(19) United States
(12) Patent Application Publication
(10) Pub. No.: US 2004/0053245 A1
(43) Pub. Date: Mar. 18, 2004

(54) Novel nucleic acids and polypeptides

(76) Inventors: Y. Tom Tang, San Jose, CA (US); Chenghua Liu, San Jose, CA (US); Radoje T. Drmanac, Palo Alto, CA (US)

Correspondence Address: NUVELO, 675 ALMANOR AVE., SUNNYVALE, CA, 94085, US

(21) Appl. No.: 10/276,774

(22) PCT Filed: Feb. 5, 2001
(86) PCT No.: PCT/US01/03800

(51) Int. Cl. C12Q 1/68; C07H 21/04; C12N 9/00; C12P 21/02; C12N 5/06

(52) U.S. Cl. 435/6; 435/69.1; 435/183; 435/320.1; 435/325; 530/350; 536/23.2; 530/388.1

(57) ABSTRACT

The present invention provides novel nucleic acids, novel polypeptide sequences encoded by these nucleic acids and uses thereof.

### 1. TECHNICAL FIELD

[0001] The present invention provides novel polynucleotides and proteins encoded by such polynucleotides, along with uses for these polynucleotides and proteins, for example in therapeutic, diagnostic and research methods.

### 2. BACKGROUND

[0002] Technology aimed at the discovery of protein factors (including e.g., cytokines, such as lymphokines, interferons, CSFs, chemokines, and interleukins) has matured rapidly over the past decade. The now routine hybridization cloning and expression cloning techniques clone novel polynucleotides “directly” in the sense that they rely on information directly related to the discovered protein (ie., partial DNA/amino acid sequence of the protein in the case of hybridization cloning; activity of the protein in the case of expression cloning). More recent “indirect” cloning techniques such as signal sequence cloning, which isolates DNA sequences based on the presence of a now well-recognized secretory leader sequence motif, as well as various PCR-based or low stringency hybridization-based cloning techniques, have advanced the state of the art by making available large numbers of DNA/amino acid sequences for proteins that are known to have biological activity, for example, by virtue of their secreted nature in the case of leader sequence cloning, by virtue of their cell or tissue source in the case of PCR-based techniques, or by virtue of structural similarity to other genes of known biological activity.

[0003] Identified polynucleotide and polypeptide sequences have numerous applications in, for example, diagnostics, forensics, gene mapping; identification of mutations responsible for genetic disorders or other traits, to assess biodiversity, and to produce many other types of data and products dependent on DNA and amino acid sequences.

### 3. SUMMARY OF THE INVENTION

[0004] The compositions of the present invention include novel isolated polypeptides, novel isolated polynucleotides encoding such polypeptides, including recombinant DNA molecules, cloned genes or degenerate variants thereof, especially naturally occurring variants such as allelic variants, antisense polynucleotide molecules, and antibodies that specifically recognize one or more epitopes present on such polypeptides, as well as hybridomas producing such antibodies.

[0005] The compositions of the present invention additionally include vectors, including expression vectors, containing the polynucleotides of the invention, cells genetically engineered to contain such polynucleotides and cells genetically engineered to express such polynucleotides.

[0006] The present invention relates to a collection or library of at least one novel nucleic acid sequence assembled from expressed sequence tags (ESTs) isolated mainly by sequencing by hybridization(SBH), and in some cases, sequences obtained from one or more public databases. The invention relates also to the proteins encoded by such polynucleotides, along with therapeutic, diagnostic and research utilities for these polynucleotides and proteins. These nucleic acid sequences are designated as SEQ ID NO: 1-1350, The polypeptides sequences are designated SEQ ID NO: 1351-2700, The nucleic acids and polypeptides are provided in the Sequence Listing. In the nucleic acids provided in the Sequence Listing, A is adenosine; C is cytosine; G is guanine; T is thymine; and N is any of the four bases. In the amino acids provided in the Sequence Listing, * corresponds to the stop codon.

[0007] The nucleic acid sequences of the present invention also include, nucleic acid sequences that hybridizetothe complement of SEQ ID NO: 1-1350 under stringen thybridization conditions; nucleic acid sequences which are allelic variants or species homologues of any of the nucleic acid sequences recited above, or nucleic acid sequences that encode a peptide comprising a specific domain or truncation of thee peptides encodedby SEQ ID NO: 1-1350; A polynucleotide comprising a nucleotide sequence having at least 90% identity to an identifying sequence of SEQ ID NO: 1-1350 or a degenerate variant or fragment thereof. The identifying sequence can be 100 base pairs in length.

[0008] The nucleic acid sequences of thee present invention also include the sequence information from the nucleic acid sequences of SEQ ID NO: 1-1350. The sequence information can be a segment of any one of SEQ ID NO: 1-1350 that uniquely identifies or represents the sequence information of SEQ ID NO: 1-1350.

[0009] A collection as used in this application can be a collection of only one polynucleotide. The collection of sequence information or identifying information of each sequence can be provided on a nucleic acid array. In one embodiment, segments of sequence information is provided on a nucleic acid array to detect the polynucleotide that contains the segment. The array can be designed to detect full-match or mismatch to the polynucleotide that contains the segment The collection can also be provided in a computer-readable format.

[0010] This invention also includes the reverse or direct complement of any of the nucleic acid sequences recited above; cloning or expression vectors containing the nucleic acid sequences; and host cells or organisms transformed with these expression vectors. Nucleic acid sequences (or their reverse or direct complements) according to the invention have numerous applications in a variety of techniques known to those skilled in the art of molecular biology, such as use as hybridization probes, use as primers for PCR, use in an array, use in computer-readablemedia, use in sequencing full-length genes, use for chromosome and gene mapping, use in the recombinant production of protein, and use in the generation of anti-sense DNA or RNA, their chemical analogs and the like.

[0011] In a preferred embodiment, the nucleic acid sequences of SEQ ID NO: 1-1350 or novel segments or parts of the nucleic acids of the invention are used as primers in expression assays that are well known in the art In a particularly preferred embodiment, the nucleic acid sequences of SEQ ID NO: 1-1350 or novel segments or parts of the nucleic acids provided herein are used in diagnostics for identifying expressed genes or, as well known in the art and exemplified by Vollrath et al., Science 258:52-59 (1992), as expressed sequence tags for physical mapping of the human genome.

[0012] The isolated polynucleotides of the invention include, but are not limited to, a polynucleotide comprising any one of the nucleotide sequences set forth in SEQ ID NO: 1-1350; a polynucleotide comprising any of the full length protein coding sequences of SEQ ID NO: 1-1350; and a polynucleotide comprising any of the nucleotide sequences of the mature protein coding sequences of SEQ ID NO: 1-1350. The polynucleotides of thee present invention also include, but are not limited to, a polynucleotide that hybridizes under stringent hybridization conditions to (a) the complement of any one of the nucleotide sequences set forth in SEQ ID NO: 1-1350; (b) a nucleotide sequence encoding any one of the amino acid sequences set forth in the Sequence Listing (e.g, SEQ ID NO: 1351-2700); (c) a polynucleotide which is an allelic variant of any polynucleotides recited above; (d) a polynucleotide which encodes a species homolog (e.g orthologs) of any of the proteins recited above; or (e) a polynucleotide that encodes a polypeptide comprising a specific domain or truncation of any of the polypeptides comprising an amino acid sequence set forth in the Sequence Listing.

[0013] The isolated polypeptides of the invention include, but are not limited to, a polypeptide comprising any of the amino acid sequences set forth in the Sequence Listing; or the corresponding full length or mature protein. Polypeptides of the invention also include polypeptides with biological activity that are encoded by (a) any of the polynucleotide shaving a nucleotide sequence set forth in SEQ ID NO: 1-1350; or (b) polynucleotides that hybridize to the complement of the polynucleotides of (a) under stringent hybridization conditions. Biologically or immunologically active variants of any of the polypeptide sequences in the Sequence Listing, and “substantial equivalents” thereof (e.g., with at least about 65%, 70%, 75%, 80%, 85%, 90%, 95%, 98% or 99% amino acid sequence identity) that preferably retain biological activity are also contemplated. The polypeptides of the invention may be wholly or partially chemically synthesized but are preferably produced by recombinant means using the genetically engineered cells (e.g. host cells) of the invention.

[0014] The invention also provides compositions comprising a polypeptide of the invention. Polypeptide compositions of the invention may further comprise an acceptable carrier, such as a hydrophilic, e.g., pharmaceutically acceptable, carrier.

[0015] The invention also provides host cells transformed or transfected with a polynucleotide of the invention.

[0016] The invention also relates to methods for producing a polypeptide of the invention comprising growing a culture of the host cells of the invention in a suitable culture medium under conditions permitting expression of the desired polypeptide, and purifying the polypeptide from the culture or from the host cells. Preferred embodiments include those in which the protein produced by such process is a mature form of the protein.

[0017] Polynucleotides according to the invention have numerous applications in a variety of techniques known to those skilled in the art of molecular biology. These techniques include use as hybridization probes, use as oligomers, or primers, for PCR, use for chromosome and gene mapping, use in the recombinant production of protein, and use in generation of anti-sense DNA or RNA, their chemical analogs and the like. For example, when the expression of an mRNA is largely restricted to a particular cell or tissue type, polynucleotides of the invention can be used as hybridization probes to detect the presence of the particular cell or tissue mRNA in a sample using, e.g., in situ hybridization.

[0018] In other exemplary embodiments, the polynucleotides are used in diagnostics as expressed sequence tags for identifying expressed genes or, as well known in the art and exemplified by Vollrath et al., Science 258:52-59 (1992), as expressed sequence tags for physical mapping of the human genome.

[0019] The polypeptides according to the invention can be used in a variety of conventional procedures and methods that are currently applied to other proteins. For example, a polypeptide of the invention can be used to generate an antibody that specifically binds the polypeptide. Such antibodies, particularly monoclonal antibodies, are useful for detecting or quantitating the polypeptide in tissue. The polypeptides of the invention can also be used as molecular weight markers, and as a food supplement.

[0020] Methods are also provided for preventing, treating, or ameliorating a medical condition which comprises the step of administering to a mammalian subject a therapeutically effective amount of a composition comprising a polypeptide of the present invention and a pharmaceutically acceptable carrier.

[0021] In particular, the polypeptides and polynucleotides of the invention can be utilized, for example, in methods for the prevention and/or treatment of disorders involving aberrant protein expression or biological activity.

[0022] The present invention further relates to methods for detecting the presence of the polynucleotides or polypeptides of the invention in a sample. Such methods can, for example, e utilized as part of prognostic and diagnostic evaluation of disorders as recited herein and for the identification of subjects exhibiting a predisposition to such conditions. The invention provides a method for detecting the polynucleotides of the invention in a sample, comprising contacting the sample with a compound that binds to and forms a complex with the polynucleotide of interest for a period sufficient to form the complex and under conditions sufficient to form a complex and detecting the complex such that if a complex is detected, the polynucleotide of interest is detected. The invention also provides a method for detecting the polypeptides of the invention in a sample comprising contacting the sample with a compound that binds to and form a complex with the polypeptide under conditions and for a period sufficient to form the complex and detecting the formation of the complex such that if a complex is formed, the polypeptide is detected.

[0023] The invention also provides kits comprising polynucleotide probes and/or monoclonal antibodies, and optionally quantitative standards, for carrying out methods of the invention. Furthermore, the invention provides methods for evaluating the efficacy of drugs, and monitoring the progress of patients, involved in clinical trials for the treatment of disorders as recited above.

[0024] The invention also provides methods for the identification of compounds that modulate (i. e., increase or decrease) the expression or activity of the polynucleotides and/or polypeptides of the invention. Such methods can be utilized, for example, for the identification of compound: that can ameliorate symptoms of disorders as recited herein. Such methods can include, but are not limited to, assays for identifying compounds and other substances that interact with (e.g., bind to) the polypeptides of the invention. The invention provides a method for identify a compound that binds to the polypeptides of the invention comprising contacting the compound with a polypeptide of the invention in a cell for a time sufficient to form a polypeptide/compound complex, wherein the complex drives expression of a reporter gene sequence in the cell; and detecting the complex by detecting the reporter gene sequence expression such that if expression of the reporter gene is detected the compound the binds to a polypeptide of the invention is identified.

[0025] The methods of the invention also provides methods for treatment which involve the administration of the polynucleotides or polypeptides of the invention to individuals exhibiting symptoms or tendencies. In addition, the invention encompasses methods for treating diseases o disorders as recited herein comprising administering compounds and other substances that modulate the overall activity of the target gene products. Compounds and other substances can effect such modulation either on the level of target gene/protein expression or target protein activity.

[0026] The polypeptides of the present invention and the polynucleotides encoding them are also useful for the same functions known to one of skill in the art as the polypeptides and polynucleotides to which they have homology (set forth in Table 2). If no homology is set forth for a sequence, then the polypeptides and polynucleotides of the present invention are useful for a variety of applications, as described herein, including use in arrays for detection.

### 4. DETAILED DESCRIPTION OF THE INVENTION

### 4.1 Definitions

[0027] It must be noted that as used herein and in the appended claims, the singular forms “a”, “an” and “the” include plural references unless the context clearly dictates otherwise.

[0028] The term “active” refers to those forms of the polypeptide which retain the biologic and/or immunologic activities of any naturally occurring polypeptide. According to the invention, the terms “biologically active” or “biological activity” refer to a protein or peptide having structural, regulatory or biochemical functions of a naturally occurring molecule. Likewise “immunologically active” or “immunological activity” refers to the capability of the natural, recombinant or synthetic polypeptide to induce a specrifc immune response in appropriate animals or cells and to bind with specific antibodies.

[0029] The term “activated cells” as used in this application are those cells which are engaged in extracellular or intracellular membrane trafficking, including the export of secretory or enzymatic molecules as part of a normal or disease process.

[0030] The terms “complementary” or “complementarity” refer to the natural binding of polynucleotides by base pairing. For example, the sequence 5′-AGT-3′ binds to the complementary sequence 3′-TCA-5′. Complementarity between two single-stranded molecules may be “partial” such that only some of the nucleic acids bind or it may be “complete” such that total complementarity exists between the single stranded molecules. The degree of complementarity between the nucleic acid strands has significant effects on the efficiency and strength of the hybridization between the nucleic acid strands.

[0031] The term “embryonic stem cells (ES)” refers to a cell that can give rise to many differentiated cell types in an embryo or an adult, including the germ cells. The term “germ line stem cells (GSCs)” refers to stem cells derived from primordial stem cells that provide a steady and continuous source of germ cells for the production of gametes. The term “primordial germ cells (PGCs)” refers to a small population of cells set aside from other cell lineages particularly from the yolk sac, mesenteries, or gonadal ridges during embryogenesis that have the potential to differentiate into germ cells and other cells. PGCs are the source from which GSCs and ES cells are derived The PGCs, the GSCs and the ES cells are capable of self-renewal. Thus these cells not only populate the germ line and give rise to a plurality of terminally differentiated cells that comprise the adult specialized organs, but are able to regenerate themselves.

[0032] The term “expression modulating fragment,” EM, means a series of nucleotides which modulates the expression of an operably linked ORF or another EMF.

[0033] As used herein, a sequence is said to “modulate the expression of an operably linked sequence” when the expression of the sequence is altered by the presence of the EMF. EMFs include, but are not limited to, promoters, and promoter modulating sequences (inducible elements). One class of EMFs are nucleic acid fragments which induce the expression of an operably linked ORF in response to a specific regulatory factor or physiological event.

[0034] The terms “nucleotide sequence” or “nucleic acid” or “polynucleotide” or “oligonculeotide” are used interchangeably and refer to a heteropolymer of nucleotides or the sequence of these nucleotides. These phrases also refer to DNA or RNA of genomic or synthetic origin which may be single-stranded or double-stranded and may represent the sense or the antisense strand, to peptide nucleic acid (PNA) or to any DNA-like or RNA-like material. In the sequences herein A is adenine, C is cytosine, T is thymine, G is guanine and N is A, C, G or T (U). It is contemplated that where the polynucleotide is RNA, the T (thymine) in the sequences provided herein is substituted with U (uracil). Generally, nucleic acid segments provided by this invention may be assembled from fragments of the genome and short oligonucleotide linkers, or from a series of oligonucleotides, or from individual nucleotides, to provide a synthetic nucleic acid which is capable of being expressed in a recombinant transcriptional unit comprising regulatory elements derived from a microbial or viral operon, or a eukaryotic gene.

[0035] The terms “oligonucleotide fragment” or a “polynucleotide fragment”, “portion,” or “segment” or “probe” or “primer” are used interchangeably and refer to a sequence of nucleotide residues which are at least about 5 nucleotides, more preferably at least about 7 nucleotides, more preferably at least about 9 nucleotides, more preferably at least about 11 nucleotides and most preferably at least about 17 nucleotides. The fragment is preferably less than about 500 nucleotides, preferably less than about 200 nucleotides, more preferably less than about 100 nucleotides, more preferably less than about 50 nucleotides and most preferably less than 30 nucleotides. Preferably the probe is from about 6 nucleotides to about 200 nucleotides, preferably from about 15 to about 50 nucleotides, more preferably from about 17 to 30 nucleotides and most preferably from about 20 to 25 nucleotides. Preferably the fragments can be used in polymerase chain reaction (PCR), various hybridization procedures or microarray procedures to identify or amplify identical or related parts of mRNA or DNA molecules. A fragment or segment may uniquely identify each polynucleotide sequence of the present invention. Preferably the fragment comprises a sequence substantially similar to any one of SEQ ID NOs: 1-1350.

[0036] Probes may, for example, be used to determine whether specific mRNA molecules are present in a cell or tissue or to isolate similar nucleic acid sequences from chromosomal DNA as described by Walsh et al. (Walsh, P. S. et al., 1992, PCR Methods Appl 1:241-250). They may be labeled by nick translation, Klenow fill-in reaction, PCR, or other methods well known in the art. Probes of the present invention, their preparation and/or labeling are elaborated in Sambrook, J. et al., 1989, Molecular Cloning: A Laboratory Manual, Cold Spring Harbor Laboratory, NY; or Ausubel, F. M. et al., 1989, Current Protocols in Molecular Biology, John Wiley & Sons, New York NY, both of which are incorporated herein by reference in their entirety.

[0037] The nucleic acid sequences of the present invention also include the sequence information from the nucleic acid sequences of SEQ ID NO: 1-1350. The sequence information can be a segment of any one of SEQ ID NO: 1-1350 that uniquely identifies or represents the sequence information of that sequence of SEQ ID NO: 1-1350. One such segment can be a twenty-mer nucleic acid sequence because the probability that a twenty-mer is fully matched in the human genome is 1 in 300, In the human genome, there are three billion base pairs in one set of chromosomes. Because 4²⁰ possible twenty-mers exist, there are 300 times more twenty-mers. than there are base pairs in a set of human chromosomes. Using the same analysis, the probability for a seventeen-mer to be fully matched in the human genome is approximately 1 in 5. When these segments are used in arrays for expression studies, fifteen-mer segments can be used. The probability that the fifteen-mer is fully matched in the expressed sequences is also approximately one in five because expressed sequences comprise less than approximately 5% of the entire genome sequence.

[0038] Similarly, when using sequence information for detecting a single mismatch, a segment can be a twenty-five mer. The probability that the twenty-five mer would appear in a human genome with a single mismatch is calculated by multiplying the probability for a full match (1÷4²⁵) times the increased probability for mismatch at each nucleotide position (3×25). The probability that an eighteen mer with a single mismatch can be detected in an array for expression studies is approximately one in five. The probability that twenty-mer with a single mismatch can be detected in a human genome is approxinmately one in five.

[0039] The term “open reading frame,” ORF, means a series of nucleotide triplets coding for amino acids without any termination codons and is a sequence translatable into protein.

[0040] The terms “operably linked” or “operably associated” refer to functionally related nucleic acid sequences. For example, a promoter is operably associated or operably linked with a coding sequence if the promoter controls the transcription of the coding sequence. While operably linked nucleic acid sequences can be contiguous and in the same reading frame, certain genetic elements e.g. repressor genes are not contiguously linked to the coding sequence but still control transcription/translation of the coding sequence.

[0041] The term “pluripotent” refers to the capability of a cell to differentiate into a number of differentiated cell types that are present in an adult organism. A pluripotent cell is restricted in its differentiation capability in comparison to a totipotent cell.

[0042] The terms “polypeptide” or “peptide” or “amino acid sequence” refer to an oligopeptide, peptide, polypeptide or protein sequence or fragment thereof and to naturally occurring or synthetic molecules. A polypeptide “fragment,” “portion,” or “segment” is a stretch of amino acid residues of at least about 5 amino acids, preferably at least about 7 amino acids, more preferably at least about 9 amino acids and most preferably at least about 17 or more amino acids. The peptide preferably is not greater than about 200 amino acids, more preferably less than 150 amino acids and most preferably less than 100 amino acids. Preferably the peptide is from about 5 to about 200 amino acids. To be active, any polypeptide must have sufficient length to display biological and/or immunological activity.

[0043] The term “naturally occurring polypeptide” refers to polypeptides produced by cells that have not been genetically engineered and specifically contemplates various polypeptides arising from post-translational modifications of the polypeptide including, but not limited to, acetylation, carboxylation, glycosylation, phosphorylation, lipidation and acylation.

[0044] The term “translated protein coding portion” means a sequence which encodes for the full length protein which may include any leader sequence or any processing sequence.

[0045] The term “mature protein coding sequence” means a sequence which encodes a peptide or protein without a signal or leader sequence. The “mature protein portion” means that portion of the protein which does not include a signal or leader sequence. The peptide may have been produced by processing in the cell which removes any leader/signal sequence. The mature protein portion may or may not include the initial methionine residue. The methionine residue may be removed from the protein during processing in the cell. The peptide may be produced synthetically or the protein may have been produced using a polynucleotide only encoding for the mature protein coding sequence.

[0046] The term “derivative” refers to polypeptides chemically modified by such techniques as ubiquitination, labeling (e.g., with radionuclides or various enzymes), covalent polymer attachment such as pegylation (derivatization with polyethylene glycol) and insertion or substitution by chemical synthesis of amino acids such as ornithine, which do not normally occur in human proteins.

[0047] The term “variant”(or “analog”) refers to any polypeptide differing from naturally occurring polypeptides by amino acid insertions, deletions, and substitutions, created using, e g., recombinant DNA techniques. Guidance in determining which amino acid residues may be replaced, added or deleted without abolishing activities of interest, may be found by comparing the sequence of the particular polypeptide with that of homologous peptides and minimizing the number of amino acid sequence changes made in regions of high homology (conserved regions) or by replacing amino acids with consensus sequence.

[0048] Alternatively, recombinant variants encoding these same or similar polypeptides may be synthesized or selected by making use of the “redundancy” in the genetic code. Various codon substitutions, such as the silent changes which produce various restriction sites, may be introduced to optimize cloning into a plasmid or viral vector or expression in a particular prokaryotic or eukaryotic system. Mutations in the polynucleotide sequence may be reflected in the polypeptide or domains of other peptides added to the polypeptide to modify the properties of any part of the polypeptide, to change characteristics such as ligand-binding affinities, interchain affinities, or degradation/turnover rate.

[0049] Preferably, amino acid “substitutions” are the result of replacing one amino acid with another amino acid having similar structural and/or chemical properties, iLe., conservative amino acid replacements. “Conservative” amino acid substitutions may be made on the basis of similarity in polarity, charge, solubility, hydrophobicity, hydrophilicity, and/or the amphipathic nature of the residues involved. For example, nonpolar (hydrophobic) amino acids include alanine, leucine, isoleucine, valine, proline, phenylalanine, tryptophan, and methionine; polar neutral amino acids include glycine, serine, threonine, cysteine, tyrosine, asparagine, and glutamine; positively charged (basic) amino acids include arginine, lysine, and histidine; and negatively charged (acidic) amino acids include aspartic acid and glutamic acid. “Insertions” or “deletions” are preferably in the range of about 1 to 20 amino acids, more preferably 1 to 10 amino acids. The variation allowed may be experimentally determined by systematically making insertions, deletions, or substitutions of amino acids in a polypeptide molecule using recombinant DNA techniques and assaying the resulting recombinant variants for activity.

[0050] Alternatively, where alteration of function is desired, insertions, deletions or non-conservative alterations can be engineered to produce altered polypeptides. Such alterations can, for example, alter one or more of the biological functions or biochemical characteristics of the polypeptides of the invention. For example, such alterations may change polypeptide characteristics such as ligand-binding affinities, interchain affinities, or degradation/turnover rate. Further, such alterations can be selected so as to generate polypeptides that are better suited for expression, scale up and the like in the host cells chosen for expression. For example, cysteine residues can be deleted or substituted with another amino acid residue in order to eliminate disulfide bridges.

[0051] The terms “purified” or “substantially purified” as used herein denotes that the indicated nucleic acid or polypeptide is present in the substantial absence of other biological macromolecules, e.g., polynucleotides, proteins, and the like. In one embodiment, the polynucleotide or polypeptide is purified such that it constitutes at least 95% by weight, more preferably at least 99% by weight, of the indicated biological macromolecules present (but water, buffers, and other small molecules, especially molecules having a molecular weight of less than 1000 daltons, can be present).

[0052] The term “isolated” as used herein refers to a nucleic acid or polypeptide separated from at least one other component (e.g., nucleic acid or polypeptide) present with the nucleic acid or polypeptide in its natural source. In one embodiment, the nucleic acid or polypeptide is found in the presence of (if anything) only a solvent, buffer, ion, or other component normally present in a solution of the same. The terms “isolated” and “purified” do not encompass nucleic acids or polypeptides present in their natural source.

[0053] The term “recombinant,” when used herein to refer to a polypeptide or protein, means that a polypeptide or protein is derived from recombinant (e.g., microbial, insect, or mammalian) expression systems. “Microbial” refers to recombinant polypeptides or proteins made in bacterial or fungal (e.g., yeast) expression systems. As a product, “recombinant microbial“defines a polypeptide or protein essentially free of native endogenous substances and unaccompanied by associated native glycosylation. Polypeptides or proteins expressed in most bacterial cultures, e.g., E. coli, will be free of glycosylation modifications; polypeptides or proteins expressed in yeast will have a glycosylation pattern in general different from those expressed in mammalian cells.

[0054] The term “recombinant expression vehicle or vector” refers to a plasmid or phage or virus or vector, for expressing a polypeptide from a DNA (RNA) sequence. An expression vehicle can comprise a transcriptional unit comprising an assembly of (1) a genetic element or elements having a regulatory role in gene expression, for example, promoters or enhancers, (2) a structural or coding sequence which is transcribed into mRNA and translated into protein, and (3) appropriate transcription initiation and termination sequences. Structural units intended for use in yeast or eukaryotic expression systems preferably include a leader sequence enabling extracellular secretion of translated protein by a host cell. Alternatively, where recombinant protein is expressed without a leader or transport sequence, it may include an amino terminal methionine residue. This residue may or may not be subsequently cleaved from the expressed recombinant protein to provide a final product.

[0055] The term “recombinant expression system” means host cells which have stably integrated a recombinant transcriptional unit into chromosomal DNA or carry the recombinant transcriptional unit extrachromosomally. Recombinant expression systems as defined herein will express heterologous polypeptides or proteins upon induction of the regulatory elements linked to the DNA segment or synthetic gene to be expressed. This term also means host cells which have stably integrated a recombinant genetic element or elements having a regulatory role in gene expression, for example, promoters or enhancers. Recombinant expression systems as defined herein will express polypeptides or proteins endogenous to the cell upon induction of the regulatory elements linked to the endogenous DNA segment or gene to be expressed. The cells can be prokaryotic or eukaryotic.

[0056] The term “secreted” includes a protein that is transported across or through a membrane, including transport as a result of signal sequences in its amino acid sequence when it is expressed in a suitable host cell. “Secreted” proteins include without limitation proteins secreted wholly (e.g., soluble proteins) or partially(e.g, receptors) from the cell in which they are expressed. “Secreted” proteins also include without limitation proteins that are transported across the membrane of the endoplasmic reticulum. “Secreted” proteins are also intended to include proteins containing non-typical signal sequences (e.g Interleukin-1 Beta, see Krasney, P. A and Young, P. R. (1992) Cytokine 4(2):134-143) and factors released from damaged cells (e.g. Interleukin-1 Receptor Antagonist, see Arend, W. P. et. al. (1998) Annu. Rev. Immunol. 16:27-55)

[0057] Where desired, an expression vector may be designed to contain a “signal or leader sequence” which will direct the polypeptide through the membrane of a cell. Such a sequence may be naturally present on the polypeptides of the present invention or provided from heterologous protein sources by recombinant DNA techniques.

[0058] The term “stringent” is used to refer to conditions that are commonly understood in the art as stringent. Stringent conditions can include highly stringent conditions (i e., hybridizanon to filter-bound DNA in 0.5 M NaHPO₄, 7% sodium dodecyl sulfate (SDS), 1 mM EDTA at 65° C., and washing in 0.1×SSC/0.1% SDS at 68° C.), and moderately stringent conditions (Le., washing in 0.2×SSC/0.1% SDS at 42° C.). Other exemplary hybridization conditions are described herein in the examples.

[0059] In instances of hybridization of deoxyoligonucleotides, additional exemplary stringent hybridization conditions include washing in 6×SSC/0.05% sodium pyrophosphate at 37° C. (for 14-base oligonucleotides), 48° C. (for 17-base oligos), 55° C. (for 20-base oligonucleotides), and 60° C. (for 23-base oligonucleotides).

[0060] As used herein, “substantially equivalent” can refer both to nucleotide and amino acid sequences, for example a mutant sequence, that varies from a reference sequence by one or more substitutions, deletions, or additions, the net effect of which does not result in an adverse functional dissimilarity between the reference and subject sequences. Typically, such a substantially equivalent sequence varies from one of those listed herein by no more than about 35% (i.e., the number of individual residue substitutions, additions, and/or deletions in a substantially equivalent sequence, as compared to the corresponding reference sequence, divided by the total number of residues in the substantially equivalent sequence is about 0.35 or less). Such a sequence is said to have 65% sequence identity to the listed sequence. In one embodiment, a substantially equivalent, e.g., mutant, sequence of the invention varies from a listed sequence by no more than 30% (70% sequence identity); in a variation of this embodiment, by no more than 25% (75% sequence identity); and in a firter variation of this embodiment, by no more than 20% (80% sequence identity) and in a further variation of this embodiment, by no more than 10% (90% sequence identity) and in a further variation of this embodiment, by no more that 5% (95% sequence identity). Substantially equivalent, e.g., mutant, amino acid sequences according to the invention preferably have at least 80% sequence identity with a listed amino acid sequence, more preferably at least 85% sequence identity, more preferably at least 90% sequence identity, more preferably at least 95% identity, more preferably at least 98% identity, and most preferably at least 99% identity. Substantially equivalent nucleotide sequences of the invention can have lower percent sequence identities, taking into account, for example, the redundancy or degeneracy of the genetic code. Preferably, nucleotide sequence has at least about 65% identity, more preferably at least about 75% identity, more preferably at least about 80% sequence identity, more preferably at least about 85% sequence identity, more preferably at least about 90% sequence identity, and most preferably at least about 95% identity, more preferably at least about 98% sequence identity, and most preferably at least about 99% sequence identity. For the purposes of the present invention, sequences having substantially equivalent biological activity and substantially equivalent expression characteristics are considered substantially equivalent. For the purposes of determining equivalence, truncation of the mature sequence (e.g., via a mutation which creates a spurious stop codon) should be disregarded. Sequence identity may be determined, e.g., using the Jotun Hein method (Hein, J. (1990) Methods Enzymol. 183:626-645). Identity between sequences can also be determined by other methods known in the art, e.g. by varying hybridization conditions.

[0061] The term “totipotenf” refers to the capability of a cell to differentiate into all of the cell types of an adult organism.

[0062] The term “transformation” means introducing DNA into a suitable host cell so that the DNA is replicable, either as an extrachromosomal element, or by chromosomal integration. The term “transfection” refers to the taking up of an expression vector by a suitable host cell, whether or not any coding sequences are in fact expressed. The term “infection” refers to the introduction of nucleic acids into a suitable host cell by use of a virus or viral vector.

[0063] As used herein, an “uptake modulating fragment,” UMF, means a series of nucleotides which mediate the uptake of a linked DNA fragment into a cell. UMFs can be readily identified using known UMFs as a target sequence or target motif with the computer-based systems described below. The presence and activity of a UME can be confirmed by attaching the suspected UMF to a marker sequence. The resulting nucleic acid molecule is then incubated with an appropriate host under appropriate conditions and the uptake of the marker sequence is determined. As described above, a UMF will increase the frequency of uptake of a linked marker sequence.

[0064] Each of the above terms is meant to encompass all that is described for each, unless the context dictates otherwise.

### 4.2 Nucleic Acids of the Invention

[0065] Nucleotide sequences of the invention are set forth in the Sequence Listing.

[0066] The isolated polynucleotides of the invention include a polynucleotide comprising the nucleotide sequences of SEQ ID NO: 1-1350 ; a polynucleotide encoding any one of the peptide sequences of SEQ ID NO: 1351-2700; and a polynucleotide comprising the nucleotide sequence encoding the mature protein coding sequence of the polypeptides of any one of SEQ ID NO: 1351-2700, The polynucleotides of the present invention also include, but are not limited to, a polynucleotide that hybridizes under stringent conditions to (a) the complement of any of the nucleotides sequences of SEQ ID NO: 1-1 350 ; (b) nucleotide sequences encoding any one of the amino acid sequences set forth in the Sequence Listing; (c) a polynucleotide which is an allelic variant of any polynucleotide recited above; (d) apolynucleotide which encodes a species homolog of any of the proteins recited above; or (e) a polynucleotide that encodes a polypeptide comprising a specific domain or truncation of the polypeptides of SEQ ID NO: 1351-2700, Domains of interest may depend on the nature of the encoded polypeptide; e.g., domains in receptor-like polypeptides include ligand-binding, extracellular, transmembrane, or cytoplasmic domains, or combinations thereof; domains in immunoglobulin-like proteins include the variable immunoglobulin-like domains; domains in enzyme-like polypeptides include catalytic and substrate binding domains; and domains in ligand polypeptides include receptor-binding dornains.

[0067] The polynucleotides of the invention include naturally occurring or wholly or partially synthetic DNA, e.g., cDNA and genomic DNA, and RNA, e.g., mRNA. The polynucleotides may include all of the coding region of the cDNA or may represent a portion of the coding region of the cDNA.

[0068] The present invention also provides genes corresponding to the cDNA sequences disclosed herein. The corresponding genes can be isolated in accordance with known methods using the sequence information disclosed herein. Such methods include the preparation of probes or primers from the disclosed sequence information for identification and/or amplification of genes in appropriate genomic libraries or other sources of genomic materials. Further 5′ and 3′ sequence can be obtained using methods known in the art. For example, full length cDNA or genomic DNA that corresponds to any of the polynucleotides of SEQ ID NO: 1-1350 can be obtained by screening appropriate cDNA or genomic DNA libraries under suitable hybridization conditions using any of the polynucleotides of SEQ ID NO: 1-1350 or a portion thereof as a probe. Alternatively, the polynucleotides of SEQ ID NO: 1-1350 may be used as the basis for suitable primer(s) that allow identification and/or amplification of genes in appropriate genomic DNA or cDNA libraries.

[0069] The nucleic acid sequences of the invention can be assembled from ESTs and sequences (including cDNA and genomic sequences) obtained from one or more public databases, such as dbEST, gbpri, and UniGene. The EST sequences can provide identifying sequence information, representative fragment or segment information, or novel segment information for the full-length gene.

[0070] The polynucleotides of the invention also provide polynucleotides including nucleotide sequences that are substantially equivalent to the polynucleotides recited above. Polynucleotides according to the invention can have, e.g., at least about 65%, at least about 70%, at least about 75%, at least about 80%, 81%, 82%, 83%, 84%, more typically at least about 85%, 86%, 87%, 88%, 89%, more typically at least about 90%, 91%, 92%, 93%, 94%, and even more typically at least about 95%, 96%, 97%, 98%, 99%, sequence identity to a polynucleotide recited above.

[0071] Included within the scope of the nucleic acid sequences of the invention are nucleic acid sequence fragments that hybridize under stringent conditions to any of the nucleotide sequences of SEQ ID NO: 1-1350, or complements thereof, which fragment is greater than about 5 nucleotides, preferably 7 nucleotides, more preferably greater than 9 nucleotides and most preferably greater than 17 nucleotides. Fragments of, e.g. 15, 17, or 20 nucleotides or more that are selective for (i.e. specifically hybridize to any one of the polynucleotides of the invention) are contemplated. Probes capable of specifically hybridizing to a polynucleotide can differentiate polynucleotide sequences of the invention from other polynucleotide sequences in the same family of genes or can differentiate human genes from genes of other species, and are preferably based on unique nucleotide sequences.

[0072] The sequences falling within the scope of the present invention are not limited to these specific sequences, but also include allelic and species variations thereof. Allelic and species variations can be routinely determined by comparing the sequence provided SEQ ID NO: 1-13 50, a representative fragment thereof, or a nucleotide sequence at least 90% identical, preferably 95% identical, to SEQ ID NO: 1-1350 with a sequence from another isolate of the same species. Furthermore, to accommodate codon variability, the invention includes nucleic acid molecules coding for the same amino acid sequences as do the specific ORFs disclosed herein. In other words, in the coding region of an ORF, substitution of one codon for another codon that encodes the same amino acid is expressly contemplated

[0073] The nearest neighbor or homology result for the nucleic acids of the present invention, including SEQ ID NO: 1-13 50, can be obtained by searching a database using an algorithm or a program. Preferably, a BLAST which stands for Basic Local Alignment Search Tool is used to search for local sequence alignments (Altshul, S. F. J Mol. Evol. 36 290-300 (1993) and Altschul S. F. et al. J. Mol. Biol. 21:403410 (1990)). Alternativelya FASTA version 3 search against Genpept, using Fastxy algorithm.

[0074] Species homologs (or orthologs) of the disclosed polynucleotides and proteins are also provided by the present invention. Species homologs may be isolated and identified by making suitable probes or primers from the sequences provided herein and screening a suitable nucleic acid source from the desired species.

[0075] The invention also encompasses allelic variants of the disclosed polynucleotides or proteins; that is, naturally-occurring alternative forms of the isolated polynucleotide which also encode proteins which are identical, homologous or related to that encoded by the polynucleotides.

[0076] The nucleic acid sequences of the invention are further directed to sequences which encode variants of the described nucleic acids. These amino acid sequence variants may be prepared by methods known in the art by introducing appropriate nucleotide changes into a native or variant polynucleotide. There are two variables in the construction of amino acid sequence variants: the location of the mutation and the nature of the mutation. Nucleic acids encoding the amino acid sequence variants are preferably constructed by mutating the polynucleotide to encode an amino acid sequence that does not occur in nature. These nucleic acid alterations can be made at sites that differ in the nucleic acids from different species (variable positions) or in highly conserved regions (constant regions). Sites at such locations will typically be modified in series, e.g., by substituting first with conservative choices (e.g., hydrophobic amino acid to a different hydrophobic amino acid) and then with more distant choices (e.g., hydrophobic amino acid to a charged amino acid), and then deletions or insertions may be made at the target site. Amino acid sequence deletions generally range from about 1 to 30 residues, preferably about 1 to 10 residues, and are typically contiguous. Amino acid insertions include amino-and/or carboxyl-terminal fusions ranging in length from one to one hundred or more residues, as well as intrasequence insertions of single or multiple amino acid residues. Intrasequence insertions may range generally from about 1 to 10 amino residues, preferably from 1 to 5 residues. Examples of terminal insertions include the heterologous signal sequences necessary for secretion or for intracellular targeting in different host cells and sequences such as FLAG or poly-histidine sequences useful for purifying the expressed protein.

[0077] In a preferred method, polynucleotides encoding the novel amino acid sequences are changed via site-directed mutagenesis. This method uses oligonucleotide sequences to alter a polynucleotide to encode the desired amino acid variant, as well as sufficient adjacent nucleotides on both sides of the changed amino acid to form a stable duplex on either side of the site of being changed. In general, the techniques of site-directed mutagenesis are well known to those of skill in the art and this technique is exemplified by publications such as, Edelman et al., DNA 2:183 (1983). A versatile and efficient method for producing site-specific changes in a polynucleotide sequence was published by Zoller and Smith, Nucleic Acids Res. 10:6487-6500 (1982). PCR may also be used to create amino acid sequence variants of the novel nucleic acids. When small amounts of template DNA are used as starting material, primer(s) that differs slightly in sequence from the corresponding region in the template DNA can generate the desired amino acid variant. PCR amplification results in a population of product DNA fragments that differ from the polynucleotide template encoding the polypeptide at the position specified by the primer. The product DNA fragments replace the corresponding region in the plasmid and this gives a polynucleotide encoding the desired amino acid variant

[0078] A further technique for generating amino acid variants is the cassette mutagenesis technique described in Wells et al., Gene 34:315 (1985); and other mutagenesis techniques well known in the art, such as, for example, the techniques in Sambrook et al., supra, and Current Protocols in Molecular Biology, Ausubel et al. Due to the inherent degeneracy of the genetic code, other DNA sequences which encode substantially the same or a functionally equivalent amino acid sequence may be used in the practice of the invention for the cloning and expression of these novel nucleic acids. Such DNA sequences include those which are capable of hybridizing to the appropriate novel nucleic acid sequence under stringent conditions.

[0079] Polynucleotides encoding preferred polypeptide truncations of the invention can be used to generate polynucleotides encoding chimeric or fusion proteins comprising one or more domains of the invention and heterologous protein sequences.

[0080] The polynucleotides of the invention additionally include the complement of any of the polynucleotides recited above. The polynucleotide can be DNA (genomic, cDNA, amplified, or synthetic) or RNA. Methods and algorithms for obtaining such polynucleotides are well known to those of skill in the art and can include, for example, methods for determining hybridization conditions that can routinely isolate polynucleotides of the desired sequence identities.

[0081] In accordance with the invention, polynucleotide sequences comprising the mature protein coding sequences corresponding to any one of SEQ ID NO: 1-1350, or functional equivalents thereof, may be used to generate recombinant DNA molecules that direct the expression of that nucleic acid, or a functional equivalent thereof in appropriate host cells. Also included are the cDNA inserts of any of the clones identified herein.

[0082] A polynucleotide according to the invention can be joined to any of a variety of other nucleotide sequences by well-established recombinant DNA techniques (see Sambrook J et al. (1989) Molecular Cloning: A Laboratory Manual, Cold Spring Harbor Laboratory, NY). Useful nucleotide sequences for joining to polynucleotides include an assortment of vectors, e.g., plasmids, cosmids, lambda phage derivatives, phagernids, and the like, that are well known in the art. Accordingly, the invention also provides a vector including a polynucleotide of the invention and a host cell containing the polynucleotide. In general, the vector contains an origin of replication functional in at least one organism, convenient restriction endonuclease sites, and a selectable marker for the host cell. Vectors according to the invention include expression vectors, replication vectors, probe generation vectors, and sequencing vectors. A host cell according to the invention can be a prokaryotic or eukaryotic cell and can be a unicellular organism or part of a multicellular organism.

[0083] The present invention further provides recombinant constructs comprising a nucleic acid having any of the nucleotide sequences of SEQ ID NO: 1-1350 or a fragment thereof or any other polynucleotides of the invention. In one embodiment, the recombinant constructs of the present invention comprise a vector, such as a plasmid or viral vector, into which a nucleic acid having any of the nucleotide sequences of SEQ ID NO: 1-1350 or a fragment thereof is inserted, in a forward or reverse orientation. In the case of a vector comprising one of the ORFs of the(present invention, the vector may further comprise regulatory sequences, including for example, a promoter, operably linked to the ORF. Large numbers of suitable vectors and promoters are known to those of skill in the art and are commercially available for generating the recombinant constructs of the present invention. The following vectors are provided by way of example. Bacterial: pBs, phagescript, PsiX174, pBluescript SK, pBs KS, pNH8a, pNH16a, pNH18a, pNH46a (Stratagene); pTrc99A, pKK223-3, pKK233-3, pDR540, pRIT5 (Pharmacia). Eukaryotic: pWLneo, pSV2cat, pOG44, PXrI, pSG (Stratagene) pSVK3, pBPV, pMSG, pSVL (Pharmacia).

[0084] The isolated polynucleotide of the invention may be operably linked to an expression control sequence such as the pMT2 or pED expression vectors disclosed in Kaufinan et al., NucleicAcids Res. 19, 4485-4490 (1991), in order to produce the protein recombinantly. Many suitable expression control sequences are known in the art. General methods of expressing recombinant proteins are also known and are exemplified in R. Kaufman, Methods in Enzymology 185, 537-566 (1990). As defined herein “operably linked” means that the isolated polynucleotide of the invention and an expression control sequence are situated within a vector or cell in such a way that the protein is expressed by a host cell which has been transformed (transfected) with the ligated polynucleotide/expression control sequence.

[0085] Promoter regions can be selected from any desired gene using CAT (chlorarnphenicol transferase) vectors or other vectors with selectable markers. Two appropriate vectors are pKK232-8 and pCM7, Particular named bacterial promoters include lacd, lacZ, T3, T7, gpt, lambda PR, and trc. Eukaryotic promoters include CMV immediate early, HSV thymidine kinase, early and late SV40, LTRs from retrovirus, and mouse metallothionein-I. Selection of the appropriate vector and promoter is well within the level of ordinary skill in the art. Generally, recombinant expression vectors will include origins of replication and selectable markers permitting transformation of the host cell, e.g., the ampicillin resistance gene of E. coli and S. cerevisiae TRP1 gene, and a promoter derived from a highly-expressed gene to direct transcription of a downstream structural sequence. Such promoters can be derived from operons encoding glycolytic enzrnes such as 3-phosphoglycerate kinase (PGK), a-factor, acid phosphatase, or heat shock proteins, among others. The heterologous structural sequence is assembled in appropriate phase with translation initiation and termination sequences, and preferably, a leader sequence capable of directing secretion of translated protein into the periplasmic space or extracellular medium. Optionally, the heterologous sequence can encode a fusion protein including an amino terminal identification peptide imparing desired characteristics, e.g., stabilization or simplified purification of expressed recombinant product. Useful expression vectors for bacterial use are constructed by inserting a structural DNA sequence encoding a desired protein together with suitable translation initiation and termination signals in operable reading phase with a functional promoter. The vector will comprise one or more phenotypic selectable markers and an origin of replication to ensure maintenance of the vector and to, if desirable, provide amplification within the host. Suitable prokaryotic hosts for transformation include E. coli, Bacillus subtilis, Salmonella typhimurium and various species within the genera Pseudomonas, Streptomyces, and Staphylococcus, although others may also be employed as a matter of choice.

[0086] As a representative but non-limiting example, useful expression vectors for bacterial use can comprise a selectable marker and bacterial origin of replication derived from commercially available plasmids comprising genetic elements of the well known cloning vector pBR322 (ATCC 37017). Such commercial vectors include, for example, pKK223-3 (Pharmacia Fine Chemicals, Uppsala, Sweden) and GEM 1 (Promega Biotech, Madison, Wis., USA). These pBR322 “backbone” sections are combined with an appropriate promoter and the structural sequence to be expressed. Following transformation of a suitable host strain and growth of the host strain to an appropriate cell density, the selected promoter is induced or derepressed by appropriate means (e.g., temperature shift or chemical induction) and cells are cultured for an additional period. Cells are typically harvested by centrifigation, disrupted by physical or chemical means, and the resulting crude extract retained for further purification. .

[0087] Polynucleotidves of the invention can also be used to induce immune responses. For example, as described in Fan et al., Nat. Biotech. 17:870-872 (1999), incorporated herein by reference, nucleic acid sequences encoding a polypeptide may be used to generate antibodies against the encoded polypeptide following topical administration of naked plasmid DNA or following injection, and preferably intramuscular injection of the DNA. The nucleic acid sequences are preferably inserted in a recombinant expression vector and may be in the form of naked DNA.

### 4.3 Antisense

[0088] Another aspect of the invention pertains to isolated antisense nucleic acid molecules that are hybridizable to or complementary to the nucleic acid molecule comprising the nucleotide sequence of SEQ ID NO: 1-1350, or fragments, analogs or derivatives thereof. An “antisense” nucleic acid comprises a nucleotide sequence that is complementary to a “sense” nucleic acid encoding a protein, e.g., complementary to the coding strand of a double-stranded cDNA molecule or complementary to an mRNA sequence. In specific aspects, antisense nucleic acid molecules are provided that comprise a sequence complementary to at least about 10, 25, 50, 100, 250 or 500 nucleotides or an entire coding strand, or to only aportion thereof. Nucleic acid molecules encoding fragnents, homologs, derivatives and analogs of a protein of any of SEQ ID NO: 1351-2700 or antisense nucleic acids complementary to a nucleic acid sequence of SEQ ID NO: 1-1350 are additionally provided.

[0089] In one embodiment, an antisense nucleic acid molecule is antisense to a “coding region” of the coding strand of a nucleotide sequence of the invention. The term “coding region” refers to the region of the nucleotide sequence comprising codons which are translated into amino acid residues. In another embodiment, the antisense nucleic acid molecule is antisense to a “noncoding region” of the coding strand of a nucleotide sequence of the invention. The term “noncoding region” refers to 5′ and 3′ sequences which flank the coding region that are not translated into amino acids (i.e., also referred to as 5′ and 3′ untranslated regions).

[0090] Given the coding strand sequences encoding a nucleic acid disclosed herein (e.g., SEQ ID NO: 1-1350), antisense nucleic acids of the invention can be designed according to the rules of Watson and Crick or Hoogsteen base pairing. The antisense nucleic acid molecule can be complementary to the entire coding region of a mRNA, but more preferably is an oligonucleotide that is antisense to only a portion of the coding or noncoding region of a mRNA. For example, the antisense oligonucleotide can be complementary to the region surrounding the translation start site of a mRNA. An antisense oligonucleotide can be, for example, about 5, 10, 15, 20, 25, 30, 35, 40, 45 or 50 nucleotides in length. An antisense nucleic acid of the invention can be constructed using chemical synthesis or enzymatic ligation reactions using procedures known in the art. For example, an antisense nucleic acid (e.g., an antisense oligonucleotide) can be chemically synthesized using naturally occurring nucleotides or variously modified nucleotides designed to increase the biological stability of the molecules or to increase the physical stability of the duplex formed between the antisense and sense nucleic acids, e.g., phosphorothioate derivatives and acridine substituted nucleotides can be used.

[0091] Examples of modified nucleotides that can be used to generate the antisense nucleic acid include: 5-fluorouracil, 5-bromouracil, 5-chlorouracil, 5-iodouracil, hypoxanthine, xanthine, 4-acetylcytosine, 5-(carboxyhydroxylmethyl) uracil, 5-carboxymethylaminomethyl-2-thiouridine, 5-carboxymethylaminomethyluracil, dihydrouracil, bet6-isopentenyladenine, 1-methylguanine, 1-met 2-methyladenine, 2-methylguanine, 3-methylcytosine, 5-methylcytosine, N6-adenine, 7-methylguanine, 5-methylaminomethyluracil, 5-methoxyaminomethyl-2-thiouracil, beta-D-mannosylqueosine, 5′-methoxycarboxymethyluracil, 5-methoxyuracil, 2-methylthio-N6-isopentenyladenine, uracil-5-oxyacetic acid (v), wybutoxosine, pseudouracil, queosine, 2-thiocytosine, 5-methyl-2-thiouracil, 2-thiouracil, 4-thiouracil, 5-methyluracil, uracil-5-oxyacetic acid methylester, uracil-5-oxyacetic acid (v), 5-methyl-2-thiouracil, 3-(3-amino-3-N-2-carboxypropyl) uracil, (acp3)w, and 2,6-diaminopurine. Alternatively, the antisense nucleic acid can be produced biologically using an expression vector into which a nucleic acid has been sucloned in an antisense orientation (i. e., RNA transcribed from the inserted nucleic acid will be of an antisense orientation to a target nucleic acid of interest, described further in the following subsection).

[0092] The antisense nucleic acid molecules of the invention are typically administered to a subject or generated in situ such that they hybridize with or bind to cellular mRNA and/or genomic DNA encoding a protein according to the invention to thereby inhibit expression of the protein, e.g., by inhibiting transcription and/or translation. The hybridization can be by conventional nucleotide complementarity to form a stable duplex, or, for example, in the case of an antisense nucleic acid molecule that binds to DNA duplexes, through specific interactions in the major groove of the double helix. An example of a route of administration of antisense nucleic acid molecules of the invention includes direct injection at a tissue site. Alternatively, antisense nucleic acid molecules can be modified to target selected cells and then administered systemically. For example, for systemic administration, antisense molecules can be modified such that they specifically bind to receptors or antigens expressed on a selected cell surface, e.g., by linking the antisense nucleic acid molecules to peptides or antibodies that bind to cell surface receptors or antigens. The antisense nucleic acid molecules can also be delivered to cells using the vectors described herein. To achieve sufficient intracellular concentrations of antisense molecules, vector constructs in which the antisense nucleic acid molecule is placed under the control of a strong poll or pol m promoter are preferred.

[0093] In yet another embodiment, the antisense nucleic acid molecule of the invention is an a nomeric nucleic acid molecule. An -anomeric nucleic acid molecule forms specific double-stranded hybrids with complementary RNA in which, contrary to the usual -units, the strands run parallel to each other (Gaultier et al. (1987) Nucleic Acids Res 15: 6625-6641). The antisense nucleic acid molecule can also comprise a 2′-o-methylribonucleotide (Inoue et al. (1987) Nucleic Acids Res 15: 6131-6148) or a chimeric RNA -DNA analogue (Inoue et al. (1987) FEBS Lett 215: 327-330).

### 4.4 Ribozymes and Pna Moities

[0094] In still another embodiment, an annisense nucleic acid of the invention is a ribozyme. Ribozymes are catalytic RNA molecules with ribonuclease activity that are capable of cleaving a single-stranded nucleic acid, such as a mRNA, to which they have a complementary region. Thus, ribozymes (e.g., hammerhead ribozymes (described in Haselhoff and Gerlach (1988) Nature 334:585-591)) can be used to catalytically cleave a mRNA transcripts to thereby inhibit translation of a mRNA. A ribozyme having specificity for a nucleic acid of the invention can be designed based upon the nucleotide sequence of a DNA disclosed herein (i.e., SEQ ID NO: 1-1350). For example, a derivative of a Tetrahymena L-19 IVS RNA can be constructed in which the nucleotide sequence of the active site is complementary to the nucleotide sequence to be cleaved in a SECX-encoding mRNA. See, e.g., Cech et al. U.S. Pat. No. 4,987,071; and Cech et al. U.S. Pat No. 5,116,742, Alternatively, SECX mRNA can be used to select a catalytic RNA having a specific ribonuclease activity from a pool of RNA molecules. See, e.g., Bartel et al., (1993) Science 261:1411-1418.

[0095] Alternatively, gene expression can be inhibited by targeting nucleotide sequences complementary to the regulatory region (e.g., promoter and/or enhancers) to form triple helical structures that prevent transcription of the gene in target cells. See generally, Helene. (1991) Anticancer Drug Des. 6: 569-84; Helene. et al. (1992) Ann. N.Y. Acad. Sci. 660:27-36; and Maher (1992) Bioassays 14: 807-15.

[0096] In various embodiments, the nucleic acids of the invention can be modified at the base moiety, sugar moiety or phosphate backbone to improve, e.g., the stability, hybridization, or solubility of the molecule. For example, the deoxyribose phosphate backbone of the nucleic acids can be modified to generate peptide nucleic acids (see Hyrup et al. (1996) Bioorg Med Chem 4: 5-23). As used herein, the terms “peptide nucleic acids” or “PNAs” refer to nucleic acid mimics, e.g., DNA mimics, in which the deoxyribose phosphate backbone is replaced by a pseudopeptide backbone and only the four natural nucleobases are retained. The neutral backbone of PNAs has been shown to allow for specific hybridization to DNA and RNA under conditions of low ionic strength. The synthesis of PNA oligomers can be performed using standard solid phase peptide synthesis protocols as described in Hyrup et al. (1996) above; Perzy-O'Keefe et al. (1996) PNAS 93: 14670-675.

[0097] PNAs of the invention can be used in therapeutic and diagnostic applications. For example, PNAs can be used as antisense or antigene agents for sequence-specific modulation of gene expression by, e.g., inducing transcription or translation arrest or inhibiting replication. PNAs of the invention can also be used, e.g., in the analysis of single base pair mutations in a gene by, e.g., PNA directed PCR clamping; as artificial restriction enzymes when used in combination with other enzymes, e.g., S1 nucleases (Hyrup B. (1996) above); or as probes or primers for DNA sequence and hybridization (Hyrup et al. (1996), above; Perry-O'Keefe (1996), above).

[0098] In another embodiment, PNAs of the invention can be modified, e.g., to enhance their stability or cellular uptake, by attaching lipophilic or other helper groups to PNA, by the formation of PNA-DNA chimeras, or by the use of liposomes or other techniques of drug delivery known in the art. For example, PNA-DNA chimeras can be generated that may combine the advantageous properties of PNA and DNA. Such chimeras allow DNA recognition enzymes, e.g., RNase H and DNA polymerases, to interact with the DNA portion while the PNA portion would provide high binding affinity and specificity. PNA-DNA chimeras can be linked using linkers of appropriate lengths selected in terms of base stacking, number of bonds between the nucleobases, and orientation (Hyrup (1996) above). The synthesis of PNA-DNA chimeras can be performed as described in Hymp (1996) above and Finn et al. (1996) Nucl Acids Res 24: 3357-63, For example, a DNA chain can be synthesized on a solid support using standard phosphoramidite coupling chemistry, and modified nucleoside analogs, e.g., 5′-(4-methoxytrityl)amino-5′-deoxy-thymidine phosphoramidite, can be used between the PNA and the 5′ end of DNA (Mag etal. (1989) Nucl Acid Res 17: 5973-88). PNA monomers are then coupled in a stepwise manner to produce a chimeric molecule with a 5′ PNA segment and a 3′ DNA segment (Finn et al. (1996) above). Alternatively, chimeric molecules can be synthesized with a 5′ DNA segment and a 3′ PNA segment. See, Petersen et al. (1975) Bioorg Med Chem LettS: 1119-11124.

[0099] In other embodiments, the oligonucleotide may include other appended groups such as peptides (e.g., for targeting host cell receptors in vivo), or agents facilitating transport across the cell membrane (see, e.g., Letsinger et al., 1989, Proc. Natl. Acad. Sci. U.S.A. 86:6553-6556; Lemaitre et al., 1987, Proc. Natl. Acad. Sci. 84:648-652; PCT Publication No. WO88109810) or the blood-brain barrier (see, e.g., PCT Publication No. WO89/10134). In addition, oligonucleotides can be modified with hybridization triggered cleavage agents (See, e.g., Krol et al., 1988, BioTechniques 6:958-976) or intercalating agents. (See, e.g., Zon, 1988, Pharm. Res. 5: 539-549). To this end, the oligonucleotide may be conjugated to another molecule, e.g., a peptide, a hybridization triggered cross-linking agent, a transport agent, a hybridization-triggered cleavage agent, etc.

### 4.5 Hosts

[0100] The present invention further provides host cells genetically engineered to contain the polynucleotides of the invention. For example, such host cells may contain nucleic acids of the invention introduced into the host cell using known transformation, transfection or infection methods. The present invention still further provides host cells genetically engineered to express the polynucleotides of the invention, wherein such polynucleotides are in operative association with a regulatory sequence heterologous to the host cell which drives expression of the polynucleotides in the cell.

[0101] Knowledge of nucleic acid sequences allows for modification of cells to permit, or increase, expression of endogenous polypeptide. Cells can be modified (e.g., by homologous recombination) to provide increased polypeptide expression by replacing, in whole or in part, the naturally occurring promoter with all or part of a heterologous promoter so that the cells express the polypeptide at higher levels. The heterologous promoter is inserted in such a manner that it is operatively linked to the encoding sequences. See, for example, PCT International Publication No. WO94/12650, PCT International Publication No. WO92/20808, and PCT International Publication No. WO91/09955, It is also contemplated that, in addition to heterologous promoter DNA, amplifiable marker DNA (e.g., ada, dhfr, and the multifimctional CAD gene which encodes carbamyl phosphate synthase, aspartate transcarbamylase, and dihydroorotase) and/or intron DNA may be inserted along with the heterologous promoter DNA. If linked to the coding sequence, amplification of the marker DNA by standard selection methods results in co-amplification of the desired protein coding sequences in the cells.

[0102] The host cell can be a higher eukaryotic host cell, such as a mammalian cell, a lower eukaryotic host cell, such as a yeast cell, or the host cell can be a prokaryotic cell, such as a bacterial cell. Introduction of the recombinant construct into the host cell can be effected by calcium phosphate transfection, DEAE, dextran mediated transfection, or electroporation (Davis, L. et al., Basic Methods in Molecular Biology (1986)). The host cells containing one of the polynucleotides of the invention, can be used in conventional manners to produce the gene product encoded by the isolated fragment (in the case of an ORF) or can be used to produce a heterologous protein under the control of the EMF.

[0103] Any host/vector system can be used to express one or more of the ORFs of the present invention. These include, but are not limited to, eukaryotic hosts such as HeLa cells, Cv-1 cell, COS cells, 293 cells, and Sf9 cells, as well as prokaryotic host such as E. coli and B. subtilis. The most preferred cells are those which do not normally express the particular polypeptide or protein or which expresses the polypeptide or protein at low natural level. Mature proteins can be expressed in mammalian cells, yeast, bacteria, or other cells under the control of appropriate promoters. Cell-free translation systems can also be employed to produce such proteins using RNAs derived from the DNA constructs of the present invention. Appropriate cloning and expression vectors for use with prokaryotic and eukaryotic hosts are described by Sambrook, et al., in Molecular Cloning: A Laboratory Manual, Second Edition, Cold Spring Harbor, N.Y. (1989), the disclosure of which is hereby incorporated by reference.

[0104] Various mammalian cell culture systems can also be employed to express recombinant protein. Examples of mammalian expression systems include the COS-7 lines of monkey kidney fibroblasts, described by Gluzman, Cell 23:175 (1981). Other cell lines capable of expressing a compatible vector are, for example, the C127, monkey COS cells, Chinese Hamster Ovary (CHO) cells, human kidney 293 cells, human epidermal A431 cells, human Colo2O5 cells, 3T3 cells, CV-1 cells, other transformed primate cell lines, normal diploid cells, cell strains derived from in vitro culture of primary tissue, primary explants, HeLa cells, mouse L cells, BHK, HL-60, U937, HaK or Jurkat cells. Mammalian expression vectors will comprise an origin of replication, a suitable promoter and also any necessary ribosome binding sites, polyadenylation site, splice donor and acceptor sites, transcriptional termination sequences, and 5′ flanking nontranscribed sequences. DNA sequences derived from the SV40 viral genome, for example, SV40 origin, early promoter, enhancer, splice, and polyadenylation sites may be used to provide the required nontranscribed genetic elements. Recombinant polypeptides and proteins produced in bacterial culture are usually isolated by initial extraction from cell pellets, followed by one or more salting-out, aqueous ion exchange or size exclusion chromatography steps. Protein refolding steps can be used, as necessary, in completing configuration of the mature protein. Finally, high performance liquid chromatography (HPLC) can be employed for final purification steps. Microbial cells employed in expression of proteins can be disrupted by any convenient method, including freeze-thaw cycling, sonication, mechanical disruption, or use of cell lysing agents.

[0105] Alternatively, it may be possible to produce the protein in lower eukaryotes such as yeast or insects or in prokaryotes such as bacteria. Potentially suitable yeast strains include Saccharomyces cerevisiae, Schizosaccharomyces pombe, Kluyveromyces strains, Candida, or any yeast strain capable of expressing heterologous proteins. Potentially suitable bacterial strains include Escherichia coli, Bacillus subtlis, Salmonella typhimurium, or any bacterial strain capable of expressing heterologous proteins. If the protein is made in yeast or bacteria, it may be necessary to modify the protein produced therein, for example by phosphorylation or glycosylation of the appropriate sites, in order to obtain the functional protein. Such covalent attachments may be accomplished using known chemical or enzymatic methods.

[0106] In another embodiment of the present invention, cells and tissues may be engineered to express an endogenous gene comprising the polynucleotides of the invention under the control of inducible regulatory elements, in which case the regulatory sequences of the endogenous gene may be replaced by homologous recombination. As described herein, gene targeting can be used to replace a gene's existing regulatory region with a regulatory sequence isolated from a different gene or a novel regulatory sequence synthesized by genetic engineering methods. Such regulatory sequences may be comprised of promoters, enhancers, scaffold-attachment regions, negative regulatory elements, transcriptional initiation sites, regulatory protein binding sites or combinations of said sequences. Alternatively, sequences which affect the structure or stability of the RNA or protein produced may be replaced, removed, added, or otherwise modified by targeting. These sequence include polyadenylation signals, mRNA stability elements, splice sites, leader sequences for enhancing or modifying transport or secretion properties of the protein, or other sequences which alter or improve the function or stability of protein or RNA molecules.

[0107] The targeting event may be a simple insertion of the regulatory sequence, placing the gene under the control of the new regulatory sequence, e.g., inserting a new promoter or enhancer or both upstream of a gene. Alternatively, the targeting event may be a simple deletion of a regulatory element, such as the deletion of a tissue-specific negative regulatory element. Alternatively, the targeting event may replace an existing element; for example, a tissue-specific enhancer can be replaced by an enhancer that has broader or different cell-type specificity than the naturally occurring elements. Here, the naturally occurring sequences are deleted and new sequences are added. In all cases, the identification of the targeting event may be facilitated by the use of one or more selectable marker genes that are contiguous with the targeting DNA, allowing for the selection of cells in which the exogenous DNA has integrated into the host cell genome. The identification of the targeting event may also be facilitated by the use of one or more marker genes exhibiting the property of negative selection, such that the negatively selectable marker is linked to the exogenous DNA, but configured such that the negatively selectable marker flanks the targeting sequence, and such that a correct homologous recombination event with sequences in the host cell genome does not result in the stable integration of the negatively selectable marker. Markers useful for this purpose include the Herpes Simplex Virus thymidine kinase (TK) gene or the bacterial xanthine-guanine phosphoribosyl-transferase (gpt) gene.

[0108] The gene targeting or gene activation techniques which can be used in accordance with this aspect of the invention are more particularly described in U.S. Pat. No. 5,272,071 to Chappel; U.S. Pat. No. 5,578,461 to Sherwin et al.; International Application No. PCT/US92/09627 (WO93/09222) by Selden et al.; and International Application No. PCT/US90/06436 (WO9106667) by Skoultchi et al., each of which is incorporated by reference herein in its entirety.

### 4.6 Polypetides of the Invention

[0109] The isolated polypeptides of the invention include, but are not limited to, a polypeptide comprising: the amino acid sequences set forth as any one of SEQ ID NO: 1351-2700 or an amino acid sequence encoded by any one of the nucleotide sequences SEQ ID NO: 1-1350 or the corresponding full length or mature protein. Polypeptides of the invention also include polypeptides preferably with biological or immunological activity that are encoded by: (a) a polynucleotide having any one of the nucleotide sequences set forth in SEQ ID NO: 1-1350 or (b) polynucleotides encoding any one of the amino acid sequences set forth as SEQ ID NO: 1351-2700 or (c) polynucleotides that hybridize to the complement of the polynucleotides of either (a) or (b) under stringent hybridization conditions. The invention also provides biologically active or immunologically active variants of any of the amino acid sequences set forth as SEQ ID NO: 1351-2700 or the corresponding full length or mature protein; and “substantial equivalents” thereof (e.g., with at least about 65%, at least about 70%, at least about 75%, at least about 80%, at least about 85%, 86%, 87%, 88%, 89%, at least about 90%, 91%, 92%, 93%, 94%, typically at least about 95%, 96%, 97%, more typically at least about 98%, or most typically at least about 99% amino acid identity) that retain biological activity. Polypeptides encoded by allelic variants may have a similar, increased, or decreased activity compared to polypeptides comprising SEQ ID NO: 1351-2700.

[0110] Fragments of the proteins of the present invention which are capable of exhibiting biological activity are also encompassed by the present invention. Fragments of the protein may be in linear form or they may be cyclized using known methods, for example, as described in H. U. Saragovi, et al., Biotechnology 10, 773-778 (1992) and in R. S. McDowell, et al., J. Amer. Chem. Soc. 114, 9245-9253 (1992), both of which are incorporated herein by reference. Such fragments may be fused to carrier molecules such as immunoglobulins for many purposes, including increasing the valency of protein binding sites.

[0111] The present invention also provides both full-length and mature forms (for example, without a signal sequence or precursor sequence) of the disclosed proteins. The protein coding sequence is identified in the sequence listing by translation of the disclosed nucleotide sequences. The mature form of such protein may be obtained by expression of a full-length polynucleotide in a suitable mammalian cell or other host cell. The sequence of the mature form of the protein is also determinable from the amino acid sequence of the full-length form. Where proteins of the present invention are membrane bound, soluble forms of the proteins are also provided. In such forms, part or all of the regions causing the proteins to be membrane bound are deleted so that the proteins are fully secreted from the cell in which they are expressed.

[0112] Protein compositions of the present invention may further comprise an acceptable carrier, such as a hydrophilic, e.g., pharmaceutically acceptable, carrier.

[0113] The present invention also provides isolated polypeptides encoded by the nucleic acid fragments of the present invention or by degenerate variants of the nucleic acid fragments of the present invention. By “degenerate variant” is intended nucleotide fagments which differ from a nucleic acid fragment of the present invention (e.g., an ORF) by nucleotide sequence but, due to the degeneracy of the genetic code, encode an identical polypeptide sequence. Preferred nucleic acid fragments of the present invention are the ORFs that encode proteins.

[0114] A variety of methodologies known in the art can be utilized to obtain any one of the isolated polypeptides or proteins of the present invention. At the simplest level, the amino acid sequence can be synthesized using commercially available peptide synthesizer. The synthetically-constructed protein sequences, by virtue of sharing primary, secondary or tertiary structural and/or conformational characteristics with proteins may possess biological properties in common therewith, including protein activity. This technique is particularly useful in producing small peptides and fragments of larger polypeptides. Fragments are useful, for example, in generating antibodies against the native polypeptide. Thus, they may be employed as biologically active or immunological substitutes for natural, purified proteins in screening of therapeutic compounds and in immunological processes for the development of antibodies.

[0115] The polypeptides and proteins of the present invention can alternatively be purified from cells which have been altered to express the desired polypeptide or protein. As used herein, a cell is said to be altered to express a desired polypeptide or protein when the cell, through genetic manipulation, is made to produce a polypeptide or protein which it normally does not produce or, which the cell normally produces at a lower level. One skilled in the art can readily adapt procedures for introducing and expressing either recombinant or synthetic sequences into eukaryotic or prokaryotic cells in order to generate a cell which produces one of the polypeptides or proteins of the present invention.

[0116] The invention also relates to methods for producing a polypeptide comprising growing a culture of host cells of the invention in a suitable culture medium, and purifying the protein from the cells or the culture in which the cells are grown. For example, the methods of the invention include a process for producing a polypeptide in which a host cell containing a suitable expression vector that includes a polynucleotide of the invention is cultured under conditions that allow expression of the encoded polypeptide. The polypeptide can be recovered from the culture, conveniently from the culture medium, or from a lysate prepared from the host cells and further purified. Preferred embodiments include those in which the protein produced by such process is a full length or mature form of the protein.

[0117] In an alternative method, the polypeptide or protein is purified from bacterial cells which naturally produce the polypeptide or protein. One skilled in the art can readily follow known methods for isolating polypeptides and proteins in order to obtain one of the isolated polypeptides or proteins of the present invention. These include, but are not limited to, immunochromatography, HPLC, size-exclusion chromatography, ion-exchange chromatography, and immuno-afinity chromatography. See, e.g., Scopes, Protein Purification: Principles and Practice, Springer-Verlag (1994); Sambrook, et al., in Molecular Cloning: A Laboratory Manual; Ausubel et al., Current Protocols in Molecular Biology. Polypeptide fragments that retain biological/immunological activity include fragments comprising greater than about 100 amino acids, or greater than about 200 amino acids, and fragments that encode specific protein domains.

[0118] The purified polypeptides can be used in invitro binding assays which are well known in the art to identify molecules which bind to the polypeptides. These molecules include but are not limited to, for e.g. small molecules, molecules from combinatorial libraries, antibodies or other proteins. The molecules identified in the binding assay are then tested for antagonist or agonist activity in in vivo tissue culture or animal models that are well known in the art. In brief, the molecules are titrated into a plurality of cell cultures or animals and then tested for either cell/animal death or prolonged survival of the animal/cells.

[0119] In addition, the peptides of the invention or molecules capable of binding to the peptides may be complexed with toxins, e.g., ricin or cholera, or with other compounds that are toxic to cells. The toxin-binding molecule complex is then targeted to a tumor or other cell by the specificity of the binding molecule for SEQ ID NO: 1351-2700.

[0120] The protein of the invention may also be expressed as a product of transgenic animals, e.g., as a component of the milk of transgenic cows, goats, pigs, or sheep which are characterized by somatic or germ cells containing a nucleotide sequence encoding the protein.

[0121] The proteins provided herein also include proteins characterized by amino acid sequences similar to those of purified proteins but into which modification are naturally provided or deliberately engineered. For example, modifications, in the peptide or DNA sequence, can be made by those skilled in the art using known techniques. Modifications of interest in the protein sequences may include the alteration, substitution, replacement, insertion or deletion of a selected amino acid residue in the coding sequence. For example, one or more of the cysteine residues may be deleted or replaced with another amino acid to alter the conformation of the molecule. Techniques for such alteration, substitution, replacement, insertion or deletion are well known to those skilled in the art (see, e.g., U.S. Pat. No. 4,518,584). Preferably, such alteration, substitution, replacement, insertion or deletion retains the desired activity of the protein. Regions of the protein that are important for the protein function can be determined by various methods known in the art including the alanine-scanning method which involved systematic substitution of single or strings of amino acids with alanine, followed by testing the resulting alanine-containing variant for biological activity. This type of analysis determines the importance of the substituted amino acid(s) in biological activity. Regions of the protein that are important for protein function may be determined by the eMATRIX program.

[0122] Other fragments and derivatives of the sequences of proteins which would be expected to retain protein activity in whole or in part and are useful for screening or other immunological methodologies may also be easily made by those skilled in the art given the disclosures herein. Such modifications are encompassed by the present invention.

[0123] The protein may also be produced by operably linking the isolated polynucleotide of the invention to suitable control sequences in one or more insect expression vectors, and employing an insect expression system. Materials and methods for baculovirus/insect cell expression systems are commercially available in kit form from, e.g., Invitrogen, San Diego, Calif., U.S.A. (the MaxBat™kit), and such methods are well known in the art, as described in Summers and Smith, Texas Agricultural Experiment Station Bulletin No. 1555 (1987), incorporated herein by reference. As used herein, an insect cell capable of expressing a polynucleotide of the present invention is “transformed.”

[0124] The protein of the invention may be prepared by culturing transformed host cells under culture conditions suitable to express the recombinant protein. The resulting expressed protein may then be purified from such culture (ie., from culture medium or cell extracts) using known purification processes, such as gel filtration and ion exchange chromatography. The purification of the protein may also include an afinity column containing agents which will bind to the protein; one or more column steps over such affinity resins as concanavalin A-agarose, heparin-toyopearlt™ or Cibacrom blue 3GA Sepharose™; one or more steps involving hydrophobic interaction chromatography using such resins as phenyl ether, butyl ether, or propyl ether; or immunoaffinity chromatography.

[0125] Alternatively, the protein of the invention may also be expressed in a form which will facilitate purification. For example, it may be expressed as a fusion protein, such as those of maltose binding protein (MBP), glutathione-S-tnansferase (GST) or thioredoxin (TRX), or as a His tag. Kits for expression and purification of such fision proteins are commercially available from New England BioLab (Beverly, Mass.), Pharmacia (Piscataway, N.J.) and Invitrogen, respectively. The protein can also be tagged with an epit6pe and subsequently purified by using a specific antibody directed to such epitope. One such epitope (“FLAGO®”) is commercially available from Kodak (New Haven, Conn.).

[0126] Finally, one or more reverse-phase high performance liquid chromatography (RP-HPLC) steps employing hydrophobic RP-HPLC media, e.g., silica gel having pendant methyl or other aliphatic groups, can be employed to further purify the protein. Some or all of the foregoing purification steps, in various combinations, can also be employed to provide a substantially homogeneous isolated recombinant protein. The protein thus purified is substantially free of other mammalian proteins and is defined in accordance with the present invention as an “isolated protein.”

[0127] The polypeptides of the invention include analogs (variants). This embraces fragments, as well as peptides in which one or more amino acids has been deleted, inserted, or substituted. Also, analogs of the polypeptides of the invention embrace fusions of the polypeptides or modifications of the polypeptides of the invention, wherein the polypeptide or analog is fused to another moiety or moieties, e.g., targeting moiety or another therapeutic agent. Such analogs may exhibit improved properties such as activity and/or stability. Examples of moieties which may be fused to the polypeptide or an analog include, for example, targeting moieties which provide for the delivery of polypeptide to pancreatic cells, e.g., antibodies to pancreatic cells, antibodies to immune cells such as T-cells, monocytes, dendritic cells, granulocytes, etc., as well as receptor and ligands expressed on pancreatic or immune cells. Other moieties which may be fused to the polypeptide include therapeutic agents which are used for treatment, for example, immunosuppressive drugs such as cyclosporin, SK506, azathioprine, CD3 antibodies and steroids. Also, polypeptides may be fused to immune modulators, and other cytokines such as alpha or beta interferon.

[0128] 4.6.1 Determining Polypeptide and Poplynucleotide Identity and Similarity

[0129] Preferred identity and/or similarity are designed to give the largest match between the sequences tested. Methods to determine identity and similarity are codified in computer programs including, but are not limited to, the GCG program package, including GAP Devereux, J., et al., Nucleic Acids Research 12(1):387 (1984); Genetics Computer Group, University of Wisconsin, Madison, Wis.), BLASTP, BLASTN, BLASTX, FASTA (Altschul, S. F. et al., J. Molec. Biol. 215:403410 (1990), PSI-BLAST (Altschul S. F. et al., Nucleic Acids Res. vol. 25, pp. 3389-3402, herein incorporated by reference), eMatrix software (Wu et al., J. Comp. Biol., Vol. 6, pp.219-235 (1999), herein incorporated by reference), eMotif software (Nevill-Manning et al, ISMB-97, Vol. 4, pp. 202-209, herein incorporated by reference), pFam software (Sonnharniner et al., Nucleic Acids Res., Vol.26(l), pp.320-322 (1998), herein incorporated by reference) and the Kyte-Doolittle hydrophobocity prediction algorithm (J. Mol Biol, 157, pp. 105-31 (1982), incorporated herein by reference). The BLAST programs are publicly available from the National Center for Biotechnology Information (NCBI) and other sources (BLAST Manual, Altschul, S., et al. NCB NLM NIH Bethesda, Md. 20894; Altschul, S., et al., J. Mol. Biol. 215:403 410 (1990).

### 4.7 Chimeric and Fusion Proteins

[0130] The invention also provides chimeric or fusion proteins. As used herein, a “chimeric protein” or ” fusion protein” comprises a polypeptide of the invention operatively linked to another polypeptide. Within a fusion protein the polypeptide according to the invention can correspond to all or a portion of a protein according to the invention. In one embodiment, a fusion protein comprises at least one biologically active portion of a protein according to the invention. In another embodiment, a fusion protein comprises at least two biologically active portions of a protein according to the invention. Within the fusion protein, the term “operatively linked” is intended to indicate that the polypeptide according to the invention and the other polypeptide are fused in-frame to each other. The polypeptide can be fused to the N-terminus or C-terminus.

[0131] For example, in one embodiment a fusion protein comprises a polypeptide according to the invention operably inked to the extracellular domain of a second protein.

[0132] In another embodiment, the fusion protein is a GST-fusion protein in which the polypeptide sequences of the invention are fused to the C-terminus of the GST (i.e., glutathione S-transferase) sequences.

[0133] In another embodiment, the fusion protein is an immunoglobulin fusion protein in which the polypeptide sequences according to the invention comprises one or more domains are fused to sequences derived from a member of the immunoglobulin protein family. The immunoglobulin fusion proteins of the invention can be incorporated into pharmaceutical compositions and administered to a subject to inhibit an interaction between a ligand and a protein of the invention on the surface of a cell, to thereby suppress signal transduction in vivo. The imnmunoglobulin fusion proteins can be used to affect the bioavailability of a cognate ligand. Inhibition of the ligand/protein interaction may be useful therapeutically for both the treatment of proliferative and differentiative disorders, e,g., cancer as well as modulating (e.g., promoting or inhibiting) cell survival. Moreover, the immunoglobulin fusion proteins of the invention can be used as immunogens to produce antibodies in a subject, to purify ligands, and in screening assays to identify molecules that inhibit the interaction of a polypeptide of the invention with a ligand.

[0134] A chimeric or fusion protein of the invention can be produced by standard recombinant DNA techniques. For example, DNA fragments coding for the different polypeptide sequences are ligated together in-frame in accordance with conventional techniques, e.g., by employing blunt-ended or stagger-ended termini for ligation, restriction enzyme digestion to provide for appropriate termini, filling-in of cohesive ends as appropriate, alkaline phosphatase treatment to avoid undesirable joining, and enzymatic ligation. In another embodiment, the fusion gene can be synthesized by conventional techniques including automated DNA synthesizers. Alternatively, PCR amplification of gene fragments can be carried out using anchor primers that give rise to complementary overhangs between two consecutive gene fragments that can subsequently be annealed and reamplified to generate a chimeric gene sequence (see, for example, Ausubel et al. (eds.) CURRENT PROTOCOLS IN MOLECULAR BIOLOGY, John Wiley & Sons, 1992). Moreover, many expression vectors are commercially available that already encode a fusion moiety (e.g., a GST polypeptide). A nucleic acid encoding a polypeptide of the invention can be cloned into such an expression vector such that the fusion moiety is linked in-frame to the protein of the invention.

### 4.8 Gene Therapy

[0135] Mutations in the polynucleotides of the invention gene may result in loss of normal function of the encoded protein. The invention thus provides gene therapy to restore normal activity of the polypeptides of the invention; or to treat disease states involving polypeptides of the invention. Delivery of a functional gene encoding polypeptides of the invention to appropriate cells is effected ex vivo, in situ, or in vivo by use of vectors, and more particularly viral vectors (e.g., adenovirus, adeno-associated virus, or a retrovirus), or ex vivo by use of physical DNA transfer methods (e.g., liposomes or chemical treatments). See, for example, Anderson, Nature, supplement to vol. 392, no. 6679, pp.25-20 (1998). For additional reviews of gene therapy technology see Friedmann, Science, 244: 1275-1281 (1989); Venna, Scientific American: 68-84 (1990); and Miller, Nature, 357: 455460 (1992). Introduction of any one of the nucleotides of the present invention or a gene encoding the polypeptides of the present invention can also be accomplished with extrachromosomal substrates (transient expression) or artificial chromosomes (stable expression). Cells may also be cultured ex vivo in the presence of proteins of the present invention in order to proliferate or to produce a desired effect on or activity in such cells. Treated cells can then be introduced in vivo for therapeutic purposes. Alternatively, it is contemplated that in other human disease states, preventing the expression of or inhibiting the activity of polypeptides of the invention will be useful in treating the disease states. It is contemplated that antisense therapy or gene therapy could be applied to negatively regulate the expression of polypeptides of the invention.

[0136] Other methods inhibiting expression of a protein include the introduction of antisense molecules to the nucleic acids of the present invention, their complements, or their translated RNA sequences, by methods known in the art. Further, the polypeptides of the present invention can be inhibited by using targeted deletion methods, or the insertion of a negative regulatory element such as a silencer, which is tissue specific.

[0137] The present invention still farther provides cells genetically engineered in vivo to express the polynucleotides of the invention, wherein such polynucleotides are in operative association with a regulatory sequence heterologous to the host cell which drives expression of the polynucleotides in the cell. These methods can be used to increase or decrease the expression of the polynucleotides of the present invention.

[0138] Knowledge of DNA sequences provided by the invention allows for modification of cells to permit, increase, or decrease, expression of endogenous polypeptide. Cells can be modified (e.g., by homologous recombination) to provide increased polypeptide expression by replacing, in whole or in part, the naturally occurring promoter with all or part of a heterologous promoter so that the cells express the protein at higher levels. The heterologous promoter is inserted in such a manner that it is operatively linked to the desired protein encoding sequences. See, for example, PCT International PublicationNo. WO 94/12650, PCT International PublicationNo. WO 92/20808, and PCT International PublicationNo. WO 91/09955, It is also contemplated that, in addition to heterologous promoter DNA, amplifiable marker DNA (e.g., ada, dhfr, and the multifunctional CAD gene which encodes carbamyl phosphate synthase, aspartate transcarbamylase, and dihydroorotase) and/or intron DNA may be inserted along with the heterologous promoter DNA. If linked to the desired protein coding sequence, amplification of the marker DNA by standard selection methods results in co-amplification of the desired protein coding sequences in the cells.

[0139] In another embodiment of the present invention, cells and tissues may be engineered to express an endogenous gene comprising the polynucleotides of the invention under the control of inducible regulatory elements, in which case the regulatory sequences of the endogenous gene may be replaced by homologous recombination. As described herein, gene targeting can be used to replace a gene's existing regulatory region with a regulatory sequence isolated from a different gene or a novel regulatory sequence synthesizedby genetic engineering methods. Such regulatory sequences may be comprised of promoters, enhancers, scaffold-attachmentregions, negative regulatory elements, transcriptional initiation sites, regulatory protein binding sites or combinations of said sequences. Alternatively, sequences which affect the structure or stability of the RNA or protein produced may be replaced, removed, added, or otherwise modified by targeting. These sequences include polyadenylation signals, mRNA stability elements, splice sites, leader sequences for enhancing or modifying transport or secretion properties of the protein, or other sequences which alter or improve the function or stability of protein or RNA molecules.

[0140] The targeting event may be a simple insertion of thee regulatory sequence, placing the gene under the control of the new regulatory sequence, e.g., inserting a new promoter or enhancer or both upstream of a gene. Alternatively, the targeting event may be a simple deletion of a regulatory element, such as the deletion of a tissue-specific negative regulatory element. Alternatively, the targeting event may replace an existing element; for example, a tissue-specific enhancer can be replaced by an enhancer that has broader or different cell-type specificity than the naturally occurring elements. Here, the naturally occurring sequences are deleted and new sequences are added. In all cases, the identification of the targeting event may be facilitated by the use of one or more selectable marker genes that are contiguous with the targeting DNA, allowing for the selection of cells in which the exogenous DNA has integrated into the cell genome. The identification of the targeting event may also be facilitated by the use of one or more marker genes exhibiting the property of negative selection, such that the negatively selectable marker is linked to the exogenous DNA, but configured such that the negatively selectable marker flanks the targeting sequence, and such that a correct homologous recombination event with sequences in the host cell genome does not result in the stable integration of the negatively selectable marker. Markers useful for this purpose include the Herpes Simplex Virus thymidine kinase (TK) gene or the bacterial xantiine-guanine phosphoribosyl-transferase (gpt) gene.

[0141] The gene targeting or gene activation techniques which can be used in accordance with this aspect of the invention are more particularly described in U.S. Pat. No. 5,272,071 to Chappel; U.S. Pat. No. 5,578,461 to Sherwin et al.; International Application No. PCT/US92/09627 (WO93/09222) by Selden et al.; and International Application No. PCT/US90/06436 (WO91/106667) by Skoultchi et al., each of which is incorporated by reference herein in its entirety.

### 4.9 Transgenic Animals

[0142] In preferred methods to determine biological functions of the polypeptides of the invention in vivo, one or more genes provided by the invention are either over expressed or inactivated in the germ line of animals using homologous recombination [Capecchi, Science 244:1288-1292 (1989)]. Animals in which the gene is over expressed, under the regulatory control of exogenous or endogenous promoter elements, are known as transgenic animals. Animals in which an endogenous gene has been inactivated by homologous recombination are referred to as “knockout” animals. Knockout animals, preferably non-human mammals, can be prepared as described in U.S. Pat. No. 5,557,032, incorporated herein by reference. Transgenic animals are useful to determine the roles polypeptides of the invention play in biological processes, and preferably in disease states. Transgenic animals are useful as model systems to identify compounds that modulate lipid metabolism. Transgenic animals, preferably non-human mammals, are produced using methods as described in U.S. Pat. No 5,489,743 and PCT Publication No. WO94/28122, incorporated herein by reference.

[0143] Transgenic animals can be prepared wherein all or part of a promoter of the polynucleotides of the invention is either activated or inactivated to alter the level of expression of the polypeptides of the invention. Inactivation can be carried out using homologous recombination methods described above. Activation can be achieved by supplementing or even replacing the homologous promoter to provide for increased protein expression. The homologous promoter can be supplemented by insertion of one or more heterologous enhancer elements known to confer promoter activation in a particular tissue.

[0144] The polynucleotides of the present invention also make possible the development, through, e.g., homologous recombination or knock out strategies, of animals that fail to express polypeptides of the invention or that express a variant polypeptide. Such animals are useful as models for studying the in vivo activities of polypeptide as well as for studying modulators of the polypeptides of the invention.

[0145] In preferred methods to determine biological functions of the polypeptides of the invention in vivo, one or more genes provided by the invention are either over expressed or inactivated in the germ line of animals using homologous recombination [Capecchi, Science 244:1288-1292 (1989)]. Animals in which the gene is over expressed, under the regulatory control of exogenous or endogenous promoter elements, are known as transgenic animals. Animals in which an endogenous gene has been inactivated by homologous recombination are referred to as “knockout” animals. Knockout animals, preferably non-human mammals, can be prepared as described in U.S. Pat. No. 5,557,032, incorporated herein by reference. Transgenic animals are useful to determine the roles polypeptides of the invention play in biological processes, and preferably in disease states. Transgenic animals are useful as model systems to identify compounds that modulate lipid metabolism. Transgenic animals, preferably non-human mammals, are produced using methods as described in U.S. Pat. No 5,489,743 and PCT Publication No. WO94/28122, incorporated herein by reference.

[0146] Transgenic animals can be prepared wherein all or part of the polynucleotides of the invention promoter is either activated or inactivated to alter the level of expression of the polypeptides of the invention. Inactivation can be carried out using homologous recombination methods described above. Activation can be achieved by supplementing or even replacing the homologous promoter to provide for increased protein expression. The homologous promoter can be supplemented by insertion of one or more heterologous enhancer elements known to confer promoter activation in a particular tissue.

### 4.10 Uses and Biological Activity

[0147] The polynucleotides and proteins of the present invention are expected to exhibit one or more of the uses or biological activities (including those associated with assays cited herein) identified herein. Uses or activities described for proteins of the present invention may be provided by administration or use of such proteins or of polynucleotides encoding such proteins (such as, for example, in gene therapies or vectors suitable for introduction of DNA). The mechanism underlying the particular condition or pathology will dictate whether the polypeptides of the invention, the polynucleotides of the invention or modulators (activators or inhibitors) thereof would be beneficial to the subject in need of treatment. Thus, “therapeutic compositions of the invention” include compositions comprising isolated polynucleotides (including recombinant DNA molecules, cloned genes and degenerate variants thereof) or polypeptides of the invention (including full length protein, mature protein and truncations or domains thereof), or compounds and other substances that modulate the overall activity of the target gene products, either at the level of target gene/protein expression or target protein activity. Such modulators include polypeptides, analogs, (variants), including fragments and fusion proteins, antibodies and other binding proteins; chemical compounds that directly or indirectly activate or inhibit the polypeptides of the invention (identified, e.g., via drug screening assays as described herein); antisense polynucleotides and polynucleotides suitable for triple helix formation; and in particular antibodies or other binding partners that specifically recognize one or more epitopes of the polypeptides of the invention.

[0148] The polypeptides of the present invention may likewise be involved in cellular activation or in one of the other physiological pathways described herein.

[0149] 4.10.1 Research Uses and Utilities

[0150] The polynucleotides provided by the present invention can be used by the research community for various purposes. The polynucleotides can be used to express recombinant protein for analysis, characterization or therapeutic use; as markers for tissues in which the corresponding protein is preferentially expressed (either constructively or at a particular stage of tissue differentiation or development or in disease states); as molecular weight markers on gels; as chromosome markers or tags (when labeled) to identify chromosomes or to map related gene positions; to compare with endogenous DNA sequences in patients to identify potential genetic disorders; as probes to hybridize and thus discover novel, related DNA sequences; as a source of information to derive PCR primers for genetic fingerprinting; as a probe to “subtract-out” known sequences in the process of discovering other novel polynucleotides; for selecting and making oligomers for attachment to a “gene chip” or other support, including for examination of expression patterns; to raise anti-protein antibodies using DNA immunization techniques; and as an antigen to raise anti-DNA antibodies or elicit another immune response. Where the polynucleotide encodes a protein which binds or potentially binds to another protein (such as, for example, in a receptor-ligand interaction), the polynucleotide can also be used in interaction trap assays (such as, for example, that described in Gyuris et al., Cell 75:791-803 (1993)) to identify polynucleotides encoding the other protein with which binding occurs or to identify inhibitors of the binding interaction.

[0151] The polypeptides provided by the present invention can similarly be used in assays to determine biological activity, including in a panel of multiple proteins for high-throughput screening; to raise antibodies or to elicit another immune response; as a reagent (including the labeled reagent) in assays designed to quantitatively determine levels of the protein (or its receptor) in biological fluids; as markers for tissues in which the corresponding polypeptide is preferentially expressed (either constructively or at a particular stage of tissue differentiation or development or in a disease state); and, of course, to isolate correlative receptors or ligands. Proteins involved in these binding interactions can also be used to screen for peptide or small molecule inhibitors or agonists of the binding interaction.

[0152] Any or all of these research utilities are capable of being developed into reagent grade or kit format for commercialization as research products.

[0153] Methods for performing the uses listed above are well known to those skilled in the art.

[0154] References disclosing such methods include without limitation “Molecular Cloning: A Laboratory Manual”, 2d ed., Cold Spring Harbor Laboratory Press, Sambrook, J., E. F. Fritsch and T. Maniatis eds., 1989, and “Methods in Enzymology: Guide to Molecular Cloning Techniques”, Academic Press, Berger, S. L. and A. R. Kimmel eds., 1987.

[0155] 4.10.2 Nutritional Uses

[0156] Polynucleotides and polypeptides of the present invention can also be used as nutritional sources or supplements. Such uses include without limitation use as a protein or amino acid supplement, use as a carbon source, use as a nitrogen source and use as a source of carbohydrate. In such cases the polypeptide or polynucleotide of the invention can be added to the feed of a particular organism or can be administered as a separate solid or liquid preparation, such as in the form of powder, pills, solutions, suspensions or capsules. In the case of microorganisms, the polypeptide or polynucleotide of the invention can be added to the medium in or on which the microorganism is cultured.

[0157] 4.10.3 Gytokine and Cell Proliferation/Diferntation Activity

[0158] A polypeptide of the present invention may exhibit activity relating to cytokine, cell proliferation (either inducing or inhibiting) or cell differentiation (either inducing or inhibiting) activity or may induce production of other cytolines in certain cell populations. A polynucleotide of the invention can encode a polypeptide exhibiting such attributes. Many protein factors discovered to date, including all known cytokines, have exhibited activity in one or more factor-dependent cell proliferation assays, and hence the assays serve as a convenient confirmation of cytokie activity. The activity of therapeutic compositions of the present invention is evidenced by any one of a number of routine factor dependent cell proliferation assays for cell lines including, without limitation, 32D, DA2, DA1G, T10, B9, B9/11, BaF3, MC9/G, M+(preB M+), 2E8, RB5, DA1 , 123, T1165, HT2, CTLL2, TF-1, Mo7e, CMK, HUVEC, and Caco. Therapeutic compositions of the invention can be used in the following:

[0159] Assays for T-cell or thymocyte proliferation include without limitation those described in: Current Protocols in Immunology, Ed by J. E. Coligan, A. M. Kruisbeek, D. H. Margulies, E. M. Shevach, W. Strober, Pub. Greene Publishing Associates and Wiley-Interscience (Chapter 3, In Vitro assays for Mouse Lymphocyte Function 3.1-3.19; Chapter 7, Immunologic studies in Humans); Takai et al., J. Immunol. 137:3494-3500, 1986; Bertagnolli et al., J. Immunol. 145:1706-1712, 1990; Bertagnolli et al., Cellular Immunology 133:327-341, 1991; Bertagnolli, et al., I. Immunol. 149:3778-3783, 1992; Bowman et al., I. Immunol. 152:1756-1761, 1994.

[0160] Assays for cytokine production and/or proliferation of spleen cells, lymph node cells or thymocytes include, without limitation, those described in: Polyclonal T cell stimulation, Kruisbeek, A. M. and Shevach, E. M. In Current Protocols in immunology. J. E. e.a. Coligan eds. Vol 1 pp. 3.12.1-3.12.14, John Wiley and Sons, Toronto. 1994; and Measurement of mouse and human interleukin-γ, Schreiber, R D. In Current Protocols in Immunology. J. E. e.a. Coligan eds. Vol 1 pp. 6.8.1-6.8.8, John Wiley and Sons, Toronto. 1994.

[0161] Assays for proliferation and differentiation of hematopoietic and lymphopoietic cells include, without limitation, those described in: Measurement of Human and Murine Interleulin 2 and Interleukin 4, Bottomly, K., Davis, L. S. and Lipsky, P. E. In Current Protocols in Immunology. J. E. e.a. Coligan eds. Vol 1 pp. 6.3.1-6.3.12, John Wiley and Sons, Toronto. 1991; deVries et al., J. Exp. Med. 173:1205-1211, 1991; Moreau et al., Nature 336:690-692, 1988; Greenberger et al., Proc. Natl. Acad. Sci. U.S.A. 80:2931-2938, 1983; Measurement of mouse and human interleukin 6-Nordan, R. In Current Protocols in Immunology. J. E. Coligan eds. Vol 1 pp. 6.6.1-6.6.5, John Wiley and Sons, Toronto. 1991; Smith et al., Proc. Natl. Aced. Sci. U.S.A. 83:1857-1861, 1986; Measurement of human Interleukin 1-Bennett, F., Giannotti, J., Clark, S. C. and Turner, K. J. In Current Protocols in Immunology. J. E. Coligan eds. Vol 1 pp. 6.15.1 John Wiley and Sons, Toronto. 1991; Measurement of mouse and human Interleukin 9—Ciarletta, A., Giannotti, J., Clark, S. C. and Turner, K. J. In Current Protocols in Immunology. J. E. Coligan eds. Vol 1 pp. 6.13.1, John Wiley and Sons, Toronto. 1991,

[0162] Assays for T-cell clone responses to antigens (which will identify, among others, proteins that affect APC-T cell interactions as well as direct T-cell effects by measuring proliferation and cytokine production) include, without limitation, those described in: Current Protocols in Immunology, Ed by J. E. Coligan, A. M. Kruisbeek, D. H. Margulies, E. M. Shevach, W Strober, Pub. Greene Publishing Associates and Wiley-Interscience (Chapter 3, In Vitro assays for Mouse Lymphocyte Function; Chapter 6, Cytokines and their cellular receptors; Chapter 7, Immunologic studies in Humans); Weinberger et al., Proc. Natl. Acad. Sci. USA 77:6091-6095, 1980; Weinberger et al., Eur. J. Immun. 11:405411, 1981; Takai et al., J. Immunol. 137:3494-3500, 1986; Takai et al., J. Immunol. 140:508-512, 1988.

[0163] 4.10.4 Stem Cell Growth Factor Activity

[0164] A polypeptide of the present invention may exhibit stem cell growth factor activity and be involved in the proliferation, differentiation and survival of pluripotent and totipotent stem cells including primordial germ cells, embryonic stem cells, hematopoietic stem cells and/or germ line stem cells. Administration of the polypeptide of the invention to stem cells in vivo or ex vivo is expected to maintain and expand cell populations in a totipotential or pluripotential state which would be useful for re-engineering damaged or diseased tissues, transplantation, manufacture of bio-pharmaceuticals and the development of bio-sensors. The ability to produce large quantities of human cells has important working applications for the production of human proteins which currently must be obtained from non-human sources or donors, implantation of cells to treat diseases such as Parkinson's, Alzheimer's and other neurodegenerative diseases; tissues for grafting such as bone marrow, skin, cartilage, tendons, bone, muscle (including cardiac muscle), blood vessels, cornea, neural cells, gastrointestinal cells and others; and organs for transplantation such as kidney, liver, pancreas (including islet cells), heart and lung.

[0165] It is contemplated that multiple different exogenous growth factors and/or cytokines may be administered in combination with the polypeptide of the invention to achieve the desired effect, including any of the growth factors listed herein, other stem cell maintenance factors, and specifically including stem cell factor (SCF), leukemia inhibitory factor (LIF), Flt-3 ligand (Flt-3L), any of the interleukins, recombinant soluble IL-6 receptor fused to IL-6, macrophage inflammatory protein 1-alpha (MIP-1-alpha), G-CSF, GM-CSF, thrombopoietin (TPO), platelet factor 4 (PF-4), platelet-derived growth factor (PDGF), neural growth factors and basic fibroblast growth factor (bFGF).

[0166] Since totipotent stem cells can give rise to virtualy any mature cell type, expansion of these cells in culture will facilitate the production of large quantities of mature cells. Techniques for culturing stem cells are known in the art and administration of polypeptides of the invention, optionally with other growth factors and/or cytokines, is expected to enhance the survival and proliferation of the stem cell populations. This can be accomplished by direct administration of the polypeptide of the invention to the culture medium. Alternatively, stroma cells transfected with a polynucleotide that encodes for the polypeptide of the invention can be used as a feeder layer for the stem cell populations in culture or in vivo. Stromal support cells for feeder layers may include embryonic bone marrow fibroblasts, bone marrow stromal cells, fetal liver cells, or cultured embryonic fibroblasts (see U.S. Pat. No. 5,690,926).

[0167] Stem cells themselves can be transfected with a polynucleotide of the invention to induce autocrine expression of the polypeptide of the invention. This will allow for generation of undifferentiated totipotential/pluripotential stem cell lines that are useful as is or that can then be differentiated into the desired mature cell types. These stable cell lines can also serve as a source of undifferentiated totipotential/pluripotential mRNA to create cDNA libraries and templates for polymerase chain reaction experiments. These studies would allow for the isolation and identification of differentially expressed genes in stem cell populations that regulate stem cell proliferation and/or maintenance.

[0168] Expansion and maintenance of totipotent stem cell populations will be useful in the treatment of many pathological conditions. For example, polypeptides of the present invention may be used to manipulate stem cells in culture to give rise to neuroepithelial cells that can be used to augment or replace cells damaged by illness, autoimmune disease, accidental damage or genetic disorders. The polypeptide of the invention may be useful for inducing the proliferation of neural cells and for the regeneration of nerve and brain tissue, ie. for the treatment of central and peripheral nervous system diseases and neuropathies, as well as mechanical and traumatic disorders which involve degeneration, death or trauma to neural cells or nerve tissue. In addition, the expanded stem cell populations can also be genetically altered for gene therapy purposes and to decrease host rejection of replacement tissues after grafting or implantation.

[0169] Expression of the polypeptide of the invention and its effect on stem cells can also be manipulated to achieve controlled differentiation of the stem cells into more differentiated cell types. A broadly applicable method of obtaining pure populations of a specific differentiated cell type from undifferentiated stem cell populations involves the use of a cell-type specific promoter driving a selectable marker. The selectable marker allows only cells of the desired type to survive. For example, stem cells can be induced to differentiate into cardiomyocytes (Wobus et al., Differentiation, 48: 173-182, (1991); Klug et al., J. Clin. Invest., 98(1): 216-224, (1998)) or skeletal muscle cells (Browder, L. W. In: Principles of Tissue Engineering eds. Lanza et al., Academic Press (1997)). Alternatively, directed differentiation of stem cells can be accomplished by culturing the stem cells in the presence of a differentiation factor such as retinoic acid and an antagonist of the polypeptide of the invention which would inhibit the effects of endogenous stem cell factor activity and allow differentiation to proceed.

[0170] In vitro cultures of stem cells can be used to determine if the polypeptide of the invention exhibits stem cell growth factor activity. Stem cells are isolated from any one of various cell sources (including hematopoietic stem cells and embryonic stem cells) and cultured on a feeder layer, as described by Thompson et al. Proc. Natl. Acad. Sci, U.S.A., 92: 7844-7848 (1995), in the presence of the polypeptide of the invention alone or in combination with other growth factors or cytokines. The ability of the polypeptide of the invention to induce stem cells proliferation is determined by colony formation on semi-solid support e.g as described by Bernstein et al., Blood, 77: 23162321 (1991).

[0171] 4.10.5 Hematopoiesis Regulating Activity

[0172] A polypeptide of the present invention may be involved in regulation of hematopoiesis and, consequently, in the treatment of myeloid or lymphoid cell disorders. Even marginal biological activity in support of colony forming cells or of factor-dependent cell lines indicates involvement in regulating hematopoiesis, e.g in supporting the growth and proliferation of erytbroid progenitor cells alone or in combination with other cytokines, thereby indicating utility, for example, in treating various anemias or for use in conjunction with irradiation/chemotherapy to stimulate the production of erytiroid precursors and/or erytroid cells; in supporting the growth and proliferation of myeloid cells such as granulocytes and monocytes/macrophages (i.e., traditional CSF activity) useful, for example, in conjunction with chemotherapy to prevent or treat consequent myelo-suppression; in supporting the growth and proliferation of megakaryocytes and consequently of platelets thereby allowing prevention or treatment of various platelet disorders such as thrombocytopenia, and generally for use in place of or complimentary to platelet transfusions; and/or in supporting the growth and proliferation of hematopoietic stem cells which are capable of maturing to any and all of the above-mentioned hematopoietic cells and therefore find therapeutic utility in various stem cell disorders (such as those usually treated with transplantation, including, without limitation, aplastic anemia and paroxysrnal nocturnal hemoglobinuria), as well as in repopulating the stem cell compartment post irradiation/chemotherapy, either in-vivo or ex-vivo (i.e., in conjunction with bone marrow transplantation or with peripheral progenitor cell transplantation (homologous or heteroiogous)) as normal cells or genetically manipulated for gene therapy.

[0173] Therapeutic compositions of the invention can be used in the following:

[0174] Suitable assays for proliferation and differentiation of various hematopoietic lines are cited above.

[0175] Assays for embryonic stem cell differentiation (which will identify, among others, proteins that influence embryonic differentiation hematopoiesis) include, without limitation, those described in: Johansson et al. Cellular Biology 15:141-151, 1995; Keller et al., Molecular and Cellular Biology 13:473-486, 1993; McClanahan et al., Blood 81:2903-2915, 1993.

[0176] Assays for stem cell survival and differentiation (which will identify, among others, proteins that regulate lympho-hematopoiesis) include, without limitation, those described in: Methylcellulose colony forming assays, Freshney, M. G. In Culture of Hematopoietic Cells. R. I. Freshney, et al. eds. Vol pp. 265-268, Wiley-Liss, Inc., New York, N.Y. 1994; Hirayama et al., Proc. Natl. Acad. Sci. USA 89:5907-5911, 1992; Primitive hematopoietic colony forming cells with high proliferative potential, McNiece, I. K. and Briddell, R. A. In Culture of Hematopoietic Cells. R I. Freshney, et al. eds. Vol pp. 23-39, Wiley-Liss, Inc., New York, N.Y. 1994; Neben et al., Experimental Hematology 22:353-359, 1994; Cobblestone area forming cell assay, Ploemacher, R. E. In Culture of Hematopoietic Cells. R. I. Freshney, et al. eds. Vol pp. 1-21, Wiley-Liss, Inc., New York, N.Y. 1994; Long term bone marrow cultures in the presence of stromal cells, Spooncer, E., Dexter, M. and Allen, T. In Culture of Hematopoietic Cells. R. I. Freshney, et al. eds. Vol pp. 163-179, Wiley-Liss, Inc., New York, N.Y. 1994; Long term culture initiating cell assay, Sutherland, H. J. In Culture of Hematopoietic Cells. R I. Freshney, et al. eds. Vol pp.139-162, Wiley-Liss, Inc., New York, N.Y. 1994,

[0177] 4.10.6 Tissue Growth Activity

[0178] A polypeptide of the present invention also may be involved in bone, cartilage, tendon, ligament and/or nerve tissue growth or regeneration, as well as in wound healing and tissue repair and replacement, and in healing of burns, incisions and ulcers.

[0179] A polypeptide of the present invention which induces cartilage and/or bone growth in circumstances where bone is not normally formed, has application in the healing of bone fractures and crtilage damage or defects in humans and other animals. Compositions of a polypeptide, antibody, binding partner, or other modulator of the invention may have prophylactic use in closed as well as open fracture reduction and also in the improved fixation of artificial joints. De novo bone formation induced by an osteogenic agent contributes to the repair of congenital, trauma induced, or oncologic resection induced craniofacial defects, and also is useful in cosmetic plastic surgery.

[0180] A polypeptide of this invention may also be involved in attracting bone-forming cells, stimulating growth of bone-forming cells, or inducing differentiation of progenitors of bone-forming cells. Treatment of osteoporosis, osteoarthritis, bone degenerative disorders, or periodontal disease, such as through stimulation of bone and/or cartilage repair or by blocking inflammation or processes of tissue destruction (collagenase activity, osteoclast activity, etc.) mediated by inflammatory processes may also be possible using the composition of the invention.

[0181] Another category of tissue regeneration activity that may involve the polypeptide of the present invention is tendon/ligament formation. Induction of tendon/ligament-like tissue or other tissue formation in circumstances where such tissue is not normally formed, has application in the healing of tendon or ligament tears, deformities and other tendon or ligament defects in humans and other animals. Such a preparation employing a tendon/ligament-like tissue inducing protein may have prophylactic use in preventing damage to tendon or ligament tissue, as well as use in the improved fixation of tendon or ligament to bone or other tissues, and in repairing defects to tendon or ligament tissue. De novo tendon/ligament-like tissue formation induced by a composition of the present invention contributes to the repair of congenital, trauma induced, or other tendon or ligament defects of other origin, and is also useful in cosmetic plastic surgery for attachment or repair of tendons or ligaments. The compositions of the present invention may provide environment to attract tendon- or ligament-forming cells, stimulate growth of tendon- or ligament-forming cells, induce differentiation of progenitors of tendon-or ligament-forming cells, or induce growth of tendon/ligament cells or progenitors ex vivo for return in vivo to effect tissue repair. The compositions of the invention may also be useful in the treatment of tendinitis, carpal tunnel syndrome and other tendon or ligament defects. The compositions may also include an appropriate matrix and/or sequestering agent as a carrier as is well known in the art.

[0182] The compositions of the present invention may also be useful for proliferation of neural cells and for regeneration of nerve and brain tissue, i.e. for the treatment of central and peripheral nervous system diseases and neuropathies, as well as mechanical and traumatic disorders, which involve degeneration, death or trauma to neural cells or nerve tissue. More specifically, a composition may be used in the treatment of diseases of the peripheral nervous system, such as peripheral nerve injuries, peripheral neuropathy and localized neuropathies, and central nervous system diseases, such as Alzheimer's, Parkinson's disease, Huntington's disease, amyotrophic lateral sclerosis, and Shy-Drager syndrome. Further conditions which may be treated in accordance with the present invention include mechanical and traumatic disorders, such as spinal cord disorders, head trauma and cerebrovascular diseases such as stroke. Peripheral neuropathies resulting from chemotherapy or other medical therapies may also be treatable using a composition of the invention.

[0183] Compositions of the invention may also be useful to promote better or faster closure of non-healing wounds, including without limitation pressure ulcers, ulcers associated with vascular insufficiency, surgical and traumatic wounds, and the like.

[0184] Compositions of the present invention may also be involved in the generation or regeneration of other tissues, such as organs (including, for example, pancreas, liver, intestine, kidney, skin, endothelium), muscle (smooth, skeletal or cardiac) and vascular (including vascular endothelium) tissue, or for promoting the growth of cells comprising such tissues. Part of the desired effects may be by inhibition or modulation of fibrotic scarring may allow normal tissue to regenerate. A polypeptide of the present invention may also exhibit angiogenic activity.

[0185] A composition of the present invention may also be useful for gut protection or regeneration and treatment of lung or liver fibrosis, reperfusion injury in various tissues, and conditions resulting from systemic cytokine damage.

[0186] A composition of the present invention may also be useful for promoting or inhibiting differentiation of tissues described above from precursor tissues or cells; or for inhibiting the growth of tissues described above.

[0187] Therapeutic compositions of the invention can be used in the following:

[0188] Assays for tissue generation activity include, without limitation, those described in: International Patent Publication No. WO95/16035 (bone, cartilage, tendon); International Patent Publication No. WO95/05846 (nerve, neuronal); International Patent Publication No. WO91/07491 (skin, endothelium).

[0189] Assays for wound healing activity include, without limitation, those described in: Winter, Epidermal Wound Healing, pps. 71-112 (Maibach, H. I. and Rovee, D. T., eds.), Year Book Medical Publishers, Inc., Chicago, as modified by Eaglstein and Mertz, J. Invest. Dermatol 71:382-84 (1978).

[0190] 4.10.7 Immune Stimulating or Suppressing Activity

[0191] A polypeptide of the present invention may also exhibit immune stimulating or immune suppressing activity, including without limitation the activities for which assays are described herein. A polynucleotide of the invention can encode a polypeptide exhibiting such activities. A protein may be useful in the treatment of various immune deficiencies and disorders (including severe combined immunodeficiency (SCID)), e.g., in regulating (up or down) growth and proliferation of T and/or B lymphocytes, as well as effecting the cytolytic activity of NK cells and other cell populations. These immune deficiencies may be genetic or be caused by viral (e.g., HIV) as well as bacterial or fimgal infections, or may result from autoimmune disorders. More specifically, infectious diseases causes by viral, bacterial, fingal or other infection may be treatable using a protein of the present invention, including infections by HV, hepatitis viruses, herpes viruses, mycobacteria, Leishmania spp., malaria spp. and various fimgal infections such as candidiasis. Of course, in this regard, proteins of the present invention may also be useful where a boost to the immune system generally may be desirable, i. e., in the treatment of cancer.

[0192] Autoimmune disorders which may be treated using a protein of the present invention include, for example, connective tissue disease, multiple sclerosis, systemic lupus erythematosus, rheumatoid aritis, autoimmune pulmonary inflarnation, Guillain-Barre syndrome, autoimmune thyroiditis, insulin dependent diabetes mellitis, myasthenia gravis, graft-versus-host disease and autoimmune inflammatory eye disease. Such a protein (or antagonists thereof, including antibodies) of the present invention may also to be useful in the treatment of allergic reactions and conditions (e.g. anaphylaxis, serum sickness, drug reactions, food allergies, insect venom allergies, mastocytosis, allergic rhinitis, hypersensitivity pneumonitis, urticaria, angioedema, eczema, atopic dermatitis, allergic contact dermatitis, erythema multiforme, Stevens-Johnson syndrome, allergic conjunctivitis, atopic keratoconjunctivitis, venereal keratoconjunctivitis, giant papillary conjunctivitis and contact allergies), such as asthma particularly allergic asthma) or other respiratory problems. Other conditions, in which immune suppression is desired (including, for example, organ transplantation), may also be treatable using a protein (or antagonists thereof) of the present invention. The therapeutic effects of the polypeptides or antagonists thereof on allergic reactions can be evaluated by in vivo animals models such as the cumulative contact enhancement test (Lastbom et al., Toxicology 125: 59-66, 1998), skin prick test (Hofftnann et al., Allergy 54: 446-54, 1999), guinea pig skin sensitization test (Vohr et al., Arch. Toxocol. 73: 501-9), and murine local lymph node assay (Kimber et al., J. Toxicol. Environ. Health 53: 563-79).

[0193] Using the proteins of the invention it may also be possible to modulate immune responses, in a number of ways. Down regulation may be in the form of inhibiting or blocking an immune response already in progress or may involve preventing the induction of an immune response. The functions of activated T cells may be inhibited by suppressing T cell responses or by inducing specific tolerance in T cells, or both. Immunosuppression of T cell responses is generally an active, non-antigen-specific, process which requires continuous exposure of the T cells to the suppressive agent. Tolerance, which involves inducing non-responsiveness or anergy in T cells, is distinguishable from immunosuppression in that it is generally antigen-specific and persists after exposure to the tolerizing agent has ceased. Operationally, tolerance can be demonstrated by the lack of a T cell response upon reexposure to specific antigen in the absence of the tolerizing agent.

[0194] Down regulating or preventing one or more antigen functions (including without limitation B lymphocyte antigen functions (such as, for example, B7)), e.g., preventing high level lymphokine synthesis by activated T cells, will be useftil in situations of tissue, skin and organ transplantation and in graft-versus-host disease (GVHD). For example, blockage of T cell function should result in reduced tissue destruction in tissue transplantation. Typically, in tissue transplants, rejection of the transplant is initiated through its recognition as foreign by T cells, followed by an immune reaction that destroys the transplant. The administration of a therapeutic composition of the invention may prevent cytokine synthesis by immune cells, such as T cells, and thus acts as an immunosuppressant. Moreover, a lack of costitnulation may also be sufficient to anergize the T cells, thereby inducing tolerance in a subject. Induction of long-term tolerance by B lymphocyte antigen-blocking reagents may avoid the necessity of repeated administration of these blocking reagents. To achieve sufficient immunosuppression or tolerance in a subject, it may also be necessary to block the function of a combination of B lymphocyte antigens.

[0195] The efficacy of particular therapeutic compositions in preventing organ transplant rejection or GVHD can be assessed using animal models that are predictive of efficacy in humans. Examples of appropriate systems which can be used include allogeneic cardiac grafts in rats and xenogeneic pancreatic islet cell grafts in mice, both of which have been used to examine the immunosuppressive effects of CTLA4Ig fusion proteins in vivo as described in Lenschow et al., Science 257:789-792 (1992) and Turka et al., Proc. Natl. Acad. Sci USA, 89:11102-11105 (1992). In addition, murine models of GVHD (see Paul ed., Fundamental Immunology, Raven Press, New York, 1989, pp. 846-847) can be used to determine the effect of therapeutic compositions of the invention on the development of that disease.

[0196] Blocking antigen function may also be therapeutically useful for treating autoimmune diseases. Many autoimmune disorders are the result of inappropriate activation of T cells that are reactive against self tissue and which promote the production of cytokines and autoantibodies involved in the pathology of the diseases. Preventing the activation of autoreactive T cells may reduce or eliminate disease symptoms. Administration of reagents which block stimulation of T cells can be used to inhibit T cell activation and prevent production of autoantibodies or T cell-derived cytokines which may be involved in the disease process. Additionally, blocking reagents may induce antigen-specific tolerance of autoreactive T cells which could lead to long-term relief from the disease. The efficacy of blocking reagents in preventing or alleviating autoimmune disorders can be determined using a number of well-characterized animal models of human autoimmune diseases. Examples include murine experimental autoimmune encephalitis, systemic lupus erythmatosis in MRLIlpr/lpr mice or NZB hybrid mice, murine autoimmune collagen arthritis, diabetes mellitus in NOD mice and BB rats, and murine experimental myasthenia gravis (see Paul ed., Fundamental Immunology, Raven Press, New York, 1989, pp. 840-856).

[0197] Upregulation of an antigen function (e.g., a B lymphocyte antigen function), as a means of up regulating immune responses, may also be useful in therapy. Upregulation of immune responses may be in the form of enhancing an existing immune response or eliciting an initial immune response. For example, enhancing an immune response may be useful in cases of viral infection, including systemic viral diseases such as influenza, the common cold, and encephalitis.

[0198] Alternatively, anti-viral immune responses may be enhanced in an infected patient by removing T cells from the patient, costimulating the T cells in vitro with viral antigen-pulsed APCs either expressing a peptide of the present invention or together with a stimulatory form of a soluble peptide of the present invention and reintroducing the in vitro activated T cells into the patient. Another method of enhancing anti-viral immune responses would be to isolate infected cells from a patient, transfect them with a nucleic acid encoding a protein of the present invention as described herein such that the cells express all or a portion of the protein on their surface, and reintroduce the transfected cells into the patient. The infected cells would now be capable of delivering a costimulatory signal to, and thereby activate, T cells in vivo.

[0199] A polypeptide of the present invention may provide the necessary stimulation signal to T cells to induce a T cell mediated immune response against the transfected tumor cells. In addition, tumor cells which lack MHC class I or MHC class II molecules, or which fail to reexpress sufficient mounts of MHC class I or MHC class II molecules, can be transfected with nucleic acid encoding all or a portion of (e.g., a cytoplasmic-domain truncated portion) of an MHC class I alpha chain protein and β₂ microglobulin protein or an NBC class II alpha chain protein and an MHC class II beta chain protein to thereby express MHC class I or MHC class If proteins on the cell surface. Expression of the appropriate class I or class II MHC in conjunction with a peptide having the activity of a B lymphocyte antigen (e.g., B7-1, B7-2, B7-3) induces a T cell mediated immune response against the transfected tumor cell. Optionally, a gene encoding an antisense construct which blocks expression of an MHC class II associated protein, such as the invariant chain, can also be cotransfected with a DNA encoding a peptide having the activity of a B lymphocyte antigen to promote presentation of tumor associated antigens and induce tumor specific immunity. Thus, the induction of a T cell mediated immune response in a human subject may be sufficient to overcome tumor-specific tolerance in the subject.

[0200] The activity of a protein of the invention may, among other means, be measured by the following methods:

[0201] Suitable assays for thymocyte or splenocyte cytotoxicity include, without limitation, those described in: Current Protocols in Immunology, Ed by J. E. Coligan, A. M. Kruisbeek, D. H. Margulies, E. M. Shevach, W. Strober, Pub. Greene Publishing Associates and Wiley-Interscience (Chapter 3, In Vitro assays for Mouse Lymphocyte Function 3.1-3.19; Chapter 7, Immunologic studies in Humans); Herrmann et al., Proc. Natl. Acad. Sci. USA 78:2488-2492, 1981; Herrmann et al., J. Immunol. 128:1968-1974, 1982; Handa et al., J. Immunol. 135:1564-1572, 1985; Takai et al., I. Immunol. 137:3494-3500, 1986; Takai et al., J. Immunol. 140:508-512, 1988; Bowman et al., J. Virology 61:1992-1998; Bertagnolli et al., Cellular Immunology 133:327-341, 1991; Brown et al., J. Immunol. 153:3079-3092, 1994,

[0202] Assays for T-cell-dependent immunoglobulin responses and isotype switching (which will identify, among others, proteins that modulate T-cell dependent antibody responses and that affect Th1/Th2 profiles) include, without limitation, those described in: Maliszewski, J. Immunol. 144:3028-3033, 1990; and Assays for B cell function: In vitro antibody production, Mond, J. J. and Brunswick, M. In Current Protocols in Immunology. J. E. e.a. Coligan eds. Vol 1 pp. 3.8.1-3.8.16, John Wiley and Sons, Toronto. 1994.

[0203] Mixed lymphocyte reaction (MLR) assays (which will identify, among others, proteins that generate predominantly Th1 and CTL responses) include, without limitation, those described in: Current Protocols in Immunology, Ed by J. E. Coligan, A. M. Kruisbeek, D. H. Margulies, E. M. Shevach, W. Strober, Pub. Greene Publishing Associates and Wiley-Interscience (Chapter 3, In Vitro assays for Mouse Lymphocyte Function 3.1-3.19; Chapter 7, Immunologic studies in Humans); Takai et al., J. Immunol. 137:3494-3500, 1986; Takai et al., J. Immunol. 140:508-512, 1988; Bertagnolli et al., J. Immunol. 149:3778-3783, 1992.

[0204] Dendritic cell-dependent assays (which will identify, among others, proteins expressed by dendritic cells that activate naive T-cells) include, without limitation, those described in: Guery et al., J. Immunol. 134:536-544, 1995; Inaba et al., Journal of Experimental Medicine 173:549-559, 1991; Macatonia et al., Journal of Immunology 154:5071-5079, 1995; Porgador et al., Journal of Experimental Medicine 182:255-260, 1995; Nair et al., Journal of Virology 67:4062-4069, 1993; Huang et al., Science 264:961-965, 1994; Macatonia et al., Journal of Experimental Medicine 169:1255-1264, 1989; Bhardwaj et al., Journal of Clinical Investigation 94:797-807, 1994; and Inaba et al., Journal of Experimental Medicine 172:631-640, 1990.

[0205] Assays for lymphocyte survival/apoptosis (which will identify, among others, proteins that prevent apoptosis after superantigen induction and proteins that regulate lymphocyte homeostasis) include, without limitation, those described in: Darzlewicz et al., Cytometry 13:795-808, 1992; Gorczyca et al., Leukemia 7:659-670, 1993; Gorczyca et al., Cancer Research 53:1945-1951, 1993; Itoh et al., Cell 66:233-243, 1991; Zacharchuk, Journal of Immunology 145:4037-4045, 1990; Zamai et al., Cytometry 14:891-897, 1993; Gorczyca et al., International Journal of Oncology 1:639-648, 1992.

[0206] Assays for proteins that influence early steps of Tell commitment and development include, without limitation, those described in: Antica et al., Blood 84:111-117, 1994; Fine et al., Cellular Immunology 155:111-122, 1994; Galy et al., Blood 85:2770-2778, 1995; Toki et al., Proc. Nat Acad Sci. USA 88:7548-7551, 1991.

[0207] 4.10.8 Activin/Inhibin Activity

[0208] A polypeptide of the present invention may also exhibit activin-or inhibin-related activities. A polynucleotide of the invention may encode a polypeptide exhibiting such characteristics. Inhibins are characterized by their ability to inhibit the release of follicle stimulating hormone (FSH), while activins and are characterized by their ability to stimulate the release of follicle stimulating hormone (FSH). Thus, a polypeptide of the present invention, alone or in heterodimers with a member of the inhibin family, may be useful as a contraceptive based on the ability of inhibins to decrease fertility in female mammals and decrease spermatogenesis in male mammals. Administration of sufficient amounts of other inhibins can induce infertility in these mammals. Alternatively, the polypeptide of the invention, as a homodimer or as a heterodimer with other protein subunits of the inhibin group, may be useful as a fertility inducing therapeutic, based upon the ability of activin molecules in stimulating FSH release from cells of the anterior pituitary. See, for example, U.S. Pat. No. 4,798,885. A polypeptide of the invention may also be useful for advancement of the onset of fertility in sexually immature mammals, so as to increase the lifetime reproductive performance of domestic animals such as, but not limited to, cows, sheep and pigs.

[0209] The activity of a polypeptide of the invention may, among other means, be measured by the following methods.

[0210] Assays for activin/inhibin activity include, without limitation, those described in: Vale et al., Endocrinology 91:562-572, 1972; Ling et al., Nature 321:779-782, 1986; Vale et al., Nature 321:776-779, 1986; Mason et al., Nature 318:659-663, 1985; Forage et al., Proc. Natl. Acad. Sci. USA 83:3091-3095, 1986.

[0211] 4.10.9 Chemotatic/Chemokinetic Activity

[0212] A polypeptide of the present invention may be involved in chemotactic or chemokinetic activity for mammalian cells, including, for example, monocytes, fibroblasts, neutrophils, T-cells, mast cells, eosinophils, epithelial and/or endothelial cells. A polynucleotide of the invention can encode a polypeptide exhibiting such attributes. Chemotactic and chemokinetic receptor activation can be used to mobilize or attract a desired cell population to a desired site of action. Chemotactic or chemokinetic compositions (e.g. proteins, antibodies, binding partners, or modulators of the invention) provide particular advantages in treatment of wounds and other trauma to tissues, as well as in treatment of localized infections. For example, attraction of lymphocytes, monocytes or neutrophils to tumors or sites of infection may result in improved immune responses against the tumor or infecting agent.

[0213] A protein or peptide has chemotactic activity for a particular cell population if it can stimulate, directly or indirectly, the directed orientation or movement of such cell population. Preferably, the protein or peptide has the ability to directly stimulate directed movement of cells. Whether a particular protein has chemotactic activity for a population of cells can be readily determined by employing such protein or peptide in any known assay for cell chemotaxs.

[0214] Therapeutic compositions of the invention can be used in the following:

[0215] Assays for chemotactic activity (which will identify proteins that induce or prevent chemotaxis) consist of assays that measure the ability of a protein to induce the migration of cells across a membrane as well as the ability of a protein to induce the adhesion of one cell population to another cell population. Suitable assays for movement and adhesion include, without limitation, those described in: Current Protocols in Immunology, Ed by J. E. Coligan, A. M. Kruisbeek, D. H. Marguiles, E. M. Shevach, W. Strober, Pub. Greene Publishing Associates and Wiley-Interscience (Chapter 6.12, Measurement of alpha and beta Chemokines 6.12.1-6.12.28; Taub et al. J. Clin. Invest. 95:1370-1376, 1995; Lind et al. APMIS 103:140-146, 1995; Muller et al Eur. J. Immunol. 25:1744-1748; Gruber et al. J. of Immunol. 152:5860-5867, 1994; Johnston et al. J. of Ilnunol. 153:1762-1768, 1994.

[0216] 4.10.10 Hemostatic and Thrombolytic Activity

[0217] A polypeptide of the invention may also be involved in hemostatis or thrombolysis or thrombosis. A polynucleotide of the invention can encode a polypeptide exhibiting such attributes. Compositions may be useful in treatment of various coagulation disorders (including hereditary disorders, such as hemophilias) or to enhance coagulation and other hemostatic events in treating wounds resulting from trauma, surgery or other causes. A composition of the invention may also be useful for dissolving or inhibiting formation of thromboses and for treatment and prevention of conditions resulting therefrom (such as, for example, infraction of cardiac and central nervous system vessels (e.g., stroke).

[0218] Therapeutic compositions of the invention can be used in the following:

[0219] Assay for hemostatic and thrombolytic activity include, without limitation, those described in: Linet et al., J. Clin. Pharmacol. 26:131-140, 1986; Burdick et al., Thrombosis Res. 45:413-419, 1987; Humphrey et al., Fibrinolysis 5:71-79 (1991); Schaub, Prostaglandins 35:467-474, 1988.

[0220] 4.10.11 Cancer Diagnosus and Therapy

[0221] Polypeptides of the invention may be involved in cancer cell generation, proliferation or metastasis. Detection of the presence or amount of polynucleotides or polypeptides of the invention may be useful for the diagnosis and/or prognosis of one or more types of cancer. For example, the presence or increased expression of a polynucleotide/polypeptide of the invention may indicate a hereditary risk of cancer, a precancerous condition, or an ongoing malignancy. Conversely, a defect in the gene or absence of the polypeptide may be associated with a cancer condition. Identification of single nucleotide polymorphisms associated with cancer or a predisposition to cancer may also be useful for diagnosis or prognosis.

[0222] Cancer treatments promote tumor regression by inhibiting tumor cell proliferation, inhibiting angiogenesis (growth of new blood vessels that is necessary to support tumor growth) and/or prohibiting metastasis by reducing tumor cell motility or invasiveness. Therapeutic compositions of the invention may be effective in adult and pediatric oncology including in solid phase tumors/malignancies, locally advanced tumors, human soft tissue sarcomas, metastatic cancer, including lymphatic metastases, blood cell malignancies including multiple myeloma, acute and chronic leukemias, and lymphomas, head and neck cancers including mouth cancer, larynx cancer and thyroid cancer, lung cancers including small cell carcinoma and non-small cell cancers, breast cancers including small cell carcinoma and ductal carcinoma, gastrointestinal cancers including esophageal cancer, stomach cancer, colon cancer, colorectal cancer and polyps associated with colorectal neoplasia, pancreatic cancers, liver cancer, urologic cancers including bladder cancer and prostate cancer, malignancies of the female genital tract including ovarian carcinoma, uterine (including endometrial) cancers, and solid tumor in the ovarian follicle, kidney cancers including renal cell carcinoma, brain cancers including intrinsic brain tumors, neuroblastoma, astrocytic brain tumors, gliomas, metastatic tumor cell invasion in the central nervous system, bone cancers including osteomas, skin cancers including malignant melanoma, tumor progression of human skin keratinocytes, squamous cell carcinoma, basal cell carcinoma, hemangiopericytoma and Karposi's sarcoma.

[0223] Polypeptides, polynucleotides, or modulators of polypeptides of the invention (including inhibitors and stimulators of the biological activity of the polypeptide of the invention) may be administered to treat cancer. Therapeutic compositions can be administered in therapeutically effective dosages alone or in combination with adjuvant cancer therapy such as surgery, chemotherapy, radiotherapy, thermotherapy, and laser therapy, and may provide a beneficial effect, e.g. reducing tumor size, slowing rate of tumor growth, inhibiting metastasis, or otherwise improving overall clinical condition, without necessarily eradicating the cancer.

[0224] The composition can also be administered in therapeutically effective amounts as a portion of an anti-cancer cocktail. An anti-cancer cocktail is a mixture of the polypeptide or modulator of the invention with one or more anti-cancer drugs in addition to a pharmaceutically acceptable carrier for delivery. The use of anti-cancer cocktails as a cancer treatment is routine. Anti-cancer drugs that are well known in the art and can be used as a treatment in combination with the polypeptide or modulator of the invention include: Actinomycin D, Aminoglutethimide, Asparaginase, Bleomycin, Busulfan, Carboplatin, Carnustine, Chlorambucil, Cisplatin (cis-DDP), Cyclophosphamide, Cytarabine HCI (Cytosine arabinoside), Dacarbazine, Dactinomycin, Daunorubicin HCl, Doxorubicin HCl, Estramustine phosphate sodium, Etoposide (V16-213), Floxuridine, 5-Fluorouracil (5-Fu), Flutamide, Hydroxyurea (hydroxycarbamide), Ifosfamide, Interferon Alpha-2a, Interferon Alpha-2b, Leuprolide acetate (LHRH-releasing factor analog), Lomustine, Mechlorethamine HC1 (nitrogen mustard), Melphalan, Mercaptopurine, Mesna, Methotrexate (MTX), Mitomycin, Mitoxantrone HCl, Octreotide, Plicamycin, Procarbazine HCl, Streptozocin, Tamoxifen citrate, Thioguanine, Thiotepa, Vinblastine sulfate, Vincristine sulfate, Amsacrine, Azacitidine, Hexamethylmelanine, Interleukin-2, Mitoguazone, Pentostatin, Semustine, Teniposide, and Vindesine sulfate.

[0225] In addition, therapeutic compositions of the invention may be used for prophylactic treatment of cancer. There are hereditary conditions and/or environmental situations (e.g. exposure to carcinogens) known in the art that predispose an individual to developing cancers. Under these circumstances, it may be beneficial to treat these individuals with therapeutically effective doses of the polypeptide of the invention to reduce the risk of developing cancers.

[0226] In vitro models can be used to determine the effective doses of the polypeptide of the invention as a potential cancer treatment. These in vitro models include proliferation assays of cultured tumor cells, growth of cultured tumor cells in soft agar (see Freshney, (1987) Culture of Animal Cells: A Manual of Basic Technique, Wily-Liss, New York, N.Y. Ch 18 and Ch 21), tumor systems in nude mice as described in Giovanella et al., J. Natl. Can. Inst., 52: 921-30 (1974), mobility and invasive potential of tumor cells in Boyden Chamber assays as described in Piington et al., Anticancer Res., 17: 4107-9 (1997), and angiogenesis assays such as induction of vascularization of the chick chorioallantoic membrane or induction of vascular endothelial cell migration as described in Ribatta et al., Intl. J. Dev. Biol., 40: 1189-97 (1999) and Li et al., Clin. Exp. Metastasis, 17:423-9 (1999), respectively. Suitable tumor cells lines are available, e.g. from American Type Tissue Culture Collection catalogs.

[0227] 4.10.12 Receptor/Ligand Activity

[0228] A polypeptide of the present invention may also demonstrate activity as receptor, receptor ligand or inhibitor or agonist of receptor/ligand interactions. A polynucleotide of the invention can encode a polypeptide exhibiting such characteristics. Examples of such receptors and ligands include, without limitation, cytokine receptors and their ligands, receptor kinases and their ligands, receptor phosphatases and their ligands, receptors involved in cell-cell interactions and their ligands (including without limitation, cellular adhesion molecules (such as selectins, integrins and their ligands) and receptor/ligand pairs involved in antigen presentation, antigen recognition and development of cellular and humoral immune responses. Receptors and ligands are also useful for screening of potential peptide or small molecule inhibitors of the relevant receptor/ligand interaction. A protein of the present invention (including, without limitation, fragments of receptors and ligands) may themselves be useful as inhibitors of receptor/ligand interactions.

[0229] The activity of a polypeptide of the invention may, among other means, be measured by the following methods:

[0230] Suitable assays for receptor-ligand activity include without limitation those described in: Current Protocols in lmunology, Ed by J. E. Coligan, A. M. Kruisbeek, D. H. Margulies, E. M. Shevach, W. Strober, Pub. Greene Publishing Associates and Wiley- Interscience (Chapter 7.28, Measurement of Cellular Adhesion under static conditions 7.28.1-7.28.22), Takai et al., Proc. Natl. Acad. Sci. USA 84:6864-6868, 1987; Bierer et al., J. Exp. Med. 168:1145-1156, 1988; Rosenstein et al., J. Exp. Med. 169:149-160 1989; Stoltenborg et al., J. Immunol. Methods 175:59-68, 1994; Stitt et al., Cell 80:661-670, 1995,

[0231] By way of example, the polypeptides of the invention may be used as a receptor for a ligand(s) thereby transmitting the biological activity of that ligand(s). Ligands may be identified through binding assays, affinity chromatography, dihybrid screening assays, BIAcore assays, gel overlay assays, or other methods known in the art.

[0232] Studies characterizing drugs or proteins as agonist or antagonist or partial agonists or a partial antagonist require the use of other proteins as competing ligands. The polypeptides of the present invention or ligand(s) thereof may be labeled by being coupled to radioisotopes, colorimetric molecules or a toxin molecules by conventional methods. (“Guide to Protein Purification” Murray P. Deutscher (ed) Methods in Enzymology Vol. 182 (1990) Academic Press, Inc. San Diego). Examples of radioisotopes include, but are not limited to, tritium and carbon-14 , Examples of colorimetric molecules include, but are not limited to, fluorescent molecules such as fluorescamine, or rhodaimine or other calorimetric molecules. Examples of toxins include, but are not limited, to ricin.

[0233] 4.10.13 Drug Screening

[0234] This invention is particularly useful for screening chemical compounds by using the novel polypeptides or binding fragments thereof in any of a variety of drug screening techniques. The polypeptides or fragments employed in such a test may either be free in solution, affixed to a solid support, borne on a cell surface or located intracellularly. One method of drug screening utilizes eukaryotic or prokaryotic host cells which are stably transformed with recombinant nucleic acids expressing the polypeptide or a fragment thereof. Drugs are screened against such transformed cells in competitive binding assays. Such cells, either in viable or fixed form, can be used for standard binding assays. One may measure, for example, the formation of complexes between polypeptides of the invention or fragments and the agent being tested or examine the diminution in complex formation between the novel polypeptides and an appropriate cell line, which are well known in the art.

[0235] Sources for test compounds that may be screened for ability to bind to or modulate (i.e., increase or decrease) the activity of polypeptides of the invention include (1) inorganic and organic chemical libraries, (2) natural product libraries, and (3) combinatorial libraries comprised of either random or mimetic peptides, oligonucleotides or organic molecules.

[0236] Chemical libraries may be readily synthesized or purchased from a number of commercial sources, and may include structural analogs of known compounds or compounds that are identified as “hits” or “leads” via natural product screening.

[0237] The sources of natural product libraries are microorganisms (including bacteria and fungi), animals, plants or other vegetation, or marine organisms, and libraries of mixtures for screening may be created by: (1) fermentation and extraction of broths from soil, plant or marine microorganisms or (2) extraction of the organisms themselves. Natural product libraries include polyketides, non-ribosomal peptides, and (non-naturally occurring) variants thereof. For a review, see Science 282:63-68 (1998).

[0238] Combinatorial libraries are composed of large numbers of peptides, oligonucleotides or organic compounds and can be readily prepared by traditional automated synthesis methods, PCR, cloning or proprietary synthetic methods. Of particular interest are peptide and oligonucleotide combinatorial libraries. Still other libraries of interest include peptide, protein, peptidomimetic, multiparallel synthetic collection, recombinatorial, and polypeptide libraries. For a review of combinatorial chemistry and libraries created therefrom, see Myers, Curr. Opin. Biotechnol, 8:701-707 (1997). For reviews and examples of peptidomimetic libraries, see Al-Obeidi et al., Mol. Biotechnol, 9(3):205-23 (1998); Hruby et al., Curr Opin Chem Biol, 1(1):114-119 (1997); Domer et al., Bioorg Med Chem, 4(5):709-15 (1996) (alkylated dipeptides).

[0239] Identification of modulators through use of the various libraries described herein permits modification of the candidate “hit” (or “lead”) to optimize the capacity of the “hit” to bind a polypeptide of the invention. The molecules identified in the binding assay are then tested for antagonist or agonist activity in in vivo tissue culture or animal models that are well known in the art. In brief, the molecules are titrated into a plurality of cell cultures or animals and then tested for either cell/animal death or prolonged survival of the animal/cells.

[0240] The binding molecules thus identified may be complexed with toxins, e.g., ricin or cholera, or with other compounds that are toxic to cells such as radioisotopes. The toxin-binding molecule complex is then targeted to a tumor or other cell by the specificity of the binding molecule for a polypeptide of the invention. Alternatively, the binding molecules may be complexed with imaging agents for targeting and imaging purposes.

[0241] 4.10.14 Assay for Recceptor Activity

[0242] The invention also provides methods to detect specific binding of a polypeptide e.g. a ligand or a receptor. The art provides numerous assays particularly useful for identifying previously unknown binding partners for receptor polypeptides of the invention. For example, expression cloning using mammalian or bacterial cells, or dihybrid screening assays can be used to identify polynucleotides encoding binding partners. As another example, affinity chromatography with the appropriate immobilized polypeptide of the invention can be used to isolate polypeptides that recognize and bind polypeptides of the invention. There are a number of different libraries used for the identification of compounds, and in particular small molecules, that modulate (i.e., increase or decrease) biological activity of a polypeptide of the invention. Ligands for receptor polypeptides of the invention can also be identified by adding exogenous ligands, or cocktails of ligands to two cells populations that are genetically identical except for the expression of the receptor of the invention: one cell population expresses the receptor of the invention whereas the other does not. The response of the two cell populations to the addition of ligands(s) are then compared. Alternatively, an expression library can be co-expressed with the polypeptide of the invention in cells and assayed for an autocrine response to identify potential ligand(s). As still another example, BIAcore assays, gel overlay assays, or other methods known in the art can be used to identify binding partner polypeptides, including, (1) organic and inorganic chemical libraries, (2) natural product libraries, and (3) combinatorial libraries comprised of random peptides, oligonucleotides or organic molecules.

[0243] The role of downstream intracellular signaling molecules in the signaling cascade of the polypeptide of the invention can be determined. For example, a chimeric protein in which the cytoplasmic domain of the polypeptide of the invention is fused to the extracellular portion of a protein, whose ligand has been identified, is produced in a host cell. The cell is then incubated with the ligand specific for the extracellular portion of the chimeric protein, thereby activating the chimeric receptor. Known downstream proteins involved in intracellular signaling can then be assayed for expected modifications i.e. phosphorylation. Other methods known to those in the art can also be used to identify signaling molecules involved in receptor activity.

[0244] 4.10.15 Anti-Inflammatory Activity

[0245] Compositions of the present invention may also exhibit anti-inflammatory activity. The anti-inflammatory activity may be achieved by providing a stimulus to cells involved in the inflammatory response, by inhibiting or promoting cell-cell interactions (such as, for example, cell adhesion), by inhibiting or promoting chemotaxis of cells involved in the inflammatory process, inhibiting or promoting cell extravasation, or by stimulating or suppressing production of other factors which more directly inhibit or promote an inflammatory response. Compositions with such activities can be used to treat inflammatory conditions including chronic or acute conditions), including without limitation intimation associated with infection (such as septic shock, sepsis or systemic inflammatory response syndrome (SIRS)), ischemia-reperfusion injury, endotoxin lethality, arthritis, complement-mediated hyperacute rejection, nephritis, cytokine or chemokine-induced lung injury, inflammatory bowel disease, Crohn's disease or resulting from over production of cytokines such as TNF or IL-1. Compositions of the invention may also be useful to treat anaphylaxis and hypersensitivity to an antigenic substance or material. Compositions of this invention may be utiiz to prevent or treat conditions such as, but not limited to, sepsis, acute pancreatitis, endotoxin shock, cytokine induced shock, rheumatoid arthritis, chronic inflammatory arthritis, pancreatic cell damage from diabetes mellitus type 1, graft versus host disease, inflammatory bowel disease, inflammation associated with pulmonary disease, other autoimmune disease or inflammatory disease, an antiproliferative agent such as for acute or chronic mylegenous leukemia or in the prevention of premature labor secondary to intrauterine infections.

[0246] 4.10.16 Leukemias

[0247] Leukemias and related disorders may be treated or prevented by administration of a therapeutic that promotes or inhibits function of the polynucleotides and/or polypeptides of the invention. Such leukemias and related disorders include but are not limited to acute leukemia, acute lymphocytic leukemia, acute myelocytic leukemia, myeloblastic, promyelocytic, myelomonocytic, monocytic, erythroleukemia, chronic leukemia, chronic myelocytic (granulocytic) leukemia and chronic lymphocytic leukemia (for a review of such disorders, see Fisbman et al., 1985, Medicine, 2d Ed, J. B. Lippincott Co., Philadelphia).

[0248] 4.10.17 Nervous System Disordes

[0249] Nervous system disorders, involving cell types which can be tested for efficacy of intervention with compounds that modulate the activity of the polynucleotides and/or polypeptides of the invention, and which can be treated upon thus observing an indication of therapeutic utility, include but are not limited to nervous system injuries, and diseases or disorders which result in either a disconnection of axons, a diminution or degeneration of neurons, or demyelination. Nervous system lesions which may be treated in a patient (including human and non-human mammalian patients) according to the invention include but are not limited to the following lesions of either the central (including spinal cord, brain) or peripheral nervous systems:

[0250] (i) traumatic lesions, including lesions caused by physical injury or associated with surgery, for example, lesions which sever a portion of the nervous system, or compression injuries;

[0251] (ii) ischemic lesions, in which a lack of oxygen in a portion of the nervous system results in neuronal injury or death, including cerebral infarction or ischemia, or spinal cord infarction or ischemia;

[0252] (iii) infectious lesions, in which a portion of the nervous system is destroyed or injured as a result of infection, for example, by an abscess or associated with infection by human immunodeficiency virus, herpes zoster, or herpes simplex virus or with Lyme disease, tuberculosis, syphilis;

[0253] (iv) degenerative lesions, in which a portion of the nervous system is destroyed or injured as a result of a degenerative process including but not limited to degeneration associated with Parkinson's disease, Alzheimer's disease, Huntington's chorea, or amyotrophic lateral sclerosis;

[0254] (v) lesions associated with nutritional diseases or disorders, in which a portion of the nervous system is destroyed or injured by a nutritional disorder or disorder of metabolism including but not limited to, vitamin B12 deficiency, folic acid deficiency, Wernicke disease, tobacco-alcohol amblyopia, Marchiafava-Bignami disease (prirary degeneration of the corpus callosum), and alcoholic cerebellar degeneration;

[0255] (vi) neurological lesions associated with systemic diseases including but not limited to diabetes (diabetic neuropathy, Bell's palsy), systemic lupus erythematosus, carcinoma, or sarcoidosis;

[0256] (vii) lesions caused by toxic substances including alcohol, lead, or particular neurotoxins; and

[0257] (viii) demyelinated lesions in which a portion of the nervous system is destroyed or injured by a demyelinating disease including but not limited to multiple sclerosis, human immunodeficiency virus-associated myelopathy, transverse myelopathy or various etiologies, progressive multifocal leukoencephalopathy, and central pontine myelinolysis.

[0258] Therapeutics which are useful according to the invention for treatment of a nervous system disorder may be selected by testing for biological activity in promoting the survival or differentiation of neurons. For example, and not by way of limitation, therapeutics which elicit any of the following effects may be useful according to the invention:

[0259] (i) increased survival time of neurons in culture;

[0260] (ii) increased sprouting of neurons in culture or in vivo;

[0261] (iii) increased production of a neuron-associated molecule in culture or in vivo, e.g., choline acetyltransferase or acetylcholinesterase with respect to motor neurons; or

[0262] (iv) decreased symptoms of neuron dysfunction in vivo.

[0263] Such effects may be measured by any method known in the art. In preferred, non-limiting embodiments, increased survival of neurons may be measured by the method set forth in Arakawa et al. (1990, J. Neurosci. 10:3507-3515); increased sprouting of neurons may be detected by methods set forth in Pestronk et al. (1980, Exp. Neurol. 70:65-82) or Brown et al. (1981, Ann. Rev. Neurosci. 4:1742); increased production of neuron-associated molecules may be measured by bioassay, enzymatic assay, antibody binding, Northern blot assay, etc., depending on the molecule to be measured; and motor neuron dysfunction may be measured by assessing the physical manifestation of motor neuron disorder, e.g., weakness, motor neuron conduction velocity, or functional disability.

[0264] In specific embodiments, motor neuron disorders that may be treated according to the invention include but are not limited to disorders such as infarction, infection, exposure to toxin, trauma, surgical damage, degenerative disease or malignancy that may affect motor neurons as well as other components of the nervous system, as well as disorders that selectively affect neurons such as amyotrophic lateral sclerosis, and including but not limited to progressive spinal muscular atrophy, progressive bulbar palsy, primary lateral sclerosis, infantile and juvenile muscular atrophy, progressive bulbar paralysis of childhood (Fazio-Londe syndrome), poliomyelitis and the post polio syndrome, and Hereditary Motorsensory Neuropathy (Charcot-Marie-Tooth Disease).

[0265] 4.10.18 Other Activities

[0266] A polypeptide of the invention may also exhibit one or more of the following additional activities or effects: inhibiting the growth, infection or function of, or killing, infectious agents, including, without limitation, bacteria, viruses, fungi and other parasites; effecting (suppressing or enhancing) bodily characteristics, including, without limitation, height, weight, hair coloreye color, skin, fat to lean ratio or other tissue pigmentation, or organ or body part size or shape (such as, for example, breast augmentation or diminution, change in bone form or shape); effecting biorhythms or circadian cycles or rhythms; effecting the fertility of male or female subjects; effecting the metabolism, catabolism, anabolism, processing, utilization, storage or elimination of dietary fat, lipid, protein, carbohydrate, vitamins, minerals, co-factors or other nutritional factors or component(s); effecting behavioral characteristics, including, without limitation, appetite, libido, stress, cognition (including cognitive disorders), depression (including depressive disorders) and violent behaviors; providing analgesic effects or other pain reducing effects; promoting differentiation and growth of embryonic stem cells in lineages other than hematopoietic lineages; hormonal or endocrine activity; in the case of enzymes, correcting deficiencies of the enzyme and treating deficiency-related diseases; treatment of hyperproliferative disorders (such as, for example, psoriasis); immunoglobulin-like activity (such as, for example, the ability to bind antigens or complement); and the ability to act as an antigen in a vaccine composition to raise an immune response against such protein or another material or entity which is cross-reactive with such protein.

[0267] 4.10.19 Identification of Polymorphims

[0268] The demonstration of polymorphisms makes possible the identification of such polymorphisms in human subjects and the pharmacogenetic use of this information for diagnosis and treatment. Such polymorphisms may be associated with, e.g., differential predisposition or susceptibility to various disease states (such as disorders involving inflammation or immune response) or a differential response to drug administration, and this genetic information can be used to tailor preventive or therapeutic treatment appropriately. For example, the existence of a polymorphism associated with a predisposition to inflammation or autoimmune disease makes possible the diagnosis of this condition in humans by identifying the presence of the polymorphism.

[0269] Polymorphisms can be identified in a variety of ways known in the art which all generally involve obtaining a sample from a patient, analyzing DNA from the sample, optionally involving isolation or amplification of the DNA, and identifying the presence of the polymorphism in the DNA. For example, PCR may be used to amplify an appropriate fragment of genomic DNA which may then be sequenced. Alternatively, the DNA may be subjected to allele-specific oligonucleotide hybridization (in which appropriate oligonucleotides are hybridized to the DNA under conditions permitting detection of a single base mismatch) or to a single nucleotide extension assay (in which an oligonucleotide that hybridizes immediately adjacent to the position of the polymorphism is extended with one or more labeled nucleotides). In addition, traditional restriction fragment length polymorphism analysis (using restriction enzymes that provide differential digestion of the genomic DNA depending on the presence or absence of the polymorphism) may be performed. Arrays with nucleotide sequences of the present invention can be used to detect polymorphisms. The array can comprise modified nucleotide sequences of the present invention in order to detect the nucleotide sequences of the present invention. In the alternative, any one of the nucleotide sequences of the present invention can be placed on the array to detect changes from those sequences.

[0270] Alternatively a polymorphism resulting in a change in the amino acid sequence could also be detected by detecting a corresponding change in amino acid sequence of the protein, e.g., by an antibody specific to the variant sequence.

[0271] 4.10.20 Arthritritis and Inflammation

[0272] The immunosuppressive effects of the compositions of the invention against rheumatoid artbritis is determined in an experimental animal model system. The experimental model system is adjuvant induced arthritis in rats, and the protocol is described by J. Holoshitz, et at., 1983, Science, 219:56, or by B. Waksman et al., 1963, Int. Arch. Allergy Appl. Immunol., 23:129. Induction of the disease can be caused by a single injection, generally intradermally, of a suspension of killed Mycobacterium tuberculosis in complete Freund's adjuvant (CFA). The route of injection can vary, but rats may be injected at the base of the tail with an adjuvant mixture. The polypeptide is administered in phosphate buffered solution (PBS) at a dose of about 1-5 mg/kg. The control consists of administering PBS only.

[0273] The procedure for testing the effects of the test compound would consist of intradermally injecting killed Mycobacterium tuberculosis in CFA followed by immediately administering the test compound and subsequent treatment every other day until day 24. At 14, 15, 18, 20, 22, and 24 days after injection of Mycobacterium CFA, an overall arthritis score may be obtained as described by J. Holoskitz above. An analysis of the data would reveal that the test compound would have a dramatic affect on the swelling of the joints as measured by a decrease of the arthritis score.

### 4.11 Therapeutic Methods

[0274] The compositions (including polypeptide fragments, analogs, variants and antibodies or other binding partners or modulators including antisense polynucleotides) of the invention have numerous applications in a variety of therapeutic methods. Examples of therapeutic applications include, but are not limited to, those exemplified herein.

[0275] 4.11.1 Example

[0276] One embodiment of the invention is the administration of an effective amount of the polypeptides or other composition of the invention to individuals affected by a disease or disorder that can be modulated by regulating the peptides of the invention. While the mode of administration is not particularly important, parenteral administration is preferred. An exemplary mode of administration is to deliver an intravenous bolus. The dosage of the polypeptides or other composition of the invention will normally be determined by the prescribing physician. It is to be expected that the dosage will vary according to the age, weight, condition and response of the individual patient. Typically, the amount of polypeptide administered per dose will be in the range of about 0.01 μg/kg to 100 mg/kg of body weight, with the preferred dose being about 0.1 μg/kg to 10 mg/kg of patient body weight. For parenteral administration, polypeptides of the invention will be formulated in an injectable form combined with a pharmaceutically acceptable parenteral vehicle. Such vehicles are well known in the art and examples include water, saline, Ringer's solution, dextrose solution, and solutions consisting of small amounts of the human serum albumin. The vehicle may contain minor amounts of additives that maintain the isotonicity and stability of the polypeptide or other active ingredient. The preparation of such solutions is within the skill of the art.

### 4.12 Pharmaceutical Formulations and Routes of Administration

[0277] A protein or other composition of the present invention (from whatever source derived, including without limitation from recombinant and non-recombinant sources and including antibodies and other binding partners of the polypeptides of the invention) may be administered to a patient in need, by itself, or in pharmaceutical compositions where it is mixed with suitable carriers or excipient(s) at doses to treat or ameliorate a variety of disorders. Such a composition may optionally contain (in addition to protein or other active ingredient and a carrier) diluents, fillers, salts, buffers, stabilizers, solubilizers, and other materials well known in the art. The term “pharmaceutically acceptable” means a non-toxic material that does not interfere with the effectiveness of the biological activity of the active ingredient(s). The characteristics of the carrier will depend on the route of administration. The pharmaceutical composition of the invention may also contain cytokines, lymphokines, or other hematopoietic factors such as M-CSF, GM-CSF, TNF, IL-1, IL-2, IL-3, IL-4, IL-5, IL-6, IL-7, IL-8, IL-9, IL-10, IL-11, IL-12, IL-13, IL-14, IL-15, IFN, TNF0, TNF1, TNF2, G-CSF, Meg-CSF, thrombopoietin, stem cell factor, and erythropoietin. In furler compositions, proteins of the invention may be combined with other agents beneficial to the treatment of the disease or disorder in question. These agents include various growth factors such as epidermal growth factor (EGF), platelet-derived growth factor (PDGF), transforming growth factors (TGF-αand TGF-β), insulin-like growth factor (IGF), as well as cytokines described herein.

[0278] The pharmaceutical composition may father contain other agents which either enhance the activity of the protein or other active ingredient or complement its activity or use in treatment. Such additional factors and/or agents may be included in the pharmaceutical composition to produce a synergistic effect with protein or other active ingredient of the invention, or to minimize side effects. Conversely, protein or other active ingredient of the present invention may be included in formulations of the particular clotting factor, cytokine, lymphokine, other hematopoietic factor, thrombolytic or anti-thrombotic factor, or anti-inflanmmatory agent to minimize side effects of the clotting factor, cytokine, lymphokine, other hematopoietic factor, thrombolytic or anti-thrombotic factor, or anti-inflammatory agent (such as IL-1Ra, IL-1 Hy1, IL-1 Hy2, anti-TNF, corticosteroids, immunosuppressive agents). A protein of the present invention may be active in multimers (e.g., heterodimers or homodimers) or complexes with itself or other proteins. As a result, pharmaceutical compositions of the invention may comprise a protein of the invention in such multimeric or complexed form.

[0279] As an alternative to being included in a pharmaceutical composition of the invention including a first protein, a second protein or a therapeutic agent may be concurrently administered with the first protein (e.g., at the same time, or at differing times provided that therapeutic concentrations of the combination of agents is achieved at the treatment site). Techniques for formulation and administration of the compounds of the instant application may be found in “Remington's Pharmaceutical Sciences,” Mack Publishing Co., Easton, Pa., latest edition. A therapeutically effective dose fer refers to that amount of the compound sufficient to result in amelioration of symptoms, e.g., treatment, healing, prevention or amelioration of the relevant medical condition, or an increase in rate of treatment, healing, prevention or amelioration of such conditions. When applied to an individual active ingredient, administered alone, a therapeutically effective dose refers to that ingredient alone. When applied to a combination, a therapeutically effective dose refers to combined amounts of the active ingredients that result in the therapeutic effect, whether administered in combination, serially or simultaneously.

[0280] In practicing the method of treatment or use of the present invention, a therapeutically effective amount of protein or other active ingredient of the present invention is administered to a mammal having a condition to be treated. Protein or other active ingredient of the present invention may be administered in accordance with the method of the invention either alone or in combination with other therapies such as treatments employing cytokines, lymphokines or other hematopoietic factors. When co-administered with one or more cytokines, lymphokines or other hematopoietic factors, protein or other active ingredient of the present invention may be administered either simultaneously with the cytokine(s), lymphokine(s), other hematopoietic factor(s), thrombolytic or anti-thrombotic factors, or sequentially. If administered sequentially, the attending physician will decide on the appropriate sequence of administerng protein or other active ingredient of the present invention in combination with cytokine(s), lymphokine(s), other hematopoietic factor(s), thrombolytic or anti-thrombotic factors.

[0281] 4.12.1 Routes of Administration

[0282] Suitable routes of administration may, for example, include oral, rectal, transmucosal, or intestinal administration; parenteral delivery, including intramuscular, subcutaneous, intramedullary injections, as well as intrathecal, direct intraventricular, intravenous, intraperitoneal, intranasal, or intraocular injections. Administration of protein or other active ingredient of the present invention used in the pharmaceutical composition or to practice the method of the present invention can be carried out in a variety of conventional ways, such as oral ingestion, inhalation, topical application or cutaneous, subcutaneous, intraperitoneal, parenteral or intravenous injection. Intravenous administration to the patient is preferred.

[0283] Alternately, one may administer the compound in a local rather than systemic manner, for example, via injection of the compound directly into a arthritic joints or in fibrotic tissue, often in a depot or sustained release formulation. In order to prevent the scarring process frequently occurring as complication of glaucoma surgery, the compounds may be administered topically, for example, as eye drops. Furthermore, one may administer the drug in a targeted drug delivery system, for example, in a liposome coated with a specific antibody, targeting, for example, arthritic or fibrotic tissue. The liposomes will be targeted to and taken up selectively by the afflicted tissue.

[0284] The polypeptides of the invention are administered by any route that delivers an effective dosage to the desired site of action. The determination of a suitable route of administration and an effective dosage for a particular indication is within the level of skill in the art. Preferably for wound treatment, one administers the therapeutic compound directly to the site. Suitable dosage ranges for the polypeptides of the invention can be extrapolated from these dosages or from similar studies in appropriate animal models. Dosages can then be adjusted as necessary by the clincian to provide maximal therapeutic benefit.

[0285] 4.12.2 Compositions/Formulations

[0286] Pharmaceutical compositions for use in accordance with the present invention thus may be formulated in a conventional manner using one or more physiologically acceptable carriers comprising excipients and auxiliaries which facilitate processing of the active compounds into preparations which can be used pharmaceutically. These pharmaceutical compositions may be manufactured in a manner that is itself known, e.g., by means of conventional mixing, dissolving, granulating, dragee-making, levigating, emulsifying, encapsulating, entrapping or lyophilizing processes. Proper formulation is dependent upon the route of administration chosen. When a therapeutically effective amount of protein or other active ingredient of the present invention is administered orally, protein or other active ingredient of the present invention will be in the form of a tablet, capsule, powder, solution or elixir. When administered in tablet form, the pharmaceutical composition of the invention may additionally contain a solid carrier such as a gelatin or an adjuvant. The tablet, capsule, and powder contain from about 5 to 95% protein or other active ingredient of the present invention, and preferably from about 25 to 90% protein or other active ingredient of the present invention. When administered in liquid form, a liquid carrier such as water, petroleum, oils of animal or plant origin such as peanut oil, mineral oil, soybean oil, or sesame oil, or synthetic oils may be added. The liquid form of the pharmaceutical composition may further contain physiological saline solution, dextrose or other saccharide solution, or glycols such as ethylene glycol, propylene glycol or polyethylene glycol. When administered in liquid form, the pharmaceutical composition contains from about 0.5 to 90% by weight of protein or other active ingredient of the present invention, and preferably from about 1 to 50% protein or other active ingredient of the present invention.

[0287] When a therapeutically effective amount of protein or other active ingredient of the present invention is administered by intravenous, cutaneous or subcutaneous injection, protein or other active ingredient of the present invention will be in the form of a pyrdgen-free, parenterally acceptable aqueous solution. The preparation of such parenterally acceptable protein or other active ingredient solutions, having due regard to pH, isotonicity, stability, and the like, is within the skill in the art. A preferred pharmaceutical composition for intravenous, cutaneous, or subcutaneous injection should contain, in addition to protein or other active ingredient of the present invention, an isotonic vehicle such as Sodium Chloride Injection, Ringer's Injection, Dextrose Injection, Dextrose and Sodium Chloride Injection, Lactated Ringer's Injection, or other vehicle as known in the art. The pharmaceutical composition of the present invention may also contain stabilizers, preservatives, buffers, antioxidants, or other additives known to those of skill in the art. For injection, the agents of the invention may be formulated in aqueous solutions, preferably in physiologically compatible buffers such as Hanks's solution, Ringer's solution, or physiological saline buffer. For transmucosal administration, penetrants appropriate to the barrier to be permeated are used in the formulation. Such penetrants are generally known in the art.

[0288] For oral administration, the compounds can be formulated readily by combining the active compounds with pharmaceutically acceptable carriers well known in the art. Such carriers enable the compounds of the invention to be formulated as tablets, pills, dragees, capsules, liquids, gels, syrups, slurries, suspensions and the like, for oral ingestion by a patient to be treated. Pharmaceutical preparations for oral use can be obtained from a solid excipient, optionally grinding a resulting mixture, and processing the mixture of granules, after adding suitable auxiliaries, if desired, to obtain tablets or dragee cores. Suitable excipients are, in particular, fillers such as sugars, including lactose, sucrose, mannitol, or sorbitol; cellulose preparations such as, for example, maize starch, wheat starch, rice starch, potato starch, gelatin, gum tragacanth, methyl cellulose, hydroxypropylmethyl-cellulose, sodium carboxymethylcellulose, and/or polyvinylpyrrolidone (PVP). If desired, disintegrating agents may be added, such as the cross-linked polyvinyl pyrrolidone, agar, or alginic acid or a salt thereof such as sodium alginate. Dragee cores are provided with suitable coatings. For this purpose, concentrated sugar solutions may be used, which may optionally contain gum arabic, talc, polyvinyl pyrrolidone, carbopol gel, polyethylene glycol, and/or titanium dioxide, lacquer solutions, and suitable organic solvents or solvent mixtures. Dyestuffs or pigments may be added to the tablets or dragee coatings for identification or to characterize different combinations of active compound doses.

[0289] Pharmaceutical preparations which can be used orally include push-fit capsules made of gelatin, as well as soft, sealed capsules made of gelatin and a plasticizer, such as glycerol or sorbitol. The push-fit capsules can contain the active ingredients in admixture with filler such as lactose, binders such as starches, and/or lubricants such as talc or magnesium stearate and, optionally, stabilizers. In soft capsules, the active compounds may be dissolved or suspended in suitable liquids, such as fatty oils, liquid parain, or liquid polyethylene glycols. In addition, stabilizers may be added. All formulations for oral adni ation should be in dosages suitable for such administration. For buccal administration, the compositions may take the form of tablets or lozenges formulated in conventional manner.

[0290] For administration by inhalation, the compounds for use according to the present invention are conveniently delivered in the form of an aerosol spray presentation from pressurized packs or a nebuliser, with the use of a suitable propellant, e.g., dichlorodifluoromethane, trichlorofluoromethane, dichlorotetrafluoroethane, carbon dioxide or other suitable gas. In the case of a pressurized aerosol the dosage unit may be determined by providing a valve to deliver a metered amount Capsules and cartridges of, e.g. gelatin for use in an inhaler or insufflator may be formulated containing a powder mix of the compound and a suitable powder base such as lactose or starch. The compounds may be formulated for parenteral administration by injection, e.g., by bolus injection or continuous infusion. Formulations for injection may be presented in unit dosage form, e.g., in ampules or in multi-dose containers, with an added preservative. The compositions may take such forms as suspensions, solutions or emulsions in oily or aqueous vehicles, and may contain fornulatory agents such as suspending, stabilizing and/or dispersing agents.

[0291] Pharmaceutical formulations for parenteral administration include aqueous solutions of the active compounds in water-soluble form Additionally, suspensions of the active compounds may be prepared as appropriate oily injection suspensions. Suitable lipophilic solvents or vehicles include fatty oils such as sesame oil, or synthetic fatty acid esters, such as ethyl oleate or triglycerides, or liposomes. Aqueous injection suspensions may contain substances which increase the viscosity of the suspension, such as sodium carboxymethyl cellulose, sorbitol, or dextran. Optionally, the suspension may also contain suitable stabilizers or agents which increase the solubility of the compounds to allow for the preparation of highly concentrated solutions. Alternatively, the active ingredient may be in powder form for constitution with a suitable vehicle, e.g., sterile pyrogen-free water, before use.

[0292] The compounds may also be formulated in rectal compositions such as suppositories or retention enemas, e.g., containing conventional suppository bases such as cocoa butter or other glycerides. In addition to the formulations described previously, the compounds may also be formulated as a depot preparation. Such long acting formulations may be administered by implantation (for example subcutaneously or intramuscularly) or by intramuscular injection. Thus, for example, the compounds may be formulated with suitable polymeric or hydrophobic materials (for example as an emulsion in an acceptable oil) or ion exchange resins, or as sparingly soluble derivatives, for example, as a sparingly soluble salt.

[0293] A pharmaceutical carrier for the hydrophobic compounds of the invention is a co-solvent system comprising benzyl alcohol, a nonpolar surfactant, a water-miscible organic polymer, and an aqueous phase. The co-solvent system may be the VPD co-solvent system. VPD is a solution of 3% w/v benzyl alcohol, 8% w/v of the nonpolar surfactant polysorbate 80, and 65% w/v polyethylene glycol 300, made up to volume in absolute ethanol. The VPD co-solvent system (VPD: 5W) consists of VPD diluted 1:1 with a 5% dextrose in water solution. This co-solvent system dissolves hydrophobic compounds well, and itself produces low toxicity upon systemic administration. Naturally, the proportions of a co-solvent system may be varied considerably without destroying its solubility and toxicity characteristics. Furthermore, the identity of the co-solvent components may be varied: for example, other low-toxicity nonpolar surfactants may be used instead of polysorbate 80; the fraction size of polyethylene glycol may be varied; other biocompatible polymers may replace polyethylene glycol, e.g. polyvinyl pyrrolidone; and other sugars or polysaccharides may substitute for dextrose. Alternatively, other delivery systems for hydrophobic pharmaceutical compounds may be employed. Liposomes and emulsions are well known examples of delivery vehicles or carriers for hydrophobic drugs. Certain organic solvents such as dimethylsulfoxide also may be employed, although usually at the cost of greater toxicity. Additionally, the compounds may be delivered using a sustained-release system, such as semipermeable matrices of solid hydrophobic polymers containing the therapeutic agent. Various types of sustained-release materials have been established and are well known by those skilled in the art. Sustained-release capsules may, depending on their chemical nature, release the compounds for a few weeks up to over 100 days. Depending on the chemical nature and the biological stability of the therapeutic reagent, additional strategies for protein or other active ingredient stabilization may be employed.

[0294] The pharmaceutical compositions also may comprise suitable solid or gel phase carriers or excipients. Examples of such carriers or excipients include but are not limited to calcium carbonate, calcium phosphate, various sugars, starches, cellulose derivatives, gelatin, and polymers such as polyethylene glycols. Many of the active ingredients of the invention may be provided as salts with pharmaceutically compatible counter ions. Such pharmaceutically acceptable base addition salts are those salts which retain the biological effectiveness and properties of the free acids and which are obtained by reaction with inorganic or organic bases such as sodium hydroxide, magnesium hydroxide, ammonia, trialkylamine, dialkylamine, monoalkylamine, dibasic amino acids, sodium acetate, potassium benzoate, triethanol amine and the like.

[0295] The pharmaceutical composition of the invention may be in the form of a complex of the protein(s) or other active ingredient(s) of present invention along with protein or peptide antigens. The protein and/or peptide antigen will deliver a stimulatory signal to both B and T lymphocytes. B lymphocytes will respond to antigen through their surface immunoglobulin receptor. T lymphocytes will respond to antigen through the T cell receptor (TCR) following presentation of the antigen by MHC proteins. MHC and structurally related proteins including those encoded by class I and class II MHC genes on host cells will serve to present the peptide antigen(s) to T lymphocytes. The antigen components could also be supplied as purified MHC-peptide complexes alone or with co-stimulatory molecules that can directly signal T cells. Alternatively antibodies able to bind surface immunoglobulin and other molecules on B cells as well as antibodies able to bind the TCR and other molecules on T cells can be combined with the pharmaceutical composition of the invention.

[0296] The pharmaceutical composition of the invention may be in the form of a liposome in which protein of the present invention is combined, in addition to other pharmaceutically acceptable carriers, with amphipathic agents such as lipids which exist in aggregated form as micelles, insoluble monolayers, liquid crystals, or lamellar layers in aqueous solution. Suitable lipids for liposomal formulation include, without limitation, monoglycerides, diglycerides, sulfatides, lysolecithins, phospholipids, saponin, bile acids, and the like. Preparation of such liposomal formulations is within the level of skill in the art, as disclosed, for example, in U.S. Pat. Nos. 4,235,871; 4,501,728; 4,837,028; and 4,737,323, all of which are incorporated herein by reference.

[0297] The amount of protein or other active ingredient of the present invention in the pharmaceutical composition of the present invention will depend upon the nature and severity of the condition being treated, and on the nature of prior treatments which the patient has undergone. Ultimately, the attending physician will decide the amount of protein or other active ingredient of the present invention with which to treat each individual patient. Initially, the attending physician will administer low doses of protein or other active ingredient of the present invention and observe the patient's response. Larger doses of protein or other active ingredient of the present invention may be administered until the optimal therapeutic effect is obtained for the patient, and at that point the dosage is not increased further. It is contemplated that the various pharmaceutical compositions used to practice the method of the present invention should contain about 0.01 μg to about 100 mg (preferably about 0.1 μg to about 10 mg, more preferably about 0.1 μg to about 1 mg) of protein or other active ingredient of the present invention per kg body weight. For compositions of the present invention which are useful for bone, cartilage, tendon or ligament regeneration, the therapeutic method includes administering the composition topically, systematically, or locally as an implant or device. When administered, the therapeutic composition for use in this invention is, of course, in a pyrogen-free, physiologically acceptable form. Further, the composition may desirably be encapsulated or injected in a viscous form for delivery to the site of bone, cartilage or tissue damage. Topical administration may be suitable for wound healing and tissue repair. Therapeutically useful agents other than a protein or other active ingredient of the invention which may also optionally be included in the composition as described above, may alternatively or additionally, be administered simultaneously or sequentially with the composition in the methods of the invention. Preferably for bone and/or cartilage formation, the composition would include a matrix capable of delivering the protein-containing or other active ingredient-containing composition to the site of bone and/or cartilage damage, providing a structure for the developing bone and cartilage and optimally capable of being resorbed into the body. Such matrices may be formed of materials presently in use for other implanted medical applications.

[0298] The choice of matrix material is based on biocompatibility, biodegradability, mechanical properties, cosmetic appearance and interface properties. The particular application of the compositions will define the appropriate formulation. Potential matrices for the compositions may be biodegradable and chemically defined calcium sulfate, tricalcium phosphate, hydroxyapatite, polylactic acid, polyglycolic acid and polyanhydrides. Other potential materials are biodegradable and biologically well-defined, such as bone or dermal collagen. Further matrices are comprised of pure proteins or extracellular matrix components. Other potential matrices are nonbiodegradable and chemically defined, such as sintered hydroxyapatite, bioglass, aluminates, or other ceramics. Matrices may be comprised of combinations of any of the above mentioned types of material, such as polylactic acid and hydroxyapatite or collagen and tricalcium phosphate. The bioceramics may be altered in composition, such as in calcium-aluminate-phosphate and processing to alter pore size, particle size, particle shape, and biodegradability. Presently preferred is a 50:50 (mole weight) copolymer of lactic acid and glycolic acid in the form of porous particles having diameters ranging from 150 to 800 microns. In some applications, it will be useful to utilize a sequestering agent, such as carboxymethyl cellulose or autologous blood clot, to prevent the protein compositions from disassociating from the matrix.

[0299] A preferred family of sequestering agents is cellulosic materials such as alkylcelluloses (including hydroxyalkylcelluloses), including methylcellulose, ethylcellulose, hydroxyethylcellulose, hydroxypropylcellulose, hydroxypropyl-methylcellulose, and carboxymethylcellulose, the most preferred being cationic salts of carboxymethylcellulose (CMC). Other preferred sequestering agents include hyaluronic acid, sodium alginate, poly(ethylene glycol), polyoxyethylene oxide, carboxyvinyl polymer and poly(vinyl alcohol). The amount of sequestering agent useful herein is 0.5-20 wt %, preferably 1-10 wt % based on total formulation weight, which represents the amount necessary to prevent desorption of the protein from the polymer matrix and to provide appropriate handling of the composition, yet not so much that the progenitor cells are prevented from infiltrating the matrix, thereby providing the protein the opportunity to assist the osteogenic activity of the progenitor cells. In further compositions, proteins or other active ingredients of the invention may be combined with other agents beneficial to the treatment of the bone and/or cartilage defect, wound, or tissue in question. These agents include various growth factors such as epidermal growth factor (EGF), platelet derived growth factor (PDGF), transforming growth factors (TGF-αand TGF-β), and insulin-like growth factor (IGF).

[0300] The therapeutic compositions are also presently valuable for veterinary applications. Particularly domestic animals and thoroughbred horses, in addition to humans, are desired patients for such treatment with proteins or other active ingredients of the present invention. The dosage regimen of a ptotein-containing pharmaceutical composition to be used in tissue regeneration will be determined by the attending physician considering various factors which modify the action of the proteins, e.g., amount of tissue weight desired to be formed, the site of damage, the condition of the damaged tissue, the size of a wound, type of damaged tissue (e.g., bone), the patients age, sex, and diet, the severity of any infection, time of administration and other clinical factors. The dosage may vary with the type of matrix used in the reconstitution and with inclusion of other proteins in the pharmaceutical composition. For example, the addition of other known growth factors, such as IGF I (insulin like growth factor I), to the final composition, may also effect the dosage. Progress can be monitored by periodic assessment of tissue/bone growth and/or repair, for example, X-rays, histomorphometric determinations and tetracycline labeling.

[0301] Polynucleotides of the present invention can also be used for gene therapy. Such polynucleotides can be introduced either in vivo or ex vivo into cells for expression in a mammalian subject. Polynucleotides of the invention may also be administered by other known methods for introduction of nucleic acid into a cell or organism (including, without limitation, in the form of viral vectors or naked DNA). Cells may also be cultured ex vivo in the presence of proteins of the present invention in order to proliferate or to produce a desired effect on or activity in such cells. Treated cells can then be introduced in vivo for therapeutic purposes.

[0302] 4.12.3 Efective Dosage

[0303] Pharmaceutical compositions suitable for use in the present invention include compositions wherein the active ingredients are contained in an effective amotit to achieve its intended purpose. More specifically, a therapeutically effective amount means an amount effective to prevent development of or to alleviate the existing symptoms of the subject being treated. Determination of the effective amount is well within the capability of those skilled in the art, especially in light of the detailed disclosure provided herein. For any compound used in the method of the invention, the therapeutically effective dose can be estimated initially from appropriate in vitro assays. For example, a dose can be formulated in animal models to achieve a circulating concentration range that can be used to more accurately determine useful doses in humans. For example, a dose can be formulated in animal models to achieve a circulating concentration range that includes the IC₅₀ as determined in cell culture (i.e., the concentration of the test compound which achieves a half-maximal inhibition of the protein's biological activity). Such information can be used to more accurately determine useful doses in humans.

[0304] A therapeutically effective dose refers to that amount of the compound that results in amelioration of symptoms or a prolongation of survival in a patient. Toxicity and therapeutic efficacy of such compounds can be determined by standard pharmaceutical procedures in cell cultures or experimental animals, e.g., for determining the LD₅₀ (the dose lethal to 50% of the population) and the ED₅₀ (the dose therapeutically effective in 50% of the population). The dose ratio between toxic and therapeutic effects is the therapeutic index and it can be expressed as the ratio between LD₅₀ and EDso. Compounds which exhibit high therapeutic indices are preferred. The data obtained from these cell culture assays and animal studies can be used in formulating a range of dosage for use in human. The dosage of such compounds lies preferably within a range of circulating concentrations that include the ED₅₀ with little or no toxicity. The dosage may vary within this range depending upon the dosage form employed and the route of administration utilized. The exact formulation, route of administration and dosage can be chosen by the individual physician in view of the patient's condition. See, e.g., Fingl et al., 1975, in “The Pharmacological Basis of Therapeutics”, Ch. 1 p. 1. Dosage amount and interval may be adjusted individually to provide plasma levels of the active moiety which are sufficient to maintain the desired effects, or minimal effective concentration (MEC). The MEC will vary for each compound but can be estimated from in vitro data. Dosages necessary to achieve the MEC will depend on individual characteristics and route of administration. However, HPLC assays or bioassays can be used to determine plasma concentrations.

[0305] Dosage intervals can also be determined using MEC value. Compounds should be administered using a regimen which maintains plasma levels above the MEC for 10-90% of the time, preferably between 30-90% and most preferably between 50-90%. In cases of local administration or selective uptake, the effective local concentration of the drug may not be related to plasma concentration.

[0306] An exemplary dosage regimen for polypeptides or other compositions of the invention will be in the range of about 0.01 μg/kg to 100 mg/kg of body weight daily, with the preferred dose being about 0.1 μg/kg to 25 mg/kg of patient body weight daily, varying in adults and children. Dosing may be once daily, or equivalent doses may be delivered at longer or shorter intervals.

[0307] The amount of composition administered will, of course, be dependent on the subject being treated, on the subject's age and weight, the severity of the affliction, the manner of administration and the judgment of the prescribing physician.

[0308] 4.12.4 Packaging

[0309] The compositions may, if desired, be presented in a pack or dispenser device which may contain one or more unit dosage forms containing the active ingredient. The pack may, for example, comprise metal or plastic foil, such as a blister pack. The pack or dispenser device may be accompanied by instructions for administration. Compositions comprising a compound of the invention formulated in a compatible pharmaceutical carrier may also be prepared, placed in an appropriate container, and labeled for treatment of an indicated condition.

### 4.13 Antibodies

[0310] Also included in the invention are antibodies to proteins, or fragments of proteins of the invention. The term “antibody” as used herein refers to immunoglobulin molecules and immunologically active portions of inmmunoglobulin (1g) molecules, i.e., molecules that contain an antigen binding site that specifically binds (immunoreacts with) an antigen. Such antibodies include, but are not limited to, polyclonal, monoclonal, chimeric, single chain, Fg&, Fab and F(ab)2 fragments, and an Fab expression library. In general, an antibody molecule obtained from humans relates to any of the classes IgG, IgM, IgA, IgE and IgD, which differ from one another by the nature of the heavy chain present in the molecule. Certain classes have subclasses as well, such as IgG₁, IgG₂, and others. Furthermore, in humans, the light chain may be a kappa chain or a lambda chain. Reference herein to antibodies includes a reference to all such classes, subclasses and types of human antibody species.

[0311] An isolated related protein of the invention may be intended to serve as an antigen, or a portion or fragment thereof, and additionally can be used as an immunogen to generate antibodies that immunospecifically bind the antigen, using standard techniques for polyclonal and monoclonal antibody preparation. The fir length protein can be used or, alternatively, the invention provides antigenic peptide fragments of the antigen for use as immunogens. An antigenic peptide fragment comprises at least 6 amino acid residues of the amino acid sequence of the full length protein, (for example the amino acid sequence shown in SEQ ID NO: 1351), and encompasses an epitope thereof such that an antibody raised against the peptide forms a specific immune complex with the full length protein or with any fragment that contains the epitope. Preferably, the antigenic peptide comprises at least 10 amino acid residues, or at least 15 amino acid residues, or at least 20 amino acid residues, or at least 30 amino acid residues. Preferred epitopes encompassed by the antigenic peptide are regions of the protein that are located on its surface; commonly these are hydrophilic regions.

[0312] In certain embodiments of the invention, at least one epitope encompassed by the antigenic peptide is a region of -related protein that is located on the surface of the protein, e.g., a hydrophilic region. A hydrophobicity analysis of the human related protein sequence will indicate which regions of a related protein are particularly hydrophilic and, therefore, are likely to encode surface residues useful for targeting antibody production. As a means for targeting antibody production, hydropathy plots showing regions of hydrophilicity and hydrophobicity may be generated by any method well known in the art, including, for example, the Kyte Doolittle or the Hopp Woods methods, either with or without Fourier transformation. See, e.g., Hopp and Woods, 1981, Proc. Nat. Acad. Sci. USA 78: 3824-3828; Kyte and Doolittle 1982, J. Mol. Biol. 157: 105-142, each of which is incorporated herein by reference in its entirety. Antibodies that are specific for one or more domains within an antigenic protein, or derivatives, fragments, analogs or homologs thereof, are also provided herein.

[0313] A protein of the invention, or a derivative, fragment, analog, homolog or ortholog thereof, may be utilized as an immunogen in the generation of antibodies that immunospecifically bind these protein components.

[0314] Various procedures known within the art may be used for the production of polyclonal or monoclonal antibodies directed against a protein of the invention, or against derivatives, fragments, analogs homologs or orthologs thereof (see, for example, Antibodies: A Laboratory Manual, Harlow E, and Lane D, 1988, Cold Spring Harbor Laboratory Press, Cold Spring Harbor, N.Y., incorporated herein by reference). Some of these antibodies are discussed below.

[0315] 5.13.1 Polyclonal Antibodies

[0316] For the production of polyclonal antibodies, various suitable host animals (e.g., rabbit, goat, mouse or other mammal) may be immunized by one or more injections with the native protein, a synthetic variant thereof, or a derivative of the foregoing. An appropriate immunogenic preparation can contain, for example, the naturally occurring immunogenic protein, a chemically synthesized polypeptide representing the immunogenic protein, or a recombinantly expressed immunogenic protein. Furthermore, the protein may be conjugated to a second protein known to be immunogenic in the mammal being immunized. Examples of such immunogenic proteins include but are not limited to keyhole limpet hemocyanin, serum albumin, bovine thyroglobulin, and soybean trypsin inhibitor. The preparation can further include an adjuvant. Various adjuvants used to increase the immunological response include, but are not limited to, Freund's (complete and incomplete), mineral gels (e.g., aluminum hydroxide), surface active substances (e.g., lysolecithin, pluronic polyols, polyanions, peptides, oil emulsions, dinitrophenol, etc.), adjuvants usable in humans such as Bacille Calmette-Guerin and Corynebacterium parvum, or similar immunostimulatory agents. Additional examples of adjuvants which can be employed include MPL-TDM adjuvant (monophosphoryl Lipid A, synthetic trehalose dicorynomycolate).

[0317] The polyclonal antibody molecules directed against the immunogenic protein can be isolated from the mammal (e.g., from the blood) and further purified by well known techniques, such as affinity chromatography using protein A or protein G, which provide primarily the IgG fraction of immune serum. Subsequently, or alternatively, the specific antigen which is the target of the immunoglobulin sought, or an epitope thereof, may be immobilized on a column to purify the immune specific antibody by immunoaffinity chromatography. Purification of immunoglobulins is discussed, for example, by D. Wilkinson (The Scientist, published by The Scientist, Inc., Philadelphia Pa., Vol. 14, No. 8 (Apr. 17, 2000), pp. 25-28).

[0318] 5.13.2 Monoclonal Antibodies

[0319] The term “monoclonal antibody” (MAb) or “monoclonal antibody composition”, as used herein, refers to a population of antibody molecules that contain only one molecular species of antibody molecule consisting of a unique light chain gene product and a unique heavy chain gene product In particular, the complementary determining regions (CDRs) of the monoclonal antibody are identical in all the molecules of the population. MAbs thus contain an antigen binding site capable of immunoreacting with a particular epitope of the antigen characterized by a unique binding affinity for it.

[0320] Monoclonal antibodies can be prepared using hybridoma methods, such as those described by Kohler and Milstein, Nature, 256:495 (1975). In a hybridoma method, a mouse, hamster, or other appropriate host animal, is typically immunized with an immunizing agent to elicit lymphocytes that produce or are capable of producing antibodies that will specifically bind to the immunizing agent. Alternatively, the lymphocytes can be immunized in vitro.

[0321] The immunizing agent will typically include the protein antigen, a fragment thereof or a fusion protein thereof. Generally, either peripheral blood lymphocytes are used if cells of human origin are desired, or spleen cells or lymph node cells are used if non-human mammalian sources are desired. The lymphocytes are then fused with an immortalited cell line using a suitable fusing agent, such as polyethylene glycol, to form a hybridoma cell (Goding, Monoclonal Antibodies: Principles and Practice Academic Press, (1986) pp. 59-103). Immortalized cell lines are usually transformed mammalian cells, particularly myeloma cells of rodent, bovine and human origin. Usually, rat or mouse myeloma cell lines are employed. The hybridoma cells can be cultured in a suitable culture medium that preferably contains one or more substances that inhibit the growth or survival of the unfused, immortalized cells. For example, if the parental cells lack the enzyme hypoxanthine guanine phosphoribosyl transferase (HGPRT or HPRT), the culture medium for the hybridomas typically will include hypoxanthine, aminopterin, and thymidine (“HAT medium”), which substances prevent the growth of HGPRT-deficient cells.

[0322] Preferred immortalized cell lines are those that fuse efficiently, support stable high level expression of antibody by the selected antibody-producing cells, and are sensitive to a medium such as HAT medium. More preferred immortalized cell lines are murine myeloma lines, which can be obtained, for instance, from the Salk Institute Cell Distribution Center, San Diego, Calif. and the American Type Culture Collection, Manassas, Va. Human myeloma and mouse-human heteromyeloma cell lines also have been described for the production of human monoclonal antibodies (Kozbor, J. Immunol., 133:3001 (1984); Brodeur et al., Monoclonal Antibodv Production Techniques and Applications, Marcel Dekker, Inc., New York, (1987) pp. 51-63).

[0323] The culture medium in which the hybridoma cells are cultured can then be assayed for the presence of monoclonal antibodies directed against the antigen. Preferably, the binding specificity of monoclonal antibodies produced by the hybridoma cells is determined by immunoprecipitation or by an in vitro binding assay, such as radioimmrunoassay (RIA) or enzyme-linked immunoabsorbent assay (ELISA). Such techniques and assays are known in the art. The binding affinity of the monoclonal antibody can, for example, be determined by the Scatchard analysis of Munson and Pollard, Anal. Biochem. 107:220 (1980). Preferably, antibodies having a high degree of specificity and a high binding affnity for the target antigen are isolated.

[0324] After the desired hybridoma cells are identified, the clones can be subdoned by limiting dilution procedures and grown by standard methods. Suitable culture media for this purpose include, for example, Dulbecco's Modified Eagle's Medium and RPMI-1640 medium. Alternatively, the hybridoma cells can be grown in vivo as as cites in a mammal.

[0325] The monoclonal antibodies secreted by the subdlones can be isolated or purified from the culture medium or as cites fluid by conventional inmmunoglobulin purification procedures such as, for example, protein A-Sepharose, hydroxylapatite chromatography, gel electrophoresis, dialysis, or affinity chromatography.

[0326] The monoclonal antibodies can also be made by recombinant DNA methods, such as those described in U.S. Pat. No. 4,816,567, DNA encoding the monoclonal antibodies of the invention can be readily isolated and sequenced using conventional procedures (e.g. by using oligonucleotide probes that are capable of binding specifically to genes encoding the heavy and light chains of murine antibodies). The hybridoma cells of the invention serve as a preferred source of such DNA. Once isolated, the DNA can be placed into expression vectors, which are then transfected into host cells such as simian COS cells, Chinese hamster ovary (CHO) cells, or myeloma cells that do not otherwise produce immunoglobulin protein, to obtain the synthesis of monoclonal antibodies in the recombinant host cells. The DNA also can be modified, for example, by substituting the coding sequence for human heavy and light chain constant domains in place of the homologous murine sequences (U.S. Pat. No. 4,816,567; Morrison, Nature 368, 812-13 (1994)) or by covalently joining to the immunoglobulin coding sequence all or part of the coding sequence for a non-immunoglobulin polypeptide. Such a non-immunoglobulin polypeptide can be substituted for the constant domains of an antibody of the invention, or can be substituted for the variable domains of one antigen-combining site of an antibody of the invention to create a chimeric bivalent antibody.

[0327] 5.13.2 Humanized Antibodies

[0328] The antibodies directed against the protein antigens of the invention can further comprise humanized antibodies or human antibodies. These antibodies are suitable for administration to humans without engendering an immune response by the human against the administered irrunoglobulin. Humanized forms of antibodies are chimeric immunoglobulins, immunoglobulin chains or fragments thereof (such as Fv, Fab, Fab′, F(ab′)₂ or other antigen-binding subsequences of antibodies) that are principally comprised of the sequence of a human immunoglobulin, and contain minimal sequence derived from a non-human immunoglobulin. Humanization can be performed following the method of Winter and co-workers (Jones et al., Nature 321:522-525 (1986); Riechmann et al., Nature, 332:323-327 (1988); Verhoeyen et al., Science, 239:15341536 (1988)), by substituting rodent CDRs or CDR sequences for the corresponding sequences of a human antibody. (See also U.S. Pat. No. 5,225,539.) In some instances, Fv framework residues of the human immunoglobulin are replaced by corresponding non-human residues. Humanized antibodies can also comprise residues which are found neither in the recipient antibody nor in the imported CDR or framework sequences. In general, the humanized antibody will comprise substantially all of at least one, and typically two, variable domains, in which all or substantially all of the CDR regions correspond to those of a non-human immunoglobulin and all or substantially all of the framework regions are those of a human immunoglobulin consensus sequence. The humanized antibody optimally also will comprise at least a portion of an immunoglobulin constant region (Fc), typically that of a human immunoglobulin (Jones et al., 1986; Riechmann et al., 1988; and Presta, Curr. Op. Struct. Biol., 2:593-596 (1992)).

[0329] 5.13.3 Human Antibodies

[0330] Fully human antibodies relate to antibody molecules in which essentially the entire sequences of both the light chain and the heavy chain, including the CDRs, arise from human genes. Such antibodies are termed “human antibodies”, or “fully human antibodies” herein. Human monoclonal antibodies can be prepared by the trioma technique; the human B-cell hybridoma technique (see Kozbor, et al., 1983 Immunol Today 4: 72) and tile EBV hybridoma technique to produce human monoclonal antibodies (see Cole, et al., 1985 In: MONOCLONAL ANTIBODIES AND CANCER THERAPY, Alan R. Liss, Inc., pp. 77-96). Human monoclonal antibodies may be utilized in the practice of the present invention and may be produced by using human hybridomas (see Cote, et al., 1983, Proc Natl Acad Sci USA 80: 2026-2030) or by transforming human B-cells with Epstein Barr Virus in vitro (see Cole, et al., 1985 In: MONOCLONAL ANTIBODIES AND CANCER THERAPY, Alan R. Liss, Inc., pp. 77-96).

[0331] In addition, human antibodies can also be produced using additional techniques, including phage display libraries (Hoogenboom and Winter, J. Mol. Biol., 227:381 (1991); Marks et al., J. Mol. Biol. 222:581 (1991)). Similarly, human antibodies can be made by introducing human immunoglobulin loci into transgenic animnals, e.g., mice in which the endogenous immunoglobulin genes have been partially or completely inactivated. Upon challenge, human antibody production is observed, which closely resembles that seen in humans in all respects, including gene rearrangement, assembly, and antibody repertoire. This approach is described, for example, in U.S. Pat. Nos. 5,545,807; 5,545,806; 5,569,825; 5,625,126; 5,633,425; 5,661,016, and in Marks et al. (Bio/Technology 10 779-783 (1992)); Lonberg et al. Nature 368 856-859 (1994)); Morrison (Nature 368, 812-13 (1994)); Fishwild et al, (Nature Biotechnology 14, 845-51 (1996)); Neuberger (Nature Biotechnology 14, 826 (1996)); and Lonberg and Huszar (Intern. Rev. Immunol. 13 65-93 (1995)).

[0332] Human antibodies may additionally be produced using transgenic nonhuman animals which are modified so as to produce fully human antibodies rather than the animal's endogenous antibodies in response to challenge by an antigen. (See PCT publication WO94/02602). The endogenous genes encoding the heavy and light immunoglobulin chains in the nonhuman host have been incapacitated, and active loci encoding human heavy and light chain immunoglobulins are inserted into the host's genome. The human genes are incorporated, for example, using yeast artificial chromosomes containing the requisite human DNA segments. An animal which provides all the desired modifications is then obtained as progeny by crossbreeding intermediate transgenic animals containing fewer than the full complement of the modifications. The preferred embodiment of such a nonhuman animal is a mouse, and is termed the Xenomouse™ as disclosed in PCT publications WO96/33735 and WO 96/34096, This animal produces B cells which secrete fully human immunoglobulins. The antibodies can be obtained directly from the animal after immunization with an immunogen of interest, as, for example, a preparation of a polyclonal antibody, or alternatively from immortalized B cells derived from the animal, such as hybridomas producing monoclonal antibodies. Additionally, the genes encoding the immunoglobulins with human variable regions can be recovered and expressed to obtain the antibodies directly, or can be further modified to obtain analogs of antibodies such as, for example, single chain Fv molecules.

[0333] An example of a method of producing a nonhuman host, exemplified as a mouse, lacking expression of an endogenous immunoglobulin heavy chain is disclosed in U.S. Pat. No. 5,939,598. It can be obtained by a method including deleting the J segment genes from at least one endogenous heavy chain locus in an embryonic stem cell to prevent rearrangement of the locus and to prevent formation of a transcript of a rearranged immunoglobulin heavy chain locus, the deletion being effected by a targeting vector containing a gene encoding a selectable marker; and producing from the embryonic stem cell a transgemic mouse whose somatic and germ cells contain the gene encoding the selectable marker.

[0334] A method for producing an antibody of interest, such as a human antibody, is disclosed in U.S. Pat. No. 5,916,771, It includes introducing an expression vector that contains a nucleotide sequence encoding a heavy chain into one mammalian host cell in culture, introducing an expression vector containing a nucleotide sequence encoding a light chain into another mammalian host cell, and fusing the two cells to form a hybrid cell. The hybrid cell expresses an antibody containing the heavy chain and the light chain.

[0335] In a further improvement on this procedure, a method for identifying a clinically relevant epitope on an immunogen, and a correlative method for selecting an antibody that binds immunospecifically to the relevant epitope with high affinity, are disclosed in PCT publication WO99/53049.

[0336] 5.13.4 F_{ab} Fragments and Single Chain Antibodies

[0337] According to the invention, techniques can be adapted for the production of single-chain antibodies specific to an antigenic protein of the invention (see e.g., U.S. Pat. No. 4,946,778). In addition, methods can be adapted for the construction of F_{ab} expression libraries (see e.g., Huse, et al., 1989 Science 246: 1275-1281) to allow rapid and effective identification of monoclonal F_{ab} fragments with the desired specificity for a protein or derivatives, fragments, analogs or homologs thereof. Antibody fragments that contain the idiotypes to a protein antigen may be produced by techniques known in the art including, but not limited to: (i) an.F(_{ab})2 fragment produced by pepsin digestion of an antibody molecule; (ii) an F_{ab} fragment generated by reducing the disulfide bridges of an F(_{ab})2 fragment; (iii) an F_{ab} fragment generated by the treatment of the antibody molecule with papain and a reducing agent and (iv) F_{ab} fragments.

[0338] 5.13.5 Bispecific Antibodies

[0339] Bispecific antibodies are monoclonal, preferably human or hunized, antibodies that have binding specificities for at least two different antigens. In the present case, one of the binding specificities is for an antigenic protein of the invention. The second binding target is any other antigen, and advantageously is a cell-surface protein or receptor or receptor subunit.

[0340] Methods for making bispecific antibodies are known in the art. Traditionally, the recombinant production of bispecific antibodies is based on the co-expression of two irrunoglobulin heavy-chami/light-cham. pairs, where the two heavy chains have different specificities (Milstein and Cuello, Nature, 305:537-539 (1983)). Because of the random assortment of immunoglobulin heavy and light chains, these hybridomas (quadromas) produce a potential mixture often different antibody molecules, of which only one has the correct bispecific structure. The purification of the correct molecule is usually accomplished by affinity chromatography steps. Similar procedures are disclosed in WO 93/08829, published May 13, 1993, and in Traunecker et al., 1991 EMBO J., 10:3655-3659.

[0341] Antibody variable domains with the desired binding specificities (antibody-antigen combining sites) can be fused to immunoglobulin constant domain sequences. The fusion preferably is with an immunoglobulin heavy-chain constant domain, comprising at least part of the hinge, CH2, and CH3 regions. It is preferred to have the first heavy-chain constant region (CH1) containing the site necessary for light-chain binding present in at least one of the fusions. DNAs encoding the immunoglobulin heavy-chain fusions and, if desired, the immunoglobulin light chain, are inserted into separate expression vectors, and are co-transfected into a suitable host organism. For further details of generating bispecific antibodies see, for example, Suresh et al., Methods in Enzymology. 121:210 (1986).

[0342] According to another approach described in WO96/27011, the interface between a pair of antibody molecules can be engineered to maximize the percentage of heterodimers which are recovered from recombinant cell culture. The preferred interface comprises at least a part of the CH3 region of an antibody constant domain. In this method, one or more small amino acid side chains from the interface of the first antibody molecule are replaced with larger side chains (e.g. tyrosine or tryptophan). Compensatory “cavities” of identical or similar size to the large side chain(s) are created on the interface of the second antibody molecule by replacing large amino acid side chains with smaller ones (e.g. alanine or threonine). This provides a mechanism for increasing the yield of the heterodimer over other unwanted end-products such as homodiimers.

[0343] Bispecific antibodies can be prepared as fill length antibodies or antibody fragments (e.g. F(ab′) bispecific antibodies). Techniques for generating bispecific antibodies from antibody fragments have been described in the literature. For example, bispecific antibodies can be prepared using chemical linkage. Brennan et al., Science 229:81 (1985) describe a procedure wherein intact antibodies are proteolytically cleaved to generate F(ab′)₂ fragments. These fragments are reduced in the presence of the dithiol complexing agent sodium arsenite to stabilize vicinal dithiols and prevent intermolecular disulfide formation. The Fab′ fragments generated are then converted to thionitrobenzoate (TNB) derivatives. One of the Fab′-TNB derivatives is then reconverted to the Fab′-thiol by reduction with mercaptoethylamine and is mixed with an equimolar amount of the other Fab′-TNB derivative to form the bispecific antibody. The bispecific antibodies produced can be used as agents for the selective immobilization of enzymes.

[0344] Additionally, Fab′ fragments can be directly recovered from E. coli and chemically coupled to form bispecific antibodies. Shalab′ y et al., J. Exn. Med. 175:217-225 (1992) describe the production of a fully humanized bispecific antibody .F(ab′ )2 molecule. Each Fab′ fragment was separately secreted from E. coli and subjected to directed chemical coupling in vitro to form the bispecific antibody. The bispecific antibody thus formed was ab′ le to bind to cells overexpressing the ErbB2 receptor and normal human T cells, as well as trigger the lytic activity of human cytotoxic lymphocytes against human breast tumor targets.

[0345] Various techniques for making and isolating bispecific antibody fragments directly from recombinant cell culture have also been described. For example, bispecific antibodies have been produced using leucine zippers. Kostelny et al., J. Immunol. 148(5):1547-1553 (1992). The leucine zipper peptides from the Fos and Jun proteins were linked to the Fab′ portions of two different antibodies by gene fuision. The antibody homodimers were reduced at the hinge region to form monomers and then re-oxidized to form the antibody heterodimers. This method can also be utilized for the production of antibody homodimers. The “diabody” technology described by Hollinger et al., Proc. Natl. Acad. Sci. USA 90:64446448 (1993) has provided an alternative mechanism for making bispecific antibody fragments. The fragments comprise a heavy-chain variable domain (V_{H}) connected to a light-chain variab′ le domain (V_{L}) by a linker which is too short to allow pairing between the two domains on the same chain. Accordingly, the V_{H} and V_{L} domains of one fragment are forced to pair with the complementary V_{L} and V_{H} domains of another fragment, thereby forming two antigen-binding sites. Another strategy for making bispecific antibody fragments by the use of single-chain Fv (sFv) dimers has also been reported. See, Gruber et al., J. Immunol. 152:5368, (1994).

[0346] Antibodies with more than two valencies are contemplated. For example, trispecific antibodies can be prepared. Tutt et al., J. Immunol. 147:60 (1991). Exemplary bispecific antibodies can bind to two different epitopes, at least one of which originates in the protein antigen of the invention. Alternatively, an anti-antigenic arm of an immunoglobulin molecule can be combined with an arm which binds to a triggering molecule on a leukocyte such as a T-cell receptor molecule (e.g. CD2, CD3, CD28, or B7), or Fc receptors for IgG (Fe R), such as Fe RI (CD64), Fe RII (CD32) and Fc RIII (CD16) so as to focus cellular defense mechanisms to the cell expressing the particular antigen. Bispecific antibodies can also be used to direct cytotoxic agents to cells which express a particular antigen. These antibodies possess an antigen-binding arm and an arm which binds a cytotoxic agent or a radionuclide chelator, such as EOTUBE, DPTA, DOTA, or TETA. Another bispecific antibody of interest binds the protein antigen described herein and further binds tissue factor (IF).

[0347] 5.13.6 Heteroconjugate Antibodies

[0348] Heteroconjugate antibodies are also within the scope of the present invention. Heteroconjugate antibodies are composed of two covalently joined antibodies. Such antibodies have, for example, been proposed to target immune system cells to unwanted cells (U.S. Pat. No. 4,676,980), and for treatment of HIV infection (WO 91/00360; WO 92/200373; EP 03089). It is contemplated that the antibodies can be prepared in vitro using known methods in synthetic protein chemistry, including those involving crosslinking agents. For example, immunotoxins can be constructed using a disulfide exchange reaction or by forming a thioether bond. Examples of suitable reagents for this purpose include iminothiolate and methyl4-mercaptobutyrimidate and those disclosed, for example, in U.S. Pat. No. 4,676,980.

[0349] 5.13.7 Effector Function Engineering

[0350] It can be desirable to modify the antibody of the invention with respect to effector function, so as to enhance, e.g., the effectiveness of the antibody in treating cancer. For example, cysteine residue(s) can be introduced into the Fe region, thereby allowing interchain disulfide bond formation in this region. The homodimeric antibody thus generated can have improved internalization capability and/or increased complement-mediated cell dilling and antibody-dependent cellular cytotoxicity (ADCC). See Caron et al., J. Exp Med., 176: 1191-1195 (1992) and Shopes, J. Immunol., 148: 2918-2922 (1992). Homodimeric antibodies with enhanced anti-tumor activity can also be prepared using heterobifunctional cross-linkers as described in Wolff et al. Cancer Research, 53: 2560-2565 (1993). Alternatively, an antibody can be engineered that has dual Fe regions and can thereby have enhanced complement lysis and ADCC capabilities. See Stevenson et al., Anti-Cancer Drug Design, 3: 219-230 (1989).

[0351] 5.13.8 Immunoconjugates

[0352] The invention also pertains to Immunoconjugates comprising an antibody conjugated to a cytotoxic agent such as a chemotherapeutic agent, toxin (e.g., an enzymatically active toxin of bacterial, fungal, plant, or animal origin, or fragments thereof), or a radioactive isotope (ie., a radioconjugate).

[0353] Chemotherapeutic agents useful in the generation of such Immunoconjugates have been described above. Enzymatically active toxins and fragments thereof that can be used include diphtheria A chain, nonbinding active fragments of diphtheria toxin, exotoxin A chain (from Pseudomonas aeruginosa), ricin A chain, abrin A chain, modeccin A chain, alpha-sarcin, Aleurites fordii proteins, dianthin proteins, Phytolaca americana proteins (PAPI, PAPII, and PAP-S), momordica charantia inhibitor, curcin, crotin, sapaonaria officinalis inhibitor, gelonin, mitogellin, restrictocin, phenomycin, enomycin, and the tricothecenes. A variety of radionuclides are available for the production of radioconjugated antibodies. Examples include ²¹² Bi, ¹³¹In, ⁹⁰Y, and ¹⁸⁶Re.

[0354] Conjugates of the antibody and cytotoxic agent are made using a variety of bifunctional protein-coupling agents such as N-succinimidyl-3-(2-pyridyldithiol) propionate (SPDP), iminothiolane (IT), bifunctional derivatives of imidoesters (such as dimethyl adipimidate HCL), active esters (such as disuccinimidyl suberate), aldehydes (such as glutareldehyde), bis-azido compounds (such as bis (pazidobenzoyl) hexanediamine), bis-diazonium derivatives (such as bis (pdiazoniumbenzoyl)-ethylenediamine), diisocyanates (such as tolyene 2,6-diisocyanate), and bis-active fluorine compounds (such as 1,5-difluoro-2,4dinitrobenzene). For example, a ricin immunotoxin can be prepared as described in Vitetta et al., Science, 238: 1098 (1987). Carbon-14-labeled 1-isothiocyanatobenzyl-3-methyldiethylene triaminepentaacetic acid (MX-DTPA) is an exemplary chelating agent for conjugation of radionucleotide to the antibody. See WO094/1 1026.

[0355] In another embodiment, the antibody can be conjugated to a “receptor” (such streptavidin) for utilization in tumor pretargeting wherein the antibody-receptor conjugate is administered to the patient, followed by removal of unbound conjugate from the circulation using a clearing agent and then administration of a “ligand” (e.g., avidin) that is in turn conjugated to a cytotoxic agent

### 4.14 Computer Readable Sequence

[0356] In one application of this embodiment, a nucleotide sequence of the present invention can be recorded on computer readable media. As used herein, “computer readable media” refers to any medium which can be read and accessed directly by a computer. Such media include, but are not limited to: magnetic storage media, such as floppy discs, hard disc storage medium, and magnetic tape; optical storage media such as CD-ROM; electrical storage media such as RAM and ROM; and hybrids of these categories such as magnetic/optical storage media. A skilled artisan can readily appreciate how any of the presently known computer readable mediums can be used to create a manufacture comprising computer readable medium having recorded thereon a nucleotide sequence of the present invention. As used herein, “recorded” refers to a process for storing information on computer readable medium. A skilled artisan can readily adopt any of the presently known methods for recording information on computer readable medium to generate manufactures comprising the nucleotide sequence information of the present invention.

[0357] A variety of data storage structures are available to a skilled artisan for creating a computer readable medium having recorded thereon a nucleotide sequence of the present invention. The choice of the data storage structure will generally be based on the means chosen to access the stored information. In addition, a variety of data processor programs and formats can be used to store the nucleotide sequence information of the present invention on computer readable medium. The sequence information can be represented in a word processing text file, formatted in comrnercially-available software such as WordPerfect and Microsoft Word, or represented in the form of an ASCII file, stored in a datab ase application, such as DB2, Sybase, Oracle, or the like. A skilled artisan can readily adapt any number of data processor structuring formats (e.g. text file or datab ase) in order to obtain computer readable medium having recorded thereon the nucleotide sequence information of the present invention.

[0358] By providing any of the nucleotide sequences SEQ ID NO: 1-1350 or a representative fragment thereof, or a nucleotide sequence at least 95% identical to any of the nucleotide sequences of SEQ ID NO: 1-1350 in computer readable form, a skilled artisan can routinely access the sequence information for a variety of purposes. Computer software is publicly available which allows a skilled artisan to access sequence information provided in a computer readable medium. The examples which follow demonstrate how software which implements the BLAST (Altschul et al., J. Mol. Biol. 215:403410 (1990)) and BLAZE (Brutlag et al., Comp. Chem. 17:203-207 (1993)) search algorithms on a Sybase system is used to identify open reading frames (ORFs) within a nucleic acid sequence. Such ORs may be protein encoding fragments and may be useful in producing commercially important proteins such as enzymes used in fermentation reactions and in the production of commercially useful metabolites.

[0359] As used herein, “a computer-based system” refers to the hardware means, software means, and data storage means used to analyze the nucleotide sequence information of the present invention. The minimum hardware means of the computer-based systems of the present invention comprises a central processing unit (CPU), input means, output means, and data storage means. A skilled artisan can readily appreciate that any one of the currently availab′ le computer-based systems are suitable for use in the present invention. As stated ab′ ove, the computer-based systems of the present invention comprise a data storage means having stored therein a nucleotide sequence of the present invention and the necessary hardware means and software means for supporting and implementing a search means. As used herein, “data storage means” refers to memory which can store nucleotide sequence information of the present invention, or a memory access means which can access manufactures having recorded thereon the nucleotide sequence information of the present invention.

[0360] As used herein, “search means” refers to one or more programs which are implemented on the computer-based system to compare a target sequence or target structural motif with the sequence information stored within the data storage means. Search means are used to identify fragments or regions of a known sequence which match a particular target sequence or target motif. A variety of known algorithms are disclosed publicly and a variety of commercially available software for conducting search means are and can be used in the computer-based systems of the present invention. Examples of such software includes, but is not limited to, Smith-Waterman, MacPattern (EMBL), BLASTN and BLASTA (NPOLYPEPTIDEIA). A skilled artisan can readily recognize that any one of the available algorithms or implementing software packages for conducting homology searches can be adapted for use in the present computer-based systems. As used herein, a “target sequence” can be any nucleic acid or amino acid sequence of six or more nucleotides or two or more amino acids. A skilled artisan can readily recognize that the longer a target sequence is, the less likely a target sequence will be present as a random occurrence in the database. The most preferred sequence length of a target sequence is from about 10 to 300 amino acids, more preferably from about 30 to 100 nucleotide residues. However, it is well recognized that searches for commercially important fragments, such as sequence fragrents involved in gene expression and protein processing, may be of shorter length.

[0361] As used herein, “a target structural motif,” or “target motif,” refers to any rationally selected sequence or combination of sequences in which the sequence(s) are chosen based on a three-dimensional configuration which is formed upon the folding of the target motif. There are a variety of target motifs known in the art. Protein target motifs include, but are not limited to, enzyme active sites and signal sequences. Nucleic acid target motifs include, but are not limited to, promoter sequences, hairpin structures and inducible expression elements (protein binding sequences).

### 4.15 Triple Helix Formation

[0362] In addition, the fragments of the present invention, as broadly described, can be used to control gene expression through triple helix formation or antisense DNA or RNA, both of which methods are based on the binding of a polynucleotide sequence to DNA or RNA. Polynucleotides suitable for use in these methods are preferably 20 to 40 bases in length and are designed to be complementary to a region of the gene involved in transcription (triple helix—see Lee et al., Nucl. Acids Res. 6:3073 (1979); Cooney et al., Science 15241:456 (1988); and Dervan et al., Science 251:1360 (1991)) or to the mRNA itself (antisense—Olmno, J. Neurochem. 56:560 (1991); Oligodeoxynucleotides as Antisense Inhibitors of Gene Expression, CRC Press, Boca Raton, Fla. (1988)). Triple helix-formation optimally results in a shut-off of RNA transcription from DNA, while antisense RNA hybridization blocks translation of an mRNA molecule into polypeptide. Both techniques have been demonstrated to be effective in model systems. Information contained in the sequences of the present invention is necessary for the design of an antisense or triple helix oligonucleotide.

### 4.16 Diagnostic Assay and Kits

[0363] The present invention further provides methods to identify the presence or expression of one of the ORFs of the present invention, or homolog thereof, in a test sample, using a nucleic acid probe or antibodies of the present invention, optionally conjugated or otherwise associated with a suitable label.

[0364] In general, methods for detecting a polynucleotide of the invention can comprise contacting a sample with a compound that binds to and forms a complex with the polynucleotide for a period sufficient to form the complex, and detecting the complex, so that if a complex is detected, a polynucleotide of the invention is detected in the sample. Such methods can also comprise contacting a sample under stringent hybridization conditions with nucleic acid primers that anneal to a polynucleotide of the invention under such conditions, and amplifying annealed polynucleotides, so that if a polynucleotide is amplified, a polynucleotide of the invention is detected in the sample.

[0365] In general, methods for detecting a polypeptide of the invention can comprise contacting a sample with a compound that binds to and forms a complex with the polypeptide for a period sufficient to form the complex, and detecting the complex, so that if a complex is detected, a polypeptide of the invention is detected in the sample.

[0366] In detail, such methods comprise incubating a test sample with one or more of the antibodies or one or more of the nucleic acid probes of the present invention and assaying for binding of the nucleic acid probes or antibodies to components within the test sample.

[0367] Conditions for incubating a nucleic acid probe or antibody with a test sample vary. Incubation conditions depend on the format employed in the assay, the detection methods employed, and the type and nature of the nucleic acid probe or antibody used in the assay. One skilled in the art will recognize that any one of the commonly available hybridization, amplification or immunological assay formats can readily be adapted to employ the nucleic acid probes or antibodies of the present invention. Examples of such assays can be found in Chard, T., An Introduction to Radioimmunoassay and Related Techniques, Elsevier Science Publishers, Amsterdam, The Netherlands (1986); Bullock, G. R. et al., Techniques in Immunocytochemistry, Academic Press, Orlando, Fla. Vol. 1 (1982), Vol. 2 (1983), Vol. 3 (1985); Tijssen, P., Practice and Theory of immunoassays: Laboratory Techniques in Biochemistry and Molecular Biology, Elsevier Science Publishers, Amsterdam, The Netherlands (1985). The test samples of the present invention include cells, protein or membrane extracts of cells, or biological fluids such as sputum, blood, serum, plasma, or urine. The test sample used in the above-described method will vary based on the assay format, nature of the detection method and the tissues, cells or extracts used as the sample to be assayed. Methods for preparing protein extracts or membrane extracts of cells are well known in the art and can be readily be adapted in order to obtain a sample which is compatible with the system utilized.

[0368] In another embodiment of the present invention, kits are provided which contain the necessary reagents to carry out the assays of the present invention. Specifically, the invention provides a compartment kit to receive, in close confinement, one or more containers which comprises: (a) a first container comprising one of the probes or antibodies of the present invention; and (b) one or more other containers comprising one or more of the following: wash reagents, reagents capable of detecting presence of a bound probe or antibody.

[0369] In detail, a compartment kit includes any kit in which reagents are contained in separate containers. Such containers include small glass containers, plastic containers or strips of plastic or paper. Such containers allows one to efficiently transfer reagents from one compartment to another compartment such that the samples and reagents are not cross-contaminated, and the agents or solutions of each container can be added in a quantitative fashion from one compartment to another. Such containers will include a container which will accept the test sample, a container which contains the antibodies used in the assay, containers which contain wash reagents (such as phosphate buffered saline, Tris-buffers, etc.), and containers which contain the reagents used to detect the bound antibody or probe. Types of detection reagents include labeled nucleic acid probes, labeled secondary antibodies, or in the alternative, if the primary antibody is labeled, the enzymatic, or antibody binding reagents which are capable of reacting with the labeled antibody. One skilled in the art will readily recognize that the disclosed probes and antibodies of the present invention can be readily incorporated into one of the established kit formats which are well known in the art.

### 4.17 Medical Imaging

[0370] The novel polypeptides and binding partners of the invention are useful in medical imaging of sites expressing the molecules of the invention (e.g., where the polypeptide of the invention is involved in the immune response, for imaging sites of inflammation or infection). See, e.g., Kunkel et al., U.S. Pat No. 5,413,778, Such methods involve chemical attachment of a labeling or imaging agent, administration of the labeled polypeptide to a subject in a pharmaceutically acceptable carrier, and imaging the labeled polypeptide in vivo at the target site.

### 4.18 Screening Assay

[0371] Using the isolated proteins and polynucleotides of the invention, the present invention further provides methods of obtaining and identifying agents which bind to a polypeptide encoded by an ORF corresponding to any of the nucleotide sequences set forth in SEQ ID NO: 1-1350, or bind to a specific domain of the polypeptide encoded by the nucleic acid. In detail, said method comprises the steps of:

[0372] (a) contacting an agent with an isolated protein encoded by an ORF of the present invention, or nucleic acid of the invention; and

[0373] (b) determining whether the agent binds to said protein or said nucleic acid.

[0374] In general, therefore, such methods for identifying compounds that bind to a polynucleotide of the invention can comprise contacting a compound with a polynucleotide of the invention for a time sufficient to form a polynucleotide/compound complex, and detecting the complex, so that if a polynucleotide/compound complex is detected, a compound that binds to a polynucleotide of the invention is identified.

[0375] Likewise, in general, therefore, such methods for identify compounds that bind to a polypeptide of the invention can comprise contacting a compound with a polypeptide of the invention for a time sufficient to form a polypeptide/compound complex, and detecting the complex, so that if a polypeptide/compound complex is detected, a compound that binds to a polynucleotide of the invention is identified.

[0376] Methods for identifying compounds that bind to a polypeptide of the invention can also comprise contacting a compound with a polypeptide of the invention in a cell for a time sufficient to form a polypeptide/compound complex, wherein the complex drives expression of a receptor gene sequence in the cell, and detecting the complex by detecting reporter gene sequence expression, so that if a polypeptide/compound complex is detected, a compound that binds a polypeptide of the invention is identified.

[0377] Compounds identified via such methods can include compounds which modulate the activity of a polypeptide of the invention (that is, increase or decrease its activity, relative to activity observed in the absence of the compound). Alternatively, compounds identified via such methods can include compounds which modulate the expression of a polynucleotide of the invention (that is, increase or decrease expression relative to expression levels observed in the absence of the compound). Compounds, such as compounds identified via the methods of the invention, can be tested using standard assays well known to those of skill in the art for their ability to modulate activity/expression.

[0378] The agents screened in the above assay can be, but are not limited to, peptides, carbohydrates, vitatin derivatives, or other pharmaceutical agents. The agents can be selected and screened at random or rationally selected or designed using protein modeling techniques.

[0379] For random screening, agents such as peptides, carbohydrates, pharmaceutical agents and the like are selected at random and are assayed for their ability to bind to the protein encoded by the ORF of the present invention. Alternatively, agents may be rationally selected or designed. As used herein, an agent is said to be “rationally selected or designed” when the agent is chosen based on the configuration of the particular protein: For example, one skilled in the art can readily adapt currently available procedures to generate peptides, pharmaceutical agents and the like, capable of binding to a specific peptide sequence, in order to generate rationally designed antipeptide peptides, for example see Hurby et al., Application of Synthetic Peptides: Antisense Peptides,” In Synthetic Peptides, A User's Guide, W. H. Freeman, NY (1992), pp. 289-307, and Kaspczak et al., Biochemistry 28:9230-8 (1989), or pharmaceutical agents, or the like.

[0380] In addition to the foregoing, one class of agents of the present invention, as broadly described, can be used to control gene expression through binding to one of the ORFs or EMs of the present invention. As described above, such agents can be randomly screened or rationally designed/selected. Targeting the ORF or EMF allows a skilled artisan to design sequence specific or element specific agents, modulating the expression of either a single ORF or multiple ORFs which rely on the same EMF for expression control. One class of DNA binding agents are agents which contain base residues which hybridize or form a triple helix formation by binding to DNA or RNA. Such agents can be based on the classic phosphodiester, ribonucleic acid backbone, or can be a variety of sulfhydryl or polymeric derivatives which have base attachment capacity.

[0381] Agents suitable for use in these methods preferably contain 20 to 40 bases and are designed to be complementary to a region of the gene involved in transcription (triple helix -see Lee et al., Nucl. Acids Res. 6:3073 (1979); Cooney et al., Science 241:456 (1988); and Dervan et al., Science 251:1360 (1991)) or to the mRNA itself (antisense—Okano, J. Neurochem. 56:560 (1991); Oligodeoxynucleotides as Antisense Inhibitors of Gene Expression, CRC Press, Boca Raton, Fla. (1988)). Triple helix-formation optimally results in a shut-off of RNA transcription from DNA, while antisense RNA hybridization blocks translation of an mRNA molecule into polypeptide. Both techniques have been demonstrated to be effective in model systems. Information contained in the sequences of the present invention is necessary for the design of an antisense or triple helix oligonucleotide and other DNA binding agents.

[0382] Agents which bind to a protein encoded by one of the ORFs of the present invention can be used as a diagnostic agent. Agents which bind to a protein encoded by one of the ORFs of the present invention can be formulated using known techniques to generate a pharmaceutical composition.

### 4.19 Use of Nnucleic Acids As Probes

[0383] Another aspect of the subject invention is to provide for polypeptide-specific nucleic acid hybridization probes capable of hybridizing with naturally occurring nucleotide sequences. The hybridization probes of the subject invention may be derived from any of the nucleotide sequences SEQ ID NO: 1-1350, Because the corresponding gene is only expressed in a limited number of tissues, a hybridization probe derived from of any of the nucleotide sequences SEQ ID NO: 1-1350 can be used as an indicator of the presence of RNA of cell type of such a tissue in a sample.

[0384] Any suitable hybridization technique can be employed, such as, for example, in situ hybridization. PCR as described in U.S. Pat. Nos. 4,683,195 and 4,965,188 provides additional uses for oligonucleotides based upon the nucleotide sequences. Such probes used in PCR may be of recombinant origin, may be chemically synthesized, or a nixt of both. The probe will comprise a discrete nucleotide sequence for the detection of identical sequences or a degenerate pool of possible sequences for identification of closely related genomic sequences.

[0385] Other means for producing specific hybridization probes for nucleic acids include the cloning of nucleic acid sequences into vectors for the production of mRNA probes. Such vectors are known in the art and are commercially available and may be used to synthesize RNA probes in vitro by means of the addition of the appropriate RNA polymerase as 17 or SP6 RNA polymerase and the appropriate radioactively labeled nucleotides. The nucleotide sequences may be used to construct hybridization probes for mapping their respective genomic sequences. The nucleotide sequence provided herein may be mapped to a chromosome or specific regions of a chromosome using well known genetic and/or chromosomal mapping techniques. These techniques include in situ hybridization, linkage analysis against known chromosomal markers, hybridization screening with libraries or flow-sorted chromosomal preparations specific to known chromosomes, and the like. The technique of fluorescent in situ hybridization of chromosome spreads has been described, among other places, in Verma et al (1988) Human Chromosomes: A Manual of Basic Techniques, Pergamon Press, New York N.Y.

[0386] Fluorescent in situ hybridization of chromosomal preparations and other physical chromosome mapping techniques may be correlated with additional genetic map data. Examples of genetic map data can be found in the 1994 Genome Issue of Science (265:1981f). Correlation between the location of a nucleic acid on a physical chromosomal map and a specific disease (or predisposition to a specific disease) may help delimit the region of DNA associated with that genetic disease. The nucleotide sequences of the subject invention may be used to detect differences in gene sequences between normal, carrier or affected individuals.

### 4.20 Preparation of Support Bound Oligonucleotides

[0387] Oligonucleotides, i.e., small nucleic acid segments, may be readily preparedby, for example, directly synthesizing the oligonucleotide by chemical means, as is commonly practiced using an automated oligonucleotide synthesizer.

[0388] Support bound oligonucleotides may be prepared by any of the methods known to those of skill in the art using any suitable support such as glass, polystyrene or Teflon. One strategy is to precisely spot oligonucleotides synthesized by standard synthesizers. Immobilization can be achieved using passive adsorption (Inouye & Hondo, (1990) J. Clin. Microbiol. 28(6) 1469-72); using UV light (Nagata et aL, 1985; Dahlen et al., 1987; Morrissey & Collins, (1989) Mol. Cell Probes 3 (2) 189-207) or by covalent binding of base modified DNA (Keller et al, 1988; 1989); all references being specifically incorporated herein.

[0389] Another strategy that may be employed is the use of the strong biotin-streptavidin interaction as a linker. For example, Broude et al (1994) Proc. Natl. Acad. Sci. USA 91(8) 3072-6, describe the use of biotinylated probes, although these are duplex probes, that are immobilized on streptavidin-coated magnetic beads. Streptavidin-coated beads may be purchased from Dynal, Oslo. Of course, this same linking chemistry is applicable to coating any surface with streptavidin. Biotinylated probes may be purchased from various sources, such as, e.g., Operon Technologies (Alameda, Calif. ).

[0390] Nunc Lab′ oratories Naperville, Ill. ) is also selling suitable material that could be used. Nunc Laboratories have developed a method by which DNA can be covalently bound to the microwell surface termed Covalink NH. CovaLinkNH is a polystyrene surface grafted with secondary amino groups (>NH) that serve as bridge-heads for further covalent coupling. CovaLink Modules may be purchased from Nunc Lab′ oratories. DNA molecules may be bound to CovaLink exclusively at the 5′-end by a phosphoramidatebond, allowing immobilizationof more than 1 pmol of DNA (Rasmussenet al., (1991) Anal. Biochem. 198(1) 138-42).

[0391] The use of CovaLinkNH strips for covalent binding of DNA molecules at the 5′-end has been described (Rasmussen et al., (1991). In this technology, a phosphoramidatebond is employed (Chu et al., (1983) Nucleic Acids Res. 11(8)6513-29). This is beneficial as immobilzationusing only a single covalent bond is preferred. The phosphoramidate bond joins the DNA to the CovaLink NH secondary amino groups that are positioned at the end of spacer arms covalently grafted onto the polystyrene surface through a 2 mn long spacer arm. To link an oligonucleotide to CovaLink NH via an phosphoramidate bond, the oligonucleotide terminus must have a 5′-end phosphate group. It is, perhaps, even possible for biotin to be covalently bound to Cov&Link and then streptavidin used to bind the probes.

[0392] More specifically,the linkage method includes dissolving DNA in water (7.5 ng/ul) and denaturing for 10 min. at 95 ° C. and cooling on ice for 10 min. Ice-cold 0.1 M 1-methylimidazole, pH 7.0 (1-MeIm₇), isthenaddedto a final concentration of 10 mM 1-MeIn₇. Ass DNA solutionis then dispensed into CovaLinkNH strips (75 ul/well) standing on ice.

[0393] Carbodiimide 0.2 M 1-ethyl-3-(3-dimethylaminopropyl)-carbodiimide (EDC), dissolved in 10 mM -Melm₇, is made fresh and 251 μl added per well. The strips are incubated for 5 hours at 50° C. After incubation the strips are washed using, e.g., Nunc-Immuno Wash; first the wells are washed 3 times, then they are soaked with washing solution for 5 min., and finally they are washed 3 times (where in the washing solution is 0.4 N NaOH, 0.25% SDS heated to 50° C.).

[0394] It is contemplated that a further suitable method for use with the present invention is that described in PCT Patent Application WO90/03382 (Southern & Maskos), incorporated herein by reference. This method of preparing an oligonucleotide bound to a support involves attaching a nucleoside 3′-reagent through the phosphate group by a covalent phosphodiester link to aliphatic hydroxyl groups carried by the support. The oligonucleotide is then synthesized on the supported nucleoside and protecting groups removed from the synthetic oligonucleotide chain under standard conditions that do not cleave the oligonucleotide from the support. Suitable reagents include nucleoside phosphoramidite and nucleoside hydrogen phosphorate.

[0395] An on-chip strategy for the preparation of DNA probe for the preparation of DNA probe arrays may be employed. For example, addressable laser-activated photodeprotectionmay be employed in the chemical synthesis of oligonucleotides directly on a glass surface, as described by Fodor etal. (1991) Science 251(4995)767-73, incorporated herein by reference. Probes may also be immobilized on nylon supports as described by Van Ness et al. (1 991) Nucleic Acids Res. 19(12) 3345-50; or linked to Teflon using the method of Duncan & Cavalier (1988) Anal. Biochenm 169(1) 1048; all references being specifically incorporated herein.

[0396] To link an oligonucleotide to a nylon support, as described by Van Ness et aL (1991), requires activation of the nylon surface via alkylation and selective activation of the 5′-amine of oligonucleotides with cyanuric chloride.

[0397] One particular way to prepare support bound oligonucleotides is to utilize the 5 light-generated synthesis described by Pease et aL, (1994) PNAS USA 91(11) 5022-6, incorporated herein by reference). These authors used current photolithographic techniques to generate arrays of immobilized oligonucleotide probes (DNA chips). These methods, in which light is used to direct the synthesis of oligonucleotide probes in high-density, miniaturized arrays, utilize photolabile 5′-protectedN-acyl-deoxynucleoside phosphoramidites, surface linker chemistry and versatile combinatorial synthesis strategies. A matrix of 256 spatially defined oligonucleotide probes may be generated in this manner.

### 4.21 Preparation of Nucleic Acid Fragments

[0398] The nucleic acids may be obtained from any appropriate source, such as cDNAs, genornic DNA, chromosomal DNA, microdissected chromosome bands, cosmid or YAC inserts, and RNA, including mRNA without any amplification steps. For example, Sambrook et al (1989) describes three protocols for the isolation of high molecular weight DNA from mammalian cells (p. 9.149.23).

[0399] DNA fragments may be prepared as clones in 13, plasmid or lambda vectors and/or prepared directly from genomic DNA or cDNA by PCR or other amplification methods. Samples may be prepared or dispensed in multi well plates. About 100-1000 ng of DNA samples may be prepared in 2-500 ml of final volume.

[0400] The nucleic acids would then be fragmented by any of the methods known to those of skill in the art including, for example, using restriction enzymes as described at 924-9.28 of Sambrook et al. (1989), shearing by ultrasound and NaOH treatment.

[0401] Low pressure shearing is also appropriate, as described by Schriefer et al. (1990) Nucleic Acids Res. 18(24) 7455-6, incorporatedherein by reference). Inthis method, DNA samples are passed through a small French pressure cell at a variety of low to intermediate pressures. A lever device allows controlled application of low to intermediate pressures to the cell. The results of these studies indicate that low-pressure shearing is a useful alternative to sonic and enzymatic DNA fragmentation methods.

[0402] One particularly suitable way for fragmenting DNA is contemplated to be that using the two base recognition endonuclease, CνiJI, described by Fitzgerald et al. (1992) Nucleic Acids Res. 20(14)3753-62, These authors described an approach for the rapid fragmentation and fractionation of DNA into particular sizes that they contemplated to be suitable for shotgun cloning and sequencing.

[0403] The restriction endonuclease CνiJI normally cleaves the recognition sequence PuGCPy between the G and C to leave blunt ends. Atypical reaction conditions, which alter the specificity of this enzyme (CνJI* *), yield a quasi-random distribution of DNA fragments form the small molecule pUC19 (2688 base pairs). Fitzgerald etal. (1992) quantitatively evaluated the randomness of this fragmentation strategy, using a CνiJI** digest of pUC19 that was size fractionated by a rapid gel filtration method and directly ligated, without end repair, to a lac Z minus M13 cloning vector. Sequence analysis of 76 clones showed that CνiJI* * restricts pyGCPy and PuGCPu, in addition to PuGCPy sites, and that new sequence data is accumulated at a rate consistent with random fragmentation.

[0404] As reported in the literature, advantages of this approach compared to sonication and agarose gel fractionation include: smaller amounts of DNA are required (0.2-0.5 ug instead of 2-5 ug); and fewer steps are involved (no preligation, end repair, chemical extraction, or agarose gel electrophoresis and elution are needed

[0405] Irrespective of the manner in which the nucleic acid fragments are obtained or prepared, it is important to denature the DNA to give single stranded pieces available for hybridization. This is achieved by incubating the DNA solution for 2-5 minutes at 80-90° C. The solution is then cooled quickly to 2° C. to prevent renaturation of the DNA fragments before they are contacted with the chip. Phosphate groups must also be removed from genornic DNA by methods known in the art.

### 4.22 Preparation of DNAa Arrays

[0406] Arrays may be prepared by spotting DNA samples on a support such as a nylon membrane. Spotting may be performed by using arrays of metal pins (the positions of which correspond to an array of wells in a microtiter plate) to repeated by transfer of about 20 nl of a DNA solution to a nylon membrane. By offset printing, a density of dots higher than the density of thee wells is achieved. One to 25 dots may be accommodated in 1 mm², depending on the type of label used. By avoiding spotting in some preselected number of rows and columns, separate subsets (subarrays) may be formed. Samples in one subarray may be the same genomic segment of DNA (or the same gene) from different individuals, or may be different, overlapped genomic clones. Each of the subarrays may represent replica spotting of the same samples. In one example, a selected gene segment may be amplified from 64 patients. For each patient, the amplified gene segment may be in one 96-well plate (all 96 wells containing the same sample). A plate for each of the 64 patients is prepared. By using a 96-pin device, all samples may be spotted on one 8×12 cm membrane. Subarrays may contain 64 samples, one from each patient. Where the 96 subarrays are identical, the dot span may be 1 mm² and there may be a 1 mm space between subarrays.

[0407] Another approach is to use membranes or plates (available from NUNC, Naperville, Ill. ) which may be partitioned by physical spacers e.g a plastic grid molded over the membrane, the grid being similar to the sort of membrane applied to the bottom of multi well plates, or hydrophobic strips. A fixed physical spacer is not preferred for imaging by exposure to flat phosphor-storage screens or x-ray films.

[0408] The present invention is illustrated in the following examples. Upon consideration of the present disclosure, one of skill in the art will appreciate that many other embodiments and variations may be made in the scope of the present invention Accordingly, it is intended that the broader aspects of the present invention not be limited to the disclosure of the following examples. The present invention is not to be limited in scope by the exemplified embodiments which are intended as illustrations of single aspects of the invention, and compositions and methods which are functionally equivalent are within the scope of the invention. Indeed, numerous modifications and variations in the practice of the invention are expected to occur to those skilled in the art upon consideration of the present preferred embodiments. Consequently, the only limitations which should be placed upon the scope of the invention are those which appear in the appended claims.

[0409] All references cited within the body of the instant specification are hereby incorporated by reference in their entirety.

### 5.0 EXAMPLES

### 5.1 Example 1

[0410] Novel Nucleic Acid Sequences Obtained From Various Libraries

[0411] A plurality of novel nucleic acids were obtained from CDNA libraries prepared from various human tissues and in some cases isolated from a genomic library derived from human chromosome using standard PCR, SBH sequence signature analysis and Sanger sequencing techniques. The inserts of the library were amplified with PCR using primers specific for the vector sequences which flank the inserts. Clones from cDNA libraries were spotted on nylon membrane filters and screened with oligonucleotide probes (e.g., 7-mers) to obtain signature sequences. The clones were clustered into groups of similar or identical sequences. Representative clones were selected for sequencing.

[0412] In some cases, the 5′ sequence of the amplified inserts was then deduced using a typical Sanger sequencing protocol. PCR products were purified and subjected to fluorescent dye terminator cycle sequencing. Single pass gel sequencing was done using a 377 Applied Biosystems (ABI) sequencer to obtain the novel nucleic acid sequences. In some cases RACE (Random Amplification of cDNA Ends) was performed to further extend the sequence in the 5′ direction.

### 5.2 Example 2

[0413] 5 Novel Contigs

[0414] The novel contigs of the invention were assembled from sequences that were obtained from a cDNA library by methods described in Example 1 above, and in some cases sequences obtained from one or more public databases. The sequences for the resulting nucleic acid contigs are designated as SEQ ID NO: 1-1350 and are provided in the attached Sequence Listing. The contigs were assembled using an EST sequence as a seed. Then a recursive algorithm was used to extend the seed EST into an extended assemblage, by pulling additional sequences from different datab′ ases (i.e., Hyseq'sdatabase containingEST sequences,dbEST version 114, gb pri 114, and UniGene version 101) that belong to this assemblage. The algorithm terminated when there was no additional sequences from the above databases that would extend the assemblage. Inclusion of component sequences into the assemblage was based on a BLASTN hit to the extending assemblage with BLAST score greater than 300 and percent identity greater than 95%.

[0415] Table 3 sets forth the novel predicted polypeptides (including proteins) encoded by the novel polynucleotides (SEQ ID NO: 189-282) of the present invention, and their corresponding nucleotide locations to each of SEQ ID NO: 189-282, Table 3 also indicates the method by which the polypeptide was predicted. Method A refers to a polypeptide obtained by using a software program called FASTY (available from huo://fasta.bioch.virginia.edu) which selects a polypeptide based on a comparison of the translated novel polynucleotideto known polynucleotides (W. R Pearson, Methods in Enzymology, 183:63-98(1990), herein incorporated by reference). MethodB refers to a polypeptide obtained by using a software program called GenScan for human/vertebrate sequences (available from Stanford University, Office of Technology Licensing) that predicts the polypeptide based on a probabilistic model of gene structure/compositionalproperties (C. Burge and S. Karlin, J. Mol. Biol., 268:78-94 (1997), incorporatedhereinby reference). Method C refers to a polypeptide obtained by using a Hyseq proprietary software program that translates the novel polynucleotide and its complementary strand into six possible amino acid sequences (forward and reverse frames) and chooses the polypeptide with the longest open reading frame.

[0416] The nearest neighbor results for SEQ ID NO: 1-1350 were obtained by a BLASTP version 2.0 al 19MP-WashU search against Genpept release 120 and Geneseq database Oct. 12, 2000, update 21 (Derwent), using BLAST algorithm. The nearest neighbor result showed the closest homologue for SEQ ID NO: 1-1350, The nearest neighbor results for SEQ ID NO: 1-1350 are shown in Table 2 below.

[0417] Tab′ les 1, 2 and 3 follow. Table 1 shows the various tissue sources of SEQ ID NO: 1-1350, Table 2 shows the nearest neighbor result for the assembled contig. The nearest neighbor result shows the closest homolog with an identifiable function for each assemblage. Table 3 contains the start and stop nucleotides for the translated amino acid sequence for which each assemblage encodes. Table 3 also provides a correlation between the amino acid sequences set forth in the Sequence Listing, the nucleotide sequences set forth in the Sequence Listing and the SEQ ID NO. in U.S. Pat. No. 09/496,914.

TABLE 1

| Tissue Origin | RNA Source | Hyseq Library Name | SEQ ID NOS: |
|---|---|---|---|
| adult brain | GIBCO | AB3001 | 111 151 188 215 662-665 877 910 927 |
| | | | 976 1233 1319 |
| adult brain | GIBCO | ABD003 | 41 49 74 101 111 120 132 141-142 151 |
| | | | 217 225 238 271 317 404 446 469 503 |
| | | | 513-514 535 550 564 573 666-669 798 |
| | | | 898 910 927 976 1067 1083 1085 1178 |
| | | | 1254 |
| adult brain | Clontech | ABR001 | 39 216 238 327 356 535 927 1056 1121 |
| | | | 1178-1180 1199 1251 |
| adult brain | Clontech | ABR006 | 74 611 949 1034 1136 |
| adult brain | Clontech | ABR008 | 14 32 41 61 81 86 89 120 132 138 145 |
| | | | 147 188 197 208 225 227-239 250 300-303 |
| | | | 312 316 328-331 340 357-362 374 |
| | | | 380 384-391 408 414 446 448 464-467 |
| | | | 483 488 495-496 505 512 521 535 550 |
| | | | 566 571 577 585 590 594 598 634 641 |
| | | | 658 666 683 725 742 764 767 786 801 |
| | | | 805 810 823 826 829 831 836 841 887-923 |
| | | | 927 934 943 950-951 963 976 995 |
| | | | 1000-1001 1006 1026 1034 1048 1057-1067 |
| | | | 1086 1088 1090 1118 1120 1122-1128 |
| | | | 1142 1162 1181-1192 1199 1204 |
| | | | 1218-1219 1225 1232 1253 1267 1271-1306 |
| | | | 1342 1347 1349-1350 |
| adult brain | Clontech | ABR011 | 49 238 1219 |
| adult brain | BioChain | ABR012 | 74 238 |
| adult brain | Invitrogen | ABR013 | 868 1268 |
| adult brain | Invitrogen | ABT004 | 49 117 138 191 217 252 291 305 535 |
| | | | 566 596 663 670 746 798 816-819 876 |
| | | | 892 898 922 943 963 1034-1036 1121 |
| cultured | Strategene | ADP001 | 41 74 101 138 211 238 304 537 582 |
| preadipocytes | | | 740 798 883 943 976 1067 |
| adrenal gland | Clontech | ADR002 | 49 74 101 111 120 127 151 215 238 |
| | | | 240-247 316 330 363-364 404 414 534-535 |
| | | | 833 924-940 950 963 976 1001 |
| | | | 1003 1067-1070 1118 1156 1193-1200 |
| | | | 1325 |
| adult heart | GIBCO | AHR001 | 38 49 71-72 74-77 79 92 99 101 111 |
| | | | 118 129 132 138 151 158-163 182 195-203 |
| | | | 215 217 238 264 269 353 384 398 |
| | | | 408 434-439 446 504 512-513 519 537 |
| | | | 562-573 577 611-614 616-619 658 661 |
| | | | 671-672 722 734 757-773 815 828-835 |
| | | | 874 891 898 919 926-927 976 988 |
| | | | 1021 1037 1041 1062 1067 1071 1080 |
| | | | 1083 1093 1122 1131 1185 1201 1254 |
| | | | 1308 1331 1335 |
| adult kidney | GIBCO | AKD001 | 41 49 51 71-74 78-85 94 100-101 103-107 |
| | | | 111 119-120 138 151 157 215 217-218 |
| | | | 238 250 264 294 304 384 404 440 |
| | | | 446 454 477 504-505 509 514 518-519 |
| | | | 535 537 564 574-583 620-627 639 653 |
| | | | 673-675 705 753 789 831 844 851 859 |
| | | | 877 909 918 927 956 963 976 1067 |
| | | | 1074 1083 1095 1178 1302 1331 1335 |
| adult kidney | Invitrogen | AKT002 | 11-12 41 49 111-112 215-217 294 316 |
| | | | 446 487 564 575 844 868 910 927 976 |
| | | | 1116 |
| adult lung | GIBCO | ALG001 | 8 101 111 151 187 402 446 490 514 |
| | | | 518 537 545 549 580 582 592 594 634 |
| | | | 640 651-652 676-678 725 851 873 918 |
| | | | 952 976 1042 1067 1076 1083 1152 |
| lymph node | Clontech | ALN001 | 8 111 121 151 180-182 188 215 537 |
| | | | 545 549 651 679-682 789 804-810 868 |
| | | | 873 927 952 976 1042 1059 1335 |
| young liver | GIBCO | ALV001 | 8 64 79 111 186 215-216 238 446 514 |
| | | | 519 537 564 653 683-684 698 753 798 |
| | | | 813 833 840 858 927 976 1038-1039 |
| | | | 1051 1085 1224 1245 1256 |
| adult liver | Invitrogen | ALV002 | 40 71 292-293 305 384 468-469 496 |
| | | | 505 657 675 714 753 832 844 941-942 |
| | | | 976 1040 1076 1256 1293 |
| adult liver | Clontech | ALV003 | 976 |
| adult ovary | Invitrogen | AOV001 | 8 32 36 38 41 49 51 71 74 79-80 101 |
| | | | 104 111 120 122-125 138 140 143-149 |
| | | | 151 188-190 207-212 215-217 238 264 |
| | | | 316 384 409 440 445-446 496 504 512 |
| | | | 514 518-519 535 537 549-550 564 566 |
| | | | 571 580 582 600 618 638 657 667 681 |
| | | | 685-697 699 705 722 735-744 761 771 |
| | | | 815 833 842-865 868 875-876 918 926-927 |
| | | | 950 952 963 976 1023 1042 1048 |
| | | | 1051 1059 1072 1076 1083 1117 1120 |
| | | | 1124 1131 1144 1174 1224 1268 1331 |
| | | | 1335 |
| adult placenta | Clontech | APL001 | 102 217 238 537 641 700 |
| placenta | Invitrogen | APL002 | 663 851 1048 |
| adult spleen | GIBCO | ASP001 | 8 45 74 111 132 140 151 185 217 238 |
| | | | 294 414 446 477 504 514 534 545 549 |
| | | | 592 722 873 883 952 976 1041-1042 |
| | | | 1083 1093-1094 1152 1224 |
| testis | GIBCO | ATS001 | 72 107 111 113 126 140 151 183 215 |
| | | | 238 446 497 537 642 701-706 811 877 |
| | | | 927 962 976 1083 1117 1131 |
| adult bladder | Invitrogen | BLD001 | 41 151 191 402-405 409 414 496 545 |
| | | | 592 607 706 873 952 1178 1329-1335 |
| bone marrow | Clontech | BMD001 | 8 58-62 65-68 74 79 108 111 116 137 |
| | | | 147 151 164-174 213-215 238 305-307 |
| | | | 374 404 446 460 466 516 519 534 538-541 |
| | | | 544-546 549-554 566 584 586 592 |
| | | | 596 607 610 628-629 643-645 652 707-708 |
| | | | 774-789 844 866-871 873 919 927 |
| | | | 952 963 976 998 1034 1042 1064 1083 |
| | | | 1085 1120 1132 1152 1225 1229 1268 |
| | | | 1307 1310 |
| bone marrow | Clontech | BMD002 | 6 8 37-38 52 74 77 105 111 129 132 |
| | | | 210 317 510-511 545 549 581 598 628 |
| | | | 638 724 766 789 844 860 868 873 919 |
| | | | 927 952 963 968 976 1042 1111 1141 |
| | | | 1160-1161 1229 1266 1346 |
| bone marrow | Clontech | BMD004 | 111 238 282 549 1083 |
| adult colon | Invitrogen | CLN001 | 52 260 264 299 494 536 545 564 592 |
| | | | 844 873 877 952 976 1042 1152 1268 |
| | | | 1336-1337 |
| adult cervix | BioChain | CVX001 | 49 51 129 132 151 205 207 238 332-335 |
| | | | 365-367 392-401 440 466 470-471 |
| | | | 518 537 597 629 832 877 927 976 1006 |
| | | | 1085 1117 1129-1134 1192 1202-1205 |
| | | | 1219 1309-1328 |
| diaphragm | BioChain | DIA002 | 74 976 1083 |
| endothelial cells | Strategene | EDT001 | 32 40-41 49 74 79 101 111 120 132 |
| | | | 138 151 204-206 215-217 238 269 316 |
| | | | 414 433 505 510 513 550 555 580 582 |
| | | | 596 675 722 745 798 814 836-841 851 |
| | | | 918 976 1041 1043 1073 1083 1131 |
| | | | 1331 |
| Genomic clones | Genomic DNA | EPM001 | 525-532 927 |
| from the short arm | from Genetic | | |
| of chromosome 8 | Research | | |
| Genomic clones | Genomic DNA | EPM003 | 47 525 |
| from the short arm | from Genetic | | |
| of chromosome 8 | Research | | |
| Genomic clones | Genomic DNA | EPM004 | 525 927 |
| from the short arm | from Genetic | | |
| of chromosome 8 | Research | | |
| Genomic clones | Genomic DNA | EPM005 | 531 |
| from the short arm | from Genetic | | |
| of chromosome 8 | Research | | |
| esophagus | BioChain | ESO002 | 74 138 238 |
| fetal brain | Clontech | FBR001 | 441-442 927 |
| fetal brain | Clontech | FBR004 | 215 893 927 1001 |
| fetal brain | Clontech | FBR006 | 48 61 101 120 132 138 140 147 208 |
| | | | 225 271 317 319 336 359 368 405-414 |
| | | | 519 550 571 594 686 715 722 764 824 |
| | | | 829 836 859 909 927 943 947 963 1057 |
| | | | 1067-1068 1104 1135-1140 1162 1206-1207 |
| | | | 1235 1268 1288 1307-1308 1319 |
| | | | 1338-1350 |
| fetal brain | Clontech | FBRs03 | 111 446 |
| fetal brain | Invitrogen | FBT002 | 41 51 120 151 192-194 264 504 512 |
| | | | 535 683 761 798 820-827 844 876 909 |
| | | | 963 976 1026 1048 1083 1144 1302 |
| fetal heart | Invitrogen | FHR001 | 446 566 761 |
| fetal kidney | Clontech | FKD001 | 51 74 111 127 140 151 184 294 537 |
| | | | 550 630-631 1319 |
| fetal kidney | Clontech | FKD002 | 111 976 1083 |
| fetal kidney | Invitrogen | FKD007 | 238 974 |
| fetal lung | Clontech | FLG001 | 463 566 976 1074 1083 1093 |
| fetal lung | Invitrogen | FLG003 | 41 238 330 407 415-416 537 573 844 |
| | | | 859 1048 1083 1116 1192 |
| fetal liver-spleen | Columbia | FLS001 | 8 14 34-35 37 41 43 49 51 54-56 63-64 |
| | University | | 69-71 74 77 79 87-90 101 107 110-111 |
| | | | 114 120 128-131 138 140 147 150-155 |
| | | | 197 210 215 217 225 238 312 367 384 |
| | | | 414 440 446 460 468 483 496 504-507 |
| | | | 511-515 518-519 523 533-535 537 541 |
| | | | 544-545 547-550 555-560 564 566 571 |
| | | | 577 582 585-586 598 636 646-647 649 |
| | | | 652 664 698 709-710 714 722-723 731 |
| | | | 735-736 746-753 761 784 798 823 829 |
| | | | 832 844 851 858-859 868 873 876 898 |
| | | | 927 943 949 952 963 976 984 1002 |
| | | | 1021 1023 1040 1042 1044 1050 1083 |
| | | | 1093 1116 1120 1129 1131 1144 1174 |
| | | | 1217 1251 1254 1256 1302 1308 1311 |
| | | | 1319 |
| fetal liver-spleen | Columbia | FLS002 | 8 36-37 41-46 49 54 64 71 74 79 101 |
| | University | | 111 120 129 147 207 210 215-216 238 |
| | | | 250 330 353 359 366 383-384 414 478 |
| | | | 505 508-509 511 515-524 534-535 537 |
| | | | 544-545 564 566 571 577 591 598 638 |
| | | | 663 671 698 714 722 725 727 751 798 |
| | | | 851 859 873 876 909 927 949 952 983-984 |
| | | | 1002 1023 1042-1044 1085 1095 |
| | | | 1131 1144 1178 1199 1233 1240-1270 |
| | | | 1331 1340 |
| fetal liver-spleen | Columbia | FLS003 | 64 535 976 1256 |
| | University | | |
| fetal liver | Invitrogen | FLV001 | 8 101 120 138 217 446 468 535 566 |
| | | | 580 722 730 749 844 918 943 976 1051 |
| | | | 1256 1331 |
| fetal liver | Clontech | FLV004 | 537 926 1256 |
| fetal muscle | Invitrogen | FMS001 | 51 111 264 312 369-370 404 417-421 |
| | | | 425 535 537 577 598 614 836 857 1141 |
| | | | 1208 1268 |
| fetal muscle | Invitrogen | FMS002 | 537 |
| fetal skin | Invitrogen | FSK001 | 13-26 32 41 51 89 107 111 147 151 |
| | | | 225 264 316 405 422-429 488-494 496 |
| | | | 519 534-535 537 566 675 732 859 876-877 |
| | | | 898 947 949-950 963 976 1001 |
| | | | 1062 1076 1083 1117 1144 1165 1268 |
| | | | 1281 |
| fetal skin | Invitrogen | FSK002 | 537 812 |
| fetal spleen | BioChain | FSP001 | 87 549 |
| umbilical cord | BioChain | FUC001 | 27-33 41 49 151 215 238 248-249 301 |
| | | | 316 446 495-503 519 521 534-535 537 |
| | | | 582 634 691 877 883 927 944-950 963 |
| | | | 976 1001 1075 1142-1143 1171 1218 |
| | | | 1243 1308 |
| fetal brain | GIBCO | HFB001 | 41 49 57 79 87 103 111 120 132-135 |
| | | | 138 145 151 188 197 207 215 238 264 |
| | | | 271 294 316 367 414 440 446 466 504 |
| | | | 513-514 535 542-543 550 564 571 596 |
| | | | 635 648-654 675 711-715 722-723 798 |
| | | | 832 872 876 883 927 976 1095 1144 |
| | | | 1168 1171 1178 1211 1335 |
| macrophage | Invitrogen | HMP001 | 238 |
| infant brain | Columbia | IB2002 | 49-50 77 81 89 105 111 136-138 140 |
| | University | | 151 161 175-179 185 216-217 264 295 |
| | | | 299 308-310 371-373 462 476 504 511-513 |
| | | | 533 537 564 566 571 655-657 662 |
| | | | 683 716-720 723 752 790-803 829 832 |
| | | | 858-859 876 898 909 949 976 1045-1047 |
| | | | 1076-1087 1090 1093 1116 1122 |
| | | | 1144 1209-1213 1225 1233 1256 1319 |
| | | | 1341 |
| infant brain | Columbia | IB2003 | 41 50 77 104 132 215 238 508 512-513 |
| | University | | 519 566 655 714 794 918 943 976 1067 |
| | | | 1092-1093 1233 |
| infant brain | Columbia | IBM002 | 311 472-473 753 1214 |
| | University | | |
| infant brain | Columbia | IBS001 | 51 111 376 474 790 876 949 1144 1204 |
| | University | | 1221 |
| lung, fibroblast | Strategene | LFB001 | 151 316 462 514 534 582 675 939 1131 |
| lung tumor | Invitrogen | LGT002 | 1-7 41 74 79 94 115 120 138-139 156 |
| | | | 215 217 269 280 296 337 374-375 384 |
| | | | 404 446 454 475-480 498 514 518-519 |
| | | | 522 537 545 564 577 597 653 658 705 |
| | | | 721-724 754-756 779 859 868 872-874 |
| | | | 876-877 919 927 949 951-952 959 976 |
| | | | 1002 1042 1048-1053 1076 1083 1088-1089 |
| | | | 1131 1144-1147 1216-1218 1229 |
| | | | 1293 1311 |
| lymphocytes | ATCC | LPC001 | 41 74 111 132 151 253 316 446 550 |
| | | | 634 844 927 976 1085 1268 |
| leukocyte | GIBCO | LUC001 | 8 11 41 74 86 91-98 101 109 111 120 |
| | | | 147 151 212 215 218 238 252 288 312-314 |
| | | | 316 338 359 408 427 443-447 505 |
| | | | 510 512 514 518 534 545 549-550 561 |
| | | | 564 566 571 577 580 582 587-609 615 |
| | | | 632-638 658-659 698 714 725-728 832 |
| | | | 836 841 859 866 873-874 882-883 918-919 |
| | | | 927 943 952 963 976 1042 1076 |
| | | | 1083 1090 1148 1152 1168 1195 1219-1220 |
| | | | 1224 |
| leukocyte | Clontech | LUC003 | 74 100 215 232 238 339-341 446 545 |
| | | | 657 660 729 873 883 927 952 963 1008 |
| | | | 1042 1116 1120 1149-1150 1215 1222 |
| Melanoma from cell | Clontech | MEL004 | 210 215 238 342 534 545 592 722 873 |
| line ATCC #CRL | | | 919 929 939 952 976 1071 1118 1218 |
| 1424 | | | 1235 1245 |
| mammary gland | Invitrogen | MMG001 | 8-10 40-41 49 73 80 114 138-140 147 |
| | | | 217 250-256 264 297-299 305 377-378 |
| | | | 398 446 481-486 505 512 537 545 549 |
| | | | 571 592 725 730-733 816 829 836 844 |
| | | | 868 873 876-877 898 926 943 951-960 |
| | | | 963 976 995 1034 1042 1048 1054-1055 |
| | | | 1076 1083 1091 1093 1116-1117 |
| | | | 1124 1152 1302 |
| induced neuron cells | Strategene | NTD001 | 39 101 111 138 238 361 1225 1251 |
| | | | 1319 |
| retinoid acid induced | Strategene | NTR001 | 74 225 976 |
| neuronal cells | | | |
| neuronal cells | Strategene | NTU001 | 129 225 238 304 313 361 657 976 |
| pituitary gland | Clontech | PIT004 | 976 |
| placenta | Clontech | PLA003 | 38 976 |
| prostate | Clontech | PRT001 | 111 188 238 257-258 564 724 961-966 |
| | | | 1067 1095 |
| rectum | Invitrogen | REC001 | 238 430-431 841 859 868 963 1001 |
| | | | 1116 |
| salivary gland | Clontech | SAL001 | 8 151 402 432-433 446 496 868 952 |
| | | | 976 1083 1120 1151 1184 |
| small intestine | Clontech | SIN001 | 8 101 147 215 259-266 446 462 505 |
| | | | 545 592 660 789 836 866 873 927 952 |
| | | | 963 967-978 1042 1120 1152 1223-1224 |
| skeletal muscle | Clontech | SKM001 | 238 302 927 943 992 1031 |
| spinal cord | Clontech | SPC001 | 74 111 132 151 215-216 238 264 267-270 |
| | | | 343-344 353 379 516 537 566 740 |
| | | | 828 927 976 979-994 1092 1153-1159 |
| | | | 1225 1250 |
| adult spleen | Clontech | SPLc01 | 698 859 1042 |
| stomach | Clontech | STO001 | 210 238 271-272 537 580 705 918 952 |
| | | | 995 1171 |
| thalamus | Clontech | THA002 | 61 219-220 273-276 312 315 330 596 |
| | | | 963 996-1007 1059 1093 1160-1162 |
| thymus | Clonetech | THM001 | 8 120 151 208 221 316-317 353 639 |
| | | | 750 867 874 878-881 927 963 1023 |
| | | | 1083 1094-1096 1124 |
| thymus | Clontech | THMc02 | 8 61 114 129 132 210 225 231 306 |
| | | | 317-319 336 340 359 380 398 446 448-463 |
| | | | 512 519 545 554 587 598 698 724-725 |
| | | | 789 812 836 868 873 927 947 952 |
| | | | 976 1007 1042 1083 1085 1097-1116 |
| | | | 1122 1147 1177 1226-1229 1234 1311 |
| | | | 1313 |
| thyroid gland | Clontech | THR001 | 14 41 49 76 94 111 144 151 183 188 |
| | | | 210 217 222 253 264 271 277-286 294 |
| | | | 320-326 345-352 361 381-382 446 467 |
| | | | 483 514 534 549-550 564 578 602 649 |
| | | | 844 882-883 927 950 956 976 1008-1028 |
| | | | 1076 1083 1117-1120 1142 1163-1175 |
| | | | 1230-1238 1308 |
| trachea | Clontech | TRC001 | 223-225 238 287 353-354 514 |
| | | | 545 592 611 873 883-884 927 |
| | | | 952 1029-1031 1042 1151-1152 |
| | | | 1170 1176-1177 1239 |
| uterus | Clontech | UTR001 | 151 226 288-290 355 537 877 |
| | | | 885-886 976 1001 1032-1033 |
| | | | 1232 |

[0418] TABLE 2

| SEQ | | | | Smith- | |
|---|---|---|---|---|---|
| ID | Accession | | | Waterman | % |
| NO: | No. | Species | Description | Score | Identity |
| 1 | B02829 | Homo sapiens | Human G protein coupled receptor hRUP5 | 460 | 100 |
| | | | protein SEQ ID NO: 10. | | |
| 2 | G03564 | Homo sapiens | Human secreted protein, SEQ ID NO: 7645. | 111 | 51 |
| 3 | R26173 | Homo sapiens | Part of Major Yo paraneoplastic antigen | 293 | 76 |
| | | | (CDR62) encoded by clone pY2. | | |
| 4 | L29536 | Homo sapiens | calcium channel L-type alpha 1 subunit | 191 | 65 |
| 5 | Y94943 | Homo sapiens | Human secreted protein clone yt14_1 protein | 251 | 50 |
| | | | sequence SEQ ID NO: 92. | | |
| 6 | M11507 | Homo sapiens | transferrin receptor | 120 | 95 |
| 7 | AF099100 | Homo sapiens | WD-repeat protein 6 | 1941 | 93 |
| 8 | Y92338 | Homo sapiens | Human cancer associated antigen precursor from | 245 | 82 |
| | | | clone NY-REN-45. | | |
| 9 | G01343 | Homo sapiens | Human secreted protein, SEQ ID NO: 5424. | 226 | 91 |
| 10 | AJ133798 | Homo sapiens | copine VII protein | 1127 | 68 |
| 11 | G02449 | Homo sapiens | Human secreted protein, SEQ ID NO: 6530. | 584 | 99 |
| 12 | X98330 | Homo sapiens | ryanodine receptor 2 | 282 | 78 |
| 13 | AL024498 | Homo sapiens | dJ417M14.2 (novel serine/threonine-protein | 293 | 100 |
| | | | kinase (ortholog of mouse and rat MAK (male | | |
| | | | germ cell-associated kinase)) | | |
| 14 | AF045577 | Pan | olfactory receptor OR93Ch | 191 | 36 |
| | | troglodytes | | | |
| 15 | G03131 | Homo sapiens | Human secreted protein, SEQ ID NO: 7212. | 93 | 39 |
| 16 | U26595 | Rattus | prostaglandin F2a receptor regulatory protein | 569 | 89 |
| | | norvegicus | precursor | | |
| 17 | B08918 | Homo sapiens | Human secreted protein sequence encoded by | 99 | 44 |
| | | | gene 28 SEQ ID NO: 75. | | |
| 18 | Y36203 | Homo sapiens | Human secreted protein #75. | 165 | 75 |
| 19 | U15647 | Mus | reverse transcriptase | 106 | 40 |
| | | musculus | | | |
| 20 | G02701 | Homo sapiens | Human secreted protein, SEQ ID NO: 6782. | 544 | 100 |
| 21 | Y35923 | Homo sapiens | Extended human secreted protein sequence, SEQ | 1691 | 100 |
| | | | ID NO. 172. | | |
| 22 | G04030 | Homo sapiens | Human secreted protein, SEQ ID NO: 8111. | 380 | 96 |
| 23 | G02455 | Homo sapiens | Human secreted protein, SEQ ID NO: 6536. | 123 | 50 |
| 24 | AF036329 | Homo sapiens | gonadotropin-releasing hormone precursor, | 284 | 90 |
| | | | second form | | |
| 25 | G04067 | Homo sapiens | Human secreted protein, SEQ ID NO: 8148. | 96 | 32 |
| 26 | S80119 | Rattus sp. | reverse transcriptase homolog | 100 | 34 |
| 27 | U83303 | Homo sapiens | line-1 reverse transcriptase | 101 | 35 |
| 28 | G03267 | Homo sapiens | Human secreted protein, SEQ ID NO: 7348. | 135 | 45 |
| 29 | G04067 | Homo sapiens | Human secreted protein, SEQ ID NO: 8148. | 83 | 42 |
| 30 | G02872 | Homo sapiens | Human secreted protein, SEQ ID NO: 6953. | 116 | 72 |
| 31 | G03371 | Homo sapiens | Human secreted protein, SEQ ID NO: 7452. | 96 | 67 |
| 32 | G03224 | Homo sapiens | Human secreted protein, SEQ ID NO: 7305. | 58 | 32 |
| 33 | Y66688 | Homo sapiens | Membrane-bound protein PRO1152. | 2457 | 98 |
| 34 | Y87071 | Homo sapiens | Human secreted protein sequence SEQ ID | 348 | 95 |
| | | | NO: 110. | | |
| 35 | U15131 | Homo sapiens | p126 | 182 | 48 |
| 36 | Y73464 | Homo sapiens | Human secreted protein clone y14_1 protein | 982 | 90 |
| | | | sequence SEQ ID NO: 150. | | |
| 37 | AL133215 | Homo sapiens | bA108L7.6 (semaphorin 4G (sema domain, | 687 | 99 |
| | | | immunoglobulin domain (Ig), transmembrane | | |
| | | | domain (TM) and short cytoplasmic domain)) | | |
| 38 | AC067969 | amino acids | Homo sapiens ryanodine receptor 1 (skeletal) | 386 | 66 |
| | | 3338-4088 | | | |
| 39 | AL031588 | Homo sapiens | dJ1163J1.1 (mostly supported by GENSCAN, | 493 | 76 |
| | | | FGENES and GENEWISE) | | |
| 40 | G03628 | Homo sapiens | Human secreted protein, SEQ ID NO: 7709. | 110 | 51 |
| 41 | AF132969 | Homo sapiens | CGI-35 protein | 228 | 68 |
| 42 | Y36268 | Homo sapiens | Human secreted protein encoded by gene 45. | 220 | 88 |
| 43 | X61048 | Hydra sp. | mini-collagen | 105 | 35 |
| 44 | M76546 | Helianthus | hydroxyproline-rich protein | 110 | 31 |
| | | annuus | | | |
| 45 | U82288 | Caenorhabditis | Rac-like GTPase | 139 | 70 |
| | | elegans | | | |
| 46 | G03477 | Homo sapiens | Human secreted protein, SEQ ID NO: 7558. | 118 | 58 |
| 47 | AF090942 | Homo sapiens | PRO0657 | 113 | 63 |
| 48 | G03564 | Homo sapiens | Human secreted protein, SEQ ID NO: 7645. | 90 | 59 |
| 49 | AJ005560 | Mus | SPR2B protein | 72 | 56 |
| | | musculus | | | |
| 50 | G02450 | Homo sapiens | Human secreted protein, SEQ ID NO: 6531. | 385 | 98 |
| 51 | Y91649 | Homo sapiens | Human secreted protein sequence encoded by | 973 | 94 |
| | | | gene 60 SEQ ID NO: 322. | | |
| 52 | U93563 | Homo sapiens | putative p150 | 105 | 38 |
| 53 | Y55927 | Homo sapiens | Human STLK2 protein. | 699 | 85 |
| 54 | G02607 | Homo sapiens | Human secreted protein, SEQ ID NO: 6688. | 145 | 56 |
| 55 | AB008175 | Mus | hepatic nuclear factor 1-beta short form | 356 | 74 |
| | | musculus | | | |
| 56 | M68941 | Homo sapiens | protein-tyrosine phophatase | 165 | 41 |
| 57 | AL031600 | Homo sapiens | c390E6.1 (chloride channel 7) | 338 | 76 |
| 58 | AF011417 | Mus | putative pheromone receptor | 143 | 55 |
| | | musculus | | | |
| 59 | AF167320 | Mus | zinc finger protein ZFP113 | 558 | 68 |
| | | musculus | | | |
| 60 | U73036 | Homo sapiens | interferon regultory factor 7 | 263 | 96 |
| 61 | X07984 | Mus | protein-tyrosine kinase | 297 | 69 |
| | | musculus | | | |
| 62 | Y29861 | Homo sapiens | Human secreted protein clone cb98_4. | 791 | 98 |
| 63 | U35376 | Homo sapiens | repressor transcriptional factor | 485 | 65 |
| 64 | AF265555 | Homo sapiens | ubiquitin-conjugating BIR-domain enzyme | 785 | 74 |
| | | | APOLLON | | |
| 65 | G03883 | Homo sapiens | Human secreted protein, SEQ ID NO: 7964. | 88 | 95 |
| 66 | AF177390 | Manduca | antennal specific membrane protein AMP | 274 | 54 |
| | | sexta | | | |
| 67 | AB040800 | Homo sapiens | SREB2 | 614 | 100 |
| 68 | AF030027 | Equine | 24 | 213 | 26 |
| | | herpesvirus 4 | | | |
| 69 | G02965 | Homo sapiens | Human secreted protein, SEQ ID NO: 7046. | 261 | 95 |
| 70 | W75770 | Homo sapiens | Human oxidoreductase YTFO3. | 1144 | 98 |
| 71 | AB011135 | Homo sapiens | KIAA0563 protein | 239 | 76 |
| 72 | AB014885 | Halocynthia | HrPOPK-1 | 813 | 78 |
| | | roretzi | | | |
| 73 | AF045454 | Cavia | phospholipase B | 955 | 73 |
| | | porcellus | | | |
| 74 | J02870 | Mus | laminin receptor | 308 | 61 |
| | | musculus | | | |
| 75 | Y00826 | Rattus | gp210 (AA 1-1886) | 413 | 84 |
| | | norvegicus | | | |
| 76 | AF117754 | Homo sapiens | thyroid hormone receptor-associated protein | 351 | 54 |
| | | | complex component TRAP240 | | |
| 77 | Y38422 | Homo sapiens | Human secreted protein. | 468 | 76 |
| 78 | Y14596 | Homo sapiens | Human T-type voltage-gated Ca channel alpha- | 1357 | 99 |
| | | | 1-I (hCavT3). | | |
| 79 | Y14591 | Human | APM-1 protein | 767 | 100 |
| | | papillomavirus | | | |
| | | type 68 | | | |
| 80 | AL137802 | Homo sapiens | dJ798A10.2 (KIAA0445 protein) | 71 | 34 |
| 81 | AP000383 | Arabidopsis | protein arginine N-methyltransferase-like protein | 359 | 65 |
| | | thaliana | | | |
| 82 | L46815 | Mus | DNA binding protein Rc | 895 | 75 |
| | | musculus | | | |
| 83 | G01600 | Homo sapiens | Human secreted protein, SEQ ID NO: 5681. | 315 | 96 |
| 84 | Y53886 | Homo sapiens | A suppressor of cytokine signalling protein | 538 | 71 |
| | | | designated HSCOP-6. | | |
| 85 | AB029002 | Homo sapiens | KIAA1079 protein | 134 | 42 |
| 86 | Y28678 | Homo sapiens | Human cw272_7 secreted protein. | 325 | 62 |
| 87 | Y99368 | Homo sapiens | Human PRO1326 (UNQ686) amino acid | 156 | 48 |
| | | | sequence SEQ ID NO: 100. | | |
| 88 | AJ225124 | Mus | hyperpolarization-activated cation channel, | 487 | 95 |
| | | musculus | HAC3 | | |
| 89 | AF177203 | Homo sapiens | cerebral cell adhesion molecule | 290 | 56 |
| 90 | Y28280 | Homo sapiens | Human G-protein coupled receptor GRIR-2. | 326 | 79 |
| 91 | L39891 | Homo sapiens | polycystic kidney disease-associated protein | 1751 | 95 |
| 92 | AF064876 | Homo sapiens | ion channel BCNG-1 | 953 | 99 |
| 93 | AF170723 | Homo sapiens | protein kinase STK10 | 401 | 53 |
| 94 | X13292 | Trypanosoma | GPI-phospholipase C (AA 1-358) | 151 | 37 |
| | | brucei | | | |
| 95 | Y34127 | Homo sapiens | Human potassium channel K + Hnov11. | 661 | 99 |
| 96 | X03638 | Rattus | sodium channel protein I (aa 1-2009) | 1775 | 92 |
| | | norvegicus | | | |
| 97 | AF134213 | Homo sapiens | ubiquitin-specific protease | 1995 | 99 |
| 98 | G00838 | Homo sapiens | Human secreted protein, SEQ ID NO: 4919. | 213 | 38 |
| 99 | AF021935 | Rattus | mytonic dystrophy kinase-related Cdc42-binding | 675 | 48 |
| | | norvegicus | kinase | | |
| 100 | AF279265 | Homo sapiens | putative anion transporter 1 | 867 | 98 |
| 101 | AC007878 | Homo sapiens | match to nuclear protein, NP220; note: sequence | 160 | 60 |
| | | | difference at residue 58 | | |
| 102 | U22829 | Mus | P2Y purinoceptor | 264 | 42 |
| | | musculus | | | |
| 103 | Y45023 | Homo sapiens | Human sensory transduction G-protein coupled | 516 | 99 |
| | | | receptor-B3. | | |
| 104 | Y94990 | Homo sapiens | Human secreted protein vb21_1, SEQ ID NO: 20. | 787 | 98 |
| 105 | Y87342 | Homo sapiens | Human signal peptide containing protein HSPP- | 343 | 57 |
| | | | 119 SEQ ID NO: 119. | | |
| 106 | AF169312 | Homo sapiens | hepatic angiopoietin-related protein | 212 | 67 |
| 107 | AF116657 | Homo sapiens | PRO1310 | 74 | 52 |
| 108 | AE000401 | Escherichia | sialic acid transporter | 587 | 96 |
| | | coli | | | |
| 109 | Y38395 | Homo sapiens | Human secreted protein encoded by gene No. 10. | 693 | 100 |
| 110 | Y78801 | Homo sapiens | Hydrophobic domain containing protein clone | 182 | 94 |
| | | | HP00631 amino acid sequence. | | |
| 111 | Z25535 | Homo sapiens | nuclear pore complex protein hnup153 | 464 | 85 |
| 112 | Y94939 | Homo sapiens | Human secreted protein clone ye90_1 protein | 274 | 51 |
| | | | sequence SEQ ID NO: 84. | | |
| 113 | AF016365 | Homo sapiens | hexokinase 1 isoform td | 301 | 71 |
| 114 | AC007956 | Homo sapiens | unknown | 520 | 75 |
| 115 | M83738 | Homo sapiens | protein-tyrosine phosphatase | 251 | 92 |
| 116 | AL157952 | Homo sapiens | dJ875K15.1.1 (ets homologous factor (ets- | 484 | 91 |
| | | | domain transcription factor ESE-3A, isoform 1)) | | |
| 117 | W18084 | Homo sapiens | Human Aurora-2. | 546 | 87 |
| 118 | L41816 | Homo sapiens | cam kinase I | 407 | 62 |
| 119 | AJ006710 | Rattus | phosphatidylinositol 3-kinase | 627 | 93 |
| | | norvegicus | | | |
| 120 | AF026954 | Bos taurus | pyruvate dehydrogenase phosphatase regulatory | 1646 | 94 |
| | | | subunit precursor, PDPr | | |
| 121 | S39392 | Homo sapiens | protein tyrosine phosphatase, PTPase {EC | 373 | 68 |
| | | | 3.1.3.48} | | |
| 122 | U60805 | Homo sapiens | oncostatin-M specific receptor beta subunit | 262 | 88 |
| 123 | Y44403 | Homo sapiens | Human truncated tankyrase-1. | 111 | 35 |
| 124 | U88167 | Caenorhabditis | contains similarity to C2 domains | 219 | 29 |
| | | elegans | | | |
| 125 | AF300648 | Homo sapiens | guanine nucleotide binding protein beta subunit 4 | 693 | 90 |
| 126 | AB021861 | Mus | apoptosis signal-regulating kinase 2 | 153 | 65 |
| | | musculus | | | |
| 127 | AF305210 | Homo sapiens | concentrative Na+-nucleoside cotransporter | 807 | 97 |
| | | | hCNT3 | | |
| 128 | M90360 | Homo sapiens | protein kinase | 220 | 73 |
| 129 | D32202 | Homo sapiens | alpha 1C adrenergic receptor isoform 2 | 574 | 86 |
| 130 | AF208043 | Homo sapiens | IFI16b | 496 | 67 |
| 131 | AF201734 | Mus | testis specific serine kinase-3 | 800 | 87 |
| | | musculus | | | |
| 132 | AF112886 | Bos taurus | differentiation enhancing factor 1 | 159 | 74 |
| 133 | AJ278314 | Homo sapiens | phospholipase C-beta-1b | 554 | 85 |
| 134 | W74802 | Homo sapiens | Human secreted protein encoded by gene 73 | 1157 | 87 |
| | | | clone HSQEL25. | | |
| 135 | AB020335 | Homo sapiens | Pancreas-specific gene | 668 | 96 |
| 136 | W80408 | Homo sapiens | A secreted protein encoded by clone dt674_2. | 866 | 98 |
| 137 | AC002563 | Homo sapiens | putative RHO/RAC effector protein; 95% | 5041 | 99 |
| | | | similarity to P49205 (PID: g1345860) | | |
| 138 | Y96736 | Homo sapiens | PRO3434, a novel secreted protein. | 891 | 100 |
| 139 | AB024034 | Arabidopsis | DNA-damage inducible protein DDI1-like | 147 | 55 |
| | | thaliana | | | |
| 140 | W97809 | Homo sapiens | Human GTPase regulator GRAF. | 248 | 56 |
| 141 | Y51557 | Homo sapiens | Human PLA2 protein. | 125 | 46 |
| 142 | AF090113 | Rattus | AMPA receptor binding protein | 623 | 93 |
| | | norvegicus | | | |
| 143 | W26642 | Homo sapiens | Human RECK cancer-inhibiting protein. | 641 | 82 |
| 144 | U87306 | Rattus | transmembrane receptor UNC5H2 | 578 | 84 |
| | | norvegicus | | | |
| 145 | AF264014 | Homo sapiens | scavenger receptor cysteine-rich type 1 protein | 727 | 92 |
| | | | M160 precursor | | |
| 146 | W63683 | Homo sapiens | Human secreted protein 3. | 140 | 40 |
| 147 | M96264 | Homo sapiens | galactose-1-phosphate uridyl transferase | 513 | 81 |
| 148 | D64014 | Escherichia | HrsA | 818 | 90 |
| | | coli | | | |
| 149 | M83316 | Escherichia | pppGpp phosphohydrolase | 915 | 95 |
| | | coli | | | |
| 150 | AL163279 | Homo sapiens | homolog to cAMP response element binding and | 1261 | 99 |
| | | | beta transducin family proteins | | |
| 151 | AF179867 | Homo sapiens | STE20-like kinase | 940 | 99 |
| 152 | R95332 | Homo sapiens | Tumor necrosis factor receptor 1 death domain | 392 | 61 |
| | | | ligand (clone 3TW). | | |
| 153 | AF151859 | Homo sapiens | CGI-101 protein | 370 | 92 |
| 154 | X66957 | Homo sapiens | hexokinase type 1 | 489 | 81 |
| 155 | Y16355 | Homo sapiens | alternatively spliced form | 432 | 92 |
| 156 | G00857 | Homo sapiens | Human secreted protein, SEQ ID NO: 4938. | 349 | 78 |
| 157 | AF159455 | Mus | zinc finger protein | 352 | 74 |
| | | musculus | | | |
| 158 | L76191 | Homo sapiens | interleukin-1 receptor-associated kinase | 537 | 76 |
| 159 | AP001743 | Homo sapiens | putative gene, ankirin like, possible dual | 670 | 98 |
| | | | specifity Ser/Thr/Tyr kinase domain | | |
| 160 | AJ250425 | Rattus | Collybistin I | 556 | 74 |
| | | norvegicus | | | |
| 161 | G02885 | Homo sapiens | Human secreted protein, SEQ ID NO: 6966. | 370 | 100 |
| 162 | Z22968 | Homo sapiens | M130 antigen | 610 | 100 |
| 163 | AF181121 | Homo sapiens | ATP-dependent Ca2+ pump PMR1 | 336 | 92 |
| 164 | AF055636 | Homo sapiens | leucine-rich glioma-inactivated protein precursor | 455 | 94 |
| 165 | AF160798 | Rattus | calcium transporter CaT1 | 700 | 96 |
| | | norvegicus | | | |
| 166 | Y76332 | Homo sapiens | Fragment of human secreted protein encoded by | 327 | 45 |
| | | | gene 38. | | |
| 167 | Y48607 | Homo sapiens | Human breast tumor-associated protein 68. | 1072 | 99 |
| 168 | AB020741 | Mus | NIK-related kinase | 197 | 43 |
| | | musculus | | | |
| 169 | AF252293 | Homo sapiens | PAR3 | 596 | 44 |
| 170 | U59429 | Cricetinae | diacylglycerol kinase eta | 481 | 82 |
| | | gen. sp. | | | |
| 171 | AF035268 | Homo sapiens | phosphatidylserine-specific phospholipase A1 | 386 | 42 |
| 172 | AF127085 | Mus | semaphorin cytoplasmic domain-associated | 507 | 82 |
| | | musculus | protein 3B | | |
| 173 | Y27918 | Homo sapiens | Human secreted protein encoded by gene No. | 653 | 99 |
| | | | 123. | | |
| 174 | G02979 | Homo sapiens | Human secreted protein, SEQ ID NO: 7060. | 538 | 97 |
| 175 | U36488 | Mus | embryonic stem cell phosphatase | 168 | 55 |
| | | musculus | | | |
| 176 | W95629 | Homo sapiens | Homo sapiens secreted protein gene clone | 1022 | 100 |
| | | | gm196_4. | | |
| 177 | AF289023 | Homo sapiens | formiminotransferase cyclodeaminase form D | 255 | 93 |
| 178 | X04936 | Homo sapiens | T-cell receptor alpha-chain (413 is 2nd base in | 710 | 99 |
| | | | codon) | | |
| 179 | AF127481 | Homo sapiens | non-ocogenic Rho GTPase-specific GTP | 175 | 80 |
| | | | exchange factor | | |
| 180 | G00978 | Homo sapiens | Human secreted protein, SEQ ID NO: 5059. | 517 | 94 |
| 181 | Y66645 | Homo sapiens | Membrane-bound protein PRO1310. | 671 | 96 |
| 182 | AF110640 | Homo sapiens | orphan seven-transmembrane receptor | 862 | 100 |
| 183 | AB020854 | Bos taurus | orphan transporter short splicing variant | 766 | 84 |
| 184 | AF169691 | Homo sapiens | cadherin-like protein VR8 | 375 | 38 |
| 185 | AF126372 | Homo sapiens | thyrotropin-releasing hormone degrading | 985 | 99 |
| | | | ectoenzyme | | |
| 186 | L20966 | Homo sapiens | phosphodiesterase | 541 | 76 |
| 187 | G02920 | Homo sapiens | Human secreted protein, SEQ ID NO: 7001. | 254 | 93 |
| 188 | Y94918 | Homo sapiens | Human secreted protein clone dd504_18 protein | 301 | 98 |
| | | | sequence SEQ ID NO: 42. | | |
| 189 | Y66713 | Homo sapiens | Membrane-bound protein PRO1309. | 694 | 100 |
| 190 | G03244 | Homo sapiens | Human secreted protein, SEQ ID NO: 7325. | 331 | 73 |
| 191 | U36771 | Rattus | sn-glycerol 3-phosphate acyltransferase | 707 | 92 |
| | | norvegicus | | | |
| 192 | R05935 | Homo sapiens | Secreted GPIIb subunit of multiple subunit | 157 | 72 |
| | | | polypeptide (MSP)GPIIb-IIIa. | | |
| 193 | M92084 | Theileria | casein kinase II alpha subunit | 364 | 50 |
| | | parva | | | |
| 194 | Y66645 | Homo sapiens | Membrane-bound protein PRO1310. | 448 | 90 |
| 195 | W95631 | Homo sapiens | Homo sapiens secreted protein gene clone | 382 | 49 |
| | | | hj968_2. | | |
| 196 | AF255614 | Rattus | scaffolding protein SLIPR | 680 | 99 |
| | | norvegicus | | | |
| 197 | AC021640 | Arabidopsis | putative phosphatidate phosphohydrolase | 300 | 41 |
| | | thaliana | | | |
| 198 | AF073967 | Mus | olfactory receptor | 316 | 43 |
| | | musculus | | | |
| | | domesticus | | | |
| 199 | W01730 | Homo sapiens | Human G-protein receptor HPRAJ70. | 617 | 98 |
| 200 | AF117948 | Homo sapiens | pancreas-enriched phospholipase C | 625 | 89 |
| 201 | AF128625 | Homo sapiens | CDC42-binding protein kinase beta | 636 | 94 |
| 202 | AF117946 | Homo sapiens | Link guanine nucleotide exchange factor II | 1303 | 100 |
| 203 | Y53021 | Homo sapiens | Human secreted protein clone qc646_1 protein | 701 | 99 |
| | | | sequence SEQ ID NO: 48. | | |
| 204 | AF227968 | Homo sapiens | SH2-B beta signaling protein | 182 | 79 |
| 205 | S81752 | Homo sapiens | DPH2L = candidate tumor suppressor gene | 375 | 100 |
| | | | {ovarian cancer critical region of deletion} | | |
| 206 | U18315 | Sus scrofa | parathyroid receptor | 122 | 60 |
| 207 | AF255342 | Homo sapiens | putative pheromone receptor V1RL1 long form | 170 | 96 |
| 208 | S52051 | Rattus sp. | neurotransmitter transporter | 715 | 94 |
| 209 | W63683 | Homo sapiens | Human secreted protein 3. | 840 | 99 |
| 210 | D79992 | Homo sapiens | similar to Drosophila photoreceptor cell-specific | 541 | 82 |
| | | | protein, calphotin. | | |
| 211 | AF117948 | Homo sapiens | pancreas-enriched phospholipase C | 1348 | 99 |
| 212 | U81035 | Rattus | ankyrin binding cell adhesion molecule | 471 | 69 |
| | | norvegicus | neurofascin | | |
| 213 | AF154846 | Homo sapiens | zinc finger protein | 798 | 56 |
| 214 | AF102777 | Mus | FYVE finger-containing phosphoinositide kinase | 933 | 93 |
| | | musculus | | | |
| 215 | AL163303 | Homo sapiens | putative gene containing transmembrane domain | 523 | 89 |
| 216 | U26595 | Rattus | prostaglandin F2a receptor regulatory protein | 563 | 78 |
| | | norvegicus | precursor | | |
| 217 | G04095 | Homo sapiens | Human secreted protein, SEQ ID NO: 8176. | 644 | 98 |
| 218 | X75756 | Homo sapiens | protein kinase C mu | 314 | 81 |
| 219 | Y66723 | Homo sapiens | Membrane-bound protein PRO1100. | 770 | 98 |
| 220 | D88577 | Mus | Kupffer cell receptor | 567 | 40 |
| | | musculus | | | |
| 221 | AF258465 | Homo sapiens | OTRPC4 | 853 | 100 |
| 222 | AF021935 | Rattus | mytonic dystrophy kinase-related Cdc42-binding | 636 | 96 |
| | | norvegicus | kinase | | |
| 223 | AL136527 | Homo sapiens | bA215B13.1 (A kinase (PRKA) anchor protein | 693 | 100 |
| | | | 11) | | |
| 224 | AB032417 | Homo sapiens | WNT receptor Frizzled-4 | 690 | 99 |
| 225 | AF030430 | Mus | semaphorin VIa | 703 | 68 |
| | | musculus | | | |
| 226 | AE000218 | Escherichia | putative dihydroxyacetone kinase (EC 2.7.1.2) | 297 | 39 |
| | | coli | | | |
| 227 | AF302150 | Homo sapiens | phosphoinositol 3-phosphate-binding protein-2 | 2080 | 100 |
| 228 | AB024573 | Mus | GTP-binding like protein 2 | 265 | 88 |
| | | musculus | | | |
| 229 | AF122924 | Xenopus | Wnt inhibitory factor-1 | 316 | 40 |
| | | laevis | | | |
| 230 | G03205 | Homo sapiens | Human secreted protein, SEQ ID NO: 7286. | 229 | 100 |
| 231 | X98260 | Homo sapiens | M-phase phosphoprotein 11 | 265 | 92 |
| 232 | R92754 | Homo sapiens | Human growth differentiation factor-12. | 682 | 95 |
| 233 | R75111 | Homo sapiens | Glycosyl-phosphatidylinositol-specific | 290 | 100 |
| | | | phospholipase-D. | | |
| 234 | W69431 | Homo sapiens | Human secreted protein cw1233_3. | 235 | 97 |
| 235 | Y08686 | Homo sapiens | serine palmitoyltransferase, subunit II | 859 | 81 |
| 236 | AF118275 | Homo sapiens | atrophin-related protein ARP | 117 | 37 |
| 237 | X81466 | Mus | Embryo Brain Kinase | 460 | 62 |
| | | musculus | | | |
| 238 | U64857 | Caenorhabditis | similar to the BPTI/Kunitz family of inhibitors; | 284 | 33 |
| | | elegans | most similar to tissue factor pathway inhibitor | | |
| | | | precursor (TFPI) | | |
| 239 | AJ250840 | Mus | serine/threonine protein kinase | 739 | 63 |
| | | musculus | | | |
| 240 | AJ223472 | Mus | transcription elongation factor TFIIS.h | 222 | 38 |
| | | musculus | | | |
| 241 | Y94906 | Homo sapiens | Human secreted protein clone rb649_3 protein | 353 | 52 |
| | | | sequence SEQ ID NO: 18. | | |
| 242 | AF169301 | Homo sapiens | Na+/sulfate cotransporter SUT-1 | 591 | 99 |
| 243 | L22022 | Rattus | orphan transporter v7-3 | 667 | 93 |
| | | norvegicus | | | |
| 244 | AF016191 | Rattus | potassium channel | 1043 | 98 |
| | | norvegicus | | | |
| 245 | AF097366 | Homo sapiens | cone sodium-calcium potassium exchanger | 645 | 98 |
| 246 | Y29868 | Homo sapiens | Human secreted protein clone pp325_9. | 497 | 98 |
| 247 | AF180475 | Homo sapiens | Not4-Np | 188 | 83 |
| 248 | Y17227 | Homo sapiens | Human secreted protein (clone yal-1). | 690 | 99 |
| 249 | AF250910 | Manduca | death-associated small cytoplasmic leucine-rich | 182 | 31 |
| | | sexta | protein SCLP | | |
| 250 | AF192756 | Kaposi's | Orf73 | 134 | 34 |
| | | sarcoma- | | | |
| | | associated | | | |
| | | herpesvirus | | | |
| 251 | AB022694 | Homo sapiens | MOK protein kinase | 209 | 83 |
| 252 | W55045 | Homo sapiens | Neural adhesion molecule (ethb0018f2 product). | 469 | 100 |
| 253 | L46815 | Mus | DNA binding protein Rc | 251 | 67 |
| | | musculus | | | |
| 254 | W68505 | Homo sapiens | Human acid sensing ionic channel. | 173 | 82 |
| 255 | AF070066 | Mus | Citron-K kinase | 1201 | 98 |
| | | musculus | | | |
| 256 | G02491 | Homo sapiens | Human secreted protein, SEQ ID NO: 6572. | 460 | 100 |
| 257 | Z12841 | Oryctolagus | Phospholipase | 368 | 80 |
| | | cuniculus | | | |
| 258 | Y95436 | Homo sapiens | Human calcium channel SOC-3/CRAC-2. | 1857 | 99 |
| 259 | AJ222968 | Mus | L-periaxin | 430 | 72 |
| | | musculus | | | |
| 260 | AJ250839 | Homo sapiens | serine/threonine protein kinase | 861 | 100 |
| 261 | AJ249977 | Homo sapiens | AMP-activated protein kinase gamma 3 subunit | 758 | 98 |
| 262 | AF141386 | Rattus | SLIT-2 | 198 | 40 |
| | | norvegicus | | | |
| 263 | AF022859 | Homo sapiens | neuropilin-2(a0) | 335 | 62 |
| 264 | AF160477 | Homo sapiens | Ig superfamily receptor LNIR precursor | 387 | 91 |
| 265 | Y44662 | Homo sapiens | Human 14273 G-protein coupled receptor | 636 | 99 |
| | | | (GPCR). | | |
| 266 | U27269 | Mus | sodium glucose cotransporter | 204 | 56 |
| | | musculus | | | |
| 267 | AF124491 | Homo sapiens | ARF GTPase-activating protein GIT2 | 159 | 75 |
| 268 | AF127389 | Rattus | putative taste receptor TR1 | 209 | 39 |
| | | norvegicus | | | |
| 269 | X98296 | Homo sapiens | ubiquitin hydrolase | 215 | 95 |
| 270 | X78482 | Streptococcus | Fc-gamma receptor | 129 | 26 |
| | | pyogenes | | | |
| 271 | AB009883 | Nicotiana | KED | 109 | 26 |
| | | tabacum | | | |
| 272 | AF137367 | Mus | VPS10 domain receptor protein SORCS | 899 | 97 |
| | | musculus | | | |
| 273 | L34938 | Rattus | ionotropic glutamate receptor | 460 | 86 |
| | | norvegicus | | | |
| 274 | AL022724 | Homo sapiens | dJ413H6.1.1 (hamster Androgen-dependent | 188 | 74 |
| | | | Expressed Protein LIKE PUTATIVE protein) | | |
| | | | (isoform 1) | | |
| 275 | AF265555 | Homo sapiens | ubiquitin-conjugating BIR-domain enzyme | 173 | 94 |
| | | | APOLLON | | |
| 276 | G02872 | Homo sapiens | Human secreted protein, SEQ ID NO: 6953. | 148 | 56 |
| 277 | L40380 | Homo sapiens | thyroid receptor interactor | 430 | 61 |
| 278 | AB046851 | Homo sapiens | KIAA1631 protein | 283 | 96 |
| 279 | AC008075 | Arabidopsis | Contains PF\|00069 Eukaryotic protein kinase | 157 | 43 |
| | | thaliana | domain. | | |
| 280 | M83738 | Homo sapiens | protein-tyrosine phosphatase | 181 | 73 |
| 281 | AK024397 | Homo sapiens | unnamed protein product | 439 | 91 |
| 282 | AF141326 | Homo sapiens | RNA helicase HDB/DICE1 | 497 | 84 |
| 283 | AF156530 | Mus | ETS-domain transcriptional repressor PE1 | 605 | 76 |
| | | musculus | | | |
| 284 | Y29336 | Homo sapiens | Human secreted protein clone cs756_2 alternate | 647 | 100 |
| | | | reading frame protein. | | |
| 285 | Y73402 | Homo sapiens | Human secreted protein clone yc25_1 protein | 300 | 90 |
| | | | sequence SEQ ID NO: 26. | | |
| 286 | AF016411 | Homo sapiens | KCNA3.1B | 137 | 100 |
| 287 | W89253 | Homo sapiens | Human ALP. | 688 | 97 |
| 288 | AF112886 | Bos taurus | differentiation enhancing factor 1 | 750 | 96 |
| 289 | AF113131 | Homo sapiens | host cell factor homolog LCP | 367 | 44 |
| 290 | U52111 | Homo sapiens | plexin-related protein | 698 | 100 |
| 291 | AF026504 | Rattus | SPA-1 like protein p1294 | 603 | 89 |
| | | norvegicus | | | |
| 292 | AF102854 | Rattus | membrane-associated guanylate kinase- | 124 | 53 |
| | | norvegicus | interacting protein 2 Maguin-2 | | |
| 293 | X99211 | Drosophila | ubiquitin-specific protease | 143 | 38 |
| | | melanogaster | | | |
| 294 | Y94943 | Homo sapiens | Human secreted protein clone yt14_1 protein | 185 | 94 |
| | | | sequence SEQ ID NO: 92. | | |
| 295 | Y94890 | Homo sapiens | Human protein clone HP02798. | 108 | 59 |
| 296 | AF019767 | Homo sapiens | zinc finger protein | 154 | 96 |
| 297 | Y28568 | Homo sapiens | Secreted peptide clone bd577_1. | 568 | 84 |
| 298 | Y94943 | Homo sapiens | Human secreted protein clone yt14_1 protein | 182 | 97 |
| | | | sequence SEQ ID NO: 92. | | |
| 299 | B08906 | Homo sapiens | Human secreted protein sequence encoded by | 605 | 69 |
| | | | gene 16 SEQ ID NO: 63. | | |
| 300 | R58890 | Homo sapiens | Human-32 cadherin-related molecule. | 212 | 97 |
| 301 | AF022859 | Homo sapiens | neuropilin-2(a0) | 277 | 100 |
| 302 | Y71124 | Homo sapiens | Human mitogenic regulator duox2. | 716 | 97 |
| 303 | Y44297 | Homo sapiens | Human receptor tyrosine kinase. | 228 | 97 |
| 304 | D32050 | Homo sapiens | alanyl-tRNA synthetase | 192 | 80 |
| 305 | U43586 | Homo sapiens | protein kinase related to Raf protein kinases; | 428 | 72 |
| | | | Method: conceptual translation supplied by | | |
| | | | author | | |
| 306 | R54872 | Homo sapiens | Human H13 viral receptor mutant 4. | 280 | 95 |
| 307 | D78572 | Mus | membrane glycoprotein | 199 | 41 |
| | | musculus | | | |
| 308 | AF255614 | Rattus | scaffolding protein SLIPR | 639 | 88 |
| | | norvegicus | | | |
| 309 | S79463 | Mus sp. | semaphorin homolog = M-Sema F | 162 | 89 |
| 310 | AF178941 | Homo sapiens | ATP-binding cassette sub-family A member 2 | 736 | 100 |
| 311 | U03413 | Dictyostelium | calcium binding protein | 151 | 36 |
| | | discoideum | | | |
| 312 | Y87347 | Homo sapiens | Human signal peptide containing protein HSPP- | 744 | 100 |
| | | | 124 SEQ ID NO: 124. | | |
| 313 | Z97055 | Homo sapiens | dJ388M5.4 (putative GS2 like protein) | 789 | 99 |
| 314 | AC004010 | Homo sapiens | similar to Leucine-rich transmembrane proteins; | 197 | 38 |
| | | | 44% similarity to U42767 (PID: g1736918) | | |
| 315 | AL021392 | Homo sapiens | dJ439F8.2 (supported by GENSCAN and | 278 | 38 |
| | | | GENEWISE) | | |
| 316 | U70209 | Mus | polycystic kidney disease 1 protein | 165 | 38 |
| | | musculus | | | |
| 317 | AF109643 | Rattus | coxsackie-adenovirus-receptor homolog | 223 | 38 |
| | | norvegicus | | | |
| 318 | AF104923 | Homo sapiens | putative transcription factor | 138 | 84 |
| 319 | AF100287 | Trypanosoma | activated protein kinase C receptor homolog | 141 | 38 |
| | | vivax | | | |
| 320 | G00588 | Homo sapiens | Human secreted protein, SEQ ID NO: 4669. | 125 | 51 |
| 321 | Y21591 | Homo sapiens | Human secreted protein (clone CC332-33). | 459 | 97 |
| 322 | D26070 | Homo sapiens | human type 1 inositol 1,4,5-trisphosphate | 232 | 97 |
| | | | receptor | | |
| 323 | Y27918 | Homo sapiens | Human secreted protein encoded by gene No. | 306 | 88 |
| | | | 123. | | |
| 324 | AF010144 | Homo sapiens | neuronal thread protein AD7c-NTP | 209 | 70 |
| 325 | M19650 | Homo sapiens | 2′,3′-cyclic-nucleotide 3′-phosphodiesterase (EC | 214 | 97 |
| | | | 3.1.4.37) | | |
| 326 | W80396 | Homo sapiens | A secreted protein encoded by clone bp646_10. | 140 | 70 |
| 327 | X75756 | Homo sapiens | protein kinase C mu | 540 | 78 |
| 328 | G02292 | Homo sapiens | Human secreted protein, SEQ ID NO: 6373. | 721 | 99 |
| 329 | AF168990 | Homo sapiens | putative GTP-binding protein | 877 | 99 |
| 330 | S67984 | Homo sapiens | anti-HIV gp120 antibody heavy chain variable | 581 | 80 |
| | | | region | | |
| 331 | X13916 | Homo sapiens | LDL-receptor related precursor (AA-19 to 4525) | 2823 | 98 |
| 332 | Y87330 | Homo sapiens | Human signal peptide containing protein HSPP- | 1127 | 100 |
| | | | 107 SEQ ID NO: 107. | | |
| 333 | Y28503 | Homo sapiens | HGFH3 Human Growth Factor Homologue 3. | 320 | 98 |
| 334 | AC002563 | Homo sapiens | putative RHO/RAC effector protein; 95% | 327 | 93 |
| | | | similarity to P49205 (PID: g1345860) | | |
| 335 | Y87347 | Homo sapiens | Human signal peptide containing protein HSPP- | 1111 | 67 |
| | | | 124 SEQ ID NO: 124. | | |
| 336 | AF006466 | Mus | lymphocyte specific formin related protein | 193 | 75 |
| | | musculus | | | |
| 337 | AF265555 | Homo sapiens | ubiquitin-conjugating BIR-domain enzyme | 632 | 97 |
| | | | APOLLON | | |
| 338 | Y13443 | Homo sapiens | Amino acid sequence of hSlo3-2. | 516 | 100 |
| 339 | Y07637 | Homo sapiens | putative GABA-gated chloride channel | 189 | 100 |
| 340 | Y05734 | Homo sapiens | Human Grb7 effector 2.2412 protein. | 2156 | 99 |
| 341 | AE000497 | Escherichia | L-idonate transcriptional regulator | 928 | 98 |
| | | coli | | | |
| 342 | D90855 | Escherichia | glycerol-3-phosphate dehydrogenase (EC | 769 | 99 |
| | | coli | 1.1.99.5) chain A, anaerobic | | |
| 343 | D85613 | Escherichia | membrane component | 399 | 100 |
| | | coli | | | |
| 344 | M93239 | Escherichia | transmembrane protein | 232 | 100 |
| | | coli | | | |
| 345 | M60177 | Escherichia | enterobactin | 759 | 99 |
| | | coli | | | |
| 346 | D90699 | Escherichia | Sensor protein copS (EC 2.7.3.—). | 638 | 97 |
| | | coli | | | |
| 347 | D90843 | Escherichia | CapB protein. | 552 | 100 |
| | | coli | | | |
| 348 | M13422 | Escherichia | 49 kd protein | 1193 | 96 |
| | | coli | | | |
| 349 | L10328 | Escherichia | similar to drug resistance translocases | 340 | 90 |
| | | coli | | | |
| 350 | X69942 | Mus | enhancer-trap-locus-1 | 560 | 82 |
| | | musculus | | | |
| 351 | AF239613 | Homo sapiens | apamin-sensitive small-conductance Ca2+- | 463 | 80 |
| | | | activated potassium channel | | |
| 352 | D90777 | Escherichia | 3-hydroxybutyryl-CoA dehydrogenase (EC | 577 | 100 |
| | | coli | 1.1.1.157) (b- hydroxybutyryl-CoA | | |
| | | | dehydrogenase) (BhbD). | | |
| 353 | D90863 | Escherichia | similar to | 311 | 98 |
| | | coli | | | |
| 354 | Y52386 | Homo sapiens | Human transmembrane protein HP02000. | 133 | 58 |
| 355 | Y31645 | Homo sapiens | Human transport-associated protein-7 (TRANP- | 482 | 55 |
| | | | 7). | | |
| 356 | Y58637 | Homo sapiens | Protein regulating gene expression PRGE-30. | 119 | 51 |
| 357 | AF119226 | Homo sapiens | dual-specificity tyrosine phosphatase YVH1 | 1788 | 100 |
| 358 | Y87219 | Homo sapiens | Human secreted protein sequence SEQ ID | 165 | 100 |
| | | | NO: 258. | | |
| 359 | J00132 | Homo sapiens | beta-fibrinogen | 233 | 93 |
| 360 | G03789 | Homo sapiens | Human secreted protein, SEQ ID NO: 7870. | 128 | 70 |
| 361 | R28916 | Homo sapiens | Type III procollagen (prior art). | 108 | 40 |
| 362 | U16655 | Rattus | phospholipase C delta-4 | 649 | 65 |
| | | norvegicus | | | |
| 363 | G03119 | Homo sapiens | Human secreted protein, SEQ ID NO: 7200. | 95 | 42 |
| 364 | U47276 | Gallus gallus | chicken brain factor-2 | 104 | 34 |
| 365 | G03789 | Homo sapiens | Human secreted protein, SEQ ID NO: 7870. | 183 | 65 |
| 366 | G04091 | Homo sapiens | Human secreted protein, SEQ ID NO: 8172. | 118 | 46 |
| 367 | X98258 | Homo sapiens | M-phase phosphoprotein 9 | 564 | 75 |
| 368 | AL021366 | Homo sapiens | cICK0721Q.3 (Kinesin related protein) | 3387 | 99 |
| 369 | U70932 | Peromyscus | reverse transcriptase | 92 | 59 |
| | | leucopus | | | |
| 370 | X86400 | Homo sapiens | gamma subunit of sodium potassium ATPase | 242 | 73 |
| | | | like | | |
| 371 | G03172 | Homo sapiens | Human secreted protein, SEQ ID NO: 7253. | 165 | 56 |
| 372 | U49974 | Homo sapiens | mariner transposase | 257 | 55 |
| 373 | X13916 | Homo sapiens | LDL-receptor related precursor (AA-19 to 4525) | 21193 | 99 |
| 374 | AF234765 | Rattus | serine-arginine-rich splicing regulatory protein | 1182 | 78 |
| | | norvegicus | SRRP86 | | |
| 375 | U49974 | Homo sapiens | mariner transposase | 172 | 55 |
| 376 | G01984 | Homo sapiens | Human secreted protein, SEQ ID NO: 6065. | 221 | 67 |
| 377 | G00669 | Homo sapiens | Human secreted protein, SEQ ID NO: 4750. | 600 | 100 |
| 378 | X52574 | Mus | GTP binding protein | 1456 | 91 |
| | | musculus | | | |
| 379 | R69095 | Homo sapiens | Anti-HIV Fab tat3I light chain. | 68 | 37 |
| 380 | J04974 | Homo sapiens | alpha-2 type XI collagen | 125 | 37 |
| 381 | AB002405 | Homo sapiens | LAK-4p | 530 | 43 |
| 382 | U64830 | Dictyostelium | protein tyrosine kinase | 115 | 44 |
| | | discoideum | | | |
| 383 | G02916 | Homo sapiens | Human secreted protein, SEQ ID NO: 6997. | 618 | 98 |
| 384 | G01194 | Homo sapiens | Human secreted protein, SEQ ID NO: 5275. | 617 | 93 |
| 385 | AJ245822 | Homo sapiens | type I transmembrane receptor | 4560 | 100 |
| 386 | D86974 | Homo sapiens | KIAA0220 | 2148 | 98 |
| 387 | G03203 | Homo sapiens | Human secreted protein, SEQ ID NO: 7284. | 142 | 50 |
| 388 | G04072 | Homo sapiens | Human secreted protein, SEQ ID NO: 8153. | 99 | 59 |
| 389 | M12140 | Homo sapiens | envelope protein | 197 | 51 |
| 390 | AJ293309 | Homo sapiens | NHP2 protein | 461 | 77 |
| 391 | Y42751 | Homo sapiens | Human calcium binding protein 2 (CaBP-2). | 181 | 94 |
| 392 | W48351 | Homo sapiens | Human breast cancer related protein BCRB2. | 241 | 66 |
| 393 | Y14442 | Homo sapiens | olfactory receptor protein | 339 | 54 |
| 394 | W85607 | Homo sapiens | Secreted protein clone da228_6. | 957 | 100 |
| 395 | Y76332 | Homo sapiens | Fragment of human secreted protein encoded by | 171 | 34 |
| | | | gene 38. | | |
| 396 | G03930 | Homo sapiens | Human secreted protein, SEQ ID NO: 8011. | 250 | 100 |
| 397 | AB032904 | Hylobates | dopamine receptor D4 | 105 | 35 |
| | | syndactylus | | | |
| 398 | AJ007798 | Homo sapiens | stromal antigen 3, (STAG3) | 861 | 85 |
| 399 | Y91405 | Homo sapiens | Human secreted protein sequence encoded by | 1047 | 92 |
| | | | gene 2 SEQ ID NO: 126. | | |
| 400 | Y29861 | Homo sapiens | Human secreted protein clone cb98_4. | 162 | 37 |
| 401 | D87002 | Homo sapiens | similar to rat integral membrane glycoprotein; | 527 | 78 |
| | | | accession number Z21513. | | |
| 402 | AF100754 | Homo sapiens | ancient ubiquitous protein AUP1 isoform | 853 | 95 |
| 403 | X74904 | Gallus gallus | alpha-2-macroglobulin receptor | 258 | 60 |
| 404 | AF075462 | Mus | ADP-ribosylation factor-directed GTPase | 545 | 89 |
| | | musculus | activating protein isoform b | | |
| 405 | X92887 | Human | pol/env | 162 | 30 |
| | | endogenous | | | |
| | | retrovirus K | | | |
| 406 | Y30162 | Homo sapiens | Human dorsal root receptor 4 hDRR4. | 325 | 72 |
| 407 | AK022626 | Homo sapiens | unnamed protein product | 2833 | 99 |
| 408 | L13802 | Homo sapiens | ribosmal protein small subunit | 264 | 92 |
| 409 | Y91600 | Homo sapiens | Human secreted protein sequence encoded by | 1788 | 89 |
| | | | gene 9 SEQ ID NO: 273. | | |
| 410 | W88745 | Homo sapiens | Secreted protein encoded by gene 30 clone | 2004 | 99 |
| | | | HTSEV09. | | |
| 411 | AB043953 | Mus | Chat-H | 2628 | 82 |
| | | musculus | | | |
| 412 | Y86233 | Homo sapiens | Human secreted protein HNTMX29, SEQ ID | 1014 | 92 |
| | | | NO: 148. | | |
| 413 | U10542 | Pan | MHC class I A | 265 | 71 |
| | | troglodytes | | | |
| 414 | AF155097 | Homo sapiens | NY-REN-7 antigen | 850 | 95 |
| 415 | G03203 | Homo sapiens | Human secreted protein, SEQ ID NO: 7284. | 88 | 48 |
| 416 | Y57911 | Homo sapiens | Human transmembrane protein HTMPN-35. | 266 | 89 |
| 417 | W27651 | Homo sapiens | Secreted protein AT205. | 481 | 60 |
| 418 | Y76884 | Homo sapiens | Retinoblastoma binding protein-7sequence. | 3077 | 87 |
| 419 | AF255559 | Notothenia | alpha tubulin | 289 | 68 |
| | | coriiceps | | | |
| 420 | G01984 | Homo sapiens | Human secreted protein, SEQ ID NO: 6065. | 209 | 74 |
| 421 | AL109827 | Homo sapiens | dJ309K20.2 (acrosomal protein ACR55 (similar | 1446 | 96 |
| | | | to rat sperm antigen 4 (SPAG4))) | | |
| 422 | AC008075 | Arabidopsis | F24J5.4 | 112 | 35 |
| | | thaliana | | | |
| 423 | AF231705 | Homo sapiens | Alu co-repressor 1 | 1090 | 100 |
| 424 | AF234887 | Homo sapiens | FLAMINGO 1 | 6268 | 97 |
| 425 | Y35942 | Homo sapiens | Extended human secreted protein sequence, SEQ | 1961 | 99 |
| | | | ID NO: 191. | | |
| 426 | AB009288 | Homo sapiens | N-copine | 635 | 98 |
| 427 | L12392 | Homo sapiens | Huntington's Disease protein | 16080 | 99 |
| 428 | Y94990 | Homo sapiens | Human secreted protein vb21_1, SEQ ID NO: 20. | 768 | 98 |
| 429 | AJ293573 | Homo sapiens | zinc finger protein Cezanne | 542 | 87 |
| 430 | Y84441 | Homo sapiens | Amino acid sequence of a human RNA- | 2074 | 100 |
| | | | associated protein. | | |
| 431 | G02850 | Homo sapiens | Human secreted protein, SEQ ID NO: 6931. | 723 | 95 |
| 432 | G04067 | Homo sapiens | Human secreted protein, SEQ ID NO: 8148. | 73 | 42 |
| 433 | AF159296 | Lycopersicon | extensin-like protein | 613 | 48 |
| | | esculentum | | | |
| 434 | W48351 | Homo sapiens | Human breast cancer related protein BCRB2. | 135 | 44 |
| 435 | X73874 | Homo sapiens | phosphorylase kinase | 3442 | 97 |
| 436 | AF161426 | Homo sapiens | HSPC308 | 268 | 74 |
| 437 | Y30812 | Homo sapiens | Human secreted protein encoded from gene 2. | 1055 | 52 |
| 438 | G03798 | Homo sapiens | Human secreted protein, SEQ ID NO: 7879. | 168 | 56 |
| 439 | X14766 | Homo sapiens | GABA-A receptor alpha 1 subunit | 2294 | 96 |
| 440 | X02344 | Homo sapiens | beta-tubulin | 311 | 95 |
| 441 | AF168418 | Homo sapiens | activating signal cointegrator 1 | 1882 | 100 |
| 442 | L11672 | Homo sapiens | zinc finger protein | 795 | 54 |
| 443 | G03203 | Homo sapiens | Human secreted protein, SEQ ID NO: 7284. | 93 | 26 |
| 444 | A52140 | unidentified | HUMAN NDR | 2451 | 100 |
| 445 | X98330 | Homo sapiens | ryanodine receptor 2 | 9356 | 99 |
| 446 | AF116712 | Homo sapiens | PRO2738 | 227 | 49 |
| 447 | AF245447 | Homo sapiens | sphingosine kinase type 2 isoform | 576 | 99 |
| 448 | AF133086 | Homo sapiens | membrane-type serine protease 1 | 2630 | 94 |
| 449 | U87305 | Rattus | transmembrane receptor UNC5H1 | 817 | 93 |
| | | norvegicus | | | |
| 450 | AF081249 | Homo sapiens | JAW1-related protein MRVI1A long isoform | 4568 | 99 |
| 451 | AC005498 | Homo sapiens | R31665_1 | 316 | 62 |
| 452 | M60235 | Homo sapiens | granule membrane protein-140 | 464 | 73 |
| 453 | AB036706 | Homo sapiens | intelectin | 730 | 88 |
| 454 | G00918 | Homo sapiens | Human secreted protein, SEQ ID NO: 4999. | 263 | 81 |
| 455 | Y22634 | Homo sapiens | Human cytokine inducible regulatory protein-1 | 192 | 67 |
| | | | (CIRP-1). | | |
| 456 | Y36705 | Homo sapiens | Fragment of human secreted protein encoded by | 106 | 40 |
| | | | gene 62. | | |
| 457 | N91325 | Homo sapiens | DNA encoding human growth hormone receptor. | 3282 | 96 |
| 458 | M19155 | Plasmodium | S-antigen precursor | 110 | 36 |
| | | falciparum | | | |
| 459 | Y13377 | Homo sapiens | Amino acid sequence of protein PRO257. | 509 | 98 |
| 460 | Y02693 | Homo sapiens | Human secreted protein encoded by gene 44 | 149 | 43 |
| | | | clone HTDAD22. | | |
| 461 | Y14482 | Homo sapiens | Fragment of human secreted protein encoded by | 184 | 54 |
| | | | gene 17. | | |
| 462 | Y53005 | Homo sapiens | Human secreted protein clone pm749_8 protein | 135 | 47 |
| | | | sequence SEQ ID NO: 16. | | |
| 463 | X84960 | Triticum | low molecular weight glutenin | 109 | 33 |
| | | aestivum | | | |
| 464 | W19919 | Homo sapiens | Human Ksr-1 (kinase suppressor of Ras). | 1781 | 85 |
| 465 | AF189764 | Mus | alpha/beta hydrolase-1 | 502 | 59 |
| | | musculus | | | |
| 466 | U93569 | Homo sapiens | p40 | 101 | 30 |
| 467 | Y41528 | Homo sapiens | Fragment of human secreted protein encoded by | 1172 | 99 |
| | | | gene 77. | | |
| 468 | G02872 | Homo sapiens | Human secreted protein, SEQ ID NO: 6953. | 149 | 52 |
| 469 | AJ000008 | Homo sapiens | PI3-kinase | 5832 | 97 |
| 470 | X70922 | Mus | neurotoxin homologue | 118 | 47 |
| | | musculus | | | |
| 471 | G03797 | Homo sapiens | Human secreted protein, SEQ ID NO: 7878. | 198 | 75 |
| 472 | Y36705 | Homo sapiens | Fragment of human secreted protein encoded by | 72 | 57 |
| | | | gene 62. | | |
| 473 | G02313 | Homo sapiens | Human secreted protein, SEQ ID NO: 6394. | 328 | 100 |
| 474 | Y07007 | Homo sapiens | Breast cancer associated antigen precursor | 1013 | 97 |
| | | | sequence. | | |
| 475 | W93254 | Homo sapiens | Human ESRP1 protein. | 943 | 80 |
| 476 | W48351 | Homo sapiens | Human breast cancer related protein BCRB2. | 236 | 65 |
| 477 | Y02693 | Homo sapiens | Human secreted protein encoded by gene 44 | 202 | 60 |
| | | | clone HTDAD22. | | |
| 478 | G01870 | Homo sapiens | Human secreted protein, SEQ ID NO: 5951. | 267 | 100 |
| 479 | AF102777 | Mus | FYVE finger-containing phosphoinositide kinase | 3427 | 92 |
| | | musculus | | | |
| 480 | G03052 | Homo sapiens | Human secreted protein, SEQ ID NO: 7133. | 123 | 53 |
| 481 | W87701 | Homo sapiens | A human membrane fusion protein designated | 221 | 77 |
| | | | SYTAX1. | | |
| 482 | G03119 | Homo sapiens | Human secreted protein, SEQ ID NO: 7200. | 131 | 39 |
| 483 | AF210651 | Homo sapiens | NAG18 | 124 | 59 |
| 484 | AF010144 | Homo sapiens | neuronal thread protein AD7c-NTP | 343 | 50 |
| 485 | G00637 | Homo sapiens | Human secreted protein, SEQ ID NO: 4718. | 129 | 70 |
| 486 | U15174 | Homo sapiens | BCL2/adenovirus E1B 19 kD-interacting protein 3 | 149 | 73 |
| 487 | Y76167 | Homo sapiens | Human secreted protein encoded by gene 44. | 627 | 100 |
| 488 | AJ275213 | Homo sapiens | stabilin-1 | 1244 | 91 |
| 489 | G03798 | Homo sapiens | Human secreted protein, SEQ ID NO: 7879. | 313 | 65 |
| 490 | L12392 | Homo sapiens | Huntington's Disease protein | 16081 | 100 |
| 491 | G03789 | Homo sapiens | Human secreted protein, SEQ ID NO: 7870. | 197 | 66 |
| 492 | J03799 | Homo sapiens | laminin-binding protein | 228 | 70 |
| 493 | U15174 | Homo sapiens | BCL2/adenovirus E1B 19 kD-interacting protein 3 | 128 | 41 |
| 494 | Y02693 | Homo sapiens | Human secreted protein encoded by gene 44 | 197 | 67 |
| | | | clone HTDAD22. | | |
| 495 | AC005175 | Homo sapiens | R31449_3 | 889 | 94 |
| 496 | G03786 | Homo sapiens | Human secreted protein, SEQ ID NO: 7867. | 229 | 61 |
| 497 | AB030237 | Canis | D4 dopamine receptor | 90 | 48 |
| | | familiaris | | | |
| 498 | G02872 | Homo sapiens | Human secreted protein, SEQ ID NO: 6953. | 228 | 65 |
| 499 | U70935 | Peromyscus | reverse transcriptase | 213 | 52 |
| | | maniculatus | | | |
| 500 | U48508 | Homo sapiens | skeletal muscle ryanodine receptor | 26406 | 99 |
| 501 | G03371 | Homo sapiens | Human secreted protein, SEQ ID NO: 7452. | 105 | 58 |
| 502 | AF119851 | Homo sapiens | PRO1722 | 156 | 62 |
| 503 | AF113685 | Homo sapiens | PRO0974 | 116 | 50 |
| 504 | U79458 | Homo sapiens | WW domain binding protein-2 | 322 | 59 |
| 505 | W29651 | Homo sapiens | Human secreted protein CD124_3. | 608 | 55 |
| 506 | W85459 | Homo sapiens | Secreted protein encoded by clone dh1135_9. | 986 | 70 |
| 507 | Y86265 | Homo sapiens | Human secreted protein HUSXE77, SEQ ID | 115 | 33 |
| | | | NO: 180. | | |
| 508 | AL160175 | Homo sapiens | bA243J16.3 (similar to MYLK (myosin, light | 184 | 92 |
| | | | polypeptide kinase)) | | |
| 509 | U43360 | Peromyscus | reverse transcriptase | 97 | 62 |
| | | maniculatus | | | |
| 510 | G03789 | Homo sapiens | Human secreted protein, SEQ ID NO: 7870. | 117 | 63 |
| 511 | W79092 | Homo sapiens | Human secreted protein dn740_3. | 1058 | 100 |
| 512 | AF010144 | Homo sapiens | neuronal thread protein AD7c-NTP | 205 | 64 |
| 513 | AJ133439 | Homo sapiens | GRIP1 protein | 2151 | 100 |
| 514 | AE003456 | Drosophila | CG6393 gene product | 259 | 42 |
| | | melanogaster | | | |
| 515 | Z17206 | Xenopus | p46X1Eg22 | 128 | 40 |
| | | laevis | | | |
| 516 | AF104413 | Homo sapiens | large tumor suppressor 1 | 1766 | 94 |
| 517 | G03797 | Homo sapiens | Human secreted protein, SEQ ID NO: 7878. | 92 | 40 |
| 518 | AF151083 | Homo sapiens | HSPC249 | 444 | 98 |
| 519 | S80864 | Homo sapiens | cytochrome c-like polypeptide | 318 | 50 |
| 520 | X92485 | Plasmodium | pva1 | 170 | 61 |
| | | vivax | | | |
| 521 | G03790 | Homo sapiens | Human secreted protein, SEQ ID NO: 7871. | 159 | 59 |
| 522 | AF121857 | Homo sapiens | sorting nexin 7 | 259 | 40 |
| 523 | G02654 | Homo sapiens | Human secreted protein, SEQ ID NO: 6735. | 82 | 37 |
| 524 | W88627 | Homo sapiens | Secreted protein encoded by gene 94 clone | 253 | 73 |
| | | | HPMBQ32. | | |
| 525 | AF119851 | Homo sapiens | PRO1722 | 162 | 57 |
| 526 | Y27761 | Homo sapiens | Human secreted protein encoded by gene No. 47. | 154 | 57 |
| 527 | G02707 | Homo sapiens | Human secreted protein, SEQ ID NO: 6788. | 70 | 45 |
| 528 | U47924 | Homo sapiens | C8 | 1112 | 86 |
| 529 | G04063 | Homo sapiens | Human secreted protein, SEQ ID NO: 8144. | 84 | 45 |
| 530 | G03203 | Homo sapiens | Human secreted protein, SEQ ID NO: 7284. | 111 | 60 |
| 531 | G04067 | Homo sapiens | Human secreted protein, SEQ ID NO: 8148. | 92 | 65 |
| 532 | G03267 | Homo sapiens | Human secreted protein, SEQ ID NO: 7348. | 75 | 29 |
| 533 | G03203 | Homo sapiens | Human secreted protein, SEQ ID NO: 7284. | 182 | 48 |
| 534 | AF068286 | Homo sapiens | HDCMD38P | 861 | 100 |
| 535 | U07707 | Homo sapiens | epidermal growth factor receptor substrate | 228 | 60 |
| 536 | G01955 | Homo sapiens | Human secreted protein, SEQ ID NO: 6036. | 484 | 75 |
| 537 | AF219232 | Gallus gallus | qin-induced kinase | 206 | 53 |
| 538 | AF135022 | Homo sapiens | mediator | 128 | 100 |
| 539 | G03267 | Homo sapiens | Human secreted protein, SEQ ED NO: 7348. | 141 | 59 |
| 540 | AF016430 | Caenorhabditis | contains similarity to a BR-C/TTK domain | 853 | 39 |
| | | elegans | | | |
| 541 | AC003093 | Homo sapiens | OXYSTEROL-BINDING PROTEIN; 45% | 408 | 66 |
| | | | similarity to P22059. (PID: g129308) | | |
| 542 | M29487 | Homo sapiens | integrin alpha subunit precursor | 517 | 81 |
| 543 | AF102530 | Mus | olfactory receptor F3 | 327 | 73 |
| | | musculus | | | |
| 544 | Y73431 | Homo sapiens | Human secreted protein clone yb186_1 protein | 386 | 100 |
| | | | sequence SEQ ID NO: 84. | | |
| 545 | AE004833 | Pseudomonas | probable TonB-dependent receptor | 279 | 42 |
| | | aeruginosa | | | |
| 546 | G03793 | Homo sapiens | Human secreted protein, SEQ ID NO: 7874. | 264 | 53 |
| 547 | Y69192 | Homo sapiens | A human monocyte-macrophage apolipoprotein | 1772 | 67 |
| | | | B receptor protein. | | |
| 548 | Y91493 | Homo sapiens | Human secreted protein sequence encoded by | 176 | 100 |
| | | | gene 43 SEQ ID NO: 166. | | |
| 549 | G01571 | Homo sapiens | Human secreted protein, SEQ ID NO: 5652. | 777 | 99 |
| 550 | AF044588 | Homo sapiens | protein regulating cytokinesis 1; PRC1 | 1953 | 88 |
| 551 | Y29332 | Homo sapiens | Human secreted protein clone pe584_2 protein | 1224 | 94 |
| | | | sequence. | | |
| 552 | X98330 | Homo sapiens | ryanodine receptor 2 | 24621 | 99 |
| 553 | Y42782 | Homo sapiens | Human UC Band #331 protein. | 684 | 95 |
| 554 | AB025258 | Mus | granuphilin-a | 501 | 41 |
| | | musculus | | | |
| 555 | AJ010346 | Homo sapiens | RING-H2 | 1468 | 100 |
| 556 | W92388 | Homo sapiens | Human TR-interacting protein S239a. | 538 | 92 |
| 557 | AF119851 | Homo sapiens | PRO1722 | 175 | 59 |
| 558 | AF117756 | Homo sapiens | thyroid hormone receptor-associated protein | 183 | 32 |
| | | | complex component TRAP150 | | |
| 559 | G02872 | Homo sapiens | Human secreted protein, SEQ ID NO: 6953. | 319 | 68 |
| 560 | D86214 | Mus | Ca2+ dependent activator protein for secretion | 1010 | 93 |
| | | musculus | | | |
| 561 | AF187325 | Canis | melanoma antigen | 287 | 55 |
| | | familiaris | | | |
| 562 | AJ001981 | Homo sapiens | OXA1L | 2512 | 99 |
| 563 | Z17238 | Rattus | glutamate receptor subtype delta-1 | 338 | 66 |
| | | norvegicus | | | |
| 564 | W30638 | Homo sapiens | Partial human 7-transmembrane receptor | 371 | 100 |
| | | | HAPO167 protein. | | |
| 565 | AC005620 | Homo sapiens | R33590_1 | 467 | 97 |
| 566 | Y99358 | Homo sapiens | Human PRO1772 (UNQ834) amino acid | 1138 | 78 |
| | | | sequence SEQ ID NO: 63. | | |
| 567 | AL031177 | Homo sapiens | dJ889M15.3 (novel protein) | 1002 | 58 |
| 568 | AF151043 | Homo sapiens | HSPC209 | 798 | 100 |
| 569 | AF097518 | Homo sapiens | liver-specific transporter | 231 | 100 |
| 570 | AB035698 | Homo sapiens | Misshapen/NIK-related kinase MINK-1 | 1532 | 100 |
| 571 | Y07096 | Homo sapiens | Colon cancer associated antigen precursor | 1064 | 100 |
| | | | sequence. | | |
| 572 | AL031177 | Homo sapiens | dJ889M15.3 (novel protein) | 735 | 55 |
| 573 | Y66639 | Homo sapiens | Membrane-bound protein PRO290. | 254 | 45 |
| 574 | AB037108 | Homo sapiens | seven transmembrane domain orphan receptor | 1883 | 99 |
| 575 | D43949 | Homo sapiens | This gene is novel. | 836 | 100 |
| 576 | Y48596 | Homo sapiens | Human breast tumor-associated protein 57. | 108 | 50 |
| 577 | G00352 | Homo sapiens | Human secreted protein, SEQ ID NO: 4433. | 141 | 75 |
| 578 | R95913 | Homo sapiens | Neural thread protein. | 140 | 65 |
| 579 | AK025116 | Homo sapiens | unnamed protein product | 201 | 70 |
| 580 | Y86473 | Homo sapiens | Human gene 52-encoded protein fragment, SEQ | 77 | 70 |
| | | | ID NO: 388. | | |
| 581 | AF196779 | Homo sapiens | JM10 protein | 450 | 100 |
| 582 | AF188706 | Homo sapiens | g20 protein | 330 | 98 |
| 583 | AB030234 | Canis | D4 dopamine receptor | 64 | 56 |
| | | familiaris | | | |
| 584 | G02621 | Homo sapiens | Human secreted protein, SEQ ID NO: 6702. | 345 | 90 |
| 585 | AL096828 | Homo sapiens | dJ963E22.1 (Novel protein similar to NY-REN-2 | 268 | 85 |
| | | | Antigen) | | |
| 586 | Y30819 | Homo sapiens | Human secreted protein encoded from gene 9. | 235 | 35 |
| 587 | G00357 | Homo sapiens | Human secreted protein, SEQ ID NO: 4438. | 132 | 56 |
| 588 | G02872 | Homo sapiens | Human secreted protein, SEQ ID NO: 6953. | 182 | 79 |
| 589 | AF235017 | Mus | 2P1 protein | 764 | 80 |
| | | musculus | | | |
| 590 | W88627 | Homo sapiens | Secreted protein encoded by gene 94 clone | 329 | 81 |
| | | | HPMBQ32. | | |
| 591 | Y30709 | Homo sapiens | Amino acid sequence of a human secreted | 110 | 43 |
| | | | protein. | | |
| 592 | Y53875 | Homo sapiens | A human seven transmembrane signal transducer | 1369 | 92 |
| | | | polypeptide. | | |
| 593 | Y53051 | Homo sapiens | Human secreted protein clone dd119_4 protein | 1112 | 97 |
| | | | sequence SEQ ID NO: 108. | | |
| 594 | Y27658 | Homo sapiens | Human secreted protein encoded by gene No. 92. | 763 | 79 |
| 595 | G03798 | Homo sapiens | Human secreted protein, SEQ ID NO: 7879. | 156 | 58 |
| 596 | AF151110 | Mus | COP1 protein | 2215 | 95 |
| | | musculus | | | |
| 597 | G03786 | Homo sapiens | Human secreted protein, SEQ ID NO: 7867. | 157 | 65 |
| 598 | AF192499 | Mus | putative secreted protein ZSIG37 | 143 | 40 |
| | | musculus | | | |
| 599 | AF119855 | Homo sapiens | PRO1847 | 236 | 76 |
| 600 | G02872 | Homo sapiens | Human secreted protein, SEQ ID NO: 6953. | 212 | 73 |
| 601 | Y00295 | Homo sapiens | Human secreted protein encoded by gene 38. | 567 | 88 |
| 602 | AF184971 | Homo sapiens | class II cytokine receptor ZCYTOR7 | 2015 | 74 |
| 603 | AF061936 | Homo sapiens | diacylglycerol kinase iota | 773 | 96 |
| 604 | AL096828 | Homo sapiens | dJ963E22.1 (Novel protein similar to NY-REN-2 | 1333 | 93 |
| | | | Antigen) | | |
| 605 | AB033106 | Homo sapiens | KIAA1280 protein | 3915 | 100 |
| 606 | X75756 | Homo sapiens | protein kinase C mu | 3916 | 99 |
| 607 | D86983 | Homo sapiens | similar to D. melanogaster peroxidasin(U11052) | 5758 | 99 |
| 608 | W69341 | Homo sapiens | Secreted protein of clone CG279_1. | 1377 | 99 |
| 609 | W88627 | Homo sapiens | Secreted protein encoded by gene 94 clone | 339 | 82 |
| | | | HPMBQ32. | | |
| 610 | Y27868 | Homo sapiens | Human secreted protein encoded by gene No. | 116 | 62 |
| | | | 107. | | |
| 611 | AF202636 | Homo sapiens | angiopoietin-like protein PP1158 | 2164 | 100 |
| 612 | AF090944 | Homo sapiens | PRO0663 | 218 | 82 |
| 613 | Y02693 | Homo sapiens | Human secreted protein encoded by gene 44 | 195 | 59 |
| | | | clone HTDAD22. | | |
| 614 | M87053 | Rattus | lens membrane protein | 450 | 84 |
| | | norvegicus | | | |
| 615 | AC004232 | Homo sapiens | FPM315 | 163 | 37 |
| 616 | G01984 | Homo sapiens | Human secreted protein, SEQ ID NO: 6065. | 205 | 79 |
| 617 | Y91524 | Homo sapiens | Human secreted protein sequence encoded by | 821 | 99 |
| | | | gene 74 SEQ ID NO: 197. | | |
| 618 | AJ245621 | Homo sapiens | CTL2 protein | 2258 | 99 |
| 619 | Y76198 | Homo sapiens | Human secreted protein encoded by gene 75. | 108 | 64 |
| 620 | AF067864 | Homo sapiens | transferrin receptor 2 alpha | 3922 | 94 |
| 621 | D90721 | Escherichia | Transmembrane protein dppC | 573 | 90 |
| | | coli | | | |
| 622 | W75858 | Homo sapiens | Human secretory protein of clone CS752-3. | 730 | 100 |
| 623 | Y94982 | Homo sapiens | Human secreted protein vb12_1, SEQ ID NO: 4. | 733 | 100 |
| 624 | AF034745 | Mus | LNXp80 | 637 | 83 |
| | | musculus | | | |
| 625 | U42580 | Paramecium | Pro-rich, IPPPNMSLPLS (3x) | 94 | 46 |
| | | bursaria | | | |
| | | Chlorella | | | |
| | | virus 1 | | | |
| 626 | U79260 | Homo sapiens | unknown | 194 | 70 |
| 627 | R95913 | Homo sapiens | Neural thread protein. | 99 | 50 |
| 628 | G03450 | Homo sapiens | Human secreted protein, SEQ ID NO: 7531. | 427 | 100 |
| 629 | Y36281 | Homo sapiens | Human secreted protein encoded by gene 58. | 590 | 100 |
| 630 | Y02693 | Homo sapiens | Human secreted protein encoded by gene 44 | 165 | 76 |
| | | | clone HTDAD22. | | |
| 631 | G02139 | Homo sapiens | Human secreted protein, SEQ ID NO: 6220. | 268 | 96 |
| 632 | U16996 | Homo sapiens | protein tyrosine posphatase | 351 | 80 |
| 633 | AF121857 | Homo sapiens | sorting nexin 7 | 2019 | 100 |
| 634 | AF283772 | Homo sapiens | similar to Homo sapiens ribosomal protein L10 | 340 | 77 |
| | | | encoded by GenBank Accession Number | | |
| | | | L25899 | | |
| 635 | Y07090 | Homo sapiens | Renal cancer associated antigen precursor | 277 | 64 |
| | | | sequence. | | |
| 636 | AB013382 | Homo sapiens | DUSP6 | 414 | 76 |
| 637 | G02872 | Homo sapiens | Human secreted protein, SEQ ID NO: 6953. | 315 | 71 |
| 638 | M95762 | Rattus | GABA transporter | 924 | 89 |
| | | norvegicus | | | |
| 639 | G03789 | Homo sapiens | Human secreted protein, SEQ ID NO: 7870. | 219 | 60 |
| 640 | Y01400 | Homo sapiens | Secreted protein encoded by gene 18 clone | 137 | 79 |
| | | | HNHFO29. | | |
| 641 | AC008075 | Arabidopsis | F24J5.4 | 121 | 33 |
| | | thaliana | | | |
| 642 | W74824 | Homo sapiens | Human secreted protein encoded by gene 96 | 615 | 62 |
| | | | clone HAQBK61. | | |
| 643 | AB015982 | Homo sapiens | serine/threonine kinase | 485 | 98 |
| 644 | Y25806 | Homo sapiens | Human secreted protein fragment encoded from | 162 | 46 |
| | | | gene 23. | | |
| 645 | AF122904 | Homo sapiens | membrane protein DAP10 | 474 | 100 |
| 646 | AF233323 | Homo sapiens | Fas-associated phosphatase-1 | 200 | 38 |
| 647 | W48804 | Homo sapiens | Homo sapiens clone BK158_1 protein. | 1203 | 99 |
| 648 | AF257330 | Homo sapiens | COBW-like protein | 1440 | 98 |
| 649 | Y36203 | Homo sapiens | Human secreted protein #75. | 233 | 73 |
| 650 | G02872 | Homo sapiens | Human secreted protein, SEQ ID NO: 6953. | 173 | 78 |
| 651 | Y32199 | Homo sapiens | Human receptor molecule (REC) encoded by | 1012 | 100 |
| | | | Incyte clone 2022379. | | |
| 652 | AB032909 | Hylobates | dopamine receptor D4 | 122 | 32 |
| | | agilis | | | |
| 653 | AK021848 | Homo sapiens | unnamed protein product | 186 | 69 |
| 654 | W73411 | Homo sapiens | Human secreted protein encoded by Gene No. | 57 | 37 |
| | | | 15. | | |
| 655 | L22455 | Rattus | mu opioid receptor | 116 | 34 |
| | | norvegicus | | | |
| 656 | G03112 | Homo sapiens | Human secreted protein, SEQ ID NO: 7193. | 110 | 45 |
| 657 | G02345 | Homo sapiens | Human secreted protein, SEQ ID NO: 6426. | 459 | 97 |
| 658 | W88627 | Homo sapiens | Secreted protein encoded by gene 94 clone | 291 | 75 |
| | | | HPMBQ32. | | |
| 659 | G02832 | Homo sapiens | Human secreted protein, SEQ ID NO: 6913. | 134 | 65 |
| 660 | Y91423 | Homo sapiens | Human secreted protein sequence encoded by | 333 | 96 |
| | | | gene 11 SEQ ID NO: 144. | | |
| 661 | G03789 | Homo sapiens | Human secreted protein, SEQ ID NO: 7870. | 168 | 68 |
| 662 | Y53886 | Homo sapiens | A suppressor of cytokine signalling protein | 375 | 43 |
| | | | designated HSCOP-6. | | |
| 663 | W75771 | Homo sapiens | Human GTP binding protein APD08. | 629 | 100 |
| 664 | AL096770 | Homo sapiens | bA150A6.2 (novel 7 transmembrane receptor | 480 | 55 |
| | | | (rhodopsin family) (olfactory receptor like) | | |
| | | | protein (hs6M1-21)) | | |
| 665 | AB037734 | Homo sapiens | KIAA1313 protein | 978 | 96 |
| 666 | W82841 | Homo sapiens | Human cerebral protein-1. | 192 | 84 |
| 667 | W82841 | Homo sapiens | Human cerebral protein-1. | 182 | 87 |
| 668 | AB030184 | Mus | contains transmembrane (TM) region and ATP | 757 | 68 |
| | | musculus | binding region | | |
| 669 | AB032919 | Hylobates | dopamine receptor D4 | 85 | 37 |
| | | muelleri | | | |
| 670 | AF107295 | Rattus | outer membrane protein | 746 | 81 |
| | | norvegicus | | | |
| 671 | Z33642 | Homo sapiens | leukocyte surface protein | 394 | 93 |
| 672 | W85608 | Homo sapiens | Secreted protein clone du410_5. | 261 | 91 |
| 673 | G03203 | Homo sapiens | Human secreted protein, SEQ ID NO: 7284. | 106 | 48 |
| 674 | AL035587 | Homo sapiens | dJ475N16.4 (KIAA0240) | 2388 | 99 |
| 675 | Y59668 | Homo sapiens | Secreted protein 108-005-5-0-C1-FL. | 1134 | 53 |
| 676 | G03797 | Homo sapiens | Human secreted protein, SEQ ID NO: 7878. | 174 | 74 |
| 677 | AF026954 | Bos taurus | pyruvate dehydrogenase phosphatase regulatory | 1013 | 95 |
| | | | subunit precursor; PDPr | | |
| 678 | L11625 | Mus | receptor protein-tyrosine kinase | 545 | 96 |
| | | musculus | | | |
| 679 | AL031427 | Homo sapiens | dJ167A19.3 (novel protein) | 745 | 100 |
| 680 | AJ133430 | Mus | olfactory receptor | 528 | 77 |
| | | musculus | | | |
| 681 | G02532 | Homo sapiens | Human secreted protein, SEQ ID NO: 6613. | 179 | 70 |
| 682 | G03789 | Homo sapiens | Human secreted protein, SEQ ID NO: 7870. | 336 | 76 |
| 683 | Y94943 | Homo sapiens | Human secreted protein clone yt14_1 protein | 118 | 100 |
| | | | sequence SEQ ID NO: 92. | | |
| 684 | U43360 | Peromyscus | reverse transcriptase | 100 | 37 |
| | | maniculatus | | | |
| 685 | G00885 | Homo sapiens | Human secreted protein, SEQ ID NO: 4966. | 162 | 60 |
| 686 | AK001518 | Homo sapiens | unnamed protein product | 590 | 100 |
| 687 | G01982 | Homo sapiens | Human secreted protein, SEQ ID NO: 6063. | 718 | 100 |
| 688 | Y92241 | Homo sapiens | Human cancer associated antigen precursor | 2405 | 99 |
| | | | (MO-REN-46). | | |
| 689 | AC024792 | Caenorhabditis | contains similarity to TR: P78316 | 423 | 36 |
| | | elegans | | | |
| 690 | Y27868 | Homo sapiens | Human secreted protein encoded by gene No. | 183 | 81 |
| | | | 107. | | |
| 691 | Y56514 | Homo sapiens | Human Jurkat cell clone P2-15 AIM10 longest | 180 | 88 |
| | | | ORF protein sequence. | | |
| 692 | Y27795 | Homo sapiens | Human secreted protein encoded by gene No. 79. | 1539 | 99 |
| 693 | Y36268 | Homo sapiens | Human secreted protein encoded by gene 45. | 428 | 98 |
| 694 | U12465 | Homo sapiens | ribosomal protein L35 | 308 | 89 |
| 695 | Y45272 | Homo sapiens | Human secreted protein encoded from gene 16. | 1517 | 99 |
| 696 | AF191838 | Homo sapiens | TANK binding kinase TBK1 | 1242 | 98 |
| 697 | Y02693 | Homo sapiens | Human secreted protein encoded by gene 44 | 275 | 75 |
| | | | clone HTDAD22. | | |
| 698 | Y87280 | Homo sapiens | Human signal peptide containing protein HSPP- | 576 | 90 |
| | | | 57 SEQ ID NO: 57. | | |
| 699 | Y97999 | Homo sapiens | Human SCAD family molecule HSFM-1, SEQ | 729 | 99 |
| | | | ID NO: 1. | | |
| 700 | AJ006701 | Homo sapiens | putative serine/threonine protein kinase | 610 | 79 |
| 701 | AF209198 | Homo sapiens | zinc finger protein 277 | 2357 | 100 |
| 702 | AJ298841 | Mus | torsinA protein | 709 | 45 |
| | | musculus | | | |
| 703 | AK021729 | Homo sapiens | unnamed protein product | 622 | 98 |
| 704 | Z46787 | Caenorhabditis | similar to Glutaredoxin, Zinc finger, C3HC4 | 920 | 51 |
| | | elegans | type (RING finger) | | |
| 705 | G02882 | Homo sapiens | Human secreted protein, SEQ ID NO: 6963. | 589 | 98 |
| 706 | G02501 | Homo sapiens | Human secreted protein, SEQ ID NO: 6582. | 125 | 58 |
| 707 | R95326 | Homo sapiens | Tumor necrosis factor receptor 1 death domain | 121 | 95 |
| | | | ligand (clone 2DD). | | |
| 708 | G03002 | Homo sapiens | Human secreted protein, SEQ ID NO: 7083. | 125 | 39 |
| 709 | Y96202 | Homo sapiens | IkappaB kinase (IKK) binding protein, Y2H56. | 516 | 98 |
| 710 | M63577 | Saccharomyces | SFP1 | 131 | 59 |
| | | cerevisiae | | | |
| 711 | AB026291 | Rattus | acetoacetyl-CoA synthetase | 467 | 85 |
| | | norvegicus | | | |
| 712 | D21211 | Homo sapiens | protein tyrosine phosphatase (PTP-BAS, type 3) | 368 | 44 |
| 713 | AF044033 | Marmota | olfactory receptor | 615 | 83 |
| | | marmota | | | |
| 714 | G03561 | Homo sapiens | Human secreted protein, SEQ ID NO: 7642. | 251 | 100 |
| 715 | AB033062 | Homo sapiens | KIAA1236 protein | 1380 | 100 |
| 716 | G00577 | Homo sapiens | Human secreted protein, SEQ ID NO: 4658. | 80 | 73 |
| 717 | Y96864 | Homo sapiens | SEQ. ID. 37 from WO0034474. | 835 | 99 |
| 718 | AJ243396 | Homo sapiens | voltage-gated sodium channel beta-3 subunit | 234 | 100 |
| 719 | U47334 | Homo sapiens | similar to chicken gamma aminobutyric acid | 578 | 99 |
| | | | receptor beta4 subunit | | |
| 720 | AB020598 | Homo sapiens | peptide transporter 3 | 1096 | 100 |
| 721 | Y53886 | Homo sapiens | A suppressor of cytokine signalling protein | 570 | 74 |
| | | | designated HSCOP-6. | | |
| 722 | J05046 | Homo sapiens | insulin receptor-related receptor | 6787 | 100 |
| 723 | AF001958 | Ambystoma | electrogenic Na+ bicarbonate cotransporter; | 111 | 41 |
| | | tigrinum | NBC | | |
| 724 | AF127084 | Mus | semaphorin cytoplasmic domain-associated | 5253 | 94 |
| | | musculus | protein 3A | | |
| 725 | X54673 | Homo sapiens | GABA transporter | 3114 | 99 |
| 726 | AF016191 | Rattus | potassium channel | 370 | 100 |
| | | norvegicus | | | |
| 727 | AB029559 | Rattus | BAT1 | 139 | 35 |
| | | norvegicus | | | |
| 728 | Y28503 | Homo sapiens | HGFH3 Human Growth Factor Homologue 3. | 2186 | 97 |
| 729 | AJ011415 | Homo sapiens | plexin-B1/SEP receptor | 729 | 56 |
| 730 | Z93096 | Homo sapiens | bK390B3.1 (manic fringe (Drosophila) | 142 | 68 |
| | | | homolog) | | |
| 731 | Z10062 | Homo sapiens | cDNA encoding a human vanilloid receptor | 675 | 99 |
| | | | homologue Vanilrep1. | | |
| 732 | AF161382 | Homo sapiens | HSPC264 | 492 | 94 |
| 733 | AB029033 | Homo sapiens | KIAA1110 protein | 3826 | 99 |
| 734 | AE000493 | Escherichia | putative transport protein | 592 | 97 |
| | | coli | | | |
| 735 | AL033379 | Homo sapiens | dJ417O22.2 (novel 7 transmembrane receptor | 2173 | 99 |
| | | | (rhodopsin family) protein similar to high- | | |
| | | | affinity lysophosphatidic acid receptor homolog) | | |
| 736 | AF132599 | Homo sapiens | RANTES factor of late activated T lymphocytes-1 | 245 | 56 |
| 737 | X55019 | Homo sapiens | acetylcholine receptor delta subunit | 883 | 99 |
| 738 | X91906 | Homo sapiens | voltage-gated chloride ion channel | 1978 | 100 |
| 739 | AB026116 | Homo sapiens | organic anion transporter 4 | 1444 | 98 |
| 740 | D00570 | Mus | open reading frame (196 AA) | 83 | 24 |
| | | musculus | | | |
| 741 | W03626 | Homo sapiens | Human thyrotropin GPR N-terminal sequence. | 118 | 40 |
| 742 | U66059 | Homo sapiens | V_segment translation product | 614 | 100 |
| 743 | AF119815 | Homo sapiens | G-protein-coupled receptor | 2751 | 99 |
| 744 | X16663 | Homo sapiens | haematopoietic lineage cell protein (AA 1-486) | 148 | 93 |
| 745 | W67838 | Homo sapiens | Human secreted protein encoded by gene 32 | 448 | 95 |
| | | | clone HLTCJ63. | | |
| 746 | W57260 | Homo sapiens | Human semaphorin Y. | 2414 | 100 |
| 747 | W21578 | Homo sapiens | Alzheimer's disease protein encoded by DNA | 968 | 65 |
| | | | from plasmid pGCS2232. | | |
| 748 | Y94935 | Homo sapiens | Human secreted protein clone yd218_1 protein | 622 | 100 |
| | | | sequence SEQ ID NO: 76. | | |
| 749 | AL022238 | Homo sapiens | dJ1042K10.5 (novel protein) | 314 | 85 |
| 750 | G03889 | Homo sapiens | Human secreted protein, SEQ ID NO: 7970. | 391 | 87 |
| 751 | AB025258 | Mus | granuphilin-a | 773 | 41 |
| | | musculus | | | |
| 752 | Y52386 | Homo sapiens | Human transmembrane protein HP02000. | 900 | 99 |
| 753 | Y48586 | Homo sapiens | Human breast tumor-associated protein 47. | 2527 | 99 |
| 754 | AJ272207 | Homo sapiens | putative G protein-coupled receptor 92 | 694 | 100 |
| 755 | M85183 | Rattus | vasopressin receptor | 979 | 68 |
| | | norvegicus | | | |
| 756 | AF190501 | Homo sapiens | leucine-rich repeat-containing G protein-coupled | 388 | 71 |
| | | | receptor 6 | | |
| 757 | Y02692 | Homo sapiens | Human secreted protein encoded by gene 43 | 461 | 87 |
| | | | clone HTADX17. | | |
| 758 | Z22535 | Homo sapiens | ALK-3 | 439 | 98 |
| 759 | R04932 | Homo sapiens | Interferon-gamma receptor segment from clone | 564 | 97 |
| | | | 39 responsiblefor binding the target. | | |
| 760 | W74902 | Homo sapiens | Human secreted protein encoded by gene 175 | 1217 | 99 |
| | | | clone HE8BI92. | | |
| 761 | G03706 | Homo sapiens | Human secreted protein, SEQ ID NO: 7787. | 223 | 88 |
| 762 | AB020676 | Homo sapiens | KIAA0869 protein | 4433 | 99 |
| 763 | AK026992 | Homo sapiens | unnamed protein product | 2285 | 99 |
| 764 | AF173358 | Homo sapiens | glucocorticoid receptor AF-1 coactivator-1 | 573 | 100 |
| 765 | AF268066 | Mus | netrin 4 | 2019 | 89 |
| | | musculus | | | |
| 766 | Y48585 | Homo sapiens | Human breast tumor-associated protein 46. | 1169 | 89 |
| 767 | AF230378 | Mus | interleukin-1 delta | 309 | 45 |
| | | musculus | | | |
| 768 | AF121975 | Mus | odorant receptor S18 | 268 | 62 |
| | | musculus | | | |
| 769 | AB008515 | Homo sapiens | RanBPM | 611 | 57 |
| 770 | Y09945 | Rattus | putative integral membrane transport protein | 458 | 50 |
| | | norvegicus | | | |
| 771 | AF226731 | Homo sapiens | AD026 | 688 | 99 |
| 772 | Y27132 | Homo sapiens | Human glioblastoma-derived polypeptide (clone | 1384 | 100 |
| | | | OA004FG). | | |
| 773 | X87832 | Homo sapiens | NOV/plexin-A1 protein | 1821 | 98 |
| 774 | AB025258 | Mus | granuphilin-a | 500 | 41 |
| | | musculus | | | |
| 775 | AF125101 | Homo sapiens | HSPC040 protein | 232 | 93 |
| 776 | G02815 | Homo sapiens | Human secreted protein, SEQ ID NO: 6896. | 314 | 95 |
| 777 | G02493 | Homo sapiens | Human secreted protein, SEQ ID NO: 6574. | 191 | 68 |
| 778 | R03301 | Homo sapiens | Sequence of pre-human atrial natriuretic peptide. | 213 | 45 |
| 779 | AL357374 | Homo sapiens | bA353C18.2 (novel protein) | 232 | 100 |
| 780 | AF100346 | Homo sapiens | neuronal voltage gated calcium channel gamma- | 1434 | 89 |
| | | | 3 subunit | | |
| 781 | Y19566 | Homo sapiens | Amino acid sequence of a human secreted | 103 | 52 |
| | | | protein. | | |
| 782 | Y36233 | Homo sapiens | Human secreted protein encoded by gene 10. | 1098 | 93 |
| 783 | AF084464 | Rattus | GTP-binding protein REM2 | 141 | 30 |
| | | norvegicus | | | |
| 784 | W49042 | Homo sapiens | Human low density lipoprotein binding protein | 2693 | 99 |
| | | | LBP-3. | | |
| 785 | AF238381 | Homo sapiens | PTOV1 | 1904 | 91 |
| 786 | Y91870 | Homo sapiens | Human apoptosis related protein. | 547 | 100 |
| 787 | Y71062 | Homo sapiens | Human membrane transport protein, MTRP-7. | 1062 | 94 |
| 788 | AF117754 | Homo sapiens | thyroid hormone receptor-associated protein | 8684 | 98 |
| | | | complex component TRAP240 | | |
| 789 | AL049569 | Homo sapiens | dJ37C10.3 (novel ATPase) | 2848 | 96 |
| 790 | AF151848 | Homo sapiens | CGI-90 protein | 745 | 96 |
| 791 | Y08639 | Homo sapiens | nuclear orphan receptor ROR-beta | 1421 | 95 |
| 792 | Y41706 | Homo sapiens | Human PRO381 protein sequence. | 644 | 99 |
| 793 | AF121228 | Homo sapiens | thyroid hormone receptor-associated protein | 1037 | 100 |
| | | | complex component TRAP95 | | |
| 794 | G04072 | Homo sapiens | Human secreted protein, SEQ ID NO: 8153. | 124 | 62 |
| 795 | Y69384 | Homo sapiens | Amino acid sequence of a 14274 receptor | 119 | 100 |
| | | | protein. | | |
| 796 | W40215 | Homo sapiens | Human macrophage antigen. | 1358 | 99 |
| 797 | AF258340 | Homo sapiens | hepatocellular carcinoma-associated antigen 112 | 1151 | 99 |
| 798 | AF159615 | Homo sapiens | FGF receptor activating protein 1 | 461 | 98 |
| 799 | Y59863 | Homo sapiens | Human normal uterus tissue derived protein 26. | 797 | 99 |
| 800 | W70459 | Homo sapiens | Human T1-receptor ligand III splice variant 2. | 572 | 92 |
| 801 | L00073 | Homo sapiens | renin | 1913 | 93 |
| 802 | P92219 | Homo sapiens | CR1 protein. | 11963 | 97 |
| | | (human) | | | |
| 803 | X15357 | Homo sapiens | ANP-A receptor preprotein (AA −32 to 1029) | 5199 | 98 |
| 804 | W64473 | Homo sapiens | Human secreted protein from clone EC172_1. | 4018 | 95 |
| 805 | AJ243874 | Homo sapiens | oligophrenin-4 | 2067 | 100 |
| 806 | G01731 | Homo sapiens | Human secreted protein, SEQ ID NO: 5812. | 284 | 100 |
| 807 | Z24680 | Homo sapiens | garp | 1562 | 83 |
| 808 | AF171669 | Homo sapiens | glycoprotein-associated amino acid transporter | 1364 | 90 |
| | | | LAT2 | | |
| 809 | W70321 | Homo sapiens | Secreted protein CC198_1. | 1154 | 96 |
| 810 | W74843 | Homo sapiens | Human secreted protein encoded by gene 115 | 855 | 99 |
| | | | clone HOVBA03. | | |
| 811 | AF108831 | Homo sapiens | K:Cl cotransporter 3 | 4561 | 100 |
| 812 | AF092135 | Homo sapiens | PTD014 | 862 | 100 |
| 813 | AF283772 | Homo sapiens | similar to Homo sapiens ribosomal protein L10 | 784 | 100 |
| | | | encoded by GenBank Accession Number | | |
| | | | L25899 | | |
| 814 | G01563 | Homo sapiens | Human secreted protein, SEQ ID NO: 5644. | 330 | 100 |
| 815 | AF051151 | Homo sapiens | Toll/interleukin-1 receptor-like protein 3 | 3850 | 99 |
| 816 | W95630 | Homo sapiens | Homo sapiens secreted protein gene clone | 358 | 100 |
| | | | gn114_1. | | |
| 817 | G01082 | Homo sapiens | Human secreted protein, SEQ ID NO: 5163. | 549 | 100 |
| 818 | AF151800 | Homo sapiens | CGI-41 protein | 1106 | 95 |
| 819 | L00352 | Homo sapiens | low density lipoprotein receptor | 3980 | 100 |
| 820 | X04434 | Homo sapiens | IGF-I receptor | 5832 | 99 |
| 821 | G03844 | Homo sapiens | Human secreted protein, SEQ ID NO: 7925. | 572 | 100 |
| 822 | AF212220 | Homo sapiens | TERA | 396 | 48 |
| 823 | Y50125 | Homo sapiens | Human glycophosphatidylinositol-anchored | 4897 | 99 |
| | | | protein GPI-122. | | |
| 824 | AF156778 | Homo sapiens | ASB-3 protein | 2675 | 98 |
| 825 | AF096322 | Homo sapiens | neuronal voltage-gated calcium channel gamma- | 1105 | 100 |
| | | | 2 subunit | | |
| 826 | Y07972 | Homo sapiens | Human secreted protein fragment #2 encoded | 1540 | 100 |
| | | | from gene 28. | | |
| 827 | AB032013 | Homo sapiens | potassium channel Kv8.1 | 2435 | 95 |
| 828 | Y13620 | Homo sapiens | BCL9 | 5284 | 96 |
| 829 | Y91474 | Homo sapiens | Human secreted protein sequence encoded by | 541 | 98 |
| | | | gene 24 SEQ ID NO: 147. | | |
| 830 | X54232 | Homo sapiens | glypican | 1625 | 87 |
| 831 | X14830 | Homo sapiens | acetylcholine receptor beta-subunit preprotein | 2540 | 100 |
| 832 | Y71262 | Homo sapiens | Human chondromodulin-like protein, Zchm1. | 1002 | 100 |
| 833 | G03873 | Homo sapiens | Human secreted protein, SEQ ID NO: 7954. | 638 | 96 |
| 834 | AC003030 | Homo sapiens | R29828_1 | 1389 | 93 |
| 835 | Y38422 | Homo sapiens | Human secreted protein. | 964 | 87 |
| 836 | U41557 | Caenorhabditis | glycine-rich | 85 | 36 |
| | | elegans | | | |
| 837 | AL121889 | Homo sapiens | dJ1076E17.1 (KIAA0823 protein (continues in | 998 | 75 |
| | | | AL023803)) | | |
| 838 | AJ011415 | Homo sapiens | plexin-B1/SEP receptor | 1580 | 60 |
| 839 | W80398 | Homo sapiens | A secreted protein encoded by clone cw1543_3. | 1105 | 67 |
| 840 | G00862 | Homo sapiens | Human secreted protein, SEQ ID NO: 4943. | 255 | 92 |
| 841 | G02650 | Homo sapiens | Human secreted protein, SEQ ID NO: 6731. | 644 | 97 |
| 842 | AF036717 | Homo sapiens | FGFR signalling adaptor SNT-1 | 2629 | 99 |
| 843 | Y73446 | Homo sapiens | Human secreted protein clone yc27_1 protein | 1089 | 100 |
| | | | sequence SEQ ID NO: 114. | | |
| 844 | G02872 | Homo sapiens | Human secreted protein, SEQ ID NO: 6953. | 357 | 69 |
| 845 | AF151810 | Homo sapiens | CGI-52 protein | 1443 | 88 |
| 846 | X83378 | Homo sapiens | putative chloride channel | 1620 | 99 |
| 847 | AC004883 | Homo sapiens | similar to general transcription factor 2I; similar | 655 | 96 |
| | | | to AF038969 (PID: g2827207) | | |
| 848 | X99886 | Homo sapiens | monocyte chemotactic protein-2 | 160 | 76 |
| 849 | AC005587 | Homo sapiens | similar to mouse olfactory receptor 13; similar to | 963 | 98 |
| | | | P34984 (PID: g464305) | | |
| 850 | AB038237 | Homo sapiens | G protein-coupled receptor C5L2 | 1767 | 100 |
| 851 | AF124490 | Homo sapiens | ARF GTPase-activating protein GIT1 | 3415 | 98 |
| 852 | Y86217 | Homo sapiens | Human secreted protein HWHGU54, SEQ ID | 1189 | 99 |
| | | | NO: 132. | | |
| 853 | AF224741 | Homo sapiens | chloride channel protein 7 | 3748 | 99 |
| 854 | X17094 | Homo sapiens | furin (AA 1-794) | 3550 | 99 |
| 855 | W78245 | Homo sapiens | Fragment of human secreted protein encoded by | 1245 | 99 |
| | | | gene 19. | | |
| 856 | R97569 | Homo sapiens | Interleukin-2 receptor associated protein p43. | 1926 | 100 |
| 857 | Y41765 | Homo sapiens | Human PRO1083 protein sequence. | 3211 | 99 |
| 858 | AF057306 | Homo sapiens | transmembrane proteolipid | 481 | 84 |
| 859 | AK025116 | Homo sapiens | unnamed protein product | 374 | 69 |
| 860 | Y41312 | Homo sapiens | Human secreted protein encoded by gene 5 clone | 824 | 100 |
| | | | HLDRM43. | | |
| 862 | Y25776 | Homo sapiens | Human secreted protein encoded from gene 66. | 895 | 99 |
| 863 | Y74188 | Homo sapiens | Human prostate tumor EST fragment derived | 96 | 30 |
| | | | protein #375. | | |
| 864 | AF167473 | Homo sapiens | heme-binding protein | 870 | 99 |
| 865 | G02532 | Homo sapiens | Human secreted protein, SEQ ID NO: 6613. | 211 | 67 |
| 866 | X54870 | Homo sapiens | Type II integral membrane protein | 1201 | 100 |
| 867 | G00700 | Homo sapiens | Human secreted protein, SEQ ID NO: 4781. | 640 | 99 |
| 868 | Y07894 | Homo sapiens | Human secreted protein fragment encoded from | 388 | 88 |
| | | | gene 43. | | |
| 869 | J00123 | Homo sapiens | preproenkephalin ( | 1349 | 95 |
| 870 | Y91632 | Homo sapiens | Human secreted protein sequence encoded by | 1048 | 98 |
| | | | gene 25 SEQ ID NO: 305. | | |
| 871 | L04311 | Homo sapiens | GABA-alpha receptor beta-3 subunit | 237 | 93 |
| 872 | Y29988 | Homo sapiens | Human cytokine family member EF-7 protein. | 960 | 94 |
| 873 | AF161382 | Homo sapiens | HSPC264 | 1124 | 99 |
| 874 | G03412 | Homo sapiens | Human secreted protein, SEQ ID NO: 7493. | 464 | 100 |
| 875 | Y27572 | Homo sapiens | Human secreted protein encoded by gene No. 6. | 573 | 96 |
| 876 | M15530 | Homo sapiens | B-cell growth factor | 171 | 56 |
| 877 | W63681 | Homo sapiens | Human secreted protein 1. | 1652 | 99 |
| 878 | L27867 | Rattus | neurexophilin | 1448 | 98 |
| | | norvegicus | | | |
| 879 | Y10835 | Homo sapiens | Amino acid sequence of a human secreted | 321 | 100 |
| | | | protein. | | |
| 880 | W88991 | Homo sapiens | Polypeptide fragment encoded by gene 144. | 936 | 100 |
| 881 | AF118670 | Homo sapiens | orphan G protein-coupled receptor | 1971 | 100 |
| 882 | AF208865 | Homo sapiens | EDRF | 528 | 100 |
| 883 | Y18462 | Homo sapiens | cathepsin L | 209 | 72 |
| 884 | Y94950 | Homo sapiens | Human secreted protein clone dh1073_12 protein | 348 | 100 |
| | | | sequence SEQ ID NO: 106. | | |
| 885 | AF070661 | Homo sapiens | HSPC005 | 404 | 100 |
| 886 | Y04315 | Homo sapiens | Human secreted protein encoded by gene 23. | 385 | 100 |
| 887 | X92744 | Homo sapiens | hBD-1 | 375 | 100 |
| 888 | Y22496 | Homo sapiens | Human secreted protein sequence clone | 994 | 94 |
| | | | cn621_8. | | |
| 889 | Y41293 | Homo sapiens | Human soluble protein ZTMPO-1. | 4595 | 99 |
| 890 | G03714 | Homo sapiens | Human secreted protein, SEQ ID NO: 7795. | 147 | 63 |
| 891 | AF208856 | Homo sapiens | BM-014 | 1012 | 99 |
| 892 | U29195 | Homo sapiens | neuronal pentraxin II | 2002 | 98 |
| 893 | X68149 | Homo sapiens | Burkitt lymphoma receptor 1 | 1953 | 100 |
| 894 | Y94914 | Homo sapiens | Human secreted protein clone pw337_6 protein | 537 | 100 |
| | | | sequence SEQ ID NO: 34. | | |
| 895 | W61630 | Homo sapiens | Clone HNFGW06 of EGFR receptor family. | 326 | 63 |
| 896 | M24110 | Homo sapiens | G0S19-2 peptide precursor | 481 | 100 |
| 897 | Z68747 | Homo sapiens | imogen 38 | 2018 | 99 |
| 898 | AF186112 | Homo sapiens | neurokinin B-like protein ZNEUROK1 | 619 | 100 |
| 899 | AF225420 | Homo sapiens | AD025 | 734 | 100 |
| 900 | P60657 | Homo sapiens | Sequence of human lipocortin. | 1835 | 100 |
| 901 | M27288 | Homo sapiens | oncostatin M | 1297 | 99 |
| 902 | W85737 | Homo sapiens | Polypeptide with transmembrane domain. | 749 | 100 |
| 903 | G01349 | Homo sapiens | Human secreted protein, SEQ ID NO: 5430. | 650 | 99 |
| 904 | Y00261 | Homo sapiens | Human secreted protein encoded by gene 4. | 1133 | 99 |
| 905 | AF039688 | Homo sapiens | antigen NY-CO-3 | 771 | 99 |
| 906 | AB007836 | Homo sapiens | Hic-5 | 2544 | 100 |
| 907 | AB017507 | Homo sapiens | Apg12 | 224 | 100 |
| 908 | AK000056 | Homo sapiens | unnamed protein product | 1537 | 98 |
| 909 | Y86299 | Homo sapiens | Human secreted protein HFOXB55, SEQ ID | 427 | 100 |
| | | | NO: 214. | | |
| 910 | AF231023 | Homo sapiens | protocadherin Flamingo 1 | 7393 | 99 |
| 911 | Y14134 | Homo sapiens | Vascular endothelial cell growth inhibitor beta | 1319 | 100 |
| | | | protein sequence. | | |
| 912 | Z90420 | Homo sapiens | Human GDF-3 (hGDF-3) polypeptide encoding | 1950 | 100 |
| | | | cDNA. | | |
| 913 | Y19757 | Homo sapiens | SEQ ID NO 475 from WO9922243. | 1361 | 100 |
| 914 | G03172 | Homo sapiens | Human secreted protein, SEQ ID NO: 7253. | 112 | 48 |
| 915 | U14971 | Homo sapiens | ribosomal protein S9 | 886 | 90 |
| 916 | AF172854 | Homo sapiens | cardiotrophin-like cytokine CLC | 1204 | 99 |
| 917 | AC005525 | Homo sapiens | F22162_1 | 1963 | 100 |
| 918 | AF166350 | Homo sapiens | ST7 protein | 4711 | 99 |
| 919 | Y87285 | Homo sapiens | Human signal peptide containing protein HSPP- | 430 | 100 |
| | | | 62 SEQ ID NO: 62. | | |
| 920 | Y36131 | Homo sapiens | Human secreted protein #3. | 465 | 88 |
| 921 | AF193766 | Homo sapiens | cytokine-like protein C17 | 724 | 100 |
| 922 | Y95013 | Homo sapiens | Human secreted protein vc48_1, SEQ ID NO: 66. | 357 | 100 |
| 923 | X75208 | Homo sapiens | protein tyrosine kinase-receptor | 5256 | 100 |
| 924 | Y96202 | Homo sapiens | IkappaB kinase (IKK) binding protein, Y2H56. | 813 | 98 |
| 925 | AB039886 | Homo sapiens | down-regulated in gastric cancer | 785 | 78 |
| 926 | G03368 | Homo sapiens | Human secreted protein, SEQ ID NO: 7449. | 55 | 50 |
| 927 | Y48606 | Homo sapiens | Human breast tumor-associated protein 67. | 539 | 100 |
| 928 | Y36151 | Homo sapiens | Human secreted protein #23. | 668 | 100 |
| 929 | AF110399 | Homo sapiens | elongation factor Ts | 1666 | 100 |
| 930 | AF210317 | Homo sapiens | facilitative glucose transporter family member | 2763 | 99 |
| | | | GLUT9 | | |
| 931 | Y73328 | Homo sapiens | HTRM clone 082843 protein sequence. | 931 | 100 |
| 932 | G01959 | Homo sapiens | Human secreted protein, SEQ ID NO: 6040. | 274 | 100 |
| 933 | U47924 | Homo sapiens | B-cell receptor associated protein | 1469 | 100 |
| 934 | G03827 | Homo sapiens | Human secreted protein, SEQ ID NO: 7908. | 529 | 93 |
| 935 | AB039371 | Homo sapiens | mitochondrial ABC transporter 3 | 196 | 63 |
| 936 | X56385 | Canis | rab8 | 1064 | 100 |
| | | familiaris | | | |
| 937 | B08906 | Homo sapiens | Human secreted protein sequence encoded by | 117 | 44 |
| | | | gene 16 SEQ ID NO: 63. | | |
| 938 | M13692 | Homo sapiens | alpha-1 acid glycoprotein precursor | 1064 | 99 |
| 939 | Y53886 | Homo sapiens | A suppressor of cytokine signalling protein | 515 | 42 |
| | | | designated HSCOP-6. | | |
| 940 | Y16630 | Homo sapiens | Human Putative Adrenomedullin Receptor | 1904 | 99 |
| | | | (PAR). | | |
| 941 | AC005102 | Homo sapiens | small inducible cytokine subfamily A member | 627 | 99 |
| | | | 24 | | |
| 942 | M12886 | Homo sapiens | T-cell receptor beta chain | 1289 | 81 |
| 943 | AF226046 | Homo sapiens | GK003 | 1049 | 98 |
| 944 | Y36078 | Homo sapiens | Extended human secreted protein sequence, SEQ | 667 | 100 |
| | | | ID NO. 463. | | |
| 945 | M22877 | Homo sapiens | cytochrome c | 565 | 100 |
| 946 | W67869 | Homo sapiens | Human secreted protein encoded by gene 63 | 551 | 93 |
| | | | clone HHGDB72. | | |
| 947 | W67859 | Homo sapiens | Human secreted protein encoded by gene 53 | 283 | 100 |
| | | | clone HBMCL41. | | |
| 948 | W85726 | Homo sapiens | Novel protein (Clone BG33_7). | 789 | 100 |
| 949 | AJ242015 | Homo sapiens | eMDC II protein | 4236 | 100 |
| 950 | G04075 | Homo sapiens | Human secreted protein, SEQ ID NO: 8156. | 567 | 99 |
| 951 | AF110645 | Homo sapiens | candidate tumor suppressor p33 INGl homolog | 1314 | 100 |
| 952 | Y36111 | Homo sapiens | Extended human secreted protein sequence, SEQ | 402 | 70 |
| | | | ID NO. 496. | | |
| 953 | AB012109 | Homo sapiens | APC10 | 990 | 100 |
| 954 | AF246221 | Homo sapiens | transmembrane protein BRI | 1405 | 100 |
| 955 | AF054986 | Homo sapiens | putative transmembrane GTPase | 1883 | 100 |
| 956 | W74726 | Homo sapiens | Human secreted protein fg949_3. | 1879 | 100 |
| 957 | Y27096 | Homo sapiens | Human viral receptor protein (ACVRP). | 1581 | 100 |
| 958 | AJ222967 | Homo sapiens | cystinosin | 1920 | 100 |
| 959 | Y53052 | Homo sapiens | Human secreted protein clone df202_3 protein | 587 | 100 |
| | | | sequence SEQ ID NO: 110. | | |
| 960 | G02694 | Homo sapiens | Human secreted protein, SEQ ID NO: 6775. | 283 | 100 |
| 961 | AF151855 | Homo sapiens | CG1-97 protein | 1214 | 96 |
| 962 | U26592 | Homo sapiens | diabetes mellitus type I autoantigen | 250 | 65 |
| 963 | AL050306 | Homo sapiens | dJ475B7.2 (novel protein) | 3796 | 100 |
| 964 | AF078859 | Homo sapiens | PTD004 | 2089 | 100 |
| 965 | AB020315 | Homo sapiens | homologue of mouse dkk-1 gene: Acc# | 1466 | 100 |
| | | | AF030433 | | |
| 966 | X04571 | Homo sapiens | precursor polypeptide (AA-22 to 1185) | 6580 | 99 |
| 967 | AF146019 | Homo sapiens | hepatocellular carcinoma antigen gene 520 | 993 | 99 |
| 968 | AF071002 | Homo sapiens | minK-related peptide 1; MiRP1 | 632 | 100 |
| 969 | AB021227 | Homo sapiens | membrane-type-5 matrix metalloproteinase | 3545 | 100 |
| 970 | AF 180920 | Homo sapiens | cyclin L ania-6a | 1579 | 100 |
| 971 | AF105365 | Homo sapiens | K-Cl cotransporter KCC4 | 5621 | 99 |
| 972 | AF083248 | Homo sapiens | ribosomal protein L26 homolog | 739 | 100 |
| 973 | AJ132429 | Homo sapiens | hyperpolarization-activated cyclic nucleotide | 6295 | 100 |
| | | | gated cation channel hHCN4 | | |
| 974 | W61619 | Homo sapiens | Clone HTPEF86 of TM4SF superfamily. | 454 | 100 |
| 975 | AF155100 | Homo sapiens | zinc finger protein NY-REN-21 antigen | 2261 | 100 |
| 976 | AF275948 | Homo sapiens | ABCA1 | 11763 | 99 |
| 977 | AB026891 | Homo sapiens | cystine/glutamate transporter | 2552 | 100 |
| 978 | AF 117657 | Homo sapiens | thyroid hormone receptor-associated protein | 3348 | 99 |
| | | | complex component TRAP80 | | |
| 979 | AF044201 | Rattus | neural membrane protein 35; NMP35 | 1570 | 92 |
| | | norvegicus | | | |
| 980 | AF119297 | Homo sapiens | neuroendocrine-specific protein-like protein I | 1170 | 99 |
| 981 | AF155652 | Homo sapiens | potassium channel modulator factory | 1983 | 99 |
| 982 | W88499 | Homo sapiens | Human stomach carcinoma clone HP 10412- | 1553 | 99 |
| | | | encoded protein. | | |
| 983 | Z56281 | Homo sapiens | interferon regulatory factor 3 | 2012 | 98 |
| 984 | AB026125 | Homo sapiens | ART-4 | 2160 | 100 |
| 985 | Y14482 | Homo sapiens | Fragment of human secreted protein encoded by | 172 | 70 |
| | | | gene 17. | | |
| 986 | AB023888 | Homo sapiens | b-chemokine receptor CCR4 | 1895 | 100 |
| 987 | W27291 | Homo sapiens | Human H1075-1 secreted protein 5′ end. | 712 | 100 |
| 988 | AF153450 | Manduca | juvenile hormone esterase binding protein | 226 | 32 |
| | | sexta | | | |
| 989 | G03697 | Homo sapiens | Human secreted protein, SEQ ID NO: 7778. | 194 | 88 |
| 990 | AF204159 | Homo sapiens | potassium large conductance calcium-activated | 1486 | 100 |
| | | | channel beta 3a subunit | | |
| 991 | G02061 | Homo sapiens | Human secreted protein, SEQ ID NO: 6142. | 558 | 99 |
| 992 | AL031266 | Caenorhabditis | VM106R.1 | 327 | 40 |
| | | elegans | | | |
| 993 | Y66749 | Homo sapiens | Membrane-bound protein PRO1124. | 4730 | 99 |
| 994 | G01246 | Homo sapiens | Human secreted protein, SEQ ID NO: 5327. | 141 | 77 |
| 995 | AF133845 | Homo sapiens | corin | 5811 | 99 |
| 996 | AF117756 | Homo sapiens | thyroid hormone receptor-associated protein | 4999 | 100 |
| | | | complex component TRAP150 | | |
| 997 | W62066 | Homo sapiens | Human stem cell antigen 2. | 284 | 93 |
| 998 | Y87173 | Homo sapiens | Human secreted protein sequence SEQ ID | 725 | 100 |
| | | | NO: 212. | | |
| 999 | Y13379 | Homo sapiens | Amino acid sequence of protein PRO263. | 1654 | 99 |
| 1000 | Y95008 | Homo sapiens | Human secreted protein vf3_1, SEQ ID NO: 56. | 676 | 47 |
| 1001 | AF190167 | Homo sapiens | membrane associated protein SLP-2 | 1747 | 100 |
| 1002 | G01234 | Homo sapiens | Human secreted protein, SEQ ID NO: 5315. | 398 | 96 |
| 1003 | W73420 | Homo sapiens | Human secreted protein encoded by Gene No. | 2150 | 100 |
| | | | 24. | | |
| 1004 | X12791 | Homo sapiens | 19 kD SRP-protein (AA 1-144) | 742 | 100 |
| 1005 | M23323 | Homo sapiens | membrane protein | 642 | 100 |
| 1006 | X63745 | Homo sapiens | KDEL receptor | 326 | 98 |
| 1007 | Y35997 | Homo sapiens | Extended human secreted protein sequence, SEQ | 824 | 99 |
| | | | ID NO. 382. | | |
| 1008 | AB032918 | Hylobates | dopamine receptor D4 | 92 | 35 |
| | | moloch | | | |
| 1009 | Y91680 | Homo sapiens | Human secreted protein sequence encoded by | 1372 | 99 |
| | | | gene 81 SEQ ID NO: 353. | | |
| 1010 | AL136125 | Homo sapiens | dJ304B14.1 (novel protein) | 825 | 98 |
| 1011 | G03733 | Homo sapiens | Human secreted protein, SEQ ID NO: 7814. | 379 | 98 |
| 1012 | Y17531 | Homo sapiens | Human secreted protein clone BL205 14 protein. | 818 | 97 |
| 1013 | G00724 | Homo sapiens | Human secreted protein, SEQ ID NO: 4805. | 462 | 100 |
| 1014 | AF288092 | Naegleria | haem lyase | 114 | 37 |
| | | gruberi | | | |
| 1015 | AB045292 | Homo sapiens | M83 protein | 3867 | 99 |
| 1016 | X15940 | Homo sapiens | ribosomal protein L31 (AA 1-125) | 644 | 100 |
| 1017 | Y94873 | Homo sapiens | Human protein clone HP02632. | 1876 | 100 |
| 1018 | AL024498 | Homo sapiens | dJ417M14.1 (novel protein) | 589 | 100 |
| 1019 | X83425 | Homo sapiens | Lutheran blood group glycoprotein | 3054 | 99 |
| 1020 | W03516 | Homo sapiens | Prostaglandin DP receptor. | 1864 | 100 |
| 1021 | G03960 | Homo sapiens | Human secreted protein, SEQ ID NO: 8041. | 398 | 100 |
| 1022 | Y91689 | Homo sapiens | Human secreted protein sequence encoded by | 768 | 100 |
| | | | gene 93 SEQ ID NO: 362. | | |
| 1023 | AE000660 | Homo sapiens | hADV36S1 | 573 | 100 |
| 1024 | AF132965 | Homo sapiens | CGI-31 protein | 1550 | 100 |
| 1025 | W92380 | Homo sapiens | Human TR-interacting protein S103a. | 1466 | 97 |
| 1026 | R66278 | Homo sapiens | Therapeutic polypeptide from glioblastoma cell | 830 | 100 |
| | | | line. | | |
| 1027 | X65614 | Homo sapiens | S100P calcium-binding protein | 476 | 100 |
| 1028 | Y41741 | Homo sapiens | Human PRO704 protein sequence. | 1323 | 100 |
| 1029 | AJ001014 | Homo sapiens | RAMP1 | 806 | 100 |
| 1030 | W63682 | Homo sapiens | Human secreted protein 2. | 1354 | 99 |
| 1031 | AK023007 | Homo sapiens | unnamed protein product | 766 | 100 |
| 1032 | W97900 | Homo sapiens | Human SR-BI class B scavenger. | 2672 | 99 |
| 1033 | Y82453 | Homo sapiens | Human TGC-440 secretory protein SEQ ID | 639 | 99 |
| | | | NO: 1. | | |
| 1034 | Y73473 | Homo sapiens | Human secreted protein clone yd178_1 protein | 752 | 93 |
| | | | sequence SEQ ID NO: 168. | | |
| 1035 | Y86468 | Homo sapiens | Human gene 48-encoded protein fragment, SEQ | 96 | 90 |
| | | | ID NO: 383. | | |
| 1036 | U09813 | Homo sapiens | mitochondrial ATP synthase subunit 9 precursor | 698 | 100 |
| 1037 | AJ242832 | Homo sapiens | calpain | 3699 | 99 |
| 1038 | X66403 | Homo sapiens | acetylcholine receptor epsilon subunit CHRNE | 2574 | 100 |
| 1039 | AJ242730 | Homo sapiens | polyhomeotic 2 | 1310 | 100 |
| 1040. | AF169968 | Mus | DNA binding protein DESRT | 1453 | 80 |
| | | musculus | | | |
| 1041 | X52563 | Bos taurus | permability increasing protein | 383 | 29 |
| 1042 | G00368 | Homo sapiens | Human secreted protein, SEQ ID NO: 4449. | 75 | 50 |
| 1043 | G02532 | Homo sapiens | Human secreted protein, SEQ ID NO: 6613. | 60 | 53 |
| 1044 | M94582 | Homo sapiens | interleukin 8 receptor B | 1850 | 100 |
| 1045 | AL080239 | Homo sapiens | bG256O22.1 (similar to IGFALS (insulin-like | 1704 | 50 |
| | | | growth factor binding protein, acid labile | | |
| | | | subunit)) | | |
| 1046 | AF125101 | Homo sapiens | HSPC040 protein | 580 | 100 |
| 1047 | W74809 | Homo sapiens | Human secreted protein encoded by gene 81 | 176 | 100 |
| | | | clone HMWDN32. | | |
| 1048 | AL022238 | Homo sapiens | dJ1042K10.4 (novel protein) | 2201 | 100 |
| 1049 | W88667 | Homo sapiens | Secreted protein encoded by gene 134 clone | 1559 | 99 |
| | | | HAIBP89. | | |
| 1050 | AF097518 | Homo sapiens | liver-specific transporter | 2820 | 100 |
| 1051 | W78324 | Homo sapiens | Fragment of human secreted protein encoded by | 1318 | 98 |
| | | | gene 81. | | |
| 1052 | Y21851 | Homo sapiens | Human signal peptide-containing protein (SIGP) | 1643 | 95 |
| | | | (clone ID 2328134). | | |
| 1053 | AL163815 | Arabidopsis | putative protein | 661 | 62 |
| | | thaliana | | | |
| 1054 | Y76200 | Homo sapiens | Human secreted protein encoded by gene 77. | 262 | 100 |
| 1055 | AJ276567 | Homo sapiens | TC10-like Rho GTPase | 1160 | 100 |
| 1056 | Y27620 | Homo sapiens | Human secreted protein encoded by gene No. 54. | 154 | 96 |
| 1057 | D14530 | Homo sapiens | ribosomal protein | 745 | 100 |
| 1058 | AF132000 | Homo sapiens | TADA1 protein | 1132 | 100 |
| 1059 | AL031778 | Homo sapiens | dJ34B21.1 (novel BZRP (benzodiazapine | 920 | 100 |
| | | | receptor (peripheral) (MBR, PBR, PBKS, IBP, | | |
| | | | Isoquinoline-binding protein)) LIKE protein) | | |
| 1060 | AF227135 | Homo sapiens | candidate taste receptor T2R9 | 134 | 33 |
| 1061 | Y27575 | Homo sapiens | Human secreted protein encoded by gene No. 9. | 1392 | 100 |
| 1062 | Z11697 | Homo sapiens | HB15 | 1088 | 100 |
| 1063 | AF123757 | Homo sapiens | putative transmembrane protein | 819 | 100 |
| 1064 | AF155135 | Homo sapiens | novel retinal pigment epithelial cell protein | 2932 | 99 |
| 1065 | Y41674 | Homo sapiens | Human channel-related molecule HCRM-2. | 936 | 99 |
| 1066 | AJ250042 | Homo sapiens | Rab5 GDP/GTP exchange factor homologue | 2575 | 100 |
| 1067 | Y36087 | Homo sapiens | Extended human secreted protein sequence, SEQ | 770 | 85 |
| | | | ID NO. 472. | | |
| 1068 | Y94959 | Homo sapiens | Human secreted protein clone mc300_1 protein | 301 | 100 |
| | | | sequence SEQ ID NO: 124. | | |
| 1069 | Y94959 | Homo sapiens | Human secreted protein clone mc300_1 protein | 301 | 100 |
| | | | sequence SEQ ID NO: 124. | | |
| 1070 | W64535 | Homo sapiens | Human leukocyte cell clone HP00804 protein. | 2014 | 99 |
| 1071 | X03145 | Homo sapiens | pot. ORF III | 148 | 50 |
| 1072 | AL031177 | Homo sapiens | dJ889M15.3 (novel protein) | 821 | 91 |
| 1073 | X82200 | Homo sapiens | gpStaf50 | 249 | 62 |
| 1074 | G03213 | Homo sapiens | Human secreted protein, SEQ ID NO: 7294. | 99 | 47 |
| 1075 | Y36233 | Homo sapiens | Human secreted protein encoded by gene 10. | 506 | 55 |
| 1076 | G03187 | Homo sapiens | Human secreted protein, SEQ ID NO: 7268. | 424 | 98 |
| 1077 | L25899 | Homo sapiens | ribosomal protein L10 | 332 | 76 |
| 1078 | Y91447 | Homo sapiens | Human secreted protein sequence encoded by | 898 | 97 |
| | | | gene 48 SEQ ID NO: 168. | | |
| 1079 | G01862 | Homo sapiens | Human secreted protein, SEQ ID NO: 5943. | 290 | 89 |
| 1080 | AB039723 | Homo sapiens | WNT receptor frizzled-3 | 1376 | 92 |
| 1081 | AB020527 | Homo sapiens | Na/PO4 cotransporter homolog | 269 | 100 |
| 1082 | L13802 | Homo sapiens | ribosmal protein small subunit | 499 | 80 |
| 1083 | W75098 | Homo sapiens | Human secreted protein encoded by gene 42 | 143 | 81 |
| | | | clone HSXB125. | | |
| 1084 | G03564 | Homo sapiens | Human secreted protein, SEQ ID NO: 7645. | 83 | 51 |
| 1085 | G04063 | Homo sapiens | Human secreted protein, SEQ ID NO: 8144. | 88 | 43 |
| 1086 | AF090942 | Homo sapiens | PRO0657 | 124 | 64 |
| 1087 | G00517 | Homo sapiens | Human secreted protein, SEQ ID NO: 4598. | 129 | 41 |
| 1088 | G04091 | Homo sapiens | Human secreted protein, SEQ ID NO: 8172. | 126 | 36 |
| 1089 | AF140631 | Homo sapiens | G-protein coupled receptor 14 | 364 | 82 |
| 1090 | G04063 | Homo sapiens | Human secreted protein, SEQ ID NO: 8144. | 114 | 32 |
| 1091 | S72304 | Mus sp. | LMW G-protein | 146 | 83 |
| 1092 | W88708 | Homo sapiens | Secreted protein encoded by gene 175 clone | 405 | 100 |
| | | | HEMAM41. | | |
| 1093 | W85612 | Homo sapiens | Secreted protein clone fh123_5. | 4358 | 97 |
| 1094 | Y53012 | Homo sapiens | Human secreted protein clone pm514_4 protein | 1013 | 99 |
| | | | sequence SEQ ID NO: 30. | | |
| 1095 | Y92345 | Homo sapiens | Human cancer associated antigen precursor from | 409 | 100 |
| | | | clone NY-REN-62. | | |
| 1096 | AF090942 | Homo sapiens | PRO0657 | 147 | 60 |
| 1097 | L24521 | Homo sapiens | transformation-related protein | 166 | 58 |
| 1098 | X56932 | Homo sapiens | 23 kD highly basic protein | 490 | 70 |
| 1099 | G04063 | Homo sapiens | Human secreted protein, SEQ ID NO: 8144. | 83 | 35 |
| 1100 | Y02693 | Homo sapiens | Human secreted protein encoded by gene 44 | 149 | 59 |
| | | | clone HTDAD22. | | |
| 1101 | AF119851 | Homo sapiens | PRO1722 | 183 | 72 |
| 1102 | G04086 | Homo sapiens | Human secreted protein, SEQ ID NO: 8167. | 207 | 62 |
| 1103 | G04063 | Homo sapiens | Human secreted protein, SEQ ID NO: 8144. | 91 | 52 |
| 1104 | X74856 | Mus | ribosomal protein L28 | 128 | 69 |
| | | musculus | | | |
| 1105 | G03789 | Homo sapiens | Human secreted protein, SEQ ID NO: 7870. | 130 | 62 |
| 1106 | G03133 | Homo sapiens | Human secreted protein, SEQ ID NO: 7214. | 122 | 48 |
| 1107 | G03040 | Homo sapiens | Human secreted protein, SEQ ID NO: 7121. | 69 | 43 |
| 1108 | AF039942 | Homo sapiens | HCF-binding transcription factor Zhangfei | 744 | 99 |
| 1109 | AF201951 | Homo sapiens | high affinity immunoglobulin epsilon receptor | 738 | 94 |
| | | | beta subunit | | |
| 1110 | AF111108 | Mus | transient receptor potential 2 | 223 | 79 |
| | | musculus | | | |
| 1111 | AF119900 | Homo sapiens | PRO2822 | 144 | 59 |
| 1112 | Y16589 | Homo sapiens | A protein that interacts with presenilins. | 265 | 39 |
| 1113 | G02872 | Homo sapiens | Human secreted protein, SEQ ID NO: 6953. | 178 | 67 |
| 1114 | Y02999 | Homo sapiens | Fragment of human secreted protein encoded by | 164 | 63 |
| | | | gene 121. | | |
| 1115 | Y30811 | Homo sapiens | Human secreted protein encoded from gene 1. | 1217 | 99 |
| 1116 | X51394 | Xenopus | APEG precursor protein | 130 | 40 |
| | | laevis | | | |
| 1117 | M27826 | Homo sapiens | neutral protease large subunit | 442 | 65 |
| 1118 | G03371 | Homo sapiens | Human secreted protein, SEQ ID NO: 7452. | 72 | 60 |
| 1119 | G03602 | Homo sapiens | Human secreted protein, SEQ ID NO: 7683. | 491 | 97 |
| 1120 | Y35906 | Homo sapiens | Extended human secreted protein sequence, SEQ | 244 | 97 |
| | | | ID NO. 155. | | |
| 1121 | G03714 | Homo sapiens | Human secreted protein, SEQ ID NO: 7795. | 122 | 65 |
| 1122 | Y00337 | Homo sapiens | Human secreted protein encoded by gene 81. | 110 | 90 |
| 1123 | AF084830 | Homo sapiens | two pore domain K+ channel; TASK-2 | 703 | 94 |
| 1124 | AF212862 | Homo sapiens | membrane interacting protein of RGS16 | 442 | 88 |
| 1125 | W64469 | Homo sapiens | Human secreted protein from clone CW795_2. | 191 | 53 |
| 1126 | G01361 | Homo sapiens | Human secreted protein, SEQ ID NO: 5442. | 154 | 100 |
| 1127 | G01361 | Homo sapiens | Human secreted protein, SEQ ID NO: 5442. | 165 | 100 |
| 1128 | Y84320 | Homo sapiens | Human cardiovascular system associated protein | 815 | 99 |
| | | | kinase-1. | | |
| 1129 | G02105 | Homo sapiens | Human secreted protein, SEQ ID NO: 6186. | 88 | 73 |
| 1130 | Y32923 | Homo sapiens | Transmembrane domain containing protein clone | 700 | 100 |
| | | | HP01512. | | |
| 1131 | Y29817 | Homo sapiens | Human synapse related glycoprotein 2. | 260 | 91 |
| 1132 | Y91644 | Homo sapiens | Human secreted protein sequence encoded by | 525 | 96 |
| | | | gene 43 SEQ ID NO: 317. | | |
| 1133 | Y91449 | Homo sapiens | Human secreted protein sequence encoded by | 542 | 100 |
| | | | gene 49 SEQ ID NO: 170. | | |
| 1134 | AB017908 | Homo sapiens | 4F2 light chain | 2399 | 93 |
| 1135 | X51760 | Homo sapiens | zinc finger protein (583 AA) | 312 | 55 |
| 1136 | Y99426 | Homo sapiens | Human PRO1604 (UNQ785) amino acid | 917 | 72 |
| | | | sequence SEQ ID NO: 308. | | |
| 1137 | G03790 | Homo sapiens | Human secreted protein, SEQ ID NO: 7871. | 102 | 50 |
| 1138 | AF155106 | Homo sapiens | NY-REN-36 antigen | 768 | 91 |
| 1139 | AL031055 | Homo sapiens | dJ28H20.1 (novel protein similar to membrane | 117 | 50 |
| | | | transport proteins) | | |
| 1140 | AF011359 | Bos taurus | regulator of G-protein signaling 7 | 138 | 96 |
| 1141 | Y70018 | Homo sapiens | Human Protease and associated protein-12 | 623 | 100 |
| | | | (PPRG-12). | | |
| 1142 | G04091 | Homo sapiens | Human secreted protein, SEQ ID NO: 8172. | 113 | 38 |
| 1143 | AB030235 | Canis | D4 dopamine receptor | 89 | 48 |
| | | femiliaris | | | |
| 1144 | Y94922 | Homo sapiens | Human secreted protein clone pv6_1 protein | 539 | 88 |
| | | | sequence SEQ ID NO: 50. | | |
| 1145 | X99962 | Homo sapiens | rab-related GTP-binding protein | 398 | 96 |
| 1146 | G03807 | Homo sapiens | Human secreted protein, SEQ ID NO: 7888. | 168 | 79 |
| 1147 | G03712 | Homo sapiens | Human secreted protein, SEQ ID NO: 7793. | 512 | 85 |
| 1148 | Y28279 | Homo sapiens | Human G-protein coupled receptor GRIR-1. | 705 | 76 |
| 1149 | U13642 | Caenorhabditis | exon 5 similar to transmembrane domain of S. | 247 | 36 |
| | | elegans | cerevisiae zinc resistance protein | | |
| 1150 | G03438 | Homo sapiens | Human secreted protein, SEQ ID NO: 7519. | 117 | 62 |
| 1151 | G01003 | Homo sapiens | Human secreted protein, SEQ ID NO: 5084. | 181 | 80 |
| 1152 | G03798 | Homo sapiens | Human secreted protein, SEQ ID NO: 7879. | 198 | 63 |
| 1153 | X88799 | Oryza sativa | DNA binding protein | 95 | 41 |
| 1154 | D85245 | Homo sapiens | TR3beta | 155 | 96 |
| 1155 | R74272 | Homo sapiens | Tumor suppressor protein, p53. | 341 | 87 |
| 1156 | Y86265 | Homo sapiens | Human secreted protein HUSXE77, SEQ ID | 99 | 41 |
| | | | NO: 180. | | |
| 1157 | G02577 | Homo sapiens | Human secreted protein, SEQ ID NO: 6658. | 263 | 98 |
| 1158 | AF104334 | Homo sapiens | putative organic anion transporter | 185 | 42 |
| 1159 | G01393 | Homo sapiens | Human secreted protein, SEQ ID NO: 5474. | 173 | 57 |
| 1160 | W75771 | Homo sapiens | Human GTP binding protein APD08. | 224 | 81 |
| 1161 | AF216833 | Homo sapiens | M-ABC2 protein | 410 | 83 |
| 1162 | W67816 | Homo sapiens | Human secreted protein encoded by gene 10 | 1156 | 100 |
| | | | clone HCEMU42. | | |
| 1163 | AF119851 | Homo sapiens | PRO1722 | 230 | 70 |
| 1164 | Y87252 | Homo sapiens | Human signal peptide containing protein HSPP- | 113 | 31 |
| | | | 29 SEQ ID NO: 29. | | |
| 1165 | W64537 | Homo sapiens | Human liver cell clone HP01148 protein. | 338 | 82 |
| 1166 | AF269286 | Homo sapiens | HC6 | 134 | 64 |
| 1167 | Y14482 | Homo sapiens | Fragment of human secreted protein encoded by | 149 | 51 |
| | | | gene 17. | | |
| 1168 | D90789 | Escherichia | Dipeptide transport system permease protein | 411 | 90 |
| | | coli | DppC. | | |
| 1169 | R63783 | Homo sapiens | TG0847 protein. | 344 | 90 |
| 1170 | Y45274 | Homo sapiens | Human secreted protein encoded from gene 18. | 478 | 98 |
| 1171 | D64154 | Homo sapiens | Mr 110,000 antigen | 347 | 96 |
| 1172 | AB026256 | Homo sapiens | organic anion transporter OATP-B | 311 | 67 |
| 1173 | G00357 | Homo sapiens | Human secreted protein, SEQ ID NO: 4438. | 60 | 52 |
| 1174 | D87717 | Homo sapiens | similar to human GTPase-activating | 178 | 59 |
| | | | protein(A49869) | | |
| 1175 | M64716 | Homo sapiens | ribosomal protein | 391 | 78 |
| 1176 | R08330 | Homo sapiens | Human IL-7 receptor clone H6. | 285 | 67 |
| 1177 | L06505 | Homo sapiens | ribosomal protein L12 | 242 | 72 |
| 1178 | AJ251885 | Homo sapiens | organic cation transporter (OCT2) | 276 | 88 |
| 1179 | G03258 | Homo sapiens | Human secreted protein, SEQ ID NO: 7339. | 155 | 71 |
| 1180 | G01207 | Homo sapiens | Human secreted protein, SEQ ID NO: 5288. | 282 | 90 |
| 1181 | AF181856 | Rattus | tRNA selenocysteine associated protein | 249 | 62 |
| | | norvegicus | | | |
| 1182 | AF161524 | Homo sapiens | HSPC176 | 138 | 90 |
| 1183 | G03789 | Homo sapiens | Human secreted protein, SEQ ID NO: 7870. | 282 | 66 |
| 1184 | Y02671 | Homo sapiens | Human secreted protein encoded by gene 22 | 107 | 71 |
| | | | clone HMSJW18. | | |
| 1185 | G03797 | Homo sapiens | Human secreted protein, SEQ ID NO: 7878. | 88 | 69 |
| 1186 | G03564 | Homo sapiens | Human secreted protein, SEQ ID NO: 7645. | 118 | 46 |
| 1187 | AB032905 | Hylobates | dopamine receptor D4 | 96 | 37 |
| | | concolor | | | |
| 1188 | G00956 | Homo sapiens | Human secreted protein, SEQ ID NO: 5037. | 292 | 78 |
| 1189 | G03258 | Homo sapiens | Human secreted protein, SEQ ID NO: 7339. | 178 | 79 |
| 1190 | G03361 | Homo sapiens | Human secreted protein, SEQ ID NO: 7442. | 324 | 76 |
| 1191 | AF117755 | Homo sapiens | thyroid hormone receptor-associated protein | 187 | 70 |
| | | | complex component TRAP230 | | |
| 1192 | Y70455 | Homo sapiens | Human membrane channel protein-5 (MECHP- | 202 | 67 |
| | | | 5). | | |
| 1193 | G03052 | Homo sapiens | Human secreted protein, SEQ ID NO: 7133. | 99 | 42 |
| 1194 | G02607 | Homo sapiens | Human secreted protein, SEQ ID NO: 6688. | 192 | 76 |
| 1195 | W29661 | Homo sapiens | Homo sapiens CI542_2 clone secreted protein. | 2001 | 98 |
| 1196 | Y14104 | Homo sapiens | Human GABAB receptor 1d protein sequence. | 239 | 69 |
| 1197 | X61972 | Homo sapiens | macropain subunit iota | 149 | 90 |
| 1198 | G00534 | Homo sapiens | Human secreted protein, SEQ ID NO: 4615. | 145 | 51 |
| 1199 | Y86260 | Homo sapiens | Human secreted protein HELHN47, SEQ ID | 1089 | 89 |
| | | | NO: 175. | | |
| 1200 | G02607 | Homo sapiens | Human secreted protein, SEQ ID NO: 6688. | 154 | 57 |
| 1201 | G00838 | Homo sapiens | Human secreted protein, SEQ ID NO: 4919. | 404 | 50 |
| 1202 | M27826 | Homo sapiens | neutral protease large subunit | 202 | 49 |
| 1203 | Y73424 | Homo sapiens | Human secreted protein clone yi4_1 protein | 265 | 61 |
| | | | sequence SEQ ID NO: 70. | | |
| 1204 | AF264014 | Homo sapiens | scavenger receptor cysteine-rich type 1 protein | 625 | 98 |
| | | | M160 precursor | | |
| 1205 | Y36203 | Homo sapiens | Human secreted protein #75. | 219 | 59 |
| 1206 | U78111 | Gallus gallus | AQ | 205 | 57 |
| 1207 | AF095448 | Homo sapiens | putative G protein-coupled receptor | 416 | 76 |
| 1208 | AF116715 | Homo sapiens | PRO2829 | 127 | 75 |
| 1209 | AF099137 | Homo sapiens | MaxiK channel beta 2 subunit | 475 | 95 |
| 1210 | AF205718 | Homo sapiens | hepatocellular carcinoma-related putative tumor | 423 | 79 |
| | | | suppressor | | |
| 1211 | Y27868 | Homo sapiens | Human secreted protein encoded by gene No. | 224 | 70 |
| | | | 107. | | |
| 1212 | G00719 | Homo sapiens | Human secreted protein, SEQ ID NO: 4800. | 117 | 44 |
| 1213 | G01009 | Homo sapiens | Human secreted protein, SEQ ID NO: 5090. | 351 | 73 |
| 1214 | AF090942 | Homo sapiens | PRO0657 | 124 | 70 |
| 1215 | Y14427 | Homo sapiens | Human secreted protein encoded by gene 17 | 99 | 77 |
| | | | clone HSIEA14. | | |
| 1216 | G03905 | Homo sapiens | Human secreted protein, SEQ ID NO: 7986. | 173 | 57 |
| 1217 | Y57897 | Homo sapiens | Human transmembrane protein HTMPN-21. | 1173 | 100 |
| 1218 | J00194 | Homo sapiens | hla-dr antigen alpha chain | 454 | 78 |
| 1219 | Y59709 | Homo sapiens | Secreted protein 76-28-3-A12-FL1. | 470 | 92 |
| 1220 | W81576 | Homo sapiens | EBV-induced G-protein coupled receptor (EBI- | 725 | 100 |
| | | | 2) polypeptide. | | |
| 1221 | W96745 | Homo sapiens | High affinity immunoglobulin E receptor-like | 650 | 98 |
| | | | protein (IGERB). | | |
| 1222 | Y35911 | Homo sapiens | Extended human secreted protein sequence, SEQ | 135 | 31 |
| | | | ID NO. 160. | | |
| 1223 | Y00278 | Homo sapiens | Human secreted protein encoded by gene 21. | 260 | 95 |
| 1224 | AF161422 | Homo sapiens | HSPC304 | 568 | 90 |
| 1225 | U14970 | Homo sapiens | ribosomal protein S5 | 202 | 95 |
| 1226 | G01733 | Homo sapiens | Human secreted protein, SEQ ID NO: 5814. | 610 | 100 |
| 1227 | AF099973 | Mus | schlafen2 | 333 | 56 |
| | | musculus | | | |
| 1228 | G01218 | Homo sapiens | Human secreted protein, SEQ ID NO: 5299. | 155 | 81 |
| 1229 | AF217188 | Mus | YIP1B | 801 | 63 |
| | | musculus | | | |
| 1230 | AF176813 | Homo sapiens | soluble adenylyl cyclase | 275 | 100 |
| 1231 | X98333 | Homo sapiens | organic cation transporter | 1704 | 100 |
| 1232 | W74955 | Homo sapiens | Human secreted protein encoded by gene 77 | 212 | 53 |
| | | | clone HOEAS24. | | |
| 1233 | Y94940 | Homo sapiens | Human secreted protein clone yi62_1 protein | 526 | 100 |
| | | | sequence SEQ ID NO: 86. | | |
| 1234 | U76618 | Mus | N-RAP | 482 | 82 |
| | | musculus | | | |
| 1235 | AF044924 | Homo sapiens | hook2 protein | 380 | 97 |
| 1236 | G01459 | Homo sapiens | Human secreted protein, SEQ ID NO: 5540. | 417 | 100 |
| 1237 | AF000018 | Homo sapiens | adapter protein | 164 | 84 |
| 1238 | W88633 | Homo sapiens | Secreted protein encoded by gene 100 clone | 250 | 90 |
| | | | HE8EU04. | | |
| 1239 | W29660 | Homo sapiens | Homo sapiens CH27_1 clone secreted protein. | 697 | 98 |
| 1240 | AF004161 | Oryctolagus | peroxisomal Ca-dependent solute carrier | 154 | 52 |
| | | cuniculus | | | |
| 1241 | Y92710 | Homo sapiens | Human membrane-associated protein Zsig24. | 709 | 97 |
| 1242 | Y95002 | Homo sapiens | Human secreted protein vc34_1, SEQ ID NO: 44. | 908 | 88 |
| 1243 | Y44905 | Homo sapiens | Human potassium channel molecule ERG-LP2 | 325 | 100 |
| | | | partial protein. | | |
| 1244 | AF284422 | Homo sapiens | cation-chloride cotransporter-interacting protein | 511 | 97 |
| 1245 | Y53629 | Homo sapiens | A bone marrow secreted protein designated | 1888 | 93 |
| | | | BMS115. | | |
| 1246 | AB039371 | Homo sapiens | mitochondrial ABC transporter 3 | 389 | 97 |
| 1247 | Y35911 | Homo sapiens | Extended human secreted protein sequence, SEQ | 168 | 39 |
| | | | ID NO. 160. | | |
| 1248 | AF072509 | Rattus | glutamate receptor interacting protein 2 | 559 | 90 |
| | | norvegicus | | | |
| 1249 | AF247042 | Homo sapiens | tandem pore domain potassium channel TRAAK | 661 | 98 |
| 1250 | B08974 | Homo sapiens | Human secreted protein sequence encoded by | 1087 | 97 |
| | | | gene 27 SEQ ID NO: 131. | | |
| 1251 | L15313 | Caenorhabditis | putative | 858 | 59 |
| | | elegans | | | |
| 1252 | Y29338 | Homo sapiens | Human secreted protein clone it217_2 alternate | 278 | 75 |
| | | | reading frame protein. | | |
| 1253 | W01730 | Homo sapiens | Human G-protein receptor HPRAJ70. | 211 | 92 |
| 1254 | G03074 | Homo sapiens | Human secreted protein, SEQ ID NO: 7155. | 294 | 83 |
| 1255 | G01818 | Homo sapiens | Human secreted protein, SEQ ID NO: 5899. | 253 | 91 |
| 1256 | AF286368 | Homo sapiens | eppin-1 | 222 | 54 |
| 1257 | AF220264 | Homo sapiens | MOST-1 | 87 | 93 |
| 1258 | G02227 | Homo sapiens | Human secreted protein, SEQ ID NO: 6308. | 281 | 78 |
| 1259 | Y07970 | Homo sapiens | Human secreted protein fragment #2 encoded | 81 | 94 |
| | | | from gene 26. | | |
| 1260 | R95332 | Homo sapiens | Tumor necrosis factor receptor 1 death domain | 986 | 100 |
| | | | ligand (clone 3TW). | | |
| 1261 | AF140674 | Homo sapiens | zinc metalloprotease ADAMTS6 | 172 | 36 |
| 1262 | U28369 | Homo sapiens | semaphorin V | 237 | 67 |
| 1263 | Y07049 | Homo sapiens | Renal cancer associated antigen precursor | 288 | 71 |
| | | | sequence. | | |
| 1264 | Y36153 | Homo sapiens | Human secreted protein #25. | 187 | 80 |
| 1265 | Y78114 | Homo sapiens | Human cytokine signal regulator CKSR-2 SEQ | 723 | 93 |
| | | | ID NO: 2. | | |
| 1266 | Y13397 | Homo sapiens | Amino acid sequence of protein PRO334. | 191 | 100 |
| 1267 | AF030558 | Rattus | phosphatidylinositol 5-phosphate 4-kinase | 859 | 95 |
| | | norvegicus | gamma | | |
| 1268 | U73167 | Homo sapiens | candidate tumor suppressor gene LUCA-1 | 159 | 96 |
| 1269 | AF190664 | Mus | LMBR2 | 552 | 76 |
| | | musculus | | | |
| 1270 | AL050332 | Homo sapiens | dJ570F3.1 (homolog of the rat synaptic ras | 820 | 98 |
| | | | GTPase-activating protein p135 SynGAP) | | |
| 1271 | G02126 | Homo sapiens | Human secreted protein, SEQ ID NO: 6207. | 131 | 95 |
| 1272 | AF125533 | Homo sapiens | NADH-cytochrome b5 reductase isoform | 253 | 92 |
| 1273 | AL035661 | Homo sapiens | dJ568C11.3 (novel AMP-binding enzyme | 1280 | 100 |
| | | | similar to acetyl-coenzyme A synthethase | | |
| | | | (acetate-coA ligase)) | | |
| 1274 | AF064748 | Mus | S3-12 | 3523 | 61 |
| | | musculus | | | |
| 1275 | D17554 | Homo sapiens | TAXREB107 | 377 | 78 |
| 1276 | Y30715 | Homo sapiens | Amino acid sequence of a human secreted | 643 | 90 |
| | | | protein. | | |
| 1277 | AF146760 | Homo sapiens | septin 2-like cell division control protein | 707 | 100 |
| 1278 | Y05069 | Homo sapiens | Human PIGR-2 protein sequence. | 281 | 46 |
| 1279 | X59668 | Oryctolagus | aorta CNG channel (rACNG) | 267 | 85 |
| | | cuniculus | | | |
| 1280 | G01051 | Homo sapiens | Human secreted protein, SEQ ID NO: 5132. | 489 | 98 |
| 1281 | G03411 | Homo sapiens | Human secreted protein, SEQ ID NO: 7492. | 120 | 43 |
| 1282 | AF055084 | Homo sapiens | very large G-protein coupled receptor-1 | 1635 | 100 |
| 1283 | AF117814 | Mus | odd-skipped related 1 protein | 357 | 98 |
| | | musculus | | | |
| 1284 | U87318 | Xenopus | NaDC-2 | 535 | 60 |
| | | laevis | | | |
| 1285 | AF061346 | Mus | Edp1 protein | 452 | 68 |
| | | musculus | | | |
| 1286 | AB030182 | Mus | contains transmembrane (TM) region | 582 | 68 |
| | | musculus | | | |
| 1287 | A13595 | synthetic | immunosuppresive protein PP15 | 185 | 97 |
| | | construct | | | |
| 1288 | AF254411 | Homo sapiens | ser/arg-rich pre-mRNA splicing factor SR-A1 | 837 | 100 |
| 1289 | AF084205 | Rattus | serine/threonine protein kinase TAO1 | 319 | 98 |
| | | norvegicus | | | |
| 1290 | AF038563 | Homo sapiens | membrane associated guanylate kinase 2 | 523 | 100 |
| 1291 | AF034837 | Homo sapiens | double-stranded RNA specific adenosine | 468 | 100 |
| | | | deaminase | | |
| 1292 | M15888 | Bos taurus | endozepine-related protein precursor | 937 | 87 |
| 1293 | AB010692 | Arabidopsis | ATP-dependent RNA helicase-like protein | 636 | 45 |
| | | thaliana | | | |
| 1294 | AF209923 | Homo sapiens | orphan G-protein coupled receptor | 1570 | 100 |
| 1295 | W67828 | Homo sapiens | Human secreted protein encoded by gene 22 | 504 | 98 |
| | | | clone HFEAF41. | | |
| 1296 | AC004832 | Homo sapiens | similar to 45 kDa secretory protein; similar to | 648 | 65 |
| | | | CAA10644.1 (PID: g4164418) | | |
| 1297 | X80035 | Oryctolagus | cysteine rich hair keratin associated protein | 575 | 70 |
| | | cuniculus | | | |
| 1298 | G02645 | Homo sapiens | Human secreted protein, SEQ ID NO: 6726. | 223 | 97 |
| 1299 | Y59440 | Homo sapiens | Human delta3 fragment #4. | 122 | 32 |
| 1300 | W70504 | Homo sapiens | Leukocyte seven times membrane-penetrating | 459 | 81 |
| | | | type receptor protein JEG18. | | |
| 1301 | Y67315 | Homo sapiens | Human secreted protein BL89_13 amino acid | 3916 | 99 |
| | | | sequence. | | |
| 1302 | M77693 | Homo sapiens | spermidine/spermine N1-acetyltransferase | 174 | 96 |
| 1303 | G01331 | Homo sapiens | Human secreted protein, SEQ ID NO: 5412. | 254 | 69 |
| 1304 | G01491 | Homo sapiens | Human secreted protein, SEQ ID NO: 5572. | 747 | 99 |
| 1305 | AF148509 | Homo sapiens | alpha 1,2-mannosidase | 602 | 98 |
| 1306 | G01658 | Homo sapiens | Human secreted protein, SEQ ID NO: 5739. | 333 | 98 |
| 1307 | Y90899 | Homo sapiens | D1-like dopamine receptor activity modifying | 332 | 98 |
| | | | protein SEQ ID NO: 1. | | |
| 1308 | AF033120 | Homo sapiens | p53 regulated PA26-T2 nuclear protein | 348 | 52 |
| 1309 | Y73388 | Homo sapiens | HTRM clone 3376404 protein sequence. | 147 | 66 |
| 1310 | AF063243 | Bos taurus | ribosomal protein L30 | 296 | 90 |
| 1311 | AF224494 | Mus | arsenite inducible RNA associated protein | 688 | 70 |
| | | musculus | | | |
| 1312 | Y73342 | Homo sapiens | HTRM clone 2709055 protein sequence. | 1154 | 100 |
| 1313 | Y99419 | Homo sapiens | Human PRO1780 (UNQ842) amino acid | 1145 | 78 |
| | | | sequence SEQ ID NO: 282. | | |
| 1314 | AF116667 | Homo sapiens | PRO1777 | 433 | 97 |
| 1315 | W75100 | Homo sapiens | Human secreted protein encoded by gene 44 | 807 | 97 |
| | | | clone HE8CJ26. | | |
| 1316 | AJ272078 | Homo sapiens | APOBEC-1 stimulating protein | 789 | 100 |
| 1317 | AB041533 | Homo sapiens | sperm antigen | 2607 | 98 |
| 1318 | U19617 | Mus | Elf-1 | 806 | 92 |
| | | musculus | | | |
| 1319 | U82598 | Escherichia | ferric enterobactin transport protein | 768 | 100 |
| | | coli | | | |
| 1320 | D90892 | Escherichia | SORBITOL-6-PHOSPHATE 2- | 709 | 100 |
| | | coli | DEHYDROGENASE (EC 1.1.1.140) | | |
| | | | (GLUCITOL-6-PHOSPHATE | | |
| | | | DEHYDROGENASE) (KETOSEPHOSPHATE | | |
| | | | REDUCTASE). | | |
| 1321 | W67847 | Homo sapiens | Human secreted protein encoded by gene 41 | 601 | 92 |
| | | | clone HPBCJ74. | | |
| 1322 | AJ276101 | Homo sapiens | GPRC5B protein | 466 | 93 |
| 1323 | AJ276101 | Homo sapiens | GPRC5B protein | 504 | 97 |
| 1324 | Y58628 | Homo sapiens | Protein regulating gene expression PRGE-21. | 1584 | 100 |
| 1325 | U91561 | Rattus | pyridoxine 5′-phosphate oxidase | 1277 | 89 |
| | | norvegicus | | | |
| 1326 | AF125533 | Homo sapiens | NADH-cytochrome b5 reductase isoform | 1606 | 100 |
| 1327 | Y32206 | Homo sapiens | Human receptor molecule (REC) encoded by | 1531 | 90 |
| | | | Incyte clone 2825826. | | |
| 1328 | AF151048 | Homo sapiens | HSPC214 | 657 | 85 |
| 1329 | Y10530 | Homo sapiens | olfactory receptor | 1645 | 100 |
| 1330 | AF180681 | Homo sapiens | guanine nucleotide exchange factor | 4314 | 99 |
| 1331 | AF111856 | Homo sapiens | sodium dependent phosphate transporter isoform | 3591 | 99 |
| | | | NaPi-3b | | |
| 1332 | Y13583 | Homo sapiens | G-protein coupled receptor | 2171 | 100 |
| 1333 | AF078866 | Homo sapiens | SURF-4 | 1395 | 100 |
| 1334 | Y25755 | Homo sapiens | Human secreted protein encoded from gene 45. | 1380 | 96 |
| 1335 | AF152325 | Homo sapiens | protocadherin gamma A5 | 4742 | 99 |
| 1336 | X74070 | Homo sapiens | transcription factor BTF3 | 639 | 81 |
| 1337 | AF095927 | Rattus | protein phosphatase 2C | 1931 | 95 |
| | | norvegicus | | | |
| 1338 | G03877 | Homo sapiens | Human secreted protein, SEQ ID NO: 7958. | 621 | 100 |
| 1339 | AL008582 | Homo sapiens | bK223H9.2 (ortholog of A. thaliana F23F1.8) | 626 | 100 |
| 1340 | X61615 | Homo sapiens | leukemia inhibitory factor receptor | 5820 | 99 |
| 1341 | Y01519 | Homo sapiens | A carcinogenesis-inhibiting protein. | 7528 | 97 |
| 1342 | AF207600 | Homo sapiens | ethanolamine kinase | 2372 | 100 |
| 1343 | U54807 | Rattus | GTP-binding protein | 1167 | 97 |
| | | norvegicus | | | |
| 1344 | AC020579 | Arabidopsis | putative phosphoribosylformylglycinamidine | 3283 | 51 |
| | | thaliana | synthase; 25509-29950 | | |
| 1345 | Y28576 | Homo sapiens | Secreted peptide clone pe503_1. | 944 | 100 |
| 1346 | W74787 | Homo sapiens | Human secreted protein encoded by gene 58 | 1171 | 100 |
| | | | clone HHFHN61. | | |
| 1347 | M55542 | Homo sapiens | guanylate binding protein isoform I | 2636 | 87 |
| 1348 | AF183428 | Homo sapiens | 28.4 kDa protein | 1329 | 100 |
| 1349 | U70669 | Homo sapiens | Fas-ligand associated factor 3 | 167 | 24 |
| 1350 | AF295530 | Homo sapiens | cardiac voltage gated potassium channel | 562 | 99 |
| | | | modulatory subunit | | |

[0419] TABLE 3

| | | | | | | Amino, acid sequence (A = Alanine C = |
|---|---|---|---|---|---|---|
| | | | | | | Cysteine, D = Aspartic Acid, |
| | | | | Predicted | | E = Glutamic Acid,F = Phenylalanine, |
| | | | | beginning | | G = Glycine, H = Histidine, I = Iso- |
| | | | | nucleotide | Predicted end | leucine, K = Lysine, L = Leucine, |
| | | | | location | nucleotide | M = Methionine, N = Asparagine |
| | | | | corresponding | location | P = Proline, Q = Glutamine, R = |
| | | | | to first | corresponding | Arginine, S = Serine, T = Threonine, |
| SEQ ID | SEQ ID | | SEQ ID | amino acid | to last amino | V = Valine, W = Tryptophan, Y = Tyro- |
| NO: of | NO: of | | NO: in | residue of | acid residue | sine, X = Unknown, * = Stop codon, |
| nucleotide | peptide | | U.S. Ser. No | peptide | of peptide | / = possible nucleotide deletion, |
| sequence | sequence | Method | 09/496,914 | sequence | sequence | \ = possible nucleotide insertion |

| | | | | | | |
|---|---|---|---|---|---|---|
| 1 | 1351 | A | 2 | 337 | 1 | TPSLIHQAPTPCPAGLWG/PPNGHYHGS*PGC |
| | | | | | | HWPQAPHRA***GLLPPRWLGHGLPGGPAAP |
| | | | | | | WAASQWVDGVAGRLPGPAWSWHASGAAPA |
| | | | | | | QPGPL*LLVPGSSGLPDPRDP |
| 2 | 1352 | A | 27 | 100 | 366 | IRNSSIRPMKERETKLSAKHMITCSASYDRGL |
| | | | | | | QIET\YHHTPIRMAKIQKT/GHHQC**ECGAT |
| | | | | | | GTLIHGWWGCKVVEPLGKTVWQIPK |
| 3 | 1353 | A | 40 | 3 | 314 | HASAHASVVLKDNSELEQQLGATGAYRARA |
| | | | | | | LELEAEVAEMRQMLQLEHPFVNGADKLRPD |
| | | | | | | SMYVHLNEL*QSLVENMLLTVVDTH\RTPI*R |
| | | | | | | SCNYTLALILFL |
| 4 | 1354 | A | 74 | 2 | 292 | TASALFSCPDGGSLAGFAGRRASFHLECLKR |
| | | | | | | QKDRGGDISQKTVLPLHLVHHQVAHTFGQAT |
| | | | | | | VTCQQARQSPG*RTNPE/ALQWVLPVSDGWH |
| | | | | | | VLPLP |
| 5 | 1355 | A | 78 | 114 | 850 | ENCRVASNLPGVFFSEDTAQSGSYMRISAHPP |
| | | | | | | NAGGEVSNGPKRKLTLMLNFSLPSSGLNAGA |
| | | | | | | FYALSTLLNRMVIWHYPGEEVNAGRIGLTIVI |
| | | | | | | AGMLGAVISGIWLDRSKTYKETTLVVYIMDT |
| | | | | | | GGAWWCYTFYLGTGDTCG*CFITAG\TMGFF |
| | | | | | | MTGYLPLGFEFAVEL\SYPESEGISSGLLNISA |
| | | | | | | QVFGIIFTISQGQIIDNYGTKPGIFLCVFLCVFLTLG |
| | | | | | | AALTAFIKADLRRQKANKETLEN |
| 6 | 1356 | A | 81 | 97 | 376 | EWFSYMLGSNMSVYHSP*SLEPLCKVLSES*A |
| | | | | | | YLRVPFIRILLNAR*IRKAYKRMSLEIKLLI/RE |
| | | | | | | *CLFQEMGLSLQWLYSARGDFFRATSRL |
| 7 | 1357 | A | 93 | 2 | 872 | TLSSACLIGDAWKELTIVAGAVSNQLLVWYP |
| | | | | | | ATALADNKPVAPDRRISGHVGIIFSMSYLESK |
| | | | | | | GLLATASEDRSVRIWKGGDLRVPGGRVQNIG |
| | | | | | | HCFGHSARVWQVKLLENYLISAGEDCVCLV |
| | | | | | | WSHEGEILQAFRGHQGRGIRAIAAHERQAWV |
| | | | | | | ITGGDDSGIRLWHLVGRGYRGLG/DLGSLLQ |
| | | | | | | VP**ARYTQGCDSGWLLATAGSD*YRGPVSL |
| | | | | | | *RRGQVLGAARG*TFPVLLPAGGSSWSRGL |
| | | | | | | RIVCYGQWGRSCQGCPHQHSNCCCGPDPVS |
| | | | | | | WEGAQLELGPAWL |
| 8 | 1358 | A | 106 | 3 | 350 | FSSLLSGRISTLRDETGAILIDGDPAACAPIIKF |
| | | | | | | LLTEELHLRGVSIYVLRHEAQIYGITPLWCAL |
| | | | | | | LI/CRRL*SDSCMRAALNDRGLYQVLILDGLV |
| | | | | | | QCLGFVDSDSRKMVSTLT |
| 9 | 1359 | A | 115 | 49 | 186 | QAWAIFKGKYKEGDTGGPAVWKTRRCALN |
| | | | | | | KSSEFNEGPERERMDV |
| 10 | 1360 | A | 123 | 2 | 1249 | KGCRTQEKVDRTEVIRTCINPVYSKLFTVDFY |
| | | | | | | FEEVQRLRFEVHDISSNHNGLKEADFLGGME |
| | | | | | | CTLGQIVSQRKLSKSLLKHGNTAGKSSITVIA |
| | | | | | | EELSGNDDYVELAFNARKLDDKDFFSKSDPF |
| | | | | | | LELFRMNDDATQQLVHRTEVVMNNLSPAWK |
| | | | | | | SFKVSVNSLCSGDPDRRLKCIVWDWDSNGK |
| | | | | | | HDFIGEFTSTFKEMRGAMEGKQVQWECINPK |
| | | | | | | YKAKKKNYKNSGTVILNLCKIHKMHSFLDYI |
| | | | | | | MGGCQIQFTVAIDFTASNGDPRNSCSLHYIHP |
| | | | | | | YQPNEYLKALVAVGEICQDYDSDKMFPAFGF |
| | | | | | | GARIPPEYTDSHDFAINFNEDNPECAGIQGVV |
| | | | | | | EAYQSCF\PKAPTFTGPTNICPHSSRKVAKFRR |
| | | | | | | SEGN*HQGRAFAIIFILVDPGQVGVYSQDMGP |
| | | | | | | DNPGGHFV |
| 11 | 1361 | A | 147 | 614 | 9 | ACARKQLLGRTVFIWFVGQLLGGELKGYSKT |
| | | | | | | NTTSSRPASSRG\TLSSSSSSSSSLTKDALPSSL |
| | | | | | | KSDSTTITSGLVFPFRSLCVNPAKSSVSESVSSI |
| | | | | | | KILLSSSVKYLE*KRTSCCFPDSSESKLSQLSS |
| | | | | | | DERVSMGTSSRKPTNSSSSLGALKMSATS\*G |
| | | | | | | SGSESPTPFFLTGLQSPPSTRPRPGLTTARNS |
| | | | | | | TTLTRDC |
| 12 | 1362 | A | 177 | 12 | 416 | LIPSEPALDSLVDPRVRSRKQPFVIYPVYDTAI |
| | | | | | | DTKIHFSLLDGNVGEPDMSAGFCPNHKAAM |
| | | | | | | VLFLDRVYGIEVQDFLLHLLEGGFLPDLRAA |
| | | | | | | ASLDT/AEIGAMDFLLS*LFTLCLMMFFFIYPFI |
| | | | | | | NLLTMNVY |
| 13 | 1363 | A | 249 | 535 | 105 | WTFHRHLSPAPLIVCDQGTCVVSYYPQNIVQ |
| | | | | | | MPDTQMEQGLN/HLFLDGNA*PHSVECYCPS |
| | | | | | | TFEIAIKITSFVLYFHRYRAPEVLLRSSVYSSPI |
| | | | | | | DVWAVGSIMAELYMLRPLFPGTSEVDEIFKIC |
| | | | | | | QVLGTPKKVSTLVPKLL |
| 14 | 1364 | A | 254 | 572 | 201 | YLLTXIGNLMMLLVINADSCLRTXM*FFLGH |
| | | | | | | FFFLDICYSSVTAQDAAEPVS*LVWGYIT |
| | | | | | | *SFFFFIFSWGTNCLLSAITYACYAAICHPLLS |
| | | | | | | TMVMNRPLCTATVNATNKMGFLNSQVN |
| 15 | 1365 | A | 257 | 425 | 68 | THAKFLNKKFNLPKLVILPKLVYWKAWTKM |
| | | | | | | AIEFLLECDQNIT\KLICENT*KNIAKNI*KRRV |
| | | | | | | TFTPIET*HPVKQMIKWQ*LTAWLRNRGYKKI |
| | | | | | | KQTPNSETAPSVCRNLVFDKCG |
| 16 | 1366 | A | 263 | 104 | 481 | FCIFRTTEEDRGGDDCVVSVWTKQENNSCVK |
| | | | | | | SKDVFSKPVNIFWALEESVLGVKARQPKPFFA |
| | | | | | | AGNTFEMTCKVSSKNIKSPRYSVLNAEKPV |
| | | | | | | GDLSSPNETKYIISLDQDSVVKLENWTDASRV |
| 17 | 1367 | A | 298 | 68 | 208 | RKRTNNPIKLDKKFEHFKNEDI*ITSKHTKMW |
| | | | | | | VSSLAMKEMLTKTTM |
| 18 | 1368 | A | 300 | 904 | 1 | LVVGITGTRHHARVIFIFLVETGFPHVGQAGL |
| | | | | | | ELLTSGDPPALASQSAGITGMSHCAEPKGHFG |
| | | | | | | IHLK*MFYSQKMP*PTINLILLLIIPGNLNIF |
| | | | | | | KPNMGWLGPKTAFV*KDEVLSGIPFAKGRCR |
| | | | | | | WK*DY*C/LQEVVTDPIMEKGKKKKRTASFFK |
| | | | | | | GQPHQSTLALLRRCVR*RYHLS\TVETAGLP* |
| | | | | | | KNTGHIPGQPFLFKLVFKC*NVICI**QYKW*Q |
| | | | | | | NIGVKNKSFCFH*SSSPSL*FIGHHSRNF/CSFK |
| | | | | | | TEPHSVVQAGGQWRNLSSLQAPPPGLMPLSR |
| | | | | | | ISLMSSWDYRRPPQ |
| 19 | 1369 | A | 302 | 3 | 445 | NSPSRWAKIQMFEHTFCG*GCG/ER/NVHIHCS |
| | | | | | | WICRLRPLLWRAVREYLSKLKNAELSFDPGV |
| | | | | | | SLLRIYAIDMPTSI*DEKEALLFAFLAFHE*HC |
| | | | | | | KSRIWAVIQ/CIHLWDWLRKL*CFHRMKFYA |
| | | | | | | AV*NKPRHLLSHIWKDVQNILLK |
| 20 | 1370 | A | 304 | 1 | 1339 | FFFCGKEVPLFEQNKHPGPRATTSPGA/HARA |
| | | | | | | LLSAGEFTAGVGLSP*AIHSFVWLCTFIQHGA |
| | | | | | | GGPCHQPGGSPGPWMHTTQAGHLWEGAYPG |
| | | | | | | GSSTWHQVPGQLGGSWGPRERSLLGSFIKCSP |
| | | | | | | CPHPPGPRLWMSPNQKPPTENPGVMGRVWR |
| | | | | | | LMPGESPLIWEAEGKEDHLSPEGQGHSEIPVA |
| | | | | | | PLHSSLGNTVKP*PKNQKPKQNRSRHGQ\GF |
| | | | | | | MAGQGQSRPAAR*PPCPALTPASHSAGTWPP |
| | | | | | | RICRTPGGPCPSPSGFRSCRR*GFSA*TRSWP |
| | | | | | | DAEPPSTPDTAPRCCTQSDTSSQGPQ*S*WRR |
| | | | | | | CRALPGRLCSAPAAGLRRARPRLSESRRGNSP |
| | | | | | | PASPAAASARCPSWGPSCPARPPSRPAAGTEP |
| | | | | | | AAPSRCTAWLRGEREPGPRPPGPSRPRSGRGP |
| | | | | | | VSFAPEVLSLPAVRQTKSWRWRNEEEITRPW |
| | | | | | | ALVRSRGG |
| 21 | 1371 | A | 326 | 799 | 1587 | GSQVLPPPPSQDSATLPQDA*GPRAAPGQPVC |
| | | | | | | E*GLQGAGVRRLRGEVLCQPQP*GAL*EQCLP |
| | | | | | | HLSFSPRQGAAPDTEPSAWGPAPTGATGPGLP |
| | | | | | | LRIIVRLFSAGAPRGAATPCPPALLHGPAWPP |
| | | | | | | ARPMFRGHPPVRPLGPWGKVAAGPRALCLA |
| | | | | | | GVPAVQGECATKPSG*GL*PNRLRGPPGPEVL |
| | | | | | | QWHWQLSAGRDPVPAEDPPL*EGPLGPGGPA |
| | | | | | | AAQAEPGADPEPEDKDQAAESRPAGAMSLSA |
| | | | | | | QGSGPVGGQGLR |
| 22 | 1372 | A | 327 | 146 | 652 | PHLENPHPEHSFPGAPLT*STLSWSILSPREPSP |
| | | | | | | GAPCYPGHPHLENPHLEHLLTWRTVTWSTLL |
| | | | | | | PGAPCYPEHPHLEHPLTWSTPHLEHPSPGEPL |
| | | | | | | SCRTPTRSELHRDHPLP*CLSTEESPI*GWGSLP |
| | | | | | | APPSTPLVLDVAPPGPQPASSCPCRDSCYSVP |
| | | | | | | GTVVSP |
| 23 | 1373 | A | 348 | 397 | 2 | CIVSSCQGTRKPCHLEDANKINKQSPTLEKIES |
| | | | | | | LQESL*VKQ*LIVAEKYVQILHPRKKYFQRPL |
| | | | | | | NNEKRKMKKRKEEKKKCRERMQRRSKWRR |
| | | | | | | EEKKE*RREE\EERKKEKEDRKERRKETSPRG |
| | | | | | | SRRLLRD |
| 24 | 1374 | A | 362 | 170 | 352 | GRALDTAAGSPVQTAHGLPSDALAPLDDSMP |
| | | | | | | WEGRTTAQWSLHRKRHLARTLLVSRVRGPQ |
| 25 | 1375 | A | 384 | 373 | 128 | YLITTTILETGYLWKNRHSDQ*KRTENPERDQH |
| | | | | | | KYPKVDFCKSNSMKNRLCNKWHWTNWIFTD |
| | | | | | | KKINLNLKPHTKLTPNIKKN |
| 26 | 1376 | A | 397 | 383 | 165 | EVKNTNPFIFSGTNLTIWIRSI*RKSDEINQRTK |
| | | | | | | *MEKYSISLDRRLNTVKMSFLPNLIYKFNTISI |
| | | | | | | KIPANF |
| 27 | 1377 | A | 406 | 103 | 380 | KSKATGYMVNI*KLIV\FLYANDEQLEIEMNK |
| | | | | | | IVP\FNGSKNKIAFTNLTKYQNIQNRHAENYKI |
| | | | | | | LVNKIEDLNKWRNVLLSWIGRENIINTMT |
| 28 | 1378 | A | 408 | 14 | 427 | TLCTNKFNNLDEIK/FLERHKLSKLTQEEVENL |
| | | | | | | ITLKTSRETELVINK*VIPHKEKPGPDSFTGEF |
| | | | | | | YQTFKEEL/II/ILHKLFQTIKYGRILPNSVYETSI |
| | | | | | | TLKPKPEKDL\KENYRPLPLSNIDAK\LNKTLA |
| | | | | | | NRI**HIR |
| 29 | 1379 | A | 434 | 395 | 128 | IYSKMCMERQRLNN*ILKKNKVRGIAVPDVK |
| | | | | | | VYYKPTVIK/TSWIL*KDSHIVEWNRLENLEID |
| | | | | | | PN/IKRLILDKGAEATEWRKDSFFRQWQ |
| 30 | 1380 | A | 455 | 2 | 228 | FFFETESHSVTQAGVQWCNPGFKRFSCFGLSS |
| | | | | | | SWDYRYAPPRP\ANF\*FLVETGFYYVAQAGL |
| | | | | | | KLLSPGDLPALAS |
| 31 | 1381 | A | 462 | 393 | 2 | QLMFDKGVKNLH\WGWTPPFTK*YWKNWISI |
| | | | | | | CRRMNLNPYLSRYIKINSR\KDLTVRPEPIKLV |
| | | | | | | EENTGKTIQDTGLGK*FIAKTSKAQSTKTNK* |
| | | | | | | KRQTRYIKLK\KKSTASKENNRVKRQPLE*EK |
| | | | | | | IFAN |
| 32 | 1382 | A | 474 | 125 | 471 | VKPYEIAVFLVKPIEYK*HLLSDPAIPLSGI*LK |
| | | | | | | EIKAYT/RRICTPMFAAPVSVIA/RN*KQSK/CQ |
| | | | | | | KQ*YVHRMEYYTTIKRSEILICTTTWVDFRNT |
| | | | | | | ILRETDRIHKTTYDVISLI |
| 33 | 1383 | A | 488 | 1825 | 2 | KSACSFLCSEEQPASPSPLKPGTYASET\RPRDP |
| | | | | | | HAAGPRRDSSEAETLRPRGAIDGSGTVVKGT |
| | | | | | | PGSPAPPCSWGHGG\ETEGAG*CPAAPGTDLR |
| | | | | | | APGGSAGS*\GLPSAGGSRGRKGWRAAGRQP |
| | | | | | | STR*GRPGRIHGGRGE*AGHPEPRQSALQSAG |
| | | | | | | LIASSPEPMGAALAEDGSGDSRGAGPRPQE*P |
| | | | | | | PSVLSRS\GS*G*G*AASGTASSFRSHSSRLGPP |
| | | | | | | SAGFHGLRCGQPPFAAAPPGPWPGTGRPAGG |
| | | | | | | AGSPPAAAGTAPPATRGAQSRRQNRTAGRNA |
| | | | | | | SPQTAAGAGSPVQWALSRATG*TGETGSWC |
| | | | | | | AGGTHQATHLTAAWVCPPTWSVRPGGSGPA |
| | | | | | | AGLGR*QRHPAQSPPLPVPRG*PAWPQEAPSP |
| | | | | | | SPASSEVALSSGSCWPDQAPGPARGSPPAPLA |
| | | | | | | PAWPAAGRGRQR*GRQSAHPPPRR*STAVSL |
| | | | | | | SGTS*WRRSP*AGTRTQQC*SPWLVPACSSRP |
| | | | | | | L*RGTRRPSTQQSPQTTGTPGRSAGPGHPRS* |
| | | | | | | GGRSPAGTGHLGAQTVASPH*GHWPTALSCL |
| | | | | | | WASASPPGPEAPPQTGACIGTNCRYRAASAR |
| | | | | | | RSSVAPACA*GWQ*AGSPPAVLRGPP*RVRER |
| | | | | | | GALTHRPRAPDE |
| 34 | 1384 | A | 497 | 422 | 2 | APGASVGRAQAAEG*RGGPTGRPPSALGVS/E |
| | | | | | | AGRAGRAGEGRPVPPAYPLCKSAQTSGPPKA |
| | | | | | | RLS\PPLASCGGRGPPGGAACATCAPPAGPAR |
| | | | | | | KLTPCRCQFRGLCA |
| 35 | 1385 | A | 509 | 156 | 475 | PTPYPGE*QAAFLLRGPGLRPPA/DPSLR/HRN |
| | | | | | | LTELVVAVTDEMVGLFAALLAERRVLLTAS |
| | | | | | | KLSTLTSCDHAFCALLYPMRWEHVLIPTLPPH |
| | | | | | | LLDYC*CPPLPRT |
| 36 | 1386 | A | 512 | 3 | 1631 | FFFSFVCHLYCVSPTPGPHGRLATWL/PGLLA |
| | | | | | | FLGLAAGGQTLCPAGELPGHAEAQASGAPGS |
| | | | | | | VLIAVPGRRRVHTCGPGPAAPSTRGECPPPAL |
| | | | | | | GHTRPARPRPV\PFAPAVPQEPGGQGHGAA/P |
| | | | | | | PATGHSAPRGCPPARAAPTGSATPAPPPAACA |
| | | | | | | AFHSAWSVPPAGRQQG*RVPAPAFRRTTPGT |
| | | | | | | PGQHLLDRPGAPPAQGSGPAPAPPPRLAGPA |
| | | | | | | GPAAPPPGPPAASWHSSLSKSSSSL\GWSPPLP |
| | | | | | | VGPGSLQ*TPPPQGPHLSGSCGGTSSWRGQR |
| | | | | | | AAVARELRSWNACGLSRVAGRSSASYPGRE |
| | | | | | | GRPSQSQ*PAGPPGMRGCCLRGW*PSSSGSD |
| | | | | | | GPGPHPASTWLRAGKTGPSPPACGCA*LPPPS |
| | | | | | | VSAAPQSPRTRCPRGCAAAAGLCVLAAAGAS |
| | | | | | | HGA\GLPGVRVHTQRVHIH*GAG/GCQTPRPR |
| | | | | | | LRSLPVLGLPAPRCPVSAHPWHRRSGSSCHA |
| | | | | | | ARLVPRHPAPGCP**TG*\PLITGFPEP*A*GLP |
| | | | | | | NHQAVGLEASGALQAGHRDELPTMVQLLDH |
| | | | | | | SPDYPLKGRPHAP |
| 37 | 1387 | A | 620 | 828 | 1 | FRLPLAAGA/RGAAEPRVAVSMAPDPSAKIH |
| | | | | | | WEASPEMQSKCHQKGKNNQTECFNHVRFLQ |
| | | | | | | RLNSTHLYACGTHAFQPLCAAIDAEAFTLPTS |
| | | | | | | FEEGKEKCPYDPARGTGLIIDGGLYTATRYE |
| | | | | | | FRSIPDIRRSRHPHSLRTEETPMHWLNG*EDE |
| | | | | | | AQDDGG*GTISSFLLPWPADHPTPKSPGEPVH |
| | | | | | | SIPVCCQVRGQPQSGGKESPACLKSLSNCLTH |
| | | | | | | \DAEFVFSVLVRESKASAVGDDDKVYYFFTE |
| | | | | | | RATEKESGSFTQSRSSHRVARGIPPL |
| 38 | 1388 | A | 739 | 1 | 427 | FRAMVSSTLKLG1SILNGGNAEVQ/QGNRGKG |
| | | | | | | TSEEGKEG*EVPV*LPVSPPLPRPLQKMLDYL |
| | | | | | | KDKKEVGFFQSIQALMQTC\GEKVMADDEFT |
| | | | | | | QDLFRFLQLLCEGHNNDFQNYLRTQTGNTTT |
| | | | | | | INIIICTVDYLLRLQESI |
| 39 | 1389 | A | 767 | 1 | 1030 | TLDLTGPLLLGGVPNVPKDFRGRNRQFGGCM |
| | | | | | | RNLSVDGKNVDMAGFIANNGTREGCAARRN |
| | | | | | | FCDGRRRQNGGTCVNRWNMYLCELCECPLRFGG |
| | | | | | | KNCEQGEWPASSIPPVTAAWEALLLDVPGTT |
| | | | | | | VRGLHIQVRQPLVVYAAFVDSHRPLQETVL |
| | | | | | | REAPAPASGVPSPSGVGWDR*AGPAEPSPSTP |
| | | | | | | ATVIISVPWYGLMFRTR\KEDSVLMEATSGG |
| | | | | | | PTSFRLQVTGAPCHQGTC*VGARGRDPMLSG |
| | | | | | | LRVTDGEWHLLIELKNVKEDSEMKHLVTM |
| | | | | | | TLDYGMDQVSWHLHLLWG*TLPPAQGKTGA |
| | | | | | | SEDKVSVRRGFRGCMQVRGGCGGRGEACPS |
| | | | | | | QAAPRL |
| 40 | 1390 | A | 801 | 69 | 399 | IHKIIIHKEDLNKWKYILCSGMERLSTVMIPVV |
| | | | | | | PQIIYKFNA*Q\VILKFTW*E*GAKITILRKNKL |
| | | | | | | RGLVLVPLSTC*VKYLLDKVLPHIKTYYEAR |
| | | | | | | VNKSVVLVQVTIM |
| 41 | 1391 | A | 835 | 7 | 195 | SMLKERKVFQFPSCLFFQYITWLGPPYHVLFD |
| | | | | | | SSVTNFSIGAK*DILQSVMNCLYAKRIPCVT |
| 42 | 1392 | A | 841 | 1 | 415 | GSTHASGYDKTPDFILQVPVAVEGHIIHWIES |
| | | | | | | KASFGDECSHIAYQFWSYWNSLKHRTW |
| | | | | | | QGIGTVASNLSQL*TLNAPFPELLLFRSLARTG |
| | | | | | | FVLT*\RFGPGLVIYWYGFIQELDCNRERGILL |
| | | | | | | KACFPTNIVTL |
| 43 | 1393 | A | 845 | 358 | 92 | PALSPAPVPQKKGSPLPLDPCLGPSSWLLSVG |
| | | | | | | LGWPRL*PRRGPGDPGSLPATPPLLTPPHTLLP |
| | | | | | | QRPMLPPSHAGLARPPPPEPISVP |
| 44 | 1394 | A | 853 | 452 | 1 | LPQYCFFPRLSPKSKLVKHSAL**PSALKPPTK |
| | | | | | | SPRCPRTSLYFTICC/PPALQL/SPIEDPPAIYRS |
| | | | | | | PPTHMLRSASQPLNQAPTLVKGHPPSRFLQG |
| | | | | | | QVSCPPQPTLPREKPLPLHLRPPPRPAQPPLPR |
| | | | | | | PLTFSTRRNVDPEIPERFR |
| 45 | 1395 | A | 894 | 379 | 162 | GVYPPTVFDNYSVQTSVDGQIVSLNTWDTAG |
| | | | | | | QEEYDIRLRTLS*PQTSIFVICFSIGNLEFPIYGT |
| | | | | | | WLSMSMGK |
| 46 | 1396 | A | 900 | 1 | 366 | TTKKTLISNNVSSRSLPILPELKAFSLAFNDPL |
| | | | | | | EIQKYMRT/DQ*CVTHDISLYIVTKLALIFLIPR |
| | | | | | | VPLFHQLNIT**CLHFFTMTTFIAIPFSFLFLGR |
| | | | | | | D/KSLAMLPRLVSNSWPQVILPP |
| 47 | 1397 | A | 944 | 162 | 2 | QLQNLASRGCL*SQLLRRLRRENRLNPGGGG |
| | | | | | | CSEIAP\CTPAWVTQRDFFRKKK |
| 48 | 1398 | A | 963 | 216 | 308 | HFTPDRIAIVKNTRDSHCWRGC*EEGAPARC |
| 49 | 1399 | A | 967 | 466 | 1 | PRKRESWWGERLPIPRGFPPAAEDAPAPGWK |
| | | | | | | GRKHASRTARAHVFHPIRQSIRSPVRGRPGDP |
| | | | | | | RAAIITRSAGTRLQCKASRGG*GKGPAPTR*E |
| | | | | | | GGPGSAPAPLPASSGCSLFPDSSPWTPPPPAPG |
| | | | | | | AAAAQP**TPRCPAALRAGAHIGRVGRPY |
| 50 | 1400 | A | 973 | 45 | 421 | EKCIQALDVFVFCYIDHSSHCLMSCD*EIDQA |
| | | | | | | LNFMPLEMEPKMSKLAFGCQRSSTSDDDSGC |
| | | | | | | ALEEYAWVPPGLRPEQIQLYFACLPEEKVPY |
| | | | | | | VNSPGEKHRIKQLLYQLPPIIDNEVRYCQSLSE |
| | | | | | | E |
| 51 | 1401 | A | 992 | 2095 | 194 | IRIRHEAARSCLGCAAGHVPAPGLRLLPTVRG |
| | | | | | | PPGRRGPAAPGCVCY*SGESTFVSHVPQRMA |
| | | | | | | WPGSAPPRGFHPLQSQTSPSDTVSSPQLSKEE |
| | | | | | | DGPGWEHPLSSSL*SLGQAGGNH*QPEELAG |
| | | | | | | WEPRGPPSLAPSSPT/TMWTALVLIWIFSLSLS |
| | | | | | | ESHAASNDPRNFVPNKMWKGLVKRNASVET |
| | | | | | | VDNKTSEDVTMAAASPVTLTKGTSAAHILNS |
| | | | | | | MEVTTEDTSRTDVSEPATSGVAADGVTSIAPT |
| | | | | | | AVASSTTAASMTAASSMTVASSAPTTAASST |
| | | | | | | TVASIAPTTAASSMTAASSTPMTLALPAPTST |
| | | | | | | STGRTPSTTATGHPSLSTALAQVPKSSALPRT |
| | | | | | | ATLATLATRAQTVATTANTSSPMSTRPSPSKH |
| | | | | | | MPSDTAASPVPPMRPQAQGPISQVSVDQPVV |
| | | | | | | NTTNKSTPMPSNTTPEPAPTPTVVTTTKAQAR |
| | | | | | | EPTASPVPVPHTSPIPEMEAMSPTTQPSPMPYT |
| | | | | | | QRAAGPGTSQAPEQVETEATPGTDSTGPTPRS |
| | | | | | | SGGTKMPATDSCQPSTQGQYMV/DHH*APHP |
| | | | | | | GRGRQNSPSGGAVTRGDPFHHSLGFVCPAGL |
| | | | | | | *ELQEEGLHPGGLLNQRDVCGLRNVRGAGA |
| | | | | | | WREAWPLPRPFLLPLRPNQVLPNSFGAIEEIC |
| | | | | | | QMLKHI |
| 52 | 1402 | A | 994 | 1 | 462 | ESGEFLVSFTLKKPTNVFHHINGMKFFNK/LIF |
| | | | | | | *SHTDIAFYKIQHPFMLKALTKWA*EGT*PDR |
| | | | | | | RYLH*SLRLNGEQLKTFPLRSGMR*G/CAILPL |
| | | | | | | VLNAMLSIVPAVVPAGKTRHEKEITCPLIGQE |
| | | | | | | EK*FS*FVGDMNTCVENKKESKKLLE |
| 53 | 1403 | A | 1011 | 1 | 630 | PEVIQQSAYDSKADIWSLGITAIELAKGEPPNS |
| | | | | | | DMHPMRVLFLIPKNNPPTHCWRRLLESFKEV |
| | | | | | | *LMLA*TKDPSI\RPTAKELLKHKFIVKNSKKT |
| | | | | | | SYLTELIDRFKRWKAEGHSDDESDSEGSDSES |
| | | | | | | TSRENNTHPEWSFITVRKKPDPKKVQNGAEQ |
| | | | | | | DLVQTLSCLSMIITPAFAELKQQDENNASRNQ |
| | | | | | | AIEELEKSIAVAEAAGPG |
| 54 | 1404 | A | 1016 | 1 | 222 | ISIDA*KAFDKIQH/CFMITTLKKLGIDGKYLN |
| | | | | | | TIKAIDDRHTVSTILNVEKLKAFL*RSGTRQRF |
| | | | | | | PISGSGARI |
| 55 | 1405 | A | 1033 | 3 | 366 | HASVDGDEGSDDVYYYYTPAILRELQALNTA |
| | | | | | | EAAEHRPEEDRMLSEDPWRPAIIMIKGYMPL |
| | | | | | | HNIPHTEVIDVTGLNQSHLYQHLNKGTPMKT |
| | | | | | | QKRAA\LYTWHVLEQLEILRQINQQSHGPG |
| 56 | 1406 | A | 1044 | 5 | 429 | SVLTLQTRSPSKPLS\RKLMDWEVVSRNSISsE |
| | | | | | | DRLETQSPASRSPPVTPNQSQETPVDGKPLAL |
| | | | | | | PPNQSQKNTRYHIHYLHLQYYLDRHISATLPIP |
| | | | | | | SSSGIPTPIAVITDALTDLVELILGQPCSEESGR |
| | | | | | | APGTLFLLAL |
| | | | | | | GAYAFETNGFPIMLVLTTDKIEGDVGIAGLYD |
| | | | | | | MH\ISLPMAFLLRTLVRCTSYIIFVTHVLSTPV |
| | | | | | | TCLRRREKDGVIVDVLSDTASNHNGFPVEEH |
| | | | | | | ADDTHPARLQGPTLRSQPMGPLKHKAFEERA |
| | | | | | | NLGLVQRRLRLED |
| 58 | 1408 | A | 1058 | 258 | 419 | LKHRDTPVVGANNRALSCTPLTSLTLCALCPL |
| | | | | | | PCLGCPTXATCRLYQTTVAVVF |
| 59 | 1409 | A | 1064 | 3 | 425 | KAFSFITSLIGHQRMHTGERPYKCKEGGKTF |
| | | | | | | KGSSSLNNHQRIHTGEKPYKCNECGRAFSQG |
| | | | | | | SSLIQHHRIHTGEKPYECTQCGKAFTSISRLSR |
| | | | | | | HHRIHTGEKPFHCNECGKVFSYHSALHHQRIH |
| | | | | | | TGEKPYACKDVGK |
| 60 | 1410 | A | 1065 | 204 | 419 | GGPPGPFLAHTHAGLQAPGPLLAPAGDEGDL |
| | | | | | | LLLAVQQSCLADHLLTASWGGK/DPIPTKALG |
| | | | | | | EGQEGLPLTV |
| 61 | 1411 | A | 1079 | 3 | 383 | RHSRAIILCQPFHLVMRDLLQLGQDIPQGCHY |
| | | | | | | LEENHLIHRDIAARNCLLSCAAPTRAATIGDF |
| | | | | | | GMARYIYRTRYYQLGDRAL/LPRKWMPPEAL |
| | | | | | | LEGIFTYNTDSWTFGVLLWEIFSLGYMPYPGR |
| | | | | | | TN |
| 62 | 1412 | A | 1080 | 1 | 859 | VVEFLWSRRPSGSSDPRPRRPASKCQMMEER |
| | | | | | | ANLMHMMKLSIKVLLQSALSLGRSLDADHA |
| | | | | | | PLQQFFVVMEHCLKHGLKVKKSFIGQNKSFF |
| | | | | | | GPLELVEKLCPEASDIATSVRNLPELKTAVGR |
| | | | | | | GRAWLYLALMQKKLADYLKVLIDNKITILLSE |
| | | | | | | FYEPEALMMEEEGMVIVGLLVGLNVLDANL\ |
| | | | | | | CLKGEDLDSQVGVDFSLYLKDVQDLDGGKE |
| | | | | | | HERITDVLDQKNYVEELNRHLSCTVGDLQTK |
| | | | | | | IDGLEKTNSKLQERVSAATDRICSLQEEQQQL |
| | | | | | | REQNELIR |
| 63 | 1413 | A | 1083 | 2 | 615 | SSFAKHKRIHTGEKPFICLECGKAFTSSTTLTK |
| | | | | | | HRRIHTGEKPYTCEECGKAFRQSAILYVHRRI |
| | | | | | | HTGEKPYTCGECGKTFRQSANLYAHKKIHTG |
| | | | | | | EKPYTCGDCCIKTFRQSAIILYAHKKIHTG\EKP |
| | | | | | | YKCKECGKAFKSYYSILKHICRTHTRGMSYEG |
| | | | | | | DEC/QRSLN/RSSILSNHKIIHNEEK/PLKCEKCE |
| | | | | | | KAFNHTSICCRHKKN |
| 64 | 1414 | A | 1084 | 946 | 1 | KKQDLSSSLTDDSKNAQAPLALTESHLATLA |
| | | | | | | SSSQSPEAIKQLLDSGLPSLLNRSLASFCFSHIS |
| | | | | | | SSESIAQSIDISQDKLRRHHVPQQCNKMPITAD |
| | | | | | | LVAPILRFLTEVGNSHLMKDWLGGSEVNPLW |
| | | | | | | TALLFLLCHSGSTSGS\HNLG\AQQDQCKISFS |
| | | | | | | FFSWLTTGLTTQQRTAIE\NATVAFF\LQCI\SC |
| | | | | | | HPNNQKLMAQVLCELFQTSPQRGNLPTSGNI |
| | | | | | | S\GFIR\RLFLQLMLEDEKVTMFLQSPCPLYKG |
| | | | | | | RINATSHVIQHP\MYGAGHKFRTLHLPVSTTL |
| | | | | | | SDVLDRVSDTPSITAKLISKQKDDKKKK |
| 65 | 1415 | A | 1087 | 103 | 324 | PRAFEFVHTEMIVG/RVQNIHLFTLQVLEDRA |
| | | | | | | LFTMSVQSSLWSTYLIHVMALPIDRELLKFNA |
| | | | | | | SVALHKLSNALV |
| 66 | 1416 | A | 1095 | 3 | 493 | HETCSVTHIVSFSLPFLNPSHPASTPGHTENEQ |
| | | | | | | PSLVWFDRGKFYLTFEGSSRGPSPLTMGAQD |
| | | | | | | TLPVAAAFTETVNAYFKGADPSKGIVKITGE |
| | | | | | | MYLSFPAGITRHFANNPSPAALTFRVINFSRLE |
| | | | | | | HVLPNPQLLCCDNTQNDANTK\EFWVNMFNL |
| | | | | | | MTHLK |
| 67 | 1417 | A | 1098 | 57 | 356 | LKLTSLGFIIGVSVVGNLLISILLVKDKTLHRA |
| | | | | | | PYYFLLDLCCSDILRSAICFPFVFNSVKNGST |
| | | | | | | WTYGTLTCKVIAFLGVLSCFHTAFMLFCISVT |
| | | | | | | RYL |
| 68 | 1418 | A | 1106 | 1 | 1326 | MGKISATGNMGTKCSWALVWHLESYDPKH |
| | | | | | | YEREGMQDWKTASGQSEEATQQSSQKPQPH |
| | | | | | | YTTYQSSSFLKYSSESHLLAWRENSSEGSFQF |
| | | | | | | PGRSRARPPRTRQQRRGAAAGPGRGAVRLG |
| | | | | | | HPQSAAQPQLRAAARIPESPAAFPAQPRPGSA |
| | | | | | | RNSDASGPASLSRTLGRASSPRPPQAPDVTAP |
| | | | | | | SPAALAPRAARGGSRAAALAGAEAEEPLRTL |
| | | | | | | APRFTRAAAPPPPPPPPPLPPGAPPPPVRCVSR |
| | | | | | | RARAPPWRIPAATGPPP\RPVAPSRKLGSARAP |
| | | | | | | APALQIRKGTSSGLPGRGGGSGPGNNLSSVA |
| | | | | | | GNWRGSSFAVERPGMAKYQGEVQSLKLDDD |
| | | | | | | SVIEGVSDQVLVAVVVSFALIATLVYALFRNV |
| | | | | | | HQNIHPENQELVRVLREQLQTEQDAPAATRQ |
| | | | | | | QFYTDMYCPICLHQASFPVETNCGHLFCGSLT |
| | | | | | | PNSIW |
| 69 | 1419 | A | 1107 | 2 | 466 | FDTARLHEFGTSITQ1FAVDNREDLQKWMEA |
| | | | | | | FWQHFFDLSQWKIICCEELMKIEIMSPRKPPLF |
| | | | | | | LTKEATSVYHDMSIDSPMKLESLTDIIQKKIEE |
| | | | | | | TNGQFLIGQREESLP/SS/CGPHSLMVTIKWSS |
| | | | | | | RKRY/SYPASEPLHDEKGKKRQAPLPPSDK |
| 70 | 1420 | A | 1111 | 698 | 23 | AIRRLHYVRATKV\FLSFRRPFWREEHIEGGH |
| | | | | | | SNTDRPSRMIFYPPPREGALLLASYTWSDAAA |
| | | | | | | AFAGLSREEALRLALDDVAALHGPVVRQLW |
| | | | | | | DGTGVVKRWAEDQHSQGGFVVQPPALWQT |
| | | | | | | EKDDWTVPYGRIYFAGEHTAYFHGWVETAV |
| | | | | | | KSALRAAIKINSRKGPASDTASPEGHASDMEG |
| | | | | | | QGHVHGVASSPSHDLAKEEC3SHPPVQGQLSL |
| | | | | | | QNTTHTRTSH |
| 71 | 1421 | A | 1119 | 2 | 385 | QKQTLQNGYLDSSMDILYLGSLPPELQVSSDE |
| | | | | | | PPGPPEQAGLSQFHLEPETQNPETTEEIQSS\LQ |
| | | | | | | QEAAAQLPQLPEVVELSSTKA\EAPALPSQSL |
| | | | | | | EGVHSSTEQKAPAQQLPAFEEILAPLLIHHE |
| 72 | 1422 | A | 1127 | 1 | 906 | HAQYVGPYRLEKTLGKGQTGLVKLGVHCIT |
| | | | | | | GQKVAIKIVNREKLSESVLMKVEREIALL\RLI |
| | | | | | | EHPHVLKLHGVYENKKYFPPDELTSGPSMLA |
| | | | | | | QVSPHGKLSAERSWDLLSGFPRYLVLEHVSG |
| | | | | | | GELFDYLVKKGRLTPKEARKFFRQIVSALDFC |
| | | | | | | HSYSICHRDLKPENLLLDEKNNIRIADFGMAS |
| | | | | | | LQVGDSLLETSCGSPHYACPEVIKGEKYDGR |
| | | | | | | RADMWSCGVILFALLVGALPFDDDNLRQLLE |
| | | | | | | KVKRGVFHMPHFIPPDCQSLLRGMIEVEPEKR |
| | | | | | | LSLEQIQKHPWYLGGNFIS |
| 73 | 1423 | A | 1128 | 1 | 802 | LRNALDVLHREVPRVLVNLVDFLNNPTIMRQV |
| | | | | | | FLGNPDKCPVQQAIMLEPLGSKTETLDLRAE |
| | | | | | | MPITCPTQNEPFLRTPRNSNYTYPIKPAIENWG |
| | | | | | | SDFLCTEWKASNSVPTSVHQLRPADIKVVAA |
| | | | | | | LGDSLTTAVGARPNNSSDLPTSWRGLSWSIG |
| | | | | | | GDGNLETHTTLPNTLKKFNPYLLGFSTSTWEG |
| | | | | | | TAGLNVAAEGARARDMFAQAWDLVERMKN |
| | | | | | | SPDINLEKDWKLVTLFIGGNDLCHYCENPEA |
| | | | | | | HLATEYVQHIQQALDILSE |
| 74 | 1424 | A | 1139 | 60 | 480 | FREPCLLVPGDHQPLREASWLA/LPPIGLWGT |
| | | | | | | DSPLCCVEVAIPCNKGAHSVGLKGWLLAQG |
| | | | | | | VLGMRDTIPQEHPWESTPDLCFCRDPEEIEVE |
| | | | | | | EQPAADAAVAKGEF/QGEQIAPVPA\IIAAHPE |
| | | | | | | AADPAPVHITAHPKGA |
| 75 | 1425 | A | 1147 | 2 | 413 | PFPHQHPQEP\KGSCWPQSALRGQCPGPVLGV |
| | | | | | | TTTSDLCSLQVPVSSHRNPLLDLAAYDQEGR |
| | | | | | | RFDNFSSLSIQWESTRPVLASIEPELPMQLVSQ |
| | | | | | | DDESGQKKLHGLQAILVHEASGTTAITATAT |
| | | | | | | GYQESHLSSAR |
| 76 | 1426 | A | 1155 | 38 | 410 | PIISAPAQDDPILLSFIHCLHANLLGVWRRDVK |
| | | | | | | PDCKEIWIFWWGDEPNLV\VQYIMNCMLWK |
| | | | | | | KDSGKMAFPMNVGRC/FFKEIHNLLERCLMD |
| | | | | | | KNFVLIGKWFVRPYYKDEKPVNKSEHLSCAF |
| | | | | | | T |
| 77 | 1427 | A | 1162 | 526 | 350 | RFPQGLEDVSTYPVLIEELLSRGWSEEELQGV |
| | | | | | | LRGNLLRVFRQVEKVQEENKWQSPLED |
| 78 | 1428 | A | 1171 | 1 | 1293 | MAESASPPSSSAAAPAAEPGVITEQPGPRSPP |
| | | | | | | SSPPGLEEPLDGADPHVPHPDLAPIAFFCLRQT |
| | | | | | | TSPRWCIKMVCNPWFECVSMLVILLNCVTL |
| | | | | | | GMYQPCDDMDCLSDRCKILQVFDDFIFIFFA |
| | | | | | | MEMVLKMVALGIFGKKCYLGDTWNRLDFFI |
| | | | | | | VMAGMVEYSLDLQNNLSAIRTVRVLRPLKA |
| | | | | | | INRVPSMRILVNLLLDTLPMLGNVLLLCFFVF |
| | | | | | | FIFGIIGVQLWAGLLRNRCFLEENFTIQGDVAL |
| | | | | | | PP\YYQPEEDDEMPFICSLSGDNGIMGCHEIPP |
| | | | | | | LKEQGRECCLSKDDVYDFGAERQDLNASGL |
| | | | | | | CVNWNRYYNVCRTGSANPHKGAINFDNIGY |
| | | | | | | AWIVIFQVITLEGWVEIMYYVMDAHSFYNFI |
| | | | | | | YFILLHVSVREPGLLGGSFSTAQSPKCQGDSFP |
| | | | | | | GVAAESLLLRGWVLWLPGGG |
| 79 | 1429 | A | 1175 | 1 | 405 | PNDFFKDMFPDLPGGPLGPIKAENDYGAYLN |
| | | | | | | FLSATHLGGLFPPWPLVEERKLKPKASQQCPI |
| | | | | | | CHKVIMGAGKLPRHMRTHTGEKPYMCTICE |
| | | | | | | VRFTRQDKLKIHMRKHTGERPYLCIHCNAKF |
| | | | | | | VHNYDLKNHMR |
| 80 | 1430 | A | 1182 | 25 | 198 | EMNELSQQLSQQGGRGASQCPSPPAPTLPNPT |
| | | | | | | PLCQLQLQRVNTGLPTPPCHPGAGAA |
| 81 | 1431 | A | 1186 | 254 | 583 | KTVLDVGAGTGILSIFCAQAGARRVYAVEAS |
| | | | | | | AIWQQAREVVRFNGLEDRVHVLPGPVETVEL |
| | | | | | | PEQVDAIVSEWMGYGLLHESMLSSVLHARTK |
| | | | | | | VVKDGGFFLPXSSELFM |
| 82 | 1432 | A | 1187 | 2 | 716 | DFVDAARNLPLESTKSPAEPSKSVPSLE\DPRA |
| | | | | | | SSQGLPSQGPVQNQGRRGEQRPKKF/TVIQHT |
| | | | | | | SSFEKSDSLEQPSGLEGEDKPLAQFPSPPPAPH |
| | | | | | | GRSAHSLQPKLVRQPNIQVPEILVTEEPDRPD |
| | | | | | | TEPEPPPKEPEKTEEFQWPQGSQTLAQFPVEK |
| | | | | | | LPPKKKRLGLAKMAQSSGESSFESSVPLFRSP |
| | | | | | | SQESNVSLSGSSRSALFERDDHGKAEAPSPSF |
| | | | | | | DMGPKPLGTHMLTV |
| 83 | 1433 | A | 1188 | 517 | 804 | ESPGLSKVLRTGAFAYPFLFDNLPLFYRLGLC |
| | | | | | | WGRGHGCGQEAILSTSHGYHLFCALLTGFLFA |
| | | | | | | SHLPERLAPGRFDYIGHSHQLFHICAVLGTHF |
| | | | | | | Q |
| 84 | 1434 | A | 1192 | 45 | 476 | LGDVGFWVERTPVHEAAQRGESLQLQQLIES |
| | | | | | | GACVNQVTVDS1TPLHAASLQGQARCVQLLL |
| | | | | | | AAGAQVDARNIDGSTPLCECLRLGQHRVCEA |
| | | | | | | LAVLRGQGQPSPVHSVPPARGLHXREFRMC* |
| | | | | | | GFLFDVGXNLEAHEFHFGEP |
| 85 | 1435 | A | 1194 | 69 | 410 | KRSEEASAFPFPLGGTGAAPTRASLPEQILLPR |
| | | | | | | SCLEARKSQPDEKLLSALHNSRTWN*EPRRSQ |
| | | | | | | HRLVSPEVHPGRRGSSPGVAECICLTSAYFRT |
| | | | | | | GRSPCPSLPGTTRTNSLL |
| 86 | 1436 | A | 1215 | 3 | 405 | LPSHTCGNPGRLPNGIQQGSTFNLGDKVRYSC |
| | | | | | | NLGFFLEGHAVLTCHAGSENSATWDFPLPSC |
| | | | | | | RADDACGGTLRGIAEWHHLQPPLPLGIATKN |
| | | | | | | NADCTWTILAELGDTIALVFIDFQLEDGYDFL |
| | | | | | | EVTGTEGSSLW |
| 87 | 1437 | A | 1216 | 226 | 964 | GTAEFGPMVGFGANRRAGRLPSLVLGVLLV |
| | | | | | | VIVVLAFNYWSISSRHVLLQEEVAELQGQVQ |
| | | | | | | RTEVARGRLEKRNSDLFAVVGHAQETDRPEG |
| | | | | | | GRLRPPQQPAAGQRGPREEM\EDDKVKLQNN |
| | | | | | | ISYQMADIHHLKEQLAELRQEFLRQEDQLQD |
| | | | | | | YRKNNTYLVKRLEYESFQCGQQMKELRAQH |
| | | | | | | EENIKKLADQFLEEQKQETQKIQSNDGKELDI |
| | | | | | | NNQVVPKNIPKVAENVADKNEEPSSNHIPHG |
| 88 | 1438 | A | 1218 | 1 | 534 | PEFGTTISCGYLMATDVSRRPSVHKAVEIEQE |
| | | | | | | RVKSAGAWIIHPYSDFRFYWDLIMLLLMVGN |
| | | | | | | LTVLPVG1TFFKEENSP\PWIVFNVLSDTFFLLD |
| | | | | | | LVLNFRTGIVVEEGAEILLAPRAIRTRYLRTW |
| | | | | | | FLVDLISSIPVDYIFLVVELEPRLDAEVYKTAR |
| | | | | | | AIRIVRFTKILSLLRL |
| 89 | 1439 | A | 1223 | 1 | 743 | MGFDEVFMINLRRRQDRRERMLRALQAQEIE |
| | | | | | | CRLVEAVDGKVGMLTRSNAAPGRHLAMLET |
| | | | | | | LVVVAPRFVDADNLILNPDTLSLLIAENKTVV |
| | | | | | | APMLDSRAAYSNFWCGMTSQGYYKRTPAYI |
| | | | | | | PIRKRDRRGCFAVPMVHSTFLIDLRKAASRNL |
| | | | | | | \AFYPPHPDYTWSFDDIIVFAFSCKQ\AEVQMY |
| | | | | | | VCNKEEYGFLPVPLRAHSTLQDEAESFMHVQ |
| | | | | | | LEVMVPSSPSSAQSMAVVSADHIGLVISYL |
| 90 | 1440 | A | 1227 | 2 | 349 | NKTSFIFYLKNIVVADLIMTLTFPFRIVHDAGF |
| | | | | | | GPWDFKFILCRYTSVLFYANMDTSWVLGLIT/ |
| | | | | | | YDRY/WKVVRHL/WDSWMTGI/SFTRVYLLG |
| | | | | | | LGARLVWFGKLILAKGGHGGISWL |
| 91 | 1441 | A | 1245 | 3 | 1937 | LGSSDVRAPQRSELGAESPSRMVASQAYNLT |
| | | | | | | SALTPILTRSRVLNEEPLTLAGF\SRAPANLSD |
| | | | | | | VVQLIFLVDSNPFPFGYISNYTVSTKVASMAF |
| | | | | | | QTQAGAQIPIERLASERAITVKVPNNSDWAAR |
| | | | | | | GHRSSANSV\VQPQAFVGAVVTLDSSNPAAV |
| | | | | | | LHLQLNYTLLDGRYLSEEPEPYLAVYLHSEPR |
| | | | | | | PNEHNCSASRRIRPESLQGADIIRPYTFFISPGT |
| | | | | | | RDPVGSYRLNLSSHFRWSALEVSVGLYTSLC |
| | | | | | | QYFSEEDVVWRTEGLLPLEETSPRQAVCLTR |
| | | | | | | HLTAFGTSLFVPPSHIRFVFPEPTADVNYIVML |
| | | | | | | TCAVCLVTYMVMAAILHKLDQLDASRGRAIP |
| | | | | | | FCGQRGRFKYEILVKTGWGRGSGTTAHVGIM |
| | | | | | | LYGVDSRSGHRHLDGDRAFHRNSLDIFQIATP |
| | | | | | | HSLGSMWKIRVWHDNKGLSPAWFLQHIIVRD |
| | | | | | | LQTARSTFFLVNDWLSVETEANGGLVEKEVL |
| | | | | | | AASKASFRVPTPS\AALLRFRRLINAELQRGF |
| | | | | | | FDKHIWLSIWDRPPRSCFTRIQRATCCVLLICL |
| | | | | | | FLGANAVWYGAVGDSAYSTGRVSRLNPLSV |
| | | | | | | DTVAVGLVSSVVVYPVYLAILFLFRMSRSKV |
| | | | | | | GWGWGPGSTGNGAWASAPCPEPPLSSAAAR |
| | | | | | | GKGVHQRLLGKGQHT |
| 92 | 1442 | A | 1246 | 5 | 562 | VFDEENILNELNDPLREEIVNFMCRKLVATMP |
| | | | | | | LFANADPNFVTAMLSKLRFEVFQPGDYIIREG |
| | | | | | | AVGKKMYFIQHGVAGVITKSSKEMKLTDGS |
| | | | | | | YFGEICLLTKGRRTASVRADTYCRLYSLSVD |
| | | | | | | NFNEVLEEYPMMRRAFETVAIDRLDRIGKKN |
| | | | | | | SILLQKFQKDLNTGVFNNQENEILKQIVKH |
| 93 | 1443 | A | 1249 | 180 | 901 | TVPPPPGGPSPAPLHPKPSPTSTGEARLKEERL |
| | | | | | | PGRKASCSTAGSGSRGLPP\SSPMVSSAHNPN |
| | | | | | | KAEIPERRKDSTSTPNNLPPSMMTRRNTYVCT |
| | | | | | | ERPGAERPSLLPNGKENSSGTPRVPPASPSSHS |
| | | | | | | LAPPSGERSRLARGSTIRSTFHGGQVRDRRAG |
| | | | | | | GGGGGGVQNGPPASPTLAHEAAPLPAGRPRP |
| | | | | | | TTNLFTKLTSKLTRRVADEPERIGGPEVTRRP |
| | | | | | | RQEDHLSPGGRGCSEL |
| 94 | 1444 | A | 1261 | 3 | 385 | KFSQWGLTKPKLSNASP/WISLVKKLMKKWS |
| | | | | | | VTQNLTFREQLEAGIRYFDLRVSSKPGDADQ |
| | | | | | | EIYFIHGLFGTKVWDGLMEIDSFLTQHPQEIIFL |
| | | | | | | DFNHFYAMDETHHKCLVLRIQEAFGNKLCPA |
| | | | | | | CR |
| 95 | 1445 | A | 1282 | 2 | 550 | GPRDNPG\EDPRFEIVEHFGIAWFTFELVARFA |
| | | | | | | VAPDFLKFFKNALNLIDLMSIVPFYITLVVNL |
| | | | | | | VVESTPTLANLGRVAQVLRLMRIFRILKLARH |
| | | | | | | STGLRSLGATLKYSYKEVGLLLLYLSVGISIFS |
| | | | | | | VVAYTIEKEEN\EGLATIPACWWWATVSMTT |
| | | | | | | VGYGDVVPGTTAGKLTASACILA |
| 96 | 1446 | A | 1294 | 1 | 1456 | QLLPPSNRENAGLLVGRCLCSAALRPVGDLIT |
| | | | | | | SSGQVAVRNAPQAGSAKAGKGKFQDNFEFIQ |
| | | | | | | YFKKFFDANCNEKDYNPVAAGQGQETEVAP |
| | | | | | | SIVAPVLNKPNQCPEGYICVKAGRNPNYGYT |
| | | | | | | SFDTFSWAFLSLFRLMTQDYWENLYQLTLRA |
| | | | | | | AETTYMIF/LV/LVILLGSLYLVTLILAV/VAMA |
| | | | | | | YEEQNQATLEEAEQICEAEFQQMLEQLKKQQ |
| | | | | | | EAAQQAATATASEHSREPSAAGRLSDSSSEAS |
| | | | | | | KLSSKSAKERRNRRKKRKQKEQSGGEEKDED |
| | | | | | | EFQKSESEDSIRRKGFRFSIEGNRLTYEKRYSS |
| | | | | | | PHQSLLSIRGSLFSPRRNSRTSLFSFRGRAKDV |
| | | | | | | GSENDFADDEHSTFEDNESRRDSLFVPRRHGE |
| | | | | | | RRNSNLSQTSRSSRMLAVFPANGKMHSTVDC |
| | | | | | | NGVVSLVGGPSVPTSPVGQLLPEVIIDKPATD |
| | | | | | | DNGTTTETEMRKRRSSSFHVSMDFLEDPSQR |
| | | | | | | QRAMSIASILTNTVE |
| 97 | 1447 | A | 1295 | 2 | 2057 | IQTQLPTKSSQQLRKGGNCVRCKMQMNFIAE |
| | | | | | | EVLLKYRITFYNNNKGPNMLYIEIKAFVHFMI |
| | | | | | | NRYLSYGSGPKRFPLVDVLQYALEFASSKPV |
| | | | | | | CTSPVDDIDASSPPSGSIPSQTLPSITEQQGALS |
| | | | | | | SELPSTSPSSVAAISSRSVIHKPFTQSRIPPDLP |
| | | | | | | MIIPAPRHITEEELSVLESCLHRWRTEIENDTR |
| | | | | | | DLQESISRIHRTIELMYSDKSMIQVPYRLHAV |
| | | | | | | LVHEGQANAGHYWAYIFDHRESRWMKYNDI |
| | | | | | | AVTKSSWEELVRDSFGGYRNASAYCLMYIN |
| | | | | | | DKAQFLIQE\DLIKTGQPLVGIETLPPDLRDFV |
| | | | | | | EEDNQRFEKELEEWDAQLAQKALQEKLLAS |
| | | | | | | QKLRESETSVTTAQAAGDPKYLEQPSRSDFSK |
| | | | | | | HLKEETIQIITKASHEHEDKSPETVLQSAIKLE |
| | | | | | | YARLVKLAQEDTPPETDYRLHHVVVYFIQNQ |
| | | | | | | APKKIIEKTLLEQFGDRNLSFDERCHNIMKVA |
| | | | | | | QAKLEMIKPEEVNLEEYEEWHQDYRKFRETT |
| | | | | | | MYLIIGLENFQRESYIDSLLFLICAYQNNKELL |
| | | | | | | SKGLYRGIIDEELISHYRRECLLKLNEQAAELF |
| | | | | | | ESGEDREVNNGLIIMNEFIVPFLPLLLVDEMEE |
| | | | | | | KDILAVEDMRNRWCSYLGQEMEPHLQEKLT |
| | | | | | | DFLPKLLDCSMEIKSFHEPPKLPSYSTHELCER |
| | | | | | | FARIMLSLSRTPADGR |
| 98 | 1448 | A | 1304 | 118 | 453 | SGPSSRAIYLHRKEYSQNLTSEPTLLQHRVEH |
| | | | | | | LMTCKQGSQRVQGPEDALQKLFEMDAHGRV |
| | | | | | | WSQDLILQVRDGWLQLLDIETKEELDSYRLD |
| | | | | | | SIQAMNVALNTCSYNSILS |
| 99 | 1449 | A | 1306 | 3 | 1660 | CGYFCHTTCAPQAPPCPVPPDLLRTALGVHPE |
| | | | | | | TGTGTAYEGFLSVPRPSGVRRGWQRVFAALS |
| | | | | | | DSRLLLFDAPDLRLSPPSGALLQVLDLRDPQF |
| | | | | | | SATPVLASDVIHAQSRDLPRIFRVTTSQLAVPP |
| | | | | | | TTCTVLLLAESEGERERWLQVLGELQRLLLD |
| | | | | | | ARPRIPRPVYTLKEAYDNGLPLLPHTLCAAILD |
| | | | | | | QDRLALGTEEGLFVIHLRSNDIFQVGECRRVQ |
| | | | | | | QLTLSPSAGLLVVLCGRGPSVRLFALAELENI |
| | | | | | | EV\EVPKIPESRGCQVLAAGSILQARTPVLCVA |
| | | | | | | VKRQVLCYQLGPGPGPWQRRIRELQAPATVQ |
| | | | | | | SLGLLGDRLCVGAAGGFALYPLLNEAAPLAL |
| | | | | | | GAGLVPEELPPSRGGLGEALGAVELSLSEFLL |
| | | | | | | LFTTAGIYVDGAGRKSRGHELLWPAAPMGW |
| | | | | | | GYAAPYLTVFSENSIDVFDVRRAEWVQTVPL |
| | | | | | | KK\VRPLNPEGSLFLYGTEKVRLTYLRNQLAE |
| | | | | | | KDEFDIPDLTDNSRRQLFRTKSKRRFFFRVSE |
| | | | | | | EQQKQQRREMLKDPFVRSKLISPPTNFNHLV |
| | | | | | | HVGPANGRPGAEDKSP |
| 100 | 1450 | A | 1318 | 918 | 190 | SLCVPGPVDTGTFAVMSVMVGSVTESLAPQA |
| | | | | | | LNDSMINETARDAARVQVASTLSVLVGLFQV |
| | | | | | | GLGLIHPGFVVTYLSEPLVRGYTTAAAVQVF |
| | | | | | | VSQLKYVFGLHLSSHSGPLSLIYTVLEVCWKL |
| | | | | | | PQSKVGTVVTAAVAGVVLVVVKLLNDKLQQ |
| | | | | | | QLPMPIPGELLTLIGATGISYGMGLKHRFEAG\ |
| | | | | | | PPVANTQLFSKLVGSAFTIAVVGPAIAISLGK |
| | | | | | | IFALRHGYRVDSNQVWVMRDV |
| 101 | 1451 | A | 1353 | 220 | 445 | DWPDLFTYPLIGSPKCFQSARPE\RMYRRTVR |
| | | | | | | SSHGNHALQEVLPRSGHGTEPTKQKHLEAAD |
| | | | | | | HGHPPARMSIFSR |
| 102 | 1452 | A | 1363 | 542 | 2 | AHLLMLNLAL\TDLL\YLTSLPFLIHYYASGEN |
| | | | | | | WLFGDFMCKFIRFSFHFNLYSSILFLTCFSIFRY |
| | | | | | | CVIIHPMSCFSIHKTRCAVVACAVVWIISLVA |
| | | | | | | VIPMTFLITSTNRTNRSACLDLTSSDELNTIKW |
| | | | | | | YNLILTA\LLCLPLVIVTLCYTITIIHTLTHGHAN |
| | | | | | | \DSCLKQKARRLTILLL |
| 103 | 1453 | A | 1371 | 2 | 410 | CHSTESSSDFILPGDYLLGGLCPLHSGCLQV\C |
| | | | | | | SFNEHGYHLFQAMRLAVEEINNSTALLPNITL |
| | | | | | | GYQLYDVCSDSANVYATLRVLSLPGQHIIIEL |
| | | | | | | QGDLLLHYSPTVLAVIGPDSTNRAATTAALLSP |
| | | | | | | FLVPMLLEQ |
| 104 | 1454 | A | 1376 | 3 | 432 | NSRVEDRSINMSLWTQNITVCPVRNVTRDGG |
| | | | | | | FGPWSPWQPCEHLDGDNSGSCLCRARSCDSP |
| | | | | | | RPRCGGLDCLGPAIIIIANCSRNGAWTPWSSW |
| | | | | | | ALCSTSCGIGFQVRQRSCSNPAPRHGGRICVG |
| | | | | | | KSREERFCNENTPCPVPIF |
| 105 | 1455 | A | 1379 | 2 | 396 | GLGLLYLIFAAVEGVMRVIGGSNHLAVVLDD |
| | | | | | | ILLAVIDSIFVWFIFISLAQTMKTLRLRKNTVKF |
| | | | | | | SLYRIIFKNTLIFAVLASWFMGWITKTFRIAK |
| | | | | | | CQSDWMERWVDDAFWSFLF\SLILWIMFLW |
| | | | | | | RPSA |
| 106 | 1456 | A | 1383 | 1 | 432 | EDGHGGWSSRCLVDHAEEGHREPWKRLCTW |
| | | | | | | QRGGHEIRFAFYFPGHPLLSPQICLAPETPPRG |
| | | | | | | CPPVSSLHFISLQIRLPRDCQELFQVGERQSGL |
| | | | | | | FEIQPQGSPPPLVNCKMTSGTFWTCRTDSRVF |
| | | | | | | QNANPSNAAHSEDQPTP |
| 107 | 1457 | A | 1386 | 719 | 558 | FFFVTRSHSVAQAEGSGVFTAHRSLDLVGSSN |
| | | | | | | YPALSLQSSWDHRHTWLIFAFL |
| 108 | 1458 | A | 1397 | 631 | 2 | RVAISLLCAAIFISFMVQSAGKRWPTGVMLM |
| | | | | | | VVVLFAFLYSWPIQALLPTYLKTDLAYNPHT |
| | | | | | | VANVLSFSGFGAAVGCCV/GGFLGDWLGTRK |
| | | | | | | AYVCSLLASQLLIIPVFAIGGANVWVLGLLLF |
| | | | | | | FQQMLGQGIAGILPKLIGGYFDTDQRAAGLG |
| | | | | | | FTYNVGALGGALAPIIGALIAQRLDLGTALAS |
| | | | | | | LSFSLTFVVILRNRRPGKSLVR |
| 109 | 1459 | A | 1402 | 15 | 387 | VLVALPDT\VTSETVVTEVLGHRVTLPCLYSS |
| | | | | | | WSHNSNSMCWGKDQCPYSGCKEALIRTDGM |
| | | | | | | RVTSRKSAKYRLQGTIPRGDVSLTILNPSESDS |
| | | | | | | GVYCCRTEVPGWFNDVKINVRLNLQRASTT |
| 110 | 1460 | A | 1421 | 3 | 350 | HEDLSSLLTRGSGNQERERQLKKLISLRDWM |
| | | | | | | LAELAFPVGVLATCA*SLLSC*YCVILFPCSCF |
| | | | | | | FFHSPDALFSLLLLSCYFPSYCFFYYLFFSSSPL |
| | | | | | | CLLLASSPFPLFILLASL |
| 111 | 1461 | A | 1426 | 2 | 344 | FTSTMTKPFEKESEQPA*ATLAFGAQTSTTAD |
| | | | | | | QCALKPDLSYLNNSSSSSSTPATSAGGGIFGSS |
| | | | | | | TSSSNPPVATFVFGQSSDFVSSYGFVNTAESST |
| | | | | | | SDSLLFSQDSKLATTS |
| 112 | 1462 | A | 1434 | 46 | 372 | TTSWTTSCTRSCT*SGASSGPGWTPRTTWWR |
| | | | | | | SRRSSQRTCSRACSGAWSRTW*RSS*TSSSSC |
| | | | | | | STSCSSSSSRSCGRPGGPLGARGVHITSCLNSC |
| | | | | | | MSSSTTSSTTSTF |
| 113 | 1463 | A | 1439 | 3 | 292 | HEDIMTHYDRLVDE*ALNAGKQRYEKMISG |
| | | | | | | MYLGEIVRNILIDFTLKGFLLRGQISEMLKTR |
| | | | | | | GIFLTFLLSNFLIVCVLLFYVSFYLFQSCINFVL |
| 114 | 1464 | A | 1463 | 1 | 396 | KQQAVPEPHSSTTTPQEQEQNWYGQDLLNLQ |
| | | | | | | QRTKVHLPGHKTGPAVAKDTPEPVKKEFTVP |
| | | | | | | ATSQGP*SPFSEEPPLPPSNEEVPPTLPP*EPQS |
| | | | | | | EDP*KNA*LKQMHAATTHWQQHQQHQVGC |
| | | | | | | QYHGIMQ |
| 115 | 1465 | A | 1464 | 291 | 2 | AGSYPSMVWSCHWGVTQKRRAL*VYSFEEG |
| | | | | | | GRRKCGQYWPLEKDSRIEFGFLTVSNLGVEN |
| | | | | | | MNHYKKSTLEILNPEVNPGPFFLTLWKQGEN |
| | | | | | | NYCN |
| 116 | 1466 | A | 1465 | 667 | 337 | LPPQRPA*TDSYSTCNVSSGFLAGQSHNLHLQ |
| | | | | | | YWTKYQVWEWLQHFLDTNQLDANCIPFQEF |
| | | | | | | DINGEHLCSMSLQEFTRAAGTAGQLLYSNLQ |
| | | | | | | HLKWNGDSLFLCLSLPC |
| 117 | 1467 | A | 1479 | 1 | 381 | GTSGGPKRVLVTERFPWQNPLPVNRGQAQR |
| | | | | | | VLGPSNSFQRVPLQAQKLVSSHKPGQNQKHK |
| | | | | | | QLQATSVPHPVCMIPLNNTQKSKQPLPSAPEN |
| | | | | | | NPEEELASDPNNEESL*RPWALEDFEIGRPLG |
| | | | | | | KGK |
| 118 | 1468 | A | 1485 | 3 | 385 | TYLWL*GNPPFYEKNDGGLFELILRAKDEFNS |
| | | | | | | PYWDDMSDSAKHFIRPLTGRDP*KPFPCDQPL |
| | | | | | | QHPWIEGHTCLDNNIHQAASEPINNNFAESKR |
| | | | | | | NLAFLATGVVRHMRKLFMGANLEGPGPTVS |
| | | | | | | H |
| 119 | 1469 | A | 1486 | 1 | 398 | GTTSKHH*LARSLIRGPFDHDLKPNAATRDQL |
| | | | | | | NIIVSYPPTKQLTYEEQDLGWKFRYYLTNQE |
| | | | | | | KALTKFLKWVNWDLPQEAKQALELLGKWK |
| | | | | | | PMDVKDSLELLSSHYTNPTVRRYAVARLRQA |
| | | | | | | DDEDLLMYL |
| 120 | 1470 | A | 1497 | 3 | 999 | MGESPAV*GYFVLAGMNSAGLSFGGGAGKY |
| | | | | | | LAEWMVHGYPSENVWELDLKRFGALQSSRT |
| | | | | | | FLRHRVMEVMPLMYDLKVPHWDFQTGRQL |
| | | | | | | RTSPLYDRLDAQGARWMEKHGFERPKYFVP |
| | | | | | | PDKDLLALEQSKTFYKPDWFDIVESEVKCCK |
| | | | | | | EAVCVIDMSSFTEFEITSTGDQALEVLQYLFS |
| | | | | | | NDLDVPVGHIVHTGMLNEGGGYENDCSIARL |
| | | | | | | NKRSFFMISPTDQQVHCWAWLKKHMPKDSN |
| | | | | | | LLLEDVTWKYTALNLIGPRAVDVLSELSYAP |
| | | | | | | MTPDHFPSLFCKEMSVGYANGIRVMSMTHT |
| | | | | | | GEPGFMLYIPIEYRWGFTMLSTLVSNS |
| 121 | 1471 | A | 1498 | 3 | 306 | AQFLLVGWDHIL*LIVL*TNLTELGRTTCDQN |
| | | | | | | WPNSPDVLNHGCFYMQCLSKDCTIGYVSRE |
| | | | | | | MLVAIHTHTVEEHTGTHLQYVSWPDHSVPDD |
| | | | | | | SSDFVEFEN |
| 122 | 1472 | A | 1533 | 121 | 329 | LGLFSFVWTEVLEEPKDFSCETEDFKTLHCT |
| | | | | | | WDPGTDTALGWSKQPSQSYTLFES*VGSGYII |
| | | | | | | DNFFLA |
| 123 | 1473 | A | 1547 | 111 | 408 | DARITWKPRNGSSGIWPGDGAK*PPAVEQAE |
| | | | | | | RGHVEMIEKLTFLNLHTSEKDKGGNTALHLA |
| | | | | | | AKHGHSPAVQVLLAQWQDINEMNEKQQTPL |
| | | | | | | HVAADRG |
| 124 | 1474 | A | 1555 | 1 | 745 | MTFDDDDKNTYGVALVWKKFQTQSLRLSDL |
| | | | | | | HRKSHLWRGIVSITLIEGRDLKAMDSNGLSDP |
| | | | | | | YVKFRLGHQKYKSKIMPKTLNPQWREQFDF |
| | | | | | | HLYEERGGVIDITAWDKDAGKRDDFIGRCQV |
| | | | | | | DLSALSREQTHKLELQLEEGEGHLVLLVTLT |
| | | | | | | ASATVSISDLSVNSLEDQKEREEILKRYSPLRI |
| | | | | | | FHNLKDVGFLQVKVIRAEGLMAADVTQKSD |
| | | | | | | PFCVVELNNDRLLTHTVYKNLNPEWNKVFTL |
| | | | | | | *VALVWKKFQTQSLRLSDLHRKSHLWRGIVS |
| | | | | | | ITLTEGRDLKAMDSNGLSDPYVKFRILGHQKY |
| | | | | | | KSKIMPKTLNPQWREQFDFHLYEERGGVIDIT |
| | | | | | | AWDKDAGKRDDFIGRCQVDLSALSREQTHK |
| | | | | | | LELQLEEGEGHLVLLVTLTASATVSISDLSVN |
| | | | | | | SLEDQKEREEILKRYSPLRIFHNLKDVGFLQV |
| | | | | | | KVIRAEGLMAADVTGKSDPFCVVELNNDRLL |
| | | | | | | THTVYKNLNPEWNKVFTL |
| 125 | 1475 | A | 1556 | 57 | 509 | GGPAPNSRYAEP*KNSLAMT*AHADCENYVA |
| | | | | | | CGGLDNICSIYNLKTREQNVRVSRELPGHTGY |
| | | | | | | LSCCRPLDDSQIVTSSGDTTCALWDIETAQQT |
| | | | | | | TTFTGHSGDVMSLSLSPDMRTFVSGACDASS |
| | | | | | | KLWDIRDGMCRQSFTGHVSDINAVS |
| 126 | 1476 | A | 1592 | 3 | 178 | KSEKSCVSSLAHFGTSCQRDYDAMVKLVETL |
| | | | | | | EMLPTCDLADQHNKFHYAFALNR*ER |
| 127 | 1477 | A | 1612 | 1 | 497 | TESPLLVRPYLPYITKSELHAIMTAGFSTIAGS |
| | | | | | | VLGAYISFGVPSSHLLTASVMSAPASLAAAKL |
| | | | | | | FWPETEKPKITLKNAIVIKMESGDSGNLL*AAT |
| | | | | | | QGASSSISLVANIAVNLIAPLALLSPMNSALA |
| | | | | | | WVGNMFDYPQLSFELICSYIFMPFSFMMGVE |
| | | | | | | WPDSFM |
| 128 | 1478 | A | 1619 | 286 | 486 | CGMNSKAQESVFKNVLCNPPALSEMPDVKA |
| | | | | | | EDEYDFRASSISEEVAVGSIAATLKMKQGPM |
| | | | | | | TQAINR |
| 129 | 1479 | A | 1627 | 1 | 395 | PTRGALRYWIFGRFLCNIWAAVDVRCCTATI |
| | | | | | | MGLCIISIDRYVGVSYPLRYPTIVTQRRGLMA |
| | | | | | | LLCVWALSLVIYIGPLLGWRHPAPEDETICQI |
| | | | | | | NEEPGYVLFSTPGSFYLPLAIMLVMN*RVYRV |
| | | | | | | AKTE |
| 130 | 1480 | A | 1638 | 2 | 466 | DPRVRTKIVNRTTIYEIQDKTGSMAVVGKG |
| | | | | | | ECHNIPCEKGDKLRLFCFRLRKRENMSKLMS |
| | | | | | | EMHSFIQTQKNTNQRSHDSRSMALPQEQSQHP |
| | | | | | | KPSEASTTLPESHLKTPQMPPTTPSSSSFTKVT |
| | | | | | | KDKDIK*LLFNLYSSVEILPEVLHLKT |
| 131 | 1481 | A | 1651 | 607 | 3 | LAEGGDVFDCVLNGGPLPESRAKALFRQMVE |
| | | | | | | AIRYCHGCGVAHRDLKCENALLQQFNLKLTD |
| | | | | | | FGFAKVLPKSHRELSQTFCGSTAYAAPEVLQ |
| | | | | | | GIPHDSKKGDVWSMGVVLYVMLCASLPFDD |
| | | | | | | TDIPKMLWQQQKGVSFPTHLSISADCQDLLK |
| | | | | | | RLLEPDMILRPSIEEVSWHPWLAST**KQWQV |
| | | | | | | LSNKVGGESKPKKKK |
| 132 | 1482 | A | 1656 | 150 | 48 | LVAKSLLYCGCLFFLLQLAKNVGNNSFNDIM |
| | | | | | | EANLTSPSPKPTPSSDM*VFLIY*TYFGAWHV |
| | | | | | | VDAQ |
| 133 | 1483 | A | 1660 | 3 | 406 | RKHIKLLIQKLSDVP*ECQNNQL*KLTEICEKE |
| | | | | | | KKEFKKKMDDQRPEKITEA*SKDKSPMEEEK |
| | | | | | | TEMIRSYIQEVGRYIKRLEEAQSKRLEKLREK |
| | | | | | | HKEIRQPILDEKPKGEGSSSFLSETCHEDTSWF |
| | | | | | | PNFTP |
| 134 | 1484 | A | 1666 | 1276 | 466 | PGSTHASARITIY*L*IILSNATEVDNNFSKPPP |
| | | | | | | FFPAGAPPASSSSSSSSSSPPTVSTAPPLIPPPGF |
| | | | | | | PPPPGAPPPSLIPTIESGHSSGYDSRSARAFPYG |
| | | | | | | NVAFPHLPGSAPSWPSLVDTSKQWDYYARSS |
| | | | | | | SSSSSSSSSSSSSPRDRDRER*RTRERERERDHS |
| | | | | | | PTPSVFNSDEERYRYREYAERGYERHRASRE |
| | | | | | | KEERHRERRHREKEETRHKSSRSNSRRRHESE |
| | | | | | | EGDSHRRHKHKKSKRSKEGKEAGSEPAPEQE |
| | | | | | | STEATPAE |
| 135 | 1485 | A | 1673 | 1 | 417 | PTRPVNSSQAFALVYYTLGALGGNLIAHMGL |
| | | | | | | GYRYWAGIGVLQSCESALTHYRLVANHVAS |
| | | | | | | DISLTGGSVVQRIRLPDEVENPGMNSGMLQE |
| | | | | | | DLIQYYQFLAEKGDVQAQVGLGQLHLHGGR |
| | | | | | | GV*QNHQRAFDYFNLAA |
| 136 | 1486 | A | 1678 | 525 | 9 | ANTSLSSAAVSAVSPPPCRTSTATTLPPPMPSF |
| | | | | | | FCVFPSPSMSPSPSEFLSCIASVSRVHSLSSSSS |
| | | | | | | GSSSTASSLNFSAIMGSSSATASWVLSTASTPP |
| | | | | | | CPSALPSSPAQES*SLAASSSAWPVAGISPSGA |
| | | | | | | CTFPAGSASGAAKAPSPSWRCPSFRALFSLLD |
| | | | | | | SSSLSL |
| 137 | 1487 | A | 1680 | 1 | 2999 | AHRDEIQRKFDALRNSCTVITDLEEQLNQLTE |
| | | | | | | DNAELNNQNFYLSKQLDEASGANDEIVQLRS |
| | | | | | | EVDHLRREITEREMQLTSQKQTMEALKTTCT |
| | | | | | | MLEEQVMDLEALNDELLEKERQWEAWRSVL |
| | | | | | | GDEKSQFECRVRELQRMLDTEKQSRARADQ |
| | | | | | | RITESRQVVELAVKEHKAEILALQQALKEQK |
| | | | | | | LKAESLSDKLNDLEKKHAMLEMNARSLQQK |
| | | | | | | LETERELKQRLLEEQAKLQQQMDLQKNHIFR |
| | | | | | | LTQGLQEALDRADLLKTERSDLEYQLENIQV |
| | | | | | | LYSHEKVKMEGTISQQTKLIDFLQAKMDQPA |
| | | | | | | KKKKVPLQYNELKLALEKEKARCAELEEALQ |
| | | | | | | KTRIELRSAREEAAHRKATDHPHPSTPATARQ |
| | | | | | | QIAMSAIVRSPEHQPSAMSLLAPPSSRRKESST |
| | | | | | | PEEFSRRLKERMHHNIPHRFNVGLNMRATKC |
| | | | | | | AVCLDTVHFGRQASKCLECQVMCHPKCSTC |
| | | | | | | LPATCGLPAEYVTHFTEAFCRDKMNSPGLQT |
| | | | | | | KEPSSSLHLEGWMKVPRNNKRGQQGWDRK |
| | | | | | | YIVLEGSKVLIYDNEAREAGQRPVEEFELCLP |
| | | | | | | DGDVSIHGAVGASELANTAKADVPYILKMES |
| | | | | | | HPHTTCWPGRTLYLLAPSFPDKQRWVTALES |
| | | | | | | VVAGGRVSREKAEADAKLLGNSLLKLEGDD |
| | | | | | | RLDMNCTLPFSDQVVLVGTEEGLYALNVLK |
| | | | | | | NSLTHVPGIGAVFQIYIIKDLEKLLMIAGEERA |
| | | | | | | LCLVDVKKVKQSLAQSHLPAQPDISPNIFEAV |
| | | | | | | KGCHLFGAGKIENGLCICAAMPSKVVILRYN |
| | | | | | | ENLSKYCIRKEIETSEPCSCIHFTNYSILIGTNK |
| | | | | | | FYEIDMKQKTLEEFLDKNDIISLAPAVFAASS |
| | | | | | | NSFPVSIVQVNSAGQREEYLLCFHEFGVFVDS |
| | | | | | | YGRRSRTDDLKWSRLPLAFAYREPYLFVTHF |
| | | | | | | NSLEVIEIQARSSAGTPARAYLDIPNPRYLGPA |
| | | | | | | ISSGAIYLASSYQDKLRVICCKGNLVKESGTE |
| | | | | | | HHRGPSTSRR*PASPLPQYQGQRAFLQGRRK |
| 138 | 1488 | A | 1686 | 2 | 526 | GRPQGPAPGAGSPPESGPGLWAALGCSLVWV |
| | | | | | | PLCCLGGAAGRL*ARSGKSGLRRRRAHAGPP |
| | | | | | | PGGPCNSCP*CSAPESGGRGPLPGPGTGGVCS |
| | | | | | | CWTRGCQTTARTAAAAAAPGPAGRRPPGQA |
| | | | | | | PQNQSCAASASQEAAAPPPMCPPGRRWAVAS |
| | | | | | | PPETRCPAAPGTRCRRLEAA |
| 139 | 1489 | A | 1693 | 3 | 376 | LPSMSNCTSCFRLQSRTES*IRQAGHLLGRNE |
| | | | | | | FIETKALGCAWFSLCYYLVLYFESSHKVDFVF |
| | | | | | | IV*CFSTPPGAQMTIMSQACAERCNLMRLVDR |
| | | | | | | RWAGIAKGVGTQKIIGRVHLGEQKALGL |
| 140 | 1490 | A | 1704 | 3 | 376 | ERTNKFIKELIMDGKNLIAATKSLSVAQRKFA |
| | | | | | | HSLRDFKFEFIGDAVTDDERCIDASLREFSNFL |
| | | | | | | KNLEEQREIMVS*EGCKLISQLSRGKK1WIWK |
| | | | | | | LVLVEVVKHLSLGTVVHCNGKMRFPEP |
| 141 | 1491 | A | 1743 | 1 | 362 | LITNKVFVARELSCLDYHLDSTGSTAVVADQ |
| | | | | | | DKLELELVLKGSYEDTQTSFLGTASAFRFHY |
| | | | | | | MAAL*TELSGRLRSSKSNGWNGDNSTGYLTV |
| | | | | | | PLRPLTIVKEVTMDVPAPNVRGLNWMG |
| 142 | 1492 | A | 1769 | 1 | 406 | NNPSTLPRGS*PMSPRTTMGRRRQRRREHKSS |
| | | | | | | LSLASSTVGPGGQIVHTETTEVVLCGDPLSGF |
| | | | | | | GLQLQGGIFATETLSSPPLVCFIEPDSPAERCG |
| | | | | | | LLQVGDRVLSLNGIATEDGTMEEANQLLRDA |
| | | | | | | ALAHKVV |
| 143 | 1493 | A | 1789 | 1 | 447 | QMLRNGGDQNTVPDYHFADRIRELL*PTEDQ |
| | | | | | | KNCIP*DTYLRPSALGNIVEEVTHPCSPGPCPA |
| | | | | | | NELCEVNRKGCTSGDPCLPYFCVQGCKLGQA |
| | | | | | | SDFIARQGTLIQVPSSAGEVECYKICSCGQSGL |
| | | | | | | LENCMEMHCMDLPTDTSALVR |
| 144 | 1494 | A | 1814 | 1 | 404 | PGRRFRPRLSQAGTDSGS*VFPDSFPSAPAEPL |
| | | | | | | PYFLQEPQDAYIVKNKPVELRCRAFPATQIYF |
| | | | | | | KCNGEWVSQNDHVTQEGLDEATGLRVREVH |
| | | | | | | IEVSRQQVEELFGLEDYWCQCVAWSSAGTTK |
| | | | | | | SRRAYVRI |
| 145 | 1495 | A | 1827 | 26 | 448 | XVEEKHADTWRSXCLSDFFFHAAKXLCXE*N |
| | | | | | | CGDAISLSVGDHFGKGNGLTWAEKFQCEGSE |
| | | | | | | TIILALCPIVQHPEDTCTHSREVGVVCSRYTDV |
| | | | | | | RLVNGKSQCDGQVEINVLGHWGSLCDTHWD |
| | | | | | | PEDARVLCRQLNCGTAL |
| 146 | 1496 | A | 1828 | 574 | 333 | QHEGGDLRRRQLGEIQLTVRYVCLRAASAC* |
| | | | | | | SMAAET*HHVPASGADPYVRVYLLPERKWA |
| | | | | | | CRKKTSVKRKTLEPLFDET |
| 147 | 1497 | A | 1855 | 1 | 372 | ERLVLTSEHCLVLTLFWPSWTYHTLLLSRQH |
| | | | | | | VRRLPKLTHAEHDHLASIMNKLLTNYDNLFE |
| | | | | | | TSVTYSMG*HGAPTGSEAGANWNH**LHAH |
| | | | | | | YYPPLLRSDTVRKFMVGSQMLAQAQRDLTPE |
| | | | | | | Q |
| 148 | 1498 | A | 1879 | 568 | 7 | LLSALDDKGGTQPSASFSNAPTIVCVTACPAG |
| | | | | | | IAHTYMAAEYLEKAGRKLGVNVYYEKQGAN |
| | | | | | | GIEGRLTADQLNSATACIFAAEVAIKESERFN |
| | | | | | | GIPALSVPVAEPIRHAEALMQQALTLKRSDET |
| | | | | | | RTVQQDTQPVKSVKTELKQALLSGISFAVPLI |
| | | | | | | VAGGTQVA*AV*RQGISSLHDVQVRTWNS |
| 149 | 1499 | A | 1880 | 611 | 24 | GLNSENALSNEAMERGWQCLRLFAERLQDIP |
| | | | | | | PSQIRVYATATLRLAVNAGDFIAKAQEILGCP |
| | | | | | | VQVLSGEEEARLIYQGVAHTTGGADQRLVVD |
| | | | | | | IGGASTELVTGTGAQTT*LFSLSMGCVTWLER |
| | | | | | | YFADRNLGQENFDAAQKAAREVLRPVADEL |
| | | | | | | RYHSWKEVRGASVTVQALQEIMMAQGMDE |
| | | | | | | RITMETWPVD |
| 150 | 1500 | A | 1894 | 2 | 750 | GRVDFFHTDYRPLIRDSNNYVLDEQTQQAPH |
| | | | | | | LMPPPFLVDVDGNPHPTKYQRLVPGRENSAD |
| | | | | | | EHLIPQLGYVATSDGEVIEQIISLQTNDNDERS |
| | | | | | | PESSILDGMIRQLQQQQDQRMGADQDTIPRG |
| | | | | | | LSNGEETPRRGFRRLSLDIQSPPNIGLRRSGQV |
| | | | | | | EGVRQMHQNAPRSQIATERDLQAWKRRVVV |
| | | | | | | PEVPLGIFRKLEDFRLEKGEEERNLYIIGRIKRK |
| | | | | | | TLQLSHKSDSVGLVSQSRPRTCRRKYP |
| 151 | 1501 | A | 1900 | 141 | 785 | GKTIQIQTTMQNKYKTVQKQYKTIPKNKKA |
| | | | | | | MEMQIKKQFQDTCKVQTKQYKALKNHQLEV |
| | | | | | | TPKNEHKTILKTLKDEQTRKLAILAEQYEQSI |
| | | | | | | NEMMASQALRLDEAQEAECQALRLQLQQEM |
| | | | | | | ELLNAYQSKIKMQTEAQHERELQKLEQRVSL |
| | | | | | | RRAHLEQKIEEELAALQKERSERIKNLLERQE |
| | | | | | | REIETFDMESLRMGFGNLVTLDFPKEDYR |
| 152 | 1502 | A | 1915 | 2 | 377 | LVRLLDTQRDGLQNYEALLGLTNLSGRSDKL |
| | | | | | | RQKIFKERALPDIENYMFENHDQLRQAATEC |
| | | | | | | MCNMVLHKEVQERFLADGNDRLKLVVLLCG |
| | | | | | | EDDDKVQNAAAGALAMLTAAHKKLCLKMT |
| | | | | | | QVTT |
| 153 | 1503 | A | 1921 | 1 | 237 | AYQSLRLEYLQIPPVSRAYTTACVLTSAAVQL |
| | | | | | | ELITPFQLYFIPELIFKHFQIIWRLITNFLFFVPFG |
| | | | | | | FNFLLYMIFLYT |
| 154 | 1504 | A | 1928 | 2 | 354 | EMVEGGEGKMCINTEWGGFGDNGCIDDIRTR |
| | | | | | | YDTEVDEGSLNPGKQRYEKMTSGMYLGEIV |
| | | | | | | RQILIDLTKQGLLFRGQISERLRTRGIFETKFLS |
| | | | | | | QIESDRLALLQVRRILQQLGLD |
| 155 | 1505 | A | 1929 | 2 | 369 | TEIAKIKMEAKKKYEKELTMFQNDFEKACQA |
| | | | | | | KSEALVLREKSTLERIHKHQEIETKEIYAQRQ |
| | | | | | | LLLKDMDLLRGREAELKQRVEAFESYQLELK |
| | | | | | | DDYIIRTYRLIEDDRINIQISGHWQESP |
| 156 | 1506 | A | 1935 | 1 | 270 | VTRKLPIFIVDAFTARAFRGSPAADCLLENEL |
| | | | | | | DEDMHQKIAREMNLSETAFIRKLHPTDNFAQ |
| | | | | | | RSCFGLTWFTPTTDLQILTSSILPSIL |
| 157 | 1507 | A | 1936 | 584 | 305 | ESKVNNEKFRTKSPKPAESPQSATKQLDQPTA |
| | | | | | | AYEYYDAGNHWCKDCNTICGTMFDFFTHMH |
| | | | | | | NKKHTQGQFQKSSDFQKEELQQTFLPPERQG |
| 158 | 1508 | A | 1939 | 1 | 423 | TTHRLNVTAEPPCTSMPIYWMPDVPHRCTTA |
| | | | | | | NTCPVDLTDYCAQNGFYCLVYGFLPYGSLED |
| | | | | | | RLHCQTQACPPLSWPQRLDILLGTARAIQFLH |
| | | | | | | QDSPSLIIIGDIKSSNVLLDERLTPKLGDFGLA |
| | | | | | | RFSRFAGSSPIQSSM |
| 159 | 1509 | A | 1974 | 3 | 401 | HTSTARLLLHRGAGKEAVTSDGYTALHLAAR |
| | | | | | | NGHLATVKLLVEEKADVLARGPLNQTALHL |
| | | | | | | AAAHGHSEVVEELVSADVIDLFDEQGLSALH |
| | | | | | | LAAQGRHAQTVETLLRHGAHINLQSLKFQGG |
| | | | | | | HGPAATLLR |
| 160 | 1510 | A | 1982 | 2 | 417 | KFLKDLEKQYNKEEPHLSEIGSCFLQNQEGFA |
| | | | | | | IYSEYCNNHPGACLELANLMKQGKYRHFFEA |
| | | | | | | CRLLQQMIDIAIDQFLLTPVQKICKYPLQLAEL |
| | | | | | | LKYITQEHGDYSNTKAAYEANKNVACLINER |
| | | | | | | KRKLESIDKIA |
| 161 | 1511 | A | 1984 | 4 | 770 | RETGSVSLSPSGLEGAESYAVSPILYSSPDVKE |
| | | | | | | LWLETLQGQRHSHTGVKSTPGQSAAILMKLR |
| | | | | | | SSHNASKTLNANNMETLIECQSEGDIICEHPLL |
| | | | | | | ASCESEDSICQLIEVKKRKKVLSWPFLMRRLS |
| | | | | | | PASDFSGALETDLKASLFDQPLSIICGDSDTLP |
| | | | | | | RPLQDILTILCLKGPSTEGIFRRAANEKARKEL |
| | | | | | | KEELNSGDAVDLERLPVHLLAVVFKDFLRSIP |
| | | | | | | RKLLSSDLFEEWMGALEMQDEEDRIEALK |
| 162 | 1512 | A | 1986 | 864 | 501 | LLNSGLFSAPDGSNLEMRLTRGGNMCSGRIEI |
| | | | | | | KFQGRWGTVCDDNFNIDHASVICRQLECGSA |
| | | | | | | VSPSGSSNFGEGSGPIWFDDLICNGNESALWN |
| | | | | | | CKHQGWGKHNCDHAEDAGVICSSKD |
| 163 | 1513 | A | 2001 | 419 | 187 | AVDLSIDESSLTGETTPCSKVTAPQPAATNGD |
| | | | | | | LASRSNIAFMGTLVRCGKAKGVVIGTGENSE |
| | | | | | | FGDIINLSTFVVHS |
| 164 | 1514 | A | 2012 | 284 | 597 | SLLCLFPGTSTVVCKPIVIETQLYVIVAQLFGG |
| | | | | | | SHIYKRDSFANKFIKIQAIEILKIRKPNDIETFKI |
| | | | | | | ENNWYFVVADSSKAGFTTTYKWERETGFYSH |
| | | | | | | QSFTR |
| 165 | 1515 | A | 2013 | 2 | 403 | EDPEELGHFYDYPMALFSTFELFLTIIDGPANY |
| | | | | | | NVDLPFMYSITYAAFAIIATLLMLNLLIAMMG |
| | | | | | | DTHWRVAHERDELWRAQIVAITVMLERKLP |
| | | | | | | RCLWPRSGICGREYGLGDRWILRVEDRQDLN |
| | | | | | | RQRIQRYA |
| 166 | 1516 | A | 2019 | 2 | 927 | CCQREGLGLKAVVQILLSHGRNGLPGEPASS |
| | | | | | | QGLSAASSTPVFHLALQIDSAPDNIDWVEMLF |
| | | | | | | NKNMVTERLQNVMVLEQCFSDSSSLYRFLTY |
| | | | | | | SYLLAFNVWLLLAPVTLCYDWQVGSIPLVETI |
| | | | | | | WDMRNLATIFLAVVMALLSLHCLAAFKRLE |
| | | | | | | HKEVLVGLLFLVFPFIPASNLPFRVGFVVAER |
| | | | | | | VLYMPSMGYCRFVHGLSKLCTWLNRCGATT |
| | | | | | | LIVSTVLLLLLFSWKTVKQNEIWLSRESLFRS |
| | | | | | | GVQTLPHNAKVHYNYANFLKDQQRNKRAIY |
| | | | | | | HYRTALNNNKAWDYLCWRFRKTLTDLP |
| 167 | 1517 | A | 2025 | 696 | 71 | AAASAASSLTVTLGRLASACSHSILRPSGPGA |
| | | | | | | ASLWSASRRFNSQSTSYLPGYVPKTSLSSPPW |
| | | | | | | PEVVLPDPVEETRHHAEVVKKVNEMIVTGQY |
| | | | | | | GRLFAVVIIFASRQWKVTSEDLILIGNELDLA |
| | | | | | | CQERIRLEKVLLVGADNFTLLGKPLLGKDLV |
| | | | | | | RVEATVIEKTESWPRIIMRFRKRKNFKKKRIV |
| | | | | | | TTPQTVLRINSIEIAPCLL |
| 168 | 1518 | A | 2046 | 2 | 366 | LILQVAARVFMPLQAVDSAPKPLKGQAQAPQ |
| | | | | | | ELQGAARVFMPLQAQVKAKASKPLQMQIKA |
| | | | | | | PPRLRRAARVLMPLQAQVRAPRLLQVQSQVS |
| | | | | | | KKQQAQTQTSEPQDLDQVPEEFQGQDQVLR |
| 169 | 1519 | A | 2049 | 1 | 945 | QNLEDREVLNGVQTELLTSPRTKDTLSDMTR |
| | | | | | | TVEISGEGGPLGIHVVPFFSSLSGRILGLFIRGI |
| | | | | | | EDNSRSKREGLFHENECIVKINNVDLVDKTFA |
| | | | | | | QAQDVPRQAMKSPSVLLHVLPPQNREQYEKS |
| | | | | | | VIGSLNIFGNNDGVLKTKVPPPVHGKSGLKTA |
| | | | | | | NLTGTDSPETDASASLQQNKSPRVPRLGGKPS |
| | | | | | | SPSLSPLMGFGSNKNAKKIKIDLKKGPEGLGF |
| | | | | | | TVVTRDSSLHGPGPIFVKNILPKGAAIKDGRLQ |
| | | | | | | SGDRILEVNGRDVTGRTQEELVAMLRSTKQG |
| | | | | | | ETASLVIARQEGHFLPRELVMFRSQSH |
| 170 | 1520 | A | 2050 | 363 | 1 | PVATHLTKILNSDEHAVVISSAKTLCETVKDF |
| | | | | | | VAKVEKTYDKTLENAVVADAVASKCSVLNE |
| | | | | | | KLEQLLQALHTDSQAAPVLPGLSPLWEEDAV |
| | | | | | | ESSSEESLGESKEQLGDDVTKPSSQKA |
| 171 | 1521 | A | 2055 | 139 | 675 | IPSRPWLGRITGLDPAGPLFNGKPHQDRLDPS |
| | | | | | | DAQFVDVIHSDTDALGYKEPLGNIDFYPNGG |
| | | | | | | LDQPGCPKTILGGFQYFKCDHQRSVYLYLSSL |
| | | | | | | RESCTTTAYPCDSYQDYRNGKCVSCGTSQKE |
| | | | | | | SCPLLGYYADNWKDIILRGKDPPMTKAFFDT |
| | | | | | | AEESPFCMYHYFVDIITWNKNVR |
| 172 | 1522 | A | 2056 | 3 | 361 | LIQHKSAVEYAQSHLSLVSMCKESHKCSEPK |
| | | | | | | MEWKVKIRSDGTRYITKRPVRDRILKERALKI |
| | | | | | | KEERSGLTTDDDTMSEMKMGRYWSKEERKQ |
| | | | | | | HLVRGKEQRRREEFMMIRLKCLKES |
| 173 | 1523 | A | 2060 | 1 | 387 | GTRILSMQIPFVGFQPIRTSEHMAAAGVFALL |
| | | | | | | QAYAFLQYLRDRLTKQEFQTLFFLGVSLAAG |
| | | | | | | AVFLSVIYLTYTGYIAPWSGRFYSLWDTGYA |
| | | | | | | KIHIPIIASVSEHQP1TWVSFFFDLHILGCTFPA |
| | | | | | | G |
| 174 | 1524 | A | 2071 | 74 | 443 | LLMGPKAKKSGSKKKKVTKAERLKLLQEEEE |
| | | | | | | RELKEEEEARLKYEKEEMERLEIQRIEKEKW |
| | | | | | | HRLEAKDLERRNEELEELYLLERCFPEAEKLK |
| | | | | | | QETKLLSQWKHYIQCDGSPDPSVAQEMNT |
| 175 | 1525 | A | 2083 | 139 | 486 | AALTWSQPQEFWPMEMQPIVTDMVTVIIWV |
| | | | | | | AESSTVGWLCALFRVTHVGVGATGHGVVCG |
| | | | | | | RRVLCGLPLPSPAPMPIMSLPEGESRKEREVQ |
| | | | | | | RLQFPYLEPGHELPATILLAFLAAV |
| 176 | 1526 | A | 2092 | 3 | 587 | EGSVNFKFGVLFAKDGQLTDDEMFSNEIGSEP |
| | | | | | | FQKFLNLLGDTTTLKGWTGYRGGLDTKNDTT |
| | | | | | | GIHSVYTVYQGHEIMFHVSTMLPYSKENKQQ |
| | | | | | | VERKRHIGNDIVTIVFQEGEESSPAFKPSMIRS |
| | | | | | | HFTHIFALVRYNQQNDNYRLKIFSEESVPLPG |
| | | | | | | PPLPTPPVFTDHQEFRDFLLVKLINGEKATLET |
| | | | | | | PCI |
| 177 | 1527 | A | 2103 | 44 | 427 | GKGQVSLEGRPHRGPLCLGSWWPGSRVPGC |
| | | | | | | CDGAWLAWACWVFGNDFPSPASAACSALLG |
| | | | | | | CSVSTACLCVPLCSGSPLAPFRRTAALQEGLR |
| | | | | | | RAVSVPLTLAETVASLWPALQELARCGNLAC |
| | | | | | | RSDLQ |
| 178 | 1528 | A | 2104 | 2 | 409 | ALQSTLGAVWLGLLLNSLWKVAESKDQVFQ |
| | | | | | | PSTAASSEGAVVEIFCNHSVSNAYNFFWYLHP |
| | | | | | | PGCAPRLLVKGSKPSQQGRYNMTYERFSSSL |
| | | | | | | LILQVREADAAVYYCAVEVPNTDKLIFCITGT |
| | | | | | | RLQVFPNIQNPD |
| 179 | 1529 | A | 2111 | 1 | 312 | PTRSSTRPPSLFVHASAKGGEKEEGDDGHYL |
| | | | | | | MRTESHTGLKKGGNANLVFMLKRNTEPKKG |
| | | | | | | SYHFDLERLRAAHLLFEREQEHLAPGGISMPL |
| | | | | | | PPPLPLPACLG |
| 180 | 1530 | A | 2116 | 3 | 366 | TSIKRAIETTDVTRSFGWDSSEAWQQHDVQE |
| | | | | | | LCRVMFDALEQKWKQTEQADLINELYQGKL |
| | | | | | | KDYVRSLECGYEGWRIDTYLDIPLVIRPYGSS |
| | | | | | | QAFASVVCTFHLTACVSLHRIHNSTVV |
| 181 | 1531 | A | 2117 | 2 | 386 | YGLGAHFGRLFIQAGINENDFYDGAWCAGR |
| | | | | | | NDLQQWIEVDARELTRFTGVITQGRNSLWLS |
| | | | | | | DWVTSYKVMVSNDSHTWVTGKNGSGDMIFE |
| | | | | | | GNSEKEIPVLNELPVPMVARYIR1NPQSWPDN |
| | | | | | | GSICI |
| 182 | 1532 | A | 2123 | 1 | 493 | RTKTDVYIILNLAVADLLLLFTLPFWAVNAVH |
| | | | | | | GWVLGKIMCKITSALYTLNFVSGMQFLACISI |
| | | | | | | DRYVAVTKVPSQSGVGKPCWIICFCVWMAAI |
| | | | | | | LLSIPQLVFYTVNDNARCIPIFPRYLQTSMKAL |
| | | | | | | IQMLEICIGFVVPFLIMGVCYFITARTLMKMP |
| | | | | | | NIKIS |
| 183 | 1533 | A | 2140 | 3 | 561 | RQAWHEAFKVRKEILTVICCLLAFCIGLIFVQ |
| | | | | | | RSGNYFVTMFDDYSATLPLLIVVELENIAVCF |
| | | | | | | VYGIDKFMEDLKDMLGFAPSRYYYYMWKYI |
| | | | | | | SPLMLLSLLIASVVNMGLSPPGYNAWIEDKAS |
| | | | | | | EEPLSYPTWGLAVCASLDVFAIIPVPVAFIGR |
| | | | | | | RFSLIDDGAGPFCSAAYTTTGCRTPYL |
| 184 | 1534 | A | 2145 | 3 | 538 | HELTVAAADRGQPPQSSVVPVTVTVLDVND |
| | | | | | | NPPVFTRASYRVTVPEDTPVGAELLHVEASD |
| | | | | | | ADPGPHGLVRFTVSSGDPSGLFELDESSGTLR |
| | | | | | | LAHALDCETQARHQLVVQAADPAGAHFALA |
| | | | | | | PVTIEVQDVNDHGPAFPLNLLSTSVAENQPPG |
| | | | | | | TLVTTLHAIDGDAGAFGRLRYHL |
| 185 | 1535 | A | 2151 | 2 | 671 | LDKLLDRMENYNIFNEYILKQVAATYIKLGW |
| | | | | | | PKNNFNGSLVQASYQHEELRREVIMLACSFG |
| | | | | | | NKHCHQQASTLISDWISSNRNRIPLNVRDIVY |
| | | | | | | CTGVSLLDEDVWEFIWMKFHSTTAVSEKKIL |
| | | | | | | LEALTCSDDRLLNRLLNLSLNSEVVLDQDAI |
| | | | | | | DVIIHVARNPHGRDLAWKFFRDKWKILNTRI |
| | | | | | | RQKTLEFDFAEPLILAFPIILYTAIDNPPLVREH |
| | | | | | | E |
| 186 | 1536 | A | 2153 | 2 | 400 | GPMCDKHSAFAEFHAGFIDYIVHPLWETWA |
| | | | | | | HLALPDAQDILYTLEDNRNWVDSMIPQSPSPP |
| | | | | | | LDEQNRDWQGLLENLHVELTLDEEDSEGPEK |
| | | | | | | EGEGQTYFTSSKTLCGIVPQNTDSLGETGIHIC |
| | | | | | | AHDKSP |
| 187 | 1537 | A | 2158 | 227 | 442 | FNCPRVASDSFLENSSLLIMILPLRNATQEFIIR |
| | | | | | | PGAVAYTCNPSTLGGWGGWITRSGVRDQPG |
| | | | | | | QHGGTPS |
| 188 | 1538 | A | 2167 | 3 | 486 | AHLGGAWLTQRSLGSWAAPGPARAAKEVVA |
| | | | | | | CIPQNQKMNIWRMKTSKHLQLLSFVLGAVSP |
| | | | | | | AVVVPYMMVLQENGYGVEEGIPTLLMAASS |
| | | | | | | MDDILAITGFNTCLSIVFSSGCARSSGSRNSKS |
| | | | | | | LRTPLGTICEGCDDSSIFSHLDHSSKWSSTYG |
| | | | | | | HSGA |
| 189 | 1539 | A | 2168 | 2 | 412 | EFLSSNQITQLPNTTFRPMPNLRSVDLSYNKL |
| | | | | | | QALAPDLFHGLRKLTTLHMRANAIQFVPVRIF |
| | | | | | | QDCRSLKFLDIGYNQLKSLARNSFAGLFKLTE |
| | | | | | | LHLEHNDLVKVNFAHFPRLISLHSLCLRRNKV |
| | | | | | | AIVVSSLDW |
| 190 | 1540 | A | 2179 | 64 | 399 | MRLNQNTLLLESFGXXRPYTSEHAIPTYHQW |
| | | | | | | MKADELLRWTTSEPLTLEHEYAMQRTWLED |
| | | | | | | AYECTFIVLDAEKRHAQPGATEESCMVGDVN |
| | | | | | | LFLTDLEDLTLGEIEVLIAEP |
| 191 | 1541 | A | 2190 | 1 | 469 | CLDRAAGIRHERNVIYINETHTRHRGWLARR |
| | | | | | | LSYVLFIQERDVHKGMFATNVTENVLNSSRV |
| | | | | | | QEAIAEVAAELNPDGSAQQQSKAVNKVKKK |
| | | | | | | AKRILQEMVATVSPAMIRLTGWVLLKLFNSF |
| | | | | | | FWNIQIHKGQLEMVKAATETNLPLLFLPVIIR |
| | | | | | | SH |
| 192 | 1542 | A | 2197 | 26 | 157 | PSKXGGLRLLLTGTQLYGRFGSAIAPLGDLDR |
| | | | | | | DGYNGEGREEPY |
| 193 | 1543 | A | 2236 | 2 | 383 | EYFPNSIWRSLFSTMDLGDIGFYTYRILQALS |
| | | | | | | YTHSKGIMHRDVKPLNILCNSPRNKVILADW |
| | | | | | | GLAEFYHPMRKYSVHVATRYYKSPEILLDYE |
| | | | | | | YYDYSLDIWAVGVILLELLTLKLHVFEGGDN |
| | | | | | | EQ |
| 194 | 1544 | A | 2241 | 105 | 409 | RKGVGKMPTSEGRPGQERSDWVTSYKVMGS |
| | | | | | | NDSHTWVTVKNGSGDMIFEGNSEKEIPVLNE |
| | | | | | | LPVPMGARYIRINPQSWFDNGSICMRMEILGC |
| | | | | | | PLPDPNNY |
| 195 | 1545 | A | 2245 | 1 | 672 | MGVASDWTKIEYQPGSGSMPLFPSIHLETCD |
| | | | | | | GAVSSLQIVTELQTNYIGKGCDRETYSEKSLQ |
| | | | | | | KLCGASSGIIDLLPSPSAATNWTAGLLVDSSE |
| | | | | | | MIFKFDGRQGAKIPDGIVPKNLTDQFTITMW |
| | | | | | | MKHGPSPGVRAEKETILCYSDKTEMNRHHY |
| | | | | | | ALYVHNCRLVFLLRKDFDQADTFRPAEFHW |
| | | | | | | KLDQQALAKVDGQPGKSTTRQLQEMPVTIQG |
| | | | | | | ISLKPS |
| 196 | 1546 | A | 2256 | 1 | 396 | FRGTPVSGLTNRDTLAVIRHFREPIRLKTVKP |
| | | | | | | GKVINKDLRHYLSLQFQKGSIDHKLQQVIRD |
| | | | | | | NLYLRTIPCTTRAPRDGEVPGVDYNFISVEQF |
| | | | | | | KALEESGALLESGTYDGNFYGTPKPPAEPSPF |
| | | | | | | QPDPV |
| 197 | 1547 | A | 2259 | 43 | 594 | QLAIEIGVRALLFGVFVFTEFLDPFQRVIQPEEI |
| | | | | | | WLYKNPLGQSDNIPTRLMFAISFLTPLAVICV |
| | | | | | | VKITRRTDKTELKEAFLAVSLALALNGVCTNTI |
| | | | | | | KLIVGRPRPDFFYRCFPDGVMNSEMHCTGDP |
| | | | | | | DLVSEGRKSFPSIHSSFAFSGLGFTTFYLAGKL |
| | | | | | | HCFTESGRGKSWRLCAAILPL |
| 198 | 1548 | A | 2275 | 3 | 404 | TCTTVVVIPRMLVDFLSESKTISLPECATQMFF |
| | | | | | | FLGFASNNCFIMAAMSYDRYTAIHNPLQYHT |
| | | | | | | LMTRKICLQMMMASWMVGFLFSLCIWTVFN |
| | | | | | | LSLCDLNTIQHYFCDISPVVSLACNYTFYHEM |
| | | | | | | AIFVLSA |
| 199 | 1549 | A | 2315 | 1 | 375 | LTQMFFIHALSAIESTILLAMAFDRYVAICHPL |
| | | | | | | RHAAVLNNTVTAQIGIVAVVRGSLFFFPLPLLI |
| | | | | | | KRLAFCHSNVLSHSYCVHQDVMKLAYADTL |
| | | | | | | PNVVYGLTAILLVMGXDRMFISLSYFLII |
| 200 | 1550 | A | 2334 | 2 | 409 | PRVRPQQRKMSFFFKTELGEKLVTKFLFETDF |
| | | | | | | SDDPMLPSPDQLKKKAPFTNKKLKAIIQTPVD |
| | | | | | | ILKQKAIIQLASMQVQAYNGGNANPRPANNE |
| | | | | | | EEEDEEDEYDYDYESLSDDNILEDRPENKSCH |
| | | | | | | DQLQFEYKEEM |
| 201 | 1551 | A | 2350 | 3 | 512 | ISWEAQIAEIIQWVSDEKDARGYLQALASKM |
| | | | | | | TEELEALRSSSLGSRTLDPLWKVRRSQKLDM |
| | | | | | | SARLELQSALEAEIRAKQLVQEELRKVKDAN |
| | | | | | | LTLESKLKDSEAKNRELLEEMEILKKKMIEEK |
| | | | | | | FRADTGKLMLCDSALFEYKYFSNECFYFLFD |
| | | | | | | LIYTLEAPTEFQIQY |
| 202 | 1552 | A | 2351 | 1 | 1003 | PSSYSSDELSPGEPLTSPPWAPLGAPERPEHLL |
| | | | | | | NRVLERLAGGATRDSAASDILLDDIVLTHSLF |
| | | | | | | LPTEKFLQELHQYFVRAGGMEGPEGLGRKQA |
| | | | | | | CLAMLLHFLDTYQGLLQEEEGAGHIIKDLYL |
| | | | | | | LIMKDESLYQQLREDTLRLHQLVETVELKIPE |
| | | | | | | ENQPPSKQVKPLFRHFRRIDSCLQTRVAERGS |
| | | | | | | DEIFCRVYMPDHSYVTIRSRLSASVQDILGSV |
| | | | | | | TEKLQYSEEPAGREDSLILVAVSSSGEKVLLQ |
| | | | | | | PTEDCVFTALGINSHLFACTRDSYEALVPLPE |
| | | | | | | EIQVSPGDTEIHRVEPEDVAMILTAFHWELFR |
| | | | | | | CVHELEFVDYVFHGE |
| 203 | 1553 | A | 2361 | 2 | 403 | NNLNCAEPLFEQNNSLNVNFNTQICKTVWLIH |
| | | | | | | GYRPVGSIPLWLQNFVRILLNEEDMNVIVVD |
| | | | | | | WSRGATTFIYNRAVKNTRKVAVSLSVHIKNL |
| | | | | | | LKHGASLDNFHFIGGSLGAHISGFVGKIFHGQ |
| | | | | | | LGRITGLDP |
| 204 | 1554 | A | 2390 | 280 | 476 | SPSLLPQCLMSLSDLSLSPAPPSHLSPRCPSPQ |
| | | | | | | AGSRLGAMRRCAREMDATPMPPAPSCPSERV |
| | | | | | | T |
| 205 | 1555 | A | 2400 | 543 | 745 | AAVALRDISWQQPYPMDFYAGSSLGPWTVN |
| | | | | | | HGQDRRPHAPGRPARGKVQEGSARPPSAVAC |
| | | | | | | EDCSCR |
| 206 | 1556 | A | 2406 | 122 | 485 | DLSPDSREDHPQGHRRLLPKRPVRGSLMPGH |
| | | | | | | THHPCPVSSTTNDTPDQIWVSVGSLRMGTGG |
| | | | | | | ESRGGLLATGVGGMCACVPRNQPLTGT |
| 207 | 1557 | A | 2409 | 289 | 418 | LWTLYRHKQQVQHNHSNRLSCRPSQEDRAT |
| | | | | | | HTIMVLDKENTLS |
| 208 | 1558 | A | 2413 | 64 | 492 | VQGTGXXFIAFTEAMTHFPASPVWAGMFFL |
| | | | | | | MLINLGLGSMIGTMAGITTPIIDTFKVPKEMFT |
| | | | | | | GGCCVFAFLVGLLFVQRSGNYFVTMFDDYSA |
| | | | | | | TLPLTLIVILENIAVAWIYGTKKFMQELTEML |
| | | | | | | GFRPYRFYFYMWKFVSP |
| 209 | 1559 | A | 2417 | 3 | 877 | EKERLLDEWFTLDEVPKGKLHLRLEWLTLMP |
| | | | | | | NASNLDKVLTDIKADKDQANDGLSSALLILY |
| | | | | | | LDSARNLPIRYKTNEPVWEENFTFFIHNPKRQ |
| | | | | | | DLEVEVRDEQHQCPLGNLKVPLSQLLTSEDM |
| | | | | | | TVSQRFQLGNSGPNSTIKMKIALRVLHLEKRE |
| | | | | | | RPPDHQHSAQVKRPSVSKEGRKTSIKSHMSG |
| | | | | | | SPGPGGSNTPSTPVIGGSDKPGMEEKAQPPE |
| | | | | | | AGPQGLHDLGRSSSSLLASPGHISVKEPTPSIA |
| | | | | | | SDISLPIATQELRQRLRQLENGTTLGQSPLGQI |
| | | | | | | QLTIP |
| 210 | 1560 | A | 2422 | 35 | 456 | REFAASDLEPFTPTDQPISPEAITQPSCIKRQRA |
| | | | | | | AGNPGSLAATLDIIKPCSAPLEPKIQASRNQRW |
| | | | | | | GAVRAAESLTDLAEPASPQVHETPIDASQTQK |
| | | | | | | VEPASKSRFTPELQAKVSHSRERALSTMDATP |
| | | | | | | HHAQPQRGEG |
| 211 | 1561 | A | 2431 | 1 | 764 | RRYSQKLIQHTACQLLRTYPAATRIDSSNPNP |
| | | | | | | LMFWLHGIQLVALNYQTDDLPLHLNAAMFE |
| | | | | | | ANGGCGYVLKPPVLWDKNCPMYQKFSPLER |
| | | | | | | DLDSMDPAVYSLTIVSGQNVCPSNSMGSPCIE |
| | | | | | | VDVLGMPLDSCHFRTKPIHRNTLNPMWNEQF |
| | | | | | | LFHYHFEDLVFLRFAVVENNSSAVTAQRIIPL |
| | | | | | | KALKRGYRHLQLRNLHNEVLEISSLFINSREM |
| | | | | | | EENSSGNTMSASSMFNTEERKCLQTHRVTVH |
| | | | | | | GVPG |
| 212 | 1562 | A | 2436 | 1 | 411 | GIRGTTGHLGCPINDDPSLTLTVSWVMEDKPI |
| | | | | | | YIGNGTKKEDDSLTIFAVAKRDHVSDTCGAC |
| | | | | | | TDLDHNLDKGYLTVLGEQATPTNRLGALPKG |
| | | | | | | RANRTRDLELTYLAERIVRLTWIPGDANNRPI |
| | | | | | | TDYDCQIEEHQ |
| 213 | 1563 | A | 2445 | 1 | 1294 | MSSIGCLWVSRSSQIDGLTAEKSGPEKPHGT |
| | | | | | | WLMPELHPKEQILELLVLEQFLSILPEELQIWV |
| | | | | | | QQHNPESGEESVTLLEDLEREFDDPGQQVPAS |
| | | | | | | PQGPAVPWKDLTCLRASQESTDIHLQPLKTQ |
| | | | | | | LKSWKPCLSPKSDCENSETATKEGISEEKSQG |
| | | | | | | LPQEPSFRGISEIIESNLVWKQGSATGEKLRSP |
| | | | | | | SQGGSFSQVIFTNKSLGKRDLYDEAERCLILT |
| | | | | | | TDSIMCQKVPPEERPYRCDVCGHSFKQHSSLT |
| | | | | | | QHQRIHTGEKPYKCNQCGKAPSLRSYLIIHQR |
| | | | | | | IHSGEKAYECSECGKAFNQSSALIRHRKIHTG |
| | | | | | | EKACKCNECGKAFSQSSYLIIHQRIHTGEKPY |
| | | | | | | ECNECGKTFSQSSKLIRHQRIHTGERPYECNE |
| | | | | | | CGKAFRQSSELITHQRIHSGEKPYECSECGKA |
| | | | | | | FSLSSNLIRHQRIHSG |
| 214 | 1564 | A | 2461 | 1 | 615 | GIPGSTISSSRNIFLEDDLAWQSLIHPDSSNTPL |
| | | | | | | STRLVSVQEDAGKSPARNRSASITNLSLDRSG |
| | | | | | | SPMVPSYETSVSPQANRTYVRTETTEDERKIL |
| | | | | | | LDSVQLKDLWKKICHHSSGMEFQDHRYWLR |
| | | | | | | THPNCIVGKELVNWLIRNGHIATRAQAIAIGQ |
| | | | | | | AMVDGRWLDCVSHHDQLFRDEYALYRPLQV |
| | | | | | | LFSVYCQLECSKLIL |
| 215 | 1565 | A | 2464 | 3 | 2932 | GPGVRSSQDGMADVFVHLRTAWPRCSFISGQ |
| | | | | | | HGPGRHGRRVCSSQDSMADVFVHLRTAWPT |
| | | | | | | CSLISGQHGPGESVSYEDDDIPAPASLLIIVNA |
| | | | | | | AAPALTNPTAPVLCTAPNNTAQKEKVPSGMR |
| | | | | | | QRPAGVRISSRTPDLTCAVSTHSTVPGVRISSC |
| | | | | | | TPDLTCAVSIHSTVPSVCISSCTPDLTCAVSTH |
| | | | | | | STVPGVRISSCTPDLTCAVSTHSTVPGVRISSR |
| | | | | | | TPDLTCAVSIHATVPGVRISSCTPDLTCAVSIH |
| | | | | | | ATVPGVRISSCTPDLTCAVSTHSTVPGVRISSR |
| | | | | | | TPDLTCAVSIHSTVPGVRISSCTPDLTCAVSIH |
| | | | | | | ATVPGVRISSCTPDLTCAVSTHSTVPGVRISSR |
| | | | | | | TPDLTCAVSIHATVPGVRISSRTPDLTCAVSIH |
| | | | | | | ATVPGVRISSCTPDLTCAVSIHATVPGVRISSC |
| | | | | | | TPDLTCAVSIHATVPGVRISSRTPDLTCAVSIH |
| | | | | | | ATVPGVRISSCTPDLTCAVSTHSTVPGVRISSR |
| | | | | | | TPDLTCAVSIHATVPGVRISSCTPDLTCAVSTH |
| | | | | | | STVPGVRISSRTPDLTCAVSIHATVPGVHISSC |
| | | | | | | TPDLTCAVSTHSTVPGVRISSRTPDLTCAVSIH |
| | | | | | | STVPGVCISSRTPDLTCAVSIHSTVPSVHISSCT |
| | | | | | | PDLTCAVSIHSTVPGVRISSRTPDLTCAVSTHS |
| | | | | | | TVPGVHISSCITDLTCAVSIHATVPGVHISSCT |
| | | | | | | PDLTCAVSIHSTVPGVRISSRTPDLTCAVSIHS |
| | | | | | | TVPGVRISSRTPDLTCAVSTHSTVPGVRISSRT |
| | | | | | | PDLTCAVSTHLTVPGVRISSRTPDLTCAVSIHA |
| | | | | | | TVPGVHISSCTPDLTCAVSIHATVPGVRISSRT |
| | | | | | | PDLTCAVSIHATVPGVHISSCTPDLTCAVSTHS |
| | | | | | | TVPGVRTSSRTPDLTCAVSLHSTVPGVHISSCT |
| | | | | | | PDLTCAVSTHSTVPGVHISSCTPDLTCAVSTH |
| | | | | | | STVPGVHISSRTPDLTCAVSIHATVPSVHISSC |
| | | | | | | TPDLTCAVSIHSTVPGLLTSVSQTSTG |
| 216 | 1566 | A | 2477 | 1 | 414 | FRTKSYRKGSYRCIVSEWIAEQGNWQEIQEK |
| | | | | | | AVEVATVVIQPTVLRAAVPKNVSVAEGKELD |
| | | | | | | LTCNITTDRADDVRPEVTWSFSRMPDSTLPGS |
| | | | | | | RVLARLDRDFLVHSSPHVALSHVDARSYHLL |
| | | | | | | VRDVSKENSGYYY |
| 217 | 1567 | A | 2480 | 2 | 460 | CRTLCEGPQRFEEYEYLGYKAGLYEAIADHY |
| | | | | | | MQVLVCQHECVRELATRPGRLSPIENFLPLHY |
| | | | | | | DYLQFAYYRVGEYVKALECAKAYLLCHPDD |
| | | | | | | EDVLDNVDYYESLLDDSIDPASIEAREDLTMF |
| | | | | | | VKRHKLESELIKSAAEGLGXSYTEPNYW |
| 218 | 1568 | A | 2483 | 140 | 383 | AFSSPHPSPAPQFPECGFYGLYDKILLFKHDPT |
| | | | | | | SANLLQLVRSSGDIQEGDLVEVVLSASATFED |
| | | | | | | LQIRPHALTVHSYRAP |
| 219 | 1569 | A | 2489 | 3 | 428 | SSRLVLLAGAAALASGSQGDREPVYRDCVLQ |
| | | | | | | CEEQNCSGGALNHFRSRQPIYMSLAGWTCRD |
| | | | | | | DCKYECMWVTVGLYLQEGHKVPQFHGKWP |
| | | | | | | FSRFLFFQEPASAVASFLNGLASINMLCRYRT |
| | | | | | | FVPASSPMYHTCVAFAWVS |
| 220 | 570 | A | 2498 | 1 | 1297 | MDGEAVRFCTDNQCVSLHPQEVDSVAMAPA |
| | | | | | | APKIPRLVQATPAPMAVTLVFSLVTLFVVDH |
| | | | | | | HHFGREAEMRELIQTFKGHMENSSAWVVEIQ |
| | | | | | | MLKCRVDNVNSQLQVLGDHLGNTNADIQMV |
| | | | | | | KGVLKDATTLSLQTQMLRSSLEGTNAEIQRL |
| | | | | | | KEDLEKADALTFQTLNFLKSSLENTSIELHVL |
| | | | | | | SRGLENANSEIQMLNASLETANTQAQLANSS |
| | | | | | | LKNANAEIYVLRGHLDSVNDLRTQNQVLRNS |
| | | | | | | LEGANAEIQGLKENLQNTNALNSQTQAFIKSS |
| | | | | | | FDNTSAEIQFLRGHLERAGDEIHVLKRDLKM |
| | | | | | | VTAQTQKANGRLDQTDTQIQVFKSEMENVN |
| | | | | | | TLNAQIQVLNGHMKNASREIQTLKQGMKNA |
| | | | | | | SALTSQTQMLDSNLQKASAETQRLRGDLENT |
| | | | | | | KALTMEIQQEQSRLKTLHVVITSQEQLQRTQ |
| 221 | 1571 | A | 2501 | 3 | 500 | RVRLNNDGLSPLMMAAKTGKIGIFQHIIREEV |
| | | | | | | TDEDTRHLSRKFKDWAYGPVYSSLYDLSSLD |
| | | | | | | TCGEEASVLEILVYNSKIENRHEMLAVEPINE |
| | | | | | | LLRDKWRKFGAVSFYINVVSYLCAMVIFTLT |
| | | | | | | AYYQPLEGTPPYPYRTTVDYLRLAGEVITLFT |
| | | | | | | GVLFFFTN |
| 222 | 1572 | A | 2508 | 3 | 395 | DAHCQRKLAMQEFMEINERLTELHTQKQKL |
| | | | | | | ARHVRDKEEEVDLVMQKVESLRQELRRTER |
| | | | | | | AKKELEVHTEALAAEASKDRKLREQSEHYSK |
| | | | | | | QLENELEGLKQKQISYSPGVCSIEHQQEITKL |
| | | | | | | KTDLEKKS |
| 223 | 1573 | A | 2544 | 2 | 412 | NDPAIISNFSAAVVHTIVNETLESMTSLEVTK |
| | | | | | | MVDERTDYLTKSLKEKTPPFSHCDQAVLQCS |
| | | | | | | EASSNKDMFADRLSKSIIKHSIDKSKSVLPNID |
| | | | | | | KNAVYKESLPVSGEESQLTPEKSPKFPDSQNQ |
| | | | | | | LTHCSLSAA |
| 224 | 1574 | A | 2552 | 401 | 1 | GASLCFISTAFTVLTFLIDSCRFSYPERPIIFLSM |
| | | | | | | CYNIYSIAYIVRLTVGRERISCDFEEAAEPVLI |
| | | | | | | QEGLKNTGCAIIFLLMYFFGMASSIWWVILTL |
| | | | | | | TWFLAAGLKWGHEAIEMHSSYFHIAAWAIPA |
| | | | | | | VK |
| 225 | 1575 | A | 2563 | 724 | 1 | MSARKERREKGEEEGEGEKDGDEDEKEEEKE |
| | | | | | | GLGEEEEKEAGKKKKKQEEKEKEKGAVYSR |
| | | | | | | VARICKNDMGGSQRVLEKIIWTSFLKARLNC |
| | | | | | | SVPGDSFFYFDVLQSITDIIQINGIPTVVGVFIT |
| | | | | | | QLNSIPGSAVCAFSMDDIEKVFKGRFKEQKTP |
| | | | | | | DSVWTAVPEDKVPKPRPGCCAKHGLAEAYK |
| | | | | | | TSIDFPDETLSFIKSHPLMDSAVPPIADEPWFT |
| | | | | | | KTRVRYRLTAISVDHSAGPYH |
| 226 | 1576 | A | 2571 | 449 | 3 | EGVLFVYGNYVGDVMNFEMAAEMAQEVAIP |
| | | | | | | TRTVLTTDDISSSPIEDRDGRRGVAGNFFIFKV |
| | | | | | | AGAACDRGMSLEACEAVTRKANRRTYTMG |
| | | | | | | VALEPCSLPQTRRHNFEIGAEEMEIGMGIHGE |
| | | | | | | RGVIREKMMPADAIVDHIMDRIFS |
| 227 | 1577 | A | 2575 | 3 | 1197 | VLSDLCLFYYRDEKEEGILGSILLPSFQIALLTS |
| | | | | | | EDHINRKYAFKAAHPNMRTYYFCTDTGKEM |
| | | | | | | ELWMKAMLDAALVQTEPVKRVDKITSENAP |
| | | | | | | TKETNNIPNHRVLIKPEIQNNQKNKEMSKIEE |
| | | | | | | KKALEAEKYGPQKDGQDRPLTKINSVKLNSL |
| | | | | | | PSEYESGSACPAQTVHYRPTNLSSSENKIVNVS |
| | | | | | | LADLRGGNRPNTGPLYTEADRVIQRTNSMQQ |
| | | | | | | LEQWIKIQKGRGHEEETRGVISYQTLPRNMPS |
| | | | | | | HRAQIMARYPEGYRTLPRNSKTRPESICSVTP |
| | | | | | | STHDKTLGPGAEEKRRSMRDDTMWQLYEW |
| | | | | | | QQRQFYNKQSTLPRHSTLSSPKTMVNISDQT |
| | | | | | | MNSIPTSPSHGSIAAYQGYSPQRTYRSEVSSPI |
| | | | | | | QRGDVTIDRRHRAHHPKVK |
| 228 | 1578 | A | 2583 | 3 | 330 | LPFLGLGSVLPQGMVMASPEMNPTICSVFEA |
| | | | | | | HIYLLFHATTFRRGFQVTVLVGNVRQTAVVE |
| | | | | | | KIHAKVRGTWPFISPEVRKEGGLPQTGRELLD |
| | | | | | | PTMGIKPHLWWVAA |
| 229 | 1579 | A | 2589 | 1 | 448 | DDKNAQGIKRHVKPTSGNAFTICKYPCGKSR |
| | | | | | | ECVAPNICKCKPGYIGSNCQTALCDPDCKNH |
| | | | | | | GKCIKPNICQCLPGHGGATCDEEHCNPPCQH |
| | | | | | | GGTCLAGNLCTCPYGFVGPRCETMVCNRHC |
| | | | | | | ENGGQCLTPDICQCKPGWYGPTCSTA |
| 230 | 1580 | A | 2593 | 2 | 138 | AVTFSVVFAYVADITQEHERSMAYGLVCMFI |
| | | | | | | LYLLYLLRNAFFLR |
| 231 | 1581 | A | 2595 | 185 | 2 | SGPYTDFTPWPTEEQKLLEQALKTYPVNPPER |
| | | | | | | WEKIAEAVPGRTKKACIKRYKVADLRISK |
| 232 | 1582 | A | 2596 | 1 | 391 | STVTGQPRRLLDTAGHQQPFLELKIRANEPGA |
| | | | | | | GRARRRTPTCEPATPLCCRRDHYVNFQELGW |
| | | | | | | RDWILLPEGYQLNYCSGQCPTHLAGSPGIAAS |
| | | | | | | LLYL |
| 233 | 1583 | A | 2601 | 184 | 403 | LLFSDEIIMAAPLRIADVTSGLIGGEDGRVYV |
| | | | | | | YNGKETTLGDMTGKCKSWITPCPEEKVNVLQ |
| | | | | | | NSIPYWERIT |
| 234 | 1584 | A | 2614 | 178 | 335 | PLTLCLPENNKPPQADAVPDKELTLPVDSTFL |
| | | | | | | DGSKSSDDQKIISYLWEKTQ |
| 235 | 1585 | A | 2616 | 2 | 896 | DVLEVYGTGVASTRHEMGTLDKHKELEDLV |
| | | | | | | AKFLNVEAAMVFGMGFATNSMNIPALVGKG |
| | | | | | | CLILRDEVNHTSLVLGARLLGATIGIFKHNYA |
| | | | | | | QSLEKLLRDAVIYGQPRTRRAWKKILILVEGV |
| | | | | | | YSMEGSIVHLPQIIALKKKYKAYLYIDEAHSI |
| | | | | | | GAVGPTGRGVTEFFGLDPHEVDVLMGTFTKS |
| | | | | | | FGASGGYIAGRKARILSPPACLVPNTGSHSLH |
| | | | | | | RLTRDLQMNEAMVALVTDRLQGWNSGEGN |
| | | | | | | WDRADKFGDLVDYLRVHSHSAVYASSMSPPI |
| | | | | | | AEQIIRSLKLIMGLDGTTQ |
| 236 | 1586 | A | 2621 | 1 | 392 | NTSSFPAQPSSPARPSLPHLSQHIPSNPLLPLAS |
| | | | | | | ADHPQCGRFLPLHEPEPLCPSPSLSYPTLVSS |
| | | | | | | WSSPFSSHHGCPPGLYPFPTSPKTIQPPGLAQL |
| | | | | | | KMLGIPPGRQQLRGAQSMPGHGALSPLLLPP |
| | | | | | | A |
| 237 | 1587 | A | 2628 | 398 | 1 | DLVCKISGFGRGPRDRSEAVYTTMSGRSPAL |
| | | | | | | WAAPETLQFGIIFSSASDVWSFGIIMWEVMAF |
| | | | | | | GERPYWDMSGQDVIKAVEDGPRLPPPRNCPN |
| | | | | | | LMHRLMLDCWQKDPGERFRFSQIHSILSKMV |
| | | | | | | QDPEPPNV |
| 238 | 1588 | A | 2631 | 1 | 1104 | WSPCSLTCGVGLQTRDVFCSHLLSREMNETV |
| | | | | | | ILADELCRQPKPSTVQACNRFNCPPAWYPAQ |
| | | | | | | WQPCSRTCGGGVQKREVLCKQRMADGSFLE |
| | | | | | | LPETFCSASKPACQQACKKDDCPSEWLLSDW |
| | | | | | | TECSTSCGEGTQTRSAICRKMLKTGLSTVVNS |
| | | | | | | TLCPPLPFSSSIRPCMLATCARPGRPSTKHSPHI |
| | | | | | | AAARKVYIQTRRQRKLHFVGGGFAYLLPKTA |
| | | | | | | VVLRCPARRVRKPLITWEKDGQHLISSTHVT |
| | | | | | | VAPFGYLKIHRLKPSDAGVYTCSAGPAREHP |
| | | | | | | VIKLIGGNRKLVARPLSPRSEEEVLAGRKGGP |
| | | | | | | KEALQTHKHQNGIFSNGSKAEKRGLAANPGS |
| | | | | | | RYDDLVSRLLEQGAPCSSSKKKN |
| 239 | 1589 | A | 2636 | 1 | 678 | MKPDNILLDEHGHVHITDFNIAAMLPRETQIT |
| | | | | | | TMAGTKPYMAPEMFSSRKGAGYSFAVDWW |
| | | | | | | SLGVTAYELLRGRRPYHIRSSTSSFCEIVHTFET |
| | | | | | | TVVTYPSAWSQEMVSLLKKLLEPNPDQRFSQ |
| | | | | | | LSDVQNFPYMNDINWDAVPQKRLIPGFIPNK |
| | | | | | | GRLNCDPTPELEEMILESKFLHKKKKRLAKK |
| | | | | | | EKDMRKCDSSQTCLLQEHLDSVQKEFIIINRE |
| | | | | | | KVNRDCI |
| 240 | 1590 | A | 2639 | 389 | 3 | ELLDPTTPMRTKCIELLYAALTSSSTDQPKAD |
| | | | | | | LWQNFAREIEEHVFTLYSKNIKKYKTCIRSKV |
| | | | | | | ANLKNPRNSHLQQNLLSGITSPREFAEMTVM |
| | | | | | | EMANKELKQLRASYTESCIQEHYLPQVIDGTL |
| | | | | | | Y |
| 241 | 1591 | A | 2640 | 392 | 3 | IRLTILRCVFMRLATICVLVFTLGSKITSCDDD |
| | | | | | | TCDLCGYNQKLYPCWETQVGQEMYKLMIFD |
| | | | | | | FIIILAVTLFVDPPRKLLVTYCSSCKLIQCWGQ |
| | | | | | | QEFAIPDNVLGIVYGQTICWIGAFFSPLLPAM |
| | | | | | | Y |
| 242 | 1592 | A | 2642 | 405 | 1 | YFKNTTLLLVGVICVAAAVEKWNLHKRIALR |
| | | | | | | MYLMAGAKPGMLLLCFMCCTTLLSMWLSNT |
| | | | | | | STTAMVMPIVEAVLQELVSAEDEQLVAGNSN |
| | | | | | | TEEAEPISLDVKNSQPSVELIFVNEDILDFLMK |
| | | | | | | SPLMISQACI |
| 243 | 1593 | A | 2646 | 412 | 2 | CLAMIKGIQSSGKIIYFSSLFPYVVLICFLIRAF |
| | | | | | | LLNGSIDGIRHMFTPKLEIMLEPKVWREAATQ |
| | | | | | | VFFALGLGFGGVIAFSSYNKRDNNCHFDAVL |
| | | | | | | VSFINFFTSVLATLVVFAVLGFKANVINEKCIT |
| | | | | | | QNSETV |
| 244 | 1594 | A | 2650 | 1 | 1271 | MTTTLIGLLKTARLLRLVRVARKLDRYSEYG |
| | | | | | | AAVLMLLMCIFALIAHWLACIWYAIGNVERY |
| | | | | | | YLTDKIGWLDSLGQQIGKRYNDSDSSSGPSIK |
| | | | | | | DKYVTALYFTFSSLTSVGFGNVSPNTHSEKIF |
| | | | | | | SICVMLIGSLMYASIFGNVSAIIQRLYSGTARY |
| | | | | | | HMQMLRVKEFIRFHQIPNPLRQRLEEYFQHA |
| | | | | | | WTYTNGIDMNMVTNGTCSSCTSDDGHFILVS |
| | | | | | | NHHQGGLIYSWNDAASMQRPFNHTKSSLLGS |
| | | | | | | TSDSNLNKYSTINKIPQLTLNFSEVKTEKKNSS |
| | | | | | | PPSSDKTHAPKVKDRTHNVTEKVTQVLSLGA |
| | | | | | | DVLPEYKLQAPRINKFTILHYSPFKAVWDWLI |
| | | | | | | LLLVIYTAIFTPYSAAFLLNDREEQKRRECGY |
| | | | | | | SCSPLNVVDLIVDIMPIIDILINFRTTYVNQNEE |
| | | | | | | VVSDPASV |
| 245 | 1595 | A | 2656 | 385 | 2 | NLTWWPLFRDVSFYIVDLIMLIIFFLDNVIMW |
| | | | | | | WESLLLLTAYPCYVVFMICFNVQVEKWVKQ |
| | | | | | | MINRNKVVKVTAPEAQAKPSAARDKDEPTLP |
| | | | | | | AKPRLQRGGSSASLHNSLMRNSIFQNKIHTLD |
| | | | | | | PHV |
| 246 | 1596 | A | 2660 | 200 | 506 | VLVLQMNYYQMLIIYYVLFFKVNEFLAFEGPI |
| | | | | | | LLDMRIKHLIKTNQLSQATALAKLCSDHFEIG |
| | | | | | | IKGSFKQTYLVCLCTSSPNGKLIEEVSMFSFIS |
| | | | | | | NYFLS |
| 247 | 1597 | A | 2678 | 3 | 267 | DAWVKNDIIFNQTERKQKISENLKHLASVRV |
| | | | | | | VQKNLVFVVGLSQRLADPEVSPLVFFVIIIFF |
| | | | | | | VSLSYLEIIFDPAQLCDSSEHIIS |
| 248 | 1598 | A | 2687 | 1 | 404 | DFTTLAAMMRTLFSLFGDVRSDVHRFSVTLF |
| | | | | | | GAATKSVKNPDKKSIENQVLDSLVPLLLYSQD |
| | | | | | | ENDAVAEESRQVLTICAQFLKWKLPREVYSK |
| | | | | | | DPWHIKPTEAGTICRFFEKKCKGKINILEQTL |
| | | | | | | MYSKNPKL |
| 249 | 1599 | A | 2692 | 1 | 440 | FRRRRRERERDCAAQGARRHCRHLAECKLV |
| | | | | | | SFPIGIYKVLRNVSGQIHLITLANNELKSLTSK |
| | | | | | | FMTTFSQLRELHLEGNFLHRLPSEVSALQHLK |
| | | | | | | AIDLSRNQFQDFPEQLTALPALETINLEENEIV |
| | | | | | | DVPVEKLAAMPALRSINL |
| 250 | 1600 | A | 2693 | 459 | 21 | LLPGSLGVPILHSQPWDPSPQCPHRAPSTPRRL |
| | | | | | | PPLGALSQALTFLSRAAKNHSQDPGKGTKPFP |
| | | | | | | AAPAAPPPRSSLPAPLPMGLKDKGPQPAPPTIF |
| | | | | | | NSPWHPATLPGALGPQLSQAAPSPIPPPCLMG |
| | | | | | | ISSCPDLKLTKSSTP |
| 251 | 1601 | A | 2694 | 2 | 404 | FVFDLKLRVPGFAAILIHGASSVPGPETVRLR |
| | | | | | | QKRKKKAPDHSSGRKEELVTTHTVDKLETKK |
| | | | | | | PVGRVLCGLSGELLHSLLLPRRKTEKRAIGSH |
| | | | | | | RKAGFPEHPVAPEPLSNSCQISKEGREQVLSEI |
| | | | | | | GAGDCL |
| 252 | 1602 | A | 2697 | 421 | 1 | PQKSHSGAYQCFATRKAQTAQDFAILALEDG |
| | | | | | | TPRIVSSFSEKVVNPGEQFSLMCAAKGAPPPT |
| | | | | | | VTWALDDEPWRDGSHRTNQYTMSDGTTISH |
| | | | | | | MNVTGPQIRDGGVYRCTARNLVGSAEYQARI |
| | | | | | | NVRGPPSIRAMRNIT |
| 253 | 1603 | A | 2698 | 65 | 401 | ACCQWRRTLIPAKSITVSCTISTPHHPFRGSYS |
| | | | | | | FDDHITDSEALSRSSHVFFSHPRMLKRQPAIEL |
| | | | | | | PLGGEYSSDVPRPLSTQLSSSLLGYPSTLMTG |
| | | | | | | AAFTNNIASSTIIL |
| 254 | 1604 | A | 2699 | 438 | 301 | GQIHSQDDPPFIDQLGFGVAPGFQTFVACQEQ |
| | | | | | | RVRGPWEAGPGVGY |
| 255 | 1605 | A | 2700 | 1 | 842 | LQNREDSSEGLRKKLVEAEELEEKHREAQVS |
| | | | | | | AQIILEVHLKQKEQHYEEKIKVLDNQIKKDLA |
| | | | | | | DKETLENMMQRHEEEAIIEKGKILSEQKAMIN |
| | | | | | | AMDSKIRSLEQRIVELSEANKLAANSSLFTQR |
| | | | | | | NMKAQEEMISELRQQKFYLETQAGKLEAQN |
| | | | | | | RKLEEQLEKISHQDHSDKNRLLELETRLREVS |
| | | | | | | LEHEEQKLELKRQLTELQLSLQERESQLTALQ |
| | | | | | | AARAALESQLRQAKTELEETTAEAEEEIQALT |
| | | | | | | VGLGSNIFRLLKASARMSVELALSILAHP |
| 256 | 1606 | A | 2701 | 2 | 405 | FVGGPGADPPVAVMWDPRAARMDLTAYAE |
| | | | | | | LLKESGNQVLKNGNFSLAIRKYDEAIQILLQL |
| | | | | | | YQWGVPPRDLAVLLCNKSNAFFSLGKWNEA |
| | | | | | | FVAAKECLQWDPTYVKGYYRAGYSLLRLHQ |
| | | | | | | PYEAARMFFEGLR |
| 257 | 1607 | A | 2702 | 2 | 399 | FVESASSRPPGCFSGDGRFWLVSEGSRRGWD |
| | | | | | | FNPSFSFLDPRYSVGGDENIGTVTITLANILREF |
| | | | | | | NPSLKGFSVGTGKETSPNAFLNQAVAGGRAE |
| | | | | | | DLPVQARRLVDLMKNDTRIHFQEDWKIITLFI |
| | | | | | | GGNDL |
| 258 | 1608 | A | 2709 | 1 | 1097 | SVGARQGEARDRIRRFFPKGDLEVLQAQVERI |
| | | | | | | MTRKELLTVYSSEDGSEEFETIVLKALVKACG |
| | | | | | | SSEASAYLDELRLAVAWNRVDIAQSELFRGDI |
| | | | | | | QWRSFHLEASLMDALLNDRPEFVRLLISHGLS |
| | | | | | | LGHFLTPMRLAQLYSAAPSNSLIRNLLDQASH |
| | | | | | | SAGTKAPALKGGAAELRPPDVGHVLRMLLG |
| | | | | | | KMCAPRYPSGGAWDPHPGQGFGESMYLLSD |
| | | | | | | KATSPLSLDAGLGQAPWSDLLLWALLLNRA |
| | | | | | | QMAMYFWEMGSNAVSSALGACLLLRVMAR |
| | | | | | | LEPDAEEAARRKDLAFKFEGMGVDLFGECYR |
| | | | | | | SSEVRAARLLLRRCPLWGDATCLQLAMQAD |
| | | | | | | ARAFFAQDGVQSLPTQKWWGDMARR |
| 259 | 1609 | A | 2721 | 1 | 403 | VYLGAGPGLFFSNEGAKEGEKANIPKLMLPR |
| | | | | | | GGFSQREMVTGERSPSPEEEEEEEEEGFGERA |
| | | | | | | SCRRGLFRVRLTRVGLAAPSKASRGQEGDAA |
| | | | | | | PKSPVREKSPKFRFPRVSLSPKARSGSGDQEE |
| | | | | | | GGLRVRLP |
| 260 | 1610 | A | 2728 | 1 | 477 | LLGGDLRYHLQQNVHFTEGTVKLYICELALA |
| | | | | | | LEYLQRYHIIHRDIKPDNILLDEHGHYIIITDFN |
| | | | | | | IATVVKGAERASSMAGTKPYMAPEVFQVYM |
| | | | | | | DRGPGYSYPVDWWSLGITAYELLRGWRPYEI |
| | | | | | | HSVTPTDEILNMFKVERVIIYSSTWCKGMVAL |
| | | | | | | LRK |
| 261 | 1611 | A | 2730 | 3 | 547 | LTITDFILVLYRYYRSPLVQIYEIEQHKIETWR |
| | | | | | | ETYLQGCFKPLVSISPNDSLFEAVYTLIKNRIH |
| | | | | | | RLPVLDPVSGNVLHILTHKRLLKFLIIIFGSLLP |
| | | | | | | RPSFLYRTIQDLGIGTFRDLAVVLETAPILTAL |
| | | | | | | DIFVDRRVSALAVVNECGTHPQDERLGLGW |
| | | | | | | GLGEPGSEERLFPAAITSR |
| 262 | 1612 | A | 2733 | 3 | 431 | GPEFPGSAKLVFLDLSYNNLTQLGAGAFRSA |
| | | | | | | GRLVKLSLANNNLVGVHEDAFETLESLQVLE |
| | | | | | | LNDNNLRSLSVAAIAALPAIRSLRLDGNPWL |
| | | | | | | CDCDFAHLFSWIQENASKLPKGLDEIQCSLPM |
| | | | | | | ESRRISLRACRRPASRV |
| 263 | 1613 | A | 2736 | 2 | 343 | PARISGVDPPVRKATKGGENCSFEDNKNWQF |
| | | | | | | LWGLNGNFNFFKEPWGGRNNHAKGFRTTW |
| | | | | | | ARSSSQNNRTFQNNENFLRLQRDSQKKGQFA |
| | | | | | | RLISPLVNLPQSPGGLEFQYQAT |
| 264 | 1614 | A | 2738 | 2 | 245 | RAMLKCLREGQPPPSYNWTRLDGPLPSGVRV |
| | | | | | | DGDTLGFPPLTTEHSGIYVRHDTNEFSSRIDSH |
| | | | | | | DTVDVLDPPEDSGKQVDL |
| 265 | 1615 | A | 2752 | 2 | 388 | AAGDAPLRSLEQANRTRFPFFSDVKGDHELV |
| | | | | | | LAAVETTVLVLIPAVSLLGNVCALVLVARRR |
| | | | | | | RRGATACLVLNLFCADLLFISAIPLVLAVRWT |
| | | | | | | EAWLLGPVACHLLFYVMTLSGSVTILTLAAV |
| | | | | | | SLER |
| 266 | 1616 | A | 2755 | 192 | 1 | AFREVGGYWGLLCEHLYAIPSKTSEGNWTAK |
| | | | | | | LQGYLPLQDAFHIFQDPLTGDLPWPELILGLP |
| | | | | | | V |
| 267 | 1617 | A | 2760 | 434 | 714 | ASRLEKQNSTPESDYDNTPNDMEPDGMGYM |
| | | | | | | HRTSVPGEGLPRARDLAGLGQQKQFITHTPF |
| | | | | | | LYFQTHKGLKDSSIRSEVTCLGISQCWRKGFF |
| 268 | 1618 | A | 2762 | 1 | 405 | IACTFCGQDEWSPERSTRCFRRRSRFLAWGEP |
| | | | | | | AVLLLLLLLSLALGLVLAALGLFVHHRDSPL |
| | | | | | | VQASQGPLACFGINCLGLVCLSVLLFPGQPSP |
| | | | | | | ARCLAQQPLSHLPLTGCLSTLFLQAAEIFVESE |
| | | | | | | LPLSWAE |
| 269 | 1619 | A | 2772 | 3 | 243 | TRPAEKIQYLVLFFVMSHPSQAYDKLSLSDHL |
| | | | | | | LIAVLNLLRREVSEHGRHLQQYFNLFVMYAN |
| | | | | | | LSKNLSFSEFCFDVSY |
| 270 | 1620 | A | 2789 | 1 | 486 | ELQSQQACTHTKETEQLRSQLQTLKQQHQQA |
| | | | | | | VEQIAKAEETHSSLSQELQARLQTVTRIEKEEL |
| | | | | | | LQLSIERGKVLQNKQAEICQLEEKLEIANEDR |
| | | | | | | KIIALERFEQEAVAVDSNLRVRELQRKVDGIQ |
| | | | | | | KAYDELRLQSEAFKKHSLDLLSKERELNGKL |
| | | | | | | RHLSP |
| 271 | 1621 | A | 2795 | 1 | 568 | KEKRVTVQLPTESIQKNQEDKLKMVPEKQRE |
| | | | | | | FSGSDRGKLPGSEEKNQGPSMIGRKEERLITE |
| | | | | | | RKHEHLKNKSAPKVVKQKVIDAHLDSQTQN |
| | | | | | | FQQTQIQTAESKAEHKKLPQPYNSLQEEKCLE |
| | | | | | | VKGIQEKQVFSNTKDSKQEITQNKSFFSSVKE |
| | | | | | | SQRDDGKGALNIVEFLRKREELHQILSTVKQP |
| 272 | 1622 | A | 2797 | 8 | 523 | KCMQGKYAGAMESEPCVCTEADFDCDYGYE |
| | | | | | | RHSNGQCLPAFWFNPSSLSKDCSLGQSYLNST |
| | | | | | | GYRKVVSNNCTDGVREQYTAKPQKCPGKAP |
| | | | | | | RGLRIVTADGKLTAEQGHNVTLMVQLEEGD |
| | | | | | | VQRTLIQVDFGDGIAVSYVNLSSMEDGIXHV |
| | | | | | | YQNXGIXRXTVQVDNSLGS |
| 273 | 1623 | A | 2801 | 72 | 395 | HPSRSNVGPRQLTVWNTSNLSHDNRRKYIFS |
| | | | | | | DEEGQNQLGIRIHQDIPLPPRREELPALRTTNG |
| | | | | | | KADSLNVSRNSVMQELSELEKQIQVIRQELQL |
| | | | | | | AVSRKTELEEYH |
| 274 | 1624 | A | 2805 | 168 | 320 | ILWLYFETGTWVYPVFAKLSLLGLAALPSLRE |
| | | | | | | IFIARNGVVGETLTHCKRV |
| 275 | 1625 | A | 2812 | 208 | 321 | GSLATCQLSEPLLWFILRVLDTSDALKAFHD |
| | | | | | | MGKIIFQ |
| 276 | 1626 | A | 2813 | 41 | 266 | AGRSLHGAGDRAWVGISPTDWSPKVVELCK |
| | | | | | | KYQQQTVVAIDLAGDETIPGSSLLPGHVQAY |
| | | | | | | QVGPVRRNGEAGPG |
| 277 | 1627 | A | 2817 | 3 | 410 | VLQERLDNFQRKCIQLASSTEGKVDKLLMRN |
| | | | | | | LFISYLHTPKHKQHEVLQAMGSILGITGEEME |
| | | | | | | PLFQEEHGTATRWMTGWLEGGSKSVPKTPL |
| | | | | | | GLNQQPALNGSFSELFVKFLKTESLSSTLPTX |
| | | | | | | LPPHNSPGKIK |
| 278 | 1628 | A | 2821 | 238 | 457 | GLSGPSCSCPHSPLPTIISRAQLETALKWRNYE |
| | | | | | | VKLRLLLHLEELQMEHDIRHYDLESVPMTWD |
| | | | | | | PVDQNPRLV |
| 279 | 1629 | A | 2822 | 342 | 1 | PLIPANLPAHSNPLQPLPSLPHPFLPATHKFPT |
| | | | | | | TPPTFSSPPPLPSLSSILHHSPLHSELNPIILQS |
| | | | | | | CRLPSRPSVSRELPPQSGPASSVPLAPTPLPDS |
| | | | | | | VPSQRHPTXPPPAS |
| 280 | 1630 | A | 2825 | 307 | 77 | PSMVWSYHWGVKQKRLALCVFSFEEGGRRK |
| | | | | | | CGQYWPLEKDSRIRFGFLTVTNLTGAVGEPG |
| | | | | | | VAFQCDGQRRREPTC |
| 281 | 1631 | A | 2827 | 81 | 381 | KMGTAVWVPKEKEKRDKASQEGGDVLGAR |
| | | | | | | QDCTPSLKSLVATGNLLDLEETAKAPLSTVSA |
| | | | | | | NTTNMDEVPRPQALSGSSVVWVSGCVASRS |
| | | | | | | VILSLTSG |
| 282 | 1632 | A | 2830 | 471 | 160 | KLPXDKYELEPSPLTQYILERKSPHTCWQVFV |
| | | | | | | TSSGKYNELGYPPGYLKASTTLTCVNLFVMP |
| | | | | | | YNYPVLLPLLDDLFKVIIKLKPNLKWRQAFDS |
| | | | | | | YLKTLPPYYL |
| 283 | 1633 | A | 2835 | 462 | 148 | VSPALSLTPTIFSYSPSPGLSPFTSSSGFSFNPEE |
| | | | | | | MKHYLHSQACSVFNYHLSPRTFPRYPGLMVP |
| | | | | | | PLQCQMHPEESTQFSIKLQPPPVGRKNRERVE |
| | | | | | | SSEESAP |
| 284 | 1634 | A | 2836 | 2 | 384 | KTLPRTLLDILADGTILKVGVGCSEDASKLLQ |
| | | | | | | DYGLVVRGCLDLRYLAMRQRNNLLCNGLSL |
| | | | | | | KSLAETVLNFPLDKSLLLRCSNWDAETLTED |
| | | | | | | QVIYAARDAQISVALFLHLLGYPFSRNSPGEK |
| | | | | | | KR |
| 285 | 1635 | A | 2843 | 20 | 271 | PIRPYYSYSGLDRDCSWLPLAKAWLPDVMIL |
| | | | | | | VCDRVSEDGINRQQAQEWCIKHGFELVELSF |
| | | | | | | EELPEEDGKCLCVRRKYGTYI |
| 286 | 1636 | A | 2845 | 197 | 278 | TAEDVLTVAYEHGVNLFDTAEVYAAGK |
| 287 | 1637 | A | 2851 | 2 | 427 | FVAEVRREWAKYMEVHEKASFTNSELHRAM |
| | | | | | | NLHVGNLRLLSGPLDQVRAALPTPALSPKDK |
| | | | | | | AVLQNLKRILAKVQEMRDQRVSLEQQLRELI |
| | | | | | | QKDDITGSLVTTDHSQMKKLFEEQLKKYDQL |
| | | | | | | KVYLEQNLAAQDRVLCALT |
| 288 | 1638 | A | 2859 | 2 | 469 | FVNLGILTCIECSGIHREMGAHISRIQSLELDK |
| | | | | | | LGTSELLPAKNVGNNSFNDIMEANLPSPSPKP |
| | | | | | | TPSSDMTVRKEYITAKYVDHRPSRKTCSTSSA |
| | | | | | | KLNELLEAIKSRDLLALIQVYAEGVELMEPLL |
| | | | | | | EPGQELAETALHLAVRTADQTSLHLVE |
| 289 | 1639 | A | 2861 | 2 | 454 | FVASGGPATARMSDSQFFCVAEERSGHCAVV |
| | | | | | | DGNFLYVWGGYVSIEDNEVYLPNDEIWTYDI |
| | | | | | | DSGLWRMHLMEGELPASMSGSCGACINGKL |
| | | | | | | YIPGGYDDKGYSNRLYFVNLRTRDETYIWEK |
| | | | | | | ITDFEGQPPTPRDKLSCWVYKDRLIYFG |
| 290 | 1640 | A | 2868 | 1 | 378 | FRQGQLYKVFLHGSQGQVYHSQQVGPPGSAI |
| | | | | | | SPDLLLDSSGSHLYVLTAHQVDRIPVAACPQF |
| | | | | | | PDCASCLQAQDPLCGWCVLQGRCTRKGQCG |
| | | | | | | RAGQLNQWLWSYEEDSHCLHIQSLLPGHHPR |
| | | | | | | QE |
| 291 | 1641 | A | 2870 | 1 | 385 | FRYMPNNRQQLLRKRHIGNDIVTIVFQEPGAIL |
| | | | | | | PFTPKSIRSHFQHVFVIVKVHNPCTENVCYSV |
| | | | | | | GVSRSKDVPPFGPPIPKGVTFPKSAVFRDFLL |
| | | | | | | AKVINAENAAHKSEKFRAMATRTRQEYLKD |
| | | | | | | LA |
| 292 | 1642 | A | 2877 | 3 | 188 | RPTRPPPATTQSPESTMDTSLKKEKSAILDLYI |
| | | | | | | PPPPAVPYSPRYVAVHCHGMLVSCWCHL |
| 293 | 1643 | A | 2878 | 1 | 427 | REKEEEVEEEEDKVVKETEKEAEQEKEEDSL |
| | | | | | | GAGTHPDAAIPSGERTCGSEGSRSVLDLVNYF |
| | | | | | | LSPEKLTAENRYYCESCASLQDAEKVVELSQ |
| | | | | | | GPCYLILTLLRFSFDLRTMRRRKILDDVSIPLL |
| | | | | | | LRLPLAGGRGQAYDL |
| 294 | 1644 | A | 2879 | 109 | 245 | QLCCFCFRQTTLIVYILSFIGMVIFTFTLDLRYI |
| | | | | | | IIVFVTGGVLG |
| 295 | 1645 | A | 2880 | 3 | 320 | LASSQHGIINNLSLLFSICKTCIRTMDHHCPRA |
| | | | | | | NNCVGEQNHRFFCALHCKSKHFCIEFTLNTNF |
| | | | | | | FNCFLPGAEKSTIDAPFSLQPFLQDSKYNTALS |
| | | | | | | LSESISQ |
| 296 | 1646 | A | 2892 | 209 | 363 | SQYSIISLDYHLLQVTKNPFTLGDSSNPGQTE |
| | | | | | | RLQEFSQKMDQVRGHWPVST |
| 297 | 1647 | A | 2893 | 8 | 424 | SPXTLXLDTFILLGIQDNWVLILATPPFMAGG |
| | | | | | | KLYSTMGRFLRDRKNPACREMAYVLLANLA |
| | | | | | | QGDSLAARAIAVQKGSIGHLLGFLEDSLAAT |
| | | | | | | QIQQSQASLLHMHNPPFEPTSVDMMRRACRA |
| | | | | | | LLALAKVDDNHSEF |
| 298 | 1648 | A | 2894 | 310 | 445 | FWIYFPSFFMTGYLPLGFEFAVEITYPESEGTS |
| | | | | | | SGLLNASAQVNL |
| 299 | 1649 | A | 2898 | 1 | 492 | KIKAKNLTNYDLCSIFLGTSTLLVWVGVIRYL |
| | | | | | | GYFQAYNVLILTMQASLPKVLRFCACAGMIY |
| | | | | | | LGYTFCGWIVLGPYHDKFENLNTVAECLFSL |
| | | | | | | VNGDDMFATFAQIQQKSILVWLFSRLYLYSFI |
| | | | | | | SLFIYMILSLFIALITDSYDTIKKFQQNGFPETD |
| | | | | | | LQEF |
| 300 | 1650 | A | 2901 | 1 | 445 | PVWWNSLNGASEVTFSVHVKDGGSFPKTDST |
| | | | | | | TVTVRPVNKADFPKVRAKEQTFMFPENQPVS |
| | | | | | | SLVTITITGSSLRGEPMSYYIASGNLGNTFQIDQ |
| | | | | | | LTGQVSISQPLDFEKIQKYVYWIEARDGGVPP |
| | | | | | | FSSYEKLDITVLDVNDNAPIF |
| 301 | 1651 | A | 2902 | 162 | 433 | THFICLPLGYCFPLLDKDLQLPSGFNCNFDFLE |
| | | | | | | EPCGWMYDHAKWLRTTWASSSSPNDRTFPG |
| | | | | | | KPAVSEDMKELRPACSTYFNPRFPYKL |
| 302 | 1652 | A | 2909 | 2 | 412 | GPQMLCKKIYFIWVTRSQCQFEWLADIMQEV |
| | | | | | | EENDHQDLVSVHIYVTQLAEKFDLRTTMLYI |
| | | | | | | CERHFQKVLNRSLFTGLRSITHFGRPPFEPFFN |
| | | | | | | SLQEVHPQVRKIGVFSCGPPGMTKNVEKACQ |
| | | | | | | LVNRQDRAHFM |
| 303 | 1653 | A | 2914 | 291 | 453 | KLNRWLCFFYSWSFGILLYEMVTLGAPPYPE |
| | | | | | | VPPTSILEHLQRRKIMKRPSSCS |
| 304 | 1654 | A | 2926 | 179 | 354 | PGVPSQALRKAESLKKCLSVMEAKVKAQTAP |
| | | | | | | NKDVQREIADLGEVGAASLPPSSGPGA |
| 305 | 1655 | A | 2938 | 135 | 438 | GMGYLHAKGILHKDLKSKNVFYDNGKVVIT |
| | | | | | | DFGLFSISGVLQAGRREDKLRIQNGWLCHLA |
| | | | | | | PEIIRQLSPDTEEDKLPFSKHSDVFALGTIWYE |
| | | | | | | LHAREWP |
| 306 | 1656 | A | 2944 | 2 | 329 | VRWNSCVNCSCAFGNGASLSTSLGESSGCLW |
| | | | | | | EIGKWLSCSLLSFPSPLAVLIITFCIVTVLGREA |
| | | | | | | LTKGALWAVPLLAGSALLCAEVTGVIWRQPE |
| | | | | | | SKTKLSFKVSSSA |
| 307 | 1657 | A | 2950 | 2 | 411 | NYLGIAKNSAGSAMGKTRLVVQVPPVIENGL |
| | | | | | | PDLSTTEGSHAFLPCKARGSPEPNITWDKDGQ |
| | | | | | | PVSGAEGKFTIQPSGELLVKNLEGQDAGTYT |
| | | | | | | CTAENAVGRARRRVHLTILVLPVFTTLPGDRS |
| | | | | | | LRLGDRLWLR |
| 308 | 1658 | A | 2951 | 1 | 407 | PTRPPRVRFDNEFDAESQRKRTTSVSKMERM |
| | | | | | | DSSLPEEEEDEDKEAINGSGNAENRERHSESS |
| | | | | | | DWMKTVPSYNQTNSSMDFRNYMMRDETLEP |
| | | | | | | LPKNWEMAYTDTGMIYFIDHNTKTITWLDP |
| | | | | | | RLCKKAKAPEDC |
| 309 | 1659 | A | 2954 | 2 | 179 | QDFLTLTLTEPTGLLYVGAREALFAFSMEALE |
| | | | | | | LQGAVRGGAVGGSRACQRARPRGAVLG |
| 310 | 1660 | A | 2959 | 1 | 419 | QDMMERAIIDTFVGHDVVEPGSYVQMFPYPC |
| | | | | | | YTRDDFLFVIEHMMPLCMVISWVYSVAMTIQ |
| | | | | | | HIVAEKEHRLKEVMKTMGLNNAVHWVAWFI |
| | | | | | | TGFVQLSISVTALTAILKYGQVLMHSHVVIIW |
| | | | | | | LFLAVYAVATIMFCF |
| 311 | 1661 | A | 2963 | 3 | 465 | MKPQMPGLGAPNGYGPGRGRAGVPGGPERR |
| | | | | | | PWVPHLLPFSSPGYLGVMKAQKPGAGEGMK |
| | | | | | | PQKPGLRGTLKPQKSGHGHENGPWPGPCNA |
| | | | | | | RVAPMLLPRLPTPGVPSDKEGGWGLKSQPPS |
| | | | | | | AVQNGKLPGHQPPNGYGPGAEPGFNGGLEPQ |
| | | | | | | KI |
| 312 | 1662 | A | 2967 | 3 | 405 | WLAQEWSPCTVTCGQGLRYRVVLCIDHRGM |
| | | | | | | HTGGCSPKTKPHIKEECIVPTPCYKPKEKLPV |
| | | | | | | EAKLPWFKQAQELEEGAAVSEEPSFIIPEAWS |
| | | | | | | ACTVTCGVGTQVRIVRCQVLLSFSQSVADLPI |
| | | | | | | DECEGPKPA |
| 313 | 1663 | A | 2969 | 2 | 430 | VVADNCRQGYLDALRFLERRGLTKEPVLWT |
| | | | | | | LVSKEPPAPADGNWDAGCDQRRKGGLSLNW |
| | | | | | | KVPHVQVKDVPNFEQLSPELEAALKKACTRD |
| | | | | | | PSRWARFWHSGPGQVLTYLLLPCTLPFEYIYF |
| | | | | | | RSRRLVVWLPDVPADLWWMQ |
| 314 | 1664 | A | 2971 | 422 | 33 | LDXSHNALQRLRPGWLAPLFQLRALHLDHNE |
| | | | | | | LDALGRGVFVNASGLRLLDLSSNTLRALGRH |
| | | | | | | DLDGLGALEKLLLFNNRLVHLDEHAFHGLRA |
| | | | | | | LSHYLGCNELASFSFDHLHGLSATHLLTLDL |
| | | | | | | SSNRM |
| 315 | 1665 | A | 2973 | 1 | 525 | ITVSTHASGSPFGLEPQSGWLWVRAALDREA |
| | | | | | | QELYILKVMAVSGSKAELGQQTGTATVRVSI |
| | | | | | | LNQNEHSPRLSEDPTFLAVAENQPPGTSVGRV |
| | | | | | | FATDRDSGPNGRLTYSLQQLSEDSKAFRIHPQ |
| | | | | | | TGEVTTLQTLDREQQSSYQLLVQVQDGGSPP |
| | | | | | | RSTTGTVHVAVLDLNDNT |
| 316 | 1666 | A | 2978 | 2 | 400 | ELVVELVSAGKSGPERNTYEVQVVTGNVPKA |
| | | | | | | GTDANVYLTIYGEEYGDTGERPLKKSDKSNK |
| | | | | | | FEQGQTDTFTIYAIDLGALTKIRIRHDNTGNR |
| | | | | | | AGWFLDRIDITDMNNEITYYPPCQRWLAVEE |
| | | | | | | DDGQLSRE |
| 317 | 1667 | A | 2981 | 3 | 440 | VLNCQGRPTRPVRINGDGQEVLYLAESDNVR |
| | | | | | | LGCPYVLDPDDYGPNGLDIEWMQVNSNPAH |
| | | | | | | HRENVFLSYQDICRNHGSLPHLQHRVPFAAS |
| | | | | | | DPSQYDASINLMNLQVSDTATYECRVKKTM |
| | | | | | | ATPKVIVTVQARPAVPMCWTEGQ |
| 318 | 1668 | A | 2995 | 119 | 414 | LPEKEFPIIRKSSSLKVTKCLFTEQPKPIIILRFA |
| | | | | | | ENYDARLLRIDIANTLREQVQELFNKTYGKQ |
| | | | | | | RRTPGEGHVAAVDREVAGFPVPAEGISGETIH |
| 319 | 1669 | A | 2999 | 2 | 332 | GFFAYTYGRLVVVEDLHSGAQQHWSGHSAEI |
| | | | | | | STLALSHSAQVLASASGRSSTTAHCQIRVWD |
| | | | | | | VSGGLCQHLIFPHSTTVLALAFSPDDRLLVTL |
| | | | | | | GDHDGRTLALWGTGHL |
| 320 | 1670 | A | 3000 | 693 | 322 | IDESTGLIITVNYLDYETKTSYMMNVSATDQA |
| | | | | | | PPFNQGFCSVYITLLNELDEAVQFSNASYEAA |
| | | | | | | ILENLALGTEIVRVQAYSIDNLNQITYRFDAY |
| | | | | | | TSTQAKALFKIDAITVRGWGQGAPFFPI |
| 321 | 1671 | A | 3001 | 6 | 383 | RIPRGKACXTVLGRSTGELEGFASSRLPPQPC |
| | | | | | | GWGQSSDLLSRIDLDELMKKDEPPLDFPDTLE |
| | | | | | | GFEYAFNEKGQLRHIKTGEPFVFNYREHLHR |
| | | | | | | WNQKRYEALGEIITKYVYELLEKDCNSKKVS |
| 322 | 1672 | A | 3007 | 192 | 447 | ERVRNSLFPGRGDSQCACCPSSPVWVFLETGF |
| | | | | | | LFPWLFLQVEVIKKAYMQGEVEFEDGENGK |
| | | | | | | DGAASPRNVGHNIYILAHQLARH |
| 323 | 1673 | A | 3019 | 18 | 245 | KELLFYHLIVNNLNFFNTRYAKIHIPIIASVSEH |
| | | | | | | QPTTWVSFFFDLHILVCTFPAGLWFCIKNIND |
| | | | | | | ERVFGKRGF |
| 324 | 1674 | A | 3020 | 523 | 797 | LCYFSARYHQRKLFGILYIFTLSAINRKEPNLFI |
| | | | | | | YLFIFFEMESHSVTHAGVQRHNLNSLQPLPPG |
| | | | | | | FKRFSCLCFLSSWNYRGAPPGPANF |
| 325 | 1675 | A | 3022 | 2 | 156 | NDFLPLYFGWVLTKKSSETLRKAGQVFLEEL |
| | | | | | | GNHKAFKKELRQCRWQVGAL |
| 326 | 1676 | A | 3023 | 38 | 172 | KMVRGSKKLISFFPGGPYGILAGRDPSKGLAT |
| | | | | | | FCLNKEALKDEFE |
| 327 | 1677 | A | 3027 | 1 | 385 | LTLEFLLLPAASELAHGKRLACCIVDHKLPEC |
| | | | | | | GFYGLYDKILLFKHDPTSANLLQLVRSSGDIQ |
| | | | | | | EGDLVEVVLSASATFEDFQIRPHALTVHSYRA |
| | | | | | | PAFCDHCGEMLFGLVRQGLKCDGCGLNYHK |
| | | | | | | RC |
| 328 | 1678 | A | 3030 | 13 | 569 | ITRPTISCQRPGPGLAAGMLPYTVNFKVSART |
| | | | | | | LTGALNAHNKAAVDWGWQGLIAYGCHSLV |
| | | | | | | VVIDSITAQTLQVLEKHKADVVKVKWAREN |
| | | | | | | YHHNIGSPYCLRLASADVNGKIIVWDVAAGV |
| | | | | | | AQCEIQEHAKPIQDVQWLWNQDASRDLLLAI |
| | | | | | | HPPNYIVLWNADTGTKLWKKSYADNILSFSF |
| | | | | | | D |
| 329 | 1679 | A | 3038 | 90 | 744 | SVNLPPSLWPWEEAMDSTKSEPLKGSPEAED |
| | | | | | | GNIEYKKLVNPSQYRFEHLVTQMKWRLQEG |
| | | | | | | RGEAVYQIGVEDNGLLVGLAEEEMRASLKTL |
| | | | | | | HRMAEKVGADITVLREREVDYDSDMPRKITE |
| | | | | | | VLVRKVPDNQQFLDLRVAVLGNVDSGKSTL |
| | | | | | | LGVLTQQELDNGRGRARLNLFRHLHEIQSGR |
| | | | | | | TSSISFEILGFNSKGEVHGINGTQWGQTLRMG |
| | | | | | | W |
| 330 | 1680 | A | 3040 | 3 | 397 | LCSTLLLLTIPSWVLSQITLKESGPTLMKPTET |
| | | | | | | LTLTCTFSGFSLNTSGVGVAWIRQPPGKALE |
| | | | | | | WLALIYWDDDKRYSPSLNDRLTIAKDTSPNQ |
| | | | | | | VVLTMTNMGPVDTATYYCAQFARGARGSN |
| | | | | | | WFDPWGQ |
| 331 | 1681 | A | 3043 | 3 | 1509 | AGIRHEAPPTSNRHRRQIDRGVTHLNISGLK |
| | | | | | | MPRGIAIDWVAGNVYWTDSGRDVIEVAQMK |
| | | | | | | GENRKTLISGMIDEPHAIVVDPLRGTMYWSD |
| | | | | | | WGNHPKIETAAMDGTLRETLVQDNIQWPTG |
| | | | | | | LAVDYHNERLYWADAKLSVIGSIRLNGTDPI |
| | | | | | | VAADSKRGLSHPFSIDVFEDYTYGVTYINNRV |
| | | | | | | PKIHKFGHSPLVNLTGGLSHASDVVLYHQHK |
| | | | | | | QPEVTNPCDRKKCEWLCLLSPSGPVCTCPNG |
| | | | | | | KRLDNGTCVPVPSPTPPPDAPRPGTCNLQCFN |
| | | | | | | GGSCFLNARRQPKCRCQPRYTGDKCELDQC |
| | | | | | | EHCRNGGTCAASPSGMPTCRCPTGFTGPKC |
| | | | | | | TQQVCAGYCANNSTCTVNQGNQPQCRCLPG |
| | | | | | | FLGDRCQYRQCSGYCENFGTCQMAADGSRQ |
| | | | | | | CRCTAYFEGSRCEVNKCSRCLEGACVVNKQS |
| | | | | | | GDVTCNCTDGRVAPSCLTCVGHCSNGGSCT |
| | | | | | | MNSKMMPECQCPPHMTGPRCEEIIVFSQQQP |
| | | | | | | GHIASILIP |
| 332 | 1682 | A | 3045 | 3 | 952 | TTTISNFHTQVNRTYCCGTYRAGPMRQISLVG |
| | | | | | | AVDEEVGDYFPEFLDMILEESPFLKMTLPWGT |
| | | | | | | LSSLRLQCRSQSDDGPIMWVRPGEQMIPTAD |
| | | | | | | MPKSPFKRRRSMNEIKNLQYLPRTSEPREVLF |
| | | | | | | EDRTRAHADHVGQGFDWQSTAAVGVLKAV |
| | | | | | | QFGEWSDQPRITIKDVICFHAEDFTDVVQRLQ |
| | | | | | | LDLHEPPVSQCVQWVDEAKLNQMEREGIRY |
| | | | | | | ARIQLCDNDIYFIPRNVIHQFKTVSAVCSLAW |
| | | | | | | HIRLKQYHPVVEATQNTESNSNMDCGLTGKR |
| | | | | | | ELEVDSQCVRIKTESEEACTEIQLLTTASSSFP |
| | | | | | | PASE |
| 333 | 1683 | A | 3046 | 497 | 167 | SACSTGPELPGRATRSLTRPANQKGCDGDRL |
| | | | | | | YYDGCAMIAMNGSVFAQGSQFSLDDVEVLT |
| | | | | | | ATLDLEDVRSYRAEISSRNLAVSAPVDTCVG |
| | | | | | | CSSKTWKVAPFVRAWWRP |
| 334 | 1684 | A | 3053 | 37 | 276 | VITDLEEQLNQLTEDNAELNNQNFYLSKQLD |
| | | | | | | EASGANDEIVQLRSEVDHLRREITEREMQLTS |
| | | | | | | QKQVRRVNKVVRSLEDF |
| 335 | 1685 | A | 3054 | 2 | 846 | WDAWGDWSDCSRTCGGGASYSLRRCLTGR |
| | | | | | | NGEGQNIRYKTCSNHDCPPDAEDFRAQQCSA |
| | | | | | | YNDVQYQGHYYEWLPRYNDPAAPCALKCH |
| | | | | | | AQGQNLVVELAPKVLDGTRCNTDSLDMCISG |
| | | | | | | ICQAVGCDRQLGSNAKEDNGGVCAGDGSTC |
| | | | | | | RLVRGQSKSHVSPEKREENVIAVPLGSRSVRT |
| | | | | | | TVKGPAHLFIESKTLQGSKGEHSFNSPGVFVV |
| | | | | | | ENTTVEFQRGSERQTFKIPGPLMADFIFKTRY |
| | | | | | | TAAKDSVVQFFFYQPISHQWRQTDFFPCTVT |
| | | | | | | CGGG |
| 336 | 1686 | A | 3058 | 54 | 347 | VVGKQEAGAHSDSCCLLHTPPRLTPAHSRKA |
| | | | | | | LRNSRIYSQKDDVHVCIMCLRAIMNYQVSRG |
| | | | | | | AWDWRLGSPACPHWGLHKLPRLWDPLSLYP |
| | | | | | | VLCWGT |
| 337 | 1687 | A | 3059 | 2 | 709 | ILTSLVELTRFETLTPRFSATVPPCWVEVQQE |
| | | | | | | QQQRRHPQHLHQQHHGDAAQHTRTWKLQT |
| | | | | | | DSNSWDEHVFELVLPKACMVGHVDFKFVLN |
| | | | | | | SNITNIPQIQVTLLKNKAPGLGKVNGLRCPF |
| | | | | | | LEDHKEDILCGPVWLASGLDLSGIIAGMLTLT |
| | | | | | | SPKLVKGMAGGKYRSFLIHVKAVNERGTEEI |
| | | | | | | CNGGMRPVVRLPSLKHQSNKGYSLASLLAK |
| | | | | | | VAAGKEKSSNVKNENTSGTRK |
| 338 | 688 | A | 3060 | 85 | 384 | KAFYNYHVLELLQMLVTGGVSSQLEQHLDK |
| | | | | | | DKVYGVADSCTSLLSGRNRCKLGLLSLHEHL |
| | | | | | | SDVNPRNTFGQLFCGSLDLFGILCVGLYRITDE |
| | | | | | | EELNP |
| 339 | 1689 | A | 3063 | 236 | 362 | CFLCLSGDFMVMTIFFNVSRRFGYVAFQNYV |
| | | | | | | PSSVTTMLSWV |
| 340 | 1690 | A | 3065 | 3 | 1249 | DLWQFTPLHEAASKNRVEVCSLLLSYGADPT |
| | | | | | | LLNCHNKSAIDLAPTPQLKERLAYEFKGHSLL |
| | | | | | | QAAREADVTRIKKHLSLEMVNFKHPQTHETA |
| | | | | | | LHCAAASPYPKRKQICELLLRKGANNEKTKE |
| | | | | | | FLTPLHVASEKAHNDVVEVVVKHEAKVNAL |
| | | | | | | DNLGQTSLHRAAYCGHLQTCRLLLSYGCDPN |
| | | | | | | IISLQGFTALQMGNENVQQLLQEGISLGNSEA |
| | | | | | | DRQLLEAAKAGDVETVKKLCTVQSVNCRDIE |
| | | | | | | GRQSTPLHFAAGYNRVSVVEYLLQHGADVH |
| | | | | | | AKDKGGLVPLHNACSYGHYEVAELLVKHGA |
| | | | | | | VVNVADLWKFTPLHEAAAKGKYEICKLLLQ |
| | | | | | | HGADPTKKNRDGNTPLDLVKDGDTDIQDLLR |
| | | | | | | GDAALLDAAKKGCLARVKKISSPDNVMCRD |
| | | | | | | TQGRHSTPLHLAGK |
| 341 | 1691 | A | 3070 | 1 | 547 | GVLIPSFQNQLFADILAGIESVTSEHNYQTLIA |
| | | | | | | NYNYDRDSEEESVINLLSYNIDGIILSEKYHTI |
| | | | | | | RTVKFLRSATIPVVELMDVQGERLDMEVGFD |
| | | | | | | NRQAAFDMVCTMLEKRVRHKILYLGSKDDT |
| | | | | | | RDEQRYQGYCDAMMLHNLSPLRMNPRAISSI |
| | | | | | | HLRMQLMRDALSANPDLDGVFGTN |
| 342 | 1692 | A | 3073 | 463 | 3 | RINRCRKFSDADILVPGDTISLIGTFSLRIDYNE |
| | | | | | | IDDNRVTAEEVDILLREGEKLAPVMAKTRILR |
| | | | | | | AYSGVRPLVASDDDPSGRNVSRGIVLLDHAE |
| | | | | | | RDGLDGFITITGGKLMTYRLMAEWATDAVC |
| | | | | | | RKLGNTRPCTTADLALPGSQEPAKVP |
| 343 | 1693 | A | 3075 | 250 | 1 | LLIYLAIFAPVAMSALAGVKSVQQVRIRAAQS |
| | | | | | | LGASRAQVLWFVILPGALPEILTGLRIGLGVG |
| | | | | | | WSTLVAAELIAATRGLGFM |
| 344 | 1694 | A | 3076 | 2 | 138 | LYFDAYLQSLQVAAISTFCCLLIGYPLAWAV |
| | | | | | | AHSKPSTRNILLLL |
| 345 | 1695 | A | 3078 | 469 | 3 | LKIRGQRIELGEIDRVMQALPDVEQAVTHAC |
| | | | | | | VINQAAATGGDARQLVGYLVSQSGLPLDTSA |
| | | | | | | LQAQLRETLPPHMVPVVLLQLPQLPLIANGKL |
| | | | | | | DRKALPLPELKAQAPGRAPKAGSETIIAAAFS |
| | | | | | | SLLGCDVQDADADFFALGCIHSLLAMKLAT |
| 346 | 1696 | A | 3082 | 404 | 2 | QNITSKDLDVRLDPQTVPLELEQLVLSFNHMI |
| | | | | | | ERIEDVFTRQSNFSADIAHEIRTPITNLITQTEI |
| | | | | | | ALSQSRSQKELEDVLYSNLEELTRMAKMVSD |
| | | | | | | MLFLAQADNNQLIPEKKMLNLAHEVGKVFD |
| | | | | | | QFEALPE |
| 347 | 1697 | A | 3084 | 3 | 340 | NELTFKEAEISKLYTKVHPAYRTLLEKRQALE |
| | | | | | | DEKAKLNGRVTAMPKTQQEIYRLTRDVESGQ |
| | | | | | | QVYMQLLNKEQELKITEASTVGDVRIYDPAIT |
| | | | | | | QPGVLKPKKGLIILGAI |
| 348 | 1698 | A | 3086 | 723 | 10 | TQAMVWQQKACAEDDPQLSGRHWLHAATL |
| | | | | | | YNIAAYPHLKGDDLAEQAQALSNRAYEEAA |
| | | | | | | QRLPGTMRQMEFTVPGGAPITGFLHMPKGDG |
| | | | | | | PFPTVLMCGGLDAMQTDYYSLYERYFAPRGI |
| | | | | | | AMLTIDMFSVGFSSKWKLTQDSSLLHQHVLK |
| | | | | | | ALPNVPWVDHTRVAAFGFRFGANVAVRLAY |
| | | | | | | LESPRLKAVACLGPVVHTLLSGLKCQQQVPE |
| | | | | | | MYLDVLASRLGMHDASTKSSTRENH |
| 349 | 1699 | A | 3087 | 2 | 249 | RIRSSDPEITLAGTPLHAAYLIGMTLICAGFSV |
| | | | | | | GPGVAMSQALGPFSLRAGVASSTLGIAQVCG |
| | | | | | | SSLWIWLAAVVGIGAWNM |
| 350 | 1700 | A | 3099 | 3 | 424 | EAPEATPQPSQPGPSSPISLSAEEENAEGEVSR |
| | | | | | | ANTPDSDITEKTEDSSVPETPDNERKASISYFK |
| | | | | | | NQRGIQYIDLSSDSEDVVSPNCSNTVQEKTFN |
| | | | | | | KDTVHVSEPSEDEESQGLPTMARRNDDISELE |
| | | | | | | DLSGMEDLK |
| 351 | 1701 | A | 3108 | 2 | 404 | IKKNIHGYQLLHRRALFEKRTRLSDYALIFG |
| | | | | | | MFGIVVMVIETELSWGAYYKAPLYSLALKCL |
| | | | | | | ISLFTIILLGLTIVYHAREIQLFMANYGADDWR |
| | | | | | | SALTYEPIFLILLEAIRGVIHATPCRVSLSLWD |
| | | | | | | GLDLP |
| 352 | 1702 | A | 3110 | 341 | 2 | AQLAEVCPPQTLLTTNTSSISITAIAAEIKNPER |
| | | | | | | VAGLIIFFNPAPVMKLVEVVSGLATAAEVVE |
| | | | | | | QLCELTLSWGKQPVRCHSTPGFIYNRVARPY |
| | | | | | | YSEAWRALEEQVAAPEVI |
| 353 | 1703 | A | 3111 | 3 | 188 | HFSLFRIAFAVFLTYMTVGLPLPVIPLFVHHEL |
| | | | | | | GYGNTMVGIAVGIQFLATVLTRGYAGRLA |
| 354 | 1704 | A | 3116 | 367 | 225 | WQLFHLNGTFLNIGETDTESCVNGWVYDRSS |
| | | | | | | FPFSNMTEVRGLVFLS |
| 355 | 1705 | A | 3117 | 101 | 53 | VINLVYLISSPRPELKPVDKESEVVMKFPDQF |
| | | | | | | EKFSPPILQLDEVDFYYDPKHVIFSRLSVSADL |
| | | | | | | ESRICVVGENGAGKSTMLKLLLGDL\APVRGI |
| | | | | | | RHAHENLKIGYFSQHHVGAAGT*TFSACGNL |
| | | | | | | LGTQVFLGRPEEEY\RHQLGFGMGISGELGHA |
| | | | | | | SSLPACLGGQKEAEVAFGSDGLLPCPNFL\IL\ |
| | | | | | | DEPTN\HLGHGRAIEALGPCLQTISGVGVILVS |
| | | | | | | HR*SALSRLVCRE\LWVC*GRSTSPF |
| 356 | 1706 | A | 3121 | 137 | 466 | RGGRDWGEHNQRLEEHQARAWQGAMDAG |
| | | | | | | AASREHARWQGTGLAPGTRVAVAPTCVQGL |
| | | | | | | PQERSVCRPFFSSRWREGPVWALGAGAHGKP |
| | | | | | | RWSGGVRCVVRGGRWFTPAPH |
| 357 | 1707 | A | 3124 | 1249 | 229 | MLEAPGPSDGCELSNPSASRVSCAGQMLEVQ |
| | | | | | | PGLYFGGAAAVAEPDHLREAGITAVLTVDSE |
| | | | | | | EPSFKAGPGVEDLWRLFVPALDKPETDLLSH |
| | | | | | | LDRCVAFIGQARAEGRAVLVHCHAGVSRSV |
| | | | | | | AIITAFLMKTDQLPFEKAYEKLQILKPEAKMN |
| | | | | | | EGFEWQLKLYQAMGYEVDTSSAIYKQYRLQ |
| | | | | | | KVTEKYPELQNLPQELFAVDPITVSQGLKDE |
| | | | | | | VLYKCRKCRRSLFRSSSILDHREGSGPIAFAH |
| | | | | | | KRMTPSSMLTTGRQAQCTSYFIEPVQWMESA |
| | | | | | | LLGVMDGQLLCPKCSAKLGSFNWYGEQCSC |
| | | | | | | GRWITPAFQIHKNRVDEMKILPVLGSQTGKI |
| 358 | 1708 | A | 3127 | 816 | 139 | EVETLGPRTPGPIEAQSPTPGSCPGWQEPSPGP |
| | | | | | | TPPP*LSGPGPQGAPVLGKLLPDPEETPAGKTP |
| | | | | | | LGKHPWWGL\PVTSANFSPGAAA*FGGALSPP |
| | | | | | | GGDL/GHLLQGPPSPFRLQQQ*QTPPGSHSP |
| | | | | | | PTANREINPGPAAAADTRSCWGHKRSWRGW |
| | | | | | | RGLAPWRLGFGSPGIP*PAPAGIPIGRFTWEGG |
| | | | | | | KGAGGKPSETLTRSPPVWRGKRGSANGFLSW |
| | | | | | | VQILQ |
| 359 | 1709 | A | 3132 | 3 | 191 | HEHLLLLLLCVFLVKSQGVNDNEEGFFSARG |
| | | | | | | HRPLDKKREDAPNLRPALAD\ITVCDYRAQIA |
| | | | | | | *AASTPKRAASIAHNAYSCR*AQIA |
| 360 | 1710 | A | 3134 | 1 | 286 | REPPRFALLFF*DRVSLCGPGWNAVVQSQLT |
| | | | | | | AAPTSQVQ/SDSPTFPSSWDYRHVPEYPANFL |
| | | | | | | *RQGFPMLPRLVSNSWAQTVHPPRPPKVLDL |
| | | | | | | QA |
| 361 | 1711 | A | 3135 | 56 | 1449 | PVPAPRVSPSARGAPGRPRLPGVRGPRHSIWA |
| | | | | | | AD*RGSRM/PPRAPAPSPTGP/APGGKKVRGR |
| | | | | | | VPEDPDAYEPRCSAL*V*PTHVTSPQFCDP*N |
| | | | | | | GQIRSYFTVLLRGLNETMLVK/PLCRREP/PEA |
| | | | | | | GPGRQSTPAVTRDHRQHEDPRGAGRQWDAD |
| | | | | | | PRPSAPIPAEVATGSRPGRHMWMRLCLAAQQ |
| | | | | | | APGLPHRTSIRPGWRRLTEPEAWARRHRRPW |
| | | | | | | GQRGAVRPPPQGAAPPPSHQGRRTNTDPSAT |
| | | | | | | PRLTVMSRCLAPDLKAPASGPRGWRRGMPQ |
| | | | | | | SS/GALLWTPPPTPRGSHSPRPREAPLRAIHPA |
| | | | | | | GPSKISRAGASGRLPEVIYGWVTLFTPPEAGT |
| | | | | | | FILIPSPT*MSPALVIQPPVPPTQMGLRISGLPR |
| | | | | | | QG*PSGAPW*LPGLAQLAFQCHLPHDEVGPP |
| 362 | 1712 | A | 3136 | 1270 | 274 | RVGMVLGTREVGDSTPPPSPPLYPFTGNEFVQ |
| | | | | | | GQMN*GGSRDWEEGVEEQQVGNKFSSDGR |
| | | | | | | VGECSRKLLG*EMLSVDITSRYRAPSTYLLNS |
| | | | | | | LKEGLEGLHGESCSSFLLGPSVAMNMQTAGL |
| | | | | | | EMDICDGHFRQNGGCGYVLKPDFLRDIQSSF |
| | | | | | | HPEKPISPFKAQTLLNQVISVQQLPKVDKTKE |
| | | | | | | GSIVDPLVKVQIFGVRLDTARQETNYVENNG |
| | | | | | | FNPYWGQTLCFRVLGPDFPMLRFGKMDYDW |
| | | | | | | KSRNDLLGKTPCPGTCMQQGYRHIIHLLSKDCI |
| | | | | | | ISLRPASIFVYICIQEGLEGDES |
| 363 | 1713 | C | 3139 | 60 | 248 | MFAGSYGKSMFSFSKKVLNCLPKWRYHFVIA |
| | | | | | | PAMNESPLAPHLHQHLVFSVFQVLTILIGV** |
| 364 | 1714 | A | 3140 | 57 | 418 | SAFKTLQLPAFSLYFDLGSLKLLILRIHTSIVK |
| | | | | | | NHKVESPRTMSPG*DPQSFLQIPQPRPPQLRV |
| | | | | | | GLTSGLIQHFHSPSSCQFPLLRGPPFPRQPPLGI |
| | | | | | | SGASLCPVLSPPR*PLQPSSL |
| 365 | 1715 | A | 3145 | 122 | 413 | LLPYPSLFVFLRQCHFVT\RLECNGVVSAHCN |
| | | | | | | LHLPGSSDSPASAS*VAGTTGVCHHTRUF\VF |
| | | | | | | LV*TGFHYVAQAGLELLTA*S\PPQLPKVVGL |
| | | | | | | QA |
| 366 | 1716 | A | 3150 | 247 | 2 | VGEKLHDIRFGNDFDMTPKAQATKEKIDKLN |
| | | | | | | FIKLKKLCIEGYYINREPQNGRKIFANYVS\DK |
| | | | | | | GLMATIYEELLKLSNKLIQ |
| 367 | 1717 | A | 3152 | 3 | 2367 | QKLKQNQPKRAHVEDGGSRSKQGNEQSKKT |
| | | | | | | PIEKSDFAAATHPRAFYLSKPDETPNAWMSD |
| | | | | | | SGTGLTYWKLEEKDMHHSLPETLEKTFISLSS |
| | | | | | | TDVSPNQVLTLDPTLHMKPKQQISGIQPHGLP |
| | | | | | | NALDDRISFSPDSVLEPSMSSPSDIDSFSQASN |
| | | | | | | VTSQLPGFPKYPSHTKASPVDSWKNQTFQNE |
| | | | | | | SRTSSTFPSVYTTTSNDISVNTVDEENTVMYAS |
| | | | | | | ASVSQSQLPGTANSVPECISLTSLEDPVILSKIR |
| | | | | | | QNLKEKHARHIADLRAYYESEITNSLKQKLEA |
| | | | | | | KEISGVEDWKITNQILVDRCGQLDSALHEATS |
| | | | | | | RVRTLENKNNLLEIEVNDLRERFSAASSASKI |
| | | | | | | LQERIEEMRTSSKEKDNTIIRLKSRLQDLEEAF |
| | | | | | | ENAYKLSDDKEAQLKQENKMFQDLLGEYES |
| | | | | | | LGKEHRRVKDALNTTENKLLDAYTQISDLKR |
| | | | | | | MISKLEAQVKQVEHENMLSLRHNSRIHYRPS |
| | | | | | | RANTLATSDVSRRIKWLIPQAEYSIFTGQPLDT |
| | | | | | | QDSNVDNQLEETCSLGHRSPLEKDSSP/GSSST |
| | | | | | | SLLIICKQRETSDTPIMRALKELDEGKIFKNWG |
| | | | | | | TQTEKEDTSNSLL*IINPRQTETSVNASRSPEK |
| | | | | | | CAQQRQKRLNSASQRSSSLPPSNRKSSTPTKR |
| | | | | | | EIMLTPVTVAYSPKRSPKENLSPGFSHLLSKN |
| | | | | | | ESSPIREKTYSEKATDNHVNHSSCPEPVFNGV |
| | | | | | | KKVSVRTAWEKNICSVSYEQCKPVSVTPQGN |
| | | | | | | DFEYTAKLIRTLAETERFFDELTKEKDQIEAAL |
| | | | | | | SRMPSPGGRITLQTRLNQVKCLSLNLL |
| 368 | 1718 | A | 3163 | 2 | 2350 | EFKSGGCGAGLVAAGAVLVLYPASRAGERT |
| | | | | | | RVPGSPAPSSLPLHSPGACGTEVDMDPQRSPL |
| | | | | | | LEVKGNIELKRPLIKALPSQLPLSGSRLKRRPDQ |
| | | | | | | MEDGLEPEKKRTRGLGATTKITTSHPRVPSLT |
| | | | | | | TVPQTQGQTTAQKVSKKTGPRCSTAIATGLK |
| | | | | | | NQKPVPAVPVQKSGTSGVPPMAGGKKPSKRP |
| | | | | | | AWDLKGQLCDLNAELKRCRERTQTLDQENQ |
| | | | | | | QLQDQLRDAQQQVKALGTERTTLEGHLAKV |
| | | | | | | QAQAEQGQQELKNLRACVLELEERLSTQEGL |
| | | | | | | VQELQKKQVELQEERRGLMSQLEEKERRLQT |
| | | | | | | SEAALSSSQAEVASLRQETVAQAALLTEREER |
| | | | | | | LHGLEMERRRLHNQLQELKGNIRVFCRVRPV |
| | | | | | | LPGEPTPPPGLLLFPSGPGGPSDPPTRLSLSRSD |
| | | | | | | ERRGTLSGAPAPPTRHDFSFDRVFPPGSGQDE |
| | | | | | | VFEEIAMLVQSALDGYPVCIFAYGQTGSGKTF |
| | | | | | | TMEGGPGGDPQLEGLIPRALRHLFSVAQELSG |
| | | | | | | QGWTYSFVASYVEIYNETVRDLLATGTRKGQ |
| | | | | | | GGECEIRRAGPGSEELTVTNARYVPVSCEKEV |
| | | | | | | DALLHLARQNRAVARTAQNERSSRSHSVFQL |
| | | | | | | QISGEHSSRGLQCGAPLSLVDLAGSERLDPGL |
| | | | | | | ALGPGERERLRETQAINSSLSTLGLVIMALSN |
| | | | | | | KESHVPYRNSKLTYLLQNSLGQSAKMLMFV |
| | | | | | | NISPLEENVSESLNSLRFASKVEPSVLFGTAQS |
| | | | | | | NRKWKTDPDLCVCVCVCVCVCVCVCVCVP |
| | | | | | | MSMYRVRGGRVAGGCFIGWRAPCPRAIK |
| 369 | 1719 | A | 3165 | 365 | 12 | GYTSQGRWIDIERGPLTANTESLHENNFNALP |
| | | | | | | GYIRKIE*I*IYKKN*INFGGVGLLNIVKISILSIK |
| | | | | | | IYRFDAIPVKILTRFFINLDKLILKFVLKTKIAK |
| | | | | | | NRIKTFYIMRRKKLGDSS |
| 370 | 1720 | A | 3170 | 393 | 42 | GASISPSAVIDGVEGLKPMQEQEAQEAGPCLD |
| | | | | | | *HMAPEQWVAP\RLLFRLIFSVLHALIIAAAA |
| | | | | | | QSSAEEDEDPRN*GQSSEDQAPNQNGLIVIVH |
| | | | | | | RVHVPLGAAATVPVHRSHFPR |
| 371 | 1721 | A | 3173 | 770 | 510 | GNGGCGLSQLPPSHLGAFSRGSLLSRG\DPRGP |
| | | | | | | PPHPVIFFVFVVE\QGFTVLARMVSIS*PCDPP |
| | | | | | | ALASQSAGITGVSHLARPQNLYF |
| 372 | 1722 | A | 3180 | 381 | 76 | RVLHHDNVPAHSSPQKREISQEFQLEIRHLP*S |
| | | | | | | PDLAPSGCFLFLNLKNTFK\GTHFSLVDNVKK |
| | | | | | | TVSTWLHISQNAQFYKDRLNGWYHCLQKCL |
| | | | | | | QHY*AYVEK |
| 373 | 1723 | A | 3181 | 410 | 14101 | RREVAGPEGKGLLLASAHTMLTPPLLLLLPLL |
| | | | | | | SALVAAAIDAPKTCSPKQFACRDQITCISKGW |
| | | | | | | RCDGERDCPDGSDEAPEICPQSKAQRCQPNE |
| | | | | | | HNCLGTELCVPMSRLCNGVQDCMDGSDEGP |
| | | | | | | HCRELQGNCSRLGCQHHCVPTLDGPTCYCNS |
| | | | | | | SFQLQADGKTCKDFDECSVYGTCSQLCTNTD |
| | | | | | | GSFICGCVEGYLLQPDNRSCKAKNEPVDRPP |
| | | | | | | VLLIANSQNILATYLSGAQVSTITPTSTRQTTA |
| | | | | | | MDFSYANETVCWVHVGDSAAQTQLKCARM |
| | | | | | | PGLKGFVDEHTINISLSLHHVEQMMDWLTGN |
| | | | | | | FYFVDDIDDRIFVCNRNGDTCVTLLDLELYNP |
| | | | | | | KGIALDPAMGKVFFTDYGQIPKVERCDMDG |
| | | | | | | QNRTKLVDSKWFPHGITLDLVSRLVYWADA |
| | | | | | | YLDYIEVVDYEGKGRQTIIQGILIEHLYGLTVF |
| | | | | | | ENYLYATNSDNANAQQKTSVIRVNRFNSTEY |
| | | | | | | QVVTRVDKGGALHIYHQRRQPRVRSHACEN |
| | | | | | | DQYGKPGQCSDICLLANSHKARTCRCRSGFS |
| | | | | | | LGSDGKSCKPEHELFLVYGKGRPGIIRGMD |
| | | | | | | MGAKVPDEHMIPIENLMNPRALDFHAIETGFI |
| | | | | | | YFADTTSYLIGRQKIDGTERETILKDGIHNVE |
| | | | | | | GVAVDWMGDNLYWTDDGPKKTISVARLEK |
| | | | | | | AAQTRKTLIEGKMTHPRAIVVDPLNGWMYW |
| | | | | | | TDWEEDPKDSRRGRLERAWMDGSHRDIFVT |
| | | | | | | SKTVLWPNGLSLDIPAGRLYWVDAFYDRIETI |
| | | | | | | LLNGTDRKIVYEGPELNHAFGLCHHGNYLFW |
| | | | | | | TEYRSGSVYRLERGVGGAPPTVTLLRSE\RPPI |
| | | | | | | PEIR\MYDAQHQQVGSNKCRVNNAGCSSLCL |
| | | | | | | ATPGSRQCACAEDQVLDADGVTCLANPSYVP |
| | | | | | | PPQCQPGEFACANSRCIQERWKCDGDNDCLD |
| | | | | | | NSDEAPALCHQHTCPSDRFKCENNRCIPNRW |
| | | | | | | LCDGDNDCGNSEDESNATCSARTCPPNQFSC |
| | | | | | | ASGRCIPISWTCDLDDDCGDRSDESASCAYPT |
| | | | | | | CFPLTQFTCNNGRC1NINWRCDNDNDCGDNS |
| | | | | | | DEAGCSHSCSSTQFKCNSGRCIPEHWTCDGD |
| | | | | | | NDCGDYSDETHANCTNQATRPPGGCHTDEF |
| | | | | | | QCRLDGLCIPLRWRCDGDTDCMDSSDEKSCE |
| | | | | | | GVTHVCDPSVKFGCKDSARCISKAWVCDGD |
| | | | | | | NDCEDNSDEENCESLACRPPSHPCANNTSVC |
| | | | | | | LPPDKLCDGNDDCGDGSDEGELCDQCSLNN |
| | | | | | | GGCSHNCSVAPGEGIVCSCPLGMELGPDNHT |
| | | | | | | CQIQSYCAKHLKCSQKCDQNKFSVKCSCYEG |
| | | | | | | WVLEPDGESCRSLDPFKPFITFSNRHEIRRIDLH |
| | | | | | | KGDYSVLVPGLRNTIALDFHLSQSALYWTDV |
| | | | | | | VEDKIYRGKLLDNGALTSFEVVIQYGLATPEG |
| | | | | | | LAVDWIAGNIYWVESNLDQIEVAKLDGTLRT |
| | | | | | | TLLAGDIEHPRAIALDPRDGILFWTDWDASLP |
| | | | | | | RIEAASMSGAGRRTVHRETGSGGWPNGLTV |
| | | | | | | DYLEKRILWIDARSDAIYSARYDQSGHMEVL |
| | | | | | | RGHEFLSHPFAVTLYGGEVYWTDWRTNTLA |
| | | | | | | KANKWTGHNVTVVQRTNTQPFDLQVYHPSR |
| | | | | | | QPMAFNPCEANGGQGPCSHLCLTNYNRTVSC |
| | | | | | | ACPHLMKLHKDNTTCYEFKKFLLYARQMEIR |
| | | | | | | GVDLDAPYYNYIISFTVPDIDNVTVLDYDARE |
| | | | | | | QRVYWSDVRTQAIKRAFINGTGVETVVSADL |
| | | | | | | PNAHGLAVDWVSRNLFWTSYDTNKKQINVA |
| | | | | | | RLDGSFKNAVVQGLEQPHGLVVHPLRGKLY |
| | | | | | | WTDGDNISMANMDGSNRTLLFSGQKGPVGL |
| | | | | | | AIDFPESKLYWISSGNIITINRCNLDGSGLEVID |
| | | | | | | AMRSQLGKATALATMGDKLWWADQVSEKM |
| | | | | | | GTCSKADGSGSVVLRNSTTLVMHMKVYDESI |
| | | | | | | QLDHKGTNFCSVNNGDCSQLCLPTSETTRSC |
| | | | | | | MCTAGYSLRSCIQQACEGVGSFLLYSVHEGIR |
| | | | | | | GIPLDPNDKSDALVPVSGTSLAVGIDFHAEND |
| | | | | | | TTYWVDMGLSTISRAKRDQTWREDVVTNGIG |
| | | | | | | RVEGIAVDWIAGNIYWTDQGFDVIEVARLNG |
| | | | | | | SFRYVVISQGLDKPRAITVHPEKGYLFWTEW |
| | | | | | | GQYPRIERSRLDGTERVVLVNVSISWTPNGISV |
| | | | | | | DYQDGKLYWCDARTDKIERIDLETGENREVV |
| | | | | | | LSSNNMDMFSVSVFEDFIYWSDRTHANGSIK |
| | | | | | | RGSKDNATDSVPLRTGIGVQLKDIKVFNEDR |
| | | | | | | QKGTNVCAVANGGCQQLCLYRGRGQRACA |
| | | | | | | CAHGMLAEDGASCREYAGYLLYSERTILKSI |
| | | | | | | HLSDERNLNAPVQPFEDPEHMKNVIALAFDY |
| | | | | | | RAGTSPGTPNRIFFSDIHFGNIQQLNDDGSRRIT |
| | | | | | | IVENVGSVEGLAYHRGWDTLYWTSYTTSTTT |
| | | | | | | RHTVDQTRPGAFERETVITMSGDDHPRAFVL |
| | | | | | | DECQNLMFWTNWNEQHPSIMRAALSGANVL |
| | | | | | | TLIEKDIRTPNGLAIDHRAEKLYFSDATLDKIE |
| | | | | | | RCEYDGSHRYVILKSEPVHPFGLAVYGEHIF |
| | | | | | | WTDWVRRAVQRANKHVGSNMKLLRVDIPQ |
| | | | | | | QPMGIIAVANDTNSCELSPCRINNGGCQDLCL |
| | | | | | | LTHQGHVNCSCRGGRILQDDLTCRAVNSSCR |
| | | | | | | AQDEFECANGECINFSLTCDGVPHCKDKSDE |
| | | | | | | KPSYCNSRRCKICTPRQCSNGRCVSNMLWCN |
| | | | | | | GADDCGDGSDEIPCNKTACGVGEFRCRDGTC |
| | | | | | | IGNSSRCNQFVDCEDASDEMNCSATDCSSYF |
| | | | | | | RLGVKGVLFQPCERTSLCYAPSWVCDGAND |
| | | | | | | CGDYSDERDCPGVKRPRCPLNYFACPSGRCIP |
| | | | | | | MSWTCDKEDDCEHGEDETHCNKFCSEAQFE |
| | | | | | | CQNHRCISKQWLCDGSDDCGDGSDEAAHCE |
| | | | | | | GKTCGPSSFSCPGTHVCVPERWLCDGDKDCA |
| | | | | | | DGADESLAAGCLYNSTCDDREFMCQNRQCIP |
| | | | | | | KHFVCDHDRDCADGSDESPECEYPTCGPSEF |
| | | | | | | RCANGRCLSSRQWECDGENDCHDQSDEAPK |
| | | | | | | NPHCTSPEHKCNASSQFLCSSGRCVAEALLCN |
| | | | | | | GQDDCGDSSDERGCHINECLSRKLSGCSQDC |
| | | | | | | EDLKIGFKCRCRPGFRLKDDGRTCADVDECS |
| | | | | | | TTFPCSQRCINTHGSYKCLCVEGYAPRGGDP |
| | | | | | | HSCKAVTDEEPPLIFANRYYLRKLNLDGSNY |
| | | | | | | TLLKQGLNNAVALDFDYREQMIYWTDVITQ |
| | | | | | | GSMIRRMHLNGSNVQVLHRTGLSNPDGLAV |
| | | | | | | DWVGGNLYWCDKGRDTIEVSKLNGAYRTVL |
| | | | | | | VSSGLREPRALVVDVQNGYLYWTDWGDHSL |
| | | | | | | IGRIGMDGSSRSVIVDTKITWPNGLTLDYVTE |
| | | | | | | RIYWADAREDYIEPASLDGSNRHVVLSQDIPH |
| | | | | | | IFALTLFEDYVYWTDWETKSINRAHKTTGTN |
| | | | | | | KTLLISTLHRPMDLHVFHALRQPDVPNHPCK |
| | | | | | | VNNGGCSNLCLLSPGGGHKCACPTNFYLGSD |
| | | | | | | GRTCVSNCTASQFVCKNDKCIPFWWKCDTE |
| | | | | | | DDCGDHSDEPPDCPEFKCRPGQFQCSTGICTN |
| | | | | | | PAFICDGDNDCQDNSDEANCDLHVCLPSQFK |
| | | | | | | CTNTNRCIPGIFRCNGQDNCGDGEDERDCPE |
| | | | | | | VTCAPNQFQCSITKRCIPRVWVCDRDNDCVD |
| | | | | | | GSDEPANCTQMTCGVDEFRCKDSGRCTPARW |
| | | | | | | KCDGEDDCGDGSDEPKEECDERTCEPYQFRC |
| | | | | | | KNNRCVPGRWQCDYDNDCGDNSDEESCTPR |
| | | | | | | PCSESEFSCANGRCIAGRWKCDGDHDCADGS |
| | | | | | | DEKDCTPRCDMDQFQCKSGHCIPLRWRGDA |
| | | | | | | DADCMDGSDEEACGTGVRTCPLDEFQCNNT |
| | | | | | | LCKPLAWKCDGEDDCGDNSDENPEECARFV |
| | | | | | | CPPNRPFRCKNDRVCLWIGRQCDGTDNCGD |
| | | | | | | GTDEEDCEPPTAHTTHCKDKKEFLCRNQRCL |
| | | | | | | SSSLRCNMFDDCGDGSDEEDCSIDPKLTSCAT |
| | | | | | | NASICGDEARCVRTEKAAYCACRSGFHTVPG |
| | | | | | | QPGCQDINECLRFGTCSQLCNNTKGGHLCSC |
| | | | | | | ARNFMKTHNTCKAEGSEYQVLYLADDNEIRS |
| | | | | | | LFPGHPHSAYEQAFQGDESVRIDAMDVHVKA |
| | | | | | | GRVYWTNWHTGTISYRSLPPAAPPITSNRHR |
| | | | | | | RQIDRGVTHLNISGLKMPRGIADWVAGNYY |
| | | | | | | WTDSGRDVIEVAQMKGENRKTLISGMIDEPH |
| | | | | | | AIVVDPLRGTMYWSDWGNIIPKIETAAMDGT |
| | | | | | | LRETLVQDNIQWPTGLAVDYHNERLYWADA |
| | | | | | | KLSVIGSIRLNGTDPIVAADSKRGLSHPFSIDV |
| | | | | | | FEDYIYGVTYINNRVFKIHKFGHSPLVNLTGG |
| | | | | | | LSHASDVVLYHQHKQPEVTNPCDRKKCEWL |
| | | | | | | CLLSPSGPVCTCPNGKRLDNGTCVPVPSPTPP |
| | | | | | | PDAPRPGTCNLQCFNGGSCFLNARRQPKCRC |
| | | | | | | QPRYTGDKCELDQCWEHCRNGGTCAASPSG |
| | | | | | | MPTCRCPTGFTGPKCTQQVCAGYCANNSTCT |
| | | | | | | VNQGNQPQCRCLPGFLGDRCQYRQCSGYCE |
| | | | | | | NFGTCQMAADGSRQCRCTAYFEGSRCEVNK |
| | | | | | | CSRCLEGACVVNKQSGDVTCNCTDGRVAPS |
| | | | | | | CLTCVGHCSNGGSCTMNSKMMPECQCPPHM |
| | | | | | | TGPRCEEHVFSQQQPGHIASILIPLLLLLLLVL |
| | | | | | | VAGVVFWYKRRVQGAKGFQHQRMTNGAM |
| | | | | | | NVEIGNPTYKMYEGGEPDDVGGLLDADFAL |
| | | | | | | DPDKPTNFTNPVYATLYMGGHGSRHSLASTD |
| | | | | | | EKRELLGRGPEDEIGDPLA |
| 374 | 1724 | A | 3187 | 191 | 1815 | CLELASAGKIPEESKALSLLAPAPTMTSLMPG |
| | | | | | | AGLLPIPTPNPLTTLGVSLSSLGAIPAAALDPNI |
| | | | | | | ATLGEIPQPPLMGNVDPSKIDEIRRTVYVGNL |
| | | | | | | NSQTTTADQLLEFFKQVGEVKFVRMAGDET |
| | | | | | | QPTRFAFVEFADQNSVPRALAFNGVMFGDRP |
| | | | | | | LKINHSNNAIVKPPEMTPQAAAKELEEVMKR |
| | | | | | | VREAQSFISAAIEPGWLHSTSLCNDFLGCF*RR |
| | | | | | | RMYRE*APCTICGTFHLCIINWDL*LF*AYTA |
| | | | | | | K*FFPPRVWKEQ*KKRR\RSRSHTRSKSRSSSK |
| | | | | | | SHSRRKRSQSKHRSRSHNRSRSRQKDRRRSK |
| | | | | | | SPHKKRSKSRERRKSRSRSHSRDKRKDTREKI |
| | | | | | | KEKERVKEKDREKEREREKEREKEKERGKN |
| | | | | | | KDRDKEREKDREKDKEKDREREREKEGEKD |
| | | | | | | RDKEKEKEQDKEKEREKDRSKEIDEKRKKDK |
| | | | | | | KSRTPPRSYNASRRSRSSSRERRRRRSRSSSRS |
| | | | | | | PRTSKTIKRKSSRSPSPRSRNKKDKKREKERD |
| | | | | | | HISERRERERSTSMRKSSNDRDGKEKLEKNST |
| 375 | 1725 | A | 3192 | 415 | 101 | AHSSHQTRAILQEFQWDIIRHPPL\SPNLALSG |
| | | | | | | FWPNLKKSLRGTHFSSVKK\TTLTWLNSQDP |
| | | | | | | WFIFFYP*SPDLQIPSSFRNGLNDWYHHSQKC |
| | | | | | | PDLDGAYVKK |
| 376 | 1726 | A | 3199 | 931 | 418 | GV*WCDLGSPQPPPPGFKQFCLGRSSSWDYR |
| | | | | | | HVPPHPANFVFLLETGFLHAGQAGL\GDPPAS |
| | | | | | | ASQSAQITGVSHTWPKNHLIFYACLVIRSKRI |
| | | | | | | K |
| 377 | 1727 | A | 3201 | 274 | 1285 | KTCIYTSRGSPLSPQSSIDSELSTSELEDDSISM |
| | | | | | | GYKLQDLTDVQIMARLQEESLRQDYASTSAS |
| | | | | | | VSRHSSSVSLSSGKKGTCSDQEYDQYSLEDEE |
| | | | | | | EFDHLPPPQPRLPRCSPFQRGIPHSQTFSSIREC |
| | | | | | | RRSPSSQYFPSNNYQQQQYYSPQAQTPDQQP |
| | | | | | | NRTNGDKIPPKKYA*PSPDAKYNCH**QH\SSP |
| | | | | | | VTVRNSQSFDSSLHGAGNGISRIQSCIPSPGQL |
| | | | | | | QHRVHSVGIIFPVSIRQPLKATAYVSPTVQGSS |
| | | | | | | NMPLSNGLQLYSNTGIPTPNKAAASGIMGRS |
| | | | | | | ALPRPSLAINGSNLPRSKIAQPVRSFLQPPKPL |
| | | | | | | SSLSTLRDGNWRDGCY |
| 378 | 1728 | A | 3202 | 112 | 1789 | VPGVTESEPSVLRGDHLFALLSSETHQEDPIT |
| | | | | | | YKGFVHKV\ELDRVKLSFSMSLLSRFVGWG* |
| | | | | | | PFKVNFY/TFNRQPLRV\QHRALELTGRWLLW |
| | | | | | | PMLFP\VAPRDVPLLPSDVKLKLYDRSLESNF |
| | | | | | | EQLQAMRHIVTGTTRPAPYIIFGPPGTGKTVT |
| | | | | | | LVEAIKQVVKHLPKAHILACAPSNSGADLLC |
| | | | | | | QRLRVHLPSSIYRLLAPSRDIRMVPEDIKPCCN |
| | | | | | | WDAKKGEYVFPAKKKLQEYRVLITTLITAGR |
| | | | | | | LVSAQFPIDIIFTHIPIDEAGHCMEPESLVAIAG |
| | | | | | | LMEVKETGDPGGQLVLAGDPRQLGPVLRSPL |
| | | | | | | TQKHGLGYSLLERLLTYNSLYKKGPDGYDPQ |
| | | | | | | FITKLLRNYRSHPTILDIPNQLYYEGELQACA |
| | | | | | | DVVDRERFCRWAG\LPRQGFPIIFHGVMGKD |
| | | | | | | EREGNSPSFFNPEEAATVTSYLKLLLAPSSKK |
| | | | | | | GKAELSPRSVGVISPYRKQVEKIRYCITKLDR |
| | | | | | | ELRGLDDIKDLKVTCCSTVTPCLPCAPTCPLP |
| | | | | | | ETSSSFHSSPRPRPTPAALNRARALPEPLTPGD |
| | | | | | | SNLRVWDGIRKPAGLTNTSCHS |
| 379 | 1729 | A | 3206 | 432 | 130 | PKAAPSVXLWFPPFL*GSFKPTKGHTXCVXIK |
| | | | | | | *LSTREAXDSXPGRQIAXXRQGGKVETTTAL |
| | | | | | | XKQSNNKGTRASSYXEPDAXEQWKFPHKKL |
| | | | | | | QLPGXTHE |
| 380 | 1730 | A | 3207 | 187 | 507 | GGTGHPHPARPPLSGVGGCQCSHSKPWTAGS |
| | | | | | | PEQRDHPAPHKQIEAGQGLPGPQAWGG*KGP |
| | | | | | | AXLLPGPGGGPGPVASLEARAQASSGVTPNG |
| | | | | | | GGRTYPYPTFSSGE |
| 381 | 1731 | A | 3225 | 1 | 840 | GTRPGHLPAPSDGFCV/HL*SIPSWGSF*GESL/ |
| | | | | | | EMQLITSLGLQEFDIARNVLELIYAQTLVWIGI |
| | | | | | | FFCPLLPFIQMIMLFIMFYSKNISLMMNFQPPS |
| | | | | | | KAWRASQMMTFFIFLLFFPSFTGVLCTLAITI |
| | | | | | | WRLKPSADCGPFRGLPLFIHSIYSWIDTLSTRP |
| | | | | | | GYLWVVWIYRNLIGSVHFFFILTLIVLIITYLY |
| | | | | | | WQITEGRKIMIRLLHEQIINEGKDKMFLIEKLI |
| | | | | | | KLQDMEKKANPSSLVLERREVEQQGFLHLGE |
| | | | | | | HDGSLDLRSRRSVQEGNPRA |
| 382 | 1732 | A | 3238 | 256 | 38 | LLMIKVSSTCFSCHLHHHHHHIHHRHHQGHNS |
| | | | | | | LFFSLKSSSNSSTLPVYLSYNTILVFSKCLVFDF |
| | | | | | | LFSNACL |
| 383 | 1733 | A | 3241 | 1542 | 343 | KGAPSFVRLYQYPNFAGPHAALANKSFFKAD |
| | | | | | | KVTMLWNKKATAVLVIASTDVDKTGASYYG |
| | | | | | | EQTLHYIATNGESAVVQLPKNGPIYDVVWNS |
| | | | | | | SSTPCAVYGPMPAKATIIFNLKCDPVFDPGTG |
| | | | | | | PRNAAYYSPHGHILVLAGFGNLILQI*AD/IMK |
| | | | | | | VWNVKNYKLISKPVASDSTYFAWCPDGEHIL |
| | | | | | | TATCAPRLRVNNGYKIWHYTGSTLHKYDVPS |
| | | | | | | NAELWQVSWQPFLDGIFPAKTITYQAVPSEVP |
| | | | | | | NEEPKVATAYRPPALRI\IKFITNSKLHEEEPPQ |
| | | | | | | NMKPQSGNDKPLSKTALKNQRKHEAKKAAK |
| | | | | | | QEARSDKSPDLAPTPAPQSTPRNTVSQSISGDP |
| | | | | | | EIDKKIKNLKKKLKALEQLKEQAATGKQLEK |
| | | | | | | NQLEKIQKETALLQELEDLELGI |
| 384 | 1734 | A | 3242 | 3 | 678 | IRSPAARSPGLETPTCLLFVIAAIAAVFVDSAIP |
| | | | | | | RLTQHRPQDGSFPYTILDPPLYLPGQCAPPQP |
| | | | | | | LSQCARRVHGEKLRRPTFGPRHRGAGTAKMS |
| | | | | | | ASLVRATVRAVSKRKLQPTRAALTLTPSAVN |
| | | | | | | KIKQLLKDKPEHVGVKVGVRTRGCNGLSYTL |
| | | | | | | EYTKTKGDSDEEVIQDGVRVFIEKKAQLTLL |
| | | | | | | GTEMDYVEDKLSSEFVFNNPNIKGTCGCGES |
| | | | | | | FNI |
| 385 | 1735 | A | 3243 | 3190 | 664 | VAMGTPRAQIIPPPPQLLFLILLSCPWIQGLPL |
| | | | | | | KEEEILPEPGSETPTVASEALAELLHGALLRR |
| | | | | | | GPEMGYLPGPPLGPEGGEEETTTTIITTTTVTT |
| | | | | | | TVTSPVLCNNNISEGEGYVESPDLGSPVSRTL |
| | | | | | | GLLDCTYSIHVYPGYGIEIQVQTLNLSQEEELL |
| | | | | | | VLAGGGSPGLAPRLLANSSMLGEGQVLRSPT |
| | | | | | | NRLLLHFQSPRVPRGGGFRIHYQAYLLSCGFP |
| | | | | | | PRPAHGDVSVTDLHPGGTATFHCDSGYQLQG |
| | | | | | | EETLICLNGTRPSWNGETPSCMASCGGTIHNA |
| | | | | | | TLGRIVSPEPGGAVGPNLTCRWVIEAAEGRRL |
| | | | | | | HLHFERVSLDEDNDRLMVRSGGSPLSPVWDS |
| | | | | | | DMDDVPERGLISDAQSLYVELLSETPANPLLL |
| | | | | | | SLRFEAFEEDRCFAPFLAHGNVTTTDPEYRPG |
| | | | | | | ALATFSCLPGYALEPPGPPNAIECVDPTEPHW |
| | | | | | | NDTEPACKAMCGGELSEPAGVVLSPDWPQS |
| | | | | | | YSPGQDCVWGVHVQEEKRILLQVEILNVREG |
| | | | | | | DMLTLFDGDGPSARVLAQLRGPQPRRRLLSS |
| | | | | | | GPDLTLQFQAPPGPPNPGLGQGFVLHFKEVPR |
| | | | | | | NDTCPELPPPEWGWRTASHGDLIRGTVLTYQ |
| | | | | | | CEPGYELLGSDILTCQWDLSWSAAFPACQKI |
| | | | | | | MTCADPGEIANGHRTASDAGFPVGSHVQYRC |
| | | | | | | LPGYSLEGAAMLTCYSRDTGTPKWSDRVPKC |
| | | | | | | ALKYEPCLNPGVPENGYQTLYKHHYQAQESL |
| | | | | | | RFFCYEGFELIGEVTITCVPGHPSQWTSQPPLC |
| | | | | | | KVTQTTDPSRQLEGGNLALAILLPLGLVIVLG |
| | | | | | | SGVYIYYTKLQGKSLFGFSGSHSYSPITVESDF |
| | | | | | | SNPLYEAGDTREYEVSI |
| 386 | 1736 | A | 3250 | 5725 | 3984 | GTSTVTMATKKHFSIILNLLGMLLKKDNQDT |
| | | | | | | RKLLMTWALEVAVVMKKSETYAPLFCLPSF |
| | | | | | | HKFCKGLLADTLVEDVNICLQACSSLHALSSS |
| | | | | | | LPDDLLQRCVDVCRVQLVHRGTCIRQAFGKL |
| | | | | | | LKSIPLGVFLSNNNHTEIQEISLALRSHMSKAP |
| | | | | | | SNTFHPQDFSD/VISFILYGNSHRTGKDNWLE |
| | | | | | | RLFYSCQRLDKRDQSTIPRNLLKTDAVLWQW |
| | | | | | | AIWEAAQFTVLSKLRTPLGRAQDTFQTIEGIIR |
| | | | | | | SLAGHTLNPDQDVSQWTITADNDEGHGNNQL |
| | | | | | | RLVLLLQYLENLEKLMYNAYEGCANALTSPP |
| | | | | | | KVIRTFLYTNRQTCQDWLTRIRLSIMRVGLLA |
| | | | | | | GQPAVTVRHGFDLLTEMKTTSLSQGNELEVSI |
| | | | | | | MMVVEALCELHCPEAIQGIAVWSSSIVGKHL |
| | | | | | | LWINSVAQQAEGRFEKASVEYQEHLCAMTG |
| | | | | | | VDCCISSFDKSVLTLASAGCKSASLKHCLNGE |
| | | | | | | SRKSVLSKPTDSSPEVENYLGNKACECYISTA |
| | | | | | | DWAAVQEWQNAIHDLKKSTSSTSLNLKADF |
| | | | | | | NYIKSLSSFESGKFVECTEQLELLPGENTNLLA |
| | | | | | | GGSKEKIDMKKLLRNM |
| 387 | 1737 | A | 3255 | 380 | 76 | MD1FLYNCKYQVQTE1*NSIQHIMA\SKKLSRF |
| | | | | | | LKYVHNL*AENYKTLMK*INEDLNKQRDVPY |
| | | | | | | S*TARLNKMSIPTKTIFRFKAIYIKIPATYFIET |
| | | | | | | NMQ |
| 388 | 1738 | A | 3260 | 685 | 428 | PQWLGLQVYALPPANFVFFVEMRSTILAQTG |
| | | | | | | FELLDSSDLPASASKSAGITCMSHHARTLSLK |
| | | | | | | *WPFCLSATQEKFC*PASEGVAW |
| 389 | 1739 | A | 3269 | 1 | 332 | LDGYHTPIYMLNRIIRLPAAL*IISDQTGHALTI |
| | | | | | | LTRLETQMINADYQNKLTLDYLLTTDREVYE |
| | | | | | | PFNLTNYCLHIHNQRLGAYDLG*V*Q/KLAHV |
| | | | | | | PVQV*HGFDPEAIVIFR |
| 390 | 1740 | A | 3270 | 2 | 372 | GRCHDQNKGKS\DGPDAQAEACGGESTYQEL |
| | | | | | | LVNQNPIGQPLACRRLTRKIYEGIKKAVKPNII |
| | | | | | | SPRGVKKVHKFVNKGEKGIMVLAGDTLGIGV |
| | | | | | | YCLLPCMC*DPKLTYAHIPSTTDLGAGAGY |
| 391 | 1741 | A | 3273 | 1 | 187 | FFQEMLDIMKAISDMMGKCTYPVLKEDAPRQ |
| | | | | | | HVETFFQ\EELTRSQEGMKLGENFLMFAMPP |
| | | | | | | DDSKESKGK*FFQEMLDIMKAISDMMGKCTY |
| | | | | | | PVLKEDAPRQHVETFPQVGTNQKSRGHEVRR |
| | | | | | | KFPDVCHAPR |
| 392 | 1742 | A | 3281 | 901 | 521 | FFFGDGVSPCRQAGV*WHDLDSLQNLPPGFK |
| | | | | | | RFSYLSLPSSW\DYRHVLPRQANFGIF/M*RRG |
| | | | | | | FTMLARMVSIS*PRDLPALASQSAGITGVSHH |
| | | | | | | APPQMDFTFALLCFALKGCLPRQKEGGTLNLI |
| 393 | 1743 | A | 3283 | 385 | 3 | RNRSVVPEFVLLGLSAGPQTQTLLFVLFVVIC |
| | | | | | | LLTVMGNLLLLVVINADSCLHTPMYFFLGQL |
| | | | | | | SFLDLCHSSVTAPKLLENLLSEKKTISVEGCM |
| | | | | | | A*VFFVFATGGTESSLLAVMAYDRYVAIRTR |
| | | | | | | G |
| 394 | 1744 | A | 3284 | 575 | 1054 | CTKCKADCDTCFNKNFCTKCKSGFYLHLGKC |
| | | | | | | LDNCPEQLEANNHTMECVSIVHCEVSEWNP |
| | | | | | | WSPCTKKGKTCGFKRGTETRVREIIQHPSAKG |
| | | | | | | NLCPPTNETRKCTVQRKKCQKGERGKKGRE |
| | | | | | | RKRKKPNKGESKEAIPDSKSLESSKEIPEQREN |
| | | | | | | KQQQ |
| 395 | 1745 | A | 3286 | 1 | 340 | RVLYVPSMGPCILVAHGWQKISTKSVFKKLS |
| | | | | | | WICLSMVTILTHSLKTFHRNWDWESEYTLFMS |
| | | | | | | ALKVNKNNAKLWNNVGHALENEKNFERAL |
| | | | | | | KYFLQATHVQPDDIGAHMNVGR |
| 396 | 1746 | A | 3293 | 1 | 172 | GFRAVVMTVKTEAAKGTLTYSRMRGMVAIL |
| | | | | | | IAFMKQRRMGLNDFIQKIANNSYACKQ |
| 397 | 1747 | A | 3295 | 12 | 401 | AEPACGASSCTPPSLRSSSSQSVGPLRPGRPL |
| | | | | | | WSEACAFL*AAAPQGPASPCCGLPSGFPRVW |
| | | | | | | AQCCPPGGALRFPEGLGSVLSPRRCPQVSRGS |
| | | | | | | GLSAVPQEVPSGFLGPGLRACPQEAPSRFLRA |
| | | | | | | GLT |
| 398 | 1748 | A | 3300 | 1912 | 2768 | KQRRWQNIQRKGPKRYIVIAGNSQSHQPMIFS |
| | | | | | | MLRKLPKVTCRDVLPEIRAICIEEIGCWMQSY |
| | | | | | | STSFLTDSYLKYIGWTLLIDKHREVRVKCVKA |
| | | | | | | LKGLYGNRDLTARLELFTGRFKDWMVSMIV |
| | | | | | | DREYSVAVEAVRLLILILKNMEGVLMDVDCE |
| | | | | | | SVYPIV*ASN*GLASAVGEFLYWKLFYPECEI |
| | | | | | | RTMGGREQRQSPGAQRTFFQLLLSFFVESKSH |
| | | | | | | SVTQAGVQWQFSAHRDLCLPGSSNSHVSASR |
| | | | | | VSNS | |
| 399 | 1749 | A | 3301 | 536 | 2391 | LRSYGCKAPSRISHLHK\FLFLLLPSLLMGYSE |
| | | | | | | SPPPITDSWAPFISLTHHVLSQSQSPLSSNCWI |
| | | | | | | CLSTHTQ*FTALPADLLTWTQSNVSLHISYLAI |
| | | | | | | PFLADSFLKPVIL*PGNSAKHLSFKLSSLSMVS |
| | | | | | | GRAVALLHLIASGLTSIQTNTASSKPPIWGY\L |
| | | | | | | STQTSFISPPPLCLSRTYPNPAHATMVGQVPQ |
| | | | | | | SLCGLIFLIRTPCRPSILHPNYKIISTSAWQKV |
| | | | | | | LCFSGSPTIHTSLHTTGSSFLSFHPLPGFPAAN |
| | | | | | | SALYVSSLKGPPGKNVTIPSPVTGT*QPPHRGS |
| | | | | | | NIRLTVDKDNFFLSPKPNSLHQLPSQ\TPYQAL |
| | | | | | | TGAALAGSYPIWENENTLSWLPTFYNFCLST |
| | | | | | | PSLFFLCDTN*YLCLPANWSGTCTLVFQAFTI |
| | | | | | | NLLPPNQTILISVEASISSSPIRNKWALHLITLLT |
| | | | | | | GLGITAALGTGIAGITTSITSYQTLFTTLSNTVE |
| | | | | | | DMHTSITSLQRQLDFLVGVILQNWRVLDLLT |
| | | | | | | TEKGGTCIYLQEECCFCVNESGIVHIAVRRLH |
| | | | | | | DRAAEL*HQVADSWWQGSSLLRWIPWVAPF |
| | | | | | | LGPLIFLPLLLMTGPCIFNLVSRFISQRLNCFIQ |
| | | | | | | ASMQKHIDNIFHLCHV*YQSLRGNHSEAPEPR |
| | | | | | | P |
| 400 | 1750 | A | 3303 | 2 | 453 | THWRHSSGVPGSTTARRRRRELEIATSDNQE |
| | | | | | | YYNRLCQEVTNRERNDQKMLADLDDLNRTK |
| | | | | | | KYLEERLIELLRDKDALWQKSDALEFQQKLS |
| | | | | | | AEERWLGDTEANHCLDCKREFSWMVRRHHC |
| | | | | | | RICGRIFCYYCCNNYVLSKHGGKKERCC |
| 401 | 1751 | A | 3304 | 1 | 626 | MAPQHSSLDDKVPQQASTVCFEFQDILQHSQ |
| | | | | | | CTEHKDSLWGPGARSQPFGAHNTRLSPDSCP |
| | | | | | | EKIVLRALKDSRAGMPEQDKDPGVQENPDD |
| | | | | | | QRRVPQGTGDAPSAFRPLWDNGGLSFFVSRF |
| | | | | | | GPLERDLHAQRSEVTYNQRSQSSWMSSFPKR |
| | | | | | | NAFVSPYSSMGQAQP/GLPKTNPIGESCCWEG |
| | | | | | | LSLSTQILG*QKPSKYIPSLCKR |
| 402 | 1752 | A | 3305 | 1678 | 172 | MELPSGPGPERLFDSHIRLPGDCPLLLVLLLYA |
| | | | | | | PVGFCLLVLRLFLGIHYFLVSCALPDSVLRRF |
| | | | | | | VVRTMCAVLGLVARQEDSGLRDHSVRVLISN |
| | | | | | | HVTPFDHNIVNLLTTCSTVSESEAESATGRFP |
| | | | | | | GAQLKAPLSPLAFRMEDTEALPLTPILYPTCQ |
| | | | | | | FFFF\IFLNIFLLAFSSPGSQPLLNSPPSFVCWSR |
| | | | | | | GFMEMNGRGELVESLKRFCASTRLPPTPLLLF |
| | | | | | | PEEEATNGREGLLRFSSWPFSIQDVVQPLTLQ |
| | | | | | | VQRTLVSVTVSDASWVSELL\WSLFVPFTVY |
| | | | | | | QVRWLRPVHRQLGEANEEFALRVQQ\LVAKE |
| | | | | | | LG\QTGTRLTPA\DKAEHMKRQRHPR\LRPQS |
| | | | | | | AQSSFPPSPWVLSS/SDVQTGQTLGFREFKESF |
| | | | | | | CPHVAIGVFIPERPWPKTGCCKTLTIHLILL*G |
| | | | | | | GPVSFSCPE\DIHPRGT*VPTQQASGLPSFPSYG |
| | | | | | | PARGGVL*HPSAQQPLTFA\KSS\WARAGRAL |
| | | | | | | QERKQ\ALYEYAEREFTERRAPGGLD |
| 403 | 1753 | A | 3307 | 44 | 447 | DPSPSLLAVALGLRAGERTRSGPGSSSPSGGIS |
| | | | | | | GGASAGLASSPECACGRSHFTCAVSAIGECT |
| | | | | | | CIPAQWQCDGDNDCGDHSDEDGCILPTCSPL |
| | | | | | | DFHCDNGKCIRRSWVCDSDNDCEDDSDEQD |
| | | | | | | CPPRECEED |
| 1404 | 1754 | A | 3311 | 409 | 1 | PRHGWGRRVLGRDRPRLQKVKKSVKAIYIPG |
| | | | | | | QDHVQNEEIYARVLDKFGSNFLSRDNAIDLGT |
| | | | | | | STLTK*LSALLKNLLQGLSRNVIFTLDS |
| | | | | | | IEKEKREREWR |
| 405 | 1755 | A | 3322 | 12 | 458 | AAVPVENPWDDPRVRPRVRIFTWEDCIAGQA |
| | | | | | | KVLCNDSYGVTIIDWSPKGAFIRLTSQSVGNG |
| | | | | | | HPASKENDQMVDTIKNTTKVPIIWTYGDMVE |
| | | | | | | PRPQMIRPAVGAKHKELWKILMALKKIK\IWE |
| | | | | | | GKYTKPSQYNPNYMLELAHNDSVW |
| 406 | 1756 | A | 3324 | 1 | 426 | LSMLSTISTEHRLSVLWPLWYCCHCPTIILSAV |
| | | | | | | MCVLLWALSLLQSILEWMFCSFLFSDVDSDN |
| | | | | | | WCQILDFLTAVWLIFLI\LVLCGFTLVLLVRIIC |
| | | | | | | GSQKMPLTRLYVTILLTGLVFLFCSLPLSIQ*F |
| | | | | | | LLYWIEKDLDDL |
| 407 | 1757 | A | 3328 | 213 | 1841 | SGDLSPAELMMLTIGDVIKQLIEAHEQGKDID |
| | | | | | | LNKVKTKTAAKYGLSAQPRLVDHAAVPPQY |
| | | | | | | RKVLMPKLKAKPIRTASGIAVVAVMCKPHRC |
| | | | | | | PHISFTGNICVYCPGGPDSDFEYSTQSYTGYEP |
| | | | | | | TSMRAIRARYDPFLQTRHRIEQLKQLGHSVD |
| | | | | | | KVEFIVMGGTFMALPEEYRDYFIRNLHDALS |
| | | | | | | GHTSNNIYEAVKYSERSLTKCIGITLETRPDYC |
| | | | | | | MKRHLSDMLTYGCTRLEIGVQSVYEDVARD |
| | | | | | | TNRGHTVKAVCESFIILAKDSGFKVVAHMMP |
| | | | | | | DLPNVGLERDIEQFTEFFENFAFRPDGLKLYP |
| | | | | | | TLVIRGTGLYELWKSGRYKSYSPSDLVELVA |
| | | | | | | RLVPPWTRVYRVQRDIPMPLVSSGVEHG |
| | | | | | | NLRELALARMKDLGIQCRDVRTREVGIQEIH |
| | | | | | | HKVRPYQVELVRRDYVANGGWETFLSYEDP |
| | | | | | | DQDILIGLLRLRKCSEETFRFELGGGVSIVREL |
| | | | | | | HVYGSVVPVSSRDPTKFQHQGFGMLLMEEA |
| | | | | | | ERIAREEHGSGKIAVISGVGTRNYYRKIGYRL |
| | | | | | | QGPYMVKMLK |
| 408 | 1758 | A | 3335 | 3 | 467 | AIASPRAAGIRHELTSTMAAGKNKRLTKGGK |
| | | | | | | KGAKKKAV/DNIINIGKTLVTRTQRTKIASDG |
| | | | | | | LKGRVFEESLADLQND\TDGYLLRVI*VAFTT |
| | | | | | | ERTNQI/REVFNKLIPDSIGKDIEKACQSIYPLH |
| | | | | | | DDFARKVKMLKKPKFELRKLMELHGEGSS |
| 409 | 1759 | A | 3338 | 7 | 1252 | PRWRNSARDEILLSFPQNYYIQWLNGSLIHGL |
| | | | | | | WNLASLFSNLCLFVLMPFAFFFLESEGFAGLK |
| | | | | | | KGIRARILETLGMLLLLALLILGIVWVASALID |
| | | | | | | NDAASMESLYDLWEFYLPYLYSCISLMGCLL |
| | | | | | | LLLCTPVGL\SRMFTVMGQLLVKPTILEDLDE |
| | | | | | | QIYIITLEEEALQRPTKWAVFIRW/KYNIMELE |
| | | | | | | QELENVKTLKTKLERRKKASAWERNLVYPA |
| | | | | | | VMVLLLIETSTSVLLVACNILCLLVDETAMPK |
| | | | | | | GTRGPGIGNASLSTFGFVGAALEIILIFYLMVS |
| | | | | | | SVVGFYSLRFFGNFTPKKDDTTMTKIIGNCVS |
| | | | | | | ILVLSSALPVMSRTLGITRFDLLGDFGRFNWL |
| | | | | | | GNFYIVLSYNLLFAIVTTLCLVRKFTSAVREE |
| | | | | | | AL |
| 410 | 1760 | A | 3339 | 127 | 1433 | GSHRFSLASPLDPEVGPYCDTPTMRTLFNLL |
| | | | | | | WLALACSPVH1TLSKSDAKKAASKTLLEKSQ |
| | | | | | | FSDKPVQDRGLVVTDLKAESVVLEHRSYCSA |
| | | | | | | KARDRHFAGDVLGYVTPWNSHGYDVTKVFG |
| | | | | | | SKFTQISPVLQLKRRGREMFEVTGLHDVDQ |
| | | | | | | GWMRAVRKHAKGL\P*CLGSCLRTGLTMISG/ |
| | | | | | | YVLDSEDEIEELSKTVVQVAKNQHFDGFVVE |
| | | | | | | VWNQLLSQKRVGLIHMLTHLAEALHQAELL |
| | | | | | | ALLVIPPAITPGTDQLGMFTHKEFEQLAPVLD |
| | | | | | | GFSLMTYDYSTAIIQPGPNAPLSWVRACVQV |
| | | | | | | LDPKSKWRSKILLGLNFYGMDYATSKDAREP |
| | | | | | | VVGARYIQTLKDHRPRMVWDSQVSEHFFEY |
| | | | | | | KKSRSGRHVVFYPTLKSLQVRLELARELGVG |
| | | | | | | PWSE |
| 411 | 1761 | A | 3342 | 74 | 2701 | VATRKLAKGFTQFAKMTEGTKKTSKKFKFFK |
| | | | | | | FKGFGSFSNLPRSETLRRSSASISRQSHLEPDTP |
| | | | | | | EATQDDMVTVPKSPPAYARSSDMYSHMGTM |
| | | | | | | PRPSLKKAQNSQAARQAQEAGPKFNLVPGGV |
| | | | | | | PDPPGLEAAKEVMVKATGPLEDTPAMEPNPS |
| | | | | | | AVEVDPIRKPEVPTGDVEEERLPPRDVHSERAA |
| | | | | | | GEPEAGSDYVKFSKEKYILDSSPEKLHKELEE |
| | | | | | | ELKLSSTDLRSHAWYHGRIPREVSETLVQRN |
| | | | | | | GDFLIRDSLTSLGDYVLTCRWRNQALHFKIN |
| | | | | | | KVVVKAGESYTHIQYLFEQESFDHVPALVRY |
| | | | | | | HVGSRKAVSEQSGAIIYCFVNRTFPLRYLEAS |
| | | | | | | YGLGQGSSKPASPVSPSGPKGSHMKRRSVTM |
| | | | | | | TDGLTADKVTRSDGCPTSTSLPRPRDSTRSCA |
| | | | | | | LSMDQIPDLHSPMSPISESPSSPAYSTVTRVHA |
| | | | | | | APAAPSATALPASPVARRSSEPQLCPGSAPKT |
| | | | | | | HGESDKGPHTSPSHTLGKASPSPSLSSYSDPDS |
| | | | | | | GHYCQLQPPVRGSREWAATETSSQQARSYGE |
| | | | | | | RLKELSENGAFEGDWGKTFTVPIVEVTSSFNP |
| | | | | | | ATPQSLLIPRDNRPLEVGLLRKVKELLAEVDA |
| | | | | | | RTLARHVTKVDCLVARILGVTKEMQTLMGV |
| | | | | | | RWGMELLTLPHG\RKLRLDLLERFHTMSIML |
| | | | | | | AVDILGCTGSAEERAALLHKTIQLAAELRGT |
| | | | | | | MGNMPSFAAVMGALDMAQISRLEQTWVTLR |
| | | | | | | QRHTEGAILYEKKLKPFLKSLNEGKEGPPLSN |
| | | | | | | TTFPIIVLPLITLLECDSAPPEGPEPWGSTEHGV |
| | | | | | | EVVLAHLEAARTVAHHGGLYHTNAEVKLQG |
| | | | | | | FQARPELLEVFSTEEQMRLLWGSQGASSSQA |
| | | | | | | RRYEKFDKVLTALSHKLEPAVRSSEL |
| 412 | 1762 | A | 3347 | 1 | 898 | IDRAAECRTKPLPMAVSIRGNADSIVACLVLM |
| | | | | | | VLYLIKKRLVACAAVFYGFAVHMKIYPETYI |
| | | | | | | LPITLHLLPDRDNDKSLRQFRYTFQACL*ELL |
| | | | | | | KRLCNRTALMFVAVAGLTFFALSFGFYYEYG |
| | | | | | | WEFLEHTYFYHLTRRDIRHNFSPYFYMLYLT |
| | | | | | | AESKWSFSLGIAAFLPQLILLSAVSFAYYRDL |
| | | | | | | VFCWFLHTSIFVTFNKVCTSQYFLWYLCLLPL |
| | | | | | | VMPLVRMPWKRAVVLLMLWFIGQAMWLAP |
| | | | | | | AYVLEFQGKNTFLFIWLAGLFFLLINCSILIQII |
| | | | | | | SHYKEEPLTERIKYD |
| 413 | 1763 | A | 3361 | 3 | 474 | PIPVRWNSLEGRLLRGYEQHANDGKDYISRN |
| | | | | | | *DLRSWTAADMAAQITKRKWEAEEFAEQIKA |
| | | | | | | YLEGTCVERILRTHLENGKETLQLTEQSSQPTI |
| | | | | | | PIVGIVAGLVLLGAVVTGAVVSAVMCRKKNS |
| | | | | | | GHFLPTDRVSYSEAASSDHAQGSDVSLTACK |
| | | | | | | V |
| 414 | 1764 | A | 3363 | 1488 | 453 | HQILELKKKILKTYNPDYDEDLVQEASSEDVL |
| | | | | | | GVHMVDKDTERDIEMKRQLRRLRELHLYST |
| | | | | | | WKKYQEAMKTSLGVPQEERDEGSLGKPLCP |
| | | | | | | PEILSETLPGSVKKRVCFPSEDHLEEFIAEHLP |
| | | | | | | EASNQSLLTVAHADAGTQTNGDLEDLEEHGP |
| | | | | | | GQTVSEEATEVHMMEGDPDTLAELLIRDVLQ |
| | | | | | | ELSSYNGEEE\DPEEVKTSLGVPQRGDLEDLE |
| | | | | | | EHVPGQTVSEEATGVHMMQVDPATLAKSDL |
| | | | | | | EDLEEHVPEQTVSEEATGVHMMQVDPATLA |
| | | | | | | KQLEDSTITGSHQQMSASPSSAPAEEATEKTK |
| | | | | | | VEEEVKTRKPKKKTRKPSKKSRWNVLKCWD |
| | | | | | | TFNIF |
| 415 | 1765 | A | 3369 | 431 | 315 | IPWSWVGRLSVRKMSTLF*LTYNYNAILNKTP |
| | | | | | | PSPSPSL |
| 416 | 1766 | A | 3373 | 42 | 651 | RQEKMGLGEIGASGVLRSMLKERKKQNMKG |
| | | | | | | NGNVTLTPLLPAVQCGCELQPAGRSPLPSSHS |
| | | | | | | APGLCSPLHPLQPQQEASTCPSGTLQGREKAA |
| | | | | | | PGQGRPLCSLWAQGAGA\PGERGAEGRGPSD |
| | | | | | | QAPDPKSGPWLFPPGLGAPAEVRLHNVPHNL |
| | | | | | | RRPPLP*ARGK*PPNSCICPWSEGRAKQPLSCG |
| | | | | | | PKPQCSLPSQVPGDTH |
| 417 | 1767 | A | 3382 | 2 | 2061 | EAQDPRACGPDAGGRFAARDAPGNSLRPPPS |
| | | | | | | SPP/GWPGQLRLLPRVPGSELRCGKPERGRLP |
| | | | | | | ASPPGKIRGWPPGISKRPGLGGRSFPPGFAPRT |
| | | | | | | WRPEARGPSVQSLPPIFSPQSAQITAR*RPGAP |
| | | | | | | KNAGRCGGA\RGPRLSLGPPPGPPPAPALPAR |
| | | | | | | ASAGAGAAAAALAVGGVRGAGGARGTGGY |
| | | | | | | GHCSGRIPTGRTGPGPQGPGPPMPARPR*AS\S |
| | | | | | | TRGSRRGPGSRPARAAAAPRAGDHGRRPVRV |
| | | | | | | HLRQHTAV*EPRLGDATAPPGGAAGPGAPAP |
| | | | | | | R\GPGWDCALLPSPGPRSPRAVGCAEPEIWDP |
| | | | | | | SPRRGTSPVPSVRSLRSEPANPRLGLPALLNSY |
| | | | | | | PLKGPGLPPPWGPRTQTGHVIITVQPSGSCIEH |
| | | | | | | SKSLDIRGPWGAPPWGPSSSGLCSPKLATAGP |
| | | | | | | PQSWGLCQIGRRRGLGGPGLKRGET/GLL*GC |
| | | | | | | SMDHANRTKGPGVPTSNRCFSHIPG\GDGCSD |
| | | | | | | HSSCEGHPDLHAGREMPAAPGLSELERVRFT |
| | | | | | | VGCGGLASGISSASVSGLSPNRAGGPGQGDW |
| | | | | | | EMYPVSWQTQESGGQG/SPKTGR*VGMLQA |
| | | | | | | GAGSLQGGTGDGVWGLWEDGP/RG*DSPLPS |
| | | | | | | GTGTEP*TPTTSIPFFPQPSGVYPSRATLLPMPS |
| | | | | | | Y*ALGPSANKSEKPLLSFLYRGLCCRISLQLA |
| | | | | | | KGIGQLSEIPLLNVETAFWSMWVTYFRK |
| 418 | 1768 | A | 3398 | 304 | 2121 | EEEEEEEDEDDDDNNEEEEFECYPPGMKVQV |
| | | | | | | RYGRGKNQKMYEASIKDSDVEGGEVLYLVH |
| | | | | | | YCGWNVRYDEWIKADKIVRPADKNVPKIKH |
| | | | | | | RKKIKNKLDKEKDKDEKYSPKNCKPPALGPN |
| | | | | | | PPFQTNPISWKWYPKLDLTDAKNSDTAHIKSI |
| | | | | | | EITSILNGLQASESSAEDSEQEDERGAQDMDN |
| | | | | | | NGKEESKIDHLNNRNDLISKEEQNSSSLLEE |
| | | | | | | NKVHADLVISKPVSKSPERLPKDIEVLSEDTD |
| | | | | | | YEEDEVTKKRKDVKKDTTDKSSKPQIKRGKR |
| | | | | | | RYCNTEECLKTGSPGKKEEKAKNKESLCMEN |
| | | | | | | SSNSSSDEDEEETKAKMTPTKKYNGLEEKRK |
| | | | | | | SLRTTGFYSGFSEVAEKRIKLLNNSDERLQNS |
| | | | | | | RAKDRKDVWSSIQGQWPKKTLKELFSDSDTE |
| | | | | | | AAASPPHPAPEEGVAEESLQTVAEEESCSPSV |
| | | | | | | ELEKIPPPVNVDSKPIEEKTVEVNDRKAEFPSS |
| | | | | | | GSNFSA*IPLPYLHLNRLHQSL*QKGSRQQSS |
| | | | | | | VTVSEPLAPNQEEVRSIKSETDSTIEVDSVAGE |
| | | | | | | LQDLQSERE*LASRF*CQCELKQ**SARTRTS* |
| | | | | | | KSLYRSEKSERCSGRRKFIKKAEKKP*SNSGK |
| | | | | | | QQKEGK |
| 419 | 1769 | A | 3399 | 206 | 463 | QRECLSIHIGQAGIQIGDACWELYCLEHGIQP |
| | | | | | | NGVVLDTQQDQLENAKMEHTNASFDTFFCE |
| | | | | | | TRAGKHVPRALFVDLEPTVIDGIR |
| 420 | 1770 | A | 3408 | 1010 | 685 | RRLSFFF*IWSSVLVTQARVQWRDLGSPQPLP |
| | | | | | | PGFKRFSGLSLPSSWDYRIIPSPRPVNF/HVFLV |
| | | | | | | VMGFHHVGQAGLELLTSGDLPALASQSARIT |
| | | | | | | GVNHCAQPRGHFH |
| 421 | 1771 | A | 3409 | 355 | 1326 | ADSNLLESCWQELGLGPWGQDWRVEQVGAS |
| | | | | | | ASLRFPREVCSIRFLFTAVSLLSLFLSAFWLGL |
| | | | | | | LYLVSPLENEPKEMLTLSEYHERVRSQGQQL |
| | | | | | | QQLQAELDKLHKEVSTVRAANSERVAKLVF |
| | | | | | | QRLNEDFVRKPDYALSSVGASIDLQKTSHDY |
| | | | | | | ADRNTAYFWNRFSFWNYARPPTVILEPHVFP |
| | | | | | | GNCWAFEGDQGQVVIQLPCIRVQLSDTTLQHP |
| | | | | | | PPSVEHTGGANSAPRDFAVFFLLSFFTHQGLQ |
| | | | | | | VYDETEVSLGKFTFDVEKSEIQTFHLQNDPPA |
| | | | | | | AFPKVKIQILSNWGHPRFTCLYRVRAHGVRT |
| | | | | | | SEGAEGSAQGPH |
| 422 | 1772 | A | 3412 | 2 | 421 | EFDAQPSIGALVVFKRP*AITGSDPGPKRGMN |
| | | | | | | YLVSCSMRSPESGKGEPGTARDYTPMGRPPP |
| | | | | | | PVPSVSPGPLPGSLAIALPHSPEPHPWEQQPPRG |
| | | | | | | QARSPPGGWLGSAT/RVRRPHNHPIRGHIHSP |
| | | | | | | VDTAGAPASPGPDVCE |
| 423 | 1773 | A | 3420 | 91 | 706 | DAQRAIYSSVGPAVSLRQRQQDGAVKESGRI |
| | | | | | | RGGVRSFSRAAAAMAPIKVGDAIPAVEVFEG |
| | | | | | | EPGNKVNLAELFKGKKGVLFGVPGAFTPGCS |
| | | | | | | KTHLPGFVEQAEALKAKGVQVVACLSVNDA |
| | | | | | | FVTGEWGRAHKAEGKVRLLADPTGAFGKET |
| | | | | | | DLLLDDSLVSIFGNERLKEFSMVVQDGIVKA |
| | | | | | | LNVEPDGTGLTCSLAFNIISQL |
| 424 | 1774 | A | 3421 | 4 | 7688 | RQVTRVGTRVLGSTTAAVFLSVEDDNDNAPQ |
| | | | | | | FSEKRYVVQVREDVTPGAPVLRVTASDRDKG |
| | | | | | | SNAVVHYSIMSGNARGQPYLDAQTGALDVV |
| | | | | | | SPLDYETTKEYTLRVRAQDGGRPPLSNVSGL |
| | | | | | | VTVQVLDTNDNAPIFVSTPFQATVLESVPLGY |
| | | | | | | LVLHVQAIDADAGDNARLEYRLAGVGHDFP |
| | | | | | | FTINNGTGWISVAAELDREEVDFYSFGVEAR |
| | | | | | | DHGTPALTASASVSVTALDVNDNNPTFTQPE |
| | | | | | | YTVRLNEDAAVGTSVVTSAVDRDAHSVITY |
| | | | | | | QITSGNTRNRFSITSQSGGGLVSLALPLDYKLE |
| | | | | | | RQYVLAVTASDGTRQDTAQIVVNVTDANTH |
| | | | | | | RPVFQSSHYTVNVNEDRPAGTTVVLISATDE |
| | | | | | | DTGENARITYFMEDSIPQFRIDADTGAVTTQA |
| | | | | | | ELDYEDQVSYTLAITARDNGIPQKSDTTYLEI |
| | | | | | | LVNDVNDNAPQFLPDSYQGSVYEDVPPFTSV |
| | | | | | | LQISATDRDSGLNGRVFYTFQGGDDGDGDFI |
| | | | | | | VESTSGIVRTLRRLDRENVAQYVLRAYAVDK |
| | | | | | | GMPPARTPMEVTVTVLDVNDNPPVFEQDEFD |
| | | | | | | VFVEENSPIGLAVARVTATDPDEGTNAQIMY |
| | | | | | | QIVEGNIPEVFQLDIFSGELTALVDLDYEDRPE |
| | | | | | | YVLVIQATSAPLVSRATVHVRLLDRNDNPPV |
| | | | | | | LGNFEILFNNYVTLRSSSFPGGAIGRVPAIIDP |
| | | | | | | DISDSLTYSFERGNELSLVLLNASTGELKLSR |
| | | | | | | ALDNNRPLEAIMSVLVSDGVHSVTAQCALRV |
| | | | | | | TIITDEMLTHSITLRLEDMSPERFLSPLLGLFIQ |
| | | | | | | AVAATLATPPDHVVVFNVQRDTDAPGGHILN |
| | | | | | | VSLSVGQPPGPGGGPPFLPSEDLQERLYLNRS |
| | | | | | | LLTAISAQRVLPFDDNICLREPCENYMRCVSV |
| | | | | | | LRFDSSAPFIASSSVLFRPIHPVGGLRCRCPPGF |
| | | | | | | TGDYCETEVDLCYSRPCGPHGRCRSREGQYT |
| | | | | | | CLCRDGYTGEHCEVSARSGRCTPGVCKNGGT |
| | | | | | | CVNLLVGGFKCDCPSGDFEKPYCQVTTRSFP |
| | | | | | | AHSFITFRGLRQRFHFTLALSFATKERDGLLL |
| | | | | | | YNGRFNEKHDFVALEVIQEQVQLTFSAGEST |
| | | | | | | ITVSPFVPGGVSDGQWHTVQLKYYNKPLLG |
| | | | | | | QTGLPQGPSEQKVAVVTVDGCDTGVALRFGS |
| | | | | | | VLGNYSCAA\QGTQGGSKKSLDLTGPLLLGG |
| | | | | | | VPDLPESFPVRMRQFVGCMRNLQVDSRHIDM |
| | | | | | | ADFIANNGTVPGCPAKKNVCDSKTCHNGGTC |
| | | | | | | VNQWDAFSCECPLGFGGKSCAQEMANPQHF |
| | | | | | | LGSSLVAWIIGLSLPISQPWYLSLMPRTRQAD |
| | | | | | | GVLLQAITRGRSTITLQLREGHVMLSVEGTGL |
| | | | | | | QASSLRLEPGRANDGDWHHAQLALGAIGGP |
| | | | | | | GHAILSFDYGQQRAEGNLGPRLHGLHLSNITV |
| | | | | | | GGIPGPAGGVARGFRGCLQGVRVSDTPEGVN |
| | | | | | | SLDPSHGESINVEQGCSLPDPCDSNPCPANSY |
| | | | | | | CSNDWDSYSCSCDPGYYGDNCTNVCDLNPC |
| | | | | | | EHQSVCTRKPSAPHGYTCECPPNYLGPYCET |
| | | | | | | RIDQPCPRGWWGHPTCGPCNCDVSKGFDPDC |
| | | | | | | NKTSGECHCKENHYRPPGSPTCLLCDCYPTG |
| | | | | | | SLSRVCDPEDGQCPCKPGVIGRQCDRCDNPF |
| | | | | | | AEVTITNGCEVNYDSCPRAIEAGIWWPRTRFG |
| | | | | | | LPAAAPCPKGSFGTAVRHCDEHRGWLPPNLF |
| | | | | | | NCTSITFSELKGFAERLQRNESGLDSGRSQQL |
| | | | | | | ALLLRNATQHTAGYPGSDVKVAYQLATRLL |
| | | | | | | AHESTQRGFGLSATQDVHFTENLLRVGSALL |
| | | | | | | DTANKRHWELIQQTEGGTAWLLQHYEAYAS |
| | | | | | | ALAQNMRHTYLSPFTIVTPNIVISVVRLDKGN |
| | | | | | | FAGAKLPRYEALRGEQPPDLETTVILPESVFR |
| | | | | | | ETPPVVRPAGPGEAQEPEELARRQRRHPELSQ |
| | | | | | | GEAVASVIIYRTLAGLLPHNYDPDKRSLRVPK |
| | | | | | | RPIINTPVVSISVHDDEELLPRALDKPVTVQFR |
| | | | | | | LLETEERTKPICVFWNWSILVSGTGGWSARGC |
| | | | | | | EVVFRNESHVSCQCNHMTSFAVLMDVSRRE |
| | | | | | | NGEILPLKTLTYVALGVTLAALLLTFFFLTLL |
| | | | | | | RILRSNQHGIRRNLTAALGLAQLVFLLGINQA |
| | | | | | | DLPFACTVIAILLHFLYLCTFSWALLEALHLY |
| | | | | | | RALTEVRDVNTGPMRFYYMLGWGVPAPITG |
| | | | | | | LAVGLDPEGYGNPDFCWLSIYDTLIWSFAGP |
| | | | | | | VAFAVSMSVFLYILAARASCAAQRQGFEKKG |
| | | | | | | PVSGLQPSFAVLLLLSATWLLALLSVNSDTLL |
| | | | | | | FHYLFATCNCIQGPFIFLSYVVLSKEVRKALK |
| | | | | | | LACSRICPSPDPALTTKSTLTSSYNCPSPYADG |
| | | | | | | LYQP\YGDSAGSLHSTSRSGKSQPSYIPFLLR |
| | | | | | | EESALNPG\QGPPGLGGIPGRILCFLGRFKDQQ |
| | | | | | | H\DS*TRDFDSDLSLEDDQSGSYASTHSSDSEE |
| | | | | | | EEEEEEEEAAFPGEQGWDSLLGPGAERLPLHS |
| | | | | | | TPKDGGPGPGKAPWPGDFGTTAKESSGNGAP |
| | | | | | | EERLRENGDALSREGSLGPLPGSSAQPHKGIL |
| | | | | | | KKKCLPTISEKSSLLRLPLEQCTGSSRGSSASE |
| | | | | | | GSRGGPPSRPPPRQSLQEQLNGVMPIAMSIKA |
| | | | | | | GTVDEDSSGSEFLFFNFLH |
| 425 | 1775 | A | 3429 | 155 | 1417 | GEPAVQSCDCGGTQRSCPWLLVAPGLLSSSSS |
| | | | | | | RAASVREAEDAPLQPASIHPVSQGSRGPEGSL |
| | | | | | | GSAECLPGDPLGARRATRAHSPVPGPPPSLPA |
| | | | | | | AGTAVKRGLQPG*GAIGATSTPGTGAATGGL |
| | | | | | | CGPAWAAPSAVGPCCCCPSISTWSQMRSARP |
| | | | | | | SLGCLPSWAS\PGTEHPPGPQGPGPS*DLCSV* |
| | | | | | | KREFQRGPWAGMVILHRISAADPARAPGPDS |
| | | | | | | NLQSALQQPATGCSEPAAVYSPPIGLWGA**P |
| | | | | | | EYG*PQHSLPG*TAPADR*P\AGIKDRVYSNSI |
| | | | | | | YELLENGQRAGTCVLEYATPLQTLFAMSQYS |
| | | | | | | QAGFSREDRLEQAKLFCRTLEDILADAPESQN |
| | | | | | | NCRLIAYQEPADDSSFSLSQEVLRHLRQEEKE |
| | | | | | | EVTVGSLKTSAVPSTSTMSQEPELLISGMEKP |
| | | | | | | LPLRTDFS |
| 426 | 1776 | A | 3431 | 1662 | 369 | AIWWLSWLQHDLLPTPTQVAIDFTASNGDPR |
| | | | | | | SSQSLHCLSPRQPNHYLQALRAVGGICQDYD/ |
| | | | | | | SVGESGAGGNRQGGLAQRIPQLFLLPSDKRFP |
| | | | | | | AFGFGARLPPNFEVG*MRGKEGDGGRVSQAE |
| | | | | | | KAGPHCSRLALTG\SHDFAINFDPENPECEGK |
| | | | | | | RGDFIILPRLPADTLHTGAQTPLPRAQLPVPST |
| | | | | | | HPRPVF1\EISGVIASYRRCLPQIQLYGPTNVAP |
| | | | | | | IINRVAEPAQREQSTGQATKYSVLLVLTDGV |
| | | | | | | VSDMAETRTAIVRASRLPMSIIIVGVGNADFS |
| | | | | | | DMRLLDGDDGPLRCPRGVPAARDIVQFVPFR |
| | | | | | | DFKDVSPPGPFRLKDSSASHPPKSDLRLPPFD |
| | | | | | | VLLRTREPSWPP*SPTSPSDDPASPTLPLTPNHI |
| | | | | | | TVPTL\AAPSALAKCVLAEVPRQVVEYYASQ |
| | | | | | | GISPGAPRPCTLATTPSPSP |
| 427 | 1777 | A | 3446 | 79 | 9748 | GCQSCWPAWPRLRRRGPASAGARLGRKAPW |
| | | | | | | GLPGRVQDGRPLRFCFYLRPRAPFIAPVLSGA |
| | | | | | | ASRPEASGDCRAGRETAMATLEKLMKAFESL |
| | | | | | | KSFQQQQQQQQQQQQQQQQQQQQQQQPPPP |
| | | | | | | PPPPPPPQLPQPPPQAQPLLPQPQPPPPPPPPPP |
| | | | | | | GPAVAEEPLHRPKKELSATKKDRVNHGLTIC |
| | | | | | | ENIVAQSVRNSPEFQKLLGIAMELFLLCSDDA |
| | | | | | | ESDVRMVADECLNKVIKALMDSNLPRLQLEL |
| | | | | | | YKEIKKNGAPRSLRAALWRFAELAHLVRPQK |
| | | | | | | CRPYLVNLLPCLTRTSKRPEESVQETLAAAVP |
| | | | | | | KIMASFGNFANDNEIKVLLKAFIANLKSSSPTI |
| | | | | | | RRTAAGSAVSICQHSRRTQYFYSWLLNVLLG |
| | | | | | | LLVPVEDEHSTLLILGVLLTLRYLVPLLQQQV |
| | | | | | | KDTSLKGSFGVTRKEMEVSPSAEQLVQVYEL |
| | | | | | | TLHHTQHQDHNVVTGALELLQQLFRTPPPEL |
| | | | | | | LQTLTAVGGIGQLTAAKEESGGRSRSGSIVELI |
| | | | | | | AGGGSSCSPVLSRKQKGKVLLGEEEALEDDS |
| | | | | | | ESRSDVSSSALTASVKDEISGELAASSGVSTPG |
| | | | | | | SAGHDILTEQPRSQHTLQADSVDLASCDLTSS |
| | | | | | | ATDGDEEDILSHSSSQVSAVPSDPAMDLNDG |
| | | | | | | TQASSPISDSSQTTTEGPDSAVTPSDSSEIVLD |
| | | | | | | GTDNQYLGLQIGQPQDEDEEATGILPDEASEA |
| | | | | | | FRNSSMALQQAHLLKNMSHCRQPSDSSVDKF |
| | | | | | | VLRDEATEPGDQENKPCRIKGDIGQSTDDDS |
| | | | | | | APLVHCVRLLSASFLLTGGKNVLVPDRDVRV |
| | | | | | | SVKALALSCVGAAVALHPESFFSKLYKVPLD |
| | | | | | | TTEYPEEQYVSDILNYIDHGDPQVRGATAILC |
| | | | | | | GTLICSILSRSRFHVGDWMGTIRTLTGNTFSL |
| | | | | | | DCIPLLRKTLKDESSVTCKLACTAVRNCVM |
| | | | | | | SLCSSSYSELGLQLIIDVLTLRNSSYWLVRTEL |
| | | | | | | LETLAEIDFRLVSFLEAKAENLHRGAHHYTGL |
| | | | | | | LKLQERVLNNVVIHLLGDEDPRVRHVAAASL |
| | | | | | | IRLVPKLFYKCDQGQADPVVAVARDQSSVYL |
| | | | | | | KLLMHETQPPSHFSVSTITRIYRGYNLLPSITD |
| | | | | | | VTMENNLSRVIAAVSHELITSTTRALTFGCCE |
| | | | | | | ALCLLSTAFPVCIWSLGWHCGVPPLSASDESR |
| | | | | | | KSCTVGMATMILTLLSSAWFPLDLSAHQDAI |
| | | | | | | ILAGNLLAASAPKSLRSSWASEEEANPAATK |
| | | | | | | QEEVWPALGDRALVPMVEQLFSHLLKVINIC |
| | | | | | | AHVLDDVAPGPAIKAALPSLTNPPSLSPIRRK |
| | | | | | | GKEKEPGEQASVPLSPKKGSEASAASRQSDTS |
| | | | | | | GPVTTSKSSSLGSFYHLPSYLKLHDVLKATHA |
| | | | | | | NYKVTLDLQNSTEKFGGFLRSALDVLSQILEL |
| | | | | | | ATLQDIGKCVEEILGYLKSCFSREPMMATVC |
| | | | | | | VQQLLKTLFGTNLASQFDGLSSNPSKSQGRA |
| | | | | | | QRLGSSSVRPGLYHYCFMAPYTHFTQALADA |
| | | | | | | SLRNMVQAEQENDTSGWFDVLQKVSTQLKT |
| | | | | | | NLTSVTKNRADKNAIHNHIRLFEPLVIKALKQ |
| | | | | | | YTTTTCVQLQKQVLDLLAQLVQLRVNYCLL |
| | | | | | | DSDQVFIGFVLKQFEYIEVGQFRESEAIIPNIFF |
| | | | | | | FLVLLSYERYHSKQIIGIPKIIQLCDGIMASGR |
| | | | | | | KAVTHAIPALQPWHDLFVLRGTNKADAGKE |
| | | | | | | LETQKEVVVSMLLRLIQYHQVLEMFILVLQQ |
| | | | | | | CHKENEDKWKRLSRQIADIILPMLAKQQMHI |
| | | | | | | DSHEALGVLNTLFEILAPSSLRPVDMLLRSMF |
| | | | | | | VTPNTMASVSTVQLWISGILAILRVLISQSTED |
| | | | | | | WLSRIQELSFSPYLISCTVINRLRDGDSTSTLE |
| | | | | | | EHSEGKQIKNLPEETFSRFLLQLVGILLEDIVT |
| | | | | | | KQLKVEMSEQQHTFYCQELGTLLMCLIHIFKS |
| | | | | | | GMPRRITAAATRLFRSDGCGGSFYTLDSLNLR |
| | | | | | | ARSMIITHPALVLLWCQILLLVNHTDYRWW |
| | | | | | | AEVQQTPKRHSLSSTKLLSPQMSGEEEDSDLA |
| | | | | | | AKLGMCNREIVRRGALILFCDYVCQNLHDSE |
| | | | | | | HLTWLIVNIIIQDLISLSHEPPVQDFISAVHIRNS |
| | | | | | | AASGLFIQAIQSRGENLSTPTMLKKTLQCLEGI |
| | | | | | | HLSQSGAVLTLYVDRLLCTPFRVLARMVDIL |
| | | | | | | ACRRVEMLLAANLQSSMAQLPMEELNRIQEY |
| | | | | | | LQSSGLAQRHQRLYSLLDRFRLSTMQDSLSPS |
| | | | | | | PPVSSHPLDGDGHVSLETVSPDKDWYVHIVK |
| | | | | | | SQCWTRSDSALLEGAELVNRIPAEDMNAFM |
| | | | | | | MNSEFNLSLLAPCLSLGMSEISGGQKSALFEA |
| | | | | | | AREVTLARVSGTVQQLPAVHHYPQPELPAEP |
| | | | | | | AAYWSKLNDLFGDAALYQSLPTLARALAQY |
| | | | | | | LVVVSKLPSHLHLPPETCEKDIVKFVVATLEAL |
| | | | | | | SWHLIHEQTPLSLDLQAGLDCCCLALQLPGL |
| | | | | | | WSVVSSTEFVTHACSLIYCVHFILEAVAVQPG |
| | | | | | | EQLLSPERRTNTPKAISEEEEEVDPNTQNPKYI |
| | | | | | | TAACEMVAEMVESLQSVLALGHKRINSGVPA |
| | | | | | | FLTPLLRNIIISLARLPLVNSYTRVPPLVWKIG |
| | | | | | | WSPKPGGDFGTAFPEIPVEFLQEKEVFKEFIYR |
| | | | | | | INTLGWTSRTQFEETWATLLGVLVTQPLVME |
| | | | | | | QEESPPEEDTERTQINVLAVQAITSLVLSAMT |
| | | | | | | VPVAGNPAVSCLEQQPRNKPLKALDTRFGRK |
| | | | | | | LSIIRGIVEQEIQAMVSKRENIATHHLYQAWD |
| | | | | | | PVPSLSPATTGALISHEKLLLQINPERELGSMS |
| | | | | | | YKLGQVSTHSVWLGNSITPLRIEEEWDEEEEEE |
| | | | | | | ADAPAPSSPPTSPVNSRKHRAGVDIHSCSQFL |
| | | | | | | LELYSRWILPSSSARRTPATILISEVVRSLLVVS |
| | | | | | | DLFTERNQFELMYVTLTELRRVHPSEDEILAQ |
| | | | | | | YLVPATCKAAAVLGMDKAVAEPVSRLLESTL |
| | | | | | | RSSHLPSRVGALHGILYVLECDLLDDTAKQLI |
| | | | | | | PVISDYLLSNLKGIAHCVNIHSQQIIVLVMCAT |
| | | | | | | AFYLIENYPLDVGPEFSASIIQMCGVMLSGSE |
| | | | | | | ESTPSIIYHCALRGLERLLLSEQLSRLDAESLV |
| | | | | | | KLSVDRVNVHSPHRAMAALGLMLTCMYTG |
| | | | | | | KEKVSPGRTSDPNPAAPDSESVIVAMERVSVL |
| | | | | | | FDRLRKGFPCEARVVARILPQFLDDFFPPQDIM |
| | | | | | | NKVIGEFLSNQQPYPQFMATVVYKVFQTLHS |
| | | | | | | TGQSSMVRDWVMLSLSNFTQRAPVAMATWS |
| | | | | | | LSCFFVSASTSPWVAAILPHVISRMGKLEQVD |
| | | | | | | VNLFCLVATDFYRHQIEEELDRRAFQSVLEV |
| | | | | | | VAAPGSPYHRLLTCLRNVHKVTTC |
| 428 | 1778 | A | 3449 | 3 | 430 | NSRPSPSAALVEVLLRSGSTFPHTVSGGWAA |
| | | | | | | WGPWSSCSRDCELGFRVRKRTCTNPEPRNGG |
| | | | | | | LPCVGDAAEYQDCNPQACPVRGAWSCWTS |
| | | | | | | WSPCSASCGGGHYQRTRSCTSPAPSPGEDICL |
| | | | | | | GLHTEEALCATQAGPEGWS |
| 429 | 1779 | A | 3464 | 583 | 3 | DALDRRYLERCHPAAGGWVGEGE*ALCQKT/ |
| | | | | | | RFSGVLEPPLPSLKDGGRFPAWT*RSCSKSLR |
| | | | | | | AAFTSQFFPSRRSRASPGSAP\GNGQNLTEQHP |
| | | | | | | CPGSCDPQVLSASWM*VEHRSKFRPPP*NSTI |
| | | | | | | PPESIRS*QGGTVQTGQHSSGREAGSWRARGR |
| | | | | | | NAGRR*KGQGKIGTKQGAVRARKECRGEMA |
| | | | | | | SGETDSE |
| 430 | 1780 | A | 3473 | 2802 | 270 | FRMRIFLHCPWNQQMWKIWNLLETSLESCKA |
| | | | | | | HLSIQKLLKER\Q\QLPVFKHRDSWETLKRHR |
| | | | | | | VVVVAGET\GSGKSTQVPfffLLEDLLLNEWE |
| | | | | | | ASKCNIVGTQPRRISAVSLANRVCDELGGENG |
| | | | | | | PGGRNSLCGYQIRMESRACESTRLLYCTTGV |
| | | | | | | LLRKLQEDGLLSNVS/HMFIVDEV\IIER\SVQS |
| | | | | | | DFLLIILKEILQKRSDLHLILMSATVDSEKFST |
| | | | | | | YFTHCPILRISGRSYPVEVFHLEDITEETGFVLE |
| | | | | | | KDSEYCQKFLEEEEEVTINVTSKAGGIKKYQE |
| | | | | | | YIPVQTGAHADLNPFYQKYSSRTQHAILYMN |
| | | | | | | PHKINLDLILELLAYLDKSPQFRMEGAVLIFL |
| | | | | | | PGLAHIQQLYDLLSNDREFYSERYKVIALIISI |
| | | | | | | LSTQDQAAAFTLPPPGVRKIVLATNIAETGITI |
| | | | | | | PDVVFVIDTGRTKENKYHESSQMSSLVETFVS |
| | | | | | | KASALQRQGRAGRVRDGFCFRMYTRERFEG |
| | | | | | | FMDYSVPEILRVPLEELCLHIMKCNLGSPEDF |
| | | | | | | LSKALDPPQLQVISNAMNLLRKIGACELNEPK |
| | | | | | | LTPLGQHLAALPVNVKGIGKMLIFGAIFGCLDP |
| | | | | | | VATLAAVMTEKSPFTTPIGRKDEADLAKSAL |
| | | | | | | AMADSDHLTWNAYLGWKKARQEGGYRSEI |
| | | | | | | TYCRRNFLNRTSLLTLEDVKQELIKLVKAAGF |
| | | | | | | SSSTTSTSWEGNRASQTLSFQEIALLKAVLVA |
| | | | | | | GLYDNVGKIIYTKSVDVTEKLACIVETAQGK |
| | | | | | | AQVHPSSVNRDLQTHGWLLYQEKIRYARVY |
| | | | | | | LRETTLITPFPVLLFGGDIEVQHRERLLSIDGW |
| | | | | | | IYFQAPVKIAVIFKQLRVLIDSVLRKKLENPK |
| | | | | | | MSLENDKILQIITELIKTENN |
| 431 | 1781 | A | 3474 | 1 | 441 | FRPAPGHVQP*GGSSAAAGGGLLSHPRPCQQ |
| | | | | | | PCPPAPAPSRPRSLGSLGQRVPAALATAAQEL |
| | | | | | | PATLGGDGGKPALTAGEAALPGLHRSGVPAA |
| | | | | | | AARC*PCT/SRPT*STLSPTQAAWWCRPSRRQ |
| | | | | | | QRGEASTGGASGRRCGSCFQV |
| 432 | 1782 | A | 3478 | 416 | 23 | QLRRLTLPNFKTY/YSS*IIEIAWH**KNMQID |
| | | | | | | QWFRRESPEIDLCKYS*LSFDKEAKAIKIWKE |
| | | | | | | CSLFNKWC/YKNWM/LHVQKKRI*VQTLHPS |
| | | | | | | QKLK\SKWIKDLNVECRITKLLDQEYPGDLGY |
| | | | | | | SRALNSGSR |
| 433 | 1783 | A | 3504 | 1876 | 552 | CLAPCSPQPEKNGMQPLLLLLPPLLYQQLLHS |
| | | | | | | SLGAPGESTLLVRTSKLLVGLGLQLLVWLLL |
| | | | | | | QTRSLLALQLHLTSSAPLLAAPTAVCSCSRCS |
| | | | | | | APRSRCVARPAARTGLPTPAPASSPAPAASPA |
| | | | | | | PAASPESTA\PQPLILLPKPIPPAPGAPPPRP |
| | | | | | | GAPPPRPAASPSPAASPAPPAASPVLTASPPLP |
| | | | | | | AASPSPAASPAPPAASPVLTASPPLPAASPSPA |
| | | | | | | ASPAPPAASPVLTASPPLPAASPALAASPVHT |
| | | | | | | ASPPVHVASPPVHTASPPVHVASPPVHTASPP |
| | | | | | | VHVASPPVHTASPHVHVASPPVHVASPPVHV |
| | | | | | | ASPPVHTASPPVHVASPPVHTASPHVIIVASPP |
| | | | | | | VHTASPPVHVASPPVHVASPPVHVAYPPVHV |
| | | | | | | ASPPVHVASPPVHVASPPVSCSGDSTSDCFPP |
| | | | | | | QPGAVFPHSLAPSLGGWSHLVAALP |
| 434 | 1784 | A | 3516 | 142 | 590 | GGVNRPRSETEQVKTPVIISSWDYRHPPPRPA |
| | | | | | | SFFVFLV*TCIF\TALARMVLISWPCDLPTSASQ |
| | | | | | | SAGITGVRHHA\RLLYFEQESHSVTQAGW\VQ |
| | | | | | | WHNLGSLQPLSLEDRLSPGVLGCSALCRSGV |
| | | | | | | RTKFGINMVTSRERGTPRLPKEG |
| 435 | 1785 | A | 3529 | 1 | 3161 | MSLVRAALEALDELDLFGVKGGPQSVLHVLA |
| | | | | | | DEVQHCQSILNSLLPRASTSKEVDASLLSVVS |
| | | | | | | FPAFAVEDSQLVELTKQEIITKLQGRYGCCRF |
| | | | | | | LRDGYKTPKEDPNRLYY/ENPAELKLFENIEC |
| | | | | | | EWPLFWTYFILDGVFSGNAEQVQEYKEALEA |
| | | | | | | VLIKGKNGVPLLPELYSVPPDRVDEEYQNPHT |
| | | | | | | VDRVPMGKLPHMWGQSLYILGSLMAEGFLA |
| | | | | | | PGEIDPLNRRFSTVPKPDVVYQVYPSLPHGCS |
| | | | | | | SKSPSHQCTIISIRTTRKITAPVSILAETEEIICTIL |
| | | | | | | KDKGIYVETIAEVYPIRVQPARILSIIIYSSLEIF |
| | | | | | | LPFLNSVSGCNNRMKISGRPYRITLIGVLGTSK |
| | | | | | | LYDIRKTIFTFTPQFIDQQQFYLALDNKMIVE |
| | | | | | | MLRTDLSYLCSRWRMTHGQPTITFPISHSMLDE |
| | | | | | | DGTSLNSSILAALRKMQDGYFGGARVQTGKL |
| | | | | | | SEFLTTSCCTHLSFMDPGPEGKLYSEDYDDN |
| | | | | | | YDYLESGNWMNDYDSTHARCGDEVARYL |
| | | | | | | DHLLAIITAPHPKLAPTSQKGGLDRFQAAVQT |
| | | | | | | TCDLMSLVTKAKELHVQNVHMYLPTKLFQA |
| | | | | | | SRPSFNLLDSPHPRQENQVPSVRVEIHLPRDQ |
| | | | | | | SGEVDFKALVLQLKETSSLQEQADILYMLYT |
| | | | | | | MKGPDWNTELYNERSATVRELLTELYGKVG |
| | | | | | | EIRHWGLIRYISGILRIKKVEAIDEACTDLLSH |
| | | | | | | QKHLTVGLPPEPREKTISAPLPYEALTQLIDEA |
| | | | | | | SEGDMSISILTQEIMVYLAMYMRTQPGLFAE |
| | | | | | | MFRLRIGLIIQVMATELAHSLRCSAEEATEGL |
| | | | | | | MNLSPSAMKNLLHHILSGKEFGVERSVRPTD |
| | | | | | | SNVSPAISIHIEIGAVGATKTERTGIMQLKSEIK |
| | | | | | | QSPGTSMTPSSGSFPSAYDQQSSKDSRQGQW |
| | | | | | | QRRRRLDGALNRVPVGFYQKVWKVLQKCH |
| | | | | | | GLSVEGFVLPSSTTREMTPGEIKFSVHVESVL |
| | | | | | | NRVPQPEYRQLLVEAIL\VLTMLADIEI\HSIGS |
| | | | | | | IIAVEKIVHIANDLFLQEQKTLGADDTMLAKD |
| | | | | | | PASGICTLLYDSAPSGRFGTMTYLSKAAATY |
| | | | | | | VQEFLPHSICAMQ |
| 436 | 1786 | A | 3546 | 73 | 393 | CP*LTWELLEVKKAEVLQDSLDGRYSTPSSCL |
| | | | | | | EQPDSCRPYGRSFYALEEKHVIFSLDVGETDN |
| | | | | | | KGKGKTIRGI*TFKGRKGGTYQREHDANPLA |
| | | | | | | PXSARSCWMRKG |
| 437 | 1787 | A | 3554 | 5157 | 2939 | AVRAEPGLEELSSGLRAHSPSKITVCEPEAQG |
| | | | | | | SASGCRYAAHPHWGLGGAAAAGGSWEPQPP |
| | | | | | | RPVCEPAGRGKPPPAAPRSPLLPGSRRRPHA |
| | | | | | | AQPGARARTSPPPASARNMAARPAATLAWSL |
| | | | | | | LLLSSALLREGCRARFVAERDSEDDGEEPVVF |
| | | | | | | PESPLQSPTVLVAVLARNAAHTLPHFLGCLER |
| | | | | | | LDYPKSRMAIWAATDHNVDNTTEIFREWLK |
| | | | | | | NVQRLYHYVEWRPMDEPESYPDEIGPKHWP |
| | | | | | | TSRFAHVMKLRQAALRTAREKWSDYILFIDV |
| | | | | | | DNFLTNPQTLNLLIAENKTIVAPMIESRGLYS |
| | | | | | | NFWCGITPKGFYKRTPDY\VQIREWKRTGCFP |
| | | | | | | VPMVHSTFLIDLRKEASDKLTFYPPHQDYTW |
| | | | | | | TFDDIIVFAFSSRQAGIQMYLCNREHYGYLPIP |
| | | | | | | LKPHQTLQEDIENLIHVQIEAMIDRPPMEPSQ |
| | | | | | | YVSVVPKYPDKMGFDEIFMINLKIRRKGQGGD |
| | | | | | | RWLRTLYEQEIEVKIVEAVDGKALNTSQLKA |
| | | | | | | LNIEMLPGYRDPYSSRPLTRGEIGCFLSHyYV |
| | | | | | | WKEVIDRELEKTLVIEDDVRFEHQFKKKLMK |
| | | | | | | LMDNIDQAQLDWELIYIGRKRMQVKEPEKA |
| | | | | | | VPNVANLVEADYSYWTLGYVISLEGAQKLV |
| | | | | | | GANPFGKMLPVDEFLPVMYNKHPVAEYKEY |
| | | | | | | YESIWLKAFSAEPLLIYPTHYTGQPGYLSDTE |
| | | | | | | TSTIWDNETVATDWDRTHAWKSRKQSRIYSN |
| | | | | | | AKNTEALPPPTSLDTVPSRDEL |
| 438 | 1788 | A | 3563 | 130 | 527 | IFFNSSSLFCRVFCLFLRWSFTLVAQARVQ*C |
| | | | | | | NLSSLQPLPPGFK*FSCLSPPRS*DYRRPPPRPA |
| | | | | | | NFLYF**RQGPGQAGLELLT/S/GDPPTSA |
| | | | | | | SQSAGITGVSHRAWPVHAISTHISLVKTRPSLT |
| | | | | | | TLG |
| 439 | 1789 | A | 3565 | 446 | 1834 | LLQPAMRKSPGLSDCLWAWILLLSTLTGRSY |
| | | | | | | GQPSLQDELKDNTTVFTRILDRLLDGYDNRL |
| | | | | | | RPGLGERVTEVKTDIFVTSFGPVSDHDMEYTI |
| | | | | | | DVFFRQSWKDERLKPKGPMTVLRLNNLMAS |
| | | | | | | KIWTPDTFFHNGKKSVARNMTMPNKLLRITE |
| | | | | | | DGTLLYTMELTVR\AECPMAFGRDFPM\D\AH |
| | | | | | | ACPLKGSYAYTRAEVVYEWTREPARSVVV |
| | | | | | | AEDGSRLNQYDLLGQTVDSGIVQSSTGEYVV |
| | | | | | | MTTHFHLKRKIGYFVIQTYLPCIMTVILSQVSF |
| | | | | | | WLNRESVPARTVFGVTTVLTMTTLSISARNSL |
| | | | | | | PKVAYATAMDWFIAVCYAFVFSALIEFATVN |
| | | | | | | YFTKRGYAWDGKSVVPEKPKKVKDPLIKKN |
| | | | | | | NTYAPTATSYTPNLARGDPGLATIAKSATIEP |
| | | | | | | KEVKPETKPPEPKKTFNSVSKIDRLSRIAFPLL |
| | | | | | | FGIFNLVYWATYLNREPQLICAPTPHQ |
| 440 | 1790 | A | 3568 | 1 | 350 | STSSCFPAAAAAIMREIVHILQAGQCGNQIGAK |
| | | | | | | FWEVISDEHGIDPTGTYHGDSDLQLERINVYY |
| | | | | | | NEATGEAFVPSPTAIRGPRGPCLG*RPPVPAG |
| | | | | | | GKYTLVDMEPGTMIDSV |
| 441 | 1791 | A | 3569 | 2 | 1751 | FVAVAGAVSGEPLVHWCTQQLRKTFGLDVS |
| | | | | | | EEIIQYVLSIESAEEIREYVTDLLQGNEGKKGQ |
| | | | | | | FIEELITKWQKNDQELISDPLQQCFKKDEILDG |
| | | | | | | QKSGDHLKRGRKKGRNRQEVPAFTEPDTTAE |
| | | | | | | VKTPFDLAKAQENSNSVKKKTKFVNLYTREG |
| | | | | | | QDRLAVLLPGRRPCDCLGQKHKLINNCLICG |
| | | | | | | R1YCEQEGSGPCLFCGTLVCTHEEQDILRGDS |
| | | | | | | N\KSQKLLKKLMSGVENSGKVDISTKDLLPH |
| | | | | | | QELRIKSGLEKAIKHKDKLLEFDRTSIRRTQVI |
| | | | | | | DDESDYFASDSNQWLSKLERETLQKREEELR |
| | | | | | | ELRHASRLSKKVTIDFAGRKILEEENSLAEYH |
| | | | | | | SRLDETIQAIANGTLNQPLTKLDRSSEEPLGVL |
| | | | | | | VNPNMYQSPPQWVDHTGAASQKKAFRSSGF |
| | | | | | | GLEFNSFQHQLRIQDQEFQEGFDGGWCLSVH |
| | | | | | | QPWASLLVRGIKRVEGRSWYTPHRGRLWIAA |
| | | | | | | TAKKPSPQEVSELQATYRLLRGKDVEFPNDY |
| | | | | | | PSGCLLGCVDLIDCLSQKQFKEQFPDISQESDS |
| | | | | | | PFVFICKNPQEMVVKFPIKGNPKIWKLDSKIH |
| | | | | | | QGAKKGLMKQNKAV |
| 442 | 1792 | A | 3576 | 1 | 2019 | MPRSHTGERLCEGKEGSQCAENFSPNLSVTK |
| | | | | | | KTAGVKPYECTICGKAFMRLSSLTRHMRSIIT |
| | | | | | | AIRAI\EKPYKCKEC\GRAFSLSQILSK\IIERSH |
| | | | | | | TGEKPYKCKQCGKTFIYHQPFQRIIERTHIGEK |
| | | | | | | PYECKQCGKALSCSSSLRVHERIHTGEKPYEC |
| | | | | | | KQCGKAFSCSSSIRVHERTHTGEKPYACK\EC |
| | | | | | | GKAFIS\TTSVLTHMITHNGDRPYKCKECGKA |
| | | | | | | PIPPSFLRVHERIHTGEKPYKCKQCGKAFRWS |
| | | | | | | TSIQIHERIHTGEKPYKCKECGKSFSARPAFRV |
| | | | | | | HVRVHTGEKPYKCKECGKAFSRISYFRIHERT |
| | | | | | | HTGEKPYECKKCGKTFNYPLDLKIHKRNHTG |
| | | | | | | EKPYECKECAKTFISLENFRRHMITHTGDGPY |
| | | | | | | KCRDCGKVFIFPSALRTHERTHTGEKPYECKQ |
| | | | | | | CGKAFSGSSYIRIHKRTHTGEK\PYECKECGK |
| | | | | | | AFIYPTSFQGHMRMIITGEKPYKCKECGKAFS |
| | | | | | | LHSSFR\RHTRIHNYEKPLEC*Q\CGKAFSVSTS |
| | | | | | | LKKPMRNAQSDRKLYIKCEK*EKVFNSNRCF |
| | | | | | | QSCENSH*REKSCQCK*YRKRDTR*FMYSQV |
| | | | | | | PHNVSVSNGPYRICGSPIRLYNT*NISINRNL |
| | | | | | | VAVVTP*CSTLFKCLWCWCKRAALSVV*IIVQ |
| | | | | | | DSGRGRWLWVIPALWEAKAGGSRGQEIKTIL |
| | | | | | | ANTVKPHLY |
| 443 | 1793 | A | 3578 | 287 | 114 | DFYERKFEQFIEGHKQIVNKWRDLLCSWKRK |
| | | | | | | LSIIKKSVLQNNL*FSAASMRFQKVFF |
| 444 | 1794 | A | 3582 | 3335 | 1909 | HLFFSLFLAAMAMTGSTPCSSMSNHTKERVT |
| | | | | | | MTKVTLENFYSNLIAQIIEEREMRQKKLEKV |
| | | | | | | MEEEGLKDEEKRLRRSAHARKETEFLRLKRT |
| | | | | | | RLGLEDFESLKVIGRGAPGEVRLVQKKDTGH |
| | | | | | | VYAMKILRKADMLEKEQVGHIRAERDILVEA |
| | | | | | | DSLWVVKMFYSFQDKLNLYLIMEFLPGGDM |
| | | | | | | MTLLMKKDTLTEEETQFYLAETVLAIDSIHQL |
| | | | | | | GFIHRDIKPDNLLLDSKGHVKLSDFGLCTGLK |
| | | | | | | KAHRTEFYRNLNHSLPSDFTFQNMNSKRKAE |
| | | | | | | TWKENRRQLAFSTVGTPDYIAPEVFMQTGYN |
| | | | | | | KLCDWWSLGVIMYEMLIGYPPFCSETPQETY |
| | | | | | | KKVMNWKETLTFPPEVPLSEKAKDLILRFCCE |
| | | | | | | WEHRIGAPGVEEIKSNSFFEGVDWEHIRERPA |
| | | | | | | AISIEIKSIDDTSNFDEFPESDILICPTVATSNHPE |
| | | | | | | TDYKNKDWVPINYTYKRFEGLTARGAIPSYM |
| | | | | | | KAAK |
| 445 | 1795 | A | 3584 | 1 | 6169 | RTRQIEKRFAYSFLQQLIRYVDEAHQYILEFD |
| | | | | | | GGSRGKGEIIFPYEQEIKFFAKVVLPLIDQYFK |
| | | | | | | NHRLYFLSAASRPLCSGGHASNKEKEMVTSL |
| | | | | | | FCKLGVLVRHRISLFGNDATSIVNCLHILGQT |
| | | | | | | LDARTVMKTGLESVKSALRAFLDNAAEDLE |
| | | | | | | KTMENLKQGQFTHTRNQPKGVTQIINYITVA |
| | | | | | | LLPMLSSLFEHIGQHQFGEDLILEDVQVSCYRI |
| | | | | | | LTSLYALGTSKSIYVERQRSALGECLAAFAGA |
| | | | | | | FPVAFLETHLDKIINIYSIYNTKSSRERAALSLP |
| | | | | | | TNVEDVCPNTPSLEKLMEEIVELAESGIRYTQ |
| | | | | | | MPHVMEVILPMLGSYMSRWWEHGPENNPER |
| | | | | | | AEMCCTALNSEHMNTLLGNILKIIYNNLGIDE |
| | | | | | | GAWMKRLAVFSQPIINKVKPQLLKTHFLPLM |
| | | | | | | EKLKKKAATVVSEEDHLKAEARGDMSEAEL |
| | | | | | | LILDETLARDLYAFYPLLIRFGDYNRAKWL |
| | | | | | | KEPNPEAEELFRMVAEVFIYWSKSHNFKREE |
| | | | | | | QNFVVQNE1NNMSFLITDTKSKMSKAAVSDQ |
| | | | | | | ERKKMKRKGDRYSMQTSLWAALKRLLPIGL |
| | | | | | | NICAPGDQELIALAKNRFSLKDTEDEVRDIIRS |
| | | | | | | NIHLQGKLEDPAIRWQMALYKDLPNRTDDTS |
| | | | | | | DPEKTVERVLDIANVLFHLEQKSKRVGRRHY |
| | | | | | | CLVEHPQRSKKAVWHKLLSKQRKRAVVACF |
| | | | | | | RMAPLYNLPRHRAVNLFLQGYEKSWIETEEH |
| | | | | | | YFEDKLIEDLAKPGAEPPEEDEGTKRVDPLHQ |
| | | | | | | LILLFSRTALTEKCKLEEDFLYMAYADIMAKS |
| | | | | | | CHDEEDDDGEEEVKSFEEKEMEKQKLLYQQ |
| | | | | | | ARLHDRGAAEMVLQTISASKGETGPMVAAT |
| | | | | | | LKLGIAILNGGNSTVQQKMLDYLKEKKDVGF |
| | | | | | | FQSLAGLMQSCSVLDLNAFERQNKAEGLGM |
| | | | | | | VTEEGSGEKVLQDDEFTCDLFRFLQLLCEGH |
| | | | | | | NSDFQNYLRTQTGNNTTVNIIISTVDYLLRVQ |
| | | | | | | ESISDFYWYYSGKDVIDEQGQRNFSKAIQVA |
| | | | | | | KQVFNTLTEYIQGPCTGNQQSLAHSRLWDAV |
| | | | | | | VGFLHVFAHMQMKLSQDSSQIELLKELMDLQ |
| | | | | | | KDMVVMLLSMLEGNVVNGTIGKQMVDMLV |
| | | | | | | ESSNNVEMILKFFDMFLKLKDLTSSDTFKEYD |
| | | | | | | PDGKGVIFKRDFHICAMESHKHYTQSETEFLL |
| | | | | | | SCAETDENETLDYEEFVKRFHEPAKDIGFNVA |
| | | | | | | VLLTNLSEHMPNDTRLQTFLELAESVLNYFQP |
| | | | | | | FLGRIEIMGSAKRIERVYFEISESSRTQWEKPQ |
| | | | | | | VKESKRQFIFDVVNECIGEKEKMELFVNFCED |
| | | | | | | TIFEMQLAAQISESDLNERSANKEESEKERPEE |
| | | | | | | QGPRMAFFSILTVRSALPALRYNTLTLMRMLS |
| | | | | | | LKSLKKQMKKVKKMTVKDMVTAFFSSYWSI |
| | | | | | | FMTLLHFVASVFRGPFRIICSLLLGGSLVEGA |
| | | | | | | KKIKVAELLANMPDPTQDEVRGDGEEGERKP |
| | | | | | | LEAALPSEDLTDLKELTEESDLLSDIFGLDLKR |
| | | | | | | EGGQYKLIPHNPNAGLSDLMSNPVPMPEVQE |
| | | | | | | KFQEQKAKEEEICEEKEETKSEPEKALEGEDGE |
| | | | | | | KEEKAKEDKGKQKLRQLHTHRYGEPEVPESA |
| | | | | | | FWKKIIAYQQKLLNYFARNFYNMRMLALFV |
| | | | | | | AFAINFILLFYKVSTSSVVEGKELPTRSSSENA |
| | | | | | | KVTSLDSSSHRIIAVHYVLEESSGYMEPTVRIL |
| | | | | | | PILHTVISFFCIIGYYCLKVPLVIFKREKEVARIK |
| | | | | | | LEFDGLYITEQPSEDDIKGQWDRLVINTQSPP |
| | | | | | | NNYWDKFVKRKVMDKYGEFYGRDRISELLG |
| | | | | | | MDKAALDFSDAREKKKPKKDSSLSAVLNSID |
| | | | | | | VKYQMWKLGVVFTDNSFLYLAWYMTMSVL |
| | | | | | | GHY\NNFPFAAHLLDIAMGFKTLRTLLSSVTH |
| | | | | | | NGKQLVLTVGLLAVVVYLYTVVAFNFFRKF |
| | | | | | | YNKSEDGDTPDMKCDDMITCYMFHMYVGV |
| | | | | | | RAGGGIGDEIEDPAGDEYEIYRIIFDITFFFFVI |
| | | | | | | VILLAIIQGLDAFGELRDQQEQVKEDMETKC |
| | | | | | | FICGIGNDYFDTVPHGPETHTLQEHNLANYLF |
| | | | | | | FLMYLINKDETEHTGQESYVWKMYQERCWE |
| | | | | | | FFPAGDCFRKQYEDQLN |
| 446 | 1796 | A | 3592 | 1 | 355 | AGLELLNSDDPPALASQSAGITGVTRTPSLFF* |
| | | | | | | DTVLLCCSGWSAVAPSRLTAALPS*AQAVCL |
| | | | | | | SLPRSWDYRRW/PPHPANFCIFCRDE/SLA/ML |
| | | | | | | PRLVSNSWTQAILLPRPPKMLQLQV |
| 447 | 1797 | A | 3598 | 1202 | 1070 | LFVGGGPICPEGASGFAPGPAPAPRVGVDAEV |
| | | | | | | GR*V*GAAASQGAIGSLRPRPTGPGHPGAWL |
| | | | | | | QVWGAAAVCAGPAM*/AVRAKRGPRAG*EP |
| | | | | | | NSPWRSGVLAA\RAVGAGPWP*P*PGCS*ARG |
| | | | | | | PSSRSAPGLASGPAAPLLQGVHSSAGPLLCYI |
| | | | | | | NGTLALGLKP**AWGWGEWRPKG |
| 448 | 1798 | A | 3604 | 3115 | 557 | FRRKGGGGPKDFGAGLKYNSRHEKVNGLEE |
| | | | | | | GVEFLPVNNVKKVEKHGPGRWVVLAAVLIG |
| | | | | | | LLLVLLGIGFLVWHLQYRDVRVQKVFNGYM |
| | | | | | | RLTNENFVDAYENSNSTEFVSLASKVKDALKL |
| | | | | | | LYSGVPFLGPYHKESAVTAFSEGSVIAYYWSE |
| | | | | | | PSIPQHLVEEAERVMAEERVVMLPPRARSLKS |
| | | | | | | FVVTSVVAFPTDSKTVQRTQDNSCSFGLHAR |
| | | | | | | GVELMRFTTPGFPDSPYPAHARCQWALRGD |
| | | | | | | ADSVLSLTFRSFDLASCDERGRHLV\TVYNT\L |
| | | | | | | SPMEPHA\LVQLCGTYPPSYNLTFHS\S\QNVL |
| | | | | | | LITLITNTERRIIPG\FEATFFQLPRMSSCGGRL |
| | | | | | | RKAQGTFNSPYYPGHYPPNIDCTWNLEVPNN |
| | | | | | | QHYKVRFKFFYLLEPGVPAGTCPKDYVEING |
| | | | | | | EKYCGERSQFVVTSNSNKITVRFHSDQSYTDT |
| | | | | | | GFLAEYLSYDSSDPCPGQFTCRTGRCIRKELR |
| | | | | | | CDGWADCTDHSDELNCSCDAGHQFTCKNKF |
| | | | | | | CKPLFWVCDSLNDCGDNSDEQGCSCP\AQTF |
| | | | | | | RCSNGKCLSKSQQCNGKDDCGDGSDEASCP |
| | | | | | | KVNVVTCTKHTYRCLNGLCLSKGNPECDGK |
| | | | | | | EDCSDQSDEKDCDCGLRSFTRQARVVGGTD |
| | | | | | | ADEGEWPWQVSLHALQQGHICQASLISPNWL |
| | | | | | | VSAAHCYIDDRGFRYSDPTQWTAFLGLHDQS |
| | | | | | | QRSAPGVQERRLKRIIISHPFFNDFTFDYDIALL |
| | | | | | | ELEKPAEYSSMVTRPICLPDASHVFPAGKAIWV |
| | | | | | | TGWGHTQYGGTGALILQKGEIRVINQTTCEN |
| | | | | | | LLPQQITPRMMCVGFLSGGVDSCQGDSGGPL |
| | | | | | | SSVEADGRIFQAGVVSWGDGCAQENKPG\TY |
| | | | | | | TRLPLFRDWIICENTGV |
| 449 | 1799 | A | 3618 | 2 | 613 | FVSGSPWRMDGSTERLEARRPAGRLPWSSRQ |
| | | | | | | EMTRRPSLMAGRQHGWSAQQSATVANPVPG |
| | | | | | | ANPDLLPHFLQEPEDVYIVKNKPVLLVCKAV |
| | | | | | | PATQIFFKCNGEWVRQVDHVIERSTDGSSGLP |
| | | | | | | TMEVVRINVSRQQVEKVFGLEEYWCQCVAWS |
| | | | | | | SSGTTKSQKAYIRIAYLRKNFEQEPLAKEVSL |
| | | | | | | EQGIVLPCRPPEGIPPAE |
| 450 | 1800 | A | 3620 | 1 | 2676 | MEPSLGQGMDLTCPFGVSPACGAQASWSIFG |
| | | | | | | ADAAEVPGTRGHSQQEAAMPHIPEDEEPPGE |
| | | | | | | PQAAQSPAGQQGPPTAGVSCSPTPTIVLTGDA |
| | | | | | | TSPEGETDKNLANRVHSPHKRLSHRHLKVST |
| | | | | | | ASLTSVDPAGHIIDLVNDQLPDISISEEDKKKN |
| | | | | | | LALLEEAKLVSERFLTRRGRKSRSSPGDSPSA |
| | | | | | | VSPNLSPSASPTSSRSNSLTVPTPPEGDEADVS |
| | | | | | | SPHPGEPNVPKGLADRKQNDQRKVSQGRLAP |
| | | | | | | RPPPVEKSKEIAIEQKENFDPLQYPETEPKGLA |
| | | | | | | PVTNSSGKMALNSPQPGPVESELGKQLLKTG |
| | | | | | | WEGSPLPRSPTQDAAGVGPPASQGRGPAGEP |
| | | | | | | MGPEAGSKAELPPTVSRPPLLRGLSWDSGPEE |
| | | | | | | PGPRLQKVLAKLPLAEEEKRPAGKAGGKLAK |
| | | | | | | APGLKDFQIQVQPVRMQKLTKLREEHILMRN |
| | | | | | | QNLVGLKLPDLSEAALEQEKGLPSELSPAIEEE |
| | | | | | | ESKSGLDVMPNISDVLLRKLRVHRSLPGSAPP |
| | | | | | | LTEKEVENVFVQLSSAFRNDSYTLESEINQAE |
| | | | | | | RERNLTEENTEKELENFKASITSSASLWHIICE |
| | | | | | | HRETYQKLLEDIAVLHRLAARLSSRAEVVGA |
| | | | | | | VRQEKRMSKATEVMMQYVENLKRTYEKDH |
| | | | | | | AELMEFKKLANQNSSRSCGPSEDGVLRTARS |
| | | | | | | MSLTLGKNMPRERVSVAVVPKFNALNLPGQ |
| | | | | | | TPSSSSIPSPALSESPNGKGSLPVTSALPALLE |
| | | | | | | NGKTNGDPDCEASAPALTLSCLEELSQETKA |
| | | | | | | RMEEEAYSKGFQEGLKKTKELQDLKEEEEEQ |
| | | | | | | KSESPEEPEEVEETEEEEKDPRSSKLEELVHFL |
| | | | | | | QVMYPKLCQHWQVIWMMAAVMLVLTVVL |
| | | | | | | GLYNSYNSCAEQADGPLGRSTCSAAQKDSW |
| | | | | | | WSSGLQHEQPTEQ |
| 451 | 1801 | A | 3623 | 504 | 198 | QLIQHQTVHTGRKLYECKECGKAFNQGSTLI |
| | | | | | | RHQRIHTGEKPYECKVCGKAFRVSSQLKQHQ |
| | | | | | | RIHTGERPYQCKELKGRGAEMLAVLAVKEQ |
| | | | | | | NRTPVNYGK |
| 452 | 1802 | A | 3628 | 2 | 195 | MTCLHSAKAFHY*SSCSFSCEEGFALIGPEVV |
| | | | | | | QCTALGVWTAPAPVCIAVQCQIILEALNEGT |
| | | | | | | MG*DYPFTAFAYGSSCKYECHTVYRVRGLD |
| | | | | | | MLHSRGCYLWNGHFTT*EAISCEPLERPCH*S |
| | | | | | | V*CSFSCEEGFALIGPEVVQCTALGVWTAPAP |
| | | | | | | VCIAVQCQHLEALNEGTMG |
| 453 | 1803 | A | 3637 | 662 | 142 | IQAKGLGIWHVPNKSPMQHWR\KGSLLRYRT |
| | | | | | | DTGFLQTLGHNLLGIYQKYPVKYGEGKCWT |
| | | | | | | DNGPVIPVVYDFGDAQKTASYYSPYGQREFT |
| | | | | | | AGFVQPRVFNNERAANALCAGMRVTGCNTE |
| | | | | | | HHCIGGGYFPEASPQQCGDFSGFDWSGYGT |
| | | | | | | \HVGYSSSREITE\AAVLLFYR |
| 454 | 1804 | A | 3641 | 1 | 362 | TQVHPAMLGLDELGRSGCGHCTQADLRFGD |
| | | | | | | AAGRDPGQDNDRNTAEPAFPPPPRVMAMA |
| | | | | | | ALRAPAQSSVTFEDVAVNFSLEEWSLLNEAQ |
| | | | | | | GCLYHDVMLETLTLISSLGKVLLLNCDLS |
| 455 | 1805 | A | 3646 | 2 | 414 | AAAGRGASGALTGEGGGEQGRRVGLGSRAH |
| | | | | | | SLLLGPTFNSCQVSSQPPRVAGLGLPLKHEPS |
| | | | | | | RPQPPSPRGPRTVRAGVPGAHPQDTPCPEFVR |
| | | | | | | PRKVPLVGEAPGLPPEERSRGWRRDTPGLQE |
| | | | | | | SRVRAPSYDDIT |
| 456 | 1806 | A | 3656 | 396 | 8 | QIVSFNSYLTLYTKNNLKSMKDLNVNTEMIK |
| | | | | | | LLELKNTHNLG*AKFFLN*IQKALIKRKILIHW |
| | | | | | | P/LIKIK/SFCSLSDTIKKMKRQTIVWEQTFTIIII |
| | | | | | | SVKELVSRIYEAFLQFNKTVNRFVFDIKKEQK |
| | | | | | | F |
| 457 | 1807 | A | 3660 | 14 | 1961 | SEAKLGGPTGMDLWQLLLTLALAGSSDAFSG |
| | | | | | | SEATAAILSRAPWSLQSVNPGLKTNSSKEPKF |
| | | | | | | TKCRSPERETFSCHWTDEVHIIGTKNLGPIQLF |
| | | | | | | YTRRNTQEWTQEWKECPDYVSAGENSCYFN |
| | | | | | | SSFTSIWIPYCIKLTSNGGTVDEKCFSVDEIVQ |
| | | | | | | PDPPIALNWTLLNVSLTGIHADIQVRWEAPRN |
| | | | | | | ADIQKGWMVLEYELQYKEVNETKWKMMDP |
| | | | | | | ILTTSVPVYSLKVDKEYEVRVRSKQRNSGNY |
| | | | | | | GEFSEVLYVTLPQMSQFTCEEDFYFPWLLITIP |
| | | | | | | GIFGLTVMLFVFLFSKQQRIKMLILPPVPVPKI |
| | | | | | | KGIDPDLLKEGKLEEVNTILAIHDSYKPEFHS |
| | | | | | | DDSWVEFIELDIDEPDEKTEESDTDRLLSSDH |
| | | | | | | EKLHINLGVKDGDSGRTSCCEPDILETDFNAII |
| | | | | | | DIHEGTSEVAQPQRLKGEADLLCLDQKNQNN |
| | | | | | | SPYHDACPATQQPSVIQAEKNKPQPLPTEGAE |
| | | | | | | STHQAAHIQLSNPSSLSNIDFYAQVSDITPAGS |
| | | | | | | VVLSPGQKNKAGMSQCDMHPEMVSLCQENF |
| | | | | | | LMDNAYFCEADAKKCIPVAPHTKVESHIQP\S |
| | | | | | | LNQEDIYTTESLT\TAAGSP\GTGEHVPGSEM |
| | | | | | | PVPDYTSIHIVQSPQGL1LNATALPLPDKEFLS |
| | | | | | | SCGYVSTDQLNKIMP |
| 458 | 1808 | A | 3663 | 154 | 462 | TRAPASGRSGAGLALSANAPDSGGHPGATEG |
| | | | | | | PAGSLAHASGSARGTWRVRGRGSHGWERTV |
| | | | | | | GAGGCANPALHSCASAPRGTGRVSALGPK |
| | | | | | | TGSSPLSSPKG |
| 459 | 1809 | A | 3664 | 902 | 135 | LGKYNTSMALFDFVLHNSTGERYITEDDVIQ |
| | | | | | | SQNALGKYNTSMALPESNSFEKTILESPYYVD |
| | | | | | | LNQTLPVQVSLHTSDPNLVVFLDTCRASPTSD |
| | | | | | | FASPTYDLLKSGCSRDETCK\VYPLFGHYGRF |
| | | | | | | QFNAFKFLRSMSSVYLQCKVLICDSSDHQSRC |
| | | | | | | \NQGCVSRSKRDISSYKWKTDSIIGPIRLKRDR |
| | | | | | | SA\NGNSGFQHETHAEETPNQPFNSVHLFSFM |
| | | | | | | VLALNVVTVATITVRHFVNQRADYQ\YQKLQ |
| | | | | | | NY |
| 460 | 1810 | A | 3670 | 850 | 557 | LGILMSPQVEAGEI*ALLTPPPGCMQFSPLTL/P |
| | | | | | | K*WVSPGLTP/PPPEVPSVFLVEPGLPHAGQA |
| | | | | | | GLDLL\TSGDPPASTSQSARTTDVSHRAQPLAI |
| 461 | 1811 | A | 3671 | 2472 | 2099 | IGVLAFETGSCSVTRLYCIGIIMPHCSLDLAGS\ |
| | | | | | | TSAFRIAGTTSVHHHPQLTFFFFWIETGSHGV |
| | | | | | | VQTGL*LLALSNPPALASQIAGISGMSHRAWP |
| | | | | | | GLVLYSLEFSLLCASQSLIMLFTCYNE |
| 462 | 1812 | A | 3672 | 394 | 110 | VKPVNGESKRD*GADTQTCEGEADEQLQT\N |
| | | | | | | CYYD/STKSFFYISCG*K\RKPTWAENRRLNA |
| | | | | | | KMFGIPLHSNSDPWGYEEREVIGFHRSRVSRG |
| | | | | | | HGS |
| 463 | 1813 | A | 3673 | 348 | 1 | QRNPFSAGHPQRPPTSGSQSELLAQPRLRPGR |
| | | | | | | KSSFSRDQDVW* SQAVPKRQ*QRNPFSAGHP |
| | | | | | | QRPPTSGSQSELLAQPRLRPGRKSSFSRDQDV |
| | | | | | | WPGQKPRPSQQQHQMCASPTLGQRSPFALEP |
| | | | | | | VPAYHGGRDPFASARPSPVGIPKPRAAPAGG |
| | | | | | | GWRRIRPKSSTK |
| 464 | 1814 | A | 3676 | 2253 | 320 | PVIQRCSQPYGFSLLISFFLKCVSETSQQPPSR |
| | | | | | | KVFQLLPSFPTLTRSKSHESQLGNRIDDVSSM |
| | | | | | | RFDLSHGSPQMVRRDIGLSVTHEFSTKSWLS |
| | | | | | | QVCHVCQKSMIFGVKCKHCRLKCHNKCTKE |
| | | | | | | APACRISFLPLTRLRRTESVPSDINNPVDRAAE |
| | | | | | | PHFGTLPKALTKKEHPPAMNHLDSSSNPSSTT |
| | | | | | | FSTPSSPAFFPTSSNPSSATIW\NPSP\GQR\DSR |
| | | | | | | FNFPSC/AYFIHFIR\Q\QFIFPDISAFAHAAPLPE |
| | | | | | | AADGTRLDDQPKADVLEAHEAEAEEPEAGK |
| | | | | | | SEAEDDEDEVDDLPSSRRPWRGPISRKASQTS |
| | | | | | | VYLQEWDIPFEQVELGEPIGQGRWGRVHRGR |
| | | | | | | WHGEVAIRLLEMDGHNQDIILKLPKKEVMN |
| | | | | | | YRQTRHENVVLFMGACIVINPPHLAIITSFCKG |
| | | | | | | RTLHSFVRDPKTSLDINKTRQIAQEIIKGMGY |
| | | | | | | LHAKGIVHKDLKSRNVFYDNG\KVVITDFGLF |
| | | | | | | \GISGVVP\EGRRENQLKLSHDWLCYLAPEIVR |
| | | | | | | EMTPGKDEDQLPFSKAADVYAFGTVWYELQ |
| | | | | | | ARDWPLKNQAAEASIWQIGSGEGMKRVLTS |
| | | | | | | VSLGKEVSENLSACWAPDLQERPS\FSLLMD |
| | | | | | | MLEKLPKLNRRLSHPGHF*KSADINSSKVVPR |
| | | | | | | FERFGLGVLESSNPKM |
| 465 | 1815 | A | 3679 | 8 | 803 | TPSPAWWNSTWADTFSLLLALAVALYLGYY |
| | | | | | | WACVLQTLIRAFCASNTEDLETVVNHIKHRYP |
| | | | | | | QAPLLAVGISFGGILVLNHLAQARQAAGLVA |
| | | | | | | ALTLSACWDSFETTRSLETPLNSLLFNQPLTA |
| | | | | | | GLCQLVERLSYIE*DLQARTIRQFDERYTSVA |
| 466 | 1816 | A | 3684 | 3 | 307 | SSQYIVQSKTKIFL*AAREKQ/RHTGRRFSRLS |
| | | | | | | ANISSQTGEARGQWPSVFKVLKEKKLSTKKS |
| | | | | | | FGQK*GR\RKTFPDKQK/IREFDTTRPTIQEML |
| | | | | | | TGVLQG |
| 467 | 1817 | A | 3687 | 2465 | 837 | ELPTPLIAAHQLYNYVADHASSYHMKPLRMA |
| | | | | | | RPGGPEHNEYALVSAWHSSGSYLDSEGLRHQ |
| | | | | | | DDFDVSLLVCHCAAPFEEQGEAERHVLRLQF |
| | | | | | | FVVLTSQRELFPRLTADMRRFRKPPRLPPEPE |
| | | | | | | APGSSAGSPGEASGLILAPGPAPLFPPLAAEVG |
| | | | | | | MARARLAQLVRLAGGHCRRDTLWKRLPLLE |
| | | | | | | PPGPDRLRLGGRLALAELEELLEAVHAKSIGD |
| | | | | | | IDPQLDCFLSMTVSWYQSLIKVLLSRFPQSCR |
| | | | | | | HFQSPDLGTQYLVVLNQKFTDCFVLVFLDSH |
| | | | | | | LGKTSLTVVFREPFPVQPQDSESPPAQLVSTY |
| | | | | | | HHLESVINTACFTLWTRLL*GSGLDH*MSLFL |
| | | | | | | ESWAYQIACQRQD*PALLGPRASQTLSDTKG |
| | | | | | | FVTMS*GSAAPAWQQEPPSPNTHSH*PIQDSR |
| | | | | | | ESGQPRGPLGPFWGTPFGPPGRVSGVHTGWQ |
| | | | | | | TPPRAPLPESCPL\PLTTVSHLCPLSLRVFTSHL |
| | | | | | | DITAGHSHRDDTWVPTPALPLKHLRPPSSPFA |
| | | | | | | LGPWVSHPLMRWVQKLSHLHSNPGTGFSMG |
| | | | | | | GKQQRN |
| 468 | 1818 | A | 3691 | 960 | 499 | QTCRKDKRAIYPHFQNE*MNEIKAI*SGTGGI |
| | | | | | | QCFHSQNDSAFFFFLFLLETEFCSAA/TVQWH |
| | | | | | | DPLSMQPPPPGFKQFTCLSLLSSWNYREAPPPF |
| | | | | | | PGNP\*FLVKTGFPHVGQTGFELLTSSDLAPLA |
| | | | | | | SQNGGITGMSPCAWPFFFFFFFGLC |
| 469 | 1819 | A | 3714 | 4747 | 495 | MAYSWQTDPNPNESHEKQYEHQEFLFVNQP |
| | | | | | | HSSSQVSLGFDQIVDEISGKIPHYESEEDENTFF |
| | | | | | | VFTAPKWDSTGHSLNEAHQISLNEFTSKSREL |
| | | | | | | SWHQVSKAPAIGFSPSVLPKPQNTNKECSWG |
| | | | | | | SPIGKHHGADDSRFSILAPSFTSLDKINLEKEL |
| | | | | | | ENENHNYHIGFESSIPPTNSSFSSDFMPKEENK |
| | | | | | | RSGHVNIVEPSLMLLKGSLQPGMWESTWQK |
| | | | | | | NIESIGCSIQLVEVPQSSNTSLASFCNKVKKIR |
| | | | | | | ERYHAADVNFNSGKIWSTTTAFPYQLFSKTL |
| | | | | | | FNIHIFIDNSTQPLHPMPCANYLVKDLIAEILH |
| | | | | | | FCTNDQLLPKDHILSVWGSEEFLQNDHCLGS |
| | | | | | | HKMFQKDKSVIQLHLQKSREAPGKLSRKHEE |
| | | | | | | DHSQFYLNQLLEFMHIWKVSRQCLLTLIRKY |
| | | | | | | DFHLKYLLKTQENVYNIIEEVKKICSVLGCVE |
| | | | | | | TKQITDAVNELSLILQRKGENFYQSSETSAKG |
| | | | | | | LIEKVTTELSTSIYQLINVYCNSFYADFQPVNV |
| | | | | | | PRCTSYLNPGLPSIILSFTVYAAHNIPETWVHR |
| | | | | | | INFPLEIKSLPRESMLTVKLFGIACATNNANLL |
| | | | | | | AWTCLPLFPKEKSILGSMLFSMTLQSEPPVEM |
| | | | | | | ITPGVWDVSQPSPVTLQIDFPATGWEYMKPD |
| | | | | | | SEENRSNLEEPLKECIKHIARLSQKQTPLLLSE |
| | | | | | | EKKRYLWFYRFYCNNENCSLPLVLGSAPGW |
| | | | | | | DERTVSEMHTILRRWTFSQPLEALGLLTSSFP |
| | | | | | | DQEIRKVAVQQLDNLLNDELLEYLPQLVQAV |
| | | | | | | KFEWNLESPLVQLLLHRSLQSIQVAHRLYWL |
| | | | | | | LKNAENEAYFKSWYQKLLAALQFCAGKALN |
| | | | | | | DEFSKEQKLIKILGDIGERVKSASDHQRQEVL |
| | | | | | | KKEIGRLEEFFQDVNTCHLPLNPALCIKGIDH |
| | | | | | | DACSYFTSNALPLKITFINANLMGKNISIIFKA |
| | | | | | | GDDLRQDMLVLQLIQVMDNIWLQEGLDMQ |
| | | | | | | MIIYRCLSTGKDQRLVQMVPDAVTLAKIHRH |
| | | | | | | SGLIGPLKENTTKKWFSQHNHLKADYEKALR |
| | | | | | | NFFYSCAGWCVVTFILGVCDRHINDNIMLTKS |
| | | | | | | GHMPIDDFGKFLGHAQTFGGIKRDRAPFIFTS |
| | | | | | | EM\EYFITEGG\KNPQHFQDFV\ELCCRAYNIIR |
| | | | | | | KHSQLLL\NLL\EMMLYAG\LPELSGI\QDLKY |
| | | | | | | VYNNLRPQDTDLEATSHFTKKIKESLECFPVK |
| | | | | | | LNNLIHTLAQMSAIISPAKSTSQTFPQESCLLST |
| | | | | | | TRSIERATILGFSKKSSNLYLIQVTHSNNETSL |
| | | | | | | TEKSFEQFSKLHSQLQKQFASLTLPEFPHWW |
| | | | | | | HLPFTNSDIIRRFRDLNHYMEQILNVSHEVTN |
| | | | | | | SDCVLSFFLSEAGQQTVEESSPVYLGEKFPDK |
| | | | | | | KPKVQLVISYEDVKLTILVKHMKNIHLPDGSA |
| | | | | | | PSAHVEPYLLPYPSEVRRRKTKSVPKCTDPTY |
| | | | | | | NEIVVYDEVTELQGHVLMLIVKSKTVFVGAI |
| | | | | | | NIRLCSVPLDKEKWYPLGNSII*PLLLFSSFGM |
| | | | | | | KSLEKDEFVGGMLLSNPIW |
| 470 | 1820 | A | 3718 | 430 | 75 | SHGSISLLNLHQGCVFLPSLPAQGLRCYRCLA |
| | | | | | | VLEGASCSVVSCPFLDGVCVSQKVSS/CWQ*/ |
| | | | | | | CPWGARAEGRLSAVVDSQISCCKGDLCNAV |
| | | | | | | VLAAGSPWALCVQLLLSLGSVFLWALL |
| 471 | 1821 | A | 3723 | 891 | 494 | LRQSLINSVPQAGVQWRDSSLQAPPPRPTPLS |
| | | | | | | CLSLPSSWDYRRLPPCLANFLYF**RRGPTML |
| | | | | | | ARMVLIS*PRDPPASASQ\STEITGGSHRAQHP |
| | | | | | | TDSRDHSERSVKKSHIEVISELRMKVIKCKVAF |
| | | | | | | SKNPI |
| 472 | 1822 | A | 3734 | 443 | 251 | GFIET*NFCVSKDTSKKLS/RLPTKWKNVFAN |
| | | | | | | *ISDKGLVSRICQELLRHLDAEQVSSTAGLSL |
| 473 | 1823 | A | 3746 | 3 | 500 | THASGGARSGAGWAGRGVRAGTEAGRQGIF |
| | | | | | | LTLSILRTRDLPSGAMSEGVDLIDIYADEEFNQ |
| | | | | | | DPEFNNTDQIDLYDDVLTATSQPSDDRSSSTE |
| | | | | | | PPPPVRQEPSPKPNNKTPAILYTYSGLRNRRA |
| | | | | | | AVYVGSFSWWTTDQQLIQVIRSIGVYDVGEV |
| | | | | | | KFAENRAK |
| 474 | 1824 | A | 3753 | 2 | 5262 | RPLFAEEGGIYAVLVCMQEYKTSV\LVQQAG |
| | | | | | | LAALKMLAVASSSEIPTFVTGRDSIHSLFDAQ |
| | | | | | | MTREIFASIDSATRPGSESLLLTVPAAVILMLN |
| | | | | | | TEGCSSAARNGLLLLNLLLCNHHTLGDQIITQ |
| | | | | | | ELRDTLFRHSGIAPRTEPMPTTRTILMMLLNR |
| | | | | | | YSEPPGSP\ERAALETPIIQGQDGSPELLIRSLV |
| | | | | | | GGPSAELLLDLERVLCREGSPGGAVRPLLKRL |
| | | | | | | QQETQPFLLLLRTLDAPGPNKTLLLSVLRVIT |
| | | | | | | RLLDFPEAMVLPWHEVLEPCLNCLSGPSSDSE |
| | | | | | | IVQELTCFLHRLASMHKDYAVVLCCLGAKE1 |
| | | | | | | LSKVLDKHSAQLLLGCELRDLVTECEKYAQL |
| | | | | | | YSNLTSSILAGCIQMVLGQIEDHRRTHQPINIP |
| | | | | | | FFDVFLRHLCQGSSVEVKEDKCWEKVEVSSN |
| | | | | | | PHRASKLTDHNPKTYWESNGSTGSHYITLHM |
| | | | | | | HRGVLVRQLTLLVASEDSSYMPARVVVFGG |
| | | | | | | DSTSCIGTELNTVNVMPSASRVILLENLNRFW |
| | | | | | | PIIQIRIKRCQQGGIDTRVRGVEVLGPKFTFWP |
| | | | | | | LFREQLCRRTCLFTIRAQAWSRDIAEDHRRL |
| | | | | | | LQLCPRLNRVLRHEQNFADRFLPDDEAAQAL |
| | | | | | | GKTCWEALVSPLVQNITSPDAEGVSALGWLL |
| | | | | | | DQYLEQRETSRNPLSRAASFASRVRRLCHLL |
| | | | | | | VHVEPPPGPSPEPSTRPFSKNSKGRDRSPAPSP |
| | | | | | | VLPSSSLRNITQCWLSVVQEQVSRFLAAAWR |
| | | | | | | APDFVPRYCKLYEHLQRAGSELFGPRAAFML |
| | | | | | | ALRSGFSGALLQQSFLTAAHMSEQFARYIDQ |
| | | | | | | QIQGGLIGGAPGVEMLGQLQRHLEPIMVLSG |
| | | | | | | LELATTFEHFYQHYMADRLLSFGSSWLEGAV |
| | | | | | | LEQIGLCFPNRLPQLMLQSLSTSEELQRQFHLF |
| | | | | | | QLQRLDKLFLEQEDEEEKRL*EEEEEEEEEEA |
| | | | | | | EKELFIEDPSPAISILVLSPRCWPVSPLCYLYHP |
| | | | | | | RKCLPTEFCDALDRPSSFYSQSQNHPVLDMG |
| | | | | | | PHRRLQWTWLGRAELQFGKQILHVSTVQMW |
| | | | | | | LLLKFNQTEEVSVETLLKDSDLSPELLLQALV |
| | | | | | | PLTSGNGPLTLHEGQDFPHGGVLRLHEPGPQ |
| | | | | | | RSGEALWLIPPQAYLNVEKDEGRTLEQKRNL |
| | | | | | | LSCLLVRILKAHGEKGLHIDQLVCLVLEAWQ |
| | | | | | | KGPNPPGTLGHTVAGGVACTSTDVLSCILHLL |
| | | | | | | GQGYVKRRDDRPQILMYAAPEPMGPCRGQA |
| | | | | | | DVPFCGSQSETSKPSPEAVATLASLQLPAGRT |
| | | | | | | MSPQEVEGLMKQTVRQVQETLNLEPDVAQH |
| | | | | | | LLAHSHWGAEQLLQSYSEDPEPLLLAAGLCV |
| | | | | | | HQAQAVPVRPDHCPVCVSPLGCDDDLPSLCC |
| | | | | | | MHYCCKSCWNEYLTTRIEQNLVLNCTCPIAD |
| | | | | | | CPAQPTGAFIRAIVSSPEVISKYEKALLRGYVE |
| | | | | | | SCSNLTWCTNPQGCDRILCRQGLGCGTTCSK |
| | | | | | | CGWASCFNCSFPEAHYPASCGHMSQWVDDG |
| | | | | | | GYYDGMSVEAQSKHLAKLISKRCPSCQAPIE |
| | | | | | | KNEGCLHMTCAKCNHGFCWRCLKSWKPNH |
| | | | | | | KDYYNCSAMVSKAARQEKRFQDYNERCTFH |
| | | | | | | HQAREFAVNLRNRVSAIHEVPPPRSFTFLNDA |
| | | | | | | CQGLEQARKVLAYAGVYSFYSQDAEYMDVV |
| | | | | | | EQQTENLELHTNALQILLEETLLRGRDLASSL |
| | | | | | | LLRADCLSTGMELLRRIQERLLAILQHSAQD |
| | | | | | | FRVGLQSPSVEAWEAKGPNMPGSQPQASSGP |
| | | | | | | EAEEEEEDDEDDVPEWQQDEFDEELDNDSFS |
| | | | | | | YDESENLDQETFFFGDEEEDEDEAYD |
| 475 | 1825 | A | 3754 | 1093 | 96 | GTSRNQHSPKTHA*RSS/WPQPPPLFLPPLQPQ |
| | | | | | | ATGRRRERTRTQQRTAALLTDGTTKTGAAW |
| | | | | | | SRRPSLCWPSRTTGAPGAK*AVLVRSATFITN |
| | | | | | | PPNPQSPTGAAGKLRAPGNRAGISEPSSQEPPP |
| | | | | | | DGPASITGVAQSPATRATPSLPCLHVPAP |
| | | | | | | SRGQTLGVRTTGRASRLTVDRSRISWPGRSA |
| | | | | | | RSGGGRWRPNAPRGRWPRM*SWEPGSWTE |
| | | | | | | PWRWPFPAAESPPHRCIYCTNHVSPAGPARPS |
| | | | | | | HVYIIRATINSISHPLCRAQSSPWEAAGVWRR |
| | | | | | | PAQPAPTSDVNTNLLRKPRVKRHDLIYQFLGN |
| | | | | | | TLWEEGRQRPPETLQPAR |
| 476 | 1826 | A | 3758 | 901 | 521 | FFFGNGVSPCPQAGV*WHDLDSLQNLPPGFK |
| | | | | | | RFSYLSLPSSW\DYRHVPPRQANFCIF/M*RRG |
| | | | | | | FTMLARMVSIS*PRDLPALASQSAGITGVSHH |
| | | | | | | APPQMDFTFALLCFAPKGCLPRQKEGGTLNLI |
| 477 | 1827 | A | 3761 | 843 | 575 | GVISAHCNLRL/CHLPGSSNSPASASQVAGTIG |
| | | | | | | ARTTPS*IFVFLVETGFHHVSQDGLDLL/NFVI |
| | | | | | | RPRRPLKVLGLQACTRARLPSPLKEL |
| 478 | 1828 | A | 3763 | 267 | 1240 | HLLSFHLWSASLDCLEQLSQERHVKGMLLGP |
| | | | | | | PPVNESTKPSPSPWKLTPPMCSIPPVFPPKSGS |
| | | | | | | PTTSWS/PSGHSKLEVERAQTGPFCLHIYCP*P |
| | | | | | | GVTDNTTSLLHY1PFPRL\SGLVCFPAH*FPSY |
| | | | | | | WTGHSFASQAWLRQVPEVSKHLQCPSAESLL |
| | | | | | | TMEYHQPEDPAPGKAGTAEAVIPENHEVLAG |
| | | | | | | PDEHPQDTDARDADGEAREREPIRRPSFAA*P |
| | | | | | | VWGQP\ESPLPEASSAPPGPTWTLPEVETIRA |
| | | | | | | CSMPQELP*SPRTRQPEPDFYCVKWIPWKGE |
| | | | | | | QTPIITQSTNGPLPSPCHHEHPLSSVEGEAPPA |
| | | | | | | EGSDHIG |
| 479 | 1829 | A | 3766 | 2 | 2152 | YSPIRLLEVCVPLPKLFIKRQAPLKVSLLQDLK |
| | | | | | | DFFQKVSQVYVAIDERLASLKTDTFSKTREEK |
| | | | | | | MEDIFAQKEMEEGEFKNWIEKMQARLMSSS |
| | | | | | | VDTPQQLQSVFESLIAKKQSLCEVLQAWNNR |
| | | | | | | LQDLFQQEKGRKRPSVPPSPGRLRQGEESKIS |
| | | | | | | AMDASPRNISPGLQNGEKEDRFLTTLSSQSST |
| | | | | | | SSTHLQLPTPPEVMSEQSVGGPPELDTASSSE |
| | | | | | | DVFDGHLLGSTDSQVKEKSTMKAIFANLLPG |
| | | | | | | NSYNPIPFPFDPDKHYLMYEHERVPIAVCEKE |
| | | | | | | PSSIIAFALSCKEYRNALEELSKATQWNSAEE |
| | | | | | | GLPTNSTSDSRPKSSSPIRLPEMSGGQTNRTTE |
| | | | | | | TEPQPTKKASGMLSFFRGTAGKSPDLSSQKRE |
| | | | | | | TLRGADSAYYQVGQTGKEGTENQGVEPQDE |
| | | | | | | VDGGDTQKKQLINPHVELQFSDANAKFYCRL |
| | | | | | | YYAGEFHKMREVLLDSSEEDFIRSLSHSSPWQ |
| | | | | | | ARGGKSGAAFYATEDDRFLLKQMPRLEVQSF |
| | | | | | | LDFAPHYFNYITNAVQQKRPTALAKILGVYRI |
| | | | | | | GYKNSQNNTEKKLDLLVMENLFYGRKMAQ |
| | | | | | | VFDLKGSLRNRNVKTDTGKESCDVVLLDENL |
| | | | | | | LKMVRDNPLYIRSHSKAVLRTSIHSDSHFLSS |
| | | | | | | HLHDYSLLVGRDDTSNELVVGIIDYIRTFTWD |
| | | | | | | KKLEMVVKSTGILGGQG*MPTVVSPELYRTR |
| | | | | | | FCEAMDNYFLMVPDHCTGLGLNC |
| 480 | 1830 | A | 3777 | 251 | 3 | QGCGSAGTLIHY**ECKMVQLLWKTV*QFLI |
| | | | | | | KLNI\KDPAITLDVYPNEVKNYVRTKTYTQMF |
| | | | | | | I/ANFIMAKSWKQPTHPSVRT |
| 481 | 1831 | A | 3779 | 333 | 3 | EAAIRQPEPNILDVNQIFKDLAMIIHDQGDLID |
| | | | | | | SIEANAESSEVLVERAFGQLQRPA\YYQKKSR |
| | | | | | | KKMCLVVLVQTAIILICERIM*VVYTTKWSPPI |
| | | | | | | VLPVSCFQGQKLFN |
| 482 | 1832 | A | 3780 | 2 | 371 | TGGRQGKNDHTSITEKPSRDFNRHLITQNI*M |
| | | | | | | PNQDMKSSSNSLIIRKVQIKPTILYHHIFTRKA |
| | | | | | | KMKTTDKTKYR*GFKAITILIHCSQDCILQ*S |
| | | | | | | /L*ENHFMIFPKAEQHITYDTTIPFLR |
| 483 | 1833 | A | 3787 | 43 | 448 | LMKDLSPYVMETHYILNRLNER/RSMWRHHG |
| | | | | | | KLPNTKDQEKILKAIRGRREVIQGS/RQQYRR |
| | | | | | | PAAFSAAEKARRLWCS/VFNIERRNL/CEYPTK |
| | | | | | | LSFNIKGEMTFSDKTEF1TNRPSLKMLLKDRI |
| | | | | | | QEEGKMF*KEKCFKRKE |
| 484 | 1834 | A | 3798 | 1 | 727 | FFFFETESRSVAQAGVQWCNLGSLQALPPGF\ |
| | | | | | | SHSPASASRVAGTTGTRH*ARLIFYIFSRDGVS |
| | | | | | | PC*PGWS*SPDLVIRPP\RLPKCWDYRREPPRP |
| | | | | | | A*FFVFLVE\QGFTMLARMVSIS*PQICDLPAS |
| | | | | | | VSQNAGITGVSHCAWLHFCFFGFFFEMESC |
| | | | | | | SVAQAEVQWHDLRSLQAPPPGFTPFSCLSLPG |
| | | | | | | SWDYRRPPPRPIQTF\CIFSPDGVSPC*PGWSRS |
| | | | | | | PDLVIRPPRPPKVLGLQA |
| 485 | 1835 | A | 3802 | 1 | 239 | FFFFEMECLTVSQAGVQWYNLHSLQPLPPGF |
| | | | | | | KQFSCLSLPSSWD*RVPTSRPAKF/CVIF*DGV |
| | | | | | | SHCQPGWSAVVQPPLH |
| 486 | 1836 | A | 3811 | 378 | 98 | RYD*SSQSENIP\QKEFLLKYP*CTATLGMRN |
| | | | | | | MSIMKKKS1FSAEFYKVSLPSLLL\HLLAIEWG |
| | | | | | | FHIEIQLTIHQHFLNYELESDFVHIVEYM |
| 487 | 1837 | A | 3814 | 771 | 320 | FDPDWTRAAGIRHEKKPKALAYRRENSPGDL |
| | | | | | | PPPPLPPPEEEASWAL/GAEGSRQHVLPGAGA |
| | | | | | | QWGEESGPGRAPGSPAGAPPR*RGLAP\NSRP |
| | | | | | | SFLSRGQGTSTCSTAGSNSSRGSSSSRGSRGPG |
| | | | | | | RSRSRSQSRSQSQRPGQKRREEPR |
| 488 | 1838 | A | 3818 | 1 | 781 | FRACLLELIPYAPTLSWTACPPAMAGPRGLLP |
| | | | | | | LCLLAFCLAGFSFVRGQVLKGCDVKTTFVT |
| | | | | | | HVPCTSCAAIKKQTCPSGWLRELPDQITQDCR |
| | | | | | | YEVQLGGSMVSMSGCRRKCRKQVVQKACCP |
| | | | | | | GYWGSRCHECPGGAETPCNGHGTCLDGMDR |
| | | | | | | NGTCVCQENFRGSACQECQDPNRFGPDCQSV |
| | | | | | | CSCVHGVCNHGPRGDGSCLCFAGYTGPHCD |
| | | | | | | QELPVWQELGFPQNNPRLRKAPNCKCLPG*H |
| | | | | | | RNGLIATPNPCRIP |
| 489 | 1839 | A | 3822 | 934 | 669 | FFFSEMESRSVTRLECSGAISAHLRTLLGSSNSP |
| | | | | | | ASAS*VAGTIGACHHAQLIPVFLVETGPHHVG |
| | | | | | | QDGLDLL/NLMIHPPRPPKVLGPQA |
| 490 | 1840 | A | 3825 | 79 | 9748 | QDGLDLL/NLMIHPPRPPKVLGFQA |
| | | | | | | GCQSCWPAWPRLRRRGPASAGARLGRKAPW |
| | | | | | | GLPGRVQDGRPLRFCFYLRPRAPFIAPVLSGA |
| | | | | | | ASRPEASGDCRAGRETAMATLEKLMIKAFESL |
| | | | | | | KSFQQQQQQQQQQQQQQQQQQQQQQQPPPP |
| | | | | | | PPPPPPPQLPQPPPQAQPLLPQPQPPPPPPPPPP |
| | | | | | | GPAVAEEPLHRPKKELSATKKDRVNHCLTIC |
| | | | | | | ENIVAQSVRINSPEFQKLLGIAMELFLLCSDDA |
| | | | | | | ESDVRVADECLNKVIKALMDSNLPRLQLEL |
| | | | | | | YKEIKKNGAPRSLRAALWRFAELAHLVRPQK |
| | | | | | | CRPYLVNLLPCLTRTSKPEESVQETLAAAVP |
| | | | | | | KIMASFGNFANDNEIKVLLKAFIANLKSSSPTI |
| | | | | | | RRTAAGSAVSICQHSRRTQYFYSWLLNVLLG |
| | | | | | | LLVPVEDEHSTLLILGVLLTLRYLVPLLQQQV |
| | | | | | | KDTSLKGSFGVTRKEMEVSPSAEQLVQVYEL |
| | | | | | | TLHHTQHQDHNVYTGAIELLQQLFRTPPPEL |
| | | | | | | LQTLTAVGGIGQLTAAKEESGGRSRSGSIVELI |
| | | | | | | AGGSSCSPVLSRKQKGKVLLGEEEAIEDDS |
| | | | | | | ESRSDVSSSALTASVKDEISGELAASSGVSTPG |
| | | | | | | SAGIDIITEQPRSQHTLQADSVDLASCDLTSS |
| | | | | | | ATDGDEEDILSHSSSQVSAVPSDPAMDLNDG |
| | | | | | | TQASSPISDSSQLTEGPDSAVTPSDSSEIVLD |
| | | | | | | GTDNQYLGLQIGQPQDEDEEATGILPDEASEA |
| | | | | | | FRNSSMALQQAHLLKNMSHCRQPSDSSVDKF |
| | | | | | | VLRDEATEPGDQENKPCRIKGDIGQSTDDDS |
| | | | | | | APLVHCVRLLSASFLLTGGKNVLVPDRDVRV |
| | | | | | | SVKALALSCVGAAVALHPESFFSKLYKVPLD |
| | | | | | | TTEYPEEQYVSDILNYIDHGDPQVRGATAILC |
| | | | | | | GTLICSILSRSRFHVGDWMGTRTGNTFSL |
| | | | | | | ADCIPLLRKTLKDESSVTCKLACTAVRNCVM |
| | | | | | | SLCSSSYSELCILQLIIDVLTLRNSSYWLVRTEL |
| | | | | | | LETLAEIDFRLVSFLEAKAENLHRGAHHYTGL |
| | | | | | | LKLQERVLNNVVIHLLGDEDPRVRHAAASL |
| | | | | | | LVPKLFYKCDQGQADPVVAVARDQSSVYL |
| | | | | | | KLLMHETQPPSHFSVSTITRIYRGYNLLPSITD |
| | | | | | | VTMENNLSRVIAAVSHELITSTTRALTFGCCE |
| | | | | | | ALCLLSTAFPVCIWSLGWHCGVPPLSASDESR |
| | | | | | | KSCTVGMATMILTLLSSAWPPLDLSAHQDAL |
| | | | | | | ILAGNLLAASAPKSLRSSWASEEEANPAATK |
| | | | | | | QEEVWPALGDRAIVPMVEQLFSHLLKVINIC |
| | | | | | | AHVLDDVAPGPAIKAAIPSLTNPPSLSPIRRK |
| | | | | | | GKEKEPGEQASVPLSPKKGSEASAASRQSDTS |
| | | | | | | GPVTTSKSSSLGSFHLPSYLKLHDVLKATHA |
| | | | | | | NYKVTLDLQNSTEKFGGFLRSAIDVLSQREL |
| | | | | | | ATLQDIGKCVEEILGYLKSCFSREPMMATVC |
| | | | | | | VQQLLKTLFGTNLASQFDGLSSNPSKSQGRA |
| | | | | | | QRLGSSSVRPGLYHYCFIVLAPYTHFTQALADA |
| | | | | | | SLRNMVQAEQENDTSGWFDVLQKVSTQLKT |
| | | | | | | NLTSVTKNRADKNAIHNHIRLFEPLVIKALKQ |
| | | | | | | YTTTTCVQLQKQVLDLLAQLVQLRVNYCLL |
| | | | | | | DSDQVFIGFVLKQFEYIEVGQFRESEAIIPNIFF |
| | | | | | | FLVLLSYERYHSKQIIGIPKIIQLCDGIMASGR |
| | | | | | | KAVTHAIPALQPTVHDLFVLRGTNKADAGKE |
| | | | | | | LETQKEVVVSMLLRLIQYHQVLEMFILVLQQ |
| | | | | | | CHKENEDKWKRLSRQIADIIILPMLAKQQMHI |
| | | | | | | DSHEALGVLNTLFEILAPSSLRPVDMLLRSMF |
| | | | | | | VTPNTMASVSTVQLWISGILAILRVLISQSTED |
| | | | | | | IVLSRIQELSFSPYLISCTVINRLRDGDSTSTLE |
| | | | | | | EHSEGKQIKNLPEETFSRFLLQLVGILLEDIVT |
| | | | | | | KQLKVEMSEQQHTFYCQELGTLLMCLIHIFKS |
| | | | | | | GMFRRITAAATRLFRSDGCGGSFYTLDSLNLR |
| | | | | | | ARSMITTHPALVLLWCQILLLVNHTDYRWW |
| | | | | | | AEVQQTPKRHSLSSTKLLSPQMSGEEEDSDLA |
| | | | | | | AKLGMCNPEIVRRGAULFCDYVCQNLHDSE |
| | | | | | | HLTWLIVNHIQDLISLSHEPPVQDFISAVHRNS |
| | | | | | | AASGLFIQAIQSRCENLSTPTMLKKTLQCLEGI |
| | | | | | | HLSQSGAVLTLYVDRLLCTPFRVLARMVDIL |
| | | | | | | ACRRVEMLLAANLQSSMAQLPMEELNRIQEY |
| | | | | | | LQSSGLAQRHQRLYSLLDRFRLSTMQDSLSPS |
| | | | | | | PPVSSHPLDGDGHVSLETVSPDKDWYVHLVK |
| | | | | | | SQCWTRSDSALLEGAELVNRIPAEDMNAFM |
| | | | | | | MNSEFNLSLLAPCLSLGMSEISGGQKSALFEA |
| | | | | | | AREVTLARVSGTVQQLPAVHHVFQPELPAEP |
| | | | | | | AAYWSKLNDLPGDAALYQSLPTLARALAQY |
| | | | | | | LVVVSKLPSHLHLPPEKEKDIVKFVVATLEAI |
| | | | | | | SWIILIHEQIPLSLDLQAGLDCCCLALQLPGL |
| | | | | | | WSVVSSTEFVTHACSLIYCVHFILEAVAVQPG |
| | | | | | | EQLLSPERRTNTPKAISEEEEEVDPNTQNPKYI |
| | | | | | | TAACEMVAEMVESLQSVLALGHKRNSGVPA |
| | | | | | | FLTPLLRNTIISLARLPLVNSYTRVPPLVWKLG |
| | | | | | | WSPKPGGDFGTAFPEIPVEFLQEKEVFKEFIYR |
| | | | | | | INTLGWTSRTQFEETWATLLGVLVTQPLVME |
| | | | | | | QEESPPEEDTERTQINVLAVQAITSLVLSAMT |
| | | | | | | VPVAGNPAVSCLEQQPRNKPLKALDTRFGRK |
| | | | | | | LSIIIRGTVEQEIQAMVSKRENIATHHLYQAWD |
| | | | | | | PVPSLSPAITGALISHEKLLLQINPERELGSMS |
| | | | | | | YKLGQVSIHSVWLGNSITPLREEEWDEEEEEE |
| | | | | | | ADAPAPSSPPTSPVNSRKHRAGVDIIASCSQFL |
| | | | | | | LELYSRWILPSSSARRTPAILISEVVRSLLVVS |
| | | | | | | DLFTERNQFELMYVTLTELRRVHPSEDEILAQ |
| | | | | | | YLVPATCKAAAVLGMDKAVAEPVSRLLESTL |
| | | | | | | RSSHLPSRVGALHGVLYVLECDLLDDTAKQL |
| | | | | | | IPVISDYLLSNLKGIAHCVNIHSQQHVLVMCA |
| | | | | | | TAFYLIENYPLDVGPEFSASIIQMCGVMLSGS |
| | | | | | | EESTPSIIYHCALRGLERLLLSEQLSRLDAESL |
| | | | | | | VKLSVDRVNVHSPHRAMAALGLMLTCMYT |
| | | | | | | GKEKVSFGRTSDPNPAAPDSESVIVAMERVS |
| | | | | | | VLFDRIRKGFPCEARVVARILPQFLDDPFPPQ |
| | | | | | | DIMNKVIGEFLSNQQPYPQFMATVVYKVFQT |
| | | | | | | LHSTGQSSMVRDWVMLSLSNFTQRAPVAMA |
| | | | | | | TWSLSCFFVSASTSPWVAAILPHYISRMGKLE |
| | | | | | | QVDVNLFCLVATDFYRHQIEEELDRRAFQSV |
| | | | | | | LEVVAAPGSPYHRLLTCLRNVHKVITC |
| 491 | 1841 | A | 3826 | 469 | 302 | SNPPASASRVAGITGVHQHAWLIFVFLVEMEF |
| | | | | | | HHVGQAVLKLLISGDLPVSASQSA |
| 492 | 1842 | A | 3836 | 392 | 88 | VAPSPMIMPDLYFYRDPEEIEKEE*AAAEK\EE |
| | | | | | | FQSEWTAVV/PIEFTATQSEVADWFKDMQVP |
| | | | | | | SVPIQQFPTEDWST*PTMNDWSATSTAQ1TE |
| | | | | | | WVRITTEWP |
| 493 | 1843 | A | 3838 | 19 | 380 | TPSDMNRAFETDTQSIGEKNRSPSEPDYFERK |
| | | | | | | KFKRS*EKAIHIRYKIDQPEDLPLK\EFLCKLSK |
| | | | | | | CTATLSMRNMSLMKKKCSFSEEF\LAFFPSLL |
| | | | | | | VCHLLAIKLGFYIEIHLTTFNNTF |
| 494 | 1844 | A | 3845 | 2 | 352 | FFFLRRSLIDSVAQAEAQWL\ELGLLQAPPPGF |
| | | | | | | KPISLP\GLPSSWDYGRPPPCPANFCIF/M*RRG |
| | | | | | | FTVLARMVLIS*PCDPPTLASQGTAITGMSYH |
| | | | | | | ARPQDIDFLYAHQGRCWFRLL |
| 495 | 1845 | A | 3847 | 1774 | 40 | DIFFRRAKEGMGQDEAQFSVEMPLTGKAYL |
| | | | | | | WADKYRPRKPRFFNRVHTGFEWNKYNQTHY |
| | | | | | | DFDNPPPKIVQGYKFNIFYPDLIDKRSTPEYFL |
| | | | | | | EACADNKDFAILRFHAGPFYEDLAFKIVNREW |
| | | | | | | EYSHRHGFRCQFANGIFQLWFHFKRYRYRR* |
| | | | | | | RPWGTAGRCPRGHSKGASVKLVVTPGPLSGL |
| | | | | | | QGRGFTSHLRPHLSFARPQFPPI*KGGHH*AC |
| | | | | | | HGELRRHWDRLA*GPDATEGALGASFEHEG |
| | | | | | | GQQPPADLTVQADTLHRPSARLGGAHRACPK |
| | | | | | | RRPHRVLWRWARGAWAWRCQAREKQETQG |
| | | | | | | QPCHITGHPLGREAEPAAAGAAPALAHRPPF |
| | | | | | | ARTGSTE\PGPCWRPIRIICRRDPLWTPTLC\RD |
| | | | | | | WPPTHPVLAGGVHFPAAGIIGGCVEVPVSVN |
| | | | | | | VMGTKSH*AVLPPPPSTGPGGQGLPEGWGLE |
| | | | | | | KGEGLPPGIPPPGLLTGPW\SMRPVTPSFAHIR |
| | | | | | | TVAPSHSPFSGQEGRGPHGCHSPGR\SGP\AGR |
| | | | | | | LVLQHPTGTSPTEAKRKVPPGPPEGHPTSPVT |
| | | | | | | SPRPPTAPPRHPASSGNSSVCFSKKTCRWEKK |
| | | | | | | SFVLMELAYWQDRMFF |
| 496 | 1846 | A | 3849 | 830 | 442 | AKSPLPLG*IQWR/NLGSLKLRLPGFK*FTCLG |
| | | | | | | LLSSWDYRSLPPRPVNFCIINELGFHHYDQAG |
| | | | | | | LKLLTSSALPALASQSAEITGMSHRIWPLPLLR |
| | | | | | | RPPVIRIRAPPQRLPFNLITSLKALSPNMATF |
| 497 | 1847 | A | 3859 | 2 | 393 | ALRICTRRDGIARTGAQPAASWKGTNNYPWR |
| | | | | | | LEMAGRPGSQEQSKDRGTGSLPPPSQRPLGPS |
| | | | | | | PEGAGPSPPPPGIPRGGGSSSSEGPIPQLLFVPR |
| | | | | | | VPIL |
| 498 | 1848 | A | 3860 | 253 | 634 | KNASTVYSSQGDPKSFFFLLRWSLALVAQAG |
| | | | | | | EQ*RDLSSLQPPPPGFK*FSCLSLPSSWD\YRCP |
| | | | | | | LPCLANF\*FLVETGFHHVGQADLKLLTSGDP |
| | | | | | | PTSASESAGITGVSHRAWPRIHFLYWKTFFL |
| 499 | 1849 | A | 3863 | 423 | 263 | APSQISVAFLYAAIDKLFEKEI*KKIPFIIASIDKI |
| | | | | | | KIGINLTKEVKYLYTENYITLMKEIKIDTDKW |
| | | | | | | ICDILY*WIGKINI*KMSTPPKAIYRFNAIPTKIP |
| | | | | | | MTFFTEIEKSIIKFIWNHKKPPNTQSNTEQKE*S |
| | | | | | | FCSILLWVFGQFLWFHMNFMIDFSISVKNVIGI |
| | | | | | | LVGIALNL |
| 500 | 1850 | A | 3865 | 2 | 15246 | LPRGCLWCLQRSPTPARPQPSRPARSPLPLFP |
| | | | | | | DLRPWASDLDIMGDAEGEDEVQFLRTDDEV |
| | | | | | | VLQCSATVLKEQLKLCLAAEGFGNELCPLEP |
| | | | | | | TSNAQNVPPDLAICCFVLEQSLSVRALQEML |
| | | | | | | ANTVEAGVESSQGGGHRTLLYGHAILLRHAH |
| | | | | | | SRMYLSCLITSRSMTDICLAFDVGLQEDATGE |
| | | | | | | ACWWTMHPASKQRSEGEKVRVGDDIILVSVS |
| | | | | | | SERYLHLSTASGELQVDASFMQTLWNMNPIC |
| | | | | | | SRCEEGFVTGGHVLRLFHGHMDECLTISPADS |
| | | | | | | DDQRRLVYYEGGAVCTHARSLWRLEPLRIS |
| | | | | | | WSGSHLRWGQPLRVRHVTTGQYLALTEDQG |
| | | | | | | LVVVDASKAHTKATSPCFRISKEKLDVAPKR |
| | | | | | | DVEGMGPPEIKYGESLCFVQHVASGLWLTYA |
| | | | | | | APDPKALRLGVLKKKAMLHQEGHMDDAISL |
| | | | | | | TRCQQEESQAARMIHSTNGLYNQFIKSLDSFS |
| | | | | | | GKPRGSGPPAGTALPIEQVILSLQDLIIYFEPPS |
| | | | | | | EDLQHEEKQSKLRSLRNRQSLPQEEGMLSMV |
| | | | | | | LNCIDRLNVYITAAHFAEFAGEEAAESWKEI |
| | | | | | | VNLLYELLASLIRGNRSNCALFSTNLDWLVS |
| | | | | | | KLDRLEASSGILEVLYCVLIESPEVLNIIQENHI |
| | | | | | | KSIISLLDKHGRNHKVLDVLCSLCVCNGVAV |
| | | | | | | RSNQDLITENLLPGRELLLQTNLINYVTSIRPN |
| | | | | | | IFVGRAEGITQYSKWYPEVMVDEVTPFLTAQ |
| | | | | | | ATILLRVGWALTEGYTPYPGAGEGWGGNGV |
| | | | | | | GDDLYSYGFDGLHLWTGHVARPVTSPGQHL |
| | | | | | | LAPEDVISCCLDLSVPSISFRINGGPVQGVFESF |
| | | | | | | NLDGLFFPVVSFSAGVKVRFLLGGRHGEFKF |
| | | | | | | LPPPGYAPCHEAVLPRIERIHIEPIKEYRREGP |
| | | | | | | RGPHLVGPSRCLSHTDFVPCPVDTVQIVLPPH |
| | | | | | | LERIREKLAENIHELWALTRIEQGWTYGPVRD |
| | | | | | | DNKRLHPGLVDFHSLPEPERNYNLQMSGIETL |
| | | | | | | KTLLALGCHVGMADEKAEDNLKKTKLPKTY |
| | | | | | | MMSNGYKPAPLDLSHVRLTPAQTTLVDRLAE |
| | | | | | | NGHNVWARDRVGQGWSYSAVQDIPARRNPR |
| | | | | | | LVPYRLLDEATKRSNRDSLCQAVRTLLGYGY |
| | | | | | | NIEPPDQEPSQVENQSRCDRVRTFRAEKSYTV |
| | | | | | | QSGRWYFEPEAVTTGEMRVGWARPELRPDV |
| | | | | | | ELGADELAYVFNGHRGQRWHLGSEPFGRPWW |
| | | | | | | QPGDVVGCMIDLTENTIIFTLNGEVLMSDSGS |
| | | | | | | ETAFREIEIGDGFLPVCSLGPGQVGHILNLGQD |
| | | | | | | VSSLRFFAICGLQEGFEPPAINMQRPVTTWPS |
| | | | | | | KGLPQFEPVPLEHPHYEVSRVDGTVDTPPCLR |
| | | | | | | LTRTWGSQNSLVEMLFLRLSLPVQFHQHFR |
| | | | | | | CTAGATPLAPPGLQPPAEDEARAAEPDPDYE |
| | | | | | | NLRRSAGGWSEAENGKEGTAKEGAPGGTPQ |
| | | | | | | AGGEAQPARAENEKDATTEKNKKRGFLFKA |
| | | | | | | KKVAMMTQPPATPTLPRLPIIDVVPADNRDD |
| | | | | | | PEIILNTITYYYSVRVFAGQEPSCVWAGWVT |
| | | | | | | PDYHQHDMSFDLSKVRVVTVTMGDEQGNV |
| | | | | | | HSSLKCSNCYMVWGGDFVSPGQQGRISHTDL |
| | | | | | | VIGCLVDLATGLMTFTANGKESNTFFQVEPN |
| | | | | | | TKLFPAVFVLPTHQNVIQFELGKQKNIMPLSA |
| | | | | | | AMFQSERKNPAPQCPPRLEMQMLMPVSWSR |
| | | | | | | MPNHFLQVETRRAGERLGWAVQCQEPLTMM |
| | | | | | | ALHIPEENRCMDILELSERLDLQRFHSHTLRL |
| | | | | | | YRAVCALGNNRVAHALCSHVDQAQLLHALE |
| | | | | | | DAHLPGPLRAGYYDLLTSIHIESACRSRRSML |
| | | | | | | SEYIVPLTPETRAITLFPPGRSTENGHYRHGLP |
| | | | | | | GVGVTTSLRPPHIIFSPPCFVAALPAAGAAEAP |
| | | | | | | ARLSPAIPLEALRDKALRMLGEAVRDGGQHA |
| | | | | | | RDPVGASVEFQFVPVLKLVSTLLVMCIIFGDE |
| | | | | | | DVKQILKMIEPEVFTEEEEEEDEEEEGEEEDEE |
| | | | | | | EKEEDEEETAQEKEDEEKEEEEAAEGEKEEG |
| | | | | | | LEEGLLQMKLPESVKLQMCHLLEYFCDQELQ |
| | | | | | | HRVESLAAPAERYVDKLQANQRSRYGLLIKA |
| | | | | | | FSMTAAETARRTREFRSPPQEQINMLLQFKDG |
| | | | | | | TDEEDCPLPEEIRQDLLDFHQDLLAHCGIQLD |
| | | | | | | GEEEEPEEETTLGSRLMSLLEKVRLVKKKKEEK |
| | | | | | | PEEERSAEESKPRSLQELVSHMVVRWAQEDF |
| | | | | | | VQSPELVRAMFSLLHRQYDGLGELLRALPRA |
| | | | | | | YTISPSSVEDTMSLLECLGQIRSLLIVQMGPQE |
| | | | | | | ENLMIQSIGNIMNNKVFYQHPNLMIRALGMHE |
| | | | | | | TVMEVMVNVLGGQESKEIRFPKMVTSCCRFL |
| | | | | | | CYFCRISRQNQRSMFDHLSYLLENSGIGLGM |
| | | | | | | QGSTPLDVAAASVIDNNELALALQEQDLEKV |
| | | | | | | VSYLAGCGLQSCPMLVAKGYPDIGWKPCGG |
| | | | | | | ERYLDFLRFAVPVNGESVEENANVVVRLLIR |
| | | | | | | KPECFGPALRGEGGSGLLAAIEEAIRISEDPAR |
| | | | | | | DGPGIRRDRRREHFGEEPPEENRVHLGHAIMS |
| | | | | | | FYAALIDLLGRCAPEMHLIQAGKGEALRIRAI |
| | | | | | | LRSLVPLEDLVGIISLPLQIPTLGKDGALVQPK |
| | | | | | | MSASFPDHKASMVLFLDRVYGIENQDFLLH |
| | | | | | | VLDVGFLPDMRAAASLDTATFSTTEMALAV |
| | | | | | | NRYLCLAVLPLITKCAPLFAGTEHRAIMVDS |
| | | | | | | MLHTVYRLSRGRSLTKAQRDVIEDCLMSLCR |
| | | | | | | YIRPSMLQHLLRRLVFDVPILNEFAKMPLKLL |
| | | | | | | TNIIYERCWKYYCLPTGWANFGVTSEEELHL |
| | | | | | | TRKLFWGIFDSLAHKKYDPELYRMAMPCLC |
| | | | | | | AIAGALPPDYVDASYSSKAEKKATVDAEGNF |
| | | | | | | DPRPVETLNVIIPEKLDSFINKFAEYTHEKWAF |
| | | | | | | DKIQNNWSYGENIDEELKTHIPMLRPYKTFSE |
| | | | | | | KDKEIYRWPLKESLKAMIAWEWTIEKAREGE |
| | | | | | | EEKTEKKKTAKISQSAQTYDPREGYNPQPPDL |
| | | | | | | SAVTLSRELQAMAEQLAENYHNTWGRKKKQ |
| | | | | | | ELEAKGGGTHPLLVPYDTLTAKEKARDREKA |
| | | | | | | QELLKFLQMNGYAVTRGLKDMELDSSSIEKR |
| | | | | | | FAFGFLQQLLRWMDISQEFIAHLEAVVSSGRV |
| | | | | | | EKSPHEQEIKFFAKILLPLINQYFTNHCLYFLS |
| | | | | | | TPAKVLGSGGHASNKEKEMITSLFCKLAALV |
| | | | | | | RHRVSLFGTDAPAVVNCLHILARSLDARTVM |
| | | | | | | KSGPEIVKAGLRSFFESASEDIEKMVENLRLG |
| | | | | | | KVSQARTQVKGVGQNLTYITVALLPVLTTLF |
| | | | | | | QHIAQHQFGDDVILDDVQVSCYRTLCSIYSLG |
| | | | | | | TTKNTYVEKLRPALGECLARLAAAMPVAFLE |
| | | | | | | PQLNEYNACSVYITKSPREPAILGLPNSVEEM |
| | | | | | | CPDIPVLERLMADIGGLAESGARYTEMPHVIE |
| | | | | | | ITLPMLCSYLPRWWERGPEAPPSALPAGAPPP |
| | | | | | | CTAVTSDHLNSLLQNILRIIVNNLGIDEASWM |
| | | | | | | KRLAVFAQPWSRARPELLQSHFIPTIGRLRKR |
| | | | | | | AGKVVSEEEQLALEAKAEAQEGELLVRDEFS |
| | | | | | | VLCRDLYALYPLLIRYVDNNRAQWLTEPNPS |
| | | | | | | AEELFRMVGEIPIYWSKSHNPKREEQNFVVQ |
| | | | | | | NEINNMSFLTADNKSKMAKAGDIQSGGSDQE |
| | | | | | | RTKKKRRGDRYSVQTSLIVATLKKMLPIGLN |
| | | | | | | MCAPTDQDLITLAKTRYALKDTDEEVREFLH |
| | | | | | | NNLHLQGKVEGSPSLRWQMALYRGVPGREE |
| | | | | | | DADDPEKIVRRVQEVSAVLYYLDQTEHPYKS |
| | | | | | | KKAVWHKLLSKQRRRAVVACFRMTPLYNLP |
| | | | | | | THRACNMFLESYKAAWILTEDHSFEDRMIDD |
| | | | | | | LSKAGEQEEEEEEVEEKKPDPLHQLVLHPSRT |
| | | | | | | ALTEKSKLDEDYLYMAYADIMAKSCHLEEG |
| | | | | | | GENGEAEEEVEVSFEEKQMEKQRLLYQQARL |
| | | | | | | HTRGAAEMVLQMISACKGETGAMVSSTLKL |
| | | | | | | GISILNGGNAEVQQKMLDYLKDKKEVGFFQS |
| | | | | | | IQALMQTCSVLDLNAFERQNKAEGLGMVNE |
| | | | | | | DGTVTNRQNGEKVMADDEFTQDLFRFLQLLC |
| | | | | | | EGHNNDFQNYLRTQTGNTTTINIIICTVDYLL |
| | | | | | | RLQESISDFYWYYSGKDVIEEQGKRNFSKAM |
| | | | | | | SVAKQVFNSLTEYIQGPCTGNQQSLAHSRLW |
| | | | | | | DAVVGPLHVFAHMMMKLAQDSSQIELLKEL |
| | | | | | | LDLQKDMVVMLLSLLEGNVVNGMIARQMV |
| | | | | | | DSSSNVEMTLKFFDMFLKLKDIVGSEAF |
| | | | | | | QDYVTDPRGLISKKDFQKAMDSQKQFSGPEI |
| | | | | | | QFLLSCSEADENEMINCEEFANRFQEPARDIG |
| | | | | | | FNVAVLLTNLSEHVPIIDPRLHNFLELAESILE |
| | | | | | | YFRPYLGRIEIMGASRRIERIYFEISETNRAQW |
| | | | | | | EMPQVKESKRQFIFDVVNEGGEAEKMELFVS |
| | | | | | | FCEDTIFEMQIAAQISEPEGEPETDEDEGAGA |
| | | | | | | AEAGAEGAEEGAAGLEGTAATAAAGATARV |
| | | | | | | VAAAGRALRGLSYRSLRRRVRRLRRLTAREA |
| | | | | | | ATAVAALLWAAVTRAGAAGAGAAAGALGL |
| | | | | | | LWGSLFGGGLVEGAKKVTVTELLAGMPDPT |
| | | | | | | SDEVHGEQPAGPGGDADGEGASEGAGDAAE |
| | | | | | | GAGDEEEAVHEAGPGGADGAVAVTDGGPFR |
| | | | | | | PEGAGGLGDMGDITPAEPPTPEGSPILKRKLG |
| | | | | | | VDGVEEELPPEPEPEPEPELEPEKADAENGEK |
| | | | | | | EEVPEPTPEPPKKQAPPSPPPKKEEAGGEFWG |
| | | | | | | ELEVQRVKFLNYLSRNPYTLRFLALFLAFAIN |
| | | | | | | FILLFYKVSDSPPGEDDMEGSAAGDVSGAGS |
| | | | | | | GGSSGWGLGAGEEAEGDEDENMVYYFLEES |
| | | | | | | TGYMEPALRCLSLLHTLVAFLCIIGYNCLKVP |
| | | | | | | LVIFKREKELARKLEFDGLYITEQPEDDDVKG |
| | | | | | | QWDRLVLNTPSFPSNYWDKFVKRKVLDKHG |
| | | | | | | DIYGRERIAELLGMDLATLEITAHNERKPNPP |
| | | | | | | PGLLTWLMSIDVKYQIWKFGVIFTDNSFLYLG |
| | | | | | | WYMVMSLLGHYNNFFFAAHLLDIAMGVKTL |
| | | | | | | RTILSSVTHNGKQLVMTVGLLAVVVYLYRVV |
| | | | | | | AFNFFRKFYNKSEDEDEPDMKCDDMMTCYL |
| | | | | | | FHMYVGVRAGGGIGDEIEDPAGDEYELYRVV |
| | | | | | | FDITFFFFVIVILLAHQGLIIDAFGELRDQQEQV |
| | | | | | | KEDMETKCFICGIGSDYFDTTPHGFETHTLEE |
| | | | | | | HNLANYMFFLMYLINKDETEHTGQESYVWK |
| | | | | | | MYQERCWDFFPAGDCFRKQYEDQLS |
| 501 | 1851 | A | 3869 | 467 | 665 | VIVAIYCQLIFDKGAKTIQ*PFQQIAL/CKRMK |
| | | | | | | LGPCFTPCGKNSEWIRELSVRVKTIKIILEIGV |
| | | | | | | N |
| 502 | 1852 | A | 3888 | 1042 | 724 | SGMQWEDLTPLQPLPPRFKQFSCLSLPGSWD |
| | | | | | | YRHAP\PLLTNF\*FLVEMGFCYVGQAGRKLL |
| | | | | | | ASSDQSALASQSAGLTGISTAPGPPFFFLNFEA |
| | | | | | | GSCSVAQAGVQ |
| 503 | 1853 | A | 3891 | 1773 | 1193 | EVDSQSGVQ*QAPGSLQLQTPGLKNSCLLSR |
| | | | | | | QDYRSSLPHLASCCYYYYYY/VFL*RRGLTTL |
| | | | | | | VQGGLKLLPSSNPFASAP*TACIITQMSHCAGP |
| | | | | | | HFNF*MFRKISCIRE*F*HTRIYDIPFLILFFKET |
| | | | | | | LLCYPGWPQIPGLKPSSCLRLLSSWDIIRC |
| | | | | | | APPCPASFPIFHVDRVSPPCPGLVSITFKMLLL |
| | | | | | | L |
| 504 | 1854 | A | 3896 | 279 | 70 | MVSKSKSILMSYNHYELTFSDMKKMPEAFRR |
| | | | | | | TQKHTIYLIPYQVIFWSTGKDAMRSFMMPFY |
| | | | | | | QKEYYENQ* |
| 505 | 1855 | A | 3899 | 2 | 13 | EPGVPTKKTWFDKPDFNRTNSPGFQKKVQFG |
| | | | | | | NENTKLELRKVPPELNNISKINEHFSRFGTLV |
| | | | | | | NLQVAYNGDPEGALIQFATYEEAKKAISSTEA |
| | | | | | | VLNNRFIKVYWHREGSTQQLQTTSPKVMQPL |
| | | | | | | VQQPILPVVICQSVKERLGPVPSSTIEPAEAQS |
| | | | | | | ASSDLPQVLST\LLA*QKQCIIQLL/WKAAQKT |
| | | | | | | LLVSTSAVDNNEAQKKKQEALKLQQDVRKR |
| | | | | | | KQEILEKHIETQKMLISKLEKNKTMKSEDKAE |
| | | | | | | IMKTLEVLTKNITKLKDEVKAASPGRCLPKSI |
| | | | | | | KTKTQMQKELLDTELDLYKKMQAGEEVTEL |
| | | | | | | RRKYTELQLEAAKRGILSSGRGRGIHSRGRGA |
| | | | | | | VHGRGRGRGRGRGVPGHAVVDHRPRALEIS |
| | | | | | | AFTESDREDLLPHFAQYGEIEDCQTDDSSLHA |
| | | | | | | VITFKTRAEAEAAAVHGARFKGQDLKLAWN |
| | | | | | | KPVTNISAVETEEVEPDEEEQRELIIA |
| 506 | 1856 | A | 3911 | 1952 | 919 | DAELSGTLSLVLTQCCKRIKDTVQKLASDHK |
| | | | | | | DIHSSVSRVGKAIDKNFDSDISSVGIDGCWQA |
| | | | | | | DSQRLLNEVMVEHFFRQGMLDVAEELCQES |
| | | | | | | GLSVDPSQKEPFYELNRILEALKVRVLRPALE |
| | | | | | | WAVSNREMLIAQNSSLEFKLHRLYFISLLMG |
| | | | | | | GTTITNQREALQYAKNFQPFALNHQKDIQVLM |
| | | | | | | GSLVYLRQGIENSPYVHLLDAI\IQWADICDIFT |
| | | | | | | RDACALLGLSVESPLSVSFSAGCVALPALINIK |
| | | | | | | AVIEQRQGTGVWNQKDELPIEV\DLG*KSAGY |
| | | | | | | HSIFACPILRQQITDNNPPMKLVCGHIISRDAL |
| | | | | | | NKMFNGSKLKCPYCPMEQSPGDAKQIFF |
| 507 | 1857 | A | 3936 | 439 | 18 | SHPFSPAPGICPDAPPPLPRPSKGLGHPGTAGA |
| | | | | | | PGSGARCHPPSTCSPSWASPG*GAKASPALPR |
| | | | | | | SHGVTLLCKAQAHLCRGEDSKDASGSTSQA |
| | | | | | | WEPG*GAWGMPRCQGPALGSCFCPPGTTVQ |
| | | | | | | RPAKQRDKRNRHLGR |
| 508 | 1858 | A | 3944 | 120 | 412 | WCPAGTLDFPGPQEMVLLEIEVMNQLNHRNL |
| | | | | | | IQLYAAIETPHEIVLFIVIE\YECPK*W*GLGGGT |
| | | | | | | TRHGASRGGVCAHSIEGGELFERIVDEDYHLT |
| | | | | | | EV |
| 509 | 1859 | A | 3949 | 31 | 392 | LTKTPSPREKGRGVLSVLLMNII*KCRVIFVKIP |
| | | | | | | MVFFLQNFCIRIILNVA\WTGD*PNTL*KEQRG |
| | | | | | | ITFSDSKS*YKATKIKTMWYCHKNRYID/ERN |
| | | | | | | RIEIPEINPCICDKIIFRKLSMTTQ |
| 510 | 1860 | A | 3954 | 1013 | 885 | FSETRACCPRLEHSGRIEAIICSLNTIPGSSDPPT |
| | | | | | | SASSVAATTG |
| 511 | 1861 | A | 3956 | 1 | 1054 | PPAWAPRSPLIWAPTSGRHPGRAALPWSTSSV |
| | | | | | | RWQPSEKQPPPPAHRGPADSLSTAAGAAELS |
| | | | | | | AEGAGKSRGSGEQDWVNRPKTVRDTLLALH |
| | | | | | | QHGHSGPFESKFKKEPALTAVARTARKRKPS |
| | | | | | | PEPEGEVGPPK\TTERPSRGCPHPQRGSRSP*L |
| | | | | | | LHPLLCLRPLPHLIPTGPHRLKRPRM\P\SP |
| | | | | | | MAALILVADNAGGSHASKDANQVHSITRRN |
| | | | | | | SNSPPSPSSMNQRRLGPREVQGQGAGNTGGL |
| | | | | | | EPVHPASLPDSSLATSAPLCCTLCHERLEDTH |
| | | | | | | FVQCPSVPSHKFCFPCSRQSIKQQGASGEVYC |
| | | | | | | PSGEKCPLVGSNVPWAFMQGEIATILAGDVK |
| | | | | | | VKKERDS |
| 512 | 1862 | A | 3957 | 1086 | 3 | QDRARLDGSSATSAHCNLRLPGS*DSPASASR |
| | | | | | | VAGTTDTHHHTWLILGSSVQTGFDHVGQAG |
| | | | | | | LELLTSGDPPISASESAGIMGMSHCVWP*SWG |
| | | | | | | LSHHMAPPQGDGGRARGTPGPEQSFWNLSC |
| | | | | | | H*PRCQVPS*LMTQLIFWGRHQYNPTMKRGK |
| | | | | | | LRHREACSLPLPGEGEPGLQPSS\*SQNPCSSPL |
| | | | | | | FHHGL*AWLWCPELLLQGQAERII*RSPPS/FK |
| | | | | | | CPATLSLTAWSQTKRLRSQFLLLPWL*RAL*H |
| | | | | | | PP\CHWPSRRSLGDPLLPRSQG*RDGT*ASTFC |
| | | | | | | SYF*DTESHLVAQAGVQWRDLGSLQPPCPRL |
| | | | | | | K\RFSRLSPPSSYTHRYVPSHLAESCISSRDRIP |
| | | | | | | PSRPDRSRNSNSLSR |
| 513 | 1863 | A | 3961 | 3038 | 476 | VATTSMCCNKQVIVIDKIKSASIADRCGALH |
| | | | | | | VGDHILSIDGTSMEYCTLAEATQFLANITDQ |
| | | | | | | VKLEILPHHQTRLALKGPDHVKIQRSDRQLT |
| | | | | | | WDSWASNHSSELHHTNHHYNTYHPDHCRVPAL |
| | | | | | | TFPKAPPPNSPPALVSSSFSPTSMSAYSLSSLN |
| | | | | | | MGTLPRSLYSTSPRGTMMRRRLKKKDFKSSL |
| | | | | | | SLASSTVGLAGQVVHTETIEVVLTADPVTGF |
| | | | | | | GIQLQGSVFATETLSSPPLISYIEADSPAERCG |
| | | | | | | VLQIGDRVMAINGIPTEDSTFEEASQLLRDSSL |
| | | | | | | TSKVTLEIEFDVAESVIPSSGTFHVKLPKKHN |
| | | | | | | VELGITISSPSSRKPGDPLVISDIKKGSVAHRT |
| | | | | | | GTLELGDKLLAIDNIRLDNCSMEDAVQILQQC |
| | | | | | | EDLVKLKIRKDEDNSDEQESSGAIIYTVELKR |
| | | | | | | YGGPLG\ITISGTEEP\FDL*IISSLTKGGLAERT |
| | | | | | | GAIHIGDRIL\AINSSSLKGKPLSEAIHLLQMAG |
| | | | | | | ETVTLKIKKQTDAQSASSPKKFPISSHLSDLGD |
| | | | | | | VEEDSSPAQKPGKLSDMYPSHGCPSVDSAVD |
| | | | | | | SWDGSA\IDTS\YGTEGT\SFQASGYYNFNTYD |
| | | | | | | WRSPKQRGS\LSPVT\KPRSQTYPDVQLSYED |
| | | | | | | WDRSTASGFAGAA\DSAETEQEENFWSQALE |
| | | | | | | DLETCGQSGILRELEATIMSGSTMSLNHEAPT |
| | | | | | | PRSPAGSDRPSFQERSSSRPHYSQTTRSNTLPS |
| | | | | | | DVGRKSVTLRKMKQEIKEIMSPTPVELHKVT |
| | | | | | | LYKDSDMEDFGFSVADGLLEKGVYVKNIRPA |
| | | | | | | GPGDLGGLKPYDRLLQVNHVRTRDFDCCLV |
| | | | | | | VPLIAESGNKLDLVISRNPLASQKSIDQQSLPG |
| | | | | | | D*SEQNSAFPQQPSHGGNLETRDLVVYV |
| 514 | 1864 | A | 3967 | 833 | 800 | LEKQGVSGMATKRLARQLGLIRRKSLAPANG |
| | | | | | | NLGRSKSKQLFDYLIVIDFESTCWNDGKHHH |
| | | | | | | SQEIIEFPAVLLNTSTGQIDSEFQAYVQPQEHPI |
| | | | | | | LSEFCMELTGIKQAQVDEGVPLKICLSQFCK |
| | | | | | | WIHKIQQQKNUFATGISEPS/DF*SKIMCICYL |
| | | | | | | VR*RISYTY*SKHKSKGC |
| 515 | 1865 | A | 3969 | 492 | 182 | CRFWGISTHCDTCDPLSPQITEG**EGDLWSL |
| | | | | | | DLLGPEFLARKPLFKTKTYQSTF*SISKNE/FTC |
| | | | | | | PNFIIEEGTDLIF\*QVKHNPCHRLTPEEGTVQL |
| | | | | | | NRADS |
| 516 | 1866 | A | 3977 | 2 | 1357 | KMLC/QKESNYIRLKRAKMDKSMFVKIKTLGI |
| | | | | | | GAFGEVCLARKVDTKALYATKTLRKKDVLL |
| | | | | | | RNQVAIIVKAEEDILAEADNEWVVRLYYSFQ |
| | | | | | | DKDNLYFVMDYIPGGDMMSLLIRMGLFPESL |
| | | | | | | ARFYIAELTCAVESVHKMGFIHRDIKPDNLLID |
| | | | | | | RDGHIKLTDFGLCTGFRWTHDSKYYQSGDHP |
| | | | | | | RQDSMDFSNEWGDPSSCRCGDRLKPLERRAA |
| | | | | | | RQHQRCLAHSLVGTPNYIAPEVLLRTGYTQL |
| | | | | | | CDWWSVGVILFEMLVGQPPFLAQTPLETQM |
| | | | | | | KVINWQTSLHIPPQAKLSPEASDLIIKLCRGPE |
| | | | | | | DELGKNGADEIKAHPIF*NQFDFSQ*PEDSRS |
| | | | | | | AFKQFP*NHTTPTDTSNFDP\VDPDKLWSDDN |
| | | | | | | EEENVNDTLNGWYKNGKHPEHAFYEFIFRRF |
| | | | | | | FDDNGYPYNYPKPIEYEYINSQGSEQQSDEDD |
| | | | | | | QNTGSEIKNRDLVYV |
| 517 | 1867 | A | 3980 | 1358 | 1022 | FFFKKFTQSLGFLLFSFSFLFSCFFFFHFVLFGY |
| | | | | | | VFLDRVPLCHPGWSAVVQSQVTIVNLPPSWD |
| | | | | | | *RCRPPH/LANLCNFCRD\SFITLPRLVLNTWA |
| | | | | | | QAIFQPQPPKVLGLQV |
| 518 | 1868 | A | 3986 | 974 | 666 | SPEMESHPITQAGVQWHHLSSLQPLPPGFK*F |
| | | | | | | SCFSLPE*LQYRHVPPCLANSVFSVEMG\FLH |
| | | | | | | VGQAGLELLTSGDLPALASQSAGITG\SHRAR |
| | | | | | | PENGFENIF |
| 519 | 1869 | A | 3994 | 751 | 126 | NQGLRIIVGLCRTCLVNQMFASSILGKSHHHS |
| | | | | | | LISINQGHNALWKAAG\PLPLKAGYC\QSPSPC |
| | | | | | | DSLKYG\SWDEKDLTVPQEDTHKRSVLRWIS |
| | | | | | | QRGK\LAVEMEEGHCLL/LPLGTECLGIK\PIV |
| | | | | | | HLFSSEMGE\NRPMVG\ARIHVYSNAALLSFTP |
| | | | | | | LRCLGGEKHKSGLHARPVIVPSLELHYDMDSI |
| | | | | | | AHV\FADLLLIITLPSYYIPFC |
| 520 | 1870 | A | 3999 | 882 | 698 | QSFRLSLLSSWDYRHM*PRLANF*TWFCRDRI |
| | | | | | | SLALLPRLVSNSWPQAILPPRPPKVLGLQT |
| 521 | 1871 | A | 4011 | 1346 | 1178 | FFF*ETVSCSAS*AGVRSHDNSSLQPPSPG\SSN |
| | | | | | | PPTSASHVAGATGTHHHAWLLSV |
| 522 | 1872 | A | 4015 | 2 | 377 | QGIALLTRMGESVKHVTGGYKLRTRPLEFAA |
| | | | | | | IGDYLDTFALKLGTIDRIAQRIIKEEIEYLVELR |
| | | | | | | YGPVYSTWSALEGELAEPLEGVSACIGNCST |
| 523 | 1873 | A | 4018 | 341 | 19 | ERVIHNQ1QQAQRSPHIFNARRSS/PRPNIYELP |
| | | | | | | KVKEVCKTSKS/GQVIYKGVSIRLRANFLAEP |
| | | | | | | L*NRREWDEAIKVLKEKQ\FLSKMVYPANLSF |
| | | | | | | GNEGDITSFPAK |
| 524 | 1874 | A | 4020 | 1067 | 743 | FFLRWSLIDSVAQAGVKWCNLGSLQAPPPGF |
| | | | | | | TPFSCLSLPSSWDYRIHPPPRLAN*LTNFLCF** |
| | | | | | | RQGFTVLARMVLIS*PHDLPASASQSAGITGL |
| | | | | | | SHCSWPTSSILS |
| 525 | 1875 | A | 4021 | 781 | 351 | QFRVIFFFLRRSHSVAQAGMQWHDHSLLQPL |
| | | | | | | PPRLKQIF/SHLSPPSIWDYRRVPPCLVNFSIFF |
| | | | | | | VETGSCQPCLQLLGSSNPPASASQSAGIAGISH |
| | | | | | | QGQPE*SFDIRFACVIAALRETFQCLCSASRVN |
| | | | | | | NKIINRPTHPVESSF |
| 526 | 1876 | A | 4024 | 80 | 341 | TPSSTSRGTEEQQSSKMAWQRREEKEHLNVR |
| | | | | | | RSSAEDGWKADKPIVDG*TPGEDHLPTPSPFQ |
| | | | | | | LHIHSSESQLHIISVKSPPSLSFRLM |
| 527 | 1877 | A | 4026 | 593 | 230 | DFYLYPERKKRGQMMTAVSLTTRPQESVAPE |
| | | | | | | DVAVYFTTKEWAIMG\PAERALYRDVMLEN |
| | | | | | | YGGGGPL*CHPTSKPALVFS\LEQGKESCFSPA |
| | | | | | | TGSSLSRNDWPAGWIGYLELRRYTYLS |
| 528 | 1878 | A | 4028 | 1160 | 242 | GTSELLCIQRWNWGPAFPPRPGLALAPTLQLL |
| | | | | | | VEMGSAKSVPVTPARPPPHNKHLARVADPRS |
| | | | | | | PSAGILRTPIQVESSPQPGLPAGEQLEGLKHAQ |
| | | | | | | DSDPRSPTLGIARTPMKTSSGDPPSPLVKQLSE |
| | | | | | | VFETEDSKSNLPPEPVLPPEAPLSSELDLPLGT |
| | | | | | | QLSVEEQMPPWNQTEFPSKQVFSKEEARQPT |
| | | | | | | ETPVASQSSDKPSRDPETPRSS\GSMRNRWKF\ |
| | | | | | | NSSKVL\GKSPLHPSCQDDNSPGTLTLRQGKA |
| | | | | | | AFKPLSENVSELK\EGA\ILGTGR\LLKTEGRA |
| | | | | | | WEQGQD\HDKENQHFPLVES |
| 529 | 1879 | A | 4039 | 2 | 366 | KDMVLIMEMQSMITMKCPQYL*E*RKIPDITK |
| | | | | | | CW*GCGSTG1L1FC/WS*PL*KTI*QPR*FKQI*T |
| | | | | | | ILTIIYSIM*EHTFHNAGV*LSDIYPRFMKGYV |
| | | | | | | HTEICT*MFIAVLFVVVKTWKQF |
| 530 | 1880 | A | 4057 | 358 | 3 | LLEVNGNTIVTVFTKAQNKKNKGSRSILFKQL |
| | | | | | | RKYGSENLLKSKHDKNICTENYKT*IVIKEIEA |
| | | | | | | /DTDKWKDILCSWIRRIHMKDILCSWIGRTHV |
| | | | | | | VKISILPKVNYRFYLISIKIIMAI |
| 531 | 1881 | A | 4061 | 50 | 278 | TQGTEEIYKISSCEWVQASFSTPLITLHDFKIY |
| | | | | | | HKATVIKMVWYWHRQ*KFSKN/RIESSEIEPH |
| | | | | | | IYDQFIFDKGEKIIQEKGNSFFNN/MCWKNWIF |
| | | | | | | T*KR |
| 532 | 1882 | A | 4069 | 19 | 368 | NDLLENFKFWE*FKE*LENINGTVTEKETGGV |
| | | | | | | YKELSSPKYSGTRQFYGQTISNFPGKIISMVY |
| | | | | | | KLFQNTE/TEGRHPISLYEFRITLITIPNKDNIYL |
| | | | | | | QIWMPVSLMNIVTLKCPT |
| 533 | 1883 | A | 4076 | 1 | 355 | PIRKFTKVAG*KSNTPK*LAFLHINNEQFENKII |
| | | | | | | ITNL/PFIIASKRIKYSGISLTKEMKDLYTETLLR |
| | | | | | | KIKEDTNKWKDI/SCFWVGRILNIVKMPKNIC |
| | | | | | | IFNAIPIKMPMMCMAKIEKNSS |
| 534 | 1884 | A | 4088 | 3 | 1931 | IIDSSTRRMESERSPLYRQLIDLGYLSSSIIWNC |
| | | | | | | GAPGQDTKAQSMILVEQSEKLRHLSTFSHQVL |
| | | | | | | QTRLVDAAKALNLVHCHCLDIFNQAFDMQR |
| | | | | | | DLQITPKRLEYTRKKENELYESLMNIANRKQE |
| | | | | | | EMKDMIVETLNTMKEELLDDATNMEFKDVI |
| | | | | | | VPENGEPVGTREIKGCIRQIQELIISRLNQAVA |
| | | | | | | NKLISSVDYLRESFVGTLERCLQSLEKSQDVS |
| | | | | | | VHITSNYLKQILNAAYHVEVTFHSGSSVTRM |
| | | | | | | LWEQIKQIIQRITWVSPPAITLEWKRKVAQEAI |
| | | | | | | ESLSASKLAKSICSQFRTRLNSSHEAFAASLRQ |
| | | | | | | LEAGHSGRLEKTEDLWLRVRKDHAPRILARLS |
| | | | | | | LESRSLQDVLLHRKPKLGQELGRGQYGVVYL |
| | | | | | | CDNWGGHFPCALKSVVPPDEKHWNDLALEF |
| | | | | | | HYMRSLPKHERLVDLHGSVIDYNYGGGSSIA |
| | | | | | | VLLIMERLHRDLYTGLKAGLTLETRLQIALDV |
| | | | | | | VEGIRFLHSQGLVHRDIKLKNVLLDKQNRAKI |
| | | | | | | TDLGFCKPEAMMSGSIVGTPIHMAPELFTGK |
| | | | | | | YDNSVDVYAFGILFWYICSGSVKLPEAFERCA |
| | | | | | | SKDHLWNNVRRGARPERLPVFDEECWQLME |
| | | | | | | ACWDGDPLKRPLLGIVQPMLQGIMNRLCKS\ |
| | | | | | | NSEQPNRGLDDST |
| 535 | 1885 | A | 4090 | 2 | 417 | ALMPHEANYEEIFLKTDKDMDGFESGLEVRE |
| | | | | | | IFLKTRIGLPSTLLAHIWALCDSKDCGKLSKD |
| | | | | | | IIFALAFHLIT\QKLTKGIDPPLVLTPEKISPSNR |
| | | | | | | ASLQKVTELTRKPVCIIFKGTILWRITDSIWMK |
| | | | | | | HNRKRIWLRA |
| 536 | 1886 | A | 4102 | 569 | 829 | DHQK*KNIPCSWIGRINIVKMSILPKAIYRFSAI |
| | | | | | | PIKIPMTFFTEI*S*NVYRITKTQE*AKAILSKK |
| | | | | | | EQNLEESHYLDFK*YYRAV |
| 537 | 1887 | A | 4104 | 54 | 281 | SIDCEHLIRRMLVLDPSKLRLTIAQIKEHKWML |
| | | | | | | IEVPVQRPVLYPQEQENEPSIGEFNEQVLRLM |
| | | | | | | HSLGIDQQKTIE |
| 538 | 1888 | A | 4109 | 141 | 314 | IREIPLKIRSVVSLILKCPYKFILTFFFAGCSQPL |
| | | | | | | VPRENITAWMNAIGLIITALPVS |
| 539 | 1889 | A | 4111 | 268 | 1 | ASRPWGHSYP*FNQQEVDTLKRPIASSEI*MM |
| | | | | | | I*KFAT\KKSPGPYRFTAEFSHTFKEDLVPILW |
| | | | | | | PLFPKTYREGTLPHSFYEASITL |
| 540 | 1890 | A | 4142 | 198 | 2064 | PEPGAGRAATPWGPLFWRGRGSGRCEKAAE |
| | | | | | | AALGDFLGLHERTQQPAVDRLLSDASAQWR |
| | | | | | | VRGHGGVRESGRAPQQPGRRRGRRPRKRPR |
| | | | | | | GRWRREGCGAGGRGVCVAAWSQRSIAGNN |
| | | | | | | DYRLFHKMSNSHPLRPFTAVGEIDHVHILSEH |
| | | | | | | IGALLIGEEYGDVTFVVEKKRFPAHRVILAAR |
| | | | | | | CQYFRALLYGGMRESQPEAEIPLQDTTAEAFT |
| | | | | | | MLLKYIYTGRATLTDEKEEVLLDFLSLAHKY |
| | | | | | | GFPELEDSTSEYLCTILNIQNVCMTFDVASLY |
| | | | | | | SLPKLTCMCCMFMDRNAQEVLSSEGFLSLSK |
| | | | | | | TALLNIVLRDSFAAPEKDIFLALLNWCKHNSK |
| | | | | | | ENHAEIMQAVRLPLMSLTELLNVVRPSGLLSP |
| | | | | | | DAILDAIKVRSESRDMDLNYRGMLIPEENIAT |
| | | | | | | MKYGAQVVKGELKSALLDGDTQNYDLDHG |
| | | | | | | FSRHPIDDDCRSGIEIKLGQPSIINHVRILLWDR |
| | | | | | | DSRSYSYFIEVSMDELDWVRVIDHSQYLCRS |
| | | | | | | WQKLYFPARVCRYIRIVGTHNTVNKIFHIVAF |
| | | | | | | ECMFTNKTFTLEKGLIVPMENVATIADCASVI |
| | | | | | | EGVSRSRNALLNGDTKNYDWDSGYTCHQLG |
| | | | | | | SGAIVVQLAQPYMIGSIRVLLWDCDDRSY |
| 541 | 1891 | A | 4146 | 282 | 778 | GTLGYFNGARGQPQDNFFAHQ\VSHHPPISAC |
| | | | | | | HAESENFAFWQDMKWKNKFWGKSLEIVPVG |
| | | | | | | TVNVSLPRFGDHFEWNKVTSCIHNVLSGQRW |
| | | | | | | IEHYGEVLIRNTQDSSCHCKITFCKAKYWSSN |
| | | | | | | VHEVQGAVLSRSGRVLHRLFGKWHEGLYRCI |
| | | | | | | PTPGGQCIWKP |
| 542 | 1892 | A | 4147 | 44 | 433 | SVDAYVCNDIVFSYRTTITLLEGA*LTHRYVA |
| | | | | | | QDPKQGQLRSLHLTCDSAPAGSQGTWSTSCR |
| | | | | | | INIILIFRGGAQ1TFLATFDDSPKAVLGDRLLLT |
| | | | | | | SSH |
| 543 | 1893 | A | 4153 | 678 | 11 | TISYPQCLTQMYFLISFANVDTFLLPIMALDH |
| | | | | | | YVAICSALQ*CSIITP/ELCQGLPVLA*AGSSLIS |
| | | | | | | PVHTVIMSRLAFCSSAQISHFYRDAYLLMKIA |
| | | | | | | CSHT4\NQHVFLGAVVLFILAPCALILVSYIRIA |
| | | | | | | AAILRIPSPTRRRKACSICSSHISLVTLFYGTV |
| | | | | | | LGICI*PPDSFSAQDAIATIMYTVVTSMLNPFIY |
| | | | | | | SLMNKEVQEAVRRLFSRGSHSSWCW |
| 544 | 1894 | A | 4158 | 3 | 538 | LLYAQAGVQ*LNLSSLQPQPAGLKQSSHPSLP |
| | | | | | | SSWDYRYSTPHPANFFVEMEFHHVAQAGLEL |
| | | | | | | LGSGDLPTSTSHSAGITGV\SHHAPPRLISSEGS |
| | | | | | | LLGHLLCLPMVFPLLCVFVLISSSLAGEEAAG |
| | | | | | | LRVQKLWPAVVLSHLPVCWFHCSGIWSEVIE |
| | | | | | | LKVGREGHVLPWQAHVVEF |
| 545 | 1895 | A | 4160 | 1 | 412 | HPLGLGLVPSEIFSPQDKKAADGSILAPARGE |
| | | | | | | DLEAGLKGSFMDGRLQASVSVFRIQRVGSAM |
| | | | | | | QDTASAMPGLPYYPTSHCFMAGGKSRSQGW |
| | | | | | | ELELSGEPAPGWQVLAGYTYTQARYLRDASE |
| | | | | | | ANVGQPLRPVDPR |
| 546 | 1896 | A | 4174 | 1252 | 1190 | FFQVFIFLFLIFFKTEFHSCGPGAVQWHNLDSL |
| | | | | | | QPPPPRFKGFSCLSLPSSWDYRHAPAHPANFV |
| | | | | | | FLVETGFV\GQ\ASLELPTSGDTPAS\ASQSA |
| | | | | | | GITGVSHHA*PRASGRRCW |
| 547 | 1897 | A | 4176 | 3029 | 1 | AGPDGLAAPASCQGARGQTRVPGAFSWLAP |
| | | | | | | GSHIIASEGLAPGVPPAGGVSAQELTAPPQEG |
| | | | | | | WGLGAPPAAPRPESDEKRAGSDAVRSFSRGA |
| | | | | | | RDSLGQRRLGGTRGAGPAGKGAQRTMGPAS |
| | | | | | | GFHSFPPRPHQEPSPRSSCWQHLLWHCPWPQ |
| | | | | | | PSRLPRLTPAQLLQGPGVLAAPPGP*HVPGFL |
| | | | | | | AQSPWPLPSGPRSP*DPLHQGALVPLPQGGSP |
| | | | | | | HTAPHCLPSVLSPAIQQPLLPTAST/SSRSPPAS |
| | | | | | | TMAPIPSALAVWEPAGSSPQLSSAPADSS\PLP |
| | | | | | | ALPKVLPPWTQKPLLQCLCQSPLPLLSFPDQI/ |
| | | | | | | RCPPACSPAAASSFSFESQPCPSAPSKASPAPA |
| | | | | | | AL\IVGPHHPP*SQQPQSQSVHPHGPGGPQPPL |
| | | | | | | AASSLFWMFCQPPPPHPQFLWHRPLPVTGKA |
| | | | | | | LAS\PLCFRPAPGSLRQTPLPPQFHIPRPGLSAP/ |
| | | | | | | PPPASGTSDSSDSRSPSASAARVWPPA\SPPPP |
| | | | | | | AARHRPHPPEYFLSPCPFSCGFPRLLGRPRRPQ |
| | | | | | | ALQTPRAWDLPPGSSPAPLCSQPELP*APPPLP |
| | | | | | | PFPRVA*LGSGHPPSAQVPGLW*RCV*GHPIP |
| | | | | | | RPVGHS*SGPPHSPPL*APPQAWPLELPPSRQC |
| | | | | | | LQPLHLRAAQPLDPCCSLSPPGPPLPVPALPS |
| | | | | | | WPGRP*SPSPASSQPPYHAGLPGPQSSPLPPGL |
| | | | | | | PQLPSLRSGSQQPLLFFQCPGPGAVWGKGSPQ |
| | | | | | | PLSPHPPPP/ARTQTFPVASRSLSPGTAPYSVCL |
| | | | | | | TPSRSASSLPEVVLASSLPKIPQSSGS\PLGPTSP |
| | | | | | | MP*CFHRPSPPLP/LSSPFPA\LRPQAPQFPLHLP |
| | | | | | | P*PPAPSPGCPLPPLAQQHQPSPPSPPSPHARSTLT |
| | | | | | | PPLWPSLALLP*PLPPPPPVPSFSASLLCSLPAH |
| | | | | | | GTFASPGLGRSCLGKPQTLPWISFWPPSGPRLA |
| | | | | | | PGTWQPWIPVSPAPLSCLSAWDPWELPSPQPQ |
| | | | | | | VCSTAELPTSCLLSSPGP\PAYQPPRPGCL*GPP |
| | | | | | | GPPGLPPLQSSLSFPPPPPPVPQPPAPPALQWG |
| | | | | | | LHLPGGRTK |
| 548 | 1898 | A | 4180 | 2369 | 844 | RIHREEDFQFILKGLARLLSNPLLQTYLPNSTK |
| | | | | | | KIQFHQELLVLFWKICDFNKVGQPRGALQGD |
| | | | | | | GEQLPQ*PGGRDSVRLRGVGQSCPSLELSPLG |
| | | | | | | PSPHP*KFLFFVLKSSDVLDILVPILFFLNDAR |
| | | | | | | ADQSRVGLMHIGVFILLLLSGECNFGVRLNKP |
| | | | | | | YSIRVPMDIPVFTGTHIMDLLW\VFHKIITSGHQ |
| | | | | | | RLQPLFDCLLTIVVNVSPYLKSLSMVTANKLL |
| | | | | | | HLLEAFSTTWPLFSAAQNHHLVFFLLEVFNNI |
| | | | | | | IQYQFDGNSNLVYAIIRKRSIFHQLANLPTDPP |
| | | | | | | TIHKALQRRRRTPEPLSRTGSQGGAYPWRAPA |
| | | | | | | PLPLQSQAPSRPVWWLLQALTS*PRSPRCQR |
| | | | | | | MAPCGPWNLSPSRAWRMAARLRGSPARRHGG |
| | | | | | | SSGDRPIHSSASGQWSPTPEWVLSWKSKLPLQ |
| | | | | | | TIMRLLQVLVPQVEKICIDKGLTDESELLRFLQ |
| | | | | | | HGTLVGLLPVPHILIRKYQANSGTAMWFRT |
| | | | | | | YMWGVIYLRNVDPPVWYDTDVKLPEIQRV |
| 549 | 1899 | A | 4191 | 858 | 321 | LPWQRLGVLLSRGKIVIAVTGWLESLRTAQKT |
| | | | | | | ALLQDGRRKVHYLFPDGKEMAEEYDEKTSE |
| | | | | | | LLVRKWRVKSALGAMGQWQLEVGDPAPLG |
| | | | | | | AGNLGPELIKESNANPIFMRKDTKMSFQWRIR |
| | | | | | | NLPYPKDVYSVSVDQKERCIIVRTTNKKYYK |
| | | | | | | KFSIPDLDRHQLPLDDALLSFA\TPTAP |
| 550 | 1900 | A | 4192 | 1 | 1980 | IRHTGSDIAGVCGWLLLSGPCGVGLDLDSPIL |
| | | | | | | GASAMRRSEVLAEESIVCLQKALNHLREIWE |
| | | | | | | LIGIPEDQRLQRTEVVKKHIKELLDMMIAEEE |
| | | | | | | SLKERLIKSISVCQKELNTLCSELHVEPFQEEG |
| | | | | | | ETTILQLEKDLRTQVELMRKQKKERKQE\LKL |
| | | | | | | LQEQDQELC\EILCMPHYDIDSASVPSLEELNQ |
| | | | | | | FRQHVTTLRETKASRREEF/VSSIKRQIILCME |
| | | | | | | ELDHTPDTSFERDVVCEDEDAYCLSLENIAT+433 L |
| | | | | | | QKLLRQ\LEMQKSQNEAVCEG\LRTQI\RELW |
| | | | | | | DRLQIPEEEREAVATIMSGSKAKVRK\ALQ\LE |
| | | | | | | VDRLEELEKCKTMKKVIEAIRVELVQYWDQC |
| | | | | | | FYSQEQRQAFAPFCAEDYTESLLQLHDAEIVR |
| | | | | | | LKNYYEVHKELFEGVQKWEETWRLFLEFER |
| | | | | | | KASDPNRFRGGNLLKEEKQRAKLQKMLP |
| | | | | | | KLEEELKARIELWEQEHSKAFMVNGQKFME |
| | | | | | | YVAEQWEMHRLEKERAKQERQLKNKKQTET |
| | | | | | | EMLYGSAPRTPSKRRGLAPNTPGKARKLNTT |
| | | | | | | TMSNATANSSIRPIFGGTVYHSPVSRLPPSGSK |
| | | | | | | PVAASTCSGKIIPRTGRHGANKENLELNGSI |
| | | | | | | LSGGYPGSAPLQRNFSINSVASTYSEFADPSLS |
| | | | | | | DSSTVGLQRELSKASKSDATSGILNSTNIQS |
| 551 | 1901 | A | 4194 | 3 | 1008 | AWIIEGLVSSPAIGAYLSASYGDSLVVLVAW |
| | | | | | | VALLDICFILVAVPESLPEKMRPVSWGAQISW |
| | | | | | | KQADPFASLKKVGKDSTVLL\ICITVCLSYVPE |
| | | | | | | AG\QYSSFF\LYLR\QVIQFG\TVKIAAYIAMVIGI |
| | | | | | | LSIVAQTAFLSILMRSLGNKNTVLLGLGFQML |
| | | | | | | QLAWYGFGSQAWMMWAAGTVAAMSSTTFP |
| | | | | | | AISALVSRNAESDQQGVAQGIITGIRGLCNGL |
| | | | | | | GPALYGFIFYMFHVELTELGPKINSNNVPLQ |
| | | | | | | GAVIPGPPFLFGACWLMSFLVAIFIPEYSKSA |
| | | | | | | GVQKHSNSSSGSLTNTPERGSDEDIEPLLQDS |
| | | | | | | SIWELSSFEEPGNQCTEL |
| 552 | 1902 | A | 4197 | 2 | 14302 | APYPPAPGSRQQKQKAALPGAAAAAELRGAR |
| | | | | | | EPAPARRRGTMADGGEGEDEIQFLRTDDEVV |
| | | | | | | LQCTATLIIKEQQKLCLAAEGFGNRLCFLESTS |
| | | | | | | NSKNVPPDLSICTFVLEQSLSVRALQEMLANT |
| | | | | | | VEKSEGQVDVEKWKFMMKTAQGGGHRTLL |
| | | | | | | YGHAILLRHSYSGMYLCCLSTSRSSTDKLAFD |
| | | | | | | VGLQEDITGEACWWTIHPASKQRSEGEKVR |
| | | | | | | VGDDLILVSVSSERYLHLSYGNGSLHVDAAF |
| | | | | | | QQTLWSVAPISSGSEAAQGYLIGGDVLRLLH |
| | | | | | | GHMDECLTVPSGEHGEEQRRTVHYEGGAVS |
| | | | | | | VHARSLWRLETLRVAWSGSHIRWGQPFRLR |
| | | | | | | HVTTGKYLSLMEDKNLLLMDKEKADVKSTA |
| | | | | | | FTFRSSKEKLDVGVRKEVDGMGTSEIKYGDS |
| | | | | | | VCYIQHVDTGLWLTYQSVDVKSVRMGSIQR |
| | | | | | | KAIMIIHEGHMDDGISLSRSQHEESRTARVIRS |
| | | | | | | TVFLFNRFIRGLDALSKKAKASTVDLPIESVSL |
| | | | | | | SLQDLIGYFHPPDEHLEHEDKQNRLRALKNR |
| | | | | | | QNLFQEEGMINLVLECIDRLHVYSSAAHFAD |
| | | | | | | VAGREAGESWKSILNSLYELLAALIRGNRKN |
| | | | | | | CAQFSGSLDWLISRLERLEASSGILEVLHCVL |
| | | | | | | VESPEALNIIKEGHIKSIISLLDKIIGRNHKVLD |
| | | | | | | VLCSLCVCHGVAVRSNQHLICDNLLPGRDLL |
| | | | | | | LQTRLVNHVSSMRPNWLGVSEGSAQYKKWY |
| | | | | | | YELMVDHTEPPVTAEATHLRVGWASTEGYSP |
| | | | | | | YPGGQEEWGGNGVGDDLFSYGFDGLIILWSG |
| | | | | | | CIARTVSSPNQHLLRTDDVISCCLDLSAPSISF |
| | | | | | | RINGQPVQGMFENFNIDGLFFPVVSFSAGIKV |
| | | | | | | RFLLGGRHGEFKFLPPPGYAPCYEAVLPKEKL |
| | | | | | | KVEHSREYKQERTYTRDLLGPTVSLTQAAFT |
| | | | | | | PIPVDTSQIVLPPHLERLREKLAENIHELWVMN |
| | | | | | | KIELQWQYGPVRDDNKRQEPCLVEFSKLPEQ |
| | | | | | | ERNYNLQMSLETLKTLLALGCHVGISDEHAE |
| | | | | | | DKVKKMKLPKNYQLTSGYKPAPMDLSFIKLT |
| | | | | | | PSQEAMVDKLAENAHNVWALRDRIRQGWTY |
| | | | | | | GIQQDVKNRRNPRLVPYTPLDDRTKKSNKDS |
| | | | | | | LREAVRTLLGYGYNLEAPDQDHAARAEVCS |
| | | | | | | GTGERFRIFRAEKTYAVKAGRWYFEFETVTA |
| | | | | | | GDMRVGWSRPGCQPDQELGSDERAFAFDGF |
| | | | | | | KAQRWHQGNEHYGRSWQAGDVVGCMVDM |
| | | | | | | NEHTMMFTLNGEILLDDSGSELAFKDFDVGD |
| | | | | | | GFIPVCSLGVAQVGRMNFGKDVSTLKYFTIC |
| | | | | | | GLQEGYEPFAVNTNRDITMWLSKRLPQFLQV |
| | | | | | | PSNHEHLEVTRIDGTLDSSPCLKVTQKSFGSQN |
| | | | | | | SNTDIMFYRLSMPIECAEVFSKTVAGGLPGAG |
| | | | | | | LFGPKNDLEDYDADSDFEVLMKTAIIGHLVP |
| | | | | | | DRVDKDKEATKPEFNNHKDYAQEKPSRLKQ |
| | | | | | | RIFLLRRTKPDYSTSHSARLTEDVLADDRDDY |
| | | | | | | DFLMQTSTYYYSVRIFPGQEPANVWVGWITS |
| | | | | | | DFHQYDTGFDLDRVRTVTVTLGDEKGKVHE |
| | | | | | | SIKRSNCYMVCAGESMSPGQGRNNNGLEIGC |
| | | | | | | VVDAASGLLTFIANGKELSTYYQVEPSTKLFP |
| | | | | | | AVFAQATSPNVFQFELGRIKNVMPLSAGLFKS |
| | | | | | | EHKNPVPQCPPRLHVQFLSHVLWSRMPNQFL |
| | | | | | | KVDVSRISERQGWLVQCLDPLQFMSLHIPEEN |
| | | | | | | RSVDILELTEQEELLKFHYHTLRLYSAVCALG |
| | | | | | | NHRVAHALCSHVDEPQLLYAIENKYMPGLLR |
| | | | | | | AGYYDLLIDIHLSSYATARLMMNNEYIYPMT |
| | | | | | | EETKSITLFPDENKKHGLPGIGLSTSLRPRMQF |
| | | | | | | SSPSFVSISNECYQYSPEPPLDILKSKTIQMLTE |
| | | | | | | AVKEGSLHARDPVGG1TEFLFVPLIKLFYTLLI |
| | | | | | | MGIFHNEDLKHILQLIEPSVFKEAATPEEESDT |
| | | | | | | LEKELSVDDAKLQGAGEEEAKGGKRPKEGLL |
| | | | | | | QMKLPEPVKLQMCLLLQYLCDGQVRHRIEAI |
| | | | | | | VAFSDDFVAKLQDNQRFRYNEVMQALNMSA |
| | | | | | | ALTARKTKEFRSPPQEQINMLLNFKDDKSECP |
| | | | | | | CPEEIRDQLLDFHEDLMTHCGIELDEDGSLDG |
| | | | | | | NSDLTIRGRLLSLVEKVTYLKKKQAEKPVES |
| | | | | | | DSKKSSTLQQLISETMVRWAQESVIEDPELVR |
| | | | | | | AMFVLLHRQYDGIGGLVRALPKTYTINGVSV |
| | | | | | | EDTINLLASLGQIRSLLSVRMGKEEEKLMIRG |
| | | | | | | LGDIMNNKVFYQHPNLMRALGMHETVMEV |
| | | | | | | MVNVLGGGESKEITFPKMVANCCRFLCYFCR |
| | | | | | | ISRQNQKAMFDHLSYLLENSSVGLASPAMRG |
| | | | | | | STPLDVAAASVMDNNELALALREPDLEKVVR |
| | | | | | | YLAGGGLQSCQMLVSKGYPDIGWNPVEGER |
| | | | | | | YLDFLRFAVFCNGESVEENANVVVRLLIRRPE |
| | | | | | | CFGPALRGEGGNGLLAAMEEAIKIAEDPSRD |
| | | | | | | GPSPNSGSSKTLDTEEEEDDTLHMGNAIMTFY |
| | | | | | | SALIDLLGRCAPEMHLIHAGKGEAIRIRSILRS |
| | | | | | | LIPLGDLVGVISIAFQMPTIAKDGNVVEPDMS |
| | | | | | | AGFCPDHKAAMVLFLDRVYGIEVQDFLLHLL |
| | | | | | | EVGFLPDLRAAASLDTAALSATDMALALNRY |
| | | | | | | LGTAVLPLLTRGAPLFAGTEHHASLIDSLLHT |
| | | | | | | VYRLSKGCSLTKAQRDSIEVCLLSICGQLRPS |
| | | | | | | MMQIILLRRLVFDVPLLNEHAKMPLKLLTNH |
| | | | | | | YERCWKYYCLPGGWGNFGAASEEELHLSRK |
| | | | | | | LFWGIFDALSQKKYEQELPKLALPCLSAVAG |
| | | | | | | ALPPDYMESNYVSMMEKQSSMDSEGNFNPQ |
| | | | | | | PVDTSNITIPEKLEYFINKYAEHSHDKWSMDK |
| | | | | | | LANGWIYGEIYSDSSKVQPLMKPYKLLSEKE |
| | | | | | | KEIYRWPIKESLKTMLARTMRTERTREGDSM |
| | | | | | | ALYNRTRRISQTSQVSVDAAHGYSPRAIDMS |
| | | | | | | NVTLSRDLHAMAEMMAENYHNIWAKKKKM |
| | | | | | | ELESKGGGNHPLLVPYDTLTAKEKAKDREKA |
| | | | | | | QDILKFLQINGYAVSRGFKDLELDTPSIEKRFA |
| | | | | | | YSFLQQLIRYVDEAHQYLLEFDGGSRGKGEHF |
| | | | | | | PYEQEIICFFAKVVLPLIDQYFKNHRLYFLSAA |
| | | | | | | SRPLCSGGHASNKEKEMVTSLFCKLGVLVRII |
| | | | | | | RISLFGNDATSIVNCLHILGQTLDARTVMKTG |
| | | | | | | LESVKSALRAFLDNAAEDLEKTMENLKQGQF |
| | | | | | | THTRNQPKGVTQIINYTTVALLPMLSSLFEHI |
| | | | | | | GQHQFGEDLILEDVQVSCYRILTSLYALGTSK |
| | | | | | | SYVERQRSALGECLAAFAGAFPVAFLETIILD |
| | | | | | | KHNIYSIYNTKSSRERAALSLPTNVEDVCPNIP |
| | | | | | | SLEKLMEEIVELAESGIRYTQMPHVMEVTLPM |
| | | | | | | LCSYSRWWEHGPENNPERAEMCCTALNSE |
| | | | | | | HMNTLLGNILKIIYNNLGIDEGAWMKRLAVF |
| | | | | | | SQPIINKVKFQLLKTHFLPLMEICLKICKAATVV |
| | | | | | | SEEDHLKAEARGDMSEAELLILDEFHLARDL |
| | | | | | | YAFYPLLIRFVDYNRAKWLKEPNPEAEELFR |
| | | | | | | MVAEVFWWSKSHNFKREEQNFVVQNEINN |
| | | | | | | MSFLITDTKSKMSKAAVSDQERKKMKRKGD |
| | | | | | | RYSMQTSLIVAALKRLLPIGLNICAPGDQELIA |
| | | | | | | LAKNEFSLKDTEDEVRDIIRSNIHLQGKLEDP |
| | | | | | | AIRWQMALYKDLPNRTDDTSDPEKTVERVL |
| | | | | | | DIAIWLFHLEQKSKRVGRRHYCLVEHPQRSK |
| | | | | | | KAVWHKLLSKQRKRAVVACFRMAPLYNLPR |
| | | | | | | KRAVNLFLQGYEKSWTETEEHYFEDKLIEDLA |
| | | | | | | KPGAEPPEEDEGTKRVDPLHQLILLFSRTALT |
| | | | | | | EKCKLEEDFLYMAYADIMAKSCHDEEDDDG |
| | | | | | | EEEVKSFEEKEMEKQKLLYQQARLHDRGAA |
| | | | | | | EMVLQTISASKGETGPMVAATLKLGIAILNGG |
| | | | | | | NSTVQQKMLDYLKEKKDVGFFQSLAGLMQS |
| | | | | | | CSVLDLNAFERQNKAEGLGMVTEEGSGEKV |
| | | | | | | LQDDEFTCDLFRFLQLLCEGHNSDFQNYLRT |
| | | | | | | QTGNNTTVNIIISTVDYLLRVQESISDFYWYY |
| | | | | | | SGKDVIDEQGQRNFSKAIQVAKQVFNTLTEYI |
| | | | | | | QGPCTGNQQSLAHSRLWDAVVGFLHVFAHM |
| | | | | | | QMKLSQDSSQIELLKELMDLQKDMVVMLLS |
| | | | | | | MLEGNVVNGTIGKQMYDMLVESSNNVEMIL |
| | | | | | | KFFDMFLKLKDLTSSDTFKEYDPDGKGVISK |
| | | | | | | RDFHKAMESHKHYTQSETEFLLSCAETDENE |
| | | | | | | TLDYEEFVKRFHEPAKDIGFNVAVLLTNLSEH |
| | | | | | | MPNDTRLQTFLELAESVLNYFQPFLGRIEIMG |
| | | | | | | SAKRIERVYFEISESSRTQWEKPQVKESKRQFI |
| | | | | | | FDVVNEGGEKEKMELFVNFCEDTIFEMQLAA |
| | | | | | | QISESDLNERSANKEESEKERPEEQGPRMAFF |
| | | | | | | SILTVRSALFALRYNILTLMRMLSLKSLKKQM |
| | | | | | | KKVKKIVITVKDMVTAFFSSYWSIFMTLLHFV |
| | | | | | | ASVFRGFFRIICSLLLGGSLVEGAICKIKVAELL |
| | | | | | | ANMPDPTQDEVRGDGEEGERKPLEAALPSED |
| | | | | | | LTDLKELTEESDLLSDIFGLDLKREGGQYKLIP |
| | | | | | | HNPNAGLSDLMSNPVPMIPEVQEKFQEQKAK |
| | | | | | | EEEKEEKEETKSEPEKAEGEDGEKEEKAKED |
| | | | | | | KGKQKLRQLHTHRYGEPEVPESAFWKKIIAY |
| | | | | | | QQKLLNYFAEI\IFYNMEMLALFVAFAINFILL |
| | | | | | | FYKVSTSSVVEGKELPTRSSSENAKVTSLDSS |
| | | | | | | SHRIIAVHYVLEESSGYMEPTVRILPILHTVISF |
| | | | | | | FCIIGYYCLKVPLVIFKREKEVARKLEFDGLYI |
| | | | | | | TEQPSEDDTKGQWDRLVINTQSFPNNYWDKF |
| | | | | | | VKRKVMDKYGEFYQRDRISELLGMDKAALD |
| | | | | | | FSDAREKKKPKKDSSLSAVLNSIDVKYQMW |
| | | | | | | KLGVVFTDNSFLYLAWYMT |
| 553 | 1903 | A | 4199 | 31 | 767 | LPELNGRGAGLRRAEPSERGGGAERTQQVAA |
| | | | | | | LPLSHGIISHGGGGCRCAAERNGAARGSAAC |
| | | | | | | AYGLYLRIDKGRLQCLNESREGSGRGVFKPW |
| | | | | | | ERAD\DRSKPVESDADEELLFNIPFTG\HVKLK |
| | | | | | | GIIIMGEDDDSHPSEMRLYKNIPQMSFDDTER |
| | | | | | | EPDQTFSLNRDLTGELEYATKISRFSNVYHLSI |
| | | | | | | HTSKNFGADTTKVFYIGLRGEWTELRRHEVTI |
| | | | | | | CNYEASANPADIIRVHQVTPQTIIFIS |
| 554 | 1904 | A | 4200 | 1 | 961 | GIPCTEMGNFDNANVTGELEFAIHYCFKTHSL |
| | | | | | | EICIKACKNLAYGEEKKKKCNPYVKTYLLPD |
| | | | | | | RSSQGKRKTGVQRNTVDPTFQETLKYQVAPA |
| | | | | | | QLVTRQLQVSVWHLGTLAERVFLGEVIIPLAT |
| | | | | | | WDFEDSTTQSFRWHPLRAKADKYEDSVPQS |
| | | | | | | NGELTVRAKLVLPSRTRKLQEAQEGTDQPSL |
| | | | | | | HGQLCLVVLGAKNLPVRPDGTLNSFVKGCLT |
| | | | | | | LPDQQKLRLKSPVLRKQACPQWKHSFVFSGV |
| | | | | | | TPAQLRQSSLELTVWDQALFGMNDRLLGGT\ |
| | | | | | | RLGSKGDTAVGGDACSQSKLQWQKVLSSPN |
| | | | | | | LWTDMTLVLH |
| 555 | 1905 | A | 4211 | 331 | 2419 | KENKKARNLEMNQSRSRSDGGSEETLPQDH |
| | | | | | | NHHENERRWQQERLHREEAYYQFINELNDE |
| | | | | | | DYRLMRDHNLLGTPGEITSEELQQRLDGVKE |
| | | | | | | QLASQPDLRDGTNYRDSEVPRESSHEDSLLE |
| | | | | | | WLNTFRRTGNATRSGQNGNQTWRAVSRTNP |
| | | | | | | NNGEFEFSLEIHVNHENRGFELHGEDYTDIPLS |
| | | | | | | DSNRDHTANRQQRS1\SPVARRTRSQTSVNFN |
| | | | | | | GSSSNIPRTRLASRGQNPAEGSFSTLGRLRNGI |
| | | | | | | GGAAGIPRANASRTNFSSHTNQSGGSELRQRE |
| | | | | | | GQRFGAAHVWENGARSNVTVRNTNQRLEPI |
| | | | | | | RLRSTSNSRSRSPIQRQSGTVYHNSQRESRPV |
| | | | | | | QQTTRRSVRRRGRTRVFLEQDRERERRGTAY |
| | | | | | | TPFSNSRLVSRITVEEGEESSRSSTAVRRIWHT |
| | | | | | | LDLQVR\RIRPGENRDRDSIANRTRSRVGLAE |
| | | | | | | NTVTIESNSGGFRRTISRLERSGIRTYVSTITVP |
| | | | | | | LRRISENELVEPSSVALRSILRQLMTGFGELSSL |
| | | | | | | MEADSESELQRNGQHLPDMHSELSNLGTDN |
| | | | | | | NRSQHREGSSQDRQAQGDSTEMHGENETTQP |
| | | | | | | HTRNSDSRGGRQLRNPNNLVETGTLPILRLAII |
| | | | | | | FFLLNESDDDDIURGLTKEQIDNLSTRIIYEHN |
| | | | | | | SIDSELGKICSVCISDYVTGNKLRQLPCMHEF |
| | | | | | | HIHCIDRWLSENCTCPICRQPVLGSNIANNG |
| 556 | 1906 | A | 4212 | 3 | 462 | LQRQRQHPAAAPAVPVRCFTFCFTDIVIMPKR |
| | | | | | | KSPENTEGKDGSKVTKQEPTRRSAELSAKPA |
| | | | | | | PPKPEPKPRKTSAKKEPGAKISRGAKGKKEEK |
| | | | | | | QEAGKEGTAPSENGETKAEEIHISRSTVNVST |
| | | | | | | SRGTPPSTLSVKGQIETVRVKGTEN |
| 557 | 1907 | A | 4213 | 774 | 507 | ARRFSCLTLQTSWGHRH\GPPRP\ANFVFLVET |
| | | | | | | GFLHIGQAGHKLPTSGDPPASASQSARITGMS |
| | | | | | | HRTWFLASFLIDSCKNFIVYKIMYTL |
| 558 | 1908 | A | 4225 | 3 | 1253 | TYRHAEREHPETSSATKVSYDYRHKRPKLLD |
| | | | | | | GDQDFSDGRTQKYCKEEDRKYSFQKGPLNRE |
| | | | | | | LDCFNTGRGRETQDGQVKEPPKPSKKDSIAC |
| | | | | | | TYSNKNDVDLRSSNDKWKEKKKKEGDCRKE |
| | | | | | | SNSSSNQLDKSQKLPDVKFSPINLRKKSLTVK |
| | | | | | | VDVKKTVDTFRVASSYSTERQMSHDLVAVG |
| | | | | | | RKSENFHPVFEHLDSTQNTENKPTGEFAQEIIT |
| | | | | | | IIHQVKANYFPSPGITLHERFS\KMADIHKADV |
| | | | | | | NETPLNSDPEIHRRIDMSLAELQSKQAVIYESE |
| | | | | | | QTLIKIIDPNDLRHDIERREKERLQNEDEHIFHI |
| | | | | | | ASAAERDDQNSSFSKNYITQRKDIITHKPFEV |
| | | | | | | EGNHRNTRVRPFKSNFRGGRCQPNYKSGLVQ |
| | | | | | | KSLYIQAKYQRLRFTGPRGFITHKFRERLMRK |
| 559 | 1909 | A | 4235 | 1 | 323 | KFSIPFFLRWSFTLV\PRLEGNDMISVHCNLGL |
| | | | | | | LGLSHSPASASQVGGITGTQHHTGLIFGFLIET |
| | | | | | | EFHHVGQAGLELLTSGDPPALAFQSAGITGVS |
| | | | | | | HHAWLQVLNS |
| 560 | 1910 | 77 | 4246 | 2 | 1569 | TLSLLERVLMKDIVTPVPQEEVKTVLRKCLEQ |
| | | | | | | AALVNYSRLSEYAKIEGKKREMYELPVFCLA |
| | | | | | | SQVMDLTIQNQKDAENVGRLITPAKKLEDTIR |
| | | | | | | LAELVIEVLQQNEEHHAEAIFAWWSDLMVEH |
| | | | | | | AETFLSLFAVDMDAALEVQPPDTWDSFPLFQ |
| | | | | | | LL\NDFLRTGLLICGNGK\FIIKHLQDLFAPLVV |
| | | | | | | R/YMWDLDGSSPIAQSIHRGLLSRESWEPVNN |
| | | | | | | GSGTSEDLFWKLDALQTFIRDLHWPEEEFGK |
| | | | | | | HLEQRLKLMASDMIESCVKRTR\IAFEVKLQK |
| | | | | | | TSSIQQIFRVPQFNMAPCFNVMGLMAKGSIQP |
| | | | | | | KL\CSMEMGQEFAKMWIIQYHSKIDELIEETV |
| | | | | | | KEMITLLVAKFVTILEGVLAKLSRYDEGTLFS |
| | | | | | | SFLSFTVKAASKYVDVPKPGMDVADAYVTF |
| | | | | | | VRHSQDVLRDKVNEEMYIERLFDQWYNSSM |
| | | | | | | NVICTWLTDRMDLQLHIYQLKTLIRMVKKTY |
| | | | | | | RDFRLQGVLDSTLNSKTYETIRNRLTVEEATA |
| | | | | | | SVSEGGGLQGISMKDSDEEDH |
| 561 | 1911 | A | 4257 | 1300 | 654 | SELVQFLLIKDQKKIPIKRADILKHVIGDYKDI |
| | | | | | | FPDLFKRAAERLQYVFGYKLVELEPKSNTYIL |
| | | | | | | INTLEPVEEDAEMRGDQGTPTTGLLMIVLGLI |
| | | | | | | FMKGNTLKETEAWDFLLAL\GVYPTKKHLLFG |
| | | | | | | DPKKLITEDFVRQRYLEYRRIPHTDPVDYEFQ |
| | | | | | | WGPRTNLETSKMKVLKFVAKVLINQDPKDW |
| | | | | | | PAQYCEALADEENRAEPQPSGPAPSS |
| 562 | 1912 | A | 4260 | 1 | 1498 | MVTWLYRFLPTSNMAAKLRSLLPPDLRLQF |
| | | | | | | WLHARLQKCFLSRGCGSYCAGAKASPLPGK |
| | | | | | | MAMGLMCGRRELLRLLQSGRRVHSVAGPSQ |
| | | | | | | WLGKPLTTRLLFPAAPCCCRPHYLFLAASGPR |
| | | | | | | SLSTSAISFAEVQVQAPPVVAATPSPTAVPEV |
| | | | | | | ASGETADVVQTAAEQSFAELGLGSYTPVGLI |
| | | | | | | QNLLEFMHVDLGLPWWGAIAACTVFARCLIF |
| | | | | | | PLIVTGQREAARIHNHLPEIQKFSSRIREAKLA |
| | | | | | | QDHIEYYKASSEMALYQKKHGIKLYKPLILPV |
| | | | | | | TQAPIFISFFIALREMANLPVPSLQTGGLWWF |
| | | | | | | QDLTVSDPIYILPLAVTATMWAVLELGAETG |
| | | | | | | VQSSDLQWMRNVIRMMPLITLPITMHFPTAV |
| | | | | | | FMYWLSSNLFSLVQVSCLRIPAVRTVLKIPQR |
| | | | | | | VVHDLDKLPPREGFLESFKKGWKNAEMTRQ |
| | | | | | | LREREQRMRNQLELAARGPLRQTFTHNPLLQ |
| | | | | | | PGKDNPPNIPSS\SSSSSKPKSKYPWHDTLG |
| 563 | 1913 | A | 4265 | 623 | 116 | MGGLAPTQTLEPT\REYQNTQLSVSYLLPEQN |
| | | | | | | THGTRETLSSGPSNNLPLPLSSSATMPSMQCK |
| | | | | | | HRSPNGGLFRQSPVKITPPIPMSFQPVPGGV\L |
| | | | | | | PRGSGNPPHGTSILTAPPALLPHPPTHPTQQSF |
| | | | | | | LIQENNNTNHTHSHTHTYTETLSFFLYICVNN |
| | | | | | | DRMEWGICSVF |
| 564 | 1914 | A | 4270 | 3 | 368 | ILKRKLSSLNSEVSTIQNTRMLAFKATAQLFIL |
| | | | | | | GCTWCLGLLQVGPAAQVMAYLFTIINSLQGF |
| | | | | | | FIFLVYCLLS\QQVQKQYQKWFREIVKSKSES |
| | | | | | | ETYTLSSKMGPDSKFSEGDVFPRTSE |
| 565 | 1915 | A | 4288 | 83 | 406 | RNSRPLWCSPPASQPRQAPVSQSCCCPLPSSSS |
| | | | | | | PPSALLAPTKPRALGTLRLYECSPELCTTMLP |
| | | | | | | PAWLLMLCQAPRPQDPDPRLTQPEKSLQEAP |
| | | | | | | GQTGASRTPRT |
| 566 | 1916 | A | 4298 | 1041 | 229 | LNSSQKLACLIGVEGGHSLDSSLSVLRSFYVL |
| | | | | | | GVRYLTLTFTCSTPWAESSTKFRHHMYTNVS |
| | | | | | | GLTSFGEKVVEELNRLGMMIDLSYASDTLIRR |
| | | | | | | VLEVSQAPVIFSHSAARAVCDNLLNVPDDILQ |
| | | | | | | LLKKNGGIVMVTLSMGVLQCNLLANVSTVA |
| | | | | | | DHFDHIRAVIGSEFIGIGGNYDGTGRFPQGL\E |
| | | | | | | DVSTYPVLIEELLSRSWSEEELQGVLRGNLLR |
| | | | | | | VFRQVEKVREESRAQSPVEAEFPYGQLSTSCH |
| | | | | | | FHLGASEWTPRLLIWR |
| 567 | 1917 | A | 4299 | 1 | 1106 | GATPLGSVGGRTCKMDAATLTYDTLRFAEFE |
| | | | | | | DFPETSEPVWILGRKYSIFTEKDEILSDVASRL |
| | | | | | | WFTYRKNFPAIGGTGPTSDTGWGCMLRCGQ |
| | | | | | | MIFAQALVCRHLGRDWRWTQRKRQPDSYFS |
| | | | | | | VLNAFIDRKDSYYSIHQIAQMGVGEGKSIGQ |
| | | | | | | WYGPNTVAQVLKKLAVFDTWSSLAVHIAMD |
| | | | | | | NTVVMEEIRRLCRTSVPCAGATAFPADSDRR |
| | | | | | | CNGFPAGAEVTNRPSPWRILVLLIPLPLGLTD |
| | | | | | | INEAYVETLKHCFMMPQSLGVIGGKPNSAIIY |
| | | | | | | FIGYVGEELIYLDPHTTQPAVEPTDGCFIPDES |
| | | | | | | FHCQHIPPCRMSIAELDPSIAVVRGGHLSTQAF |
| | | | | | | GAECCLGMTRKTFGFLRFFFSMLG |
| 568 | 1918 | A | 4300 | 2012 | 1843 | SRKFLTTTPTVLYFLTSFYTKYDQIHFVLNTVS |
| | | | | | | LMSVLIPKLPQLHGVRIFGINKY |
| 569 | 1919 | A | 4302 | 186 | 531 | WTFCLFIIWWVPESARWLLTQGHVKEAHRY |
| | | | | | | LLHCARLNGRPVCEDSFSQEVRVNVCVSMHI |
| | | | | | | CVWWGVGCVKCLPPRAHHIWQEKPLGPHRT |
| | | | | | | VTESKLEAEGKTKEKAREKERKKKS |
| 570 | 1920 | A | 4308 | 3 | 869 | RSGQGKVYGLIGREEFQQMDVLEGLNLLLTIS |
| | | | | | | GKRNKLRVYYLSWLRNKILHNDPEVEKKQG |
| | | | | | | WTTVGDMEGCGHYRVVKYERIKFLVIALKSS |
| | | | | | | VEVYAWAPKPYHKFMAFKSFADLPHRPLLV |
| | | | | | | DLTVEEGQRLKVIYGSSAGFHAVDVDSGNSY |
| | | | | | | DIYIPVHIQSQITPHAIIIFLPNTDGMEMLLCYE |
| | | | | | | DEGVYVNTYGRIIKDVVLQWGEMPTSVAYIC |
| | | | | | | SNQIMGWGEKAIEIRSVETGHLDGVFMIHKRA |
| | | | | | | QRLKFLCERNDKVFFASVRSGGSSQVYFMTL |
| | | | | | | NRNCIMNW |
| 571 | 1921 | A | 4309 | 9 | 524 | ASREMDVTKVCGEMRYQLNKTNMEKDEAE |
| | | | | | | KEHREFRAKTNRDLEIKDQEIEKLRIELDESK |
| | | | | | | QHLEQEQQKAALAREECLRLTELLGESEHQL |
| | | | | | | HLTRQEICDSIQQSFSKEAKAQALQAQQREQE |
| | | | | | | LTQKIQQMEAQHDKTENEQYLLLTSQNTFLT |
| | | | | | | KLKEECCTLAKKLEQISQ |
| 572 | 1922 | A | 4318 | 1 | 1119 | GATPLGSVGGRTGKMDAATLTYDTLRFAEFE |
| | | | | | | DFPETSEPVWLLGRKYSIFTEKDEILSDVASRL |
| | | | | | | WFTYRKNFPAIGGTGPTSDTGWGCMLRCGQ |
| | | | | | | MIPAQALLVCRELGRDWRWTQRKRQPDSYFS |
| | | | | | | VLNAFIDRKDSYYSIHQIAQMGVGEGKSIGQ |
| | | | | | | WYGPNTVAQVLKKLAVFDTWSSLAVHIAMD |
| | | | | | | NTVVMEEIRRLCRTSVPCAGATAFPADSDRH |
| | | | | | | CNGFPAGAEVTNRFSPWEPLVLLIPLRLGL\T |
| | | | | | | DINEAYV\ETL\KHCFHGWPQFPGIVVHREGK |
| | | | | | | PNSAHYFIGYVGEELIYLDPHTTQPAVEPTDG |
| | | | | | | CFLPDESFHCQHPPGRMSIAELDPSLAVVRGGH |
| | | | | | | LSTQAFGARCCLGMTRKTFGFLRFFFSMLG |
| 573 | 1923 | A | 4333 | 363 | 1066 | GGVPVGLASKPFQILYGHTNEVLSVGISTELD |
| | | | | | | MAVSGSRDGTVIIHTIQKGQYMRTLRPPCESS |
| | | | | | | LFLTIPNLAISWEGHIVVYSSTEEKTTLK\ERM |
| | | | | | | HYICFSINGKYLGSQILKEQVSDLCIIGEHIVTG |
| | | | | | | SIQGFLSIRDLHSLNLSINPLAIVIELPIIICVCVT |
| | | | | | | KEYSHILVGLEDGKLIVVGVGKPAEVKPSISN |
| | | | | | | FISHAVGDYFGSPSFQLIEKSPLGNKLKAKFD |
| | | | | | | FSKGSK |
| 574 | 1924 | A | 4346 | 359 | 1234 | MDTLEEVTWANGSTALPPPLAPNISVPHRCLL |
| | | | | | | LLYEDIGTSRVRYWDLLLLIPNVLFLIFLLWK |
| | | | | | | LPSARAKIRITSSPIFITFYILVFVVALVGIARA |
| | | | | | | VVSMTVSTSNAATVADKILWEITRFFLLAIEL |
| | | | | | | SVIILGLAFGHLESKSSIKRVLAITTVLSLAYSV |
| | | | | | | TQGTLFILYPDAHLSAEDFNIYGHGGRQFWL |
| | | | | | | VSSCFFFLVYSLVVILPKTPLKERISLPSRRSFY |
| | | | | | | VYAGILALLNLLQGLGSVLLCFDIIEGLCCVD |
| | | | | | | ATI2FLYFSFFAPLTYVAFLRGFFGSEPKILF |
| 575 | 1925 | A | 4360 | 2038 | 1512 | GCWWRHPWLASQRDCLDCRIQLAEKFVKAV |
| | | | | | | SKPSRPDMMPIRVKEVYRLEEMEKIFVRILEM |
| | | | | | | KIIKGSSGTPKLSYTGRDDRIIFVPMGLYIVRT |
| | | | | | | VNEPWTMGFSKSFKKKFFYNKKTKDSTFDLP |
| | | | | | | ADSIAFFHICYYGRLFWEWGDGIRVHDSQKP |
| | | | | | | QDQDKLSKEDVLSFIQMHRA |
| 576 | 1926 | A | 4365 | 69 | 500 | QVEGRQGREVKRTAWRISPVWRPARCRRRST |
| | | | | | | PQP/PEIPGAQQQERHRQGEAPMQALDPRAEP |
| | | | | | | GPQAQSHAACQPEPEPPRVLLDPTAARGGVQ |
| | | | | | | GRP/GLSRHPGLAPHPQTHTPWPQSGRLPCAS |
| | | | | | | EPLPLGGIRPTPGLEPKGRDLM |
| 577 | 1927 | A | 4366 | 785 | 502 | SAPPKKKNGVLFLSPRLKSSGAIWVHSTPTLW |
| | | | | | | ASSNSRASTPKVAGITGARPHARIIFVFLIEMG |
| | | | | | | FHNVGQAGLIDTLTLVIGPPQPPKLLGLQM |
| 578 | 1928 | A | 4367 | 1 | 221 | FFFFLKKSRCVTQAGVQG\PISLHPPPPGFKRF |
| | | | | | | SRLSLLSSWDYRHP/HAANFCIFSRDG\VSPYW |
| | | | | | | SGWSRTPDLR |
| 579 | 1929 | A | 4383 | 1 | 224 | FETESHSVTQAGMQWHNLGSLQPMP/PGLKR |
| | | | | | | FSCLRLQSSWDHRHAPPHLAHFCIFSRDGVSP |
| | | | | | | CWPGWSSTPDLK |
| 580 | 1930 | A | 4397 | 410 | 94 | SRLPYSNVTAKKLPATNIPNLDCFTAKLYQ |
| | | | | | | \VFKKGI\IHILHELFQNKEEGAFPNS/FYEASFT |
| | | | | | | LRPKSDRDIAKEESYSTLSLLSTDTKILMSKYK |
| | | | | | | QLKSSDL |
| 581 | 1931 | A | 4414 | 670 | 3 | VLVHRQCGG1LRLRKEAVSVLDSADIEVTDS |
| | | | | | | RLPHATIVDHRPQHRWLETCNAPPQLIQGKA |
| | | | | | | RSAPKPSQASGHFSVELVRGYAGFGLTLGGG |
| | | | | | | RDVAGDTPLAVRGLLKDGP\AQRCGRLEVGD |
| | | | | | | LVLHINGESTQGLT\AQAVERIRAGGPQLHL |
| | | | | | | VIRRPLETHPGKPRGVGEPRKGVVPSWPDRSP |
| | | | | | | DPGGPEVTGSRSSSTSLVQHPPSRTTLKKTRG |
| | | | | | | SPE |
| 582 | 1932 | A | 4424 | 194 | 449 | VLYIRKKKRLEKLRLIQLMPMYNFDPTEEQDE |
| | | | | | | LEQELLEIIGRDAASVQAATSVQAMQGKTTL |
| | | | | | | PS\QGPLQRPSRLVFT\DVANAIHV |
| 583 | 1933 | A | 4435 | 1 | 166 | APGPPVPPPGSPPEQMPGPCPASMPPIDPPPGS |
| | | | | | | PPEQMPGPCPVSAPP/GPPPGSPPEQMPGPCPV |
| | | | | | | SAIPPALLQDTSV |
| 584 | 1934 | A | 4439 | 1 | 628 | SATPQQPSAPQHQGTLNQPPVPGMDESMSYQ |
| | | | | | | APPQQLPSAQPPQPSNPPHGAHTLNSGPQPGT |
| | | | | | | APATQHSQAGPATGQAYGPHTYTEPAKPKK |
| | | | | | | GQQLWNRMKPAPGT\EVSSSTSRSDPLLLPPR |
| | | | | | | ALAIPTQRASTVVLAPSPT/SEKVQNHSGSSAR |
| | | | | | | GNLSGKPDDWPILGHERVCGALLHRL*VGGG |
| | | | | | | QGPHGKAAQGGAAGAAAGRLGLYH |
| 585 | 1935 | A | 4463 | 10 | 144 | HKPVTNSRDTQEVPLEKAKQVLKIIATFKHTT |
| | | | | | | SIFDDFAHYEKRQ |
| 586 | 1936 | A | 4464 | 1309 | 103 | LNAESYVSFTTKLDIPTAAKYEYGVPLQTSDS |
| | | | | | | FLRPSSLTSSLCTDNNPAAFLVNQAVKCTRK |
| | | | | | | NLEQCEEIEALSMAFYSSPEILRVPDSRKKVPI |
| | | | | | | TVQSIVIQSLNKTLTRREDTDVLQPTLVNAGH |
| | | | | | | FSLCVNVYLEVKYSLTYTDAGEVTKADLSFV |
| | | | | | | LGTVSSVVVPLQQKFEIHFLQENTQPVPLSGN |
| | | | | | | PGYVVGLPLAAGFQPHKGSGIIQTTNRYGQLT |
| | | | | | | ILHSTTEQDCLALEGVRTPVLFGYTMQSGCK |
| | | | | | | LRLTGALPCQLVAQKVKSLLWGQGFPDYVA |
| | | | | | | PFGNSQGP/ADMLDWVPIHFITQSFNRKDSCQ |
| | | | | | | LPGALVIEVKWTKYGSLLNPQAKIVNVTANLI |
| | | | | | | SSSFPEANSGNERTILISTAVTFVDVSAPAEAG |
| | | | | | | FRAPPAINARLPFNFFFPFV |
| 587 | 1937 | A | 4471 | 614 | 387 | LLGRASAC/LQLQSSW/D/HRPMLPYLANFVF |
| | | | | | | CKDRISFTWLPRLVLNSWLQVILLPWPPTGCD |
| | | | | | | NKHEPPCPATKRRHSGSI |
| 588 | 1938 | A | 4480 | 1720 | 1458 | HDLGSLQPPPPGFKRFSCLSLPSSWDYRLMPP |
| | | | | | | CPANFCIIII/DFLVETGFHHVGQASHELLTSGD |
| | | | | | | PPTSASQSAGLTGMSYHTWFGES |
| 589 | 1939 | A | 4487 | 922 | 332 | APVTTSPRVGQPWIRTALALRSLYEARPSLRC |
| | | | | | | PPVELPWAPRRGHRLSPADDELYQRTRISLLQ |
| | | | | | | REAAQAMYIDSYNSRGFMINGNRVLGPCALL |
| | | | | | | PHSVVQWNVGSHQDITEDSFSLFWLLEPRIEI |
| | | | | | | VVVGTGDRTERLQSQVLQAMRQRGIAVEVQ |
| | | | | | | DTPNACATFNFLCHEGRVTGAALIPPPGGTSL |
| | | | | | | TSLGQAAQ |
| 590 | 1940 | A | 4492 | 1 | 472 | FFFFETESRSVAQAGVQWRDLGSLQAPPPGFT |
| | | | | | | PFSCLSLPSSWDYRRPPLRPANFFVFLVETGFP |
| | | | | | | RFSRDGLDLLT/SIGDPPTSASQSAGITGVSHR |
| | | | | | | ARPKRIGEPRRKCGNAVVWPSTSLGDHRVTS |
| | | | | | | VPHQGGLPGPIRVAPSSAGQREASQGPPGR |
| 591 | 1941 | A | 4495 | 1444 | 1116 | IAARFTLAKTWNQLKRP\TMIDSIKKTR\YIYT |
| | | | | | | MIEYYADTERNEIMSF\AGTWVELEAIILSKLM |
| | | | | | | LKDNWVEDTIPQGAVPCTATAEGMKRLLFAL |
| | | | | | | EPWDSSCFPHPSSGV |
| 592 | 1942 | A | 4496 | 2 | 919 | RTRPLFSGRPTRPVCTMSDERRLPGSAVGWL |
| | | | | | | VCGGLSLLANAWGILSVGAKQKKWKPLEFL |
| | | | | | | LCTLAATHMLNVAVPIATYSVVQLRRQRPDF |
| | | | | | | EWNEGLCKVFVSTFYTLTLATCFSVTSLSYHR |
| | | | | | | MWMVCWPVNYRLSNAKKQAGHTVMGIWM |
| | | | | | | GSFILSALPAVGWHDTSERPYTIIGCRFIYAEI |
| | | | | | | GLGFGVCFLLLVGGSVAMGVICTAIALFQTL |
| | | | | | | AVQVGRQADHRAFTVPTIVVEDAQGKRRSSI |
| | | | | | | DGSEPAKTSLQTTGLVTITIVFIYDCLMGFPVL |
| | | | | | | GPFSLADTHLSDLPYTWGDRDSGGACVM |
| 593 | 1943 | A | 4506 | 2 | 193 | FFFEAESCSVPQAGVQRPDLGWLHAPPP\GSC |
| | | | | | | HFPASASQVAGTTHARHHTQLIF\AFLVENGL |
| | | | | | | C |
| 594 | 1944 | A | 4507 | 1327 | 647 | KMAGGVRPLRQLRALCRVLLFLSQFCILSGG |
| | | | | | | ESTEIPPYVMKCPSNGLCSRLPADCIDCTTNFS |
| | | | | | | CTYGKPVTFDCAVKPSVTCVDQDFKSQKNFII |
| | | | | | | NMTCRFCWQLPETDYECTNSTSCMTVSCPRQ |
| | | | | | | RYPANCTVR\DLIVIICLGNRTFPKMLYCNWT |
| | | | | | | GGYKWVYGLWLLRHHPRWGLGADRF\YLGF |
| | | | | | | VAGTASGKLFSFGGLGIWTLIDVLLIGVGYVG |
| | | | | | | PADGSLYI |
| 595 | 1945 | A | 4512 | 533 | 264 | FFFKMESYSVARLECSGAISAPCNLHLLGSNN |
| | | | | | | SPASASRV/AGNIGARHHTQQIFVLLVQMRVH |
| | | | | | | YVGQDGLDLL/NLMIHPPRSPKVLGLQA |
| 596 | 1946 | A | 4513 | 3 | 1674 | HASDHLYPNFLVNELILKQKQRFEEKRFKLD |
| | | | | | | HSVSSTNGHRWQIFQDWLGTDQDNLDLANV |
| | | | | | | NLMLELLVQKKKQLEAESHAAQLQILMEFLK |
| | | | | | | VARRNKREQLEQIQKELSVLEEDIKRVEEMS |
| | | | | | | GLYSPVSEDSTVPQFEAPSPSHSSIIDSTEYSQP |
| | | | | | | PGFSGSSQTKKQPWYNSTLASRRKRLTAHFE |
| | | | | | | DLEQCYFSTRMSRISDDSRTASQLDEFQEG\LS |
| | | | | | | KF\TRYNSVRPL\ATLSYASDLYNGSQYKSLV |
| | | | | | | FEFDRDCDYFAIAGVTKKIKVYEYDTVIQDA |
| | | | | | | VDIHYPENEMTCNSKISCISWSSYHKNLLASS |
| | | | | | | DYEGTVILWDGFTGQRSKVYQEHEKRCWSV |
| | | | | | | DFNLMDPKLLASGSDDAKVKLWSTNLDNSV |
| | | | | | | ASIEAKANVCCVKFSPSSRYHLAFGCADHCV |
| | | | | | | HYYDLRNTKQPIMVFKGHRKAVSYAKFVSG |
| | | | | | | EEIVSASTDSQLKLWNVGKP\YCLRSFKGHIN |
| | | | | | | EKNFV\GLASNGDYIACGSENNSLYLYYKGLS |
| | | | | | | KTLLTFKFDTVKSVLDKDRKEDDTNEFVSAV |
| | | | | | | CWRALPDGESNVLIAANS\QGTI\KVLELV |
| 597 | 1947 | A | 4518 | 536 | 824 | RSLALSPGLECSGMISAHCNLHLLGSSDPPTS |
| | | | | | | ASQVAEITSVRHHTWLIFCI\LGQMGFHHVGE |
| | | | | | | QAGLELLTSWDPAILPSQSAGHGMSPHAWPP |
| 598 | 1948 | A | 4524 | 1 | 384 | FDTEFVNIGGDFDAAAGVPR\CRLPGAYFFSF |
| | | | | | | TLGKLPRKTLSVKIMKNEDEVQAMIYDDGSS |
| | | | | | | RRREMQSQSVMLALRRGDAVWLLSHDHDG |
| | | | | | | YGAYSNIIGKYITFSGFLVYPDLAPAAPPGLG |
| | | | | | | ASELL |
| 599 | 1949 | A | 4526 | 366 | 776 | MGQPAFYAEGPIQGGDAGELCKCDFLVFTSF |
| | | | | | | NPEAVCEAGTPAMFQTAWRQMESCSI/AQAG |
| | | | | | | VQWRDPGSLFPPLGFKEFSCLSLPSSWDYK |
| | | | | | | HAPPHPANFCIFSRDQVSPCWPGWSRSLDLVI |
| | | | | | | PPPWLPKVLGLQA |
| 600 | 1950 | A | 4529 | 776 | 334 | FFFETESCYVAQAGVQWCDLCSLQAPPPG\SS |
| | | | | | | DPPASASRVAGTTGARHHTQLIFVFLVETGFH |
| | | | | | | \MLARDGLKLLTSSDPPASASQSSWDYRREPP |
| | | | | | | RLANFFVFLVETGSRYVAQAGVQWLFTGAIP |
| | | | | | | LLISTGVLTCSVSDLGRFTPP |
| 601 | 1951 | A | 4533 | 1460 | 403 | HEVQESIHFLESESRGISDNYTLALITYALSS |
| | | | | | | VGSPKAKEALNMLTWRAEQEGGMQFWVSSE |
| | | | | | | SKLSDSWQPRSLDIEVAAYALLSHFLQFQTSE |
| | | | | | | GIPIMRWLSRQRNSLGGFASTQDTTVALKALS |
| | | | | | | EFAALMNTERTNIQVTVTGPSSPSPVKFLDT |
| | | | | | | HNRLLLQTAELADGTANGSV/SISANGFGFAI |
| | | | | | | CQLNVVYNVKASGSSRRRRSIQNQEAFDLDV |
| | | | | | | AVKENKDDLNHVDLNVCTSFSGPGRSGMAL |
| | | | | | | MEVNLLSGFMVPSEAISLSETVKK\TEYDHGK |
| | | | | | | LNLYLDSVNETQFCVNIPAVRNFKVSNTQDA |
| | | | | | | SVSIVDYYEPRRQAVRSYNSEVKLSSCDLCSD |
| 602 | 1952 | A | 4540 | 1963 | 295 | MRAFGRPALRPLPLPPLLLLLLSSPWGRAVPC |
| | | | | | | VSGGLPKPAN1TFLSNMKNVLQWTPPEGLQG |
| | | | | | | VKVTYTVQYFIYGQKKWLNKSECRNINRTYC |
| | | | | | | DLSAETSDYEHQYYAKVIWGTKCSKWAE |
| | | | | | | SGRFYPFLETQLGPPEVALITDEKSISVVLTAP |
| | | | | | | EKWKRPEDLPVSMQQIYSNLKYNVSVLNT |
| | | | | | | KSNRTWSQCYTNHTLVLTW\LEPNTLYCVEY |
| | | | | | | ESFPGPPRAQPSEKQCARTLKDQSSEFKAK |
| | | | | | | IIFWYVLPISITVFLFSVMGYSIYRYIHVG\KEK |
| | | | | | | HP\ANLILIYG\NEFDKRFFVPA\EKIV\INFI\TL |
| | | | | | | NIS\DDSKISHQDMSLLGKSSDVSSLNDPQPSG |
| | | | | | | PPQEEEEVKTLGYASHLMEIFCDSEEN\ |
| | | | | | | EGTSFFQQESLSRTIPPDKTVWYEYDVRTTDI |
| | | | | | | CAGPEEQELSLQEEVSTQGTLLESQAALAVL |
| | | | | | | GPQTLQYSYTPQLQDLDPLAQEHTDSEEGPEE |
| | | | | | | EPSTTLVDWDPQTGRLCIPSLSSFDQDSEGCE |
| | | | | | | PSEGDGLGEEGLLSRLYEEPAPDRPPGENETY |
| | | | | | | LMQFMEEWGLYVQMEN |
| 603 | 1953 | A | 4543 | 3 | 600 | YSAVEFVEQASGISDWWNPALRKRMLSDSGL |
| | | | | | | GMAPYYEDSDLKDLSHSRVLQSPVSSEDHAI |
| | | | | | | LQAVIAGDLMKLIESYKNGGSLLIQGPDHCSL |
| | | | | | | LHYAATGNGEWKYILDHQPSELLDMADSE |
| | | | | | | TGETALHKAACQRNRAVCQLLVDAGASLRK\ |
| | | | | | | TDSKGKTPQERAQQA\GDPDLAA/YTIESRQN |
| | | | | | | YKVIGHEDLETAV |
| 604 | 1954 | A | 4548 | 3 | 938 | QDNKVQNGSLHQKDTVHDNDFEPYLTGQAN |
| | | | | | | QSNSYPSMSDPYLSSYYPPSIGFPYSLNEAFW |
| | | | | | | STAGDPPIPYLTTYGQLSNGDHHPMHDAVFG |
| | | | | | | QPGGLGNNIYQHEFNFFPENPAFSAWGTSGS |
| | | | | | | QGQQTQSSAYGSSYTYPPSSLGGTVVDGQPG |
| | | | | | | FHSDTLSKAPGMNSLEQGMVGLKIGDVSSSA |
| | | | | | | VKTVGSVVSSVALTGVLSGNGGTNVNMPVS |
| | | | | | | KPTSWAAIASKPAKPQPKMKTKSGPVMGGG |
| | | | | | | LPPPPIKHNMDIGTWDNKGPVPKAPVPQQAP |
| | | | | | | SPQAAPQPQQVAQPLPAQPPALAQPQYQSPQ |
| | | | | | | QPPQ |
| 605 | 1955 | A | 4553 | 2 | 2304 | TLLQEKRNCLLMQLEEATRLTSYLQSQLKSLC |
| | | | | | | ASTLTVSSGSSRGSLASSRGSLASSRGSLSSVS |
| | | | | | | FTDIYGLPQYEKPDAECISQLLRFDLIPFDSLGR |
| | | | | | | DAPFSEPPGPSGFHKQRRSLDTPQSLASLSSRS |
| | | | | | | SLSSLSPPSSPLDTPFLPASRDSPLAQLADSCE |
| | | | | | | GPGLGALDRLRAHASAMGDEDLPGMAALQP |
| | | | | | | HGVPGDGEGPHERGPPPASAPVGGTVTLRED |
| | | | | | | SAKRLERRARRISACLSDYSLASDSGVFEPLT |
| | | | | | | KENEDAEEPAYGDTASNGDPQIHVGLLRDSG |
| | | | | | | SEGLLVHVLQLKNPAGLAVKEDCKVHIRVYL |
| | | | | | | PPLDSGTPNTYCSKALEFQVPLVFNEVFRIPV |
| | | | | | | HSSALTLKSLQLYVCSVTPQLQEELLGIAQIN |
| | | | | | | LADYDSLSEMQLRWHSVQVFTS\LNHQGRGR |
| | | | | | | LGVQERAPPGTLHTPSPSPA/STDAVTVLLAR |
| | | | | | | TTAQLQAVERELAEERAKLEYTEEEVLEMER |
| | | | | | | KEEQAEAISERSWQADSVDSGCSNCTQTSPPY |
| | | | | | | PEPCCMGIDSTLGHPFAAQAGPYSPEKFQPSPL |
| | | | | | | KVDKETNTEDLFLEEAASLVKERPSRRARGSP |
| | | | | | | PVRSGTIVRSQTFSPGARSQYVCRLYRSDSDS |
| | | | | | | STLPRKSPFVRNTLERRTLRYKQSCRSSLAEL |
| | | | | | | MARTSLDLELDLQASRTRQRQLNEELCALRE |
| | | | | | | LRQRLEDAQLRGQTDLPPWVLRDERLRGLLR |
| | | | | | | EAERQTRQTKLDYRHEQAAEKMLKKASKEI |
| | | | | | | YQLRGQSHKEPIQVQTFREKIAFFTRPRINTPPL |
| | | | | | | PADDV |
| 606 | 1956 | A | 4555 | 3429 | 776 | PGSGPGPAPFLAPVAAPVGGISFHLQIGLSREP |
| | | | | | | VLLLQDSSGDYSLAHVREMACSIVDQKFPEC |
| | | | | | | GFYGMYDKILLFRHDPTSENILQLVKAASDIQ |
| | | | | | | EGDLIEVVLSASATPEDFQIRPHALFVHSYRA |
| | | | | | | PAFCDHCGEMLWGLV\RQGLKCEGCGLNYH |
| | | | | | | KRCAFKIPNNCSGVRPRRLSNVSLTGVSTIRT |
| | | | | | | SSAELSTSAPDEPLLQKSPSESFIGREKRSNSQ |
| | | | | | | SYIGRPTHLDKILMSKVKVPHTFVIHSYTRPTV |
| | | | | | | CQYCKKLLKGLFRQGLQCKDCRFNCHKRCA |
| | | | | | | PKVPNNCLGEVTTNGDLLSPGAESDVVMEEG |
| | | | | | | SDDNDSERNSGLMDDMEEAMVQDAEMAMA |
| | | | | | | ECQNDSGEMQDPDPDHEDANRTISPSTSNNIP |
| | | | | | | LMRVVQSVKHTKRKSSTVMKEGWMVHYTS |
| | | | | | | KDTLRKRHYWRLDSKCITLPQNDTGSRYYKE |
| | | | | | | IPLSEILSLEPVKTSALIPNGANPHCFEITTANV |
| | | | | | | VYYVGENVVNPSSPSPNNSVLTSGVGADVAR |
| | | | | | | MWEIAIQIIALMPVIPKGSSVGTGTNLHRDISV |
| | | | | | | SISVSNCQIQENVDISTVYQIFPDEVLGSGQFGI |
| | | | | | | VYGGKHRKTGRDVAIKIIDKLRFPTKQESQLR |
| | | | | | | NEVAILQNLHHPGVVNLECMFETPERVFVVM |
| | | | | | | EKLHGDMLEMILSSEKGRLPEHITKFLITQILV |
| | | | | | | ALRHLHFKNIVHCDLKPENVLLASADPFPQV |
| | | | | | | KLCDFGFARHGEKSFRRSVVGTPAYLAPEVL |
| | | | | | | RNKGYNRSLDMWSVGVIIYVSLSGTFPFNED |
| | | | | | | EDIHDQIQNAAFMYPPNPWKEISHEAIDLINN |
| | | | | | | LLQVKMRKRYSVDKTLSHPWLQDYQTWLDL |
| | | | | | | RELECKIGERYITHESDDLRWEKYAGEQGLQ |
| | | | | | | YPTHLINPSASHSDTPETEETEMKALGERVSIL |
| 607 | 1957 | A | 4563 | 1 | 4499 | SRPWWLRASERPSAPSAMAKRSRGPGRRCLL |
| | | | | | | ALVLFCAWGTLAVVAQKPGAGCPSRCLCFRT |
| | | | | | | TVRCMHLLLEAVPAVAPQTSILDLRFNRIREI |
| | | | | | | QPGAFRRLRNLNTLLLNNNQIKRIPSGAFEDL |
| | | | | | | ENLKYLYLYKNEIQSIDRQAFKGLASLEQLYL |
| | | | | | | HFNQIETLDPDSFQHLPKLERLFLHNNRITHL |
| | | | | | | VPGTFNHLESMKRLRLDSNTLHCDCEILWLA |
| | | | | | | DLLKTYAESGNAQAAAICEYPRRIQGRSVATI |
| | | | | | | TPEELNCERPRITSEPQDADVTSGNTVYFTCR |
| | | | | | | AEGNPKPEIIWLRNNNELSMKTDSRLNLLDD |
| | | | | | | GTLMIQNTQETDQGIYQCMAKNVAGEVKTQ |
| | | | | | | EVTLRYFGSPARPTFVIQPQNTEVLVGESVTL |
| | | | | | | ECSATGHPPPRISWTRGDRTPLPVDPRVNITPS |
| | | | | | | GGLYIQNVVQGDSGEYACSATNNIDSVHATA |
| | | | | | | FIIVQALPQFTVTPQDRVVIEGQTVDFQCEAK |
| | | | | | | GNPPPVIAWTKGGSQLSVDRRHLVLSSGTLRI |
| | | | | | | SGVALHDQGQYECQAVNIIGSQKVVAHLTVQ |
| | | | | | | PRVTPVFASIPSDTTVEVGANVQLPCSSQGEF |
| | | | | | | EPAITWNKDGVQVTESGKFHISPEGFLTINDV |
| | | | | | | GPADAGRYECVAIRNTIGSASVSMVLSVNVPD |
| | | | | | | VSRNGDPFVATSIVEAIATVDRAINSTRTHLF |
| | | | | | | DSRPRSPNDLLALFRYPRDPYTVEQARAGEIF |
| | | | | | | ERTLQLIQEHVQHGLMVDLNGTSYIIYNDLVS |
| | | | | | | PQYLNLIANLSGCTAHRRVNNCSDMCFHQKY |
| | | | | | | RTHDGTCNNLQHPMWGASLTAPERLLKSVY |
| | | | | | | ENGFNTPRGINPHRLYNGHALPMPRLVSTTLI |
| | | | | | | GTETVTPDEQFTHMLMQWGQFLDHDLDSTV |
| | | | | | | VALSQARFSDGQHCSNVCSNDPPCFSVMIPPN |
| | | | | | | DSRARSGARGMFFVRSSPVCGSGMTSLLMNS |
| | | | | | | VYPREQINQLTSYIDASNVYGSTEHEARSIRD |
| | | | | | | LASHRGLLRQGIVQRSGKPLLPFATGPPTECM |
| | | | | | | RDENESPIPCFLAGDHRANEQLGLTSMHTLW |
| | | | | | | FREHNRIATELLKLNPHWDGDTIYYETRKIVG |
| | | | | | | AEIQHITYQHWLPKILGEVGMRTLGEYHGYD |
| | | | | | | PGINAGIFNAFAT\AAFRFGHTLVNPLLLPGLD |
| | | | | | | ENPQPIAQDHLPLHKAFPSPFRIVNEGGIDPLL |
| | | | | | | RGLFGVAGKMRVPSQLLNTELTERLFSMAIIT |
| | | | | | | VALDLAAINIQRGRDHGIPPYHDYRVYCNLS |
| | | | | | | AAHTFEDLKNEIKNPEIREKLKRLYGSTLNID |
| | | | | | | LFPALVVEDLVPGSRLGPTLMCLLSTQFKRLR |
| | | | | | | DGDRLWYENPGVFSPAQLTQIKQTSLARILCD |
| | | | | | | NADNITRVQSDVFRVAEFPHGYGSCDEIPRVD |
| | | | | | | LRVWQDCCEDCRTRGQFNAFSYHFRGRRSLE |
| | | | | | | FSYQEDKPTKKTRPRKIPSVGRQGEHLSNSTS |
| | | | | | | A\FSTRSDASG\TNDFQRVCSWEMQKTTTDLR |
| | | | | | | TQIKKLESR\LSITECVDAGGESHANNTKWK |
| | | | | | | KDACTICECKDGQVTCFVEACPPATCAVPVNI |
| | | | | | | PGACCPVCLQKRAEEKP |
| 608 | 1958 | A | 4566 | 354 | 1135 | FSFLCIGVSGRLGLDSEEDYYTPQKVDVPKAL |
| | | | | | | IIVAVQCGCDGTFLLTQSGKVLACGLNEFNKL |
| | | | | | | GLNQCMSGIINHEAYHEVPYTITSFTLAKQLSF |
| | | | | | | YKIRTLAPGKTHTAAIDERGRLLTFGCNKCGQ |
| | | | | | | LGVGNYKKRLGINLLGGPLGGKQVIRVSCGD |
| | | | | | | EFTIAATDDNHIFAWGNGGNGRLAMTPTERP |
| | | | | | | HGSDICTSWPRPIFGSLHHVPDLSGRGWHTIILI |
| | | | | | | VEKVLNSKTIRSNSSGLSIGTVFQSSSPGGGGE |
| | | | | | | GGPDAW |
| 609 | 1959 | A | 4567 | 1 | 412 | FFFFETESRSVAQAGVQWRDLGSLQAPPPGFT |
| | | | | | | PFSCLSLPSSWDYRRPPLRPANFFVFLVETGF |
| | | | | | | HIRFSRDGLDLLTIS/GDPPASASQSAGITGVSH |
| | | | | | | RARPRINLRNVIYSFAVTYCLNYISLAMSSTL |
| | | | | | | KLSFIIVLSGS |
| 610 | 1960 | A | 4570 | 697 | 467 | ECRGVISAH\CCTLCLPSSSDSASAF\RVARTIT |
| | | | | | | GTCDYAQLIFAFLVEMGFHHVGQDGLHLLIM |
| | | | | | | LVIRPPRPPKVLGLQA |
| 611 | 1961 | A | 4571 | 25 | 1396 | ADPHTTVIRFFPAASATKRVLPPVLRVSSPRT |
| | | | | | | WNPNVPESPRIPAPRLPKRMSGAPTAGAALM |
| | | | | | | LCAATAVLLSAQGGPVQSKSPRFASWDEMN |
| | | | | | | VLAIIGLLQLGQG\CANT\GAHPQSAERAGA\R |
| | | | | | | LSACGSACQGTEGSTDLPLAPESRVDPEVLHS |
| | | | | | | LQTQLKAQNSRIQQLFHKVAQQQRHLEKQHL |
| | | | | | | RIQHLQSQFGLLDHKHLDHEVAKPARRKRLP |
| | | | | | | EMAQPVDPAHNVSRLHRLPRDCQELFQVGER |
| | | | | | | QSGLFEIQPQGSPPFLVNCKMTSDGGWTVIQR |
| | | | | | | RHDGSVDFNRPWEAYKAGFGDPHGEFWLGL |
| | | | | | | EKVHSITGDRNSRLAVQLRDWDGNAELLQFS |
| | | | | | | VHLGGEDTAYSLQLTAPVAGQLGAITVPPSG |
| | | | | | | LSVPFSTWDQDHDLRRDKNCAKSLSGGWWF |
| | | | | | | GTCSHSNLNGQYFRSIPQQRQKLKKGIFWKT |
| | | | | | | WRGRYYPLQATTMLIQPMAAEAAS |
| 612 | 1962 | A | 4575 | 162 | 3 | FFFETESRSVAQAGVQWRDLSSLQPPPPG\SR |
| | | | | | | GSPASASPVAGITGTRHHRTRG |
| 613 | 1963 | A | 4584 | 687 | 321 | PLAQRRPFLWVTVKTNGHIWGSSTYPIIFWGS |
| | | | | | | SNS/PASASQVAGIPNARHQARIIFVFLVEPRF |
| | | | | | | HHVGRAGLGFLINLAICLPQHPKVLGLQACN |
| | | | | | | LNIKPHPAHKYISMIQFNVHFMCMSVHIYI |
| 614 | 1964 | A | 4589 | 727 | 299 | PGSAQSAQRGRGRRRARAGSATQITMYSFMG |
| | | | | | | GGLFCAWVGTILLVVAMATDHWMQYRLSGS |
| | | | | | | FALIQGLWRYCLGNKCYLQTDSIAYWNATRA |
| | | | | | | FMILSALCAISGIIMGIMAF/GWVAVLMTFFA |
| | | | | | | GIFYMCAYRVHECRRLSTPR |
| 615 | 1965 | A | 4590 | 2 | 414 | TILPEKIQAWAQKQCPQSGEEAVALVVHLEK |
| | | | | | | ETGRLRQQVSSPVHREKHSPLGAAWEVADFQ |
| | | | | | | PEQVETQPRAVSREEPGSLHSGHQEQLNRKR |
| | | | | | | ERRPLPKNARPSPWVPALADEWNTLHQEVTT |
| | | | | | | TRLPAGSQEPVKD |
| 616 | 1966 | A | 4592 | 773 | 488 | DFALVAQAGVQWHNLGSPQPLPPGFKRIFSCL |
| | | | | | | SLPSSWEYRCVFPIRLAMVFLVEMGFLHVGQ |
| | | | | | | AGLELPTSGDPPALASQSAGITGVTTVPSGPG |
| 617 | 1967 | A | 4595 | 84 | 478 | XRHGLREPLLERRCAAASSFQHSSSLGRELPY |
| | | | | | | DPVDTEGFGEGGDMQERPLFPEYILDPEPQPT |
| | | | | | | REKQLQELQQQQEEEERQRQQRREEERQQNL |
| | | | | | | RARSREHPVVGHPDPALPPSGVNCSGCGAEL |
| | | | | | | HCQDAR* |
| 618 | 1968 | A | 4596 | 2945 | 1188 | ARSRNSARGVYGMCVDTLFLCFLEDLERNDG |
| | | | | | | SAERPYFMCSTLKKPLARRCFPAIHAYKGVL |
| | | | | | | MVGNETTYEDGHGSRKNITDLVEGAKKANG |
| | | | | | | VLEARQLAMRIFEDYTVSWYWIIIGLVIAMA |
| | | | | | | MSLLSIILLHLLAGIMGWVMIIIVIEI\SELGYRIF |
| | | | | | | HCYMEYSRLRGEAGSDVSLVDLGFQTDFRV |
| | | | | | | YLIILRQTWLAFMIILSILEVIIILLLIFLRKRILI |
| | | | | | | AIALIKEASRAVGYVMCSLLYPLVTFFLLCLCI |
| | | | | | | AYWASTAVFLSTSNEAVYKIFDDSPCPFTAKT |
| | | | | | | CNPETFPSSNESRQCPNARCQFAFYGGESGYH |
| | | | | | | RALLGLQIFNAFMFFWLANFVLALGQVTLAG |
| | | | | | | AFASYYWALRKPDDLPAFPLFSAFGRALRYH |
| | | | | | | TGSLAFGALILAIVQHRVILEYLDQRLKAAEN |
| | | | | | | KFAKCLMTCLKCCFWCLEKFIKFLNRNAYIM |
| | | | | | | IAIYGTNFCTSARNAFFLLMRNIIRVAVLDKV |
| | | | | | | TDFLFLLGKLLIVGSVGILAFFFFTHRIRIVQDT |
| | | | | | | APPLNYYWVPILTVIVGSYLIAHGFFSVYGMC |
| | | | | | | VDTLFLCFLEDLERNDGSAERPYFMSSTLKKL |
| | | | | | | LNKTNKKAAES |
| 619 | 1969 | A | 4601 | 2 | 357 | RTSVEPYILGEF/RKLSNNTKVVKTEYKATEY |
| | | | | | | GLAYGHFSYEFSNHRDVVVDLQGWVIGNGK |
| | | | | | | GLIYLTDPQLHSVDQKVFTTNFGKRGIFYFFN |
| | | | | | | NQHVECNEICHELSLTRPSMEKPCKS |
| 620 | 1970 | A | 4606 | 1 | 2415 | MERLWGLFQRAQQLSPRSSQTVYQRVEGPR |
| | | | | | | KGHIEEEEEDGEEGAETLAHFCPMELRGPEP |
| | | | | | | LGSRPRQPNLIPWAAAGRRAAPYLVLTALLIF |
| | | | | | | TGAFLLGYVAFRGSCQACGDSVLVVSEDVN |
| | | | | | | YEPDLDFHQGRLYWSDLQAMFLQFLGEGRL |
| | | | | | | EDTIRQTSLRERVAGSAGMAALTQDIRAALS |
| | | | | | | RQKLDHVWTDTHYVGLQFPDPAHPNTLHWV |
| | | | | | | DEAGKVGEQLPLEDPDVYCPYSAIGNVTGEL |
| | | | | | | VYAHYGRPEDLQDLPARGVDPVGRLLLVRV |
| | | | | | | GVISFAQKVTNAQDFGAQGVLIYPEPADFSQ |
| | | | | | | DPPKPSLSSQQAVYGHVHLGTGDPYTPGFPSF |
| | | | | | | NQTQFPPVASSGLPSIPAQPISADIASRLLRKL |
| | | | | | | KGPVAPQEWQGSLLGSPYHLGPGPRLRLVVN |
| | | | | | | NHRTSTPTINNIFGCIEGRSEPDHYVVIGAQRDA |
| | | | | | | WGPGAAKSAVGTAILLELVRTFSSMVSNGFR |
| | | | | | | PRRSLLFISWDGGDFGSVGSTEWLEGYLSVL |
| | | | | | | HLKAVVYVSLDNAVLGDDKFHAKTSPLLTSL |
| | | | | | | IESVLKQVDSPNHSGQTLYEQVVFTN\PSWD\ |
| | | | | | | AEVIRPLPM\DSSAY\SFIAFVGVPAVEFSFME\ |
| | | | | | | DDQ\AYPFLHTKEDTYENLHKVLQGRLPAVA |
| | | | | | | QAVAQLAGQLLIRLSHDRLLPLDFGRYGDVY |
| | | | | | | LRHIGNLNEFSGDLKARGLTLQWVYSARGDY |
| | | | | | | LRAAEKLRQEIYSSEERDERLTRMYNVRIMRV |
| | | | | | | EPYFLSQYVSPADSPFRHIFMGRGDHTLGALL |
| | | | | | | DHLRLLRSNSSGTPQATSSTGFQ\ESRFRRQL\ |
| | | | | | | ALL\TWDACKGAANALSGDVWNIDNNF |
| 621 | 1971 | A | 4610 | 793 | 334 | ISRVDDFVGSGIANVIIAVAIFSIFAFARLVRG\ |
| | | | | | | NTLVLKQQTFLESARSIGASDMTVLLRHILPGT |
| | | | | | | GSSIVVFFTMRIGTSIISAASLSFLGLGAQPPTP |
| | | | | | | EWGAMLNEARADMVIAPHVAVFPALAIFLTV |
| | | | | | | LAENLLGDGLRDALDPKIKG |
| 622 | 1972 | A | 4614 | 2 | 820 | LVYVMLAIFCIASAMSLYNCLAALIHKIPYGQ |
| | | | | | | CTIACRGKNMEVRLIFLSGLCIAVAVVWAVP |
| | | | | | | RNEDRWAWILQDILGIAFCLNLIKTLKLPNFK |
| | | | | | | SGVILLGLLLLYDVFPVFITPFITKNGESIMVEL |
| | | | | | | AAGPFGNNEKNDGNLVEATGQPSAPHEKLPV |
| | | | | | | VIRVPKLIYFSVMSVCLMPVSILGFGDIIPGL |
| | | | | | | LIAYCRRFDVQTGSSYIYYVSV\TVAYAIGMIL |
| | | | | | | TFVVLG\LMICKGQPALLYLVPCTLITA/CQFV |
| | | | | | | AWETVRRMKKFWERVTS |
| 623 | 1973 | A | 4619 | 17 | 691 | TLVSVVEFVRRADLTREDLAFSSVDSGQAGP |
| | | | | | | GGCCESGLPNTMPSAFSVSSFPVSIPAVLTQT |
| | | | | | | DWTEPWLMGLATFRALCVLLTCLSSRSYRLQ |
| | | | | | | IGHPLCLVILVYCAEYINEAAAMNWRLFSKY |
| | | | | | | QYFDSRGMFISIVFSAPLLVNAMIIVVMWVW |
| | | | | | | KTLNVMTDLKNAQERRKEKKRRRKED*GAA |
| | | | | | | AAWSLRPSRPPSAAPSAAVCVAWASFQLTHG |
| | | | | | | LKNRCFI |
| 624 | 1974 | A | 4622 | 164 | 668 | VSCYTALQSIMNQPESANDPEPLCAVCGQAH |
| | | | | | | SLEENHFYSYPEEVDDDLICHICLQALLDPLD |
| | | | | | | TPCGHTYCTLCLTNFLVEKDFCPMDRKPLVL |
| | | | | | | QHCKKSSILVNKLLNKLLVTCPFREHCTQVL |
| | | | | | | QRCDLEHHFQTSQAWGTHL*SQLLGRLRQED |
| | | | | | | CLSPGVHHCSEV |
| 625 | 1975 | A | 4625 | 474 | 473 | CFLSPSPLLPPLLLSSSSSPSFPLPPPPTLLPSTLP |
| | | | | | | PPLLIPSS*LSP |
| 626 | 1976 | A | 4629 | 249 | 3 | KLKGNECFCYHCNVCWLMIKK*GLFLC*IYFI |
| | | | | | | LFFET*SHSFTRLECSGTISAHCSLQLQGSSNSP |
| | | | | | | ASASQVAGIAGTHH |
| 627 | 1977 | A | 4635 | 1 | 301 | FFFFETKPFFAPQAGGQGPSRGSLNPLPTGLK |
| | | | | | | QFSGLTLSRSGNNGPRPPPRVNFGILRGNGVP |
| | | | | | | PGGAG*PRPPDLRGPPGLAPPQGGNGDPP |
| | | | | | | ARAYL |
| 628 | 1978 | A | 4648 | 1357 | 782 | LFSSQRLFGPHIQAPSFLLLSFFPS*LLAMR |
| | | | | | | TVGNNAFILVFLVYRIVLLLF*HV*PAYFQPSK |
| | | | | | | NKTAKNCN*RPFLFLVCYLL*AELHIGTFIANF |
| | | | | | | YDGIPNKLNEHLWPKLLQSLIFHVDFCGFLHK |
| | | | | | | VFYICFTEFLLFLYFL*LFIIKVSCSII*CSTICVF |
| | | | | | | SYKSFAVIIFFVDNTRFFSFGF |
| 629 | 1979 | A | 4660 | 18 | 999 | HHELHTLELLQNPKEVLTRSEIQDVNYSLEAV |
| | | | | | | KVKTVCQIPLMKEMLKRFQVAVNLAEDTAH |
| | | | | | | PKLVFSQEGRYVNTASASSWPVFSSAWNYF |
| | | | | | | AGWRNPQKTAFVERFQHLSCVLGKNVFTSG |
| | | | | | | KHYWEVESRDSLEVAVGVCREDVMGITDRS |
| | | | | | | KMSPDVGIWAIYWSAAGYWPLIGPPGTPTQQ |
| | | | | | | EPALHRVGVYLDRGTQNVSFYSAVDGVHLH |
| | | | | | | FSCSSVSRLRPFFWLSPLASLVIPPVTDRK*G |
| | | | | | | FSSPDQNSFPVVQLRDTHPWALFCPSCLYPG |
| | | | | | | WSIFWVSLTVPFGICPLCASQEAVPWEVGLA |
| | | | | | | NGDGTGNFPRRFWEIFL |
| 630 | 1980 | A | 4669 | 2 | 358 | FFFFFETESHSVAQAGMQWRNLGSLPAPPPGF |
| | | | | | | TPFFCLSLLNGWDYREPPPHLANFFVLLVETG |
| | | | | | | FHDVGQDGLDLLTS*STPSASQSAEITGVSHC |
| | | | | | | TRLKKIRFAKGHVEFFFESHVE |
| 631 | 1981 | A | 4674 | 953 | 614 | TPIRGTDDEHEECTVQEYSAGKNTCLRPGAV |
| | | | | | | AHTCNPCTLGGRGRWIT*GSGVQDQPGPTWQ |
| | | | | | | NLEEPRALHSSPGLITQRILWAQGLWV |
| | | | | | | GAGSTGCSRGPRGEGVFREG |
| 632 | 1982 | A | 4678 | 34 | 314 | RSTHASGMISPSFGFMGHLLRLEFEILPSTPNF |
| | | | | | | *LPSYQGEAAGSSLISHLQTFSPDLKGVYCTFP |
| | | | | | | ASGLAPVPTHWTVSELSRSPVATATFC |
| 633 | 1983 | A | 4696 | 1 | 1365 | RTLGMEGERRASQAPSSGLPAGGANGESPGG |
| | | | | | | GAPFPGSSGSSALLQAEVLDLDEDEDDLEVFS |
| | | | | | | KDASLINSFSPIVMPTSPLSMINQIKFEDEP |
| | | | | | | DLKDLFITVDEPESHVTTIETFTTYRIITKTSRG |
| | | | | | | EFDSSEFEVRRRYQDFLWLKGKLEEAHPTLII |
| | | | | | | PPLPEKFIVKGMVERFNDDFIETRRKALHKFL |
| | | | | | | NRIADHPTLTFNEDFKIFLTAQAWELSSHKKQ |
| | | | | | | GPGLLSRMGQTVRAVASSMRGVKNRPEEFM |
| | | | | | | EMNFIELFSQKINLIDKISQRIYKEEREYFDE |
| | | | | | | MKEYGPIHILLWSASEEDLVDTLKDVASCIDRC |
| | | | | | | CKATEKRMSGLSEALLPVVHEYVLYSEEFM |
| | | | | | | GVMKRRDQIQAELDSKVEVLTYKKADTDLL |
| | | | | | | PEEIGKLEDKVECANNALKADWERWKQNM |
| | | | | | | QNDIKLAFTDMAEENIHYYEQCLATWESFLT |
| | | | | | | SQTNLHLEEASEDKP |
| 634 | 1984 | A | 4708 | 421 | 158 | SYWVGEDYTYKFFEVILIDPFHKAIRRNPDTQ |
| | | | | | | WISKAVYKHREMCGLTSTGRKSHGLEKDRM |
| | | | | | | FPHAIGGSCRAA*RRRKTLQFPCYH |
| 635 | 1985 | A | 4709 | 42 | 341 | YIKQPDAKERRRTVHWKKETESEASEITIPPST |
| | | | | | | PGVPQAPGHWEDYGRGDNFYLPH*DPGGIVL |
| | | | | | | WNIFNRMPIYIARKNITDGEHHEYLIEVPRLFHT |
| | | | | | | SED |
| 636 | 1986 | A | 4721 | 2 | 351 | EKPDHFFPEGTSFIHEPRRPN*GDLVHCLGGIS |
| | | | | | | RSTTVTVA*LMQKLNLSMNDAYYIVIMKMSS |
| | | | | | | ISPNFNSMDQPLDFQRTLGLRSPCYNRVPAQK |
| | | | | | | MYFITPSNHNAYQVDSVQST |
| 637 | 1987 | A | 4726 | 664 | 253 | NTGLTCSIQRKCGETQLYRREENRLILLLQDH |
| | | | | | | LKSESFQVLTLSPRLEFSGLISAHCNLRLPGSS |
| | | | | | | DSSASSSRAAGITGVHHHAWLIFFFLVETGFL |
| | | | | | | HAG*AGLELLTSGDPPASASRSAGITGVSHHA |
| | | | | | | RPRETRFL |
| 638 | 1988 | A | 4734 | 24 | 592 | GGMDSRVSGTTSNGETKPVYPVMEKKEEDG |
| | | | | | | TLERGHWNNKMEFVLSVAGEIIGLGNVWRFP |
| | | | | | | YLCYKNGGGAFFIPYLVFLTCGIPVFLLETAL |
| | | | | | | GQYTSQGGVTAWRKICPLFEGIGYASQMIVIL |
| | | | | | | LNVYYIIVLAWALFYLFSSFTIDLPWGGCYHE |
| | | | | | | WNTEHCMEFQKTNGSLNGTSENATSPVIEFW |
| 639 | 1989 | A | 4743 | 1040 | 699 | QGLTLLPRMECSATITAHCSLELPGSIDLPTSA |
| | | | | | | S*VARTTGTHHHPWLILVLLL*TWGSYYVAQ |
| | | | | | | AGLELLGSSNLPAAMYSQSAQIIGHDHCAWA |
| | | | | | | TSNHVLYTQEGLRRGKEG |
| 640 | 1990 | A | 4771 | 527 | 2 | GRIDCPHPATVLAQPIFIDACSVLGAYQGAQN |
| | | | | | | WIRRRPCLPSGCLKMNREIGPLQHSLCCPGWS |
| | | | | | | QTPGLKAILLRQPPK*LGLQMESHSCPPAWSA |
| | | | | | | MARSRLTATSASQVQAILLPQPPGTTDSCSPS |
| | | | | | | PDHEQQPLSWVLPPPQKDMNPREQQVALGP |
| | | | | | | QAAALPWAVWRNDCFPR |
| 641 | 1991 | A | 4780 | 16 | 473 | RPSSQCGGIPTGWKKGLAPELSSELSSPPLPAR |
| | | | | | | LQLAASPYFSPSWAECPQPVPAGTHATWCLA |
| | | | | | | RVWARMTPPGPAGIPSHPLPPPPPERSVPIPSP |
| | | | | | | FPARDSGSRQGHSTDRYKHTDAFRDAHRRVP |
| | | | | | | QRDTDTQVHTGSGTHTHAHTPPEK |
| 642 | 1992 | A | 4798 | 1 | 487 | GYSFRCDIVDYSRSPTALRMARTCWLYYFSK |
| | | | | | | FIELLDTIFFVLRKKNSQVTFLHVFHHTIMPW |
| | | | | | | TWWFGVKFAAGGLGTFHALLNTAVHVVMY |
| | | | | | | SYYGLSALGPAYQKYLWWKKYLTSLQLVQF |
| | | | | | | VTVALHISQFFFMEDCKYQFPVFACIIMSYSFM |
| | | | | | | FLLLFLH |
| 643 | 1993 | A | 4799 | 2 | 391 | LMAFIEMHISGSLVYLKIKIYSYFSMLNFLL |
| | | | | | | QEIPLSEILRISSPRDFTNISQGSNPHGFEIITDT |
| | | | | | | MVYFVGENNGDSSHNPVLAATGVGLDVAQS |
| | | | | | | WEKAIRQALMPVTPQASVCTSPGQGKDHSK |
| | | | | | | Q*ASVCTSPGQGKDHSKQ |
| 644 | 1994 | A | 4800 | 488 | 101 | AYPLFAVLIPVHTECVAGVVGRAYLLCALFFL |
| | | | | | | LSFLGYCKAFRESNKEGAIISSTFWVLLSWLG |
| | | | | | | AVAMLCKEQGITVLVRAATWLGPAFSVCPPP |
| | | | | | | SYKDIWGWPCLCGVLHAYIPLLV |
| 645 | 1995 | A | 4805 | 458 | 126 | LLWTTVLCQTPARPQSTMIHLGHILFLLLLPV |
| | | | | | | AAAQFFPGERSSLPAFYPGTSGSCSGCGSLSL |
| | | | | | | PLLAGLVAADAVASLLIVGAVFLCARPRRSP |
| | | | | | | AQEDGKVYINMPGRG |
| 646 | 1996 | A | 4817 | 47 | 1033 | LQQDTWHLSFLSHFSRLHGGVPGRGLLEGNL |
| | | | | | | LQPQAPGHDMTSIPFPGDRLLQVDGVILCGLT |
| | | | | | | HKQAVQCLKGPGQVARLVLERRVPRSTQQC |
| | | | | | | PSANDSMGDERTAVSLVTALPGRPSSCVSVT |
| | | | | | | DGPKF*SSN*KRIANGLGFSFVQMEKESCSHL |
| | | | | | | KSDLVRIKRLFPGHPAEENGAIAAGDIILGRE |
| | | | | | | WEGPRKASSSRCRGSWAMQLSVQAGPSFAS |
| | | | | | | YYPAAVEVLHLLRGAFQEVTLLLCRPPPGAL |
| | | | | | | PELEQEWQTPELSADKEFTRATCTDSCTSPIL |
| | | | | | | GSRGQLGGTVPPQMQGKAWGLRPESSQKAIR |
| | | | | | | EGTMGAKTERDLGPVP |
| 647 | 1997 | A | 4854 | 1044 | 335 | PRVRGDWPLEKKKSNSNIHPIFSWCGSTDSKD |
| | | | | | | IVMPTYDLTDSVLETMGRVSLDMMSVQANT |
| | | | | | | GPPWESKNSTAVWRGRDSRKERLELVKLSRK |
| | | | | | | HPELIDAAFTNFFFFKIIDENLYGPIVKHISFFD |
| | | | | | | FFKIIKYQINIDGTVAAYRLPYLLVGDSVVLK |
| | | | | | | QDSIYYEHFYNELQPWKHYEPVKSNLSDLLEK |
| | | | | | | LKWAKDHDEEAKKIAKAGQEFARNNLMGD |
| | | | | | | DIFCYYFQTFPRNMPIYK |
| 648 | 1998 | A | 4867 | 2030 | 837 | AGMLPAVGSADEEEDPAEEDCPELVPMETTQ |
| | | | | | | SEEEEKSGLGAKIPVTIITGYLGAGKITLLNYI |
| | | | | | | LTEQHSKRVAVILNEFGEGSALEKSLAVSQG |
| | | | | | | GELYEEWLELRNGCLCCSVKDNGLRAIENLM |
| | | | | | | QKKGKFDYILLETTGLADPGAVASMFWVDA |
| | | | | | | ELGSDIYLDGIITIVDSKYGLKHLAEEKPDGLI |
| | | | | | | NEATRQVALADALLINKTDLVPEEDVKKLRT |
| | | | | | | TIRSINGLGQILETQRSRVDLSNVLDLHAFDSL |
| | | | | | | SGISLQKKLQHVPGTQPHLDQSIVTITFDVPG |
| | | | | | | NAKEEHLNMFIQNLLWEKNVRNKDNHCMEV |
| | | | | | | IRLKGLVSIKDKSQQVIVQGVHELYDLEETPV |
| | | | | | | SWKDDTERTNRLVLLGRNLDKDILKQLFIAT |
| | | | | | | VTETEKQWTTHPKEDQVCT |
| 649 | 1999 | A | 4873 | 226 | 189 | DGVSLLLPKLGVQWAQYWAHWQPPLPGFKR |
| | | | | | | FSCLSLRSSWD*KCAPPHPAFVFLVEMGFHRV |
| | | | | | | GQAGLELRTSGDPPASASQSAGITGVSHLA*P |
| | | | | | | TSMPLLPFQRLCVYI |
| 650 | 2000 | A | 4874 | 2 | 437 | FPFLRRSFAFVAQAGVQWGDLGSPQPLPPGF |
| | | | | | | K*FSCLSLPSSWDYRHAPPPCPS*FLYF**RQG |
| | | | | | | FTMLARLVLNS*PHDLPTSPSQSAETKGVSHR |
| | | | | | | CPASFYLFLKYYLEAKFCA*GECAPSAGVGA |
| | | | | | | GYKRGIIKSCLLINCVVQI |
| 651 | 2001 | A | 4898 | 1701 | 771 | DAWGPETRLARILNPDSFIEPRPGRLPELEATR |
| | | | | | | PHMEPKASCPAAAIPLMERKFHVLVGVTGSV |
| | | | | | | AALKLPLLVSKLLDIPGLEVAVVTTERAKHFY |
| | | | | | | SPQDIPVTLYSDADEWEMWKSRSDPVLHIDL |
| | | | | | | RRWADLLLVAPLDANTLGKVASGICDNLLTC |
| | | | | | | VMRAWDRSKPLLFCPAMNTAMWEHPITAQQ |
| | | | | | | VDQLKAFGYVELPCVAKKLVCGDEGLGAMA |
| | | | | | | EVGTIVDKVKEVLFQHSGFQQS*PGISVMGVP |
| | | | | | | LYSEWVQAKSVKMDVGKIGGYPHLLNGGPA |
| | | | | | | LSLPRGQACSRLNWTEGPGLSFFQPGEAAA |
| 652 | 2002 | A | 4927 | 1 | 611 | FRGRQTSRPARGFSPWRPPGTMQEPSSGECPA |
| | | | | | | SP*LPCASNRLAFGGLIFPCAPLVPYPAPFSPLL |
| | | | | | | PAFSGAPRPRAIITHSRTHPSAPLVPKPSSRAR |
| | | | | | | GQSPLPSRASSPSCSWAQVPGVALARCAGVC |
| | | | | | | KPGDSWRVAACISGRCCSRGRRRGSGPRNPE |
| | | | | | | QSFRGAWGPSFWGSWKSQRELSAGGAQAWP |
| | | | | | | LLGSAGSGLRGEA |
| 653 | 2003 | A | 4965 | 2 | 283 | FFFFI*DGVSLCHPGWNAVARSWLTATSASR |
| | | | | | | VQAVSCFRLPSSWDYRHATMPG*FF*YF**R |
| | | | | | | WGFTHLAILVLNS*PQVICPPWPPKVLTLQA |
| 654 | 2004 | A | 4968 | 3 | 437 | RPGIPGRRFRRSWFCQLP*EPEPGLESLATPGD |
| | | | | | | IPAVGLGALGVIPPVRVPQRPPTQRSQGRGW |
| | | | | | | DPERDPGCRVQVSRGPRFGEQKTPGLQGCLP |
| | | | | | | PPCLTHLAAASCVVVWCGRWKRDSAECQCD |
| | | | | | | HSCSAVSQQEDRCRSSSCS |
| 655 | 2005 | A | 4983 | 201 | 397 | MNNNTTCIQPSMISSMALPIIYILLCIVGVFGN |
| | | | | | | TLSQWIFLTKIGKKTSTHIYLSHLVTANLLVC |
| 656 | 2006 | A | 4988 | 332 | 159 | LVHKDMYREFFEEEAQASNKHVTRCLTSLVI |
| | | | | | | REVHIKTMR*HFLPIRLEKNKNNIKD |
| 657 | 2007 | A | 5008 | 129 | 465 | MAGMKTASGDYIDSSWELRVFVGEEDPEAES |
| | | | | | | VTLRVTGESHIGGVLLKIVEQINRKQDWSDH |
| | | | | | | AIWWEQKRQWLLQTIIWTLDKYGILADARLF |
| | | | | | | FGPQHRPVILRLPNRRALRLX* |
| 658 | 2008 | A | 5017 | 1 | 292 | FFFFKETESHSVTQAGVQWHDLGSLQPPPPGF |
| | | | | | | KRFSCLSLLSSWDYRCAPPHPAISIFVFLVETGF |
| | | | | | | HHVAQAGLKLLTL*SANLGLSTSLPIPLFILLS |
| 659 | 2009 | A | 5018 | 17 | 338 | RGHGGKSLTGGTPGNWGDGLLVSEDWSHLIF |
| | | | | | | T*NSLVSPVLGKWSPCLQGPGLSAVHTWPWL |
| | | | | | | MAACWAVHVKTHMRPGLAVLPRLVLNSWS |
| | | | | | | *AIILLWPPKALGLQA |
| 660 | 2010 | A | 5028 | 2 | 310 | SRVDDFVGERRGGCDECLCGIIRGLRAVPLG |
| | | | | | | HPGHLCLQPPGGPA*FLDYCRGCCPHPVPGST |
| | | | | | | AGSCPRQKKTFPGPTVLCVCSFWIYQRGEPH |
| | | | | | | HRTGARWNH |
| 661 | 2011 | A | 5050 | 752 | 431 | RQSCSSTQAKVQWFHYGPLQSQPPGLKQSSQ |
| | | | | | | LSLPNSRDHRHVPPRLAIFSFAETGSPYFAQAS |
| | | | | | | LELLGSSLIPPTSASQSARITGVSHRAWPLK*F |
| | | | | | | NLNQYQTLTMN |
| 662 | 2012 | A | 5054 | 48 | 103 | ELNNGPFQMPLCNGGNLAVTGSWADRSPLH |
| | | | | | | EAASQGRLLALRTLLSQGYNVNAVTLDHVTP |
| | | | | | | LHEACLGDHVACARTLLEAGANVNAITIDGV |
| | | | | | | TPLFNACSQGSPSCAELLLEYGAQAQLESCLP |
| | | | | | | SPTIIEGASKGHHECLDTLISWGIDVDQEIPHSG |
| | | | | | | TPLYVACMAQQFHCIWNLIYAGAGVRKGKY |
| | | | | | | WDTPLPGAGHQSTQKLE*LFAMVEIWQ |
| 663 | 2013 | A | 5066 | 951 | 580 | VRNS*SFAHCASVYKHHYIVIDGQTPCLFVSSK |
| | | | | | | ADLPEGVAVSGPSPAEFCRKHRLPAPVPFSCA |
| | | | | | | GPAEPSITIFTQLATMAAFPHLVHAELHPSSF |
| | | | | | | WLRGLLGVVGAAVAAVLSFSLYRVLVKSQ |
| 664 | 2014 | A | 5071 | 550 | 1 | LSFIEVLSMEQVNKTVVREFVVLGFSSLARLQ |
| | | | | | | QLLFVIFLLLYLFTLGTNAIIISTIVLDRALHTP |
| | | | | | | MYFFLAILSCSEICYTFVIVPKMLVDLLSQKK |
| | | | | | | TISFLGCAIQMFSFLFFGSSHSFLLAAMGYDR |
| | | | | | | YMAICNPLRYSVLMGHGVCMGLMAAAWAC |
| | | | | | | GETVSLVITSLVFHLPFHSSNQHE |
| 665 | 2015 | A | 5074 | 496 | 692 | QQYHNTGSAGHHAHCQVGHSPHVHYPSGCG |
| | | | | | | PL*IQRGLPSFNSLEGHSLKDSGHEESVQLDSE |
| | | | | | | HDVQRSLYCDTAVNDVLNTSVTSMGSQMPD |
| | | | | | | HDQNEGFHCREECRILGHSDRCWMPRNPMPI |
| | | | | | | RSKSPEHVRNUALSIEATAADVEAYDDCGPT |
| | | | | | | KRTFATFGKDVSDHPAEERPTLKGKRTVDVT |
| | | | | | | ICSPKVNSVIREAGNGCEAISPVTSPLHLKSSL |
| | | | | | | PTKPSVSYEIVDPGITARRC |
| 666 | 2016 | A | 5080 | 408 | 248 | IMLLSTSS*VYFQSSTKDSHFFLFDFQKTGPPL |
| | | | | | | VGPKAQLSGLQLQPCLYKRR |
| 667 | 2017 | A | 5081 | 129 | 247 | DLTNSHFFLFDFQKTGPPLGGPKAQFSSLQLQ |
| | | | | | | PCVY*RR |
| 668 | 2018 | A | 5086 | 852 | 233 | NIKSNDRWVQIKTAYKYFF*KNGDNYNWVF |
| | | | | | | RALPFADIENLKYLLFTRDASQPFYLGIHTV |
| | | | | | | IFGDLEYVTVEGGIVLSRELMKRLNRLLDNSE |
| | | | | | | TCADQSVIWKLSEDKQLAICLKYAGVHAENA |
| | | | | | | EDYEGRDVFNTKPIAQLIEEALSNNPQQVVEG |
| | | | | | | CGSDMAITFNGLTPQKMEVMMYGLYRLRAF |
| | | | | | | GHYFNDTLVFLPPVGSEND |
| 669 | 2019 | A | 5101 | 1 | 329 | PGRPTRPPLLTLLAHVSPEPAGPSCDSLAQPG |
| | | | | | | ASGV*VQHDSHPPLLCGSQCLSEPVPGSHGPP |
| | | | | | | RGCQHEAAPCPRGPGSDGLHHASAACASLPP |
| | | | | | | SPILPVLLPELGPL |
| 670 | 2020 | A | 5102 | 3 | 547 | DAWGNRCAVGAAPRLIHLHLCCTPADPSRKP |
| | | | | | | DEL*NMNGRVDYLVTEEEINLTRGPSGLGFMT |
| | | | | | | VGGTDQQYVSNDSG1YVSRIKENGAAALDGR |
| | | | | | | LQEGDKILSVNGQDLKNLLHQDAVDLFRNA |
| | | | | | | GYAVSLRVQHRLQVQNGPIGHRGEGDPSGIPI |
| | | | | | | FMVLVPVFALTMVAAWAFMRYRQQL |
| 671 | 2021 | A | 5105 | 672 | 400 | RDGREELCLQQEPTLPSRICSSAPLLYFLFICPF |
| | | | | | | VLLLLLLISLLCLYWKARKLSTLRSNTRKEKA |
| | | | | | | LWVDLKEAGGVTTNEMED*EEDECN |
| 672 | 2022 | A | 5148 | 72 | 314 | IIYFSYNIFLKITELLNDVERLKQALNGLSQLT |
| | | | | | | YTSGNPTKRQSQLIDTLQHQVKSLEQQLAVS |
| | | | | | | NQAHGALQEYVLAPCS |
| 673 | 2023 | A | 5152 | 210 | 335 | REILCSRIGRLNIV*MSLFPNLTCRLNAIPLKIPA |
| | | | | | | NHFVEVT |
| 674 | 2024 | A | 5153 | 3 | 2953 | LTEDQPFDILQKSLQEANTTEQTLAEEAYLDA |
| | | | | | | SIGSSQQFAQAQLHPSSSASFTQASNVSNYSG |
| | | | | | | QTLQPIGVTHVPVGASFASNTVGVQHGFMQH |
| | | | | | | VGISVPSQHLSNSSQISGSGQIQLIGSFGNIIPS |
| | | | | | | MMTINNLDGSQIILKGSGQQAPSNVSGGLLV |
| | | | | | | HRQTPNGNSLFGNSSSSPVAQPVTVPFNSTNF |
| | | | | | | QTSLPVHNIIIQRGLAPNSNKVPINIQPKPIQM |
| | | | | | | GQQNTYNVNNLGIQQHHVQQGISFASASSPQ |
| | | | | | | GSVYGPHMSVNIVNQQNTRKPVTSQAVSSTG |
| | | | | | | GSIVIHSPMGQPHAPQSQFLIPTSLSVSSNSVH |
| | | | | | | HVQTINGQLLQTQPSQLISGQVASEHVMLNR |
| | | | | | | NSSNMLRTNQPYTGPMLNNQNTAVHLVSGQ |
| | | | | | | TFAASGSPVIANHASPQLVGGQMPLQQASPT |
| | | | | | | VLHLSPGQSSVSQGRPGFATMPSVTSMSGPSR |
| | | | | | | FPAVSSASTAHPSLGSAVQSGSSGSNFTGDQL |
| | | | | | | TQPNRTPVPVSVSHRLPVSSSKSTSTFSNTPGT |
| | | | | | | GTQQQFFCQAQKKCLNQTSPISAPKTTDGLR |
| | | | | | | QAQIPGLLSTTLPGQDSGSKVISASLGTAQPQ |
| | | | | | | QEKVVGSSPGHPAVQVESHSGGQKRPAAKQ |
| | | | | | | LTKGAFILQQLQRDQAIHTVTPDKSHFRSLSD |
| | | | | | | AVQRLLSYHVCQGSMPTEEDLRKVDNEFETV |
| | | | | | | ATQLLKRTQAMLNKYRCLLLEDAMRINPPAE |
| | | | | | | MVMLDRMFNQEERASLSRDKRLALVDPEGFQ |
| | | | | | | ADFCCSFKLDKAAHETQFGRSDQHGSKASSS |
| | | | | | | LQPPAKAQGRDRAKTGVTEPMNHDQFHLVP |
| | | | | | | NHIVVSAEGNISKKTECLGRALKFDKVGLVQ |
| | | | | | | YQSTSEEKASRREPLKASQCSPGPEGHRKTSS |
| | | | | | | RSDHGTESKLSSILADSHLEMTCNNSFQDKSL |
| | | | | | | RNSPKNEVLHTDIMKGSGEPQPDLQLTKSLET |
| | | | | | | TFKNILELKKAGRQPQSDPTVSGSVELDFPNF |
| | | | | | | SPMASQENCLEKFIPDHSEGVVETDSILEAAV |
| | | | | | | NSILEC |
| 675 | 2025 | A | 5154 | 599 | 1880 | LKKMEPFSCDTFVALPPATVDNRIIFGKNSDR |
| | | | | | | LYDEVQEVVYFPAVVHDNLGERLKCTYIEID |
| | | | | | | QVPETYAVVLSRPAWLWGAEMGANEHGVCI |
| | | | | | | GNEAVWGREEVCDEEALLGMDLVRLGLERA |
| | | | | | | DTAEKALNVIVDLLEKYGQGGNCTEGRMVF |
| | | | | | | SYHNSFLIADRNEAWILETAGKYWAAEKVQE |
| | | | | | | GVRNISNQLSTTTKIAREHPDMRNYAKRKGW |
| | | | | | | WDGKKEFDFAAAYSYLDTAKMMTSSGRYCE |
| | | | | | | GYKLLNKHKGNITFETMMEILRDKPSGINME |
| | | | | | | GEFLTTASMVFILPQDSSLPCIHFFTGTPDPER |
| | | | | | | SVFKPFIFVPHISQLLDTSSPTFELEDLVKKKS |
| | | | | | | HFKPDRRHPLYQKHQQALEVVNNNEEKAKI |
| | | | | | | MLDNMEKLEKELFREMESILQNKHLDVEKIV |
| | | | | | | NLFPQCTKDEIQIYQSNLSVKVSS |
| 676 | 2026 | A | 5155 | 2 | 306 | FFFLRRSLALSPRPDCGLQWRNLGSLQAPPPG |
| | | | | | | FTPFSCLSLPSSWDYRRPPPRPANFLYF**RRG |
| | | | | | | FTLLARMVSIS*PHDPPASASQSAGITGVSHRA |
| | | | | | | RPT |
| 677 | 2027 | A | 5167 | 97 | 740 | FFHSVDLLALEQSKTFYKPDWFDIVESEYKCC |
| | | | | | | KEAVCVIDMSSFTEFEITSTGDQALEVLQYLF |
| | | | | | | SNDLDVPVGHIVHTGMLNEGGGYENDCSIAR |
| | | | | | | LNKRSFFMISPTDQQVHCWAWLKKIIMPKDS |
| | | | | | | NLLLEDVTWKYTALNLIGPRAVDVLSELSYA |
| | | | | | | PMTPDHFPSLFCKEMSVGYANGIRVMSMTHT |
| | | | | | | GEPGFMLYIPIEYRWGFTMLSTLVSNS |
| 678 | 2028 | A | 5183 | 1919 | 2018 | PALCRLRDDMTVCVADFGLSKKIYSGDYYRQ |
| | | | | | | GRIAKMPVKWIAIESLADRVYTSKSDVWAFG |
| | | | | | | VTMWEIATRGMTPYPGVQNHEMYDYLLHG |
| | | | | | | HRLKQPEDCLDELCKI**SPQSP |
| 679 | 2029 | A | 5190 | 39 | 499 | RESQVKHFKMRKIDLCLSSEGSEVIILATSSDE |
| | | | | | | KHPPENIIDGNPETFWTITGMFPQEFIICFHKH |
| | | | | | | VRIERLVIQSYFVQTLKIEKSTSKEPVDFEQWI |
| | | | | | | EKDLVHTEGQLQNEEIVAHDGSATYLRFIIVS |
| | | | | | | AFDHFASVHSVSAEGTVVSNLSS |
| 680 | 2030 | A | 5204 | 541 | 92 | EILAVLKLACGDISLNALALMVATAVLTLAPL |
| | | | | | | LLICLSYLFILSAILRVPSAAGRCKAFSTCSAH |
| | | | | | | RTVVVVFYGTISFMYFKPKAKDPNVDKTVAL |
| | | | | | | FYGVVTPSLNPIIYSLRNAEVKAAVLTLLRGG |
| | | | | | | LLSRKASHCYCCPLPLSAGIG |
| 681 | 2031 | A | 5207 | 10 | 247 | VPDNGDVTKLPVCSTLVEETSLTVSEAMEQSI |
| | | | | | | KNESPLPGTLAHTCNTSTLGGRGRWIT*GREF |
| | | | | | | DTSMANMVKPCLYRK |
| 682 | 2032 | A | 5210 | 2 | 231 | FFFETESYSITQAGVQWPNLSSLKTLPPGFK*F |
| | | | | | | SCLSLPSSWDYRCLPPCPANFCTPSRNGVLPC |
| | | | | | | WPGWSRTPDLS |
| 683 | 2033 | A | 5218 | 85 | 402 | CPSVSGLRRHNNINIGTNVDVKAVSNIF |
| | | | | | | MIILLRSMYRINVKPYFFI*LFFSRVNC*SVIIG |
| | | | | | | YARCYTFLIF*LFL*IPADSPTDQEPKTVMLSK |
| | | | | | | QSESAI |
| 684 | 2034 | A | 5220 | 1 | 194 | NLMKEMQNLNSENHKTWEEYKDTK*IMSYF |
| | | | | | | YG*ALNVLKMAVLPKLMYRFSATLVKIPQHL |
| | | | | | | TDS |
| 685 | 2035 | A | 5228 | 260 | 440 | LHSQDGNSDPRKPQGEMSAHAFPVQTCGEED |
| | | | | | | QKKTQVPTINFTELSKCS*S*KIMSGERE |
| 686 | 2036 | A | 5239 | 79 | 508 | GGEAAARAAKLSSPRPHRVGRRERGVGGMS |
| | | | | | | AFSEAALEKKLSELSNSQQSVQTLSLWLIHHR |
| | | | | | | KHSRPIVTVWERELRKAKPNRKLTFLYLAND |
| | | | | | | VIQNSKRKGPEFTKDFAPVIVEAFKHVSSETD |
| | | | | | | ESCKKHLGRVLSIWEERS |
| 687 | 2037 | A | 5244 | 1 | 428 | MAAVVAATALKGRGARNARVLRGILAGATA |
| | | | | | | NKASHNRTRALQSHSSPEGKEEPEPLSPELEYI |
| | | | | | | PRKIRGKNPMKAVGLAWAIQPPCGILLFILTKR |
| | | | | | | EVDKDRVKQMKARQNMRLSNTGEYESQRFR |
| | | | | | | ASSQSAPSPDVGSGVQT |
| 688 | 2038 | A | 5249 | 1 | 1407 | LQQTEDKSLLNQGSSSEEVAGSSQKMGQPGP |
| | | | | | | SGDSDLATALHRLSLRRQNYLSEKQFFAEEW |
| | | | | | | QRKIQVLADQKEGVSGCVTPTESLASLCTTQS |
| | | | | | | EITDLSSASCLRGFMPEKLQIVKPLEGSQTLY |
| | | | | | | HWQQLAQPNLGTILDPRPGVITKGFTQLPGD |
| | | | | | | AIYHISDLEEDEEEGITFQVQQPLEVEEKLSTS |
| | | | | | | KPVTGIFLPPITSAGGPVTVATANPGKCLSCT |
| | | | | | | NSTFTFTTCRILHPSDITQVTPSSGFPSLSCGSS |
| | | | | | | GSSSSNTAVNSPALAYRLSIGESTTNRRDSTIT |
| | | | | | | FSSTMSLAKLLQERGISAKVYHSPISENPLQPL |
| | | | | | | PKSLAIPSTPPNSPSHSPCPSPLPFEPRVHLSEN |
| | | | | | | FLASRPAETFLQEMYGLRPSRNPPDVGQLKM |
| | | | | | | NLVDRLKRLGIARVVKNPGAQENGRCQEAEI |
| | | | | | | GPQKPDSAVYLNSGSSLLGGLRRNQSLPVIM |
| | | | | | | GSFAAPVCTSSPKMGVLKED |
| 689 | 2039 | A | 5254 | 2 | 2621 | LSLFGSRALGRSGARAMAKAKKVGARRKAS |
| | | | | | | GAPAGARGGPAKANSNPFEVKVNRQKFQILG |
| | | | | | | RKTRHDVGLPGVSRARALRKRTQTLLKEYKE |
| | | | | | | RDKSNVFRDKRFGEYNSNMSPEEKMMKRFA |
| | | | | | | LEQQRHHEKKSIYNLNEDEELTHYGQSLADIE |
| | | | | | | KHNDIVDSDSDAEDRGTLSGELTAAHFGGGG |
| | | | | | | GLLHKKTQQEGEEREKPKSRKELIEELIAKSK |
| | | | | | | QEKRERQAQREDALELTEKLDQDWKEIQTLL |
| | | | | | | SHKTPKSENRDKKEKPKPDAYDMMVRELGF |
| | | | | | | EMKAQPSNRMKTEAELAKEEQEHLRKLEAE |
| | | | | | | RLRRMLGKDEDENVKKPKHMSADDLNDGFV |
| | | | | | | LDKDDRRLLSYKDGKMNVEEDVQEEQSKEA |
| | | | | | | SDPESNEEEGDSSGGEDTEESDSPDSHLDLES |
| | | | | | | NVESEEENEKPAKEQRQTPGKGLISGKERAG |
| | | | | | | KATRDELPYTFAAPESYEELRSLLLGRSMEEQ |
| | | | | | | LLVVERIQKCNHPSLAEGNKAKLEKLFGFLLE |
| | | | | | | YVGDLATDDPPDLTVIDKLVVHLYHLCQMFP |
| | | | | | | ESASDAIKFVLRDAMHEMEEMIETKGRAALP |
| | | | | | | GLDVLIYLKITGLLFPTSDFWHPVVTPALVCL |
| | | | | | | SQLLTKCPILSLQDVVKGLFVCCLFLEYVALS |
| | | | | | | QRFIPELINFLLGILYIATPNKASQGSTLVHPFR |
| | | | | | | ALGKNSELLVVSAREDVATWQQSSLSLRWA |
| | | | | | | SRLRAPTSTEANHIRLSCLAVGLALLKRCVLM |
| | | | | | | YGSLPSFHAIMGPLRALLTDHLADCSHPQELQ |
| | | | | | | ELCQSTLTEMESQKQLCRPLTCEKSKPVPLKL |
| | | | | | | FTPRLVKVLEFGRKQGSSKEEQERKRLIHKHK |
| | | | | | | REFKGAVREIRKDNQFLARMQLSEIMERDAE |
| | | | | | | RKRKVKQLFNSLATQEGEWKALKRKKFKK |
| 690 | 2040 | A | 5261 | 1 | 304 | FPFFVFLVETGFHHVGQAGLELLTSGDPPTW |
| | | | | | | ASQSAGITGVSHCSWPVIYVLSTLLHAVRNVL |
| | | | | | | FKRTFPLKSSSFLSYDKEIFFILIIVLKFYLVTLT |
| | | | | | | SFVK |
| 691 | 2041 | A | 5270 | 3 | 158 | NCHTTHCTANWVHLPGTPPGWKLDGPAAAL |
| | | | | | | EVLSSFFFFFLKFSYKPQNW |
| 692 | 2042 | A | 5282 | 56 | 1268 | GMEPVGCCGECRGSSVDPRSTFVLSNLAEVV |
| | | | | | | ERVLTFLPAKALLRVACVCRLWEECVRRVLR |
| | | | | | | THRSVTWISAGLAEAGHLEGHCLVRVVAEEL |
| | | | | | | ENVRILPHTVLYMADSETFISLEECRGHKRAR |
| | | | | | | KRTSMETALALEKLFPKQCQVLGIVTPGIVVT |
| | | | | | | PMQSGSNRPQEIEIGESGFALLFPQIEGIKIQPF |
| | | | | | | HFIKDPKNLTLERHQLTEVGLLDNPELRVVLV |
| | | | | | | FGYNCCKVGASNYLQQVVSTFSDMNIILAGG |
| | | | | | | QVDNLSSLTSEKNPLDIDASGVVGLSFSGHRI |
| | | | | | | QSATVLLNEDVSDEKTAEAAMQRLKAANIPE |
| | | | | | | HNTIGFMFACVGRGFQYYRAKGNVEADAFR |
| | | | | | | KFFPSVPLFGFFGNGEIGCDRIVTGNFILRKCN |
| | | | | | | EVKDDDLFHSYTTIMALIHLGSSK |
| 693 | 2043 | A | 5301 | 362 | 507 | EEIKERFGPGLVIYWYGFIQELDCNRERGILLK |
| | | | | | | ACFPTNIVTLCHSIA |
| 694 | 2044 | A | 5310 | 1 | 204 | RVLTAINHTLKENLRKFYKGKKDKPLDLRPK |
| | | | | | | KTRAMRRRLNMHEENLKTKLKQHRKERLYPL |
| | | | | | | RKYAAKA |
| 695 | 2045 | A | 5315 | 125 | 1596 | ETRSTAVKSEVQVCISLLLCLEDRTMIPKKAKP |
| | | | | | | TGSGKEEGPAPCKQMKLEAAGGPSALNFDSP |
| | | | | | | SSLFESLISPIKTETFWEFWEQKPLLIQRDDPA |
| | | | | | | LATYYGSLFKLTDLKSLCSRGMYYGRDVNV |
| | | | | | | CRCVNGKKKVLNKDGKAHFLQLRKDFDQKR |
| | | | | | | ATIQFHQPQRFKDELWRIQEKLECYFGSLVGS |
| | | | | | | NVYLTPAGSQGLPPHYDDVEVFILQLEGEKH |
| | | | | | | WRLYHPTVPLAREYSVEAEERIGRPVHEFML |
| | | | | | | KPGDLLYFPRGTIHQADTPAGLAIISTHVTIST |
| | | | | | | YQNNSWGDFLLDTISGLVFDTAKEDVELRTG |
| | | | | | | TPRQLLLQVESITVATRRLSGFLRTLADRLEG |
| | | | | | | TKELLSSDMKKDFIMHRLPPYSAGDGAELSTP |
| | | | | | | GGKLPRLDSVVRLQFKDHIVLTVLPDQDQSD |
| | | | | | | ETQEKMVYIYHSLKNSRETHMMGNEEETEFH |
| | | | | | | GLRFPLSHLDALKQIWNSPAISVKDLKLTTDE |
| | | | | | | EKESLVLSLWTECLIQVV |
| 696 | 2046 | A | 5318 | 1476 | 742 | LMKXYLEAAELGELSDIHTKLLRLSSSQGTIET |
| | | | | | | SLQDIDSRLSPGGSLADAWAHQEGTHPKDRN |
| | | | | | | VEKLQVLLNCMTEIYYQFKKDKAERRLAYN |
| | | | | | | EEQIHKFDKQKLYYHATKAMTHFTDECVKK |
| | | | | | | YEAFLNKSEEWIRKMLHLRKQLLSLTNQCFDI |
| | | | | | | EEEVSKYQEYTELQEILPQKMFTASSGIKHT |
| | | | | | | MTPIYPSSNTLVEMTLGMKKLKEEMEGVVKE |
| | | | | | | LAENNHILESCIGSLTMDGGLRNVDCL |
| 697 | 2047 | A | 5320 | 244 | 478 | LDYNFFLFEMTFGLVSQAGVQWHDLGSLQPP |
| | | | | | | PPGFKQFSCLSLPSSWDYRHLPPIILANFSREG |
| | | | | | | VSPSWPGWSRTPDFR |
| 698 | 2048 | A | 5324 | 266 | 714 | LPIRKSLRSVRSGFPTSQSPITRNLDGTASGSC |
| | | | | | | LAKTVTGSLFRINVGLRGLVAGGIIGALLGTP |
| | | | | | | VGGLLMAFQKYSGETVQERKQKDRKALHEL |
| | | | | | | KLEEWKGRLQVTEHLPEKIESSLQEDEPENDA |
| | | | | | | KKIEALLNLPRNPSVIDKQDKD |
| 699 | 2049 | A | 5334 | 699 | 277 | RPHGHLVCISSSAGLSGVNGLADYCASKFAA |
| | | | | | | FGFAESVFVETFVQKQKGIKUIVCPFPIKTGM |
| | | | | | | FEGCTTGCPSLLPILEPKYAVEKIVEAILQEKM |
| | | | | | | YLYMPKLLYFMMFLKSFLPLKTGLLLADYLGI |
| | | | | | | LHAMDGFADQKK |
| 700 | 2050 | A | 5344 | 3 | 614 | PTAEEMSSLTPESSPELAKRSWFGNFISLDKEE |
| | | | | | | QIELVLKDKPLSSIKADIVHAFLSIPSLSHSVLS |
| | | | | | | QTSFRAEYKASGGPSVFQKFVRFQVDISSSEG |
| | | | | | | PEPSPRRDQSGGGGIYSVTFTLISGPSRRFKRV |
| | | | | | | VETIQAQLLSTHDQPSVQALADEKNGAQTRP |
| | | | | | | AGAPPRSLQPPPGRPDPELSSSPRRGPPKDKK |
| | | | | | | LLATNGTPL |
| 701 | 2051 | A | 5346 | 3 | 1383 | HASVLFCRVMAASKTQGAVARMQEDRDGSC |
| | | | | | | STVGGVGYGDSKDCILEPLSLPESPGGTITLE |
| | | | | | | GSPSVPCIFCEEHFPVAEQDKLLKHMIIEHKIY |
| | | | | | | IADVKLVADFQRYILYWRKRFTEQPITDFCSV |
| | | | | | | IRINSTAPFEEQENYFLLCDVLPEDRILREELQ |
| | | | | | | KQRLREILEQQQQERNDTNFHGVCMFCNEEF |
| | | | | | | LGNRSVILNHMAEEHAFNIGLPDNIVNGNEFL |
| | | | | | | CTLQKKLDNLQCLYCEKTFRDKNTLKDLIMR |
| | | | | | | KKQHRKINPKNREYDRFYVINYLELGKSWEE |
| | | | | | | VQLEDDRELLDHQEDDWSDWEEHPASAVCL |
| | | | | | | FCEKQAETIEKLYVHMEDAHEFDLLKIKSELG |
| | | | | | | LNFYQQVKLVNFIRRQVHQCRCYGCHVKFKS |
| | | | | | | KADLRTHMEETKHTSLLPDRKTWDQLEYYFP |
| | | | | | | TYENDTLLWTLSDSESDLTAQEQNENVPUSE |
| | | | | | | DTSKLYALKQSSILNQLLL |
| 702 | 2052 | A | 5356 | 2502 | 1540 | MAAATRGCRPWGSLLGLLGLVSAAAAAWD |
| | | | | | | LASLRCTLGAFCECDFRPDLPGLECDLAQHL |
| | | | | | | AGQHLAKALVVKALKAFVRDPAPTKPLVLSL |
| | | | | | | HGWTGTGKSYVSSLLAHYLFQGGLRSPRVH |
| | | | | | | HFSPVLHFPHPSHIERYKKDLKSWVQGNLTA |
| | | | | | | CGRSLFLFDEMDKMPPGLMEVLRPFLGSSWV |
| | | | | | | VYGTNYRKAIFLFISNTGGEQINQVALEAWRS |
| | | | | | | RRDREEILLQELEPVISRAVLDNPHHGFSNSGI |
| | | | | | | MEERLLDAVVPFLPLQRHHVRHCVLNELAQL |
| | | | | | | GLEPRDEVVQAVLDSTTFFPEDEQLFSSNGCK |
| | | | | | | TVASRIAFFL |
| 703 | 2053 | A | 5380 | 278 | 657 | LFLQKLRMKTEEEARTHTELEMFLRKEQQKL |
| | | | | | | EERLEFWMEKYDKDTEMKQNELNALKATKA |
| | | | | | | SDLAIILQDLAKMIREYEQVIIEDRIEKERSKK |
| | | | | | | KVKQDLLELKSVIKLQAWWRGTMIRREIGGF |
| | | | | | | KM |
| 704 | 2054 | A | 5381 | 1 | 1003 | FRGRAVKMAAVVEVEVGGGAAGERELDEV |
| | | | | | | DMSDLSPEEQWRVEHARMHAKHRGHEAMH |
| | | | | | | AEMVLILIATLVVAQLLLVQWKQRHPRSYN |
| | | | | | | MVTLFQMWVVPLYFTVKLHWWRFLVIWILF |
| | | | | | | SAVTAFVTFRATRKPLVQITPRLVYKWFLLIY |
| | | | | | | KISYATGIVGYMAVMFTLPGLNLLFKIKPEDA |
| | | | | | | MDFGISLLFYGLYYGVLERDFAEMCADYMA |
| | | | | | | STLGFYSESGMPTKIILSDSVCAVCGQQIFVDV |
| | | | | | | SEEGIIENTYRLSCNHVFHEFCIRGWCIVGKK |
| | | | | | | QTCPYCKEKVDLKRMFSNPWERPHVMYGQL |
| | | | | | | LDWLRYLVAWQPVIIGVVQGINYILGLE |
| 705 | 2055 | A | 5396 | 3 | 675 | IYDRDPLQLATRAGQPLDINMAGEPKPYRPKP |
| | | | | | | GNKRPLSALYRLESKEPFLSVGGYVFDYDYY |
| | | | | | | RDDFYNRLFDYHGRVPPPPPAVIPLKRPRVA |
| | | | | | | VTTTRRGKGVFSMKGGSRSTASGSTGSKLKS |
| | | | | | | DELQTIKKELTQIKTKIDSVLGRLDKIEKQQK |
| | | | | | | AEAEAQKKLLEESLVLIQEECVSEIADHSTEEP |
| | | | | | | AEGGPDADGEEMTDGTEEAFDEDGGHELFLQ |
| | | | | | | IK |
| 706 | 2056 | A | 5410 | 2 | 98 | GRVGLNLEGRGCSEPKWRHICTPTWATEQDSI |
| | | | | | | S |
| 707 | 2057 | A | 5415 | 6 | 287 | PFKLTPSFLSHAFSSGQERKVFIELNHIKKCNT |
| | | | | | | VRGVFVLEEFGNYTILLLGLDSHGSNSNLGAP |
| | | | | | | EEGLGAGRKRTSVEKSGGAGVTRKKRDP |
| 708 | 2058 | A | 5423 | 3 | 291 | SSSNPLGSPSTLWKLCSFVLHNKSCCCSFFGS |
| | | | | | | TPTLRAITLTVRVCGFIPEVSKTTNPLGRTLNS |
| | | | | | | GCTIFKTVTLTARSTASLLKSVRPRTHQKE |
| 709 | 2059 | A | 5424 | 679 | 347 | R1RHEEKRGSRGRGRRTSEEDTPKKKKHKGG |
| | | | | | | SEFTDTILSVHPSDVLDMPVDPNEPTYCLCHQ |
| | | | | | | VSYGEMIGCDNPDCPIEWFHFACVDLTTKPK |
| | | | | | | GKWFCPRCVQEKRKKK |
| 710 | 2060 | A | 5442 | 1073 | 559 | QESLKKKIQPKLSLTLSSSVSRGNVSTPPRHSS |
| | | | | | | GSLTPPVTPPITPSSSFRSSTPTGSEYDEEEVDY |
| | | | | | | EESDSDESWTTESAISSEAILSSMCMNGGEEK |
| | | | | | | PFACPVPGCKKRYKNVNGIKYHAKNGHRTQI |
| | | | | | | RVRKPFKCRCGKSYKTAQGLRHHTINFHPPV |
| | | | | | | SAEIIRKMQQ |
| 711 | 2061 | A | 5449 | 1 | 319 | GDSLCVPQYNKYREERVILFLKMASGHAFQP |
| | | | | | | DLVKRIRDAIRMGLSARHVPSLILETKGIPYTL |
| | | | | | | NGKKVEVAVKQIIAGKAVEQGGAFSNPETLD |
| | | | | | | LYRDIPELQGF |
| 712 | 2062 | A | 5499 | 91 | 749 | RPTPGHGDFWMQPLTKDAGMSLSSVTLASAL |
| | | | | | | QVRGEALSEEEIWSLLFLAAEQLLEDLRNDSS |
| | | | | | | DYVVCPWSALLSAAGSLSFQGRVSHIEAAPF |
| | | | | | | KAPELLQGQSEDEQPDASQMHVYSLGMTLY |
| | | | | | | WSAGFHVPPHQPLQLCEPLHSILLTMCEDQPH |
| | | | | | | RRCTLQSVLEACRVHEKEVSVYPAPAGLHIR |
| | | | | | | RLVGLVLGTISEVSREPGFSSSSCWSCVAIKI |
| 713 | 2063 | A | 5506 | 22 | 478 | VEELILNSRLDPHLHTPMYFFLAHLSFLDLSFT |
| | | | | | | TSSIPQLLYNLNGCDKTISYMGCAIQLFLFLGL |
| | | | | | | GGVECLLLAVMAYDRCVAICKPLHYMVIMN |
| | | | | | | PRLCRGLVSVTWGCGVANSLAMSPVTLRLPR |
| | | | | | | CGHHEVDHFLCEMPALIRMACISTV |
| 714 | 2064 | A | 5514 | 25 | 220 | AIRPYWCENNIIGIGKLSTADGKAFAIIPEVLR |
| | | | | | | RLTSSVSCALDEAAAALTRMRAESTANAGQS |
| | | | | | | DK |
| 715 | 2065 | A | 5526 | 3 | 810 | KVTAPRRPQRYSSGHGSDNSSVLSGELPPAM |
| | | | | | | GRTALFHHSGGSSGYESLRRDSEATGSASSAP |
| | | | | | | DSMSESGAASPGARTRSLKSPKKRATGLQRR |
| | | | | | | RLIPAPLPDITALGRKPSLPGQWVDLPPPLAG |
| | | | | | | SLKEPFEIKVYEIDDVERLQRPRPTPREAPTQG |
| | | | | | | LACVSTRLRLAERRQQRLREVQAKHKHLCEE |
| | | | | | | LAETQGRLMLEPGRWLEQFEVDPELEPESAE |
| | | | | | | YLAALERATAALEQCVNLCKAHVMMVTCFD |
| | | | | | | ISVAASAAIPGPQEVDV |
| 716 | 2066 | A | 5529 | 458 | 790 | SPGYGENKFTVTSXNIAVPLCEMNKIYSYYSD |
| | | | | | | SSSSERTMDLVLEMCNTNSIHWCGISGRQLG |
| | | | | | | KLHPSSSLCLALTLLSSVQGLQSISGLRLTDTF |
| | | | | | | LKRTYEYDDIAQYCV |
| 717 | 2067 | A | 5531 | 3 | 460 | NSEDLLKYFNPESWQEDLDNMYLDTPRYRG |
| | | | | | | RSYHDRKSKVDLDRLNDDAKRYSCTPRNYS |
| | | | | | | VNIREELKLANVVFFPRCLLVQRCGGNCGCG |
| | | | | | | TVNWRSCTCNSGKTVKKYHEVLQFEPGHIKR |
| | | | | | | RGRAKTMALVDIQLDHHERCDCICSSRPPR |
| 718 | 2068 | A | 5586 | 311 | 88 | AVLKNMAPMTALGLLDLHILNLILFLSAGEDF |
| | | | | | | TSVVSEIMMYILLVFLTLWLLIEMIYCYRKVS |
| | | | | | | KAEEAAQENA |
| 719 | 2069 | A | 5598 | 1 | 330 | KNCANEAVVQKILDRVLSRYDVRLRPNFGSM |
| | | | | | | LATNSTRGLNEDELMAHQQEKDSSSESEDSC |
| | | | | | | PPSPGCSFTEGFSFDLLNPDYVPKVDKWSRFL |
| | | | | | | FPLAFGLFNIVAAERC |
| 720 | 2070 | A | 5628 | 798 | 148 | LPPAQIPEAWLLLANVVVVLILVPLKDRLIDP |
| | | | | | | LLLRCKLLPSALQKMALGMFFGFTSVIVAGV |
| | | | | | | LEMERLHYIHHNIETVSQQIGEVLYNAAPLSIW |
| | | | | | | WQIPQYLLIGISEIFASIPGLEFAYSEAPRSMQG |
| | | | | | | AIMGIFFGLSGVGSLLGSSLVALLSLPGGWLH |
| | | | | | | CPKDFGNINNCRMDLYFFLLAGIQAVTALLF |
| | | | | | | VWIAGRYERASQGPASHSRFSRDRG |
| 721 | 2071 | A | 5632 | 146 | 536 | MSALIVRKLRSAELTLFSELPTVLGANVNAA |
| | | | | | | KLHETALHHAAKVKNVDLIEMLIEFGGNIYA |
| | | | | | | RDNRGKKPSDYTWSSSAPAKCFEYYEKTPLT |
| | | | | | | LSQLCRVNLRKATGVRGLEKIAKLNIPPRLID |
| | | | | | | YLSYN |
| 722 | 2072 | A | 5638 | 3 | 3806 | CPSLDIRSEVAELRQLENCSVVEGHLQILLMF |
| | | | | | | TATGEDFRGLSFPRLTQVTDYLLLFRVYGLES |
| | | | | | | LRDLFPNLAVTRGTRLFLGYALVIFEMPHLRD |
| | | | | | | VALPALGAVLRGAVRVEKNQELCHLSTIDW |
| | | | | | | GLLQPAPGANHIVGNKLGEECADVCPGVLGA |
| | | | | | | AGEPCAKTTFSGHTDYRCWTSSHCQRVCPCP |
| | | | | | | HGMACTARGECCHTECLGGCSQPEDPRACV |
| | | | | | | ACRHLYFQGACLWACPPGTYQYESWRCVTA |
| | | | | | | ERCASLHSVPGRASTFGIHQGSGLAQCPSGFT |
| | | | | | | RNSSSIFCHKCEGLCPKECKVGTKTIDSIQAA |
| | | | | | | QDLVGCTHVEGSLILNLRQGYNLEPQLQHSL |
| | | | | | | GLVETITGFLKIKHSFALVSLGFFKNLKLLRGD |
| | | | | | | AMVDGNYTLYVLDNQNLQQLGSWVAAGLTI |
| | | | | | | PVGKIYFAFNPRLCLEHIYRLEEVTGTRGRQN |
| | | | | | | KAEINPRTNGDRAACQTRTLRFVSNVTEADRI |
| | | | | | | LLRWERYEPLEARDLLSFIVYYKESPFQNATE |
| | | | | | | HVGPDAGGTQSWNLLDVELPLSRTQEPGVTL |
| | | | | | | ASLKPWTQYAVFVRAITLTTEEDSPHQGAQS |
| | | | | | | PIVYLRTLPAAPTVPQDVISTSNSSSHLLVRW |
| | | | | | | KPPTQRNGNLTYYLVLWQRLAEDGDLYLND |
| | | | | | | YCHRGLRLPTSNNDPRFDGEDGDPEAEMESD |
| | | | | | | CCPCQHPPPGQVLPPLEAQEASFQKKFENFLH |
| | | | | | | NAITIPISPWKVTSINKSPQRDSGRHRRAAGPL |
| | | | | | | RLGGNSSDFEIQEDKVPREPAVLSGLRHFTEY |
| | | | | | | RIDIHACNHAAHTVGGSAATFVFARTMPHRE |
| | | | | | | ADGIPGKVAWEASSKNSVLLRWLEPPDPNGL |
| | | | | | | ILKYEIKYRRLGEEATVLCVSRLRYAKFGGV |
| | | | | | | HLALLPPGNYSARVRATSLAGNGSWTDSVAF |
| | | | | | | YILGPEEEDAGGLHVLLTATPVGLTLLWLAA |
| | | | | | | LGFFYGKKRNRTLYASVNPEYFSASDMYVPD |
| | | | | | | EWEVPREQISIIRELGQGSFGMVYEGLARGLE |
| | | | | | | AGEESTPVALKTVNELASPRECIEFLKEASVM |
| | | | | | | KAFKCHHVVRLLGVVSQGQPTLVIMELMTR |
| | | | | | | GDLKSHLRSLRPEAENNPGLPQPALGEMIQM |
| | | | | | | AGEIADGMAYLAANKFVHRDLAARNCMVSQ |
| | | | | | | DFTVKIGDFGMTRDVYETDYYRKGGKGLLP |
| | | | | | | VRWMAPESLKDGIFTTHSDVWSFGVVLWEIV |
| | | | | | | TLAEQPYQGLSNEQVLKFVMDGGVLEELEGC |
| | | | | | | PLQLQELMSRCWQPNPRLRPSFTILDSIQEEL |
| | | | | | | RPSFRLLSFYYSPECRGARGSLPTTDAEPDSSP |
| | | | | | | TPRDCSPQNGGPGH |
| 723 | 2073 | A | 5672 | 1 | 216 | LAWIDNILPEKEKKETDKKRKRKKGAHEDCD |
| | | | | | | EEPQFPPPSVIKIPMESVQSDPQNGIHCIARKR |
| | | | | | | SSSWSYSL |
| 724 | 2074 | A | 5704 | 4235 | 940 | ARGRRSRPVWAASWGGRGRPAARRRPRGLA |
| | | | | | | ATMGFELDRFDGDVDPDLKCALCHKVLEDP |
| | | | | | | LTTPCGHVFCAGCVLPWVVQEGSGPARCRGR |
| | | | | | | LSAKELNHVLPLKRLILKLDIKCAYATRGCGR |
| | | | | | | VVKLQQLPEHLERCDFAPARCRHAGCGQVLL |
| | | | | | | RRDVEAHMRDACDARPVGRCQEGCGLPLTH |
| | | | | | | GEQRAGGHCCARALRAHNGALQARLGALHK |
| | | | | | | ALKKEALRAGKREKSLVAQLAAAQLELQMT |
| | | | | | | ALRYQKKFTEYSARLDSLSRCVAAPPGGKGE |
| | | | | | | ETKSLTLVLHRDSGSLGFNIIGGRPSVDNHDG |
| | | | | | | SSSEGIFVSKIVDSGPAAKEGGLQIHDRIIEVN |
| | | | | | | GRDLSRATHDQAVEAFKTAKEPTVVQVLRRT |
| | | | | | | PRTKMFTPPSESQLVDTGTQTDITFEHIMALT |
| | | | | | | KMSSPSPPVLDPYLLPEEHPSAHEYYDPNDYI |
| | | | | | | GDIHQEMDREELELEEVDLYRMNSQDKLGLT |
| | | | | | | VCYRTDDEDDIGIYISEIDPNSIAAKDGRIREG |
| | | | | | | DRIIQINGIEVQNREEAVALLTSEENKNFSLLI |
| | | | | | | ARAELQLDEGWMDDDRNDFLDDLHMDMLE |
| | | | | | | EQHHQAMQFTASVLQQKKHDEDGGTTDTAT |
| | | | | | | ILSNQIIEKDSGVGRTDESTRNDESSEQENNG |
| | | | | | | DDATASSNPLAGQRKLTCSQDTLGSGDLPFS |
| | | | | | | NESFISADCTDADYLGIPVDECERFRELLELK |
| | | | | | | CQVKSATPYGLYYPSGPLDAGKSDPESVDKE |
| | | | | | | LELLNEELRSIELECLSIVRAHKMQQLKEQYR |
| | | | | | | ESWMLHNSGFRNYNTSIDVRRHELSDITELPE |
| | | | | | | KSDKDSSSAYNTGESCRSTPLTLEISPDNSLRR |
| | | | | | | AAEGISCPSSEGAVGTTEAYGPASKNLLSITE |
| | | | | | | DPEVGTPTYSPSLKELDPNQPLESKERRASDG |
| | | | | | | SRSPTPSQKLGSAYLPSYHHSPYKHAHIPAHA |
| | | | | | | QHYQSYMQLIQQKSAVEYAQSQMSLVSMCK |
| | | | | | | DLSSPTPSEPRMEWKVKIRSDGTRYITKRPVR |
| | | | | | | DRLLRERALKIREERSGMTTDDDAVSEMKM |
| | | | | | | GRYWSKEERKQHLVKAKEQRRRREFMMQSR |
| | | | | | | LDCLKEQQAADDRKEMNILELSHKKMMKKR |
| | | | | | | NKKIFDNWMTIQELLTHGTKSPDGTRVYNSF |
| | | | | | | LSVITV |
| 725 | 2075 | A | 5707 | 3 | 1770 | QISTEVSEAPVANDKPKTLVVKVQKKAADLP |
| | | | | | | DRDTWKGRFDFLMSCVGYAIGLGNVWRFPY |
| | | | | | | LCGKNGGGAFLIPYFLTLIFAGVPLFLLECSLG |
| | | | | | | QYTSIGGLGVWKLAPMFKGVGLAAAVLSFW |
| | | | | | | LNIYYIVIISWAIYYLYNSFTTTLPWKQCDNP |
| | | | | | | WNTDRCFSNYSMVNTTNMTSAVVEFWERN |
| | | | | | | MHQMTDGLDKPGQIRWPLAITLAIAWILVYF |
| | | | | | | CIWKGVGWTGKVVYFSATYPYIMLIILFFRGV |
| | | | | | | TLPGAKEGILFYITPNFRKLSDSEVWLDAATQ |
| | | | | | | IFFSYGLGLGSLIALGSYNSFHNNVYRDSIIVC |
| | | | | | | CINSCTSMFAGFVIFSIVGFMAHVTKRSIADV |
| | | | | | | AASGPGLAFLAYPEAVTQLPISPLWAILFFSM |
| | | | | | | LLMLGIDSQFCTVEGFITALVDEYPRLLRNRR |
| | | | | | | ELFIAAVCIISYLIGLSNITQGGIYVFKLFDYYS |
| | | | | | | ASGMSLLFLVFFECVSISWFYGVNRFYDNIQE |
| | | | | | | MVGSRPCIWWKLCWSFFTPIIVAGVFIPSAVQ |
| | | | | | | MTPLTMGNYVFPKWGQGVGWLMALSSMVL |
| | | | | | | IPGYMAYMFLTLKGSLKQRIQVMVQPSEDIV |
| | | | | | | RPENGPEQPQAGSSTSKEAYI |
| 726 | 2076 | A | 5711 | 156 | 423 | PRRDPGRTFELRGSAPRKTGANMPVRRGHVA |
| | | | | | | PQNTFLGTIIRKFEGQNKKFIIANARVQNCAII |
| | | | | | | YCNDGFCEMTGFSRPDVMQKPCTCD |
| 727 | 2077 | A | 5716 | 3 | 274 | HASEYFFKLCSFQVFLSFPLATTVIDVGLVVIP |
| | | | | | | LVKSPNVHYVYVLLLVLSGLLFYIPLIHFKIRL |
| | | | | | | AWFEKMTCYLQLLFNICLPDVSEE |
| 728 | 2078 | A | 5737 | 1899 | 649 | IQASRASPYPRVKVDFALSCHEDLLAPISEPIE |
| | | | | | | WKYHSPEEEISLGPACWLWDFLRRSQQAGFL |
| | | | | | | LPLSGGVDSAATACLIYSMGCQVCEAVRSGN |
| | | | | | | EEVLADVRTIVNQISYTPQDPRDLCGRTLLC |
| | | | | | | YMASKNSSQETCTRARELAQQIGSLLHISLNID |
| | | | | | | PAVKAVMGIFSLVTGKSPLFAAHGGSSRENL |
| | | | | | | ALQNVQARIRMVLAYLFAQLSLWSRGVHGG |
| | | | | | | LLVLGSANVDESLLGYLTKYDCSSADINPIGG |
| | | | | | | ISKTDLRAFVQFCIQRFQLPALQSILLAPATAE |
| | | | | | | LEPLADGQVSQTDEEDMGMTYAELSVYGKL |
| | | | | | | RKVAKMGPYSMFCKLLGMWRHICTPRQVAD |
| | | | | | | KVKRFFSKYSMNRHKMTRTPAYHAENYSPE |
| | | | | | | DNRFDLRPFLYNTSWPWQFRCIENQVLQLER |
| | | | | | | AEPQSLDGVD |
| 729 | 2079 | A | 5741 | 1 | 5976 | PGCAARLSRARAPGPGAAGAGRKRLADPGPP |
| | | | | | | PASRRLRAPGSRPRLAPCTRRAAQPAHAPIVIA |
| | | | | | | PRAAGGAPLSARAAAASPPPFQTPPRCPVPLL |
| | | | | | | LLLLLGAARAGALEIQRRFPSPTPTNNFALDG |
| | | | | | | AAGTVYLAAVNRLYQLSGANLSLEAEAAVG |
| | | | | | | PVPDSPLCHAPQLPQASCEHPRRLTDNYNKIL |
| | | | | | | QLDPGQGLVVVCGSIYQGFCQLRRRGNISAV |
| | | | | | | AVRFPPAAPPAEPVTVFPSMLNVAANHPNAS |
| | | | | | | TVGLVLPPAAGAGGSRLLVGATYTGYGSSFF |
| | | | | | | PRNRSLEDHRFENTPEIAIRSLDTRGDLAKLFT |
| | | | | | | FDLNPSDDNILKIKQGAKEQHKLGFVSAFLHP |
| | | | | | | SDPPPGAQSYAYLALNSEARAGDKESQARSL |
| | | | | | | LARICLPHGAGGDAKKLTESYIQLGLQCAGG |
| | | | | | | AGRGDLYSRLVSVFPARERLFAVFERPQGSPA |
| | | | | | | ARAAPAALCAFRFADVRAAIRAARTACFVEP |
| | | | | | | APDVVAVLDSVVQGTGPACERKLNIQLQPEQ |
| | | | | | | LDCGAAHLQHPLSILQPLKATPVFRAPGLTSV |
| | | | | | | AVASVNNYTAVFLGTVNGRLLKINLNESMQ |
| | | | | | | VVSRRVVTVAYGEPVHHVMQFDPADSGYLY |
| | | | | | | LMTSHQMARVKVAACNVHSTCGDCVGAAD |
| | | | | | | AYCGWCALETRCTLQQDCTNSSQQHFVISA |
| | | | | | | SEGPSRCPAMTVLPSEIDVRQEYPGMILQISGS |
| | | | | | | LPSLSGMEMACDYGNNLRTVARVPGPAFGHQ |
| | | | | | | LAYCNLLPRDQFPPFPPNQDHVTVEMSVRVN |
| | | | | | | GRNIVKANFTTYDCSRTAQVYPHTACTSCLSA |
| | | | | | | QWPCFWCSQQHSCVSNQSRCEASPNPTSPQD |
| | | | | | | CPRTLLSPLAPVPTGGSQNILVPLANTAFFQG |
| | | | | | | AALECSFGLEEIFEAVWVNESVVRCDQVVLH |
| | | | | | | TTRKSQVFPLSLQLKGRPARFLDSPEPMTVM |
| | | | | | | VYNCAMGSPDCSQCLGREDLGHLCMWSDGC |
| | | | | | | RLRGPLQPMAGTCPAPEIRAIEPLSGPLDGGT |
| | | | | | | LLTIRGRNLGRRLSDVAHGVWIGGVACEPLP |
| | | | | | | DRYTVSEEIVCVTGPAPGPLSGVVTVNASKE |
| | | | | | | GKSRDRFSYVLPLVHSLEPTMGPKAGGTRITI |
| | | | | | | HGNDLHVGSELQVLVNDTDPCTELMRTDTSI |
| | | | | | | ACTMPEGALPAPVPVCVRFERRGCVHGNLTF |
| | | | | | | WYMQNPVITAISPRRSPVSGGRTITVAGERFLI |
| | | | | | | MVQNVSMAVHHIGREPTLKCKVLNSTLITCPSP |
| | | | | | | GALSINASAPVDFFINGRAYADEVAVAEELLD |
| | | | | | | PEEAQRGSRFRLDYLPNPQFSTAKREKWIKH |
| | | | | | | HPGEPLTLVIHVSTKGAGKEQDSLGLQSHEY |
| | | | | | | RVKIGQVSCDIQIVSDRIIHCSVNESLGAAVGQ |
| | | | | | | LPITIQVGNFNQTIATLQLGGSETAIIVSIVICSV |
| | | | | | | LLLLSVVALFVFCTKSRRAERYWQKTLLQME |
| | | | | | | EMESQIREEIRKGFAELQTDMTDLTKELNRSQ |
| | | | | | | GIPPLEYKHFVTRTFFPKCSSLYEERYVLPSQT |
| | | | | | | LNSQGSSQAQETHPLLGEWKIPESCRPNMEE |
| | | | | | | GLSLFSSLLDNKIIFLIVFVHALEQQKDFAVRD |
| | | | | | | RCSLASLLTIALHGKLEYYTSIMKELLVDLID |
| | | | | | | ASAAKNPKLMLRRTESVVEKMLTNWMSICM |
| | | | | | | YSCLRETVGEPFFLLLCAIKQQINKGSIDAITG |
| | | | | | | KARYTLNEEWLLRENIEAKPRNLNVSFQGCG |
| | | | | | | MDSLSVRAMDTDTLTQVKEKILEAFCKNVPY |
| | | | | | | SQWPRAEDVDLEWFASSTQSYILRDLDDTSV |
| | | | | | | VEDGRKKLNTLAIIYKIPEGASLAMSLIDKKD |
| | | | | | | NTLGRVKDLDTEKYFHLVLPTDELAEPKKSH |
| | | | | | | RQSHRKKVLPEIYLTRLLSTKGTLQKFLDDLF |
| | | | | | | KAILSIREDKPPLAVKYFFDFLEEQAEKRGISD |
| | | | | | | PDTLHIWKTNSLPLRFWVNILKNPQFVFDIDK |
| | | | | | | TDHIDACLSVIAQAFIDACSISDLQLGKDSPTN |
| | | | | | | KLLYAKEIPEYRKIVQRYYKQIQDMTPLSEQE |
| | | | | | | MNAHLAEESRKYQNEFNTNVAMAEIYKYAK |
| | | | | | | RYRPQIMAALEANPTARRTQLQHKFEQVVAL |
| | | | | | | MEDNIYECYSEA |
| 730 | 2080 | A | 5744 | 3 | 292 | QPSPLFHSHLETLQLLRTAQLPEQVSWPWGQ |
| | | | | | | VANGKGNQRNMGSPQPSLLAFERNLELQIMG |
| | | | | | | LGYSLLMGKLRPRVAKDTLRVHRDSTPSPLT |
| 731 | 2081 | A | 5747 | 1 | 382 | FLKCMRKAFRSSKLLQVGYTPDGICDDYRWC |
| | | | | | | FRVDEVNWITWNTNVGINEDPGNCEGVKRT |
| | | | | | | LSFSLRSSRVSGRHWKNFALVPLLREASARD |
| | | | | | | RQSAQPEEVYLRQFSGSLKPEDAEVFKSPAAS |
| | | | | | | GEK |
| 732 | 2082 | A | 5753 | 198 | 3 | AQAESSTVASPEATAGPLCTRIPNVPPPTPIRP |
| | | | | | | PGKLQAQLPCPSPVRFTSARIFPASRPQTKS |
| 733 | 2083 | A | 5754 | 2 | 2223 | AAGPPGLEAEGRAPESAGPGPGGDAAETPGL |
| | | | | | | PPAHSGTLMMAFRDVTVQIANQNISVSSSTAL |
| | | | | | | SVANCLGAQTVQAPAEPAAGKAEQGETSGR |
| | | | | | | EAPEAPAVGREDASAEDSCAEAGASGAADG |
| | | | | | | ATAPKTEEEEEEEETAEVGRGAEAEAGDLEQ |
| | | | | | | LNRTSTSTKSAKSGSEASASASKDALQAMILS |
| | | | | | | LPRYHCENPASCKSPTLSTDTLRKRLYRIGLN |
| | | | | | | LFNINPDKGIQFLISRGFIPDTPIGVAHFLLQRK |
| | | | | | | GLSRQMIGEFLGNSKKQFNRDVLDCVVDEM |
| | | | | | | DFSSMELDEALRKFQAHIRVQGEAQKVERLIE |
| | | | | | | AFSQRYCMCNPEVVQQFHNPDTIFILAFAIILL |
| | | | | | | NTDMYSPNIKPDRKMMLEDFIRNLRGVDDG |
| | | | | | | ADIPRELVVGIYERIQQKELKSNEDIIVTYVTK |
| | | | | | | VEKSIVGMKTVLSVPHRRLVCCSRLFEVTDV |
| | | | | | | NKLQKQAAHQREVFLFNDLLVILKLCPKKKS |
| | | | | | | SSTYTFCKSVGLLGMQFQLFENEYYSHGITLV |
| | | | | | | TPLSGSEKKQVLHFCALGSDEMQKFVEDLKE |
| | | | | | | SIAEVTELEQIRIEWELEKQQGTKTLSFKPCGA |
| | | | | | | QGDPQSKQGSPTAKREAALRERPAESTVEVSI |
| | | | | | | HNRLQTSQHNSGLGAERGAPVPPPDLQPSPPR |
| | | | | | | QQTPPLPPPPPTPPGTLVQCQQIVKVIVLDKPC |
| | | | | | | LARMEPLLSQALSCYTSSSSDSCGSTPLGGPG |
| | | | | | | SPVKVTHQPPLPPPPPPYNHPHQFCPPGSLLH |
| | | | | | | GHRYSSGSRSLV |
| 734 | 2084 | A | 5788 | 8 | 362 | SSVMGDLVGQGLEEQWARDENSWLIDGGTP |
| | | | | | | LDDVMRVLDIDEFPQSGNYETIGGFMMFMLR |
| | | | | | | KIPKRTDSVKFAGYKFEVVDIDNYRIDQLLVT |
| | | | | | | RIDSKATALSPKLPDAKDKEESVA |
| 735 | 2085 | A | 5827 | 1 | 1257 | MVFSAVLTAFHTGTSNTTFVVYENTYMNITL |
| | | | | | | PPPFQHPDLSPLLRYSFETMAPTGLSSLTVNST |
| | | | | | | AVPTTPAAFKSLNLPLQITLSAIMIFILFVSFLG |
| | | | | | | NLVVCLMVYQKAAMRSAINILLASLAFADM |
| | | | | | | LLAVLNMPFALVTILTIRWIFGKFFCRVSAMF |
| | | | | | | FWLFVLEGVAILLIISIDRFLIIVQRQDKLNPYR |
| | | | | | | AKVLIAVSWATSFCVAFPLAVGNPDLQIPSRA |
| | | | | | | PQCVFGYTTNPGYQAYVILISLISFFIPFLVILY |
| | | | | | | SFMGILNTLRHNALRIHSYPEGICLSQASKLGL |
| | | | | | | MGLQRPFQMSIDMGFKTRAFTTLILFAVFIVC |
| | | | | | | WAPFTTYSLVATFSKHFYYQHNFFEISTWLL |
| | | | | | | WLCYLKSALNPLIYYWRIKKFHDACLDMMP |
| | | | | | | KSFKFLPQLPGHTKRRIRPSAVYVCGEHRTVV |
| 736 | 2086 | A | 5870 | 3 | 268 | FTRSDELARHYRTHTGEKRFSCPLCPKQFSRS |
| | | | | | | DHLTKHARRHPTYHPDMIEYRGRRRTPRIDPP |
| | | | | | | LTSEVESSASGSGPGPAPSFTTCL |
| 737 | 2087 | A | 5871 | 2 | 521 | LTWPQLFLETLPELLHMSRFAEDGPSPGALVRS |
| | | | | | | RSSSLGYISKAEEYFLLKSRSDLIVWEKQSERH |
| | | | | | | GLARRLTTARRPPASSEQAQQELFNELKPAV |
| | | | | | | DGANFIVNHMRDQNNYNEEKDSWNRVART |
| | | | | | | VDRLCLFVVTPVMVVGTAWIFLQGVYNQPPP |
| | | | | | | QPFPGDPYSYNVQDKRFI |
| 738 | 2088 | A | 5881 | 1 | 1160 | LVVTAITAILAFPNEYTRMSTSELISELFNDCG |
| | | | | | | LLDSSKLCDYENRFNTSKGGELPDRPAGVGV |
| | | | | | | YSAMWQLALTLILKIVTTTFTFGMKIPSGLFWS |
| | | | | | | MAVGAIAGRLLGVGMEQLAYYHQEWTVFNS |
| | | | | | | WCSQGADCTTPGLYAMVGAAACLGGVTRMT |
| | | | | | | VSLVVIMFELTGGLEYIVPLMAAAMTSKWVA |
| | | | | | | DALGRLEGIYDAHIRLNGYPFLEAKEEFAIIKTL |
| | | | | | | AMDVMKPRLRNDPLLTVLTQDSMTVEDVETII |
| | | | | | | SETTYSGFPVVVSRESQRLVGFVLRRDLHSLE |
| | | | | | | NARKKQDGVVSTSIIYFTEHSPPLPPYTPPTLK |
| | | | | | | LRNILDLSPTVTDLTPMEIVYDIFRKLGLRQC |
| | | | | | | LVTHNGRLLGIITKKDVLKHIAQMANQDPDSI |
| | | | | | | LFN |
| 739 | 2089 | A | 5892 | 2 | 916 | TLQLAASVPFFAISLISWWLPESARWLIINGKP |
| | | | | | | DQALQELRKVARINGHKEAKNLTIEVLMSSV |
| | | | | | | KEEVASAKEPRSVLDLFCVPVLRWRSCAMLV |
| | | | | | | VNFSLLISYYGLVFDLQSLGRDIFLLQALFGA |
| | | | | | | VDFLGRATTALLLSFLGRRTIQAGSQAMAGL |
| | | | | | | AILANMLVPQDLQTLRVVFAVLGKGCFGISL |
| | | | | | | TCLTIYKAELFPTPVRMTADGILHTVGRLGA |
| | | | | | | MMGPLILMSRQALPLLPPLLYGVISIASSLVVL |
| | | | | | | FFLPETQGLPLPDTIQDLESQKSTAAQGNRQE |
| | | | | | | AFTVESTSLLEIVALHGAL |
| 740 | 2090 | A | 5900 | 2 | 426 | RPIKTLGIGFHFSVDGVHFLTQREVQNLWKE |
| | | | | | | NLLILDTAKKHGYEVVDTFTITMGRYKEFLQG |
| | | | | | | KCGCHFHEVYKSKLSKEYNFIKMKRSRNHIM |
| | | | | | | GRYPSNQSKLQQGTVTNFRSPYHVRGPINQV |
| | | | | | | CSEILLSRMCANKRTM |
| 741 | 2091 | A | 5910 | 3 | 412 | RMPESTLLIICENGY1LEAPLPTIKQEEDDHDV |
| | | | | | | VSYEIKDMCIKCFHFSSVKSKILRLIEIEKRER |
| | | | | | | QRELKEKIREERRNKLAAEMGEDGEKEFQEE |
| | | | | | | EEEKEEEEEEEEPLPEIFIIPSTPSPILCGFYSEPG |
| | | | | | | KFWV |
| 742 | 2092 | A | 5936 | 1 | 482 | MGCRLLCCVVPCLLQAGPLDTAVSQTPKYLV |
| | | | | | | TQMGNDKSIKCEQNLGHDTMYWYKQDSKK |
| | | | | | | FLKIMFSYNNKELIINETVPNRFSPKSPDKAHL |
| | | | | | | NLHINSLELGDSAVYFCASSQDTALQSHCTPV |
| | | | | | | HKPPGSARKLQGSVCTCTQGSSLHSLMASDG |
| | | | | | | VPVC |
| 743 | 2093 | A | 5938 | 1 | 1566 | MNSFFGTPAASWCLLESDVSSALPDKEAGRER |
| | | | | | | RALSVQQRGGPAWSGSLEWSRQSAGDRRRL |
| | | | | | | GLSRQTAKSSWSRSRDRTCCCRRAWWILVPA |
| | | | | | | ADRARRERFIMNEKWDTNSSENWHPIWNVN |
| | | | | | | DTKHHLYSDINITYVNYYLHQPQVAAIFIISYF |
| | | | | | | LIFFLGMMGNTVVCFIVMITLHCHMHTVTNLFI |
| | | | | | | LNLAISDLLVGIFCNIPITLLDNILAGWPFGNTM |
| | | | | | | CKISGLVQGISVAASVFTLVAIAVDRFQCVVY |
| | | | | | | PFKPKLTIKTAFVIIMIIWVLAITIMSPSAVMLH |
| | | | | | | VQEEKYYRVRLNSQNKTSPVYWCREDWPNQ |
| | | | | | | EMRKIYTTVLFANIYLAPLSLIVIMYGRIGISLF |
| | | | | | | RAAVPHTGRKNQEQWHVVSRKKQKIIKMLLI |
| | | | | | | VALLFILSWLPLWTLMMLSDYADLSPNELQII |
| | | | | | | NIYIYPFAHWLAFGNSSVNPIIYGFFNENFRRG |
| | | | | | | FQEAFQLQLCQKRAKPMEAYALKAKSHVLIN |
| | | | | | | TSNQLVQESTFQNPHGETLLYRKSAEKPQQE |
| | | | | | | LVMEELKETTNSSEI |
| 744 | 2094 | A | 5966 | 149 | 327 | SHVCVSHYAGSSGCPAGAGAGAVALGISAVA |
| | | | | | | LYDYQGGRLGVARGAWYMEAPDIRQGDM |
| 745 | 2095 | A | 5970 | 413 | 856 | GAPHTDWAWAPTPMSGLGSGRGRQGTLASS |
| | | | | | | PLSLPLLLAGVTGILATELFDQMARPAACMV |
| | | | | | | CGALMWIMLILVGLGFPFIMEALSHFLYVPFL |
| | | | | | | GVCVCGAIYTGLFLPETKGKTFQEISKELHIRL |
| | | | | | | NFPRRAQGPTWRSLEVIQSTEL |
| 746 | 2096 | A | 5971 | 3 | 1343 | AQTARRIIGLELDTEGHRLFVAFSGCIVYLPLS |
| | | | | | | RCARHGACQRSCLASQDPYCGWHSSRGCVDI |
| | | | | | | RGSGGTDVDQAGNQESMEHGDCQDGATGSQ |
| | | | | | | SGPGDSAYGVRRDLPPASASRSVPIPLLLASV |
| | | | | | | AAAFALGASVSGLLVSCACRRAHRRRGKDIE |
| | | | | | | TPGLPRPLSLRSLARLHGGGPEPPPPSKDGDA |
| | | | | | | VQTPQLYTTFLPPPEGVPPPELACLPTPESTPE |
| | | | | | | LPVKHLRAAGDPWEWNQNRNNAKEGPGRSR |
| | | | | | | GGHAAGGPAPRVLVRPPPPGCPGQAVEVTTL |
| | | | | | | EELLRYLHGPQPPRKGAEPPAPLTSRALPPEP |
| | | | | | | APALLGGPSPRPHECASPLRLDVPPEGRCASA |
| | | | | | | PARPALSAPAPRLGVGGGRRLPFSGHRAPPAL |
| | | | | | | LTRVPSGGPSRYSGGPGKHLLYLGRPEGYRG |
| | | | | | | RALKRVDVEICPQLSLKPPLVGPSSRQAVPNG |
| | | | | | | GRFNF |
| 747 | 2097 | A | 5998 | 2 | 754 | DHASLPCSWNHRFDVETRHVFIGDHSGQVTI |
| | | | | | | LKLEQENCTLVTTFRGHTGGVTALCWDPVQ |
| | | | | | | RVLFSGSSDHSVIMWDTGGRKGTAIELQGHN |
| | | | | | | DRVQALSYAQHTRQLISCGGDGGIVVWNMD |
| | | | | | | VERQETPEWLDSDSCQKCDQPFFWNFKQMW |
| | | | | | | DSKKIGLRQHHCRKCGKAVCGKCSSKRSSIPL |
| | | | | | | MGFEFEVRVCDSCHEAITDEERAPTATFHDSK |
| | | | | | | INIVHVHFDATRGWLLTSGTDKVIKLWDMT |
| | | | | | | PVVS |
| 748 | 2098 | A | 6001 | 2 | 747 | AMVFGGVVPYVPQYRDIRRTQNADGFSTYV |
| | | | | | | CLVLLVANILRTLFWFGRRFESPLLWQSAIMIL |
| | | | | | | TMLLMLKLCTEVRVANELNARRRSFTAADS |
| | | | | | | KDEEVKVAPRRSFLDFDPHHFWQWSSFSDYV |
| | | | | | | QCVLAFTGVAGYITYLSIDSALFVETLGFLAV |
| | | | | | | LTEAMLGVPQLYRNHRHQSTEGMSIKMVLM |
| | | | | | | WTSGDAFKTAYFLLKGAPLQFSVCGLLQVLV |
| | | | | | | DLAILGQAYAFARIHPQKPAPHAVHPTGTKAL |
| 749 | 2099 | A | 6002 | 2 | 447 | GRPDRSELVRMHILEETFAEPSLQATQMKLK |
| | | | | | | RARLADDLNEKIAQRPGPMELVEKNILPVDSS |
| | | | | | | VKEAIIGVGKEDYPHTQGDFSFDEDSSDALSP |
| | | | | | | DQPASQESQGSAASPSEPKVSESPSPVTTNTP |
| | | | | | | AQFASVSPTVPEFLKTPPTAD |
| 750 | 2100 | A | 6004 | 2 | 427 | LLTQAMLVLPHRPQWFTPGPRLQAQGPCQEG |
| | | | | | | WRWELRLRNYVPEDEDLNKRRVPQAKPDAV |
| | | | | | | QEKVKEQLEAAKFEPVIEEVDLAKLAPRKPD |
| | | | | | | WDLKRDVAKKLEKLLKRTQRAIAELIRERLK |
| | | | | | | GQEDSLDSAVDAATEHKTC |
| 751 | 2101 | A | 6007 | 33 | 1280 | TDQAKVDNQPEKLVRSAEDVSTVPTQPDNPF |
| | | | | | | SHPDKLKRMSKSVPAFLQDESDDRETDTASE |
| | | | | | | SSYQLSRHKKSPSSLTNLSSSSGMTSLSSVSGS |
| | | | | | | VMSVYSGDFGNLEVKGNIQFAIEYVESLKEL |
| | | | | | | HVFVAQCKDLAAADVKKQRSDPYVKAYLLP |
| | | | | | | DKGKMGKKKTLVVKKTLNPVYNEILRYKIEK |
| | | | | | | QILKTQKLNLSIWHRDTFKRNSFLGEVELDLE |
| | | | | | | TWDWDNKQNKQLRWYPLKRKTAPVALEAE |
| | | | | | | NRGEMKLALQYVPEPVPGKKLPTTGEVHIWV |
| | | | | | | KECLDLPLLRGSHLNSFVKCTILPDTSRKSRQ |
| | | | | | | KTRAVGKITNPIFNHTMVYDGFRPEDLMEAC |
| | | | | | | VELTVWDHYKLTNQFLGGLPIGFGTGKSYGT |
| | | | | | | EVDWMDSTSEEVALWEKMVNSPNTWIEATL |
| | | | | | | PLRMLLIAKISK |
| 752 | 2102 | A | 6028 | 108 | 1283 | KEIPSPFELISVKPLCLLLGVTCSQSMAFEELL |
| | | | | | | SQVGGLGRFQMLHLVFILPSLMLLIPHILLENF |
| | | | | | | AAAIPGHRCWVHMLDNNTGSGNETGILSEDA |
| | | | | | | LLRISIPLDSNLRPEKCRRFVHPQWQLLIILNG |
| | | | | | | TIHSTSEADTEPCVDGWVYDQSYFPSTIVTKW |
| | | | | | | DLVCDYQSLKSWQFLLLTGMLVGGIIGGHV |
| | | | | | | SDRFGRRFILRWGLLQLAITDTCAAFAPTFPV |
| | | | | | | YCVLRFLAGFSSMHISNNSLPITEWIRPNSKAL |
| | | | | | | VVILSSGALNIGQIILGGLAYVFRDWQTLHVV |
| | | | | | | ASVPFFVFFLLSRWLVESARWLTITNKLDEGL |
| | | | | | | KALRKVARTNGIKNAEETLNIEVVRSTMQEE |
| | | | | | | LDAAQTKTTVWDLFRNPSMRKRICILVFLRK |
| | | | | | | KNLKEKA |
| 753 | 2103 | A | 6043 | 1 | 1470 | DSFESILRLIFEIHHSGEKGDIVVFLACEQDIEK |
| | | | | | | VCETVYQGSNLNPDLGELVVVPLYPKEKCSL |
| | | | | | | FKPLDETEKRGQVYQRRVVLTTSSGEFLIWSN |
| | | | | | | SVRFVLDVGVERRKVYNPRIRANSLVMQPISQ |
| | | | | | | SQAEIRKQILGSSSSGKFFCLYTEEFASKDMTP |
| | | | | | | LKPAEMQEANLTSMVLFMKR1DIAGLGHCDF |
| | | | | | | MNRPAPESLMQALEDLDYLAALDNDGNLSE |
| | | | | | | FGIIMSEFPLDPQLSKSILASCEFDCVDEVLTIA |
| | | | | | | AMVTAPNCFSHVPHGAEEAALTCWKTFLHPE |
| | | | | | | GDHFTLISIYKAYQDTTLNSSSEYCVEKWCRD |
| | | | | | | YFLNCSALRMADVIRAELLEIIKRIELPYAEPA |
| | | | | | | FGSKENTLNIKKALLSGYFMQIARDVDGSGN |
| | | | | | | YLMLTHKQVAQLHPLSGYSITKKMPEWVLF |
| | | | | | | HKFSISENNYIRITSELSPELFMQLVPQYYFSNL |
| | | | | | | PPSESKDILQQVVDHLSPVSTMNKEQQMCET |
| | | | | | | CPETEQRCTLQ |
| 754 | 2104 | A | 6055 | 2 | 394 | YYALHHWPFPDLLCQTTGAIFQMNMYGSCIF |
| | | | | | | LMLINVDRYAAIVHPLRLRHLRRPRVARLLC |
| | | | | | | LGVWALILVFAVPAARVHRPSRCRYRDLEVR |
| | | | | | | LCFESFSDELWKGRLLPLVLLAEALGFLLPLA |
| | | | | | | AVVYSS |
| 755 | 2105 | A | 6059 | 3 | 1795 | LGLGSGTLLSVSEYKKKYREHVLQLHARVKE |
| | | | | | | RNARSVKITKRFTKLLIAPESAAPEEALGPAEE |
| | | | | | | PEPGRARRSDTHTFNRLFRRDEEGRRPLTVVL |
| | | | | | | QGPAGIGKTMAAKKILYDWAAGKLYQGQVD |
| | | | | | | FAFFMPCGELLERPGTRSLADLILDQCPDRGA |
| | | | | | | PVPQMLAQPQRLLFILDGADELPALGGPEAAP |
| | | | | | | CTDPFEAASGARVLGGLLSKALLPTALLLVTT |
| | | | | | | RAAAPGRLQGRLCSPQCAEVRGPSDKDKKK |
| | | | | | | YFYKFFRDERRAERAYRFVKENETLFALCFV |
| | | | | | | PFVCWIVCTVLRQQLELGRDLSRTSKTITSVY |
| | | | | | | LLFITSVLSSAPVADGPRLQGDLRNLCRLARE |
| | | | | | | GVLGRRAQFAEKELEQLELRGSKVQTLFLSK |
| | | | | | | KELPGVLETEVTYQFIDQSFQEFLAALSYLLE |
| | | | | | | DGGVPRTAAGGVGTLLRGDAQPHSHLVLTT |
| | | | | | | RFLFGLLSAERMRDIERHFGCMVSERVKQEA |
| | | | | | | LRWVQGQGQGCPGVAPEVTEGAKGLEDTEE |
| | | | | | | PEEEEEGEEPNYPLELLYCLYETQEDAFVRQA |
| | | | | | | LCRFPELALQRVRFCRMDVAVLSYCVRCCPA |
| | | | | | | GQALRLISCRLVAAQEKKKKSLGKRLQASLQ |
| | | | | | | GG |
| 756 | 2106 | A | 6060 | 12 | 436 | SGRPTRPAKPTGQGMGRFMLTLVCQGSIIVIMS |
| | | | | | | ARDLIMNNLTELQPGLFHHLRFLEELRLSGNH |
| | | | | | | LSHIPGQAFSGLYSLKILMLHNNQLGGLPAQA |
| | | | | | | LWELPSLQSLRLDANLISLVPERSFEGLSSLRH |
| | | | | | | LWLDDNALTETPS |
| 757 | 2107 | A | 6063 | 54 | 419 | ITPLGLGAADMCAFPWLLLLLLLQEGSQRRL |
| | | | | | | WRWCGSEEVVAVLQESISLPLELPPDEEVENII |
| | | | | | | WSSHKSLATVVPGKEGHPATIMVTNPHYQG |
| | | | | | | QILTMLLRSLQQPSASWPRDCSSSCSW |
| 758 | 2108 | A | 6066 | 125 | 438 | IGISCPATIFVPMFSHSLIGIGEEYQLPYYNMV |
| | | | | | | PSDPSYEDMREVVCVKRLRPIYSNRWNSDEC |
| | | | | | | LRAVLKLMSECWAHNPASRLTALRIKKTLAK |
| | | | | | | MVESQDVKI |
| 759 | 2109 | A | 6072 | 3 | 650 | PGRRFRPAALEERAMEKLREKVPFQNRGKGT |
| | | | | | | LSSIIPNNSDTRKATETTSLSSKPEYVNPDFRW |
| | | | | | | SKDPSSKSGNLLETSEVGWTSNPEELDPIRIA |
| | | | | | | LLGKSGLSCQVGSATSHPVSCQEPTDEDQRISP |
| | | | | | | KDKSTAGREFSGQVSHQTTSENQCTPIPSSTV |
| | | | | | | HSSVADMQNMPAAVHALLTQPSLSAAPFAQ |
| | | | | | | RYLGTLPSTGSITLPQCHAGNATVW |
| 760 | 2110 | A | 6077 | 3 | 730 | PLRLTLMEEVLLLGLKDREGYTSFWNDCISSG |
| | | | | | | LRGCMLIELPLRGRLQLEACGMRRKSLLTRK |
| | | | | | | VICKSDAPTGDVLLDEALKHVKETQPPETVQ |
| | | | | | | NWIELLSGETWNPLKLHYQLRNVRERLAKNL |
| | | | | | | VEKGVLTTEKQNFLLFDMTTHPLTNNNTKQR |
| | | | | | | LIKKVQEAVLDKWVNDPHRMDRRLLALIYL |
| | | | | | | AHASDVLENAFAPLLDEQYDLATKRVRQLLD |
| | | | | | | LDPEVECLKANTNEVLWAVVAAFTK |
| 761 | 2111 | A | 6078 | 833 | 390 | IVSFHLSGFKKFVRPFSFLSVHGLQVDEYHSV |
| | | | | | | HQKLSADMADHSNL1RSLLVGAEDARLMRD |
| | | | | | | MKTMKSRYMELYDLNRDLLNGYKIRWNNH |
| | | | | | | TELLGNLKAVNQAIQRAGRLRVGKPKNQVIT |
| | | | | | | ACRDAIIRSNNTNTLFKIMRVGTASS |
| 762 | 2112 | A | 6079 | 2 | 2686 | KKAITCGEKEKQDLIKSLAMLKDGFRTDRGS |
| | | | | | | HSDLWSSSSSLESSSFPLPKQYLDVSSQTDISG |
| | | | | | | SFQINSNNQLAEKVRLRLRYEEAKRRIANLKI |
| | | | | | | QLAKLDSEAWPGVLDSERDRLILINEKEELLK |
| | | | | | | EMRPISPRKWTQGEVEQLEMARKRLEKDLQ |
| | | | | | | AAIWTQSKALTERLKLNSKRNQLVRELEEAT |
| | | | | | | RQVATLHSQLKSLSSSMQSLSSGSSPGSLTSSR |
| | | | | | | GSLVASSLDSSTSASFTDLYYDPFEQLDSELQ |
| | | | | | | SKVEFLLLEGATGFRPSGCITIIHEDEVAKTQ |
| | | | | | | KAEGGGRLQALRSLSGTPKSMTSLSPRSSLSS |
| | | | | | | PSPPCSPLMADPLLAGDAPLNSLEFEDPELSA |
| | | | | | | TLCELSLGNSAQERYRLEEPGTEGKQLGQAV |
| | | | | | | NTAQGCGLKVACVSAAVSDESVAGDSGVYE |
| | | | | | | ASVQRLGASEAAAFDSDESEAVGATRIQIALK |
| | | | | | | YDEKNKQFAILIIQLSNLSALLQQQDQKVNIR |
| | | | | | | VAVLPCSESTTCLFRTRPLDASDTLVFNEVPW |
| | | | | | | VSMSYPALHQKTLRVDVCTTDRSHLEECLGG |
| | | | | | | AQISLAEVCRSGERSTRWYNLLSYKYLKKQS |
| | | | | | | RELKPVGVMAPASGPASTDAVSALLEQTAVE |
| | | | | | | LEKRQEGRSSTQTLEDSWRYEETSENEAVAE |
| | | | | | | EEEEEVEEEEGEEDVFTEKASPDMDGYPALK |
| | | | | | | VDKETNTETPAPSPTVVRPKDRRVGTPSQGPF |
| | | | | | | LRGSTILRSKTFSPGPQSQYVCRLNRSDSDSST |
| | | | | | | LSKKPPFVRNSLERRSVRMKRPSPPPQPSSVK |
| | | | | | | SLRSERLTRTSLDLELDLQATRTWHSQLTQEIS |
| | | | | | | VLKELKEQLEQAKSHGEKELPQWLREDERFR |
| | | | | | | LLLRMLEKRMDRAEIIMGELQTDKMMRAAA |
| | | | | | | KDVHRLRGQSCKEPPEVQSFREKMAFFTRPR |
| | | | | | | MNIPALSADDV |
| 763 | 2113 | A | 6082 | 3 | 1558 | PHPIRFSKLCVSFNNQEYNQFCVIEEASKANE |
| | | | | | | VLENLTQGKMCLVPGKTRKLLFKFVAKTED |
| | | | | | | VGKKIEITSVDLALGNETGRCVVTINWQGGGG |
| | | | | | | DAASSQEALQAARSFKRRPKLPDNEVHWGSII |
| | | | | | | IQASTMIISRVPNISVHLLHEPPALTNEMYCLV |
| | | | | | | VTVQSHEKTQIRDVKLTAGLKPGQDANLTQK |
| | | | | | | THVTLHGTELCDESYPALLTDIPVGDLHPGEQ |
| | | | | | | LEKMLYVRCGTVGSRMFLVYVSYLINTTVEE |
| | | | | | | KEIVCKCHKDETVTIETVFPFDVAVKFVSTKF |
| | | | | | | EHLERVYADIPFLLMTDLLSASPWALTWSSE |
| | | | | | | LHLAPSMTTVDQLESQVDNVILQTGESASECF |
| | | | | | | CLQCPSLGNLEGGVATGHYIISWKRTSAMENI |
| | | | | | | PIITTVITLPHVIVENIPLHVNADLPSFGRVRES |
| | | | | | | LPVKYHLQNKTDLVQDVEISVEPSDAFMFSG |
| | | | | | | LKQIRLRILPGTEQEMLYNFYPLMAGYQQLPS |
| | | | | | | LN1NLLRFPNFTNQLLRRFIPTSIFVKPQGRLM |
| | | | | | | DDTSIAAA |
| 764 | 2114 | A | 6093 | 1 | 1422 | AAADLANSNAGAAVGRKAGPRSPPSAPAPAP |
| | | | | | | PPPAPAPPTLGNNHQESPGWRCCRPTLRERN |
| | | | | | | AIMFNNELMADVHFVVGPPGATRTVPALKY |
| | | | | | | VLAVGSSVFYAMFYGDLAEVKSEIHIPDVEPA |
| | | | | | | AFLLLLKYMYSDEIDLEADTVLATLYAAKkYI |
| | | | | | | VPALAKACVNFLETSLEAKNACVLLSQSRLF |
| | | | | | | EEPELTQRCWEVIDAQAEMALRSEGFCEIDR |
| | | | | | | QTLEIIVTREALNTKEAVVFEAVLNWAEAEC |
| | | | | | | KRQGLPITPRNKRHVLGRALYLVRIPTMTLEE |
| | | | | | | FANGAAQSDILTLEETHSIFLWYTATNKPRLD |
| | | | | | | FPLTKRKGLAPQRCHRFQSSAYRSNQWRYRG |
| | | | | | | RCDSIQFAVDRRVFIAGLGLYGSSSGKAEYSV |
| | | | | | | KIELKRLGVVLAQNLTKFMSDGSSNTFPVWF |
| | | | | | | EHPVQVEQDTFYTASAVLDGSELSYPGQEGM |
| | | | | | | TEVQCGKVAFQFQCSSDSTNGTGVQGGQLPE |
| 765 | 2115 | A | 6099 | 1 | 1150 | SGFTHYAIYDFIVKGSCFCNVHADQCIPVHGF |
| | | | | | | RPVKAPGTFHMVHGKCMCKHNTAGSHCQH |
| | | | | | | CAPLYNDRPWEAADGKTGAPNECRTCKCNG |
| | | | | | | HADTCHFDVNVWEASGNRSGGVCDDCQHN |
| | | | | | | TEGQYCQRCKPGFYRDLRRPFSAPDACKPCS |
| | | | | | | CHPVGSAVLPANSVTFCDPSNGDCPCKPGVA |
| | | | | | | GRRCDRCMVGYWGFGDYGCRPCDCAGSCD |
| | | | | | | PITGDCISSHTDIDWYHEVPDFRPVHNKSEPP |
| | | | | | | WEWEDAQGFSALLHSGKCECKEQTLGNAKA |
| | | | | | | FCGMKYSYVLKIICILSAHDKGTHVEVNYKIK |
| | | | | | | KVLKSTLKIFRGKRTLYPESWTDRGCTCPIL |
| | | | | | | NPGLEYLVAGHEDIRTGKLIVNMKSFVQHWK |
| | | | | | | PSLGRKVMDILKRECK |
| 766 | 2116 | A | 6103 | 2 | 384 | MTAAATATVLKEGVLEKRSGGLLQLWKRKR |
| | | | | | | CVLTERGLQLFEAKGTGGRPKELSFARIKAVE |
| | | | | | | CVESTGRHIYFTLVTEGGGEIDFRCPLEDPGW |
| | | | | | | NAQITLGLVKFKNQQAIQTVRARQSLGTGTL |
| | | | | | | VS |
| 767 | 2117 | A | 6106 | 1 | 542 | SGSSHASDGSGFQELRICSEDQTPLIAGMCSLP |
| | | | | | | MARYYIIKYADQKALYTRDGQLLVGDPVAD |
| | | | | | | NCCAEKICTLPNRGLDRTKVPIFLGIQGGSRC |
| | | | | | | LACVETEEGPSLQLEDVNIEELYKGGEEATRF |
| | | | | | | TFFQSSSGSAFRLEAAAWPGWFLCGPAEPQQ |
| | | | | | | PVQLTKESEPSARTKFYFEQSW |
| 768 | 2118 | A | 6109 | 3 | 292 | FILQAVLQLSSQEARYKAFGTCVSHIGAILAF |
| | | | | | | YTPSVISSVMHRVARCAAPHVHILLANFYLLF |
| | | | | | | PPMVNPIIYGVKTKQIRDSLGSIPEKGCVNRE |
| 769 | 2119 | A | 6110 | 1 | 711 | RIAEPSCSNGVASTKSKQNHSKYPAPSSSSSSS |
| | | | | | | SSSSSSSPSSVNYSESNSTDSTKSQHHSSTSNQ |
| | | | | | | ETSDSEMEMEAEHYPNGVLGSMSTRIVNGAY |
| | | | | | | KHEDLQTDESSMDDRHPRRQLCGGNQAATE |
| | | | | | | RIILFGRELQALSEQLGREYGKNLAHTEMLQD |
| | | | | | | AFSLLAYSDPWSCPVGQQLDPIQREPVCAAL |
| | | | | | | NSAILESQNLPKQPPLMLALGQASECLRLMA |
| | | | | | | RAGLGSCSFARVDDYLH |
| 770 | 2120 | A | 6125 | 2 | 570 | YFGLNLHVQHLGNNVFLLQTLFGAVILLANC |
| | | | | | | VAPWALKYMNRRASQMLLMFLLAICLLAHF |
| | | | | | | VPQEMQMLREVLATLGLGASALANTLAFAH |
| | | | | | | GNEVIPTLIIRARAMGINATFANIAGALAPLMM |
| | | | | | | ILSVYSPPLPWILYGVFPFISGFAFLLLPETRNK |
| | | | | | | PLFDTIQDEKNERKDPREPKQEDPRVEVTQF |
| 771 | 2121 | A | 6126 | 909 | 353 | RSFVLDTASAICNYNAHYKNHPKYWCRGYF |
| | | | | | | RDYCNILAFSPNSTNHVALRDTGNQLIVTMSC |
| | | | | | | LTKEDTGWYWCGIQRDFARDDMDFTELIVT |
| | | | | | | DDKGTLANDFWSGKDLSGNKTRSCKAPKVV |
| | | | | | | RKADRSRTSILIICILITGLGIISVISHLTKRRRS |
| | | | | | | QRNRRVGNTLKPFSRVLTPKEMAPTEQM |
| 772 | 2122 | A | 6148 | 7 | 810 | FVLGILALSHTISPFMNKFFPASFPNRQYQLLF |
| | | | | | | TQGSGENKEEIINYEFDTKDLVCLGLSSIVGV |
| | | | | | | WYLLRKHWIANNLFGLAFSLNGVELLHLNN |
| | | | | | | VSTGCILLGGLFIYDVFWVFGTNVMVTVAKS |
| | | | | | | FEAPIKLVFPQDLLEKGLEANNFAMLGLGDV |
| | | | | | | VIPGIFIALLLRFDISLKKNTHTYFYTSFAAYIF |
| | | | | | | GLGLTIFIMHIFKHAQPALLYLVPACIGFPVLV |
| | | | | | | ALAKGEVTEMFSYEESNPKDPAAVTESKEGT |
| | | | | | | EASASKGLEKKEK |
| 773 | 2123 | A | 6161 | 3 | 1088 | CQPMLVTRKNHPKLLLRRTESVAEKMLTNW |
| | | | | | | FTFLLYKFLKESAGEPLFMLYCAIKHQMEKG |
| | | | | | | PIDAITGEARYSLSEDKLIRHLIDYKTLTLNCV |
| | | | | | | NPENENALPEVPVKGLDCDTGTQAKEKLLDA |
| | | | | | | AYKGVPYSQRPKAADMDLEWRQQRMAPIIL |
| | | | | | | QDEDVTTKIDNDWKRLNTLAHYQVTDGSSV |
| | | | | | | ALVPKQTSAYNISNSSTFTKSLSRYESMLRTA |
| | | | | | | SSPDSLRSRTPMITPDLESGTKLWHLVKNHDH |
| | | | | | | LDQREGDRGSKMVSEIYLTRLLATKGTLQKF |
| | | | | | | VDDLFETIFSTAHRGSALPLAIKYMFDFLDEQ |
| | | | | | | ADKHQTHDADVRHTWKSNCLPLRFWVNVIK |
| | | | | | | NPQFVFDIHKNSITDACLSW |
| 774 | 2124 | A | 6163 | 860 | 125 | KTAVKKRNLNPVPNETLRYSVPQAELQGRVL |
| | | | | | | SLSVWHRESLGRNIFLGEVEVPLDTWDWQSE |
| | | | | | | PTWLPLQPRVPPSPDDLPSRGLLALSLKYVPA |
| | | | | | | GSEGAGLPPSGELHFWVKEARDLLPLRAGSL |
| | | | | | | DTYVQCFVLPDDSRASRQRTRVVRRSLSPVF |
| | | | | | | NHTMVYDGFGPADLRQACAELSLWDHGALA |
| | | | | | | NRQLGGTRISLGTGSSYGLQVPWMDSTPEEK |
| | | | | | | QLWQALLEQPCEWVDGLLPLRTNLAPRT |
| 775 | 2125 | A | 6191 | 2 | 392 | ARGIGSLGRDHSGSGGGTGMAGAWVRKAAD |
| | | | | | | YVRSKDFEDYLMSTHFWGPVANWGLPIAAIT |
| | | | | | | DMK\KSPEIISRRMTFAL*CYSLTFVRFAHYVQ |
| | | | | | | \PWNWLMLGCHTAVDFDQLISSMIPCISHQMT |
| | | | | | | ASASAL |
| 776 | 2126 | A | 6217 | 1 | 827 | FRGYWGVREAFTDASWSGGLGPGKPGMKIT |
| | | | | | | RQKHAKKIILGFPRNNFGVREPYQILLDGTFC |
| | | | | | | QAALRGRIQLREQLPRYLMGETQLCTTRCVL |
| | | | | | | KELETLGKDLYGAKLIAQKCQVRNCPHFKNA |
| | | | | | | VSGSECLLSMVEEGNPHHYFVATQDQNLSVK |
| | | | | | | VKKKPGVPLMFIIQNTMVLDKPSPKTIAFVKA |
| | | | | | | VESG\RLSQCMRKKVSNISKRNRV**KTLNRG |
| | | | | | | RRKKRKKISGPNPLSCLKKKKKAPDTQSSASE |
| | | | | | | KKRKRKRIRNRSNPKVLSEKQNAEGE |
| 777 | 2127 | A | 6236 | 1038 | 1402 | YYQISSLPSIVGNGLFLWLLICIFLAKQGGSRL* |
| | | | | | | FQPFGRPRGGGHLRSGVLGQPGQHGETP/SFF |
| | | | | | | YNSKISPALWGPPVIPSALGGEAGKSL*PRRQ |
| | | | | | | RFQRGGIAPLPSRVRGRAKLFLKKK |
| 778 | 2128 | A | 6237 | 422 | 913 | ASFFHHHRGAFLLLLAIPGS*GQDQSLIHWSN |
| | | | | | | AVSNAD\LLDLK\N*LDH\LEEKMPL\EVKVVP |
| | | | | | | PQVL\SEPN*RSGGCFSAPSFEVPPWTGEVKP/ |
| | | | | | | SPQRDGGALG\QGPLGIPSDSILALLKKQT*RA |
| | | | | | | LLNWPLGSLRRSSCFGGQDGQDLKPRSGLGC |
| | | | | | | NSFRYRR |
| 779 | 2129 | A | 6249 | 420 | 36 | ARAPSPSFSVRDVELSDPARERGEMPVAVGP |
| | | | | | | YGQSQPSCFDRVKMGFVMGCAVGMAAGAL |
| | | | | | | FGTFSCLSSILVSSSG/SGMRGRELMGGIGKTM |
| | | | | | | MQSGGTFGTFMAIGMGIRC*PWLPITSVPSH |
| | | | | | | QSQPMY |
| 780 | 2130 | A | 6263 | 415 | 1380 | RIMRMCDRGIQMLITTVGAFAAPSLMTIAVG |
| | | | | | | TDYWLYSRGVCRTKSTSDNETSRKNEEVMT |
| | | | | | | HSGLWRTCCLEGAFRGVCKKIDHFPEDADYE |
| | | | | | | QDTAEYLLRAVRASSVFPILSVTLLFFGGLCV |
| | | | | | | AASEFHRSRHNVILSAGIFFVSAGLSNIIGIIVYI |
| | | | | | | S\ANAGRTPGQR\DSKKSYSYGWSF/YFSGAFS |
| | | | | | | FIIGRIHC*GVGLPWHIYIEKHQQLRAKSHSEF |
| | | | | | | LKKSTFARLPPYRYRFRRRSSSRSTEPRSRDLS |
| | | | | | | PISKGPHTIPSTDISMFTLSRDPSKITMGTLLNS |
| | | | | | | DRDIIAFLQFHNSTPKEFKESLHNNPANRRTT |
| | | | | | | PV |
| 781 | 2131 | A | 6274 | 832 | 318 | RIIKVKDLKQTLAIKTAYPRCKGLVEMDQIFH |
| | | | | | | LQVKQKQLACLCTWQARDPDCPPSTKVVL/L |
| | | | | | | VGPGMGCMVALFQDSIAWSNKSMPSSLSAIS |
| | | | | | | QSPCQVQAPEGPSSFHLPTLS1TICLSWQGGD |
| | | | | | | LEFLGDLKGCSELKNFQELITQSALVHPKADV |
| | | | | | | WWYGGRPLLGTLPSN |
| 782 | 2132 | A | 6281 | 1324 | 393 | WISLPSSLLCRKNGSSAEDDRR\GEPSAEEAEG |
| | | | | | | EREDWGIQSA*SVGAVSKVPSARF*RTYPS\E |
| | | | | | | DEEEVTHQKSSSSDSNSEEHRKKKTSRSRNK |
| | | | | | | KKRKNKSSKRKHRKYSDSDSNSESDTNSDSD |
| | | | | | | DDKKRVKAKKKKKKKKHKTKKKKNKKTKK |
| | | | | | | ESSDSSCKDSEEDLSEATWMEQPNVADTMDL |
| | | | | | | IGPEAPIIHTSQDEKPLKYGHALLPGEGAAMA |
| | | | | | | EYVKAGKRIPRRGEIGLTSEEIGSFECSGYVM |
| | | | | | | SGSRHRRMEAVRLRKENQIYSADEKRALASF |
| | | | | | | NQEERRKRESKILASFREMVHKKTKGKDDK |
| 783 | 2133 | A | 6305 | 201 | 1032 | WDDYPQGALRREEAAEGLHFLGPPGRVRGQ |
| | | | | | | LRGITGPAWYCHSPSHSLLSAFCHLPTPSRCP |
| | | | | | | AMARPPVPGSVVVPNWHES/RRGQGVPGLHS |
| | | | | | | AQEPPAGVWAA*AASAAAA\LSIDTASYKIFV |
| | | | | | | SGKSGVGKTALVAKLAGLEVPVVHHETTGIQ |
| | | | | | | TTVVFWPAKLQASSRVVMFRFEFWDCGESA |
| | | | | | | LKKFDHMLLACMENTDAFLFLFSFTDRASFE |
| | | | | | | DLPGQLARIAGEAPGVVRMVIGSICFDQYMHT |
| | | | | | | DVPERDLTAFRQAWELPLLRVKSVPGRRLG |
| 784 | 2134 | A | 6308 | 86 | 96 | GSSPDPASLITMKNQDKKNGAAKQSNPKSSP |
| | | | | | | GQPEAGPEGAQERIPSQAAPAVEAEGPGSSQA |
| | | | | | | PRKPEGAQARTAQSGALRDVSEELSRQLEDIL |
| | | | | | | STYCVDNNQGGPGEDGAQGEPAEPEDAEKSR |
| | | | | | | TYVARNGEPEPTPVVNGEKEPSKGDPNTEEIR |
| | | | | | | QSDEVGDRDHRRPQEKKKAKGLGKEITLLM |
| | | | | | | QTLNTLSTPEEKLAALCKKYAELLEEHRNSQ |
| | | | | | | KQMKLLQKKQSQLVQEKDHLLRGEHSKAVLA |
| | | | | | | RSKLESLCRELQRHNRSLKEEGVQRAREEEE |
| | | | | | | KRKEVTSHFQVTLNDIQLQMEQHNERNSKLR |
| | | | | | | QENMELAERLKKUEQYELREEHIDKVFKHK |
| | | | | | | DLQQQLVDAKLQQAQEMLKEAEERHQREKD |
| | | | | | | FLLKEAVESQRMCELMKQQETHLKQQLALY |
| | | | | | | TEKFEEFQNTLSKSSEVFITFKQEMEKMTKKI |
| | | | | | | KKLEKETTMYRSRWESSNKALLEMAEEKTV |
| | | | | | | RDKELEGLQVKIQRLEKLCRALQT/GAQ*PVR |
| | | | | | | GQRWGSHRTSAVRIFS |
| 785 | 2135 | A | 6319 | 1493 | 889 | SPQGPLLRSVSPVSAGASSVTPGGAQPGVTIT |
| | | | | | | PPSLVAVAPAPGSAAGPAAGWQ*HAGCRIWIT |
| | | | | | | KLPWSWGMRPMKIFFSEEYRSISTRISHDAL* |
| | | | | | | EKCTQPAKPLSMIR\TGSSVSPG/PLVKWNWT |
| | | | | | | RREFRNSGTRVVSSCCGMSCMYSFLGHCSV/S |
| | | | | | | QDLPLVHVDVGWQPPLGPTVGLRPGLLPLHD |
| | | | | | | TTPCQKLVVDDLDWA |
| 786 | 2136 | A | 6320 | 551 | 135 | RWLPVAECDSSCVGCTGEGPGNCKECISGYA |
| | | | | | | REHGQCADVDECSLAEKTCVRKNENCYNTP |
| | | | | | | GSYVCVCPDGFEETIRRCLCAAGRG*SHRRRK |
| | | | | | | PDTAALPRRPVMCRTYPLNYSEGCPVENVAL |
| | | | | | | RMPSPAVDSGGERLPAL |
| 787 | 2137 | A | 6330 | 1693 | 227 | DYVLTAELHRQRSPGVSFGLSVFNLMNALMG |
| | | | | | | SGILGLAYVMANTGVFGFSFLLLTVALLASYS |
| | | | | | | VHLLLSMCIQTAYLGP*TNYFMVLPAH*LTCL |
| | | | | | | PLIEFLQSL*NSL\*AVTSYEDLGLFAFGLPGKL |
| | | | | | | VVAGTLIIQNIGAMSSYLLIIKTELPAAIAEFLT |
| | | | | | | GDYSRYWYLDGQTLLIHCVGIVFPLALLPKIG |
| | | | | | | FLGYTSSLSFFFMMFFALVVIIKKWSIPCPLTL |
| | | | | | | NYVEKGFQISNVTDDCKPKLFHFSKESAYALP |
| | | | | | | TMAFSFLCHTSILPIYCELQSPSKKRMQNVTN |
| | | | | | | TAIALSFLIYFISALPGYLTFYD/GTTKAQRGE |
| | | | | | | VTCHRIKDKVESELLKC***IP*SHDVVVM1W |
| | | | | | | KLCILFAVLL\TVPLIHFPARKAVTMMFFSNFP |
| | | | | | | FSWIRHFLITLALNIIIVLLAIYVPDIRNVFGVV |
| | | | | | | GASTSTCLIFIFPGLFYLKLSREDFLSWKKLGV |
| | | | | | | GCFC/LLSFKTSILRNSLSVYLILPASRKSIYFKI |
| 788 | 2138 | 77 | 6351 | 1 | 6622 | PRSLCFSLWAEAAVLADGGLRRRRRLLRGTM |
| | | | | | | SASFVPNGASLEDCHCNLFCLADLTGIKWKK |
| | | | | | | YVWQGPTSAPILFPVTEEDPILSSFSRCLKADV |
| | | | | | | LG/VWRRDQRFERRE\L*IFWGGEDP\VLLTLF |
| | | | | | | TMTYQKKKMECGRMDFPMNAVLCFSKAVH |
| | | | | | | NLLERCLMNRNFVRIGKWFVKPYEKDEKPIN |
| | | | | | | KSEHLSCSFTFFLHGDSNVCTSVEINQHQPVY |
| | | | | | | LLSEEHITLAQQSNSPFQVILCPFGLNGTLTGQ |
| | | | | | | AFKMSDSATKKLIGEWKQFYPISCCLKEMSE |
| | | | | | | EKQEDMDWEDDSLAAVEVLVAGVRMIYPAC |
| | | | | | | FVLVPQSDIPTPSPVGSTHLCSSSCLGVHQVPAS |
| | | | | | | TRDPAMSSVTLTPPTSPEEVQTVDPQSVQKW |
| | | | | | | VKFSSVSDGFNSDSTSHHGGKIPRKLANHVV |
| | | | | | | DRVWQECNMNRAQNKRKYSASSGGLCEEAT |
| | | | | | | AAKVASWDFVEATQRTNCSCLRLHKNLKSRN |
| | | | | | | AGQQGQAPSLGQQQQILPKHKTNEKQEKSEK |
| | | | | | | PQKRPLTPFHHRVSVSDDVGMD\ADS\ASQRL |
| | | | | | | V\ISAP\DSQWRFSNIR\TNDVAK\TPQMHGTE |
| | | | | | | MANSPQPPPLSP\HPCDVVDEGVTKTPSTPQS |
| | | | | | | QHFYQMPTPDPLVPSKPMEDRIDSLSQSFPPQ |
| | | | | | | YQEAVEPTVYVGTAVNLEEDEANIAWKYYK |
| | | | | | | FPKKKDVEFLPPQLPSDKFICDDPVGPFGQESV |
| | | | | | | TSVTELMVQCKKPLKVSDELVQQYQIKNQCL |
| | | | | | | SAIASDAEQEPKIDPYAFVEGDEEFLFPDKKD |
| | | | | | | RQNSEEEAGKKHKVEDGTSSVTVLSHEEDA |
| | | | | | | MSLFSPSIKQDAPRPTSHARPPSTSLIYDSDLA |
| | | | | | | VSYTDLDNLFNSDEDELTPGSKRSANGSDDK |
| | | | | | | ASCKESKTGNLDPLSCISTADLHKMYPTPPSL |
| | | | | | | EQHIMGFSPMNMNNKEYGSMDTFPGGTVLE |
| | | | | | | GNSSSIGAQFKIEVDEGFCSPKPSEIKDFSYVY |
| | | | | | | KPENCQILVGCSMFAPLKTLPSQYLPLIKLPEE |
| | | | | | | CIYRQSWTVGKLELLSSGPSMPFIKEGDGSNM |
| | | | | | | DQEYGTAYTPQTHTSCGMPPSSAPPSNSGAGI |
| | | | | | | LPSPSTPRFPTPRTPRTPRTPRGAGGPASAQGS |
| | | | | | | VKYENSDLYSPASTPSTCRPLNSVEPATVPSIP |
| | | | | | | EAHSLYVNLILSESVMNLFKDCNSDSCCICVC |
| | | | | | | NMNIKGADVGVYIPDPTQEAQYRCTCGFSAV |
| | | | | | | MNRKFGNNSGLPFEDELDIIGRNTDCGKEAE |
| | | | | | | KRFEALRATSAEHVNGGLKESEKLSDDLILLL |
| | | | | | | QDQCTNLFSPFGAADQDPFPKSGVISNWVRV |
| | | | | | | EERDCCNDCYLALEHGRQFMDNMSGGKVDE |
| | | | | | | ALVKSSCLHPWSKRNDVSMQCSQDILRMLLS |
| | | | | | | LQPVLQDAIQKKRTVRPWGVQGPLTWQQFLI |
| | | | | | | KMAGRGSYGTDESPEPLPIPTPLLGYDYDYLV |
| | | | | | | LSPFALPYWERLMLEPYGSQRDIAYVVLCPE |
| | | | | | | NEALLNGAKSFFRDLTAIYESCRLGQHRPVSR |
| | | | | | | LLTDGIMRVGSTASKKLSEKLVAEWFSQAAD |
| | | | | | | GNNEAFSKLKLYAQVCRYDLGPYLASLPLDS |
| | | | | | | SLLSQPNLVAPTSQSLITPPQMTNTGNANTPS |
| | | | | | | ATLASAASSTMTVTSGVAISTSVATANSTLTT |
| | | | | | | ASTSSSSSSNLNSGVSSNKLPSFPPFGSMNSNA |
| | | | | | | AGSMSTQANTVQSGQLGGQQTSALQTAGISG |
| | | | | | | ESSSLPTQPHPDVSESTMDRDKVGIPTDGDSH |
| | | | | | | AVTYPPAIVVYIIDPFTYENTDESTNSSSVWTL |
| | | | | | | GLLRCFLEMVQTLPPHIKSTVSVQIIPCQYLLQ |
| | | | | | | PVKHEDREIYPQIILKSLAFSAFTQCRRPLPTS |
| | | | | | | TNVKTLTGFGPGLAMETALRSPDRPECIRLYA |
| | | | | | | PPFILAPVKDKQTELGETFGEAGQKYNVLFV |
| | | | | | | GYCLSHDQRWILASCTDLYGELLETCIINIDVP |
| | | | | | | NRARRKKSSARKFGLQKLWEWCLGLVQMSS |
| | | | | | | LPWRVVIGRLGRIQHGELKDWSCLLSRRNLQ |
| | | | | | | SLSKRLKDMCRMCGISAADSPSILSACLVAM |
| | | | | | | EPQGSFVIMPDSVSTGSVFGRSTTLNMQTSQL |
| | | | | | | NTPQDTSCTHILVFPTSASVQVASATYTTENL |
| | | | | | | DLAFNPNNDGADGMGIFDLLDTGDDLDPDII |
| | | | | | | NTLPASPTGSPVHSPGSHYPHGGDAGKGQSTD |
| | | | | | | RLISTEPHEEVPNILQQPLALGYFVSTAKAGP |
| | | | | | | LPDWFWSACPQAQYQCPLFLKASLHLHVPSV |
| | | | | | | QSDELLHSICHSHPLDSNQTSDVLRFVLEQYN |
| | | | | | | ALSWLTCDPATQDRRSCLPIHFVVLNQLYNFI |
| | | | | | | MNML |
| 789 | 2139 | A | 6359 | 1 | 2002 | TGTLTEDQLDVMGVVPLKGQAFLPLVPEPRR |
| | | | | | | LPVGPLLRALATCHALSRLQDTPVGDPMDLK |
| | | | | | | MVESTGWVLEEEPAADSAFGTQVLAVMRPP |
| | | | | | | LWEPQLQAMEEPPVPVSVLHRFPFSSALQRM |
| | | | | | | SVVVAWPGATQPEAYVKGSPELVAGLCNPET |
| | | | | | | VPTDFAQMLQSYTAAGYRVVALASKPLPSVP |
| | | | | | | SLEAAQQLTRDTVEGDLSLLGLLVMRNLLKP |
| | | | | | | QTTPVIQALRRTRIRAVMVTGDNLQTAVTVA |
| | | | | | | RGCGMVAPQEHLIIVHATHPERGQPASLEFLP |
| | | | | | | MESPTAVNGVKDPDQAASYTVEPDPRSRHLA |
| | | | | | | LSGPTFGIIVKHFPKLLPKVLVQGTVFARMAP |
| | | | | | | EQKTELVCELQKLQYCVGMCGDGANDCGAL |
| | | | | | | KAADVGISLSQAEASVVSPFTSSMASIECVPM |
| | | | | | | VLREGRCSLDTSFSVFKYMALYSLTQFISVLIL |
| | | | | | | YTINTNLGDLQFLAIDLVITTTVAVLMSRTGP |
| | | | | | | ALVLGRVRPPGALLSVPVLSSLLLQMVLVTG |
| | | | | | | VQLGGYFLTLAQPWFVPLNRTVAAPDNLPNY |
| | | | | | | ENTVVFSLSSFQYLILAAAVSKGAPFR\RPLTN |
| | | | | | | NVPFLLASAL*SSVLVVLVLSPGLLHGPLALR |
| | | | | | | NITDTGFKLLLVGLVTLNFVGGLHAGERARP |
| | | | | | | VPPRLPAPPPAQAG\SKKRFKQLERELAEQPW |
| | | | | | | PPLPAGPLR |
| 790 | 2140 | A | 6380 | 76 | 1059 | SSAGSARKLQVMALAARLWRLLPFRIRGAAP |
| | | | | | | GSRLPAGTSGSRGHCGPCRFRGFEVMGNPGT |
| | | | | | | FKRGLLLSALSYLGFETYQVISQAAVVHATA |
| | | | | | | KVEEILEQADYLYESGETEKLYQLLTQYKESE |
| | | | | | | DAELLWRLARASRDVAQLSRTSEEEKKLLVY |
| | | | | | | EALEYAKRA/L/EKNESSFASHKWYAICLSDV |
| | | | | | | GDYEGIKAKIANAYLTKEHFEKAIELNPKDATS |
| | | | | | | IHLMGIWCYTFAEMPWYQRRIA*NACLQLPP |
| | | | | | | *FPPYEKALG\YFHRAEQVDPNFYSKNLLLLG |
| | | | | | | KTYLKLHNKKLAAFWLMKAKDYPAHTEED |
| | | | | | | KQIQTEAAQLLTSFSEKN |
| 791 | 2141 | A | 6434 | 3 | 1460 | IALLLVDGLAWDDQGGLALLHISPSKLIL*QDS |
| | | | | | | SGMSIYVMVRCTITRAFFKSLLCHICQYSIGPQ |
| | | | | | | *VT\CPGQDACKE*KSTAN*GG*RE**PQVLFF |
| | | | | | | AFLSNPAVKPGRMSKKQRDSLYAEVQKHQQ |
| | | | | | | RLQEQRQQQSGEAEALARVYSSSISNGLSNLN |
| | | | | | | NETSGTYANGSVIDLPKSEGYYNVVSGQPSP |
| | | | | | | DQSGLDMT\GIKQTKQEPIYDLTSVPNLFTY\SS |
| | | | | | | FNN\GQLAPGIT\MTEIDRIAQNIIKSHLETCQY |
| | | | | | | TMEELHQLAWQTHTYEEIKAYQSKSREALW |
| | | | | | | QQCAIQITHAIQYVVEFAKRITGPMELCQNDQ |
| | | | | | | ILLLKSGCLEVVLVRMCRAFNPLNNTVLFEG |
| | | | | | | KYGGMQMFKALGSDDLVNEAFDFAKNLCSL |
| | | | | | | QLTEEEIALFSSAVLISPDRAWLIEPRKVQKLQ |
| | | | | | | EKIYFALQHVIQKNHLDDETLAKLIAKIPTITA |
| | | | | | | VCNLHGEKLQVFKQSHPEIVNTLFPPLYKELF |
| | | | | | | NPDCATACK |
| 792 | 2142 | A | 6440 | 92 | 781 | SRGTFRCFCRDFFPCFSNMRLFLWNAVLTLFV |
| | | | | | | TSLIGALIPEPEVKIEVLQKPFICHRKTKQGDL |
| | | | | | | MLVHYEGYLEKDGSLPHSTHKHNNGQPIWFT |
| | | | | | | LGILEALKGWGPGA*KIDMCVGEKRKLILPPA |
| | | | | | | LGYGKEGKGKIPPESTLIFNIDLLEIRNGPRSH |
| | | | | | | ESFQEMDLNDDWKLSKDEVKAYLKKEFEKE |
| | | | | | | GAVVNESHHDALVEDTFDKEDEDKDGFISAR |
| | | | | | | EFTYKHDEL |
| 793 | 2143 | A | 6446 | 3201 | 152 | PRLKRLVVTEEDGQARPEALGKIAPRTPAELG |
| | | | | | | ARADQELVTALMCDLRRPAAGGMMDLAYV |
| | | | | | | CEWEKWSKSTHCPSVPLACAWSCRNLIAFTM |
| | | | | | | DLRSDDQDLTRMIHILDTEHPWDLHSIPSEHH |
| | | | | | | EAITC\LEWDQSGFPGFLFSRWPTGQIK\CWS |
| | | | | | | MGVSTLA\NSWE\SSVGSL\VEGGPHLWALS\ |
| | | | | | | WLH\NGVKLALHVEKSGASSFGEKFSRWKFS |
| | | | | | | P\SLTLF\GGNAMEGWIAVTVSGLVTVSLLQ\P |
| | | | | | | SGQVL\TST\ESLCRLRARVALADIAFTGGGNI |
| | | | | | | VVATADGSSA\SPVQFYKVCVSVVSEKCRIDT |
| | | | | | | DLPSLFRCTTDLNRKDFPAITHLKFLARD |
| | | | | | | MSEQVLLCASSQTSSIVECWSLRKEGLPVNNI |
| | | | | | | FQQISPVVGDKQPTILKWRILSATNDLDRVSA |
| | | | | | | V\ALPKLPISLTNTDLKVASDTQFYPGLGLAL |
| | | | | | | AFHDGSVHIVIIRLSLQTMAVFYSSAAPRPVD |
| | | | | | | EPAMKRPRTAGPAVHLKAMQLSWTSLALVG |
| | | | | | | IDSHGKLSV\LRLSPSMGHPLEVGLALRHLLFL |
| | | | | | | LEYCMVTQYDWWDLLHVQPSMVQSLVEKL |
| | | | | | | HEEYTRQTAALQQVLSTRILAMKASLCKLSP |
| | | | | | | CTVTRVCDYHTKLFLIAISSTLKSLLRPHFLNT |
| | | | | | | PDKSPGDRLTEICTKITDVDIDKVMINLKTEEF |
| | | | | | | VLDMNTLQALQQLLQWVGDFVLYLLASLPN |
| | | | | | | QPCPTSEPCPTSEPSPTSEPSPTSEPSSP*SLC\G |
| | | | | | | SLLRPGHSFLRDGTSLGMLRELMVVIRIWGLL |
| | | | | | | KPSCLPVYTATSDTQDSMSLLFRLLTKLWICC |
| | | | | | | RDEGPASEPDEALVDECCLLPSQLLIPSLDWL |
| | | | | | | PASDGLVSRLQPKQPLRLQFGRAPTLPGSAAT |
| | | | | | | LQLDGLARAPGQPKIDHLRRLHLGACPTEEC |
| | | | | | | KACTRCGCVTMLKSPNRITAVKQWEQRWIK |
| | | | | | | NC/LVRWALVAGAPQLPLSPAAPQLLLSYPSA |
| | | | | | | APEPGCCKSHRSPWTLLGAVNLSPPCRAVEG |
| | | | | | | RGPDACVTSRASEEAPAFVQLGPQSTHHSPRT |
| | | | | | | PRSLDHLHPEDRP |
| 794 | 2144 | A | 6490 | 418 | 585 | NGDKADLENESCRAQVLMPVVPALWEAEGG |
| | | | | | | GSIEPRDLRLQ*AVITPL\TPAWVTQ |
| 795 | 2145 | A | 6499 | 395 | 1027 | KLLWLPPHSEQKRSPLYHPQGPSGTTPSAP\FS |
| | | | | | | SHSPPPSLLQA\PSIAAFLRTHGHISASGPLRMP |
| | | | | | | FPH/H*NAFLLVFPGQRSQLTSIPSHYLCREVFP |
| | | | | | | DHHHHLCRLSLESSPLFHHRVLFCVPKQNVN |
| | | | | | | STRAQIFCLFVHIYGCRCINTFPLHLFRLHLWL |
| | | | | | | HFLQIPLCKKNKSVKLGKTVVGRGCQSAAGS |
| | | | | | | DTRVRAAVGAPGLPVEPLV |
| 796 | 2146 | A | 6503 | 68 | 936 | HSALLTHSSFCVFTLCQDFFTYSSMSEEVTYA |
| | | | | | | DLQFQNSSEMEKIIPEIGKFGEKAPPAPSHVWR |
| | | | | | | PAALFLTLLCLLLLIGLGVLASMFHVTLKIEM |
| | | | | | | KKMNKLQNISEELQRNISLQLMSNMNISNKIR |
| | | | | | | NLSTTLQTIATKLCRELYSKEQEHKCKPCPRR |
| | | | | | | WIWHKDSCYFLSDDVQTWQESKMACAAQN |
| | | | | | | ASLLKINNKNALEFIKSQSRSYDYWLGLSPEE |
| | | | | | | DS/YSWYESG*YNQ\PSAWVIRNAPDLNNMY |
| | | | | | | CGYINRLYVQYYHCTYKQRMICEKMANPVQ |
| | | | | | | LGSTYFREA |
| 797 | 2147 | A | 6507 | 1 | 881 | PGSTHASARSQVPRSAGEAAPHSRRPPGLLPH |
| | | | | | | APRAASAQLEERMRDPHPGMTLQEGDCRGS |
| | | | | | | QTVSLTMGTADSDEMAPEAPQHTHIDVHIHQ |
| | | | | | | ESALAKLLLTCGSALRPRATQARGSSRLLVAS |
| | | | | | | WVMQIVLGILSAVLGGFFYIEDYTLLVTSGA |
| | | | | | | AIWTGAVAVLAGAAAFIYEKRGGTYWALLR |
| | | | | | | TLLALAAFSTAIAALKLWNEDFRYGYSYYNS |
| | | | | | | ACRISSSSDWNTPAPTQSPEEVRRLHLCTSFM |
| | | | | | | DMLKALFRTLQAMLLGVWILLLLASLTPLWL |
| | | | | | | /SL/RGECSQPKG*VPKKRDQKEMLEVSGI*PG |
| | | | | | | STHASARSQVPRSAGEAAPHSRAPPGLLPHAP |
| | | | | | | RAASAQLEERMRDPHPGMTLQEGDCRGSQT |
| | | | | | | VSLTMGTADSDEMAPEAPQHTHIDVHIHQES |
| | | | | | | ALAKLLLTCCSALRPRATQARGSSRLLVASW |
| | | | | | | VMQIYLGILSAVLGGFFYIRDYTLLVTSGAAI |
| | | | | | | WTGAVAVLAGAAAFIYEKRGGTYWALLRTL |
| | | | | | | LALAAFSTAIAALKLWNEDFRYGYSYYNSAC |
| | | | | | | RISSSSDWNTPAPTQSPEEVRRLHLCTSFMDM |
| | | | | | | LKALFRTLQAMLLGVWILLLLASLTPLWLYC |
| | | | | | | WRMFPTKGVSP |
| 798 | 2148 | A | 6528 | 912 | 2287 | VPNYLPSVSSAIGGEVPQRYVWRFCIGLHSAP |
| | | | | | | RFLVAFAYWNHYLSCTSPCSCYRPLCRLNFG |
| | | | | | | LNVVENLALLVLTYVSSSEDFITWVPG*GRSG |
| | | | | | | EVFPEGTGLPLPHSDLPTSWCGHSLQCGSQSS |
| | | | | | | FPPAIHENAF1VFIASSLGHMLLTCILWRLTKK |
| | | | | | | HTVSQE\DGLSLAGAPRQPRRKSRTSVLRIRV |
| | | | | | | MVRWELSSNGNPGRGVLGLGLGLGNKLRVV |
| | | | | | | GQNLGL*HCVWVVWETGE*KRWRLQMGW* |
| | | | | | | GVASRQ*VRNSVRGLVCHNSSAPPMYMGFF |
| | | | | | | SPTVFGGGVGG*LIIVTFILHPPEVEAAGIPLLL |
| | | | | | | GPSLPQRQGREHIVVILAAPACAPFHDR*WEP |
| | | | | | | REIRPSP*ELGLRQEPTLSYPASCRVIRQPIP*D |
| | | | | | | RKSYSWKQRLFHNFISFFSALAVYFRHNMYC |
| | | | | | | EAGVYTIFAILEYTVVLTNMAFHIVITAWWDF |
| | | | | | | GNKELLITSQPEEKRF |
| 799 | 2149 | A | 6529 | 1 | 874 | FFFFQRTNFIEHSGSVSLLALACDLGWCEDWS |
| | | | | | | CCLVQGGGDLVDVVQTNHGEDEAGGDTDSV |
| | | | | | | DEARCKESQQEAQENLREDLCLESFAKDKIL |
| | | | | | | QIIEGSEREHEETRTKQAALDGEPLGGGQLTA |
| | | | | | | VHLHPSKEQQGQEGGERQRGARTHHWRGW |
| | | | | | | EKGRRVRLRPPSGKLRADQPVRKLGGPTPS/T |
| | | | | | | ELPGLQPHAPTPHTAIPATPIYSPAPDTPNPPV |
| | | | | | | RWKCPLPVEPRTRQLCRERTRKACPPKPRLPPL |
| | | | | | | GLPGDPTGPVTHHAPPVSPTGASGQERRAEP |
| | | | | | | GAVSYAHASATK |
| 800 | 2150 | A | 6544 | 2 | 662 | SAQRWAAVAGRWGCRLLALLLLVPGPGGAS |
| | | | | | | EITFELPDNAKQCFYEDIAQGTKCTLEFQVITG |
| | | | | | | GHYDVDCRLEDPDGKVLYKEMKKQYDSFTF |
| | | | | | | TASKNGTYKFCFSNE\FSTFTHKTVYFDFQVG |
| | | | | | | E\THLCFLVRIDRVSALTQMESACVSIHEALKS |
| | | | | | | VIDYQTHFRLREAQGRSRAEDLNTRVAYWSV |
| | | | | | | GEALILLVVSIGQVFLLKSFFSDKRTYLTRVGS |
| 801 | 2151 | A | 6556 | 1 | 1319 | TPCMECIKGEGLREPQNLSGSQREPQTEGSM |
| | | | | | | DGWRRPRWGLLLLLWGSCTFGLPTDTTTTF |
| | | | | | | KRIFLKRMPSIRESLKERGVDMARLGPEWSQP |
| | | | | | | MKRLTLGNTTSSVILTNYMDTQYYGEIGIGTP |
| | | | | | | PQTFKVVFDTGSSNVWVPSSKCSRLYTACVY |
| | | | | | | HKLFDASDSSSYKHNGTELTLRYSTGTVSGFL |
| | | | | | | SQDIITVGGITVTQMFGEVTEMPALPFMLAEF |
| | | | | | | DGVVGMGFIEQAIGRVTPIFDNIISQGVLKED |
| | | | | | | VFSFYYNRDSENSQSLGGQIVLGGSDPQHYE |
| | | | | | | GNFHYINLIKTGVWQIQMKGVSVGSSTLLCE |
| | | | | | | DGCLALVDTGASYISGSTSSIEKLMEALGAKE |
| | | | | | | KRLFDYVVKCNEGPTLPPTFLFLLGGKDTPLT |
| | | | | | | SADYLFQESYSSKKLSTLAIHAMYIPPPTGPTL |
| | | | | | | \ALGATF\IRKFYTEFDRGNNPHGFALAR |
| 802 | 2152 | A | 6567 | 13 | 6147 | MCLGRMGASSPRSPEPVGPPAPGLPFCCGGSL |
| | | | | | | LAVVVLLALPVAWGQCNAPEW\LPFARPTNL |
| | | | | | | TDEFEFPIGTYLNYECRPGYSGRPFSIICLKNS |
| | | | | | | VWTGAKDRCRRKSCRNPPDPVNGMVHVIKG |
| | | | | | | IQFGSQIKYSCTKGYRLIGSSSATCIISGDTVIW |
| | | | | | | DNETPICDRIPCGLPPTITNGDFISTNRENFHY |
| | | | | | | GSVTYRCNPGSGGRKWELVGEPSIYCTSND |
| | | | | | | DQVGIWSGPAPQCIIPNKCTPPNVENGILVSD |
| | | | | | | NRSLFSLNEVVEFRCQPGFVMKGPRRVKCQA |
| | | | | | | LNKWEPELPSCSRVCQPPPDVLHAERTQRDK |
| | | | | | | DNFSPGQEVFYSCEPGYDLRGAASMRCTPQG |
| | | | | | | DWSPAAPTCEVKSCDDFMGQLLNGRVLFPV |
| | | | | | | NLQLGAKVDFVCDEGFQLKGSSASYCVLAG |
| | | | | | | MESLWNSSVPVCEQIFCPSPPVIPNGRHTGKP |
| | | | | | | LEVFPFGKAVNYTCDPHPDRGTSFDLIGESTIR |
| | | | | | | CTSDPQGNGVWSSPAPRCGILGHCQAPDHFL |
| | | | | | | FAKLKTQTNASDFPIGTSLKYECRFEYYGRPF |
| | | | | | | SITCLDNLVWSSPKDVCKRKSCKTPPDPVNG |
| | | | | | | MVHVITDIQVGSRINYSCITGHRLIGHSSAECI |
| | | | | | | LSGNAAHWSTKPPICQRTPCGLPPTIANGDFIS |
| | | | | | | TNRENFHYGSVVTYRCNPGSGGRKVFELVGE |
| | | | | | | PSIYCTSNDDQVGTWSGPAPQGIIPNKCTPPNV |
| | | | | | | ENGILVSDNRSLFSLNEVVEFRCQPGFVMKGP |
| | | | | | | RRVKCQALNKWEPELPSCSRVCQPPPDVLHA |
| | | | | | | ERTQRDKDNFSPGQEVFYSCEPGYDLRGAAS |
| | | | | | | MRCTPQGDWSPAAPTCEVKSCDDFMGQLLN |
| | | | | | | GRVLFPVNLQLGAKVDFVCDEGFQLKGSSAS |
| | | | | | | YCVLAGMESLWNSSVPVCEQIFCPSPPVIPNG |
| | | | | | | RHTTGKPLEVFPFGKAVNYTCDPHPDRGTSFD |
| | | | | | | LIGESTIRCTSDPQGNGVWSSPAPRCGILGHC |
| | | | | | | QAPDHFLFAKLKTQTNASDFPIGTSLKYECRP |
| | | | | | | EYYGRPFSITCLDNLVWSSPKDVCKRKSCKTP |
| | | | | | | PDPVNGMVHVITDIQYGSRINYSCTTGHRLIG |
| | | | | | | HSSAECILSGNTAHWSTKPPICQRIPCGLPPTI |
| | | | | | | ANGDFISTNRENFHYGSVVTYRCNLGSRGRK |
| | | | | | | VFELVGEPSIYCTSNDDQVGIWSGPAPQCIIPN |
| | | | | | | KCTPPNVENGILVSDNRSLFSLNEVVEFRCQP |
| | | | | | | GFVMKGPRRVKCQALNKWEPELPSCSRVCQ |
| | | | | | | PPPEILHGEHTPSHQDNFSPGQEVFYSCEPGY |
| | | | | | | DLRGAASLHGTPQGDWSPEAPRCAVKSCDDF |
| | | | | | | LGQLPHGRVLFPLNLQLGAKVSFVCDEGFRL |
| | | | | | | KGSSVSHCVLVGMRSLWNNSVPVCEHIFCPN |
| | | | | | | PPAILNGRHTGTPSGDIPYGKEISYTCDPHPDR |
| | | | | | | GMTFNLIGESTIRCTSDPHGNGVWSSPAPRCE |
| | | | | | | LSVRAGHCKTPEQFPFASPTIPINDFEFPVGTS |
| | | | | | | LNYECRPGYFGKMFSISCLENLVWSSVEDNC |
| | | | | | | REKSCGPPPEPFNGMVHINTDTQFGSTVNYSC |
| | | | | | | NEGFRLIGSPS1TCLVSGNNVTWDKKAPICEII |
| | | | | | | SGEPPPTISNGDFYSNNRTSFHNGTVVTYQCH |
| | | | | | | TGPDGEQLFELVGERSIYCTSKDDQVGVWSS |
| | | | | | | PPPRCISTNKCTAPEVENAIRVPGNRSFFSLTEI |
| | | | | | | IRFRCQPGFVMVGSHTVQCQTNGRWGPKLPH |
| | | | | | | CSRVCQPPPETLHGEHTLSHQDNFSPGQEVFY |
| | | | | | | SCEPSYDLRGAASLHCTPQGDWSPEAFRCTV |
| | | | | | | KSCDDPLGQLPHGRVLLPLNLQLGAKVSFVC |
| | | | | | | DEGFRLKGRSASHCVLAGMKALWNSSVPVC |
| | | | | | | EQIFCPNPPAILNGRHTGTPLGDIPYGKEVSYT |
| | | | | | | CDPHIPDRGMTFNLIGESTIRRTSEPHGNGVWS |
| | | | | | | SPAPRCELPVGAACPHPPKIQNGHYIGGHVSL |
| | | | | | | YLPGMTISYTCDPGYLLVGKGFIFCTDQGIWS |
| | | | | | | QLDHYCKEVNCSFPLFMNGISKELEMKKVYH |
| | | | | | | YGDYVTLKCEDGYTLEGSPWSQCQADDRWD |
| | | | | | | PPLAKGTSRTHDALLTVGTLSGTIFFILLIIELSWI |
| | | | | | | ILKHRKGNNAHENPKEVAIHLHSQGGSSVHP |
| | | | | | | RTLQTNEENSRVLP |
| 803 | 2153 | A | 6574 | 2 | 3233 | HGRSARLAAVPAEAMPGPRRPAGSRLRLLLL |
| | | | | | | LLLPPLLLLLRG\SHAGNLTVAVVLPLANTSY |
| | | | | | | PWSWA\RVGPAVELALAQVKARPDLLPGWT |
| | | | | | | VRTVLGSSENALGVCSDTAAPLAAVDLKWE |
| | | | | | | HNPAVFLGPGCVYAAAPVGRFTAHWRVPLL |
| | | | | | | TAGAPALGFGVKDEYALTTRAGPSYAKLGDF |
| | | | | | | VAALHRRLGWERQALMLYAYRPGDEEHCFF |
| | | | | | | LVEGLFMRVRDRLNITVDHLEFAEDDLSHYT |
| | | | | | | RLLRTMPRKGRVIYICSSPDAFRTLMLLALEA |
| | | | | | | GLCGEDYVFFHLDIPGQSLQGGQGPAPRRPW |
| | | | | | | ERGDGQDVSARQAFQAAICIITYKDPDNPEYL |
| | | | | | | EFLKQLKRLAYEQFNFIMEDGLVNTIPASFH |
| | | | | | | DGLLLYIQAVTETLAHCIGTVTDGENITQRMW |
| | | | | | | NRSFQGVTGYLKIDSSGDRETDFSLWDMDPE |
| | | | | | | NGAFRVVLNYNGTSQELVAVSGRKLNWPLG |
| | | | | | | YPPPDIPKCGFDNEDPACNQDHLSTLEVLALV |
| | | | | | | QSLSLLGILIVSFFIYRKMQLEKELASELWRVR |
| | | | | | | WEDVEPSSLERHLRSAGSRLTLSGRGSNYGSL |
| | | | | | | LTPEGQFQVFAKTAYYKGNLVAVKRVNRKR |
| | | | | | | IELTRKVLFELKHMRDVQNEHLTRFVGACTD |
| | | | | | | PPNICILTEYCPRGSLQDILENESITLDWMFRY |
| | | | | | | SLTNDIVKGMLFLHNGAICSHGNLKSSNCVV |
| | | | | | | DGRFVLKITDYGLESFRDLDPEQGHTVYAKK |
| | | | | | | LWTAPELLRMASPPVRGSQAGDVYSFGIILQE |
| | | | | | | LALRSGVFHVEGLDLSPKEHERVTRGEQPPFR |
| | | | | | | PSLALQSHLEELGLLMQRCWAEDPQERPPFQ |
| | | | | | | QIRLTLRKFNRENSSNILDNLLSRMEQYANNL |
| | | | | | | EELVEERTQAYLEEKRKAEALLYQILPHSVAE |
| | | | | | | QLKRGETVQAEAFDSVTIYFSDIVGFTALSAE |
| | | | | | | STPMQVVTLLNDLYITCFDAVIDNFDVYKVET |
| | | | | | | IGDAYMVVSGLPVRNGRLHACEVARMALAL |
| | | | | | | LDAVRSFRIRHRPQEQLRLRIGIHTGPVCAGV |
| | | | | | | VGLKMPRYCLFGDTVNTASRMESNGEAL\KI |
| | | | | | | HLSS\ETKAVL\EEFGGFELELRGDVEMKGKQ |
| | | | | | | KVRTYWLLGERGSSTRG |
| 804 | 2154 | A | 6585 | 2 | 3837 | DAPGRPPVRLPTMELEDGVVYQEEPGGSGAV |
| | | | | | | MSERVSGLAGSIYREFERLIVRYDEEVVKELIP |
| | | | | | | LVVAVLENLDSVFAQDQEHQVELELLRDDNE |
| | | | | | | QLITQYEREKALRKHIAEEKFIEPEDSQEQEKK |
| | | | | | | DLQTRVESLESQTRQLELKAKNYADQISILEE |
| | | | | | | REAELKKEYNALHQRIHTEMIHNYMEHLERT |
| | | | | | | KLHQLSGSDQLESTAHSRIRKERPISLGIFPLP |
| | | | | | | AGDGLLTPDAQKGGETPGSEQWKFQELSQPR |
| | | | | | | SHTSLKDELSDVSQGGSKATTPASTANSDVA |
| | | | | | | TIPTDTPLKEENEGFVKVWDAPNKSEISKH1EV |
| | | | | | | QVAQETRNVSTGSAENEEKSEVQAIIESTPEL |
| | | | | | | DMDKDLSGYKGSSTPTKGIENKAFDRNTESL |
| | | | | | | FEELSSAGSGLIGDVDEGADLLGMGREVENLI |
| | | | | | | LENTQLLETKNALNIVKNDLIAKVDELTCEK |
| | | | | | | DVLQGELEAVKQAKLKLEEKNRELEEELRKA |
| | | | | | | RAEAEDARQKAKDDDDSDIPTAQRKRFTRVE |
| | | | | | | MARVLMERNQYKERLMELQEAVRWTEMIR |
| | | | | | | ASRENPAMQEKKRSSIWQFFSRLFSSSSNTTK |
| | | | | | | KPEPPVNLKYNAPTSHVTPSVKKRSSTLSQLP |
| | | | | | | GDKSKAFDFLSEETEASLASRREQKREQYRQ |
| | | | | | | VKAHVQKEDGRVQAFGWSLPQKYKQVTNG |
| | | | | | | QGENKMKNLPVPVYLRPLDEKDTSMKLWCA |
| | | | | | | VGVNLSGGKTRDGGSVVGASVFYKDVAGLD |
| | | | | | | TEGSKQRSASQSSLDKLDQELKEQQKELKNQ |
| | | | | | | EELSSLVWICTSTHSATKVLIIDAVQPGNILDS |
| | | | | | | FTVCNSHVLCIASVPGAEETDYPAGEDLSESG |
| | | | | | | QVDICASLCGSMTSNSSAETDSLLGGITVVGC |
| | | | | | | SAEGVTGAATSPSTNGASPVMDKPPEMEAEN |
| | | | | | | SEVDENVPTAEE\ATEATEGNAGSAEDTV\DIS |
| | | | | | | QTGVYTEHVFTDPLGWQIPEDLSPVYQSSND |
| | | | | | | SDAYKDQISVLPNEQDLVREEAQKMSSLLPT |
| | | | | | | MWLGAQNGCLYVHSSVAQWRKCLHSIKLKD |
| | | | | | | SILSIVHVKGIVLVALADGTLAIFHRGVDGQW |
| | | | | | | DLSNYHLLDLGRPHILSIRCMTVVHDKVWCG |
| | | | | | | YRNKIYVVQPKAMKIEKSFDAHPRKESQVRQ |
| | | | | | | LAWVGDGVWVSIRLDSTLRLYHAHTYQHLQ |
| | | | | | | DVDLEPYVSKMLGTGKLGFSFVRITALMVSC |
| | | | | | | NRLWVGTGNGVIISIPLTETVILHQGRLLGLR |
| | | | | | | ANKTSGVPGNRPGSVIRVYGDENSDKVTPGT |
| | | | | | | FIPYCSMAHAQLCFHGIIRDAVKFFVAVPGQV |
| | | | | | | ISPQSSSSGTDLTGDKGRGHLHRSLVVRRP |
| 805 | 2155 | A | 6605 | 469 | 2602 | FGRLLWGTAFKSWKMKAPIPHLILLYATFTQ |
| | | | | | | SLKVVTKRGSADGCTDWSIDIKKYQVLVGEP |
| | | | | | | VRIKCALFYGYIRTNYSLAQSAGLSLMWYKS |
| | | | | | | SGPGDFEEPIAFDGSRMSKEEDSIWFRPTLLQ |
| | | | | | | DSGLYACVIRNSTYCMKVSISLTVGENDTGL |
| | | | | | | CYNSKMKYFEKAELSKSKEISCRDIEDFLLPT |
| | | | | | | REPEILWYKECRTKTWRPSIVFKRDTLLIREV |
| | | | | | | REDDIGNYTCELKYGGFVVRRTTELTVTAPL |
| | | | | | | TDKPPKLLYPMESKLTIQETQLGDSANLTCRA |
| | | | | | | FFGYSGDVSPLKGEKFIEDLDENRVWE |
| | | | | | | SDI\KILKEHLGEQEVSISLIVDSVEEGDLQNYS |
| | | | | | | CYVENGNGERHASVLLHKRELMYTVELAGG |
| | | | | | | LGAILLLLVCLVTIYKCYKIEIMLFYRNHFGA |
| | | | | | | EELDGDNKDYDAYLSYTKVDPDQWNQETGE |
| | | | | | | EERFALEILPDMLEKIIYGYKLFIPDRDLIPTGT |
| | | | | | | YIEDVARCVDQSKRLIIVMTPNYVVRRGWSW |
| | | | | | | ELETRLRNMLVTGEIKVILIECSELRGIMNYQE |
| | | | | | | VEALKHTIKLLTVIKWHGPKCNKLNSKFWKR |
| | | | | | | LQYEMPFKRIEPITHEQALDVSEQGPFGELQT |
| | | | | | | VSAISMAAATSTALATAHPDLRSTFHNTYHS |
| | | | | | | QMRQKIIYYRSYEYDVPPTGTLPLTSIGNQHT |
| | | | | | | YCNIPMTLINGQRPQTKSSREQNPDEAHTNSA |
| | | | | | | ILPLLPRETSISSVIW |
| 806 | 2156 | A | 6614 | 3 | 1584 | NSARGGVGVRGARAMATVQEKAAALNLSAL |
| | | | | | | HSPAHRRPPGFSVAQKPFGATYVWSSINTLQT |
| | | | | | | QVEVKKRRMRLKRHNDCFVGSEAVDVIFSHL |
| | | | | | | IQNKYFGDVDIPRAKVVRVCQALMDYKVFE |
| | | | | | | AVPTKVFGKDKKPTFEDSSCSLYRFTTIPNQD |
| | | | | | | SQLGKENKLYSPARYADALFKSSDIRSASLED |
| | | | | | | LWENLSLKPANSPHVNISTTLSPQVINEVWQE |
| | | | | | | ETIGRLLQLVDLPLLDSLLKQQEAVPKIPQPK |
| | | | | | | RQSTMVNSSNYLDRGILKAYSDSQEDEWLSA |
| | | | | | | AIDCLEYLPDQMVVEISRSFPEQPDRTDLVKE |
| | | | | | | LLFDAIGRYYSSREPLLNHLLSDVHNGIAELLV |
| | | | | | | NGKTEIALEATQLLLKLLDFQNREEFRRLLYF |
| | | | | | | MAVAANPSEFKLQKESDNRMVVKRIFSKAW |
| | | | | | | DNKNLSKGKTDLLVLFL\MDHQKDVFKWGT |
| | | | | | | L\HKIVSWK\LMAIQNGRDPNRDAGYIYCQRI |
| | | | | | | DQRDYSMTEKTTIDELLYLLKTLDEDSKLSA |
| | | | | | | KEKKK\LLGQFYKCHPDIFGD |
| 807 | 2157 | A | 6615 | 4198 | 2094 | FGIVGTFALETDELDSDRDPAIFSLCDFGAMR |
| | | | | | | PQILLLLALLTLGLAAQHQDKVPCKM/VKML |
| | | | | | | CPDRVDKKVSCQVLGLLQVPSVLPPDTETLD |
| | | | | | | LSGNQLRSILASPLGFYTALRHLDLSTNEISFL |
| | | | | | | QPGAFQALTHLEHLSLAHNRLAMATALSAG |
| | | | | | | GLGPLPRVTSLDLSGNSLYSGLLERLLGEAPS |
| | | | | | | LHTLSLAENSLTRLTRHTFRDMPALEQLDLHS |
| | | | | | | NVLMDIEDGAFEGLPRLTHLNILSRNSLTCLSD |
| | | | | | | FSLQQLRVLDLSCNSIEAFQTAS\QPQAEFQLT |
| | | | | | | WLDLRENKLLHPPDLAALPRIAYLNLSNNLIR |
| | | | | | | LPTGPPQDSKGIHAPSEGWSALPLS\APSGNAS |
| | | | | | | GRPLSQLLNLDLSYNEIELWDSFLEHLTSLCFL |
| | | | | | | NLSRNCLRTFEAERLGSLPCLMLLDLSHNALE |
| | | | | | | TLELGARALG\SLRTLLLQGNALRDLPPYTFA |
| | | | | | | NLASLQRLNLQGNRVSPCGGPDEPGP\SGCV\ |
| | | | | | | AFSGITSLRSLSLVDNEIELLRAGAFLHTPLTE |
| | | | | | | LDLSSNPGLEVATGALGGLEASLEVLALQGN |
| | | | | | | GLMVLQVDLPCFICLKRLNLAENRLSHLPAW |
| | | | | | | TQAVSLEVLDLRNNSFSLLPGSAMGGLETSLR |
| | | | | | | RLYLQGNPLSCCGNGWLAAQLHQGRVDVDA |
| | | | | | | TQDLLCRFSSQEEVSLSHVRPEDCEKGGLKNI |
| | | | | | | NLIIILTFILVSAILUITLAACCCVRRQKFNQQ |
| | | | | | | YKA |
| 808 | 2158 | A | 6619 | 153 | 1852 | FKALSQYIYTNTHLEREAAFEVAILLRRMEEG |
| | | | | | | ARHRNNTEKKHPGGGESDASPEAGSGGGGV |
| | | | | | | ALKKEIGLVSACGIIVGNIIGSGIFVSPKGVLEN |
| | | | | | | AGSVGLALIVWIVTGFITVVGALCYAELGVNI |
| | | | | | | PKSGGDYFYVKDIFGGLAGFLRLWIAVLVLYP |
| | | | | | | TNQAVIALTFSNYVLQPLFPTCFPPESGLRLLA |
| | | | | | | AICLLLLTWVNCSSVRWATRVQDIFTAGKLL |
| | | | | | | ALALIIIMGIVQICKGEYFWLEPKNAFENFQEP |
| | | | | | | DIGLVALAFLQGSFAYGGWNFLNY\VTEELV |
| | | | | | | DP\YKNL\PRAIFISIP\LVTFVYVFANV/ALYVT |
| | | | | | | AMSPQEL\LAS\NAVAVTFGEKLLGVMAWIM |
| | | | | | | PISVALSTFGGVNGSLFTSSRLFFAGAREGHLP |
| | | | | | | SVLAMIHVKRCTPIPALLFTCISTLLMLVTSD |
| | | | | | | MYTLINYVGFINYLFYGVTVAGQIVLRWKKP |
| | | | | | | DLPRPLKTNLLFPUYLLFWAFLLVFSLWSEPVV |
| | | | | | | CGIGLAIMLTGVPVYFLGVYWQHKPKCFSDFI |
| | | | | | | ELLTLVSQKMCVVVYPEVERGSGTEEANED |
| | | | | | | MEEQQQPMYQPTPTKDKDVAGQPQP |
| 809 | 2159 | A | 6621 | 1041 | 223 | QDSRKMLPSTSVNSLVQGNGVLNSRDAARH |
| | | | | | | TAGAKRYKYLRRLFRFRQMDFEFAAWQMLY |
| | | | | | | LFTSPQRVYRNFHYRKQTKDQWARDDPAFL |
| | | | | | | VLLSIWLCVSTIGFGFVLDMGFFETIKLLLWV |
| | | | | | | VLIDCVGVGLLIATLMWFISNKYLVKRQSRD |
| | | | | | | YDVEWGYAFDVHLNAFYPLLVILHFIQLFFN |
| | | | | | | HVILTDTFIGYLVGNTLWLVAVGYYIYVTFL |
| | | | | | | GYSVGLLFFS\ALPFLKNTVILLYPFAPLILLYG |
| | | | | | | LSLALGWNFTHTLCSFYKYRVK |
| 810 | 2160 | A | 6623 | 160 | 822 | SPASGHCRLNGAAVAMFGCLVAGRLVQTAA |
| | | | | | | QQVAEDKFVFDLPDYESINHVVVFMLGTIPFP |
| | | | | | | EGMGGSVYFSYPDSNGMPVWQLLGFVTNGK |
| | | | | | | PSAIFKISGLKSGEGSQHPFGAMNIVRTPSVAQ |
| | | | | | | IGISVELLDSMAQQTPVGNAAVSSVDSFTQFT |
| | | | | | | QKMLDNFYNFASSFAVSQIVPDDTQIRPSEMF |
| | | | | | | IPANVVLKWYENFQRRTSTEPSLLENIIWIKIN |
| | | | | | | F |
| 811 | 2161 | A | 6627 | 18 | 3367 | LEGSLNTERAKYYLTITMPHFTVTKVEDPEEG |
| | | | | | | AAASISQEPSLADIKARIQDSDEPDLSQNSITG |
| | | | | | | EHSQLLDDGHKICARNAYLNNSNYEEGDEYF |
| | | | | | | DKNLALFEEEMDTRPKVSSLLNRMANYTNLT |
| | | | | | | QGAKEHEEAENITEGKKKPTKTPQMGTFMG |
| | | | | | | VYLPCLQNIFGVILFLRLTWVVGTAGVLQAF |
| | | | | | | AIVLICCCCTMLTAISMSAIATNGVVPAGGSY |
| | | | | | | FMISRALGPEFGGAVGLCFYLGTTFAAAMYIL |
| | | | | | | GAIEIFLVYIVPRAAIFHSDDALKESAAMLNN |
| | | | | | | MRVYGTAFLVLMVLVVFIGVRYVNKFASLFL |
| | | | | | | ACVTVSILAIYAGAIKSSFAPPHFPVCMLGNRT |
| | | | | | | LSSRHIDVCSKTKEINNMTVPSKLWGFFCNSS |
| | | | | | | QFFNATCDEYFVHNNVTSIQGIPGLASGIITEN |
| | | | | | | LWSNYLPKGEITEKPSAKSSDVLGSLNHEYVL |
| | | | | | | VDITTSFTLLVGIFFPSVTGIMAGSNRSGDLKD |
| | | | | | | AQKSIPIGTILAILITSFVYLSNVVLFGACTEGV |
| | | | | | | VLRDKFGDAVKGNLVVGTLSWPSPWVIVIGS |
| | | | | | | FFSTCGAGLQSLTGAPRLLQAIAKDNIIPFLRV |
| | | | | | | FGHSKANGEPTWALLLTAAIAELGILIASLDL |
| | | | | | | VAPILSMFFLMCYLFVNLACALQTLLRTPNW |
| | | | | | | RPRFRYYHWALSFMGMSICLALMFISSWYYA |
| | | | | | | IVAMVIAGMIYKYIEYQGAEKEWGDGIRGLS |
| | | | | | | LSAARFALLRLEEGPPHTKNWRPQLLVLLKL |
| | | | | | | DEDLHVKHPRLLTFASQLKAGKGLTIVGSVIV |
| | | | | | | GNFLENYGEALAAEQTIKHLMEAEKVKGFCQ |
| | | | | | | LVVAAKLREGISHLIQSCGLGGMKHNTVVM |
| | | | | | | GWPNGWRQSEDARAWKTFIGTVRVTTAAHL |
| | | | | | | ALLVAKNISFFPSNVEQFSEGNIDVWWWHDG |
| | | | | | | GMLMLLPFLLK\QHKVWRKCSIRFF\TVAQLE |
| | | | | | | DNSIQMKKDLATFLYHLRIEAEVEVVEMHDS |
| | | | | | | DISAYTYERTLMMEQRSQMLRHMRLSKTER |
| | | | | | | DREAQLVKDRNSMLRLTSIGSDEDEETETYQ |
| | | | | | | EKVHMTWTKDKYMASRGQKAKSMEGFQDL |
| | | | | | | LNMRPDQSNVRRMHTAVKLNEVIVNKSHEA |
| | | | | | | KLVLLNMPGPPRNPEGDENYMEFLEVLTEGL |
| | | | | | | ERVLLVRGGGSEVITIYS |
| 812 | 2162 | A | 6628 | 66 | 640 | AVCTMSEMAELSELYEESSDLQMDVMPGEG |
| | | | | | | DLPQMEVGSGSRELSLRPSRSGAQQLEEEGP |
| | | | | | | MEEEEAQPMAAPEGKRSLANGPNAGEQPGQ |
| | | | | | | VAGADFESEDEGEEFDDWEDDYDYPEEEQLS |
| | | | | | | GAGYRVSAALEEADKMFLRTREPALDGGFQ |
| | | | | | | MHYEKTPFDQLAFIEELF\SLMVVNRLTEELG |
| | | | | | | CDEIIDRE |
| 813 | 2163 | A | 6630 | 708 | 1355 | AKMGAYKYIQELWRKKQSDVMRFLLRVRC |
| | | | | | | WQYRQLSALHRAPRPTRPDKARRLGYKAKQ |
| | | | | | | GY/VYIYIGFVFAVIYRIRVRRGGRKRPVPKG |
| | | | | | | ATYGKPVHHGVNQLKFARSLQSVAEERAGR |
| | | | | | | HCGALRVLNSYWVGEDSTYKFFEVILIDPFHK |
| | | | | | | AIRRNPDTQWITKPVHKHREMRGLTSAGRKS |
| | | | | | | RGLGKGHKFHHTIGGSRPAAWRRRNTLQLH |
| | | | | | | RYR |
| 814 | 2164 | A | 6635 | 201 | 1705 | KGTEMNKSRWQSRRRHGRRSHQQNPWFRLR |
| | | | | | | DSEDRSDSRAAQPAHDSGHGDDESPSTSSGT |
| | | | | | | AGTSSVPELPGFYFDPEKKRYFRLLPGHNNCN |
| | | | | | | PLTKESIRQKEMESKRLRLLQEEDRRKKIARM |
| | | | | | | GFNASSMLRKSQLGFLNVTNYCHLAHELRLS |
| | | | | | | CMERKKVQIRSMDPSALASDRFNULADTNS |
| | | | | | | DRLFIVNDVTVGGSKYGIINLQSLKTPTLKVF |
| | | | | | | MHENLYFTNRKV\NSVCWASLNHLDSHILLC |
| | | | | | | LMGLAETPGCATLLPASLFVNSHPAGIDRPG\ |
| | | | | | | MLCSFRIPGAWSCAWSLNIQANNCFSTGLSR |
| | | | | | | RVLLTNVVTGHRQSFGTNSDVLAQQFALMA |
| | | | | | | PLLFNGCRSGEIFAIDLRCGNQGKGWKATRLF |
| | | | | | | HDSAVTSVRILQDEQYLMASDMAGKIKLWD |
| | | | | | | LRTTKCVRQYEGHVNEYAYLPLHVHEEEGIL |
| | | | | | | VAVGQDCYTRIWSLHDAELLRTIPSPYPASKA |
| | | | | | | DIPSVAFSSRLGGSRGAPGLLMAVGDLYCY |
| | | | | | | SYS |
| 815 | 2165 | A | 6643 | 659 | 3282 | NKNILEVPSARTTRIMGDHLDLLLGVVLMAG |
| | | | | | | PVFGIPSCSFDGRIAFYRFCNLTQVPQVLNITE |
| | | | | | | RLLLSFNYIRTVTASSFPFLEQLQLLELGSQYT |
| | | | | | | PLTIDKEAFRNLPNLRLLDLGSSKIYFLHPDAF |
| | | | | | | QGLFIILFELRLYFCGLSDAVLKDGYFRNLKA |
| | | | | | | LTRLDLSKNQIRSLYLHPSFGKLNSLKSIDFSS |
| | | | | | | NQIFLVCEHELEPLQGKTLSFFSLAANSLYSR |
| | | | | | | VSVDWGKCMNPFRNMVLEILDVSGNGVITV |
| | | | | | | DITGNFSNAISKSQAFSLILAHHIMGAGFGFHN |
| | | | | | | IKDPDQNTFAGLARSSVRHLDLSHGFVFSLNS |
| | | | | | | RVFETLKDLKVLNLAYNKINKIADEAFYGLD |
| | | | | | | NLQVLNLSYNLLGELYSSNFYGLPKVAYIDL |
| | | | | | | QKNHIAIIQDQTFKFLEKLQTLDLRDNALTTIH |
| | | | | | | FIPSIPDIFLSGNKLVTLPKINLTANLIHLSENR |
| | | | | | | LENLDILYFLLRVPHLQTLILNQNRFSSCSGDQ |
| | | | | | | TPSENPSLEQLFLGENMLQLAWETELCWDVF |
| | | | | | | EGLSHLQVLYLNHNYLNSLPPGVFSHLTALR |
| | | | | | | GLSLNSNRLTVLSIINDLPANLEILDISRNQLL |
| | | | | | | APNPDVFVSLSVLDITHNKFICECELSTFINWL |
| | | | | | | NHTNVTIAGPPADIYCVYPDSLSGVSLFSLSTE |
| | | | | | | GCDEEEVLKSLKFSLFIVCTVTLTLFLMTILTV |
| | | | | | | TKFRGFCFICYKTAQRLVFKDHPQGTEPDMY |
| | | | | | | KYDAYLCFSSKDFTWVQNALLKHLDTQYSD |
| | | | | | | QNRPNLCFEERDFVPGENRP\ANIQDAIWNSR |
| | | | | | | KIVCLVSRIIFLRDGWCLEAFSYAQGRCLSDL |
| | | | | | | NSALIMVVVGSLSQYQLMKHQSIRGPVQKQQ |
| | | | | | | YLRWPEDLQDVGWFLHKLSQQILKKEKEKK |
| | | | | | | KDNNIPLQTVATIS |
| 816 | 2166 | A | 6646 | 1 | 3811 | RDRAGVRPAGKQHIAAAAFYDVGGDRPWDS |
| | | | | | | GNTQLPPRNPVKANAIVIFGAGDEDDTDFLSPS |
| | | | | | | GGARLASLFGLDQAAAGHGNEFFQYTAPKQP |
| | | | | | | KKGQGTAATGNQATPKTAPATMSTPTILVAT |
| | | | | | | AVHAYRYTNGQYVKQGKFGAAVLGNHTTR |
| | | | | | | EYRILLYISQQQPVTVARIHVNFELMVRPNNY |
| | | | | | | STFYDDQRQNWSIMFESEKAAVEFNKQVCIA |
| | | | | | | KCNSTSSLDAVLSQDLIVADGPAVEVGDSLE |
| | | | | | | VAYTGWLFQNHYLGQVFDSTANKDKLLRLK |
| | | | | | | LGSGKVIKGWEDGMLGMKKQGKRLLIVPPA |
| | | | | | | CAVGSEGVIGWTQATDSTLVFEVEVRRVKIA |
| | | | | | | KDSGSDGHSVSSRDSAAPSPIPGADNLSADPV |
| | | | | | | VSPPTSIPFKSGEPALRTKSNSLSEQLAINTSPD |
| | | | | | | AVKAKLISRMAKMGQPMLPILPPQLDSNDSEI |
| | | | | | | EDVNTLQGGGQPVVTPSVQPSLQPAHPALPQ |
| | | | | | | MTSQAPQPSVTGLQAPSAALMQVSSLDSHSA |
| | | | | | | VSGNAQSFQPYAGMQAYAYPQASAVTSQLQ |
| | | | | | | PVRPLYPAPLSQPPHFQGSGDMASFLMTEAR |
| | | | | | | QHNTEIRMAVSKVADKMDHLMTKVEELQKH |
| | | | | | | SAGNSMLIPSMSVTMETSMIMSNIQRIIQENER |
| | | | | | | LKQEILEKSNRIEEQNDKISELIERNQRYVEQS |
| | | | | | | NLMMEKRNNSLQTATENTQARVLHAEQEKA |
| | | | | | | KVTEELAAATAQVSHLQLKMTAHQKKETEL |
| | | | | | | QMQLTESLKETDLLRGQLTKVQAKLSELQET |
| | | | | | | SEQAQSKFKSEKQNRKQLELKVTSLEEELTDL |
| | | | | | | RVEKESLEKNLSERKKKSAQERSQAEEEIDEI |
| | | | | | | RKSYQEELDKLRQLLKKTRVSTDQAAAEQLS |
| | | | | | | LVQAELQTQWEAKCEHLLASAKDEHLQQYQ |
| | | | | | | EVCAQRDAYQQKLVQLQEKSVCFA\CLALQA |
| | | | | | | QITALTKQNEQHIKELEKNKSQMSGVEAAAS |
| | | | | | | DPSEKVKKIMNQVFQSLREEFELEESYNGRTI |
| | | | | | | LGTIMNTIKMVTLQLLNQQEQEKEESSSEEEE |
| | | | | | | EKAEERPRRPSQEQSASASSGQPQAPLNRERP |
| | | | | | | ESPMVPSEQVVEEAVPLPPQALITSQDGHRR |
| | | | | | | KGDSEAEALSEIKDGSLPPELSCIPSHRVLGPP |
| | | | | | | TSIPPEPLGPVSMDSECEESLAASPMAAK\PDN |
| | | | | | | PSGK\VCVREVAPDGPLQESSTRLSLTS\DPEE |
| | | | | | | GDPLALGPESPGEPQPPQLKICDDVTSSTGPHK |
| | | | | | | ELSSTEAGSTVAGAALRPSHHSQRSSLSGDEE |
| | | | | | | DELFKGATLKALRPKAQPEEEDEDEVSMKGR |
| | | | | | | PPPTPLFGDDDDDDDIDWLG |
| 817 | 2167 | A | 6649 | 63 | 1073 | FFRSSSDNGSPIRQYE/HSTPAHQGPVMGLEG |
| | | | | | | KS/ARNSQLRIVLVGKTGAGKSATGNSILGRK |
| | | | | | | VFHSGTAAKSITKKCEKRSSSWKETELVVVD |
| | | | | | | TPGIFDTEVPNAETSKETIRCILLTSPGPHALLL |
| | | | | | | VVPLGRYTEEEHKATEKILKMFGERARSFMIL |
| | | | | | | TFTRKDDLGDTNLHDYLREAPEDIQDLMDIFG |
| | | | | | | DRYCALNNKATGAEQEAQRAQLLGLIQRVV |
| | | | | | | RENKEGCYTNRMYQRAEEEIQKQTQAMQEL |
| | | | | | | HRVELEREKARIREEYEEKIRKLEDKVEQEKR |
| | | | | | | KKQMEKKLAEQEAHYAVRQQRARTEVESKD |
| | | | | | | GILELIMTALQIASFILLRLFAED |
| 818 | 2168 | A | 6660 | 357 | 1890 | APSGSWTRVVLTLDPCSLRSRSPRSLLDPGMP |
| | | | | | | GISARGLSHEGRKQLAVNLTRVLALYRSILDA |
| | | | | | | YIIEFF\TDNLWDTLPCSWQEALDGLKPPQLA |
| | | | | | | TMLLGMPGEGEVVRYRSVWPLTLLALKSTA |
| | | | | | | CALAFTRMPGFQTPSEFLEIWSQSSRLTAPFR |
| | | | | | | KHVRPKKQHEIRRLGELVKKLSDFT/GLHPGC |
| | | | | | | RRGLRPG\HLSRFMALGLGLMVKSIEGDQRL |
| | | | | | | VERAQRLDQELLQALEKEEKRNPQVVQTSPR |
| | | | | | | HSPHHVVRWVDPTALCEELLLPLENPCQGRA |
| | | | | | | RLLLTGLHACG\DLSVALLPIIFSCCPEVVALA |
| | | | | | | SVGCGYMKLSDPGGYPLSQWVAGLPGYELP |
| | | | | | | YRLREGACHALEEYAERLQKAGPGLRTHCY |
| | | | | | | RAALETVIRRARPELRRPGVQGIPRVHELKIEE |
| | | | | | | YVQRGLQRVGLDPQLPLNLAALQAHLAQEN |
| | | | | | | RVVAFFSLALLLAPLVETLILLDRLLYLQEQA |
| | | | | | | LSP\GFHAELLPIPSPELSPPNLVLVATKMPLG |
| | | | | | | QALSVLETEDS |
| 819 | 2169 | A | 6661 | 65 | 2686 | SGSGHCLAEAASMGPWGWKLRWIWALLLA |
| | | | | | | AAGTAVGDRCERNEFQCQDGKCISYKWVCD |
| | | | | | | GSAECQDGSDESQETCLSVTCKSGDFSCGGR |
| | | | | | | VNRCIPQFWRCDGQVDCDNGSDEQGCPPKTC |
| | | | | | | SQDEFRCHDGKCISRQFVCDSDRDCLDGSDE |
| | | | | | | ASCPVLTCGPASFQCNSSTCIPQLWACDNDPD |
| | | | | | | CEDGSDEWPQRCRGLYVFQGDSSPCSAFEFH |
| | | | | | | CLSGECIHSSWRCDGGPDCKDKSDEENCAVA |
| | | | | | | TCRPDEFQCSDGNCIHGSRQCDREYDCKDMS |
| | | | | | | DEVGCVNVTLCEGPNKFKCHSGECITLDKVC |
| | | | | | | NMARDCRDWSDEPLKECGTNECLDNNGGCS |
| | | | | | | HVGNDLKIGYECLCPDGFQLVAQRRCEDIDE |
| | | | | | | CQDPDTCSQLCVNLEGGYKCQCEEGFQLDPH |
| | | | | | | TKACKAVGSIAYLFFINRHEVRKMTLDRSEY |
| | | | | | | TSLIPNLRNVVALDTEVASNRIYWSDLSQRMI |
| | | | | | | CSTQLDRAHGVSSYDTVLSRDIQAPDGLAVD |
| | | | | | | WIHSNIYWTDSVLGTVSVADTKGVKRKTLFR |
| | | | | | | ENGSKPRAIVVDPVHGFMYWTDWGTPAIKIK |
| | | | | | | KGGLNGVDIYSLVTENIQWPNGITLDLLSGRL |
| | | | | | | YWVDSKLHSISSIDVNGGNRKTTLEDEKRLAH |
| | | | | | | PFSLAVFEDKVFWTDIINEAIFSANRLTGSDV |
| | | | | | | NLLAENLLSPEDMVLFIINLTQPRGVNWCERT |
| | | | | | | TLSNGGQYLCLPAPQINPHSPKFTCACPDGM |
| | | | | | | LLAR\DMRSCLTEG\EAAVATQETSTVRLKVS |
| | | | | | | STAVRTQHTTTRPVPDTSRLPGATPGLTTVEI |
| | | | | | | VTMSHQALGDVAG\RGN\EKKPSSVRALSIVL |
| | | | | | | PIV\LLVFLCLGVFLLWKNWRLKNINSINFDNP |
| | | | | | | VYQKTTEDEVHICHNQDGYSYPSRQMVSLED |
| | | | | | | DVA |
| 820 | 2170 | A | 6666 | 17 | 4146 | ERGISSQIKGMKSGSGGGSPTSLWGLLFLSAA |
| | | | | | | LSLWPTSQEICGPGIDIRNDYQQLKELENCTVI |
| | | | | | | EGYLHTLLISKAEDYRSYRFPKLTVITEYLLLF |
| | | | | | | RVAGLESLGDLFPNLTVTRGWKLFYNYALVIP |
| | | | | | | EMTNLKDIGLYNLRNITRG\AIRIEKNADLCYL |
| | | | | | | STVDWSLILDAVSNNYIVGNKPPKECGDLCP |
| | | | | | | GTMEEKPMCEKTTINNEYNYRCWTTNRCQK |
| | | | | | | MCPSTCGKRACTENNECCHPECLGSCSAPDN |
| | | | | | | DTACVACRHYYYAGVCVPACPPNTYRFEGW |
| | | | | | | RCVDRDFCANILSAESSDSEGFVIHDGECMQE |
| | | | | | | CPSGFIRNGSQSMYCIPCEGPCPKVCEEEKKT |
| | | | | | | KTIDSVTSAQMLQGCTIFKGNLLINIRRGNNIA |
| | | | | | | SELENFMGLIEVVTGYVKIRLHSHALVSLSFLK |
| | | | | | | NLRLILGEEQLEGNYSFYVLDNQNLQQLWD |
| | | | | | | WDHRNLTIKAGKMYFAFNPKLCVSEIYRMEE |
| | | | | | | VTGTKGRQSKGDINTRNNGERASCESDVLHF |
| | | | | | | TSTTTSKNRIIITWHRYRPPDYRDLISFTVYYK |
| | | | | | | EAPFKNVTEYDGQDACGSNSWNMVDVDLPP |
| | | | | | | NKDVEPGILLHGLKPWTQYAVYVKAVTLTM |
| | | | | | | VENDHIRGAKSEILYIRTNASVPSIPLDVLSAS |
| | | | | | | NSSSQLIVKWNPPSLPNGNLSYYIYRWQRQP |
| | | | | | | QDGYLYRHNYCSKDKIPIRKYADGTIDIEEVT |
| | | | | | | ENPKTEVCGGEKGPCCACPKTEAEKQAEKEE |
| | | | | | | AEYRKVFENFLHNSIFVPRPERKRRDVMQVA |
| | | | | | | NTTMSSRSRNTTAADTYNITDPEELETEYPPF |
| | | | | | | ESRVDNKERTVISNLRPFTLYRIDIHSCNHEAE |
| | | | | | | KLGCSASNFVFARTMPAEGADDIPGPVTWEP |
| | | | | | | RPENSIFLKWPEPENPNGLILMYEIKYGSQVE |
| | | | | | | DQRECVSRQEYRKYGGAKLNRLNPGNYTARI |
| | | | | | | QATSLSGNGSWTDPVFFYVQAKRYENFIHLII |
| | | | | | | ALPVAVLLIVGGLVIMLYVFILRKRNNSRLGN |
| | | | | | | GVLYASVNPEYPSAADVYVPDEWEVAREKIT |
| | | | | | | MSRELGQGSFGMVYEGVAKGVVKDEPETRV |
| | | | | | | AIKTVNEAASMRERIEFLNEASVIVIKEFNCHH |
| | | | | | | VVRLLGVVSQGQPTLVIMELMTRGDLKSYLR |
| | | | | | | SLRPEMENNPVLAPPSLSKMIQMAGEIADGM |
| | | | | | | AYLNANKFVHRDLAARNCMVAEDFTVKIGD |
| | | | | | | FGMTRDWETDYYRKGGKGLLPVRWMSPESL |
| | | | | | | KDGVFTTYSDVWSFGVVLWEIATLAEQPYQ |
| | | | | | | GLSNEQVLRFV\MEGGLLDKPDNCPDMLFEL |
| | | | | | | MRMCWQYNPKMRPSFLEIISSIKEEMEPGFRE |
| | | | | | | VSFYYSEENKLPEPEELDLEPENMESVPLDPS |
| | | | | | | ASSSSLPLPDRHSGHKAENGPGPGVLVLRASF |
| | | | | | | DERQPYAHMNGGRKNERALPLPQSSTC |
| 821 | 2171 | A | 6691 | 106 | 825 | GRVLFRGCGVGHKGQVLMGTFILAQDWLSE |
| | | | | | | SNHVFCVSSMLRLQKRLASSVLRCGKKKVW |
| | | | | | | LDPNETNEIANANSRQQIRKLIKDGLIIRKPVT |
| | | | | | | VHSRARCRKNTLARRKGRHMGIGKRKGTAN |
| | | | | | | ARMPEKVTWMRRMRILRRLLRRYRES/KRYR |
| | | | | | | ESKKIDRHMYHSLYLKVKGNVFKNKRILMEH |
| | | | | | | IHKLKADKARKKLLADQAEARRSKTKEAPK |
| | | | | | | RREERLQAKKEEIIKTLSKEEETKK |
| 822 | 2172 | A | 6715 | 772 | 21 | DFRPGLLLPRKKKMFGFHKPKMYRSIEGC\CI |
| | | | | | | SGAKSSSS\RYIDSKRYEK\DFQ\SCFGLHETR\ |
| | | | | | | SGDI\CNA\CVLL\LKRWKKLPAGSKIQNWNH |
| | | | | | | VVDARAGPS\LKTTLKPKKVKTL\SGNRIK\ST |
| | | | | | | QISKLQKEFKR\HNSDAHSTTS\SASP\AQSPLF |
| | | | | | | TVNQFRWTGSDTGVGFPGSNENHPVFSFLDL\ |
| | | | | | | TYWKRQKICCGIMYKGRFGEVLTDTHLFKPCC |
| | | | | | | SNKKA\AAEKPEEQGPEPLPISTQEWVTEVFM |
| 823 | 2173 | A | 6727 | 3 | 4063 | PYLATLQLDSSLLIPPKYQTPPAAAQGQATPG |
| | | | | | | NAGPLAPNGSAAPPAGSAFNPTSNSSSTNPAA |
| | | | | | | SSSASGSSVPPVSSSASAPGISQISTTSSSGFSGS |
| | | | | | | VGGQNPSTGGISADRTQGMGCGGDTDPGQS |
| | | | | | | SSQPSQDGQESNYPSVGSLADPDYLNTPQMN |
| | | | | | | TPVTLNSAAPASNSGAGVLPSPATPRFSVPTP |
| | | | | | | RTPRTPRTPRGGGTASGQGSVKYDSTDQGSP |
| | | | | | | ASTPSITRPLNSVEPATMQPIPEAHSLYVTLIL |
| | | | | | | SDSVMNIFKDRNFDSCGICACNMNIKGADVG |
| | | | | | | LYIPDSSNEDQYRCTCGFSAIMNRKLGYNSGL |
| | | | | | | FLEDELDIFGKNSDIGQAAERRLM\MCQSTFL |
| | | | | | | PQVEGTKKPQEPPISLLLLLQNQHTQPFASLN |
| | | | | | | FLDYISSNNRQTLPCVSWSYDRVQADNNDY |
| | | | | | | WTECFNALEQGRQYVDNPTGGKVDEALVRS |
| | | | | | | ATVHSWPHSNVLDISMLSSQDVVRMLLSLQP |
| | | | | | | FLQDAIQKKRTGRTWENIQHVQGPLTWQQFH |
| | | | | | | KMAGRGTYGSEESPEPLPIPTLLVGYDKDFLT |
| | | | | | | ISPFSLPFWERLLLDPYGGHRDVAYIVVCPEN |
| | | | | | | EALLEGAKTFFRDLSAVYEMCRLGQHKPICK |
| | | | | | | VLRDGIMRVGKTVAQKLTDELVSEWFNQPW |
| | | | | | | SGEENDNHSRLKLYAQVCRHHLAPYLATLQL |
| | | | | | | DSSLLLPPKYQTPPAAAQGQATPGNAGPLAIPN |
| | | | | | | GSAAPPAGSAFNPTSNSSSTNPAASSSASGSSV |
| | | | | | | PPVSSSASAPGISQISTTSSSGPSGSVGGQNPST |
| | | | | | | GGISADRTQGNGCGGDTLPGQSSSQPSQDG |
| | | | | | | QESVTERERIGIPTEPDSADSHAHPPAVVIYM |
| | | | | | | VDPFTYAAEEDSTSGNFWLLSLMRCYTEMLD |
| | | | | | | NLPEHMRNSFILQIVPCQYMLQTMKDEQVFY |
| | | | | | | IQYLKSMAFSVYCQCRRPLPTQIIIIKSLTGFGP |
| | | | | | | AASIEMTLKNPERPSPIQLYSPPFILAPIKDKQT |
| | | | | | | ELGETFGEASQKYNVLFVGYGLSHDQRWLL |
| | | | | | | ASCTDLHGELLETCVVNIALPNRSRRSKVSAR |
| | | | | | | KIGLQKLWEWCIGIVQMTSLPWRVVIGRLGR |
| | | | | | | LGHGELKDWSILLGECSLQTISKKLKDVCRM |
| | | | | | | CGISAADSPSILSACLVAMEPQGSFVVMPDAV |
| | | | | | | TMGSVFGRSTALNMQSSQLNTPQDASCTHIL |
| | | | | | | VFPTSSTIQVAPANYPNEDGFSPNNDDMFVDL |
| | | | | | | PFPDDMDNDIGILMTGNLHSSPNSSPVPSPGSP |
| | | | | | | SGIGVGSHFQHSRSQGERLLSREAPEELKQQP |
| | | | | | | LALGYFVSTAKAENLPQWFWSSCPQAQN\QC |
| | | | | | | PLFLKASLHHHISVAQTDELLPARNSQRVPHP |
| | | | | | | LDSKTTSDVLRFVLEQYNALSWLTCNPATQD |
| | | | | | | RTSCLPVHFVVLTQLYNAIMNIL |
| 824 | 2174 | A | 6732 | 2440 | 365 | VEEGLGRRRTPPCIGRRGPVTPARPGPDSVRR |
| | | | | | | RLLPPSSAAAFSSHRHNLLCSRRRGGGGGGG |
| | | | | | | GGGGGTIKRPGLTGPTAATSPSGEPGNAASAP |
| | | | | | | LSLLSPFPGQTTYQHPGVAEPSAYGGRDVAC |
| | | | | | | ASLVFGRLQHRGGDRKRGLLGRSSGDAASD |
| | | | | | | QPFRCRSGSTAGRLVKQMDFTEAYADTCSTV |
| | | | | | | GLAAREGNVKVLRKLLKKGRSVDVADNRG |
| | | | | | | WMPIHEAAYHNSVECLQMLTNADSSENYIKM |
| | | | | | | KTFEGFCALHLAASQGHWKIVQILLEAGADP |
| | | | | | | NATILEETITPLFLAVENGQIDVLRLLLQHGAN |
| | | | | | | VNGSHSMCGWNSLHQASFQENAEIIKLLLRK |
| | | | | | | GANKECQDDFGITPLFVAAQYG\KLESL\SILIS |
| | | | | | | SG\ANVNCQALDKATPLFIAAQEGHTKCVELL |
| | | | | | | LSSGADPDLYCNEDSWQLPTHAAAQMGHTKI |
| | | | | | | LDLLIPLTNRACDTGLNKVSPVYSAVFGGHE |
| | | | | | | DCLEILLRNGYSPDAQACLVFGFSSPVCMAFQ |
| | | | | | | KDCEFPGIVNILLKYGAQINELHLAYCLKYEK |
| | | | | | | FSIFRYFLRKGCSLGPWNHIYEFVNHAIKAQA |
| | | | | | | KYKEWLPHLLVAGFDPLTLLCNSWIDSVSIDT |
| | | | | | | LIFTLEFTNWKTLAFAVERMLSARASNAWIL |
| | | | | | | QQHIATVPSLTHLCRLEIRSSLKSERLRSDSYIS |
| | | | | | | QLPLPRSLHNYLLYEDVLRMYEVPELAMQD |
| 825 | 2175 | A | 6735 | 277 | 1252 | RIMGLFDRGVQMLLTTVGAFAAFSLMTIAVG |
| | | | | | | TDYWLYSRGVCKTKSVSENETSKKNEEVMT |
| | | | | | | HSGLWRTCCLEGNFKGLCKQIDHFPEDADYE |
| | | | | | | DTAEYFLRAVASSIFPILSVILLFMGGLCIA |
| | | | | | | ASEFYKTRHNLILSAGIFFVSAGLSNIIGIWYIS |
| | | | | | | ANAGDPSKSDSKKNSYSYGWSFYFGALSFIIA |
| | | | | | | EMVGVLAVHMFIDRHKQLRATAIRA\TDYLQ |
| | | | | | | ASAITRIPSYRYRYQRRSRSSSRSTEPSHSRDA |
| | | | | | | SPVGIKGFNTLPSTEISMYTLSRDPLKAATTPT |
| | | | | | | ATYNSDRDNSPLQVHNCIQKENKDSLHSNTA |
| | | | | | | NRRTTPV |
| 826 | 2176 | A | 6744 | 3 | 5177 | SDDLRTGLFQDVQDAESLKLPGVYEVLFYNE |
| | | | | | | TEDCPGMMLWRYPEPRGLTLVRITPVPFNTT |
| | | | | | | EDPDISTADLGDVLQDPCSLEYWDELQKVFV |
| | | | | | | AFREFNLSESKVCELQLPDINLVNDQKKLVSS |
| | | | | | | DLWRIVLNSSQNGADDQSSASESGSQSTCDPL |
| | | | | | | VTPTALAACTRVDSCFTPWFVPSLCVSFQFAH |
| | | | | | | LEFLCLDQLGTAAPQYLQPFVSDRNMPS |
| | | | | | | ELEYMLVSFREPHMYLRQWNNGSVCQEIQFL |
| | | | | | | AQADCKLLECENVTMQSVVKPFSIFGQMAVS |
| | | | | | | SDVVEKLLDCTVIYDSVFVNLGQHVVHSLNT |
| | | | | | | AIQAWQQNKCPEVEELVFSHPVICNDTQETL |
| | | | | | | RFGQVDTDENTLLASLHSHQYSWRSHKSPQL |
| | | | | | | LHICIEGWGNWRWSEPFSVDHAGTFIRTIQYR |
| | | | | | | GRTASLIIKVQQLNGVQKQIIICGRQIICSYLSQ |
| | | | | | | SIELKVVQHYIGQDGQAVVREIIFDCLTAKQK |
| | | | | | | LPSYILENNELTELCVKAKGDEDWSRDVCLE |
| | | | | | | SKAPEYSIVIQVPSSNSSIIYVWCTVLTLEPNS |
| | | | | | | QVQQRMIVFSPLFIMRSHLPDPIIIHLEKRSLGL |
| | | | | | | SETQILPGKGQEKPLQNIEPDLVHHLTFQAREE |
| | | | | | | YDPSDCAVPISTSLTKQIATKVHPGGTVNQILD |
| | | | | | | EFYGPEKSLQPIWPYNKKDSDRNEQLSQWDS |
| | | | | | | PMRVKLSIWKPYVRTLLIELLPWALLINESKW |
| | | | | | | DLWLFEGEKIVLQVPAGKIIIPPNFQEAFQIGW |
| | | | | | | WANTNTVHKSVAIKLVHNLTSPKWKDGGNG |
| | | | | | | EVVTLDEEAFVDTEIRLGAFPGHQKLCQFCIS |
| | | | | | | SMVQQGIQIIQIEDK1TIINNTPYQIPYKPQLSV |
| | | | | | | CNPHSGKEYFRVPDSATFSICPGGEQPAMKSS |
| | | | | | | SLPCWDLMPDISQSVLDASLLQKQIMLGFSPA |
| | | | | | | PGADSSQCWSLPAIYRPEFPRQSVAVPLGNFR |
| | | | | | | ENGFCTRAIVLTYQEHLGVTYLTLSEDPSPRV |
| | | | | | | IIHNRCPVKMLIKENIKDLPKFEVYCKKIPSECS |
| | | | | | | IHHELYHQISSYPDCKTKDLLPSLLLRVEPLDE |
| | | | | | | VTTEWSDAIDINSQGTQVVFLTGFGYVYVDV |
| | | | | | | VHQCGTVFITVAPEGKAGPILTNTNRAPEKIV |
| | | | | | | TF/KMFITQLSLAVFDDLTHHKASAELLRLTL |
| | | | | | | DNIFLCVAPGAGPLPGEEPVAALFELYCVEIC |
| | | | | | | CGDLQLDNQLYNKSNFHFAVLVCQGEKAEPI |
| | | | | | | QGSKMQSLLISNKELEEYKEKCPIKLCITLNEG |
| | | | | | | KSELCDINEFSFELKPARLYVEDTFVYYIKTLF |
| | | | | | | DTYLPNSRLAGHSTHLSGGKQVLPMQVTQH |
| | | | | | | ARALVNPVKLRKLVIQPVNLLVSIHASLKLYI |
| | | | | | | ASDHTPLSFSVFERGPIFTTARQLVHALAMHY |
| | | | | | | AAGALFRAGWVVGSLDILGSPASLVRSIGNG |
| | | | | | | VADFFRLPYEGLTRGPGAFVSGVSRGITSFVK |
| | | | | | | HISKGTLTSITNLATSLARNMDRLSLDEEHYN |
| | | | | | | RQEEWRRQLPESLGEGLRQGLSRLGISLLGAI |
| | | | | | | AGIVDQPMQNFQKTSEAQASAGHKAKGVISG |
| | | | | | | VGKGIMGVFTKPIGGAAELVSQTGYGILHGA |
| | | | | | | GLSQLPKQRHQPSD\VHADQAPNSHVKYVW |
| | | | | | | KMLQSLGRPEVHMALDVVLVRGSGQEHEGC |
| | | | | | | LLLTSEVLFVVSVSEDTQQQAFPVTEIDCAQD |
| | | | | | | SKQNNLLTVQLKQPRVACDVEVDGVRERLSE |
| | | | | | | QQYNRLVDYITKTSCHLAPSCSSMQIPCPVVA |
| | | | | | | AEPPPSTVKTYHYLVDPHFAQVFLSKFTMVK |
| | | | | | | NKALRKGFP |
| 827 | 2177 | A | 6748 | 2 | 1662 | FVGAPRRGNPFGSPGNPGRHQGPCHRPRGTK |
| | | | | | | ASGVSPTLWRPQAAATGLEMPSSGRALLDSP |
| | | | | | | LDSGSLTSLDSSVFCSEGEGEPLALGDCFTVN |
| | | | | | | VGGSRFVLSQQALSCFPHTRLGKLAVVVASY |
| | | | | | | RRPGALAAVPSPLELCDDANPVDNEYFFDRS |
| | | | | | | SQAFRYVLHYYRTGRLHYMEQLCALSFLQEI |
| | | | | | | QYWGIDELSIDSCCRDRYFRRKELSETLDFKK |
| | | | | | | DTEDQESQHESEQDFSQGPCPTVRQKLWNIL |
| | | | | | | EKPGSSTAARIFGVISIIFVGVSIINMALMSAEL |
| | | | | | | SWLDLQLLEILEYVCISWFTGEFVLRFLCVRD |
| | | | | | | RCRFLRKVPNIIDLLAILPFYITLLVESLSG\SQT |
| | | | | | | TQEL\ENVGAHCPGCLRLLRAL\RMLKAWGR |
| | | | | | | HSTGLRSLGMTITQCYEEVGLLLLFLSVGISIF |
| | | | | | | STVEYFAEQSIPDTTFTSVPCAWWWATTSMT |
| | | | | | | TVGYGDIEPDTTTGKIVAFMCILSGIINLALPI |
| | | | | | | AIINDRFSACYFTLKLKEAAVRQREALKKLTK |
| | | | | | | NIATDSYISVNLRDVYARSIMEMLRLKGRER |
| | | | | | | ASTRSSGGDDFWF |
| 828 | 2178 | A | 6786 | 5672 | 1360 | GTHPASSGPVPLPPAAVSAATREELGEPVPFV |
| | | | | | | TASSGFQSMLHSSNPKVRSSPSGNTQSSPKSKQ |
| | | | | | | EVMVRPPTVMSPSGNPQLDSKFSNQGKQQGS |
| | | | | | | ASQSQPSPCDSKSGGHTPKALPGPGGSMGLK |
| | | | | | | NGAGNGAKGKGKRERSISADSFDQRDPGTPN |
| | | | | | | DDSDIKECNSADHIKSQDSQHTPHSMTPSNAT |
| | | | | | | APRSSTPPHGQTTATEPTPAQKTPAKVVYVFS |
| | | | | | | TEMANKAAEAVLKGQVETIVSFHIQNISNNK |
| | | | | | | TERSTAPLNTQISALRNDPKPLPQQPPAPANQ |
| | | | | | | DQNSSQNTRLQPTPPIPAPAPKPAAPPRPLDRE |
| | | | | | | SPGVENKLIPSVGSPASSTPLPPDGTGPNSTPN |
| | | | | | | NRAVTPVSQGSNSSSADPKAPPPPPVSSGEPPT |
| | | | | | | LGENPDGLSQEQLEIIRERSLQTLRDIQRMLFP |
| | | | | | | DEKEFTGAQSGGPQQNPGVLDGPQKKPEGPI |
| | | | | | | QAMMAQSQSLGKGPGPRTDVGAFFGPQGHR |
| | | | | | | DVPFSPDEMVPPSMNSQSGTIGPDHLDHMTP |
| | | | | | | EQIAWLKLQQEFYEEKRRKPEQVVVQQCSLQ |
| | | | | | | DMMVHQHGPRGVVRGPPPPYQMTPSEGWAP |
| | | | | | | GGTEPFSDGINMPHSLPPRGMAPHPNMPQSQ |
| | | | | | | MRLPQFAGMINSEMEGPNVPNPASRLPGLSGV |
| | | | | | | SWPDDVPKIPDGRNPPPGQGIFSGPGRGERFP |
| | | | | | | NPQGLSEEMFQQQLAEKQLGLPPGMAMEGIR |
| | | | | | | PSMEMNRMIPGSQRIIMEPGNNPIFPRIPVEGP |
| | | | | | | LSPSRGDFPKGIPPQMGPGRELEFGMVPSGM |
| | | | | | | KGDVNLNVNMGSNSQMIPQKMREAGAGPEE |
| | | | | | | MLKLRPGGSDMLPAQQKMVPLPFGEHPQQE |
| | | | | | | YQMGPRPFLPMSQGPGSNSGLRNLRRPIGPDQ |
| | | | | | | RTNSRLSHMPPLPLNPSSNPTSLNTAPPVQRG |
| | | | | | | LGRKPLDISVAGSQVHSPGINFLKSPTMHQVQ |
| | | | | | | SPMLGSPSGNLKSPQTPSQLAGMLAGPAAAA |
| | | | | | | SIKSPPVLGSAAASPVHLKSPSLPAPSPGWTSS |
| | | | | | | PEPPLQSPGIPPNHKAPLTMASPAMLGNVESG |
| | | | | | | GPPPPTASQPASVNIPG\SLPSSTPYTMPPEPTL |
| | | | | | | SQNFLSIM\MSR\MSKFAM\PS\SNPGYNHDAI |
| | | | | | | KTVASSDDDSPPARSPNLPSMNNMPGMGINT |
| | | | | | | QNPRLISGPNPVVPMPTLSPMGMTQPLSHSNQ |
| | | | | | | MPSPNAVGPNIPPHGVPMGPGLMSHNPIMGH |
| | | | | | | GSQEPPMVPQGRMGFPQGFPPVQSPPQQVPFP |
| | | | | | | HNGPSGGQGSFPGGMGFPGEGPLGRPSNLPQ |
| | | | | | | SSADAALCKPGQPGGPDSFTVLGNSMPSVFT |
| | | | | | | DPDLQEVIRPGATGIPEFDLSRIIPSEKPSQTLQ |
| | | | | | | YFPRGEVPGRKQPQGPGPGFSHMQGMMGEQ |
| | | | | | | APRMGLALPGMGGPGPVGTPDIPLGTAPSMP |
| | | | | | | GHNPMRPPAFLQQGMMGPHHRMMSPAQST |
| | | | | | | MPGQPTLMSNPAAAVGMIPGKDRGPAGLYT |
| | | | | | | HPGPVGSPGMMMSMQGMMGP\NRTS |
| 829 | 2179 | A | 6797 | 433 | 3 | ASFFSICICKIILEVGPPVGHPAHDDVGGRH |
| | | | | | | GPGGRIGSRSPRSLQCAPGGGRRSGCPAGSSP |
| | | | | | | ASTCPPSPGGSGADRFGPSPPPPSREAAPTAG |
| | | | | | | AAASSTSSGASCPPVPASSRWGVRSRTRSGSG |
| | | | | | | GEREPRDRPSERPRLV |
| 830 | 2180 | A | 6800 | 3 | 1911 | LPERAFGPRTPRAPRRRRRRLLLSPPPRPPPPL |
| | | | | | | DREPRAPGPWLCPSRAGTAQDPARIRERRGR |
| | | | | | | VAGGAAGPAMELRARGWWLLCAAAALVAC |
| | | | | | | ARGDPASKSRSCGEVRQIYGAKGFSSS\DVPQ |
| | | | | | | AEISGEHLPICPQGYTCCTSEMEENLANRSHA |
| | | | | | | ELETALRDSSRVLQAMLATQLRSFDDHFQHL |
| | | | | | | LNDSERTLQATFPGAFGELYTQNARAFRDLY |
| | | | | | | SELRLYYRGANLHLEETLAEFWARLLERLFK |
| | | | | | | QLHPQLLLPDDYLDCLGKQAEALRPF\GEAP\ |
| | | | | | | RELRLRAT\RA\FVAAR\SFVQGLGVAS\DVVR |
| | | | | | | KVAQVPLG\PEC\SRAVIEAGSYC/ALHCVGVP |
| | | | | | | GARPCPDYCRNVLKGCLANQADLDAEWRNL |
| | | | | | | LDSMVLITDKFWGTSGVESVIGSVHTWLAEA |
| | | | | | | INALQDNRDTLTAKVLQGCGNPKVNPQGPGP |
| | | | | | | EEKRRRGKLAPRERPPSGTLEKLVSEAIKAQL |
| | | | | | | RDVQDFWISLPGTLCSEKMALSTASDDRCWN |
| | | | | | | GMARGRYLPEVMGDGLANQINNPEVEVDIT |
| | | | | | | KPDMTIRQQIMQLKIMTNRLRSAYNGNDVDF |
| | | | | | | QDASDDGSGSGSGDGCLDDLCGRKVSRKSSS |
| | | | | | | SRTPLTHALPGLSEQEGQKTSAASCPQPPTFL |
| | | | | | | LPLLLFLALTVARPRWR |
| 831 | 2181 | A | 6808 | 2 | 1522 | ASRHGMTPGALLMLLGALGPPLAFGVRGSEA |
| | | | | | | EGRLREKLFSGYDSSVRPAEEVGDRVRVSVG |
| | | | | | | LILAQLISLNEKDEEMSTKVYLDLEWTDYRLS |
| | | | | | | WDPAEHDGIDSLRITAESVWLPDVVLLNNND |
| | | | | | | GNFDVALDISVVVSSDGSVRWQPPGIYRSSCS |
| | | | | | | IQVTYFPFDWQNCTMVFSSYSYDSSEVSLQT |
| | | | | | | GLGPDGQGHQEIHTHEGTFIENGQWENTHKPS |
| | | | | | | RLIQPPGDPRGGREGQRQEVIFYLIIRRKPLFY |
| | | | | | | LVNVIAPCILITLLAIFVFYLPPDAGEKMGLSIF |
| | | | | | | ALLTLTVFLLLLADKVPFTSLSVPIIIKYLMFT |
| | | | | | | MVLVTFSVILSVVVLNLHHRSPHTHQMPLWV |
| | | | | | | RQIFIHKLPLYLRLKRPKPERDLMPEPPHCSSP |
| | | | | | | GSGWGRGTDEYFIRKPPSDFLFPKPNRFQPEL |
| | | | | | | SAPDLRRFIDGPNRAVALLPELREVVSSISYIA |
| | | | | | | RQLQEQEDHDALKEDWQFVAMVVDRLFLW |
| | | | | | | TFIIFTSVGTL\VIFLDATYHLPPPDPFP |
| 832 | 2182 | A | 6824 | 71 | 1079 | ETMAKNPPENCEDCHILNAEAFKSKKICKSLK |
| | | | | | | ICGLVFGILALTLIVLFWGSKHFWPEVPKKAY |
| | | | | | | DMEHTFYSNGEKKKIYMEIDPVTRTEIFRSGN |
| | | | | | | GTDETLEVHDPKNGYTGIYFVGLQKCFIKTQI |
| | | | | | | KVIPEFSEPEEEIDENEE1TITFFEQSVIWVPAE |
| | | | | | | KPIENRDFLKNSKILEICDNVTMYW\TNPTL\IS |
| | | | | | | GTFAKQLHHNFAFIILVSELQDFEEEGEDLHFP |
| | | | | | | ANEKKGTEQNEQWVVPQVKVEKTRHARQAS |
| | | | | | | EEELPINDYTLNGIEFDPIVELDERGYCCIYCRR |
| | | | | | | GNRYCRRVCEPLLGYYPYPYCYQGGRVICRV |
| | | | | | | IMPCNWWVARMLGRV |
| 833 | 2183 | A | 6846 | 116 | 602 | EAEGEQVCCGDAKCCGDAPHVENREEETARIGP |
| | | | | | | GVMESKEERALNNLIVENVNQENDEKDEKE |
| | | | | | | QVANKGEPLALPLNVSEYCVPRGNRRRFRVR |
| | | | | | | QPILQYRWDIMHRLGEPQARMREENMERIGE |
| | | | | | | EVRQLMEKLREKQLSHSLRAVSTDPPHHDHH |
| | | | | | | DEFC\LMP |
| 834 | 2184 | A | 6851 | 3 | 2024 | PNGVALLHLPGAAVIPNTNYMFQDALGGRSR |
| | | | | | | GSREESPAPSRAPASASLWRRLVVVEAKMAA |
| | | | | | | HAAAAAQAAAAQAAHAEAADSWYLALLGF |
| | | | | | | AEHFRTSSPPKIRLCVHCLQAVFPFKPPQRIEA |
| | | | | | | RTHLQLGSVLYHHTKNSEQARSHLEKAWLIS |
| | | | | | | QQIPQFEDVKFEAASLLSELYCQENSVDAAKP |
| | | | | | | LLRKAIQISQQTPYWHCRLLFQLAQLHTLEKD |
| | | | | | | LVSACDLLGVGAEYARVVGSEYTRALFLLSK |
| | | | | | | GMLLLMERKLQEVHPLLTLCGQIVENWQGN |
| | | | | | | PIQKESLRVFFLVLQVTHYLDAGQVKSVKPC |
| | | | | | | LKQLQQCIQTISTLHDDEILPSNPADLFHWLP |
| | | | | | | KEHMCVLVYLVTVMHSMQAGYLEKAQKYT |
| | | | | | | DKALMQLEKLKMLDCSPILSSFQVILLEHIIM |
| | | | | | | CRLVTGHKATALQEISQVCQLCQQSPRLFSN |
| | | | | | | HAAQLHTLLGLYCVSVNCMDNAEAQFITAL |
| | | | | | | RLTNHQELWAFIVTNLASVYIREGNRHQEVV\ |
| | | | | | | LYSLLERINPDHSFPVSSHCLRAAAFYVRGLF |
| | | | | | | SFFQGRYNEAKRFLRETLKMSNAEDLNRLTA |
| | | | | | | CSLVLLGHIFYVLGNHRESNNAVVPAMQLAS |
| | | | | | | KIPDMSVQLWSSALLRDLNKACGNAMDAHE |
| | | | | | | AAQMHQNFSQQLLQDHIEACSLPEIINLITWT |
| | | | | | | DGPPPVQFQAQNGPNTSLASLL |
| 835 | 2185 | A | 6855 | 334 | 1268 | PTRRPILPLTSPKAISVPSPLQGKQHTLVKSCL |
| | | | | | | SVSGIGGPLVSLSSRMKLQTLAVSVTALKFWS |
| | | | | | | AYVPCQTQDRDALRLTLEQLDLIRRMCASYSE |
| | | | | | | LELVTSAKALNDTQKLACLIGVEGGHSLDNS |
| | | | | | | LSILRTFYMLGVRYLTLTHTCNTPWAESSAK |
| | | | | | | GVHSFYNNISGLTDFGEKVVAEMNRLGMMV |
| | | | | | | DLSHVSDAVARRALEVSQAPVIFSHSAARGV |
| | | | | | | CNSARNVPDDILQLLEEERWAFVMVSLFHGE |
| | | | | | | LIQWQPIRPMCSTVADHFDHIKAV\IGSKFIGI |
| | | | | | | GGDYDGAGKYEKKTTCKAPWRTSSRMSS |
| 836 | 2186 | A | 6862 | 315 | 11 | PPRSRPSCWRKKVGPGRPWWWGGTGPPGQG |
| | | | | | | RPEIRLLPLPMTGACGAVAASRTGSSGPG/SSL |
| | | | | | | PNGHGGKGSGLANGLAGNP\GHLGLGSSFGT |
| | | | | | | GPGSGRPPP |
| 837 | 2187 | A | 6863 | 2 | 1615 | VLRGQRGPAGGLAEERRRGRNEWRIHDVIT |
| | | | | | | APFPGLVQRRSRLLIVSQVRYFLKNKVSPDLC |
| | | | | | | NEDGLTALHQCCIDNFEEIVKLLLSHGANVN |
| | | | | | | AKDNELWTPLHAAATCGHINLVKILVQYGA |
| | | | | | | DLLAVNSDGNMPYDLCEDEPTLDVIETCMAY |
| | | | | | | QGITQEKINEMRVAPEQQMIADIHCMIAAGQ |
| | | | | | | DLDWIDAQGATLLHIAGANGYLRAAELLLDH |
| | | | | | | GVRVDVKDWDGWEPLHAAAFWGQMQMAE |
| | | | | | | LLVSHGAN\LNARTSMDEMPIDLCEEEEFKVL |
| | | | | | | LLELK\HKHDVIMKSQLRHKSSLSRRTSHRQA |
| | | | | | | SISVGKVVRRTQPVGTGPNL\YRKEYEIGEEAI |
| | | | | | | LWQRSA\AEDQRTSTYNGDIRET\RTDQENKD |
| | | | | | | PNPRLEK\PVLLSEFPTKIPRGELDMPVENGLR |
| | | | | | | APVSAYQYALANGDVWKVHEVPDYSMAYG |
| | | | | | | NPGVADATPPWSSYKEQSPQTLLELKRQRAA |
| | | | | | | AKLLSHFFLSTHLGSSMARTGESSSEGKAPLI |
| | | | | | | GGRTSPYSSNGTSVYYTVTSGDPPLLKFKAPI |
| | | | | | | EEMEEKVHGCCRIS |
| 838 | 2188 | A | 6865 | 6291 | 739 | AGPLEPRVQGAMALQLWALTLLGLLGAGAS |
| | | | | | | LRPRKLDFFRSEKELNHLAVDEASGVVYLGA |
| | | | | | | VNALYQLDAKLQLEQQVATGPVLDNKKCTP |
| | | | | | | PIEASQCHEAEMTDNVNQLLLVDPPRKRLVE |
| | | | | | | CGQLLKGI\CALRALSNISLRLFYEDGSGEKSF |
| | | | | | | VASNDEGVATVGLVSSTGPGGDRVLFVGKG |
| | | | | | | NGPHDNGLIVSTRLLDRTDSREAFEAYTDHAT |
| | | | | | | YKAGYLSTNTQQFVAAFEDGPYVFFVFNQQD |
| | | | | | | KHPARNRTLLARMCREDPNYYSYLEMDLQC |
| | | | | | | RDPDIHAAAFGTCLAASVAAPGSGRVLYAVF |
| | | | | | | SRDSRSSGGFGAGLCLFPLDEVHAKMEANRN |
| | | | | | | ACYTGTREARDIFYKPFHGDIQCGGHAPGSSK |
| | | | | | | SFPCGSEHLPYPLGSRDGLRGTAVLQRGGLN |
| | | | | | | LTAVTVAAENNHTVAFLGTSDGRILKVYLTP |
| | | | | | | DGTSSEYDSILVEINKRVKRDLVLSGDLGSLY |
| | | | | | | AMTQDKVFRLPVQECLSYPTCTQCRDSQDPY |
| | | | | | | CGWCVVEGRCTRKAECPRAEEASHWLWSRS |
| | | | | | | KSCVAVTSAQPQNMSRRAQGEVQLTVSPLPA |
| | | | | | | LSEEDELLCLFGESPPHPARVEGEAVICNSPSS |
| | | | | | | IPVTPPGQDHVAVTIQLLLRRGNIFLTSYQYPF |
| | | | | | | YDCRQAMSLEENLPCISCVSNRWTCQWDLR |
| | | | | | | YHECREASPNPEDGIVRAHMEDSCPQFLGPSP |
| | | | | | | LVIPMNHETDVNFQGKNLDTVKGSSLHVGSD |
| | | | | | | LLKFMEPVTMQESGTFAFRTPKLSHDANETL |
| | | | | | | PLHLYVKSYGKNIDSKLHVTLYDCSFGRSDC |
| | | | | | | SLCRAANPDYRCAWCGGQSRCVYEALCNTT |
| | | | | | | SECPPPVITRIQPETGPLGGGIRITILGSNLGVQ |
| | | | | | | AGDIQRISVAGRNGSFQPERYSVSTRIVCVIEA |
| | | | | | | AETPFTGGVEVDVFGKLGRSPPNVQFTFQQP |
| | | | | | | KPLSVEPQQGPQAGGTTLTLHGTHLDTGSQED |
| | | | | | | VRVTLNGVPCKVTKFGAQLQCVTGPQATRG |
| | | | | | | QMLLEVSYGGSPVPNPGIFFTYRENPVLRAFE |
| | | | | | | PLRSFASGGRSINVTGQGFSLIQRFAMVVIAEP |
| | | | | | | LQSWQPPREAESLQPMTVVGTDYVFHNDTK |
| | | | | | | VVFLSPAVPEEPEAYNLTVLIEMDGHRALLRT |
| | | | | | | EAGAFEYVPDPTFENFTGGVKKQVNKLIRAR |
| | | | | | | GTNLNKAMTLQEAEAFVGAERCTMKTLTET |
| | | | | | | DLYCEPPEVQPPPKRRQKEIYTTHNLPEFIVKF |
| | | | | | | GSREWVLGRVEYDTRVSDVPLSLILPLVIVPM |
| | | | | | | VVVIAVSVYCYWRKSQQAEREYEKIKSQLEG |
| | | | | | | LEESVRDRCKKEFTDLMIEMEDQTLDVHEAG |
| | | | | | | IPVLDYKTYTDRVFFLPSKDGDKDVMITGKL |
| | | | | | | DIPEPRRPVVEQALYQFSNLLNSKSFLINFIHT |
| | | | | | | L\ENQPEFSARAKVYFASLLTVALHGKLEYYT |
| | | | | | | DIMHTLPLELLEQYVVAKNPKLMLRRSETVV |
| | | | | | | ERMLSNWMSICLYQYLKDSAGEPLYKLFKAI |
| | | | | | | KHQVEKGPVDAVQKKAICYTLNDTGLLGDD |
| | | | | | | VEYAPLTVSVIVQDEGVDAIPVKVLNCDTISQ |
| | | | | | | VKEKIIDQVYRGQPGSCWPRPDSVVLEWRPG |
| | | | | | | STAQILSDLDLTSQREGRWKRVNTLMHYNVR |
| | | | | | | DGATLILSKVGVSQQPEDSQQDLPGERHALL |
| | | | | | | EEENRVWHLVRPTDEVDEGKSKRGSVKEKE |
| | | | | | | RTKAITEIYLTRLLSVKGTLQQFVDNFFQSVL |
| | | | | | | APGIIAVPPAVKYPFDFLDEQAEKIINLQDEDTI |
| | | | | | | HIWKTNSLPLRFWVNILKNFHFIFDVHVHEYV |
| | | | | | | DASLSVIAQTFMDACTRTEHKLSRDSPSNKLL |
| | | | | | | YAKEISTYKKMVEDYYKGIRQMVQVSDQDM |
| | | | | | | NTHLAEISRAHTDSLNTLVALHQLYQYTQKY |
| | | | | | | YDEIINALEEDPAAQKMQLAFRLQQIAAALE |
| | | | | | | NKVTDL |
| 839 | 2189 | A | 6872 | 1 | 1485 | RAERLALQCHVGVCALTPGEQSGRELPGQT |
| | | | | | | WLMFSCFCFSLQDNSFSSTTVTECDEDPVSLH |
| | | | | | | EDQTDCSSLRDENNKENYPDAGALVEEHAPP |
| | | | | | | SWEPQQQNVEATVLVDSVLRPSMGNFKSRKP |
| | | | | | | KSIFKAESGRSHGESQETEHVVSSQSECQVRA |
| | | | | | | GTPAHESPQNNAFKCQETWRL\QPRIDQRTAT |
| | | | | | | SPKDAFETR\QDLNEEEAAQVHGVKDPAPAS |
| | | | | | | TQSVLA\DGTDSADPSPVHKDGQNEADSAIPE |
| | | | | | | DLHSVGTSRLLLIYHITDGDNPTAVRHGCSL/F |
| | | | | | | SGQSQRFNLDPESAPSPPSTQQFMIVIPRSSSRC |
| | | | | | | SCGDGKEPQTITQLTKHIQSLKRKIRKFEEKFE |
| | | | | | | QEKKYRPSHGDKTSNPEVLKWMNDLAKGRK |
| | | | | | | QLKELKLKISEEQGSAPKGFPRNLLCEQPTVP |
| | | | | | | RENGKPEAAGPEPSSSGEETPDAALTCLKERR |
| | | | | | | EQLPPQEDSKVTKQDKNLIKPLYDRYRIIKQIL |
| | | | | | | STPSLIPTIVSQDTCMLLLCTDV |
| 840 | 2190 | A | 6873 | 2 | 2054 | FFRFYFSFIRLFAMSLADLTKTNIDEHFPGVAL |
| | | | | | | ENNRRSAACKRSPGTGDFSRNSNASNKSVDY |
| | | | | | | SRSQCSCGSLSSQYDYSEDFLCDCSEKAINRN |
| | | | | | | YLKQPVVKEKEKKKYNVSKISQSKGQKEISV |
| | | | | | | EKKHTWNASLPNSQIHMIAQRRDAMAHIULS |
| | | | | | | ARLHKIKGLKNELADMHHKLEAILTENQFLK |
| | | | | | | QLQLRHLKAIGKYENSQNNLPQIMAKHQNEV |
| | | | | | | KNLRQLLRKSQEKERTLSRKLRETDSQLLKT |
| | | | | | | KDILQALQKLSEDKNLAEREELTHKLSIITTK |
| | | | | | | MDANDKKIQSLEKQLRLNCRAFSRQLAIETR |
| | | | | | | KTLAAQTATKTLQVEVKHLQQKLKEKDREL |
| | | | | | | EIKNLYSHRILKNLHDTEDYPKVSSTKSVQAD |
| | | | | | | RKILPFTSMRHQGTQKSDVPPL/TITKGKKATG |
| | | | | | | NIDHKEKSTETINHEIPHCVNKLPKQEDSKRKY |
| | | | | | | EDLSGEEKHLEVQILLENTGRQKDKKEDQEK |
| | | | | | | KNIFVKEEQELPPKUEVIHPERESNQEDVLVR |
| | | | | | | EKFKRSMQRNGVDDT\LGKGTAPYTKGPLRQ |
| | | | | | | RRHYSFTEATENLHHGLPASGGPANAGNMR |
| | | | | | | YSHSTGKHLSNREEMELEHS\DSGYEPSFGKS |
| | | | | | | SRIKVKDTTFRDKKSSLMEELFGSGYVLKTD |
| | | | | | | QSSPGVAKGSEEPLQSKESHPLPPSQASTSHA |
| | | | | | | FGDSKVTVVNSIKPSSPTEGKRKIII |
| 841 | 2191 | A | 6874 | 3 | 2867 | SSRTREMEEKEILRRQIRLLQGLIDDYKTLHG |
| | | | | | | NAPAPGTPAASGWQPPTYHSGRAFSARYPRP |
| | | | | | | SRRGYSSHHGPSWRKKYSLVNRPPGPSDPPA |
| | | | | | | DHAVRFLHGARGGQPPVPQQHYLERQVQLS |
| | | | | | | QGQNVVIKVKPPSKSGSASASGAQRGSLEEFE |
| | | | | | | DTPWSDQRPREGEGEPPRGQLQPSRPTRARG |
| | | | | | | TCSVEDPLLVCQKEPGKPRMVKSVGSVGDSP |
| | | | | | | REPRRTVSESVIAVKASFPSSALPPRTGVALG |
| | | | | | | RKLGSHSVASCAPQLLGDRRVDAGHTDQPVP |
| | | | | | | SGSVGGPARPASGPRQAREASLVVTCRTNKF |
| | | | | | | RICNNYKWVAASSKSPRVARRALSPRVAAEN |
| | | | | | | VCKASAGMANKVEKPQLIADPEPKPRKPATS |
| | | | | | | SKPGSAPSKYKWKASSPSASSSSSFRWQSEAG |
| | | | | | | SKDHASQLSPVLSRSPSGD\RPALAHSGLKPLS |
| | | | | | | GETPLSAYKVKTRTKIIRERGSTSLPGDKKSG |
| | | | | | | TSPAATAKSHSLRERQALRGKSSPVLKKTPN |
| | | | | | | KGLVQVTKHRLCRLPPSRAHLPTKEASSLHA |
| | | | | | | VRTAPTSKVIKTRYRIVKKTPASPLSAPPFPLS |
| | | | | | | LPSWRARRLSLSRSLVLNRLRPVASGGGKAQ |
| | | | | | | PGSPWWRSKGYRCTGGVLYKVSANKLSKTSG |
| | | | | | | QPSDAGSRPLLRTGRLDPAGSCSRSLASRAVQ |
| | | | | | | RSLAIIRQARQRREKRKEYCMYYNRFGRCNR |
| | | | | | | GERCPYIHDPEKVAVCTRFVRGTCKKTDGTC |
| | | | | | | PFSHHVSKEKMPVCSYFLKGICSNSNCPYSHV |
| | | | | | | YVSRKAEVCSDFLKGYCPLGAKCKKKHTLLC |
| | | | | | | PDFARRGACPRGAQCQLLHRTQKRHSRRAAT |
| | | | | | | SPAPGPSDATARSRVSASHGPRKPSASQRPTR |
| | | | | | | QTPSSAALTAAAVAAPPHCPGGSASPSSSKAS |
| | | | | | | SSSSSSSSPPASLDHE\APSLQEAALAAACSNR |
| | | | | | | LCKLPSFISLQSSPSPGAQPRVRAPRAPLTKDS |
| | | | | | | GKPLHIKPRL |
| 842 | 2192 | A | 6898 | 506 | 2071 | WPDLVHTWSSEEAMGSCCSCPDKDTVPDNH |
| | | | | | | RNKFKVINVDDDGNELGSGIIVIELTDTELILYT |
| | | | | | | RKRDSVKWHYLCLRRYGYDSNLFSFESGRRC |
| | | | | | | QTGQGIFAFKCARAEELFNMLQEIMQNNSIN |
| | | | | | | VVEEPVVERNHQTELEVPRTPRTPTTPGFAA |
| | | | | | | QNLPNGYPRYPSFGDASSHFSSRHPSVGSARL |
| | | | | | | PSVGEESTHPLLVAEEQVHTYVNTTGVQEER |
| | | | | | | KNRTSVHVPLEARVSNAESSTPKEEPSSIEDR |
| | | | | | | DPQILLEPEGVKFVLGPTPVQKQLMEKEKLE |
| | | | | | | QLGRDQVSGSGANNTEWDTGYDSDERRDAP |
| | | | | | | SVNKLVYENINGLSIPSASGVRRGRLTSTSTSD |
| | | | | | | TQNINNSAQRRTALLNYENLPSLPPVWEARK |
| | | | | | | LSRDEDDNLGPKTPSLNGYHNNLDPMHNYV |
| | | | | | | NTENVTVPASAHKIEYSRRRDCTPTVFNFDIR |
| | | | | | | RPSLEHRQLNYIQVDLEGGSDSDNPQTPKTPT |
| | | | | | | TPLPQTPTRRTELYAVIDIERTAAMSNLQKAL |
| | | | | | | PRDDGTSR\KTRHNST\DLPL |
| 843 | 2193 | A | 6919 | 2 | 663 | AGRPGTITHASGKMAYQSLRLEYLQLPPVSRA |
| | | | | | | YTTACVLTTAAVQLELITPFQLYFNPELIFKHF |
| | | | | | | QIWRUTNFLFFGPVGFNFLFNMIFLYRYCRM |
| | | | | | | LEEGSFRGRTADFVPMFLFGGFLMTLFGLFVS |
| | | | | | | L/VFLGPGLYNN/GSSMCGAE\EPLCPHELLRP |
| | | | | | | SQLPGPLSALGAHGIFLVVGELNHCGPFGYCS |
| | | | | | | WTHIFFLGRCISQSTWWNKNSENTIYFESYF |
| 844 | 2194 | A | 6928 | 902 | 366 | HRLCMPIQGACGERMEIFSLLLPGLECNGVIL |
| | | | | | | AHCNLRLPGSSNSPASASQVAGITGVCHHAR |
| | | | | | | LIFVFSVETGFLHAGQAGLELLTSGDPPASAS |
| | | | | | | QSAGITGKSQHTRPGYEFIIPYSAAQEDALKA |
| | | | | | | LM |
| 845 | 2195 | A | 6939 | 1660 | 317 | LYPENLGESLFPILLLPPPWPDGGRPCCVEMS |
| | | | | | | TRAKKLRRIWRILEEKESVAGAVQTLLLRSQE |
| | | | | | | GGV\TSAAASTLSEPPRRTQESRTRTRALGLPT |
| | | | | | | LPMEKLAASTEPQGPRPVLGRESVQVPDDQD |
| | | | | | | FRSFRSECEAEVCIWNLTYSRAGVSVWVQAV |
| | | | | | | EMDRTLHKIKCRMECCDVPAETLYDVLHDIE |
| | | | | | | YRKKWDSNVIETFDIARLTVNADVGYYSWR |
| | | | | | | CPKPLKNRDVITLRSWLPMGADYIIMNYSVK |
| | | | | | | HPKYPPRKDLVRAVSIQTGYLIQSTGPKSCVIT |
| | | | | | | YLAQVDPKGSLPKWVVNKSSQFLAPKAMKK |
| | | | | | | MKACLKYPEWKQKHL\PHFKPWL\HPEQSP |
| | | | | | | LPSLALS\ELSVQHADS\LENIDESAV\AESREE |
| | | | | | | R\MGGAGGEG\SDDDTSLYAEAPHRFRETETG |
| | | | | | | PGAGRALGAAAAPALSPLIIPPGTWWHRARP |
| | | | | | | RRVLQPGWTEPQ |
| 846 | 2196 | A | 6944 | 42 | 2672 | RRKMAGCRGSLCCCCRWCCCCGERETRTPE |
| | | | | | | ELTILGETQEEEDEILPRKDYESLDYDRCINDP |
| | | | | | | YLEVLETMDNKKGRRYEAVKWMVVFAIGV |
| | | | | | | CTGLVGLFSIDFFVRLFTQLKFGVVQTSVEECS |
| | | | | | | QKGCLALSLLELLGFNLTFVFLESLLGLIEPVE |
| | | | | | | AGSGITEGKCYLYARQVPGLVRLPTLLWKAL |
| | | | | | | GVLLTVAAMLLI\GLGSPMIHSGSVVGAGLPQ |
| | | | | | | PQSISLRKIQFNFPYFRSDRYGK\DKRDPVSAG |
| | | | | | | AAAGVAAAFGAPIGGTLFSLEEGSSFWNQGL |
| | | | | | | TWKVLFCSMSATFTLNFFRSGIQFGSWGSFQL |
| | | | | | | PGLLNFGEFKCSDSDEKCHLWTAMDLGFFV |
| | | | | | | VMGVIGGLLGATFNCLNKRLAKYRMRNVHP |
| | | | | | | KPKLVRVLESLLVSLVTUVVVFVASMVLGEC |
| | | | | | | RQMSSSSQIGNDSFQLQVTEDVNSSIKTFFCP |
| | | | | | | NDTYNDMATLFFNPQESAILQLFIIQDGTFSPV |
| | | | | | | TLALFFVLYFLLACWTYGISVPSGLFVPSLLC |
| | | | | | | GAAFGRLVANVLKSYIGLGHTYSGTFALIGAA |
| | | | | | | AFLGGVVRMTISLTVILIEST\NEITYGLPIMVT |
| | | | | | | LMVGKWTGDFFNKGI\YDIHVGLRGVPLLEW |
| | | | | | | ETEVEMDFCLRASDIMEPNLTYVYPHTRIQSLV |
| | | | | | | SILRTTVHHAFPVVTENRGNEKEFMKGNQLIS |
| | | | | | | NNIKFKKSSILTRAGEQRKRSQSMKSYPSSEL |
| | | | | | | RNMCDEHIASEEPAEKEDLLQQMLERRYTPY |
| | | | | | | PNLYPDQSPSEDWTMEERFRPLTFHGLILRSQ |
| | | | | | | LVTLLVRGVCYSESQSSASQPRLSYAEMAED |
| | | | | | | YPRYPDIHDLDLTLLNPRMIVDVTPYMNPSPF |
| | | | | | | TVSPNTHVSQVFNLFRTMGLRHLPVVNAVGE |
| | | | | | | IVGIITRIINLTYEFLQARLRQHYQTI |
| 847 | 2197 | A | 6951 | 3 | 1994 | NTNSSSVTNSAAGVEDLNIVQVTVPDNEKER |
| | | | | | | LSSIEKIKQLREQVNDLFSRKFGEAIGVDFPVK |
| | | | | | | VPYRKITFNPGCVVIDGMPPGVVFKAPGYLEI |
| | | | | | | SSMRRILEAAEFIKFTVIRPLPGLELSNGEYST |
| | | | | | | VGKRKIDQEGRVFQEKWERAYFFVEVQNIST |
| | | | | | | CLICKRSMSVSKEYNLRRHYQTNHSKHYDQY |
| | | | | | | MERMRDEKLHELKKGLRKYLLGLSDTECPE |
| | | | | | | QKQVFANPSPTQKSPVQPVEDLAGNLWEKLR |
| | | | | | | EKIRSFVAYSIAIDEITDINNTTQLAIFIRGVDE |
| | | | | | | NFDVSEELLDTVPMTGTKSGNEIFSRVEKSLK |
| | | | | | | NFCINWSKLVSVASTGTPPMVDANNGLVTKL |
| | | | | | | KSRVATFCKGAELKSICCIIHPESLCAQ\KLKM |
| | | | | | | DHYMDVVVKSVNWICSRGLNHSEFLTLLYEL |
| | | | | | | DSQYGSLLYYTEIKWLSRGLVLKRFFESLEEI |
| | | | | | | DSFMSSRGKPLPQLSSIDWIRDLAFLVDMTM |
| | | | | | | HLNALNISLQGHSQIVTQMYDLIRAFLAKLCL |
| | | | | | | WETILTRNNLAHFPTLKLVSRNESDGLNYIP |
| | | | | | | KIAELKTEFQKRLSDFKLYESELTLFSSPFSTKI |
| | | | | | | DSVHEELQMEVIDLQCNTVLKTKYDKVGIPE |
| | | | | | | FYKYLWGSYPKYKHIICAKILSMFGSTYICEQ |
| | | | | | | LFSIMKLSKTKYCSQLKDSQWDSVLHIAT |
| 848 | 2198 | A | 6985 | 3 | 289 | SVQYLPGRPTRTHASTDAPLMLKFTPLPSKTK |
| | | | | | | ASAPVQCLLLMAATFSPQGLAKPHSGTTPIT\C |
| | | | | | | CFNAINTKIPIQRLESYTRITNIQCPKEAVM |
| 849 | 2199 | A | 6999 | 963 | 5 | LDFLCHRDMGDNITSITEFLLLGFPVGPRIQM |
| | | | | | | LLFGLFSLFYVFTLLGNGTILGLISLDSRLHIAP |
| | | | | | | MYFFLSHL\AVVDIAYACNTVPRMLVNLLHP |
| | | | | | | AKPISFAGRMMQTFLESTFAVTECLLLVVMS |
| | | | | | | YDLYV\AICHPLRYLAIMTWRVCITLAVTSWT |
| | | | | | | TGVLLSLIHLVLLLPLPFCRPQKIYHFFCEILA |
| | | | | | | VLKLACADTHINENMVLAGAISGLVGPLSTIV |
| | | | | | | VSYMCILCAILQIQSREVQRKAFCTCFSHLCVI |
| | | | | | | GLFYGTAIIMYVGPRYGNPKEQKKYLLLFHS |
| | | | | | | LFNPMLNPLICSLRNSEVKNTLKRVLGVERAL |
| 850 | 2200 | A | 7001 | 1 | 1011 | MGNDSVSYEYGDYSDLSDRPVDCLDGACLAI |
| | | | | | | DPLRVAPLPLYAAIFLVGVPGNAMVAWVAG |
| | | | | | | KVARRRVGATWLLHLAVADLLCCLSLPILAV |
| | | | | | | PIARGGHWPYGAVGCRALPSIILLTMYASVLL |
| | | | | | | LAALSADLCFLALGPAW\CLRFS/GACGVQVA |
| | | | | | | CGAAWTLALLLTVPSAIYRELHQEHPPARLQ |
| | | | | | | CVVDYGGSSSTENAVTAIRFLFGFLGPLVAVA |
| | | | | | | SCHSALLCWAARRCRPLGTAIVVGFFVCWAP |
| | | | | | | YHLLGLVLTVAAPNSATTARATRAFFLWGL |
| | | | | | | ALAHSCLNPMLFLYFGRAQLRRSLPAACHW |
| | | | | | | ALRESQGQDESVDSKKSTSHDLVSEMEV |
| 851 | 2201 | A | 7011 | 1 | 2310 | AAASPLRMSRKGPRAEVCADCSAPDPGWASI |
| | | | | | | SRGVLVCDECCSVHRSLGRHISIVKHLRHSA |
| | | | | | | WPPTLLQMVHTLASNGANSIWEHSLLDPAQV |
| | | | | | | QSGPALKQTPKDKV\HPIKSEFIRAKYQMLAF |
| | | | | | | VHKLPCRDDDGVTAKDLSKQLHSSVRTGNLE |
| | | | | | | TCLRLLSLGAQANFFHPEKGTTPLHVAAKAG |
| | | | | | | QTLQAELLVVYGADPGSPDVNGRTPIDYARQ |
| | | | | | | AGHHELAERLVECQYELTDRLAFYLCGRKPD |
| | | | | | | HKNGHYIIPQMADSLDLSELAKAAKKKLQAL |
| | | | | | | SNRLFEELAMDVYDEVDRRENDAVWLATQN |
| | | | | | | HSTLVTERSAVPFLPVNPEYSATRNQGRQKL |
| | | | | | | ARFNAREFATLIIDILSEAKRRQQGKSLSSPTD |
| | | | | | | NLELSLRSQSDLDDQHDYDSVASDEDTDQEP |
| | | | | | | LRSTGATRSNRARSMDSSDLSDGAVTLQEYL |
| | | | | | | ELKKALATSEAKVQQLMKVNSSLSDELRRLQ |
| | | | | | | REIHKLQAENLQLRQPPGPVPTPPLPSERAEH |
| | | | | | | TPMAPGGSTHRRDRQAFSMYEPGSALKPFGG |
| | | | | | | PPGDELTTRLQPFHSTELEDDALYSVHVPAGL |
| | | | | | | YRIRKGVSASAVPFTPSSPLLSCSQEGSRHTSK |
| | | | | | | LSRHGSGADSDYENTQSGDPLLGLEGKRFLE |
| | | | | | | LGKEEDFHPELESLDGDLDPGLPSTEDVILKT |
| | | | | | | EQVTKNIQELLRAAQEFKHDSFVPCSEKIHLA |
| | | | | | | VTEMASLFPKRPALEPVRSSLRLLNASAYRLQ |
| | | | | | | SECRKTVPPEPGAPVDFQLLTQQVIQCAYDIA |
| | | | | | | KAAKQLVTTTTREKKQ |
| 852 | 2202 | A | 7016 | 484 | 1777 | RISKIQVYYSTGYSSRKMNPTLGLAIFLAVLL |
| | | | | | | TVKGLLKPSFSPRNYKALSEVQGWKQRMAA |
| | | | | | | KELARQNMDLGFKLLKKLAFYNPGRNIFLSP |
| | | | | | | LSISTAFSMLCLGAQDSTLDEIKQGFNFRKMP |
| | | | | | | EKDLHEGFHYIIHELTQKTQDLKLSIGNTLFID |
| | | | | | | QRLQPQRKFLEDAKNFYSAETILTNFQNLEM |
| | | | | | | AQKQINDFIIESKTHGKINNLIENIDPGTVMLL |
| | | | | | | ANYIFFRARWKHEFDPNVTKEEDFFLEKNSS |
| | | | | | | VKVPMMFRSGIYQVGYDDKLSCTILEIPYQK |
| | | | | | | NITAIFILPDEGKLKHLEKGLQVDTFSRWKTL |
| | | | | | | LSRRVVDVSVPRLHMTGTFDLKKTLSYIGVS |
| | | | | | | KIFEEHGDLTKIAPHRSLKVGEAVNKAELKM |
| | | | | | | DERGTEGAAGTGAQTLPMETPLVVKIDKPYL |
| | | | | | | LLIYSEKIPSVLFLGKIYNPIGK |
| 853 | 2203 | A | 7017 | 1 | 3293 | MTHACNFSTLGGQGRRITRSHGRRRSSRGPV |
| | | | | | | ARHVAAGAGHENKHGGSRRFPAGVAPRRAM |
| | | | | | | ANVSKKVSWSGRDRDDEEAAPLLRRTARPG |
| | | | | | | GGTPLLNGAGPGAARQSPRSALFRVGHMSSV |
| | | | | | | ELDDELLEP\DMDPPHPFPKEIPHNEKLLSLKY |
| | | | | | | ESLDYDNSENQLFLEEERRINHTAFRTVEIKR |
| | | | | | | WVICALIGILTGLVACFIDIVVENLAGLKYRVI |
| | | | | | | KGSILPNIDKFTEKGGLSFSLLLWATLNAAFV |
| | | | | | | LVGSVIVAFIEPVAAGSGIPQIKCFLNGVKIPH |
| | | | | | | VVRLKTLVIKVSGVILSVVGGLAVGKEGPMI |
| | | | | | | HSGSVLAAGISQGRSTSLKRDFKIFEYFRRDTE |
| | | | | | | KRDFVSAGAAAGVSAAFGAPVGGVLFSLEEG |
| | | | | | | ASFWNQFLTWRIFFASMISTFTLNFVLSIYHG |
| | | | | | | NMWDLSSPGLINFGRFDSEKMAYTIHEIPVFI |
| | | | | | | AMGVVGGVLGAVFNALNYWLTMFRIRYIHR |
| | | | | | | PCLQVIEAVLVAAVTATVAFVLIYSSRDCQPL |
| | | | | | | QGGSMSYPLQLFCADGEYNSMAAAFFNTPEK |
| | | | | | | SVVSLFHDPPGSYNPLTLGLFTLVYFFLACWT |
| | | | | | | YGLTVSAGVFIPSLLIGAAWGRLFGISLSYLTG |
| | | | | | | AAIWADPGKYALMGAAAQLGGIVRMTLSLT |
| | | | | | | VIMMEATSNVTYGFPIMLVLMTAKIVGDVFIE |
| | | | | | | GLYDMHIQLQSVPFLHWEAFVTSHSLTAREV |
| | | | | | | MSTPVTCLRREEKVGVIVDVLSDTASNHNGF |
| | | | | | | PVVEHADDTQPARLQGLILRSQLIVLLKHKVF |
| | | | | | | VERSNLGLVQRRLRLKDFRDAYPRFPPIQSIH |
| | | | | | | VSQDERECTMDLSEFMNPSPYTVPQEASLPR |
| | | | | | | VFKLFRALGLRHLVVVDNRNQVVGLVTRKD |
| | | | | | | LARYRLGKRGLEELSLAQTGPKAQATAEGRV |
| | | | | | | AGAAQQPCQLRAVTLEDLGLLLAGGLASPEP |
| | | | | | | LSLEELSERYESSHPTSTASVPEQDTAKHWNQ |
| | | | | | | LEQWVVELQAEVACLREHKQRCERATRSLL |
| | | | | | | RELLQVRARVQLQGSELRQLQQEARPAAQAP |
| | | | | | | EKEAPEFSGLQNQMQALDKRLVEVREALTRL |
| | | | | | | RRRQVQQEAERRGAEQEAGLRLAKLTDLLQ |
| | | | | | | QEEQGREVACGALQKNQEDSSRRVDLEVAR |
| | | | | | | M |
| 854 | 2204 | A | 7037 | 139 | 2604 | AGTWEPRPYDQAKETGAPGSQPPVPPMELRP |
| | | | | | | WLLWVVAATGTLVLLAADAQGQKVFTNTW |
| | | | | | | AVRIPGGPAVANSVARKHGFLNLGQIFGDYY |
| | | | | | | HFWHRGVTKRSLSPHRPRHSRLQREPQVQWL |
| | | | | | | EQQVAKRRTKRDVYQEPTDPKFPQQWYL\SG |
| | | | | | | VTQ\RDLMVKAAWAQGYTGHGIVVSILDDGI |
| | | | | | | EKNHPDLAGNYDPGASPDVNDQDPDPQPRY |
| | | | | | | TQMNDNRHGTRCAGEVAAVANNGVCGVGV |
| | | | | | | AYNARIGGVRMLDGEVTDAVEARSLGLNPN |
| | | | | | | HIHIYSASWGPEDDGKTVDGPARLAEEAFFR |
| | | | | | | GVSQGRGGLGSIFVWASGNGGREHDSCNCD |
| | | | | | | GYTNSIYTLSISSATQFGNVPWYSEACSSTLA |
| | | | | | | TTYSSGNQNEKQIVTTDLRQKCTESHTGTSAS |
| | | | | | | APLAAGIIALTLEANKNLTWRDMQHLVVQTS |
| | | | | | | KPAHLNANDWATNGVGRKVSHSYGYGLLD |
| | | | | | | AGAMVALAQNWTIVAPQRKCIIDILTEPKDI |
| | | | | | | GKRLEVRKTVTACLGEPNHITRLEHAQARLT |
| | | | | | | LSYNRRGDLAIIILVSPMGTRSTLLAARPHDY |
| | | | | | | SADGFNDWAFMTTHSWDEDPSQEWVLEIEN |
| | | | | | | TSEANNYGTLTKFTLVLYGTAPEGLPVPPESS |
| | | | | | | GCKTLTSSQACVVCEEGFSLHQKSCVQHCPP |
| | | | | | | GFAPQVLDTHYSTENDVETIRASVCALPCHAS |
| | | | | | | CATCQGPALTDCLSCPSHASLDPVEQTCSRQS |
| | | | | | | QSSRESPPQQQPPRLPPEYEAGQRLRAGLLPS |
| | | | | | | HLPEVVAGLSCAFIVLVFVTVFLVLQLRSGFS |
| | | | | | | FRGVKVYTMDRGLISYKGLPPEAWQEECPSD |
| | | | | | | SEEDEGRGERTAFIKDQSAL |
| 855 | 2205 | A | 7058 | 3 | 1441 | QRPASQLLAPFAAEALPGAFRAAMAQHFSLA |
| | | | | | | ACDVVGFDLDMTLCRYNLPESAPLIYNSFAQF |
| | | | | | | LVKEKGYDKELLNVTPEDWDFCCKGLALDL |
| | | | | | | EDGNPLKLANNGTVLRASHGTKMMTPEYLA |
| | | | | | | EAYGKKEWKHFLSDTGMACRSGKYYFYDN |
| | | | | | | YFDLPGALLCARVVDYLTKLNNGQKTFDFW |
| | | | | | | KDIVAAIQHNYKMSAFKENCGIYFPEIKRDPG |
| | | | | | | RYLHSRPESVKKWLRQLKNAGKILLLTTSSHS |
| | | | | | | DYCRLLGA\YILGNDFTDLFDIVITNALKPGFF |
| | | | | | | SHLPSQRPFRTLENDEEQEALPSLDKPGWYSQ |
| | | | | | | GNAVHLYELLKKMTGKPEPKVVYFGDSMHS |
| | | | | | | DIFPARHYSNWETVLILEELRGDEGTRSQRPE |
| | | | | | | ESEPLEKKGKYEGPKAKPLNTSSKKWGSFF\I |
| | | | | | | DSVLGLENTEDSLVYTWSCKRISTYSTIAIPSI |
| | | | | | | EAIAELPLDYKFTRFSSSNSKTAGYYPNPPLV |
| | | | | | | LSSDETLISK |
| 856 | 2206 | A | 7082 | 396 | 1635 | SSPSVFEFEHAVQPVFTMEFLKTCVLRRNACT |
| | | | | | | AVCFWRSKVVQKPSVRRISTTSPRSTVMPAW |
| | | | | | | VIDKYGKNEVLRFTQNMMMPIIHYPNEVIVK |
| | | | | | | VHAASVNPIDVNMRSGYGATALNMKEDPLH |
| | | | | | | VKIKGEEFPLTLGRDVSGVVMECGLDVKYFK |
| | | | | | | PGDEVWAAVPPWKQGTLSEFVVVSGNEVSH |
| | | | | | | KPKSLTHTQAASLPYVALTAWSAINKVGGLN |
| | | | | | | DKNCTGKRVLILGASGGVGTFAIQVMKAWD |
| | | | | | | AHVTAVCSQDASELVRKLGADDVIDYKSGSV |
| | | | | | | EEQLKSLKPFDFILDNVGGSTETWAPDFLKK |
| | | | | | | WSGATYVTLVTPFLLNMDRLGIADGMLQTG |
| | | | | | | VTVGSKALKHFWKQVHYRWAFFMASQPCL |
| | | | | | | DDIAELVDAGKIRPV\IEQTFPFSKVPEAFLKV |
| | | | | | | ERGHARGKTVINVV |
| 857 | 2207 | A | 7088 | 320 | 2417 | LRRRKMTPQSLLQTTLFLLSLLFLVQGAHGR |
| | | | | | | GHEEDFRFCSQRNQTHRSSLHYKPTPDLRISIE |
| | | | | | | NSEEALTVHAPFPAAHPASRSEPDPRGLYHFC |
| | | | | | | LYWNRHAGRLHLLYGKRDFLLSDKASSLLCF |
| | | | | | | QHQEESLAQGPPLLATSVTSWWSPQNISLPSA |
| | | | | | | ASFTFSFHSPPHTGAIINASVDMCELKRDLQL |
| | | | | | | LSQFLKHPQKASRRPSAAPASQQLQSLESKLT |
| | | | | | | SVEFMGDMGSFEEDRLINATVWKLQPTAGLQ |
| | | | | | | DLHIHSRQEEEQSEIMEYSVLLPRTLFQRTKG |
| | | | | | | RSGEAEKRLLLVDPSSQALFQDKNSSQVLGE |
| | | | | | | KVLGTVVQNTKVANLTEPVVLTFQHQLQPKN |
| | | | | | | VTLQCVFWVEDPTLSSPGHWSSAGCETVRRE |
| | | | | | | TQTSCFCHHLTYFAVLMVSSVEVDAVHKHY |
| | | | | | | LSLLSYVGCVVSALACLVTIAAYLCSRVPLPC |
| | | | | | | RRKPRDYTIKVHMNLLLAVFLLDTSFLLSEPV |
| | | | | | | ALTGSEAGCRASAIFLHFSLLTCLSWMGLEG |
| | | | | | | YNLYRLVVEVFGTYVPGYLLKLSAMGWGFPI |
| | | | | | | FLVTLVALVDVDNYGPIILAVHRTPEGVIYPS |
| | | | | | | MCWIRDSLVSYITNLGLFSLVFLFNMAMLAT |
| | | | | | | MVVQILRLRPHTQKWSHVLTLLCLSLVLG\LP |
| | | | | | | WALIFFSFASGTFQLVVLYLFSIITSFQGFLIFI |
| | | | | | | WYWSMRLQARGGPSPLKSNSDSARLPISSGS |
| | | | | | | TSSSRI |
| 858 | 2208 | A | 7091 | 185 | 415 | DAGAVKSSDTNIWPRGMCDDKKGHRCPS*G |
| | | | | | | QPQHFHVAFHTEAEGAMFYPRLHVIHRVMQS |
| | | | | | | QQQLFPSTLFSWLLE |
| 859 | 2209 | A | 7136 | 3 | 302 | FFFWRQSLALLPRLECSGATGAHCNLHFPGSS |
| | | | | | | DCPTSAS*IAGITGACYHAWLLFVFLAETGFH |
| | | | | | | HVGQGGLELLTSSDPSGSASQSAGITGVSHCT |
| | | | | | | WPI |
| 860 | 2210 | A | 7156 | 23 | 591 | ALSTETRTPDMRRLLLVTSLVVVLIWEAGAV |
| | | | | | | PAPKVPIKMQVKHWPSEQDPEKAWGARVVE |
| | | | | | | PPEKDDQLVVLFPVQKPKLLTIEEKPRGQGR |
| | | | | | | GPIILPGTKAWMETEDTLGRVLSPEPDHDSLY |
| 861 | 2211 | A | 7161 | 1220 | 1003 | NYVCTIAF*EKKMGF*LSLSCLVLLFVLFLDCI |
| | | | | | | LTTTTRIMFHCTYLFASVCLSLLNTLLSPNCL |
| | | | | | | KSAMILQ |
| 862 | 2212 | A | 7211 | 665 | 847 | LKYYHITMGIYKTGKKVIIL*KSSMSNRFS VIP |
| | | | | | | YKNIQKLSFSNYVYHQNYVFSSDWSYDF |
| 863 | 2213 | A | 7212 | 924 | 1273 | HGSSCALGDLAPG*LPSGPVLSSPAVRL*RKP |
| | | | | | | LVWDSPSCLPATGPT*GLVLVLGGPDCT*WA |
| | | | | | | RGQHEHKRMRAP*SCRVTVNLAKKKKKTDQ |
| | | | | | | CIKPNYQSPPKECDYNILANSVA |
| 864 | 2214 | A | 7214 | 845 | 1619 | SDKGGKKADRKNHLRHAFPLLPHRVRERLH |
| | | | | | | DPKVPVDADHVQGQDPGRAAHDIHGEDVTE |
| | | | | | | KVSKDPLAPDEVGDTDEGHDRHGHREVGQR |
| | | | | | | HGHDQEEVAYEERACEGGKFATVEVTDKPV |
| | | | | | | DEALREAMPKVAKYAGGTNDKGIGMGMTV |
| | | | | | | PISFAVFPNEDGSLQKKLKVWFRIPNQFQSDP |
| | | | | | | PAPSDKSVKIEEREGITVYSMQFGGYAKEAD |
| | | | | | | YVAQATRLRAALEGTATYRGDIYFCTGYDPP |
| | | | | | | MKPYGRRNEIWLLKT |
| 865 | 2215 | A | 7246 | 559 | 682 | RRLGAVAHAYTSSTLGGRGGWIT*GQELQTS |
| | | | | | | LANMAKPRLY |
| 866 | 2216 | A | 7257 | 641 | 1310 | TCTYKYLMGWLRGRRSRHSWEMSEFHNYNL |
| | | | | | | DLKKSDFSTRWQKQRCPVVKSKCRENASPFF |
| | | | | | | FCCFIAVAMGIRFIIMVAIWSAVFLNSLFNQEV |
| | | | | | | QIPLTESYCGPCPKNWICYKNNCYQFFDESKN |
| | | | | | | WYESQASCMSQNASLLKVYSKEDQDLLKLV |
| | | | | | | KSYHWMGLVHIPTNGSWQWEDGSILSPNLLT |
| | | | | | | IIEMQKGDCALYASSFKGYIENGSTPNTYICM |
| | | | | | | QRTV |
| 867 | 2217 | A | 7288 | 151 | 396 | SIKIIEAFGSNGPDFWFFRYWSP*LFRQQVVFI |
| | | | | | | MPFFQTLWLMNANRFCSIFTTTNVANNCWW |
| | | | | | | TPYHCWLSVVVCRCESHGI |
| 868 | 2218 | A | 7298 | 3 | 272 | PDTVIGGRGSGGKEFGRWVLW*VFE*RLGTP |
| | | | | | | KGSCPAGGSRMVSESD*EGRGC*ASYPCAC* |
| | | | | | | AGS*WR*GSRPAGRGTPPRSLSHARPP |
| 869 | 2219 | A | 7332 | 1223 | 332 | PRRDAEDRDESCLNPAFPIGLLHPNSVNSMAR |
| | | | | | | FLTLCTWLLLLGPGLLATVRAECSQDCATCS |
| | | | | | | YRLVRPADINFLACVMECEGKLPSLKIWETC |
| | | | | | | KELLQLSKPELPQDGTSTLRENSKPEESHLLA |
| | | | | | | KRYGGFMKRYGGFMKKMDELYPMEPEEEA |
| | | | | | | NGSEILAKRYGGFMKKDAEEDDSLANSSDLL |
| | | | | | | KELLETGDNRERSHHQDGSDNEEEVSKRYGG |
| | | | | | | FMRGLKRSPQLKEKAKELQKRYGGFMIRRVG |
| | | | | | | PQKW*MTSPQNRYGGFLKRFAEALPSDEEGE |
| | | | | | | SYSKEVPEMEKRYGGFMRF |
| 870 | 2220 | A | 7382 | 216 | 1018 | EIHQRLTERTQFLDESRKNPNSQANLLRGGG |
| | | | | | | AGQGRGREGAESGGSRGEGPGSDGRLPATGD |
| | | | | | | FWSPRSQRRGCCGRRAPRPEAMENGAVYSPT |
| | | | | | | TEEDPGPARGPRSGLAAYFFMGRLPLLRRVL |
| | | | | | | KGLQLLLSLLAPICEEVVSQCTLCGGLYFFEF |
| | | | | | | VSCSAFLLSLLILIVYCTPFYERVDTTKVKSSD |
| | | | | | | FYITLGTGCVPLLASIIFVSTHDRTSAEIAAIVF |
| | | | | | | GFLASFMFLLDFITMLYEKRQESQLRKPENTT |
| | | | | | | RAEALTEPLNA |
| 871 | 2221 | A | 7403 | 3 | 393 | SCAMCSGLL*LLLPIWLSWTLGTRGSEPRSVN |
| | | | | | | DPGNMSFVKETVDKLLTGFRCFREREAAPRR |
| | | | | | | ALRGAALPGESEAGDPESLRSSVNADWIQYS |
| | | | | | | DLWEAEVSTPRCEAGFGQEGFRTPGNQEKDG |
| | | | | | | PFIC |
| 872 | 2222 | A | 7413 | 1061 | 359 | FVD1VSVVEFPHCPEARFPAQHGQDSKRLTLC |
| | | | | | | PGGS*PQATLHLDRMRVSASPTKEIQVKKYK |
| | | | | | | CGLIKPCPANYFAFKICSGAANVVGPTMCFED |
| | | | | | | RMIMSPVKNNVGRGLNIALVNGTTGAVLGQ |
| | | | | | | KAFDMYSGDVMHLVKFLKEIPGGALVLVAS |
| | | | | | | YDDPGTKMNDESRKLFSDLGSSYAKQLGFRD |
| | | | | | | SWVFIGAKDLRGKSPFEQFLKEQPQTQNKYE |
| | | | | | | GWPELLEMEGCMPPKPF |
| 873 | 2223 | A | 7429 | 2242 | 2394 | ILKCAGHGGSCL*SQHFGRLRWEDRLRLGVQ |
| | | | | | | DHPGQHCETPSLLKIERKLF |
| 874 | 2224 | A | 7468 | 146 | 894 | PCTSCVLWATLHLFASTRKAPQAECGMISITE |
| | | | | | | WQKIGVGITGFGIFFILFGTLLYFDSVLLAFGN |
| | | | | | | LLFLTGLSLIIGLRKTFWFFFQRHKLKGTSFLL |
| | | | | | | GGVVIVLLRWPLLGMFLETYGFFSLFKGFFPV |
| | | | | | | AFGFLGNVCNIPFLGALFRRLQGTSSMV*KTE |
| | | | | | | MSSLNLDHWLKGAKREEWEPPPQSPALTHSP |
| | | | | | | TYPGPPQVQKERNGAEQLTSNPQVDSRGCQE |
| | | | | | | AEMQTPRRLGWGWYHTLTLYLWEEK |
| 875 | 2225 | A | 7498 | 91 | 251 | GEKPVPTWLQDEAGQWLLGFVAQPWGWPG |
| | | | | | | SERHEP*HGGVLFRLGPSAPPGKL |
| 876 | 2226 | A | 7544 | 403 | 587 | YSCLCFLFKHITSFKNSVHIWLGTVVHAYNPN |
| | | | | | | ILGGQGGWIA*GQEFKTSLGNTVRPCLYK |
| 877 | 2227 | A | 7566 | 2 | 940 | GCAPDTRFFVPEPGGRGAAPWVALVARGGC |
| | | | | | | TFKDKVLVAARRNASAVVLYNEERYGNITLP |
| | | | | | | MSHAGTGNIVVIMISYPKGREILELVQKGIPV |
| | | | | | | TMTIGVGTRHVQEFISGQSVVFVAIAFITMMII |
| | | | | | | SLAWLIFYYIQRFLYTGSQIGSQSHRKETKKVI |
| | | | | | | GQLLLHTVKHGEKGIDVDAENCAVCIENFKV |
| | | | | | | KDIIRILPCKHIFHRICIDPWLLDHIRTCPMCKL |
| | | | | | | DVIKALGYWGEPGDVQEMPAPESPPGRDPAA |
| | | | | | | NLSLALPDDDGSDESSPPSASPAESEPQCDPSF |
| | | | | | | KGDAGENTALLEAGRSDSRHGGPIS |
| 878 | 2228 | A | 7586 | 315 | 1232 | ERSLLCKVDVRWIYVSEGTKTQRRHRQGSLR |
| | | | | | | RGRMQAACWYVLFLLQPTVYLVTCANLTNG |
| | | | | | | GKSELLKSGSSKSTLKHIWTESSKDLSLSRLLS |
| | | | | | | QTFRGKENDTDLDLRYDTPEPYSEQDLWDW |
| | | | | | | LRNSTDLQEPRPRAKRRPIVKTGKFKKIVIFGW |
| | | | | | | GDFHSNTKTVKLNLLTTGKIVDHGNGTFSVYF |
| | | | | | | RHNSTGQGNVSVSLVPPTKIVEFDLAQQTVID |
| | | | | | | AKDSKSFNCRIEYEKVDKATKNTLCNYDPSK |
| | | | | | | TCYQEQTQSHVSWLCSKPFKVICIYISFYSTD |
| | | | | | | YKLVQKVCPDYNYHSDTPYFPSG |
| 879 | 2229 | A | 7605 | 479 | 391 | TESWKLKWWSPTCLDQLNGSAPGNVFIHG |
| 880 | 2230 | A | 7612 | 93 | 659 | DAAVAMTAQGGLVANRGRRFKWAIELSGPG |
| | | | | | | GGSRGRSDRGSGQGDSLYPVGYLDKQVPDTS |
| | | | | | | VQETDRILVEKRCWDIALGPLKQIPMNLFIMY |
| | | | | | | MAGNTISIFPTMMVCMMAWRPIQALMAISAT |
| | | | | | | FKMLESSSQKPLQGLVYLIGNLMGLALAVYK |
| | | | | | | CQSMGLLPTHASDWLAFIEPPERMEFSGGGL |
| | | | | | LL | |
| 881 | 2231 | A | 7615 | 291 | 1452 | SPQKTMRSHTTTMTTTSVSSWPYSSHRIVIRFIT |
| | | | | | | NHSDQPPQNFSATPNVTTCPMDEKLLSTVLTT |
| | | | | | | SYSVIFIVGLVGNIIALYVFLGIHRKRNSIQIYL |
| | | | | | | LNVAIADLLLIFCLPPRIMYHNQNKWTLGVIL |
| | | | | | | CKVVGTLFYMNMYISIILLGFISLDRYIKINRSI |
| | | | | | | QQRKAITTKQSIYVCCIVWMLALGGFLTMIIL |
| | | | | | | TLKKGGHNSTMCFHYRDKHNAKGEAIFNFIL |
| | | | | | | VVMFWLLFLLIILSYIIKIGKNLLRISKRRSKFPN |
| | | | | | | SGKYATTARNSFIVLIIFTICFVPYHAFRFIYISS |
| | | | | | | QLNVSSCYWKEIVHKTNEIMLVLSSFNSCLDP |
| | | | | | | VMYFLMSSNIRKIMCQLLFRRFQGEPSRSEST |
| | | | | | | SEFKPGYSLHDTSVAVKIQSSSKST |
| 882 | 2232 | A | 7617 | 67 | 379 | RQMALLKANKDLISAGLKEFSVLLNQQVFND |
| | | | | | | PLVSEEDMVTVVEDWMNFYINYYRQQVTGE |
| | | | | | | PQERDKALQELRQELNTLANPFLAKYRDFLK |
| | | | | | | SHELPSHPPPSSS |
| 883 | 2233 | A | 7622 | 400 | 215 | KVKTCRYNPKYSAANDTGFVDIPSREKDLAK |
| | | | | | | AVATVGPISVAVGASHVFFQFYKKGKHLSS |
| 884 | 2234 | A | 7638 | 2640 | 2861 | APVLILQMVKLSIVLTPQFLSHDQGQLTKELQ |
| | | | | | | QHVKSVTCPCEYLRKVSECRQMGPGALEQFP |
| | | | | | | GLSC8HTSHSG |
| 885 | 2235 | A | 7642 | 201 | 455 | PSRGKMELEAMSRYTSPVNPAVFPHLTVVLL |
| | | | | | | AIGMFFTAWFFVYEVTSTKYTRDIYKELLISL |
| | | | | | | VASLFMGFGVLFLLLWVGIYV |
| 886 | 2236 | A | 7692 | 61 | 569 | APENPFSRQHFNSETKVKLSLKTGTWLGNHA |
| | | | | | | HLGEHFSTHHELGLSGKVVGFLVKNILEVIRN |
| | | | | | | GGMETRHPGKVSSWFHRWDSRAEQHNHAE |
| | | | | | | HHEDVPQGDEDSKVSEAQQEFPDVVTCAGLP |
| | | | | | | GLLPKALRVLLFQLKVQHRPGIHQQRFEQQD |
| | | | | | | VSDHRYGRSVRQNRK |
| 887 | 2237 | A | 7693 | 85 | 315 | NPGCCLPVAMRTSYLLLFTLCLLLSEMASGG |
| | | | | | | NFLTGLGHRSDHYNCVSSGGQCLYSACPIFTK |
| | | | | | | IQGTCYRGKAKCCK |
| 888 | 2238 | A | 7702 | 242 | 1298 | APSHRRRYLSPSRSAGQLGNMALERLCSVLK |
| | | | | | | VLLITVLVVEGIAVAQKTQDGQNIGIKHIPAT |
| | | | | | | QCGIWVRTSNGGHFASPNYPDSYPPNKECIYI |
| | | | | | | LEAAPRQRIELTFDEHYYIEPSFECRFDHLEVR |
| | | | | | | DCIPFGFSPLIDRYCGVKSFPLIRSTGRFMWIKF |
| | | | | | | SSDEELEGLGFRAKYSFIPDPDFTYLGGILNPIP |
| | | | | | | DCQFELSGADGIVRSSQVEQEEKTKPGQAVD |
| | | | | | | CIWTIKATPKAKIYLRFLDYQMEHSNECKRNF |
| | | | | | | VAVYDGSSSIENLKAKFCSTVANDVMLKTQI |
| | | | | | | GVIRMWADEGSRLNRFRMLFTSFGGASPAQA |
| | | | | | | ALSFCHSNMCINNSLVCNGVQNCAYPWDEN |
| | | | | | | HC |
| 889 | 2239 | A | 7707 | 185 | 2911 | CHYIMNPSTHHPASAGGSILGLFDFFGLGLGE |
| | | | | | | MTMDALLARLKLLNPDDLREEIVKAGLKCGP |
| | | | | | | ITSTFRFIFEKKLAQALLEQGGRLSSFYHHEA |
| | | | | | | GVTALSQDPQRILKPAEGNPTDQAGFSEDRDF |
| | | | | | | GYSVGLNPPEEEAVTSKTCSVPPSDTDTYRAG |
| | | | | | | ATASICEPPLYYGVCPVYEDVPARNERIYVYE |
| | | | | | | NKKEALQAVKMIKGSRFKAFSTREDAEKFAR |
| | | | | | | GICDYFPSPSKTSLPLSPYKTAPLFSNDRLKDG |
| | | | | | | LCLSESETVNKERANSYKNPRTQDLTAKLRK |
| | | | | | | AVEKGEEDTFSDLIWSNPRYLIGSGDNPTIVQ |
| | | | | | | EGCRYNVMHVAAKENQASICQLTLDVLENP |
| | | | | | | DFMRLMYPDDDEAMLQKRIRYVVDLYLNTP |
| | | | | | | DKMGYDTPLHFACKFGNADVVNVLSSHHLI |
| | | | | | | VKNSRNKYDKTPEDVICERSKNKSVELKERIR |
| | | | | | | EYLKGHYYVPLLRAEETSSPVIGELWSPDQTA |
| | | | | | | EASHYSRYGGSPRDPVLTLRAFAGPLSPAKAE |
| | | | | | | DFRKLWKTPPREKAGFLHHYKKSDPERGFER |
| | | | | | | VGRELAHELGYPWVEYWEFLGCFVDLSSQE |
| | | | | | | GLQREEYLTQQEIGKKAQQETGEREASCRD |
| | | | | | | KATTSGSNSISVRAFLDEDDMSLEEIKNRQNA |
| | | | | | | ARNNSPPTVGAFGHTRCSAFPLEQEADLIEAA |
| | | | | | | EPGGPHSSRNGLCHPLNHSRTLAGKRIPKAPR |
| | | | | | | GEEAHLPPVSDLTVEFDKLNLQNIGRSVSKTP |
| | | | | | | DESTKTKDQILTSRINAVERDLLEPSPADQLG |
| | | | | | | NGHERTESEMSARIAKMSLSPSSPRHEDQLEV |
| | | | | | | TREPARRLFLFGEEPSKLDQDVLAALECADV |
| | | | | | | DPHQFPAVHRWKSAVLCYSPSDRQSWPSPAV |
| | | | | | | KGRFKSQLPDLSGPHSYSPGRNSVAGSNPAKP |
| | | | | | | GLGSPGRYSPVHGSQLRRMARLAELAAL |
| 890 | 2240 | A | 7711 | 360 | 269 | RHMPVIPALWEAEVGGLLEPRSSRSAWATE |
| 891 | 2241 | A | 7721 | 61 | 1175 | KLPWEPSFLIKMQIIRHSEQTLKTALISKNPVL |
| | | | | | | VSQYEKLDAGEQRLMNEAFQPASDLFGPITL |
| | | | | | | HSPSDWITSHPEAPQDFEQFFSDPYRKTPSPN |
| | | | | | | KRSTYIQSIGSLGNTRIISEEYIKWLTGYCKAYF |
| | | | | | | YGLRVKLLEPVPVSVTRCSFRVNENTHNLQIH |
| | | | | | | AGDILKFLKKKKPEDAFCVVGITMIDLYPRDS |
| | | | | | | WNFVFGQASLTDGVGIFSFARYGSDFYSMHY |
| | | | | | | KGKVKKLKKTSSSDYSIFDNYYIPEITSVLLLR |
| | | | | | | SCKTLTHEIGHIFGLRHCQWLACLMQGSNHL |
| | | | | | | EEADRRPLNLCPICLHKLQCAVGFSIVERYKA |
| | | | | | | LVRWIDDESSDTPGATPEIISHEDNGNLPKPV |
| | | | | | | EAFKEWKEWIIKCLAVLQK |
| 892 | 2242 | A | 7723 | 2 | 1650 | SAPTAFARPCRAERGSGGGMLALLAASVALA |
| | | | | | | VAAGAQDSPAPGSRFVCTAIYPEAVHAGCPL |
| | | | | | | PAMPMQGGAQSPEEELRAAVLQLRETVVQQ |
| | | | | | | KETLASARAIRELTGKLARCEGLAGGKARGA |
| | | | | | | GATGKDTMGDLPRDPGHVVEQLSRSLQTLK |
| | | | | | | DRLESLEPLPAMPMQGGAQSPEEELRAAVLQ |
| | | | | | | LRETVVQQKETLASARAIRELTGKLARCEGL |
| | | | | | | AGGKARGAQATGKDTMGDLPRDPGHVVEQ |
| | | | | | | LSRSLQTLKDRLESLEHQLRANVSNAGLPGD |
| | | | | | | FREVLQQRLGELERQLLRKGAELEDEKSLLH |
| | | | | | | NETSAHRQKTESTLNALLQRVIELERGNSAF |
| | | | | | | KSPNAFKVSLPLRTNYLYGKIKKTLPELYAFT |
| | | | | | | ICLWLRSSASPGMGTPFSYAVPGQANEIVLIE |
| | | | | | | WGNNPIELLINDKVAQLPLFVSDGKWHHICV |
| | | | | | | TWTTRDGMWEAFQDGKKLGTGENLAPWHPI |
| | | | | | | KPGGVLILGQEQDTVGGRFDATQAFVGELSQ |
| | | | | | | PNIWDRVLRAQEWNIANCSTNMPGNIIPWVD |
| | | | | | | NNVDVFGGASKWPVETCEERLLDL |
| 893 | 2243 | A | 7729 | 3554 | 2419 | LTAGTAMNYPLTLEMDLENLEDLFWELDRL |
| | | | | | | DNYNDTSLVENHLCFATEGPLMASFKAVFVP |
| | | | | | | VAYSLIFLLGVIGNVLVLVILERHRQTRSSTET |
| | | | | | | FLFHLAVADLLLVFILPFAVAEGSVGWVLGTF |
| | | | | | | LCKTVIALHKVNFYCSSLLLACIAVDRYLAIV |
| | | | | | | HAVHAYRHRRLLSIHITCGTIWLVGFLLALPEI |
| | | | | | | LFAKVSQGHHNNSLPRGTFSQENQAETHAWF |
| | | | | | | TSRFLYHVAGPLLPMLVMGWCYVGVVHRLR |
| | | | | | | QAQRRPQRQKAVRVAILVTSIFFLCWSPYHIV |
| | | | | | | IFLDTLARLKAVDNTCKLNGSLPVAITMCEFL |
| | | | | | | GLAHCCLNPMLYTFAGVICFRSDLSRLLTKLG |
| | | | | | | CTGPASLCQLFPSWRRSSLSESENATSLTTF |
| 894 | 2244 | A | 7738 | 670 | 287 | FVTRAGRWGAGARVRGGAGGMASGAARWL |
| | | | | | | VLAPVRSC3ALRSGPSLRKDGDVSAAWSGSGR |
| | | | | | | SLVPSRSVIVTRSGAILPKPVKMSFGLLRVFSI |
| | | | | | | VIPFLYVGTLISKNFAALLEEHDIFVPEDDDDD |
| | | | | | | D |
| 895 | 2245 | A | 7753 | 119 | 278 | APYAHSQVHCLDKVCGLLPFLNPEVPDQFYR |
| | | | | | | LWLSLFLHAGKEAPHCPRTRPL |
| 896 | 2246 | A | 7754 | 1 | 372 | SPAWWNSQQRVVSPFLALLTLEPTFHHLLPIM |
| | | | | | | QVSTAALAVLLCTMALCNQVLSAPLAADTPT |
| | | | | | | ACCFSYTSRQIPQNFIADYFETSSQCSKPSVIFL |
| | | | | | | TKRGRQVCADPSEEWVQKYVSDLELSA |
| 897 | 2247 | A | 7761 | 1725 | 445 | RPRRRGTHHFSCVLGSFRVSAMFPRVSTFLPL |
| | | | | | | RPLSRHPLSSGSPETSAAAIMLLTVRHGTVRY |
| | | | | | | RSSALLARTKNNIQRYFGTNSVICSKKDKQSV |
| | | | | | | RTEETSKETSESQDSEKENTKKDLLGILKGMK |
| | | | | | | VELSTVNVRTTKPPKRRPLKSLEATLGRLRRA |
| | | | | | | TEYAPKKRIEPLSPELVAAASAVADSLPFDKQ |
| | | | | | | TTKSELLSQLQQHEEESRAQRDAKRPKISFSNI |
| | | | | | | ISDMKVARSATARVRSRPELRIQFDEGYDNYP |
| | | | | | | GQEKTDDLKKRKNIFTGKRLNIFDMMAVTKE |
| | | | | | | APETDTSPSLWDVEFAKQLATVNEQPLQNGF |
| | | | | | | EELIQWTKEGKLWEFPINNEAGFDDDGSEFH |
| | | | | | | EHIFLEKHLESFPKQGPIRHFMELVTCGLSKNP |
| | | | | | | YLSVKQKVEHIEWPRNYFNEKKDILKESNIQF |
| | | | | | | KLRPWKFLFRNN |
| 898 | 2248 | A | 7775 | 85 | 496 | SCQITQPPAQSCSTGTMRIMLLFTAILAFSLA |
| | | | | | | QSFGAVCKEPQEEVVPGGGRSKRDPDLYQLL |
| | | | | | | QRLFKSHSSLEGLLKALSQASTDPKESTSPEK |
| | | | | | | RDMIHDFFVGLMGKRSVQPDSPTDVNQENVP |
| | | | | | | SFGILKYPPRAE |
| 899 | 2249 | A | 7785 | 179 | 703 | PFHLGASSNTFRLQVQTQESKAQKEVKMGFI |
| | | | | | | FSKSMNESMKNQKEFMLMNARLQLERQLIM |
| | | | | | | QSEMRERQMAMQIAWSREPLKYFGTFFGLA |
| | | | | | | AISLTAGAIICIKKKPAFLVPIVPLSFILTYQYDL |
| | | | | | | GYGTLLERMKGEAEDILETEKSKLQLPRGMIT |
| | | | | | | FESIEKARKEQSRFFIDK |
| 900 | 2250 | A | 7789 | 1465 | 300 | VWLPLKSYKIRSPSLHCQCEIFREEFLFSSLQE |
| | | | | | | GRDKDTFSKMAMVSEFLKQAWFIENEEQEY |
| | | | | | | VQTVKSSKGGPGSAVSPYPTFNPSSDVAALH |
| | | | | | | KAIMVKGVDEATIIDILTKRNNAQRQQIKAAY |
| | | | | | | LQETGKPLDETLKKALTGHLEEVVLALLKTP |
| | | | | | | AQFDADELRAAMKGLGTDEDTLIEILASRTN |
| | | | | | | KEIRDLNRVYREELKRDLAKDITSDTSGDFRN |
| | | | | | | ALLSLAKGDRSEDFGVNEDLADSDARALYEA |
| | | | | | | GERRKGTDVNVFNTILTTRSYPQLRRVFQKY |
| | | | | | | TKYSKHDMNKVLDLELKGDIEKCLTAIVKCA |
| | | | | | | TSKPAFFAEKLHQAMKGVGTRHKALIRIMVS |
| | | | | | | RSEIDMNDIKAFYQKMYGISLCQAILDETKGD |
| | | | | | | YEKILVALCGGN |
| 901 | 2251 | A | 7796 | 2 | 807 | VEFHPQRARAGARAPSMGVLLTQRTLLSLVL |
| | | | | | | ALLFPSMASMAAIGSCSKEYRVLLGQLQKQT |
| | | | | | | DLMQDTSRLLDPYIRIQGLDVPKLREHCRERP |
| | | | | | | GAFPSEETLRGLGRRCFLQTLNATLGCVLHRL |
| | | | | | | ADLEQRLPKAQDLERSGLNIEDLEKLQMARP |
| | | | | | | NILGLRNNIYCMAQLLDNSDTAEPTKAGRGA |
| | | | | | | SQPPTPTPASDAFQRKLEGCRFLHGYHRFMH |
| | | | | | | SVGRVPSKWGESPNRSRRHSPHQALRKGVRR |
| | | | | | | TRPSRKGKRLMTRGQLPR |
| 902 | 2252 | A | 7802 | 2 | 721 | TAARRRQKGTAARRLQKGTAARRRQKGTAA |
| | | | | | | RRRQKGTAARRPQKGTAARRRQKCITAARRR |
| | | | | | | QKGTAARRRQKGTAARRPQKGTAARRRQKG |
| | | | | | | TAARRRQKGTAARRRQKGLAIASRGCPCASR |
| | | | | | | AGGVRGAGSRLRAMAPKVFRQYWDIPDGTD |
| | | | | | | CHRKAYSTTSIASVAGLTAAAYRVTLNPPGTF |
| | | | | | | LEGVAKVGQYTFTAAAVGAVFGLTTCISAHV |
| | | | | | | REKPDDPLNYFLGGCAGGLTLGARTHNYGIG |
| | | | | | | AAACVYFGLAASLVKMGRLEGWEVFAKPKV |
| 903 | 2253 | A | 7807 | 1 | 584 | PWLPWSDGRAARSSRKCPRSRFPVQVGKMA |
| | | | | | | VSTVFSTSSLIVWALSR1SLLSPLLSVTSFRRFY |
| | | | | | | RGDSPTDSQKDMIEWLPPWQERTDESIETKR |
| | | | | | | ARLLYESPKRGMLENCILLSLFAKEHLQHMT |
| | | | | | | EKQLNLYDRLINEPSNDWDIYYWATEAKPAP |
| | | | | | | EIFENEVMALLRDFAKNKEQRLRAPDLEY |
| | | | | | | LFEKPR |
| 904 | 2254 | A | 7813 | 40 | 821 | GAGRLGHLETGAGDVAAALPARKSLLG |
| | | | | | | AGARLTGWTMNVFRILGDLSHLLAMILLLGK |
| | | | | | | IWRSKCCKGLSGKSQILFALVFTTRYLDLFTNF |
| | | | | | | ISIYNTVMKVVFLLCAYVTVYMIYGKFRKTF |
| | | | | | | DSENDTFRLEFLLVPVIGLSFLENTSFTLLEIL |
| | | | | | | WTFSIYLESVAILPQLFMISKTGEAETTTTHYL |
| | | | | | | FFLGLYRALYLANWIRRYQTENFYDQIAVVS |
| | | | | | | GVVQTIFYCDFFYLYVTKGRSWDDSNADTGL |
| | | | | | | RSYSSI |
| 905 | 2255 | A | 7817 | 1399 | 881 | LSNKDVLSPQLKDENSKLRRKLNEYQSFSEA |
| | | | | | | QTEMVRTLERKLEAKMIKEESDYHDLESVVQ |
| | | | | | | QVEQNLELMTKRAVKAENHVVKLKQEISLL |
| | | | | | | QAQVSNFQRENEALRCGQGASLTVVKQNAD |
| | | | | | | VALQNLRVVMNSAQASIEQLVSGAETLVA |
| | | | | | | EILKSIDRISEVKDEEEDS |
| 906 | 2256 | A | 7822 | 3 | 1462 | DSPRRFELGRPRTPTRPGPRPAMEDLDAL |
| | | | | | | LSDLETTTSHWRSGAPKERPAEPLTPPPSYG |
| | | | | | | HQPQTGSGESSGASGDKDHLYSTVCKPRSPK |
| | | | | | | PAAPAAPPFSSSSGVLGTGLCELDRLLQELNA |
| | | | | | | TQFNITDEIMSQFPSSKVASGEQKEDQSEDKK |
| | | | | | | RPSLPSSPSPGLPKASATSATLELDRLMASLSD |
| | | | | | | FRVQNHLPASGPTQPPVVSSTNEGSPSPPEPTG |
| | | | | | | KGSLDTMLGLLQSDLSRRGVPTQIAKGLCGSC |
| | | | | | | NKPIAGQVVTALGRAWHPEHFVCGGCSTAL |
| | | | | | | GGSSFFEKDGAPFCPECYFERFSPRCGFCNQPI |
| | | | | | | RHKMVTALGTHWHPEHFCCVSCGEPFGDEG |
| | | | | | | FHEREGRPYCREDFLQLFAPRCQGCQGPILDN |
| | | | | | | YISALSALWHPDCFVCRECFAPFSGGSFFEHE |
| | | | | | | GRPLCENHPHARRGSLCATCGLPVTGRCVSA |
| | | | | | | LGRFHPDHFTCTFCLRPLTKGSFQERAGKPY |
| | | | | | | CQPCFLKLFG |
| 907 | 2257 | A | 7828 | 1792 | 1671 | FIYVNQSFAPSPDQEVGTLYECFGSDGKLVLH |
| | | | | | | YCKSQAWG |
| 908 | 2258 | A | 7842 | 110 | 1172 | KLSCPCSHGTRVTAVRGPRLKAGVQWHDLQ |
| | | | | | | SLQPPPSGLKQSSHLSLSSSWDFRHAPTHPET |
| | | | | | | YTCPKMIEMEQAEAQLAELDLLASMFPGENE |
| | | | | | | LPNDQLAVAELKDCEKKTMEGRSSSKVYFTII |
| | | | | | | NMNLDVSDEKMAMFSLACILPFKYPAVLPEI |
| | | | | | | TVRSVLLSRSQQTQLNTDLTAFLQKHCHGDV |
| | | | | | | CLNATEWREHASGYVSRDTSSSPTTGSTVQ |
| | | | | | | SVDLIFTRLWIYSHYNKCKRKNILEWAKEL |
| | | | | | | SLSGFSMGKPGVVCVEGPQSACEEFWARLR |
| | | | | | | KLNWKRILIRHREDIPFDGTNDETERQRKSIF |
| | | | | | | EEKFSVNGARGNHMDFGQLYQFLNTKGCG |
| | | | | | | DVFQMFLWV |
| 909 | 2259 | A | 7870 | 3067 | 2923 | EGLCVYTFTYVHMYTRTCMRTYPYMYMNSV |
| | | | | | | LISSEILLIPSKYLFESK |
| 910 | 2260 | A | 7884 | 212 | 4874 | GALTWSHPLLAVCPQGVWLGSTPSGSPALLP |
| | | | | | | PSHRVNAEPGCVVTNACASGPCPPHANCRDL |
| | | | | | | WQTFSCTCQPGYYGPGCVDACLLNPCQNQG |
| | | | | | | SCRHLPGAPHGYTCDCVGGYFGHHCEHRMD |
| | | | | | | QQPRGWWGSPTCGPCNCDVHKGFDPNCNK |
| | | | | | | TNGQCHCKEFHYRPRGSDSCLPCDCYPVGST |
| | | | | | | SRSCAPHSGQCPCRPGALGRQCNSCDSPFAEV |
| | | | | | | TASGCRVLYDACPKSLRSGVWWPQTKFGVL |
| | | | | | | ATVPCPRGALGLRGAGAAVRLCDEAQGWLE |
| | | | | | | PDLFNCTSPAFRELSLLLDGLELNKTALDTME |
| | | | | | | AKICLAQRLREVTGHTDHYFSQDVRVTARLL |
| | | | | | | AHLLAFESHQQGFGLTATQDAHFNENLLWA |
| | | | | | | GSALLAPETGDLWAALGQRAPGGSPGSAGLV |
| | | | | | | RHLEEYAATLARNMELTYLNPMGLVTPNIML |
| | | | | | | SIDRMEHPSSPRGARRYPRYHSNLPRGQDAW |
| | | | | | | DPHTHVLLPSQSPRPSPSEVLPTSSSIENSTTSS |
| | | | | | | VVPPPAPPEPEPGISIIILLVYRTLGGLLPAQFQ |
| | | | | | | AERRGARLPQNPVMNSPVVSVAVFHGRI*IFLR |
| | | | | | | GILESPISLEFRLLQTANRSKAICVQWDPPGLA |
| | | | | | | EQHGVWTARDCELVHRNGSHARCRCSRTGT |
| | | | | | | FGVLMDASPRERLEGDLELLAVFTHVVVAVS |
| | | | | | | VAALVLTAAILLSLRSLKSNVRGIHANVAAA |
| | | | | | | LGVAELLFLLGIHRTHNQLVCTAVVILLHYPF |
| | | | | | | LSTFAWLFVQGLHLYRMQVEPRNVDRGAMR |
| | | | | | | FYHALGWGVPAVLLGLAVGLDPEGYGNPDF |
| | | | | | | CWISVHEPLIWSFAGPVVLVIVMNGTMFLLA |
| | | | | | | ARTSCSTGQREAKKTSALTLRSSFLLLLLVSA |
| | | | | | | SWLFGLLAVNHSILAFHYLHAGLCGLQGLAV |
| | | | | | | LLLFCVLNADARAAWMPACLGRKAAPEEAR |
| | | | | | | PAPGLGPGAYNNTALFEESGLIRITLGASTVSS |
| | | | | | | VSSARSGRTQDQDSQRGRSYLRDNVLVRHGS |
| | | | | | | AADHTDHSLQAHAGPTDLDVAMFHRDAGA |
| | | | | | | DSDSDSDLSLEEERSLSIPSSESEDNGRTRGRF |
| | | | | | | QRPLCRAAQSERLLTHPKDVDGNDLLSYWPA |
| | | | | | | LGECEAAPCALQTWGSELGLDTSKDAAN |
| | | | | | | NNQPDPALTSQDETSLGRAQRQRKGILKNRL |
| | | | | | | QYPLVPQTRGAPELSWCRAATLGHRAVPAAS |
| | | | | | | YGRAGGGTGSLSQPASRYSSREQLDLLLRR |
| | | | | | | QLSRERLEEAPAPVLRPLSRPGSQECMDAAPG |
| | | | | | | RLEPKDRGSTLPRRQPPRDYGAMAGRFGSR |
| | | | | | | DALDLGAPREWLSTLPPPRRTRDLDPQPPPLP |
| | | | | | | LSPQRQLSRDPLLPSRPLDSLSRSNSEEQLDQ |
| | | | | | | VPSRHPSREALGPLPQLLRAREDSVSGPSHGP |
| | | | | | | STEQLDILSSILASFNSSALSSVQSSSTPLGPHT |
| | | | | | | TATPSATASVLGPSTPRSATSHSISELSPDSEPR |
| | | | | | | DTQALLSATQAMDLRRRDYHMERPLLNQEH |
| | | | | | | LEELGRWGSAPRTHQWRTWLQCSRARAYAL |
| | | | | | | LLQHLPVLVWLPRYPVRDWLLGDLLSGLSVA |
| | | | | | | IMQLPQGLAYALLAGLPPVFGLYSSFYPVFLY |
| | | | | | | FLFGTSRHISVESLCVPGPVDT |
| 911 | 2261 | A | 7890 | 21 | 806 | EFGTSRSSRSMAEDLGLSFGETASVEMLPEHG |
| | | | | | | SCRPKARSSSARWALTCCLVLLFFLAGLTTYL |
| | | | | | | LVSQLRAQGEACVQFQALKGQEFAPSHQQV |
| | | | | | | YAPLRADGDKPRAHLTVVRQTPTQHFKNQFP |
| | | | | | | ALHWEHELGLAFTKNRMNYTNKFLLIPESGD |
| | | | | | | YFIYSQVTPRGMTSECSEIRQAGRPNKPDSITV |
| | | | | | | VITKVTDSYPEPTQLLMGTKSVCEVGSNWFQ |
| | | | | | | PIYLGAMFSLQEGDKLMVNVSDISLVDYTKE |
| | | | | | | DKTFFGAFLL |
| 912 | 2262 | A | 7891 | 1263 | 111 | ACGIRHEGALPGLTATPEAMLRFLPDLAFSFL |
| | | | | | | LILALGQAVQFQEYVFLQFLGLDKAPSPQKFQ |
| | | | | | | PVPYILKIUFQDREAAATTGVSRDLCYVKELG |
| | | | | | | VRGNVLRFLPDQGFFLYPKKISQASSCLQKLL |
| | | | | | | YFNLSAIKEREQLTLAQLGLDLGPNSYYNLGP |
| | | | | | | ELELALFLVQEPHVWGQTTPICPGKMFVLRSV |
| | | | | | | PWPQGAVHFNLLDVAKDWNDNPRKNFGLFL |
| | | | | | | EILVKEDRDSGVNFQPEDTCARLRCSLHASLL |
| | | | | | | VVTLNPDQCHPSRKRRAAIPVPKLSCKNLCH |
| | | | | | | RHQLFINFRDLGWHKWIIAPKGFMANYCHGE |
| | | | | | | CPFSLTISLNSSNYAFMQALMIIAVDPEIPQAV |
| | | | | | | CIPTKLSPISMLYQDNNDNVILRHYEDMVVD |
| | | | | | | ECGCG |
| 913 | 2263 | A | 7892 | 15 | 849 | ASRLPRGPGCGADMRPLLGLLLVFAGCTFAL |
| | | | | | | YLLSTRLPRGRRLGSTEEAGGRSLWFPSDLAE |
| | | | | | | LRELSEVLREYRKEHQAYVFLLFCGAYLYKQ |
| | | | | | | GFAIPGSSFLNVLAGALFGPWLGLLLCCVLTS |
| | | | | | | VGATCCYLLSSIFGKQLVVSYFPDKVALLQR |
| | | | | | | KVEENRNSLFFFLLFLRLFPMTPIIWFLNLSAPI |
| | | | | | | LNIPIVQFFFSVLIGLIPYNFICVQTGSLLSTLTS |
| | | | | | | LDALFSWDTVFKLLAIAMVALIPGTLIKKFSQ |
| | | | | | | KHLQLNETSTANHIHSRKDT |
| 914 | 2264 | A | 7893 | 815 | 959 | KSGWVWWLTPLIPALWEAQTEGSLRPEVKN |
| | | | | | | RLSNITRPFFSKKKKILV |
| 915 | 2265 | A | 7909 | 3 | 641 | HASGPGGLLRRRRGSGANMPVARSWVCRKT |
| | | | | | | YVTPRRPFEKSRLDQELKLIGEYGLRNKREV |
| | | | | | | WRVKFTLAKIRKAARELLTLDEKDPRRIFEG |
| | | | | | | NALLRRLVRIGVLDEGKMKLDYILGLKIEDFL |
| | | | | | | ERRLQTQVFKLGLAKSIHHAHVLIQQCHIRVR |
| | | | | | | EQVVNTLFFTVRLDSQKHIDFSLCFPIGVANPS |
| | | | | | | HVKRKNASKGQGGAGARDDEEEE |
| 916 | 2266 | A | 7914 | 3 | 967 | VAHTQWHTCQRLSQLTHRSILKYLLIDTHAC |
| | | | | | | QVLILKHTHASLSLPSCQECFPSSIPSASHMVS |
| | | | | | | HPHPPPSPRWGQTPEGLPAASPCGPGPRSCFS |
| | | | | | | SILPTGDSWGMLACLCTVLWHLPAVPALNRT |
| | | | | | | GDPGPGPSIQKTYDLTRYLEHQLRSLAGTYLN |
| | | | | | | YLGPPFNEPDFNPPRLGAETLPRATVDLEVW |
| | | | | | | RSLNDKLRLTQNYEAYSHLLCYLRGLNRQAA |
| | | | | | | TAELRRSLAIIFGTSLQGLLGSIAGVMAALGY |
| | | | | | | PLPQPLPGTEPTWTPGPAHSDFLQKMDDFWL |
| | | | | | | LKELQTWLWRSAKDFNRLKKKMQPPAAAVT |
| | | | | | | LHLGAHGF |
| 917 | 2267 | A | 7921 | 2 | 1166 | RPRRGQGLVQEVQTENVTVAEGGVAEITCRL |
| | | | | | | HQYDGSIVVIQNPARQTLFFNGTRALKDERFQ |
| | | | | | | LEEFSPRRVRIRLSDARLEDEGGYFCQLYTED |
| | | | | | | THHQIATLTVLVAPENPVVEVREQAVEGGEV |
| | | | | | | ELSCLVPRSRPAATLRWYRDRKELKGVSSSQ |
| | | | | | | ENGKVWSVASTVRFRVDRKDDGGIIICEAQN |
| | | | | | | QALPSGHSKQTQYVLDVQYSPTARIHASQAV |
| | | | | | | VREGDTLVLTCAVTGNPRPNQIRWNRGNESL |
| | | | | | | PERAEAVGETLTLPGLVSADNGTYTCEASNK |
| | | | | | | HGHARALYVLVVYGESRLRPTEGGGGAPDP |
| | | | | | | GAVVEAQTSVPYAIVGGILALLVFLIICVLVG |
| | | | | | | MVWCSVRQKGSYLTIIEASGLDEQGEAREAF |
| | | | | | | LNGSDGHKRKEEPFI |
| 918 | 2268 | A | 7938 | 3 | 2653 | RRRLPPASPPSSSVSSSLSPSAVVMACRWSTK |
| | | | | | | ESPRWRSALLLLFLAGVYGNGALAEHSENVH |
| | | | | | | ISGVSTACGETPEQIRAPSGIITSPGWPSEYPAK |
| | | | | | | INCSWFIRANPGEIITISFQDFDIQGSRRCNLD |
| | | | | | | WLTIETYKNIESYRACGSTIPPPYISSQDHIWIR |
| | | | | | | FHSDDNISRKGPRLAVFSGKSEEPNCACDQFR |
| | | | | | | CGNGKCIPEAWKCNNMDECGDRSDEEICAKE |
| | | | | | | ANPPTAAAFQPCAYNQFQCLSRFTKVYTCLP |
| | | | | | | ESLKCDGNIDGLDLGDEIDCDVPTCGQWLKY |
| | | | | | | FYGTFNSPNYPDFYPPGSNCTWLIDTGDHEK |
| | | | | | | VILRFTDFKLDGTGYGDYVKIYDGLEENPHK |
| | | | | | | LLRVLTAFDSHAPLTVVSSSGQIRVHFCADKV |
| | | | | | | NAARGFNATYQVDGFCLPWEIPCGGNWGCY |
| | | | | | | TEQQRCDGYWHCPNGRDETNCTMCQKEEFP |
| | | | | | | CSRNGVCYPRSDRCNYQNHCPNGSDEKNCFF |
| | | | | | | CQPGNFHCKNNRCVFESWVCDSQDDCGDGS |
| | | | | | | DEENCPVIVPTRVITAAVIGSLICGLLLVIALG |
| | | | | | | CTCKLYSLRMFERRSFETQLSRVEAELLRREA |
| | | | | | | PPSYGQLIAQGLIPPVEDFPVCSPNQASVLENL |
| | | | | | | RLAVRSQLGFTSVRLPMAGRSSNIWNRIFNFA |
| | | | | | | RSRHSGSLALVSADGDEVVPSQSTSREPERNH |
| | | | | | | THRSLFSVESDDTDTENERRDMAGASGGVAA |
| | | | | | | PLPQKVPPTTAVEATVGACASSSTQSTRGGH |
| | | | | | | ADNGRDVTSVEPPSVSPARHQLTSALSRMTQ |
| | | | | | | GLRWVRFTLGRSSSLSQNQSPLRQLDNGVSG |
| | | | | | | REDDDDVEMLIPISDGSSDFDVNDCSRPLLDL |
| | | | | | | ASDQGQGLRQPYNATNPGVRPSNRDGPCERC |
| | | | | | | GIVHTAQIPDTCLEVTLKNETSDDEALLLC |
| 919 | 2269 | A | 7951 | 1674 | 1839 | VVRVTCCPPARSTTERTNAYDEEDCVEMVAS |
| | | | | | | GGWNDVACHTTMYFMCEFDKKNM |
| 920 | 2270 | A | 7953 | 47 | 572 | GGRASWPEQAKEPRREGHTDKQQTEDVLAA |
| | | | | | | GLRCLPHLPAICARRMSPAFRAMDVEPRAKG |
| | | | | | | VLLEPFVHQVGGHSCVLRFNETTLCKPLVPRE |
| | | | | | | HQFYETLPAEMRKIFTPQYKGKSQLLEGLPHW |
| | | | | | | RGDVRDRGHGRPWQPSLEPSLPPTLCFPSLSS |
| | | | | | | FSSSWPSAQHLTPSVFNPW |
| 921 | 2271 | A | 7957 | 612 | 812 | RSGRTVVTGIGYSKALQSSNRNTKSLLQNEF |
| | | | | | | MMVYSFRALSFKESTWATFQHGGEATKSRSL |
| | | | | | | SSTQ |
| 922 | 2272 | A | 7967 | 1443 | 1660 | ENITEKWKEIWMCRGNKKSCCWTFIKDRHLT |
| | | | | | | VSCCKSKSGETLLICIFCSNLVGFFFFGIRGFSN |
| | | | | | | WELVKPN |
| 923 | 2273 | A | 7981 | 1 | 3023 | GSAPRAATAMARARPPPPPSPPPGLLPLLPPLL |
| | | | | | | LLPLLLLPAGCRALEETLMDTKWVTSELAWT |
| | | | | | | SHPESGWEEVSGYDEAMNPIRTYQVCNVRES |
| | | | | | | SQNNWLRTGFIWRRDVQRVYVELKFTVRDC |
| | | | | | | NSIPNTPGSCKETFNLFYYEADSDVASASSPFW |
| | | | | | | MENPYVKVDTIAFDESFSRLDAGRVNTKVRS |
| | | | | | | FGPLSKAGPYLAFQDQGACMSLISVRAFYKK |
| | | | | | | CASTTAGFALFPETLTGAEPTSLVIAPGTCIPN |
| | | | | | | AVEVSVPLKLYCNGDGEWMVPVGACTCATG |
| | | | | | | HEPAAKESQCRPCPPGSYKAKQGEGPCLPCPP |
| | | | | | | NSRTTSPAASICTCHNNPYRADSDSADSACTT |
| | | | | | | VPSPPRGVISNVNETSLILEWSEPRDLGVRDD |
| | | | | | | LLYNYICKKCHGAGGASACSRCDDNVEFVPR |
| | | | | | | QLGLSEPRVHTSHLLAHTRYTFEVQAVNGVS |
| | | | | | | GKSPLPPRYAAVNITTNQAAPSEVPTLRLHSS |
| | | | | | | SGSSLTLSWAPPERPNGVILDYEMKYFEKSEG |
| | | | | | | IASTVTSQMNSVQLDGLRPDARYVVQVRART |
| | | | | | | VAGYGQYSRPAEFETTSERGSGAQQLQEQLP |
| | | | | | | LIVGSATAGLVFVVAVVVIAIVGLRKQRLHGS |
| | | | | | | DSEYTEKLQQYIAPGMKVYIDPFTYEDPNEA |
| | | | | | | VREFAKEIDVSCVKIEEVIGAGEFGEVCRGRL |
| | | | | | | KQPGRREVFVAIKTLKVGYTERQRRDFLSEA |
| | | | | | | SNGQFDHPNIIRLEGVVTKSRPVMILTEFME |
| | | | | | | NCALDSFLRLNDGQFTVIQLVGMLRGIAAGM |
| | | | | | | KYLSEMNYVHRDLAARNILVNSNLVCKVSDF |
| | | | | | | GLSRFLEDDPSDPTYTSSLGGKIPIRWTAPEAI |
| | | | | | | AYRKFTSASDVWSYGIVMWEVMSYGERPY |
| | | | | | | WDMSNQDVINAVEQDYLPPPMDCPTALHQ |
| | | | | | | LMLDCWVDRNLRPKFSQIVNTLDKLIRNAA |
| | | | | | | SLKVIASAQSGMSQPLLDRTVPDYTTFTTVGD |
| | | | | | | WLDAIKMGRYKESFVSAGFASFDLVAQMTA |
| | | | | | | EDLLRIGVTLAGHQKLSSIQDMRLQMNQT |
| | | | | | | LPVQV |
| 924 | 2274 | A | 7985 | 1 | 503 | FRPRTKKATAMYLEIIYLDSIENLPGELQRNF |
| | | | | | | QLMRELDQRTEDKKAEIDTLAAEYISTVKTLS |
| | | | | | | PDQRVERLQKIQNAYSKCKEYSDDKVQLAM |
| | | | | | | QTYEMVDKHIRRLDADLARFEADLKDKMEG |
| | | | | | | SDFESSGGRGLKKGRGQKEKRGSRGRGRRTS |
| | | | | | | EEDTPKKKKHKGG |
| 925 | 2275 | A | 7994 | 447 | 589 | LPCSFCAQCMSSFER\LQQSHFNPRWNSR |
| | | | | | | SPIRCYCQHWPHCVHC |
| 926 | 2276 | A | 7996 | 925 | 582 | GPCKVCCITLALQCHSFYRKDVQVEHPKS |
| | | | | | | LNPKYSQIENFLSADMALKRKCLLSISDLDFW |
| | | | | | | IWDAQPVGIMQTLQNLKKIPNPGCFWSQAFQI |
| | | | | | | RDTQPILPLGGRYYITIRQ |
| 927 | 2277 | A | 7998 | 2 | 353 | RIQRPLNSRSPNHSLFVKAELTAKQATMKLSV |
| | | | | | | CLLLVTLALCCYQANAEFGPALVSELLDFFFI |
| | | | | | | SEPLFKLSLAKFDAPPEAVAAGVKRCTDQ |
| | | | | | | MSLQKRSLIAEVLYKILKKCSV |
| 928 | 2278 | A | 8004 | 130 | 588 | LAPLRCQPGTRTQPRSHPAANDPSAAMSAAG |
| | | | | | | ARGLRATYHRLLDKVELMLPEKLRPLYNHPA |
| | | | | | | GPRTVFFWAPIMKWGLVCAGLADMARPAEK |
| | | | | | | LSTAQSAVLMATGFIWSRYSLVIIPKNWSLFA |
| | | | | | | VNFFVGAAGASQLFRIWRYNQELKAKAHK |
| 929 | 2279 | A | 8007 | 2 | 1016 | EFARRRVFIAAREMSLLRSLRVFLVARTGSYP |
| | | | | | | AGSLLRQSPQPRHTFYAGPRLSASASSKELLM |
| | | | | | | KLRRKTGYSFVNCKKALETCGGDLKQAEIWL |
| | | | | | | HKEAQKEGWSKAAKLQGRKTKEGLIGLLQE |
| | | | | | | GNTTVLVEVNCETDFVSRNLKFQLLVQQVAL |
| | | | | | | GTMMHCQTLKDQPSAYSKGFLNSSELSGLPA |
| | | | | | | GPDREGSLKDQLALAIGKLGENMILKRAAWV |
| | | | | | | KVPSGFYVGSYVHGAMQSPSLHKLVLGKYG |
| | | | | | | ALVICETSEQKTNLEDVGRRLGQHVVGMAPL |
| | | | | | | SVGSLDDEPGGEAETKMLSQPYLLDPSITLGQ |
| | | | | | | YVQPQGVSVVDFVRFECGEGEEAAETE |
| 930 | 2280 | A | 8008 | 3 | 1679 | NSRVWGPWTEPSAGSLRPMAKQNRNSKEL |
| | | | | | | GLVPLTDDTSHAGPPGPGRALLECDHLRSGV |
| | | | | | | PGGRRRKDWSCSLLVASLAGAFGSSFLYGYN |
| | | | | | | LSVVNAPTPYIKAFNESWERRHGRPIDPDTL |
| | | | | | | TLLWSVTVSIFAIGGLVGTLIVKMIGKVLGRK |
| | | | | | | HTLLANNGFAISAALLMACSLQAGAFEMLW |
| | | | | | | GRFTMGIDGGVALSVLPMYLSEISPKEIRGSLG |
| | | | | | | QVTAIFICIGVFTGQLLGLPELLGKESTWPYLF |
| | | | | | | GVIVVPAVVQLLSLPFLPDSPRYLLLEKHNEA |
| | | | | | | RAVKAFQTFLGKADVSQEVEEVLAESRVQRS |
| | | | | | | IRIVSVLELLRAPYVRWQVVTVIVTMACYQL |
| | | | | | | CGLNAFYTNSIFGKAGIPPAKIPYVTLSTGG |
| | | | | | | IETLAAVFSGLVIEHLGRRPLLIGGFGLMGLFF |
| | | | | | | GTLTTTLTLQDHAPWVPYLSIVGILAIIASFCSG |
| | | | | | | PGGIPFLTGEFFQQSQRPAAFIIAGTVNWLSN |
| | | | | | | FAVGLLFPFIQKSLDTYCFLVFATICITTGAIYL |
| | | | | | | YFVLPETKNRTYAEISQAFSKRNKAYPPEEKI |
| | | | | | | DSAVTDGKINGRP |
| 931 | 2281 | A | 8009 | 861 | 300 | AAGAVVSAPKAKGKTRRQKFGYSVNRKRL |
| | | | | | | NRNARRKAAPRIECSHIRHAWDHAKSVRQNL |
| | | | | | | AEMGLAVDPNRAVPLRKRKVKAMEVDIEER |
| | | | | | | PKELVRKPYVLNDLEAEASLPEKKGNTLSRD |
| | | | | | | LIDYVRYMVENHGEDYKAMARDEKNYYQD |
| | | | | | | TPKQIRSKINVYKRFYPAEWQDFLDSLQKRK |
| | | | | | | MEVE |
| 932 | 2282 | A | 8011 | 412 | 1 | SNLCLGNSWRWRWAKSRHHCIPTVTLSKRSG |
| | | | | | | DIRGSHFSSPQRQRSQRVPGKETARVLRAGK |
| | | | | | | QGRGQIPIPCPWPPPPPPPPPGSPGPGCRQFHQ |
| | | | | | | SLEAKARIIPASVREMRGKVKMRRALRRAPA |
| | | | | | | STRASSRQPNPK |
| 933 | 2283 | A | 8012 | 147 | 1077 | PPVPPASRSDMAQNLKDLAGRLPAGPRGMGT |
| | | | | | | ALKLLLGAGAVAYGVRESVFTVEGGHRAIFF |
| | | | | | | NRIGGVQQDTILAEGLHFRIPWFQYPIIYDIRA |
| | | | | | | RPRKISSPTGSKDLQMVNISLRVLSRPNAQEL |
| | | | | | | PSMYQRLGLDYEERVLPSIVNEVLKSVVAKF |
| | | | | | | NASQLITQRAQVSLLIRRELTERAKDFSLILDD |
| | | | | | | VAITELSFSREYTAAVEAKQVAQQEAQRAQF |
| | | | | | | LVEKAKQEQRQKIVQAEGEAEAAKMLGEAL |
| | | | | | | SKNPGYIKLRKIRAAQNISKTIATSQNRIYLTA |
| | | | | | | DNLVLNLQDESFTRGSDSLIKGICK |
| 934 | 2284 | A | 8023 | 255 | 982 | SQFSLSQVLVDSAEEGSLAAAAELAAQKREQ |
| | | | | | | RLRKFRELHLMRNEARKLNHQEVVEEDKRL |
| | | | | | | KLPANWEAKKARLEWELKEEEKKKECAARG |
| | | | | | | EDYEKVKLLEISAEDAERWERKKKRKNPDLG |
| | | | | | | FSDYAAAQLRQYHRLTKQLKPDMETYERLRIE |
| | | | | | | KHGEEFFPTSNSLLHGTHVPSTEEIDRMVIDLE |
| | | | | | | KQIEKRDKYSRRRPYNDDADIDYNERNAKF |
| | | | | | | NKKAERFYGKYTAEIKQNLERGTAV |
| 935 | 2285 | A | 8027 | 59 | 310 | LVSSTVNLLTEKAPWNSLAWTVTSYVFLKFL |
| | | | | | | QGGGTGSTGMRDSALTLLGIGPSHRHSLSLRL |
| | | | | | | SQHSSPAPMYSQTFHIINLG |
| 936 | 2286 | A | 8032 | 1 | 639 | SGRECNMAKTYDYLFKLLLIGDSGVGKTCVL |
| | | | | | | FRFSEDAFNSTPISTIGIDFKIRTIELDGKPIKLQ |
| | | | | | | IWDTAGQERFRTITTAYYRGAMGIMLVYDIT |
| | | | | | | NEKSFDNIRNWIRNLEEHASADVEKMILGNKC |
| | | | | | | DVNDKRQVSKERGEKLALDYGIKFMETSAK |
| | | | | | | ANINWENAFFTLARDIKAKMDKKLEGNSPQG |
| | | | | | | SNQGVKITPDQQKRSSFFRCVLL |
| 937 | 2287 | A | 8039 | 393 | 311 | EETIHSENSYILEKYIPISANLTLTIA |
| 938 | 2288 | A | 8052 | 675 | 1334 | LHPAATSTAWLHVPPQLSMALSWVLTVLSLL |
| | | | | | | PLLEAQIPLCANLVPVPITNATLDRITGKWFYI |
| | | | | | | ASAFRNEEYNKSVQEIQATFFYFTPNKTEDTIF |
| | | | | | | LREYQTRQDQCIYNTTYLNVQRENGTLSRYV |
| | | | | | | GGQEHFAHLLILRDTKTYMLAFDVNDEKNW |
| | | | | | | GLSVYADKPET1TKEQLGEFYEALDCLRIPKSD |
| | | | | | | VVYTDWKKDKCEPLEKQHEKERKQEEGES |
| 939 | 2289 | A | 8055 | 12 | 1039 | SSVAEFPERVQLSQPQNWNFSGAGGAWSLDF |
| | | | | | | AEQLKWSAELARLGESTMDGKQGGMDGSKP |
| | | | | | | AGPRDFPGIRLLSNPLMGDAVSDWSPMHEAA |
| | | | | | | IHGHQLSLRNLISQGWAVNIITADHVSPLHEA |
| | | | | | | CLGGHLSCVKILLKHGAQVNGVTADWHTPL |
| | | | | | | FNACVSGSWDCVNLLLQHGASVQPESDLASP |
| | | | | | | IHEAARRGHVECVNSLIAYGGNIDHKISIILGT |
| | | | | | | PLYLACENQQRACVKKLLESGADVNQGKGQ |
| | | | | | | DSPLHAVARTASEELACLLMDFGADTQAKN |
| | | | | | | AEGKRPVELVPPESPLAQLFLEREQPPSLMQL |
| | | | | | | CRLRIRKCFGIQQHHKITKLVLPEDLKQFLLH |
| | | | | | | L |
| 940 | 2290 | A | 8058 | 2 | 1203 | KVLSIREPAHSTARKASEPSQPSQPSQPGGHLI |
| | | | | | | ARLRTMDLHLFDYSEPGNFSDISWPCNSSDCI |
| | | | | | | VVDTVMCPNMPNKSVLLYTLSFIYIFIFVIGMI |
| | | | | | | ANSVVVWVNIQAKTTGYDTHCYILNLAIADL |
| | | | | | | WVVLTIPVWVVSLVQIINQWPMGELTCKVTH |
| | | | | | | LIPSINLFGSIFFLTCMSVDRYLSITYFTNTPSS |
| | | | | | | RKKMVRRVVCILVWLLAFCVSLPDTYYLKT |
| | | | | | | VTSASNNETYCRSFYPEHSIKEWLIGMELVSV |
| | | | | | | VLGFAVPFSIIAVFYFLLARAISASSDQEKHSS |
| | | | | | | RKIIFSYVVVFLVCWLPYHVAVLLDIFSILHYI |
| | | | | | | PFTCRLEHALFTALHVTQCLSLVHCCVNPVL |
| | | | | | | YSFINRNYRYELMKAFIFKYSAKTGLTKLTDA |
| | | | | | | SRVSETEYSALEQSTK |
| 941 | 2291 | A | 8059 | 73 | 432 | DMAGLMTIVTSLLFLGVCAHHIIPTGSVVLPS |
| | | | | | | PCCMFFVSKRIPENRVVSYQLSSRSTCLKAGV |
| | | | | | | IFITKKGQQFGGDPKQEWVQRYMKNLDAKQ |
| | | | | | | KKASPRARAVAVKGPVQRYPGNQTTC |
| 942 | 2292 | A | 8067 | 278 | 1262 | GGIGEIKQRPSCLGRCLDPSLSVLMNISLGLGS |
| | | | | | | VFSAVISQKPSRDICQRGTSLTIQCQVDSQVT |
| | | | | | | MMFWYRQQPGQSLTLIATANQGSEATYESGF |
| | | | | | | VIDKFPISRPNLTFSTLTVSNMSPEDSSIYLCSA |
| | | | | | | GRQGTYEQYFGPGTRLTVTEDLKNVFPPEVA |
| | | | | | | VPEPSEAEISHTQKATLVCLATGFYPDHVELS |
| | | | | | | WWVNGKEVHSGVSTDPQPLKEQPALNDSRY |
| | | | | | | CLSSRLRVSATFWQNPRNHFRCQVQFYGLSE |
| | | | | | | NDEWTQDRAKPVTQIVSAEAWGRADCGFTS |
| | | | | | | ESYQQGVLSATILYEILLGKATLYAVLVSALV |
| | | | | | | LMAMVKRKDSRG |
| 943 | 2293 | A | 8070 | 1 | 879 | MVKVVPATRGNLPRSQLTGTHQHCQPREPKI |
| | | | | | | TASERLRRRPRATARLRAHAAPPEPPLAVFAP |
| | | | | | | PSDRKELLALPVACDPVIASVMSWVQAASLI |
| | | | | | | QGPGDKGDVFDEEADESLLAQREWQSNMQR |
| | | | | | | RVKEGYRDGIDAGKAVTLQQGFNQGYKKGA |
| | | | | | | EVILNYGRLRGTLSALLSWCHLHNNNSTLINK |
| | | | | | | INNLLDAVGQCEEYVLKHLKSITPPSHYVDLL |
| | | | | | | DSIEDMDLCHVVPAEKKIDEAKDERLCENNA |
| | | | | | | EFNKNCSKSHSGIDCSYVECCRTQEHAHSGK |
| | | | | | | PKPHMDFGTDSQF |
| 944 | 2294 | A | 8073 | 1 | 797 | ESARWSRQLRRTLIRLSFPISCGRSHAFGGCK |
| | | | | | | MAATSGTDEPVSGELVSVAHALSLPAESYGN |
| | | | | | | DPDIEMAWAMRAMQHAEVYYKLISSVDPQF |
| | | | | | | LKLTKVDDQIYSEFRKNFETLIUDVLDPEELK |
| | | | | | | SESAKEKWRPFCLKFNGIVEDFNYGTLLRLD |
| | | | | | | CSQGYTEENTIFAPRIQFFAIEIARNREGYNKA |
| | | | | | | VYISVQDKEGEKGVNNGGEKRADSGEEENT |
| | | | | | | KNGGEKGADSGEEKEEGINREDKTDKGGEK |
| | | | | | | GKEADKEINKSGEKAM |
| 945 | 2295 | A | 8074 | 2 | 505 | GAATLLRSASSAARKAAEAEQVWLHLHRYL |
| | | | | | | SADRRVLGLREWGRPASERECSLCQRLKREL |
| | | | | | | NMGDVEKGKKIFIMKCSQCHTVEKGGKHKT |
| | | | | | | GPNLHGLFGRKTGQAPGYSYTAANKNKGUW |
| | | | | | | GEDTLMEYLENPKKYIPGTKIVIIFVGIKKKEER |
| | | | | | | ADLIAYLKKATNE |
| 946 | 2296 | A | 8081 | 42 | 590 | EGRRGKFGGKLCNFLFYFHSNSAESRMDVLF |
| | | | | | | VAIFAVPLILGQEYEDEERLGEDEYYQVVYY |
| | | | | | | YTVTPSYDDFSADFTIDYSIFESEDRLNRLDK |
| | | | | | | DITEAIETTISLETARADHPKPVTVKPVTTEPQ |
| | | | | | | SPRSEAMIPCPVLRSPIPLPPVRVPLFRWGCISC |
| | | | | | | KKVGRRLLMTLWMGVWQEEIGR |
| 947 | 2297 | A | 8084 | 322 | 549 | GGGSSPRELAGAAGLTVTSQAVAARRQQPSF |
| | | | | | | SRARAPAHSLRAALSLASSARSWGAVSIWRG |
| | | | | | | PCPPAIMYQSSNKG |
| 948 | 2298 | E | 8093 | 3905 | 846 | MEPGEVKDRILENISLSVKKLQSYFAACEDEI |
| | | | | | | PAIRNHDKVLQRLCEHLDHALLYGLQDLSSG |
| | | | | | | YWVLVVHFTRREAIKQIEVLQHVATNLGRSR |
| | | | | | | AWLYLALNENSLESYLRLFQENLGLLHKYYV |
| | | | | | | KNALVCSHDHLTLFLTLVSGLEFIRFELDLDA |
| | | | | | | PYLDLAFYMPDYYKPQYLLDFEDRLPSSVHG |
| | | | | | | SDSLSLNSFNSVTSTNLEWDDSAIAPSSEDYD |
| | | | | | | FGDVFPAVPSVPSTDWEDGDLTDTVSGPRST |
| | | | | | | ASDLTSSKASTRSPTQRQNPFNEEPAETVSSS |
| | | | | | | DTTPVHTTSQEKEEAQALDPPDACTELEVIRV |
| | | | | | | TKKKKIGKKKKSRSDEEASPLHPACSQKKCA |
| | | | | | | KQGDGDSRNGSPSLGRDSPDTMLASPQEEGE |
| | | | | | | GPSSTPESSERSEPGLLIPEMKDTSMERLGQPL |
| | | | | | | SKVIDQLNGQLDPSTWCSRAEPPDQSFRTGSP |
| | | | | | | GDAPERPPLCDFSEGLSAPMDFYRFTVESPST |
| | | | | | | VTSGGGHHDPAGLGQPLHVPSSPEAAGQEEE |
| | | | | | | GGGGEGQTPRPLEDTTREAQELEAQLSLVRE |
| | | | | | | GPVSEPEPGTQEVLCQLKRDQPSPCLSSAEDS |
| | | | | | | GVDEGQGSPSEMVIISSEFRVDNNHLLLLMIH |
| | | | | | | VFRENEEQLFKMIRMSTGHMEGNLQLLYVLL |
| | | | | | | TDCYVYLLRKGATEKPYLVEEAVSYNELDY |
| | | | | | | VSVGLDQQTVKLVCTNRRKQFLLDTADVAL |
| | | | | | | AEFFLASLKSAMIKGCREPPYPSILTDATMEK |
| | | | | | | LALAKFVAQESKCEASAVTVRFYGLVHWED |
| | | | | | | PTDESLGPTPCHCSPPEGTITKEGMLHYKAGT |
| | | | | | | SYLGKEHWKTCFVVLSNGILYQYPDRTDVIP |
| | | | | | | LLSVNMGGEQCGGCRRANTTDRPHAFQVILS |
| | | | | | | DPPCLELSAESEAEMAEWMQHLCQAVSKGVI |
| | | | | | | PQGVAPSPCIPCCLVLTDDRLFTCHEDCQTSF |
| | | | | | | FRSLGTAKLGDISAVSTEPGKEYCVLEFSQDS |
| | | | | | | QQLLPPWVLYLSCTSELDRLLSALNSGWKTIY |
| | | | | | | QVDLPHTAIQEASNKKKFEDALSLIHSAWQR |
| | | | | | | SDSLCRCIRASRDPWC* |
| 949 | 2299 | A | 8095 | 9 | 2374 | ARRADTVLLESPSMLQGLLPVSLLLSVAVSAI |
| | | | | | | KELPGVKKYEVVYPIELHPLHKREAKEPEQQ |
| | | | | | | EQFETELKYKMTINGKIAVLYLKKNKNLLAP |
| | | | | | | GYTETYYNSTGKEITTSPQIMDDCYYQGLIILN |
| | | | | | | EKVSDASISTCRGLRGYFSQGDQRYFIEPLSPI |
| | | | | | | HRDGQEHALFICYNPDEKNYDSTCGMDGVL |
| | | | | | | WAHDLQQNIALPATKLVKLKDRKVQEHEKY |
| | | | | | | IEYYLVLDNGEFKRYNENQDEIRKRVFEMAN |
| | | | | | | YVNMLYKKLNTHVALVGMEIWTDKDKIKIT |
| | | | | | | PNASFTLENFSKWRGSVLSRRKRHDIAQLITA |
| | | | | | | TELAGTTVGLAFMSTMCSPYSVGVVQDHSD |
| | | | | | | NLLRVAGTMAHEMGHNFGMFHDDYSCKCPS |
| | | | | | | TICVMDKALSFYIPTDFSSCSRLSYDKFFEDKL |
| | | | | | | SNCLFNAPLPTDIISTPICGNQLVEMGEDCDC |
| | | | | | | GTSEECTNICCDAKTCKIKATFQCALGECCEK |
| | | | | | | CQFKKAGMVCRPAKDECDLPEMGNGKSGNC |
| | | | | | | PDDRFQVNGFPCHHGKGHCLMGTCPTLQEQ |
| | | | | | | CTELWGPGTEVADKSCYNRNEGGSKYGYCR |
| | | | | | | RVDDTLIPCKANDTMCGKLFCQGGSDNLPW |
| | | | | | | KGRIVTFLTCKTFDPEDTSQEIGMVANGTKCG |
| | | | | | | DNKVCINAECVDIEKAYKSTNCSSKCKGHAV |
| | | | | | | CDHELQCQCEEGWIPPDCDDSSVVFHFSIVVG |
| | | | | | | VLFVIAVIFVVVAMVIRHQSSREKQKKDQRP |
| | | | | | | LSTTGTRPHKQKRKPQMVKAVQPQEMSQK |
| | | | | | | PHVYDLPVEGNEPPASFHKDTNALPPTVFKD |
| | | | | | | NPMSTPKDSNPKA |
| 950 | 2300 | A | 8100 | 1 | 1251 | MGLLLMILASAYLGSFLTLLAQFFLLYRRQPE |
| | | | | | | PPADEAARAGEGFRYIKPVPGLLLREYLYGG |
| | | | | | | GRDEEPSGAAPEGGATPTAAPETPAPPTRETC |
| | | | | | | YFLNATILFLFRELRDTALTRRWVTKKIKVEF |
| | | | | | | EELLQTKTAGRLLEGLSLRDVFLGETVPFIKTI |
| | | | | | | RLVRPVVPSATGEPDGPEGEALPAACPEELAF |
| | | | | | | EAEVEYNGGFHLAIDVDLVFGKSAYLFVKLS |
| | | | | | | RVVGRLRLVFTRVPFTHWFFSFVEDPLIDFEV |
| | | | | | | RSQFEGRPMPQLTSIIVNQLKKIIKRKHTLPNY |
| | | | | | | KIRFKPFFPYQTLQGFEEDEEHIHIQQWALTE |
| | | | | | | GRLKVTLLECSRLLIFGSYDREANVHCTLELS |
| | | | | | | SSVWEEKQRSSIKTGTISLTAVFMGWHRVSE |
| | | | | | | AFPGLWYKLLVDLPFWGLEDGGPLLTVPLRQ |
| | | | | | | CPG |
| 951 | 2301 | A | 8108 | 1612 | 839 | EVALFCFEMAAGMYLEHYLDSIENLPFELQR |
| | | | | | | NFQLMRDLDQRTEDLKAEIDKLATEYMSSAR |
| | | | | | | SLSSEEKLALLKQIQEAYGKCKEFGDDKVQL |
| | | | | | | AMQTYEMVDKHIRRLDTDLARFEADLKEKQI |
| | | | | | | ESSDYDSSSSKGKKKGRTQKEKKAARARSKG |
| | | | | | | KNSDEEAPKTAQKKLKLVRTSPEYGMPSVTF |
| | | | | | | GSVHPSDVLDMPVDPNEPTYCLCHQVSYGE |
| | | | | | | MIGCDNPDCSIEWFHFACVGLITKPRGKWFC |
| | | | | | | PRCSQERKKK |
| 952 | 2302 | A | 8112 | 595 | 291 | PSVASLARRFSGRALWPPSHSVPGNRALCPRL |
| | | | | | | LHGTTLPGGNQRELARQKNMKKQSDSVKGK |
| | | | | | | RRDDGLSAAAIRKQRDSTPRPSELMQQKQKK |
| | | | | | | ANEKKEEPK |
| 953 | 2303 | A | 8118 | 1 | 669 | VCAGIRDPCSTPLAKPAAGGAENLSFGKQPG |
| | | | | | | LETNILKMTTPNKTPPGADPKQLERTGTVREI |
| | | | | | | GSQAVWSLSSCKPGFGVDQLRDDNLETYWQ |
| | | | | | | SDGSQPHLVNIQFRRKTTVKTLCLYADYKSDE |
| | | | | | | SYTPSKISVRVGNNFHNLQEIRQLELVEPSGW |
| | | | | | | IHVPLTDNIIKKPTRTFMIQIAVLANHQNGRD |
| | | | | | | THMRQIKIYTPVEESSIGKFPRCTTIDFMMYRS |
| | | | | | | IR |
| 954 | 2304 | A | 8133 | 66 | 1015 | PPLPPRSFPNLFSRPEPLPEPGRRGCNRSREPA |
| | | | | | | ARAPSPPPPFEGAPGRAMVKVTFNSALAQKE |
| | | | | | | AKKDEPKSGEEALIIPPDAVAVDCKDPDDVV |
| | | | | | | PVGQRRAWCWCMCFGLAFMLAGVILGGAY |
| | | | | | | LYKYFALQPDDVYYCGIKYIKDDVILNEPSAD |
| | | | | | | APAALYQTIEENIKIFEEEEVEFISVPVPEFADS |
| | | | | | | DPMNIVHDFNKKLTAYLDLNLDKCYVIPLNT |
| | | | | | | SIVMPPRNLLELLINIKAGTYLPQSYLIHEIIMV |
| | | | | | | ITDRIENIDHLGFFIYRLCHDKETYKLQRRETI |
| | | | | | | KGIQKREASNCFAIRHFENKFAVETLICS |
| 955 | 2305 | A | 8143 | 35 | 1171 | VESRSAWHEGEDQIDELDFIRNQMNLLTLDV |
| | | | | | | KKKIKEVTEEVANKVSCAMTDEICRLSVLVD |
| | | | | | | EFCSEFHPNPDVLKIYKSELNKHIEDGMGRNL |
| | | | | | | ADRCTDEVNALVLQTQQEIIENLKPLLPAGIQ |
| | | | | | | DKLHTLIPCKKFDLSYNLNYHKLCSDFQEDW |
| | | | | | | FRFSLGWSSLVHRFLGPRNAQRVLLGLSEPIF |
| | | | | | | QLPRSLASTPTAPITPATPDNASQEELMITLVT |
| | | | | | | GLASVTSRTSMGUWGGVIWKTIGWKLLSVS |
| | | | | | | LTMYGALYLYERLSWTTHAKERAFKQQFVN |
| | | | | | | YATEKLRMIVSSTSANCSHQVKQQIATTFARL |
| | | | | | | CQQVDITQKQLEEEIARLPKEIDQLEICIQNNS |
| | | | | | | KLLRNKAVQLENELENFTKQFLPSSNEES |
| 956 | 2306 | A | 8157 | 1854 | 798 | ASGSPAPSSSSAMAAACGPGAAGYCLLLGLH |
| | | | | | | LFLLTAGPALGWNDPDRMLLRDVKALTLHY |
| | | | | | | DRYTTSRRLDPIPQLKCVGGTAGCDSYTPKVI |
| | | | | | | QCQNKGWDGYDVQWECKTDLDIAYKFGKT |
| | | | | | | VVSCEGYESSEDQYVLRGSCGLEYNLDYTEL |
| | | | | | | GLQKLKESGKQHGFASFSDYYYKWSSADSC |
| | | | | | | NMSGLITTVVLLGIAFVVYKLFLSDGQYSPPP |
| | | | | | | YSEYPPFSHRYQRFTNSAGPPPPGFKSEFTGPQ |
| | | | | | | NTGHGATSGFGSAFTGQQGYENSGPGFWTGL |
| | | | | | | GTGGILGYLFGSNRAATPFSDSWYYPSYPPSY |
| | | | | | | PGTWNRAYSPLHGGSGSYSVCSNSDTKTRTA |
| | | | | | | SGYGGTRRR |
| 957 | 2307 | A | 8159 | 1492 | 528 | THVVMTGMCYAPHQVLSYINGWITSKPGVSL |
| | | | | | | VYSMPSRIMLSLRLEGLQEKDSGPYSCSVNVQ |
| | | | | | | DKQGKSRGHSIKTLELNVLVPPAPPSCRLQGV |
| | | | | | | PHVGANVTLSCQSPRSKPAVQYQWDRQLPSP |
| | | | | | | QTFFAPALDVIRGSLSLTNLSSSMAGVYVCKA |
| | | | | | | HNEVGTAQCNVTLEVSTGPGAAVVAGAVVG |
| | | | | | | TLVGLGLLAGLVLLYHRRGKALEEPANDIKE |
| | | | | | | DAIAPRTLPWPKSSDTISKNGTLSSVTSARAL |
| | | | | | | RPPHGPPRPGALTPTPSLSSQALPSPRLPTDG |
| | | | | | | AHPQPISPIPGGVSSSGLSRMGAVPVMVPAQS |
| | | | | | | QAGSLV |
| 958 | 2308 | A | 8161 | 2340 | 1192 | ELARRPKQQSSEKSRNMIRNWLTIFILFPLKLV |
| | | | | | | EKCESSVSLTVPPVVKLENGSSTNVSLTLRPP |
| | | | | | | LNATLVITFEITFRSKNITILELPDEVVVPPGVT |
| | | | | | | NSSFQVTSQNVGQLTVYLHGNIISNQTGPRIR |
| | | | | | | FLVIRSSAISIINQVIGWIYFVAWSISFYPQVIM |
| | | | | | | NWRRKSVIGLSFDFVALNLTGFVAYSVFNIGL |
| | | | | | | LWVPYIKEQFLLKYPNGVNPVNSNDVFFSLH |
| | | | | | | AVYLTLIIVQCCLYERGGQRVSWPAIGFLVL |
| | | | | | | AWLFAFVTMIVAAVGVITWLQFLFCFSYIKL |
| | | | | | | AVTLVKYFPQAYMNFYYKSTEGWSLGNVLL |
| | | | | | | DFTGGSFSLLQMFLQSYNNDQWTLIFGDPTK |
| | | | | | | FGLGVFSIVFDVVFFIQHFCLYRKEPGYDQLN |
| 959 | 2309 | A | 8163 | 521 | 1345 | GERAGRRRGRLGVWAQPQPLLPRFVGSRRE |
| | | | | | | MQPPGPPPAYAPTNGDFTFVSSADAEDLSGSI |
| | | | | | | ASPDVKLNLGGDFIKESTATTFLRQRGYGWL |
| | | | | | | LEVEDDDPEDNKPLLEELDIDLKDIYYKIRCV |
| | | | | | | LMPMPSLGFNRQVVRDNPDFWGPLAVVLFFS |
| | | | | | | MISLYGQFRVVSWIITIWIFGSLTIFLLARVLG |
| | | | | | | GEVAYGQVLGVIGYSLLPIIVIAPVLLVVGSF |
| | | | | | | EVVSTLIKLFGVFWAAYSAASLLVGEEFKTK |
| | | | | | | KPLLIYPIFLLYIYFLSLYTGV |
| 960 | 2310 | A | 8167 | 1 | 2921 | MTCFKGQKGEQRSHAFEANKDHKAKVPSPN |
| | | | | | | LYSQLNALQFTVDERSILWLNQFLLDLKQSL |
| | | | | | | NQFMAVYKLNDNSKSDEHVDVRVDGLMLK |
| | | | | | | FVIPSEVKSECHQDQPRAISIQSSEMIATNTRR |
| | | | | | | CPNCRHSDLEALFQDPKDCDFFSKTYTSFPKS |
| | | | | | | CDNFNLLHPIFQRHAHEQDTKMHEIYKGNITP |
| | | | | | | QLNKNTLKTSAATDVWAVYFSQFWIDYEGM |
| | | | | | | SGKGRPISFVDSPPLSIWICQPTRYAESQKEP |
| | | | | | | QTCNQVSLNTSQSESSDLAGRLKRKKLLKEY |
| | | | | | | YSTESEPLTNGGQKPSSSDTFFRFSPSSSEADI |
| | | | | | | HLLVHVHKHVSMQINHYQYLLLLFLHESLLLL |
| | | | | | | SENLREDVEAVTGSPASQTSICIGILLRSAELA |
| | | | | | | LLLITPVDQANTLKSPVSESVSPVVPDYLPTEN |
| | | | | | | GDFLSSKRKQISRDINRIRSVTVNHMSDNRSM |
| | | | | | | SVDLSHIPLKDPLLFKSASDTNLQKGISFMDY |
| | | | | | | LSDKHLGKISEDESSGLVYKSGSGEIGSETSD |
| | | | | | | KKDSFYTDSSSVLNYREDSNILSFDSDGNQNI |
| | | | | | | LSSTLTSKGNETIESIFKAEDLLPEAASLSENL |
| | | | | | | DISKEETPPVRTLKSQSSLSGPKERCPPNLAP |
| | | | | | | LCVSYKNMKRSSSQMSLDTISLDSMILEEQLL |
| | | | | | | ESDGSDSHMFLEKGNKKNSTTNYRGTAESVN |
| | | | | | | AGANLQNYGETSPDAISTNSEGAQENHDDLM |
| | | | | | | SVVVFKITGVNGEIDIRGEDTEICLQVNQVTP |
| | | | | | | DQLGNISLRHYLCNRPVGSDQKAVIHSKSSPE |
| | | | | | | ISLRFESGPGAVIHSLLAEKNGFLQCHIENFST |
| | | | | | | EFLTSSLMNIQHFLEDETVATVPMKIQVSNT |
| | | | | | | KINLKDDSPRSSTVSLEPAPVTVHIDHLVVER |
| | | | | | | SDDGSFHLRDSHMLNTGNDLKENVKSDSVLL |
| | | | | | | TSGKYDLKKQRSVTQATQTSPGVPWPSQSAN |
| | | | | | | FPEFSFDFTREQLMEENESLKQELAKAKMAL |
| | | | | | | AEAHLEKDALLHIHIKKMTVE |
| 961 | 2311 | A | 8172 | 1442 | 682 | TAAMSIFTPTNQIRLTNVAVVRMKRAGKRFEI |
| | | | | | | ACYKNKVVGWRSGVEKDLDEVLQTHSVFN |
| | | | | | | VSKGQVAKKEDLISAFGTDDQTEICKQILTKG |
| | | | | | | EVQVSDKERHTQLEQMFRDIATIVADKCVNP |
| | | | | | | ETKRPYTVILTERCDHYSVKTNKSTKQQA |
| | | | | | | LEVIKQLKEKMKIERAHMRLRFILPVNEGKKL |
| | | | | | | KEKLKPLIKVIESEDYGQQLEIVCLIDPGCFREI |
| | | | | | | DELIKKETKGKGSLEVLNLKDVEEGDEKFE |
| 962 | 2312 | A | 8175 | 286 | 587 | NISNKAEVSSHPSVISHSMDSFGQPRPEDNQS |
| | | | | | | VLRRMQKKYWKTKQVFIKATGKKEDEHLVA |
| | | | | | | SDAELDAKLEVFHSVQETCTELLKIIEKYQLR |
| | | | | | | LNGMKS |
| 963 | 2313 | A | 8181 | 13 | 2215 | AEGCAERRGTEPVVELSMSWESGAGPGLGSQ |
| | | | | | | GMDLVWSAWYGKCVKGKGSLPLSAHGIVV |
| | | | | | | AWLSRAEWDQVTVYLFCDDHKLQRYALNRI |
| | | | | | | TVWRSRSGNELPLAVASTADLLRCKLLDVTG |
| | | | | | | GLGTDELRLLYGMALVRFVNLIKTKFAK |
| | | | | | | VPLKCLAQEVNIPDWIVDLRHELTHICKMPHI |
| | | | | | | NDCRRGCYFVLDWLQKTYWGRQLENSLRET |
| | | | | | | WELEEFREGIEEEDQEEDKNIVVDDITEQKPE |
| | | | | | | PQDDGKSTESDVKADGDSKGSEEVDSHCKK |
| | | | | | | ALSHKELYERARELLVSYEEEQFTVLEKFRYL |
| | | | | | | PKAIKAWNNFSPRVECVLAELKGVTCENREA |
| | | | | | | VLDAFLDDGFLVPTFEQLAALQIEYEENVDL |
| | | | | | | NDVLVPKPFSQFWQPLLRGLHSQNFTQALLE |
| | | | | | | RMLSELPALGISGIRPTYILRWTVELIVANTKT |
| | | | | | | GRNARRFSAGQWEARRGWRLFNCSASLDWP |
| | | | | | | RMVESCLGSPCWASPQLLRIIFKAMGQGLPD |
| | | | | | | EEQEKLLRICSIYTQSGENSLVQEGSEASPIGK |
| | | | | | | SPYTLDSLYWSVKPASSSFGSEAKAQQQEEQ |
| | | | | | | GSVNDVKEEEKEEKEVLPDQVEEEEENDDQE |
| | | | | | | EEEEDEDDEDDEEEDRMEVGPFSTGQESPTA |
| | | | | | | ENARLLAQKRGALQGSAWQVSSEDVRWDTF |
| | | | | | | PLGRMPGQTEDPAELMLENYDTMYLLDQPV |
| | | | | | | LEQRLEPSTCKTDTLGLSCGVGSGNCSNSSSS |
| | | | | | | NFEGLLWSQGQLHGLKTGLQLF |
| 964 | 2314 | A | 8184 | 6 | 1393 | EPRRNFRDDSTRPRTRGRTRGRRRRACRSAE |
| | | | | | | GTGLRSLLLPPRLQLPAGPFSRCRWDPVSSPR |
| | | | | | | PSTMPPKKGGDGIKPPPTIGRFGTSLKIGWGLP |
| | | | | | | NVGKSTFFNVLTNSQASAENFPFCTIDPNESR |
| | | | | | | VPVPDERFDFLCQYHKPASKIPAFLNVVDIAG |
| | | | | | | LVKGANGQGLGNAFLSHISACDGIFHLTRA |
| | | | | | | FEDDDITHVEGSVDPIDIEIIHEELQLKDEEMI |
| | | | | | | GPIIDKLEKVAVRGGDKKLKPEYDIMCKVKS |
| | | | | | | WVIDKLEKVAVRGGDKKLKPEYDIMCKVKS |
| | | | | | | KPMVYLVNLSEKDYIRKKNKWLIKIKEWVD |
| | | | | | | KYDPGAFSGALELKLQELSAEERQKYLE |
| | | | | | | ANMTQSALPKIIKAGFAALQLEYFFTAGPDEV |
| | | | | | | RAWTIRKGTKAPQAAGKIHTDFEKGFIMAEV |
| | | | | | | MKYEDFKEEGSENAVKAAGKYRQQGRNYN |
| | | | | | | EDGDIIFFKFNTPQQPKKK |
| 965 | 2315 | A | 8195 | 1437 | 594 | RSFSLSFSLLSPSEMMALGAAGATRVFVAMV |
| | | | | | | AAALGGHPLLGVSATLNSVLNSNAIKNLPPPL |
| | | | | | | GGAAGHPGSAVSAAPGILYPGGNKYQTIDNY |
| | | | | | | QPYPCAEDEECGTDEYCASPTRGGDAGVQIC |
| | | | | | | LACRKRRKRCMRHAMCCPGNYCKNGICVSS |
| | | | | | | DQNHFRGEIEETFESFGNDHSTLDGYSRRTT |
| | | | | | | LSSKMYHTKGQEGSVCLRSSDCASGLCCARH |
| | | | | | | FWSKICKFVLKEGQVCTKHRRKGSHGLEIFQ |
| | | | | | | RCYCGEGLSCRIQKDHHQASNSSRLHTCQRH |
| 966 | 2316 | A | 8207 | 416 | 4082 | KFKLIKIMLLTLIILLPVVSKFSFVSLSAPQHW |
| | | | | | | SPEGTLAGNGNSTCVGPAPFLIFSHGNSIFRI |
| | | | | | | DTEGTNYEQLVVDAGVSVFHYNEKRIY |
| | | | | | | WVDLERQLLQRVFLNGSRQERVCNIEKNVSG |
| | | | | | | MAINWINEEVIWSNQQEGIITVTDMKGNNSHI |
| | | | | | | LLSALKYPANVAVDPVERFIFWSSEVAGSLY |
| | | | | | | RADLDGVGVKALLETSEKITAVSLDVLDKRL |
| | | | | | | FWIQYNREGSNSL1CSCDYDGGSVHISKHPTQ |
| | | | | | | HNLFAMSLFGDRIPYSTWKMKTIWIANKHTG |
| | | | | | | KDMVRINLHSSFVPLGELKVVHPLAQPKAED |
| | | | | | | DTWEPEQKLCKLRKGNCSSTVCGQDLQSHLC |
| | | | | | | MCAEGYALSRDRKYGEGNDWKYCEDVNEC |
| | | | | | | AFWNHGCTLGCKNTPGSYYCTCPVGFVLLPD |
| | | | | | | GKRCHQLVSCPRNVSECSHDCVLTSEGPLCF |
| | | | | | | CPEGSVLERDGKTCSGCSSPDNGGCSQLCVPL |
| | | | | | | SPVSWECDCFPGYDLQLDEKSCAASGPQPFL |
| | | | | | | LFANSQDIRHMHFDGTDYGTLLSQQMGMVY |
| | | | | | | ALDHDDPVENKIYFAHTALKWIERANMDGSQ |
| | | | | | | RERLIEEGVDVPEGLAVDWIGRRFYWTDRGK |
| | | | | | | SLIGRSDLNGKRSKITTIENISQPRGIAVHPMAK |
| | | | | | | RLFWTDTYGINPRIESSSLQGLGRLLVIASSDLIW |
| | | | | | | PSGITIDFLTDKLYWCDAKQSVIEMANLDGSK |
| | | | | | | RERLTQNDVGHPFAVAVFEDYVWFSDWAMP |
| | | | | | | SVIRVNKRTGKDRVRLQGSMLKPSSLVVVIIP |
| | | | | | | LAKPGADPCLYQNGGCEHICKKRLGTAWCS |
| | | | | | | CREGFMKASDGKTCLALDGHQLLAGGEVDL |
| | | | | | | KNQVTPLDILSKTRVSEDNITESQHMLVAEIM |
| | | | | | | VSDQDDCAPVGCSMYARCISEGEDATCQGLK |
| | | | | | | GFAGDGICLCSDIDECEMGVPVCPPASSKCINT |
| | | | | | | EGGYVCRCSEGYQGDGIHCLDIDECQLGVHS |
| | | | | | | CGENASCTNTEGGYTCMCAGRLSEPGLICPD |
| | | | | | | STPPPHLREDDHHYSVRNSDSECPLSHDGYCL |
| | | | | | | HDGVCMYIEALDKYACNCVVGYIGERCQYR |
| | | | | | | DLKWWELRHAGHGQQQICVVVAVCVVVLV |
| | | | | | | MLLLLSLWGAHYYRTQKLLSKNPKNPYEESS |
| | | | | | | RDVRSRRPADTEDGMSSCPQPWFVVIKEHQD |
| | | | | | | LKNGGQPVAGEDGQAADGSMQPTSWRQEPQ |
| | | | | | | LCGMGTEQGCWIPVSSDKGSCPQVMERSFH |
| | | | | | | MPSYGTQTLEGGVEKPHSLLSANPLWQQRAL |
| | | | | | | DPPHQMELTQ |
| 967 | 2317 | A | 8210 | 3 | 601 | SSAMGSRSSHAAVIPDGDSIRRETGFSQASLL |
| | | | | | | RLHHRFRALDRNKKGYLSRMDLQQIGALAV |
| | | | | | | NPLGDRIIESFFPDQSQRVDFPGFVRVLAHFRP |
| | | | | | | VEDEDTETQDPKKPEPLNSRRNKLHYAFQLY |
| | | | | | | DLDRDGKISRHEMLQVLRLMVGVQTEEQL |
| | | | | | | ENIADRTVQEADEDGDGAVSFVEFTKSLEKM |
| | | | | | | DVEHKMSIRILK |
| 968 | 2318 | A | 8211 | 2 | 409 | ISSCPHTAYEGSMSTLSNFTQTLEDVFRRTFIT |
| | | | | | | YMDNWRQNTTAEQEALQAKVDAENFYYVIL |
| | | | | | | YLMYMIGMFSFIIVAILVSTVKSKRREHSNDP |
| | | | | | | YHQYIVEDWQEKYKSQILNLEESKATIHENIG |
| | | | | | | AAGFKMSP |
| 969 | 2319 | A | 8215 | 1 | 1938 | GMPRSRGGRAAFGPPPPPPPPGQAPRWSRWR |
| | | | | | | VPGRLLLLLLPALCCLPGAARAAAAAAGAGN |
| | | | | | | RAAVAVAVARADEAEAPFAGQNWLKSYGY |
| | | | | | | LLPYDSRASALHSAKALQSAVSTMQQFYGIP |
| | | | | | | VTGVLDQTTIEWMKKPRCGVPDHPHLSRRRR |
| | | | | | | NKRYALTGQKWRQKHITYSIHNYTPKVGELD |
| | | | | | | TRKAIRQAFDVWQKVTPLTFEEVPYHEIKSDR |
| | | | | | | KEADLMIFFASGFHGDSSPFDGEGGFLAHAYF |
| | | | | | | PGPGIGGDTIIFDSDEPWTLGNANHDGNDLFL |
| | | | | | | VAVHELGHALGLEHSSDPSAIMAPFYQYMET |
| | | | | | | HNFKLPQDDLQGIQKIYGPPAEPLEPTRPLPTL |
| | | | | | | PVRRIHSPSERKHERQPRPPRPPLGDRPSTPGT |
| | | | | | | KPNICDGNFNTVALFRGEMFVFKDRWFWRL |
| | | | | | | RNNRVQEGYPMQIEQFWKGLPAEIDAAYER |
| | | | | | | ADGRFVFFKGDKYWVFKEVTVEPGYPHSLG |
| | | | | | | ELGSCLPREGIDTALRWEPVGKTYFFKGERY |
| | | | | | | WRYSEERRATDPGYPKPITVWKGIPQAPQGA |
| | | | | | | FISKEGYYTYFYKGRDYWKFDNQKLSVEPGY |
| | | | | | | PRNILRDWMGCNQKEVERRKERRLPQDDVDI |
| | | | | | | MVTINDVPGSVNAVAVVIPCILSLCILVLVYTI |
| | | | | | | FQFKNKTGPQPVTYYKRPVQEWV |
| 970 | 2320 | A | 8216 | 1235 | 2223 | SRLSLQFYVSFRRTGLFTCKLIYEIPFRNYMN |
| | | | | | | DSLRTNVFVRFQPETIACACIYLAARALQIPLP |
| | | | | | | TRPHWFLLFGTTEEEIQEICIETLRLYTRKKPN |
| | | | | | | YELLEKEVEKRKVALQEAKLKAKGLNPDGTP |
| | | | | | | ALSTLGGFSPASKPSSPREVKAEEKSPISINVK |
| | | | | | | TVKKEPEDRQQASKSPYNGVRKDSKRSRNSR |
| | | | | | | SASRSRSRTRSRSRSHTPRRHYNNRRSRSGTY |
| | | | | | | SSRSRSRSRSHSESPRRHHNHGSPHLKAKHTR |
| | | | | | | DDLKSSNRHGHKRKKSRSRSQSKSRDHSDAA |
| | | | | | | KKHRHERGHHRDRRERSRSFERSHKSKHHGG |
| | | | | | | SRSGHGRHRR |
| 971 | 2321 | A | 8217 | 3 | 3274 | DCRLQAAMPTNFTVVPVEAHADGGGDETAE |
| | | | | | | RTEAPGTPEGPEPERPSPGDGNPRENSPFLNN |
| | | | | | | VEVEQESFFEGKNMALFEEEMDSNPMVSSLL |
| | | | | | | NKIANYTNLSQGVVEHEEDEESRRREAKAPR |
| | | | | | | MGTFIGVYLPCLQNILGVILFLRLTWTVGVAG |
| | | | | | | VLESFLIVAMCCTCTMLTAISMSAIATNGVVP |
| | | | | | | AGGSYYMISRSLGPEFGGAVGLCFYLGTTFA |
| | | | | | | GAMYLLGTIEIFLTYISPGAAIFQAEAAGGEAA |
| | | | | | | AMLHNMRVYGTCTLVLMALVVFVGVKYVN |
| | | | | | | KLALVFLACVYLSILAIYAGVIKSAFDPPDIPV |
| | | | | | | CLLGNRTLSRRSFDACVKAYGIHNNSATSAL |
| | | | | | | WGLFCNGSQPSAACDEYFIQNNVTEIQGIPGA |
| | | | | | | ASGVFLENLWSTYAHAGAFVEKKGVPSVPV |
| | | | | | | AEESRASTLPYVLTDIAASFTLLVGIYFPSVTG |
| | | | | | | IMAGSNRSGDLKDAQKSIPTGTILAIVTTSFIY |
| | | | | | | LSCIVLFGACTEGVVLRDKFGEALQGNLVIGM |
| | | | | | | LAWPSPWVIVIGSFFSTCGAGLQTLTGAPRLL |
| | | | | | | QAIARDGIVPFLQVFGHGKANGEPTWALLLT |
| | | | | | | VLICETGILIASLDSVAPILSMFFLMCYLFVNL |
| | | | | | | ACAVQTLLRTPNWRPRFKFYHWTLSFLGMSL |
| | | | | | | CLALMFICSWYYALSAMLIAGCIYKYIEYRG |
| | | | | | | AEKEWGDGIRGLSLNAARYALLRVEHGPPHT |
| | | | | | | KNWRPQVLVMLNLDAEQAMKHPRLLSFTSQ |
| | | | | | | LKAGKGLTIVGSVLEGTYLDKHMEAQRAEE |
| | | | | | | NIRSLMSTEKTKGFCQLVVSSSLRDGMSHLIQ |
| | | | | | | SAGLGGLKHNTVLMAWPASWKQEDNPFSW |
| | | | | | | KNFVDTVRDTTAAHQALLVAKNVDSFPQNQ |
| | | | | | | ERFGGGHIDVWWIVHDGGMLMLLPFLLRQH |
| | | | | | | KVWRKCRMIUFTVAQVDDNSIQMKKDLQMF |
| | | | | | | LYHLRISAEVEVVEMVENDISAFTYERTLMM |
| | | | | | | EQRSQMLKQMQLSKNEQEREAQLIHDRNTAS |
| | | | | | | HTAAAARTQAPPTPDKVQMTWTREKLIAEK |
| | | | | | | YRSRDTSLSGFKDLFSMKPDQSNVRRMHTAV |
| | | | | | | KLNGVVLNKSQDAQLVLLNMPGPPKNRQGD |
| | | | | | | ENYMEFLEVLTEGLNRVLLVRGGGREVTTTYS |
| 972 | 2322 | A | 8224 | 701 | 246 | TSRRVTMKFNPFVTSDRSKNKKRHFNAPSHV |
| | | | | | | RRKIMSSPLSKELRQKYNVRSMPIRKDDEVQ |
| | | | | | | VVRGHYKGQQIGKVVQVYRKKYVIYIERVQ |
| | | | | | | REKANGTTVHVGIHPSKVVLTRLKLDKDRKKI |
| | | | | | | LERKAKSRQVGKEKGKYKEELIEKMQE |
| 973 | 2323 | A | 8237 | 873 | 4610 | GCPHAGGKGRVPTGGLTGGRTWSPSAAPRSC |
| | | | | | | PRPGPTPAPGAMDKLPPSMRKRLYSLPQQVG |
| | | | | | | AKAWIMDEEEDAEEEGAGGRQDPSRRSIRLR |
| | | | | | | PLPSPSPSAAAGGTESRSSALGAADSEGPARG |
| | | | | | | AGKSSTNGDCRRFRGSLASLGSRGGGSGGTG |
| | | | | | | SGSSHGHLHDSAEERRLIAEGDASPGEDRTPP |
| | | | | | | GLAAEPERPGASAQPAASPPPPQQPPQPASAS |
| | | | | | | CEQPSVDTAIKVEGGAAAGDQILPEAEVRLG |
| | | | | | | QAGFMQRQFGAMLQPGVNKFSLRMFGSQKA |
| | | | | | | VEREQERVKSAGFWIIHPYSDFRFYWDLTML |
| | | | | | | LLMVGNLIIIPVGITFFKDENITPWWFNVVSD |
| | | | | | | TFFLIDLVLNFRTGTVVEDNEIILDPQRIKMK |
| | | | | | | YLKSWFMVDFISSIPVDYIFLIVETRIDSEVYK |
| | | | | | | TARALRIVRFTKILSLLRLLRLSRLIRYIHQWE |
| | | | | | | EIFHMTYDLASAVVRIVNLIGMMLLLCHWDG |
| | | | | | | CLQFLVPMLQDFPDDCWVSINNMVNNSWGK |
| | | | | | | QYSYALFKAMSHMLCIGYGRQAPVGMSDV |
| | | | | | | WLTMLSMIVGATCYAIVIFIGHATALIQSLDSS |
| | | | | | | RRQYQEKYKQVEQYMSFHKLPPDTRQRIHD |
| | | | | | | YYEHRYQGKMFDEESILGELSEPLREEIINFNC |
| | | | | | | RKLVASMPLFANADPNFVTSMLTKLRFEVFQ |
| | | | | | | PGDYIIREGTIGKKMYFIQHGVVSVLTKGNKE |
| | | | | | | TKLADGSYFGEICLLTRGRRTASVRADTYCR |
| | | | | | | LYSLSVDNFNEVLEEYPMMRRAFETVALDRL |
| | | | | | | DRIGKKNSILLHKVQHDLNSGVFNYQENEIIQ |
| | | | | | | QIVQHDREMAHCAHRVQAAASATPTPTPVIW |
| | | | | | | TPLIQAPLQAAAATTSVAIALTHHPRLPAAIFR |
| | | | | | | PPPGSGLGNLGAGQTPPHLKRLQSLIPSALGS |
| | | | | | | ASPASSPSQVDTPSSSSFHIQQLAGFSAPAGLS |
| | | | | | | PLLPSSSSSPPPGACGSPSAPTPSAGVAAITIA |
| | | | | | | GFGHFHKALGGSLSSSDSPLLTPLQPGARSPQ |
| | | | | | | AAQPSPAPPGARGGLGLPEHFLPPPPSSRSPSS |
| | | | | | | SPGQLGQPPGELSLGLATGPLSTPETPPRQPEP |
| | | | | | | PSLVAGASGGASPVGFTPRGGLSPPGHSPGPP |
| | | | | | | RTFPSAPPRASGSHGSLLLPPASSPPPPQVPQR |
| | | | | | | RGTPPLTPGRLTQDLKLISASQPALPQDQAQT |
| | | | | | | LRRASPHSSGESMAAFPLFPRAGGGSGGSGSS |
| | | | | | | GGLGPPGRPYGAIPGQHVTLPRKTSSGSLPPP |
| | | | | | | LSLFGARATSSGGPPLTAGPQREPGARPEPVR |
| | | | | | | SKLPSNL |
| 974 | 2324 | A | 8247 | 279 | 468 | EYKQWERRFLSCQNRNDLGYGKPRKGGGLL |
| | | | | | | LVPVKDASRICSLTYLLGSHWNNLVVRSPVL |
| | | | | | | G |
| 975 | 2325 | A | 8249 | 62 | 1571 | LVALKNWKPKGTNIPAPQSPVPGEAVSGVYM |
| | | | | | | MTKVLGMAPVLGPRPPQEQVGPLMVKVEEK |
| | | | | | | EEKGKYLPSLEMFRQRFRQFGYHDTPGPREA |
| | | | | | | LSQLRVLCCEWLRPEIHTKEQILELLVLEQFLT |
| | | | | | | ILPQELQAWVQEHCPESAEEAVTLLEDLEREL |
| | | | | | | DEPGHQVSTPPNEQKPVWEKISSSGTAKESPS |
| | | | | | | SMQPQPLETSHKYESWGPLYIQESGEEQEFAQ |
| | | | | | | DPRKVRDCRLSTQHEESADEQKGSEAEGLKG |
| | | | | | | DIISVIIANKPEASLERQCVNLENEKGTKPPLQ |
| | | | | | | EAGSKKGRESVPTKPTPGERRYICAECGKAFS |
| | | | | | | NSSNLTKHRRTHTGEKPYVCTKCGKAFSHSS |
| | | | | | | NLTLHYRTHLVDRPYDCKCGKAFQQSSDLLK |
| | | | | | | HQRMHTEEAPYQCKDCGKAFSGKGSLIRHYR |
| | | | | | | IHTGEKPYQCNECGKSFSQHAGLSSHQRLHT |
| | | | | | | GEKPYKCKECGKAFNHSSNFNKHHRIHTGEK |
| | | | | | | PYWCHHCGKTFCSKSNLSKHQRVHTGEGEA |
| | | | | | | P |
| 976 | 2326 | A | 8257 | 298 | 7086 | GNMACWPQLRLLLWKNLTFRRRQTCQLLLE |
| | | | | | | VAWPLFIFLILISVRLSYPPYEQHECHFPNKAM |
| | | | | | | PSAGTLPWVQGIICNANNPCFRYPTPGEAPGV |
| | | | | | | VGNFNKSIVARLFSDARRLLLYSQKDTSMKD |
| | | | | | | MRKVLRTLQQTKKSSSNLKLQDFLVDNETFS |
| | | | | | | QFLYHNLSLPKSTVDKMLRADVILHKVFLQG |
| | | | | | | YQLHLTSLCNGSKSEEMIQLGDQEVSELCGLP |
| | | | | | | REKLAAAERVLRSNMDLLKPILRTLNSTSPFPS |
| | | | | | | KELAEATKTLLHSLGTLAQELFSMRSWSDMR |
| | | | | | | QEVMFLTNVNSSSSSTQIYQAVSRIVCGHPEG |
| | | | | | | GGLKIKSLNWYEDNNYKALFGGNGTEEDAE |
| | | | | | | TFYDNSTTPYCNDLMKNLESSPLSRITWKALK |
| | | | | | | PLLVGKILYTPDTPATRQVMAEVNKTFQELA |
| | | | | | | VFHDLEGMWEELSPKIWTFMENSQEMDLVR |
| | | | | | | MLLDSRDNDHFWEQQLDGLDWTAQDIVAPL |
| | | | | | | AKHPEDVQSSNGSVYTWREAFNETNQAIRTIS |
| | | | | | | RFMECVNLNKLEPIATEVWLINKSMELLDER |
| | | | | | | KFWAGIVFTGITPGSIELPHHVKYKIRMGIDN |
| | | | | | | VERTNKIKDGYWDPGPRADPFEDMRYVWGG |
| | | | | | | FAYLQDVVEQAIIRVLTGTEKKTGVYMQQMP |
| | | | | | | YPCYVDDIPLRVMSRSMPLFMTLAWIYSVAV |
| | | | | | | IIKGIVYEKEARLKETMRIMGLDNSILWFSWFI |
| | | | | | | SSLIPLLVSAGLLVVILKLGNLLPYSDPSVVFV |
| | | | | | | FLSVFAVVTILQCFLISTLFSRANLAAACGGII |
| | | | | | | YFTLYLPYVLCVAWQDYVGFTLKIFASLLSP |
| | | | | | | VAFGFGCEYFALFEEQGIGVQWDNLFESPVE |
| | | | | | | EDCIFNLTTSVSMMLFDTPLYGVMTWYIEAVF |
| | | | | | | PGQYGIPRPWYFPCTKSYWFGEESDEKSHPGS |
| | | | | | | NQKRISEICMEEEPTHLKLGVSIQNLVKVYRD |
| | | | | | | GMKVAVDGLALNFYEGQITSFLGHNGAGKT |
| | | | | | | TTMSILTGLFPPTSGTAYILGKDLRSEMSTIRQ |
| | | | | | | NLGVCPQHNVLFDMLTVEEHIWFYARLKGLS |
| | | | | | | EKHVKAEMEQMALDVGLPSSKLKSKTSQLS |
| | | | | | | GGMQRKLSVALAFVGGSICVVILDEPTAGVDP |
| | | | | | | YSRRGIWELLLKYRQGRTIILSTHHMDEADVL |
| | | | | | | GDRIAIISHGKLCCVGSSLFLKNQLGTGYYLT |
| | | | | | | LVKKDVESSLSSGRNSSSTVSYLKKEDSVSQS |
| | | | | | | SSDAGLGSDHESDTLTIDVSAISNLIRKHVSEA |
| | | | | | | RLVEDIGHELTYVLPYEAAKEGAFVELFHEID |
| | | | | | | DRLSDLGISSYGISETTLEEIFLKVAEESGVDA |
| | | | | | | ETSDGTLPARRNRRAFGDKQSCLRPFTEDDA |
| | | | | | | ADPNDSDIDPESRETDLLSGMDGKGSYQVKG |
| | | | | | | WKLTQQQFVALLWKRLLIARRSRKGFFAQIV |
| | | | | | | LPAVFVCIALVFSLIVPPFGKYPSLELQPWMY |
| | | | | | | NEQYTFVSNDAPEDTGTLELLNALTKDPGFG |
| | | | | | | TRCMEGNPIPDTPCQAGEEEWTTAPVPQTIM |
| | | | | | | DLFQNGNWTMQNPSPACQCSSDKIKKMLPV |
| | | | | | | CPPGAGGLPPPQRKQNTADILQDLTGRNISDY |
| | | | | | | LVKTYVQIIAKSLKNKIWVNEFRYGGFSLQVS |
| | | | | | | NTQALPPSQEVNDATKQMKKHLKLAKDSSA |
| | | | | | | DRFLNSLGRFMTGLDTRNNVKVWFNNKGW |
| | | | | | | HAISSFLNVINNAILRANLQKGENPSHYGITAF |
| | | | | | | NHPLNLTKQQLSEVAPMTTSVDVLVSICVIFA |
| | | | | | | MSFVPASFVVFLIQERVSKAKHLQFISGVKPVI |
| | | | | | | YWLSNFVWDMCNYVVPATLVIIIFICFQQKSY |
| | | | | | | VSSTNLPVLALLLLLYGWSITPLMYPASFVFK |
| | | | | | | IPSTAYVVLTSVNLFIGINGSVATFVLELFTDN |
| | | | | | | KLNNINDILKSVFLIFPHFCLGRGLIDMVKNQ |
| | | | | | | AMADALERFGENEFVSPLSWDLVGRNLFAM |
| | | | | | | AVEGVVFFLITVLIQYRFFIRPRPVNAKLSPLN |
| | | | | | | DEDEDVRRERQRILDGGGQNDILEIKELTKIY |
| | | | | | | RRKRKPAVDRICVGIPPGECFGLLGVNGAGK |
| | | | | | | SSTFKMLTGDTTVTRGDAFLNRNSILSNIHEV |
| | | | | | | HQNMGYCPQFDAITELLTGREHVEFFALLRG |
| | | | | | | VPEKEVGKVGEWAIRKLGLVKYGEKYAGNY |
| | | | | | | SGGNKRKLSTAMALIGGPPVVFLDEPTTGMD |
| | | | | | | PKARRFLWNCALSVVKEGRSVVLTSHSMEEC |
| | | | | | | EALCTRMAIMVNGRFRCLGSVQHLKNRFGD |
| | | | | | | GYTIVVRIAGSNPDLKPVQDFFGLAFPGSVPK |
| | | | | | | EKHRNMLQYQLPSSLSSLARIFSILSQSKKRLH |
| | | | | | | IEDYSVSQTTLDQVFVNFAKDQSDDDHLKDL |
| | | | | | | SLHKNQTVVDVAVLTSFLQDEKVKESYV |
| 977 | 2327 | A | 8260 | 3 | 1567 | IPGSTISFSLCFIPPPCVPTMVRKPVVSTISKGG |
| | | | | | | YLQGNVNGRLPSLGNKEPPGQEKVQLKRKV |
| | | | | | | TLLRGVSIIIGTIIGAGIFISPKGVLQNTGSVGM |
| | | | | | | SLTIWTVCGVLSLFGALSYAELGTTIKICSGGH |
| | | | | | | YTYILEVFGPLPAFVRVWVELLIIRPAATAVIS |
| | | | | | | LAFGRYILEPFFIQCEIPELAIKLITAVGITVVM |
| | | | | | | VLNSMSVSWSARIQIFLTFCKLTAILIIIVPGV |
| | | | | | | MQLIKGQTQNFKDAFSGRDSSITRLPLAFYYG |
| | | | | | | MYAYAGWFYLNFVTEEVENPEKTIPLAICISM |
| | | | | | | AIVTIGYVLTNVAYFTTINAEELLLSNAVAVT |
| | | | | | | FSERLLGNFSLAVPIFVALSCFGSMNGGVFAV |
| | | | | | | SRLFYVASREGHLPEILSMIHVRKHTPLPAVIV |
| | | | | | | LHPLTMIMLFSGDLDSLLNFLSFARWLFIGLA |
| | | | | | | VAGLIYLRYKCPDMHRPFKVPLFIPALFSFTC |
| | | | | | | LFMVALSLYSDPFSTGIGFVITLTGVPAYYLFII |
| | | | | | | WDKKPRWPRIMSEKITRTLQIILEVVPEEDKL |
| 978 | 2328 | A | 8261 | 2 | 2165 | RGGSLRCVLGKLLGQLLCFQSERCVRFPEGLL |
| | | | | | | RHRGCGLLSSRLSAGKPPLRTSFFGSWGVLPP |
| | | | | | | LADAASMSGVRAVRISIESACEKQVHEVGLD |
| | | | | | | GTETYLPPLSMSQNLARLAQRIDFSQGSGSEE |
| | | | | | | EEAAGTEGDAQEWPGAGSSADQDDEEGVVK |
| | | | | | | FQPSLWPWDSVRNNLRSALTEMCVLYDVLSI |
| | | | | | | VRDKKFMTLDPVSQDALPPKQNPQTLQLISK |
| | | | | | | KKSLAGAAQILLKGAERLTKSVTENQENKLQ |
| | | | | | | RDFNSELLRLRQHWKLRKVGDKILGDLSYRS |
| | | | | | | AGSLFPHHGTFEVIKNTDLDLDKKIPEDYCPL |
| | | | | | | DVQTPSDLEGSAYIKVSIQKQAPDIGDLGTVN |
| | | | | | | LFKRPLPKSKPGSPHWQTKLEAAQNVLLCKEI |
| | | | | | | FAQLSREAVQIKSQVPHIVVKNQIISQPFPSLQ |
| | | | | | | LSISLCHSSNDKKSQKFATEKQCPEDHLYVLE |
| | | | | | | HNLHLLIREFHKQTLSSIMMPHPASAPFGHKR |
| | | | | | | MRLSGPQAFDKNEINSLQSSEGLLEKIIKQAK |
| | | | | | | HIFLRSRAAATIDSLASRLEDPQIQAHWSNIND |
| | | | | | | VYESSVKVLITSQGYEQICKSIQLQLNIGVEQI |
| | | | | | | RVVHRDGRVITLSYQEQELQDFLLSQMSQHQ |
| | | | | | | VHAVQQLAKVMGWQVLSFSNHVGLGPIESIG |
| | | | | | | NASAITVASPSGDYAISVRNQPESGSKIMVQF |
| | | | | | | PRNQCKDLPKSDVLQIYNKWSHLRGPFKEVQ |
| | | | | | | WNKMEGRNFVYKIVIELLMSALSPCLL |
| 979 | 2329 | A | 8289 | 2 | 1053 | FVWNPRGGRKRRRQAAVTQAATRASGTPSP |
| | | | | | | RDGTMTQGKLSVANKAPGTEGQQQVHGEKK |
| | | | | | | EAPAVPSAPPSYEEATSGEGMKAGAFPPAPTA |
| | | | | | | VPLHPSWAYVDPSSSSSYDNGFPTGDHELFTT |
| | | | | | | FSWDDQKVRRVFVRKVYTILLIQLLVTLAVV |
| | | | | | | ALFTFCDPVKDYVQANPGWYWASYAVFFAT |
| | | | | | | YLTLACCSGPRRHFPWNLILLTVFTLSMAYLT |
| | | | | | | GMLSSYYNTTSVLLCLGITALVCLSVTVFSPQ |
| | | | | | | TKDFTSCQGVLFVLLMTLFFSGLILAILLPFQ |
| | | | | | | YVPWLHAVYAALGAGVFFTLFLALDTQLLMG |
| | | | | | | NRRHSLSPEEYIFGALNIYLDIIYIFTFFLQLFG |
| | | | | | | TNRE |
| 980 | 2330 | A | 8305 | 59 | 857 | ASQLPDYSISPPSLPPRISFHPSPTLARVAMAEP |
| | | | | | | SEATQSHSISSSSFGAEPSAPGGGGSPGACPAL |
| | | | | | | GTKSCSSSCAVHDLIFWRDVKKTGFVFGTTLI |
| | | | | | | MLLSLAAFSVISVVSYLILALLSVTISFRIYKSV |
| | | | | | | TQAVQKSEEGHPFKAYLDVDITLSSEAFHNY |
| | | | | | | MNAAMVHIINRALKLIIRLFLVEDLVDSLKLA |
| | | | | | | VFMWLMTYVGAVFNGITLLILAELLIFSVP1V |
| | | | | | | YEKYKTQIDHYVGIARDQTKSIVEKIQAKLPG |
| | | | | | | IAKKKAE |
| 981 | 2331 | A | 8308 | 186 | 1337 | TRMSRHEGVSCDACLKGNFRGRRYKCLICYD |
| | | | | | | YDLCASCYESGATTTRHTTDHPMQCILTRVD |
| | | | | | | FDLYYGGEAFSVEQPQSFTCPYCGKMGYTET |
| | | | | | | SLQEHVTSEHAETSTEVICPICAALPGGDPNH |
| | | | | | | VTDDFAAHLTLEHRAPRDLDESSGVRHVRR |
| | | | | | | MFHPGRGLGGPRARRSNMHFTSSSTGGLSSS |
| | | | | | | QSSYSPSNREAMDPIAELLSQLSGVRRSAGGQ |
| | | | | | | LNSSGPSASQLQQLQMQLQLERQHAQAARQ |
| | | | | | | QLETARNATRRTNTSSVYITITQSTMTNIAN |
| | | | | | | TESSQQTLQNSQFLLTRLNDPKMSETERQSM |
| | | | | | | ESERADRSLFVQELLLSTLVREESSSSDEDDR |
| | | | | | | GEMADFGAMGCVDIMPLDVALENLNLKESN |
| | | | | | | KGNEPPPPPL |
| 982 | 2332 | A | 8315 | 1 | 1004 | GSTHASADAWAQWFCTEALVMGAPVWYLV |
| | | | | | | AAALLVGFILFLTRSRGRAASAGQEPLHNEEL |
| | | | | | | AGAGRVAQPGPLEPEEPRAGGRPRRRRDLGS |
| | | | | | | RLQAQRRAQRVAWAEADENEEEAVILAQEE |
| | | | | | | EGVEKPAETHLSGKIGAKKLRKLEEKQARKA |
| | | | | | | QREAEEAEREERKRLESQREAEWKKEEERLR |
| | | | | | | LEEEQKEEEERKAREEQAQREHEEYLKLKEA |
| | | | | | | FVVEEEGVGETMTEEQSQSFLTEFINYIKQSK |
| | | | | | | VVLLEDLASQVGLRTQDTINRIQDLLAEGTIT |
| | | | | | | GVIDDRGKFIYITPEELAAVANFIRQRGRVSIA |
| | | | | | | ELAQASNSLIAWGRESPAQAPA |
| 983 | 2333 | A | 8320 | 244 | 1420 | RRRWRARGGLVPTLAWAEATGAYVPGRDKP |
| | | | | | | DLPTWKRNFRSALNRKEGLRLAEDRSKDPHD |
| | | | | | | PHKIYEFVNSGVGDFSQPDTSPDTNGGGSTSD |
| | | | | | | TQEDILDELLGNMVLAPLPDPGPPSLAVAPEP |
| | | | | | | CPQPLRSPSLDNPTPFPNLGPSENPLKRLLVPG |
| | | | | | | EEWEFEVTAFYRGRQVFQQTISCPEGLRLVGS |
| | | | | | | EVGDRTLPGWPVTLPDPGMSLTDRGVMSYV |
| | | | | | | RHVLSCLGGGLALWRAGQWLWAQRLGHCH |
| | | | | | | TYWAVSEELLPNSGHGPDGEVPKDKEGGVF |
| | | | | | | DLGPFIVGSLGPPDLITFTEGSGRSPRYALWFC |
| | | | | | | VGESWPQDQFWTKRLVMVKVVPTCLRALVE |
| | | | | | | MARVGGASSLENTVDLHISNSHPLSLTSDQY |
| | | | | | | KAYLQDLVEGMDFQGPGES |
| 984 | 2334 | A | 8321 | 1 | 1243 | ANMAPVEHVVADAGAFLRHAALQDIGKNIY |
| | | | | | | TIREVVTEIRDKATRRRLAVLPYELRFKEPLPE |
| | | | | | | YVRLVTEFSKKTGDYPSLSATDIQVLALTYQL |
| | | | | | | EAEFVGVSHLKQEPQKVKVSSSIQHIPETPLHIS |
| | | | | | | GFHLPYKPKPPQETEKGHSACEPENLEFSSFM |
| | | | | | | FWRNPLPNIDHELQELLIDRGEDVPSEEEEEEE |
| | | | | | | NGFEDRKDDSDDDGGGWITPSNIKQIQQELE |
| | | | | | | QCDVPEDVRVGCLTTDFAMQNVLLQMGLHV |
| | | | | | | LAVNGMLIREARSYILRCHGCFKTTSDMSRV |
| | | | | | | FCSHCGNKTLKKVSVTVSDDGTLHMHFSRNP |
| | | | | | | KVLNPRGLRYSLPTPKGGKYAINPHLTEDQRF |
| | | | | | | PQLRLSQKARQKTNVFAPDYIAGVSPFVENDI |
| | | | | | | SSRSATLQVRDSTLGAGRRRLNPNAERKKFV |
| 985 | 2335 | A | 8322 | 352 | 529 | RRNNIRQFIMKVCISGQARWLTPVVPVLWET |
| | | | | | | EAGRSLELKSLRPAWATWGNPISTKINK |
| 986 | 2336 | A | 8325 | 89 | 1172 | KMNPTDIADTTLDESIYSNYYLYESIPKPCTKE |
| | | | | | | GIKAFGELFLPPLYSLVFVFGLLGNSVVVLVL |
| | | | | | | FKYKRLRSMTDVYLLNLAISDLLFVFSLPFWG |
| | | | | | | YYAADQWVFGLGLCKMISWMYLVGFYSGIF |
| | | | | | | FVMLMSEDRYLAIVHAVFSLRARTLTYGVITS |
| | | | | | | LATWSVAVFASLPGFLFSTCYTERNHTYCKT |
| | | | | | | KYSLNSTTWKVLSSLEINILGLVIPLGIMLFCY |
| | | | | | | SMIIRTLQHCKNEKKNKAVKMIFAVVVLFLG |
| | | | | | | FWTPYNIYLFLETLVELEVLQDCTFERYLDYA |
| | | | | | | IQATETLAFVHCCLNPIIYFFLGEKFRKYILQL |
| | | | | | | FKTCRGLFVLCQYCGLLQIYSADTPSSSYTQS |
| | | | | | | TMDHDLHDAL |
| 987 | 2337 | A | 8326 | 3 | 470 | SLSAMRFLAATFLLLALSTAAQAEPVQFKDC |
| | | | | | | GSVDGVIKEVNVSPCPTQPCQLSKGQSYSVN |
| | | | | | | VTFTSNIQSKSSKAVVHGILMGVPVPFPIPEPD |
| | | | | | | GCKSGINCPIQKDKTYSYLNKLPVKSEYPSIK |
| | | | | | | LVVEWQLQDDKNQSLFCWEIPVQIVSHL |
| 988 | 2338 | A | 8335 | 1205 | 323 | VIKMALAARLLPQFLHSRSLPCGAVRLRTPA |
| | | | | | | VAEVRLPSATLCYFCRCRLGLGAALFPRSAR |
| | | | | | | ALAASALPAQGSRWPVLSSPGLPAAFASFPAC |
| | | | | | | PQRSYSTEEKPQQHQKTKMIVLGFSNPINWV |
| | | | | | | RTRIKAFLIWAYFDKEFSITEFSEGAKQAFAH |
| | | | | | | VSKLLSQCKFDLLEELVAKEVLHALKEKVTS |
| | | | | | | LPDNHKNALAANIDEIVFTSTGDISTYYDEKG |
| | | | | | | RKFVNILMCFWYLTSANIPSETLRGASYFQVK |
| | | | | | | LGNQNVKQLLSASYEFQREFTQGVKPDWT |
| | | | | | | IARIEHSKLLE |
| 989 | 2339 | A | 8349 | 67 | 185 | MSGFHQLLIQNLFCVYIITRLKTSQGLCLLSL |
| | | | | | | KSLHPMS |
| 990 | 2340 | A | 8361 | 210 | 1115 | ASPFLRPQGHDSCIEREPFSQTPGLMQPFSIFVQ |
| | | | | | | ITLQGSRRRQGRTAFPASCIKKRETDYSDGDPL |
| | | | | | | DVLPSSTGEDRAVLGFAMMGFSVLMF |
| | | | | | | FLLGITILKPFMLSIQREESTCTAIHTDIMDDW |
| | | | | | | LDCAFTCGVHCHGQGKYPCLQVFVNLSHPG |
| | | | | | | QKALLHYNEEAVQINTPKCFYTPKCHQDRNDL |
| | | | | | | LNSALDIKEFFDHKNGTPFSCFYSPASQSEDVI |
| | | | | | | LIKKYDQMAIFHCLFWPSLTLLGGALIVGMV |
| | | | | | | RLTQHLSLLCEKYSTVVRDEVGGKVPYIEQH |
| | | | | | | QFKLCIMRRSKGRAEKS |
| 991 | 2341 | A | 8369 | 9 | 921 | SSVVEFSALSVSMACLSPSQLQKFQQDGFLVL |
| | | | | | | EGFLSAEECVAMQQRIGEIVAEMDVPLHCRT |
| | | | | | | EFSTQEEEQLRAQGSTDYFLSSGDKIRFFFEK |
| | | | | | | GVFDEKGNFLVPPEKSINKIGHALHAHDPVFK |
| | | | | | | SITHSPKVQTLARSLGLQMPVVVQSMYIFKQP |
| | | | | | | IIFGGEVSPHQDASFLYTEPLGRVLGVWIAVE |
| | | | | | | DATLENGCLWFIPGSHTSGVSRRMVRAPVGS |
| | | | | | | APGTSFLGSEPARDNSLFVPTPVQRGALVLIH |
| | | | | | | GEVVHKSKQNLSDRSRQAYTITHLMEASGIT |
| | | | | | | WSPENWLQPTAELPFPQLYT |
| 992 | 2342 | A | 8370 | 906 | 4 | MALSGNCSRYYPREQGSAVPNSFPEVVELNV |
| | | | | | | GGQVYFTRHSTLISIPHSLLWKMFSPKRDTAN |
| | | | | | | DLAKDSKGRFFIDRDGFLFRYILDYLRDRQVV |
| | | | | | | LPDHFPEKGRLKREAEYFQLPDLVKLLTPDEI |
| | | | | | | KQSPDEFCHSDFEDASQGSDTRICPPSSLLPAD |
| | | | | | | RKWGFITVGYRGSCTLGREGQADAKFRRVPR |
| | | | | | | ILVCGRISLAKEVFGETLNESRDPDRAPERYTS |
| | | | | | | RFYLKFKHLMGAPASNFILGFWGLGQNQDK |
| | | | | | | HPVNIYLQQRSVIRPDLTSKKAGDLKGKGDA |
| | | | | | | QEVSRRRRWLGDPEHL |
| 993 | 2343 | A | 8379 | 1 | 2794 | MRMQRHKNDTMDFGDSGKRIGGGVLCLLHQ |
| | | | | | | SNTSFIKLNNNGFEDIVIVIDPSVPEDEKIIEQIE |
| | | | | | | DMVTTASTYLPEATEKRFFFKNVSILIPENWK |
| | | | | | | ENPQYKRPKHENHKHADVIVAPPTLPGRDEP |
| | | | | | | YTKQPTECGEKGEYIHFTPDLLLGKKQNEYG |
| | | | | | | PPGKLFVHEWAHLRWGVFDEYNEDQPFYRA |
| | | | | | | KSKKIEATRCSAGISGRNRVYKCQGGSCLSRA |
| | | | | | | CRIDSTTKLYGKDCQFFPDKVQTEKASTMFM |
| | | | | | | QSIDSVYEFCNEKTHNQEAPSLQNIKCNFRST |
| | | | | | | WEVISNSEDFKNTIPMVTPPPPPVFSLLKIRQRI |
| | | | | | | VCLVLDKSGSMGGKDRLNRIVINQAAKHFLLQ |
| | | | | | | TVENGSWVGMVHFDSTATWNKLIQIKSSDER |
| | | | | | | NTLMAGLPTYPLGGTSICSGIKYAFQVIGELH |
| | | | | | | SQLDGSEVLLLTDGEDNTASSCIDEVKQSGAI |
| | | | | | | VHFIALGRAADEAVIEMSKITGGSHFYVSDEA |
| | | | | | | QNNGLIDAFGALTSGNTDLSQKSLQLESKGLT |
| | | | | | | LNSNAWMNDTVIIDSTVGKDTFFLITWNSLPP |
| | | | | | | SISLWDPSGTIMENFTVDATSKMAYLSIPGTA |
| | | | | | | KVGTWAYNLQAKANPETLTITVTSRAANSSV |
| | | | | | | PPITVNAKMNKDVNSFPSPMIVYAEILQGYVP |
| | | | | | | VLGANVTAFIESQNGHTEVLELLDNGAGADS |
| | | | | | | FKNDGVYSRYFTAYTENGRYSLKVRAHGGA |
| | | | | | | NTARLKLRPPLNRAAYIPGWVVNGEIEANPP |
| | | | | | | RPEIDEDTQTTLEDFSRTASGGAFVVSQVPSL |
| | | | | | | PLPDQYPPSQITDLDATVHEDKIILTWTAPGD |
| | | | | | | NFDVGKVQRYIIRISASILDLRDSFDDALQVN |
| | | | | | | TTDLSPKEANSKESPAFKPENISEENATHIFIAI |
| | | | | | | KSIDKSNLTSKVSNIAQVTLFIPQANPDDIDPT |
| | | | | | | PTPTPTPTPDKSHNSGVNISTLVLSVIGSVYIV |
| | | | | | | NFILSTTI |
| 994 | 2344 | A | 8385 | 231 | 644 | INSSPRTGRDHQELNLHTERDSRSQRAVLKIP |
| | | | | | | RQNPGIPYWTFLPSRSHSASHGSRQRQVSCQG |
| | | | | | | TQDEILKMRNTFAELKNSLEALSSRMDQAEE |
| | | | | | | RIGTQAGVQWRDHGSLQPQPPEPKQCFHLSL |
| | | | | | | PSSWDYRACLS |
| 995 | 2345 | A | 8390 | 194 | 3421 | AWRKSSVVPPRGTRRGEKSDQDKSGQKNKR |
| | | | | | | DFLSMKQSPALAPEERCRRAGSPKPVLRADD |
| | | | | | | NNMGNGCSQKLATANLLRFLLLVLIPCICALV |
| | | | | | | LLLEILLSYVGTLQKVYFKSNGSEPLVTDGEI |
| | | | | | | QGSDVILTNTIYNQSTVVSTAHPDQHVPAWT |
| | | | | | | TDASLPGDQSHRNTSACMNITHSQCQMLPYH |
| | | | | | | ATLTPLLSVVRNMEMEKFLKFFTYLHRLSCY |
| | | | | | | QHIMLFGCTLAFPECIIDGDDSHGLLPCRSFCE |
| | | | | | | AAKEGGESVLGMVNYSWPDFLRCSQFRNQT |
| | | | | | | ESSNVSRICFSPQQENGKQLLCGRGENFLCAS |
| | | | | | | GICIPGKLQCNGYNDCDDWSDEAHCNCSENL |
| | | | | | | FHCHTGKCLNYSLVCDGYDDCGDLSDEQNC |
| | | | | | | DCNPTTEHRCGDGRCIAMEWVCDGDHDCVD |
| | | | | | | KSDEVNCSCHSQGLVECRNGQCIPSTFQCDG |
| | | | | | | DEDCKDGSDEENCSVIQTSCQEGDQRCLYNP |
| | | | | | | CLDSCGGSSLCDPNNSLNNCSQCEPITLELCM |
| | | | | | | NLPYNSTSYPNYFGHRTQKEASISWESSLFPA |
| | | | | | | LVQTNCYKYLMFFSCTILVPKCDVNTGEHIPP |
| | | | | | | CRALCEHSKERCESVLGIVGLQWPEDTDCSQ |
| | | | | | | FPEENSDNQTCLMPDEYVEECSPSHPKCRSGQ |
| | | | | | | CVLASRRCDGQADCDDDSDEENCGCKERDL |
| | | | | | | WECPSNKQCLKHTVICDGFPDCPDYMDEKN |
| | | | | | | CSFCQDDELECANHACVSRDLWCDGEADCS |
| | | | | | | DSSDEWDCVTLSINVNSSSFLMYHRAATEHH |
| | | | | | | VCADGWQEILSQLACKQMGLGEPSVTKLLQE |
| | | | | | | QEKEPRWLTLHSNWESLNGTTLHELLVNGQS |
| | | | | | | CESRSKISLLCTKQDCGRRPAARMNKRILGGR |
| | | | | | | TSRPGRWPWQCSLQSEPSGHIGGCVLIAKKW |
| | | | | | | VLTVAHCFEGRENAAVWKVVLGINNLDHPS |
| | | | | | | VFMQTRFVKTIILHPRYSRAVVDYDISIVELSE |
| | | | | | | DISETGYVRPVCLPNPEQWLEPDTYCYITGW |
| | | | | | | GHMGNKMPFKLQEGEVRIISLEHCQSYFDMK |
| | | | | | | TFITRMICAGYESGTVDSCMGDSGGPLVCEK |
| | | | | | | PGGRWTLFGLTSWGSVCPSKVLGPGVYSNVS |
| | | | | | | YFVEWIKRQIYIQTFLLN |
| 996 | 2346 | A | 8392 | 199 | 3085 | KVILSSEMSKTNKSKSGSRSSRSRSASRSRSRS |
| | | | | | | FSKSRSRSRSLSRSRKRRLSSRSRSRSYSPAHN |
| | | | | | | RERNHPRVYQNRDFRGHNRGYRRPYYFRGR |
| | | | | | | NRGFYPWGQYNRGGYGNYRSNWQNYRQAY |
| | | | | | | SPRRGRSRSRSPKRRSPSPRSRSHSRNSDKSSS |
| | | | | | | DRSRRSSSSRSSSNHSRVESSKRKSAKEKKSSS |
| | | | | | | KDSRPSQAAGDNQGDEVKEQTFSGGTSQDTK |
| | | | | | | ASESSKPWPDATYGTGSASRASAVSELSPRER |
| | | | | | | SPALKSPLQSVVVRRRSPRPSPVPKPSPPLSST |
| | | | | | | SQMGSTLPSGAGYQSGTHQGQFDHGSGSLSP |
| | | | | | | SKKSPVGKSPPSTGSTYGSSQKEESAASGGAA |
| | | | | | | YTKRYLEEQKTENGKDKEQKQTNTDKEKIKE |
| | | | | | | KGSFSDTGLGDGKMKSDSFAPKTDSEKPFRG |
| | | | | | | SQSPKRYKLRDDFEKKMADFHKEEMDDQDK |
| | | | | | | DKAKGRKESEFDDEPKFMSKVIGANKNQEEE |
| | | | | | | KSGKWEGLVYAPPGKEKQRKTEELEEESFPE |
| | | | | | | RSKKEDRGKRSEGGHRGFVPEKNFRVTAYK |
| | | | | | | AVQEKSSSPPPRKTSESRDKLGAKGDFPTQKS |
| | | | | | | SFSITREAQVNVRMDSFDEDLAEPSGLLAQER |
| | | | | | | KLCRDLVHSNKKEQEFRSIFQHIQSAQSQRSP |
| | | | | | | SELFAQHIVTTVHHVKEHHFGSSGMTLHERFT |
| | | | | | | KYLKRGTEQEAAKNKKSPEIHRRIDISPSTFRK |
| | | | | | | HGLAHDEMKSPREPGYKAEGKYKDDPVDLR |
| | | | | | | LDLERRKKHKERDLKRGKSRESVDSRDSSHSR |
| | | | | | | ERSAEKTEKTHKGSKKQKKHRRARDRSRSSS |
| | | | | | | SSSQSSHSYKAEEYTEETEEEEESTTGFDKSRL |
| | | | | | | GTKDFVGPSERGGGRARGTFQFRARGRGWG |
| | | | | | | RGNYSGNNNNNSNNDFQKRNREEEWDPEYT |
| | | | | | | PKSKKYYLHDDREGEGSDKWVSRGRGRGAF |
| | | | | | | PRGRGRFMFEKSSTSPKWAHDKFSGEEGEIE |
| | | | | | | DDESGTENREEKDNIQPTTE |
| 997 | 2347 | A | 8398 | 202 | 552 | CPALGGRQDLQGTRLLWAHDSGVGGQKAKS |
| | | | | | | KQENLESLEATGREEEGGQGPPVTKGVLLA |
| | | | | | | LLMAGLALQPGTALLCYSCKAQVSNEDCLQ |
| | | | | | | VENCTQLGEQCWTARIREWGDDSRQA |
| 998 | 2348 | A | 8400 | 697 | 301 | NPPSACTPGSCDSCSGRGRDLAFDSVWSTNN |
| | | | | | | MSDPRRPNKVLRYKPPPSECNPALDDPTPDY |
| | | | | | | MNLLGMIFSMCGLMLKLKWCAWVAVYCSFI |
| | | | | | | SFANSRSSEDTKQMMSSFMLSISAVVMSYLQ |
| | | | | | | NPQPMTPPW |
| 999 | 2349 | A | 8401 | 93 | 1126 | ASASHITSGHLRCFPGSEGVGTMARCFSLVLL |
| | | | | | | LTSIWTTRLLVQGSLRAEELSIQVSCRIMGITL |
| | | | | | | VSKKAISIQQLNFTEAKEACRLLGLSLAGKDQ |
| | | | | | | VETALKASFETCSYGWVGDGFVVISRISPNPK |
| | | | | | | CGKNGVGVLIWKVPVSRQFAAYCYNSSDTW |
| | | | | | | TNSCIPEIITTKDPIFNTQTATQTTEFTVSDSTYS |
| | | | | | | VASPYSTLPAPTTTPPAPASTSIPRRKKLICVTE |
| | | | | | | VFMETSTMSTETEPFVENKAAFKNEAAGFGG |
| | | | | | | VPTALLVLALLFFGAAAGLGFCYVKRYVKAF |
| | | | | | | PFTNKNQQKEMIETKVVKEEKANDSNPNEES |
| | | | | | | KKTDKNPEESKSPSKTTMRCLEAEV |
| 1000 | 2350 | A | 8406 | 2 | 777 | KERCQFVVKPMLSTVGSFLQDLQNEDKGIKT |
| | | | | | | AAIFTADGNMISASTLMDILLMNDFKLVINKI |
| | | | | | | AYDVQCPKREKPSNEHTAEMEHMKSLVHRL |
| | | | | | | FTILHLEESQKKREHHLLEKIDHLKEQLQPLE |
| | | | | | | QVKAGIEAHSEAKTSGLLWAGLALLSIQGGA |
| | | | | | | LAWLTWWVYSWDIMEPVTYFWFANSMVFF |
| | | | | | | AYFIVTRQDYTYSAVKSRQFLQFFHKKSKQQ |
| | | | | | | HFDVQQYNKLKEDLAKAKESLKQARHSLCL |
| | | | | | | QMQVEELNEKN |
| 1001 | 2351 | A | 8410 | 1400 | 264 | VGFWERPLRSSRWFRRSLRRWEMLARAARG |
| | | | | | | TGALLLRGSLLASGRAPRRASSGLPRNTVVLF |
| | | | | | | VPQQEAWVVERMGRFHRILEPGLNILIPVLDR |
| | | | | | | IRYVQSLKEIVINVPEQSAVTLDNVTLQIDGV |
| | | | | | | LYLRIMDPYKASYGVEDPEYAVTQLAQTTM |
| | | | | | | RSELGKLSLDKVFRERESLNASIVDAINQAAD |
| | | | | | | CWGIRCLRYEIKDIHVPPRVKESMQMQVEAE |
| | | | | | | RRKRATVLESEGTRESAINVAEGKKQAQILAS |
| | | | | | | EAEKAEQINQAAGEASAVLAKAKAKAEAIRI |
| | | | | | | LAAALTQHNGDAAASLTVAEQYVSAFSKLA |
| | | | | | | KDSNTILLPSNPGDVTSMVAQAMGVYGALT |
| | | | | | | KAPVPGTPDSLSSGSSRDVQGTDASLDEELDR |
| | | | | | | VKMS |
| 1002 | 2352 | A | 8421 | 134 | 941 | NRENLLESRMIVIDPCSVGVQLRTTNECHKTY |
| | | | | | | YTRHTGFKTLQELSSNDMLLLQLRTGMTLSG |
| | | | | | | NNTICFHHVKIYIDRFEDLQKSCCDPFNIHKKL |
| | | | | | | AKKNLHVIDLDDATFLSAKFGRQLVPQWKLC |
| | | | | | | PKCTQIINGSVDVDTEDRQKRKLPESDGRTAK |
| | | | | | | ALRSLQFTNPGRQTEFAPETGKREKRRLTKN |
| | | | | | | ATAGSDRQVIPAKSKVYDSQGLLIPSGMDLC |
| | | | | | | DCLDEDCLGCFYACPACGSTKCGAECRCDRK |
| | | | | | | WLYEQIEIEGGEIIHNKHAG |
| 1003 | 2353 | 77 | 8427 | 3 | 1416 | TEWGLSGSCPGCSPLEPGSRGRGAAAWRILR |
| | | | | | | CRRLPEPSPFLTQPNLAQSQPPAPVPVTDPSVT |
| | | | | | | MHPAVPLSLPDLRCSLLLLVTWVFTPVTTEIT |
| | | | | | | SLDTENIDEILNNADVAILVNFYADWCRFSQM |
| | | | | | | LHPIFEEASDVIKEEFPNENQVVFARVDCDQH |
| | | | | | | SDIAQRYRISKYPTLKLFRNGMMMKREYRGQ |
| | | | | | | RSVKALADYIRQQKSDPIQEIRDLAEITTLDRS |
| | | | | | | KRNIIGYFEQKDSDNYRVFERVAMLHDDCAF |
| | | | | | | LSAFGDVSKPERYSGDNIIYKPPGHSAPDMVY |
| | | | | | | LGAMTNFDVTYNWIQDKCVPLVREITFENGE |
| | | | | | | ELTEEGLPFLILFHMKEDTESLEIFQNEVARQL |
| | | | | | | ISEKGTINFLHADCDKFRHPLLHIQKTPADCP |
| | | | | | | VIAIDSFRHMYVFGDFKDVLIPGKLKQFVFDL |
| | | | | | | HSGKLHREFHHGPDPTDTAPGEQAQDVASSP |
| | | | | | | PESSFQKLAPSEYRYTLLRDRDEL |
| 1004 | 2354 | A | 8432 | 910 | 387 | GLSRKLRAGFLPGFCRVSPCGSWVVETLVKM |
| | | | | | | ACAAARSPADQDRFICIYPAYLNNKKTIAEGR |
| | | | | | | RIPLSKAVENPTATEIQDVCSAVGLNVFLEKN |
| | | | | | | KMYSREWNRDVQYRGRVRVQLKQEDGSLC |
| | | | | | | LVQFPSRKSVMLYAAEMHPKLKTRTQKTGGA |
| | | | | | | DQSLQQGEGSKKGKGKKKK |
| 1005 | 2355 | A | 8453 | 90 | 530 | QSHETKMQSGTHWRVLGLCLLSVGVWGQD |
| | | | | | | GNEEMGGITQTPYKVSISGTIYILTCPQYPGSE |
| | | | | | | ILWQHNDKNIGGDEDDKNIGSDEDHLSLKEF |
| | | | | | | SELEQSGYYVCYPRGSKPEDANFYLYLRARG |
| | | | | | | NPGLQNRYHRLFREDHSKGHSQ |
| 1006 | 2356 | A | 8458 | 3 | 307 | AVQRIRHEMNIFRLTGDLSHLAAIVILLLKIW |
| | | | | | | KTRSCAGISGKSQLLFALVFTTRYLDLFTSF1S |
| | | | | | | LYNTSMKVWYAIHRNVPHLQCTGLWTLNLC |
| | | | | | | QLCIFN |
| 1007 | 2357 | A | 8459 | 43 | 553 | GAGAGGDWAAMDKLKKVLSGQDTEDRSGL |
| | | | | | | SEVVEASSLSWSTRIKGFIACFAIGILCSLLGT |
| | | | | | | VLLWVPRKGLHLFAVFYTFGNIASIGSTIFLM |
| | | | | | | GPVKQLKRMFEPTRLIATIMVLLCFALTLCSA |
| | | | | | | FWWHNKGLALIFCILQSLALTWYSLSFIPFAR |
| | | | | | | DAVKKCFAVCLA |
| 1008 | 2358 | A | 8462 | 487 | 150 | AQDIRSVHSLGQKSTFVKHFRTLSHLHGLPDP |
| | | | | | | PPHPPQERSPPSHPCMPSHRPQIPQLSNSGPS |
| | | | | | | DPRWGCVGPSMPTSTCLPGAVEASTTKASLP |
| | | | | | | KCPVDSSLPTPEACFL |
| 1009 | 2359 | A | 8465 | 134 | 954 | ETRVKTSLELLRTQLEPTGTVGNTIMTSQPVP |
| | | | | | | NETIIVLPSNVINFSQAEKPEPTNQGQDSLKKH |
| | | | | | | LHAEIKVIGTIQILCGMMVLSLGIILASASFSPN |
| | | | | | | FTQVTSTLLNSAYPFIGPFFFIISGSLSIATEKRL |
| | | | | | | TKLLVHSSLVGSILSALSALVGFIILSVKQATL |
| | | | | | | NPASLQCELDKNNIPTRSYVSYFYHDSLYTTD |
| | | | | | | CYTAKASLAGTLSLMLICTLLEFCLAVLTAVL |
| | | | | | | RWKQAYSDFPGSVLFLPHSYIGNSGMSSKMT |
| | | | | | | HDCGYEELLTS |
| 1010 | 2360 | A | 8468 | 2 | 473 | KYRYRRPYPVMEKICQVGPAGLAFILNISPVA |
| | | | | | | HRVALCHLAGCQEQAAWYHTLQILFFLVSAY |
| | | | | | | FFSCPVPEKYFPGSCDIVGHGHQIFHAFLSICT |
| | | | | | | LSQLEAILLDYQGRQEIFLQRHGPLSVHMACL |
| | | | | | | SFPFLAACSAATAALLRHKVKARLTKKDS |
| 1011 | 2361 | A | 8478 | 5 | 409 | TELSQLEKAHPPADMGRRKSKRKPPPKKKMT |
| | | | | | | GTLETQFTCPFCNHEKSCDVKMDRARNTGVI |
| | | | | | | SCTVCLEEFQTPITCILGNLGFFQRVGRGLESG |
| | | | | | | PCSSGPLCALVQGQSRPEEQVPPSDFCGVRRC |
| | | | | | | RAGFQGQ |
| 1012 | 2362 | A | 8481 | 2810 | 1652 | RTSTQKWQSVFNDSQEHLERFYCNPENDRM |
| | | | | | | RMKYGGQEFWADLNAMNVYETTEFDQLRR |
| | | | | | | LSTPPSSNVNSIYHTVWKFFCRDHFGWREYPE |
| | | | | | | SVIRLIEEANSRGLKEVRFMMWNNHYTLHNS |
| | | | | | | FFRREIKRRPLFRSCFILLPYLQTLGGVPTQAP |
| | | | | | | PPLEATSSSQIICPDGVTSANFYPETWVYMHP |
| | | | | | | SQDFIQVPVSAEDKSYRITYNLPHKTVPEFKYR |
| | | | | | | TLQILRVQNQFLWEKYKRKKEYMNRKMFGR |
| | | | | | | DRIINERHLFHGTSQDVVDGICKHNFDPRVCG |
| | | | | | | KHATMFGQGSYFAKKASYSHNFSKKSSKGV |
| | | | | | | HFMFLAKVLTGRYTMGSHGMRRPPPVNPGS |
| | | | | | | VTSDLYDSCVDNFFEPQIFVIFNDDQSYPYFVI |
| | | | | | | QYEEVSNTVSI |
| 1013 | 2363 | A | 8488 | 2 | 517 | IENCRTRLRQAWHEVCGNKMAAPIPQGFSCL |
| | | | | | | SRFLGWWFRQPVLVTQSAAIVPVRTKKRFTP |
| | | | | | | PIYQPKFKTEKEFMQHARKAGLVIPPEKSDRS |
| | | | | | | IHLACTAGIFDAYVPPEGDARISSLSKEGLIER |
| | | | | | | TERMKKTMASQVSTRRIKDYDANFKIKDFPE |
| | | | | | | KAKDIFIEGSPLY |
| 1014 | 2364 | A | 8501 | 363 | 11 | YIRTGYVYICIIYAQLMYTYYIRTAYVYICILY |
| | | | | | | AQLMYTYVLYTHSLCIHMYSIRTAYVYICIIY |
| | | | | | | AQIMYTYVFYTHRLCIHMYSIRTDYVYICILY |
| | | | | | | AQLMYTYVFYTHSYMSDE |
| 1015 | 2365 | A | 8504 | 3 | 2190 | NSSEHFSQAPQRLSFYSWYGSARLFRFRVPPD |
| | | | | | | AVLLRWLLQVSRESGAACTDAEITVHFRSGA |
| | | | | | | PPVINPLGTSFPDDTAVQPSFQVGVPLSTTPRS |
| | | | | | | NASVNVSHPAPGDWFVAAHLPPSSQKIELKG |
| | | | | | | LAPTCAYVFQPELLVTRVVEISIMEPDVPLPQ |
| | | | | | | TLLSHPSYLKVFVPDYTRELLLELRDCVSNGS |
| | | | | | | LGCPVRLTVGPVTLPSNFQKVLTCTGAPWPC |
| | | | | | | RLLLPSPPWDRWLQVTAESLVGPLGTVAFSA |
| | | | | | | VAALTACRPRSVTIQPLLQSSQNQSFNASSGL |
| | | | | | | LSPSPDHQDLGRSGRVDRSPFCLTNYPVTRED |
| | | | | | | MDVVSVFIFQPLDRVSVRVCSDTPSVMRLRL |
| | | | | | | NTGMDSGGSLTISLRANKTEMRNETVVVACV |
| | | | | | | NAASPFLGFNTSLNCTTAFFQGYPLSLSAWSR |
| | | | | | | RANLIIPYPETDNWYLSLQLMCPENAEDCEQ |
| | | | | | | AVVHVETTLYLVPCLNIICGPYGQCLLLRRHS |
| | | | | | | YLYASCSCKAGWRGWSCTDNSTAQTVAQQR |
| | | | | | | AATLLLTLSNLMFLAPIAVSVRRFFLVEASVY |
| | | | | | | AYTMFFSTPYHACDQPGEAVLCILSYDTLQY |
| | | | | | | CDFLGSQAAIWVTIILCMARLKTVLKYVLFLL |
| | | | | | | GTLVIAMSLQLDRRGMWNMLGPCLFAFVIM |
| | | | | | | ASMWAYRCGHRRQCYPTSWQRWAFYLLPG |
| | | | | | | VSMASVGIAIYTSMMTSDNYYYTHSIWHILL |
| | | | | | | AGSAALLLPPPDQPAEPWACSQKFPCHYQIC |
| | | | | | | KNDREELYAVT |
| 1016 | 2366 | A | 8511 | 1 | 453 | KWYPSGPVRIPCIRFYYKLPAGHRRCRMAPAK |
| | | | | | | KGGEKKKGRSAINEVVTREYTINTHKRIHGVG |
| | | | | | | FKKRAPRALKEIRKFAMKEMGTPDVRIDTRL |
| | | | | | | NKAVWAKGIRNVPYRIRVRLSRKRNEDEDSP |
| | | | | | | NKLYTLVTYVPVTTFKNLQTVNVDEN |
| 1017 | 2367 | A | 8513 | 54 | 1196 | LERTPASADMAWTKYQLFLAGLMLVTGSINT |
| | | | | | | LSAKWADNFMAEGCGGSKEHSFQHPFLQAV |
| | | | | | | GMFLGEFSCLAAFYLLRCRAAGQSDSSVDPQ |
| | | | | | | QPFNPLLFLPPALCDMTGTSLMYVALNMTSA |
| | | | | | | SSFQMLRGAVIIFTGLFSVAFLGRRLVLSQWL |
| | | | | | | GILATIAGLVVVGLADLLSKHDSQHKLSEVIT |
| | | | | | | GDLLIIMAQIIVAIQMVLEEKFVYKHNVHPLR |
| | | | | | | AVGTEGLFGFVILSLLLVPMYYIPAGSFSGNP |
| | | | | | | RGTLEDALDAFCQVGQQPLIAVALLGNISSIA |
| | | | | | | FFNFAGISVTKELSATTRIAVLDSLRTVVIWAL |
| | | | | | | SLALGWEAFHALQILGFLILLIGTALYNGLHR |
| | | | | | | PLLGRLSRGRPLAEESEQERLLGGTRTPINDA |
| | | | | | | S |
| 1018 | 2368 | A | 8518 | 324 | 694 | SPFWTEKRRMEKPLFPLVPLHWFGFGYTALV |
| | | | | | | VSGGIVGYVKTGSVPSLAAGLLFGSLAGLGA |
| | | | | | | YQLYQDPRNVWGFLAATSVTFVGVMGMRS |
| | | | | | | YYYGKFMPVGLIAGASLLMAAKVGVRMLM |
| | | | | | | TSD |
| 1019 | 2369 | A | 8526 | 2 | 1787 | VSAAAVNMEPPDAPAQARGAPRLLLLAVLL |
| | | | | | | AAHPDAQAEVRLSVPPLVEVMRGKSVILDCT |
| | | | | | | PTGTHDHYMLEWFLTDRLSGARPRLASAEMQ |
| | | | | | | GSELQVTMHDTRGRSPPYQLDSQGRLVLAEA |
| | | | | | | QVGDERDYVCVVRAGAAGTAEAAARLNVF |
| | | | | | | AKPEATEVSPNKGTLSVMEDSAQEIATSNSRN |
| | | | | | | GNPAPKITWYRNGQRLEVPVEMNPEGYMTS |
| | | | | | | RTVREASGLLSLTSTLYLRLRKDDRDASFHC |
| | | | | | | AAHYSLPEGRHGRLDSPTFHLTLHYPTEHVQ |
| | | | | | | FWVGSPSTPAGWVREGDTVQLLCRGDGSPSP |
| | | | | | | EYTLFRLQDEQEEVLNVNLEGNLTLEGVTRG |
| | | | | | | QSGTYGCRVEDYDAADDVQLSKTLELRVAY |
| | | | | | | LDPLELSEGKVLSLPLNSRAVVNCSVHGLPTP |
| | | | | | | ALRWTKDSTPLGDGPMLSLSSITFDSNGTYVC |
| | | | | | | EASLPTVPVLSRTQNFTLLVQGSPELKTAEIEP |
| | | | | | | KADGSWREGDEVTLICSARGHPDPKLSWSQL |
| | | | | | | GGSPAEPIPGRQGWVSSSLTLKVTSALSRDGI |
| | | | | | | SCEASNPHGNKRHVFHFGTVSPQTSQAGVAV |
| | | | | | | MAVAVSVGLLLLVVAVFYCVRRKGGPCCRQ |
| | | | | | | RREKGAP |
| 1020 | 2370 | A | 8530 | 2 | 1200 | PRVRLLRPSRSRSCRGLLSTRAPGPSPFRSLHS |
| | | | | | | SPLLPHAMKSPFYRCQNTTSVEKGNSAVMGG |
| | | | | | | VLFSTGLLGNLLAILGLLARSGLGWCSRRPLR |
| | | | | | | PLPSVFYMLVCGLTVTDLLGKCLLSPVVLAA |
| | | | | | | YAQNRSLRVLAPALDNSLCQAFAFFMSFPGL |
| | | | | | | SSTLQLLAMALECWLSLGHPFFYRRHITRLG |
| | | | | | | ALVAPVVSAFSLAFCALPFMGFGKFVQYCPG |
| | | | | | | TWCFIQMVHEEGSLSVLGYSVLYSSLMALLV |
| | | | | | | LATVLCNLGAMRNLYAMHRRLQRHPRSCTR |
| | | | | | | DCAEPRADGREASPQPLEELDHLLLLALMTV |
| | | | | | | LFTMCSLPVIYRAYYGAFKDVKEKNRTSEEA |
| | | | | | | EDLRALRFLSVISIVDPWTFIIFRSPVFRWFHKI |
| | | | | | | FIRPLRYRSRCSNSTNMESSL |
| 1021 | 2371 | A | 8536 | 1 | 237 | RRGEIDMATEGDVELELETETSGPERPPEKPR |
| | | | | | | KHDSGAADLERVTDYAEEKEIQSSNLETAMS |
| | | | | | | VIGDRRSREQKAKQER |
| 1022 | 2372 | A | 8537 | 94 | 541 | RKERRRRRRRMEAVVFVFSLLDCCALIFLSV |
| | | | | | | YFIITLSDLECDYINARSCCSKLNKWYIFELIG |
| | | | | | | HTIVTVLLLMSLHWFIFLLNLPVATWNIYRYI |
| | | | | | | MVPSGNMGVFDPTEIHNRGQLKSHMKEAMI |
| | | | | | | KLGFHLLCFFMYLYSMILALIND |
| 1023 | 2373 | A | 8540 | 26 | 431 | RMIVIKCPQALLAIFWLLLSWVSSEDKVVQSPL |
| | | | | | | SLVVHEGDTVTLNCSYEVTNFRSLLWYKQEK |
| | | | | | | KAPTFLFMLTSSGIEKKSGRLSSILDKKELSSIL |
| | | | | | | NITATQTGDSAIYLCAVEAQCSLVTCSLYSNS |
| | | | | | | TAEALQL |
| 1024 | 2374 | A | 8544 | 1731 | 743 | GVRLRYSPIAVVMVGEAGRDLRRRRAVAVT |
| | | | | | | AEKMAVLAFLIALVYSVPRLSRWLAQPYYLL |
| | | | | | | SALLSAAFLLVRKLPPLCHGLPTQREDGNPCD |
| | | | | | | FDWREVEILMFLSAIVMMKNRRSITVEQHIGN |
| | | | | | | IFMFSKVANTILFFRLDIRMGLLYITLCIVFLM |
| | | | | | | TCKPPLYMGPEYIKYFNDKTIDEELERDKRVT |
| | | | | | | WIVEFFANWSNDCQSFAPIYADLSLKYNCTG |
| | | | | | | LNFGKVDVGRYTDVSTRYKVSTSPLTKQLPT |
| | | | | | | LILFQGGKEAMRRPQIDKKGRAVSWTFSEEN |
| | | | | | | VIREFNLNELYQRAKKLSKAGDNWEEQPVAS |
| | | | | | | TPTTVSDGENKKDK |
| 1025 | 2375 | A | 8546 | 2194 | 1707 | TVSFHKTMASLKCSTVVCVICLEKPKYRCPA |
| | | | | | | CRVPYCSVVCFRKITKEQCNPETRPVEKKIRS |
| | | | | | | AIPTKTVKPVENKDDDDSIADFLNSDEEEDR |
| | | | | | | VSLQNLKNLGESATLRSLLLNPHLRQLMVNL |
| | | | | | | DQGEDKAKLMRAYMQEPLFVEFADCCLGIV |
| | | | | | | EPSQNEES |
| 1026 | 2376 | A | 8547 | 1078 | 594 | VGMELPAVNLKV1LLGHWLLTTWGCIVFSGS |
| | | | | | | YAWANFTILALGVWAVAQRDSIDAISMFLGG |
| | | | | | | LLATFLDIVH1SWYPRVSLTDTGRFGVGMIL |
| | | | | | | SLLLKPLSCCFVYHMYRERGGELLVHTGFLG |
| | | | | | | SSQDRSAYQTIDSAEAPADPFAVPEGRSQDAR |
| | | | | | | GY |
| 1027 | 2377 | A | 8557 | 1 | 340 | DFLGPASPQEEGGSESSTMTELETAMGMIIDV |
| | | | | | | FSRYSGSEGSTQTLTKGELKVLMEKELPGFLQ |
| | | | | | | SGKDKDAVDKLLKDLDANGDAQVDFSEFTVF |
| | | | | | | VAAITSACHKYFEKAGLK |
| 1028 | 2378 | A | 8569 | 20 | 963 | KMAATLGPLGSWQQWRRCLSARDGSRRLLL |
| | | | | | | LLLLGSGQGPQQVGAGQTFEYLKREHSLSKP |
| | | | | | | YQGEAPRPCFLRDWELQVHFKIHGQGKKNL |
| | | | | | | HGDGLAIWYTKDRMQPGPVFGNMDKFVGLG |
| | | | | | | VFVDIYPNEEKQQERVFPYISAMYNNGSLSY |
| | | | | | | DHERDGRPTELGGGTAIVRNLHYDTFLVIRY |
| | | | | | | VKRHLTIMMDIDGKHEWRDCIEVPGVRLPRG |
| | | | | | | YYFGTSSITGDLSDNHDVISLKLFELTVERTPE |
| | | | | | | EEKLHRDVFLPSVDNMKLPEMTAPLPPLSGL |
| | | | | | | ALFLIVFFSLVFSVFAIWGLLYNKWQEQSRK |
| | | | | | | REY |
| 1029 | 2379 | A | 8572 | 1 | 578 | AAAASHRSRARSRPRRVSSGPAPRRAQSSAG |
| | | | | | | RVASGLDSAPLCTMARALCRLPRRGLWLLLA |
| | | | | | | HHLFMTTACQEANYGALLRELCLTQFQVDM |
| | | | | | | EAVGERWCDWGRT1RSYRELADCTWHMAE |
| | | | | | | KLGCFWPNAEVDRFPLAVHGRYFRSCPISGR |
| | | | | | | AVRDPPGSILYPFWVPITVTLLVTALVVWQS |
| | | | | | | KRTEGIV |
| 1030 | 2380 | A | 8574 | 1352 | 372 | DSSTVKGGSESRHLCLLPDLKGKARTREASSG |
| | | | | | | SRTCGRRTSLCTSAKSSWTYRSGRLSWQSIKG |
| | | | | | | THLTITQALRQPLHRAPLLPGQLCWSPRPLEK |
| | | | | | | NKAMGRPLLLPLLLLLQPPAFLQPQGSTGSGP |
| | | | | | | SYLYGVTQPKHLSASMGGSVEIPFSFYYPWEL |
| | | | | | | AIVPNVRISWRRGHFHGQSFYSTRPPSIHKDY |
| | | | | | | VNRLFLNWTEGQESGFLPISNLRKEDQSVYF |
| | | | | | | CRVELDTRRSGRQQLQSIKGTKLTITQAVTTT |
| | | | | | | TTWRPSSTTTIAGLRVTESKGHSESWHLSLDT |
| | | | | | | AIRVALAVAVLKTVILGLLCLLLLWWRRRKG |
| | | | | | | SRAPSSDF |
| 1031 | 2381 | A | 8580 | 905 | 340 | RRTAGIYPCFPKPGRTRIIALCSVVLLLLTGQL |
| | | | | | | AFDDFQESCAMMWQKYAGSRRSMPLGARIL |
| | | | | | | FHGVFYAGGFAIVYYLIQKFHSRALYYKLAV |
| | | | | | | EQLQSHPEAQEALGPPLNIHYLKLIDRENFVDI |
| | | | | | | VDAKLKIPVSGSKSEGLLYVHSSRGGPFQRW |
| | | | | | | HLDEVFLELKDGQQIPVFKLSGENGDEVKKE |
| 1032 | 2382 | A | 8593 | 2558 | 961 | RRRPLLPGAEPCEPRVGPRRADMGCSAKAR |
| | | | | | | WAAGALGVAGLLCAVLGAVMIVMVPSLIKQ |
| | | | | | | QVLKNVRIDPSSLSFNMWKEWIPFYLSVYFFD |
| | | | | | | VMNPSEILKGEKPQVRERGPYVYREFRHKSNI |
| | | | | | | TFNNNDTVSFLEYRTFQFQPSKSHGSESDYIV |
| | | | | | | MPNILVLGAAVMMENKPMTLKLIMTLAFTTL |
| | | | | | | GERAFMNRTVGEIMWGYKDPLVNLINKYFP |
| | | | | | | GMFPFKDKFGLFAELNNSDSGLFTGFTGVQNI |
| | | | | | | SRIHLVDKWNGLSKVDFWHSDQCNMINGTS |
| | | | | | | GQMWPPFMTPESSLEFYSPEACRSMKLMYKE |
| | | | | | | SGVFEGIPTYRFVAPKTLFANGSIYPPNEGFCP |
| | | | | | | CLESGIQNVSTCRFSAPLFLSHPHFLNADPVL |
| | | | | | | AEAVTGLHPNQEAHSLFLDIHPVTGIPMNCSV |
| | | | | | | KLQLSLYMKSVAGIGQTGKIEPVVLPLLWFA |
| | | | | | | ESGAMEGETLHTPYTQLVLMPKVMHYAQYV |
| | | | | | | LLALGCVLLLVPVICQIRSQEKCYLFWSSSKK |
| | | | | | | GSKDKEAIQAYSESLMTSAPKGSVLQEAKL |
| 1033 | 2383 | A | 8595 | 595 | 767 | AHLPDTLLLPPHSPTVPTPKSFQCSQKACFSRS |
| | | | | | | FCLLLSLVSSSLVSLSLCPPLTQA |
| 1034 | 2384 | A | 8597 | 640 | 164 | VTTSCIIPFAFGLGVRASERLAEIDMPYLLKYQ |
| | | | | | | PMMQTIGQKYCMDPAVIAGVLSRKSPGDKTL |
| | | | | | | VNMGDRTSMVQDPGSQAPTSWISESQVFQTT |
| | | | | | | EVLTTRITELQRRFPTWTPDQYLRGGLCAYSG |
| | | | | | | GAGYVRSSQDLSCDFCNDVLARAKYLKRHG |
| | | | | | | F |
| 1035 | 2385 | A | 8603 | 936 | 204 | AMASTLEYSPSPLRRLVGPAAGFSRAARADL |
| | | | | | | SWDPMAFFTGLWGPFTCVSRVLSHHCFSTTG |
| | | | | | | SLSAIQKMTRVRVVDNSALGNSPYHRAPRCI |
| | | | | | | HVYKKNGVGKVGDQILLAIKGQKKKALIVG |
| | | | | | | HCMPGPRMTPRFDSNNVVLIEDNGNPVGTRI |
| | | | | | | KTPIPTSLRKREGEYSKVLAIAQNFV |
| 1036 | 2386 | A | 8606 | 1 | 562 | PTRAHSFDLCCSPCRRRLLGREEAGEEPTSPV |
| | | | | | | TQYLQPRSPEECKMFACAKLACTPSLIRAGSR |
| | | | | | | VAYRPISASVLSRPEASRTGEGSTVFNGAQNG |
| | | | | | | VSQLIQREFQTSAISRDIDTAAKFIGAGAATVG |
| | | | | | | VAGSGAGIGTVFGSLIIGYARNPSLKQQLFSY |
| | | | | | | AILGFALSEAMGLFCLMVAFLILFAM |
| 1037 | 2387 | A | 8615 | 2 | 2364 | SPGPSLPESAESLDGSQEDKPRGSCAEPTFTDT |
| | | | | | | GMVAHINNSRLKAKGVGQHDNAQNFGNQSF |
| | | | | | | EELRAACLRKGELFEDPLFPAEPSSLGFKDLG |
| | | | | | | PNSKNVQNISWQRPKDIINNPLFIMDGISPTDI |
| | | | | | | CQGILGDCWLLAAIGSLLCPKLLYRVVPRG |
| | | | | | | QSFKKNYAGIFHFQIWQFGQWVNVVVDDRL |
| | | | | | | PTKNDKLVFVHSTERSEFWSALLEKAYAKLS |
| | | | | | | GSYEALSGGSTMEGLEDFTGGVAQSFQLQRP |
| | | | | | | PQNLLRLLRKAVERSSLMGCSIEVTSDSELES |
| | | | | | | MTDKMLVRGHAYSVTGLQDVHYRGKMETLI |
| | | | | | | RVRNPWGRIEWNGAWSDSAREWEEVASDIQ |
| | | | | | | MQLLHKTEDGEFWMSYQDFLNNFTLLEICNL |
| | | | | | | TPDTTLSGDYKSYWHTTFYEGSWRTGSSAGGC |
| | | | | | | RNHPGTFWTNPQFKISLPEGDDPEDDAEGNV |
| | | | | | | VVCTCLVALMQKNWRHARQQGAQLQTIGFV |
| | | | | | | LYAVPKEFQNIQDVHLKKEFFTKYQDHGFSEI |
| | | | | | | FTNSREVSSQLRLPPGEYIIIPSTFEPHRDADFL |
| | | | | | | LRVFTEKHSESWELDEVNYAEQLQEEKVSED |
| | | | | | | DMDQDFLHLFKWAGEGKEIGVYELQRLLNR |
| | | | | | | MAIKFKSFKTKGFGLDACRCMINLMDKDGSG |
| | | | | | | KLGLLEFKILWKKLKKWMDIFRECDQDHSGT |
| | | | | | | LNSYEMRLVIEKAGIKLNNKVMQVLVARYA |
| | | | | | | DDDLIIDFDSFISCFLRLKTMFTFFLTMDPKNT |
| | | | | | | GHICLSLEQVLGEGWEGICRIAPACPSTPPPPS |
| | | | | | | SDVPGPASCPRLFPPWDLLPVSTVAADDHVGI |
| 1038 | 2388 | A | 8621 | 3 | 1494 | RSRMARAPLGVLLLLGLLGRGVGKNEELRLY |
| | | | | | | HHLFNNYDPGSRPVREPEDTVTISLKVTLTNL |
| | | | | | | ISLNEKEETLTTSVWIGIDWQDYRLNYSKDDF |
| | | | | | | GGIETLRVPSELVWLPEIVLENNIDGQFGVAY |
| | | | | | | DANVLVYEGGSVTWLPPAIYRSVCAVEVTYF |
| | | | | | | PFDWQNCSLIFRSQTYNAEEVEFTFAVDNDG |
| | | | | | | KTINKIDIDTEAYTENGEWAIDFCPGVIRRHH |
| | | | | | | GGATDGPGETDVIYSLIIRRKPLFYVINIIVPCV |
| | | | | | | LISGLVLLAYFLPAQAGGQKCTVSINVLLAQT |
| | | | | | | VFLFLIAQKIPETSLSVPLLGRFLIFVMVVATLI |
| | | | | | | VMNCVIVLNVSQRTPTTHAMSPRLRHVLLEL |
| | | | | | | LPRLLGSPPPPEAPRAASPPRRASSVGLLLRAE |
| | | | | | | ELILKKPRSELVFEGQRHRQGTWTAAFCQSL |
| | | | | | | GAAAPEVRCCVDAVNFVAESTRDQEATGEE |
| | | | | | | VSDWVRMGNALDNICFWAALVLFSVGSSLIF |
| | | | | | | LGAYFNRVPDLPYAPCIQP |
| 1039 | 2389 | A | 8636 | 1 | 900 | PGRERPGGGGARRRPQHLPALLPSERPDCATL |
| | | | | | | QAMENELPVPHTSSSACATSSTSGASSSSGCN |
| | | | | | | NSSSGGSGRPTGPQISVYSGIPDRQTVQVIQQ |
| | | | | | | ALHRQPSTAAQYLQQMYAAQQQHLMLQTA |
| | | | | | | ALQQQHLSSAQLQSLAAVQQASLVSNRQGST |
| | | | | | | SGSNVSAQAPAQSSSINLAASPAAAQLLNRA |
| | | | | | | QSVNSAAASGIAQQAVLLGNTSSPALTASQA |
| | | | | | | QMYLRAQMLIFTPTATVATVQPELGTGSPAR |
| | | | | | | PPTPAQVQNLTLRTQQTPAAAASGPTPTQPVL |
| | | | | | | PSLALKPTPGGSQPLPTPA |
| 1040 | 2390 | A | 8645 | 98 | 1388 | ASQLAFGGKLTSTPSRDFQGCGRGAVTCCSF |
| | | | | | | HEHRLQSGRCLSTGMAPNLKQRPRKKKPCPQ |
| | | | | | | RRDSFSGVKDSNNNSDGKAVAKVKCEARSA |
| | | | | | | LTKPKNNHNCKKVSNEEKPKVAIGEECRADE |
| | | | | | | QAFLVALYKYMKERKTPIERIPYLGFKQINLW |
| | | | | | | TMFQAAQKLGGYETITARRQWKIUYDELGG |
| | | | | | | NPGSTSAATCTRRHYERLILPYERFIKGEEDKP |
| | | | | | | LPPIKPRKQENSSQENENKTKVSGTKRIKHEIP |
| | | | | | | KSKKEKENAPKPQDAAEVSSEQEKEQETLISQ |
| | | | | | | KSIPEPLPAADMKKKIEGYQEFSAKPLASRVD |
| | | | | | | PEKDNETDQGSNSEKVAEEAGEKGPTPPLPSA |
| | | | | | | PLAPEKDSALVPGASKQPLTSPSALVDSKQES |
| | | | | | | KLCCFTESPESEPQEASPPRLPHHTGHRWQTR |
| | | | | | | MRRRMTNCPPWQITLPTAP |
| 1041 | 2391 | A | 8646 | 113 | 1492 | LLQEMCTKTIPVLWGCFLLWNLYVSSSQTIYP |
| | | | | | | GIKARITQRALDYGVQAGMKMIEQMLKEKK |
| | | | | | | LPDLSGSESLEFLKVDYVNYNFSNIKISAFSFP |
| | | | | | | NTSLAFVPGVGIKALTNHGTANISTDWGFESP |
| | | | | | | LFVLYMSFAEPMEKPILKNLNEMLCPIIASEVK |
| | | | | | | ALNANLSTLEVLTKIDNYTLLDYSLISSPEITE |
| | | | | | | NYLDLNLKGVFYPLENLTDPPFSPVPFVLPER |
| | | | | | | SNSMLYIGIAEYFFKSASFAHFTAGVFNVTLS |
| | | | | | | TEEISNHFVQNSQGLGNVLSRIAEIYIILSQPFM |
| | | | | | | VRIMATEPPIINLQPGNFTLDIPASIMMLTQPK |
| | | | | | | NSTVETIVSMDFVASTSVGLVILGQRLVCSLS |
| | | | | | | LNRFRLALPESNRSNIEVLRPENILSSILHFGVL |
| | | | | | | PLANAKLQQGFPLPNPHKPLFVNSDIEVLEGF |
| | | | | | | LLISTDLKYETSSKQQPSFHVWEGLNLISRQW |
| | | | | | | RGKSAP |
| 1042 | 2392 | A | 8672 | 538 | 170 | ARRIARTRESKAAVSQDNVPALQPGKKKKLR |
| | | | | | | LGGKKKKFKFFRLPKEFKKQLMYSPSNFKKM |
| | | | | | | TSLAGNTVQCLNKLKYVIYSAQYPAYGNYIT |
| | | | | | | LDMITSTDHVLEQDFWICFTFYSVKERQI |
| 1043 | 2393 | A | 8688 | 359 | 17 | GLKTRAIPATPTFQREVLGPAKQDMQRRCPRI |
| | | | | | | GLMTSLLKPIKRRWRDYKRWKSGGFTGESC |
| | | | | | | HHADTLGDRGGLQGDHSELLQWQKRILRTE |
| | | | | | | GEPSPKYISKNIFPICSYITGFL |
| 1044 | 2394 | A | 8718 | 292 | 1490 | GTVKTSVATPITAGHSCSSGGVLQVKSPATQS |
| | | | | | | GFKFTSKMEDFNMESDSFEDFWKGEDLSNYS |
| | | | | | | YSSTLPPFLLDAAPCEPESLEINKYFVVIIYAL |
| | | | | | | VFLLSLLGNSLVMLVILYSRVGRSVTDVYLL |
| | | | | | | NLALADLLFALTLPIWAASKVNGWIFGTFLC |
| | | | | | | KVVSLLKEVNFYSGILLLACISVDRYLAIVHA |
| | | | | | | TRTLTQKRYLVKFICLSIWGLSLLLALPVLLFR |
| | | | | | | RTVYSSNVSPACYEDMGNNTANWRMLLRIL |
| | | | | | | PQSFGFIVPLLIMLFCYGFTLRTLFKAHMGQK |
| | | | | | | HRAMRVIFAVVLIFLLCWLPYNLVLLADTLM |
| | | | | | | RTQVIQETCERRNHIDRALDATEILGILHSCLN |
| | | | | | | PLIYAFIGQKFRHGLLKILAIHGLISKDSLPKDS |
| | | | | | | RPSFVGSSSGHTSTTL |
| 1045 | 2395 | A | 8724 | 254 | 3184 | FRANLAITVANRRGAQGGKMHTCCPPVTLEQ |
| | | | | | | DLHRKMHSWMLQTLAFAVTSLVLSCAETIDY |
| | | | | | | YGEICDNACPCEEKDGILTVSCENRGIISLSEIS |
| | | | | | | PPRFPIYHLLLSGNLLNRLYPNEFVNYTGASIL |
| | | | | | | HLGSNVIQDIETGAFHGLRGLRRLHLNNNIKL |
| | | | | | | ELLRDDTFLGLENLEYLQVDYNYISVIEPNAF |
| | | | | | | GKLHLLQVLILNDNLLSSLPNNLFRFVPLTHL |
| | | | | | | DLRGNRLKLLPYVGLLQHMDKVVELQLEEN |
| | | | | | | PWNCSCELTSLKDWLDSISYSALVGDVVCETP |
| | | | | | | FRLHGRDLDEYSKQELCPRRLISDYEMRPQTP |
| | | | | | | LSTTGYLHTTPASVNSVATSSSAVYKPPLKPP |
| | | | | | | KGTRQPNKPRVRPTSRQPSKDLGYSNYGPSIA |
| | | | | | | YQTKSPVPLECPTACSCNLQISDLGLNVNCQE |
| | | | | | | RKIESIAELQPKPYNPKKMYLTENYIAVVRRT |
| | | | | | | DLLEATGLDLLHLGNNRISMIQDRAFGDLTN |
| | | | | | | LRRLYLNGNRIERLSPELFYGLQSLQYLFLQY |
| | | | | | | NLIREIQSGTFDPVPNLQLLFLNNNLLQAMPS |
| | | | | | | GVFSGLTLLRLNLRSNHFTSLPVSGVLDQLKS |
| | | | | | | LIQIDLHDNPWDCTCDIVGMKLWVEQLKVG |
| | | | | | | VLVDEVICKAPKKFAETDMRSIKSELLCPDYS |
| | | | | | | DVVVSTPTPSSIQVPARTSAVTPAVRLNSTGA |
| | | | | | | PASLGAGGGASSVPLSVLILSLLLVFIMSVFVA |
| | | | | | | AGLFVLVMKRRKKNQSDHTSTNNSDVSSFN |
| | | | | | | MQYSVYGGGGGTGGHPHAHVHHRGPALPK |
| | | | | | | VKTPAGHVYEYIPHPLGHMCKNPIYRSREGN |
| | | | | | | SVEDYKDLHELKWFYSSNHIILQQQQQPPPPP |
| | | | | | | QQPQQQPPPQLQLQPGEEERRESHHLRSPAYS |
| | | | | | | VSTIEPREDLLSPVQDADRFYRGILEPDKHCST |
| | | | | | | TPAGNSLPEYPKFPCSPAAYTFSPNYDLRRPH |
| | | | | | | QYLHPGAGDSRLREPVLYSPPSAVFVEPNRNE |
| | | | | | | YLELKAKLNVEPDYLEVLEKQTTFSQF |
| 1046 | 2396 | A | 8736 | 28 | 452 | SPSAAGCILAWVSLALGSGSRCIRDHSGSGVGT |
| | | | | | | AMAGALVRKAADYVRSKDFRDYLMSTHFW |
| | | | | | | GPVANWGLPIAANDMKKSPEIISGRMTFALC |
| | | | | | | CYSLTFMRFAYKVQPRNWLLFACHATNEVA |
| | | | | | | QLIQGGRLIKHEMTKTASA |
| 1047 | 2397 | A | 8741 | 673 | 924 | ALPGTPQQTVTLNTDGKVKSFTSPHSNPNLPP |
| | | | | | | AKFFTSLQSLNWSSHLPPSPATESVGKRGNAK |
| | | | | | | PPTTKLLHSSPLWNFFAQQL |
| 1048 | 2398 | A | 8747 | 3 | 5054 | PEVTKPSLSQPTAASPIGSSPSPPVNGGNNAKR |
| | | | | | | VAVPNGQPPSAARYMPREVPPRFRCQQDHIK |
| | | | | | | VLLKRGQPPPPSCMLLGGGAGPPPCTAPGAN |
| | | | | | | PNNAQVTGALLQSESGTAPDSTLGGAAASNY |
| | | | | | | ANSTWGSGASSNNGTSPNPIHIWDKVIVDGS |
| | | | | | | DMEEWPCIASKDTESSSENTIDNNSASNPGSE |
| | | | | | | KSTLPGSTTSNKGKGSQCQSASSGNECNLGV |
| | | | | | | WKSDPKAKSVQSSNSITENNNGLGNWRNVS |
| | | | | | | GQDRIGPGSGFSNFNPNSNPSAWPALVQEGTS |
| | | | | | | RKGALETDNSNSSAQVSTVGQTSREQQSKME |
| | | | | | | NAGVNFVVSGREQAQIHNTDGPKNGNTNSL |
| | | | | | | NLSSPNPMENKGMPFGMGLGNTSRSTDAPSQ |
| | | | | | | STGDRKTGSVGSWGAARGPSGTDTVSGQSNS |
| | | | | | | GNNGNNGKEREDSWKQASVQKSTGSKNDS |
| | | | | | | WDNNNRSTGGSWNFGPQDSNDNKWGEGNK |
| | | | | | | MTSGVSQGEWKQPTGSDELKIGEWSGPNQPN |
| | | | | | | SSTGAWDNQKGHPLLENQGNAQAPCWGRSS |
| | | | | | | SSTGSEVEGQSTGSNHKAGSSDSHNSGRRSY |
| | | | | | | RPTHPDCQAVLQTLLSRTDLDPRVLSNTGWG |
| | | | | | | QTQIKQDTVWDIEEVPRPEGKSDKGTEGWES |
| | | | | | | AATQTKNSGGWGDAPSQSNQMKSGWGELS |
| | | | | | | ASTEWKDPKNTGGWNDYKNNNSSNWGGGR |
| | | | | | | PDEKTPSSWNENPSKDQGWGGGRQPNQGWS |
| | | | | | | SGKNGWGEEVDQTKNSNWESSASKPVSGWG |
| | | | | | | EGGQNEIGTWGNGGNASLASKGGWEDCKRS |
| | | | | | | PAWNETGRQPNSWNKQHQQQQPPQQPPPPQ |
| | | | | | | PEASGSWGGPPPPPPGNVRPSNSSWSSGPQPA |
| | | | | | | TPKDEEPSGWEEPSPQSISRKMDIDDGTSAWG |
| | | | | | | DPNSYNYKNVNLWDKNSQGGPAPREPNLPTP |
| | | | | | | MTSKSASDSKSMQDGWGESDGPVTGARHPS |
| | | | | | | WEEEEDGGVWNTTGSQGSASSHNSASWGQG |
| | | | | | | GKKQMKCSLKGGNNDSWMNPLAKQFSNMG |
| | | | | | | LLSQTEDNPSSKMDLSVGSLSDKKFDVDKRA |
| | | | | | | MNLGDFNDIMRKDRSGFRPPNSKDMGTTDS |
| | | | | | | GPYFEKGGSHGLFGNSTAQSRGLHTPVQPLN |
| | | | | | | SSPSLRAQVPPQFISPQVSASMLKQFPNSGLSP |
| | | | | | | GLFNVGPQLSPQQIAMLSQLPQIFQFQLACQL |
| | | | | | | LLQQQQQQQLLQNQRKISQAVRQQQEQQLA |
| | | | | | | RMVSALQQQQQQQQRQPGMKHSPSHPVGPK |
| | | | | | | PHLDNMVPNALNVGLPDLQTKGPIPGYGSGF |
| | | | | | | SSGGMDYGMVGGKEAGTESRFKQWTSMME |
| | | | | | | GLPSVATQEANMHKNGAIVAPGKTRGGSPY |
| | | | | | | NQFDIIPGDTLGGHTGPAGDSWLPAKSPPTNK |
| | | | | | | IGSKSSNASWPPEPQPGVPWKGIQNIDPESDP |
| | | | | | | YVTPGSVLGGTATSPIVDTDHQLLRDNTTGS |
| | | | | | | NSSLNTSLPSPGAWPYSASDNSFTNVHSTSAK |
| | | | | | | FPDYKSTWSPDPIGHNPTHLSNKMWKNHISS |
| | | | | | | RNTTPLPRPPPGLTNPKPSSPWSSTAPRSVRG |
| | | | | | | WGTQDSRLASASTWSDGGSVRPSYWLVLHN |
| | | | | | | LTPQIDGSTLRTICMQHGPLLTFHLNLTQGTA |
| | | | | | | LIRYSTKQEAAKAQTALHMCVLGNTTLLAEF |
| | | | | | | ATDDEVSRFLAQAQPPTPAATPSAPAAGWQS |
| | | | | | | LETGQNQSDPVGPALNLFGGSTGLGQWSSSA |
| | | | | | | GGSSGADLAGASLWGPPNYSSSLWGVPTVED |
| | | | | | | PHRMGSPAPLLPGDLLGGGSDSI |
| 1049 | 2399 | A | 8748 | 200 | 1387 | VPWKRQDEQLSLQYETLYLDSPAVIHLLSPTF |
| | | | | | | LPPSSLPPFLQIVDSSSSACTLDSFFPFLAPWDS |
| | | | | | | PQDCGFKDHQPLTLQALTVELARWTLMLLLS |
| | | | | | | TAMYGAHAPLLALCHVDGRVPFRPSSAVLLT |
| | | | | | | ELTKLLLCAFSLLVGWQAWPQGPPPWRQAA |
| | | | | | | PFALSALLYGANNNLVIYLQRYMDPSTYQVL |
| | | | | | | SNLKIGSTAVLYCLCLRHRLSVRQGLALLLL |
| | | | | | | MAAGACYAAQGLQVPGNTLPSPPPAAAASP |
| | | | | | | MPLHITPLGLLLLILYCLISGLSSVYTELLMKR |
| | | | | | | QRLPLALQNLFLYTFGVLLNLGLHAGGGSGP |
| | | | | | | GLLECIFSGWAALVVLSQALNGLLMSAVMKH |
| | | | | | | GSSITRLFVVSCSLVVNAVLSAVLLRLQLTAA |
| | | | | | | FFLATLLIGLAMRLYYGSR |
| 1050 | 2400 | A | 8758 | 3 | 1660 | WVSSMGFEELLEQVGGFGPFQLRNVALLALP |
| | | | | | | RVLLPLIIFLLPIFLAAVPAHRCALPGAPANFS |
| | | | | | | HQDVWLEAHLPREPDGTLSSCLRFAYPQALP |
| | | | | | | NTTLGEERQSRGELEDEPATVPCSQGWEYDH |
| | | | | | | SEFSSTIATESQWDLVCEQKGLNRAASTFFFA |
| | | | | | | GVLVGAVAFGYLSDRFGRRRLLLVAYVSTLV |
| | | | | | | LGLASAASVSYVMFAIITRTLTGSALAGFTILV |
| | | | | | | MPLELEWLDVEHRTVAGVLSSTFWTGGVML |
| | | | | | | LAIVGYLIRDWRWLLLAVTLPCAPGILSLWW |
| | | | | | | VPESARWLLTQGHVKEAHRYLLHCARLNGR |
| | | | | | | PVCEDSFSQEAVSKVAAGERVVRRPSYLDLF |
| | | | | | | RTPRLRHISLCCVVVWFGVNFSYYGLSLDVS |
| | | | | | | GLGLNVYQTQLLFGAVELPSKLLVYLSVRYA |
| | | | | | | GRRLTQAGTLLGTALAFGTRLLVSSDMKSWS |
| | | | | | | TVLAVMGKAFSEAAFTTAYLFTSELYPTVLR |
| | | | | | | QTGMGLTALVGRILGGSLAPLAALLDGVWLS |
| | | | | | | LPKLTYGGIALLAAGTALLLPETRQAQLPETI |
| | | | | | | QDVERKSAPTSLQEEEMPMKQVQN |
| 1051 | 2401 | A | 8759 | 515 | 1625 | EIRTPVAVSSAPSGDSEGDEEETTQDEVSSHTS |
| | | | | | | EEDGGVVKVEKELENTEQPVGGNEVVEHEV |
| | | | | | | TGNLNSDPLLELCQCPLCQLDCGSREQLIAHV |
| | | | | | | YQHTAAVVSAKSYMCPVCGRALSSPGSLGR |
| | | | | | | HLLIHSEDQRSNCAVGGARFTSHATFNSEKLP |
| | | | | | | EVLNMESLPTVHNEGPSSAEGKDIAFSPPVYP |
| | | | | | | AGILLVCNNCAAYRICLLEAQTPSVRKWALRR |
| | | | | | | QNEPLEVRLQRLERERTAKKSRRDNETPEERE |
| | | | | | | VRRMRDREAKRLQRMQETDEQRARRLQRDR |
| | | | | | | EAMRLKRANETPEKRQARLIREREAKRLKRR |
| | | | | | | LEKMDMMLRAQFGQDPSAMAALAAEMNPF |
| | | | | | | QLPVSGVELDSQLLGKMAFEEQNSSSLH |
| 1052 | 2402 | A | 8763 | 1106 | 70 | RHGHGGRDRRGGGRVARPGGLGRYPGRGAA |
| | | | | | | ASLVFVPTRRRSGPSGTASVAAMAYHSGYGA |
| | | | | | | HGSKHRARAAPDPPPLFDDTSGGYSSQPGGY |
| | | | | | | PATGADVAFSVNHLLGDPMANVAMAYGSSI |
| | | | | | | ASHGKDMVHKELHRFVSVSKLKYFFAVDTA |
| | | | | | | YVAKKLGLLVFPYTHQNWEVQYSRDAPLPP |
| | | | | | | RQDLNAPDLYWTMAFITYVLLAGMALGIQK |
| | | | | | | RFSPEVLGLCASTALVWVVMEVLALLLGLYL |
| | | | | | | ATVRSDLSTFHLLAYSGYKYVGMILSVLTGL |
| | | | | | | LFGSDGYYVALAWTSSALMYFIVRSLRTAAL |
| | | | | | | GPDSMGGPVPRQRLQLYLTLGAAAFQPLIIY |
| | | | | | | WLTFHLVR |
| 1053 | 2403 | A | 8768 | 2 | 712 | RPPRVWYPELRELSAAAPRWSHRTAPGIMVF |
| | | | | | | YFTSSSVNSSAYTIYMGKDKYENEDLIKHGW |
| | | | | | | PEDIWFHVDKLSSAHVYLRLHKGENIEDIPKE |
| | | | | | | VLMDCAHLVKANSIQGCKMNNVNVVYTPW |
| | | | | | | SNLKKTADMDVGQIGFHRQKDVKIVTVEKK |
| | | | | | | VNEILNRLEKTKVERFPDLAAEKECRDREER |
| | | | | | | NEKKAQIQEMKKREKEEMKKKEEMDELRSY |
| | | | | | | SSLMKVENMSSNQDGNDSDEFM |
| 1054 | 2404 | A | 8769 | 344 | 527 | REAITLACRNSCWVFSRCSLGACKPTVCSMP |
| | | | | | | SLSRQGSQTLCLRLAEYCMESVDSQRLLLS |
| 1055 | 2405 | A | 8770 | 430 | 1104 | QQESPAAGAARNCKEGTDSSCGCRGNDEK |
| | | | | | | KMLKCVVVGDGAVGKTCLLMSYANDAFPEE |
| | | | | | | YVPTVFDHYAVTVTVGGKQHLLGLYDTAGQ |
| | | | | | | EDYNQLRPLSYPNTDVFLICFSVVNPASYHNV |
| | | | | | | QEEWVPELKDCMPHVPYVLIGTQIDLRDDPK |
| | | | | | | TLARLLYMKEKPLTYEHGVKLAKAIGAQCYL |
| | | | | | | ECSALTQKGLKAVFDEAILTIFHPKKKKKRCS |
| | | | | | | EGHSCCSII |
| 1056 | 2406 | A | 8773 | 261 | 332 | NPRIQLSGNSCCAGSCRVWLSEQ |
| 1057 | 2407 | A | 8778 | 3 | 477 | PAGIRHEQARGADRMGKCRGLRTARKLRSH |
| | | | | | | RRDQKWHDKQYKKAHLGTALKANPFGGAS |
| | | | | | | HAKGIVLEKVGVEAKQPNSAIRKCVRVQLIK |
| | | | | | | NGKKITAFVPNDGCLNFIEENDEVLVAGFGR |
| | | | | | | KGHAVGDIPGVRFKVVKVANVSLLALYKGK |
| | | | | | | KERPRS |
| 1058 | 2408 | A | 8808 | 171 | 881 | PGLSQEPSGSMETVVIVAIGVLATIFLASFAAL |
| | | | | | | LVCRQRYCRPRDLLQRYDSKPWDLIGAME |
| | | | | | | TQSEPSELELDDVVITNPHIEAILENEDWEDA |
| | | | | | | SGLMSHCIAILKICHTLTEKLVAMTMGSGAK |
| | | | | | | MKTSASVSDIIVVAKRISPRVDDWKSMYPPL |
| | | | | | | DPKLLDARTTALLLSVSHLVLVTRNACHLTG |
| | | | | | | GLDWIDQSLSAAEEHLEVLREAALASEPDKG |
| | | | | | | LPGPEGFLQEQSAI |
| 1059 | 2409 | A | 8809 | 246 | 757 | MRLQGAIFVLLPHLGPILVWLFTRDHMSGWC |
| | | | | | | EGPRMLSWCPFYKVLLLVQTAIYSVVGYASY |
| | | | | | | LVWKDLGGGLGWPLALPLGLYAVQLTISWT |
| | | | | | | VLVLFFTVHNPGLALLHLLLLYGLVVSTALI |
| | | | | | | WHPITNKLAALLLLPYLAWLTVTSALTYHLWR |
| | | | | | | DSLCPVHQPQPTEKSD |
| 1060 | 2410 | A | 8810 | 304 | 381 | PKLSVYPLQSHHCLSEPFQSLVCCLA |
| 1061 | 2411 | A | 8820 | 1673 | 848 | SCKTENLLEMFQQGLSFLPSALVIWTSAA |
| | | | | | | FIFSYITAVTLHHTDPALPYISDTGTVAPEKCLF |
| | | | | | | GAMLNIAAVLCIATWVRYKQSPEENVI |
| | | | | | | IKLNAGLVLGILSCLGLSIVANFQKTTLFAA |
| | | | | | | HVSGAVLTFGMGSLYMFVQTILSYQMQPKIH |
| | | | | | | GKQVFWIRLLLVIWCGVSALSMLTCSSVLHS |
| | | | | | | GNPGTDLEQKLHWNPEDDKGYVLHMITTAAE |
| | | | | | | WSMSFSFFGFFLTYIRDFQKISLRVEANLHGL |
| | | | | | | TLYDTAFCPINNERTRLLSRDI |
| 1062 | 2412 | A | 8824 | 1 | 763 | GGAPPASVPARESPVSGAQGSSRTRGHKRAA |
| | | | | | | GARAPQLCSSWQRRSAPAMSRGLQLLLLSCA |
| | | | | | | YSLPATPEVKVACSEDVDLPCTAPWDPQVP |
| | | | | | | YTVSWVKLLEGGEERMETPQEDHLRGQHYH |
| | | | | | | QKGQNGSFDAPNERPYSLKIRNTTSCNSGTYR |
| | | | | | | CTLQDPDGQRNLSGKVILRVTGCPAQRKEET |
| | | | | | | FKKYRAEIVLLLALVIFYLTLIIFTCKFARLQSI |
| | | | | | | FPDPSKAGMERFLPVTSPNKHLGLVTPHKT |
| | | | | | | ELV |
| 1063 | 2413 | A | 8826 | 147 | 627 | CETSTSSAGHAPCRHAAQGPPAEPTGLRLCSE |
| | | | | | | HQRLHAWPPGPRRPSLWPPKNGKWHSGKRT |
| | | | | | | AGGRPQRRPSRRQSQRPSAWSGSPRMHSPGQ |
| | | | | | | KCSLMCPHRSQDSLSTAIFQRSPGANTGRALH |
| | | | | | | CVLSKEMKSVQRSLGLSRIILQSKRKIIHFVL |
| | | | | | | TR |
| 1064 | 2414 | A | 8835 | 2982 | 1869 | LKDTLKSQMTQEASDEAEDMKEAMNRMIDE |
| | | | | | | LNKQVSELSQLYKEAQAELEDYRKRKSLEDV |
| | | | | | | TAEYIHKAEHEKLMQLTNVSRAKAEDALSE |
| | | | | | | MKSQYSKVLNELTQLKQLVDAQKENSVSITE |
| | | | | | | HLQVITTLRTAAKEMEEK1SNLKLASKEVE |
| | | | | | | VAKLEKQLLEEKAAMTDAMVPRSSYEKLQS |
| | | | | | | SLESEVSVLASKLKESVKEKEKVHSEVVQIRS |
| | | | | | | EVSQVKREKENIQTLLKSKEQEVNELLQKFQ |
| | | | | | | QAQEELAEMKRYSESSSKLEEDKDKKINEMS |
| | | | | | | KEVTKLKEALNSLSQLSYSTSSSKRQSQQLEA |
| | | | | | | LQQQVKQLQNQLAECKKQHQEVISVYRMHL |
| | | | | | | LYAVQGQMDEDVQKVLKQILTMCKNQSQK |
| | | | | | | K |
| 1065 | 2415 | A | 8841 | 3 | 663 | AAATAASLSPRGCRLRTPSSDVGPSRAPPPSA |
| | | | | | | APLPTGRAQMSPSGRLCLLTTVGLILPTRGQTL |
| | | | | | | KDTTSSSSADATIMDLQVPTRAPDAVYTELQP |
| | | | | | | TSPTPTWPADETPQPQTQTQQLEGTDGPLVT |
| | | | | | | DPETHKSTKAAHPTDDTTTLSERPSPSTDVQT |
| | | | | | | DPQTLKPSGFHEDDPFFYDEHTLRKRGLLVA |
| | | | | | | AVLFITGIIILTSGKCRQLSRLCRNHCR |
| 1066 | 2416 | A | 8853 | 3806 | 2204 | FVGEQEGGCEAGAGRGAQTYPGEAGERWFG |
| | | | | | | RRRRRGRVVSRKKMSLKSERRGIHVDQSDLL |
| | | | | | | CKKGCGYYGNPAWQGFCSKCWREEYHKAR |
| | | | | | | QKQIQEDWELAERLQREEEEAFASSQSSQGA |
| | | | | | | QSLTFSKFEEKKTNEKTRKVTTVKKFFSASSR |
| | | | | | | VGSKKEIQEAKAPSPSINRQTSIETDRVSKEFIE |
| | | | | | | FLKTFHKTGQEIYKQTKLFLEGMHYKRDLSIE |
| | | | | | | EQSECAQDFYHNVAERMQTRGKVPPERVEKI |
| | | | | | | MDQIEKYIMTRLYKYVFCPETTDDEKKDLAI |
| | | | | | | QKRIRALRWVTPQMLCVPVNEDIPEVSDMVV |
| | | | | | | KAITDIIEMDSKRVPRDKLACITKCSKHIFNAI |
| | | | | | | KITKNEPASADDFLPTLIYIVLKGNPPRLQSNI |
| | | | | | | QYITRFCNPSRLMTGEDGYYFTNLCCAVAFIE |
| | | | | | | KLDAQSLNLSQEDFDRYMSGQTSPRKQEAES |
| | | | | | | WSPDACLGVKQMYKNLDLLSQLNERQERIM |
| | | | | | | NEAKKLEKDLIDWTDGIAREVQDIVEKYPLEI |
| | | | | | | KPPNQPLAAIDSENVENDKLPPPLQPQVYAG |
| 1067 | 2417 | A | 8855 | 1372 | 1513 | SNMREVGCGWLVPVIPAFWEAEVGGSLEARS |
| | | | | | | LRQAWATKQDPISKKK |
| 1068 | 2418 | A | 8856 | 1530 | 1583 | PCRPGMECNSMISVHCNL |
| 1069 | 2419 | A | 8857 | 1530 | 1583 | PCRPGMECNSMISVHCNL |
| 1070 | 2420 | A | 8866 | 293 | 1675 | PYPQGGYPQGPYPQEGYPQGPYPQGGYPQGP |
| | | | | | | YPQSPFPPNPYGQPQVFPGQDPDSPQHGNYQ |
| | | | | | | EEGPPSYYDNQDFPATNWDDKSLRQAFIRKVF |
| | | | | | | LVLTLQLSVTLSTVSVFTFVAEVKGFVRENV |
| | | | | | | WTYYVSYAVFFISLIVLSCCGDFRRKHPWNL |
| | | | | | | VALSVLTASLSYMVGMIASFYNTEAVIMAVG |
| | | | | | | ITTAVCFTVVIFSMQTRYDFTSCMGVLLVSM |
| | | | | | | VVLFIFAILCIFIRNRILEIVYASLGALLFTCFLA |
| | | | | | | VDTQLLLGNKQLSLSPEEYVFAALNLYTDIINI |
| | | | | | | FLYILTIIGRAKE*PSSSSLCPLRWHGWPGPCP |
| | | | | | | WHGSASCTSPLSCPQAQPREKDASLQPSCMY |
| | | | | | | TADTSIWTRCGHSMAPLVLPPPPRGTKATFPC |
| | | | | | | HLLSTHCCMSPVCQPTPGTGGSTRSRGEGLSQ |
| | | | | | | EVRVHVFPPVPAPQPGVEHPSPPPHPPGVLPS |
| | | | | | | GDMRSGGLIPVLSPE |
| 1071 | 2421 | A | 8868 | 2 | 358 | ARGNTLYHLPRLCRKLNLRWFSASTLYDVQH |
| | | | | | | DDKMGSNTFFKRNDCRYVMISCKADMAYDN |
| | | | | | | VRHPFMI*SI\KLIMEETYLNITKAVYDRPTASII |
| | | | | | | LNGEKLKVPPVRSGT*QGGSVWP |
| 1072 | 2422 | A | 8870 | 33 | 658 | MESVLSKYEDQITIFTDYLEEYPDTDELVWIL |
| | | | | | | GKQHLLKTEKSKLLSDISARLWFTYRRKFSPI |
| | | | | | | GGTGPSSDAGWGCMLRCGQMMLAQALICRH |
| | | | | | | LGRDWSWEKQKEQPKEYQRILQCFLDRKDC |
| | | | | | | CYSIHQMAQMGVGEGKSIGEWVLGPNTV\AQ |
| | | | | | | GV*KNLA\LFDEW\NSLGLVYVSM\DNPSGSIA |
| | | | | | | RFPKKLCRVLPL\SADTAGLTGP |
| 1073 | 2423 | A | 8879 | 146 | 412 | DFSV*GDVDIEVTCPICLQLLTEPLSLNCGLRL |
| | | | | | | *QVCITA*IKESVIISGG*SSSPVCHTTPQPANL |
| | | | | | | RTSRYLPT*SIKSLGPDEPQEG |
| 1074 | 2424 | A | 8884 | 67 | 435 | HLQGRSIRTLQLTGENEKNCEVSERIRRSGPW |
| | | | | | | KEISFGDYICHTFQGDCWADRSPLHEAAAHG |
| | | | | | | RLLALKTLIAQGVNVNLWTLIDRVSSLHEACL |
| | | | | | | *QPVACAKPYWKMVPRHGGTVTGPPLLMV |
| 1075 | 2425 | A | 8896 | 1294 | 248 | RSGDRNGLTHQLGGLSQGSRNQSYRSRSRSR |
| | | | | | | SRERIPSAPRGIPFASASSSVYYGSYSRPYGSDK |
| | | | | | | PWPSLLDKEREESLRQKRLSERERIGELGAPE |
| | | | | | | VWGLSPKNPEPDSDEHTPVEDEEPKKSTTSAS |
| | | | | | | TSEEEKKKKSSRSKERSKKREKKKSSKRKHK |
| | | | | | | KYSEDSDSDSDSETDSSDEDNKRRAKKAKKK |
| | | | | | | EKKKKHRSKKYKKKRSKKSRKESSDSSSKES |
| | | | | | | QEEFLENPWKDRTKAEEPSDLIGPEAPKTLTS |
| | | | | | | QDDKPLNYGHALLPGEGAAMAEYVKAGKRI |
| | | | | | | PRRGEIGLTR*RNCHHLNAQVM**VVSRHRR |
| | | | | | | MEAVRTAKREPESTVLMRREPLHPFNPRRET |
| | | | | | | KERE |
| 1076 | 2426 | A | 8899 | 146 | 789 | GRSTEAEKEPAFDERTGKGRRLPRAGEFHG*E |
| | | | | | | *APGPGPRSFQVSRKMPEE\PPGARKHPFSGKS |
| | | | | | | FYLDLPAGKNLQFLTGAIQQLGGVIEGFLSKE |
| | | | | | | VSYIVSSRREVKAESSGKSHRGCPSPSPSEVR |
| | | | | | | VETSAMVDPKGSHPRPSRKPVDSVPLSRGKE |
| | | | | | | LLQKAIRNQK**CTVQQLSHCRLY\GEKTTAK |
| | | | | | | RSQREHVQQQSQEHGKWPDLKGPR |
| 1077 | 2427 | A | 8901 | 352 | 3 | AKIGAYKYIQELWRKKQSDVMHFLLRVRCW |
| | | | | | | QYPALHRAGTEWQLSALHRAPRSTQPDKAC |
| | | | | | | RLGYKAKQGYIIYRICVRRGGWKCPVPKAVT |
| | | | | | | \YGKPVHHGVN*LKFAQSLQSVAEEQ |
| 1078 | 2428 | A | 8905 | 536 | 781 | ACPAENREVPEMAAGQAPHAGPGAGPGQPA |
| | | | | | | PALPFAATPGSRGQALCRGGRRRQHLHGPLH |
| | | | | | | RP*QAAPALHAGCQLAPHPPT |
| 1079 | 2429 | A | 8912 | 121 | 376 | NLIWKLCVTERRLVILDNYDLASE/YEANKYI |
| | | | | | | CNRIIQFKPGQDKYFTLGLPTGSTPL*CYPKLI |
| | | | | | | EYNKNGHLSFKYVKTFSMDEY |
| 1080 | 2430 | A | 8920 | 381 | 1788 | SSESPSDPGRMAIVITWIVFSLWPLTVFMGHIG |
| | | | | | | GHSLFSCEPITLRMCQDLPYNFIFMPNLLNHY |
| | | | | | | DQQTAALAMEPFHPMVNLDCSRDFRPFLCAL |
| | | | | | | YAPICMEYGRVTLPCRRLCQRAYSECSKLME |
| | | | | | | MFGVPWPEDMECSRFPDCDEPYPRLVDLNLA |
| | | | | | | GEPTEGAPVAVQRDYGFWCPRELKIDPDLGY |
| | | | | | | SFLHVRDCSPPCPNMYFRREELSFARYFIGLIS |
| | | | | | | IICLSATLFTFVTFLITDVTRFRYPERPIKCYAV |
| | | | | | | WHMMVSLIFF\IGFLLEDRVACNA\STPAQYKA |
| | | | | | | STVTQGSHNKACTMLFMILYFFTMAGSVWW |
| | | | | | | VILTITWFLAAVPKWGSEAIEKKALLFHASA |
| | | | | | | WGIPGTLTTILLAMNKIEGDNISGVCFVGLYD |
| | | | | | | VDALRYFVLAPLCLYVVVGVSLLLAGIISLNR |
| | | | | | | VRIEIPL*KENQDKLVKFMIRIGVFSILYLVPLL |
| | | | | | | VVIGCYFYEQAYRGIWTTWIQERC |
| 1081 | 2431 | A | 8922 | 56 | 420 | EERTKMSTGPDVKATVGDISSDGNLNVAQEE |
| | | | | | | CSRKGIVDEFFPLLSN*CIWTQPQGYPQSSYG |
| | | | | | | TLANFVF\CSVRHGLALILQLCNFSIYTQQMN |
| | | | | | | LSIAIPAMVNNTAPPSQPNASTERPST |
| 1082 | 2432 | A | 8923 | 355 | 1079 | PFQWSSTMAVVKNKCLMKGGKKGVKKKVV |
| | | | | | | GPFSKKDQYDVKAPAMNIRNTGK/TLVART |
| | | | | | | QGTQIASDGLKGLLFEVSLADLQNDEVAFRK |
| | | | | | | FKLITEDVQDKNCLTNFYGMDLTCDKICSMV |
| | | | | | | EKWSTMIEAHVDVKTTDGYFFHLFCVGFTKK |
| | | | | | | HNNQILKTSYA*HQQS/RQIQKKMMEIMT*EV |
| | | | | | | QTNDLKEVVNKLIPDNIGKDTEKV/CPWPLH |
| | | | | | | DVFIRKVKMLENPGFER\MELRGGGSSS |
| 1083 | 2433 | A | 8948 | 28 | 385 | LTWPQPHIPSCPAMSEETLQSKLAAAKKKLP |
| | | | | | | WGAVQGSRAMSDLLLLLLDLTLLLLLMLLGF |
| | | | | | | AGYSGQLAGVAVSAGSPPI/RYKFHVEPYGET |
| | | | | | | GWLLT/ESCSISPKLCSIAVH*DNPAWF |
| 1084 | 2434 | A | 8950 | 156 | 318 | HYTPINTDTIENSENNKCW*GY*E\VGLIHHW |
| | | | | | | WGGKRVQPFWKRVWQKRTLNLRV |
| 1085 | 2435 | A | 8956 | 16 | 413 | HMGQLGYFIQCWWECKRLISF\WKTI*QSPAK |
| | | | | | | *TTTSYDTAIPIS/GI/YPKRMSSKCHQETCAR |
| | | | | | | MFILAPFTATIKGKQLTCPLVEERIDY\MWYS |
| | | | | | | HKYYIKVKRNL*VTTTH\TWVNLNILMFEILLW |
| | | | | | | YSHKYY |
| 1086 | 2436 | A | 8962 | 868 | 1026 | H*KILQVGRAQRAHKSRL*SQLLRRLRHESHL |
| | | | | | | NPGARGCSEARLHRCTPAVPIT |
| 1087 | 2437 | A | 8985 | 58 | 330 | LHVKHLGHFQLVFSEVICHCILMPVS*ELQRL |
| | | | | | | *ERSVCAFHVCIQTWCLQVYACMCVYYICM |
| | | | | | | FVYSVYGCGLCTCVCMDVYICVCVQEFL |
| 1088 | 2438 | A | 8989 | 394 | 404 | N*KWILHVNVRIQSIFF/IKRNQK/INSHELKLD |
| | | | | | | KKFLDMMSNA*STKKIIDKLD/LIKFKT/LCSA |
| | | | | | | KYTVKRIKIHPTDLEKMLPNHLSDKD*YS/GV |
| | | | | | | YKDLSKLNRRKTE/S*/VKKWVKDLSRYFIKE |
| | | | | | | VISMENKHKKIPSTS |
| 1089 | 2439 | A | 8991 | 60 | 329 | MALTPESPSSFPGLAATGSSVPEPPGGPNATL |
| | | | | | | NSSWDSPTEPSSLEDLEATGTIGTLLSDMGVV |
| | | | | | | GVEDNAYTLEVNSRYMRAVGIM*IHL |
| 1090 | 2440 | A | 8996 | 2 | 351 | SNTTITLT*MKKYDNTFCW*GCGQIG/T/LIYC |
| | | | | | | WQESKFIQAFWSKIQQYLA*ISIHILFDPAFLFL |
| | | | | | | GGYPGGTQSVFLTGVLVSSVFYNMKMLHTR |
| | | | | | | LLIAALFUVQYWKQSKDHYI |
| 1091 | 2441 | A | 8997 | 97 | 456 | YPLPVCSYLSGPRGEHWNSLGGKSSCPLPLPT |
| | | | | | | LVSSRFKISKVIVVGDLSVGKTCLNR*GGAG |
| | | | | | | AELGRVGPSLARWAGSRSQHLVPSQ\VCKDS |
| | | | | | | FDKNYKAPIGADFEMERFEVLGIPF |
| 1092 | 2442 | W | 8999 | 548 | 811 | SSFIKRHILIFEDDWHQTTCCHHPHHP\F*RCQ |
| | | | | | | FHIFYVSVQNSISPSLSVSSSHPDRPDHEVHQH |
| | | | | | | RAAHHHQHGQGPLGHGLVARVG |
| 1093 | 2443 | A | 9002 | 3 | 2745 | ALLGLQQPAQSLILSRSSVMGVRGLQGFVGS |
| | | | | | | TCPHICTVVNFKELAEHHRSKYPGCTPTWVD |
| | | | | | | AMCCLRYWYTPESWICGGQWREYFSALRDF |
| | | | | | | VKTFTAAGIKLIFFFDGMVEQDKRDEWVKRR |
| | | | | | | LKNNREISRIFHYIKSHKEQPGRNMFFIPSGLA |
| | | | | | | VFTRFALKTLGQETLCSLQEADYEVASYGLQ |
| | | | | | | HNCLGILGEDTDYLIYDTCPYFSISELCLESLD |
| | | | | | | TVMLCREKLCESLGLCVADLPLLACLLGNDH |
| | | | | | | PEGMFESFRYKCLSSYTSVICENFDKKGNIILA |
| | | | | | | VSDHISKVLYLYQGEKKLEEILPL/VTKQSSFL |
| | | | | | | *RNGIISFTRT/INLHGFSKNPKV**LWTNK*YP |
| | | | | | | RVQTPNPGKKFPCVQMLNPGKKFPCVQALNP |
| | | | | | | GEKFPCIHI/PEPRQEVPTCSDPEPRQEVPTCTG |
| | | | | | | PESRREVPMCSDPEPRQEVPMCTGPEFRQEVP |
| | | | | | | MCTGPEARQEVPMCTDSEPRQEVPMCTDSEP |
| | | | | | | RQEVPMYTGSEPRQEVPMYTGPESRQEVPMY |
| | | | | | | TGPESRQEVLIRTDPESRQEIMCTGHESKQEV |
| | | | | | | PICTDPISKQEDSMCTHAEINQKLPVATDFEFK |
| | | | | | | LEALMCTNPEIKQEDPTNVGPEVKQQVTMVS |
| | | | | | | DTEILKVARTHHVQAESYLVYNIMSSGEIECS |
| | | | | | | NTLEDELDQALPSQAFIYRPIRQRVYSLLLED |
| | | | | | | CQDVTSTCLAVKEWFVYPGNPLRHPDLVRPL |
| | | | | | | QMTIPGGTPSLKILWLNQEPEIQVRRLDTLLA |
| | | | | | | CFNLSSSREELQAVESPFQALCCLLIYLFVQV |
| | | | | | | DTLCLEDLHAFIAQALCLQGKSTSQLVNLQP |
| | | | | | | DYINPRAVQLGSLLVRGLTTLVLVNSACGFP |
| | | | | | | WKTSDFMPWNVFDGKLFHQKYLQSEKGYA |
| | | | | | | VEVL/CRTK*ISAHQIPQPEGSRLQGLHEGEQT |
| | | | | | | HHWPSPLGLTPRREVGKTGLQLPQDGLWV |
| 1094 | 2444 | A | 9021 | 97 | 834 | AREAGRAKTDFPGRRFRLWPSGCCRVIVGAE |
| | | | | | | T*H\MAEPVSPLKHFVLAKKAITAIFDQLLEFV |
| | | | | | | TEGSHFVEATYKNPELDRIATEDDLVEMQGY |
| | | | | | | ICDKLSHGEVLSRRHMKVAFFGRTSSGKSSVI |
| | | | | | | NAMLWDKVLPSGIGHITNCFLSVEGTDGDKA |
| | | | | | | YLMTEGSDEKKSVKTVNQLAHALHMDKDLK |
| | | | | | | AGCLVRVFWPKAKCALLRDDLVLVDGPGTD |
| | | | | | | VTTELDSWLDKFCTKSSTREITNSGSDT |
| 1095 | 2445 | A | 9022 | 1 | 537 | LVLNSRVEDFVPPEGAGRTLPFALRPLAACW |
| | | | | | | LLHRRARRSSALCPRPRSWGVSGGEGAGARE |
| | | | | | | P*ITSSSCCLSAAISHISIQSPNMAGARRRIRPQ |
| | | | | | | LAKEKIEGCHICTSVTPGEPQVFLGKDKAFTF |
| | | | | | | DYVFDIDSQQEQIYIQCIEKLIEGCFEGYNATV |
| | | | | | | FAYGQT\GAGKTYTMGTGFD |
| 1096 | 2446 | A | 9029 | 1 | 285 | FFFFNVCKSPKVPKPGCKEESTGTLFKNTLISL |
| | | | | | | GQHSETPSLKKK\LAGYSGMCL*SQVLRRLRQ |
| | | | | | | EDCLSPGGGNCRES*SCPYTPAWITERDPV |
| 1097 | 2447 | A | 9032 | 716 | 357 | ARSTGFWGEILWCGFLKRSLALSPRVKGSGAI |
| | | | | | | LAHCNFRHAGFPPLSCLSLPNRWEYRRPPARP |
| | | | | | | GKFFLVFLVETGFQC/G*DGLDLLTSRSACLG |
| | | | | | | LPKCWDYRREPAASIIFQTTFFINSK |
| 1098 | 2448 | A | 9038 | 230 | 652 | KVVVMSCEDTNISGSFYRNKLKYLAFLCKRTS |
| | | | | | | TNPSQGPYHLWVPSHIFWQTTCGRLPHKTKQ |
| | | | | | | G*AALDHLKVFDRIPLPYDKKKQMAVSATLE |
| | | | | | | VVRPKP*RKFAYLGHWAQKVDWKYQAMTA |
| | | | | | | TMGEKRKVYYQKICYQKK |
| 1099 | 2449 | A | 9043 | 185 | 372 | IIFYSHQQCMRV/WQGCGDIETLIHCW*E*KII |
| | | | | | | HSL/WK/TV*QFLKRLYLHLPHNSVIAFLGISP |
| | | | | | | RKIKTCPQNSCTSMLTNAIHNDQKWKKINI |
| 1100 | 2450 | A | 9045 | 763 | 584 | RQSLALSPRLECSCITISAHCRLCPLVFTPLSCL |
| | | | | | | SLTSSWDYRRPPPHPANFLYFK*RRGF |
| 1101 | 2451 | A | 9050 | 275 | 2 | LFFLRKVSNQFLSPSLLPVNFQGPVFAFLLLLL |
| | | | | | | FLL/FEMESLPVA/RVECSGTISAHCNLCLPGSS |
| | | | | | | DSPASAS*VAQITDMCRYTQLILFHAS |
| 1102 | 2452 | A | 9053 | 449 | 1224 | KTSMFWKFDLHSSSHIDTLLEREDVTLKELM |
| | | | | | | DEEDVLQECKAQNRKLIEPLLKAECLEDLVSF |
| | | | | | | I\*EEPPQDMDEKIRYKYPNISCELLTSDVSQM |
| | | | | | | NDRLGEDESLLMKLYSFLLNDSPLNPLLASFF |
| | | | | | | SKVLSILISRKPEQIVDFLKKKHDFVDLIIKHIG |
| | | | | | | TSAIMDLLLRLLTCIEPPQPRQDVLN/WFKVQ |
| | | | | | | RNL*HST*NVMDISKYVNLHWGLNKSHSLL* |
| | | | | | | LLLQCVLQWLNEEKIIQRLVEIVLIPSQEEDVS |
| | | | | | | SLV |
| 1103 | 2453 | T | 9058 | 403 | 3 | GLHVYDFQVYREHILTLNVKKCSVSFWGLRE |
| | | | | | | WLYLQMYEKSPRFPIIKMTDITKCW*GC\GA |
| | | | | | | AGMQI/H/CW\WCVNVGKFWEMS*YYLLKLSI |
| | | | | | | ST/PYDPAIPLLGIYL*ETRVYIHPKTCMRMLIA |
| | | | | | | APFVLAVNG |
| 1104 | 2454 | A | 9064 | 75 | 393 | KWLFSSLNITGRGDIIGHLKWLDCR\NCSSFPI |
| | | | | | | KRNRQTHSTESNKLKAGHSFGYN*LIH*NS\V |
| | | | | | | KTDCGCGANSKGVVVVMKV\KTAQQKQTTS |
| | | | | | | YMQIGTTKNSRAT |
| 1105 | 2455 | A | 9065 | 366 | 778 | DLLILRNLAFPELKRRNCISRFYLAYHLHKIYS |
| | | | | | | RSILLCNNCSGFYILSL*QYDVFFFNYFFFRDR |
| | | | | | | AWPCCPGWSAAWLTIYILAHYRRPGLERSCC |
| | | | | | | LSLSSSWDITRRVPPCPANF*IYFSMGFTAFPRL |
| | | | | | | VLNS*TQGI |
| 1106 | 2456 | A | 9083 | 673 | 816 | ESGSLLH*WWENKPAQPLWWEI*QHVQKLPT |
| | | | | | | HFPCDPAIPLLGICPED |
| 1107 | 2457 | A | 9086 | 580 | 18 | KPSSGSFIRAIYIFLSTAHVPALFSVLVRTKLT* |
| | | | | | | AFSQSSVLWAHKQQKTSLSLVIRIERLQIKTA |
| | | | | | | VRENFLPIRLAKILKLDNVKCWQG/SGSNMSL |
| | | | | | | UHCWWEYNVIHIIWNSVTFPRKVEHVYITYA |
| | | | | | | PEISVR*IHGGLPTLVHQETHTSVFRGAPSVIP |
| | | | | | | ETR\CRPTKESINKLLHIYTMEHYGDENK |
| 1108 | 2458 | A | 9093 | 540 | 1 | GGNDCSVTPTTEPGRKEIT*KRKF*EKTDRLP |
| | | | | | | GAIPPSRTPPTPYPCPHGDRLLPPSRPLPAGPA |
| | | | | | | SAFPPAERSRGHRRASL*RARWSAAVPRRSA |
| | | | | | | GSASEPVQSRWLRLPVGSDSPPAVPVRVCPAP |
| | | | | | | DSRPAAPGSRLPDPGLDSPAPSRTPSSSVD*GG |
| | | | | | | QRPPPPSGDSLSPPGCCRY |
| 1109 | 2459 | A | 9099 | 1255 | 1425 | HESYHVNPNLCNPVAPTSGAHSIG*KWFSWL |
| | | | | | | GAVAHSCNPSTLVGRGGRITRGQELR |
| 1110 | 2460 | A | 9103 | 242 | 70 | EEQFFFFAVGMFP*VDFLAPASGELWDRLRLT |
| | | | | | | CSRPFTRHQSFGLAFLRVCSSLDSLDDSVVGP |
| | | | | | | SALLSSVUNQGGRNVLEAREAAKHFTI*RQS |
| | | | | | | LLRKQRNKRMAIP |
| 1111 | 2461 | A | 9110 | 189 | 121 | SFLSVRLECNGAIMAHCALPLPG |
| 1112 | 2462 | A | 9113 | 100 | 910 | RRRGGGSRPRRTPVPAPGPGPSFGMDVRFYP |
| | | | | | | AAAGDPASLDFAQCLGYYGYSKFGNNNNYM |
| | | | | | | NMAEANNAFFAASEQTFHTPSLGDEEFEIPPIT |
| | | | | | | PPPESDPALGMPDVLLPFQALSDPLPSQGSEFT |
| | | | | | | PQFPPQSLDLPSITISRNLVEQDGVLHSSGLHM |
| | | | | | | DQSHTQVSQYRQDPSLIMR\PSST*PDAARSG |
| | | | | | | VMPPAQLTTINQSQLSAQLGLNLGGASMPHT |
| | | | | | | SPSPPASKSATPSPSSSINEEDADEANRAIGEK |
| | | | | | | RAAPDSGKKPKTPKK |
| 1113 | 2463 | A | 9120 | 3452 | 3051 | FLRFSFALVPQAGVQWCALSWLQPPSPRFK*F |
| | | | | | | SCLSLPSSWDYRRVPPRPANFFVLLVETGFLH |
| | | | | | | VGQAGHEPLTSGDPPASASQSAGITGVSHQA |
| | | | | | | WPSFFIFSRDTVLLCCSGWSRTSGLKQSACLS |
| | | | | | | LLKCWDY |
| 1114 | 2464 | A | 9122 | 152 | 377 | NQLPLQQWTFFIYETGFCSVAQAGVQCRDHS |
| | | | | | | SLHF*PPG\SSDPPAPPS*VLGITGQRYIIACLII |
| | | | | | | YLYVQTVPQRV |
| 1115 | 2465 | A | 9124 | 553 | 981 | QRPLLRQQLGSWPTCRSLEGDLASPW**RLPG |
| | | | | | | SPRMRRSGT/ATLNLPLSPQGTVRTAVEFQVM |
| | | | | | | TQTQSLSFLLGSSASLDCGFSMAPGLDLISVE |
| | | | | | | WRLQHKGRGRGDLHLPDHHLSVPSSADTIFA |
| | | | | | | QQPSQFNGRNLYFLPLFR |
| 1116 | 2466 | A | 9135 | 48 | 410 | SASHEPAEHDGGADSLSASQPPRPAGRPAGA |
| | | | | | | QHVHVPPWTDVLAGQDRRAPTAGDGAPWP |
| | | | | | | APGGHVPSTRPHDPAEFHADEAAGRGGRGLQ |
| | | | | | | PAAPHALPAGLFHGPPAPAIPAEGGGTP*GSA |
| | | | | | | GAGGP*GSPAGRACGAAGCRPRPPRPAASSA |
| | | | | | | *NSAGS*GLVEGT*PPGAGHGAPSPAVGARLS |
| | | | | | | CPARTSVQGGTWTC*APAGRPAGLGGWEAE |
| | | | | | | RESAPPSCSAGS*DAD*GAEPWGAGSRSWGS |
| 1117 | 2467 | A | 9141 | 380 | 939 | KSGHWAKECLQPRIPPRPCPICVGPHWKSDCP |
| | | | | | | TCPGAVPRAPGTLPQGSLTDSFPDLLSLVAED |
| | | | | | | *CCLMASEASWTTT\ELWVTLTVEGKSKTP/CL |
| | | | | | | NTEATHSTLPSFQGPVSLASITVVGIDGQASKP |
| | | | | | | LKTPQLWCQLGQYSPMHYFLVIPTCPVPLLG* |
| | | | | | | GILTKLSAFLTIPRLQPHLIAALSPSS |
| 1118 | 2468 | A | 9154 | 471 | 2 | AAGQVVVEVTSHLYLCITSDAAGLRLLPPAES |
| | | | | | | ERGEGGHCPAEAPLPPRPQYCLAKHPLLRKLP |
| | | | | | | EEKIKLDPYLTQHTKINSKQIKYLS/VRAKTTQ |
| | | | | | | LVEGNIGVNLQNTELKQH*INGFLDTTPEAQE |
| | | | | | | TKEKTNKLNFIKKVKRQLAEWEKIFQIA |
| 1119 | 2469 | A | 9155 | 2 | 3187 | ACPRLARRRRRVRSLRRRRGWLRARWSRGQ |
| | | | | | | NNMAARRITQETFDAVLQEKAKRYHMDASG |
| | | | | | | EAVSETLQFKAQDLLRAVPRSRAEMYDDVHS |
| | | | | | | DGRYSLSGSVAHSRDAGRESLRSDVFSGPSFR |
| | | | | | | SSNPSISDDSYFRKECGRDLEFSHSNSRDQVIG |
| | | | | | | HRKLGHFRSQDWKFALRGSWEQDFGHPVSQ |
| | | | | | | ESSWSQEYSFGPSAVLGDFGSSRLIEKECLEK |
| | | | | | | ESRDYDVDHPGEADSV/LRGGSQVQARGRAL |
| | | | | | | NIVDQEGSLLGKGETQGLLTAKGGVGKLVTL |
| | | | | | | RNVSTKKIPTVNRITPKTQGTNQ1QKNTPSPD |
| | | | | | | VTLGTNPGTEDIQFPIQKIPLGLDLKNLRLPRR |
| | | | | | | KMSFDIIDKSDVFSRPGLEHKWAGFHTIKDDIK |
| | | | | | | FSQLFQTLFELETETCAKMLASFKCSLKPEHR |
| | | | | | | DFCFFTIKFLKHSALKTPRVDNEFLNMLLDKG |
| | | | | | | AVKTKNCFFEIIKPFDKYIMRLQDRLLKSVTP |
| | | | | | | LLMACNAYELSVKMKTLSNPLDLALALETTN |
| | | | | | | SLCRKSLALLGQTPSLASSFRQEKIL*AVGLQ |
| | | | | | | DIAPSPAAFPNFEDSTLFGREYDHLKAWLVS |
| | | | | | | SGCPLQVKKAEPEPMREEEKMIPPTKPEIQAK |
| | | | | | | APSSLSDAVPQRDHRVVGTIDQLVKRVIEGS |
| | | | | | | LSPKERTLLKEDPAYWFLSDENSLEYKYYKL |
| | | | | | | KLAEMQRMSENLRGADQKPTSADCAVRAML |
| | | | | | | YSRAVNLKKKLLP\WQRRGLLRAQG\LRG\ |
| | | | | | | WKARRAVITQTQTLLFLRAFGLKHHGRQAPG |
| | | | | | | LSQAKPSLPDRNDAAKDCPPDPVGPSPQDPSL |
| | | | | | | EASGPSPKPAGVDISEAPQTSSPCPSADIDMKT |
| | | | | | | METAEKLAEFVAQVGPEIEQFSIENSTDNPDL |
| | | | | | | WFLHDQNSSAFKFYRKKVFELCPSICFTSSPH |
| | | | | | | NLHTGGGDTTGSQESPVDLMEGEAEFEDEPP |
| | | | | | | PREAELESPEVMPEEEDEDDEDGGEEAPAPG |
| | | | | | | GAGKSEGSTPADGLPGEAAEDDLAGAPALSQ |
| | | | | | | ASSGTCFPRKRISSKSLKVGMIPAPKRVCLIQE |
| | | | | | | PKGECPPVGTVASSTVLGWWAVRVRRDRWR |
| | | | | | | HFNPKEFCAPLQNVSRHSCFPVV |
| 1120 | 2470 | A | 9163 | 124 | 207 | PPRACRPCPRACPCPPT*KCSQPVSWPC |
| 1121 | 2471 | A | 9166 | 272 | 523 | PMSSLQGCFYTFKCLIFKGLFLLLISNLIAF**EK |
| | | | | | | V/CSHITDSLKFIGKGWVGMVTHACNPGTLG |
| | | | | | | G*GGWIA*VREFETSLGNM |
| 1122 | 2472 | C | 9170 | 442 | 236 | MNRRRFLRPADCHSGMRGTENGACSEGESQI |
| | | | | | | HCGAGGEGVQLVHVVNQPENGCLQFDSTHIT |
| | | | | | | FSKRQN* |
| 1123 | 2473 | A | 9171 | 10 | 423 | MVDRSPLLTSVIIFYLAIGAAIFEVLEEPHWKE |
| | | | | | | AKKNYYTQKLHLLKEFPCLGQEGLDKILEVV |
| | | | | | | SDAAGQGVAITGNQTFNNWNWPNAMIFAAT |
| | | | | | | VITTIGYGNVASKTPGGRLFCGFYGLFGVPFC |
| | | | | | | LTWINALGKPFG |
| 1124 | 2474 | A | 9173 | 3 | 374 | GPSPSLLVLLPQEPGGTGTPVRAGAGAGMWL |
| | | | | | | WEDQGGLLGPFSFLMLMLLLETRNPVNACLL |
| | | | | | | TGSLFVLLGVFSFEPVPSCRALQELKPRDRISA |
| | | | | | | IAHRGGRHDPPENTLGAIRIQGS**WSNRR |
| 1125 | 2475 | A | 9179 | 704 | 188 | ESSSGLLFQCFQCIHVQKLTLQARPTLFSWWL |
| | | | | | | CSKPPKETGELENAESGGDGGRRGGKQDNV |
| | | | | | | AWWRRM\QKG\DFPWDDEDFPQSGPFGGQA |
| | | | | | | LPMGFFYLYFRDPGRETTWKKFVQYYLARGL |
| | | | | | | VDRLEVVNKQSVRVIPAPGTSSEVRGEFKAE |
| | | | | | | YCRRKFISCKNVVFYFFQ |
| 1126 | 2476 | A | 9183 | 153 | 233 | MEYMAESTDRSPGHILCCECGVPISPN |
| 1127 | 2477 | A | 9185 | 1 | 321 | LTGQLGSILLRVFSKSRAGLGARKLKAYRTM |
| | | | | | | EYMAESTDRSPGHILCCECGVPISPNPAQY\CV |
| | | | | | | ACLRSSFHIYHCIPKLFIHPFSKTSSSAFITPSHY |
| | | | | | | LTFFSTIS |
| 1128 | 2478 | A | 9186 | 183 | 847 | VLKFLLLQTMDEQSQGMQGPPVPQFQPQKAL |
| | | | | | | RPDMGYNTLANFRIEKKIGRGQ\FSEVYRAAC |
| | | | | | | L\LDGVPVALKKVQIFDLMDAKARADCIKEID |
| | | | | | | LLKQLNHPNVIKYYASFIEDNELNIVLELADA |
| | | | | | | GDLSRMIKHFKKQKRLLPERTVWKYFVQLCS |
| | | | | | | ALEHMHSRRVMHRDIKPANVFITATGVVKLG |
| | | | | | | DLGLGRFFSSKLAAHSLVGTPYYMSPERIHD |
| | | | | | | NG |
| 1129 | 2479 | A | 9190 | 1 | 370 | GTSWKIPSAAVSESSPNGAAYASGLPCGVRG |
| | | | | | | PPWAGLALLPSPTLMALLRRPTVSSDLDNIDT |
| | | | | | | RATT\KIRVVATITRARIEDMRLHSATALTRPD |
| | | | | | | ATTAQIPKLPVTTVCNRRANPGIPPSVL |
| 1130 | 2480 | A | 9194 | 131 | 487 | AYLKRLPVPESLTGFAIRLTVSEWLRLLPFLGV |
| | | | | | | LALLGYLAVRPFLPKKKQQKDSLINLKIQKEN |
| | | | | | | PKVVNEINIEDLCLTKAAYCRCWRSKTFPAC |
| 1131 | 2481 | A | 9201 | 184 | 605 | KELVDEKSERGRAMDPVSQLASAGTFRVLKE |
| 1132 | 2482 | A | 9206 | 1 | 852 | GGGRAGAGSRDMGSTDSKLNFRKAVIQLTTK |
| | | | | | | TQPVEATDDAFWDQFWADTATSVQDVFALV |
| | | | | | | PAAEIRAVREESPSNLATLCYKAVEKLVQGA |
| | | | | | | ESGCHSEKEKQIVLNCSRLLTRVLPYIFEDPD |
| | | | | | | WRGFFWSTVPGAGRGGQGEEDDEHARPLAE |
| | | | | | | SLLLAIADLLFCPDFTVQSHRRSTVDSAEDVH |
| | | | | | | SLDSCEYIWEAGVGFAHSPQPNYIHDMNRME |
| | | | | | | LLKLLLTCFSEAMYLPPAPESWQHIRTHWFSS |
| | | | | | | FVSSENRHALPLFTSLLNTVCAYDPVEYGIPY |
| | | | | | | NELY |
| 1133 | 2483 | A | 9208 | 1165 | 1463 | GPRARVQGFSGADIVKFMALGSMYLVLTLIV |
| | | | | | | AKVLRGAEPCCGPLKNRVLRPCPLPIVPLPPP |
| | | | | | | HPQPSRGNPVGCLPTYKVVYKLLSWPLHSNS |
| | | | | | | NVYFIV |
| 1134 | 2484 | A | 9210 | 66 | 1586 | MAGAGPKRRALSAPVAEEKEEAREKIMAAK |
| | | | | | | RADGAAPAGEGEGVTLQGNITLLKGVAVIVV |
| | | | | | | AIMGSGIFVTPTGVLKEAGSPGLALVVWAAC |
| | | | | | | GVFSIVGALCYAELGTTISICSGGDYAYMLDV |
| | | | | | | YGSLPAFLKLWIELLIIRPSSQYIVALVFATYL |
| | | | | | | LKPLFPTCPVPEEAAKLVACLCVLLLTAVNC |
| | | | | | | YSVKAATRVQDAFAAAKLLALALIILLGFVQI |
| | | | | | | GKGDVSNLDPNFSFEGTKLDVGNIVLALYSG |
| | | | | | | LFAYGGWNYLNFVTEEMINFYRNLPAIIISLP |
| | | | | | | IVTLVYVLTNLAYFTTLSTEQMLSSEAVAVDF |
| | | | | | | GNYHLGVMSWIIPVFVGLSCFGSVNGSLFTSS |
| | | | | | | RLFFVGSREGHLPSILSMIHPQLLTPVPSLVFT |
| | | | | | | CVMTLFYAFSKDIFSVINFFSFFNWLCVALAII |
| | | | | | | GMIWLRHRKPELERPIKVNLALPVFFILACLF |
| | | | | | | LIAVSFWKTTPWSVASDFTIILSGLPVYFFGV |
| | | | | | | WWKNKPKWAPPGHLSPRIPSCVRSSCMVVPQ |
| 1135 | 2485 | A | 9216 | 40 | 410 | RDRLPPAYFCRPVVCVVTALDVG\SPESQEM |
| | | | | | | DLVAFEDVAVNFTQEEWSLLDPSQKNLYREV |
| | | | | | | MQETLRNLASIGEKWKDQNIEDQYKNPRNNL |
| | | | | | | RSLLGERVDENTEENHCGETSSQIPDDTLNK |
| 1136 | 2486 | A | 9223 | 3 | 983 | RRRRRSRYRRCSRFPRPGPLAVSMPHAFKPG |
| | | | | | | DLVFAKMKGYPHWPARIDDIADGAVKPPPN |
| | | | | | | KYPIFFFGTHETAFLGPKDLFPYDKCKDKYGK |
| | | | | | | PNKRKGFNEGLWEIQNNPHASYSAPPPVSSSD |
| | | | | | | SEAPEANPADGSDADEDDEG\RGVMAVTAVT |
| | | | | | | ATAASDRMESDSDSDKSSDNSGLKRKTPALK |
| | | | | | | MSVSKRARKASSDLDQASVSPSEEENSESSSE |
| | | | | | | SEKTSDQDFTPEKKAAVRAPRRGPLGGRKKK |
| | | | | | | APSASDSDSKADSDGAKPEPVAMARSASSSSS |
| | | | | | | SSSSSDSDVSVKKPPRGRKPAEKIPLPKPRGRK |
| | | | | | | PKPERPPSSSSSD |
| 1137 | 2487 | A | 9229 | 21 | 239 | LFPRLECRDPVTVNCTLNLPGSKNAPTTASQV |
| | | | | | | GSTWNYRGGLPHPTNFFVKTGFRCSQAGLKL |
| | | | | | | RGSRLEPPAWA |
| 1138 | 2488 | A | 9231 | 1664 | 2 | TRSVGVNTCEVGVVTEPECLGPCEPGTSVNL |
| | | | | | | EGIVWHETEEGVLVVNVTWRNKTYVGTLLD |
| | | | | | | CTKHDWAPPRECESPTSDLEMRGGRGRGKR |
| | | | | | | ARSAAAAPGSEASFTESRGLQNKNRGGANGK |
| | | | | | | GRRGSLNASGRRTPPNCAAEDIKASPSSTNKR |
| | | | | | | KNKPPMELDLNSSSEDNKPGKRVRTNSRSTP |
| | | | | | | TTPQGKPETTFLDQGCSSPVLIDCPHPNCNKK |
| | | | | | | YKHINGLRYHQAHAHLDPENKLEPEPDSEDK |
| | | | | | | ISDCEEGLSNVALECSEPSTSVSAYDQLKAPA |
| | | | | | | SPGAGNPPGTPKGKRELMSNGPGSIIGAKAGK |
| | | | | | | NSGKKKGLNNELNNLPVISNMTAALDSCSAA |
| | | | | | | DGSLAAEMPKLEAEGLIDKKNLGDKEKGKK |
| | | | | | | ANNCKTDKN\PSKLKSARPIAPAPAPTPPQLIA |
| | | | | | | IPTATFTTTTTTGTIPGLPSLTTTVVQATPKSPPL |
| | | | | | | KPIQPKPTIMGEPITVNPALVSLKDKKKKEKR |
| | | | | | | KLKDKEGKETGSPKMDAKLGKLEDSKGASK |
| | | | | | | DLPGHFLKDHLNKNEGLANGLSESQESRMAS |
| | | | | | | IKAEADKVYTFTDNAPSPSIGS |
| 1139 | 2489 | A | 9234 | 207 | 443 | TRRGQPWRRRAAAAGILPGREAAACLPSC/AS |
| | | | | | | VTAAVSGLLVGYELGIISGALLQIKTLLALSC |
| | | | | | | HEQEMGVSSLVIGALL |
| 1140 | 2490 | A | 9238 | 248 | 328 | MAQGNNYGQTSNGVADESPNMLVYRKV |
| 114 | 12491 | A | 9242 | 2 | 535 | FVEAAVKMLGSLVLRRKALAPRLLLRLLRSP |
| | | | | | | TLRGHGGASGRNVTTGSLGEPQWLRVATGG |
| | | | | | | RPGTSPALFSGRGAATGGRQGGRFDTKCLAA |
| | | | | | | ATWGRLPGPEETLPGQDSWNQVPSRAGLGM\ |
| | | | | | | WPWAAALVVHCYSKSPSNKDAALLEAARAQ |
| | | | | | | \NMQEVSRNRCALLHSAAVQEYGYGN |
| 1142 | 2492 | A | 9245 | 157 | 466 | HLCFWFFVGLFLPEQQIMLFATLLRMAQGCD |
| | | | | | | PALGNDFLNITTKAQA/TKEKLDKLDFIKIKTC |
| | | | | | | CTSMDAIEKTEPLTKWTKAFVSHVSYKRLLF |
| | | | | | | GICKEYSRQ |
| 1143 | 2493 | A | 9247 | 264 | 115 | GLPQQTSTIQPPGTPDGARDFTSTIQPPGAPDG |
| | | | | | | ARDSTSIIRMGPEIPPP |
| 1144 | 2494 | A | 9260 | 1 | 401 | KKVPGRLSEMSFSLNFTLPANTTSSPVT\DCGP |
| | | | | | | SLGLAAGIPLLVATALLVALLFTLIHRRRSSIE |
| | | | | | | AMEESDRPCEISEIDDNPKISENPRRSPTHEKN |
| | | | | | | TMGAQEAHIYVKTVAGSEEPVHDRYRPTIEM |
| | | | | | | ERRR |
| 1145 | 2495 | A | 9264 | 175 | 411 | WIYQFRLIEIGDSTVGKSCLLHRFTQGRF |
| | | | | | | PGLRSPACDPTVGVDFFSRLLEIEPGKRIKLLL |
| | | | | | | WDTAGQERFISIT |
| 1146 | 2496 | A | 9277 | 592 | 814 | MFTYLEGREGIKSQPKMEPHSVT\RLECSGMI |
| | | | | | | SAHCSLNLPGTSDSPASASRNAGTTGMRHHA |
| | | | | | | WLIFAFLVETGF |
| 1147 | 2497 | A | 9279 | 1255 | 2 | FRRGRRGEEEKEEEEEEEEGWVNGMENSHPP |
| | | | | | | HHEHQQPPPQPGPSGERRNHHWRSYKLMIDP |
| | | | | | | ALKKGHHKLYRYDGQHFSLAMSSNRPVEIVE |
| | | | | | | DPRVVGIWTKNKE\LELSVPKFKIDEFYVDQV |
| | | | | | | PPKQVTFAKLNDNIRENFLRDMCKKYGEVEE |
| | | | | | | VEILYNPKTKKHLGIAKVVFATVRGAKDAVQ |
| | | | | | | HLHSTSVMGNIIHVELDTKGETRMRFYEL\LV |
| | | | | | | TGRYTPQTLPVGELDAVSPIVNETLQLSDALK |
| | | | | | | RLKDGGLSAGCGSGSSSVTPNSGGTPFSQDTA |
| | | | | | | YSSCRLDTPNSYGIQGTPLTPRLGTPFSQDSSY |
| | | | | | | SSRQPTPSYLFSQDPAVTFKARRHESKFTDAY |
| | | | | | | NRRHEHHYVHNSPAVTAVAGATAAFRGSSD |
| | | | | | | LPFGTVGGTGGSSGPPFKAQPQDSATFAHTPP |
| | | | | | | PAQATPAPGFR |
| 1148 | 2498 | A | 9302 | 1026 | 6 | IASIQNADTMPGVGLLVSHFSTLVSRQRCPNY |
| | | | | | | ADPQNLTDVSIFLLLEVSGDPELQPVLAGLFL |
| | | | | | | SMCLVTVLGNLLIILAISPDSHLHTPMYFFFSN |
| | | | | | | LSLPDV\GFTSTTVPK\MIVDI\QSRSRVISYAG |
| | | | | | | CLTQKSLFAIFGGTEE\NMLLSVMAYDRFVAI |
| | | | | | | CHPLYHSAIMNPCFCAFLVLLSFFFLSLLDSQL |
| | | | | | | HSWIVLQFTIIKNVEISNFVCDPSQLLKFACSD |
| | | | | | | SIINSTFIYFHKDPERQLVLAGLFLSMCLVTVL |
| | | | | | | GNLIIILDVSPDSHLPTPMYFFLSNLSLPDIGFT |
| | | | | | | STTVPKMIVDIQSHGRVIFYAGCLTQMSLFAIF |
| | | | | | | GGMEERHAPECDGL |
| 1149 | 2499 | A | 9303 | 1 | 699 | MASQEKDIFIGWGTIHLFRKPQRSFFGKLLRE |
| | | | | | | FRIVAADRSMGRYMLFGVINLICTGFLLMWC |
| | | | | | | SSTNSIALT\SYTYLTIFDLFSLMTCLISYWVTL |
| | | | | | | RKPSPVYSFGPERLEVLAVFASTVLAQLGALF |
| | | | | | | ILKESAERFLEQPELHTGRLLVGTFVALCFNLF |
| | | | | | | TMLSIENKPFAYVSEAASTSWLQEHVADLSR |
| | | | | | | SLCGIIPGLSSIFLPRMNPFVLIDLAGAFALCIT |
| | | | | | | YMLIEI |
| 1150 | 2500 | A | 9308 | 797 | 693 | DRSTSVTRAGVQWCSLGSLQPRTPGLLRSSCL |
| | | | | | | SLP |
| 1151 | 2501 | A | 9309 | 205 | 406 | VAIKELPVLWKWSKPTR\TAKEPPQTQQRAG |
| | | | | | | SKTAAFPCQWSRMASEGPNIPCPGARIISDKQ |
| | | | | | | FLICTI |
| 1152 | 2502 | A | 9314 | 913 | 504 | KPSPLITPPAVVLPPSAVLNLVNTFSSFPQVEV |
| | | | | | | QGPLCGPRKGRLAVTIPFFGLSILPKYMDHRR |
| | | | | | | PPPHR\EIFFVFLAETGFHRASQAGPDLPTS/S/I |
| | | | | | | PPTSAIFPKCWEYRSEPQCLPGCLSFSGILLDL |
| | | | | | | GTNVSLRAA |
| 1153 | 2503 | A | 9315 | 392 | 1 | HPHRPRPGFRSPARSSRPCPVLTSLLPPFPSPSP |
| | | | | | | PADDLVKAGRDRKDPQVR/ERELRPNPGRLG |
| | | | | | | GPR\PRPARARS/CHQPRLTRVCPRSPPPEARA |
| | | | | | | PAPAAPARGRGAPKRNRPRTDTRAPRGSSAR |
| | | | | | | PGNS |
| 1154 | 2504 | A | 9321 | 331 | 433 | MPCIIQAQYGTPAPSPGPRDHSASDPLTPEFIK |
| | | | | | | PT |
| 1155 | 2505 | A | 9324 | 180 | 275 | MEEPQSDPSVEPPLSQETFSDLWKLLSENNYL |
| 1156 | 2506 | A | 9326 | 383 | 619 | MISPSRTEGDPLPLPP/EGEGQEVRGFGGGPAK |
| | | | | | | EAAQRHCRASVSILRMRRPGQGSSRPARVPL |
| | | | | | | RGPDSHRLREPPPSPP |
| 1157 | 2507 | A | 9327 | 152 | 292 | YERRGRSQGGGSHPAGAQPGGRAIGAGWQS |
| | | | | | | KEPLWEGLQRSGSPLPG |
| 1158 | 2508 | A | 9328 | 1 | 430 | QELKQGPNPLAPSPSAPSTSAGLGDCNHRVD |
| | | | | | | LSKTFSVSSALAMLQERRCLYVVLTDSRCFL |
| | | | | | | VCMCFLTFIQALMVSGYLSSVITTIERRYSLKS |
| | | | | | | SESGLLVSCFDIGNLVVVVFVSYFRGRRRRP/ |
| | | | | | | RVAAVGGLLDLEGGEMI |
| 1159 | 2509 | A | 9334 | 108 | 383 | KGNQVNGNGNQLKIRKHESMCPVSLTQNTVR |
| | | | | | | LMEAGLPQKQAIERADELFEAGLVIYVKLDER |
| | | | | | | VLNAL\YSSVGLQWFKESDLSHLRLLEISFR |
| 1160 | 2510 | A | 9338 | 2 | 430 | FVGRPRGLSDRLEDLFLAGFRVGERLRTAAM |
| | | | | | | KRYVRILLLGEGAEHVADPVPGGRGVPRGEA |
| | | | | | | DHTDQELREELHKANVERVVHDVSQEATIEKI |
| | | | | | | RTKWIPLV/RWGDHA/EGPVGIKSYLPSGRSM |
| | | | | | | EAELPIMSQLTEIETCVEC |
| 1161 | 2511 | A | 9341 | 1 | 390 | NSRVDDFVAPGLSEAGKLLGLEFPERQRLAA |
| | | | | | | AVG/CSPMSGVISMSAIPFFLGKIIDAIYTNPTV |
| | | | | | | DYSDNLTRLCLGLSGVFLCGAAANAIRVYLM |
| | | | | | | QTSRQRVVKRLRTSLFSSILGQEVAFSDKAGT |
| | | | | | | GELI |
| 1162 | 2512 | A | 9343 | 84 | 837 | QGRFRAFCWQRDFLQPPGMRLSALLALASKV |
| | | | | | | TLPPHYRYGMSPPGSVADKRKNPPWIRRRPV |
| | | | | | | VVEPISDEDWYLFCGDTVEILEGKDAGKQGK |
| | | | | | | VVQVIRQRNWVWGGLNTHYRYIGKTMDYR |
| | | | | | | GTMIPSEAFLLHRQVKLVDPMDRKPTEIEWR |
| | | | | | | FTEAGERVRVSTRSGRIIPKPEFPRADGIVPET |
| | | | | | | WIDGPKDTSVEDALERTYVPCLKTLQEEVME |
| | | | | | | AMGIKETR\NTRRSIGIEPGAEQLLPNFCPSLE |
| | | | | | | G |
| 1163 | 2513 | A | 9346 | 967 | 616 | DSLALSPRLECSGAISAHCNLTPPCIFTPFSCLS |
| | | | | | | LPSSWAYRCASPHPDNFFVFLVESGFHKVGQ |
| | | | | | | AGLKLLISSDPPTSA/FPKCWDYRRD\SSAPAT |
| | | | | | | FSSYQRNNPDLILNDTIMFNIK |
| 1164 | 2514 | A | 9347 | 3 | 1099 | SSFPTCMRTVFHSNTSVSSLLHRPGHVTPQLTT |
| | | | | | | HGGWRHHRDHTAIDEWDFNPSKFLIYTCLLL |
| | | | | | | FSVLLPLRLDGIIQWSYWAVFAPIWLWKLLV |
| | | | | | | VAGASVGAGVWARNPRYRTEGEACVEFKA |
| | | | | | | MLIAVGIHLLLLMFEVLVCDRVERGTHFWLL |
| | | | | | | VFMPLFFVSPVSVAACVWGFRHDRSLELEILC |
| | | | | | | SVNILQFIFIALKLDRIIHWPWLVVFVPLWILM |
| | | | | | | SFLCLVVLYYIVWSLLFLRSLDVVAEQRRTH |
| | | | | | | VTMAISWITIVVPLLTFEVLLVHRLDGHNTFS |
| | | | | | | YVSIFVPLWLSLLTLMATTFRRKGGNHWWF |
| | | | | | | AIRRDF/CQDQLPQPTGICPPPPPLTDHHGEKA |
| | | | | | | LPLQNKDRGSWPASRGSPRLL |
| 1165 | 2515 | A | 9362 | 547 | 991 | DVSIGPPLLRRPCSGREQTRSLSFPSDPESSFSP |
| | | | | | | VPEGVRLADGPGHCKGRVEVIUIQNQWYTV |
| | | | | | | CQTGWSLRAAKVVCRQLRCGRAVLT\QKRC |
| | | | | | | TKHAYGRKPIWLSQMACSGPEFTLHDCPFRP |
| | | | | | | LGEDTLFHVEYTSVHGRERLSAKD |
| 1166 | 2516 | A | 9363 | 201 | 387 | PPILRWTPPSGKNFFFFFFFESEFY/SSPRVECS |
| | | | | | | GAISAHLAHCNLCLPGSSDSPASAFQVAS |
| 1167 | 2517 | 77 | 9368 | 707 | 1087 | AVLTPCLSPCSPSRIPRP\SRPYPGRRSLSHTPP |
| | | | | | | PRPLILYAPAP\RPAGTAFIPHSHPPPPDLLRFT |
| | | | | | | ATPAITPCPSLPPPPRPLHPTQPSTALLPDPPPW |
| | | | | | | PLPFPPPSS/RPPRPDGSTSYSPTFPPFT |
| 1168 | 2518 | A | 9375 | 511 | 15 | MMLSEETSAVRPQKQTRFNGAKLVWMLKGS |
| | | | | | | PITVTSAVIIVLMLLMMIIFSPWLATHDPNAID |
| | | | | | | LTARLLPPSAAHWFGTDEVGRDLFSRVLVGS |
| | | | | | | QQSILAGLVVVATTGMIGSPLECLFGELGGRA |
| | | | | | | DAIFMRVMDIMRS/IPSLVLTMEKTAALGPSL |
| | | | | | | FNAMQASSEH |
| 1169 | 2519 | A | 9377 | 42 | 410 | GNGRVAPRDPGAVASAEPGLTTHDSGVNPN |
| | | | | | | NSARRMEAMASGSNWLSGVNVVLVMAYWS |
| | | | | | | LVFVLLFIFAKRQIMRFAMKSLRGPHGPVGH |
| | | | | | | NAPKDLKEEIDILLSRVHNIKYEP\HLLADDDA |
| 1170 | 2520 | A | 9378 | 302 | 1303 | GVSGFSASVLRQRRMEDELEPSLRPRTQIQGR |
| | | | | | | ILLLTICAAGIGGTFQFGYNLSIINAPTLHIQEF |
| | | | | | | TNETWQARTGEPLPDHLVLLMWSLLVSLYPL |
| | | | | | | GGLFGALLAGPLAITLGRKKSLL\VNNIFVVS |
| | | | | | | AAILFGFSRKAGSFEMIMLGRLASWGVNAGV |
| | | | | | | SMNIQP\MLPGGESAPKELRGAVAMSSAIFTA |
| | | | | | | LGIVMGQVVGLSITAATGLRGL\AGELEELEE |
| | | | | | | ERAACQGCRARRPWELFQHRALRRQVTSLV |
| | | | | | | VLGSAMELCGNDSVYAYASSVFRKAGVPEA |
| | | | | | | KIQYAIIGTGSCELLTAVVSVSLEGALPPPAL |
| | | | | | | WGGTPRSFALNQFTLQKKKK |
| 1171 | 2521 | A | 9381 | 2 | 412 | RGPASAQEDERARTAPLERVRARGRMTTSSA |
| | | | | | | LFPSLLPCSWSTSNKYLAEFRAGKMSLKGITE |
| | | | | | | TPDKRKGLAY/TQQTDDSLIHFCWKDRTSGNV |
| | | | | | | EDDLIIFPDDCEFKRLPQCPNGRVYVLKFKAG |
| | | | | | | SKRLFFWMQEP |
| 1172 | 2522 | A | 9384 | 20 | 355 | GWNGRSTEASPAAEAPHYPHKET\KAAMGTQ |
| | | | | | | CTHGGKVRPDPHDMLITVVHKIKLFVLCHSL |
| | | | | | | LQLCAIMISDYLKSSIYTVEKRLGLFRPTSGLL |
| | | | | | | ASFNEVGNTALIVLESY |
| 1173 | 2523 | A | 9393 | 430 | 87 | LCQCIVPGQQKETFSLNPSSATVRFYL*LSLQ |
| | | | | | | QRKEDQ*IIL*YHLNKDCLHIFMSAITLYMKI* |
| | | | | | | KIFVLFDFNTMFETPFYII*FIFLFSQNLKRIRQV |
| | | | | | | IRPPISFSKINNGP |
| 1174 | 2524 | A | 9397 | 77 | 374 | ERLEIGRLGGERGSGPASCLRVIDVSGMWDQ |
| | | | | | | RLVKLALLQLLRAFYGIKVKGVRVHRDCGTF |
| | | | | | | ESSSTLIRVS*FGVPCNALAHFGVTHF*YILDF |
| | | | | | | LGML |
| 1175 | 2525 | A | 9399 | 66 | 397 | HESSRADRDKMDTRGSTYTDADPVNKSGGT |
| | | | | | | AKMNKWSKGKVRDKLNNLVLFDTATYDKL |
| | | | | | | CKEVPNYKLITLAVVSERLKIPGSLARAALHE |
| | | | | | | LLSRGLI*LVIQHIAQVIY |
| 1176 | 2526 | A | 9408 | 2 | 299 | LDLTHVLSLSISLTVTLLGTTFGMVTPLLDVVY |
| | | | | | | GERGYAQNGDF*DAQLDDYSFSCYSHAQVN |
| | | | | | | GAPNSLTRAYDDP*VKISGLECQKVGALVEV |
| | | | | | | KCLNL |
| 1177 | 2527 | A | 9416 | 2 | 402 | CNFLRSSRIRVHSTPAASTMPPKVDPNEIKVV |
| | | | | | | YLRCTGGEVRATSALAPKTGPLGLSSIKVGVD |
| | | | | | | FV*ATGDWNVLIISVILTIRILLSHIFVVPPFFCF |
| | | | | | | DHLIAFWDLQSLIFLHVIFSLFITLLLFCFFSIF |
| 1178 | 2528 | A | 9419 | 142 | 426 | TPLFDLWPRVVLSWLETVLTSLRTRRAASGPP |
| | | | | | | ACRIMPITVDDVLEHGGEVHFLQKQMLYLL |
| | | | | | | ALI*DTFAPIYVGIVFLGFTPDHRCRSPGVAEL |
| 1179 | 2529 | A | 9420 | 1450 | 1655 | LSSAGTKMNLN*KNYWPGASAHACNPSTLG |
| | | | | | | GQSRCRSGDRDHPG*HGETPSVLKIQKISRA |
| | | | | | | WWRAP |
| 1180 | 2530 | A | 9422 | 176 | 375 | HRPQTTRPDWKPRT*PQGK*GRLSSEISPASPP |
| | | | | | | SRFSRSTKPVPPKADPPARQKLTGVLHAPLLK |
| | | | | | | L |
| 1181 | 2531 | A | 9436 | 2 | 274 | PIAASLRMYNLQPYTEENLICTAFATMVETVP |
| | | | | | | IARTILDRLTGIPHGYCFVE*ADWATADKCVH |
| | | | | | | IYNGKPLPGATPLLSLQLHQLAHLGS |
| 1182 | 2532 | A | 9442 | 3 | 240 | VDKCSSKSIVLSEYCPHCMCSLSTDPKPFGQL |
| | | | | | | SMILK*MGAGDEKISAMGKARVDHRELYLGL |
| | | | | | | LYPTEDYKLTFRARH |
| 1183 | 2533 | A | 9444 | 384 | 3 | LKDFQPWALHDWPLFCCCTFLLFLVLECFTR |
| | | | | | | KGCSGWAPWLSLQGQHFGRPRWADHLRSGV |
| | | | | | | RDQPGQYSKTTFLPKIQKLAGHSGAHL*S*LL |
| | | | | | | ERMRWKNRLNPGGRSCSEPRWHHCTPGWAT |
| | | | | | | ERG |
| 1184 | 2534 | A | 9462 | 391 | 655 | LSGFKSLMPKIPLQYIYYRVRTIWSFCLPLDG |
| | | | | | | RKLMLS*YSK*LT*KYNILPEYSRMTLPPGMV |
| | | | | | | IHTCNPSTLGGRAGWIV*AQEFET |
| 1185 | 2535 | A | 9467 | 215 | 566 | RCPMWQGQASRMDPAKAKDREASTCCSLA |
| | | | | | | WWWGWECWVRALKLSSGPAGPLACWVAK |
| | | | | | | KKSLSLSGPVYPSEKGAGLYVF*DRVSLCHPG |
| | | | | | | WSAVVQFWLTAASNSCFSLLSSWDYRCA |
| 1186 | 2536 | A | 9468 | 275 | 452 | HIIPQLHTKTHYVPTRMYNKI*QIDNSKPWQR |
| | | | | | | GG*TGILTHCW*ESKLVQPLWKIVWHYQ |
| 1187 | 2537 | A | 9469 | 388 | 3 | EVAPGPSQILPRRVTDGGDRPQFSLPGPRLPQ |
| | | | | | | SSRGAEPCLSNCIHSPAPRKQRMGDSDQ*STP |
| | | | | | | NPASPHPEAPQEPWDSASGSVGSFSLGRGAK |
| | | | | | | ASS*VPGKGRGPRQGSELLAETILELFLALAN |
| | | | | | | S |
| 1188 | 2538 | A | 9471 | 124 | 397 | TMDKKNRHGNSLDMASEIHMTGPMCLIENTT |
| | | | | | | GRLMANPEALKILSAITQPMVEEAIAGLYRAC |
| | | | | | | *FYLTNNLAGMKKGLCLGSTEQAMTIGI |
| 1189 | 2539 | A | 9480 | 584 | 769 | GHVQSQHPGRPRRADHLRSGDRDHPG*HDET |
| | | | | | | PSLLKIQKISWAWWRAPVVPATWEAEAEEW |
| | | | | | | R |
| 1190 | 2540 | A | 9483 | 463 | 86 | VTVGLTLLLRGAPRFTAG*PPSGGGPPLAPLL |
| | | | | | | PRQHCTLQTHRHLHPEAPVKV*KT*RLFPGLR |
| | | | | | | GASSCRRRRCNPVLAARKAGSPRSHSTRENC |
| | | | | | | RRSRCPDTAHRRRRRGRRRNPSCVRSPRWR |
| 1191 | 2541 | A | 9489 | 1 | 411 | LADALCLSAAATGAVRPGARAQPSTRRRLSP |
| 1192 | 2542 | A | 9497 | 389 | 161 | VSFLSMSSGHCIRSTRGSKMVSWSVIAKIQEI* |
| | | | | | | KDTYSDHEEINTS |
| 1193 | 2543 | A | 9509 | 186 | 1 | IAKSQ*KRWQRSGAMETLKHGWWECKLVQF |
| | | | | | | FGKTFVNVN*S*TYVYPCDKIILLLGLYPTEM |
| 1194 | 2544 | A | 9512 | 58 | 433 | PLQRSKCLTLRCLRAKPWAWSQSPRACSSAL |
| | | | | | | LKSSRSRASSLNVQCILQSNPQGHQRI*KQKA |
| | | | | | | SSKGQQFRR*KEHPFMLKTLNKLRIEGT*LKI |
| | | | | | | RRAIYDNPTANIIVEGQKLEAFPLRTGTRQ |
| 1195 | 2545 | A | 9515 | 595 | 1223 | GHGALPSFQTQVPRTP*ASWPVVPAASESAPAF |
| | | | | | | AGGGASLPVAAGSCAAAPHTEPGAPQHLLDC |
| | | | | | | PCPLCLARPPRRPLPDTCYGPGSGRSASLAEPP |
| | | | | | | LPRCSCAPLRSASAPQVS*CV*AVNLLPHNL* |
| | | | | | | PLHLLLHD*EKAWGFLFSSASHCFQGQICLLP |
| | | | | | | APGSGPCGATARPSRGGRAGGSRARRPIPPGP |
| | | | | | | GTRRTPSGCQNPAASGG |
| 1196 | 2546 | A | 9518 | 229 | 468 | RSPTATPAPHAMGPGAPFARGGRPLPLLGAM |
| | | | | | | AERVAPGWDLHTPYLPRTNSRRTPHL**EPHA |
| | | | | | | GYIGALFPMSGGWPGGQ |
| 1197 | 2547 | A | 9521 | 289 | 448 | IAWLSGLFFPSNQANLCFLCYKLTADSRYRG |
| | | | | | | HAMRHLTGNTSMAIEFL*ADSRPQVQRARYE |
| | | | | | | APNWKYKYGY*IPVDMLC |
| 1198 | 2548 | A | 9524 | 204 | 1 | KNKKTTKGLSIVTLNISGPNQ*NKRIHRVAEWI |
| | | | | | | VKQEPNICHL*ETHFPFRDTYRLKEREQKKRK |
| | | | | | | SSYS |
| 1199 | 2549 | A | 9546 | 1785 | 1943 | GGRFKESKLTNAGWQRNSFFIGPPKS1PWAA |
| | | | | | | V*QRGDGKNPGVTHLNRPVGTX |
| 1200 | 2550 | A | 9548 | 186 | 1 | VNAEKEF*KIQHYFMTKSQNKLHIEHTYLKPI |
| | | | | | | KAIYDKWTSDIMLNLQKL*AFFLRVIVRQI |
| 1201 | 2551 | A | 9549 | 591 | 2 | SSVVEFPRGPRSSLPPLDSTFPCGSSPNWTGGC |
| | | | | | | GSCPSGE*LVSPGSEQRKKYSNSNVIMHETSQ |
| | | | | | | YHVQHLATFIMDKSEAITSVDDAIRKLVQLSS |
| | | | | | | KEKIWTQEMLLQVNDQSLRLLDIESQEELEDF |
| | | | | | | PLPTVQRSQTVLNQLRYPSVLLLVCQDSEQSK |
| | | | | | | PDVHFFHCDEVEAELVHEYMESALTDCRLGK |
| | | | | | | AMRP |
| 1202 | 2552 | A | 9552 | 428 | 1 | KYGNEGHWSRQCPNPGKPIRPCPLCRGPHWK |
| | | | | | | LDCERPPQGPLPSLPELAKTSYSDLTGLATED |
| | | | | | | *WGPGMDAPATTIASSKTRVTLMVAGRPVFF |
| | | | | | | LI*YRATYSALPNFSGPTQSSQVSVVGIDGQV |
| | | | | | | SKPRATPPLFCSLHTF |
| 1203 | 2553 | A | 9568 | 517 | 738 | RRKFERKQKQ*RYREGKQYRQRDKMKEWG |
| | | | | | | EKEKREREKGEREERKMRHRERKGESGQRD |
| | | | | | | TMENWRVERLTEKER |
| 1204 | 2554 | A | 9573 | 83 | 415 | EDKRLRLVDGDSRCAGRV*IYHDGFWGTICD |
| | | | | | | DGWDLSDAHVVCQKLGCGVAFNATVSAHFG |
| | | | | | | EGSGPIWLDDLNCTGTESHLWQCPSRGWGQ |
| | | | | | | HDCRHKEDAGVICSEFIALR |
| 1205 | 2555 | A | 9577 | 64 | 424 | ARGSGPTRPRTANGRMGETKDAPQMLVTFK |
| | | | | | | DVAVTFFREEWRQLVLVHRTLYR*GMLETC |
| | | | | | | GLLDTLRHNVPQPDVVHLLYHGTQLLIVKRE |
| | | | | | | VSHSPCAGDMRELFTREATLTPHPYNNGA |
| 1206 | 2556 | A | 9584 | 38 | 476 | TLGAVLFSEVSKESSTSHSGGQLGRQNRHPKL |
| | | | | | | SNFTTSSPRLKPTASSQRNLGQILNMFLTAV |
| | | | | | | NPQPLSTPSWQIETKYSTKVLTGNWMEERRK |
| | | | | | | GLPYKHLITHHQEPPHRYLLSTYDDHYNRHG |
| | | | | | | YNPGLPPLRTWNGQKLLWL |
| 1207 | 2557 | A | 9586 | 2 | 412 | LRSSPAALLRALCITTVTGTALALRSRVATTN |
| | | | | | | PDGCRNVLRPKYYRLCDKAESWQIALETVPT |
| | | | | | | GVAVTSWAIMLTVLTLVCKGQDYNRRQKLP |
| | | | | | | THILCLL*EKGIFGLTFAFIIGLDGSTGPTRFFL |
| | | | | | | FGILFSICFS |
| 1208 | 2558 | A | 9597 | 122 | 3 | IKNYWPGMVAHACNPSPLGGRGRWIA*AQK |
| | | | | | | FADAWADAW |
| 1209 | 2559 | A | 9611 | 148 | 558 | KSLRNVWDLLNNTWKADRFFCHSSRTSTIRK |
| | | | | | | GDPGPTFSKMSIWTSGRTSSSYRHDEKRNIYQ |
| | | | | | | RIRDHDLLDKRKTVTALKAGEDRAILLGLAM |
| | | | | | | MVCSIMM*FLLGITLLRSYMQSVWTRESQCT |
| | | | | | | LLNASITETFNC |
| 1210 | 2560 | A | 9618 | 384 | 2 | SLHDMLMLAEQQQKQKWAVNTQNTAWSNA |
| | | | | | | DSKFGQRILEKMEWSKGRGLGVQEQGGPDDI |
| | | | | | | KVQVKNNDLGLQATINNEANWIAIIQDDFNW |
| | | | | | | LLAELNTCQRQETADS***WSPKNSHVGKDS |
| | | | | | | GELSAK |
| 1211 | 2561 | A | 9620 | 316 | 610 | QKHPGGGQLGRSPQEDSRFHNKASSGVSRVR |
| | | | | | | LGRAWWLTPVIPTLWEAKAGGSPE*D*AGRG |
| | | | | | | GSRL*SQHFGRPERVDHLRSAVQDQPGQHGE |
| | | | | | | TPSLLKIQKIN*VWGRRL*SSYSEAEAGESL |
| 1212 | 2562 | A | 9623 | 297 | 344 | QFPVDGDYQKIEKITQLFQAQNLSLCLAMTR |
| | | | | | | TREL*KGGGKGRHE*AVVPFLKKGGYGVKAP |
| | | | | | | AILNTSNCT*CF*ETKMLSDDPKACVFEVSSA |
| | | | | | | DL*NTSFGVIR |
| 1213 | 2563 | A | 9624 | 2 | 356 | AELSLASTACGRNTSGDSLPDYDRAPISSPLA |
| | | | | | | TSGTILSAISCLWDLPTPVLRVGLSCQPSMSSQ |
| | | | | | | LPRMYSTDVEAAVNSLEDLYLQAYYAYLCVG |
| | | | | | | LYFHRDDMALEGVSRFL*ELAE |
| 1214 | 2564 | A | 9634 | 776 | 912 | SLSRWVRAKL*VPYNQENCLNPRGGGCSEPR |
| | | | | | | SHYCTPAWATEKDS |
| 1213 | 2565 | A | 9636 | 220 | 426 | KPGNFAVSSEY*DITSGQLKTAVRG*IEMTST |
| | | | | | | EENFGEKLHDIGFGNGFLDKT*KAQATKAKI |
| | | | | | | DK |
| 1216 | 2566 | A | 9637 | 391 | 76 | CFLEDGCTQAS*AEEAAVSPSMAEEEQGSTSC |
| | | | | | | RERRSIRFKMKNHSPDDTIKENVTISNTRTRKI |
| | | | | | | NHLPETERNLLEHGLMYIRLNAAFCSLVAHS |
| | | | | | | LFGFILKAT |
| 1217 | 2567 | A | 9655 | 2008 | 2432 | LHCKMGALETQTHPCSQNMLRSLQKCCCKV |
| | | | | | | EEHHLQPVQVLQTLLHSATAGTGCRRPARPP |
| | | | | | | PAPPTPTPWRSRQSGKQSERAS*LKGRGRYGL |
| | | | | | | GALGGRGGRALGGSRWPPPLPGETLFSGCKH |
| | | | | | | RRRRRGSDAAPGEEAGT |
| 1218 | 2568 | A | 9658 | 3 | 405 | HASARALLSPNLSPNNKMAISGGPVLGFFIIA |
| | | | | | | VLMSAQEPWAIKEEHVIIQAEFYLNPDQSGEF |
| | | | | | | MLDFEGEDTFHGDMAKKETVWRLE*LARLD |
| | | | | | | NFEAQRALANIAADQAALEIMDMGSDYTLIP |
| | | | | | | NVPPKVTVL |
| 1219 | 2569 | A | 9662 | 3 | 284 | PDWTEKRKMQDTGSILPLHWFGFCIYAALVA |
| | | | | | | YGGIIGYVKAGSVPSLAAGLLFGSLSGLGAYQ |
| | | | | | | LSQDPRNVWVFLATSGTLAGIMGMRFYHSG |
| | | | | | | KL |
| 1220 | 2570 | A | 9669 | 200 | 699 | LLLTGYIQTLQNQQLSGNQQEMQAVDNLTSA |
| | | | | | | PGNTSLCTRDYKITQVLFPLLYTVLFFVGLITN |
| | | | | | | GLAMRIFFQIRSKSNFIIFLKNTVISDLLMILTF |
| | | | | | | PFKILSDAKLGTGPLRTPVCQVTSVIFYFTMYI |
| | | | | | | SISFLGLITIDRYQKTTRPFKTSNPKNLLGAKIL |
| | | | | | | K |
| 1221 | 2571 | A | 9676 | 164 | 562 | KERDSSTFSAAMTTMQGMEQAMFGACIPGVP |
| | | | | | | QLGNMAVIHSHLWKGLQEKFLKGEPKVLGV |
| | | | | | | VQILTALMSLSMGITMMCMASNTYGSNPISV |
| | | | | | | YIGYTIWGSVMFIISGSLSIAAGIRTTKGLVRG |
| | | | | | | SLGMNITSS |
| 1222 | 2572 | A | 9688 | 43 | 412 | VAKMVKCCSAIGCASRCLPNSKLKGLTFHVF |
| | | | | | | PTDENIKRKWVLAMICRLDVNAAGIWEPKKG |
| | | | | | | DVLCSRHFKKTDFDRSAPNIKLKPGVWSIFDS |
| | | | | | | PYHLQGKREKLHCRKNFTLKTVPATNYNH |
| 1223 | 2573 | A | 9696 | 308 | 564 | RTSMGILYSEPICQAAYQNDFGQVWRWVKE |
| | | | | | | DSSYANVQDGFNGDTPLICACRRGHVRIVSFL |
| | | | | | | LKKECLCQPQKPERENLLALCCE |
| 1224 | 2574 | A | 9700 | 3 | 632 | DAWASGGELGSLFDHHVQRAVCDTRAKYRE |
| | | | | | | GRRPRAVKVYTINLESQYLLIQGVPAVGVMK |
| | | | | | | ELVERFALYGAIEQYNALDEYPAEDFTEVYLI |
| | | | | | | KFMNLQSARTAKRKMDEQSFFGGLLHVCYA |
| | | | | | | PEFETVEETRKKLQMPKAYVVKTTENKDHY |
| | | | | | | VTKKKLVTEHKDTEDFRQDFHSEMSGFCKA |
| | | | | | | ALNTSAGNSNPYLPYSCELPLCYFSSK |
| 1225 | 2575 | A | 9710 | 1 | 163 | RSGCVLRMTEWETGAPAVAETPDIKLFGKWS |
| | | | | | | TDDVHINDISLQDYIAGVRLILL |
| 1226 | 2576 | A | 9713 | 82 | 492 | QGLPSFLPAFGPSGSWLGPAFTLGSSCNTVDT |
| | | | | | | ICHGYSEIRPLFYLSFCDLLLGLCWLTETLLYG |
| | | | | | | ASVANKDIICYNLQAVGQIFYLSSFLYTVNYI |
| | | | | | | WYLYTELRMKHTQSGQSTSPLVIDYTCRVCQ |
| | | | | | | MAFVFSSLI |
| 1227 | 2577 | A | 9720 | 3 | 416 | GKWKRTQVPLLGEECADMDLARKEFLRGNG |
| | | | | | | LAAGKMNISIDLDTNYAELVLNVGRVTLGEN |
| | | | | | | NRKKMKDCQLRKQQNENVSRAVCALLNSGG |
| | | | | | | GVIKAEVENKGYSYKKDGIGLDLENSFSNML |
| | | | | | | PFVPNFLDFMQNGNYF |
| 1228 | 2578 | A | 9723 | 278 | 411 | EASSSNTVASNVADKTDPHSMNSRVFIGNLN |
| | | | | | | TLVLQKSDVEAVF |
| 1229 | 2579 | A | 9725 | 121 | 902 | LFAMSGFENLNTDFYQTSYSIDDQSQQSYDY |
| | | | | | | GGSGGPYSKQYAGYDYSQQGRFVPPDMMQP |
| | | | | | | QQPYTGQIYQPTQAYTPASPQPFYGNNFEDEP |
| | | | | | | PLLEELGINFDHIWQKTLTVLHPLKVADGSIM |
| | | | | | | NETDLAGPMVFCLAFGATLLLAGKIQFGYVY |
| | | | | | | GISAIGCLGMFCLLNLMSMTGVSFGCVASVL |
| | | | | | | GYCLLPMILLSSFAVIFSLQGMVGIILTAGIIG |
| | | | | | | WCSFSASKIFISALAMEGQQLLVAYPCALLYG |
| | | | | | | VFALISVF |
| 1230 | 2580 | A | 9739 | 11 | 247 | TFVLNMNTPKEEFQDWPIVRIAAHLPDLIVYG |
| | | | | | | HFSPERPFMDYFDGVLMFVDISGKCKRDVCL |
| | | | | | | MWMSNRLAWEFTCRA |
| 1231 | 2581 | A | 9744 | 37 | 1100 | TPLFDFWPGFVLSWLQPLSASLRARRAASGPP |
| | | | | | | ACRIMPTTVDDVLEHGGEFHFPQKQMFFLLA |
| | | | | | | LLSATFAPIYVGIVFLGFTPDHRCRSPGVAELS |
| | | | | | | LRCGWSPAEELNYTVPQPGPAGEASPRQCRR |
| | | | | | | YEVDWNQSTFDCVDPLASLDTNRSRLPLGPC |
| | | | | | | RDGWVYETPGSSWLEFNLVCANSWMLDLFQ |
| | | | | | | SSVNVGFFIGSMSIGYIADRPGRKLCLLTTVLI |
| | | | | | | NAAAGVLMAISPTYTWMLIFRLIQGLVSKAG |
| | | | | | | WLIGYILITEFVGRRYRRTVGIFYQVAYTVGL |
| | | | | | | LVLAGVAYALPHWRWLQFTVALPNFFFLLY |
| | | | | | | YWCIPESPRWLISQNKNAEAMRIIKHIAKKNG |
| | | | | | | KSLPASL |
| 1232 | 2582 | A | 9753 | 164 | 517 | PGPGMQGPPPITPTSWSLPPWRAYVAAAVLC |
| | | | | | | YINLLNYMNWFIIAGVLLDIQEVFQISDNHAG |
| | | | | | | LLQTVFVSCLLLSAPVFGYLGDRHSRKATMS |
| | | | | | | FGILLWSGAGLSSSFISPRYSWLF |
| 1233 | 2583 | A | 9757 | 25 | 419 | LPAPWTERVRKSEGLVGTCLGDPMASPRTVT |
| | | | | | | IVALSVALGLFFVFMGTIKLTPRLSKDAYSEM |
| | | | | | | KRAYKSYVRALPLLKKMGINSILLRKSIGALE |
| | | | | | | VACGIVMTLVPGRPKDVANFFLLLLVLAVLF |
| | | | | | | FHQLV |
| 1234 | 2584 | A | 9765 | 71 | 456 | RLELDWGFSLHFLPVAYLCPLSSGFEMNVQP |
| | | | | | | CSRCGYGVYPAEKISCIDQIWHKACFHCEVC |
| | | | | | | KMMLSVNNFVSHQKKPYCHAHNPKNNTFTS |
| | | | | | | VYHTPLNLNVRTFPEAISGIHDQEDGEQCKSV |
| | | | | | | FHWD |
| 1235 | 2585 | A | 9765 | 71 | 456 | IRSGAMSVDKAELCGSLLTWLQTFHVPSPCA |
| | | | | | | SPQDLSSGLAVAYVLNQIDPSWFNEAWLQGI |
| | | | | | | SEDPGPNWKLKVTSGLLLRGQTGEEMTRDGP |
| | | | | | | ARHMSWVMGRKRDRCLVINHLFIHSSMEYSP |
| | | | | | | CARPGHSARNNTDKNLPHTAIILVTSNTYTTI |
| | | | | | | KINFQAGRSGSGL |
| 1236 | 2586 | A | 9770 | 352 | 608 | FRGEALTVRFLTKRFIGEYASNFESIYKKHLC |
| | | | | | | LERKQLNLEIYDPCSQTQKAKFSLTSELHWA |
| | | | | | | DGFVIVYDISDRSSFAFAKALI |
| 1237 | 2587 | A | 9793 | 266 | 515 | NILAIIYFPFPRLFLLRDSQSNPKAFALTLCHH |
| | | | | | | QKIKNFQILPVSIDALTPPLVVCFLVSFLTHFS |
| | | | | | | RYKPTRPVCITQFQGCS |
| 1238 | 2588 | A | 9802 | 537 | 967 | ELGAGRSDREAMEAAVKEEISVEDEAVDKNI |
| | | | | | | FRDCNKIAFYRRQKQWLSKKSTYRALLDSVT |
| | | | | | | TDEDSTRFQIINEASKVPLLAEIYGIEGNIFRLK |
| | | | | | | INEETPLKPRFEVPDVLTSKPSTVRLISCSGDT |
| | | | | | | GSLILADGKGDLKC |
| 1239 | 2589 | A | 9805 | 105 | 540 | VPGDPAMVRAGAVGAHLPASGLDIFGDLKK |
| | | | | | | MNKRQLYYQVLNFAMIVSSALMIWKGLIVLT |
| | | | | | | GSESPIVVVLSGSMEPAFHRGDLLFLTNFRED |
| | | | | | | PIRAGEIVVFKVEGRDIPIVHRVIKVHEKDNG |
| | | | | | | DIKFLTKGDNNEGDDRGSYK |
| 1240 | 2590 | A | 9819 | 3 | 305 | TDGRDPLPCAARRRGGGGECCGAGWVAEWS |
| | | | | | | PQPLDPAMLLWMQGFVLEAVACQDNDDYLR |
| | | | | | | YGILFEDLDCNGDGVVDIIELQEGLRNWSSAF |
| | | | | | | DPNSEEHG |
| 1241 | 2591 | A | 9834 | 841 | 1209 | SPARGKSNRTDVMITAPKNKKMTENLAAPEA |
| | | | | | | LDSSTHSSSTATQSRAKMNTPAPTPSTVPAIPR |
| | | | | | | GGSGGPPPCAPHDRVSSVLQCDTQAMDHKTE |
| | | | | | | SSHSVVEFLFKRTKTPSPFHPAVRENRN |
| 1242 | 2592 | A | 9843 | 3 | 589 | TLSCQPATEPPASLLSSASSDDFCKEKTEDRYS |
| | | | | | | LGSSLDSGMRTPLCRICFQGPEQGELLSPCRC |
| | | | | | | DGSVKCTHQPCLIKWISERGCWSCELCYYKY |
| | | | | | | HVIAISTKNPLQWQAISLTVIEKVQVAAAILGS |
| | | | | | | LFLIASISWLLWSTFSPSARWQRQDLLFQICYG |
| | | | | | | MYCIFMDVMIVAVDSEDMVQAAKEVGKRWS |
| | | | | | | DIPP |
| 1243 | 2593 | A | 9846 | 198 | 411 | WRISHHAGKMPVMKGLLAPQNTFLDTIATRF |
| | | | | | | DGTHSNFILANAQVAKGFPIVYCSDGFCELAG |
| | | | | | | FARTEVMQ |
| 1244 | 2594 | A | 9848 | 116 | 650 | PICGFLYLCSAMASESSPLLAYRLLGEEGVAL |
| | | | | | | PANGAGGPGGASARKLSTFLGVVVPTVLSMF |
| | | | | | | SIYVFLRIGFVVGHAGLLQALAMLLVAYFILA |
| | | | | | | LTVLSVCAIATNGAVQGGGAYCILQHRWTG |
| | | | | | | VWPVLPAREVMISRTLGPEVGGSIGLMFYLA |
| | | | | | | NVCGCAVSLLGLVESVLDVFGA |
| 1245 | 2595 | A | 9849 | 573 | 1620 | KSKCRFPEGLSEGFGPMRKEALSSGSVQEAE |
| | | | | | | AMLDEPQEQAEGSLTVYVISEHSSLLPQDMM |
| | | | | | | SYIGPKRTAVVRGIMHREAFNIIGRRIVQVAQ |
| | | | | | | AMSLTEDVLAAALADHLPEDKWSAEKRRPL |
| | | | | | | KSSLGYEITFSLLNPDPKSHDVYWDIEGAVRR |
| | | | | | | YVQPFLNALGAAGNFSVDSQILYYAMLGVNP |
| | | | | | | RFDSASSSYYLDMHSLPHVINPVESRLGSSAA |
| | | | | | | SLYPVLNFLLYVPELAHSPLYIQDKDGAPVAT |
| | | | | | | NAFHSPRWGGIMVYNVDSKTYMASVLPVRV |
| | | | | | | EVDMVRVMEVFLAQLRLLFGIAQPQLPPKCL |
| | | | | | | LSGPTSEGLMTWELDRLLWARSVENLATATT |
| | | | | | | TLTSLA |
| 1246 | 2596 | A | 9850 | 114 | 464 | PPQLGAQRVREPRHPDVRAPLRVTSPGLRSRS |
| | | | | | | ARSLGRRPRIAMVTVGNYCEAEGPVGPAWM |
| | | | | | | QDGLSPCFFFTLVPSTRMALGTLALVLALPCK |
| | | | | | | RRERPAGADSLSWGAGPRISSYV |
| 1247 | 2597 | A | 9851 | 2 | 327 | FVRNKKMTRSCSAVGCSTRDTVLSRERGLSF |
| | | | | | | HQFPTDTIQRSKWIRAVNRVDPRSKKIWIPGP |
| | | | | | | GAILCSKHFQESDFESYGIRRKLKKGAVPSVS |
| | | | | | | LYKVFKYSSRCTS |
| 1248 | 2598 | A | 9853 | 58 | 444 | RVDDFVYSKGGKDAGGADVSLACRRQSIIPEE |
| | | | | | | FRGITVVELIKKEGSTLGLTISGGTDKDGKPR |
| | | | | | | VSNLRPGGLAARSDLLNIGDYIRSVNGIHLTR |
| | | | | | | LRHDEIITLLKNVGERVVLEVEYELPPPGGCP |
| | | | | | | WT |
| 1249 | 2599 | A | 9856 | 2 | 1265 | LPPPRPSRHRRGRAGTRASAAAAAGPTVSAV |
| | | | | | | RAPVRGQDSGAGTPQGRLAGRGAHLSRVGA |
| | | | | | | SGSGVAAGPAARHAPRRRCADAGEAVGASC |
| | | | | | | GRCAVALLSGVCTLVSTHYCVGSGCPGAAGT |
| | | | | | | PMGAGDAGASAESAVTTAPQEPPARPLQAGS |
| | | | | | | GAGPAPGRAMRSTTLLALLALVLLYLVSGAL |
| | | | | | | VFRALEQPHEQQAQRECGEVREKFLRAHPCV |
| | | | | | | SDQELGLLIKEVADALGGGADPETNSTSNSSH |
| | | | | | | SAWDLGSAFFFSGTTTTTGGGGDWHVGGGK |
| | | | | | | ELPHGGRCRETEGSQVAPRLPASPLCPGYGN |
| | | | | | | VALRTDAGRLFGIFYALVGIPLFGILLAGVGD |
| | | | | | | RLGSSLRHGIGHIEAIFLKWHVPPELVRVLSA |
| | | | | | | MLFLLIGCLLFVLTPTFVFCYMEDWSKLEAIY |
| | | | | | | FVIVTLTTVGFGDYVA |
| 1250 | 2600 | A | 9873 | 2 | 652 | FVVPSPCGGLPGRAPNGASRPTMGNSASRNDF |
| | | | | | | EWVYTDQPHTQRRKEILAKYPAIKALMRPDP |
| | | | | | | RLKWAVLVLVLVQMLACWLVRQLAWRWLL |
| | | | | | | FWAYAEGGCVNHSLTLAIHDISHNAAFGTGR |
| | | | | | | AARNRWLAVFANLPEGVPYAASFKKYHVDH |
| | | | | | | HRYLGGDGLDVDVPTRLEGWPFCTPARKLL |
| | | | | | | WLVLQPFFYSLRPLCVHPKAVTRMEVLNTLV |
| | | | | | | QLA |
| 1251 | 2601 | A | 9875 | 150 | 1209 | PVIMPLHFSPGDIVRPSCCVSSSPKLRRNAHSR |
| | | | | | | LESYRPDTDLSREDTGCNLQHISDRENIDDLN |
| | | | | | | MEPNPSDSTIFLSKSQTDVREKRKSLFTN |
| | | | | | | HHPPGQLARKYSSCSTIFLDDSTVSQPNLKYTI |
| | | | | | | KCYALAIIYYHIKNRDPDGRMLLDIFDENLHPL |
| | | | | | | SKSEVPPDYDKHNPEQKQTYRFVRTLFSAAQL |
| | | | | | | TAECAIVTLVYLERLLTYAEIDICPANWKRIV |
| | | | | | | LGAILLASKVWDDQAVWNVDYCQILKDITVE |
| | | | | | | DMNELERQFLELLQFNINVPSSVYAKYYFDL |
| | | | | | | RSLAEANNLSFPLEPLSRERAHKLEAISRLCED |
| | | | | | | KYKDLRRSARKRSASADNLTLPRWSPAIIS |
| 1252 | 2602 | A | 9879 | 6 | 376 | KRPDSRPPAQYRAGPTRPRTRGCELLYWKAT |
| | | | | | | KAVGIKMGSLSTANVEFCLDVFKELNSNNIG |
| | | | | | | DNIFFSSLSLLYALSMVLLGARGETEEQLEKV |
| | | | | | | WNSSEVCSEPRSLSGSRSGSAKLILSLYQ |
| 1253 | 2603 | A | 9880 | 180 | 388 | KEQAELLYGLYCQCDLTLSSHPSSVPAMSSC |
| | | | | | | NFTHATPVLIGIPGLEKAHFWVGFPLLSMYVA |
| | | | | | | AMFGNC |
| 1254 | 2604 | A | 9881 | 19 | 494 | VISFQITTDTIMDSSTAHSPVFLVFPPEITASEYE |
| | | | | | | STELSATTFSTQSPLQKLFARKMKILGTIQTLF |
| | | | | | | GIMTFSFGVIFLFTLLKFYPRFPFIFLSGYPFWG |
| | | | | | | SVLFINSGAFLIAVKRKETTETLIILSRIMNFLSA |
| | | | | | | LGAIAGEILLTPEFHPRSKLHL |
| 1255 | 2605 | A | 9896 | 72 | 386 | RPGREQRDCFQAPPLGLGGRQTDMMHHPLT |
| | | | | | | GATCVGLPNVGMCPQLSGALTFMYLQQGNQ |
| | | | | | | EATVAFDTMAQPYASAQFAPPQNGIPGEYTA |
| | | | | | | PHPHPAPEYTGQTT |
| 1256 | 2606 | A | 9902 | 95 | 399 | SGGPACILLHRPVLPKMGLSGLLPILVFFILLG |
| | | | | | | DIQEPGHAEGILGKPCPKIKVECEVEEIDQCTK |
| | | | | | | PRDCPENMKCCPFSRGKKCLDFRKVSLTLYH |
| | | | | | | KEELE |
| 1257 | 2607 | A | 9905 | 374 | 459 | EHLKSTPNRLGVVARTCNPSTLGGRGGW |
| 1258 | 2608 | A | 9911 | 364 | 1974 | AGPGVPAVGGRWASGPGLGGRTLCSGPPDH |
| | | | | | | QRRGPSCGASGDPQCVGSPHIPQRARPLLARP |
| | | | | | | GARLLPGHLPSPRPPRLPTGQPPAAAFRGPVR |
| | | | | | | PQGGGHIHPLPTPGGRPCFAVSEGSGSALLLS |
| | | | | | | YLGECGSSSYVTGAACISPVLRCREWFEAGLP |
| | | | | | | WPYERGFLLHQKIALSRYATALEDTVDTSRL |
| | | | | | | FRSRSLREFEEALFCHTKSFPISWDAYWDRND |
| | | | | | | PLRDVDEAAVPVLCICSADDPVCGPPDHTLTT |
| | | | | | | ELFHSNPYFFLLLSRRGGHCGFLRQEPLPAWS |
| | | | | | | HEVILESFRALTEFFRTEERIKGLSRHRASFLG |
| | | | | | | GRRRGGALQRREVSSSSNLEEIFNWKRSYTRL |
| | | | | | | MAAAAGAAAAPGSREPQDRPECGAGHPGPR |
| | | | | | | YYRHPERWLLRPEAFLGPLRTRAPSAEDSQR |
| | | | | | | ERPAARSGPEMRVRYPVVAAVLAPYLALSQD |
| | | | | | | PMYKSSASGQGASGSYNHVREEMLIKAGGA |
| | | | | | | MSRRVVRQSKFRHVFGQAAKADQAYEDIRV |
| | | | | | | SKVTWDSSFCAVNPKFLAIIVEAGGGGAFIVL |
| | | | | | | PLAK |
| 1259 | 2609 | A | 9919 | 693 | 935 | GCFKFIGESTCCWIFPSSVTTQCVVAKAPRAA |
| | | | | | | TLSKAERLRSQPGPEQGGSSYRPRTPTAAAIL |
| | | | | | | PPRPGRSHRKRKLVSTK |
| 1260 | 2610 | A | 9921 | 455 | 1082 | QRSCLCSAIEKDGGDVKALYRRSQALEKLGR |
| | | | | | | LDQAVLDLQRCVSLEPKNKVFQEALRMGGQ |
| | | | | | | IQEKVRYMSSTDAKVEQMFQILLDPEEKGTE |
| | | | | | | KKQKASQNLVVLAREDAGAEKIFRSNGVQLL |
| | | | | | | QRLLDMGETDLMLAALRTLVGICSEHQSRTV |
| | | | | | | ATLSILGTRRVVSILGVESQAVSLAACHLLQV |
| | | | | | | MFDALKEGVKKGFRGKEGAIIV |
| 1261 | 2611 | A | 9928 | 1 | 438 | GPRGAEAPGAAQAPKKKKPRPTEGGPGAGSG |
| | | | | | | RGKDPYRGPTLLHQPKPPKDEFLSSLESYEIAF |
| | | | | | | PTRVDHNGALLAFSPPPPQRQRRGTGATAES |
| | | | | | | RLFYKEASPSTHFLLNLTRSSRLLAGHVSVEY |
| | | | | | | WTREGLAWQRADRPHCLYA |
| 1262 | 2612 | A | 9931 | 168 | 435 | AAEMGRAGAAAVIPGLALLWAVGLGGPPPA |
| | | | | | | PPRLPFCLQELQGRHALHTFSLERTCSYQDFL |
| | | | | | | WADEGRLLHVGAQDLATWHTLSPLGLW |
| 1263 | 2613 | A | 9938 | 247 | 488 | RMSATSVDQRPKGQGNKVSVQNGSIHQKDG |
| | | | | | | CNDDDFEPYLRSPDNQSNSYPPMSDPYMPGY |
| | | | | | | YAPSIGFPYSLGEAAWSQL |
| 1264 | 2614 | A | 9941 | 61 | 277 | ESIGLTALGPRRRPWEHRWSDPITLKMKGWG |
| | | | | | | WLALLLGALLGTAWARRSQDLHCGACKAVR |
| | | | | | | RRVRQPNIYDY |
| 1265 | 2615 | A | 9956 | 2 | 522 | FVASEVSKMPVPASWPHPPGPFLLLTLLLGLT |
| | | | | | | EVAGEEELQMIQPEKLLLVTVGKTATLHCTV |
| | | | | | | TSLLPVGPVLWFRGVGPGRELIYNQKEGHFP |
| | | | | | | RVTTVSDLTKRNNMDFSIRISSITPADVGTYY |
| | | | | | | CVKFRKGSPDHVEFKSGAGTELSVRGEYSVG |
| | | | | | | FLSQVWWWLSSHPFMN |
| 1266 | 2616 | A | 10002 | 243 | 387 | PKNNACHLLFTAVCQPRCKHGECIGPNKCKC |
| | | | | | | HPGYAGKTCNQGRKTV |
| 1267 | 2617 | A | 10004 | 36 | 707 | LPAPASTWSVARETMASSSVPPATVSAATAG |
| | | | | | | PGPGFGFASKTKKKHFVQQKVKVFRAADPLV |
| | | | | | | GVFLWGVAHSINELSQVPPPVMLLPDDFKAS |
| | | | | | | SKIKVNNHLFHRENLPSHFKFKEYCPQVFRNL |
| | | | | | | PDRFGIDDQDYLVSLTRNPPSESEGSDGRFLIS |
| | | | | | | YDRTLVTKEVSSEDIADMHSNLSNYHQVRPLS |
| | | | | | | SPILSLSSLLTYSSAIVSNRCQLGRKLIGRENF |
| 1268 | 2618 | A | 10005 | 2 | 209 | GEGYELFVPSNGVPAVCHMVGRRPHRAVLSP |
| | | | | | | SQDELEHSLGESAAQGAAGVVLWVSWENTR |
| | | | | | | TKVSLGLA |
| 1269 | 2619 | A | 10010 | 245 | 688 | FGMLKNKGHSSKKDNLAVNAVALQDHILHD |
| | | | | | | LQLRNLSVADHSKTQVQKKENKSLKRDTKAI |
| | | | | | | IDTGLKKTQCPKLEDSEKEYVLDPKPPPLTL |
| | | | | | | AQKLGLIGPPPPPLSSDEWEKVKQRSLLQGDS |
| | | | | | | VQPCPICKEEFELRPQVFSIRG |
| 1270 | 2620 | A | 10011 | 2 | 588 | RVDDFVRPLPPQLMSRSRASIHRGSIPAMSYA |
| | | | | | | PFRDVRGPSTHRTQYVHSPYDRPGWNPRFCII |
| | | | | | | SGNQLLMLDEDEIHPLLIRDRRSESSRNKLLR |
| | | | | | | RTVSVPVEGRPHGEHEYHLGRSRRKSVPGGK |
| | | | | | | QYSMEGAPAAPFRPSQGFLSRELKSSIKRTKS |
| | | | | | | QPKLDRTSSFRQILPRFRSADHDRYRGWSMW |
| | | | | | | DEIDV |
| 1271 | 2621 | A | 10013 | 209 | 363 | LPAPPNLSPRLSFGFQFPGGNDNYLTITGPSHP |
| | | | | | | FLSGAEVSQSCRRRGGRA |
| 1272 | 2622 | A | 10014 | 7 | 388 | SAVTISWKWRSVMGIQTSPALLASLGAGLVT |
| | | | | | | LLGLAVGSYLVRRSRRPQVTLLDPNEKDLLR |
| | | | | | | LIDKTLSARSPCKIIIYLSTRIDGSLSIRPYTPVT |
| | | | | | | SDEDQGYVDIDIKVYLKGVHPTFPEGGKMSH |
| 1273 | 2623 | A | 10016 | 1 | 1339 | MAARTLGRGVGRLLGSLRGLSGQPARPPCGV |
| | | | | | | SAPRRAASGPSGSAPAVAAAAAQPGSYPALS |
| | | | | | | AQAAREPAAFWGPLARDTLVWDTPYHWW |
| | | | | | | DCDFSTGKIGWFLGGQLNVSVNCLDQHVRKS |
| | | | | | | PESVALIWERDEPGTEVRITYRELLETTCRLA |
| | | | | | | NTLKRHGVHRGDRVAIYMPVSPLAVAAMLA |
| | | | | | | CARIGAVHTVIFAGFSAESLAGRINDAKCKVV |
| | | | | | | ITFNQGLRGGRVVELKKIVDEAVKHCPTVQH |
| | | | | | | VLVAHRTDNKVHMGDLDVPLEQEMAKEDP |
| | | | | | | VCAPESMGSEDMIFMLYTSGSTGMPKGIVHT |
| | | | | | | QAGYLLYAALTHKLVFDHQPGDIFGCVADIG |
| | | | | | | WITGHSYVVYGPLGNGATSVLPESTPVYPNA |
| | | | | | | GRYWETVERLKINQFYGAFTAVRLLLKYGD |
| | | | | | | AWVKKYDRSSLRTLGSVGEPINGEAWEWLH |
| | | | | | | RVVGDSRCTLVDTWWQT |
| 1274 | 2624 | A | 10017 | 1 | 3750 | FRPQGTPRSPASHVLTMSAPDEGRRDPPKPKG |
| | | | | | | KTLGSFFGSLPGFSSARNLVANAHSSARARPA |
| | | | | | | ADPTGAPAAEAAQPQAQVAAHPEQTAPWTE |
| | | | | | | KELQPSEKMVSGAKDLVCSKMSRAKDAVSS |
| | | | | | | GVASVVDVAKGWQGGLDTFRSALTGTKEV |
| | | | | | | VSSGVTGAMDMAKGAVQGGLDTSKAVLTG |
| | | | | | | TKDTVSTGLTGAVNVAKGTVQAGVDVTTKTV |
| | | | | | | LTGTKDTVTTGVMGAVNLAKGTVQTGVETS |
| | | | | | | KAVLTGTKDAVSTGLTGAVNVARGSIQTGV |
| | | | | | | DTSKTVLTGTKDTVCSGVTGAMNVAKGTIQT |
| | | | | | | GVDTSKTVLTGTKDTVCSGVTGAMNVAKGT |
| | | | | | | IQTGVDTSKTVLTGTKDTVCSGVTQAMNVA |
| | | | | | | KGTIQTGVDITKTVLTGTKNTVCSGVTGAVN |
| | | | | | | LAKEAIQGGLDTTKSMYMGTKDTMSTGLTG |
| | | | | | | AANVAKGAMQTGLNTTQNIATGTKDTVCSG |
| | | | | | | VTGAMNLARGTIQTGVDTTKIVLTGTICDTVC |
| | | | | | | SGVTQAANVAKGAVQGGLDTTKSVLTGTKD |
| | | | | | | AVSTGLTGAVNVAKGTVQTGVDTTKTVLTG |
| | | | | | | TKDTVCSGVTSAVNVAKGAVQGGLDTTKSV |
| | | | | | | VIGTKDTMSTGLTGAANVAKGAVQTGVDTA |
| | | | | | | KTVLTGTKDTVTTGLVGAVNVAKGTVQTGM |
| | | | | | | DTTKTVLTGTKDTIYSGVTSAVNVAKGAVQT |
| | | | | | | GLKTTQNIATGTKNTFGSGVTSAVNVAKGAA |
| | | | | | | QTGVDTAKTVLTGTKDTVTTGLMGAVNVAK |
| | | | | | | GTVQTSVDTTKTVLTGTKDTVCSGVTGAAN |
| | | | | | | VAKGAIQGGLDTTKSVLTGTKDAVSTGLTGA |
| | | | | | | VKLAKGTVQTGMDITKTVLTGTKDAVCSGV |
| | | | | | | TGAANVAKGAVQMGVDTAKTVLTGTKDTV |
| | | | | | | CSGVTGAANYAKGAVQTGLKTTQNIATGTK |
| | | | | | | NTLGSGVTGAAKVAKGAVQGGLDTTKSVLT |
| | | | | | | GTKDAVSTGLTGAVNLAKGTVQTGVDTSKT |
| | | | | | | VLTGTKDTVCSGVTGAVNVAKGTVQTGVDT |
| | | | | | | AKTVLSGAKDAVITGVTGAVNVAKGTVQTG |
| | | | | | | VDASKAVLMGTKDTVFSGVTGAMSMAKGA |
| | | | | | | VQGGLDTTKTVLTGTKDAVSAGLMGSGNVA |
| | | | | | | TGATHTGLSTFQNWLPSTPATSWGGLTSSRT |
| | | | | | | IDNGGEQTALSPQEAPFSGISTPPDVLSVGPEP |
| | | | | | | AWEAAATTKGLATDVATFTQGAAPGREDTG |
| | | | | | | LLATTHGPEEAPRLAMLQNELEGLGDIFHPM |
| | | | | | | NAEEQAQLAASQPGPKVLSAEQGSYFVRLGD |
| | | | | | | LGPSFRQRAFEFIAVSHLQHGQFQARDTLAQL |
| | | | | | | QDCFRL |
| 1275 | 2625 | A | 10025 | 124 | 415 | TILARKKEKTCPCKKEIGRNSRSGMYSRKAM |
| | | | | | | YKRKYSAANTKVEKKKKEKVLAPVTKPVGG |
| | | | | | | DKNGGTRVVKLPTMPRYYPTEDVPRKLLSHG |
| | | | | | | KKPFS |
| 1276 | 2626 | A | 10030 | 3 | 507 | GGSLRFSPPRVPSCSRVFCPVPPGGCGLPSPMS |
| | | | | | | ASRPQSPITPWCLPRRYMKHKRDDGPEKQED |
| | | | | | | EAVDVTPVMTCVFVVMCCSMLVLLYYFYDL |
| | | | | | | LVYVVIGIFCLASATGLYSCLAPCVRRLPFGK |
| | | | | | | CRIPNNSLPYFHKRPQARMLLLALFCVAVSV |
| | | | | | | VWGVFRNEDQ |
| 1277 | 2627 | A | 10035 | 51 | 869 | YSRFTVPLPATMASSEVARHLLFQSHMATKT |
| | | | | | | TCMSSQGSDDEQIKRENIRSLTMSGHVGFESL |
| | | | | | | PDQLVNRSIQQGFCFNILCVGETGIGKSTLIDT |
| | | | | | | LFNTNFEDYESSHFCPNVKLKAQTYELQESN |
| | | | | | | VQLKLTIVNTVGFGDQINKEERQLGRSQSTEN |
| | | | | | | PQKYRSEQHPVEPKKCTSFWKGALGKWAGIE |
| | | | | | | SSGQSAQQPYLPINSPPHRLADVADVHLFSSV |
| | | | | | | LSGAFGCYHLDVTVNEFKKQQNRDEQEGYS |
| | | | | | | KGDQEQGSWICHGADPLRGGEM |
| 1278 | 2628 | A | 10036 | 3 | 457 | RAFDVRRKKSLRPCCPRDFHAGCLTVSGPST |
| | | | | | | VMGAVGESLSVQCRYEEKYKTFNKYWCRQP |
| | | | | | | CLPIWHEMVETGGSEGVVRSDQVIITDHPGDL |
| | | | | | | TTFTVTLENLTADDAGKYRCGIATILQEDGLSG |
| | | | | | | FLPDPFFQVQVLVSSASSTENSVKTP |
| 1279 | 2629 | A | 10039 | 214 | 435 | NDSLVPMSSWRSCARAPSSESAWRRSAATRR |
| | | | | | | SRKCLRTKRKRWSSGKGTQMQSTLSETPRDA |
| | | | | | | QMPCMWWYPFWG |
| 1280 | 2630 | A | 10043 | 2 | 344 | RATWHNAGKEREAVQLMAGAEKRVKASHS |
| | | | | | | FLRGLFGGNTRIEEACEMYTRAANMFKMAK |
| | | | | | | NWSAAGNAFCQAAKLHMQLQSKHDSATSFV |
| | | | | | | DAGNAYKKADPQGKTARHVACYLCV |
| 1281 | 2631 | A | 10080 | 620 | 818 | VIYKLDSSLFSYFIYFFIFETESHFLPLMKWTG |
| | | | | | | PIMAHCSLKILASRNSADSAFLSAGDTSLSHST |
| 1282 | 2632 | A | 10084 | 3 | 1640 | SASIIIRGDKRASGEVGIAPSSRHILIGEPSAKY |
| | | | | | | NGTAIISLVRGPGILGEVTVFWRIFPPSVGEFA |
| | | | | | | ETSGKLTMRDEQSAVIVVTQALNDDIPEEKSF |
| | | | | | | YEFQLTAVSEGGVLSESSSTANITVVASDSPY |
| | | | | | | GRFAFSHEQLRVSEAQRVNITIIRSSGDFGHVR |
| | | | | | | LWYKTMSGTAEAGLDFVPAAGELLFEAGEM |
| | | | | | | RKSLHVEILDDDYPEGPEEFSLTITKVELQGR |
| | | | | | | GYDFTIQENGLQIDQPPEIGNISIVRIIIMKNDN |
| | | | | | | AEGIIEFDPKYTAFEVEEDVGLIMIPVVRLHGT |
| | | | | | | YGYVTADFISQSSSASPGGVDYILHGSTVTFQ |
| | | | | | | HGQNLSFINISIIDDNESEFEEPIEILLTGATGG |
| | | | | | | AVLGRHLVSRIIIAKSDSPFGVIRFLNQSKISIA |
| | | | | | | NPNSTMILSLVLERTGGLLGEIQVNWETVGPN |
| | | | | | | SQEALLPQNRDIADPVSGLFYFGEGEGGVRTII |
| | | | | | | LTIYPHEEIEVEETFIIKLHLVKGEAKLDSRAK |
| | | | | | | DVTLTIQEFGDPNGVVQFAPETLSKKTYSEPL |
| | | | | | | ALEGPLLITFFVRRVKGTFGEIM |
| 1283 | 2633 | A | 10088 | 316 | 516 | MGSKTLPAPVPIHPSLQLTNYSFLQAVNGLPT |
| | | | | | | VPSDHLPNLYGFSALHAVHLHQWTLGYPAM |
| | | | | | | HLXRS |
| 1284 | 2634 | A | 10091 | 2 | 569 | FVSPSRAMASALIYVSKFKSFVILVVTPLLLLP |
| | | | | | | LVILMPAKFVRCAYVIILMAIYWCTEVIPLAV |
| | | | | | | TSLMPVLLFPLFQILDSRQVCVQYMKDTNML |
| | | | | | | FLGGLIVAVAVERWNLHKRIALRTLLWVGA |
| | | | | | | KPARLMLGFMGVTALLSMWISNTAITAMMV |
| | | | | | | PIVEAILQQMEATSAATEAGLELVDKGKAKE |
| | | | | | | LP |
| 1285 | 2635 | A | 10092 | 290 | 728 | KQSTRPDVMTLYPLHWQEEMSGESVVSSAVP |
| | | | | | | AAATRTTSFKGTSPSSKYVKLNVGGALYYTT |
| | | | | | | MQTLTKQDTMLKAMFSGRMEVLTDSEGWIL |
| | | | | | | IDRCGKHFGTILNYLRDGAVPLPESRREIEELL |
| | | | | | | AEAKYYLVQGLVEECQAALQV |
| 1286 | 2636 | A | 10100 | 1 | 574 | RPRGRGAWAGPGQDYSGVRRQQRRRTPISGS |
| | | | | | | QRGSDAAGTMGCCTGRCSLICLCALQLVSAL |
| | | | | | | ERQIFDFLGFQWAPILGNFLHHVVILGLFGTIQ |
| | | | | | | YRPRYIMVYTVWTALWVTWNVFIICFYLEVG |
| | | | | | | GLSKDTDLMTFNISVHRSWWREHGPGCVRR |
| | | | | | | VLPPSAHGMMDDYTYVSVTGCIVDFQYLEVI |
| | | | | | | NSA |
| 1287 | 2637 | A | 10103 | 252 | 376 | RSRMGDKPIWEQIGSSFIQHYYQLFDNDRTQL |
| | | | | | | GAIYVSFQL |
| 1288 | 2638 | A | 10107 | 1 | 478 | MEEEDESRGKTEESGEDRGDGPPDRDPTLSPS |
| | | | | | | AFILRAIQQAVGSSLQGDLPNDKDGSRCHGL |
| | | | | | | RWRRCRSPRSEPRSQESGGTDTATVLDMATD |
| | | | | | | SFLAGLVSVLDPPDTWVPSRLDLRPGESEDM |
| | | | | | | LELVAEVRIGDRDPIPLPVFSLLPRLRAWRTG |
| | | | | | | KT |
| 1289 | 2639 | A | 10113 | 237 | 438 | LLSRMPSTNRAGSLKDPEIAELFFKEDPEKLFT |
| | | | | | | DLREIGHGSFGAAYFARDVRTNEVVAIKKMS |
| | | | | | | YSG |
| 1290 | 2640 | A | 10114 | 367 | 856 | RGAKAKSAVLPPGPPCSSLLILSPPAPLTPRSPG |
| | | | | | | TEATRPTAMSKSLKKKSHWTSKVHESVIGRN |
| | | | | | | PEGQLGFELKGGAENGQFPYLGEVKPGKVAY |
| | | | | | | ESGSKLVSEELLLEVNETPVAGLTIRDVLAVI |
| | | | | | | KHCKDPLRLKCVKQGESSGLLSVLPGGGTAR |
| | | | | | | GAGQ |
| 1291 | 2641 | A | 10116 | 128 | 591 | RTIRETERRSALSCSVLKSEPLPGLQPQASQQR |
| | | | | | | RRRLPGRRQVQVQEGGGSGLRAWVLAMASV |
| | | | | | | LGSGRGSGGLSSQLKCKSKRRRRRRSKRKDK |
| | | | | | | VSILSTFLAPFKHLSPGITNTEDDDTLSTSSAE |
| | | | | | | VKENRNVGNLAARPPPSGDRARGGATR |
| 1292 | 2642 | A | 10121 | 1 | 749 | QRRRFRAGLWGGHGLTDGLRRNGGCGCSAR |
| | | | | | | VPRVGERLRGERCPDPLCLLLDMLFLSFHAG |
| | | | | | | SWESWCCCCLIPADRPWDRGQHWQLEMADT |
| | | | | | | RSVHETRFEAAVKVIQSLPKNGSFQPTNEMM |
| | | | | | | LKFYSFYKQATEGPCKLSRPGFWDPIGRYKW |
| | | | | | | DAWSSLGDMTKEEAMIAYVEEMKKIIETMP |
| | | | | | | MTEKVEELLRVIGPFYEIVEDKKSGRSSDITSD |
| | | | | | | LGNVLTSTPNAKTVNGKAESSDSGAESEEEE |
| | | | | | | AC |
| 1293 | 2643 | A | 10124 | 2 | 989 | PLMSLVRVVEFVAASSAQKTPSRLENYYMVC |
| | | | | | | KDEKFNQLVHFLRNHKQEKHLVFFRYSSGL |
| | | | | | | CGRGIRDSARMCSTCACVEYYGKALEVLVK |
| | | | | | | GVKIMCIHGKMKYKRNKIFMEFRKLQSGILV |
| | | | | | | CTDVMARGIDIPEVNWVLQYDPPSNASAFVH |
| | | | | | | RCGRTARIGHGGSALVFLLPMEESYINFLAIN |
| | | | | | | QKCPLQEMKPQRNTADLLPKLKSMALADRA |
| | | | | | | VFEKGMKAFVSYVQAYAKHECNLIFRLKDL |
| | | | | | | DFASLARGFALLRMPKMPELRGKQFPDFVPV |
| | | | | | | DVNTDTWFKDKIREKQRQKLLEQQRRRKTEN |
| | | | | | | EGRRKFIKNKAWSKQKAKKK |
| 1294 | 2644 | A | 10129 | 91 | 1042 | VTMYKDCIESTGDYFLLGDAEGPWGIILESLA |
| | | | | | | ILGIVVTILLLLAFLFLMRKIQDCSQWNVLPTQ |
| | | | | | | LLFLLSVLGLFGLAFAFIIELNQQTAPVRYFLP |
| | | | | | | GVLFALCPSCLLAHASNLVKLVRGCVSFSWT |
| | | | | | | TILCIAIGCSLLQIIIATEYVTLIMTRGMMFVN |
| | | | | | | MTPCQLNVDFVVLLVYVLFLMALTFFVSKAT |
| | | | | | | FCGPCENWKQHGRLIFITVLFSIIIWVVWISML |
| | | | | | | LRGNPQFQRQPQWDDPVVCIALVTNAWVFL |
| | | | | | | LLYLVPELCILYRSCRQECPLQGNACPVTAYQ |
| | | | | | | HSFQVENQELSPDKWKVLLNSDFLSHSGA |
| 1295 | 2645 | A | 10133 | 376 | 518 | RPRVVTHNSQWCFLPQDHPGWLPGQSGAPG |
| | | | | | | GRGAPRQEGPGSSWRQV |
| 1296 | 2646 | A | 10135 | 3 | 551 | EWSLDPFMGIMSGQVGDLSPSQEKSLAQFRE |
| | | | | | | NIQDVLSALPNPDDYFLLRWLQARSFDLQKS |
| | | | | | | EDMLRKHMEFRKQQDLANILAWQPPEVVRL |
| | | | | | | YNANGICGHDGEGSPVWYHIVGSQDPKGLLL |
| | | | | | | SASKQELLRDSFRSCELLLRECELQSQKLGKR |
| | | | | | | VEKIIAIFGLEGLGLRDLWKPGIELLQE |
| 1297 | 2647 | A | 10138 | 48 | 407 | MVSSCCGSVCSDQGCGQDLCQETCCRPSCCE |
| | | | | | | TPCCRIITCCRPSCCVSSCCRPQCCQSVCCQPT |
| | | | | | | CSRPSCCQTTCCRTTCYRPSCCVSSCCRPQCC |
| | | | | | | QPVCCQPTCCRPSCCEITCCHPQCC |
| 1298 | 2648 | A | 10156 | 94 | 453 | GGNRKSAEMFSQVPRTPASGCYYLNSMTPEG |
| | | | | | | QEMYLRFDQTTRRSPYRMSRILARHQLVTKI |
| | | | | | | QQEIEAKEACDWLRAAGFPQYAQLYEDSQFP |
| | | | | | | INIVAVKNDHDFLEKDLGEPLCRRLNT |
| 1299 | 2649 | A | 10161 | 1 | 393 | PRFSELVDGRGRVSARFGGSPSKAATVRSQPT |
| | | | | | | ASAQLENMEEAPKRVSLALQLPEHGSKDIGN |
| | | | | | | VPGNCSENPCQNGGTCVPGADAHSCDCGPGF |
| | | | | | | KGRRCELACIKVSRPCTRLFSETKAFPVWEGG |
| | | | | | | VCHHV |
| 1300 | 2650 | A | 10162 | 98 | 391 | AKIASLERIMPANYTCTRPDGDNTDFRYFIYA |
| | | | | | | VTYTGILGPGLIGNILALWVFYGYMKETKRA |
| | | | | | | VIFMINLAIADLLQVLSLPLRIFYYLKHDWPF |
| | | | | | | VPV |
| 1301 | 2651 | A | 10165 | 1 | 7545 | PGIRVGITSQTGLSSNLQENCSKLAFISSHGTE |
| | | | | | | KQLQCMPMEGRGRASSSISDLQGKGFEKGTG |
| | | | | | | EKHVPGVGSARHSPQASAGGSPWQRGKAQT |
| | | | | | | RWLGKPDPGRKRRRGSPQEEGGLRVSAAAR |
| | | | | | | LLCSGANRCKVLVRQNSTPNTQQPAVHPSTP |
| | | | | | | PSRPLPQAGRCLVAPLRPHPDWVAAKTLAKA |
| | | | | | | LRAPGKPWRLAAPSPLGDLGAPGLPGPSTAP |
| | | | | | | RTLSVEEPGVECNQLCLYADVTDPVLCLGQK |
| | | | | | | DPGVEGKHCEKEKISSSKELKHVHAKSEPSKP |
| | | | | | | ARRLSESLHVVDENKNESKIEREHKRRTSTPV |
| | | | | | | IMEGVQEETDTRDVKRQVERSEICTEEPQKQ |
| | | | | | | KSTLKNEKHLKKDDSETPHLKSLLKKEVKSS |
| | | | | | | KEKPEREKTPSEDKLSVKHKYKGDCMHKTG |
| | | | | | | DETELHSSEKGLKVEENIQKQSQQTKLSSDDK |
| | | | | | | TERKSKHRNERKLSVLGKDGKPVSEYIIKTDE |
| | | | | | | NVRKENNKKERRLSAEKTKAEHKSRRSSDSK |
| | | | | | | IQKDSLGSKQHGITLQRRSESYSEDKCDMDST |
| | | | | | | NMDSNLKPEEVVIIKEKRRTKSLLEEKLVLKS |
| | | | | | | KSKTQGKQVKVVETELQEGATKQATTPKPD |
| | | | | | | KEKNTEENDSEKQRKSKVEDKPFEETGVEPV |
| | | | | | | LETASSSAHSTQKDSSHRAKLPLAKEKYKSD |
| | | | | | | KDSTSTRLERKLSDGHKSRSLKHSSKDIKKKD |
| | | | | | | ENKSDDKDGKEVDSSHEKARGNSSLMEKKL |
| | | | | | | SRRLCENRRGSLSQEMAKGEEKLAANTLSTP |
| | | | | | | SGSSLQRPKKSGDMTLIPEQEPMEIDSEPGVE |
| | | | | | | NVFEVSKTQDNRNNNSHQDIDSENMKQKTS |
| | | | | | | ATVQKDELRTCTADSKATAPAYKPGRGTGV |
| | | | | | | NSNSEKHADHRSTLTKKMHIQSAVSKMNPGE |
| | | | | | | KEPIHRGTTEVNIDSETVHRMLLSAPSENDRV |
| | | | | | | QKNLKNTAAEEHVAQGDATLEHSTNLDSSPS |
| | | | | | | LSSVTVVPLRESYDPDVIPLFDKRTVLEGSTA |
| | | | | | | STSPADHSALPNQSLTVRESEVLKTSDSKEGG |
| | | | | | | EGFTVDTPAKASITSKRHIPEAHQATLLDGKQ |
| | | | | | | GKVIMPLGSKLTGVIVENENITTKEGGLVDMA |
| | | | | | | KKENDLNAEPNLKQTIKATVENGKKDGIAVD |
| | | | | | | HVVGLNTEKYAETVKLKRKRSPGKVKDISID |
| | | | | | | VERRNENSEVDTSAGSGSAPSVLHQRNGQTE |
| | | | | | | DVATGPRRAEKTSVATSTEGKDKDVTLSPVK |
| | | | | | | AGPATTTSSETRQSEVALPCTSIEADEGLIIGT |
| | | | | | | HSRISINPLITIVGAEASECTVFAAAEEGGAVVTE |
| | | | | | | GFAESETFLTSTKEGESGECAVAESEDRAADL |
| | | | | | | LAVHAVKIEANVNSVVTTEKDDAVTSAGSEE |
| | | | | | | KCDGSLSRISEIVEGTTTFISEVESDGAVTSAG |
| | | | | | | TEIRAGSISSEEVDGSQGNMMRMGPKKETEG |
| | | | | | | TVTCTGAEGRSDNFVICSVTGAGPREERMVT |
| | | | | | | GAGVVLGDNDAPPGTSASQEGDGSVNDGTE |
| | | | | | | GESAVTSTGITEDGEGPASCTGSEDSSEGFAIS |
| | | | | | | SESEENGESAMDSTVAKEGTNVPLVAAGPCD |
| | | | | | | DEGIVTSTGAKEEDEEGEDVVTSTGRGNEIGH |
| | | | | | | ASTCTGLGEESEQVLICESAEGDSQIGTVVEH |
| | | | | | | VEAEAGAAIMNANENNVDSMSGTEKGSKDT |
| | | | | | | DICSSAKGIVESSVTSAVSGKDEVTPVPGGCE |
| | | | | | | GPMTSAASDQSDSQLEKVEDITISTGLVGGS |
| | | | | | | YDVLVSGEVPECEVAHTSPSEKEDEDIITSVE |
| | | | | | | NEECDGLMATTASGDITNQNSLAGGKNQGK |
| | | | | | | VLIISTSTTNDYTPQVSAITDVEGGLSDALRTE |
| | | | | | | ENMEGTRVTTEEFEAFMPSAVSGDDSQLTAS |
| | | | | | | RSEEKDECAMISTSIGEEFELPISSATTIKCAES |
| | | | | | | LQPVAAAVEERATGPVLISTADFEGPMPSAPP |
| | | | | | | EAESPLASTSKEEKDECALISTSIAEECEASVS |
| | | | | | | GVVVESENERAGTVMEEKDGSGIISTSSVEDC |
| | | | | | | EGPVSSAVPQEEGDPSVTPAEEMGDTAMISTS |
| | | | | | | TSEGCEAVMIGAVLQDEDRLTITRVEDLSDA |
| | | | | | | AIISTSTAECMPLSASIDRHEENQLTADNPEGN |
| | | | | | | GDLSATEVSKHKVPMPSLIAENNCRCPGPVR |
| | | | | | | GGKEPGPVLAVSTEEGHNGPSVHKPSAGQGH |
| | | | | | | PSAVCAEKEEKHGKECPEIGPFAGRGQKESTL |
| | | | | | | HLINAEEKNVLLNSLQKEDKSPETGTAGGSST |
| | | | | | | ASYSAGRGLEGNANSPAHLRGPEQTSGQTAK |
| | | | | | | DSSVSSIRYLAAVNTGAIKADDMPVQGTVA |
| | | | | | | EHSFLPAEQQGSEDNLKTSTTKCITGQESKIAP |
| | | | | | | SHTMIPPATYSVALLAPKCEQDLTIKNDYSGK |
| | | | | | | WTDQASAEKTGDDNSTRKSFPEEGDIMVTVS |
| | | | | | | SEENVCDIGNEESPLNVLGGLKLKANLKMEA |
| | | | | | | YVPSEEEKNGELLAPPESLCGGKPSGIAELQRE |
| | | | | | | PLLVNESLNVENSGFRTNEEIHSESYNKGEISS |
| | | | | | | GRKDNAEAISGHSVEADPKEVEEEERHMPKR |
| | | | | | | KRKQHYLSSEDEPDDNPDVLDSRIETAQRQC |
| | | | | | | PETEPHATKEENSRDLEELPKTSSETNSTTSRV |
| | | | | | | MEEKDEYSSSETPGEKPEQNDDDTIKSQE |
| 1302 | 2652 | A | 10167 | 321 | 842 | EPSLFPFLRPSPARPPPRPPAPFPSPELAGPEPH |
| | | | | | | FVFYFFLSYVHPPKELAKYEYMEEQVILTEKG |
| | | | | | | NSTVAGRGTSVRCLSPSPRPLPPLLPLLADLLE |
| | | | | | | DGFGEHPFYHCLVAEVPKEHWTPEGNPSPFP |
| | | | | | | EARETKCYVRSSVGCVEPLTTQAEVTENLDR |
| | | | | | | KNSQQVFKLLKKK |
| 1303 | 2653 | A | 10171 | 206 | 429 | NMILLKKRRLLINSLGEGTINGLLDELLETNV |
| | | | | | | LSQEDTEIVKCENVTVIDKARDLLDSVIRKGA |
| | | | | | | RACEICITYI |
| 1304 | 2654 | A | 10184 | 970 | 1524 | LGTLSPGISGTAGSCLTTEPGTELGTSFAQNGF |
| | | | | | | YHEAVVLFTQALKLNPQDHRLFGNRSFCHER |
| | | | | | | LGQPAWALADAQVALTTRPGWPRGLFRLGK |
| | | | | | | ALMGLQRPREAAAVFQETTRGGSQPDAAREL |
| | | | | | | RSCLLHLTLQGQRGGICAPPLSPGALQPLPHA |
| | | | | | | ELAPSGLPSLRCPRSTALRSPGLSPLLH |
| 1305 | 2655 | A | 10194 | 2 | 394 | TDLLGRRFRVDGAAMAACEGRRSGALGSSQ |
| | | | | | | SDFLTPPVGGAFWAVATTIVMYPPPPPPPHIR |
| | | | | | | DFISVTLSFGESYDNSKSWRRRSCWRKWKQL |
| | | | | | | SRLQRNMILFLLAFLLFCGLLFYINLADHWKG |
| | | | | | | TRNTCT |
| 1306 | 2656 | A | 10195 | 1 | 410 | IPGSTISLEGPLSKWTNVMKGWQYRWFVLDY |
| | | | | | | NAGLLSYYTSKDKMMRGSRRGCVRLRGAVI |
| | | | | | | GIDDEDDSTFTITVDQKTFHFQARDADEREK |
| | | | | | | WIHALEETTLRHTLQLQVRVFTWFPDSSLVGA |
| | | | | | | FFFWLVSGFFFK |
| 1307 | 2657 | A | 10205 | 85 | 308 | QGLPSTMVKLGCSFSQKPGKDPGDQDGAAM |
| | | | | | | DSVPLISPLDISQLQPPLPDQVVIKTQTEYQLS |
| | | | | | | SPDQQNYTKSR |
| 1308 | 2658 | A | 10214 | 2 | 453 | ECGGIRQPGPGPPPALASAPAATMNRVGGSPS |
| | | | | | | AAANYLLCTNCRKVLRKDKRIRVSQPLTRRGP |
| | | | | | | SAFIPEKEVVQANTVDERTNFLVEEYSTSGRL |
| | | | | | | DNITQVMSLHTQYLESFLRSQFYMLRMDGPL |
| | | | | | | PLPYRHYIAIMAAARHQCSYLINM |
| 1309 | 2659 | A | 10233 | 45 | 421 | RGWPEQQSTGRPRDVARQPRCQKEEGRELRP |
| | | | | | | RALESRTFQGSERSRWGPPLESTKENVQCGH |
| | | | | | | RPAFPNSSWLPFHERIQVQNGECPWQVSIQM |
| | | | | | | SRKHLCGGSILHWWWVLTAAHCPRRTLLDM |
| | | | | | | AV |
| 1310 | 2660 | A | 10241 | 243 | 442 | AFQLFNAKCESAFLSKRNPLQRNWTVLYRRK |
| | | | | | | HKKGQSAEIQKKRTRRAFKFQRAITGASLADI |
| | | | | | | MAK |
| 1311 | 2661 | A | 10261 | 751 | 176 | LPGADYGGGHLSLRLFHLLLTSAAWVPDESQ |
| | | | | | | VTLNSAICVLSTVLIMEFPDLGKHCSEKTCKQ |
| | | | | | | LDFLPVKCDACKQDFCKDHFPYAAHKCPFAF |
| | | | | | | QKDVHVPVCPLCNTPIPVKKGQIPDVVVGDHI |
| | | | | | | DRDCDSHPGKKKEKIFTYRCSKEGCKKKEML |
| | | | | | | QMVCAQCHGNFCIQHRHPLDHSCRHGSRPTI |
| | | | | | | KAG |
| 1312 | 2662 | A | 10270 | 3 | 669 | STSSDEGSPSASTPMINKTGFKFSAEKPVIEVP |
| | | | | | | SMTILDKKDGEQAKALFEKVRKPRAHVEDSD |
| | | | | | | LIYKLYVVQTVIKTAKFIFILCYTANFVNAISF |
| | | | | | | EHVCKPKVEHLIGYEVFECTHNMAYMLKKL |
| | | | | | | LISYISIICVYGFICLYTLFWLFRIPLKEYSFEKV |
| | | | | | | REESSFSDIPDVICNDFAFLLHMVDQYDQLYS |
| | | | | | | KRFGVFLSEVSENKLREISLNHEWTFEKL |
| 1313 | 2663 | A | 10287 | 1221 | 266 | GAIIRVLSPAQGAQPRLRSAASVEVSMVGQR |
| | | | | | | VLLLVAFLLSGVLLSEAAKILTISTLGGSHYLL |
| | | | | | | LDRVSQILQEHGHNVTMLHQSGKFLIPDIKEE |
| | | | | | | EKSYQVIRWFSPEDHQICRIKKHFDSYIETALD |
| | | | | | | GRKESEALVKLMEIFGTQCSYLLSRKDIMDSL |
| | | | | | | KNENYDLVFVEAFDFCSFLIAEKLVKPFVAIL |
| | | | | | | PTTFGSLDFGLPSPLSYVPVFPSLLTDHMDFW |
| | | | | | | GRVKNFLMFFSFSRSQWDMQSTFDNTIKEHF |
| | | | | | | PEGSRPVLSHLLLKAELWFVNSDCAFDFARPL |
| | | | | | | LPNTVYIGGLMEKPIKPVPQVSEPSAFSLGFT |
| 1314 | 2664 | A | 10288 | 536 | 1890 | NVQLAICFSSTLVFFFSCDADPSALAKYVLAL |
| | | | | | | VKKDKSEKELKALCIDQLDVFLQKETQIPVEK |
| | | | | | | LFDAVNTKSYLPPPEQPSSGSLKVEFFPPQEK |
| | | | | | | DIKKEEITKEEEREKKFSRRLNHSPPQSSSRYR |
| | | | | | | ENRSRDERKKDDRSRKRDYDRNPPREDSYRD |
| | | | | | | RYNRRRGRSRSYSRSRSRSWSKERLRERDRD |
| | | | | | | RSRTRSRSRTRSRERDLVKPKYDLDRTDPLEN |
| | | | | | | NYTPVSSVPSISSGHYPVPTLSSTITVIAPTHHG |
| | | | | | | NNTTESWSEFHEDQVDHNSYVRPPMPKKRC |
| | | | | | | RDYDEKGFCMRGDMCPFDHGSDPVVVEDVN |
| | | | | | | LPGMQPFPAQPPVVEGPPPPGLPPPPPILTPPPV |
| | | | | | | NLRPPVPPPGPLPPSLPPVTGPPPPLPPLQPSG |
| | | | | | | MDAPPNSATSSVPTVVTTGIHHQPPPAPPSLFT |
| | | | | | | ADTYDTDGYNPEAPSITNTSRPMYRHRVHPR |
| | | | | | | AKLG |
| 1315 | 2665 | A | 10293 | 447 | 1331 | SHPLLSCPEKVSAKLRAAAEAAAEERRTRGA |
| | | | | | | GSRGICAGLRSVAPGPEPLKQEEGRREWGSSI |
| | | | | | | GTPSPCGSAQAAAAAAAEEATEKIPALRPALL |
| | | | | | | WALLALWLCCATPAHALQCRDGYEPCVNEG |
| | | | | | | MCVTYHNGTGYCKGPEGFLGEYCQHRDPCE |
| | | | | | | KNRCQNGGTCVAQAMLGKATCRCASGFTGE |
| | | | | | | DCQYSTSHPCFVSRPCLNGGTCHMLSRDTYE |
| | | | | | | CTCQVGFTGRNPKCPGGNLNYQFNGIIVVYS |
| | | | | | | GGSVPPSGTKTSKPAEHNAMGTGSKNFASGT |
| | | | | | | LWVMVSGATSTSTSTL |
| 1316 | 2666 | A | 10294 | 118 | 572 | SLSMESNHKSGDGLSGTQKEAALRALVQRTG |
| | | | | | | YSLVQENGQRKYGGPPPGWDAAPPERGCEIFI |
| | | | | | | GKLPRDLFEDELIPLCEKIGKIYEMRMMMDF |
| | | | | | | NGNNRGYAFVTFSNKVEAKNATKQLNNYEIR |
| | | | | | | NGRLLGVCASVDNCRLFVGGIPKTKK |
| 1317 | 2667 | A | 10301 | 158 | 1956 | LLKSCGVLLSGVCIPCEGKGPTVLVIQTAVPQ |
| | | | | | | DRPTKSSMRSAAKPWNPAIRAGGHGPDRVRP |
| | | | | | | LPAASSGMKSSKSSTSLAFESRLSRLKRASSE |
| | | | | | | DTLNKPGSTAASGVVRLKKTATAGAISELTES |
| | | | | | | RLRSGTGAFITTKRTGIPAPREFSVTVSRERSV |
| | | | | | | PRGPSNPRKSVSSPTSSNTPTPTKHLRTPSTKP |
| | | | | | | KQENEGGEKAALESQVRELLAEAKAKDSEIN |
| | | | | | | RLRSELKKYKEKRTLNAEGTDALGPNVDGTS |
| | | | | | | VSPGDTEPMIRALEEKNKNFQKELSDLEEENR |
| | | | | | | VLKEKLIYLEUSPNSEGAASHTGDSSCPTSITQ |
| | | | | | | ESSFGSPTGNQLSSDIDEYKKNLHGNALRTSG |
| | | | | | | SSSSDVTKASLSPDASDFEHITAETPSRPLSSTS |
| | | | | | | NPFKSSKCSTAGSSPNSVSELSLASLTEKIQKM |
| | | | | | | EENHHSTAEELQATLQELSDQQQMVQELTAE |
| | | | | | | NEKLVDEKTILETSFHQHRERAEQLSQENEKL |
| | | | | | | MNLLQERVKNEEPITQEGKLIELEQKCTGILE |
| | | | | | | QGRFEREKLLNIQQQLTCSLRKVEEENQGAL |
| | | | | | | EMIKRLKEENEKLNEFLELERIINNNMMAKTL |
| | | | | | | EECRVTLEGLKMENGSLKSHLQG |
| 1318 | 2668 | A | 10303 | 333 | 879 | GECFIMAAVVQQNDLVFEFASNVMEDERQL |
| | | | | | | GDPAIFPAVIVEHVPGADILNSYAGLAGVEEP |
| | | | | | | NDMITESSLDVAEEEIIDDDDDDITLTVEASCH |
| | | | | | | DGDETETIEAAEALLNMDSPGPMLDEKRINN |
| | | | | | | NIFSSPEDDMVVAPVTHVSVTLDGIPEVMETQ |
| | | | | | | QVQEKYADSPGASSPEQPKRKKK |
| 1319 | 2669 | A | 10322 | 169 | 654 | MEVRMSGSVAVTRAIAVPGLLLLLIIATALSL |
| | | | | | | LIGAKSLPASVVLEAFSGTCQSADCTIVLDAR |
| | | | | | | LPRTLAGLLAGGALGLAGALMQTLTRNPLAD |
| | | | | | | PGLLGVNAGASFAIVLGAALFGYSSAQEQLA |
| | | | | | | MAFAGALVASLIVAFTGSQGGGQLSPVRLTL |
| | | | | | | AGVXL |
| 1320 | 2670 | A | 10323 | 441 | 2 | KMNQYAVVIGGGQTLGAFLCHGLAAEGYRV |
| | | | | | | AVVDIQSDKAANVAQEINAEYGESMAYGFG |
| | | | | | | DATSEQSVLALSRGVDEIFGRVDLLVYSAGI |
| | | | | | | AKAAFISDFQLGDFDRSLQVNLVGYFLCARE |
| | | | | | | FSRLMIRDGIQGRIIQINSKSDE |
| 1321 | 2671 | A | 10332 | 1 | 453 | RHRTAGPGSTISSRTDSASAPAARAMPCEYTY |
| | | | | | | AKLTSDCSRPSLQWYTKAQSKMREPRLLLKD |
| | | | | | | ILKCTLLVFGVRIIYILKLNYTTEECDMKNMH |
| | | | | | | YVDPDHVKRAQKYAQQVLQKESPPKFAKTS |
| | | | | | | MALLFEHRYSVDLLPFVQKAPTDSEA |
| 1322 | 2672 | A | 10333 | 25 | 423 | EPSNGPVVYSALGNEDDEILLLGKDIIGTFAAS |
| | | | | | | ERKMRAHQVLTFLLLFVITSGASENASTSRGC |
| | | | | | | GLDLLPQNVYLCDLDAIWGIVVEAVAGAGA |
| | | | | | | LITLLLMLILLGRLPFIKEKEKKSPAVLHFLFL |
| | | | | | | LGTLG |
| 1323 | 2673 | A | 10334 | 52 | 426 | SSLGNEDDE1LSLAKDITGMFVASHRKMRAH |
| | | | | | | QVLTFLLLFVITSVASENASTSRGCGLDLLPQ |
| | | | | | | YVSLCDLDAIWGWVEAAAQAGALITLLLMLI |
| | | | | | | LLVRLPFFKEKEKKSPVGLHFLFLLGTLGP |
| 1324 | 2674 | A | 10336 | 1 | 932 | ERLCFPCMQSKIYSYMSPNKCSGMRFPLQEE |
| | | | | | | NSVTIIHEVKCQGKPLAGIYRKREEKRNAGN |
| | | | | | | AVRSAMKSEEQKIKDARKGPLVPFPNQKSEA |
| | | | | | | AEPPKTPPSSCDSTNAAIAKQALKKPIKGKQA |
| | | | | | | PRKKAQGKTQQNRKLTDFYPVRRSSRKSKAE |
| | | | | | | LQSEERKRIDELIESGKEEGMKIDLIDGKGRG |
| | | | | | | VIATKQFSRGDFVVEYHGDLIEITDAKKREAL |
| | | | | | | YAQDPSTGCYMYYFQYLSKTYCVDATRETN |
| | | | | | | RLGRLINHSKCGNCQTKLHDIDGVPHLILIAS |
| | | | | | | EDIAAGEELLYDYGDRSKASIEAHPWLKH |
| 1325 | 2675 | A | 10338 | 3 | 870 | PGSTISCSELKGTQCRATAGSRGRRPPMTCWL |
| | | | | | | RGVTATFGRPAEWPGYLSHLGGRSAAMDLG |
| | | | | | | PMRKSYRGDREAFEETHLTSLDPVKQFAAWP |
| | | | | | | EEAVQCPDIGEANAMCLATCTRDGKPSARML |
| | | | | | | LLKGFGKDGFRFFTNFESRKGKELDSNPFASL |
| | | | | | | VFYWEPLNRQVRVEGPVKKLPEEEAECYFHS |
| | | | | | | RPKSSQIGAVVSHQSSVIPDREYLRKKNEELE |
| | | | | | | QLYQDQEVPKPKSWGGYVLYPQVMEFWQG |
| | | | | | | QTNRLHDRIVFRRGLPTGDSPLGPMTHRGEE |
| | | | | | | DWLYERLAP |
| 1326 | 2676 | A | 10344 | 2 | 984 | ARAAAHCGICRLVRWWRKRRSVMGIQTSPV |
| | | | | | | LLASLGVGLVTLLGLAVGSYLVRRSRRPQVT |
| | | | | | | LLDPNEKYLLRLLDKTTVSHNTKRFEFALPTA |
| | | | | | | HHTLGLPVGKHIYLSTRIDGSLVTRPYTPVTSD |
| | | | | | | EDQGYVDLVIKVYLKGVHPKFPEGGKMSQY |
| | | | | | | LDSLKVGDVVEFRGPSGLLTYTGKGHFNIQP |
| | | | | | | NKKSPPEPRVAKKLGMIAGGTGITPMLQLIRA |
| | | | | | | ILKVPEDPTQCFLLFANQTEKDIILREDLEELQ |
| | | | | | | ARYPNRFKLWFTLDHPPKDWAYSKGFVTAD |
| | | | | | | MIREHLPAPGDDVLVLLCGPPPMVQLACHPN |
| | | | | | | LDKLGYSQKMRFTY |
| 1327 | 2677 | A | 10345 | 1 | 968 | LQSAGEGVTHVLILLESPARPVAAVTQVQRR |
| | | | | | | RYHRLSDMSMLAERRRKQKWAVDPQNTAW |
| | | | | | | SNDDSKFGQRMLEKMGWSKGKGLGAQEQG |
| | | | | | | ATDHIKVQVKNNHLGLGATINNEDNWIAIIQ |
| | | | | | | DDFNQLLAELNTCHGQETTDSSDKKEKKSFS |
| | | | | | | LEEKSKISKNRVHYMKFTKGKDLSSRSKTDL |
| | | | | | | DCIFGKRQSKKTPEGDASPSTPEENETTTTSAF |
| | | | | | | TIQEYFAKRMAALKNKPQVPVPGSDISETQVE |
| | | | | | | RKRGKKRNKEATGKDVESYLQPKAKRHTEG |
| | | | | | | KPERAEAQERVAKKKSAPAEEQLRGPCWDQ |
| | | | | | | SSKASAQDAGDHVQPA |
| 1328 | 2678 | A | 10346 | 173 | 439 | GSAAMKVKIKCWNGVATWLWVANDENCGI |
| | | | | | | CRMAFNGCGPDCKVPGDDCPLVWGQCSHCF |
| | | | | | | HMHCILKWLHAQQVQQHCPMCRQRQEWKFKE |
| 1329 | 2679 | A | 10351 | 3 | 964 | QMEPGNDTQISEFLLLGFSQEPGLQPFLFGLFL |
| | | | | | | SMYLVTVLGNLLHLATISDSHLHTPMYFFLSN |
| | | | | | | LSFADICVTSTTIPKMLMNIQTQNKVITYIACL |
| | | | | | | MQMYFFILFAGFENFLLSVMAYDRFVAICHP |
| | | | | | | LHYMVIMNPHLCGLLVLASWTMSALYSLLQI |
| | | | | | | LMVVRLSFCTALETPHFFCELNQVIQLACSDSF |
| | | | | | | LNHMVIYPTVALLGGGPLTGILYSYSKIISSIH |
| | | | | | | AISSAQGKYKAFSTCASHLSVVSLFYGAILGV |
| | | | | | | YLSSAATRNSHSSATASVMYTV\TPMLNPFI |
| | | | | | | YSLRNKDIKRALGIHLLWGTMKGQPFKKCP |
| 1330 | 2680 | A | 10352 | 34 | 2573 | IPFLKSCCCCCLFDFPPPPLDQVQEEECEVERV |
| | | | | | | TEHGTPKPFRKPDSVAPGESQSEDEQFENDLE |
| | | | | | | TDPPNWQQLVSREVLLGLKPCEIKRQEVINEL |
| | | | | | | FYTERAHVRTLKVLDQVFYQRVSREGILSPSE |
| | | | | | | LRKIFSNLEDILQLHIGLNEQMKAVRKRNETS |
| | | | | | | VIDQIGEDLLTWFSGPGEEKLKHAAATFCSNQ |
| | | | | | | PFALEMIKSRQKKDSRFQTPVQDAESNPLCRR |
| | | | | | | LQLKDIIPTQMQRLTKYPLLLDNIATYTEWPT |
| | | | | | | EREKVKKAADHCRQILNYVNQAVKEAENKQ |
| | | | | | | RLEDYQRRLDTSSLKLSEYPNVEELRNLDLTK |
| | | | | | | RKMLHEGPLVWKVNRDKTIDLYTLLLEDILV |
| | | | | | | LLQKQDDRLVLRCHSKILASTADSKHTFSPVI |
| | | | | | | KLSTVLVRQVATDNKALFVISMSDNGAQIYE |
| | | | | | | LVAQTVSEKTVWQDLICRMAASVKEQSTKPI |
| | | | | | | PLPQSTPGEGDNDEEDPSKLKEEQHGISVTGL |
| | | | | | | QSPDRDLGLESTLISSKPQSHSLSTSGKSEVRD |
| | | | | | | LFVAERQFAKEQHTDGTLKEVGEDYQIAIPDS |
| | | | | | | HLPVSEERWALDALRNLGLLKQLLVQQLGLT |
| | | | | | | EKSVQEDWQHFPRYRTASQGPQTDSVIQNSE |
| | | | | | | NIKAYHSGEGHMPFRTGTGDIATCYSPRTSTE |
| | | | | | | SFAPRDSVGLAPQDSQASNILVMDHMIMTPE |
| | | | | | | MPTMEPEGCILDDSGEHFFDAREAHSDENPSE |
| | | | | | | GDGAVNKEEKDVNLRISGNYLILDGYDPVQE |
| | | | | | | SSTDEEVASSLTLQPMTGIPAVESTHQQQHSP |
| | | | | | | QNTHSDGAISPFTPEFLVQQRWGAMEYSCFEI |
| | | | | | | QSPSSCADSQSQIMEYIHKIEADLEHLKKVEE |
| | | | | | | SYTLLGQRLAGSALTDKHSDKS |
| 1331 | 2681 | A | 10353 | 1 | 2100 | AVEFAEGALTMAPWPELGDAQPNPDKYLEG |
| | | | | | | AAGQQPTAPDKSKETNKTDNTEAPVTKIELLP |
| | | | | | | SYSTATLIDEPTEVDDPWNLPTLQDSGIKWSE |
| | | | | | | RDTKGKILCFFQGIGRLILLLGFLYFFVCSLDIL |
| | | | | | | SSAFQLVGGKMAGQFFSNSSIMSNPLLGLVIG |
| | | | | | | VLVTVLVQSSSTSTSIVVSMVSSSLLTVRAAIP |
| | | | | | | IIMGANIGTSITNTIVALMQVGDRSEFRRAFA |
| | | | | | | GATVHDFFNWLSVLVLLPVEVATHYLEIITQL |
| | | | | | | IVESFHFKNGEDAPDLLKVITKPFTKLIVQLDK |
| | | | | | | KVISQIAMNDEKAKNKSLVKIWCKTFTNKTQ |
| | | | | | | INVTVPSTANCTSPSLCWTDGIQNWTMKNVT |
| | | | | | | YKENIAKCQHIFVNFHLPDLAVGTILLILSLLV |
| | | | | | | LCGCLIMIVKILGSVLKGQVATVIKKTINTDFP |
| | | | | | | FPFAWLTGYLAILVGAGMTFIVQSSSVFTSAL |
| | | | | | | TPLIGIGVITIERAYPLTLGSNIGTTTTAILAAL |
| | | | | | | ASPGNALRSSLQIALCHFFFNISGILLWYPIPFT |
| | | | | | | RLPIRMAKGLGNISAKYRWFAVFYLLIFFFLIP |
| | | | | | | LTVFGLSLAGWRVLVGVGVPVVFIIILVLCLR |
| | | | | | | LLQSRCPRVLPKKLQNWNFLPLWMRSLKPW |
| | | | | | | DAVVSKFTGCFQMRCCCCCRVCCRACCLLC |
| | | | | | | GCPKCCRCSKCCEDLEEAQEGQDVPVKAPET |
| | | | | | | FDNITISREAQGEVPASDSKTECTAL |
| 1332 | 2682 | A | 10354 | 30 | 1377 | SQQGSQPHRQGPPSLLTAPHSLDLPALPPGPR |
| | | | | | | GSQGKLRRVLVPMSVKPSWGPGPSEGVTAVP |
| | | | | | | TSDLGEIHNWTELLDLFNHTLSECHVELSQST |
| | | | | | | KRVVLFALYLAMFVVGLVENLLVICVNWRG |
| | | | | | | SGRAGLMNLYILNMAIADLGIVLSLPVWMLE |
| | | | | | | VTLDYTWLWGSFSCRFTHYFYFVNMYSSIFF |
| | | | | | | LVCLSVDRYVTLTSASPSWQRYQHRVRRAM |
| | | | | | | CAGIWVLSAIIPLPEVVHIQLVEGPEPMCLFM |
| | | | | | | APFETYSTWALAVALSTTILGFLLPFPLITVFN |
| | | | | | | VLTACRLRQPGQPKSRRHCLLLCAYVAVFV |
| | | | | | | MCWLPYHVTLLLLTTHGTHISLHCHLVHLLY |
| | | | | | | FFYDVIDCFSMLHCVINPILYNFLSPHFRGRLL |
| | | | | | | NAVVHYLPKDQTKAGTCASSSSCSTQHSIIIT |
| | | | | | | KGDSQPAAAAPHPEPSLSFQAHHLLPNTSPISP |
| | | | | | | TQPLTPS |
| 1333 | 2683 | A | 10358 | 2 | 884 | AAGAGADGREPASERASRAEPPAVAMGQND |
| | | | | | | LMGTAEDFADQFLRVTKQYLPHVARLCLIST |
| | | | | | | FLEDGIRMWFQWSEQRDYIDTTWNCGYLLA |
| | | | | | | SSPVFLNLLGQLTGCVLVLSRNFVQYACFGLF |
| | | | | | | GIIALQTIAYSILWDLKFLMRNLALGGGLLLL |
| | | | | | | LAESRSEGKSMFAGVPTMRESSPKQYMQLGG |
| | | | | | | RVLLVLMFMTLLHFDASFFSIVQNTVGTALMI |
| | | | | | | LVAIGFKTKLAALTLVVWLFAINVYFNAFWT |
| | | | | | | IPVYKPMHDFLKYDFFQTMSVIGGLLLVVAL |
| | | | | | | GPGGVSMDEKKKEW |
| 1334 | 2684 | A | 10367 | 59 | 1562 | QAWSLQVALSPFFFPASPSNSFAAAVPQLLPP |
| | | | | | | ELPLPHVPGQESAKRRSARRFLIMSELTKELM |
| | | | | | | ELVWGTKSSPGLSDTIFCRWTQGFVFSESEGS |
| | | | | | | ALEQFEGGPCAVIAPVQAFLLKKLLFSSEKSS |
| | | | | | | WRDCSQEEQKELLCHTLCDILESACCDHSGS |
| | | | | | | YCLVSWLRGKTTEETASISGSPAESSCQVEHS |
| | | | | | | SALAVEELGFERFHALIQKRSPRSLPELKDAV |
| | | | | | | LDQYSMWGNKFGVLLFLYSVLLTKGTENTKN |
| | | | | | | EIEDASEPLIDPVYGHGSQSLINLLLTGHAVSN |
| | | | | | | VWDGDRECSGMKLLGIHEQAAVGFLTLMEA |
| | | | | | | LRYCKVGSYLKISKIPYLDCLASETHLTVFFA |
| | | | | | | KDMALVAPEAPSEQARRVFQTYDPEDNQFIP |
| | | | | | | DSLLEDVMKALDLVSDPEYINLMKNKLDPEG |
| | | | | | | LGIILLGPFLQEFFPDQGSSGPESFTVYHYNGL |
| | | | | | | KQSNYNEKVMYVEGTAVVMGFEDPMLQTD |
| | | | | | | DTPIKRCLQTKWPYIELLWITDRSPSLN |
| 1335 | 2685 | A | 10375 | 82 | 2929 | TRTKRRLGREKAMASPPRGWGCGELLLPFML |
| | | | | | | LGTLCEPGSGQIRYSMPEELDKGSFVGNIAKD |
| | | | | | | LGLEPQELAERGVRIVSRGRTQLFALNPRSGS |
| | | | | | | LVTAGRIDREELCAQSPLCVVNFNILVENKM |
| | | | | | | KIYGVEVEIIDINDNFPRFRDEELKVKVNENA |
| | | | | | | AAGTRLVLPFARDADVGVNSLRSYQLSSNLH |
| | | | | | | FSLDVVSGTDGQKYPELVLEQPLDREKETVH |
| | | | | | | DLLLTALDGGDPVLSGTFHIRVTVLDANDNA |
| | | | | | | PLFTPSEYSVSVPENIPVGTRLLMLTATDPDE |
| | | | | | | GINGKLTYSFRNEEEKISETFQLDSNLGEISTL |
| | | | | | | QSLDYEESRFYLMEVVAQDGGALVASAKVV |
| | | | | | | VTVQDVNDNAPEVILTSLTSSISEDCLPGTVIA |
| | | | | | | LFSVHDGDSGENGEIACSIPRNLPFKLEKSVD |
| | | | | | | NYYHLLTTRDLDREETSDYNITLTVMDHGTP |
| | | | | | | PLSTESHIPLKVADVNDNPPNFPQASYSTSVT |
| | | | | | | ENNPRGVSIFSVTAHDPDSGDNARVTYSLAE |
| | | | | | | DTFQGAPLSSYVSINSDTGVLYALRSFDYEQL |
| | | | | | | RDLQLWVTASDSGNPPLSSNVSLSLFVLDQN |
| | | | | | | DNTPEILYPAILPTDGSTGVELAPRSAEPGYLV |
| | | | | | | TKVVAVDKDSGQNAWLSYRLLKASEPGLFA |
| | | | | | | VGLHTGEVRTARALLDRDALKQSLVVAVED |
| | | | | | | HGQPPLSATFTVTVAVADRIPDILADLGSIKTP |
| | | | | | | IDPEDLDLTLYLVVAVAAVSCVPLAFVIVLLV |
| | | | | | | LRLRRWHKSRLLQAEGSRLAGVPASHFVGV |
| | | | | | | DGVRAFLQTYSHEVSLTADSRKSHLIFPQPNY |
| | | | | | | ADTLLSEESCEKSEPLLMSDKVDANKEERRV |
| | | | | | | QQAPPNTDWRFSQAQRPGTSGSQNGDDTGT |
| | | | | | | WPNNQFDTEMLQAMILASASEAADGSSTLGG |
| | | | | | | GAGTMGLSARYGPQFTLQHVLQGELGSDYR |
| | | | | | | QNVYIPGSNATLTNAAGKRDGKAPAGGNGN |
| | | | | | | KKKSGKKEKK |
| 1336 | 2686 | A | 10379 | 1 | 557 | RPRRRQPSFSCRVLVLEDPPCFRFTNSMNQEK |
| | | | | | | LAKLQAQVRIGGKGTARRKKKVVHRTATAD |
| | | | | | | DKKLQSSLKKLAVNNIAGIEEVNMIKDDGTVL |
| | | | | | | HFNNPKVQASLSANTPAITGHAEAKPITEMLP |
| | | | | | | GILSQLGADSLTSLRKLAEQFPRQVLDSKAPK |
| | | | | | | PEDIDEEDDDVPDLVENFDEASKNEAN |
| 1337 | 2687 | A | 10380 | 1 | 1263 | IPGSTISWSPAAARGLSVCRCCRLHPASAMDL |
| | | | | | | FGDLPEPERSPRPAAGKEAQKGPLLFDDLPPA |
| | | | | | | SSTDSGSGGPLLFDDLPPASSQDSGSLATSISQ |
| | | | | | | MVKTEGKGAKRKTSEEEKNGSEELVEKKVC |
| | | | | | | KASSVIFGLKGYVAERKGEREEMQDAHVILN |
| | | | | | | DITEECRPPSSLITRVSYFAVFDGHGGIRASKF |
| | | | | | | AAQNLHQNLTRKFPKGDVISVEKTVKRCLLD |
| | | | | | | TFKHTDEEFLKQASSQKPAWKDGSTATCVLA |
| | | | | | | VDNILYIANLGDSRAILCRYNEESQKHAALSL |
| | | | | | | SKEHNPTQYEERMRTQKAGGNVRDGRVLGV |
| | | | | | | LEVSRSIGDQQYKRCGVTSVPDIERCQLTPND |
| | | | | | | RFILLACDGLFKVFTPEEAVNFILSCLEDEKIQ |
| | | | | | | TREGKSAADARYEAACNRLANKAVQRGSAD |
| | | | | | | NVTVMVVRIGH |
| 1338 | 2688 | A | 10385 | 3 | 589 | GPSQSMAAGELEGGKPLSGLLNALAQDTPHG |
| | | | | | | YPGITEELLRSQLYPEVPPEEFRPFLAKMRGIL |
| | | | | | | KSIASADMDFNQLEAFLTAQTKKQGGITSDQ |
| | | | | | | AAVISKFWKSHKTKIRESLMNQSRWNSGLRG |
| | | | | | | LSWRVDGKSQSRHSAQIHTPVAIIELELGKYG |
| | | | | | | QESEFLCLEPDEVKVNQILKTLSEVEESISTLIS |
| | | | | | | QPN |
| 1339 | 2689 | A | 10386 | 50 | 390 | LGAMAKHHPDLIFCRKQAGVAIGRLCEKCDG |
| | | | | | | KCVICDSYVRPCTLVRICDECNYGSYQGRCVI |
| | | | | | | CGGPGVSDAYYCKECTIQEKDRDGCPKIVNL |
| | | | | | | GSSKTDLFYERKKYGFKKR |
| 1340 | 2690 | A | 10388 | 113 | 3472 | SQLRKGASATHSSPSRTDCIAQMMDIYVCLK |
| | | | | | | RPSWMVDNKRMRTASNFQWLLSTFILLYLM |
| | | | | | | NQVNSQKKGAPHDLKCVTNNLQVWNCSWK |
| | | | | | | APSGTGRGTDYEVCIENRSRSCYQLEKTSIKIP |
| | | | | | | ALSHGDYEITINSLHDFGSSTSKFTLNEQNVSL |
| | | | | | | IPDTPEILNLSADFSTSTLYLKWNDRGSVFPHR |
| | | | | | | SNVIWEIKVLRKESMELVKLVTHNTTLNGKD |
| | | | | | | TLHHWSWASDMPLECAIHFVEIRCYIDNLHFS |
| | | | | | | GLEEWSDWSPVKNISWIPDSQTKVFPQDKVIL |
| | | | | | | VGSDITFCCVSQEKVLSALIGHTNCPLIHLDGE |
| | | | | | | NVAIKIRNISVSASSGTNVVFITEDNIFGTVIF |
| | | | | | | AGYPPDTPQQLNCETHDLKEIICSWNPGRVTA |
| | | | | | | LVGPRATSYTLVESFSGKYVRLKRAEAPTNES |
| | | | | | | YQLLFQMLPNQEIYNFTLNAHNPLGRSQSTIL |
| | | | | | | VNITEKVYPHTPTSFKVKDINSTAVKLSWHLP |
| | | | | | | GNFAKINFLCEIEIKKSNSVQEQRNVTIKGVE |
| | | | | | | NSSYLVALDKLNPYTLYTFRIRCSTETFWKW |
| | | | | | | SKWSNKKQHLTTEASPSKGPDTWREWSSDG |
| | | | | | | KNLIIYWKPLPINEANGKILSYNVSCSSDEETQ |
| | | | | | | SLSEIPDPQHKAEIRLDKNDYIISVVAKNSVGS |
| | | | | | | SPPSKIASMELPNDDLKIEQVVGMGKQILLTW |
| | | | | | | HYDPNMTCDYVIKWCNSSRSEPCLMDWRKV |
| | | | | | | PSNSTETVIESDEFRPGIRYNFFLYGCRNQGY |
| | | | | | | QLLRSMIGYIEELALPIVAFNFTVEDTSADSILV |
| | | | | | | KWEDIPVEELRGFLRGYLFYFGKGERDTSKM |
| | | | | | | RVLESGRSDIKVKNITDISQKTLRIADLQGKTS |
| | | | | | | YHLVLRAYTDGGVGPEKSMYVVTKENSVGL |
| | | | | | | IIAILIPVAVAVIVGVVTSILCYRKREWIKETFY |
| | | | | | | PDIPNPENCKALQFQKSVCEGSSALKTLEMNP |
| | | | | | | CTPNNVEVLETRSAFPKIEDTEIVSPVAERPEN |
| | | | | | | RSDAKPENHVVESYCPPIIEEEIPNPAADETGG |
| | | | | | | TAQVIYIDVQSMYQPQAKPEEEQENDPVGGA |
| | | | | | | GYKPQMHLPINSTVEDIAAEEDLDKTAGYRP |
| | | | | | | QANYNTWNLVSPDSPRSIDSNSEIVSPGSPCSI |
| | | | | | | NSRQFLIPPKDEDSPKSNGGGWSFTNFFQNKP |
| | | | | | | ND |
| 1341 | 2691 | A | 10392 | 1 | 5057 | MLPPKHLSATKFKKSWAPNLYELDSDLTKEP |
| | | | | | | DVIIGEGPTDSEFFHQRFNRNLIYVEFVGPRKTL |
| | | | | | | IKLRNLCLDWLQPETRTKEEIIELLVLEQYLTII |
| | | | | | | PEKLKPWVRAICKPENCEKLVTLLENYKEMY |
| | | | | | | QPEGESLHGVLVVSAGLRCPLGLSASTLLTW |
| | | | | | | SGLDNSLSWAAVGMSCVLWDIELHHDFLGV |
| | | | | | | ATKSVSTHAQGDAAQGLGGTTVRMWARDSN |
| | | | | | | LATGVLLDDNNSDVTSDDDMTRNRRESSPPH |
| | | | | | | SVHSFSGDRDWDRRGRSRDTEPRDRWSHTR |
| | | | | | | NPRSRMPPRDLSLPVVAKTSFEMDREDDRDS |
| | | | | | | RAYESRSQDAESYQNVVDLAEDRKPHNTIQD |
| | | | | | | NMENYRKLLSLGVQLAEDDGHSHMTQGHSS |
| | | | | | | RSKRSAYPSTSRGLKTMPEAKKSTHRRGICED |
| | | | | | | ESSHGVIMEKFIKDVSRSSKSGRARESSDRSQ |
| | | | | | | RFPRMSDDNWKDISLNKRESVIQQRVYEGNA |
| | | | | | | FRGGFRFNSTLVSRKRVLERIKRRYHFDTDGK |
| | | | | | | GSIHDQKGCPRKKPFECGSEMRKAMSVSSLS |
| | | | | | | SLSSPSFTESQPIDFGAMPYVGDECGRSFSVIS |
| | | | | | | EFVEHQIMHTRENLYEYGESFIHSVAVSEVQK |
| | | | | | | SQVGGKRFECKDCGETFNKSAALAEHRKIHA |
| | | | | | | RGYLVECKNQECEEAFMPSPTFSELQKIYGK |
| | | | | | | DKFYECRVCKETFLHSSALIEHQKIHFGDDKD |
| | | | | | | NEREHERERERERGETFRPSPALNEFQICMYG |
| | | | | | | KEKMYECKVCGETFLHSSSLKEHQKIHTRGN |
| | | | | | | PFENKGKVCEETFIPGQSLKRRQKTYNKEKLC |
| | | | | | | DFTDGRDAFMQSSELSEHQKIHSRKNLFEGR |
| | | | | | | GYEKSVIHSGPFTESQKSHTITRPLESDEDEKA |
| | | | | | | FTISSNPYENQKIPTKENVYEAKSYERSVIHSL |
| | | | | | | ASVEAQKSHSVAGPSKPKVMAESTIQSFDAIN |
| | | | | | | HQRVRAGGNTSEGREYSRSVIHSLVASKPPRS |
| | | | | | | HNGNELVESNEKGESSIYISDLNDKRQKIPAR |
| | | | | | | ENPGEGGSKNRNYEDSVIQSVFRAKPQKSVP |
| | | | | | | GEGSGEFKKDGEFSVPSSNVREYQKARAKKK |
| | | | | | | YEHRSNETSVIHSLPFGEQTFRPRGMLYECQ |
| | | | | | | ECGECFAHSSDLTEHQKIHDREKPSGSRNYE |
| | | | | | | WSVIRSLALPTDPQTSYAQEQYAKEQARNKCK |
| | | | | | | DFRQFFATSEDLNTNQKIYDQEKSHGEESQGE |
| | | | | | | NTDGEETHSEETIIGQETIEDPVIQGSDMEDPQ |
| | | | | | | KDDPDDKIYECEDCGLGFVDLTDLTDHQKVH |
| | | | | | | SRKGLVDSREYTHSVIHTHSISEYQRDYTGEQ |
| | | | | | | LYECPKCGESFIHSSFLFEHQRIHEQDQLYSM |
| | | | | | | KGCDDGFIALLPMKPRRAAERNPALAGSA |
| | | | | | | IRCLLCGQGFIHSSALNEHMRLHREDDLLEQS |
| | | | | | | QMAEEAIIPGLALTEFQRSQTEERLFECAVCG |
| | | | | | | ESFVNPAELADHVTVHKNEPYEYGSSYTHTS |
| | | | | | | FLTEPLKGAIPFYECKDCGKSFIHSTVLTKHKE |
| | | | | | | LHLEEEEEDEAAAAAAAAAQEVEANVHVPQ |
| | | | | | | VVLRIQGLMVEAAEPEVEAAEPEVEAAEPEV |
| | | | | | | EAAEPNGEAEGPDGEAAEPIGEAGQPNGEAE |
| | | | | | | QPNGDADEPDGAGIEDPEERAEEPEGKAEEPE |
| | | | | | | GDADEPDGVGIEDPEEGEDQEIQVEEPYYDC |
| | | | | | | HECTETFTSSTAFSEHLKTHASMIIFEPANAFG |
| | | | | | | ECSGYIERASTSTGGANQADEKYFKCDVCGQ |
| | | | | | | LFNDHLSLARHQNTHTG |
| 1342 | 2692 | A | 10393 | 2 | 1350 | GRPRSSSDNRNPLRERAGLSSAAVQTRIGNSA |
| | | | | | | ASRRSPAARPPVPAPPAIPRGRPGTEGSTSLS |
| | | | | | | APAVLVVAVAVVVVYVSAVAWAMANYIHV |
| | | | | | | PPGSPEVPKLNVTVQDQEEHRCREGALSLLQ |
| | | | | | | HLRPHWDPQEVTLQLFTDGITMKLIGCYVGN |
| | | | | | | TMEDVVLVRIYGNKTELLVDRDEEVKSFRVL |
| | | | | | | QAHGCAPQLYCTFNNGLCYEFIQGEALDPKH |
| | | | | | | VCNPAIFRLIARQLAKIHATHAHNGWIPKSNL |
| | | | | | | WLKMGKYFSLIPTGFADEDINKRFLSDIPSSQI |
| | | | | | | LQEEMTWMKEILSNLGSPVVLCHNDLLCKNII |
| | | | | | | YNEKQGDVQFIDYEYSGYNYLAYDIGNHFNE |
| | | | | | | FAGVSDVDYSLYPDRELQSQWLRAYLEAYK |
| | | | | | | EPKGFGTEVTEKEVEILFIQVNQFALASIIFFW |
| | | | | | | GLWALIQAKYSTIEFDFLGYAIVRFNQYFKM |
| | | | | | | KPEVTALKVPE |
| 1343 | 2693 | A | 10394 | 102 | 839 | PEAQTSAVLAREKGHLPTMRHEAPMQMASA |
| | | | | | | QDARYGQKDSSDQNFDYMFKLLIIGNSSVGK |
| | | | | | | TSFLFRYADDSFTSAFVSTVGIDFKVKTVFKN |
| | | | | | | EKRIKLQIWDTAGQERYRTFITAYYRGAMGFI |
| | | | | | | LMYDITLNESFNAVQDWSTQIKTYSWDNAQ |
| | | | | | | VILVGNKCDMEDERVISTERGQHLGEQLGFE |
| | | | | | | FFETSAKDNINVKQTFERLVDIICDKMSESLET |
| | | | | | | DPAITAAKQNTRLKETPPPPQPNCAC |
| 1344 | 2694 | A | 10395 | 2 | 4136 | DRPPWNSRVDDFVTNLIHLSSKGHISPAKDTS |
| | | | | | | LQQRTPAEMSPVLHFYVRPSGHEGAASGHTR |
| | | | | | | RKLQGKLPELQGVETELCYNVNWTAEALPSA |
| | | | | | | EETKKLMWLFGCPLLLDDVARESWLLPGSN |
| | | | | | | DLLLEVGPRLNFSTPTSTNIVSVCRATGLGPV |
| | | | | | | DRVETTRRYRLSFAHPPSAEVEAIALATLHDR |
| | | | | | | MTEQHFPHPIQSFSPESMFEPLNGPINILGEGR |
| | | | | | | LALEKANQELGLALDSWDLDFYTKRFQELQR |
| | | | | | | NPSTVEAFDLAQSNSEHSRHWFFKGQLHVDG |
| | | | | | | QKLVHSLFESIMSTQESSNFNNVLKFCDNSSA |
| | | | | | | IQGKEVRFLRPEDPTRPSRFQQQQGLRHVVFT |
| | | | | | | AETHNFPTGVCPFSGATTGTGGRIRDVQCTG |
| | | | | | | RGAHVVAGTAGYCFGNLHIPGYNLPWEDLSF |
| | | | | | | QYPGNFARPLEVAIEASNGASDYGNKFGEPV |
| | | | | | | LAGFARSLGLQLPDGQREEWIKPIMFSGGIGS |
| | | | | | | MEADHISKEAPEPGMEVVKVGGPVYRIGVGG |
| | | | | | | GAASSVQVQGDNTSDLDFGAVQRGDPEMEQ |
| | | | | | | KMNRVIRACVEAPKGNPICSLHDQGAGGNG |
| | | | | | | NVLKELSDPAGAIIYTSRFQLGDPTLNALEIW |
| | | | | | | GAEYQESNALLLRSPNRDFLTHVSARERCPA |
| | | | | | | CFVGTTTGDRRIVLVDDRECPVRRNGQGDAP |
| | | | | | | PTPPPTPVDLELEWVLGKMPRKEFFLQRKPP |
| | | | | | | MLQPLALPPGLSVHQALERVLRLPAVASKRY |
| | | | | | | LTNKVDRSVGGLVAQQQCVGPLQTPLADVA |
| | | | | | | VVALSHEELIGAATALGEQPVKSLLDPKVAA |
| | | | | | | RILAVAEALTNLVFALVTDLRDVKCSGNWM |
| | | | | | | WAAKLPGEGAALADACEAMVAVMAALGVA |
| | | | | | | VDGGKDSLSMAARVGTETVRAPGSLVISAYA |
| | | | | | | VCPDITATVTPDLKHPEGRGHLLYVALSPGQ |
| | | | | | | HRLGGTALAQCFSQLGEHPPDLDLPENLVRA |
| | | | | | | FSITQGLLKDRLLCSGHDVSDGGLVTCLLEM |
| | | | | | | AFAGNCGLQVDVPVPRVDVLSVLPAEEPGLV |
| | | | | | | LEVQEPDLAQVLKRYRDAGLHCLELGHTGE |
| | | | | | | AGPHAMVRVSVNGAVVLEEPVGELRALWEE |
| | | | | | | TSFQLDRLQAEPRCVAEEERGLRERMGPSYC |
| | | | | | | LPPTFPKASVPREPGGPSPRVAILREEGSNGDR |
| | | | | | | EMADAPHLAGFEVWDVTMQDLCSGAIGLDT |
| | | | | | | FRGVAFVGGFSYADVLGSAKGWAAAVTFHP |
| | | | | | | RAGAELRRFRKRPDTFSLGVCNGCQLLALLG |
| | | | | | | WVGGDPNEDAAEMGPDSQPARPGLLLRHNL |
| | | | | | | SGRYESRWASVRVGPGPALMLRGMEGAVLP |
| | | | | | | VWSAHGEGYVAFSSPELQAQIEARGLAPLHW |
| | | | | | | ADDDGNPTEQYPLNPNGSPGGVAGICSCDGR |
| | | | | | | HLAVMIPHPERAVRPWQWAWRPPPFDTLTTS |
| | | | | | | PWLQLPINARNWTLEGSC |
| 1345 | 2695 | A | 10396 | 65 | 642 | GVRGFWAGTMASRAGPRAAGTDGSDFQHRE |
| | | | | | | RVAMHYQMSVTLKYEIKKLIYVHLVIWLLLV |
| | | | | | | AKMSVGHLRLLSHDQVAMPYQWEYPYLLSI |
| | | | | | | LPSLLGLLSFPRNNISYLVLSMISMGLFSIAPLI |
| | | | | | | YGSMEMFPAAQQLYRHGKAYRFLFGFSAVSI |
| | | | | | | MYLVLVLAVQVHAWQLYYSKKLLDSWFTST |
| | | | | | | QEKKHK |
| 1346 | 2696 | A | 10398 | 1 | 718 | DDFVRCGPQSAAMGASARLLRAVIMGAPGS |
| | | | | | | GKGTVSSRITTHFELKHLSSGDLLRDNMLRGT |
| | | | | | | EIGVLAKAFIDQGKLIPDDVMTRLALHELKNL |
| | | | | | | TQYSWLLDGFPRTLPQAEALDRAYQIDTVINL |
| | | | | | | NVPFEVIKQRLTARWIHPASGRVYNIEFNPPK |
| | | | | | | TVGIDDLTGEPLIQREDDKPETVIKRLKAYED |
| | | | | | | QTKPVLEYYQKKGVLETFSGTETNKIWPYVY |
| | | | | | | AFLQTKVPQRSQKASVTP |
| 1347 | 2697 | A | 10402 | 153 | 1969 | KHRQENNALDMAPEHMTGPMCLIENTNGEL |
| | | | | | | VANPEALKILSAITQPVVVVAIVGLYRTGKSY |
| | | | | | | LMNKLAGKNKGFSLGSTVKSHTKGIWMWCV |
| | | | | | | PHPKKPEHTLVLLDTEGLGDVKKGDNQNDS |
| | | | | | | WIFTLAVLLSSTLVYNSMGTINQQAMDQLYY |
| | | | | | | VTELTHRIRSKSSPDENENEDSADFVSFFPDFV |
| | | | | | | WTLRDPSLDLEADGQPLTPDEYLEYSLKLTQ |
| | | | | | | GTSQKDKNFNLPRLCIRKFFPKKKCFVFDLPI |
| | | | | | | HRRKLAQLEKLQDEELDPEFVQQVADFCSYI |
| | | | | | | FSNSKTKTLSGGIKVNGPRLESLVLTYINAISR |
| | | | | | | GDLPCMENAVLALAQIENSAAVQKAIAHYD |
| | | | | | | QQMGQKVQLPAETLQELLDLHRVSEREATEV |
| | | | | | | YMKNSFKDVDHLFQKKLAAQLDKKRDDFCK |
| | | | | | | QNQEASSDRCSALLQVIFSPLEEEVKAGIYSK |
| | | | | | | PGGYCLFIQKLQDLEKKYYEEPRKGIQAEEIL |
| | | | | | | QTYLKSKESVTDAILQTDQILTEKEKEIEVEC |
| | | | | | | VKAESAQASAKMVEEMQIKYQQMMEEKEKS |
| | | | | | | YQEHVKQLTEKMERERAQLLEEQEKTLTSKL |
| | | | | | | QEQARVLKERCQGESTQLQNEIQKLQKTLKK |
| | | | | | | KTKRYMSHKLKL |
| 1348 | 2698 | A | 10404 | 5 | 892 | TQLPAPLSGVLSRLQLGSGAPLLTWVQETAG |
| | | | | | | VAGGAPRRRTPVTMWRLLARASAPLLRVPLS |
| | | | | | | DSWALLPASAGVKTLLPVPSFEDVSIPEKPKL |
| | | | | | | RFIERAPLVPKVRREPKNLSDIRGPSTEATEFT |
| | | | | | | EGNFAILALGGGYLHWGHFEMMRITINRSM |
| | | | | | | DPKNMFAIWRVPAPFKPITRKSVGHRMGGGK |
| | | | | | | GAIDHYVTPVKAGRLVVEMGGRCEFEEVQG |
| | | | | | | FLDQVAHKLPFAAKAVSRGTLEKMRKDQEE |
| | | | | | | RERNNQNPWTFERIATANMLGIRKVLSPYDL |
| | | | | | | THKGKYWGKFYMPKRV |
| 1349 | 2699 | A | 10409 | 59 | 1184 | LRRNCSALGGLFQTIISDMKGSYPVWEDFINK |
| | | | | | | AGKLQSQLRTTVVAAAAFLDAFQKVADMAT |
| | | | | | | NTRGGTREIGSALTRMCMRHRSIEAKLRQFSS |
| | | | | | | ALIDCLINPLQEQMEEWKKVANQLDKDHAK |
| | | | | | | EYKKARQEIKKKSSDTLKLQKKAKKGRGDIQ |
| | | | | | | PQLDSALQDVNDKYLLLEETEKQAVRKALIE |
| | | | | | | ERGRFCTFISMLRPVIEEEISMLGEITHLQTISE |
| | | | | | | DLKSLTMDPHKLPSSSEQVILDLKGSDYSWS |
| | | | | | | YQTPPSSPSTTMSRKSSVCSSLNSVNSSDSRSS |
| | | | | | | GSHSHSPSSHYRYRSSNLAQQAPVRLSSVSSH |
| | | | | | | DSGFISQDAFQSKSPSPMPPEAPNQRRKEKRE |
| | | | | | | PDPNGGGPTTASGPPAAAEEAQRPRSM |
| 1350 | 2700 | A | 10410 | 511 | 958 | AGRGGPGKPVSWSSGPGSPGQTQRRSWVKST |
| | | | | | | RGHSSLLPPSQDFVAGLSVILRGTVDDRLNW |
| | | | | | | AFNLYDLNKDGCITKEEMLDIMKSIYDMMG |
| | | | | | | KYTYPALREEAPREHVESFFQKMDRNKDGV |
| | | | | | | VTTEEFIESCQKDENIMRSMQLFDNVI |

The application's sequence listing, which the Patent Office published only in electronic form, follows.

SEQUENCE LISTING (2700 sequences)

SEQ ID NO: 1 - DNA, 336 bp, Homo sapiens
cggatctctaggatctggaaggccgctgctgccaggaacaagaagtcagagagggccaggctgagcaggagcagcgccagacgcgtgccagctccatgccgggcctgggagccggccagccacgccatcaacccattggctggcagcccaaggagcagcagggccaccaggaagaccgtgtcccagccaccttgggggtaggagtcctcatcatcaagctctgtgcggggcctgtggccagtggcacccaggtcagcttccatggtagtgtccatttggggtccccagagtcctgctggacacggagtgggtgcctggtgaatcaatgatggtgtg

SEQ ID NO: 2 - DNA, 366 bp, Homo sapiens
ggcacgagcactcttgaaagatatatgaagggaatgttggcgcaatcagtctagaaacatatttctcccataacaataagccagttctttttgctttgaatcagaaatagctccatcaggcccatgaaggaaagggaaacaaaactgagtgccaagcatatgataacatgctcagcatcatatgacattaggggattgcaaattgaaacaacagtaccaccacacacctatcagaatggccaaaatccagaagactgacatcaccaatgctagtgagaatgtggagcaacaggaactctcattcacggctggtggggatgcaaagtggtggagccacttgggaagacagtctggcagattcctaaa

SEQ ID NO: 3 - DNA, 359 bp, Homo sapiens
cccacgcgtccgcccacgcgtccgtcgtgttaaaggataacagtgaactggagcagcagctgggggccacaggtgcctaccgagcacgggcgctggaactagaggccgaggtggcagagatgcgacagatgttgcagttagagcatccatttgtgaatggagctgataagctgaggcctgactctatgtatgtacatttgaacgagctgtgacagagcctggtggaaaacatgttactgactgttgtggatacgcatatgaacgcctatctagcgctcatgcaactatactcttgcattgatacttttcctctaagagatgtcatgtatttactcgagcagatctgaatattcatgcct

SEQ ID NO: 4 - DNA, 421 bp, Homo sapiens
cacagccagtgccctgttttcctgccctgatggtggctctctggctggctttgcaggtcgaagggcctccttccacctggaatgtctgaagcgacagaaggaccgagggggagacatctctcagaagacagtcctgcccttgcatctggttcatcatcaggtagctcacacttttggacaggccactgtcacctgccagcaggccagacagtccccagggtgacggacaaatcctgaagacttcagtgggtcttgcctgtctcagatggctggcacgtcctgcccctgccataagagccatccctgtagggcttcacactcctgtgcaggtgagggccccggcaaggtctccagcatcgcaggtgggggcctaggaagtgctaatgcacaggagctcattgtgtgatcctgaggacccaca

SEQ ID NO: 5 - DNA, 850 bp, Homo sapiens
gacgctcaacagaatctattttccagggcacattaaagggatcaaaaagcagtagtgggtggctaagggaaggttaaagggttacttttggttgttttgaagtatttctttgagaaaactgcagagtagcctcaaacctccctggagttttcttctctgaggatactgctcaaagcggcagctatatgaggatttctgcccaccccccaaatgctgggggagaagttagcaatggccccaaaagaaagctgaccctaatgttgaatttctcgctcccttcttcaggtctgaatgctggtgctttttatgccttgtccactcttctgaatcgcatggtgatctggcactacccgggggaagaagtgaatgctggaagaattggcctgacgatcgtcattgcaggaatgcttggggctgtgatctcaggaatctggctggataggtccaaaacctacaaagagacaaccctggtagtctatatcatggacactggtggggcatggtggtgttacacgttttaccttggaaccggggacacctgtgggtagtgtttcatcactgctgggcacaatgggcttctttatgactggctatctcccactgggatttgagtttgctgtggagctcaagttacccagaatcagaaggcatctcctccggcctcctcaacatatctgcacaggtatttgggatcatctttaccatctcccagggccagattattgacaactatggaaccaagcctgggaacatcttcctgtgtgtgttccttactcttggagcagccctcactgcattcattaaggcagatctccggagacagaaagcaaacaaagaaactcttgagaac

SEQ ID NO: 6 - DNA, 376 bp, Homo sapiens
gttttcccctatagggacattttcccccaaaaggagaattgaactggaaacaatatagtacataggattatataattatgttcaatttcttaatgagaatggttttcttacatgctgggctcaaatatgagtgtatatcacagtccatagagcttggaacccctgtgcaaggtgctttcggagtcttgagcttatctgcgagttccttttatcagaatcttacttaacgcacgttaaattagaaaggcatacaaaagaatgtcattagaaataaaacttctcatagcgaataatgtctgtttcaggaaatgggcctgagtttacagtggctgtattctgctcgtggagacttcttccgtgctacttccagactaac

SEQ ID NO: 7 - DNA, 1949 bp, Homo sapiens
caccctctcttcagcctgcctgattggagacgcctggaaggagctgaccatagtggcaggtgctgtttccaaccagctcttggtctggtacccagcaactgccttagcagacaacaaacctgtagcacctgaccgacgaatcagtgggcatgtgggcatcatcttcagcatgtcatacctggaaagcaagggattgctggctacagcttcagaagaccgaagcgttcgtatctggaaggggggcgacctgcgagtgcctgggggtcgggtgcaaaatattgggcactgctttgggcacagcgcccgtgtgtggcaggtcaagcttctagagaattaccttatcagtgcaggagaggattgtgtctgcttggtgtggagccatgaaggtgagatcctccaggcctttcggggacaccagggacgtgggatccgggccatagctgcccatgagaggcaggcctgggtgatcactgggggtgatgactcaggcattcggctgtggcacttggtagggcgtgggtaccggggattgggggtctcggctctctgcttcaagtcccgtagtaggccaggtacactcaaggctgtgactctggctggctcttggcgactgctggcagtgactgatacaggggccctgtatctctatgacgtcgaggtcaagtgctgggagcagctgctagaggataaacatttccagtcctactgcctgctggaggcagctcctggtcccgagggcttcggattgtgtgctatggccaatggggaaggtcgtgtcaaggttgtccccatcaacactccaactgctgctgtggaccagaccctgtttcctgggaaggtgcacagcttgagctgggccctgcgtggttatgaggagctcctgttgctggcatcgggccctggcggggtagtagcttgcctagagatctcagccgcaccctctggcaaggccatctttgtcaaggaacgttgtcggtacctgctgcccccaagcaagcagagatggcacacatgcagtgccttcctacccccaggtgacttcctggtgtgtggtgaccgccggggctctgtgctgctattcccctccagaccagggcgtgatggagcctactaccagctgtttgtacgagacggccagctccagccagtcctaaggcagaagtcctgtcgaggcatgaactggctagctgggctccgtatagtgcccgatgggagcatggttatcctgggtttccatgccaatgagtttgtggtgtggaaccctcggtcacacgagaagctgcacatcatcaactgtggtggagggcaccgttcgtgggcattctctgatactgaggcggccatggcctttgcttacctcaaggatggggatgtcatgctgtacagggctctgggtggctgcacccggccacacgtgattctccgggagggtctgcatggccgtgagatcacttgtgtaaagcgtgtgggcaccattaccctggggcctgaatatggagtgcccagcttcatgcagcctgatgacctggagcctggcagtgaggggcccgacttgactgacattgtgatcacatgtagtgaggacactactgtctgtgtcctagcactccctacaaccacaggctcagcccacgcactcacagctgtttgtaaccatatctcctcggtacgtgctgtggctgtgtggggcattggcaccccaggtggccctcaggatcctcagccaggcctgactgcccatgtggtgtctgcgggggggcgggctgagatgcactgcttcagcatcatggttactccggaccccagcaccccaagccgcctcgcctgccatgtcatgcacctttcgtcccaccggctagatgagtattgggaccggcaacgcaatcggcatcggatggttaaggtagacccagagaccaggtaatatatgctcctgggcagggtgtggt

SEQ ID NO: 8 - DNA, 354 bp, Homo sapiens
ttttttccagtttgctgagtgggagaatttcaacactgcgagatgaaactggtgctatattgattgatggagatccagcagcatgtgcacccattataaagtttcttctgactgaagaactacacttacggggagtgagtatttatgttctcaggcatgaagcacaaatttacgggatcactccattaggtatgtgctcttttaatattaggcgtttatgatctgactcatgtatgagagcagccctaaatgataggggtttatatcaggtactaattcttgacggacttgttcagtgcttaggttttgtggattctgatagcagaaagatggtgtcaactcttacttaattaa

SEQ ID NO: 9 - DNA, 366 bp, Homo sapiens
gctgggatgatacagctaagaccatgttccggattccctggaaacatgcaggcctgggcaatatttaagggaaagtataaggagggggacacaggaggtccagctgtctggaagactcgcctgcgctgtgcactcaacaagagttctgaatttaatgagggtcctgaaagggaacgtatggatgttagaaactctctacaaggccgttcaatttggtgccaacaggaatcgaaattggtcatagcaggcactctggatttcctgctgctcaatgggttcgttctgtagccattgcggggcgctaaaaattcattcttactataattgctactacaacctctgttcgtggtttaaacatcattaccc

SEQ ID NO: 10 - DNA, 1249 bp, Homo sapiens
taaaggatgtagaacacaggaaaaggttgacaggactgaggtgattcgcacctgcataaacccagtgtactcaaaactgtttactgtggacttttactttgaggaggtgcagcgcctgcggtttgaagtccatgacatcagcagcaaccacaatgggctgaaggaggccgacttccttggtggcatggagtgcacacttggccagattgtttcccagagaaagctgtccaaatccttgctgaagcatgggaacacagcagggaaatcttccatcacggtgattgctgaagaattatctggcaatgacgactatgttgagcttgcattcaatgcacggaaattggatgacaaggatttcttcagtaaatctgacccatttctggaaatttttcgtatgaatgatgatgcaactcagcagctggtgcaccgaactgaggttgtgatgaataacttaagcccagcctggaaatcattcaaagtatctgtaaattctctatgcagcggagacccagaccgccggctaaagtgcatagtatgggactgggactccaatggcaagcatgacttcattggagaattcacctcgacattcaaggagatgagaggagcaatggaagggaaacaggtgcagtgggagtgcatcaatcccaagtacaaagccaagaagaagaattacaagaactcaggcactgtgattctgaatctgtgcaagattcacaagatgcattctttcttggactacatcatgggtggctgccaaatccagtttacagtagctatagatttcactgcctcaaacggggaccccaggaacagctgttccttgcactacatccacccttaccaacccaatgagtatctgaaagctttggtagctgtgggggagatttgccaagactatgacagtgacaaaatgttccctgcctttgggtttggcgccaggatacctccagagtacacggactctcatgactttgcaatcaactttaatgaagacaacccagaatgtgcaggaattcaaggagttgtggaagcctatcagagctgtttttcctaaggctccaacttttacgggtcccaccaacatttgcccccattcatccaggaaggttgccaagttcaggcgttcagagggaaactaacaccaagggagggcattcgcaattattttcatcctggttgatcctggacaggtgggtgtttattcacaggacatggggccggacaacccgggaggccattttgttcc

SEQ ID NO: 11 - DNA, 617 bp, Homo sapiens
tcgttagcagtccctagtcagtgtggtggaattccgggccgtggtgagtccgggctcccgtggccgcgtgctgggaggagactggagcccggttaggaagaatggagttggcgactcgctaccagatccctaaagaagtggctgacatctttaacgcccccagtgatgatgaagagtttgttggcttccgagatgatgttcccatggaaaccctctcgtcagaggagagctgtgatagttttgactcactagagtcagggaaacagcaggatgtgcgctttcattccaaatacttcacagaagagctaagaagaatttttatagaggacactgactcagagactgaggattttgcaggatttacgcagagtgatctgaatggaaagactaacccagaagtaatggtcgtggagtcagatttgagtgatgatggcaaagcatctttggtgagcgaggaagaggaagatgaagaagaagataaggctacccctagaagaagcaggtctagaagaagtagtattggtcttcgagtagcctttcagttccccaccaagaagctggccaacaaaccagataaaaacagttcttccgagcagttgttttctagcgcacgctta

SEQ ID NO: 12 - DNA, 469 bp, Homo sapiens
  misc_feature (1)...(469): n = a,t,c or g
gagganaaantttgatcccttcggaaccggccttggattcccttgtcgacccacgcgtccggtctagaaagcagccatttgtaatctatcctgtatatgacacagccattgacaccaaaattcacttctctcttttagatgggaatgtgggggaacctgacatgtctgcggggttttgcccaaatcacaaggcagccatggttttattccttgacagggtctatgggattgaggttcaagacttcctcctccatcttcttgagggtggctttctgccagatctccgggcggctgcttctttagatacggtgagattggagcgatggacttcctcctctcttgactcttcactctgtgccttatgatgttcttttttatatatccattcattaatttattgacaatgaatgtttattgagtacctgttatattttcaggtaagccatgggtaaacagaaaataaactatg

SEQ ID NO: 13 - DNA, 598 bp, Homo sapiens
ggaattcttcaaaatgaaaatatcagatatctaggcaaaagttgtaaataatcaaaattataaaattaaaagcaaagtagcaagatagaaataatcaaaagttatagcaacttagggacaagagtacttacttttttgggagtccctaaaacttggcaaattttaaagatttcatcgacctcacttgtccctgggaaaagtggccttaacatatagagttcagccatgatacttccaacagcccacacatcaatgggagaactataaactgaagatctcagtaaaacttcaggggcacgatacctatgaaaatagagaacaaaagaggtaattttgattgcaatttcaaaggtggatgggcagtagcattctacgctgtgtggtcatgcatttccatcaaggaacaggtattcagaccctgttccatctgtgtgtcaggcatttgtacaatgttctggggataataggacacaacacatgttccctgatcacagacaatgagtggggctggagacaaatgtctatgaaatgtccatcaagcctaagacaggaactcaactgaatagatatggaaataagtgccatctgatatattaag

SEQ ID NO: 14 - DNA, 576 bp, Homo sapiens
  misc_feature (1)...(576): n = a,t,c or g
ggcgacgtttcgatcccctnnnnnnnnncnntttttgatcactatccgtgtggtggaattcgaaaatgcaatagatccagatagaagaatggtgttagcatgggatcagtgcaggacagagggaagcatgaagaccgtttcataactgaagtggagaatgatattgggaccacagaactgcaagtttggatacaaagattgttcacttgtgagttcagaaaccccatcttgttggttgcattgaccgttgcagtgcagagaggtcggttcatgaccatggtagagagcagagggtggcagatggcagcatagcaggcataggtgatggcagagagcaagcagccattggtgccccaagaaaaaatgaaaaagaaactctaggtgatataaccccacaccaagataggtttttatgaaacaggaaattctgcagcatcttgggcagtgactgaggagtaacatatatctaggaagaaaaaatgtccaaggaagaattacatggnggtacggaggcaagaatcagcattgattaccaacagcatcatcagattccctatcanggtcaggagataaatn

SEQ ID NO: 15 - DNA, 449 bp, Homo sapiens
  misc_feature (1)...(449): n = a,t,c or g
gtgcagcnagaaanattttgaangcctgcggncttacggtcatcgcacgggccgacccacgcgtncgtccacatttatcaaatactaaattcctacacacacttggagcggtttctgaatttgntgtttgtttaatttttttatatcctctattccttaaccatgctgttaattattgccattttatcatttgctttactgggtgttaagtttcaatgggggtaaatgttactcttcttttttaaatatttttggctatattttttcatgtattctcgcagataagcttcagttatgttttggtcacattccaaaagaaattctattgccatttttgttggaattgctttaacaatatagactaatttggggagaattaccaactttgggatattaaatttcttattcaggaacttcgcatgggttcacgattctgaagaccatcttcn

SEQ ID NO: 16 - DNA, 486 bp, Homo sapiens
  misc_feature (1)...(486): n = a,t,c or g
nagagcgggtttctcannnnnnaaggcctttgnnanngncntnnncnntngggntaagnnaaccggncgagtttttttattgaacatacagacacgttcaattttctgtatttttaggactacagaggaagacagaggcggggatgactgtgttgtgtctgtctggaccaaacagcggaacaacagctgtgtgaaaagcaaggatgtcttctccaagcctgttaacatattttgggcattagaagaatccgtgcttggggtgaaggcgaggcagccaaagcctttctttgctgccggaaatacatttgagatgacttgcaaagtatcttccaagaatattaagtcgccacgctactctgttctcatcatggctgagaagcctgtcggcgacctctccagtcccaatgaaacgaagtacatcatctctctggaccaagattctgtggtgaagctggagaattggacagatgcatcacgtgtggtttn

SEQ ID NO: 17 - DNA, 338 bp, Homo sapiens
cattcataacgtgcatatgtgaaattgaacttttatccagaatacataaataacctacaaatgaataagaaaaaggacaaacaatccaattaaactggacaaaaaatttgaacactttaaaaatgaagatatatgaataaccagtaagcacacaaaaatgtgggtatcatcattagccatgaaagaaatgctcactaaaactacaatggaatctctacttcatgcctagtagaatggcgaaaattaacgcagcaacaaactcaaatactaacaagaactggggcagaacaagaccctctcgtatcttgttagtggagtataaaatgacccaacctttc

SEQ ID NO: 18 - DNA, 903 bp, Homo sapiens
ttgtggcgggcgcctgtagtcccagctactcatgaggctgatgcgggagagtggcatgagcccgggaggtggagcttgcagtgagctgagattgcgccactgccctccagcctggacaacagagtgaggctccgtcttaaaggaaaaaaatttctggaatgatgtccaataaatcagagagagggactagaagactaatgaggacagaagcttttattcttaacacctatattttgctaccatttatattgtcatcatatgcatataacattttaacatttaaaaactagtttaaacagaaatggttgccctggaatgtggcctgtgttctttcaagggaggccagcagtttctacagtggctgagatggtaccttcatctcacacacctacgcaggagtgcatttgtgctttgatgtggttgtcccttgaagaaggaagcagttctctttttcttttttcccttttccattataggatcagtcacttcttggggcattagtagtctcatttccagcggcatcttcccttggcaaaaggaatcccagataggacctcatctttctaaacaaatgctgttttgggtcctaaccatcccatgtttggtttgaatatgtttaagttgcctggaattatcaacaaaagaattaaatttattgtaggtcagggcatcttttgactcattgtataaaacattcactttaaatgtataccgaaatgtcctttaggccgcgcgcagtggctcatgcctgtaatcccagcactttgggaggccaaggcaggtggatcacctgaggtcaggagttcaagaccagcctgcccaacatggggaaatcccgtctctactaaaaatataaaaattacccgggcatggtggcgggtgcctgtaatcccaactactagg

SEQ ID NO: 19 - DNA, 445 bp, Homo sapiens
ggaattcacctagtagatgggcaaaaatccaaatgtttgagcacacattctgtgggtgaggctgtggaaacgtatgttcacatacattgctcttggatatgcagattacgaccgctcctgtggagagcagttagggaatatctttcaaaattaaaaaatgcagagttaagttttgatccaggagtctcactcctgagaatttatgctatagatatgcctacaagcatttgagatgaaaaagaagcattgctatttgcttttcttgcttttcatgaataacattgtaaaagtagaatatgggcagtgattcaagcattcatctttgggactggttaaggaaactatgatgctttcacagaatgaaattctatgcagctgtttaaaacaaaccaagacaccttctttcacatatatggaaagatgtccaaaatatactgttaaagtt

SEQ ID NO: 20 - DNA, 1370 bp, Homo sapiens
ttttttttttgtggaaaagaggtacctttatttgaacagaacaagcaccctggccccagggcaaccacttccccaggtgcacagccagggccctcctgtctgcaggagaattcacagctggtgtgggactcagcccctaggccattcacagctttgtctggctctgtacattcattcagcacggggcaggggggccatgccaccagcctgggggctcaccaggcccctggatgcacacaactcaggcagggcacctgtgggaaggcgcatatcctggcggcagcagcacgtggcaccaggtgccaggccagttaggtggatcctggggccccagggagcgcagcttgctgggcagtttcataaaatgcagcccctgcccacacccacctggcttcaggctttggatgtctccaaaccaaaaacctcccactgaaaatccaggtgtgatgggccgggtgtggcggctcatgcctggtgaatccccgctaatttgggaagctgagggcaaggaggatcacttgagtccagaaggtcaaggtcacagtgagctgtggcaccactgcactctagcctgggcaacacagtgaaaccctgacccaaaaaccaaaaaccaaaacaaaacagatccaggcatggccaagcgattcatggctgggcagggccagtcccgtcccgctgcacgctgaccaccgtgccctgcgctcacgcctgcaagccactcagctggaacctggcctcctcggatatgccgaactgttccagggggtccttgcccgtcaccttccggatttcgttcctgtagaagatgaggcttctccgcatgaactcgtagctggcccgacgcagagcctccatccactcctgacactgctcctcgctgctgcactcaaagtgatacttcctctcagggtcctcaatgaagctgatggagaaggtgccgggctcttcccggacgactctgcagcgctccagcagcagggctccgacgggctcggcctcgtctgtccgaaagtagaagaggaaattcaccaccagcttcaccagccgccgcttcagcacgctgcccttcttggggcccctcatgcccagctcggccgccatctcggccggctgccgggacagagcctgcagctccttctcgttgtaccgcatggctccgcggggaacgggaacccgggccgcgccctcccggccgccgtccccgctcaggcagagggcccgtctcatttgccccggaagtgctttctttgcccgccgttcgccaaacgaagtcgtggaggtggcgaaacgaggaggagataacgcggccttgggctctggtgaggagtagaggcggttgagggcggcggccgacgcggaccgggggttcc

SEQ ID NO: 21 - DNA, 1812 bp, Homo sapiens
gttaattctattcatttattatggcagaagtattttaaagtaaattagacaaatcatgacatttcatacccaatactttaacatgcatctctaaaaaccaatttcttacaaagccacataattttattacgcctaataaggagacgtagcagggtagtgtgaaggaggggaaatcgtggcgatgggttaggtatacacttagaatgaagtgcagactccacacggaggccctcccgaggcccaaccggacctgacctgggtttgcttctctgtcttcacctgccagcactaacccgcagctatactccagccacacaggacttctttgagttctttcagtgaccaatctctttctcgcctcagggcctttgtactggcggttccttccgccggacacgtcgggtttcctcgtttttgcggactggcgctttctgatttcagagactctccgcaacagaaccatctcaagtgggtctacctcctcgcctttttttgttgttgttgttgcttggctgcgcttctgacagggcaggccgtgatgatgtttgtttatgagttaggtctgactgttcgttggtgcttaagatccccaccgggtccctagggcctgtgcgtaccgcgcacctgtgcacgtcctgcgcgcagctgcaggcgactccgctctggctcgtcgctgctgtttcctgctgggggtgccgaccctgtcccacgctagctgggtgacttcccccaaccgcagagacagcggcgacccggggcctcagacctgcccccgcatctcgccggcgccaggcagtgggaagtcaggttcttccgccacctcccagccaggactctgccaccctccctcaggatgcctgagggccccgagctgcacctggccagccagtttgtgaatgaggcctgcagggcgctggtgttcggcggctgcgtggagaagtcctctgtcagccgcaaccctgaggtgccctttgagagcagtgcctaccgcatctcagcttcagcccgcggcaaggagctgcgcctgatactgagccctctgcctggggcccagccccaacaggagccactggccctggtcttccgcttcggcatgtccggctcttttcagctggtgccccgcgaggagctgccacgccatgcccacctgcgcttttacacggccccgcctggcccccggctcgccctatgtttcgtggacatccgccggttcggccgctgggaccttgggggaaagtggcagccgggccgcgggccctgtgtcttgcaggagtaccagcagttcagggagaatgtgctacgaaacctagcggataaggcctttgaccggcccatctgcgaggccctcctggaccagaggttcttcaatggcattggcaactatctgcgggcagagatcctgtaccggctgaagatccccccctttgagaaggcccgctcggtcctggaggccctgcagcagcacaggccgagcccggagctgaccctgagccagaagataaggaccaagctgcagaatccagacctgctggagctatgtcactcagtgcccaaggaagtggtccagttggggggcaggggctacgggtcagagagcggggaggaggactttgctgcctttcgagcctggctgcgctgctatggcatgccaggcatgagctccctgcaggaccggcatggccgtaccatctggttccagggggatcctggaccgttggcacccaaagggcgcaagtcccgcaaaaagaaatccaaggccacacagctgagtcctgaggacagagtggaggacgctttgcctccaagcaaggc

SEQ ID NO: 22 - DNA, 1085 bp, Homo sapiens
ctgtttggacaaagggggctgctcaacagacttcgatctcctctgggggatgtggataccgctcaggcccgcacccctccattggtcctggagactgatatgggaggcggtatgtgccttggctccggagggcacctggagcacccctcacctggagaaccctcatccagagcactcctttcctggagcacccctcacctgaagcaccctcagttggagcatcctctcacctagagaaccctcacctggagcaccctgttacccggggcaccctcacctggaaaaccctcatctggagcaccttctcacctggagaaccgtcacctggagcaccctgttacctggagcaccctgttacccggagcaccctcatctggagcaccccctcacctggagcacccctcacctggagcacccctcacctggagagcccctctcctgcagaacccctaccaggagcatacttcaccgggaccaccccttgccttgatgcctcagcactgaggagtctcccatctagggttggggctcccttcctgcccccccatcaactcccctcgtccttgatgttgctcccccagggccccagccagccagctcctgccctggccgtgacagctgctattctgtgcccggcactgtggtgtccccagcgggttgttcggcactccgtggcgcagccacctgtccgcagccgctcccctgcgggacgtgggctgcctgtgccacgcactgctggggcccagctcatggcaaatgcagcactggtgtcctccacgggccggaacctgtgtctggggggagaacgcagtggccgaaggtgggaaccatgtggcagtgaccagggtctcgaccgcccccaccccagcaccccctcaggctgcagctccaagggccctctgggcaagacaggaacagaaaccaagtctcaggcttcgggacaagctgtgaggctggccgccctgccttgggctgaggggccttgtgatatggcgtctgtgtttggccacggccaggctgacccgcaggcgggagagatgattgtcccagactctgcactctccaggggtggcctcacgcgctag

SEQ ID NO: 23 - DNA, 397 bp, Homo sapiens
atcccggagaagccggcgggagccccggggagaggtctcttttcttctttcctttctgtcttccttttcttttttcctctcttccttcctcccttctttactctttcttttcttccctcctccatttactcctcctctgcattctctccctgcatttcttcttttcctcctttctttttttcatctttcttttctcattatttaagggtctttgaaaatatttttttcttggatgcaatatctgtacgtatttttctgccactattaattattgcttcacttacagtgattcctgcaaactttcaatcttctctaaggtggggctttgtttatttattttatttgcatcttccaggtgacatggttttctggtgccttggcaactgctcacgatgca

SEQ ID NO: 24 - DNA, 429 bp, Homo sapiens
ctggaggaaagcgagccctcagctcagcccaggatccccagaatgcccttaggcccccaggtgggtgtctcccagcctcatggggaggaagaaagtgatggccgggggctcccccaccctcctggagcctgaggtcggggtagggaggacagcatcagttcccttctaaggaagggccctggacactgcagcaggcagcccagtccagactgcccatggcctcccaagtgatgccctggctcccctggacgacagcatgccctgggagggcaggaccacggcccagtggtcccttcacaggaagcgacacctggcacggacactgctggtgagtagggtgagaggtccccagcatcaagaccagccactggtcatcagaggccattgtggcttatggttgggtgctgggagggtggggagaatgaaaca

SEQ ID NO: 25 - DNA, 492 bp, Homo sapiens
  misc_feature (1)...(492): n = a,t,c or g
agcagggccgggtcccgtgttccgattgactgccagtctctncnnannnncntnnnngnntaagggnccacccacgcgtccgcagacgcgagtagtatttttatattcacatttgtgattcacttcgattttttttgatatttggggttaattttgtgtgaggctttaggttgaggttaatttttttgtctgtgaatatccagttggtccagtgccatttgttgcaaagtctattcttcattgaattacttttacaaaaatccactttggggtatttgtgttgatctctttctgggttttcggttctcttctattgatctgagtgtctattcttccatagataccctgtctcaagtattgtggtgatcaaatagtaagtttaatatcaggtagcgcgagctctcttactttgttcttctagtttctttgccttatcatatatattaggataagntgtctatatctacaaaaaaatctggttgggattttgag

SEQ ID NO: 26 - DNA, 388 bp, Homo sapiens
attttgttccactgatctatttgttctttcactaataccatattgtcttgataactctagctttttaggaagtcttgaggtcaagtagggcaaatcctttcactttgttctctccttcaaaaaaacttcatataaacttaagacttaagtttgttgatatccacaaaatttgctgggattttgattgagattgtgttgaatttgtagatcaagttgggaagaaatgacatcttgacagtattgagtcttctatccaaggaaatggagtatttctccatttatttagttctttgatttatttcatcagactttcttcatatagatcttatccatattgttagatttgtgcctgagaatataaatgggtttgtgtttttcacttcaaatg

SEQ ID NO: 27 - DNA, 380 bp, Homo sapiens
caatttctaactgttcatcgttagcatacagaatttacaaataaaagtgcctatatgaagaagacatgatgctctatgtagaaaatcccaaagaatctatagaaaagcaaagccacaggatacatggtcaatatctaaaaattaattgtatattctgtatgctaacgatgaacagttagaaattgaaatgaacaaaattgtaccattacaatggcagtaaaaacaaaatagcttttacaaatctaacaaaataccagaatatacagaatcgacatgctgagaattacaaaatactggtgaacaaaatcgaagatctaaataagtgtagaaatgtactgctttcatggattggaagacggaatattatcaacacgatgact

SEQ ID NO: 28 - DNA, 427 bp, Homo sapiens
gaaaatactgtgaacaatttgcaccaacaaattcaataacctagatgaaataaagtcctagaaagacacaaactatccaaactgactcaagaagaagtagaaaatctaattacacttaaaacaagtagagagactgaattagtaataaataaataagtaattccccacaaagaaaagccaggcccagatagtttcactggtgaattctaccaaacatttaaagaagagttaacatcaacttcacaaactcttccaaacaataaaatatggaagaatacttcccaattcagtctatgaaaccagtattaccctgaagccaaaaccagaaaaagatctcacaggaaaactacagaccactacctctttcaaatatagatgcaaaatctcaacaagacactagcaaaccgaatttagtaacacataagaa

SEQ ID NO: 29 - DNA, 413 bp, Homo sapiens
agaatctttgcctagccctaggctctgatgcttctaagaggtctcaagttttaggtattattttagcccatgacccattttgagtttgttgttgttgttgtttgggttacggatgctcggtgctctattgccattgtctgaaaaagctatccttcctccactcagtggcttctgcacctttgtcaagaattaagcgtttttgtttggatctatttctaggttctccagtctgttccattcaactatatggctgtccttctataatatccaactctcttgatcactgtaggtttatagtataccttgacatcgggtacagcgattcctctcactttattctttttcaaaatttagttattaagcctttgcctttccatgcacattttagaataaatttatatctacaacaattt

SEQ ID NO: 30 - DNA, 228 bp, Homo sapiens
ttttttttttgagacagagtctcactctgtcacccaggctggagtgcagtggtgcaatcctgggtttaagcgattctcctgcttcggcctctcgagtagctgggattacaggtatgcaccaccacgccccagctaatttttgtatttttagtagagacagggttttactatgttgcacaggctggtctcaaactcctgagcccaggtgatctgcccgccttggcctcc

SEQ ID NO: 31 - DNA, 392 bp, Homo sapiens
agtttgcaaatattttctctcattcaagaggttgtctcttcactctgttgttttctttgcttgctgtgcttttttatttttagtttaatgtatcttgtttgccttttttatttgtttgtttttgttgactgtgcttttgatgtcttggctataaattatttgcctagaccagtgtcctgaattgtttttcctgtgttttcttctactagttttataggttcaggtcttacagttaagtctttatcttgagttgatttttatataacgtgagagataggggttcagattcattcttctgcatatggatatccagtttttccagtatcatttagtgaagggaggtgtccatcccgcagtgtatattcttgacacctttgtcaaacatcagttgg

SEQ ID NO: 32 - DNA, 471 bp, Homo sapiens
cgcgggacatgatatcatgagaacctttgacgccaaccttggcacgaggcaactctgatctaagcacaagagagacatcagtgaatgccatcatcaaaaagtctccctgtcctcatcttattaggtaaaaccatatgaaattgctgtttttctagttaaaccaattgaatataaataacacctactatctgatccagccattccactctcaggtatttaactaaaagaaataaaagcatacaccctcggatttgtacaccaatgtttgcagcacctgtatctgtaatagcccaaactagaaacagtccaaatgcaaaaacagtgatatgtccatagaatggaatactacacaacaataaaaaggagtgagatactgatatgtactacaacatgggtggacttcagaaacactattctacgtgaaacagatcgaatacataagaccacatatgatgtgatttcacttataca

SEQ ID NO: 33 - DNA, 1823 bp, Homo sapiens
tttcgtccggagccctaggccggtgggtgagtgcaccgcgttctcgcacgcgtcatggcggtcctcggagtacagctggtggtgaccctgctcactgccaccctcatgcacaggctggcgccacactgctccttcgcgcgctggctgctctgtaacggcagtttgttccgatacaagcacccgtctgaggaggagcttcgggccctggcggggaagccgaggcccagaggcaggaaagagcggtgggccaatggccttagtgaggagaagccactgtctgtgccccgagatgccccgttccagctggagacctgccccctcacgaccgtggatgccctggtcctgcgcttcttcctggagtaccagtggtttgtggactttgctgtgtactcgggcggcgtgtacctcttcacagaggcctactactacatgctgggaccagccaaggagactaacattgctgtgttctggtgcctgctcacggtgaccttctccatcaagatgttcctgacagtgacacggctgtacttcagcgccgaggaggggggtgagcgctctgtctgcctcacctttgccttcctcttcctgctgctggccatgctggtgcaagtggtgcgggaggagaccctcgagctgggcctggagcctggtctggccagcatgacccagaacttagagccacttctgaagaagcagggctgggactgggcgcttcctgtggccaagctggctatccgcgtgggactggcagtggtgggctctgtgctgggtgccttcctcaccttcccaggcctgcggctggcccagacccaccgggacgcactgaccatgtcggaggacagacccatgctgcagttaagtgggtcgcttggtgggttcctcctgcacaccagcttcctgtttcccctgttcatcctgtggctctggacaaagcccattgcacgggacttcctgcaccagccgccgtttggggagacgcgtttctccctgctgtccgattctgccttcgactctgggcgcctctggttgctggtggtgctgtgcctgctgcggctggcggtgacccggccccacctgcaggcctacctgtgcctggccaaggcccgggtggagcagctgcgaagggaggctggccgcatcgaagcccgtgaaatccagcagagggtggtccgagtctactgctatgtgaccgtggtgagcttgcagtacctgacgccgctcatcctcaccctcaactgcacacttctgctcaagacgctgggaggctattcctggggcctgggcccagctcctctactatcccccgacccatcctcagccagcgctgcccccatcggctctggggaggacgaagtccagcagactgcagcgcggattgccggggctctgggtggcctgcttactcccctcttcctccgtggcgtcctggcctacctcatctggtggacggctgcctgccagctgctcgccagccttttcggcctctacttccaccagcacttggcaggctcctagctgcctgcagaccctcctggggccctgaggtctgttcctggggcagcgggacactagcctgccccctctgtttgcgcccccgtgtccccagctgcaaggtggggccggactccccggcgttcccttcaccacagtgcctgacccgcggccccccttggacgccgagtttctgcctcagaactgtctctcctgggcccagcagcatgagggtcccgaggccattgtctccgaagcgtatgtgccaggtttgagtggcgagggtgatgctggctgctcttctgaacaaataaaggagcatgccgattttt

SEQ ID NO: 34 - DNA, 421 bp, Homo sapiens
ggcacagagcccccggaactggcatctgcagggcgtgagcttttgccgccgcgatgccgcacttcctggactgggtcgtgccggtctacttggtcatctcggtcctcattctggggggcttcggcgcctgcatctactacttcgagccgggcctgcaggaggcgcacaagtggcgcatgcagcgccccctggtggaccgcgacctccgcaagacgctaatggtgcgcgacaacctggccttcggcggcccggaggtctgagccgacttgcaaaggggataggcgggcggcaccgggcgcccttccccagcccgccccgcccgcccagcccggagacccccaaggcagagggaggccggcctgttggccctccacgctatccctctgcagcctgggccctcccgacagaggccccaggggcg

SEQ ID NO: 35 - DNA, 475 bp, Homo sapiens
  misc_feature (1)...(475): n = a,t,c or g
cagaacgnggaanaaacaccgggnnngancggaggcgggcgcaccgaggcggaggaacttcttcaaaatctggtttagcagtccctgtttgggccccaggcctcagtggggcttgagctggggggcggattgacggtctccagcgggcagggnatcccaccccctacccgggggaatagcaagccgctttcctgcttcgtggccccggactccggccgcctgccatccatccctgagaacaggaacctaacggagctggtggtggccgtgactgacgagaacatcgtggggctgttcgcggcgctcctggccgagagaagagtcctgctcaccgccagcaaactcagcaccctgacctcgtgcgaccacgcgttctgcgcgctcctgtaccccatgcgctgggagcacgtgctgatccccacgctgcccccacacctgctggactactgctgatgccctcctctgccaaggactn

SEQ ID NO: 36 - DNA, 1709 bp, Homo sapiens
ttttttttttttccttcgtatgccacctttattgtgtttccccaactcctgggccccatggtagactggccacatggctactgggctcctggccttcctagggctagcagctggtgggcaaacactctgccctgctggagagctgccaggccatgcccgggcacaggctagtggggctcctggctcagtcctgatagcagtgccagggaggcgtagagtgcacacatgcggccctgggcctgcggctcccagcacacgtggggagtgtcctcccccagctctaggccacactcgtccagcaagacccaggccggtgctccttcgccccagctgttccccaggagcccggggggcagggacatggtgctgcgctcctgccacggggcactctgctccaagaggctgcccaccagctcgagcggccccaacagggtctgcgactccagcgcctccgccagcagcttgtgctgcgtttcactcagcatggtcagtgcccccagcaggtagacaacagggatagcgagttccggcaccagcattccggaggacaacaccaggcactccaggacagcacctgctggaccgtccaggggctccaccggcccaaggctctggccctgctccagcgcctcctccaaggctcgcagggccagctggtcccgcagcaccccctccaggccctccagcagccagctggcacagctctctgtccaaaagctccagttccttggagatggtctccacctctgcccgtaggccctggaagtcttcagtgaacgccccctccgcagggaccccatctgtcaggaagttgtggaggcacctcatcatggagaggccagagggcagctgtggccaggcgccttcgctcgtggaacgcttgtggcctgtcgcgggtggctggaaggtcctctgcttcttatccgggaagagaaggacgtccaagtcagagtcaataaccagctgggccacccggaatgcgagggtgctgcctgaggggatggtgaccgtcttcttctggctcagatggccctggccctcaccctgcaagcacgtggctccgggcagggaaaaccggcccgagccctcccgcttgtgggtgcgcgtgacttccacctccttctgtgtctgcagcacctcagtcaccacgtacacgttgtccccgcggctgcgcagctgctgcaggactttgtgttctggctgccgcaggtgcctctcatggagcagagtctgccaggtgttagggtccacactcagcgagtacacattcattgaggtgctggagctgtcagacaccgcggccccgcctgcgatctttgcctgtcctggggctgccagctccacgctgccctgtatctgcccatccatggcatcgtagaagtggaagctcctgccacgctgcacgtctggttccgcggcatccggctccaggatgtccttgatagacaggttgacacacttataacggggtttccagaaccatgagcttgagggcttcctaaccaccaggcagtagggctggaagccagtggagctctgcaggctggtcacagggatgaactccccaccatggtccagctcctggaccactctccggactacccgctcaaaggccgaccccatgctccgtgaccgtcggcgccccgagggtggcgcgtctggcgcgtctgctctccctggaaaacgaaacggcgagcaggagctgaagg

SEQ ID NO: 37 - DNA, 828 bp, Homo sapiens
aagtggtggaattccacgggccacacggtgactgctgcggctctgagtgaagctgccagattccttttcagtggcacgctccgtgaagaagtagtacaccttgtcatcatcacccactgcactggccttgctctcccgcacgaggacggagaacacaaactccgcatctgtgggtcaggcagtttgagaggcttttgagacaggctggggattcctttcccccactctgaggctgacccctcacttgacaacacacaggaatggaatggacaggctcacctggggatttgggggtggggtggtcagctggccaagggagtaaaaatgaagaaatagtcccctaccccccatcatcctgtgcctcatcctcctaaccattgagccaatgcattggtgtctcctcagttctcagggagtgtgggtggcggctccggcggatgtcaggaatgctccggaattcatacctagtggctgtgtagaggcctccatcaatgatgaggcctgtgaagccacgggctgggtcataaggacacttctccttcccctcctcgaagctggttggcaaggtgaaggcctcagcatcaatggctgcacagaggggctggaaggcgtgagtcccacatgcatagaggtgggtagaattgagccgctgcaggaaccgcacatggttaaagcactccgtctggttgtttttccctttttgatgacatttgctttgcatctctggggaggcttcccagtggatctttgcgctcggatccggggccatagagacagcgacgcgcggctccgcggccccacagcaccagctgcgagaggaagacgaaa

SEQ ID NO: 38 - DNA, 427 bp, Homo sapiens
  misc_feature (1)...(427): n = a,t,c or g
tttcgtgccatggtgtcctccaccctgaagctgggcatctccatcctcaatggaggcaatgctgaggtccagcaggtaacagaggcaaagggacttcagaagaaggcaaggagggatgagaggttcctgtgtgactcccagtttctcctcccctgcctcgccctctgcagaaaatgctggattatcttaaggacaagaaggaagttggcttcttccagagtatccaggcactgatgcaaacatgcaggagagaaggtcatggcggatgatgaattcacacaagacctgttccgattcctacaattgctctgtgaggggcacaataatgatttccagaactacctacggacacagacagggaacacgaccactattaacatcatcatttgcactgtggactacctcctgcggctgcaggaatccatcn

SEQ ID NO: 39 - DNA, 1030 bp, Homo sapiens
accctggatctgaccggccctctactcctggggggtgtccccaacgtgccaaaagacttccgagggcgcaaccggcagttcgggggctgcatgcggaacctgtcagtcgacggcaaaaatgtggacatggccggattcatcgccaacaatggcacccgggaaggctgcgctgctcggaggaacttctgcgatgggaggcggcgtcagaatggaggcacctgtgtcaacaggtggaatatgtatctgtgtgagtgtccactccgattcggcgggaagaactgtgagcaaggtgagtggccggcgtcgtccatccccccggtcacggcggcctgggaggcattgctccttgatgtgcccgggaccaccgtgagggggcttcacatccaggtccggcagcctctggtggtatatgctgcatttactgtggactcacaccgccctctccaagagactgtcctccgcagagcccctgctcctgcttctggggtccccagtccctcaggtgtggggtgggacaggtaggctgggccggcagagcccagccccagcaccccagccacggtcatcatctctgtgccctggtacctggggctcatgttccggacccgggaaggaggacagcgttctgatggaggccaccagtggtgggcccaccagctttcgcctccaggtgactggggccccgtgccaccaaggcacctgctaggtgggtgcccgagggagggacccaatgctgtccgggttgcgggtgaccgacggggagtggcaccacctgctgatcgagctgaagaatgttaaggaggacagtgagatgaagcacctggtcaccatgaccttggactatgggatggaccaggtgagctggcacctgcacctcctctggggatagacccttcctccggcccagggaaaaacaggcgcctctgaagacaaggtctccgtgcgccgtggattccgaggctgcatgcaggtgcgtgggggttgtggggggcggggggaggcctgcccctcacaggcagctccgaggctg

SEQ ID NO: 40 - DNA, 453 bp, Homo sapiens
  misc_feature (1)...(453): n = a,t,c or g
taccggcgncgcaattcttggggcgaaccacgcgtgcgctccatctgagaaaagtaataaatatttaaatacataaaataattattcacaaggaagatctgaataaatggaaatatatactatgttcagggatggaaagactcagtactgtaatgataccagttgtcccccagataatctacaaatttaatgcatagcaagctgatcctaaaattcacatggtaagaatgaggagcaaaaataacaattttgaggaagaacaagttgaggggacttgttcttgtccccttaagtacttgttaggtaaagtacctgttagataaagtcttgccacatattaagacttactatgaagccagagtaaacaagagtgtagtactggtgcaggtaacaattatgtagcagaacagaataaagagccctgaaaaaaatatatacatagatacttctcct

SEQ ID NO: 41 - DNA, 409 bp, Homo sapiens
tcgtccagcatgctgaaggaaagaaaagttttccaatttccttcctgcttatttttccaatatattacatggctgggtccaccttaccacgtcctgtttgattccagcgttaccaacttttctattggagccaaataagacatactgcaatcagtgatgaactgtctatatgccaagcgtatcccttgtgtaactgtgtaatggctgaaactgagaaattggggctaagtatcaagtggcttaaaggattgtcacggatccaaaatttgaacgattaccaaattacctcgcacaggaaggaatttatgcagatgactgtttaccacagagagttacttatcataagtgttgtagccacgaacctgggaccttaaaagaagaatcctaagattcttggagttcctatcat

SEQ ID NO: 42 - DNA, 415 bp, Homo sapiens
gggtcgacccacgcgtccggttatgacaaaacaccagacttcattttacaagtaccagttgctgtagaagggcacataattcactggattgaaagcaaagcctcatttggggatgaatgtagccaccacgcctacctgcatgaccagttctggagctactggaatagcctcaagcacagaacttggcagggaattggaactgttgccagcaatctttcccagctctaaactctaaatgcaccttttccagagttgttactgttcagaagtctggctagaactggatttgtgttaacctaaaagatttgggccaggcttagtcatctattggtatggatttatccaggagctggactgcaaccgggaaaggggcatcctgctcaaagcctgtttccccacgaacattgtcacctta

SEQ ID NO: 43 - DNA, 394 bp, Homo sapiens
  misc_feature (1)...(394): n = a,t,c or g
ccggaattcccnnntcgacgggaggcaggaggatgcagagcccgggacagagacagacagagagggagacacagagagagattaggcaagaagggacagagatgggttcaggtggtggaggccgggcgaggccagcgtgagatgggggcagcatgggtctctggggaaggagtgtgtggggcggagtgagaagtgggggtgtggctgggagtgaccctgggtccccggggccccgcctgggctatagcctcggccatcccagtccaacagagaggagccatgaactagggccaaggcaggggtccagaggcagagggctcccctttttctggggtacaggggctggggacagggcaggatgcaagagccagacccagctcctcctcgacagcgc

SEQ ID NO: 44 - DNA, 450 bp, Homo sapiens
gcggaaccgctccggaatttccgggtcgacgtttcgtctagtggagaaggtgagaggccgcgggagtggcggttgcgcgggccgtggtggaggtcttaggtggaggggaaggggcttctctcgggggagagtgggctgcggtgggcagctgacctggccttgtaggaatcgggagggagggtgccctttaacaagggtaggcgcttgattgaggggttgtgaggctgagcgcagcatgtgagttgggggtgatctgtatatcgcaggagggtcttcaatggggaaagttgtaaagcaggagacagcagatggtaaaatatagagacgtccttggaatgcagcgtggcgatttagtaggaggttttaaggcagagggttattacagcgcactatgctttacaagctttgatttgggtgaaagtcgtgggaagaagcaatattgaggaaggg

SEQ ID NO: 45 - DNA, 394 bp, Homo sapiens
cactatctccagccccatacctctcttcagggctccatacctgtgcttctagttgtctgccagacatgtccatttttcattgcccaactggcaacttattgtctgattgtctatctagttgtacatcctagaaatcatagtcataatttattccatcttcacttccccatactcatagataaccaagtcccataaattggaaattctaagttgccaatggaaaaacaaataacaaagatactggtctggggttaggagagtgttcgcagtcatcatactcctcttggccagcagtgtcccacgtgttcaggctaacgatttgcccatccacggatgtctggacgctataattgtcaaagacagtggggggatatactcctcaggaaagacattt

SEQ ID NO: 46 - DNA, 366 bp, Homo sapiens
acgactaagaaaaccttgataagtaataatgtttccagtaggagtttgcccatccttccagaactgaaagccttttctttggcttttaatgatcctttagaaatacaaaaatatatgagaactgtcagtagtgtgtcactcatgacatttctctttatattgtcacaaagttagcactaatttttttaattcccagggtttttcttttccatcaattgaacattacctaataatgtttacatttctttactatgacgacgtttattgcaattccattttcttttctttttcttggtagagacagtctcttgctatgttgccaaggctggtctcaaactcctggcctcaagtgatcctcccacctca

SEQ ID NO: 47 - DNA, 162 bp, Homo sapiens
ttttttttttttctgaaaaagtctcgctgggtcacccaggctggagtgcaggggggcaatctcactgcatcctccgcctcccgggttcaagcgattctcccgccttagcctcctgagtaactgggattacaggcaaccgcggctggctaaattttgtaattg

SEQ ID NO: 48 - DNA, 410 bp, Homo sapiens
  misc_feature (1)...(410): n = a,t,c or g
actaggcccagcctcatggcctggaattccagtctgttatctggagcaaatcagcatttccgtccagcgttcctaggctcccttttatctgccccccacagcactgactgttactagcgtgagccgccacttctccccgttcagtgcaggctggctgtacggggttgattccttagacatataaaaatctggcaaaatcagaaaacagtcattctcacttcacacctgatagaatagccattgtcaaaaacacaagagacagccactgttggcgagggtgttgagaagagggagccccagcacgctgcaccgttggtaggaatgtaggttggtacagccatgatggaaaacaatatggaaattcctaaagaaataaaactagaactactatatgactcagcagtccttcn

SEQ ID NO: 49 - DNA, 465 bp, Homo sapiens
gtagggtcgacccacgcgtccgatatgggcgccggcgcggagcgccgcggggcaacgcggtgtctatcatggctgagctgcagcagctccgggggcaggaggcggaggggtccatggtgaagagtctggaaagagagaacatccggaagatgcaggtagcggggctggggccgaaccaggacccccttctcagcgggtgggtgccgggcccttccctcagccaccacgcgacgccttgcactgcagccgcgtacccgcagaccgggtgtgggcggccctggggtcgccggggcggcctcggacaggacttcggatgctttggcggatcggatgaaatacgtgtgcccttgccgtgcgcgaggcgtgtttccgccccttccagcctggggcaggagcgtcctcggcggcaggtgggaagcccctggtggcaggcgctcgccccaccaactttccctcttacgcggg

SEQ ID NO: 50 - DNA, 421 bp, Homo sapiens
atgtctgctaacagcattcaataaaagctctgggtcgggggtaagagaaatgcattcaggctttagatgtctttgttttttgttatattgatcacagcagccattgtttgatgtcctgtgactgagaaaccaggctttaaactttatgcctttggagatggagcccaagatgagcaaactggcctttggctgtcagagaagttccacatcagatgatgactctggctgtgcattggaggagtacgcctgggtccccccgggcctgagaccagagcagatccagctctattttgcttgcttaccagaggaaaaagttccttacgttaacagccccggagagaagcatcggattaaacagcttttgtaccagttaccaccacatgataatgaggtacggtattgccagtctttgagtgaagag

SEQ ID NO: 51 - DNA, 2095 bp, Homo sapiens
ttttttttttttgtggcgagcagtcagtactttaattcaggtcaggctccgacacctggggagacggggtcctgcccgccccaccctgaggtggaacccccagctgctcctgggcacagaatcatttacaaaaataaatatgaaaaaagcagcaactctttagtgatcatggaattaatctgacagcaattaaatgtgtttaagcatctggcatatctcctcaattgcaccaaaagaatttggaagcacttggtttggtctcaaaggcaaaaggaaaggacgaggaaggggccaggcctcccgccaggcccccgcccccctcacatttctgagtccgcatacatcccgttgattaagtagtccacctgggtgtagtccttcttcttgtagctctcataggcctgcagggcaaacaaaaccaagactgtgatgaaaagggtcaccccgagtaacagcaccaccagaaggagagttttgtctaccacggcctgggtgaggggctcagtggtgaccaccatgtactggccttgggtgctgggctggcacgagtccgtggctggcatcttagtgccccctgagctcctgggtgttggcccagtggaatcagtacctggtgtggcttcagtctctacctgctccggtgcctgggatgtgcctggcccagcggccctctgggtatatggcatggggcttggctgtgtcgtgggggacatggcctccatctcagggattgggctggtgtgaggtactggcactgggctggcagttggctccctggcttgtgccttggtggtggtcaccactgtgggggtgggggcgggctctggggttgtgtttgagggcatgggtgtggatttatttgttgtgttaaccacaggctggtccactgacacctggctaatgggaccttgtgcttggggacgcatagggggtacagggcttgccgcggtgtcactgggcatgtgcttggaaggacttggacgagtgctcatggggctgcttgtgtttgctgtggtcgctacagtctgagcacgtgtggccaatgtggccagggttgctgttcttggcaacgcgctgctctttggcacttgtgcgagggctgtgctgagagatggatgcccagtggcggtagtggacggggtccgccctgtggaagtggacgtgggcgcggggagtgcaagtgtcatgggagtgctggaggccgcagtcatactggaggctgcagtcgtgggagcaatggaggccacagttgtactggaggctgcagtcgtgggagcactggaggccacagtcatactggaggccgcagtcgtaatggaggccgcagtcgtactggaggccacagccgtgggagcaatggaggtcacaccatcagctgcaactcctgaagttgctggttcactcacatctgtcctgcttgtgtcctctgttgtgacttccatagagttgaggtgggctgccgaagtccctttggtcaatgtgacaggagaagctgctgccatggttacatcctcagacgttttattatcaactgtttccacagatgcattcctcttgactaatcccttccacattttgttagggacaaagttgcgtggatcgttggatgccgcatggctttcagataaggacaaggagaaaatccaaatgagcacaagagctgtccacatcttgtgggtgagctgggagcaaggctgggcggtccccgaggctcccagccagccagctcctcaggctgctaatggttccctcctgcttggccaagggatcagaggctgctgctaaggggatgctcccagcctggaccatcttcctccttggagagctgtgggcttgacactgtgtcgctgggcgaagtctggctttgcagggggtgaaagccacgtggtggggcactcccgggccatgccatcctttgtggcacatgtgagacgaaggtagactctccactctagtaacagacgcatccgggcgcagcaggcccccggcggcctggtggccctcggacagtaggaaggagcctgaggcccggcgcggggacgtggccggcagcgcaacccaggcagctccgggcagcctcgtgccgaattcgaat

SEQ ID NO: 52 - DNA, 462 bp, Homo sapiens
gagagtggcgaattcctagttagtttcacattaaaaaaaccaaccaatgttttccaccacattaatggaatgaaattttttaataaactatcttctagagccatacagatatagcattttataaaattcagcatccatttatgttaaaagctcttacaaaatgggcgtaggagggaacttaacctgatagaagatatctacactgaagcctgagacttaatggtgaacagttgaaaactttccctctgagatcaggaatgagatgaggctggccatattgccacttgtactcaatgccatgctatctattgtcccagctgttgtcccagccggtaaaacaaggcatgagaaagaaataacatgtccattgattggacaagaagaaaaataattttcatgatttgtgggtgatatgaatacatgtgtagaaaataaaaaagaatctaaaaaattactagaatt

SEQ ID NO: 53 - DNA, 630 bp, Homo sapiens
cctgaagttattcaacagtcagcttatgactcaaaagctgacatttggtcattgggaattactgctattgaactagccaagggagagccacctaactccgatatgcatccaatgagagttctgtttcttattcccaaaaacaatcctccaactcattgttggagacgtttactagagtcttttaaggaagtttagttgatgcttgcctgaaccaaagatccatcgatttcgtcctacagcaaaagaacttctgaaacacaaattcattgtaaaaaattcaaagaagacttcttatctgactgaactgatagatcgttttaagagatggaaggcagaaggacacagtgatgatgaatctgattccgagggctctgattcggaatctaccagcagggaaaacaatactcatcctgaatggagctttaccaccgtacgaaagaagcctgatccaaagaaagtacagaatggggcagagcaagatcttgtgcaaaccctgagttgtttgtctatgataatcacacctgcatttgctgaacttaaacagcaggacgagaataacgctagcaggaatcaggcgattgaagaactcgagaaaagtattgctgtggctgaagccgccggccccggcgc

SEQ ID NO: 54 - DNA, 222 bp, Homo sapiens
atttcaattgatgcttgaaaagcatttgataaaattcaacattcttcatgataacaactctcaaaaaactgggtatagatggaaaatatctcaacacaataaaagccatagacgacagacacacagttagtaccatattaaatgtggaaaaactgaaagcctttctctgaagatctggaacacgacaaagattcccaatttccgggtccggagctcgaattc

SEQ ID NO: 55 - DNA, 366 bp, Homo sapiens
cccacgcgtccgtggacggcgacgaaggctccgatgacgtgtactactattacacacctgccatcctcagggagctgcaagcgctcaacaccgcagaggcggcggaacaccgaccggaggaggaccggatgctcagtgaggacccttgtaggcctgctcacatgatcaagggctacatgccacttcacaacatcccccatacggaggtgatcgatgtcaccggactgaaccagtcgcacctttaccagcatctcaacaagggcacccctatgaagacccagaagcgtgccgcatctgtacacctggcacgtcctagagcaactagagattctacgacagatcaatcaacagagccatgggcctggg

SEQ ID NO: 56 - DNA, 460 bp, Homo sapiens
ataaagtgttctgacgcttcagactagatccccaagtaagcccttgtctacggaaattaatggattgggaagtagtaagcagaaattcaatatctgaggacaggttagaaacacaaagtcgtgcatcacgatctccaccggtaactcctaatcaatcacaagagacccctgtagatggcaagcctctagctttaccacccaaccagtcccagaaaaacattcggtaccatatccattatttacatttacaatactacctagaccgtcatattagtgccacacttccaatcccatcctcttctggtatacccactcctattgccgtaatcactgacgccctaactgaccttgtagagctgattcttggtcagccttgctctgaggagtctggtagggcaccaggtacccttttcttgcttgccctctgaagcttacttccgtgtagcttgtcactctagcg

SEQ ID NO: 57 - DNA, 431 bp, Homo sapiens
  misc_feature (1)...(431): n = a,t,c or g
cagccgancgggcgcctatgcctttgagaccaacggcttccccatcatgctggtgctcacgaccgacaagatcgagggcgacgtcggcattgcgggcctgtacgacatgcacactctccctgcctatggcgttcttactgcgaactttagtaagatgcacctcatatatcataccagtcacccatgtgctaagcacaccagtgacctgcctgaggcggcgtgagaaggacggcgtcattgtggacgtgctgagcgacacggcgtccaatcacaacggcttccccgtggaggagcatgccgatgacacccatcctgcccggcttcagggcccgaccctgcgctctcagcccatggggcctctaaagcacaaggcgtttgaggagcgtgccaacctgggcctggtacagcggcgcctgaggctagaggactcn

SEQ ID NO: 58 - DNA, 421 bp, Homo sapiens
  misc_feature (1)...(421): n = a,t,c or g
catcttggagcgcagagcatgctatggccttcaacttcttactgcagagccggggcagctacaattttctgacatcacccagcctcaggtacgaagagatgtcttctgtgcccagaggagcagtactcaagccgcaccagagatggctgcctgcccaggacagagaccttcctggcctttgacgaccccctgggactcatgctcgccttggtggcgctcatgctggccagcctggcagtgctggtcctcagactgttctgaagcaccgagacacacctgtggtcggggccaacaacagagctctcagctgcacgccgctcacctccctgaccctctgtgccctctgtcccttgccttgccttggttgtcccacagntgccacctgccgcctctaccagaccacagttgctgttgtgttcan

SEQ ID NO: 59 - DNA, 441 bp, Homo sapiens
  misc_feature (1)...(441): n = a,t,c or g
gaaaagccttcagtttcaccacatctcttattggacaccagagaatgcatactggagagagaccttataaatgcaaggaatgtggaaaaacatttaaaggtagttcatctcttaataatcaccagcgaattcacacaggagagaagccctataagtgtaatgaatgtgggagggccttcagtcagtgctcatctctcattcagcaccacagaattcatactggggagaaaccgtatgaatgtactcagtgtgggaaagccttcacttcaatatcgcggctaagtaggcaccatcgaattcatactggagagaaaccctttcattgtaacgagtgtggaaaagtattcagctatcactcagcccttatcatacatcagagaattcacactggtgagaaaccatatgcatgcaaagatgtgggaaagccttcaccaaagctcn

SEQ ID NO: 60 - DNA, 419 bp, Homo sapiens
atatatatggctggacatgcacgtatatctatagaagtacacccatttgctggaacagccctgtgtaattagtcgagacgaagtctgcctggtttaaaaagccttttgtacacatatttttaataaagatctctcccctgtgtctgcctatcctcctgccaagccgaggagctgcttacgttcaccctgactttttcctgtaaggtgggcccccagggccattcctggcacacacacatgctggactccaagccccaggccccctccttgccccagctggggacgagggggacctcctgctccttgcagtgcaacagagctgcctggcagaccatctgctgacagcgtcatgggggggcaaaatccaatcccaaccaaggctcttggagagggacaagaagggcttcccttgactgtgg

SEQ ID NO: 61 - DNA, 385 bp, Homo sapiens
  misc_feature (1)...(385): n = a,t,c or g
agaggcacagtcgggcacacctgtgccagccatttcatctggtcatgcgggacctgctgcaactgggccaggacataccccagggatgccactacctggaggaaaatcacttgatccacagggatattgccgcccgcaactgcctgctgagctgcgctgcacccacccgagcggccacgatcggggactttgggatggcacgatatatctaccggaccaggtattaccagttgggggaccgggccttgctccaaggaagtggatgcccccagaggccttactggagggcatcttcacatacaatacagattcctggacttttggggtgctgctctgggagatcttctcactgggctacatgccctatcctgggcgcaccaaccan

SEQ ID NO: 62 - DNA, 859 bp, Homo sapiens
  misc_feature (1)...(859): n = a,t,c or g
gtggtggaattcctctggagcaggaggcccagtggctcttctgacccaaggccccgccgtccagcttctaagtgccagatgatggaggagcgtgccaacctgatgcacatgatgaaactcagcatcaaggtgttgctccagtcggctctgagcctgggccgcagcctggatgcggaccatgcccccttgcagcagttctttgtagtgatggagcactgcctcaaacatgggctgaaagttaagaagagttttattggccaaaataaatcattctttggtcctttggagctggtggagaaactttgtccagaagcatcagatatagcgactagtgtcagaaatcttccagaattaaagacagctgtgggaagaggccgagcgtggctttatcttgcactcatgcaaaagaaactggcagattatctgaaagtgcttatagacaataaacatctcttaagcgagttctatgagcctgaggctttaatgatggaggaagaagggatggtgattgttggtctgctggtgggactcaatgttctcgatgccaatctctggcttgaaaggagaagacttggattctcaggttggagtaatagatttttccctctaccttaaggatgtgcaggatcttgatggtggcaaggagcatgaaagaattactgatgtccttgatcaaaaaaattatgtggaagaacttaaccggcacttgagctgcacagttggggatcttcaaaccaagatagatggcttggaaaagactaactcaaagcttcaagaangagtttcagctgcaacagaccgaatttgctcacttcaagaagaacagcagcagttaagagaacaaaatgaattaattcga

SEQ ID NO: 63 - DNA, 615 bp, Homo sapiens
ttcaagctttgctaaacataagaggattcatacaggtgagaaaccctttatatgtttagaatgtggtaaagcgtttactagttccacaacccttactaaacataggagaattcatactggagagaaaccctacacatgtgaagaatgtggcaaagcctttagacagtcagcaatcctttatgtacataggagaattcatactggagagaaaccctacacatgtggagaatgtggcaaaacctttagacagtctgcaaatctttatgcgcataagaaaattcatactggagagaaaccctacacgtgtggagactgtggcaaaacctttagacagtctgcaaatctttatgcacataagaaaattcatactggagataaaaccatacaagtgtaaagaatgtggcaaagcctttaagtcatactacagcattcttaaacataagagaactcataccaggggaatgtcttacgaaggtgacgaatgtcgcggtctttaaatgctcctcaatcctttctaatcataagataattcataatgaagagaaactctaaaatgtgaaaaatgtgagaaggcttttaatcacacctcaatctgttgtagacataaaaagaatt

SEQ ID NO: 64 - DNA, 945 bp, Homo sapiens
ttttttttttttgtcatctttttgtttactaattaatttagctgtgatacttggagtatctgacactctgtcaagaacatctgataatgttgttgagactggcaaatgaagagtacggaatttgtggcctgctccatacattgggatgctggatgacgtggctagtagcattaattctacctttgtacagtggacatggagactgaagaaacattgtcactttctcatcttccagcatcaactgtaaaaataatcttccgtataaaccctggaaatgttcccagatgttggaaggttccctctttgaggagatgtctgaaatagttcacaaagaacctgtgccatcagcttttgattattaggatggcatgaatatgcactgtagaaaagaacgcaacagttgcattcttcaattgctgtgcgctgttgagtagtcagtcctgttgttagccagctgaagaaagagaagctgatcttgcactggtcctgttgtgcaccctaaattattggcttccagaagtggacccagagtgacacaataaaaacagaagtgctgtccatagtggattgacttcagaaccaccaagccaatctttcataatatggctattgccaacttctgtcaaaaacctaagaataggagcaactaggtcggctgtgataggcatcttattacattgttgtgggacatgatggcgcctgagtttgtcctgggaaatatctattgactgggcaatgctttctgagctagaaatgtggctaaagcagaaactagccagactcctcacaagaagagaaggcaaacctgagtctagtaattgtttaatagcttcaggagattgagaagaggaagcaagggtagccaaatgtgattcagttaatgcgagaggtgcttgtgcatttttagagtcatctgttaaagatgaactaagatcctgctttttg

SEQ ID NO: 65 - DNA, 324 bp, Homo sapiens
ggcctggttacccaaattcatcggttctaaacttacaagcagctttcgggggagagggtaggtcggagcattcattacatattctactgtgtaatgccttaaccgcgggcctttgaatttgtacacactgaaatgattgtggggctgtgcaaaacattcacctatttaccttgcaagttttagaagacagggcactttttaccatgagtgttgggtccagcctgtggtccacttatctaatacacgtgatggctctccccgccgggagctgctcaagcccaacgcctcagtggccctccacaagctcagcaatgcactggtggg

SEQ ID NO: 66 - DNA, 493 bp, Homo sapiens
ggcacgagacctgctctgtaactcacattgtgtccttctctctccctttccttaacccttcccatcccgcttcaactcctggccatacagagaatgaacagccttccctcgtttggtttgacagaggaaagttttatttgacttttgaaggttcttccaggggacccagccccctaaccatgggagctcaggacactctccctgttgcagcagcatttacagaaacagtcaatgcctatttcaaaggagcagacccaagcaaatgtatcgttaagattaccggagaaatggtgttgtcatttcctgctggcatcaccagacactttgccaacaacccgtccccagctgctctgacttttcgggtgataaatttcagcaggttagaacacgtcctgccaaacccccaacttctctgctgtgataatacacaaaatgatgccaataccaagggaattctgggtaaacatgccaaatttgatgactcacctaaaga

SEQ ID NO: 67 - DNA, 400 bp, Homo sapiens
actatagccatgcagctgacaacattttgcaaaatctctcgcctctaacagcctttctgaaactgacttccttgggtttcataataggagtcagcgtggtgggcaacctcctgatctccattttgctagtgaaagataagaccttgcatagagcaccttactacttcctgttggatctttgctgttcagatatcctcagatctgcaatttgtttcccatttgtgttcaactctgtcaaaaatggctctacctggacttatgggactctgacttgcaaagtgattgcctttctgggggttttgtcctgtttccacactgctttcatgctcttctgcatcagtgtcaccagatacttgatatcgcccatcaccgcttctatacaaagaggctgacctttaaa

SEQ ID NO: 68 - DNA, 1890 bp, Homo sapiens
  misc_feature (1)...(1890): n = a,t,c or g
atggggaagatcagtgctacgggtataaacatgggtactaaatgcagctgggcactggtttggcatttggaatcctatgatccaaagcactatgaaagggaagggatgcaagattggaaaacagcctctggccaatcagaagaagcaactcaacaaagcagtcagaaacctcagccacattatacaacttaccagtcttcctcttttctgaaatacagcagtgaaagccatctccttgcctggagggagaactcatcagaagggtcctttcagttcccgggccggagccgggcccgtcctccgcgaacgcggcaacaaaggcgaggagcggcggcgggtcctggacgcggggcagtcaggctcggccacccccagagcgcagcgcagccccagctgcgagcagccgcacggatcccagagtcgcccgccgcgttcccagcccagccccggccggggtccgcccggaacagcgacgcctcaggcccggcaagtctctctcggaccctgggccgagcctcctcgccccgcccgccccaggccccggatgtgacggcaccgtcgcccgcagcgctcgccccacgggccgcgcgtggagggtcccgcgccgccgccctggctggagccgaggccgaggagccactgcgcacgctcgcgccccggccgacccgcgccgccgcgccgccgccgccgccgccgccgccgccgctgccgccgggcgcgcccccgccaccagttcgctgcgtgtcgaggcgagcacgcgctccgccctggaggctgcggcgacgggtcctcctccgccgtccggtcgcgccctcgcggaagctcggcagtgcgcgtgcgcccgcacccgcactccaaattagaaaggggacgtctagtgggttgcccgggaggggtggcgggagcggtcctggaaataatctgtcctctgtcgccgggaactggcgaggtagttccttcgcggtggagagacctggaatggccaaatatcaaggtgaagttcaaagtttgaaactggatgatgattcagttatagaaggagtaagcgaccaagtacttgtggcagttgtggtcagtttcgctttgattgctaccctggtatatgcacttttcagaaatgtacatcaaaacattcacccagaaaaccaggagctagtaagggtacttcgagaacagcttcaaacagaacaggatgcacctgctgccactcgacagcagttctacactgacatgtactgtcccatctgcctgcaccaagcctccttcccggtggagaccaactgtggacatcttttttgtggtagccttactcctaacagtatttggtgaagatgatcagtctcaggatgttctgagattgcatcaggatattaatgattataaccggagattctcagggcaacccagatctctcactctgctccagccatccagccctccttgctgtcctttgagcaggctgaagacgcccagcctcaggagctctgccctggccagtccctctgactgctaggctcctccgccgggcatcctcacagccaactctcaccaactccagatcttcgcacaatagccatttcctctgttaggcctgtcctgtccaccataaggaaacttgcaactccctcagcccacagagcacctctcaccggctaacatactctgtggtcacgtgtttgctatctgcctccctaatgtctttgagaacattagctccctgagggcagaaatctccttcactgacatatcccaagcccccagaactatgcgtgcagcatagnnnnnnnnnnnnnnnnnnnnnnnnnnnnnngaaaacaatttcagggaactctaagttgaaatacactttctcagttcacaatgttatccattctgacctttatcagacac

SEQ ID NO: 69 - DNA, 466 bp, Homo sapiens
ttttgatactgcccggctgcacgaattcggcacgagtataactcagatttttgcagttgacaatagagaagatcttcagaagtggatggaagccttctggcagcatttctttgatcttagccaatggaagcactgttgtgaagaacttatgaaaattgagattatgtcaccacggaaaccacctttgttcttgacaaaagaggcaacctcagtctaccatgatatgagcattgattcacctatgaaacttgaaagtttaacggatataatacaaaaaaaaattgaagagacaaatgggcagttccttattggtcagcgtgaagaatccttaccacctccttgggccacactctttgatggtaaccatcaaatggtcatccagaaaaaggtactgtatcctgcaagtgagccattacatgatgaaaaagggaaaaagagacaagctccccttcctccttctgataaa

SEQ ID NO: 70 - DNA, 698 bp, Homo sapiens
  misc_feature (1)...(698): n = a,t,c or g
ttttttttccgaaaatactttaatgcgaggtcctcgtgtgggtcgtgttttggagagataactggccttggactggagggtggctgccttcttcctttgccaggtcatgcgaggggctgctggccaccccatgcacatgcccctgcccctccatgtcagatgcgtgcccctcggggctggccgtgtccgatgcaggccccttccggctgttgatcttgatggcggcgcgcagcgccgacttgaccgccgtctccacccagccgtgcgggtaggcggtgtgctcgccggcaaagtagatgcggccataagggaccgtccagtcatccttttcggtttgccagagcgccggcggctgtaccacgaagccaccctggctgtgctggtcctccgcccaacgcttgacgacgccggtgccgtcccagagctggcgcacgacaggcccgtgcaatgccgccacgtcgtcgagcgccaagcgcaacgcctcttcccggctcaagccggcgaacgctgccgccgcgtccgaccacgtgtacgaggccagcagcagcgcgccctcgcgcggcggcgggtagaaaatcatgcgcgacgggcgatcggtgtttgagtggccgccttcaatgtgctcctcgcgccagaagggcctgcggaagcttangaacaacctttgtggcccgcacgtagtgcagccttcgcagcgc

SEQ ID NO: 71 - DNA, 385 bp, Homo sapiens
tcagaaacaaactctgcagaatgggtatttagattcaagtatggatatactgtatctgggcagcctgcctccagaactccaggtgagctcagatgagcctccagggcctcctgagcaagctggactttctcagttccatctagagcctgaaactcaaaatccagaaaccactgaagagatccagtcctctactccagcaagaagctgcagcgcagcttccacagctccctgaggtggtagaactttcttcaaccaaagctggaggccccagctctgccttcacagtcccttgagggggtccactcttcaacagagcagaaggctccagcacagcagctacctgcctttgaagagatcctagccccactattgatacatcatgagg

SEQ ID NO: 72 - DNA, 906 bp, Homo sapiens
cacgcccaatatgtgggcccctatcggctggagaagacgctgggcaaaggacagacagggctggttaaactcggggtccactgcatcacgggtcagaaggtcgccatcaagatcgtgaaccgggagaagctgtcggagtcggtgctgatgaaggtggagcgggagatcgccatcctcgaggctcatcgaacacccacatgtcctcaagctccacggcgtctacgagaacaagaaatattttcccccggatgaactgacatcaggtccgtcgatgctggcgcaggtttcaccacacgggaagctgtctgcccggcgctcatgggacctgctctcaggctttcccaggtacctggttctggagcacgtctcggggggtgagctattcgactacctggtaaagaaggggagactgacgcccaaggaggcccgaaagttcttccgccagattgtgtctgcgctggacttctgccacagctactccatctgccacagagacctaaagcccgagaacctgcttttggatgagaaaaacaacatccgcattgcagacttcggcatggcgtccctgcaggtgggggacagcctcctggagaccagctgcgggtccccccattatgcgtgtccagaggtgattaagggggaaaaatatgatggccgccgggcagacatgtggagctgtggagtcatcctcttcgccctgctcgtgggggctctgccctttgatgacgacaacctccgccagctgctggagaaggtgaaacggggcgtcttccacatgccccacttcattcctccagattgccagagcctcctgaggggaatgatcgaagtggagcccgaaaaaaggctcagtctggagcaaattcagaaacatccttggtacctaggcgggaactttatctcctt

SEQ ID NO: 73 - DNA, 802 bp, Homo sapiens
ctccgcaatgccttggacgtcctgcatagagaggtgcccagagtcctggtcaacctcgtggacttcctgaaccccactatcatgcggcaggtgttcctgggaaacccagacaagtgcccagtgcagcaggccagcttgaaccacttggaagcaaaacagagaccctggacctgagagcagagatgcccatcacctgtcccactcagaatgagcccttcctgagaacccctcggaatagtaactacacgtaccccatcaagccagccattgagaactggggcagtgacttcctgtgtacagagtggaaggcttccaatagtgttccaacctctgtccaccagctccgaccagcagacatcaaagtggtggccgccctgggtgactctctgactacagcagtgggagctcgaccaaacaactccagtgacctacccacatcttggaggggactctcttggagcattggaggggatgggaacttggagactcacaccacactgcccaacattctgaagaagttcaacccttacctccttggcttctctaccagcacctgggaggggacagcaggactaaatgtggcagcggaaggggccagagctagggacatgccagcccaggcctgggacctggtagagcgaatgaaaaacagccccgacatcaacctggagaaagactggaagctggtcacactcttcattgggggcaacgacttgtgtcattactgtgagaatccggaggcccacttggccacggaatatgttcagcacatccaacaggccctggacatcctctctgagga

SEQ ID NO: 74 - DNA, 480 bp, Homo sapiens
  misc_feature (1)...(480): n = a,t,c or g
aggtgatggcngcaactgaganncctagnnangctgacgtaangccgcggaanncanccttccgggagccatgtctgctggtcccaggcgaccaccagcctctcagagaggcgtcttggctagcccacctcccattggtctgtggggcacagattctcctctgtgctgtgtggaagtcgccatcccgtgcaacaagggagctcactcagtgggcctgaaggggtggctgctggctcagggagttctgggcatgcgtgacaccatcccccaggaacacccatgggagtccacgcctgacctctgcttctgcagagaccctgaagagattgaggtggaagagcagcctgctgctgatgcagctgtggccaagggggagtttcaggggaacagattgctccagtgcctgctgatcattgccgcccatcctgaggctgcagacccagcccctgtgcatactaccgctcatcccaagggtgcaga

SEQ ID NO: 75 - DNA, 413 bp, Homo sapiens
cccattccctcaccagcacccccaagagcccacagggcagctgctggcctcagagtgcactgcgtggtcagtgtccaggtccagtcctgggggtgaccacaacatctgacctgtgttccctgcaggtcccagtgtccagccaccgcaaccccctgctggacctggctgcttacgaccaggagggccgccggttcgacaacttcagctctctgagcatccagtgggagtccaccaggccagtgttggccagcatcgagcctgagctgcccatgcagctggtgtcccaggacgatgagagtggccaaaagaagctgcacggtttgcaggccattttggttcacgaggcatcaggaaccacagccatcactgccactgccactggctaccaggagtcccacctcagctctgccaga

SEQ ID NO: 76 - DNA, 410 bp, Homo sapiens
gcgtacgtacaattttggagtttttggtgtctgttgacccataatttcagccccagcccaagatgatccaattctgttgagtttcatccactgtctgcatgctaacctgctttgtgtatggcgtcgtgatgtcaaaccagattgcaaagagatatggatattctggtggggagatgaacccaacctagtgggtgcaatacatcatgaactgcatgttgtggaagaaggactctgggaaaatggcctttcctatgaatgtaggacgctgctcttcaaagagatccacaatctgttagaaaggtgcctaatggataaaaacttcgtattgattgggaaatggtttgtccgaccctactataaggatgaaaagcccgtcaacaaaagtgagcatttgtcctgtgctttcacac

SEQ ID NO: 77 - DNA, 773 bp, Homo sapiens
ttttttttttttgtttctatgtccaaaacatttatttcacggaaatatttgtgcctgcacaacaaggggaactttgtggggtgtctgtggcttgctacagtgacatctggcaggactaactgggtcatcagagccacagaataaggactgggaaggtggccacaactgcaaggactggggccatgtggggggaggactctgagactgaccacttgggctggtaacttgggctgtccagtgtatggggaatctcagtgagttcctgggcctgaagtcagactctgtctctgacgcagacgtgagaggtcggagtgggcaggaactcttcagctgctcatcccgggaacttgtcctccaaggggctttgccatttgttttcttcctgtaccttttccacttgtctgaagacccgcagcaggtttccacgaaggacaccctgaagctcttcctcactccagccacgactcagcaactcctctatcaggaccgggtatgtggacacgtcttccagcccctgagggaatctgtgtggccaccagctagtgggtttcagacctgattccctgatcatgactcagaaccacagtccagggtctatgaaaccccagccctggtcaggtatgggaagtggagacttggagagagtaggtaattctcctctgctctttatccttcagaaggaggcctcaaaacctccttgaatatttatcaaaacttattgaatcatactattaagatctatgccttttactgaatgcaaatgatcccccaaa

SEQ ID NO: 78 - DNA, 1293 bp, Homo sapiens
atggctgagagcgcctccccgccctcctcatctgcagcagccccagccgctgagccaggagtcaccacggagcagcccggaccccggagccccccatcctccccgccaggcctggaggagcctctggatggagctgatcctcatgtcccacacccagacctggcgcctattgccttcttctgcctgcgacagaccaccagcccccggaactggtgcatcaagatggtgtgcaacccgtggtttgaatgtgtcagcatgctggtgatcctgctgaactgcgtgacacttggcatgtaccagccgtgcgacgacatggactgcctgtccgaccgctgcaagatcctgcaggtctttgatgacttcatctttatcttctttgccatggagatggtgctcaagatggtggccctggggatttttggcaagaagtgctacctcggggacacatggaaccgcctggatttcttcatcgtcatggcagggatggtcgagtactccctggaccttcagaacatcaacctgtcagccatccgcaccgtgcgcgtcctgaggcccctcaaagccatcaaccgcgtgcccagtatgcggatcctggtgaacctgctcctggacacactgcccatgctggggaatgtcctgctgctctgcttctttgtcttcttcatctttggcatcataggtgtgcagctctgggcgggcctgctgcgtaaccgctgcttcctggaggagaacttcaccatacaaggggatgtggccttgccacccatactaccagccggaggaggatgatgagatgcccttcatctgctccctgtcgggcgacaatgggataatgggctgccatgagatccccccgctcaaggagcagggccgtgagtgctgcctgtccaaggacgacgtctacgactttggggcggagcgccaggacctcaatgccagcggcctctgtgtcaactggaaccgttactacaatgtgtgccgcacgggcagcgccaacccccacaagggtgccatcaactttgacaacatcggttatgcttggattgtcatcttccaggtgatcactctggaaggctgggtggagatcatgtactacgtgatggatgctcactccttctacaacttcatctacttcatcctgcttatcatagtaagtgtcagggagcctgggctcctaggtggcagcttcagcacagcacagtccccaaaatgtcaaggtgattcattcccaggagtcgctgctgaatccctgctgctgcgaggttgggttctctggcttcctggtggtgggag

SEQ ID NO: 79 - DNA, 446 bp, Homo sapiens
  misc_feature (1)...(446): n = a,t,c or g
cctaatgacttcttcaaggacatgttccctgacctgccgggggggcctctgggacccatcaaggcggagaacgactacggtgcctatctcaacttcctgagtgccacccacctgggaggcctcttcccaccctggcccctggtagaagagcgcaagctgaagcccaaggcctctcagcagtgccccatctgccacaaagtcatcatgggggccgggaagctgccgcggcacatgaggacccataccggggagaagccatacatgtgcaccatctgcgaggtccgcttcaccaggcaggacaagctgaaaatccacatgcggaagcacacaggggagcggccctacctgtgcatccactgcaacgccaagttcgtgcacaactacgacctcaagaaccacatgcgccntccaccacgggcgtgcggccctaccagtgcgagttctgc

SEQ ID NO: 80 - DNA, 468 bp, Homo sapiens
  misc_feature (1)...(468): n = a,t,c or g
gaggtggtcactctcctttggggtgagatgaacgagctttcccagcagctttctcagcaaggaggtcggggcgcctctcagtgtccctcacctccggcccccacgcttccaaacccaactcctctctgccagctccagctccagcgtgtgaacacgggactgcccaccccaccatgccaccccggagccggcgccgcagggccatgcctccgaggacatgcagcctgtccgtgcctgctgagagcctgatggttctaactcaggaccgagctcagcagggacagcgggtgtggcccctgccctcgcccaggcgccctgcacagcgctcgctctgaagatctgtgggggttccctcgagcccgactggctgaagtggggaccagagagcggggggnnngtgagaggctcttgtgcttgtgctgcttgntantttnnttccnccgcntggnctaatgactcgacacgccc

SEQ ID NO: 81 - DNA, 583 bp, Homo sapiens
  misc_feature (1)...(583): n = a,t,c or g
tttcgtcgcagcccaagaaaagaaagcttgagtctgggggcggcggcgaaggaggggagggaactgaagagcaagatggcgcggagcgggaggcggccctggagcgaccccggaggactaagcgggaacgggaccagctgtactacgagtgctactcggacgtttcggtccacgaggagatgatcgcggaccgcgtccgcaccgatgcctaccgccctgggtatccttcggaactgggcagcactgcgaaggcaagacggtactggacgtgggcgcgggcaccggcattctgagcatcttctgtgcccaggccggggcccggcgcgtgtacgcggtagaggccagcgccatctggcaacaggcccgggaggtggtgcggttcaacgggctggaggaccgagtgcacgtcctgccgggaccagtggagactgtagagttgccggaacaggtggatgccatcgtgagcgagtggatgggctacggactcctgcacgagtccatgctgagctccgtcctgcacgcgcgaaccaaagtggtgaaggatggcgggtttttcttgccggnctccagcgaacttttcatg

SEQ ID NO: 82 - DNA, 716 bp, Homo sapiens
ggatttcgttgatgctgctcggaaccttcccctggagtccaccaagtcaccagcagaaccaagtaaatcagtgccctccttggagggacccacgggcttccagccaaggactcccaagccagggtccggttcagaatcagggaaggagaggagaacaacgtccaaagaaatttctgtcatccagcacaccagctcctttgagaaatctgattctctcgagcagccgagtggcttggaaggggaagacaaacctctggcccagttcccatcacccccacctgccccacacggacgctctgctcactccctgcagcctaagttggtccgccagcccaacattcaggttcctgagatcctagtaactgaggagcctgaccggccggacacagagccagagccgccccctaaggaacctgagaagactgaggagttccaatggccccagggcagccagacacttgcccagttcccagttgagaagttgccacccaaaaaaaagaggttgggcctggcaaagatggcccaatcatcaggggagtccagtttcgagtcctctgtgcctttgtttcgcagcccgagccaggaaagcaatgtttctttgagtgggtccagccgctcagccttgtttgagagggatgaccatgggaaagccgaggcccccagtccctcatttgacatgggccccaaacccctgggcacccacatgttgactgtcc

SEQ ID NO: 83 - DNA, 1082 bp, Homo sapiens
tttcgtcagcctggctggcagcagccttggactccgcccgtggagccctgggcctgttgacccaccagcttaggagcacccaccaagctctgggtcaacgtggaggtaccaggccaccatgctcagtctcaagctgccccaacttcttcaagtccaccaggtcccccgggtgttctgggaagatggcatcatgtctggctaccgccgccccaccagctcggctttggactgtgtcctcagctccttccagatgaccaacgagacggtcaacatctggactcacttcctgcccacctggtacttcctgtggcggctcctggcgctggcgggcggccccggcttccgtgcggagccgtaccactggccgctgctggtcttcctgctgcccgcctgcctctaccccttcgcgtcgtgctgcgcgcacaccttcagctccatgtcgccccgcatgcgccacatctgctacttcctcgactacggcgcgctcagcctctacagtctggtttcctggagctggaaagccctgggctcagtaaggtcctccgcacaggagccttcgcctatccattcctgttcgacaacctcccactcttttatcggctcgggctgtgctggggcaggggccacggctgtgggcaggaggccctgagcaccagccatggctaccatctcttctgcgcgctgctcactggcttcctcttcgcctcccacctgcctgaaaggctggcaccaggacgctttgattacatcggccacagccaccagttattccacatctgtgcagtgctgggcacccacttccagctggaggcagtgctggctgatatgggatcacgcagagcctggctggccacacaggaacctgccctgggcctggcaggcacagtggccacactggtcttggctgcagctgggaacctactcattattgctgctttcacagccaccctgcttcgggcccccagtacatgccctctgctgcagggtggcccactggaggggggtacccaggccaaacaacagtaaggccccatccctgaccctgtcctggagggggcagaggccacgcctcagtgctgact

SEQ ID NO: 84 - DNA, 480 bp, Homo sapiens
  misc_feature (1)...(480): n = a,t,c or g
cgccggtgagccgcatggagccccgggcggcggacggctgcttcctgggcgacgtgggtttctgggtggagcggacccctgtgcacgaggcagcccagcggggtgagagcctgcagctgcaacagctgatcgagagcggcgcctgcgtgaaccaggtcaccgtggactccatcacgcccctgcacgcagccagtctgcagggccaggcgcggtgtgtgcagctgctgctggcggctggggcccaggtggatgctcgcaacatcgacggcagcaccccgctctgcgaatgcctgcgcctcgggcagcatcgagtgtgtgaagctcttgctgtcctacggggccaaggtcaaccctcccctgtacacagcgtcccccctgcacgaggcctgcatnagcgggagttccgaatgtgttgaggcttcttatttgacgtcggggncaatcttgaagcgcacgaatttcattttggggaaccctctt

SEQ ID NO: 85 - DNA, 435 bp, Homo sapiens
  misc_feature (1)...(435): n = a,t,c or g
nacgcccccttgaaccctcngttgacacactgaanatcttacgccagcttggcacgaggctgagcccgaaaaggtctgaggaggcttctgcacctccttttcccttgggggggacaggagcagcccctacccgagccagtctccccgagcaaatcctgctgcccagaagctgcctggaagccagaaagagccagccagatgaaaagttgctgtctgctttgcacaactccaggacctggaattaagagccacgccggagccagcacagactggtgtccccagaggtgcatcccggaagacgaggcagcagccctggagtggctgaatgcaaacttacatcggcatacttcagaacaggacgatcgccctgcccctcgcttccggggacaacacgaacgaactccttgctacaccaattctgcgctgacaagcctc

SEQ ID NO: 86 - DNA, 408 bp, Homo sapiens
ttctccccagccacacatgtgggaacccagggaggctgcccaatggcatccagcagggttcaaccttcaacctcggtgacaaggtccgctacagctgcaaccttggcttcttcctggagggccacgccgtgctcacctgccacgctggctctgagaacagcgccacgtgggacttccccctgccttcctgcagagctgatgatgcctgtggtgggaccctgcggggccagagtggcatcatctccagcccccacttcccctcggagtaccaaaaacaatgccgactgcacatggaccatcctggctgagctgggggacaccatcgccctggtgtttattgacttccagctggaggatggttacgactttctggaagtcactgggacagaaggctcctccctctggtaa

SEQ ID NO: 87 - DNA, 964 bp, Homo sapiens
ccggtcgacgatttcgtggacgctggcagctgggttctcccgtttcccttgggcaggagcagggtcgggttcaaagcctccggaacgcgttgtggccccttctccggctcgcagccgaccggaaagcccgcctcctccctcggccggccctggggccgtgtccgccgggcaactccagccgaggcctgggcttctgcctgcaggtgtctgcggcgaggcccctagggtacagcccgatttggccccatggtgggtttcggggccaaccggcgggctggccgcctgccctctctcgtgctgggggtgctgctggtggtgatcgtcgtcctcgccttcaactactggagcatctcctcccgccacgtcctgcttcaggaggaggtggccgagctgcagggccaggtccagcgcaccgaagtggcccgcgggcggctggaaaagcgcaattctgacctctttgctgttgttggacacgcacaagaaacagatcgaccagaaggaggccgactacggccgcctcagcagccggctgcaggccagagagggcctcgggaagagatgcgaggatgacaaggttaaactacagaacaacatatcgtatcagatggcagacatacatcatttaaaggagcaacttgctgagcttcgtcaggaatttcttcgacaagaagaccagcttcaggactataggaagaacaatacttaccttgtgaagaggttagaatatgaaagttttcagtgtggacagcagatgaaggaattgagagcacagcatgaagaaaatattaaaaagttagcagaccagtttttagaggaacaaaagcaagagacccaaaagattcaatcaaatgatggaaaggaattggatataaacaatcaagtagtacctaaaaatattccaaaagtagctgagaatgttgcagataagaatgaagaaccctcaagcaatcatattccacatggg

SEQ ID NO: 88 - DNA, 534 bp, Homo sapiens
ccggaattcgggacgacgatttcgtgcgggtacctgatggccacagatgtctctaggaggccgagcgtccacaaagcagtggaaatcgagcaggagcgggtgaagtcagcgggggcctggatcatccacccctacagcgacttccggttttactgggacctgatcatgctgctgctgatggtggggaacctcatcgtcctgcctgtgggcatcaccttcttcaaggaggagaactcccccgccttggatcgtcttcaacgtattgtctgatactttcttcctactggatctggtgctcaacttccgaacgggcatcgtggtggaggagggtgctgagatcctgctggcaccgcgggccatccgcacgcgctacctgcgcacctggttcctggttgacctcatctcttctatccctgtggattacatcttcctagtggtggagctggagccacggttggacgctgaggtctacaaaacggcacgggccctacgcatcgttcgcttcaccaagatcctaagcctgctgaggctaaa

SEQ ID NO: 89 - DNA, 743 bp, Homo sapiens
atgggcttcgacgaggtcttcatgatcaacctgaggcggcggcaggaccggcgggagcgcatgctgcgggcgctgcaggcacaggagatcgagtgccggctggtggaggccgtggacggcaaagtagggatgctcacccgtagcaacgctgcccccgggagacacttggcaatgctggagacattggtggttgtcgcacccaggtttgtagatgcggacaacctgatcctcaaccctgacacactgagcctgctcatcgctgagaacaagacggtggtcgcccccatgctggattcccgggctgcgtactccaacttctggtgtggaatgacttcccagggctactacaagcgcacacctgcctacatccctatccgcaagcgagaccgccggggctgctttgcagttcccatggtgcactcgaccttcctgatcgacctgcggaaggcggcgtccaggaacctgggccttctacccacctcaccctgactacacctggtcctttgacgacatcatcgtctttgccttctcctgcaagcagggcagaggttcagatgtatgtgtgcaacaaggaggagtacggattcttgccagtgccattgcgcgcccacagcaccctccaggatgaggccgagagcttcatgcatgtgcagctggaggtcatggtgccttcatctccaagctcagctcagagcatggcggtggtgtctgctgatcatattggtttagtcatcagctattta

SEQ ID NO: 90 - DNA, 349 bp, Homo sapiens
gaataaaaccagcttcatattctatctcaaaaacatagtggttgcagacctcataatgacgctgacatttccatttcgaatagtccatgatgcaggatttggaccttgggacttcaagtttattctctgcagatacacttcagttttgttttatgcaaacatggatacttccatcgtggtccttgggctgataacaatgaccgctattgaaggtggtcaggcatttggggactcttggatgaccggcataccttcacgagggtttatctgttggggttgggggccaggcttgtttggtttggcaaacttatccttgcaaagggcggccacggaggcatttcctggctgg

SEQ ID NO: 91 - DNA, 2598 bp, Homo sapiens
gcctgggcagctcagacgtgcgggcaccacagcgctcagagctgggagccgagtcaccatcgcggatggtggcgtcccaggcctacaacctgacctctgccctcacgcccatcctcacgcgctcccgcgtgctcaacgaggagcccctgacgctggcgggctttcagcagggccccggccaacctcagtgacgtggtgcagctcatctttctggtggactccaatccctttccctttggctatatcagcaactacaccgtctccaccaaggtggcctcgatggcgttccagacacaggccggcgcccagatccccatcgagcggctggcctcagagcgcgccatcaccgtgaaggtgcccaacaactcggactgggctgcccggggccaccgcagctccgccaactccgttggtccagccccaggccttcgtcggtgctgtggtcaccctggacagcagcaaccctgcggccgtgctgcatctgcagctcaactatacgctgctggacggccgctacctgtctgaggaacccgagccctacctggcagtctacctgcactcggagccccggcccaatgagcacaactgctcggctagcaggaggatccgcccagagtccctccagggtgccgaccaccggccctacaccttcttcatttccccggggaccagagacccagtggggagttaccgtctgaacctctccagccacttccgctggtcggcgctggaggtgtccgtgggcttgtacacgtccctgtgccagtacttcagcgaggaggacgtggtgtggcggacagaggggctgctgcccctggaggagacctcgccccgccaggccgtctgcctcacccgccacctcaccgccttcggcaccagcctcttcgtgcccccaagccatatccgctttgtgtttcctgagccaacagcggatgtaaactacatcgtcatgctgacatgtgctgtgtgcctggtgacctacatggtcatggccgccatcctgcacaagctggaccagttggatgccagccggggccgcgccatccccttctgtgggcagcggggccgcttcaagtacgagatcctcgtcaagacaggctggggccggggctcaggtaccacggcccacgtgggcatcatgctgtatggggtggacagccggagcggccaccggcacctggacggcgacagagccttccaccgcaacagtctggacatcttccagatcgccaccccgcacagcctgggtagcatgtggaagatccgagtgtggcacgacaacaaagggctcagccctgcctggttcctgcagcacatcatcgtcagggacctgcagacggcacgcagcaccttcttcctggtcaatgactggctttcggtggagacggaggccaacgggggcctggtggagaaggaggtgctggccgcgagtaaggcctcgttccgtgttcccactccgtcacgcagccctgttgcgcttccggcgcctgctggtggctgagctgcagcgtggcttctttgacaagcacatctggctctccatatgggaccggccgcctcggagctgtttcactcgcatccagagggccacctgctgcgttctcctcatctgtctcttcctgggcgccaacgccgtgtggtacggggctgttggagactctgcctacagcacggggcgtgtgtccaggctgaacccgctgagcgtcgacacagtcgctgttggcctggtgtccagcgtggttgtctatcccgtctacctggccatcctctttctcttccggatgtcccggagcaaggtgggctggggctggggaccggggagtactgggaatggagcctgggcctcggcaccatgcccagagccgccactttccagtgctgcagccagagggaaaggcgtccaccaaaggctgctcgggaagggtcaacacacttgagcagccttagctagactgaccagggagaaagagagaagactcagaagccagaatcgtgaaagaacgagggcacttcgctaagcagacgccacggacaactgcacagcagcacgccagataactcagaagaagcaagcacgcggctgtgcacgcttccgaaatgcactccagaagaaaatctcagtacatctatagcaagtgaagaggccgagttagtcccttagaaacctcccagtggccgggccgggtgtggtggctcacgcctgtaatcccaacacttcaggaggccgaggtgggcggatctgagtccaggagtttgagaccagcctgggcaacatagcaagaccccatctatataaaacattaaaaagggccaggcacggtggctcacgcctgtaatcccaacactttgggaggccgaggcgggcagatcagttgaggtcaggagttcgagaccagcctggccaacacaatgaaaccccatctctactacaaatacaaaaacttagctgggcatggtggcgggcgcctgtagtcccagctactcgagaggctgaggcaggagaatggcatgaacccaggaggcggagcttgcagtgagccgagattgcgccactgcactccatcctgggcaacggagcaagactccgtctccaaaaaa

SEQ ID NO: 92 - DNA, 660 bp, Homo sapiens
  misc_feature (1)...(660): n = a,t,c or g
tttcgtctttgatgaggaaaatattctcaatgaactcaatgatcctctgagagaggagatagtcaacttcaactgtcggaaactggtggctacaatgcctttatttgctaatgcggatcctaattttgtgactgccatgctgagcaagttgagatttgaggtgtttcaacctggagattatatcatacgagaaggagccgtgggtaaaaaaatgtatttcattcaacacggtgttgctggtgtcattacaaaatccagtaaagaaatgaagctgacagatggctcttactttggagagatttgcctgctgaccaaaggacgtcgtactgccagtgttcgagctgatacatattgtcgtctttactcactttccgtggacaatttcaacgaggtcctggaggaatatccaatgatgaggagagcctttgagacagttgccattgaccgactagatcgaataggaaagaaaaattcaattcttctgcaaaagttccagaaggatctgaacactggtgttttcaacaatcaggagaacgaaatcctcaagcagattgtgaaacatggacagggagatggtgcaggcaatcgctcccatcaattatccttcaaatgacaaccctggaatttccacattcgtcttacttacgganccccgaccct

SEQ ID NO: 93 - DNA, 1141 bp, Homo sapiens
gcatgatgtcattgatttggagtttctaagtcagtatatgtgcgttggtaatcttgaggtaattttgacagatattgtcagaatggcccacacagagattgcaacccacgtgaggaattctcaggttccaacgatcccccagagtcagttctgggtttccgtggtgatgccagctctaaacggtaccccctcccccaggtggcccatcccctgcacccctgcaccccaaacgcagcccgacgagcacgggggaggcggagctgaaggaggagcggctgccaggccggaaggcgagctgcagcaccgcggggagtgggagtcgagggctgccccccctccagccccatggtcagcagcgcccacaaccccaacaaggcagagatcccagagcggcggaaggacagcacgagcacccccaacaacctccctcctagcatgatgacccgcaggaacacctacgtttgcacagaacgcccgggggctgagcgcccgtcactgttgccaaatgggaaagaaaacagctcaggcaccccacgggtgccccctgcctccccctccagtcacagcctggcacccccatcaggggagcggagccgcctggcacgcggatccaccatccgcagcaccttccatggtggccaggtccgggaccggcgggcagggggtgggggtggtgggggtgtgcagaatgggccccctgcctctcccacactggcccatgaggctgcacccctgcccgccgggcggccccgccccaccaccaacctcttcaccaagctgacctccaaactgacccgaagggtcgcagacgaacctgagagaatcgggggacctgaggtcacaaggaggccaaggcaggaggatcacttgagcccaggaggtcgaggctgcagtgagctgtgattgcactactgcattgcaagaccctgtctcaaaaaaactaagaagtggccgggcactgtggctctcgcctgtaatcccagcactttgggaggccaaggcaggtggatcacctgaggccgggagtttaagacctgcctgcccaacatgttgccatctaccttgggatcaaacggaaaccgccccccggctgctccgattcccctggagtgtgaagctgaccagctcgcgccctcctgag

SEQ ID NO: 94 - DNA, 385 bp, Homo sapiens
tgaaattttcccagtggggcctgaccaaacccaagctatcaaacgcctcgccaggatctccttggtgaagaagctaatgaagaagtggtctgtgactcaaaacctgacatttcgagaacagctggaagctgggatccgctactttgacctgcgtgtgtcttccaaaccaggggatgccgaccaggagatctacttcatccatgggctttttggcatcaaggtctgggatgggctgatggaaattgactcgtttcttacacagcacccccaggagattatcttcctggatttcaaccacttctatgccatggatgagacccatcacaaatgcctggttctgcggatccaggaggcctttggaaacaagctgtgcccagcctgcagg

SEQ ID NO: 95 - DNA, 550 bp, Homo sapiens
agggcccagggacaaccctggacgaggaccctaggttcgaaatcgtggagcactttggcattgcctggttcacatttgagctggtggccaggtttgctgtggcccctgacttcctcaagttcttcaagaatgccctaaaccttattgacctcatgtccatcgtccccttttacatcactctggtggtgaacctggtggtggagagcacacctactttagccaacttgggcagggtggcccaggtcctgaggctgatgcggatcttccgcatcttaaagctggccaggcactccactggcctccgctccctgggggccactttgaaatacagctacaaagaagtagggctgctcttgctctacctctccgtggggatttccatcttctccgtggtggcctacaccattgaaaaggaggagaacggagggcctggccaccatccctgcctgctggtggtgggctaccgtcagtatgaccacagtggggtacggggatgtggtcccagggaccacggcaggaaagctgactgcctctgcctgcatcttggcag

SEQ ID NO: 96 - DNA, 1456 bp, Homo sapiens
caactattgccaccctccaacagggagaatgctgggctgctggtgggaagatgtctgtgttctgctgcccttaggcctgtcggggatttgatcacaagctcaggtcaagttgcagttaggaatgcacctcaggctggaagtgccaaggcaggaaaaggaaagtttcaggacaattttgaattcattcagtactttaagaagttttttgatgcaaactgcaatgaaaaagactataaccctgtggctgccggacaaggtcaagaaactgaagtggctccctctattgttgctccagttctgaataaaccgaaccagtgtccagaaggatacatctgtgtgaaggctggtcgaaaccccaactatggctacacaagctttgacacctttagctgggctttcctgtctctatttcgactcatgactcaagactactgggaaaatctttaccagttgacattacgtgctgctgagacaacatacatgatatttctgtcctgtcatcctcttgggctcattgtatttggtgactttgatcctggctgtggtgccatggcctatgaggagcagaatcaggccaccttggaagaagcagaacaaaaagaggccgaatttcagcagatgctcgaacagcttaaaaagcaacaggaggcagctcagcaggcagcaacggcaactgcctcagaacattccagagagcccagtgcagcaggcaggctctcagacagctcatctgaagcctctaagttgagttccaagagtgctaaggaaagaagaaatcggaggaagaaaagaaaacagaaagagcagtctggtggggaagagaaagatgaggatgaattccaaaaatctgaatctgaggacagcatcaggaggaaaggttttcgcttctccattgaagggaaccgattgacatatgaaaagaggtactcctccccacaccagtctttgttgagcatccgtggctccctattttcaccaaggcgaaatagcagaacaagccttttcagctttagagggcgagcaaaggatgtgggatctgagaacgacttcgcagatgatgagcacagcacctttgaggataacgagagccgtagagattccttgtttgtgccccgacgacacggagagagacgcaacagcaacctgagtcagaccagtaggtcatcccggatgctggcagtgtttccagcgaatgggaagatgcacagcactgtggattgcaatggtgtggtttccttggttggtggaccttcagttcctacatcgcctgttggacagcttctgccagaggtgataatagataagccagctactgatgacaatggaacaaccactgaaactgaaatgagaaagagaaggtcaagttctttccacgtttccatggactttctagaagatccttcccaaaggcaacgagcaatgagtatagccagcattctaacaaatacagtagaag

SEQ ID NO: 97 - DNA, 2277 bp, Homo sapiens
gatacaaactcagctgcctaccaagtcttctcagcagcttcgtaaaggaggaaattgtgtcaggtgtaagatgcaaatgaattttattgctgaggaagttttattgaagtatcgtatcacgttttataataataataaaggcccaaatatgctgtatatagaaataaaagcatttgtacattttatgattaacagatatttaagctatggttccggtcccaaacgattccccttggtagatgttcttcagtatgcattggaatttgcctcaagtaaacctgtttgcacttctcctgttgacgatattgacgctagttccccacctagtggttccataccatcacagacattaccaagcacaacagaacaacagggagccctatcttcagaactgccaagcacatcaccttcatcagttgctgccatttcatcgagatcagtaatacacaaaccatttactcagtcccggatacctccagatttgcccatgcatccggcaccaaggcacataacggaggaagaactttctgtgctggaaagttgtttacatcgctggaggacagaaatagaaaatgacaccagagatttgcaggaaagcatatccagaatccatcgaacaattgaattaatgtactctgacaaatctatgatacaagttccttatcgattacatgccgttttagttcacgaaggccaagctaatgctgggcactactgggcatatatttttgatcatcgtgaaagcagatggatgaagtacaatgatattgctgtgacaaaatcatcatgggaagagctagtgagggactcttttggtggttatagaaatgccagtgcatactgtttaatgtacataaatgataaggcacagttcctaatacaagaggagtttaataaaaactgggcagccccttgttggtatagaaacattaccaccggatttgagagattttgttgaggaagacaaccaacgatttgaaaaagaactagaagaatgggatgcacaacttgcccagaaagctttgcaggaaaagcttttagcgtctcagaaattgagagagtcagagacttctgtgacaacagcacaagcagcaggagacccaaaatatctagagcagccatcaagaagtgatttctcaaagcacttgaaagaagaaactattcaaataattaccaaggcatcacatgagcatgaagataaaagtcctgaaacagttttgcagtcggcaattaagttggaatatgcaaggttggttaagttggcccaagaagacaccccaccagaaaccgattatcgtttacatcatgtagtggtctactttatccagaaccaggcaccaaagaaaattattgagaaaacattactagaacaatttggagatagaaatttgagttttgatgaaaggtgtcacaacataatgaaagttgctcaagccaaactggaaatgataaaacctgaagaagtaaacttggaggaatatgaggagtggcatcaggattataggaaattcagggaaacaactatgtatctcataattgggctagaaaattttcaaagagaaagttatatagattccttgctgttcctcatctgtgcttatcagaataacaaagaactcttgtctaaaggcttatacagaggacatgatgaagaattgatatcacattatagaagagaatgtttgctaaaattaaatgagcaagccgcagaactcttcgaatctggagaggatcgagaagtaaacaatggtttgattatcatgaatgagtttattgtcccatttttgccattattactggtggatgaaatggaagaaaaggatatactagctgtagaagatatgagaaatcgatggtgttcctaccttggtcaagaaatggaaccacacctccaagaaaagctgacagattttttgccaaaactgcttgattgttctatggagattaaaagtttccatgagccaccgaagttaccttcatattccacgcatgaactctgtgagcgatttgcccgaatcatgttgtccctcagtcgaactcctgctgatggaagataaactgcacactttccctgaacacactgtataaactctttttagttcttaacccttgccttcctgtcacagggtttgcttgttgctgctatagtttttaacttttttttattttaataactgcaaaagacaaaatgactatacagactttagtcagactgcagacaataaagctgaaaatcgcatggcgctcagacattttaaccggaactgatgtataatc

SEQ ID NO: 98 - DNA, 455 bp, Homo sapiens
  misc_feature (1)...(455): n = a,t,c or g
gaccgcgctggaattnnncgtcgacccacgcgtccgctccaagaccagcctcctggggggaccacgcacccggccttcactggcacccagggagccgtcctcagcagcgtcaacatgtcagggcccagcagcagagccatttacttgcaccggaaggagtactcccagaacctcacctcagagcccaccctcctgcagcacagggtggagcacttgatgacatgcaagcaggggagtcagagagtccaggggcccgaggatgccttgcagaagctgttcgagatggatgcacacggccgggtgtggagccaagacttgatcctgcaggtcagggacggctggctgcagctgctggacattgagaccaaggaggagctggactcttaccgcctagacagcatccaggccatgaatgtggcgctcaacacatgttcctacaactccatcctgtccac

SEQ ID NO: 99 - DNA, 1660 bp, Homo sapiens
cctgcggctacttttgtcacacaacctgtgccccacaggccccaccctgccccgtgccccctgacctcctccgcacagccctgggagtacaccccgaaacaggcacaggcactgcctatgagggctttctgtcggtgccgcggccctcaggtgtccggcggggctggcagcgcgtgtttgctgccctgagtgactcacgcctgctgctgtttgacgcccctgacctgaggctcagcccgcccagtggggccctcctgcaggtcctagatctgagggacccccagttctcggctacccctgtcctggcctctgatgttatccatgcccaatccagggacctgccacgcatctttagggtgacaacctcccagctggcagtgccgcccaccacgtgcactgtgctgctgctggcagagagcgagggggagcgggaacgctggctgcaggtgctgggtgagctgcagcggctgctgctggacgcgcggccaagaccccggcccgtgtacacactcaaggaggcttacgacaacgggctgccgctgctgcctcacacgctctgcgctgccatcctcgaccaggatcgacttgcgcttggcaccgaggaggggctctttgtcatccatctgcgcagcaacgacatcttccaggtgggggagtgccggcgcgtgcagcagctgaccttgagccccagtgcaggcctgctggtcgtgctgtgtggccgcggccccagcgtgcgtctctttgccctggcggagctggagaacatagaggtagcaggtgcccaagatccccgagtctcgaggctgccaggtgctggcagctggaagcatcctgcaggcccgcaccccggtgctctgtgtagccgtcaagcgccaggtgctctgctaccagctgggcccgggccctgggccctggcagcgccgcatccgtgagctgcaggcacctgccactgtgcagagcctggggctgctgggcgaccggctatgtgtgggcgccgccggtggctttgcactctacccgctgctcaacgaggctgcgccgttggcgctgggggccggtttggtgcctgaggagctgccaccatcccgcgggggcctgggtgaggcactgggtgccgtggagcttagcctcagcgagttcctgctactcttcaccactgctggcatctacgtggatggcgcaggccgcaagtctcgtggccacgagctgttgtggccagcagcgcccatgggctgggggtatgcggccccctacctgacagtgttcagcgagaactccatcgatgtgtttgacgtgaggagggcagaatgggtgcagaccgtgccgctcaagaagggtgcggcccctcaatccagagggctccctgttcctctacggcaccgagaaggtccgcctgacctacctcaggaaccagctggcagagaaggacgagttcgacatcccggacctcaccgacaacagccggcgccagctgttccgcaccaagagcaagcgccgcttctttttccgcgtgtcggaggagcagcagaagcagcagcgcagggagatgctgaaggacccttttgtgcgctccaagctcatctcgccgcctaccaacttcaaccacctagtacacgtgggccctgccaacgggcggcccggcgccagggacaagtccccg

SEQ ID NO: 100 - DNA, 916 bp, Homo sapiens
aatacagggcctgtgcatcccctttctccatccccaccaagtggcccccagagactggatgctgtcccacacgtcctgctctcccaccctcagccccccacgtggcctcagcacatctgctgtctccctgtgtcccaccggttcctcccccacccgttgctggcgcctccatacacttggatgcctcctacacatcccgcatcacccagacctggttgctgtccacccggtagccgtgcctcagggcgaagatcttccccagtgagatggcaatggcaaacccaaccacagcgatggtgaaggcgctgcccacgagctttgagaacagctgggtgttgggggccactgggggcaccagcctcaaatctgtgctttagacccatgccataggagatgcctgtggccccgatgagcgtgagcagctccccgggtatcggcatgggcagctgctgctgcagcttgtcattcaacagcttcaccaccacgagcaccaccccagccacagctgcagtgaccacggtgccaaccttgctctggggcagcttccagcagacctccagcactgtatagatgagggacagtggcccagagtggctgctcagatggaggccaaacacatacttgagctgtgagacgaagacctgcacagctgcagctgtggtatagcctcggacaagaggttctgacaggtaggtgaccacgaagccgaagtggatcaggcccagccccacctggaagaggccaaccaggacactgagtgtggaggccacctgtacccgggcagcatctctggctgtctcattgatcatggagtcgttcaaggcctgcggggccagggattctgtcacactgcccaccatcacagacatgacagcaaaggtccctgtgtctactggtcccgggacacagaggctct

SEQ ID NO: 101 - DNA, 445 bp, Homo sapiens
tggtggaattcgaaagactctacttataaaaattagaggtatctgtaaggaaggcttaaagctgagttcatgtgtttatcagttttttatttttaaagtctgggtctgtgataacagcacctgctcccccaacccctcttgtgtttctgaacgttttgttccattttcttctttcattagcacgtggagatggacatgtgaagaaaggtggaaggttaagattggccggatttatttacatacccacttataggaagtccaaaatgctttcaatcagctcgccctgagagtgatgtataggagaacagtgagatcatcacatggaaaccatgcattacaagaagtactaccccgatctggtcatgggacagaatttactaaacagaagcatcttgaagctgctgaccacggacatccaccagcacgaatgtctatatttagcagg

SEQ ID NO: 102 - DNA, 545 bp, Homo sapiens
  misc_feature (1)...(545): n = a,t,c or g
ngagtagcagaatggttagccttcgtgctttctgcttaaggcagctgtcagtttgcatgtccatgggtcagagtgtggataatcgtggtatagcaaagtgtcactatcaccaaggggaggcaaagtagttgcagtcaaaattaggttgtaccacttaatagtattgagttcatccgaactggtgaggtcgagacaggctgatctgttggtcctgttggttgatgtgatcaagaaggtcatcggaatgacagctaccagtgaaatgatccacaccacagcacaggctacaactgcacatcgagttttgtgaatggaaaagcagctcattgggtgaatgatcacacagtagcggaagatgctgaaacaggtgaggaagaggatgctgctatacaggttgaaatggaagctgaagcggataaacttacacatgaaatctccaaagatccagttttcgccactggcatagtagtgaatcaggaaggggaggctggtcagataacagcagatctgtgcagggccaggttcagcattaatagatgggctgn

SEQ ID NO: 103 - DNA, 410 bp, Homo sapiens
ctgccatagcacggagtcttcttctgacttcatcctccccggagattacctcctgggaggcctgtgccctctccattctggctgtctgcaggtcttgtagcttcaatgagcatggctaccacctcttccaggctatgcggcttgctgttgaggagataaacaactccacggccctgctgcccaacatcaccctggggtaccagctgtatgatgtgtgttctgactctgccaatgtgtatgccacgctgagagtgctctccctgccagggcaacaccacatagagctccaaggagaccttctccactattcccctacggtgctggcagtgattgggcctgacagcaccaaccgtgctgccaccacagccgccctgctgagccctttccttgtgcccatgcttttggagcag

SEQ ID NO: 104 - DNA, 432 bp, Homo sapiens
ggaattcccgggtcgaggaccgctccacatgagcctctggacccagaacatcaccgtctgtcctgtgcggaatgtgacacgggatgggggcttcggcccatggtcaccatggcaaccatgtgagcacttggatggggacaactcaggctcttgcctgtgtcgagctcgatcctgtgattcccctcgaccccgctgtgggggccttgactgcctggggccagccatccacatcgccaactgctccaggaatggggcgtggaccccgtggtcatcgtgggcgctgtgcagcacgtcctgtggcatcggcttccaggtccgccagcgaagttgcagcaaccctgctccccgccacgggggccgcatctgcgtgggcaagagccgggaggaacggttctgtaatgagaacacgccttgcccggtgcccatcttctg

SEQ ID NO: 105 - DNA, 396 bp, Homo sapiens
cggactggggcttctatacttaatctttgcagctgttgaaggcgtgatgagagtcattgggggttctaaccatttagctgttgttcttgatgacattattttagcagttattgactccatttttgtgtggttcatttttattagtttggcacaaactatgaagaccctaaggctaagaaagaacactgtgaaattttcattatatagacattttaaaaatactctgatctttgctgtgctggcttctatagtgtttatggggtggacaactaagacatttagaattgcaaaatgccaatcagattggatggaacgctgggttgacgatgcattttggagcttcctttttttcgcttatccttattgtaatcatgtttttgtggagaccatcagcaa

SEQ ID NO: 106 - DNA, 432 bp, Homo sapiens
gaggatgggcacggaggctggtcctccaggtgccttgtggaccatgctgaggaaggacatagggagccatggaagaggttatgcatatggcagagaggtggtcatgagataagatttgccttttacttccctggtcatccactgttaagcccccagatatgcctggctcctgagaccccccccaggggctgccctcctgtttcaagtctccactttatctcccttcagggctgcccagggattgccaggagctgttccaggttggggagaggcagagtggactatttgaaatccagcctcaggggtctccgccatttttggtgaactgcaagatgacctcagggactttctggacctgcaggacagacagcagggtgttccagaatgccaacccctccaacgcagcccactcagaggatcagccaacgccag

SEQ ID NO: 107 - DNA, 720 bp, Homo sapiens
cgaatgtgttcagcatactacactggtacagattgtcaccacgaactgaaatataggctgcatttgggtgtcttcatttcctggggagtaagtatctttctgtgtatttatgaactctattgtttagaattactgttaccttcctgccaaatttaaaagatatgagtgtccctttatttctgtgggagcataatccatagtgaattttttggttattttaaatgtgcttttggttggtctatgtggtcatagatctgttcatcagactctggttaatattggaatctaatgctcaggttgaataacctgttttaaaaacccaagggatgatttatctctgtctaaacaaaccgctgaagcgaaatgagcaagaaagcctgtctttcctgttaccgaatcatggggcagaatcatatcctttctcttgggtactttagtcctcagctcattcagtgttaataggggactgcgaacagagtgcatgcagattaaaagccagcgttttcattttaagaagatttttccagcctgagaaacatagtgagacttcatctctataaaaaagcaaaaattagccaggtatgccggtggtcccagctactctggaggctgagggcaggataattgcttgaccccacgaggtccaggctgcggtgagctgtgaacacaccactgcactcagcttgggcgacagagtgagaccttgtcacaaaaaaaaaa

SEQ ID NO: 108 - DNA, 629 bp, Homo sapiens
gtcgcactagtgatttcccgggtcgacgatttcgtaggatcaccacgaacgtcagactgaacgagagcgatgccagcgcagtacccagatccagacgttgagcgatcaacgcgccgatgattggggccagtgcaccgcccaatgcgccaacgttgtaggtaaagcccaggcccgctgcacgctggtcggtatcgaaataaccgccaatcagttttggtaagatcccggcgatcccttgtccaagcatttgctggaagaacagtaacagaccgagcacccagacgtttgcgccgccaatcgcaaataccggaataatcagcagctgcgaggccagcaggctacaaacgtacgctttgcgggttcccagccagtcaccgaggaagccactacgcagcatcccaccgccgcgccaaagccactaaaggacagcacattggctacagtatgcgggttataagccagatcggttttcagatacgttggcagcagcgcctgaatcggccatgagtagaggaaagcaaacaacacgaccaccatcagcattacgcccgttggccagcgtttgcctgcactctgcaccataaagctgataaagattgcggcgcataacaacgaaatcgcgacccggg

SEQ ID NO: 109 - DNA, 387 bp, Homo sapiens
tttcgtatgattgagttttggtggctttacctgacaccagtcacttcagagactgttgtgacggaggttttgggtcaccgggtgactttgccctgtctgtactcatcctggtctcacaacagcaacagcatgtgctgggggaaagaccagtgcccctactccggttgcaaggaggcgctcatccgcactgatggaatgagggtgacctcaagaaagtcagcaaaatatagacttcaggggactatcccgagaggtgatgtctccttgaccatcttaaaccccagtgaaagtgacagcggtgtgtactgctgccgcatagaagtgcctggctggttcaacgatgtaaagataaacgtgcgcctgaatctacagagagcctcaacaacc

SEQ ID NO: 110 - DNA, 350 bp, Homo sapiens
ggcacgaggatctttccagtcttctgactcgaggaagtgggaaccaggagcgggagaggcagctcaagaagctcatctctctccgggactggatgttagctgagttggcctttcctgttggggttctcgcgacttgtgcctaatctttactctcgtgttagtactgtgttatcctcttcccttgttcttgtttcttctttcattctcctgacgcactgttttctttacttctgttgtcttgctactttccttcgtattgcttcttctattatctcttcttctcttcttctcctttatgtttattattggcttcgtctccttttccactttttattcttttagcttcctta

SEQ ID NO: 111 - DNA, 344 bp, Homo sapiens
atttactagtactatgacaaaaccatttgagaaggaatctgagcagccagcataagccactcttgcctttggagctcaaactagcactacagctgatcaatgtgcactaaagccagatcttagttacttgaacaacagttcctctagttcaagtacaccagccacttctgctggaggaggtatatttggaagttccacctcttcctccaatccacctgtggctacctttgtgttcggacagtccagcgatcctgtgagcagctatggctttgtgaacactgctgaatccagcacctctgactctttgctattttctcaagatagcaaactagcaaccacatcca

SEQ ID NO: 112 - DNA, 372 bp, Homo sapiens
cccacgcgtccgcccacgcgtccgaccacgcgtacgacttcgtgaacgacatcctggactacatcgtgtacgagatcctgcacgtgatctggggcgagttcaggaccaggttggacaccgaggacaacctggtggagatcccgcaggagctcgcaaaggacctgttcaagggcgtgttcaggggcatggtcacggacatggtgaaggtcatcatgaacgtcatcctcatcatgttcaacctcgtgctcaagttcctcatccaggtcatgtggcaggcctgggggccccctgggggcccgcggggtgcatatcacctcatgtttgaactcatgcatgagttctagtactacttctagtactacttccactttt

SEQ ID NO: 113 - DNA, 377 bp, Homo sapiens
ggcacgaggatattatgacacactacgacagactggtggacgaataggccctaaatgctgggaaacaaaggtatgagaagatgatcagtggtatgtacctgggtgaaatcgtccgcaacatcttaatcgactttaccaagaagggattcctcttacgagggcagatttctgagatgctgaagacccgtggcatttttttaacctttcttctttctaacttcttgattgtatgtgtattactgttttatgtttcattttatctttttcaatcttgtattaattttgttctctagactatttttgtttcttattataatttatgatctatttctttatttttcttatttatgttttgtagtagtcttctcttccaatcg

SEQ ID NO: 114 - DNA, 396 bp, Homo sapiens
aagcaacaagccgtccctgagccacattcctctacgacgactccacaggaacaggagcagaattggtatggacaggacttgcttaatttgcaacagaggacaaaagtccatttgccaggacacaaaacgggtcctgcggtagcaaaggatacaccagagccggtaaaaaaagaatttactgtacctgccaccagtcaaggcccataatctcctttttctgaggagcccccattgccaccttcaaatgaggaagtgccacctactctcccaccttaggaaccccagtctgaggacccataaaaaaatgcctagttaaagcaaatgcatgctgctacaacacactgtcagcagcaccagcaacatcaagtcggctgccagtatcatggaataatgcag

SEQ ID NO: 115 - DNA, 401 bp, Homo sapiens
cattacagtaattattctccccctgtttccacagggtgagaaaaaagaaacctggatttacctctgggttgagaatttctagcgttgatttcttataatgattcatgttctccacgcctaaattggacactgtgaggaagccaaatcggatccgagagtctttttctaatggccagtactggccacactttctcctgccgccttcctcaaagctgtagactcacagagcccggcgcttctgtgttactccccaatggcaactccaaaccatagatggatagctccctgctcatctttccacatccctgctattcagtatagtccgtggaccaatcacaccagcatcgtatggcagagcgttagaaacatgaatctgcatgtcaacgagatccccacgtgag

SEQ ID NO: 116 - DNA, 667 bp, Homo sapiens
  misc_feature (1)...(667): n = a,t,c or g
ttttttttttttgtaaccatgatggtctttttaacaagcaagtgactggactgtttgcaaaggaaagaaaacattttccaaggatagtaagtattctacgaattcctagccagcttttgtcttcttgaaaattatcaccataaggaaagaattaaattacactggcatttataagggattaggcacaccaggtaccctatgcttcaatcctgtcctttcatcttccttccatttctctgtcttgggacatggtaatttggaggtgagaccaccctttcttgtccctgacaaagaatcctgtcatctgcagaatctctattcttccagctggctcctagcagggtagggagagacacagaaagagagagtcaccgttccacttcagatgctgcaagttgctgtagaggagctgccccgccgtcccagccgcccgggtgaactcctgcaaactcatgctgcagaggtgctcgccgttgatgtcgaactcttggaaagggatacaattggcatccagctggttggtgtccaggaagtgctggagccactcccacacctggtactttgtccagtactgaagatgaatntcatgcgactggcctgcaagaaacccactggaaacattgcacgtggagtagctgtctgttcaggctgggcgctgtggagggag

SEQ ID NO: 117 - DNA, 381 bp, Homo sapiens
ggcacgagtggaggtccaaaacgtgttctcgtgactgagcggtttccttggcagaatccattacctgtaaatagaggccaggctcagcgggtcttgggtccttcaaattctttccagcgcgttcctttgcaagcacaaaagcttgtctccagtcacaagccgggtcagaatcagaagcataagcaattgcaggcaaccagtgtacctcatcctgtctgcatgccactgaataacacccaaaagagcaagcagcccctgccatcggcacctgaaaataatcctgaggaggaactggcttcagatccgaacaatgaagaatcattatagaggccgtgggctttggaagactttgaaattgggcgccctctgggtaaaggaaag

SEQ ID NO: 118 - DNA, 385 bp, Homo sapiens
ttacctacttatggctatgagggaaccctcccttttatgaaaagaatgatggcggcctctttgagctgattttgagggccaaggacgagtttaactctccttactgggacgacatgtctgactctgccaaacatttcatccggcccttgacggggagggacccctagaaaccattcccctgtgaccagcccttgcagcacccatggattgagggacatacctgtctagataataatatccaccaggccgcgagcgagccaatcaacaataactttgccgagagcaagaggaatctagcattccttgccacgggtgtggtgcggcacatgaggaaactgtttatgggcgccaacctagaggggcctgggcccacggtgagccatgg

SEQ ID NO: 119 - DNA, 398 bp, Homo sapiens
ggcacgacgagcaaacaccactagcttgcccggagtttaataagaggaccttttgaccacgatctgaaacccaatgctgccacgagagatcagttaaatattattgtgagttatccaccaaccaagcaacttacatatgaagaacaagatcttggttggaagtttagatattatcttacgaatcaagaaaaagccttgacaaaattcttgaaatgggttaattgggatctacctcaagaggccaaacaggccttggaacttctgggaaaatggaagccgatggatgtaaaggactccttggagctgttatcctctcattacaccaacccaactgtgaggcgttatgctgttgcccggttgcgacaggccgatgatgaggatttgttgatgtacctatt

SEQ ID NO: 120 - DNA, 1156 bp, Homo sapiens
tcatgggcgagtctcctgcagtgtagggctactttgtcctggcaggaatgaactctgctggcctttcatttggtggaggagccggaaagtaccttgccgaatggatggtacatggttatccctcagaaaacgtttgggaattggacctgaaacgttttggagccctccagagcagccgcacctttctgcgccaccgggtcatggaagtcatgcctttgatgtatgatctgaaggttccccactgggacttccagaccggtaggcagttacgcacctctcctctctacgaccggctggatgcacagggagccaggtggatggagaaacatggatttgagaggccaaagtactttgttccccccgacaaggacctcctggcattggagcagagcaagactttctataagccagattggtttgacatcgtggagtctgaagtcaagtgctgtaaggaagctgtgtgtgtcattgacatgtcctctttcacagagtttgagataacatccactggggatcaggcattagaagttctacagtacctcttctccaatgacctggatgtgcctgtgggccacattgtgcatactggcatgctcaacgagggtggagggtatgaaaatgactgcagcatagcacgactgaacaagcgcagtttcttcatgatctctccaaccgaccagcaggtccactgttgggcctggcttaagaaacacatgccgaaagacagcaacctgctcctggaggacgtcacctggaagtacacagccctcaatctgattggccctcgagctgtggatgtgctgtctgagttgtcctatgcccctatgactccagaccacttcccaagcctcttttgcaaggagatgagcgtgggctatgcaaatgggatccgggtgatgagcatgacgcacacaggagagccaggattcatgctctacatccccatagagtacagatggggcttcaccatgttgtccacgcttgtctccaactcctgacctcaagtggtccacacacctcagcctcccaaagtgctgggattacaggcatgagccactgtgcctggccccagggcgaccacggaacggatcagcgaggccaagtacactaccaccatctggtcattggtcttcaggtaaaaggccttgacgaactc

SEQ ID NO: 121 - DNA, 306 bp, Homo sapiens
gtgcacagtttttgctggttggatgggatcacattttgtgactcattgtcttgtagacgaatctcacagaactagggcggaccacatgtgaccagaactggccaaattcccccgacgtcttgaaccacggctgtttttacatgcagtgtctatcaaaggactgtaccatcggctatgtgtcccgagaaatgctggtcgcacacacccataccgttgaagaacatacagggacacatctacagtacgtatcatggcctgaccacagtgtgcccgatgactcctccgactttgtggaatttgaaaact

SEQ ID NO: 122 - DNA, 425 bp, Homo sapiens
aagggcaggaaggagaaggggccaagatgaagtgaccccttccttgttcacagtaactctgtggcttcagactctaaacagagctttccatttggcttatcttccaataaaaagatttaactaggtctgttttcctttgtatggacagaagtacttgaggagcccaaggacttttcttgtgaaaccgaggacttcaagactttgcactgtacttgggatcctgggacggacactgccttggggtggtctaaacaaccttcccaaagctacactttatttgaatcgtaagttggctctggttacattattgacaacttcttccttgcttgaggagcttgtgacaacatggcaaaaatctacacttagatgttgcaggaaatttgaacaaatatttcagaaccacctgccaaggtcaagaggaaacc

SEQ ID NO: 123 - DNA, 408 bp, Homo sapiens
agctgctgcgggagctccaggtctagtctttactgctctgtgtattctgctcctagaggcccagcctctgtgactccgttatctgcaggtattgggagatgcacagctaagatgccaggaccacctggaagcctagaaatggcagcagcgggatttggcctggggatggagcaaagtgaccccctgctgtagagcaagctgagaggggccatgttgaaatgatagaaaaacttaccttcctaaacctgcatacttcagaaaaggacaaggggggaaacactgccttgcacctcgctgcgaagcatggtcacagtcctgcagtgcaggtgctgctagcccagtggcaagacataaatgagatgaatgagaagcagcaaacccctctgcatgtagctgctgatcgaggaa

SEQ ID NO: 124 - DNA, 901 bp, Homo sapiens
atgacttttgatgatgatgataaaaatacctatggcgttgctctggtatggaaaaagtttcagacccaaagtttacgcctatcagacctacacagaaaatcgcatctttggagaggaatagtcagcatcaccttgattgaagggagagacctcaaggccatggattccaacgggttgagcgatccctacgtgaagttccggcttgggcatcagaagtacaagagcaagattatgccaaaaacgttgaatcctcagtggagggaacaatttgattttcacctttatgaagaaagaggaggagtcattgatatcactgcatgggacaaagatgctgggaaaagggatgatttcattggcaggtgccaggtcgacctgtcagccctcagtagggaacagacgcacaagctggagttgcagctggaagagggtgagggacacctggtgctgctggtcactctgacagcatcagccacagtcagcatctctgacctgtctgtcaactccctggaggaccagaaggaacgagaggagatattaaagagatatagcccattgaggatatttcacaacctgaaagatgtgggatttctccaggtgaaagtcatcagagcggaagggttaatggctgccgacgtcactggaaaaagtgacccattttgtgtggtagaactgaacaacgatagactgctaacacatactgtctacaaaaatctcaatcctgagtggaataaagtcttcacgttgtaagtaggcatttctttgggctctgaatccaaaattgtgttaaatttgattatttttgagggttttaaaaaaaatgtggtgtttattcttaactgattcacaactcaatgcatctggcctgcctttgctaacaacaatgaattttcctcctaccttc

SEQ ID NO: 125 - DNA, 509 bp, Homo sapiens
acttgaaacgcctgctggaattcgccatgagcctcatatggaccagtaaccattagggggggcccgcacccaattcacgctatgctgagccttagaagaactcactggcgatgacctgagctcatgctgactgtgaaaactatgttgcctgtggaggcttggacaacatctgctctatatataacttaaagaccagagagggaaatgtgagagtaagccgagagttgccaggtcacacagggtacttgtcctgctgtcgttttttagatgacagccaaattgttacaagttcaggagatacaacttgtgctttatgggacatcgaaactgcccagcagaccaccacattcactgggcattctggagatgtgatgagtctttctttgagtcctgacatgaggacttttgtttctggtgcttgtgatgcctcttccaaattatgggatattcgagatggaatgtgtagacagtctttcacgggacatgtctcagatatcaatgctgtcagt

SEQ ID NO: 126 - DNA, 380 bp, Homo sapiens
aaaaatcagagaagagctgtgtttcctctcttgctcactttgggacctcttgccaacgggactatgatgcgatggtgaagctggtggaaacactggagatgctgcctacgtgtgatttggccgatcagcataacattaaattccactatgcgtttgcactgaataggtaagaacgataatgtacgtacaggttttgaaacatgccacccattgaattgtgcttccttctttcattcaacatcgggtatgagccaggtcacgtgctaaatgccaaggttatgaagatggacaaggtccagtctttgtcctcagggactttgtatttggcatacacattctagctgtgagattgaacacatcaatccatcctaatagcttag

SEQ ID NO: 127 - DNA, 497 bp, Homo sapiens
acggagtctccactgctggtccgaccatatttaccttacatcaccaagtctgaactccacgccatcatgaccgccgggttctctaccattgctggaagcgtgctaggtgcatacatttcttttggggttccatcctcccacttgttaacagcgtcagttatgtcagcacctgcgtcattggctgctgctaaactcttttggcctgagacagaaaaacctaaaataaccctcaagaatgccatgaaaatggaaagtggtgattcagggaatcttctataagctgcaacacagggagcatcctcctccatctccctggtggccaacatcgctgtgaatctgattgccttcctggccctgctgtcttttatgaattcagcccttgcctgggttggaaacatgtttgactacccacagctgagttttgagctaatctgctcctacatcttcatgcccttttccttcatgatgggagtggaatggcccgacagctttatggg

SEQ ID NO: 128 - DNA, 488 bp, Homo sapiens
  misc_feature (1)...(488): n = a,t,c or g
nggaannnggggaggcccgagtccnnnaattganancctgcntgtttttgcagaactacnggnnnggaannnnngggncgacccacgcgtncgnggatgnncaaaagacattgaattggatccttgcttagttccaagcgcctacaaaggctagggaaggaccagtaaccatgcgataaaggaatagctcagcatagggtcagaaatgacactagccgctgacaacaaaagaatacttttccattttaacgcaaaagcaaaacaaaacacatgaaacctggagcatgttgtatgaatagtaaggcacaggaatcagtttttaaaaatgtactctgtaacccccctgcactttcagaaatgccagacgtgaaagctgaagatgaagtggattttagagcaagttcaatttctgaagaagtggctgtagggagcatagctgctacactgaagatgaagcaaggcccaatgacccaggcgataaaccgagt

SEQ ID NO: 129 - DNA, 395 bp, Homo sapiens
ccgacgcgtggggccctacgctactggatcttcggcaggttcttatgcaacatctgggcggcagtggatgtgcggtgctgcaccgcgaccatcatgggcctctgcatcatctccatcgaccgctacgttggcgtgagctacccgctgcgctacccaaccattgttacccaaaggaggggtctcatggctctgctctgcgtatgggcactctccctggtcatatacattggacccctgttaggctggaggcatccggcccccgaggacgaaaccatctgccagatcaacgaggagccgggctacgtgctcttctcaacgccgggctccttctacctgcctctggccatcatgctggtcatgaactgacgcgtctacagggtggccaagacggagaa

SEQ ID NO: 130 - DNA, 714 bp, Homo sapiens
cgacccacgcgtccgtacgaaaattgtaaataggaagacgacaatctatgaaattcaggataaaacaggaagtatggctgtagtaggaaaaggagaatgccacaatatcccctgtgaaaaaggagataagcttcgactcttctgctttcgactgagaaagagggaaaatatgtcaaaactgatgtcagaaatgcatagtttcatccagatacagaaaaatacaaaccagagaagccatgactccaggagcatggcactaccccaggaacagagtcagcatccaaaaccttcagaggccagcacaaccctacctgaaagccatctcaagactcctcagatgccaccaacaaccccatccagcagttccttcaccaaggtcaccaaggacaaggatatcaaataactactgttcaatctttactcaagtgtggaaattttgcctgaagtcctccacctaaaaacctgatgccattggtaatgatgtttatgaagataagatcaaagcacagaaaataatatatgtatatatatgtatatatatctggttgaaatactatatatatatatatatatataccagctattaattctaggaaatggagtattaagggtgcattttatttcattagttttacttttatgcattttcttcatatcatattttgcattcagaattttcataatttgaaaaaaaataaactttttttttcttaa

SEQ ID NO: 131 - DNA, 605 bp, Homo sapiens
ttttttttttttgggtttgctttctccccctactttattggagagcacttgccattgcttttatcaagtgcttgctagccatggatgccaactaacttcttcaattgaaggccggaggatcatatcgggttccaggagcctcttgagcaggtcctggcaatcggccgagatgctcagatgagtggggaaggacacccccttctgctgctgccacagcatcttggggatgtctgtgtcgtcaaaaggtaggctggcacagagcatgacatacaggaccacacccatgctccagacatcaccttttttgctatcgtggggaatgccctgcagcacctcgggggcagcataggctgtactgccgcagaaggtctggctcagctcccggtgtgacttgggcaacaccttggcaaagccaaagtcagtcagcttcaggttgaagccctgcaacaaggcgttctcacatttgaggtcccggtgggccacaccacagccatggcagtagcggatggcctcaaccatctgacggaagagggccttggcccggctttcaggcagtggccccccattcagcacgcagtcaaagacatcccctccctcagcgagct

SEQ ID NO: 132 - DNA, 348 bp, Homo sapiens
tgtatttccagcacttactttggtgcttggcacgtagtagatgctcagtaaatatttgtagaccagatggacggtggtttgtattctaagtcaaatgagggaaaatacatattcataaatctcaaaaacaaataataggagacttttaactagtagcaaagagtttgctatattgcggttgtttgttttttctgttacagctggccaagaatgtaggaaacaatagttttaatgatattatggaagcaaatttaaccagcccctcaccaaaacccaccccttcaagtgatatgtaagtatttctgatatattgaacttttttaaaccattctataattgtttttctaa

SEQ ID NO: 133 - DNA, 406 bp, Homo sapiens
  misc_feature (1)...(406): n = a,t,c or g
agcgaaaacatattaaactgcttattcaaaagttgtctgatgtcccttaagagtgtcagaacaatcagctatagaagctcacagaaatctgtgagaaagaaaagaaagaattcaagaagaaaatggatgaccagaggccggagaagattaccgaagcttaatccaaagacaaaagtccgatggaagaggagaagacagagatgatccggtcatatattcaggaagtggggcggtatatcaagaggcttgaagaagcgcaaagtaaacggctagaaaaactccgagagaaacacaaggaaatacgtcagccgatcctggatgaaaagcccaagggggaagggtcctcctcattcttgtcggaaacttgccatgaagatacctcttggttccccaactttactccccn

SEQ ID NO: 134 - DNA, 1276 bp, Homo sapiens
  misc_feature (1)...(1276): n = a,t,c or g
caagaagtgtccacagcagtaatggataaagactagttttaaatcctcaaagccctaagaggggccccttggttgccctttgtgaatgccagcccccttaagagagtggtgtttgattaacaaaaaaactgtggccccaagtggaacccttgaccttttcctcagataatctgtgtatgtacacagctaacacagctctttagattccctgttaagtgactcattcacattcctttcttggatataaagtcattgctgtctttttatttttgaaatagtacaagacaaagatttttaacttaacatgaaaaattcactcttttattttggaaaaaaagttaacttttcatactaacaaacagaacaagatttaaggtaaatttcttaaacattatccagaaaaataacaagatttatagtatctacttctggtactaatatacacaaaaggccaaaaccatgcctattctgcaggtgtagcttcggtgctctcctgttcaggggcaggctcactgcccgcttcttttccttctttgcttcttttagattttttgtgtttgtgtctcctgtgactatctccttcttcactttcatggcgacgtctactattacttcgagaagacttatgtctggtttcctctttctccctgtgtcgtctttctctatgtcgttcttctttttctcgacttgctctgtgacgctcataacctctttctgcatattccctgtatctgtatcgttcttcatcgctgttgaaaacacttggtgtaggactgtgatcacgctccctctctctctctctggtgcgttatctttctctgtcccgatcacggnnnnnnnnnnnnnnnnnnnnnnnnnnnnnnnnnnnnnnnnnnnnnnntctggcataatagtcccactgcttgctggtgtccacaagactaggccacgaaggagcagaaccaggaagatggggaaaggcaacattgccatatggaaatgcacgtgcagaacgactatcataaccagaggaatgtccactttctattgttggtataagagatggaggtggagcgcctggtggaggaggaaaacccggtggtggaatcagaggtggagcagtgctgacagtcggagnnnnnnnnnnnnnnnnnnnnnnnnnnnnnnnnntgggaggagctcctgcagggaaaaacggaggtggtttgctaaaattgttgtctacttcagtagcattagacaaaattatttaaagtcaataaattgttattcgagcggacgcgtgggtcgacccggg

SEQ ID NO: 135 - DNA, 417 bp, Homo sapiens
cccacgcgtccggttaattcaagtcaggcatttgctcttgtatattatacattgggagctcttgggggcaatctaatagcccacatgggtttgggttacagatactgggctggcatcggcgtcctccagagttgtgaatctgccctgactcactatcgtcttgttgccaatcatgttgctagtgatatctcgctaacaggaggctcagtagtacagagaatacggctgcctgatgaagtggaaaatccaggaatgaacagtggaatgctacaagaagatttgattcaatattaccagttcctagctgaaaaaggtgatgtacaagcacaggttggtcttggacaactgcacctgcacggagggcgtggagtataacagaatcatcagagagcatttgactacttcaatttagcagcc

SEQ ID NO: 136 - DNA, 523 bp, Homo sapiens
tttcgtcacaaagacagagaagagctgtccagcagggagaatagggccctgaaggaagggcaccgccaagatggagagggggccttagcagctcctgaagctgagccagcaggaaaggtgcaggcccctgaggggctgatcccagccacaggccaggcagaggagctagcagccaaagatcacgactcctgcgcaggactggaggggagagctgaagggcaaggaggagtggatgccgtgctaaggacccaggaagctgttgctgaggaagatcccataatggcagaaaagttcagggaggaagcggtggatgaggacccagaggaggaagaggacaaagagtgcactctggagacagaagcgatgcaggacaggaactcggaaggggacggggacatggaaggagaaggaaacacacaaaagaatgagggcatgggaggaggaagggttgtggctgtggaagttctacacggaggtggtgaaacggcagaaacagccgcagaggagagggaggtgttggcag

SEQ ID NO: 137 - DNA, 3131 bp, Homo sapiens
gcacatagagatgaaatccagcgcaaatttgatgctcttcgtaacagctgtactgtaatcacagacctggaggagcagctaaaccagctgaccgaggacaacgctgaactcaacaaccaaaacttctacttgtccaaacaactcgatgaggcttctggcgccaacgacgagattgtacaactgcgaagtgaagtggaccatctccgccgggagatcacggaacgagagatgcagcttaccagccagaagcaaacgatggaggctctgaagaccacgtgcaccatgctggaggaacaggtcatggatttggaggccctaaacgatgagctgctagaaaaagagcggcagtgggaggcctggaggagcgtcctgggtgatgagaaatcccagtttgagtgtcgggttcgagagctgcagagaatgctggacaccgagaaacagagcagggcgagagccgatcagcggatcaccgagtctcgccaggtggtggagctggcagtgaaggagcacaaggctgagattctcgctctgcagcaggctctcaaagagcagaagctgaaggccgagagcctctctgacaagctcaatgacctggagaagaagcatgctatgcttgaaatgaatgcccgaagcttacagcagaagctggagactgaacgagagctcaaacagaggcttctggaagagcaagccaaattacagcagcagatggacctgcagaaaaatcacattttccgtctgactcaaggactgcaagaagctctagatcgggctgatctactgaagacagaaagaagtgacttggagtatcagctggaaaacattcaggttctctattctcatgaaaaggtgaaaatggaaggcactatttctcaacaaaccaaactcattgattttctgcaagccaaaatggaccaacctgctaaaaagaaaaaggttcctctgcagtacaatgagctgaagctggccctggagaaggagaaagctcgctgtgcagagctagaggaagcccttcagaagacccgcatcgagctccggtccgcccgggaggaagctgcccaccgcaaagcaacggaccacccacacccatccacgccagccaccgcgaggcagcagatcgccatgtctgccatcgtgcggtcgccagagcaccagcccagtgccatgagcctgctggccccgccatccagccgcagaaaggagtcttcaactccagaggaatttagtcggcgtcttaaggaacgcatgcaccacaatattcctcaccgattcaacgtaggactgaacatgcgagccacaaagtgtgctgtgtgtctggataccgtgcactttggacgccaggcatccaaatgtctcgaatgtcaggtgatgtgtcaccccaagtgctccacgtgcttgccagccacctgcggcttgcctgctgaatatgtcacacacttcaccgaggccttctgccgtgacaaaatgaactccccaggtctccagaccaaggagcccagcagcagcttgcacctggaagggtggatgaaggtgcccaggaataacaaacgaggacagcaaggctgggacaggaagtacattgtcctggagggatcaaaagtcctcatttatgacaatgaagccagagaagctggacagaggccggtggaagaatttgagctgtgccttcccgacggggatgtatctattcatggtgccgttggtgcttccgaactcgcaaatacagccaaagcagatgtcccatacatactgaagatggaatctcacccgcacaccacctgctggcccgggagaaccctctacttgctagctcccagcttccctgacaaacagcgctgggtcaccgccttagaatcagttgtcgcaggtgggagagtttctagggaaaaagcagaagctgatgctaaactgcttggaaactccctgctgaaactggaaggtgatgaccgtctagacatgaactgcacgctgcccttcagtgaccaggtggtgttggtgggcaccgaggaagggctctacgccctgaatgtcttgaaaaactccctaacccatgtcccaggaattggagcagtcttccaaatttatattatcaaggacctggagaagctactcatgatagcaggagaagagcgggcactgtgtcttgtggacgtgaagaaagtgaaacagtccctggcccagtcccacctgcctgcccagcccgacatctcacccaacatttttgaagctgtcaagggctgccacttgtttggggcaggcaagattgagaacgggctctgcatctgtgcagccatgcccagcaaagtcgtcattctccgctacaacgaaaacctcagcaaatactgcatccggaaagagatagagacctcagagccctgcagctgtatccacttcaccaattacagtatcctcattggaaccaataaattctacgaaatcgacatgaagcagtacacgctcgaggaattcctggataagaatgaccattccttggcacctgctgtgtttgccgcctcttccaacagcttccctgtctcaatcgtgcaggtgaacagcgcagggcagcgagaggagtacttgctgtgtttccacgaatttggagtgttcgtggattcttacggaagacgtagccgcacagacgatctcaagtggagtcgcttacctttggcctttgcctacagagaaccctatctgtttgtgacccacttcaactcactcgaagtaattgagatccaggcacgctcctcagcagggacccctgcccgagcgtacctggacatcccgaacccgcgctacctgggccctgccatttcctcaggagcgatttacttggcgtcctcataccaggataaattaagggtcatttgctgcaagggaaacctcgtgaaggagtccggcactgaacaccaccggggcccgtccacctcccgcaggtaaccagcttctcctcttcctcagtaccaggggcaacgtgcttttctgcaaggcagaaggaagtgatactaaaccagtagaatgtttcccaatcttcactttgttcttaagctcaaaccattcatttgtttgcgatctgcggcactgaaataacacagaccattatgagcatcaggagaattagaaaataccacctt

SEQ ID NO: 138 - DNA, 526 bp, Homo sapiens
aggtcgtcctcagggcccagcacccggagctgggtccccacccgaatccggccctggcctatgggctgctctgggctgctctttggtttgggtgcctctgtgctgtctcggcggggcggcagggaggctgtgagcaaggagtggaaagtctggcctccggaggcgccgcgctcatgctggacctccaccaggtgggccatgtaattcttgtccatgatgttctgctccagagtctgggggtcgtgggccactgcctggtccaggaactggaggagtttgctcatgctggacacggggatgccaaacgactgcacgaacagcagcagctgctgcggctccaggtcctgcagggcggcgtccaccaggcggagcacctcagaacggatcatgcgcagcttcagccagtcaggaagcagcagcgcctcctccgatgtgtccaccaggaaggcggtgggcagtggcttctcctccggaaaccagatgtccagcagcgcctggaactcgctgtcgtcggctcgaggcggct

SEQ ID NO: 139 - DNA, 376 bp, Homo sapiens
ttcttccctcaatgtcaaattgtacatcatgtttcagattacagagtagaactgaaagttgaattaggcaggcagggcacttgctaggtagaaatgagtttatagagaccaaagccttggggtgtgcttggttttcgctttgttattatttagtgctatattttgagtcttctcacaaagtggattttgtttttattgtctgatgtttctctactcctccaggtgcccagatgactatcatgagccaagcttgtgcagaaaggtgtaacataatgagactggtggaccgtcggtgggcagggattgccaaaggagtgggcacccagaagattattggaagggtacatctaggtgagcaaaaggcactggggcttgg

SEQ ID NO: 140 - DNA, 404 bp, Homo sapiens
  misc_feature (1)...(404): n = a,t,c or g
tcgagaggaccaacaagttcatcaaagagctcattatggacgggaagaacctcatcgctgcgacgaaaagtctgtcagtggcccagcggaagtttgctcattcactcagagactttaagtttgagtttatcggtgatgctgtgacagatgatgaacgatgcatagatgcttccttacgtgaattttcaaattttttgaagaatctggaggaacagagagaaattatggtgagttgagaggggtgtaaattaataagtcagctttcaagggggaaaaaaatctggatttggaagcttgttctggtagaagttgtgaagcatttatccctgggtacagtagtgcattgtaatggaaagatgaggtttccggagccctgatttctagttccttgagggtgctgaccn

SEQ ID NO: 141 - DNA, 362 bp, Homo sapiens
ctcatcaccaacaaagtttttgtggcccgagagctgtcatgcctggatgtgcatctggacagcacagggagcaccgctgtggttgcagatcaagacaagctggagctggagctggtgctgaaggggtcctatgaggacacacagacatccttcctgggcacagcctctgccttccgcttccactacatggcagccctatagacagagctgagcgggcgcctgaggagctccaaaagcaatggctggaatggggacaactcaactgggtacctcactgtgcccctgaggcccttgaccattgtgaaggaggtgactatggatgttcctgctccaaatgtaaggggcctcaactggatgggaaa

SEQ ID NO: 142 - DNA, 406 bp, Homo sapiens
aacaaccccagcacccttccccgtggatcctagcccatgagtcctcgaactacaatggggcggaggaggcagcgaagaagggaacacaagagctcgttgtcgctagcctccagcacggtggggccgggcgggcagattgtgcacacggagaccacggaggtcgtgctctgtggagaccccctcagcggctttggcctccagctccagggcggcatcttcgccaccgagaccctgtcctccccacccctcgtgtgcttcatcgagcctgacagcccggctgagaggtgtgggctgctgcaggtgggggaccgtgtcctgtccatcaatggcattgccaccgaggacgggactatggaggaagccaaccagctcctgcgggacgccgcgctggcccacaaggtcgtgg

SEQ ID NO: 143 - DNA, 447 bp, Homo sapiens
cagatgcttaggaacgggggagaccagaacacagtccctgattaccactttgctgatagaattcgggagcttctgtgacctacagaggatcagaagaattgtataccttaggatacatacctcaggccaagtgctttaggtaacattgtagaagaagtgactcatccctgtagcccaggtccttgccctgccaatgagctctgtgaagtaaaccgaaaaggatgtacatctggagatccctgtcttccatacttttgtgtgcaaggatgcaaactgggacaagcttctgatttcattgcccgtcaagggacactaatccaggtgccatcatctgcaggggaagttgagtgctataaaatctgttcatgtggacaaagtggactcttagaaaactgcatggaaatgcactgtatggaccttcccaccgacacatccgcccttgtgaga

SEQ ID NO: 144 - DNA, 404 bp, Homo sapiens
ccgggtcgacgatttcgtccgaggctgagccaagcaggcactgattctggcagttaggtgttccctgactccttcccgtcagcgccagcagagccgctgccctacttcctgcaggagccacaggacgcctacattgtgaagaacaagcctgtggagctccgctgccgcgccttccccgccacacagatctacttcaagtgcaacggcgagtgggtcagccagaacgaccacgtcacacaggaaggcctggatgaggccaccggcctgcgggtgcgcgaggtgcacatcgaggtgtcgcggcagcaggtggaggagctctttgggctggaggattactggtgccagtgcgtggcctggagctccgcgggcaccaccaagagtcgccgagcctacgtgcgcatcgc

SEQ ID NO: 145 - DNA, 450 bp, Homo sapiens
  misc_feature (1)...(450): n = a,t,c or g
gctatatgactgagcggaggaattccgngttgaagagaaacatgcagacacatggcgctctgnctgtttatctgatttcttttttcatgctgccaaagngctgtgcanagaatgaaactgtggagatgccatatctctttctgtgggagatcactttggaaaagggaatggtctaacttgggccgaaaagttccagtgtgaagggagtgaaactcaccttgcattatgccccattgttcaacatccggaagacacttgtatccacagcagagaagttggagttgtctgttcccgatatacagatgtccgacttgtgaatggcaaatcccagtgtgacgggcaagtggagatcaacgtgcttggacactggggctcactgtgtgacacccactgggacccagaagatgcccgtgttctatgcagacagctcaactgtgggactgctctctn

SEQ ID NO: 146 - DNA, 650 bp, Homo sapiens
  misc_feature (1)...(650): n = a,t,c or g
ggaagaattaatacagatcaaaaaaatatttgaacattcaaatctttttactaccagagagacttcatttaaacagaaagagtagggaacattccatattcaggaacactttagcctctatgagcagtaaatgtaggtggccattttgataaacttctctggcactccattttccccactaacgtacagaagcttcatgaagtcatagactatgttgtcttgttcagccatagccccttccagcatctggcaggctgccaggcaacataacaggtacttggcaaatacttgaatgggtgaggcactctaggcaggccaccagcccacttacgtctcatcaaacaggggttccaaggtcttccgcttcactgaagtcttcttacgacatgcccacttcctttctggcaacaagtagacacggacgtagggatcagctccactggctggtacatggtgttaggtttctgcagccattgattagcacgctgaggcagcgcgcagacacacatagcgcactgtgagctgaatctcacccagctgccgtcgcctgaggtccccaccttcatgttgangcgatatctgccagtcaagcaagagaggccangagttgagnaagacatgctnggagccagcctctggnggccagngaa

SEQ ID NO: 147 - DNA, 372 bp, Homo sapiens
gaacgtctggtcctaaccagtgagcactgtttagtactgaccctcttctggccatcatggacctaccacacactgctgctttcccgtcagcatgtgcggcggctacctaagctgacccatgctgagcatgatcatctagcctccatcatgaataagctcttgaccaactatgacaacctttttgagacgtccgttacctactccatgggctagcatggggctcccacaggatcagaggctggggccaactggaaccattgatagctgcacgctcattactaccctccgctcctgcgctctgacactgtccggaaattcatggttggatcacaaatgcttgctcaggctcagagggacctcacccctgagcag

SEQ ID NO: 148 - DNA, 568 bp, Homo sapiens
ctgattacgaattccatgtccgtacctgtacatcgtggagactcgaaataccctgccgttacaccgcttacgccacttgcgtgccacccgcgacaatcaacggtacggcaaaagagattccgctcaacagtgcctgtttcagctccgttttgacacttttcaccggttgcgtatcttgctgtacggtacgcgtctcatcgctacgcttgagggtaagcgcttgttgcatcaacgcttctgcatggcgaatcggctcggcaacaggcactgaaagcgcgggaatgccattaaaacgctcactctccttgatggcgacttcagccgcaaaaatacaggcggttgcactattgagttgatccgccgttaaacgcccttcaatgccgttagcgccttgtttttcaacgtaaacatttacgccgagtttgcgtccggctttttccagatattccgcagccatataggtgtgagcaatacccgccggacaggccgttacgcagacgatagttggcgcgttggaaaaagaggcagaaggttgcgtgcctcccttgtcatccagcgccgagagcaa

SEQ ID NO: 149 - DNA, 609 bp, Homo sapiens
cgctacaaagaatgcatggctaatcaactggccaaatttccatggtaatgcgttcatccatcccctgtgccatcatgatttcctgtaacgcctgcacggtgacggaagcaccacgcacttctttccagctgtgatatcgtaattcatcggcaaccggacgtaacacttcgcgtgccgctttttgtgcagcatcaaaattttcctgccccagattacgatcggcaaaatagcgttccagccaggtgacgcagcccatcgacaggctgaacagctaggtggtttgtgcacccgtgccggttaccagttcagtactggctccgcctatatccaccaccaggcgctgatcggcaccaccagtggtgtgagcaacgccctgataaatcagacgtgcttcctcttcaccgctgatcacctgtaccggacaaccgagaatttcctgcgctttggcaataaaatcacccgcattgacggcaaggcgtaacgtcgccgtagcgacaacgcgaatttgcgagggaggaatatcttgcagacgttcagcaaacaggcgcaaacattgccaaccgcgctccattgcttcattggagagggcattttcgctattcaggccag

SEQ ID NO: 150 - DNA, 750 bp, Homo sapiens
cggccgcgtcgacttcttccatactgactatcgaccacttattagagattctaataattatgtcttagatgagcaaactcagcaggctcctcatcttatgcctccaccattcttggtagatgtagatggaaatcctcatccaaccaagtatcagagattagtaccaggccgagaaaattctgcagatgaacatttgattccacagctgggctatgtggcaacaagtgatggagaggtgattgaacaaattataagcctgcaaaccaatgataatgatgaacgcagcccagaatcgagtattcttgatggaatgataagacagttgcagcagcagcaagatcagagaatgggagcagatcaggatactattccaagaggactttcaaatggtgaagaaacaccccggagaggttttagaaggctgagcttagacattcagtcccctccaaatattggtctgcgtcgtagtggacaagttgaaggtgttcgtcagatgcatcaaaacgctccacgcagtcagattgctacagaacgtgacctgcaggcttggaaacgaagagtggttgtaccagaggtaccactaggcatatttaggaagctggaagacttccgattagagaaaggtgaagaggaaagaaatctttatataataggaagaaaaagaaagactcttcagctctcacataagtcggattcagtgggtttggtatcacagtctagaccaaggacatgtaggcgtaaatatccgaa

SEQ ID NO: 151 - DNA, 810 bp, Homo sapiens
ggaacttttagagacgaaaaacataacaggtgaaaaaatatgctgcatggtattcacaggtgattttaaaagatcagcaaacttaaagatacagcaatagaaactttccaaaatggagtacagaaggaaaaaaagactagggaaaaacaatacaaatacaaaccacaatgcaaaataaatacaaaacagtacaaaaacaatacaaaacaataccaaaaaacaaaaaggccatggaaatgcaaattaaaaaacagtttcaggacacttgcaaagtacagaccaaacagtataaagcactcaagaatcaccagttggaagttactccaaagaatgagcacaaaacaatcttaaagacactgaaagatgagcagacaagaaaacttgccattttggcagagcagtatgaacagagtataaatgaaatgatggcctctcaagcgttacggctagatgaggctcaagaagcagaatgccaggccttgaggctacagctccagcaggaaatggagctgctcaacgcctaccagagcaaaatcaagatgcaaacagaggcacaacatgaacgtgagctccagaagctagagcagagagtgtctctgcgcagagcacaccttgagcagaagattgaagaggagctggctgcccttcagaaggaacgcagcgagagaataaagaacctattggaaaggcaagagcgagagattgaaacttttgacatggagagcctcagaatgggatttgggaatttggttacattagattttcctaaggaggactacagatgagattaaattttttgccatttacaaa

SEQ ID NO: 152 - DNA, 377 bp, Homo sapiens
ccttgtaagactcttggacacacagagggatgggcttcagaactatgaggctctcctaggcctcaccaacctgtctgggcggagtgacaaactccggcagaagatctttaaggagagggccttgccagacatcgagaactacatgtttgagaatcatgatcagctgcggcaggcggccaccgagtgcatgtgcaacatggtgctccacaaggaggtacaggaaaggttcttggctgacgggaatgaccggctgaagctggtggtgctgctctgcggggaggatgatgataaggtgcagaatgcggctgcaggggctctggccatgctgacagcagcacacaagaaactgtgcctcaagatgactcaagtgacaaccc

SEQ ID NO: 153 - DNA, 324 bp, Homo sapiens
gcgtaccagagcttgcggctggagtacctgcagatcccaccggtcagccgcgcctacacgactgcctgcgtcctcaccagcgccgccgtgcagttggaattgatcacaccttttcagttgtacttcattcctgaattaatctttaaacactttcaaatatggagattaatcaccaacttcttattttttgtgccatttggatttaatttcttactatacatgatttttctatatacttaatttctatagcctattcatctgtttatcttatcttttgttctatatctatatatattttctgcttgtttttttactattctcatc

SEQ ID NO: 154 - DNA, 354 bp, Homo sapiens
cgagatggtggaggggggtgaagggaagatgtgcatcaatacagagtggggaggatttggagacaatggctgcatagatgacatccggacccgatacgacacggaggtggatgaggggtccttgaatcctggcaagcagagatacgagaaaatgaccagtgggatgtacttgggggagattgtgcggcagatcctgatcgacctgaccaagcagggtctcctcttccgagggcagatttcagagcgtctccggaccaggggcatcttcgaaaccaagttcctgtcccagatcgaaagcgatcggctggcccttctccaggtcaggaggattctgcagcagctgggcctggacag

SEQ ID NO: 155 - DNA, 413 bp, Homo sapiens
taccgagatagcaaaaattaaaatggaagcaaaaaaaaagtatgaaaaggagttaaccatgttccagaatgattttgaaaaagcttgtcaagcaaaatctgaagctctcgttcttcgggaaaagagtacccttgaaagaattcacaagcaccaagagattgaaacaaaagaaatttatgctcaaaggcaacttttactaaaagatatggatttgctaagaggaagagaagcagagctgaagcaaagagttgaagcttttgaatcgtatcaacttgaactgaaggatgactacatcattagaacctatcgactgattgaagacgataggatcaatatacaaatatctggtcattggcaagagagcccatagctattactcaaataaggaggacctctatcattctggacatcgg

SEQ ID NO: 156 - DNA, 411 bp, Homo sapiens
gtcacgaggaagcttcctattttcatagtagatgcattcacagcaagagcatttcgtgggagtcctgctgctgattgcctcctagaaaatgaattggatgaagacatgcatcagaaaattgcaagggagatgaacctctctgaaactgcttttatccgaaaactgcacccgacagacaactttgcacaaagatcctgctttggactgatatggtttacaccaacgaccgatttacaaatcttgacatcatccatactaccttcaatactctaaccttatttactacatatccctaatacatcattctacctttctacataaccaactccttactctttatctctattaatattccacatacctcatcataaatcttccttctatactccttatacactcctacacattcct

SEQ ID NO: 157 - DNA, 652 bp, Homo sapiens
  misc_feature (1)...(652): n = a,t,c or g
ttttttttttttgtggggggacttcaggaataatttattcaatgctaaataaggggaggagtggcaagtctaaaatacataccctctatgtacattctaatcttgttcattctctacaggtacaacaatatacacattcactcacccaactcaccatttcctggcagctaaaatgacaggatcttctctacaacttatccccacccccatcagtcatacccaccttctggaagtcagatccttcaggtgattgcctactggccacaagggcacccatcatttccgtggcctctgtggtttctatccctgcctttctgggggcagaaatgtctgctgcagttcctccttttggaaatctgaagacttttggaattgcccctgtgtgtgcttcttattgtgcatatgagtgaagaaatcaaacatggtcccacagatggtgttgcagtctttgcaccagtgattgccagcatcataatactcataagcagcagtgggctgatccaactgcttagtggctgactgggggctttcggcaggcttggggctcttagtacgaaacttctcattgtttacttttgattcctagaggggnaaaatctgtacttacaaggaattcaaggcaatctagacttgtcttctgttagaaatagta

SEQ ID NO: 158 - DNA, 423 bp, Homo sapiens
actacgcataggctgaacgtgactgcggaaccgccatgcacttccatgcctatttactggatgcctgatgtgccgcacaggtgcacgactgctaatacatgcccagtggacctgactgactactgtgctcagaacggcttctactgcctggtgtacggattcctgccctacggctccctggaggaccgtctccactgccagacccaggcctgcccacctctctcctggcctcagcgactggacattcttctgggtacagcccgggcaattcagtttctacatcaggacagccccagcctcatccatggagacatcaagagttccaacgtgcttctggatgagaggctgacacccaagctgggagactttggcctggcccggttcagccgctttgccgggtccagccccatccagagcagcatg

SEQ ID NO: 159 - DNA, 420 bp, Homo sapiens
ggcacacgagcactgccaggctgctcctgcatcggggcgctggcaaggaggccgtgacctcagacggctacaccgctctgcacctggctgcccgcaacggacacctggccactgtcaagctgcttgtcgaggagaaggccgatgtgctggcccggggacccctgaaccagacggcgctgcacctggctgccgcccacgggcactcggaggtggtggaggagttggtcagcgccgatgtcattgacctgttcgacgagcaggggctcagcgcgctgcacctggccgcccagggccggcacgcacagacggtggagactctgctcaggcatggtgcccacatcaacctgcagagcctcaagttccagggcggccatggccccgccgccacgctcctgcggtgaagcaagacctagctggctg

SEQ ID NO: 160 - DNA, 417 bp, Homo sapiens
aaagtttctgaaagaccttgagaaacagtacaacaaagaggaacctcacttaagtgaaataggatcttgctttcttcaaaatcaagagggctttgccatctattccgagtactgcaacaaccacccgggcgcctgcctggagctcgccaacctcatgaagcagggcaagtacagacatttctttgaagcctgccgcctgctgcagcagatgattgacatcgccatcgacgggttcctgctcacaccagtgcagaagatctgcaaatacccgctgcagctggccgagctgctcaagtataccacacaggaacacggtgattacagcaacataaaggcagcatatgaggccatgaagaatgtggcctgtctgatcaacgagcgcaagcgcaagctggagagcatcgacaagatagctcg

SEQ ID NO: 161 - DNA, 770 bp, Homo sapiens
tgaagggagaccggctcggtctctctctctcccagtggactagaaggagcagagagttatgctgtttctcccattctttacagctcaccggatgtaaaagaactctggctagagaccctccaaggacagaggcacagccacacgggagtgaaatccacccctggacagtcagccgcaatactgatgaagctgagaagcagccacaatgcttcaaaaacactaaacgccaataatatggagacactaatcgaatgtcaatcagagggtgatatcaaggaacatcccctgttggcatcatgtgagagtgaagacagtatttgccagctcattgaagttaagaagagaaagaaggtgctgtcctggccctttctcatgagaaggctctcccctgcatcagatttttctggggctttggagacagacttgaaagcatcgctatttgatcagcccttgtcaattatctgcggtgacagtgacacactccccagacccatccaggacattctcactattctatgccttaaaggcccttcaacggaagggatattcaggagagcagccaacgagaaagcccgtaaggagctgaaggaggagctcaactctggggatgcggtggatctggagaggctccccgtgcacctcctcgctgtggtctttaaggacttcctcagaagtatcccccggaagctactttcaagcgacctctttgaggagtggatgggtgctctggagatgcaggacgaggaggacagaatcgaggccctgaaaca

SEQ ID NO: 162 - DNA, 1165 bp, Homo sapiens
ttttttttctagtataaataaagttttaatgagaaaccaatattgatttttaacaagtgattcgattctgtgaacttgaaaaatgatttgggaaggagtgggttaatgaggctaatgaggaggcttttgtggattagatgataactggagtggtttggtcataaaacttcatagtgcaaaatttcctagtaaagcccttccttctttcctttttcccctctttttcttttcggtctctccctttctttatgggcttttcctaaacactttcttcttttcttatgacctggatctcagtttcactatgcacttccctaacctatttctcctaatttcagttaaggtaaaaagtccacaggtatcagaactggaacctgaagttaggttaaaatgcggtgacaaaagaagcagacttcattatgttcttaagagttcaggctcttaagatttattacccctttcttttgtcctctcctggagaatagaatgagccaagatcagtccttacttgagcaaatcactccagcatcctcagcatgatcacagttatgctttccccatccttgatgtttgcagttccagagagctgactcatttccgttgcatataagatcatcaaaccagattggtccagagccttctccaaaattagatgaaccagagaaactgacagcacttccacattcaagttgtctacaaatgacagatgcatgatctatgttgaagttatcatcacacactgttccccaccgtccttggaatttgatctctattcttccagaacacatattccctccacgcgtcagcctcatttccaaattggatccatctggagcagagaaaagaccagagttcagaagttacattcatttagaagtgattttagaaaagaagtttcctctggacacttgggattttatgttgtccttaaaatggtgcctgattttggacattgcccagctccacacagtagagaattttaatatgttaaaatctaggaagcaattaggatttttatctatatctacttacaaaggaaaatgtttacaggttaaagtttttaaactttctgttttgtttccacctattactaggacagatgtaaatactcttttttgtacagaaatagataaattcgactcaagttatttaaatttgactcagg

SEQ ID NO: 163 - DNA, 419 bp, Homo sapiens
ttttttttttttcaaattttaattaaaatctttattgaataaaaatgtttcagactaggtaagactaagaaagcagaatgttttacatctctaaaaaatattaaagctaaatctctataaatgcagtacaaagaaaagcctacagcttaagacacctctccctcccatccatacaatttggaatatcaactgtgtacaacaaatgtactcaagtttataatgtccccaaattcagaattttctcctgttccaatgacaacaccctttgctttgccacatctgaccagtgttcccataaaggcaatgttacttctcgatgcaagatctccattagttgcagctggctgaggagctgtcaccttagaacaaggcgttgtctcacctgtcaagctggactcatcaatggaaagatccacagc

SEQ ID NO: 164 - DNA, 597 bp, Homo sapiens
  misc_feature (1)...(597): n = a,t,c or g
cggacgcgtgggcggacgccttttggaaaacatttgggccatagctgtgtgtcctgaacgtctagcgcaggctagatatgacattaacaactcaattgttggcaacaaggccccacgaggcacaaaggcacggaactttaggacactgctgccattgggctttggagaccagccttgcctaatcaaccaaggagatctcttgtttcaggctgatttgggtggaagttgtatggccccagcccgcatgtttacatgctccaaaagaggatggccacacaactaatctctcctttgtcttttcccaggcacatccactgtagtatgcaagcctatagtcattgaaactcagctctatgttattgtggcccagctgtttggtggctctcacatctataagcgagacagttttgcaaataaattcataaaaatccaggntattgaaattctcaaaatccgaaaacccaatgacattgaaacattcaagattgaaaacaactggtactttgttgttgctgacagttcaaaagctggttttactaccatttacaaatgggaacgggaaacgggtttctactcccatcaatcctttacacgggt

SEQ ID NO: 165 - DNA, 403 bp, Homo sapiens
agaggaccccgaggagctaggccacttctacgactaccccatggccctgttcagcaccttcgagctgttccttaccatcatcgatggcccagccaactacaacgtggacctgcccttcatgtacagcatcacctatgctgcctttgccatcatcgccacactgctcatgctcaacctcctcattgccatgatgggcgacactcactggcgagtggcccatgagcgggatgagctgtggagggcccagattgtggccaccacggtgatgctggagcggaagctgcctcgctgcctgtggcctcgctccgggatctgcggacgggagtatggcctgggagaccgctggatcctgcgggtggaagacaggcaagatctcaaccggcagcggatccaacgctacgca

SEQ ID NO: 166 - DNA, 1130 bp, Homo sapiens
gtgctgtcagagggaaggtctagggctgaaggctgttgttcagattcttttgtcccacggcaggaacggcctgccaggggagcccgcgagctcccagggcctttctgctgcttcctctaccccagtatttcacttggctctccaaattgactcagctccagataacattgactgggtagaaatgctatttaataaaaatatggtgactgaacgcttacagaatgtcatggttcttgagcagtgtttcagtgattcttcttctctttatagattcctcacctattcctacctcttggccttcaatgtgtggcttctgcttgcacccgtgaccctgtgctatgactggcaggtcggcagtattcctctggtagagaccatatgggacatgcggaacttagccaccatctttctggcggttgtgatggccttattgagcctgcactgcttagcagcctttaagagactggagcacaaggaggttttagtcggcttgttgttcctggtgttcccgttcattccagccagcaacctcttcttcagggtgggttttgtggtggcggagagagtcctttacatgcctagcatgggctactgcatcctttttgtgcatggactgagcaagctctgcacttggctgaatcgatgtggggccaccaccctgattgtgtccactgtgttgctgctgttgcttttctcttggaaaactgtgaaacagaatgaaatttggctgtcaagagagtccctattcaggtctggagttcaaactctgccccacaatgccaaggttcactacaactatgccaatttcctgaaggaccaaggtcggaacaaggaagcgatctaccactacagaacagctctcaataataataaagcttgggattatctatgctggagattcagaaaaacactgacagatctgccatagacctccagagctctccgactgttcggttaccctggagaaggtttctaacattctaccttgtgtgatgggagtagaaagtccagagaccacccaacaagtcagcccttcctacacaaaaactcccaagaaatgcctcagctaataagccccgaaagagaaatagtgattctccctgaataaagtcaagataataatgtgtaaa

SEQ ID NO: 167 - DNA, 695 bp, Homo sapiens
cgtcgacttttttttccttgggaagcaggagtttatttttatccttttgtaagtattaactcggtaatcacaacaaacacggagcaatctcaatgctgtttatccggaggacagtctgcggggtcgtgacgattcttttcttcttgaagtttttccttttcctgaatctcataatgattcttggccatgattctgtcttttcaatgactgtggcttctactcgaacaagatcctttccgaggagtggcttgccaagcagcgtgaagttgtctgccccaaccagcaggaccttctccagtcgaattctctctccacacgcaaggtctagttcatttccaattaagatcaggtcttcagaggtcaccttccactggcggctggcaaagtgcaccacggcaaagagcctgccatactgccccgtgacgatcatctcattcaccttcttcacgacctctgcatggtgtctggtctcctcaactgggtctggcagaacaacttctggccaaggtggtgaactcagggatgttttaggaacatatcctggtagatatgaagtgctctgtgaattgaaccttcgagaagcagaccaaagggaggctgctccgggccccgaaggtctcaggatgctgtggctgcacgcggacgccagccgccctaaggtgaccgtcagggaagatgctgccgatgccgccgcc

SEQ ID NO: 168 - DNA, 366 bp, Homo sapiens
  misc_feature (1)...(366): n = a,t,c or g
gcatctacaggtagcagccagggtattcatgccactgcaggctgtggacagtgcacctaagcctctaaaggggcaggctcaggcacctcaacgactacaaggggcagctcgggtgttcatgccactacaggctcaggtgaaggctaaggcctctaaacctctacaaatgcagattaaggcacctccacgactacggagggcagccagggtgctcatgccactacaggcacaggttagggcacctaggcttctgcaggtacagtcccaggtatccaaaaagcagcaggcccagacccagacatcagaaccacaagatttggaccaggtaccagaggaatttcagggtcaagatcaggtactccgacn

SEQ ID NO: 169 - DNA, 1053 bp, Homo sapiens
cagaacttggaagacagagaagttttgaatggtgtacagacagaactactaacttcgccaagaactaaggacacattgagtgatatgacaagaacagtggagatttctggggaaggaggcccattgggaatacatgtagtgcccttcttttcatctctgagtggaaggattctaggactcttcatccgaggcattgaagacaacagcaggtccaagcgggagggactatttcacgaaaatgaatgtattgtaaaaatcaacaatgtggatctcgtagacaaaacctttgctcaggctcaagatgtcttccgccaggcaatgaaatctccaagtgtgctcctccacgtgcttcctccacaaaaccgtgaacagtatgaaaagtcagtcattggctctcttaacatttttggtaataatgatggcgttttgaaaaccaaagtgccgcctcctgtccatggaaaatcgggactaaagacagcaaatctcacaggaaccgatagtcctgaaacagatgcatcagcttccctgcaacaaaacaagagtccccgagtaccaaggctgggaggaaaaccatcctctccctcactctcgcctctcatgggatttggcagcaataaaaatgcaaagaaaattaagattgacctaaagaaaggccctgaaggacttggtttcactgtggttaccagagactcttccatacatggtcccggtcccatttttgtaaaaaacattttaccaaagggagcagcaataaaagatggccgcctacaatcaggggacagaattttggaggtaaatgggagagatgtcaccggacgaacccaggaagagcttgtggccatgctcaggagcaccaagcagggggagacagcatcgctggtcattgcccgccaagaaggacattttctgccccgagagttggtaatgttcagatctcagtctcactgaatttttaatgccgagcttaatacactcaatgaactcattatagctgagaaacgagttctaaatcacaggcttcattcataaccaaaattgaatcacactcagggt

SEQ ID NO: 170 - DNA, 363 bp, Homo sapiens
ggctttctgggaggaaggttttgtaacgtcatccccaagctgctctttgctttcacccagggactcttcactggacgattccacagcatcttcttccacaatgagagggctgaggccagggagaacaggcgcagcctgggaatctgtgtgcaaagcctgcagcagttgttcgagcttctcgtttaggactgaacatttactggccacggcatcagctacaacggcattttccaaggttttgtcatacgtcttttctactttggcaacgaagtcctttacagtttcacatagcgtcttggcagaagatatgaccactgcatgttcatcagaattgaggatttttgtaagatgcgttgcaactgg

SEQ ID NO: 171 - DNA, 675 bp, Homo sapiens
cagggtcgaggcctgtaattctccccagccatccatcgtacatctctccaacaaacccagatatgtgggctcctagacttactccgatcatgtaaatgtcatcaagagaagctccttctgccaacatctggtcaataaattccttcaagaccatggctggggagaattacaggcctcgaccctgcaggccctttattcaacgggaaacctcaccaagacagattagatcccagtgatgcgcagtttgttgatgtcatccattccgacactgatgcactgggctacaaggagccattaggaaacatagacttctacccaaatggaggattggatcaacctggctgccccaaaacaatattgggaggatttcagtattttaaatgtgaccaccagaggtctgtatacctgtacctgtcttccctgagagagagctgcaccatcactgcgtatccctgtgactcctaccaggattataggaatggcaagtgtgtcagctgcggcacgtcacaaaaagagtcctgtccccttctgggctattatgctgataattggaaagaccatctaagggggaaagatcctccaatgacgaaggcattctttgacacagctgaggagagcccattctgcatgtatcattactttgtggatattataacatggaacaagaatgtaaga

SEQ ID NO: 172 - DNA, 361 bp, Homo sapiens
agttaattcaacacaaatctgcagtcgagtatgctcaaagtcacctcagcttggtgagcatgtgcaaggagtctcacaagtgttcagagcccaagatggaatggaaggtgaaaattaggagcgacgggacacggtacatcacaaagagacccgtgcgagaccgaatcctgaaggaacgtgccttaaagatcaaggaagagcggagtggcttgaccacagacgatgacaccatgagcgagatgaaaatggggcgctactggagcaaagaggagagaaagcagcacctggttaggggcaaagagcagcgccgtcgccgtgagttcatgatgcgaatcaggttaaagtgtctcaaggagagccc

SEQ ID NO: 173 - DNA, 387 bp, Homo sapiens
ggcacgagaatattatcaatgcagataccttttgtgggattccagccaatcagaacaagtgaacacatggcagctgcaggtgtctttgcattgctgcaagcttatgctttcttgcagtatctgagagaccgattaacaaaacaagagttccagacccttttctttttgggtgtatcactagctgcaggtgctgtgttccttagtgtcatctatttgacttatacaggttacattgcaccatggagtggcaggttttattcattgtgggatactgggtatgcaaaaatacacattccaattattgcatcagtgtctgagcatcaacctacgacttgggtgtctttcttctttgatctacatattcttggatgtaccttcccagcaggc

SEQ ID NO: 174 - DNA, 443 bp, Homo sapiens
  misc_feature (1)...(443): n = a,t,c or g
aggcnnnnnnnntttgctcgtcgtcactagtccgtgcggtggaattcctgcggactactgcagtggagcttgactcttaatgggtcccaaagcaaaaaagtctggcagtaagaaaaagaaagtcaccaaagctgaacgattgaagctgctacaagaggaggaggagagacgactgaaagaggaagaggaagcccgtttgaaatatgagaaagaagaaatggaaaggcttgaaatacagcgaattgagaaagaaaaatggcatcgacttgaagcaaaagatctagaaaggagaaatgaagaacttgaagaactttatttattagagaggtgttttcctgaagcagagaaattgaaacaggaaactaaattgctttctcagtggaagcactacattcaatgtgatgggagtcctgatccttcagtagcccaagaaatgaacacgt

SEQ ID NO: 175 - DNA, 486 bp, Homo sapiens
  misc_feature (1)...(486): n = a,t,c or g
agtcccggccncccgncaatgagttcataggcaagngncgnggaatttatgctcaagagttaaggctgaggttggaggcgggtagtttgtggtgctgtctaaccagggcaggggcagagatctcaggaagttgcctgagcagccctaacttggtcccagccacaggaattctggccaatggagatgcagcccatagtcacagacatggtgacagtgcactgggtggccgagagcagcacagtgggctggctctgtgccctcttcagggtcacacatgtaggtgttggggccacagggcatggggtggtgtgtgggagaagagtcctgtgtgggctccctctgccctctccagcaccaatgccgatcatgtctttgcccgagggggagagtaggaaggaaagggaggtgcagagactgcagtttccatacctggagcctgggcatgagctgcccgccaccaccctgcttgccttcctggctgctgtg

SEQ ID NO: 176 - DNA, 587 bp, Homo sapiens
aagagggctctgtgaatttcaagtttggggttctttttgccaaagatgggcagctcactgatgatgagatgttcagcaatgaaattggaagcgagccttttcaaaaatttttaaatcttctgggtgacacaatcactctaaagggctggacgggctaccgtggcggtctggataccaaaaatgataccacagggatacattcagtttatactgtgtaccaagggcatgagatcatgtttcatgtttccaccatgttgccatattccaaagagaacaaacagcaggtggaaaggaaacgccacattggaaacgatatcgtcaccattgtgttccaagaaggagaggaatcttctcctgcctttaagccttccatgatccgctcccactttacacatatttttgccttagtgagatacaatcaacaaaatgacaattacaggctgaaaatattttcagaagagagcgtaccactctttggccctcccttgccaactccaccagtgtttacagaccaccaggaattcagggactttttgctagtgaaattaattaatggtgaaaaagccactttggaaaccccctgtatt

SEQ ID NO: 177 - DNA, 427 bp, Homo sapiens
ggcacgagcaggaagcaatgaggctccccaagaacacacctgaggaaaaggacaggtgagcctggagggccggccgcaccgtgggcctctgtgtctggggagttggtggccaggatcccgagtacctgggtgctgtgacggggcgtggttggcctgggcgtgctgggtgtttgggaatgacttcccatcgcccgcttctgcagcctgctcagccctgttggggtgcagtgtgtccactgcctgcctgtgtgtgccgctgtgctcaggctctcctcttgctcctttcaggcgcacggcggccctacaggagggtctgaggcgggcagtctctgtgccgctgacgctggcggagacggtggcctcgctgtggccggcgctgcaggaactggcccggtgtgggaacctggcctgccggtcagacctccag

SEQ ID NO: 178 - DNA, 409 bp, Homo sapiens
ggctttgcagagcactctgggggcggtgtggctagggcttctcctcaactctctctggaaggttgcagaaagcaaggaccaagtgtttcagccttccacagcggcatcttcagagggagctgtggtggaaatcttctgtaatcactctgtgtccaatgcttacaacttcttctggtaccttcacttcccgggatgtgcaccaagactccttgttaaaggctcaaagccttctcagcagggacgatacaacatgacctatgaacggttctcttcatcgctgctcatcctccaggtgcgggaggcagatgctgctgtttactactgtgctgtggaggtgcctaacaccgacaagctcatctttgggactgggaccagattacaagtctttccaaatatccagaaccctgac

SEQ ID NO: 179 - DNA, 408 bp, Homo sapiens
cccacgcgttcgtccacgcgtccgccctctctgttcgtccacgcgtccgcaaaaggaggcgagaaggaagagggagatgatggccactatcttatgagaacggaatcacatactggcctaaaaaaggggggaaatgctaacctggtatttatgcttaaaagaaacacggagccaaagaagggctcataccattttgacctggagcgactgcgtgctgcccacatactgtttgagagggaacaggagcaccttgcgccgggaggcatatccatgcccctgcccccacctttgcctctacccgcctgtttgggttaaccaagcccaaggataataatgtcatatattataagatctaagccttccgctctcaacccggtgatggtcccccgtcacaagtctcatcctagg

SEQ ID NO: 180 - DNA, 400 bp, Homo sapiens
aaaccagcataaagagagcaattgaaaccacagatgttacaaggagctttggatgggatagcagtgaggcttggcagcagcatgatgtacaagaactatgcagagtcatgtttgatgctttggaacagaaatggaagcaaacagaacaggctgatcttataaatgagctatatcaaggcaagctgaaggactacgtgagaagtctggaatgtggttatgagggctggcgaatcgacacatatcttgatattccattggtcatccgaccttatgggtccagccaagcatttgctagtgtggtgtgtacctttcacctgactgcttgtgtatccttacacagaatacataatagcacagtggtataatctcttgtaagggaagtatcatcctagatacacct

SEQ ID NO: 181 - DNA, 386 bp, Homo sapiens
ctatggcctgggggcacattttgggagactctttatccaggcgggcattaatgaaaatgatttttatgacggagcgtggtgcgcgggaagaaatgacctccagcagtggattgaagtggatgctcggcgcctgaccagattcactggtgtcatcactcaagggaggaactccctctggctgagtgactgggtgacatcctataaggtcatggtgagcaatgacagccacacgtgggtcactggtaagaatggatctggagacatgatatttgagggaaacagtgagaaggagatccctgttctcaatgagctacccgtccccatggtggcccgctacatccgcataaaccctcagtcctggtttgataatgggagcatctgcattg

SEQ ID NO: 182 - DNA, 493 bp, Homo sapiens
agaaccaaaacagatgtgtacatcctgaatttggctgtagcagatttactccttctattcactctgcctttttgggctgttaatgcagttcatgggtgggttttagggaaaataatgtgcaaaataacttcagccttgtacacactaaactttgtctctggaatgcagtttctggcttgtatcagcatagacagatatgtggcagtaactaaagtccccagccaatcaggagtgggaaaaccatgctggatcatctgtttctgtgtctggatggctgccatcttgctgagcataccccagctggttttttatacagtaaatgacaatgctaggtgcattcccattttcccccgctacctaggaacatcaatgaaagcattgattcaaatgctagagatctgcattggatttgtagtaccctttcttattatgggggtgtgctactttatcacagcaaggacactcatgaagatgccaaacattaaaatatctc

SEQ ID NO: 183 - DNA, 592 bp, Homo sapiens
cacgccaagcttggcacgaggctttcaaagtgaggaaagaaattcttactgttatctgttgtcttctggcattttgtattggcctgatatttgtgcaacgctctggaaattactttgttacaatgtttgatgattattctgctacactgcctctgctaattgtagtcattttggagaatattgctgtatgctttgtttatggcatagataagtttatggaagacctaaaagatatgctgggctttgctcccagcagatattactactatatgtggaaatatatttctcctctaatgctattatcattgctaatagctagtgttgtgaatatgggattaagtcctcctggctataacgcatggattgaagataaggcatctgaagaatttctgagctatccaacatggggactggccgtttgtgcctctctggatgtctttgcaatactccccgtccctgtagctttcattggtcgtcgcttctcccttatagatgatggagctggccctttttgctccgcggcctatactaccactgggtgccggacgccatacctttaaaatcataggcctgtagaacccacgcccttccc

SEQ ID NO: 184 - DNA, 632 bp, Homo sapiens
  misc_feature (1)...(632): n = a,t,c or g
ggcacgagctaacagtggctgcagctgaccgtgggcagccaccccaaagctcagtcgtgccagtcactgtcactgtactagatgtcaatgacaacccacctgtctttacccgagcatcctaccgtgtgacagtacctgaggacacacctgttggagctgagctgctgcatgtagaggcctctgacgctgaccctggccctcatggcctcgtgcgtttcactgtcagctcaggcgacccatcagggctctttgagctggatgagagctcaggcaccttgcgactggcccatgccctggactgtgagacccaggctcgacatcagcttgtagtacaggctgctgaccctgctggtgcacactttgctttggcaccagtgacaattgaggtccaggatgtgaatgatcatggcccagccttcccactgaacttactcagcaccagcgtggccgagaatcagcctccaggcactctcgtgaccactctgcatgcaatcgacggggatgctggggcttttgggaggcttcgttaccacctgtnggaggctgggccaggacctgagggccgtgaagcatttgcactggacagctcaacaggggagttgggtcaacttttgaactcgcggaatgnttga

SEQ ID NO: 185 - DNA, 671 bp, Homo sapiens
cctagataaattactggaccgcatggaaaactacaacattttcaatgaatatattttaaagcaagttgcagcaacatatatcaagcttgggtggccgaaaaataattttaatggatctcttgttcaagcatcctaccaacatgaagaactacgtagagaagttataatgctggcctgcagttttggcaacaagcactgtcaccaacaggcatcaacacttatttcagattggatttccagcaacaggaacagaataccactaaatgttagagacatcgtatactgtacaggagtgtcactactggatgaggatgtctgggaattcatatggatgaaattccattccaccacagcagtttctgagaagaaaatattattggaagccttaacttgcagtgatgacaggaatttattaaacaggcttctaaatctgtcactgaattctgaggtggtgctggatcaagatgcaattgatgtcataatccatgtagctcgaaatccacatggtcgagaccttgcctggaagtttttcagggataaatggaagatattaaataccaggattaggcagaaaacattagaatttgactttgcggagccactcattttagcttttcccataatactttatacagccatagataatcctcctctggtccgtgaacatgagg

SEQ ID NO: 186 - DNA, 400 bp, Homo sapiens
gggcccaatgtgtgataaacactcagcttttgcggaaaaattccatgctggtttcatcgactacattgtccatccattgtgggagacatgggcccatttggcactgcctgatgctcaagacattctttataccttagaagataacaggaactgggttgacagcatgatacctcaaagtccctcaccaccactggacgaacagaacagggactggcaggggctgttggagaaccttcatgttgaactgactcttgatgaggaagattctgaaggacccgaaaaggagggagagggacaaacctatttcaccagctcaaagacgctttgtgggattgtaccacaaaacactgattccctgggagagactggcatacacatttgcgcacatgacaagtccccc

SEQ ID NO: 187 - DNA, 486 bp, Homo sapiens
caatattgtagatgattttttatgaggctaaacttatttcattttgcttgtaccaaaatgaaaacaactttcttatgttacatgatgccaggctatatcctaggtaaggtcatgggtggggaatgttactttaactggcactttattcagtgctacaagtttattaagaggtgtttcaggcattccaacaaaaatttaaaatataactttgtggagttgctattgatttaattgctttagagttgcttcagattcatttcttgaaaattcttcccttctgattatgattttacctctgaggaatgccactcaagaatttataattaggccaggtgcagtggcttacacctgtaatccaagcactttgggaggctggggtgggtggatcacgaggtcgggagttcgggaccagcctggacaacatggcggaaccccatcttaaaaatacaaaaattagccaggcttgctggtgggtcgacgcagccg

SEQ ID NO: 188 - DNA, 721 bp, Homo sapiens
ctgcccacctgggtggcgcgtggcttacgcaacggtcactgggctcctgggccgctcccgggccagcgagggctgcgaaagaagttgtagcatgcataccacagaatcaaaaaatgaacatttggaggatgaaaacttccaaacatctacaactcctcagttttgttctaggtgctgtctctcctgctgttgttgtcccttacatgatggtgctgcaagaaaatggatatggtgttgaggaaggcattccaaccttattaatggctgctagcagtatggatgacattctggctatcactggattcaatacatgcttgagcatagtcttttcctcgggctgtgctaggtcctctggctctagaaacagcaagagtctccgcaccccacttggaaccatatgcgaaggatgtgatgacagtagcatttttagccatctcgatcacagctccaaatggagctctacttatgggcattctggggcctaaaatgcttacacaccattatgatccaagcaaaataaaactgcaattgtcaacattagaacatcattaaaaaatttacctgtcatcatctgcctgcttcttttaatgaattatttcacatgacagaagaattttaaagtagaaatatgtagggcctgtacagaaaatccaggatttagtaaacatgtgatttcagtacagggcttttcttgaactttttactccaaaaaaaaaaaaaa

SEQ ID NO: 189 - DNA, 412 bp, Homo sapiens
ggaattcctgagttccaaccagatcacccaactgcccaacaccaccttccggcccatgcccaacctgcgcagcgtggacctctcgtacaacaagctgcaggcgctcgcgcccgacctcttccacgggctgcggaagctcaccacgctgcatatgcgggccaacgccatccagtttgtgcccgtgcgcatcttccaggactgccgcagcctcaagtttctcgacatcggatacaatcagctcaagagtctggcgcgcaactctttcgccggcttgtttaagctcaccgagctgcacctcgagcacaacgacttggtcaaggtgaacttcgcccacttcccgcgcctcatctccctgcactcgctctgcctgcggaggaacaaggtggccattgtggtcagctcgctggactgg

SEQ ID NO: 190 - DNA, 400 bp, Homo sapiens
  misc_feature (1)...(400): n = a,t,c or g
tggttggaggaggtagatcaccctttctgcgggggacgatttcgtcggtggtaggctgctaccatgaggttgaatcagaacaccttgctgcttgagagttttgggnnccnccgaccctacacctcggagcatgcccccacgtaccaccagtggatgaaagcagatgagcttctgcgttggacaacctccgagccgctgaccctggagcacgagtatgccatgcagcgcacctggctggaagatgcatacgagtgtaccttcattgtgctggatgccgagaagcggcacgcccagccaggcgccaccgaagagagctgcatggtgggagatgtgaacctcttcctcacagatctagaagaccttaccttgggggagatcgaggtcttgattgcagaacccc

SEQ ID NO: 191 - DNA, 469 bp, Homo sapiens
tgtttggaccgcgctgcaggaattcggcacgagcggaatgttatttatatcaatgaaactcacacaagacaccgcggatggcttgcaagacgcctttcttacgttctttttattcaagagcgagatgtgcataagggcatgtttgccaccaatgtgactgaaaatgtgctgaacagcagtagagtacaagaggcaattgcagaagtggctgctgaattaaaccctgatggttctgcccagcagcaatcaaaagccgttaacaaagtgaaaaagaaagctaaaaggattcttcaagaaatggttgccactgtctcaccggcaatgatcagactgactgggtgggtgctgctaaaactgttcaacagcttcttttggaacattcaaattcacaaaggtcaacttgagatggttaaagctgcaactgagacgaatttgccgcttctgtttctaccagttcatagatcccata

SEQ ID NO: 192 - DNA, 475 bp, Homo sapiens
  misc_feature (1)...(475): n = a,t,c or g
aaggccggggnaatgagactgagagcctagcaagngcggtggaattcgcctcctgctgactggcacacagctctatgggcgattcggctctgccatcgcacccctgggcgacctcgaccgggatggctacaatggtgagggaagagaggagccctacttgctgcagaggggttaacagccactcaaaaagcatggagttggcctgagggcagccagaaccaggatgggttttaagcatataagtatgtggcttatacacatggggtgctgagtggagagcagatgggagagttgaagactaattaggaagtgtttgccttaatccaagcaagagacaatgaccacctggatgtggattttggcagtggagttatagatgggagtgacttcacagatatttaggactcggattattatgacttggtgggagactggatgtggggccaggggagaggatggagttgggtgcctgtgt

SEQ ID NO: 193 - DNA, 400 bp, Homo sapiens
agaatactttccaaactccatatggaggtcacttttctccacaatggatctcggggatattggattttatacatacagaatattacaagctctttcatatacgcattcaaagggaattatgcatagagatgtcaaaccattaaacattctttgcaattcgcctagaaacaaagttatccttgctgactggggcctggccgaattttatcacccaatgagaaagtattctgtccacgtcgcgacaagatattacaaatctcccgaaattcttcttgattacgaatattacgattactcgctcgatatatgggctgttggggttatactcctcgagcttttaactctcaaactccacgttttcgaaggcggagacaacgagcaataaattgactccattggg

SEQ ID NO: 194 - DNA, 409 bp, Homo sapiens
  misc_feature (1)...(409): n = a,t,c or g
tnnnnnccagccctgagccctgagacgctcgctttctggttggcaatggaaagtcttagcaggagttccacgttcagcttttctttggagaattctgatggtgaaggaaaggagtgggtaagatgccaacgtcagaaggaagaccaggacaagaaaggagtgactgggtgacatcctataaggtcatggggagcaatgacagccacacgtgggtcactgttaagaatggatctggagacatgatatttgagggaaacagtgagaaggagatccctgttctcaatgagctacccgtccccatgggggcccgctacatccgcataaaccctcagtcctggtttgataatgggagcatctgcatgagaatggagatcctgggctgcccactgccagatcctaataattatta

SEQ ID NO: 195 - DNA, 675 bp, Homo sapiens
atgggggttgcctctgactggaccaagaggattgagtaccagcctggctccgggagcatgcccctgttccccagcatccacctggagacgtgcgatggagccgtgtcttccctccagatcgtcacagagctgcagactaattacattgggaagggttgtgaccgggagacctactctgagaaatcccttcaaaagttatgtggagcctcctctggcatcattgacctcttgccatcccctagcgctgccaccaactggactgcaggactgctggtggacagcagtgagatgatcttcaagtttgacggcaggcagggtgccaaaatccccgatgggattgtgcccaagaacctgaccgatcagttcaccatcaccatgtggatgaaacacggccccagccctggtgtgagagccgagaaggaaaccatcctctgctactcagacaaaaccgaaatgaaccggcatcactatgccctgtatgtgcacaactgccgcctcgtctttctcttgcggaaggacttcgaccaggctgacacctttcgccccgcggagttccactggaagctggatcagcaggctctggccaaggtggatggacagccaggtaaatctattaccaggcagctccaggagatgcctgtgacaatccagggcatctcactaaagccatcataa

SEQ ID NO: 196 - DNA, 396 bp, Homo sapiens
tttcgtgggacgcctgtcagcgggctcaccaaccgggacaccctggctgtcatccgccacttccgcgagcccatccgtctcaagactgtgaaaccaggcaaagtcattaataaagatttgcggcattacctaagtcttcagtttcaaaaaggatcaattgaccacaaactgcagcaagtgatcagagataatctctacttgagaaccattccatgcactacaagggcccccagggatggagaagtaccaggagtggattataatttcatttccgttgaacagttcaaagcactggaagagagtggagcattgttagaaagtgggacatatgatggaaacttctatggaactcccaagcctccagcagaacccagcccttttcagccagatccagtg

SEQ ID NO: 197 - DNA, 594 bp, Homo sapiens
  misc_feature (1)...(594): n = a,t,c or g
attcggcacagggccgaggactgctccggccgcaccatgcnccagctggccattgagatcggggtgcgagccctgctcttcggagtcttcgtttttacagagtttttggatccgttccagagagtcatccagccagaagagatctggctctataaaaatcctttggggcaatcagataacatacctacccgcctcatgtttgcaatttctttcctcacacccctggctgttatttgtgtggtgaaaattatccggcgaacagacaagactgaaattaaggaagccttcttagcggtgtccttggctcttgctttgaatggagtctgcacaaacactattaaattaatagtgggaagacctcgccccgatttcttttaccgctgctttccagatggagtgatgaactcggaaatgcattgcacaggtgaccccgatctggtgtccgagggccgcaaaagcttccccagcatccattcctcctttgccttttcgggccttggcttcacgacgttctacttggcgggcaagctgcactgcttcaccgagagtgggcggggaaagagctggcggctctgtgctgccatcctgcccttg

SEQ ID NO: 198 - DNA, 404 bp, Homo sapiens
aaacttgtaccactgtggtagtaatccctcgcatgttggtggactttctatcagagagcaagaccatttctcttcctgagtgtgccacacagatgtttttctttctgggctttgcatccaacaactgtttcatcatggccgctatgtcctacgaccgctacacggccatccacaacccactgcagtaccacacccttatgacaagaaagatctgcttgcagatgatgatggcttcttggatggttgggttcctgttttctctgtgcatcatcgtcactgtattcaacttgtctctttgcgacttgaacactatccagcactatttctgtgatatctcaccagtggtctcccttgcttgtaattacactttctatcatgaaatggctatttttgtgctctctgcc

SEQ ID NO: 199 - DNA, 377 bp, Homo sapiens
  misc_feature (1)...(377): n = a,t,c or g
cttacccagatgttctttattcatgccctctcagccattgaatccaccatcctgctggccatggcctttgaccgttatgtggccatctgccacccactgcgccatgctgcagtgctcaacaatacagtaacagcccagattggcatcgtggctgtggtccgcggatccctcttttttttcccactgcctctgctgatcaagcggctggccttctgccactccaatgtcctctcgcactcctattgtgtccaccaggatgtaatgaagttggcctatgcagacactttgcccaatgtggtatatggtcttactgccattctgctggtcatgggcgnggacagaatgttcatctccttgtcctattttctgataatacg

SEQ ID NO: 200 - DNA, 409 bp, Homo sapiens
cccacgcgtgcggcctcagcaacgaaaaatgtctttttttttcaagactgagctaggagaaaagctggtgactaaattcttatttgagactgatttctcagatgatccaatgcttccttcacctgaccaactcaaaaagaaagccccttttacaaacaagaagctaaaagcccatcagacgccagtggatatcttaaagcaaaaggctcatcagttagcatctatgcaagtgcaggcttataatggtgggaatgccaacccccgacctgccaataatgaggaagaggaagatgaggaggacgaatatgattatgactatgaatccctttctgatgacaacattctggaagacagacctgaaaataaatcatgtcatgaccagcttcagtttgaatataaagaagaaatg

SEQ ID NO: 201 - DNA, 512 bp, Homo sapiens
cgatttcgtgggaagctcagattgcggaaatcattcagtgggtcagtgacgagaaagatgcccggggttaccttcaagctcttgcttccaagatgaccgaagagctcgaggctttgaggagttctagtctggggtcaagaacactggacccgctgtggaaggtgcgccgcagccagaagctggacatgtccgcgcggctggagctgcagtcggccctggaggcggagatccgggccaagcagcttgtccaggaggagctcaggaaggtcaaggacgccaacctcaccttggaaagcaaactaaaggattccgaagccaaaaacagagaattattagaagaaatggaaattttgaagaaaaagatggaagaaaaattcagagcagatactggtaaattaatgttgtgcgattctgcattatttgaatataagtatttttcaaatgaatgtttttattttcttttcgacttaatagttactttagaagcacctacagaattccaaattcagtat

SEQ ID NO: 202 - DNA, 1003 bp, Homo sapiens
ccttcctcctactcatctgacgagctgtccccaggcgagcccttgacttcgccgccctgggcccctctgggcgcccccgagcggcccgagcatcttctgaaccgggttctggagcggcttgctggaggggctaccagggacagcgccgcctcagatatcctgctggatgacattgtccttacccattctctcttcctcccgacggagaaatttctgcaggagctacaccagtactttgttcgggcaggaggcatggagggccctgaagggctgggccggaagcaagcctgtctagccatgcttctccatttcttggacacctaccaggggctgcttcaagaggaagagggggccggccacatcatcaaggatctatacctgctaattatgaaggacgagtccctttaccagggcctccgagaggacactctgaggctgcaccagctggtggagacggtggaactaaagattccagaggagaaccagccacccagcaagcaggtgaagccactcttccgccacttccgccggatagactcctgtctgcagacccgggtggccttccggggctctgatgagatcttctgccgtgtatacatgcctgaccactcttatgtgaccatacgcagccgcctttcagcatctgtgcaggacattctgggctctgtgacggagaaacttcaatattcagaggagcccgcggggcgtgaggattccctcatcctggtagctgtgtcctcctctggagagaaggtccttctccagcccactgaggactgtgttttcaccgcactgggcatcaacagccacctgtttgcctgtactcgggacagctatgaggctctggtgcccctccccgaggagatccaggtctcccctggagacacagagatccaccgagtggagcctgaggacgttgccaaccacctaactgccttccactgggagctgttccgatgtgtgcatgagctggagttcgtggactacgtgttccacggggagc

SEQ ID NO: 203 - DNA, 403 bp, Homo sapiens
gaacaacctaaactgtgctgagccactgtttgaacaaaataactcacttaatgttaatttcaacacacaaaagaaaacagtctggcttattcacggatacagaccagtaggctccatcccattatggcttcagaacttcgtaaggattttgctgaatgaagaagatatgaatgtaattgtagtagactggagccggggtgctacaacttttatttataatagagcagttaaaaacaccagaaaagttgctgtgagtttgagtgtgcacattaaaaatcttttgaagcatggtgcatctcttgacaattttcatttcataggtgggagcttaggggctcatatcagtggatttgttggaaagatatttcatggtcaacttggaagaataacaggtcttgaccct

SEQ ID NO: 204 - DNA, 476 bp, Homo sapiens
  misc_feature (1)...(476): n = a,t,c or g
ggcggtgcnnnccctcgagatcatatgcagtgtcgaggaattcggaggctgttgtgcctcggggtttggaagggaaagaaatgcgctgataggacacaggaaggcagaaggctcctggccggagccggggcggcagctgagaggtgggcgggcgcatccccattccatcggatcctctgttccattgtctgtctgtctcctggacccatcctggcctcgtctttgccctccgtcgcagcctggccttgggcctgcccttcccggggacactcggtctgatccccttccctcctccctcaatgtctcatgtccctgtctgatctctccctttcccctgccccaccgtcccatctgtccccacgttgcccctccccccaggccgggagcaggctgggagccatgcggnggtgtgcgagggagatggatgccaccccgatgcctcctgcaccctcatgcccttcggagcgagtgactgn

SEQ ID NO: 205 - DNA, 745 bp, Homo sapiens
ttttttttttagtattccaaacagcagggggtcactgtctttactttaggattcataaagcctgttaatgaatgggtgtgctgggggcactgtcatgttcttcagcatgctgcctgggcgacgaggaggcccttcctagggtctgacctggcttcccttcccaggtgggtgcaggtggcatgtccacgtctctccattgactggggcacagccttccccaagccgctgctgacaccctatgaggtaacaccaagctctgggagagagtgggctttggacgtggttctcaaaggtgaggtctggagtggagtggggtgggtgggcagcacttcgttatgttcgtagattccggagtctgtctcgatttctccagcggagtcacttcctagctgtgtagccttaggcaaggccctgaaccacacagttcccttctgtggcaggggacagtgtgcccttcacaggccgtcgtgaggactgaattcagtaatccaggggcagaaaaacactggcagatgttattgtccctccctcccctcccctaggcggccgtggctctgagggacatttcctggcagcagccctacccgatggacttctacgctggcagctccttggggccctggacggtgaaccacggccaggaccgccgtccccacgccccgggccggcccgcgcgggggaaggtgcaggaggggtccgcgcgtcccccttcggccgtggcttgcgaggactgcagctgcaggga

SEQ ID NO: 206 - DNA, 487 bp, Homo sapiens
  misc_feature (1)...(487): n = a,t,c or g
cgtgcgncccaatgacncccaaagagcttacgcangcgcnnccggnccggaanncccggggcgaggcacgcgttagaagagggcctcctgcaccctggtctcannnnncccatcctcatgagatctcagcccagactcaagggaggatcaccctcagggtcacaggaggctacttccaaagaggcctgtgagaggaagcctaatgcctgggcacacccatcacccctgccctgtgtcctcaacaactaatgacacaccagaccaaatctgggtctctgtgggcagtcttaggatgggaacaggagggatgggagctaatgcctcaacctcccccaggtgctgggacttgagctccgggaacaaaaagtggatcatccaggtgcccatcctggcctccattgtggagagcaggggtgggctgctggccacaggggtgggtgggatgtgcgcctgcgtcccccggaaccagcccctgacagggacctag

SEQ ID NO: 207 - DNA, 439 bp, Homo sapiens
acattttgtttgcttttccattaatccactggtttagtttccagaacgcaatgtcagacctgaggtgacagaaaagggaaaacgtgagagagtgtcttcttccctgaagagaggtgggcctgaggcttgacagtggcgctgcctgagtgacctagccgctgggctgggccctggacagctgatcccaggttcctgcacttgtcgccacccttccgtagtccacaggcctgatggcggcggcggctgagccgatgggcccggcacaggttcccatgaactcagaagtaattgtggaccctatacagacacaagcagcaagtccaacacaatcacagcaacagactctcctgcagaccttcccaggaagacagagccacacacaccatcatggtcctggacaaggaaaacactctttcctaatctggttgtcatgccatga

SEQ ID NO: 208 - DNA, 494 bp, Homo sapiens
  misc_feature (1)...(494): n = a,t,c or g
atgtgtgnacctgggactgacgtacgtgcgacnggcccggaannnccgggncgacgatttcgtgtgcagggcacaggccnnnntttcatcgccttcactgaggccatgacgcacttccccgcctccccggtctgggccggcatgttcttcttgatgcttatcaacctgggcctgggcagcatgatcgggaccatggcaggcatcaccacgcccatcatcgacaccttcaaggtgcccaaggagatgttcacagggggctgctgtgtctttgcattcctcgtggggctgttgttcgtccagcgctccggaaactactttgtcaccatgttcgatgactactcggccaccctgccactcactctcatcgtcatccttgagaacatcgctgtggcctggatttatggaaccaaaaagttcatgcaggagctgacggagatgctgggcttccgcccctaccgcttctatttctacatgtggaagttcgtgtctccact

SEQ ID NO: 209 - DNA, 877 bp, Homo sapiens
ttgaaaaggagcgccttttagatgaatggttcactctggacgaggttcccaaggggaagctacacttgagactggagtggctcacgttaatgccaaatgcgtcaaacctcgacaaggtgctaacagacatcaaagctgacaaagaccaagccaacgatggtctttcctctgcattgctgatcttgtacttggattcagcaaggaaccttccgattcgatacaaaaccaatgaacctgtgtgggaggaaaacttcactttcttcattcacaatcccaagcgccaggaccttgaagttgaggtcagagacgagcagcaccagtgtcccctggggaacctgaaggtccccctcagccagctgctcaccagtgaggacatgactgtgagccagcgcttccagctcggtaactcgggtccaaacagcaccatcaagatgaagattgccctgcgggtgctccatctcgaaaagcgagaaaggcctccagaccaccaacactcagctcaagtcaaacgtccctctgtgtccaaagaggggaggaaaacatccatcaaatctcatatgtctgggtctccaggccctggtggcagcaacacagctccatccacaccagtcattgggggcagtgataagcctggtatggaagaaaaggcccagccccctgaggccggccctcaggggctgcacgacctgggcagaagctcctccagcctcctggcctccccaggccacatctcagtcaaggagccgacccccagcatcgcctcggacatctcgctgcccatcgccacccaggagctgcggcaaaggctgaggcagctggaaaacgggacgaccctgggacagtctccactggggcagatccagctgaccatcccgca

SEQ ID NO: 210 - DNA, 456 bp, Homo sapiens
  misc_feature (1)...(456): n = a,t,c or g
ngggantttgaaccctgagaccattgnacannnncgggaattcgcagcctctgatcttgagccttttacccccacagaccagcctatttcccctgaggctattactcaacccagttgcatcaagaggcagagagccgctgggaaccctggttccctcgcagctaccattgaccataagccttgctctgcacccttggaacctaaaatccaggcctcaaggaaccaaagatggggagcagtgagagcagcagaatcccttacagacattgctgagcctgcctctccccaggttcatgagacaccaattgatgcctcccagactcaaaaggtggaaccagcgagcaaatctaggttcaccccggaactccaggctaaggtctctcacagtcgtgagagggctttatctaccatggatgcaacaccacatcatgcacagccccaacgaggggaaggctc

SEQ ID NO: 211 - DNA, 764 bp, Homo sapiens
cgcaggtattctcagaaactgatccagcacaccgcctgtcagctgctgagaacttaccctgctgccacccgcatcgactcttccaacccgaaccccctcatgttctggctccatgggatacagcttgtggcactcaactaccagactgatgatctccctttacatttaaatgctgcaatgtttgaggcaaatggtggttgtggttatgtattgaaacctccagttctgtgggacaagaactgccccatgtatcagaagttttctccactagaaagagatctggacagcatggatcctgcagtctattctttaactattgtctctggtcagaatgtgtgccccagtaatagcatgggaagcccgtgcattgaagtcgacgtcctgggcatgcctctggacagctgccatttccgcacaaagcccatccatcgaaacaccctgaaccccatgtggaacgagcagtttctgttccacgttcacttcgaagatcttgtatttcttcgttttgcagttgtggaaaacaatagttcagcggtaactgctcagagaatcattccactgaaagctttaaaacgaggatatcgacatcttcagctgcgaaaccttcacaatgaagtcttggagatttctagtttattcattaacagcagaaggatggaagaaaattcctctggcaataccatgtcagcctcttcgatgtttaatacagaagaaagaaaatgtttgcagactcacagagtcacggtgcatggcgtcccagggcc

SEQ ID NO: 212 - DNA, 411 bp, Homo sapiens
ggcataaggggcaccacggggcacctggggtgtcctattaatgacgacccctccctgacactgaccgtctcatgggtgatggaggacaagccgatctatattggaaacgggacgaagaaggaggacgactccctgaccatctttgcggtggcaaagcgggaccacgtcagtgacacgtgtggagcctgcaccgatctagaccataacctggacaagggctacctcaccgtgctaggtgagcaggccactccaactaaccggttgggtgccctgcccaaaggacgggcaaaccggacccgggacctggagctgacctacctggccgagaggatcgtgcggctgacctggatccccggggatgctaacaaccgtcccatcacagactacgactgccagattgaagaacaccaa

SEQ ID NO: 213 - DNA, 1294 bp, Homo sapiens
atgagctctattggatgcctgtgggtgtctagaagcagtcagatagatgggctcacggcagagaagtctggcccggagaagcctcatggcacgtggctaatgccagagttgcacccaaaggagcagatcttagaactgctggtactggagcagttcctgagcattctgcctgaggagctgcagatctgggttcagcaacataatccagaaagcggcgaggaatctgtgaccctgttggaggatttagagagggagtttgatgacccagggcagcaggtcccagctagtccacagggaccagcagtgccatggaaggatttaacatgtctcagagcatcccaagagtcaacagacatccacctccagcccttaaagacacagctgaaatcctggaaaccatgcctttcccctaaaagtgattgtgagaacagtgaaacagcaacaaaagagggcatctcagaagaaaaatcacagggactccctcaggaaccttcatttcgaggaattagtgagcatgaaagcaatttagtgtggaagcaaggaagtgctacaggggagaaactaagatctccttcccaagggggcagttttagtcaagtgatcttcacaaacaaatctctaggaaagagagacctttatgatgaggctgaaagatgcttgattctaactacagactctataatgtgtcagaaagttcctccagaagagagaccttatagatgtgatgtatgtgggcacagcttcaagcagcattcctctctaacacaacatcagagaatccatactggagaaaagccctataaatgtaaccagtgtgggaaggcctttagtttgaggtcctatcttattattcatcagagaattcatagtggtgagaaagcatatgaatgtagtgaatgtgggaaagctttcaatcagagctcagccctcattagacatcggaaaatccatactggtgagaaagcttgtaaatgtaatgagtgtggcaaagcattcagtcaaagttcatatctcattatacatcaaagaattcacactggtgagaaaccttatgagtgtaatgaatgtgggaaaacctttagccagagctcaaaactcattagacatcagcgaattcacacaggagagagaccctatgaatgtaatgaatgtggaaaagctttcaggcagagctcagagctgattactcatcagagaatacatagtggagagaaaccctatgaatgtagtgaatgtggaaaagctttcagtttgagctcaaaccttatcagacatcagagaattcatagtgggg

SEQ ID NO: 214 - DNA, 801 bp, Homo sapiens
ggaattcccgggtcgacgatttcgtccagccgtaacatatttttagaggatgatttggcctggcaaagtttgattcatccagattcctcaaatactcctctttcaacaagacttgtatctgtgcaagaggatgctgggaaatctcctgctcgaaatagatcagccagcattactaacctgtcactggatagatctggttctcctatggtaccttcatatgagacatctgtcagtccccaggctaaccgaacatatgttaggacagagaccactgaggatgaacgcaaaattcttctggacagtgtgcagttaaaagacctgtggaaaaaaatctgccatcacagcagtggaatggagtttcaggatcaccgctactggttgagaacgcatcccaactgcattgtaggaaaggaattagtcaactggctaatccgaaatgggcatattgccacaagggcacaagctatagcaattggacaagcaatggttgatggacgttggctggattgtgttagtcatcacgaccagcttttcagagatgagtatgcgctgtatagaccactgcaggtacttttcagtgtttactgccaattagaatgtagcaagcttattttatagtctttcttcatcagtgggaataaaaagtagtttattagaagatgatttttctaacattttttcctgctgtttgaggaaagttaaaactttttttacttggtaggcagcagtgatgaaaaagctgccattagaatcaaacattttattgtttactttaaatttgatcagacaataaaaaaaaaa

SEQ ID NO: 215 - DNA, 2932 bp, Homo sapiens
atggcccgggtgttcgttcatctcaggacggcatggccgacgtgttcgttcatctcaggacggcatggcccaggtgttcgttcatctcaggacagcatggcccaggacggcacggccgacgtgtttgttcatctcaggacagcatggccgacgtgtttgttcatctcaggacggcatggccgacgtgttcactcatctcaggacagcacggcccaggtgagtctgtttcttatgaagatgacgacattccagccccagcaagcctgctgcatgtgaacgccgcagcaccggcactcacaaatccaactgcacctgttctatgcactgcaccgaataacacagctcagaaagagaaagtccccagtggaatgagacagagacctgcgggtgttcgcatctcctcacgcacacccgaccttacgtgtgctgtttctacccactcgactgttcctggtgttcgcatctcctcgtgcacacccgaccttacgtgtgctgtttctatccactcgactgttcccagtgtttgcatctcctcgtgcacacccgatcttacgtgtgctgtttctacccactcgactgttcccggtgttcgcatctcctcgtgcacacccgatcttacgtgtgctgtttctacccactcgactgttcccggtgttcgcatctcctcacgcacacccgatcttacgtgtgctgtttctatccacgcgactgttcccggtgttcgcatctcctcgtgcacacccgatcttacgtgtgctgtttctatccacgcgactgttcccggtgttcgcatctcctcgtgcacacccgatcttacgtgtgctgtttctacccactcgactgttcccggtgttcgcatctcctcacgcacacccgatcttacgtgtgctgtttctatccactcgactgttcccggtgttcgcatctcctcgtgcacacccgatcttacgtgtgctgtttctatccacgcgactgttcccggtgttcgcatctcctcgtgcacacccgatcttacgtgtgctgtttctacccactcgactgttcccggtgttcgcatctcctcacgcacacccgatcttacgtgtgctgtttctatccacgcgactgttcccggtgttcgcatctcctcacgcacacccgatcttacgtgtgctgtttctatccacgcgactgttcccggtgttcgcatctcctcgtgcacacccgatcttacgtgtgctgtttctatccacgcgactgttcccggtgttcgcatctcctcgtgcacacccgatcttacgtgtgctgtttctatccacgcgactgttcccggtgttcgcatctcctcacgcacacccgatcttacgtgtgctgtttctatccacgcgactgttcccggtgttcgcatctcctcgtgcacacccgatcttacgtgtgctgtttctacccactcgactgttcccggtgttcgcatctcctcacgcacacccgatcttacgtgtgctgtttctatccacgcgactgttcccggtgttcgcatctcctcgtgcacacccgatcttacgtgtgctgtttctacccactcgactgttcccggtgttcgcatctcctcacgcacacccgatcttacgtgtgctgtttctatccacgcgactgttcccggtgttcacatctcctcgtgcacacccgatcttacgtgtgctgtttctacccactcgactgttcccggtgttcgcatctcctcacgcacacccgatcttacgtgtgctgtttctatccactcgactgttcccggtgtttgcatctcctcacgcacacccgatcttacgtgtgctgtttctatccactcgactgttcccagtgttcacatctcctcgtgcacacccgatcttacgtgtgctgtttctatccactcgactgttcccggtgttcgcatctcctcacgcacacccgatcttacgtgtgctgtttctacccactcgactgttcccggtgttcacatctcctcgtgcacaaccgatcttacgtgtgctgtttctatccacgcgactgttcccggtgttcacatctcctcgtgcacacccgatcttacgtgtgctgtttctacccacacgactgttcccggtgttcgcatctcctcacgcacacccgatcttacgtgtgctgtttctatccactcgactgttcccggtgttcgcatctcctcgtgcacacccgatcttacgtgtgctgtttctacccactcgactgttcccggtgttcgcatctcctcacgcacacccgatcttacgtgtgctgtttctacccacttgactgttcccggtgttcgcatctcctcacgcacacccgatcttacgtgtgctgtttctatccacgcgactgttcccggtgttcacatctcctcgtgcacacccgatcttacgtgtgctgtttctatccacgcgactgttcccggtgttcgcatctcctcacgcacacccgatcttacgtgtgctgtttctatccacgcaactgttcccggtgttcacatctcctcgtgcacacccgatcttacgtgtgctgtttctacccactcgactgttcccggtgttcgcatctcctcacgcacacccgatcttacgtgtgctgtttctatccactcgactgttcccggtgttcacatctcctcgtgcacacccgatcttacgtgtgctgtttctacccactcgactgttcccggtgttcacatctcctcgtgcacacccgatcttacgtgtgctgtttctacccactcgactgttcccggtgttcacatctcctcacgcacacccgatcttacgtgtgctgtttctatccacgcgactgttcccagtgttcacatctcctcgtgcacacccgatcttacgtgtgctgtttctatccactcaactgttccaggcctcctgactagtgtttctcagacctccacgggcca

SEQ ID NO: 216 - DNA, 414 bp, Homo sapiens
tttcgtacgaaatcgtacaggaagggctcctacaggtgtatcgtcagcgagtggatcgccgagcagggcaactggcaggaaatccaagaaaaggccgtggaagttgccaccgtggtgatccagccgacagttctgcgagcagctgtgcccaagaatgtgtctgtggctgaaggaaaggaactggacctgacctgtaacatcacaacagaccgagccgatgacgtccggcccgaggtgacgtggtccttcagcaggatgcctgacagcaccctacctggctcccgcgtgttggcgcggcttgaccgtgatttcctggtgcacagctcgcctcatgttgctttgagtcatgtggatgcacgctcctaccatttactggttcgggatgttagcaaagaaaactctggctactattac

SEQ ID NO: 217 - DNA, 463 bp, Homo sapiens
  misc_feature (1)...(463): n = a,t,c or g
atgccggaccctatgtgaggggcctcagagatttgaagaatatgagtatttagggtataaggctggtctgtatgaagctattgcagatcactacatgcaggtgcttgtttgtcagcatgaatgtgtgagggaacttgccacccgccctggccgcctctctcccatcgagaattttcttcctctgcactatgattacctacagtttgcctactatcgagttggtgagtatgtgaaagccctggagtgtgccaaagcctatcttctatgccatccagatgatgaggatgtcctagacaatgtggattactatgagagtctgctggatgatagcattgacccggcatccattgaggccagagaggatttaacaatgtttgtgaaacgtcataagctggagtctgagctgataaaatcagctgcagaaggtctggggntttcatacactgaaccgaattattggatc

SEQ ID NO: 218 - DNA, 383 bp, Homo sapiens
gcatcctgcccggcttttgctggggttgggagggggcaggcaggaagcgagggcctgcggggtctctgcgtttccgggggaaacagccggccctgccctgggagggtcacagcccgcccgctgctgaaggcggctctgagctttttcgtcgccacatccctctcccgcccctcagttccctgagtgtggcttctacggcctttacgacaagatcctgcttttcaaacatgaccccacgtcggccaacctcctgcagctggtgcgctcgtccggagacatccaggagggcgacctggtggaggtggtgctgtcggcctcggccacctttgaggacttacagatccggccgcacgccctcacggtgcactcctatcgggcgcctg

SEQ ID NO: 219 - DNA, 428 bp, Homo sapiens
tttcgtcgcggttggtcctgctagctggggcagcggcgctggcgagcggctcccagggcgaccgtgagccggtgtaccgcgactgcgtactgcagtgcgaagagcagaactgctctgggggcgctctgaatcacttccgctcccgccagccaatctacatgagtctagcaggctggacctgtcgggacgactgtaagtatgagtgtatgtgggtcaccgttgggctctacctccaggaaggtcacaaagtgcctcagttccatggcaagtggcccttctcccggttcctgttctttcaagagccggcatcggccgtggcctcgtttctcaatggcctggccagcctggtgatgctctgccgctaccgcaccttcgtgccagcctcctcccccatgtaccacacctgtgtggccttcgcctgggtgtcc

SEQ ID NO: 220 - DNA, 1297 bp, Homo sapiens
atggacggtgaggcagtccgcttctgcacagataaccagtgtgtctccctgcacccccaagaggtggactctgtggcaatggctcctgcagcccccaagataccgaggctcgttcaggctaccccggcatttatggctgtgaccttggtcttctctcttgtgactctctttgtagtggatcatcaccactttggcagggaggcagaaatgcgagagcttatccagacatttaaaggccacatggagaattccagtgcctgggtagtagaaatccagatgttgaagtgcagagtggacaatgtcaattcgcagctccaggtgctcggtgatcatctgggaaacaccaatgctgacatccagatggtaaaaggagttctaaaggatgccactacattgagtttgcagacacagatgttaaggagttccctggagggaaccaatgctgagatccagaggctcaaggaagaccttgaaaaggcagatgctttaactttccagacgctgaatttcttaaaaagcagtttagaaaacaccagcattgagctccacgtgctaagcagaggcttagaaaatgcaaactctgaaattcagatgttgaatgccagtttggaaacggcaaatacccaggctcagttagccaatagcagtttaaagaacgctaatgctgagatctatgttttgagaggccatctagatagtgtcaatgacttgaggacccagaaccaggttttaagaaatagtttggaaggagccaatgctgagatccagggactaaaggaaaatttgcagaacacaaatgctttaaactcccagacccaggcctttataaaaagcagttttgacaacactagtgctgagatccagttcttaagaggtcatttggaaagagctggtgatgaaattcacgtgttaaaaagggatttgaaaatggtcacagcccagacccaaaaagcaaatggccgtctggaccagacagatactcagattcaggtattcaagtcagagatggaaaatgtgaataccttaaatgcccagattcaggtcttaaatggtcatatgaaaaatgccagcagagagatacagaccctaaaacaaggaatgaagaatgcttcagccttaacttcccagacccagatgttagacagcaatctgcagaaggccagtgccgagatccagaggttaagaggggatctagagaacaccaaagctctaaccatggaaatccagcaggagcagagtcgcctgaagaccctccatgtggtcattacttcacaggaacagctacaaagaacccaaa

SEQ ID NO: 221 - DNA, 500 bp, Homo sapiens
cacgcgtccggctcaacaacgacggcctctcgcccctcatgatggctgccaagacgggcaagattgggatctttcagcacatcatccggcgggaggtgacggatgaggacacacggcacctgtcccgcaagttcaaggactgggcctatgggccagtgtattcctcgctttatgacctctcctccctggacacgtgtggggaagaggcctccgtgctggagatcctggtgtacaacagcaagattgagaaccgccacgagatgctggctgtggagcccatcaatgaactgctgcgggacaagtggcgcaagttcggggccgtctccttctacatcaacgtggtctcctacctgtgtgccatggtcatcttcactctcaccgcctactaccagccgctggagggcacaccgccgtacccttaccgcaccacggtggactacctgcggctggctggcgaggtcattacgctcttcactggggtcctgttcttcttcaccaac

SEQ ID NO: 222 - DNA, 395 bp, Homo sapiens
aagacgcacactgtcagaggaaactggccatgcaggaattcatggagatcaatgagcggctaacagaattgcacacccaaaaacagaaacttgctcgccatgtccgagataaggaagaagaggtggacctggtgatgcaaaaagttgaaagcttaaggcaagaactgcgcagaacagaaagagccaaaaaagagctggaagttcatacagaagctctagctgctgaagcatctaaagacaggaagctacgtgaacagagtgagcactattctaagcaactggaaaatgaattggagggactgaagcaaaaacaaattagttactcaccaggagtatgcagcatagaacatcagcaagagataaccaaactaaagactgatttggaaaagaaaagt

SEQ ID NO: 223 - DNA, 412 bp, Homo sapiens
aaatgatcctgcaattattagcaacttttctgcagcagtggtgcatacgatagtaaatgaaactttagagtcaatgacatcattggaagttacaaaaatggttgatgaacgtacagattatttaactaaatctttaaaggagaaaacccctccattttcccactgtgatcaggcagtgctgcaatgcagtgaagctagtagcaataaggacatgtttgctgaccggttatctaaatctattattaaacattccatagataagagcaaatcagtgatcccaaatatagataaaaatgcagtatacaaggaaagcttgcctgtttctggagaagaatcacagttgacaccagaaaagtctcccaaatttcctgactctcagaatcagttaactcactgctcactttcagctgcg

SEQ ID NO: 224 - DNA, 401 bp, Homo sapiens
gttttcactgcggggatggcccaggctgcaatgtggaaataagagctgtgcatttcaatggcttcatgaccccatttgagtcctgctgccaaaaaccaagtgagtgtcagaataacccaccaaatggagctggccattccaaaaaagtacatcagcaagaaaattattgcacatcctgtgttcttaagtccttcttggatgagaacaggttctgctgcctcttcaaaatcacaggatatcctttcccggcctacagtcagcctgacaatataagcaatgctataaatattatagcacatactgagaaatatgatggggcgctcagggtaggaaaacctacaagaatcgatcaggaaggtcagtactgtgaaggcagtggagatgaaacacaggctggcccc

SEQ ID NO: 225 - DNA, 724 bp, Homo sapiens
ggtggtagggtccggctgaatggtccactgagatggccgtcagtctgtacctgacccgagtctttgtgaaccagggctcatcggcaatgggtggaacggcagagtccatcaggggatgagatttgatgaatgacagagtttcatccgggaaatcgatggaggttttataagcttcggcaaggccgtgttttgcacaacagccaggccttggctttggcactttgtcttcgggaactgctgtccaaacagaatctggagttttctgttccttaaaccgtcctttgaatactttttcaatgtcatccatgctaaatgcacagacagcagaaccagggatgctattgagctgcgtggtaaacaccccgaccacagtggggatgccattgatttgtattatgtctgtaatagactgcagaacatcaaagtagaaaaacgaatctccagggacagaacagttcagccgagcctttagaaatgaagtccagtgtttctccaggacccgctgggaaccacccatgtcgtttttacatatgcgggccacgcgggaatacacagcccccttttccttctccttctcctcctgcttcttcttcttcttcccagcttctttttcctcttcttctcccaatccctccttctcctcttctttttcatcttcatctccatctttctctccctctccttcttcttcacctttctctctccgttccttccttgctgacat

SEQ ID NO: 226 - DNA, 447 bp, Homo sapiens
ggctgaaaatccgatccatgatgtgatcaacaatagcgtcggctggcatcattttttcgcggataacgccccgttcgccgtgaatacccatgccgatttccatttcctcggcaccgatttcaaaattgtggcgtcgcgtctgaggcaaagaacagggctccaacgcgacacccatcgtataggtgcgccgattggccttgcgtgttaccgcctcgcacgcctcaagcgacatgccccgatcacaggctgcacctgccaccttgaaaatgaagaagttacccgcgacaccgcgacggccatcgcgatcctctatgggggaagaggatatgtcgtctgtcgtcagaacggtgcgcgtcggaatagcaacttcttgcgccatttcggcagccatctcgaagttcatgacgtctccgacataattaccgtacacgaagagcacgccttctc

SEQ ID NO: 227 - DNA, 1327 bp, Homo sapiens
ttgtgctttctgacctttgcctcttttattatagagatgagaaagaagagggtatcctgggaagcatactgttacctagttttcagatagctttgcttacctctgaagatcacattaatcgcaaatatgcttttaaggcagcccatccaaacatgcggacctattatttctgcactgatacaggaaaggaaatggagttgtggatgaaagccatgttagatgctgccctagtacagacagaacctgtgaaaagagtggacaagattacatctgaaaatgcaccaactaaagaaaccaataacattcccaaccatagagtgctaattaaaccagagatccaaaacaatcaaaaaaacaaggaaatgagcaaaattgaagaaaaaaaggcattagaagctgaaaaatatggatttcagaaggatggtcaagatagacccttaacaaaaattaatagtgtaaagctgaattctctgccatctgaatatgagagtgggtcagcatgccctgctcagactgtgcactacagaccaatcaacttgagcagttcagagaacaaaatagtcaatgttagcctggcagatcttagaggtggaaatcgccccaatacagggcccttatacacagaggccgatcgagtcatacagagaacaaattcaatgcagcagttggaacagtggattaaaatccagaaggggaggggtcatgaagaagaaaccaggggagtaatttcttaccaaacattaccaagaaatatgccaagtcacagagcccagattatggcccgctaccctgaaggttatagaacactcccaagaaacagcaagacaaggcctgaaagtatctgcagtgtaaccccttccactcatgacaagacattaggacccggagcggaggagaaacggaggtccatgagagatgacacaatgtggcagctctacgaatggcagcagcgtcagttttataacaaacagagcaccctccctcgacacagtactttgagtagtcccaaaaccatggtaaatatttctgaccagacaatgcactctattcccacatcaccttcccacgggtcaatagctgcttatcagggatactcccctcaacgaacttacagatcggaagtgtcttcaccaattcagagaggagatgtgacaatagaccgcagacacagggcccatcaccctaaggtaaaatagctgctgattttgtgttaactcactaccttataaatgctgtgttttctttctagtatactattttaaatgtgagagacaaaagaatggggataaagtaagcaaggcagctcttttttgttttaaaaaaaaaa

SEQ ID NO: 228 - DNA, 448 bp, Homo sapiens
agctgcccttcctgggcctggggtctgttcttccccagggcatggtgatggcgagcccggagatgaatcctaccatctgctcggtgtttgaggcacatatagtcttactgtttcatgccaccaccttccgacgaggattccaggtgacagtactcgtgggcaacgtacgtcagacggctgtggtggaaaagatccatgccaaggtgagagggacctggcctttcatttctccagaggtcagaaaagagggaggcctgccccagactggcagagaactccttgatcccacaatgggaataaaaccccacttatggtgggtagcggcctgataggcctctggagggtggagagcctcggctggcatagaatgggacagaaggcactggccaggggagtgaccacttatttgctgcaggacaaactgcggacaggcgataaggcagtggtc

SEQ ID NO: 229 - DNA, 619 bp, Homo sapiens
gatgataaaaatgcccaagggataaagaggcatgttaagccaacaagtggaaatgccttcaccatttgtaaatatccatgtggaaaaagtagggagtgtgttgccccaaacatctgcaaatgtaaacctggttacattggttctaactgccaaactgctctttgtgaccctgattgcaaaaaccatggaaaatgtattaagcctaacatttgtcagtgtcttccaggacatggtggagcaacctgtgatgaagaacattgtaacccaccttgtcaacatggtggcacatgcttggctgggaatctctgcacttgtccttatggttttgtaggaccaaggtgtgaaacaatggtttgtaacaggcactgtgaaaatggaggccagtgtcttacaccagatatttgccagtgcaaacctggctggtatggacccacctgtagtacagcttagtgaaggcattctgaattctaatcatagcctctacattcttgatagagcaggagcaccgtcatcttggacaaacaccgccactttaaattccagctccctttctagcttttctaagcttagtgttatttgtaaacttaatgaacatactttcaaagcgattatccagtaa

SEQ ID NO: 230 - DNA, 914 bp, Homo sapiens
  misc_feature (1)...(914): n = a,t,c or g
tgcagtgactttttctgtggtatttgcatacgtagcagatataacccaagagcatgaaagaagtatggcttatggactggtatgtatgtttattctataccttttgtatctgctgagaaatgccttctttttaagataaatattattataaggagtgcaaacctttgcattacaagatttttgcgtaaaatatattttgtaataaaatcattcattagactacatttaaaatttttttgcggtatgaggctatgtaagttttgattcttttcatttagtagatattcataagtcacatgtcagaattgaaattatagtatattttaccttgtagagttctttttaacagaatcctaaaaataagaattatttagtatgtcaagagttaaaaaaaatcactactcatttaatgtctaatctaaaatacaacaggctaacatcctagctcagggatcagcaaaccttttttgtggctttgtgggccacgtacagtctctgtctcattcttttgtttttgcatgtgtatttatgtttataaactctttaaaaatgtaagaaacagccagatttgagccatagtggtaggtcgccaactcctggacactgttttggtaaactaaattatggcagtataatgtgtcatctatcaaatctaggaattaaaggaaaaaagcctagtaatagaatgactactataggcacaataatagatcactactgaatagccagaaataggacagtgatgcatttcggtaaatgtgagaccaataccctgtgataataaggactgaatattgtggtgggcngaattagttttaaaagggactgatttcngattccaaggacgttatagtgaagatcctaagatttttggggaggaaccccctttgggggaagtttgaaaagggcntata

SEQ ID NO: 231 - DNA, 388 bp, Homo sapiens
tttagaaattcttaagtctgcaaccttgtatcgtttgatgcaggccttctttgtcctgccaggcaccgcttctgctattttttcccatctttcagggggatttactgggtatgttttcaaagcttgttccaaaagcttctgttcttctgttggccaaggggtgaaatctgtatatggacctgattaagaaaaatttttatttgaaaactggctttgaacatgttctcatacaagtcttgtggcccacaagcattcgctaagtgcccatttcaatctgggatgagtcagtttgaaaataaacttgtcgagatgagagatacatatacccctctgagtgttaataatagaaaaaatttcagatagctcacatcccataaaatacaaactc

SEQ ID NO: 232 - DNA, 391 bp, Homo sapiens
agcacagttactggacaaccgaggcggctcttggacacagcaggacaccagcagcccttcctagagcttaagatccgagccaatgagcctggagcaggccgggccaggaggaggacccccacctgtgagcctgcgacccccttatgttgcaggcgagaccattacgtaaacttccaggaactgggatggcgggactggatactgctgcccgaggggtaccagctgaattactgcagtgggcagtgccctacccacctggctggcagcccaggcattgctgcctctttccattctgccgtcttcagcctcctcaaagccaacaatccttggcctggcaggacctcctggtgtgtccctactgcccgaaggcccctctctcttctctacctgg

SEQ ID NO: 233 - DNA, 403 bp, Homo sapiens
  misc_feature (1)...(403): n = a,t,c or g
atgagaatcacctgtagtaattgctattgatgaatgaagtaggaaacaaaaggctttgccaggatgaaatcacggccgactaaaggagatactaatattatttgcaagaggttgggttaggatccagtagcggaacaaggaaaagatgacagtgaggagtcaaatacttccttctgtcggnttttattgttttcagatgaaatcatcatggcagcccccctgaggatagcagatgtaacctctggactgattgggggagaagacggccgagtatatgtatataatggcaaagagaccacccttggtgacatgactggcaaatgcaaatcatggataactccatgtccagaagaaaaggtaaatgttctacaaaattctataccttattgggaaaggatcactg

SEQ ID NO: 234 - DNA, 518 bp, Homo sapiens
ctgtcagaattgcttgatatgtttcagccttatattctttattgtgtgctccctgacggtaaccacatctcccacagtatctgacagttctgtggcctgagaggcagagtccatggcttccagaacatgtgtcccaattggttcctctcctttcccacctggactggctgcttttgacctctaactctttgtcttccagaaaacaataagcctcctcaggcagatgcagtcccagataaagagctgacccttcctgtggatagcacaaccctggatggcagcaagagctcagatgatcagaaaattatctcatatctctgggaaaaaacacagtgagtattgacacaaaatccttatttttgcaaagcctccagacctttggaagagcaaggttttatttgctattatgagttgagttgctcttaatggcttatccagtggggtgactgaggaagaaatgtttgcaattccaaacttcaactccaagaaaatgatattataatcataatttttgtaag

SEQ ID NO: 235 - DNA, 896 bp, Homo sapiens
ggatgttttagaggtgtatggcacaggcgtggccagcaccaggcatgaaatgggcaccttggataagcacaaggagttggaggaccttgtggctaagttcctgaatgtggaagcagctatggtctttgggatgggattcgcaactaactcaatgaatatcccagcattagttggaaagggatgcctcattttaagggatgaggtaaaccacacatcgcttgtgcttggggcccgactcttaggtgcaaccataggaatcttcaaacacaactacgcacaaagcctagagaagctcctgagagatgctgtcatctatggccagcctcgaacccgcagagcttggaaaaagattctcatcctggtggagggtgtctacagcatggaaggttccatcgtgcatctgccccagatcatagctctaaagaagaaatacaaggcttacctctacatagatgaagctcacagtattggggccgtgggcccaaccggccggggtgtcacggagttctttggactagaccctcatgaagttgatgtgctcatgggcacattcaccaaaagttttggagcttcaggaggttacatagctggaaggaaggcaaggatcttgagtccacctgcatgcctggtgccgaacactggctcccacagcctccacaggctgaccagagacttgcaaatgaatgaagcgatggtagcccttgtaactgataggttgcagggctggaattctggagaagggaactgggacagggcagacaaatttggggacctcgtggattatttacgggttcactcgcatagtgctgtttatgcttcatccatgagcccaccgatagcagagcaaatcatcagatcactaaaacttatcatgggactggatgggaccactcaag

SEQ ID NO: 236 - DNA, 392 bp, Homo sapiens
  misc_feature (1)...(392): n = a,t,c or g
aatacatcgtcctttcctgctcagccttcctcaccagctcgcccatctctgccccacctttcccagcacccctccaatccccttcttcctctggcctctgcagaccacccacaatgtggtcgtttcctcccacttcacgaacccgaacctctctgtccctccccttctctctcctatcccaccctggtctcctcctggtcttctccattcagttcacatcatggatgtccccctggtctctatcccttccccacgtctccaaaaaccatccaaccccctggcctggctcagcttaaaatgctttgcattcctcctgggcggcagcagctgcggggagcccagagcatgccgggacatggggcgctctcccctctcctccttccccctgccan

SEQ ID NO: 237 - DNA, 398 bp, Homo sapiens
aatacattggggggctctgggtcctgcaccatcttgctcaggatgctgtggatctgggagaacctgggccgctcacctgggtccttctgccagcagtcgagcattagtcggtgcataaggttaggacagttcctggggggtggcagccggaagccatcctccacagccttgatcacgtcttggccagacatgtcccagtaaggccgctccccaaaggccatcacctcccacatgatgatgccgaagctccacacgtcactggcagagctgaagtggccaaactgaagtgtctcgggagcggcccatagcgctgggctccggccactcatagtggtgtagacagcctctgatcggtcccgggggccccgcccgaagccagagatcttgcagacaaggtc

SEQ ID NO: 238 - DNA, 1107 bp, Homo sapiens
tggagtccatgtagtctcacatgtggggtcggcctacagaccagagacgtcttctgcagccacctgctttccagagagatgaatgaaacagtcatcctggctgatgagctgtgtcgccagcccaagcccagcacggtgcaagcttgtaaccgctttaattgccccccagcctggtaccctgcacagtggcagccgtgttccagaacgtgtggcgggggtgttcagaaacgtgaggttctttgcaagcagcgcatggctgatggcagcttcctggagcttcctgagaccttctgttcagcttcaaaacctgcctgccagcaagcatgcaagaaagatgactgtcccagcgagtggcttctctcagactggacagagtgttccacaagctgcggggaaggcacccagactcgaagcgccatttgccgaaagatgctgaaaaccggcctctcaacggttgtcaattccaccctgtgcccgcccctgcctttctcttcctccatcaggccctgtatgctggcaacctgtgcaaggcccgggcggccatccacgaagcacagcccgcacatcgcggccgccaggaaggtctacatccagactcgcaggcagaggaagctgcacttcgtgggggggggcttcgcctacctgctccccaagacggcggtggtgctgcgctgcccggcgcgcagggtccgcaagcccctcatcacctgggagaaggacggccagcacctcatcagctcgacgcacgtcacggtggcccccttcggctatctcaagatccaccgcctcaagccctcggatgcaggcgtctacacctgctcagcgggcccggcccgggagcactttgtgattaagctcatcggaggcaaccgcaagctcgtggcccggcccttgagcccgagaagtgaggaagaggtgcttgcggggaggaagggcggcccgaaggaggccctgcagacccacaaacaccagaacgggatcttctccaacggcagcaaggcggagaagcggggcctggccgccaacccggggagccgctacgacgacctcgtctcccggctgctggagcagggcgctccttgtagttcatcaaaaaaaaagaattag

SEQ ID NO: 239 - DNA, 678 bp, Homo sapiens
atgaagcctgacaatattttacttgacgaacatgggcacgtgcacatcacagatttcaacattgctgcgatgctgcccagggagacacagattaccaccatggctggcaccaagccttacatggcacctgagatgttcagctccagaaaaggagcaggctattcctttgctgttgactggtggtccctgggagtgacggcatatgaactgctgagaggccggagaccgtatcatattcgctccagtacttccagcaaggaaattgtacacacgtttgagacgactgttgtaacttacccttctgcctggtcacaggaaatggtgtcacttcttaaaaagctactcgaacctaatccagaccaacgattttctcagttatctgatgtccagaacttcccgtatatgaatgatataaactgggatgcagtttttcagaagaggctcattccaggtttcattcctaataaaggcaggctgaattgtgatcctacctttgaacttgaggaaatgattttggagtccaaacctctacataagaaaaaaaagcgtctggcaaagaaggagaaggatatgaggaaatgcgattcttctcagacatgtcttcttcaagagcaccttgactctgtccagaaggagttcataattatcaacagagaaaaagtaaacagggactgtatt

SEQ ID NO: 240 - DNA, 387 bp, Homo sapiens
aatacagtgtgccatcaattacttggggaaggtaatgttcctggatacaagattccgtgtaggaggctctcaactgcttcagttccttatttgccatctccatgacagtcatttcagcaaattctcgtggagacgtggtcccagagagcaagttttgttgtaaatgagaatttctggggttcttcaaattggcaactttgcttctgatgcaagttttatattttttgatgttctttgaataaagggtaaaaacatgctcttcaatttctcttgcaaagttttgccacaaatcagctttgggttgatctgtggaagaactagttaaagctgcgtaaagaagctctatgcatttagttctcatgggtgttgtgggatccagcaactcac

SEQ ID NO: 241 - DNA, 390 bp, Homo sapiens
aatacattgcagggagaaggggtgagaaaaaggctccgatccagcagatggtttgcccgtaaactatccccaggacgttatcaggaatggcaaactcctgctgcccccagcactgaatcagcttgcaagaggaacagtaggtcaccaggagctttctaggaaaatccacgaagagtgtcacagccaagatgatgatgaagtcgaagatcatcagcttgtacatttcctgcccaacttgggtctcccagcacgggtagagtttctggttgtagccgcaaaggtcacatgtgtcatcatcacaggatgtgatcttggagcccagcgtgaacaccaggacacatatggtggccagccgcataaagacacacctaaggattgtcagacggatct

SEQ ID NO: 242 - DNA, 408 bp, Homo sapiens
  misc_feature (1)...(408): n = a,t,c or g
aatacacgcctgggatatcatcaagggtgatttcatcaagaaatccaatatgtcttcattgacaaagatgagttccacagaaggttggctgttctttacatccagactgatgggttcggcctcttcggtgttggagttgcccgccacgagctgctcgtcctcagcactgaccagctcctgcagcacggcctccacgatgggcatcaccatggcggtggtggaggtgttggacagccacatggacagcaacgtggtacagcacatgaagcagagcagcagcatgcccggtttggccccggccatcaagaccatgcgcagagcaatgcgcttatgcaggttccacttctccacggcagccgccacgcatatgacccccaccagcagtagcgtggtgttcttgaagtactn

SEQ ID NO: 243 - DNA, 411 bp, Homo sapiens
aatacagtctctgaattttgtgtaatgcatttctcatttatgacatttgctttgaagcccagaactgcaaacaccaccaatgttgccaggacagaagtgaaaaaattgatgaaggacaccaggacagcatcaaagtggcagttgttgtctctcttgttgtagcttgaaaaggcaatgacaccaccaaatcccagacctaaggcaaagaacacttgagtagcagcttctctccagaccttgggctccagcattatttcaagcttaggggtaaacatgtggcgaatgccatcaattgaaccatttaaaaggaatgctctgatgaggaagcaaataagtaccacatatggaaacagagaactaaaatatatgatttttccagaagactgaatgcctttgatcatagccaagcac

SEQ ID NO: 244 - DNA, 1271 bp, Homo sapiens
atgacaacaacattaattggtcttttgaagactgcccgactcctccgtcttgtgcgcgtggccaggaaactggatcgatattcagaatatggcgctgctgttctaatgctcttaatgtgcatctttgccctgattgctcactggctggcttgcatttggtatgcgattgggaatgtagaaaggccttacctgactgacaaaatcggatggttggattccttaggacagcaaattgggaaacgttacaatgacagtgactcaagttctggaccatccattaaagacaaatacgtcacagcactttattttaccttcagcagtttaaccagtgtaggattcgggaatgtgtctcctaacacgaattcggagaaaatcttttcaatttgtgtcatgttgattggctcactaatgtatgcaagcatttttgggaatgtatctgcaattatccaaagactatactcgggaactgccaggtaccacatgcagatgctgcgagtaaaagagttcattcgctttcaccaaatccccaaccctctgaggcaacgtcttgaagaatatttccagcacgcatggacttacaccaatggcattgacatgaacatggtcacaaatggtacatgttcatcttgcacaagtgatgatggtcacttcatcctggtctccaaccatcatcaaggaggacttatttacagttggaatgatgctgcttctatgcaaaggccttttaatcatatcaagtcaagcctcctgggatccacatcagattcaaacctcaacaaatacagcaccattaacaagattccacagctcactctgaatttttcagaggtcaaaactgagaaaaagaattcatcacctccttcttcagataaaaccattattgcacccaaggttaaagatcgaacacacaatgtgactgagaaagtgacccaggttctctctttaggagcagatgtcctacctgaatacaaactgcaggcaccacgcatcaacaagtttacgatattgcactacagccctttcaaggcagtctgggactggcttatcctgctgttggtcatatacactgctatatttactccctactctgcagccttcctcctcaatgacagagaagaacagaaaagacgagaatgtggctattcttgtagccctttgaatgtggtagacttgattgtggatattatgtttatcatagatattttaataaacttcagaacaacatatgtaaatcagaatgaagaagtggtaagtgatcccgccagtgtatt

SEQ ID NO: 245 - DNA, 384 bp, Homo sapiens
aatacatgtgggtcaagggtgtgtattttgttttggaagatgctattcctcatgagactgttgtggagggaggcagagcttccacctcgctggagacgcggcttagccggtagagttggttcatccttgtccctggctgcagatggctttgcttgggcttctggtgctgtcaccttgacgaccttattgcggtttatcatttgcttcacccatttttctacttggacgttgaatttcatgaaaaccacatagcaaaaataagctgttaagagaagcaagctttcccaccacatgatgacattatccaggaaaaatatgatcagcatgatcaagtcaacaatgtagaaagacacatctcgaaagagcggccaccatgtcaggttt

SEQ ID NO: 246 - DNA, 601 bp, Homo sapiens
cggacgcgtgggcaacaagtttattcagctcattctaaatggtcccttatataagggccaaaagtacttaacttttaaaagttagcaatataatctcttcttgcttataaggtcaagtcttttgtgatagccttactagcaataatagaaaattgaaaaaaagcattttagttcccgtgtttaaaaatatttcttataagtgttggtattgcaaatgaattattaccaaatgttaataatctattatgtcttgttttttaaagtgaatgaatttttagcttttgagggtcccatcttgttggatatgagaattaaacatctaatcaaaacaaatcagttaagtcaagcaactgctctagcaaagctgtgttctgaccatccagagattggcataaaaggtagttttaagcaaacttaccttgtctgtctttgtacatcatcaccaaatggaaagttaatcgaagaggtgagtatgttttctttcattagtaattattttttaagttgagaaattaattgttaattagaatgtctttgatgatccttttctctgatatagctaacagatcactggcatatcttacattttgggaagggtccg

SEQ ID NO: 247 - DNA, 418 bp, Homo sapiens
cggacgcgtgggtaaagaatgatattatttttaatcaaactgagagaaaacagaaaatatcagaaaatctcaaacatttggctagtgtacgtgtcgtacaaaaaaacctcgtctttgttgtaggtttatctcagcgcctagcagacccagaggtaagtcctcttgttttctttgtcatcttgatattttttgtttccttgtcttacttggaaataatatttgaccctgctcaattgtgtgattcctctgaacacattatatcttgaaggagaaaataagaaattacttttgaataattgctaagaaaccaatgaccagtcgtgatcttaggcaagcgtcttaatctttcttggcttcaatttcttcagttctaaaactaaggagttgaactagatttctaacgtgctgacaatctgtg

SEQ ID NO: 248 - DNA, 404 bp, Homo sapiens
gatttcactaccctggctgccatgatgaggaccctgttctccttatttggtgatgtgagatctgatgttcatcgtttctccgtgactctctttggagccgccataaagtctgtaaaaaacccagataagaagagtatagagaaccaagtcctggacagcttggtcccactacttctgtattctcaggatgaaaatgatgcagtagctgaggagagcaggcaagtcctaactatatgtgcccagttcctgaagtggaagctgccccgagaagtgtactccaaagatccctggcacatcaaacctactgaagcaggaacaatctgcagattctttgaaaaaaagtgcaaggggaaaattaacatcctagaacaaacactgatgtactccaagaacccaaaacttcc

SEQ ID NO: 249 - DNA, 440 bp, Homo sapiens
tttcgtcgccgccggcggcggagggagcgtgactgcgctgcgcagggcgctaggaggcattgtcgccacctggccgagtgcaagctggtctcctttcccattggcatctacaaggtcctgcggaatgtctctggccagatccacctcatcaccctggctaacaacgagcttaagtccctcaccagcaagttcatgaccacattcagtcagctccgagagctccacctggaggggaacttcctacaccgcctccccagcgaggtcagtgccctgcagcacctcaaggccattgacctgtcccggaaccagttccaggacttccctgagcagcttaccgccctgccggcgctggagaccatcaacctggaggagaacgagatcgtagatgtgcccgtggagaagctggccgccatgccagccttgcgcagcatcaacctccg

SEQ ID NO: 250 - DNA, 457 bp, Homo sapiens
  misc_feature (1)...(457): n = a,t,c or g
gcacgaccggtccggnnnnccggggtcgacgatttcgtcagtttaagatctgggcagctgctaattcccataaggcaggggggaggaatgggagatggagctgcttggctaagttggggacctagggcccctgggagggtggctggatgccaaggagagttgaatatggttgggggagctggctgtggccctttgtctttcaggcccatcgggagcggtgcaggcaaggagctcctgggaggtggggcagctggtgctgcggggaaaggcttggtccctttcccaggatcctgtgaatggtttttggcagcccggctcaagaacgtgagggcttgggagagagctcccaggggagggagcctccgtggagtggagggagccctgtgtgggcattgtggcgaggggtcccagggctgagaatgtagaatgggcaccccaagagatccaggaaggaggg

SEQ ID NO: 251 - DNA, 439 bp, Homo sapiens
  misc_feature (1)...(439): n = a,t,c or g
tttcgtgtttgatctgaaactgcgagtccctgggtttgcagcgcttctgattcatggagccagctctgttcctggcccagagactgtcaggctgagacagaaaagaaaaaaaaaggctcctgatcacagctcaggcagaaaagaagagctagtgacaactcacacagtagacaaattggagacaaagaagccagtaggccgtgtgctctgcgggctctcaggggagctgctccattctcttctccttccccgaaggaaaacagagaagcgggctctgggcagccacagaaaagctggctttccggagcaccctgtggcaccggaaccactcagtaacagctgccagatttccaaggagggcagagagcaggtactaagcgaaatcggagccggagactgcctanctcagccgggactggatgccctcgggtggcctgtg

SEQ ID NO: 252 - DNA, 421 bp, Homo sapiens
ctgtgatgttccgcatagcccggatgctgggtgggcctcttacgtttattcgcgcctgatattcagcactgcccaccaagttccgcgctgtgcaccggtacacgcccccgtcgcggatctgggggcctgtgacgttcatgtggctgatggtggtgccgtccgacatggtgtactggttggtgcggtggctgccatcccgcacgatgggctcatcgtcgagggcccaggtgaccgtggggggcggggcgcccttggccgcacacatcagtgagaactgctccccggggttgaccaccttctcgctgaaggacgagacgatgcggggcgtgccatcctcaagtgcaatgatggcaaagtcctgggcggtctgggccttgcgggtagcgaagcactggtaggccccggaatggctcttttgggg

SEQ ID NO: 253 - DNA, 401 bp, Homo sapiens
tttcgtggctgcggggagggatcatggactcttgtttgccgtctgcaggggcccacgcaagtaagcctgctgtcaatggaggaggacattgatacccgcaaaatcaacaacagtttcctgcactatcagcaccccccaccaccccttccgaggtagctactccttcgatgaccatatcaccgactccgaagccctgagccgcagcagtcacgtgtttacctcccacccccggatgctgaagcgccagccggcaatcgaattacctttgggaggggaatacagttctgacgtgccacgccccctctccactcaactatcctcctctctcttaggttacttctccaccctcatgactggagccgccttcaccaataatattgcctcttcaacaatcattctct

SEQ ID NO: 254 - DNA, 438 bp, Homo sapiens
tttcgtcagctttgcaggtgccccagggtgggggcaggtagatgagctgctgggagagccggggagctgggggagtgcggggacttctccccaaatcagcttgatggactcctctgacaagatgcagatctctggagttctgctcccctctccctctgcagcctccaaaggtctcagagtttacagagcattcttgttcattcgatcactcatgcttctgactagccagattaccacccaggtccttgctcacctgtccttcccattactgattgcccaccactccatctggacccctcaataccccaccccaggaccagcctcccatggccctctcacccgctgctcctggcaggccacaaaggtctggaagcctggggccacgccaaagcccagctggtcgatgaaaggagggtcatcctgactatggatctgccc

SEQ ID NO: 255 - DNA, 995 bp, Homo sapiens
ctgcagaaccgagaggattcttctgaaggcatcagaaagaagctggtggaagctgaggagctcgaagagaaacatcgggaggcccaagtctcagcccagcacctagaagtgcacctgaaacagaaagagcagcactatgaggaaaagattaaagtgttggacaatcagataaagaaagacctggctgacaaggagacactggagaacatgatgcagagacacgaggaggaggcccatgagaagggcaaaattctcagcgaacagaaggcgatgatcaatgctatggattccaagatcagatccctggaacagaggattgtggaactgtctgaagccaataaacttgcagcaaatagcagtctttttacccaaaggaacatgaaggcccaagaagagatgatttctgaactcaggcaacagaaattttacctggagacacaggctgggaagttggaggcccagaaccgaaaactggaggagcagctggagaagatcagccaccaagaccacagtgacaagaatcggctgctggaactggagacaagattgcgggaggtcagtctagagcacgaggagcagaaactggagctcaagcgccagctcacagagctacagctctccctgcaggagcgcgagtcacagttgacagccctgcaggctgcacgggcggccctggagagccagcttcgccaggcgaagacagagctggaagagaccacagcagaagctgaagaggagatccaggcactcacggtaggtctggggagcaacatcttcaggttgctaaaggcctcagctaggatgagtgtggaactggcactgagtatactggctcacccttagaaattccaggagggaaaacatgatccacaaagatattcagtggccaggaaattggcttacataggctgctgcttcattggaactagtagatgagcttggttggttatattcaaacttttcttagtatcttgaatagctcctcctttacttat

SEQ ID NO: 256 - DNA, 405 bp, Homo sapiens
  misc_feature (1)...(405): n = a,t,c or g
tttcgtcggcggtcctggtgcggaccctccggtcgcagtcatgtgggacccgcgggcagctaggatggacctgacagcttacgctgagctgctgaaagaatccggcaaccaggttcttaagaatgggaacttctctttggccatcagaaagtacgatgaagccatccagattctcctgcagttataccagtggggggttcccccgagggacttggctgtgctgctgtgcaacaaatcaaatgcatttttcagccttgggaagtggaatgaggcatttgttgctgccaaggaatgtctccaatgggatccaacctacgtgaagggatactaccgagctggttattccttgctgaggttgcaccagccttacgaagccgctcgcatgttttttgagggtctgcgacn

SEQ ID NO: 257 - DNA, 399 bp, Homo sapiens
tttcgtggaaagtgcaagctccaggcccccgggctgtttctcgggagacgggcgtttctggctagtgtctgaagggtctcggcgtggctgggattttaacccttcattttctttcttggacccacgttacagcgtcggcggagatgagaacatcggcaccgttaccaccctggcgaacatcctccgggaattcaacccttccctgaagggcttctctgttggcactgggaaagaaaccagtcctaatgccttcttaaaccaggctgtggcaggaggccgagctgaggatctacctgtccaggccaggaggctggtggacctgatgaagaatgacacgaggatacactttcaggaagactggaagataataaccctgtttataggcggcaatgacctctg

SEQ ID NO: 258 - DNA, 1097 bp, Homo sapiens
agtgtgggagccaggcaaggcgaagcccgagatcgaatcaggcgtttctttcccaaaggggaccttgaggtcctgcaggcccaggtggagaggattatgacccggaaggagctcctgacagtctattcttctgaggatgggtctgaggaattcgagaccatagttttgaaggcccttgtgaaggcctgtgggagctcggaggcctcagcctacctggatgagctgcgtttggctgtggcttggaaccgcgtggacattgcccagagtgaactctttcggggggacatccaatggcggtccttccatctcgaagcttccctcatggacgccctgctgaatgaccggcctgagttcgtgcgcttgctcatttcccacggcctcagcctgggccacttcctgaccccgatgcgcctggcccaactctacagcgcggcgccctccaactcgctcatccgcaaccttttggaccaggcgtcccacagcgcaggcaccaaagccccagccctaaaagggggagctgcggagctccggccccctgacgtggggcatgtgctgaggatgctgctggggaagatgtgcgcgccgaggtacccctccgggggcgcctgggaccctcacccaggccagggcttcggggagagcatgtatctgctctcggacaaggccacctcgccgctctcgctggatgctggcctcgggcaggccccctggagcgacctgcttctttgggcactgttgctgaacagggcacagatggccatgtacttctgggagatgggttccaatgcagtttcctcagctcttggggcctgtttgctgctccgggtgatggcacgcctggagcctgacgctgaggaggcagcacggaggaaagacctggcgttcaagtttgaggggatgggcgttgacctctttggcgagtgctatcgcagcagtgaggtgagggctgcccgcctcctcctccgtcgctgcccgctctggggggatgccacttgcctccagctggccatgcaagctgacgcccgtgccttctttgcccaggatggggtacagtctctgccgacacagaagtggtggggagatatggccagacgaaa

SEQ ID NO: 259 - DNA, 403 bp, Homo sapiens
gtatacttgggagccggccccggcctgtttttttccaatgagggggccaaagagggtgagaaggccaatatccccaaacttatgctgccccgagggggcttcagccaaagagagatggtcactggggaaaggtcccccagccccgaggaggaggaggaggaggaggaagagggctttggggaaagggcctcttgtcgccggggccttttccgggtccgattgacacgtgtaggcctggcggccccttctaaagcctctcgggggcaggagggcgatgcagcccccaagtcccccgtcagagagaagtcacccaagttccgcttccccagggtgtccctaagccccaaggcccggagtgggagtggggaccaggaagagggtggattgcgggtgcggctgccca

SEQ ID NO: 260 - DNA, 477 bp, Homo sapiens
ctcctgggaggcgacctgcgctaccatctgcagcagaatgtgcatttcacagaggggactgtgaaactctacatctgtgagctggcactggccctggagtatcttcagaggtaccacatcatccacagagacatcaagccagacaatatcctgctggatgaacacggacatgttcacattacagacttcaacatagcgacggtagtgaaaggagcagaaagggcttcctccatggctggcaccaagccctacatggctccagaagtattccaggtgtacatggacagaggccccggatactcgtaccctgtcgactggtggtccctgggcatcacagcctatgagctgctgcggggctggaggccgtacgaaatccactcggtcacgcccatcgatgaaatcctcaacatgttcaaggtggagcgtgtccactactcctccacgtggtgcaaggggatggtggccctgctgaggaag

SEQ ID NO: 261 - DNA, 547 bp, Homo sapiens
tgctgaccatcactgacttcatcctggtgctgtatcgctactacaggtcccccctggtccagatctatgagattgaacaacataagattgagacctggagggagatctacctgcaaggctgcttcaagcctctggtctccatctctcctaatgatagcctgtttgaagctgtctacaccctcatcaagaaccggatccatcgcctgcctgttcttgacccggtgtcaggcaacgtactccacatcctcacacacaaacgcctgctcaagttcctgcacatctttggttccctgctgccccggccctccttcctctaccgcactatccaagatttgggcatcggcacattccgagacttggctgtggtgctggagacagcacccatcctgactgcactggacatctttgtggaccggcgtgtgtctgcactggctgtggtcaacgaatgtggtacccacccccaagatgagaggctcgggctgggctggggcctgggagaacctggaagtgaggagcgcctcttcccagccgccatcacatctaggaa

SEQ ID NO: 262 - DNA, 588 bp, Homo sapiens
  misc_feature (1)...(588): n = a,t,c or g
ccggtccggaattcccgggctcggccaagctcgtgttcctcgacctcagctacaacaacttgacccagctgggcgccggcgccttccgctcggccgggaggctggtgaagcttagcctggctaacaacaacctggtgggcgtgcacgaggacgccttcgagaccctggagtcgctgcaggtgctggagctcaacgacaacaacctgcgcagcctcagcgtggccgccctggccgcgctgcccgcgctgcgctccctgcgtctggacgggaacccctggctgtgcgactgtgacttcgcccacctcttctcctggatccaggagaacgcatccaaactgcccaaaggccttgatgaaatccagtgctccctgcccatggagagcaggaggatatccctgcgtgcgtgtcggaggccagcttcacgagtgtaggttcacctgtcatcacagacctctgcatcatcattttctctggtgtggccgtgtcattgcggcatcatctcagcttctcctgccactgtggtcagtgctccagaggtgncacccaacaaagatgcggaggatgaagacgaggacgaggatgactgag

SEQ ID NO: 263 - DNA, 343 bp, Homo sapiens
accggcccggatttccggggtcgacccacccgtccggaaggccacaaaggggggggagaactgcagttttgaggataacaaaaattggcagttcctttggggattaaatggcaacttcaatttcttcaaggagccctggggtgggaggaataaccatgccaaggggttccggacaacctgggccagaagttccagccaaaacaaccggacgtttcaaaataacaggaattttttgcggttgcaaagggacagccaaaaaaagggccagtttgcccggttaataagcccccttgtcaacctgccccaaagcccggggggcttggagttccagtaccaggccacg

SEQ ID NO: 264 - DNA, 245 bp, Homo sapiens
aagagctatgctcaagtgcctgagagaagggcagccccctccctcatacaactggacacggctggatgggcctttgcccagtggggtacgagtggatggggacactttgggctttcccccactgaccactgagcacagcggcatttacgtccgccatgacaccaatgagttctcctcaagggattctcacgacactgtggatgttcttgacccccctgaagactctgggaagcaggtggacctat

SEQ ID NO: 265 - DNA, 388 bp, Homo sapiens
ggcagcgggcgacgcgcccttgcgcagcctggagcaagccaaccgcacccgctttcccttcttctccgacgtcaagggcgaccaccggctggtgctggccgcggtggaaacaaccgtgctggtgctcatctttgcagtgtcgctgctgggcaacgtgtgcgccctggtgctggtggcgcgccgacgacgccgcggcgcgactgcctgcctggtactcaacctcttctgcgcggacctgctcttcatcagcgctatccctctggtgctggccgtgcgctggactgaggcctggctgctgggccccgttgcctgccacctgctcttctacgtgatgaccctgagcggcagcgtcaccatcctcacgctggccgcggtcagcctggagcgc

SEQ ID NO: 266 - DNA, 486 bp, Homo sapiens
aacagggaggcctaagatgagttcaggccatggaagatctccagtgaggggatcttggaagatgtgaaaagcatcctggagggggaggtagccctgcagcttagcggtccagtttccctcactggtcttacttggtatggcatagaggtgctcacacagcagcccccagtatcctcccacttccctaaaggcttaaacacaccaagatgtgtatcagtttcttaaagagcacaatagcacattactgaacaaccaaaattgcagagaagtggcctcatttcctggaagtgtttcatggacggggaggtggtgaggtgaggaaatcctcatgaccaaagaaacatgaggcctgaggactggcggttgtgctcaaccacatggagaccacgtcgtgccctacaagagcaatctggtggtgtggtgctgtggaagagagaccgccatggcgacaaaacttgtgcatgtatttagaatcagaggctcctc

SEQ ID NO: 267 - DNA, 714 bp, Homo sapiens
tttttttttaaatgttgcccaggctggtctcaaactcctagccttaagcaatcgtcctgcctcagcctcccaaaatacagggattacaggtgtgagccactcacaccctgcctgtattttaactgcatctcattatgttataaatttgagaactaaatgaggatatgttgccttgcatgtctgttagtttgtactaaggatctgattaggaagtggccactgagctaagaagaaaatggtgcaaagaaggaaagaggccatttctggatccaatattcatcttttactaaattttcactagagagttgtcccctgtcccaaatgagatttgggatgtgaaggccagtagcctaacaggtaacaattcctggggaagactcctgagaagagtctcatgttacaaactcatgagggtccctcttctttcttgtaggcatccaggctggagaagcagaacagcacacctgagagtgactacgacaacactcccaacgacatggagccagatggcatggggtacatgcacaggacgagcgtgccaggggaggggctccccagggccagagacctggcaggcctgggccagcagaagcagttcaccacacacaccccttttctctattttcagactcataaaggcttaaaggattcaagcatacgctcggaggttacatgtcttggcatctcacaatgttggcgaaagggctttttctt

SEQ ID NO: 268 - DNA, 405 bp, Homo sapiens
atcgcctgcaccttttgtggccaggatgagtggtccccggagcgaagcacacgctgcttccgccgcaggtctcggttcctggcatggggcgagccggctgtgctgctgctgctcctgctgctgagcctggcgctgggccttgtgctggctgctttggggctgttcgttcaccatcgggacagcccactggttcaggcctcgggggggcccctggcctgctttggcctggtgtgcctgggcctggtctgcctcagcgtcctcctgttccctggccagcccagccctgcccgatgcctggcccagcagcccttgtcccacctcccgctcacgggctgcctgagcacactcttcctgcaggcggccgagatcttcgtggagtcagaactgcctctgagctgggcagaa

SEQ ID NO: 269 - DNA, 436 bp, Homo sapiens
  misc_feature (1)...(436): n = a,t,c or g
ccacccgtccggcagagaagatacaataccttgtgctgttttttgttatgtcccatccttcacaggcttatgacaagttaagcttgagtgatcacttactaatagcagtactaaatctcttgagaagggaagtttcagagcatgggcgtcatttacagcagtatttcaacctgtttgtaatgtatgccaatttaagtaagaatttaagtttttcagaattctgttttgatgtatcatattaaattgtgaagccatttatgtcaagtgatgaaatataatctgatctgaagtagaaacaatttcccataaaacctgttgtgaattttatctgaacatggcactttcaccttttactttgtttatgcatgtgtctttgcggcagacacaggtcagaatctgngctctgattctttttttttccttaaccccccaacgg

SEQ ID NO: 270 - DNA, 489 bp, Homo sapiens
gagctacagagccagcaggcctgcacccacaccaaggagacagaacagctgcgcagccagctgcagaccctcaagcagcagcaccagcaggctgtggagcagatagctaaggcagaggagacacacagcagcctgagccaggagctgcaggccaggctgcagaccgtcactagagagaaagaggagttgctgcagctgtccattgaaaggggcaaagtgcttcagaacaaacaggcagagatctgccagcttgaggaaaagttggagatagcaaatgaagacaggaagcatgcgctggagcggtttgagcaagaggcagtggctgtggacagcaacttgagagtcagggagcttcagcgcaaagtagatgggatccagaaggcctacgatgaactcaggctgcagtctgaagccttcaaaaagcacagcttggatcttttaagcaaggagagagaactcaatggcaaactccgccatctctctccatag

SEQ ID NO: 271 - DNA, 670 bp, Homo sapiens
aaggagaaaagagtgacagtacaattgcctacagaatccatacagaagaaccaggaagataagctcaagatggttcccaggaagcaaagagaatttagcggatctgacagagggaaacttccaggaagtgaagaaaaaaatcagggaccatcaatgattggtcgaaaagaagagagattaataactgaaagaaaacacgaacatctgaagaataaatcagcaccaaaggtcgtcaagcaaaaggttatcgatgcacatcttgattcacagactcagaattttcagcaaacacaaatacagaccgctgaaagtaaagctgaacataaaaaattgccccagccatataatagtctgcaggaagaaaaatgtctcgaagtcaagggcatacaagagaaacaagtcttctctaatactaaagattcaaagcaagagattacacagaacaaatctttcttttcctctgtgaaagaatcccagcgggatgatggaaaaggtgccttaaatatagtggaattcttgagaaaacgtgaagaactgcatcagattttgtcgacagtgaaacagccttgatcatatcctttcattcgtggtctcttacacttcagatacatcttagttactttcccattattcatgaactgtattatcagccttattatgtagaatctcg

SEQ ID NO: 272 - DNA, 524 bp, Homo sapiens
ggagcggaagtgtatgcaaggaaaatatgcaggagctatggaatctgaaccctgtgtctgcactgaggctgattttgattgcgactatggttatgagcgacacagcaatggccagtgcctgccggcattttggttcaatccatcctctctgtcaaaggattgcagcttgggacagagttacctcaatagtactgggtacaggaaggtggtttccaataattgcactgatggcgtaagggaacagtacactgccaaaccgcagaagtgcccagggaaagccccgcgggggctgcggatagtcacggctgatggaaagctgacagcggaacaaggacacaacgtcactctcatggtgcaattagaagagggtgatgttcagcggacactcatccaagtggactttggcgatggtatcgcggtgtcttacgtcaatctcagctccatggaagatgggatcaaacacgtctatcagaacgtaggcatttaccgtgtaaccgtgcaggtggacaacagtctgggttctg

SEQ ID NO: 273 - DNA, 395 bp, Homo sapiens
ccggacgcgtgggttcagagcagcatgggacttgaacttttgtatgttcatgactctttattgccccatgacaccctagcaggtctaatgtgggaccccgtcagcttaccgtatggaatacttccaatctgagtcatgacaaccgacggaaatacatctttagtgatgaggaaggacaaaaccagctgggcatccggatccaccaggacatccccctccctccaaggagaagagagctccctgccttgcggaccaccaatgggaaagcagactccctaaatgtatctcggaactcagtgatgcaggaactctcagagctcgagaagcagattcaggtgatccgtcaggagctgcagctggctgtgagcaggaaaacggagctggaggagtatcac

SEQ ID NO: 274 - DNA, 402 bp, Homo sapiens
agagaagtaggttccaggaaacaaaaaggtcagaggtgtaccctgtgaagacaacagcaggtgtgaaagccaagaaactgcagcgctcagttcactcaagaaacaaaggggttcaatatggatggactgcagatctccagatggaagcggggcatggccaggccagcatcctatggctctactttgagacgggtacctgggtgtatcctgtgtttgccaaactcagtcttttgggtctagcagctttattctctttaagggagatattcatcgcccgtaatggggtagttggtgagacgctcacccattgtaagagggttatctggcccaggcatggttttaaaagtactaagagatcccccgagtatcttgaggcgcagagttcgcaggtgggagaaaaag

SEQ ID NO: 275 - DNA, 393 bp, Homo sapiens
  misc_feature (1)...(393): n = a,t,c or g
cccacgcgtccgaaattctctgagttcagggagatggtttttttattcaggtaagatttcttatgtattttggcagacattttgtatttagcgtatttaaggctgtcagtttacaaaaattaactaggaaggaatattacatgcattgagtttagttcttattcacaggaatatataaagtcataatatgcatatttcattttttagggctctcttgctacttgccagttatctgagccattattgtggttcattttgagagtattggatactagtgatgccttgaaagcatttcatgatatgggtaagataatatttcaataactatcatttaagtgtagttatgtgatagtatgttacattttcatttttgtagccttttgtggaagttan

SEQ ID NO: 276 - DNA, 694 bp, Homo sapiens
gcctcccatggggggtttgggtgggacagcaggcaggtaggctgggaggtctctccatggtgctggtgacagagcctgggtgggcatctcgcccacagactggtcccccaaggtggtggagctgtgtaagaagtaccagcagcagaccgtggtagccattgacctggctggagatgagaccatcccaggaagcagcctcttgcctggacatgtccaggcctaccaggtgggtcctgtgagaaggaatggagaggctggccctgggtgagcttgtctcccacccatagttgggagaaatcacaagaaccagggaccatggtgtctcctgagttctgaagtgtgtctttgttgggtcttaaggcttggaactggaatccccctgggccaggcgtggtggttcatgcctgtgatcccagcactttgggaggcgaggcaggaggattgcttgagcctaggagtttgagaccagccagggcaacatagtgagatccatctctgcaaatacaaaaaaaagtagtcaggcatggtggtgcatgcctgtagtcccagctacttgggaggctgaggtgggagaattgcttgagtccaggaagtcaaagctgcagtgagctgtgataatgcgactgcactccagcctgggtgacagagggagaccctgtctcaaaaaaaaaaaaaaggaagaaagaagaaagag

SEQ ID NO: 277 - DNA, 412 bp, Homo sapiens
  misc_feature (1)...(412): n = a,t,c or g
tggtcctacaggaaaggctggataatttccaaaggaaatgcatacagttagccagcagcacagaaggaaaagtcgacaaactcctaatgagaaacctcttcattagttatctccacacaccaaaacacaaacaacatgaagtgttacaggcaatgggaagcatcctgggtatcacaggggaggaaatggagccgctgtttcaggaagagcatggcactgctaccaggtggatgactgggtggcttgaaggaggatcaaaaagtgtccctaaaacaccactggggctgaatcagcaacctgcccttaatggttctttttcagaactttttgttaaatttcttaaaacagaatctctttcatctactcttccaacaagncttcctcctcataattctccaggaaagatcaaact

SEQ ID NO: 278 - DNA, 457 bp, Homo sapiens
  misc_feature (1)...(457): n = a,t,c or g
cggaattcccggtcgacnnnnncccgagaatggaggagaatgttctggccataagagccaccatgcaaatgcaagtcgggtgaggtgggggcaggggcatccaaggaagcaggagccaaggcttccttcttcagggcctctgactctcatccacttctgtatccctctagtcttctctgctttttgacgctagttccagagcttcaggtgggagaaggtggatactcctgggcataggggttgtctggcccatcctgttcctgcccccactcacccctcccaaccatcatttccagggcccagctggagacagccctgaagtggaggaactatgaggtgaagctgcggctgctgctgcacctggaggaactgcagatggagcatgatatccggcactatgacctggagtcggtgcccatgacctgggaccctgtggaccagaaccccaggctggtcc

SEQ ID NO: 279 - DNA, 441 bp, Homo sapiens
  misc_feature (1)...(441): n = a,t,c or g
ggaggcaggaggcggngaggtcgggtgccgttgggaaggaaccgagtcgggaagaggcgtgggagcgaggggcaccgaggacgctggcccggactgcgggggcagctcgcgggagaccgatgggcggcttggaagcctgcaggattgcagatgaggattgagttcggaatggagtggagaatgatgtaggatggaggaaagtgaaggaaggggagggggaacagaggaaaatgtgggaggagtggttgggaatttgtgagtagcaggcaggaagggatgcggaaggctgggtaggggctgcagaggattggaatgagcgggaaggttagcaggaatcagagggaagtgggccgagagctgaagggttcggcaggagtgttcattaaaaggaactggtgacttgacatgtcccttcgctccggntcctgatgtctcccatat

SEQ ID NO: 280 - DNA, 447 bp, Homo sapiens
  misc_feature (1)...(447): n = a,t,c or g
ttgcctcgttccggnnnaattcccggtcgacgatttcgaccactaacccgccctgcagcgtctcagccacaggcctaacaagttggctcccgcctccgctggccatcgcattggaaggctacccctggctctcccaccgccccagtaagattggtcactgtgaggaagccaaatcggatccgagagtctttttctaaaggccagtactggccacactttctcctgccgccttcctcaaagctgaagacacacagagcaaggcgcttctgttttactccccaatggtaactccaaaccatagatggttagctccctgctcatctttccacatccctgctattcagtatagtccgtggaccaatcacaccagcatcgtatgggagagtgtaagaaacatgaatctgcatgtcaacgagatccccaggtgagtcgtaagtaggtttggga

SEQ ID NO: 281 - DNA, 448 bp, Homo sapiens
cgcggaattctcgggtcgacgatttcgtgtgactgtgagcaggtcccttcaccgctcagagtctcggttttcccatctgaaaaatgggaacagccgtctgggtccccaaagagaaagagaagagggacaaagccagccaagagggaggggacgtcctgggggcccgccaagactgcaccccctccttgaagagcttggtcgccactgggaacctgctggacttagaggagacagctaaggccccgctgtccacggtcagcgccaacaccaccaacatggacgaggtgccgcggccacaagccttgagtggcagcagtgttgtctgggtgagtggttgtgtggccagcagatcggtgatcctcagcctgacctctgggtgagcctggggctgctccagggaccaggccctgggacccgagacttgtgggcctctgggaggaccaaaccc

SEQ ID NO: 282 - DNA, 472 bp, Homo sapiens
  misc_feature (1)...(472): n = a,t,c or g
tttcgtatgatttgagaagacagtgacgacacaaatatctgtaaaataaaaagatatctctcttattgcaacagtaaaagcttttgatcactaacatttcttgtgacaagaattatcattgatacagttaatacatatatacacacaaatacatactaataggtagtatggaggcagagtttttaagtagctgtcaaaagcctgtcgccacttcagatttggcttaagcttgtgaactttaaacaagtcatctaaaagaggaagtaaaactgggtagttgtaaggcatcacaaagaggtttacacaagttaaagttgtactggcttttaaataaccaaatggatatccaagttcattgtactttccactgctagtaacaaatacctgccagcaggtatggggagactttcgttccaagatatactgagttaagggcgaaggttcaagttcatatttgtcanaaggaagtttg

SEQ ID NO: 283 - DNA, 463 bp, Homo sapiens
  misc_feature (1)...(463): n = a,t,c or g
tatcggaaccgccccggaattatcgggtcgacgattctgtggccgcttcgccattcgtgccgactgcctgattctctcagttttcttttcagaggcaggntccaccttgattcttgggggaatagaagccatggtgggcgtggtgactggtgctgactcctcgctgctctcaaccctctcccggttcttccgcccaactggtgggggctgcagcttgatggagaactgagttgactcctcaggatgcatttggcactgcagtggtggaaccatgagccctgggtaacggggaaaagtccgaggactcagatggtagttgaacacagaacaagcttgagaatgaaggtagtgtttcatttcctcagggttgaaggagaagcagctgctgctggtgaaagggctcaagcctggtgatgggctataagagaagatggtgggagtcagggagagggctggtgaaact

SEQ ID NO: 284 - DNA, 449 bp, Homo sapiens
  misc_feature (1)...(449): n = a,t,c or g
aaaaacactaccaagaacgttattggatattttggcagatggcaccattttgaaagttggagtgggatgctcagaagatgccagcaagcttctgcaggattatggcctcgttgttagggggtgcctggacctccgatacctagccatgcggcagagaaacaatttgctctgtaatgggcttagcctgaagtccctcgctgagactgttttgaactttccccttgacaagtcccttctacttcgttgcagcaactgggatgctgagactctcacagaggaccaggtaatttatgctgccagggatgcccagatttcagtggctctctttcttcatcttcttggataccctttctctaggaattcacctggagaaaaaaaacgatgaccacagtagctggagaaaagtctggaaaaatccagggtgggtctnnnnnaatccgggaggtcct

SEQ ID NO: 285 - DNA, 447 bp, Homo sapiens
gcgcaagtcccggatctgaccgattcgaccatattattcatactcgggccttgatagggactgctcatggcttccactggcgaaagcatggttacctgacgtgatgatcttggtctgcgatagagtgtctgaagatggtataaaccgacaacaagctcaagaatggtgcatcaaacatggctttgaattggtagaacttagtccagaggagttgcctgaggaggatggtaagtgtttatgtgttaggagaaaatatggcacttacatatgagagattattttaattcatggaagaagaatcacagcaaaattcaagaaacttttttgcccagctgtttcaaggatttaagcaaaatccattgatgtaatcttataatcttacacttagtggaataactcattttttttgttttaccacctggtttagaacttttgaaaatgtgtgtt

SEQ ID NO: 286 - DNA, 493 bp, Homo sapiens
attccctgctcgacgatttcgtagtgaacctggataggggtttggacaacaagcacagggaatgagggatctgaggctggaggatggggagaggggagagactagagaacccagggctgagatgtgatgggttagagtacagtgagggaggtaactgaggagcagtagttgatctttacctctttcacctccctagacagcagaggatgtgctgactgtagcctatgagcatggtgtaaacctgtttgacaccgccgaagtgtacgcagcaggaaagtaaggactggggtgaaagagctaagctccatttggaaggctgagaggacctcagggattatcttctcgttttccctctaaagaaccctgggacttctgagaacgtgaagttccaaccttttggcggagggacccgaaagcactgtaggagctacagtcccaacattagtccctctctggcttagaagtcaatgggcgtactgtgcagctacattaa

SEQ ID NO: 287 - DNA, 427 bp, Homo sapiens
tttcgtggcagaggtgaggcgagaatgggccaagtacatggaagtccatgagaaggcctccttcaccaacagtgagctgcaccgtgccatgaacctgcacgtcggcaacctgcgcctgctcagcgggccgcttgaccaggtccgggctgccctgcccacaccggccctctccccaaaggacaaggccgtgctgcaaaacctaaagcgcatcctggctaaggtgcaggagatgcgggaccagcgcgtgtccctggagcagcagctgcgtgagcttatccagaaagatgacatcactggctcgctggtcaccacagaccactcacagatgaagaagctgttcgaggagcagctgaaaaagtatgaccagctgaaggtgtacctggagcagaacctggccgcccaggaccgtgtactctgtgcactgaca

SEQ ID NO: 288 - DNA, 469 bp, Homo sapiens
  misc_feature (1)...(469): n = a,t,c or g
tttcgtcaacttgggtattttgacctgtatagaatgttctggcatccatagggaaatgggggctcatatttctcgcattcagtctttggaactagacaaattaggaacttctgaactcttgccggccaagaatgtaggaaacaatagttttaatgatattatggaagcaaatttacccagcccctcaccaaaacccaccccttcaagtgatatgactgtacgaaaagaatatatcactgcaaagtatgtagatcataggttttcaaggaagacctgttcaacttcatcagctaaactaaatgaattgcttgaggccatcaaatccagggatttacttgcactaattcaagtctatgcagaaggggtagagctaatggaaccactgctggaacctgggcaggagcttgnggagacagcccttcaccttgccgtccgaactgcagatcagacatctctccatttggttgag

SEQ ID NO: 289 - DNA, 454 bp, Homo sapiens
tttcgtggcaagcggcgggccagcgacggcgcgaatgtcggactctcagtttttctgtgtggcggaggaacgcagcggccactgcgccgtggtggacggaaacttcctctacgtgtgggggggctacgtgtctattgaagacaatgaagtatatttgcctaatgatgaaatttggacctatgatattgatagtgggttgtggagaatgcacctcatggaaggagaactcccagcctccatgtcaggaagctgtggtgcttgcattaatggaaagctgtacatttttggaggatatgatgacaaaggatacagcaatcgactttattttgttaatttacgaacaagagatgaaacctacatttgggagaaaatcaccgactttgaagggcaaccacctacaccacgtgataaactttcctgctgggtatataaagacagactaatatattttggt

SEQ ID NO: 290 - DNA, 378 bp, Homo sapiens
tttcgtcagggccagctgtacaaggtctttctccacggctcccagggccaggtttaccactcccagcaagtggggcctccaggctcagccatcagcccagacctgctgctggacagcagtggcagtcacctctatgtcctgactgcccaccaggtggaccggatacctgtggcagcctgcccccagttccctgactgtgccagctgcctccaggcccaggacccgctgtgtggctggtgtgtcctccagggcaggtgtacccggaagggccagtgcgggcgggcaggccagctgaaccagtggctgtggagttatgaggaggacagccactgcctgcacatccagagcctgctgccgggccaccacccccgccaggag

SEQ ID NO: 291 - DNA, 385 bp, Homo sapiens
tttcgttacatgcccaacaacagacaacagctactgaggaaaaggcacataggaaatgacatcgtcaccatcgtcttccaggagcctggggcacttccttttactccaaaaagcatccggtctcactttcagcatgtctttgtcatagtcaaagtgcataatccatgtaccgaaaatgtgtgttatagtgttggagtttccagatcaaaagatgtgccaccatttggcccaccgattcccaaaggtgtaacttttccaaagtcagccgtgttccgggacttccttttagccaaagtaatcaatgcagaaaatgcggcccataaatcagaaaagtttcgagcaatggccactcgaacgaggcaggagtacttgaaagatctggcgg

SEQ ID NO: 292 - DNA, 453 bp, Homo sapiens
gtcgacccacgcgtccgccacccgcgacaacccagtcccctgaaagcactatggatacctcactgaagaaggagaagtcagccatcctggatctttatattcctcctccgcctgctgttccctactctccccggtatgttgctgtccattgtcatggtatgcttgtctcctgttggtgtcatttgtaaatggtggagtgaaaagaggatcttgagagaggaagttgctgagccacagtgtgacagggctgaatcttgaactgccgttaaaagtattatcagccttattttataggagtgtaaggacatatctgggttctgtggggcttgaaactatacagattggtggggaggggccttttgacaaaaaaatattggcgggcttggccatagtggggacactaacacctggtaatccaacactctgggagagtgaggtcttttaatcacttga

SEQ ID NO: 293 - DNA, 427 bp, Homo sapiens
agggagaaagaggaggaggtggaagaggaagaagataaggtggttaaggagacagaaaaggaggctgagcaggaaaaggaagaagacagcctgggagcggggacccacccggatgctgccatcccctccggggagcggacatgtggctctgagggctcccgctccgtcctggacctggttaactacttcctgtcccccgagaagctgacagcagaaaaccgctactactgcgagtcgtgtgcctccctgcaggatgccgagaaggtggtggagctgagccaagggccgtgctacctcatcctcacactgctgcgcttctctttcgacctgcgcaccatgcggcgccgcaagatcctggatgacgtctccatccccctgctgctccgcctgccactggctggtggccgtggccaggcctatgacctct

SEQ ID NO: 294 - DNA, 392 bp, Homo sapiens
catatttccatggacaagaaggggtgaactttgaatttcaaagattcattactgaacaggtaagagtgatgatttttgtattcctaggagaatcagacaaaatactaacagctttgttgtttttgttttagacagactactctgatagtttatattttgtcttttattggaatggttatctttactttcacattggaccttagatatattatcatcgtgtttgttactggaggggtgcttgggtaagtatcagatgtgttaaggaggaatgatagcatgctgttataattctgaagtattattactctggtctttaattttttcagttcatccaaagtttcttcaatattttaaacttcaaaggattcattctatgcatataaacatgtaag

SEQ ID NO: 295 - DNA, 402 bp, Homo sapiens
ctctggcttcctcacagcatggaatactgaacaatctttctctccttttcagtatttgcaaaacatgtattcggacaatggatcatcactgcccgcgggcgaacaattgtgtaggagaacagaatcacagatttttttgtgctcttcactgcaagtcaaaacatttttgcattgaatttacattgaatacgaacttctttaactgcttcttgcctggagcagagaaatctactatcgacgcgccattttctctccagccttttctccaggattcaaagtataatactgcgctgtcattgtcagaaagtatctcccaataagtaacatgctggctcgtattatcttaagagctcacgtgtatttaattctctcccatatgccctcaatcgctattgtttattt

SEQ ID NO: 296 - DNA, 428 bp, Homo sapiens
gtggaattccagagatcatattctaagaacatgtttcgattttgttttacattgccagttttgttatcttggcacattatcccatagactcctaggagtgactgccttggtcagaaaggtggtgtgggctaaatggaaaccaagtttccctgacagggcacccactgtcaccccctgcctagtttatggtcaggcctaacaaatataaagccagtattcacatagtttggattatcatttattgcaggtgaccaaaaatcctttcacactgggcgacagttccaatcctggacagacggagagactacaggagtttagccagaagatggaccaggtaagaggtcactggccagtcagtacttagaatcctggggctccagtgaacaggaggctgcatgctcatgtcttgccactttttgaacatctaa

SEQ ID NO: 297 - DNA, 432 bp, Homo sapiens
  misc_feature (1)...(432): n = a,t,c or g
gtgcaattcgccgttnacgctggtnttggatacctttattttactgggcatccaggacaacattttggtcttgattctggccacaccccccttcatggcgggggggaagttgtatagcactatggggcgcttcctcagagaccgaaagaacccggcgtgccgggagatggctgtggtactgctggccaacctggctcagggggacagcctggcagctcgtgccattgcagtgcagaaaggcagtatcggccacctcctgggcttcctagaggacagccttgccgccacacagatccagcagagccaggccagcctcctccacatgcacaacccaccctttgagccaactagtgtggacatgatgcggcgggcttgccgcgcgctgcttgccttggccaaggtggacgacaaccactcagagtttactctgtt

SEQ ID NO: 298 - DNA, 595 bp, Homo sapiens
cgggaattcaattatttaaaattggtttttggtataccataggtaaaaaatggatgagccttacttaatctgtgtaactttatttggttacaatcaacttataaaactagaagtaaatttttctcagaaaaaaatgtgtatttgttgcttccagttctgtaaccttgagctgattggtcaatgataatagttccttactttgacatagcaacttcaaaatattcacttatttggtcattagaataagcccgagaggcagaatgattgcatcagtatgtgattgtgactttctggtagttctttctgtaattctggatttattttcctagcttcttcatgactggttacctccctttgggttttgaatttgctgttgaaatcacttaccctgaatctgaaggtacttcatctggtcttcttaatgcttctgcacaggtaaacctctgatttctctaaacctgagatgattattataccagatattctagtgagtaatgagtttgaccatggttttatttgttgttgttgttgttgttttgttttttggagacagagtcttgctcagcctgggtgacagagcgagactctgtttcag

SEQ ID NO: 299 - DNA, 492 bp, Homo sapiens
aaaatcaaagcaaagaatctcacaaactatgatctctgcagcatttttcttggaacctctacgctcttggtttgggttggagtcatcagatacctgggttatttccaggcatataatgtgctgattttaacaatgcaggcctcactgccaaaagttcttcggttttgtgcttgtgctggtatgatttatctgggttacacattctgtggctggattgtcttaggaccataccatgacaagtttgaaaatctgaacacagttgctgagtgtctgttttctctggtcaacggtgatgacatgtttgcaacctttgcccaaatccagcagaagagcatcttggtgtggctgttcagtcgtctgtatttatattccttcatcagcctttttatatatatgattctcagtctttttattgcacttattacagattcttatgacaccattaagaaattccaacagaatgggtttcctgaaacggatttgcaggaattc

SEQ ID NO: 300 - DNA, 445 bp, Homo sapiens
ccagtgtggtggaattcactaaacggagcttcagaagtgacattttctgtgcatgtaaaagatggtggctcatttccaaagacagattctacaacagtgactgttagattcgtgaataaggccgatttccctaaagtcagagccaaagaacaaacgttcatgtttcctgaaaaccaaccagtcagctctcttgtcaccaccatcacaggatcctctttaagaggagaacctatgtcatattatatcgcaagtgggaatcttggcaatactttccagattgatcagttaacagggcaggtgtctattagtcaacctctggattttgaaaagatacaaaaatatgttgtatggatagaggccagagacggtggtgtccctcctttctcctcttacgagaaacttgatataacagtattagatgtcaatgataatgccccaattttta

SEQ ID NO: 301 - DNA, 433 bp, Homo sapiens
cttggctttcatgcctgggaaggatgagaccaaagcctgacccgaaagccagcgatcgccaagatgagttaaatgaataagcaaaggaagccacttctttctctgctctccactcaggccttgccagccatttaaatagtaccactgtggctgttctctgaacccatttcatttgccttcctttgggttattgttttccccttttagacaaagatttgcagctcccttcgggattcaattgcaacttcgatttcctcgaggagccctgtggttggatgtatgaccatgccaagtggctccggaccacctgggccagcagctccagcccaaacgaccggacgtttccaggtaagccagctgtgagtgaagatatgaaagagttaaggccagcttgttccacatacttcaaccccagattcccttacaagcttca

SEQ ID NO: 302 - DNA, 412 bp, Homo sapiens
gggcccccaaatgctgtgtaagaagatctacttcatctgggtgacacggtcccagtgtcagtttgagtggctggctgacatcatgcaagaggtggaggagaacgaccaccaggacctggtgtctgtgcacatttatgtcacccagctggctgagaagttcgacctcaggaccaccatgctatacatctgcgagcggcacttccagaaagtgctgaaccggagtctgttcacgggcctgcgctccatcacccactttggccgtccccccttcgagcccttcttcaactccctgcaggaggtccacccacaggtgcgcaagatcggggtgttcagctgcggccctccaggaatgaccaagaatgtagagaaggcctgtcagctcgtcaacaggcaggaccgagcccacttcatg

SEQ ID NO: 303 - DNA, 453 bp, Homo sapiens
actcggtgcaattcgtgattgatgcaaatgtgcctgtgtggttacatgcacacacatttgcaaataataacttacatctattaatttaaaacacaggagagtaaatagagatggaatttcaatcttaaaagagattcgaacctatggaaattgagcagaaatgctttctaatggctgttattttgtttttcagacactcatccttgattctccttcattgcctttttcatggggctcttattaaaggcttctgacacttaaatgagctctctttagaaaaacagaaatagaaattaaatagatggctttgtttcttttacagctggtcttttgggatcctgctctatgagatggtgactctaggagcaccaccgtatcctgaagttcctcctaccagcatcctagagcatctccaaagaaggaaaatcatgaagagacccagtagctgctcac

SEQ ID NO: 304 - DNA, 386 bp, Homo sapiens
gtccctgtggtggaattcgcactgtgctccttgctggggcctggggctgccagcacctactccccacagacacttttggggtgttggggtatgttgctgcaaggcctaccgccggggcttccgcagctgctcagacacaggatagtgagtctgactcagacctcctgcttggggttgacccggtgtcccctcccaggccctcaggaaagcagagagcttgaagaaatgtctctctgtcatggaagccaaagtgaaggctcagactgctccaaacaaggatgtgcagagggagatcgctgaccttggagaggtaggggcggcttccctccctccgtcctcagggcctggtgcatgaaacatgccccgtcttcaggaaatcatctgtg

SEQ ID NO: 305 - DNA, 438 bp, Homo sapiens
ttcgttgacctctagtccagcgtggtggaattcgtttgcccttgaacgaggcctccaatagactcttctgtgtgttcttaatgagcagttgtgaacatctctttaggaactcattgccttctgcggcagcatagggcatgggctacctccacgccaagggaatcctacacaaggacctcaagtcaaagaacgtcttctatgacaacggcaaagtggtcatcacggactttggactcttcagcatttctggggtgctgcaggctggcaggcgggaggacaaactgcgcatccagaatggctggctatgccacctggcaccagagatcatccgccagctgtcccccgacacagaggaggataagctccccttctccaagcactctgacgtctttgcccttggcacaatctggtatgaactccacgccagggaatggcctt

SEQ ID NO: 306 - DNA, 430 bp, Homo sapiens
agtgcggtggaattcctgtgttaactgtagttgtgccttcggaaatggagcctctctctccacaagtttaggggagagcagtggatgcctgtgggaaattgggaaatggttgagttgcagcttgctgtcttttccttcccccttagctgttctcatcatcaccttctgcattgtgaccgtgcttggaagggaggctctcaccaaaggggcgctgtgggcagtctttctgctcgcagggtctgccctcctctgtgccgaggtcacgggcgtcatctggaggcagcccgagagcaagaccaagctctcatttaaggtgagcagctcggcctagggaaggaaccctggtacacagaccctggccctcctgatgcctggccagccctgcgtgggctcagccgggcctgggtgctcccgaggaaggtttttgctt

SEQ ID NO: 307 - DNA, 411 bp, Homo sapiens
aaactatctctgcatcgctaagaacagtgcgggcagtgccatggggaagacgcggctggtggtgcaagtcccaccagtgatcgagaatggcctcccagacctgtccaccaccgaaggctcccacgccttcttgccttgcaaggcgaggggcagtcctgagcccaacatcacctgggacaaagatggccagcctgtgtcgggcgccgaggggaagttcaccatccagccttctggggagttgctggtgaagaacttggagggccaggacgcaggcacctatacctgtaccgctgagaacgccgtgggccgggcccgccgccgcgtgcacctcaccatcctggtactgcctgtgttcaccaccctgcctggggaccgcagcctgcgccttggggacaggctgtggcttcgctg

SEQ ID NO: 308 - DNA, 407 bp, Homo sapiens
cccacgcgtccgccacgcgtccgctttgataatgagtttgatgcagaatctcaaagaaaacgaacgacatctgtcagcaagatggaaagaatggatagctctcttcctgaagaggaagaagatgaggacaaggaagctattaatggcagtggaaacgcagaaaacagagagaggcattctgagtcatctgactggatgaagactgttccaagttacaaccaaacaaatagctccatggactttagaaattatatgatgagagatgagactctggaaccactgcccaaaaactgggaaatggcctacactgacacagggatgatctacttcattgaccacaataccaagacaaccacctggttggatcctcgtctttgtaagaaagccaaagcccctgaagactgtga

SEQ ID NO: 309 - DNA, 526 bp, Homo sapiens
ccaggacttcctgacactgacgctgacggagcccactgggcttctgtacgtgggcgcccgagaggccctgtttgccttcagcatggaggccctggagctgcaaggagcggtgagaggtggggcagtgggaggcagtcgggcctgccagagggcaaggcccagaggggctgtgcttggctaggtggtccctcagcctggctgcccccacagaagtgctgctgggcatccggggcctgccctctggttggggtcagcatgcggcattcctctcctctctggcacttactgaattctgtgtagtggggtggtttggggcttccattctgtactaaaggaagtccccagagaatagggaccatgcctctgcactgggcgtccctgtgttgctgctgcaggctgtgcttgtgacacgtgctcagtccgtacctgtaacgtggctgacatccccttccctttccccagatctcctgggaggcccccgtggagaagaagactgagtgtatccagaaagggaggaacaaccaag

SEQ ID NO: 310 - DNA, 419 bp, Homo sapiens
caggacatgatggagcgcgccatcatcgacacttttgtggggcacgacgtggtggagccaggcagctacgtgcagatgttcccctacccctgctacacacgcgatgacttcctgtttgtcattgagcacatgatgccgctgtgcatggtgatctcctgggtctactccgtggccatgaccatccagcacatcgtggcggagaaggagcaccggctcaaggaggtgatgaagaccatgggcctgaacaacgcggtgcactgggtggcctggttcatcaccggctttgtgcagctgtccatctccgtgacagcactcaccgccatcctgaagtacggccaggtgcttatgcacagccacgtggtcatcatctggctcttcctggcagtctacgcggtggccaccatcatgttctgcttcct

SEQ ID NO: 311 - DNA, 465 bp, Homo sapiens
agatgaagcctcagatgccaggcctgggagctccaaacggctatggaccaggaaggggcagggctggggttccaggaggtccagagcggaggccttgggtccctcacttgctccctttctcttcaccaggctatttgggggttatgaaggcccagaagccaggtgctggagagggcatgaaacctcagaagccaggcctgcgagggaccttgaagcctcagaagtcaggacacggccatgaaaatgggccctggccaggtccctgcaatgcgagggtcgctccgatgctcctccccaggcttcccactccaggggtcccttcggacaaagagggtggctggggcctgaaatcccagcccccttccgcagtgcagaatggcaagttaccagggcaccagcctccaaatggctatggaccgggagcagaaccaggttttaatggtggcctcgagccacagaaaattg

SEQ ID NO: 312 - DNA, 405 bp, Homo sapiens
aatggctggcacaggagtggtctccgtgcacagtgacatgtggccagggcctcagataccgtgtggtcctctgcatcgaccatcgaggaatgcacacaggaggctgtagcccaaaaacaaagccccacataaaagaggaatgcatcgtacccactccctgctataaacccaaagagaaacttccagtcgaggccaagttgccatggttcaaacaagctcaagagctagaagaaggagctgctgtgtcagaggagccctcgttcatcccagaggcctggtcggcctgcacagtcacctgtggtgtggggacccaggtgcgaatagtcaggtgccaggtgctcctgtctttctctcagtccgtggctgacctgcctattgacgagtgtgaagggcccaagccagcat

SEQ ID NO: 313 - DNA, 430 bp, Homo sapiens
ggtagtggccgacaactgcagacaaggctacctggatgccctgaggttcctggagagacgtggactcaccaaggaaccagtgctatggacgctggtgtctaaggaacccccagccccggctgatggaaactgggatgctggctgtgaccaacgccggaaggggggcctgtctctcaactggaaagtgccccatgtgcaagtcaaggatgtacccaactttgagcagctctcaccagagctggaggctgcactgaagaaagcatgtacgagggatcccagccggtgggcccgcttctggcactcggggcctggacaggtgctgacgtacctgctgctaccctgcacactgcccttcgagtacatctacttccgcagcagaaggttggtggtgtggctgcccgatgtgccggcggacttgtggtggatgcag

SEQ ID NO: 314 - DNA, 424 bp, Homo sapiens
  misc_feature (1)...(424): n = a,t,c or g
agcgcggccagctcaggttttgagatgtgtcccatccggttggaggagaggtccagagtaagcaggtgggtggcgctcagaccgtgcaggtggtcgaaggagaacgaggcgagttcgttgcagcccaggtagagatggctgagcgcgcgcaggccgtggaaggcatgctcgtccaagtgcaccaagcggttattgaacagaagcagcttctccagcgcccccagcccgtcgaggtcgtggcggccaagcgcccgcaacgtgttagatgatagatcgagcagcctcaggccgctggcgttgacgaagacgccgcgacccagcgcatctagttcgttgtggtctaggtgcagggcgcgcagctggaagaggggcgccaaccagccggggcgcaagcgctggagcgcgttgtggctcangtcgaggt

SEQ ID NO: 315 - DNA, 537 bp, Homo sapiens
atcactgtgtcgacccacgcgtccggtagcccctttggcctggagccacagagtgggtggctatgggtgcgggcagcactagaccgtgaggcccaggaattgtacatactgaaggtaatggcagtgtctgggtccaaagctgagttggggcagcagacaggcacagccaccgtgagggtcagcatcctcaaccagaatgaacacagtccccgcttgtctgaggatcccaccttcctggctgtggctgagaaccagcccccagggaccagcgtgggccgagtctttgccactgaccgagactcaggacccaatggacgtctgacctacagcctgcaacagctgtctgaagacagcaaggccttccgcatccacccccagactggagaagtgaccacactccaaaccctggaccgtgagcagcagagcagctatcagctcctggtgcaggtgcaggatggagggagcccaccccgcagcaccacaggcactgtgcatgttgcagtgcttgacctcaacgacaacacataaaaaaaaaaa

SEQ ID NO: 316 - DNA, 400 bp, Homo sapiens
cgaacttgtcgtggagttggtgtctgctggcaagtcgggtcctgagcgaaacacctatgaggttcaggtggtcacggggaatgtgcccaaggccggcactgatgctaacgtctacctaaccatctacggcgaggagtatggagacacgggcgaacgacccctgaagaagtcagacaagtccaacaaatttgagcaggggcagacagacaccttcaccatctatgccattgacctgggggccctgaccaagattcggattcgccacgacaacacaggcaacagagcaggctggttcctggacagaatagacattactgacatgaacaacgagatcacgtactactttccatgccaacgttggctggcagtggaggaagatgatggccagctgtccagggag

SEQ ID NO: 317 - DNA, 440 bp, Homo sapiens
cggtcctgaattgccagggacgacccacgcgtcctgtgcggatcaacggggatggacaggaggtcctgtacctggcagaaagtgataatgtgaggctgggctgcccctacgtcctggaccctgatgactatggtcccaatgggctggacatcgagtggatgcaggtcaactcaaaccccgcccaccaccgagagaacgtgttccttagttaccaggacaagaggatcaaccatggcagccttccccatctgcagcatagggtccgctttgcagcctcagacccaagccagtacgatgcctccatcaacctcatgaacctgcaggtatctgatacagccacttatgagtgccgggtgaagaagaccaccatggccacccggaaggtcattgtcactgtgcaagcacgacctgcagtgcccatgtgctggacagagggccag

SEQ ID NO: 318 - DNA, 414 bp, Homo sapiens
actgaatttccaactcatcactgttgtggcaacagtgcatgtccttctggaaaaaacacatctccatcaagacgttggtgctgaagaacctgagcggcccactccaaagatccgttaattgccagagaaggagttccccataattagaaaatcatcttccttaaaagtcaccaagtgccttttcactgaacagcccaaacccataatcattttgcgctttgcagaaaattacgacgcgaggctcttacggattgacattgccaacacgctaagggagcaggtccaggagcttttcaataagacatatggtaagcagcgcagaacccctggggagggacatgtagctgctgtggacagagaagtggcaggtttcccagttccagccgaggggatttctggggaaacgattcaccc

SEQ ID NO: 319 - DNA, 508 bp, Homo sapiens
aggcttctttgcctacacgtacggccgcctggtggtggtggaggacctgcactctggcgcccagcagcactggtccggccactctgcggagatctccacgctggccctcagccacagtgcccaggtcctggcctctgcctcgggccgaagcagcacgaccgcccattgtcagatccgcgtctgggacgtgtctggcggcctctgccagcatctcattttcccccatagcaccaccgtgctggccctggccttctcaccagatgacaggcttcttgtcacactgggggaccacgatggccgcaccctcgccctgtggggcacgggccacctatgacctcgtgtcctccacccgcctcccggagccggtgcatggtgtggccttcaacccctgggacgccggtgagctcacctgtgtgggccagggcactgtcaccttctggctccttcagcagcgtggggcagacatcagccttcaggtgcgtcgagagccggtcccagaggcagtggg

SEQ ID NO: 320 - DNA, 693 bp, Homo sapiens
ttttttttttttcataggtataaactttatcttactcctacatatgaaaatggatgtgttacagggatattgatctcggggacttttttttgtttctttgtaaaaaacaaggtctcactctgttgcccgggctggagtgcagtggtgcaaacccagctcactgcagcctccaaactcctgagctgaagcaatcttcctgccccagcctttcaagcagttgggactacaggtacctaacaccacacttggccatctcaaggacattttatgacaaagaggaaagtgctgtgcacacagaaggagctcaaccaatgttggttagattggaaaaaatggtgctccctgcccccagcccctcaccgtgatggcgtctatcttgaagagggctttggcctgggtgctggtgtaggcgtcgaagcggtacgtgatttggttgaggttgtcgatggagtaggcctggacccgcacaatctcagtacccagtgccagattctccaggatggcagcctcgtatgaggcattggagaactgcacggcctcgtccagctcgttgagcagagtgatgtagacgctgcagaagccctggttgaagggcggggcctggtcagtggccgacacattcatcatgtagctggtcttggtctcgtagtccaggtaattcacggtgatgataagccctgtgctctcgtcaat

SEQ ID NO: 321 - DNA, 383 bp, Homo sapiens
  misc_feature (1)...(383): n = a,t,c or g
gcgcgcggatcccgagagggaaagcctgtancaccgttttagggagatcgactggcgaactggaaggtttcgcctcctcccgcctgccccctcagccctgtggctgggggcagagctcagatttattatctaggatagatttggatgaactaatgaaaaaagatgaaccgcctcttgattttcctgataccctggaaggatttgaatatgcttttaatgaaaagggacagctaagacacataaaaactggggaaccatttgtttttaactaccgcgaacatttacacagatggaaccagaaaagatacgaggctctaggagagatcatcacgaaatatgtatatgagctcctggaaaaggattgtaattcgaaaaaagtatct

SEQ ID NO: 322 - DNA, 447 bp, Homo sapiens
ggtcgacccacgcgtccgggcgcttgaaagccattgctgccttctaaagaaggacattaaccagccacagcatgtctcttggtctaagtagagtgaatgagtttcatttctcacgacaggagaggtggattggtattgacggcctgtgccagtgtcatgaaggattctgaggctgtgtccaagcccgataggagagagtgcggaacagccttttccctgggaggggagacagccagtgtgcatgctgtccatccagtcctgtgtgggtcttccttgaaacaggatttttgttcccttggctcttcttgcaggtggaagtgatcaagaaagcctacatgcaaggtgaagtggaatttgaggatggagaaaacggtaaggatggggcggcgtcccccaggaacgtggggcacaacatctacatattagcccatcagttggctcggcatt

SEQ ID NO: 323 - DNA, 393 bp, Homo sapiens
aagatttcttcatctaaaaggaactcctgttttatcacttaattgtaaacaatattaacttttttaataccaggtatgcaaaaatacacattccaattattgcatcagtgtctgagcatcaacctacgacttgggtgtctttcttctttgatctacatattcttgtatgtaccttcccagcaggcctttggttctgcatcaaaaatatcaacgatgaaagagtatttggtaagagaggtttttaatgaatactttgatatggaatagttatttttctttttgagattatttactttaaatttttggttttctatggttgactctatatattcaagataaattttctcctttattttgcataggtgcttaaccaagaaaaattcactgagaggc

SEQ ID NO: 324 - DNA, 797 bp, Homo sapiens
actacatgaaaatttctctaatcaaatactaaagaaaataaatcacagaatttaagaaagatggagatgtaaaagaatatttatatgtgtgcgtgtgtatgtgtgtattgaaattctttttaacctattgcataaggtttattgaaatagaaacatatttcatggaaaacattaataccattttgttattgaaagtactagataatctacaaataatcccatgaaaagagcaaattttctgaaaaatatataaacctgttaatataataaacaagatagcactcaaatgtatttgtcaaaattaatatataataactcagtaaaatgtaattatattgtaccttacttaaatatattttatgacatcaaaattatttttctctccaattaaaattagaaataaacaaaaaagttaatcaaaatcttaactatttggatatgaagaaatatttctagtctgtttctctggttaaatacagactggagaacttggcttaatgaattgtttgaggcatgaattaactatgttatttttctgcgcggtatcatcaaagaaaaatttttgggattctctatatttttacgctgtctgcaataaataggaaagagcctaatttatttatttacttatttatatttttcgagatggagtctcactctgtaacccatgctggagtgcaaagacacaatctcaattcactgcaacctctgcctcctgggttcaagcgattctcctgcctctgctttctaagtagctggaattacaggggcgcaccaccaggcccggctaatttttt

SEQ ID NO: 325 - DNA, 623 bp, Homo sapiens
gaatgacttcctgccgctctacttcggctgggtcctgaccaagaagagctctgagaccctccgcaaagccggccaggtcttcctggaagagctggggaaccacaaggccttcaagaaggagctgcgacaatgtaggtggcaggttggggccttataagcccaccttgctgggcacagggtgctgcgggcaaaggaccatcattgtactcaaaggatggagcacgaagcagcaggaggcagagagaggctcacctcagcgggggcaggggcaagcggtgcgtcccagtggtagccttggggagttggcagcacattgggaacacgggggcttcccagagcgcctttcctcccaccacacctatccttctagccctcttctctccgacacccttttcccagcctgaatgtagaccactgtcccttgtcttggaggtgggaaaaacaaattactgtagtaacaggaaacatgtcctcttctaatgtaaccttagagggggaatcaagcccagtgttttccaacgcatttttagcagcagaatcatgttccaaaaaataataataataatcacatgaaattgtaagctgcaaaaaaattaaaactaggactattgtggcttcaaaaa

SEQ ID NO: 326 - DNA, 172 bp, Homo sapiens
ttttttttttttaacttttccctttgaaactttctaaaaaatggttaggggatcaaaaaaattaatttccttttttccagggggcccatatggaatattggctggaagggatccctccaaaggactggccactttttgcctaaataaagaggcccttaaagatgaatttgag

SEQ ID NO: 327 - DNA, 385 bp, Homo sapiens
cttacccttgagtttttgcttttgcccgccgcctccgagctggctcatgggaagcggctggcctgttgcatcgtggaccacaagttacctgagtgtggcttctacggcctttacgacaagatcctgcttttcaaacatgaccccacgtcggccaacctcctgcagctggtgcgctcgtccggagacatccaggagggcgacctggtggaggtggtgctgtcggcctcggccaccttcgaggacttccagatccgcccgcacgccctcacggtgcactcctatcgggcgcctgccttctgtgatcactgcggggagatgctcttcggcctagtgcgccagggcctcaagtgcgatggctgcgggctgaactaccacaagcgctgtg

SEQ ID NO: 328 - DNA, 569 bp, Homo sapiens
ttccgtacttgaattacccggccgacgatttcgtgtcagcgcccaggtcctgggctggccgccgggatgttgccctacacagtgaacttcaaggtgtcggcgcgcaccctcacgggggccctcaacgcccacaacaaggcggcggtggactggggctggcaaggtttaattgcttatggatgtcattcacttgtggtagtgattgattccattactgcccaaactcttcaagttttagaaaagcataaagctgatgttgtaaaggttaaatgggccagggaaaactatcaccataacattggctcaccatattgcttacggttagcttctgctgatgtcaatgggaagatcatcgtctgggatgtagcagcaggagtagctcagtgtgagatccaagagcatgccaagcctatccaggatgttcagtggttgtggaatcaagatgcttcccgcgatttactgcttgctatccacccgccaaattacattgtgctctggaatgccgacactggcaccaaactatggaagaagagctatgcagataacattctttctttttcttttgaccc

SEQ ID NO: 329 - DNA, 1129 bp, Homo sapiens
tttcgtcctatggtcagctaggcccttttgcagattttggtctctctgctctcactgctttgggaaattatgctatgtggacagcatgatcagtaaacctgcctccctccttgtggccctgggaggaagccatggactctaccaagtctgaacccctgaagggatcaccagaggctgaagatggaaacattgaatataaaaagctggtgaatccatcccagtaccgctttgagcacctggtgacacaaatgaagtggcggctccaggagggacgtggtgaggccgtctaccagattggggtagaggacaatgggctgctggtggggctggctgaggaggaaatgcgagcttcgctcaagaccctgcaccggatggcagagaaggttggggcagacataaccgttcttcgagagcgagaagtggattatgatagcgacatgccccggaagatcaccgaggtgctagtacgaaaggtccctgacaaccaacagttcctagacctccgtgtggccgtcctggggaatgtggactctgggaagtcaactctgcttggagtcctgacccagggagagctggacaatgggcggggccgggctcggctcaaccttttccgccacctgcatgagattcagtctggccgaacctccagcatcagcttcgagatcctgggctttaacagcaagggagaggtgcatgggatcaatgggacccaatggggccagactctgaggatgggatggtagtagtgaaggacataggatgggggtagagtgtggagactttttgaaatagtatagatgaatgccctgaggggactgtgaacaagctctgcccctcttaggaaatcaatggggaatcaactaaattaaataaaaaatggggtcaagattaagaggcagggtcacccagggaatggtttaggtcctggcaactctgaaggggttggaagggctggcaggaggcactgagggccctgggccctgggccaggtggtgaattacagcgactcacggacagcagaagagatctgtgagagcagctccaagatgatcaccttcatcgacctggcaggccaccataagtacctacacaccaccatctttggcctcacatcatactgccccggcgc

SEQ ID NO: 330 - DNA, 397 bp, Homo sapiens
cactttgctccacgctcctgctgctgaccatcccttcatgggtcttgtcccagatcaccttgaaggagtctggtcctacgctgatgaaacccacagagaccctcacgctgacctgcaccttctctgggttctcactcaacactagtggagtgggtgtggcctggatccgtcagcccccaggaaaggccctggagtggcttgcactcatttattgggatgatgataagcgctacagcccatctctcaacgacaggctcaccatcgccaaggacacctccagaaaccaggtggtccttacaatgaccaacatgggcccagtagacacagccacttactactgtgcacaattcgcaaggggggcgaggggctccaattggttcgacccctggggccaggg

SEQ ID NO: 331 - DNA, 1537 bp, Homo sapiens
  misc_feature (1)...(1537): n = a,t,c or g
ctgcaggaattcggcacgaggcgcctcctaccacttccaaccgccaccggcgacagattgaccggggtgtcacccacctcaacatttcagggctgaagatgcccagaggcatcgccatcgactgggtggccggaaacgtgtactggaccgactcgggccgagatgtgattgaggtggcgcagatgaagggcgagaaccgcaagacgctcatctcgggcatgattgacgagccccacgccattgtggtggacccactgagggggaccatgtactggtcagactggggcaaccaccccaagattgagacggcagcgatggatgggacgcttcgggagacactggtgcaggacaacattcagtggcccacaggcctggccgtggattatcacaatgagcggctgtactgggcagacgccaagctttcagtcatcggcagcatccggctcaatggcacggaccccattgtggctgctgacagcaaacgaggcctaagtcaccccttcagcatcgacgtctttgaggattacatctatggtgtcacctacatcaataatcgtgtcttcaagatccataagtttggccacagccccttggtcaacctgacagggggcctgagccacgcctctgacgtggtcctttaccatcagcacaagcagcccgaagtgaccaacccatgtgaccgcaagaaatgcgagtggctctgcctgctgagccccagtgggcctgtctgcacctgtcccaatgggaagcggctggacaacggcacatgcgtgcctgtgccctctccaacgccccccccagatgctccccggcctggaacctgtaacctgcagtgcttcaacggtggcagctgtttcctcaatgcacggaggcagcccaagtgccgctgccaaccccgctacacgggtgacaagtgtgaactggaccagtgctgggagcactgtcgcaatgggggcacctgtgctgcctccccctctggcatgcccacgtgccggtgccccacgggcttcacgggccccaaatgcacccagcaggtgtgtgcgggctactgtgccaacaacagcacctgcactgtcaaccagggcaaccagccccagtgccgatgcctacccggcttcctgggcgaccgctgccagtaccggcagtgctctggctactgtgagaactttggcacatgccagatggctgctgatggctcccgacaatgccgctgcactgcctactttgagggatcgaggtgtgaggtgaacaagtgcagccgctgtctcgaaggggcctgtgtggtcaacaagcagagtggggatgtcacctgcaactgcacggatggccgggtggcccccagctgtctgacctgcgtcggccactgcagcaatggcggctcctgtaccatgaacagcaaaatgatgcctgagtgccagtgcccaccccacatgacagggccccggtgtgaggagcacgtcttcagccagcagcagccaggacatatagcctccatcctaatccctcnnnnnnnnnnnnnnnnnnnngttctggtggc

SEQ ID NO: 332 - DNA, 952 bp, Homo sapiens
aaacaaccaccatttcaaattttcacactcaggtcaacaggacatactgctgtggcacctaccgagcaggtcctatgcggcagataagtctcgttggagcagtagatgaagaagttggtgattatttcccagagttccttgatatgttagaagaatcaccatttctgaaaatgactttgccctggggtacactttctagcctccgactccagtgtaggtcccagagtgatgatgggcctataatgtgggtaaggccaggagaacagatgatccctacagcagatatgccaaagtcacccttcaaaagacgacgatcaatgaatgaaataaaaaatctccagtacctacctcggaccagtgaaccccgcgaagttctctttgaagataggactagagctcatgctgatcatgtcggtcaggggtttgactggcagagtacggctgctgttggagttttgaaagctgtacaatttggtgaatggagtgaccaacctcgcataaccaaagatgtgatttgttttcatgctgaggattttactgatgttgtacaaagacttcagttagatcttcatgaacctccagtttcccagtgcgtacagtgggtagatgaagctaaactaaaccaaatgaggcgggaaggcattcgttatgctagaattcagctttgcgacaatgatatctacttcatccctagaaatgtcattcatcagttcaaaacagtttcggcggtgtgcagcttagcctggcatataaggcttaaacagtaccaccctgttgtggaagccactcaaaacacagaaagcaattctaacatggactgtggtttaactggaaagcgagaattagaagttgactcccaatgtgtgaggataaaaactgaatctgaagaagcatgcacagagattcagctgttaacaactgcttcatcatctttcccacctgcatcagaact

SEQ ID NO: 333 - DNA, 526 bp, Homo sapiens
  misc_feature (1)...(526): n = a,t,c or g
aatacacctgcctgcctgtccccagctcaccccagctcagggcctggcccaagcagaggatgacggggaacagatggaagcaggttctgtctgcggcaccagcccctttccacgctcgggaagtccggaacttccctgtcagacttttcaggcactgcaccctcacggcctccaccaggcccgcacgaatggggccactttccacgtctttgatgagcatcccacacaggtgtctactggagcactcaccgccaggtttcgagatgaaatctccgccctgtagctccggacgtcctccagatccagcgtggccgtcaggacttccacgtcatccagagaaaactgggatccttgagcaaagacgcttccgttcatggcgatcatggcacagccgtcgtagtacaggcggtccccgtcgcaacccttctggttggccggacgcgtgagcgaacgcgtggctcgaccgggtaattccggcccggtactgcaggccgatcaaagaaggggttcaaatnnggacgagccg

SEQ ID NO: 334 - DNA, 360 bp, Homo sapiens
tgcttggcgtgtaactggattcctttcctcttttaggtaatcacagacctggaggagcagctaaaccagctgaccgaggacaacgctgaactcaacaaccaaaacttctacttgtccaaacaactcgatgaggcttctggcgccaacgacgagattgtacaactgcgaagtgaagtggaccatctccgccgggagatcacggaacgagagatgcagcttaccagccagaagcaagtaaggagggttaacaaggtcgtgagatccctggaggacttttagaaggattttaggagtgcttggtgcgttctcccaagggttccaacactgaacctcatacagtaattgggctctttttagaag

SEQ ID NO: 335 - DNA, 846 bp, Homo sapiens
ctgggatgcttggggcgactggagtgactgctcccggacctgtgggggaggagcatcatattctctgcggagatgtttgactggaaggaattgtgaagggcagaacattcggtacaagacatgcagcaatcatgactgccctccagatgcagaagatttcagagcccagcagtgctcagcctacaatgatgtccagtatcaggggcattactatgaatggcttccacgatataatgatcctgctgccccgtgtgcactcaagtgtcatgcacaaggacaaaacttggtggtggagctggcacctaaggtactggatggaactcgttgcaacacggactccttggacatgtgtatcagtggcatctgtcaggcagtgggctgcgatcggcaactgggaagcaatgccaaggaggacaactgtggagtctgtgccggcgatggctccacctgcaggcttgtacggggacaatcaaagtcacacgtttctcctgaaaaaagagaagaaaatgtaattgctgttcctttgggaagtcgaagtgtgagaattacagtgaaaggacctgcccacctctttattgaatcaaaaacacttcaaggaagcaaaggagaacacagctttaacagccccggcgtctttgtcgtagaaaacacaacagtggaatttcagaggggctccgagaggcaaacttttaagattccaggacctctgatggctgatttcatcttcaagaccaggtacactgcagccaaagacagcgtggttcagttcttcttttaccagcccatcagtcatcagtggagacaaactgacttctttccctgcactgtgacgtgtggaggaggtta

SEQ ID NO: 336 - DNA, 347 bp, Homo sapiens
gggatgtggtgccgtcaggttccagaggtgcctcctcttaccccagaggctgagtggtggggaaacaggaagctggggctcactctgactcctgctgcctcctccacaccccgcccaggctgaccccagcccacagcaggaaggccctgcggaattcccgcatcgtcagccagaaggacgacgtccacgtctgtattatgtgcctacgcgccatcatgaactaccaggtcagccgaggggcatgggactggcgactagggagcccagcctgtcctcactgggggctacacaagctgccgaggctctgggatccactgtccctttaccctgtgctgtgctggggaact

SEQ ID NO: 337 - DNA, 709 bp, Homo sapiens
aatcttgacatccctagtggagctaacccgctttgagactttgactccaaggttttcagcgactgttcctccatgctgggtagaagttcaacaagaacagcagcaaaggaggcatcctcaacatttgcatcagcaacaccatggtgatgctgctcagcatactcgaacttggaaactacagaccgacagcaacagctgggatgaacatgtatttgaattagtactacctaaagcttgtatggttggacatgtggacttcaaattcgttttgaactcaaacatcaccaatattccacagatacaagtgacactgctgaaaaataaagctccaggattagggaaagtcaatggtcttagattatgtccatttttggaggatcataaagaagacattctatgtgggccagtatggcttgctagtggccttgatctatcagggcatgctggaatgttgacgttaacaagccccaaacttgttaaaggtatggcaggaggaaaatatcgttcgtttttaatccatgtcaaggcagtgaatgaaagaggaacagaagagatttgtaatggtggtatgcgtcctgtagtaaggcttccatccctaaaacaccagagtaacaagggttattcacttgcttcacttttggctaaagttgcagcaggcaaggaaaaatcatctaatgttaagaatgaaaatacaagtggcacccgtaaa

SEQ ID NO: 338 - DNA, 384 bp, Homo sapiens
cagatacatgagaagcaatgataaagaaaacagaatttagcaatgtgtgcagcatattttacttaatcctgcaagcaatgctaaaaggccttctacaattatcatgtcctggaattgcttcagatgctggtgacaggaggagtaagttctcagctggaacaacatttagataaggataaagtctatggtgtggcagatagctgcacgtcgctcttgtctggaagaaaccggtgtaagctggggcttctgtccttacacgaaaccattttatcagacgttaatccaagaaacacctttggacaactgttctgtggctcattagatctttttggaatcctgtgtgttggcttataccgaataattgatgaagaggagctcaaccca

SEQ ID NO: 339 - DNA, 362 bp, Homo sapiens
gtgtaggacagtgaactgagaaggaagctattaagattctggccttggcttaactctcaactggccattggtcttgcagtaagtcttttttctgggcttcttctggtcctatttgtatgtattgcattgtcacatcatgcctctatcctagggaatactgtgagctgaaaaatgagacccttactgttcacgtcctgctaagggggaccgtcgtgtcagcactgtaatgcagtgatgttttttgtgtctttcaggtgacttcatggtcatgacgattttcttcaatgtgagcaggcggtttggctatgttgcctttcaaaactatgtcccttcttccgtgaccacgatgctctcctgggttt

SEQ ID NO: 340 - DNA, 1466 bp, Homo sapiens
tggacttgtggcaattcactcctcttcatgaggcagcttctaagaacagggttgaagtatgttctcttctcttaagttatggggcagacccaacactgctcaattgtcacaataaaagtgctatagacttggctcccacaccacagttaaaagaaagattagcatatgaatttaaaggccactcgttgctgcaagctgcacgagaagctgatgttactcgaatcaaaaaacatctctctctggaaatggtgaatttcaagcatcctcaaacacatgaaacagcattgcattgtgctgctgcatctccatatcccaaaagaaagcaaatatgtgaactgttgctaagaaaaggagcaaacatcaatgaaaagactaaagaattcttgactcctctgcacgtggcatctgagaaagctcataatgatgttgttgaagtagtggtgaaacatgaagcaaaggttaatgctctggataatcttggtcagacttctctacacagagctgcatattgtggtcatctacaaacctgccgcctactcctgagctatgggtgtgatcctaacattatatcccttcagggctttactgctttacagatgggaaatgaaaatgtacagcaactcctccaagagggtatctcattaggtaattcagaggcagacagacaattgctggaagctgcaaaggctggagatgtcgaaactgtaaaaaaactgtgtactgttcagagtgtcaactgcagagacattgaagggcgtcagtctacaccacttcattttgcagctgggtataacagagtgtccgtggtggaatatctgctacagcatggagctgatgtgcatgctaaagataaaggaggccttgtacctttgcacaatgcatgttcttatggacattatgaagttgcagaacttcttgttaaacatggagcagtagttaatgtagctgatttatggaaatttacacctttacatgaagcagcagcaaaaggaaaatatgaaatttgcaaacttctgctccagcatggtgcagaccctacaaaaaaaaacagggatggaaatactcctttggatcttgttaaagatggagatacagatattcaagatctgcttaggggagatgcagctttgctagatgctgccaagaagggttgtttagccagagtgaagaagttgtcttctcctgataatgtaaattgccgcgatacccaaggcagacattcaacacctttacatttagcaggtaagtgaatgaagtttcacagatttaggctggtaatatctgagattcattttacccaggtaaaatattttctgtaactaaactttaaaaattcaaatcaggccaagcatggtggctcacacttgtaatcccaacactttatgaggctaaggcaggaggattgcttgagcccaggaatttgagagcagcctgggcaacatggcaaaaccacacctctataaaaa

SEQ ID NO: 341 - DNA, 547 bp, Homo sapiens
ggtgtcttgattccgtcatttcaaaatcaactcttcgctgacattctcgcgggaatagaatccgtcacctctgagcataattatcagacccttattgctaattacaattacgatcgcgattccgaagaagagtcggtgattaacctgctctcttataacattgacgggattatactttcggaaaaatatcacaccatcaggacggtgaaatttctgcgttcagccaccattccggtcgtggaattgatggatgtacagggagaacggctggatatggaggtcggttttgataatcggcaggccgcttttgacatggtgtgtaccatgctggagaagcgagtcaggcacaaaattctgtatctcggttccaaagatgacacccgcgatgaacagcgttatcaagggtattgcgatgcgatgatgctgcataatctttccccattacgcatgaatccacgcgccatctcatccattcatttaagaatgcagttaatgcgtgatgcccttagcgcaaaccccgatttagacggtgtattttgcaccaatg

SEQ ID NO: 342 - DNA, 461 bp, Homo sapiens
gggaacttttgcgggttcttgtgaaccaggcagtgccagatcggcagtcgtacaggggcgcgtgttgcccagtttgcggcataccgcgtcggtagcccattcagccatcagccgataggtcatcagtttgccaccggtgatggtgataaatccgtccagaccatcgcgttcagcatggtcgagcagcacgatgccacggctgacgttacgtccgctcgggtcgtcatcgctggcaaccagcgggcgcacgccagaataggcccgcaaaatgcgcgttttcgccatcacgggggccagtttttccccttcacgcagcagaatatcaacctcttctgccgtcactcgattatcgtcaatctcgttgtaatcaatacgtaaagaggtggtaccaatcagcgaaatggtatcgccaggcaccagaatatcggcgtcggaaggtttacggcagcggttgatcctct

SEQ ID NO: 343 - DNA, 250 bp, Homo sapiens
ccataaatcctaaaccgcgcgtcgcggcaatcagctccgccgccaccagcgtagaccagcccacccccagaccaatacgtaatccggtgaggatttccggcagcgcaccgggcaaaatgacaaaccacagcacctgcgcacggctggcacccagcgactgggcggcacgaatgcgaacctgctgcacgcttttcacccccgccagcgccgacatcgccaccggtgcaaaaatcgctaaatagatcagtaa

SEQ ID NO: 344 - DNA, 138 bp, Homo sapiens
gctctatttcgatgcttatctccagtcgctacaggtggctgcgatttcgacattttgctgtttactgatcggctatccgctggcgtgggcggtggcgcacagtaagccttcgacccgtaatattttattactactggt

SEQ ID NO: 345 - DNA, 467 bp, Homo sapiens
cgttgccagtttcattgccagtagcgaatgaccgccaagcgcgaagaaatcagcatcggcatcctgcacgtcacaccccagcaacgacgagaatgccgcggcgataatcgtttcactgcccgctttcggcgcacgccctggcgcttgtgccttcagttcaggcaacggtaaggctttgcgatccagcttgccgttggcgataagtggtaactgtggaagttgcagcagaaccaccggtaccatatgtggtggcaatgtttcacgaagctgcgcctgcaatgcgctggtatccaacggcaggcccgattgcgacaccagatagcccaccaattgacgcgcatcaccaccggtggcagccgcctggttaatcacacaggcgtgggtaacggcttgttcgacatccggcagcgcctgcatcacgcgatcgatttcgcccagttcgatacgctgcccgcgaatttttagct

SEQ ID NO: 346 - DNA, 403 bp, Homo sapiens
ttccggtaacgcctcgaactgatcgaacactttgccgacttcatgcgccaggttgagcattttcttttcggggattagctggttgttatcggcctgagcgagaaacagcatatcgctgaccattttcgccattcgcgtcagctcttcgagattagagtagagcacatcttccagctccttctggctgcgcgactggctgagggcgatttcggtttgcgttatgagattcgtaattggtgtgcgaatttcgtgagcgatatccgctgagaaattggactggcgggtaaagacatcctcaatacgctcgatcatatggttgaacgacagtaccagctgttccagctcaatgggcacggtctgcgggtcgaggcgaacgtcgagatctttcgaggtaatattctgg

SEQ ID NO: 347 - DNA, 340 bp, Homo sapiens
tgaacgaactgacctttaaagaggcggaaatctccaagctgtacaccaaagttcacccggcgtaccgcacgctgctggagaaacgtcaggcgctggaagacgaaaaagccaaacttaacggtcgcgtaacggcgatgccgaaaacccagcaggagattgtccgtctgacccgcgatgtcgagtctggtcagcaggtctatatgcaactgctgaataaagagcaggagctgaaaatcaccgaggccagcaccgtcggcgatgtgcgcattgttgacccggcaatcactcagcctggcgtgctgaaaccgaagaaagggctgattatcctcggcgcgattat

SEQ ID NO: 348 - DNA, 723 bp, Homo sapiens
gtcgcactagtgattttcccgggtcgacgatttcgtggaagcatcatgcatccccaaacgactggccagaacgtcaagatacatttccggcacctgttgctggcacttaagaccactcaacagggtatgaactaccggaccaagacaggcaaccgctttcagacgcggcgattcaaggtatgccagacgcacggcaacgttagcgccgaaacggaaaccaaaggccgcgacgcgagtgtgatccacccacggtacgttaggcagcgcctttaagacgtgctgatgcaacaggctggagtcctgggtgagcttccattttgaagaaaagcccaccgacggcatatcaatagtcagcatcgcaatgccgcgcggcgcaaaataacgttcatacaggctgtaatagtccgtctgcatcgcatccagaccaccacacattaataccgtcgggaacgggccatcgcctttcggcatatgcaaaaagccggtgatgggcgcaccgccgggtacggtaaactccatctgccgcatcgtgcccggtagacgctgagcggcctcttcataggcgcggtttgacaaagcctgcgcttgctcggccaggtcatctcctttcagatgaggataggcggcaatgttgtacaacgtagccgcatgcagccagtgacgaccactgagttgcggatcgtcttccgcacaggctttttgttgccacaccatcgcctgggt

SEQ ID NO: 349 - DNA, 249 bp, Homo sapiens
acgaattcgatcgtccgacccggagatcactcttgccggtacacctttgcatgcggcttatttgattggtatgacgctgatttgcgccggtttctcggtaggttttggtgtggcgatgagtcaggcgttagggccgttttcattacgcgcgggcgtagccagctcgaccttaggtattgcgcaggtttgcggttcgtcactgtggatttggctggcagcggtggttggtatcggcgcatggaatatgct

SEQ ID NO: 350 - DNA, 424 bp, Homo sapiens
aggaagcgcccgaagcaacccctcaaccttcccagcctggcccttcttcaccaatttctcttagtgctgaagaggagaatgctgaaggggaagttagcagggcaaacactcctgattcagatataactgaaaaaacagaagattctagtgttccagaaactccagataatgaaagaaaagcaagtatatcatatttcaaaaatcaaagaggaatacagtatattgatttgtcttctgatagtgaagatgtcgtttccccaaattgctccaatacagttcaagagaaaacattcaacaaagatacagtgattatagtttctgagccatctgaagatgaagagtcccaaggccttcctaccatggcacgtagaaatgatgatatttcagaactggaagacctttcgggaatggaagaccttaaaga

SEQ ID NO: 351 - DNA, 404 bp, Homo sapiens
cataaagaagaaccatatcatcggctaccagctgctccaccgacgcgccctgttcgagaagcgcacgcggctcagcgactacgcgctcatcttcggcatgttcggcatcgtggtcatggtcatcgagaccgagctgtcgtggggcgcctactacaaggcgccgctgtattccttagctctgaaatgccttatcagtctcttcacgatcatcctgctcggtctgaccatcgtgtaccacgccagggaaatacagttgttcatggcgaactatggagcagatgactggcgaagcgccctgacttatgagcctattttcctcatccttttggaagcactgaggggggtcattcatgccacaccatgcagagtatctctctctctctgggacggcctggatttgcccg

SEQ ID NO: 352 - DNA, 340 bp, Homo sapiens
aatcacttctggggcagcaacctgctcttccagtgcccgccaggcctcggaataataaggacgcgcaacacggttaacgataaatccaggagtcgaatgacagcgcacaggctgcttaccccaactcaacgttagttcacacaactgctcaacaacttccgccgccgttgccagcccactgaccacctccaccaacttcatcaccggtgccgggttaaaaaaatgcagccccgcaacacgttcaggattttttatctccgcagcaatcgcggttatagagattgacgaagtgttagtggtcaatagcgtttgtggcgggcaaacttccgccagctgtgca

SEQ ID NO: 353 - DNA, 188 bp, Homo sapiens
gccatttttcgctcttccgcatcgcttttgcggtttttctcacctacatgaccgtagggttgccgttgccggttatcccgctgtttgttcatcatgaactgggctatggcaataccatggtcggcattgccgtcgggattcagtttctggctacggtgctgacgcgtggttacgccgggcgactggcc

SEQ ID NO: 354 - DNA, 365 bp, Homo sapiens
cttgcttaaacttttgtctgcccaagaataaaagcactattataacagggtgcatttctacttttgaattcattagcctcataaaatatgtatgtgtctggcatttaatagagtagcacttaatatttgctgaaagaatgaagaataagtatctacatgtgaccaaaggctggaagcatggttattacgtgtgctatttataaaaacccagggcagtgctcatgaaaggaaaacaaggcctcttacctcagtcatgttggagaagggaaaggagcttctgtcatacacccagccatttacacatgattccgtgtctgtctcacctatgttgagaaatgtcccattcaggtgaaagagctgccatg

SEQ ID NO: 355 - DNA, 1250 bp, Homo sapiens
  misc_feature (1)...(1250): n = a,t,c or g
gaatggactctaaagtaatgatacctgagtggtaggagtacaagccctttctaagttttctctgaacacatattactcgtgtaggaagttatttttttaagtaataaatctagtctacctcatctcttctcccaggcctgagctgaagcctgtggacaaggaatcagaggtcgtaatgaagttccctgatgggtttgagaagttctcgccgccaattctgcagctagatgaggtggatttctactacgatccgaagcacgtcatcttcagtcgcctctctgtgtctgctgatctcgagtctcgcatctgtgtggttggagagaatggggctgggaagtctaccatgctgaagctgcttttgggggacctgggcacctgttcggggcatcagacacgctcacaggaatctgaagattggctatttcagccagcaccatgtgggagcagctgggacctaaacgttcagtgcttgtgggaacttgctgggcacgcaagttttcctggggcggcctgaggaggagtaccngtcaccagcttgggttcggtatgggcatctccggagaactgggccatgcgtcctctttgccagcctgtcttgggggccagaaagaagccgaagtggccttttgctcagatggactattgccctgccccaactttctacattctgggatgaacccacaaacccaccttggacatgggagagccattgaggctctggggccttgccttcaaacaatttcaggggttggtgtgattctggtgtcccacgaatgaagcgctttatcaaggctggtgtgccgggaagttgtgggtatgctaaggaaggcggcgtcacccgtgtggaaaggaaggattttgaccagtaccgcgccctcctccagggaacagtttccgcccgcgaaggctttcctctagggccacccaggctgaaggactcgcccagggacatgggactggtctctcagaccccctggggccaccatgtaggctatccactcccaggccgtggacnttccccccaactttggggacagcctttatttcccaaatgtctctatccttttgactggagcatcttctgcacaaccttgggagcccatccaagggttggtgaggactggtctcccgggggtgggggtctggggggtaccctctggggttatagattcccccactgccccagctctgactggaccccaagtggctgctatgtaaattaaatctctccccgcgtcaaaaaaaaaaaa

SEQ ID NO: 356 - DNA, 544 bp, Homo sapiens
  misc_feature (1)...(544): n = a,t,c or g
ttgatttgcccacttgacatgcagcccttgttgtgtggcatggcccaccatgcagctgaggtcagggtgggtgcgcctgctgccgacacaaccctggaggctcattagatggctgcatgtctttttcttttggcaaaggggtggccgtgactggggagagcacaaccagcggctagaggagcaccaggcacgcgcctggcagggtgccatggacgcaggcgcggctagccgggagcacgccaggtggcaaggtacggggctggctccagggacgagggtggctgtggcccccacatgtgtccaggggcttccccaggaacggagtgtttgcagacccttcttctcttctaggtggcgagaggggcctgtctgggccctcggggccggggcacatggcaagccgcggtggagtggcggggtaaggtgtgtcgtccgtggaggacggtggttcactcctgctcctcacttcctcttccttttttgcatgtttgatcagctggctgggttggatgttatgaaaacaaagcanaaagcagctctttga

SEQ ID NO: 357 - DNA, 1249 bp, Homo sapiens
ttttttttttttctggttataaaagattttaatatcaaataaaatgtacatgatcaaaaggctttgattgccatgtaaagcatagtttccaggttacatcaagtgattttatcttctcccatttcaaatgaaatgttgaaagcacaaacaatctgccatgaatgataagaagcaaaggcagcacatatcatctgcaagtttcttcccaagctataaaatatcatgttcatatttttcctgtttgtgatcccaaaacaggcaatattttcatttcatccactctattcttatgtatttgaaaagcaggtgttatccacctaccacaagagcactgttcaccataccagttgaaggaacccaacttggcactgcattttgggcaaagaagctgtccatccatcactcccaacaaagcagattccatccactgtacaggttcaatgaaataagatgtacattgagcttgcctccctgtggtaagcatggaagatggtgtcattctcttgtgggcaaaggctataggtccacttccttcacggtgatccagaatactagaacttcgaaataatgatcgcctgcactttctacacttgtagagaacctcatctttcaatccttgtgaaacggtagttgggtcaacagcaaagagttcttgaggtaaattctgcaattctggatacttctctgtaaccttttgtaaacgatattgcttataaattgcactagaggtatccacttcgtatcccattgcctggtataatttcagttgccactcaaacccctcattcatcttagcctctggtttgagaatctggagcttttcataggctttttcaaagggaagttggtcagtcttcatgagaaaagcagttattatggccacacttcgactgactcctgcatgacagtgcaccaacaccgcacggccctcagcgcgggcctgaccgatgaaggccacgcaccggtccagatggctgagtaggtccgtctcgggtttgtccagcgctggcacgaagaggcgccatagatcctcgaccccaggccccgccttgaagctgggctcctccgagtccactgttagcacggccgtgatgcccgcttccctcaggtgatctggctccgcgacggccgcggccccaccgaaatacaatcctggctgcacttccagcatctgcccggcacagctgactctgctggcgctggggttgctgagctcgcagccatcactcgggcccggagcctccaacat

SEQ ID NO: 358 - DNA, 1135 bp, Homo sapiens
cgccagtgccccctccgcgagccccaaccagtagacggttccctgtctcccgcgccccaatttcgattttcaaacgcaactcctacaggattctgagaccccgtcccatctcccatatcccatttccagctgcaaattactgcagaatctgaacccaggaaagaaacccatttgccgaccccctcttccctctccagacaggtggagagcgggtgagggtctcgctcggctttccccctgcacctttcccaccctcccacgtcgggcggctgggatacctgcaggcgctggtcacggaattccaggagacccaaagccaagacgccaaggagcaagtcctcgccaacctcgccaacttcgcttatgaccccagcaactacgagtatctgcggcagctgcaggtcctggatttatttctcgattcgctgtcggaggagaatgagaccctggtggagtttgctattgctgctgcagtctgaacggtgacggtggcccctgcagaagcatgtggctaaatctccaccagggggcgatagagctcctccaaatcaagctgctgcccctggagaaaaattggcggaagtcacagagcagtccccaccaaaagtgtttaccaagtggagtctttcctgctggcgtttcctcagggtcaggaagcaactttcccaggacaggggcaccctgaggtccgggtccactgagctatgggggcggcgtgggccctgggctgggttcttgccatcctgggcagcttcccggcgtgggtgactgagcccgggtcctggagtccgcggtcccagcgtctccacttctcagctgattcctagaagctgagtcccgtcccttctccgagcgtggtttcctctcccgccttgcctgcgtcgcaagcagttgtgggagcagaagtgtgtctgtgcatctgtgtctctgtgcaggtattttagaattgttaggatcattatcaccagctttacttttcccaaccatttttttcctcctttttttctcttccttcttctgccacagcaagacccccccgccccaagcacagtagctttctcagcgtcgagatccctccgtgggaccatgttgcaatgaaatttcaacatgcaaatgaaatttctcgaaatttcgc

SEQ ID NO: 359 - DNA, 389 bp, Homo sapiens
  misc_feature (1)...(389): n = a,t,c or g
ggcacgagcatctattattgctactattgtgtgtttttctagttaagtcccaaggtgtcaacgacaatgaggagggtttcttcagtgcccgtggtcatcgaccccttgacaagaagagagaagatgctcccaacctgaggcctgccctagctgaccatcactgtatgtgactatcgggctcagatagcctaagctgcttccactcccaagagagcagctagcattgcccataatgctgtaagctgtcgttaggctttaatcagacatggtgatcatatattgttccctcagcgaacgtgaattttaccggaaaggccgagataggatgaccgttttcctatgtgtacttcttctgcatggtctctgagatcctggtgcacaacataatn

SEQ ID NO: 360 - DNA, 785 bp, Homo sapiens
cgtgagccaccacgcccggcgttgttgtttttttgagacagggtctcactctgttgcccaggctggaatgcagtggtgcaatcacagctcactgcagccccaacctcccaggttcaggtgattctcccaccttcccaagtagctgggactacaggcatgtgccagaatacccggccaattttttgtagagacagggtttccccatgttgcccaggctagtctcgaactcctgggctcaaacagtccacccacctcggcctcccaaagtgttggatttacaggcgtgagcccctgtgctcagcctggttgtgccattttttgaaaagcaaatttcatccttttggacacatacatgacacttaccgcaccctcactccccccagttatgctttctaaaaacttctgtcaaggtaaagattgaaaacatgttcatcttttgtgtgcactgtttatgaatagtagctgaatagcccctccgcaaggaggatgcagccccttccataaaggatgctgttgtggctccatgtctgcttagcccgagtgtgggcagcccagctgtgtgcccagctctgtgccagctgcccggggcaggcctctagagcagttgcggttagctcccacagtgattgagcacaggctgggtgagttagtacagatgtcattttctgtattagaaaattaatgtcaaatctgctaagaaaataggctgttttggtctctatccagatttacaacataaagagggtataattttccatcttcagaggggcttgatgtattttgct

SEQ ID NO: 361 - DNA, 1826 bp, Homo sapiens
ggaggtggcattcctgggttctgggtttctggattcgcgggccgttcacacgtagcctgtgccggctcctcgggtgagtccgtccgcgcgcggtgccccgggacggcctaggctgccgggggtccggggccccaggcattccgggctgcagattgacggggatcccggatgcaccgcgcgcccccgcgccctcaccgacgggtccagacctggtgggaagaaggtgcggggacgggtccctgaggatcccgatgcctacgagccaagatgctcagctttataggtgtgacctacacatgtgacttcacctcagttttgtgatccgtaaaatggacaaattcgaagctacttcacagtgctgttgagaggattaaatgaaacaatgcttgtaaagctctttgcaggagggagcctcggaagcagggcctggccggcagagcacacctgctgtcaccagggaccacaggcagcatgaagacccccgtggagctggccgtcagtgggatgcagaccctcggccttcagcaccgctgccgaggtggctaccgggtcaaggccaggacgtcatatgtggatgagactctgtttggcagcccagcaggcacccggcctaccccaccggacttcgatccgccctgggtggagaaggctaacagaaccagaggcgtgggcaaggaggcatcgaaggccttgggggcaaaggggagctgtgagaccaccccctcaaggggcagcacccccaccctcacaccaaggaagaagaacaaatacagacccatcagccacaccccgtcttactgtgatgagtcgctgtttggctcccgatctgaaggcgccagcttcggggccccgcggatggcgaagggggatgccgcaaagctccgtgctctcttgtggacgccaccacctacccccaggggtagccactcgccccgccccagggaggcaccactgcgagccattcacccagctggtccctccaagacagagccggggccagcggcagactcccagaagttatctatgggtgggttacactcttcacgccccctgaagcggggactttcccattccctcacccacctgaatgtccccagcactggtcatccagccaccagtgccccccacacaaatgggcctcaggatctcaggccttccacgtcaggggtgaccttccggagccccctggtgacttccagggctcgctcagttagcatttcagtgccatctaccccacgacgaggtggggccacccagaaaccaaagcccccttggaaatgatactctttcatcagggttgcctatggggccacggcgacaggtatggccccttgccagggtaggaggacattcatcacccagggaaccccaggtattaaagaagcccctgtgggggcagacagacatagcaggggtgggcagtgcctccctttatcctgacaatctctagtcgattcttgcctttttctcccgattgcggatttgggggccacctctaagatgcctctctccagccctgtctcaaccatactccaaattagtgccaacccaggggcctggcacctcccacatcatccattgtcttgctgccaagtgcgaataaacggtgtgattgccaacctggagggtcccctcttatcccttcaagccaagcttcctgctcaggattagtttccagctaagtctgcaagccctagaggagtttttccaggctgtctgtgaagcctggggaacacaacggcaactgggagatttgtgagtgaacactgtttcatcttaatatgcttctgaatttattttcatgtactaaatagatcagctcatca

SEQ ID NO: 362 - DNA, 1293 bp, Homo sapiens
tttgaagccaaattggagagagatgtatttataccagtggggctaaggaggaagcagtccagtgggggactttgagtgctgtgcagtgttctcttaagagtcgtagtacagtcctggggtcaagtctctttccctaatctttgctggggaagccttgagccttgatttatccttcccttggctttgggctttgaggaagttggggatggaggggatgatgcttctttaggtttctctattccaagcccctctgaatttctagttgcaacctcaggactcatccccctccaggccttcctggatgcagatatacacaaagatggaagctgggcggaggctgatgccatctttggacagcaggtgaatgtggcggtaaccttgttgcatgcaggtcccagggcaaggggtcttgcccaataagtcatttcgggatttccagtcataatccattttcccaaaacgcagcattggaaagtcagggcccagcacccggaaacatagtgtctgcccccagtatggattaaaaccattgttctccacatagttggtctcctgccgtgctgtgtctagacgaacgccaaagatctgcactttcaccagtggatccacaatggacccctctttggtcttgtccactttggggagttgctgaacgctgatcacctggtttaagagagtctgggctttgaaagggctgatgggcttctcagggtggaaagaactctggatatcacgcaggaagtctggcttcagcacatagccacagccgccattctggcggaaatgcccatcacagatgtccatttcaagccctgcagtctgcatattcatggccactgagggccccaggagaaaagaagagcaagattcaccatggaggccttccagcccctctttcagggagttaagaagataggtactgggtgcacggtacctgctggtaatatccactgatagcatttctcagcctagcaattttcttgagcattccccaaccctaccatcactagagaacttatttcccacctgctgctcctccactccctcttcccagtccctgctgcctcctcacccatctggcagcctgcattccagagttcctgggggttgtagttggaagagtctgtcctcaggtcgctgggatacacacggcttaactgccaagtattgtgctgcacaaactcattgcctgtaaaagggtatagagggggagatggaggtggggtggaatctcccacttccctagtcccaaggaccatgcctactcttcacccttctctccagcatttgaag

SEQ ID NO: 363 - DNA, 336 bp, Homo sapiens
ggcacgagcggtttttgtgtggacacaagatttaaacttgttgggtagataccaaggaaatgtttgctggatcatatggtaagagtatgtttagttttagtaagaaagtgttaaactgtctcccaaagtggcggtaccattttgtgattgcaccagcaatgaatgagagtcctcttgctccacatcttcaccagcatttggtgttttcagtgttccaggttttgaccattctaataggtgtgtagtgatatttcattattgtttaaatttgcaatcccctaatggtgtatgtagtaagtccattctcacactgctatagagaacagcaccaaacca

SEQ ID NO: 364 - DNA, 418 bp, Homo sapiens
atggtttccataatcctccgtgcatttgaccagctgagttattgcagaaataataatcagctttcaaaacccttcagcttcctgcattttctttgtattttgatcttgggagcctgaagcttctaattctaagaattcatacatcaatagttaaaaatcacaaggtagagtcccccaggactatgtctccaggttaggacccccaaagcttcctgcagattccacagccccggcctcctcagctcagagtgggcctcacctctggcctgatccagcatttccattcaccctcctcctgccaatttccactcctcagagggcctccttttcccagacaaccacctttgggcatcagtggggccagcctctgccctgtgttgtcacctcccaggtgaccgctccagcccagcagtctatt

SEQ ID NO: 365 - DNA, 3055 bp, Homo sapiens
taaattgattcaataaagatttgcctagaattcccaagacctttataggtgattctgttttctgggctccttaacttcatagatagctagtatcttccagcagtagtaacagtctggataacttcttccatatccctccctctttgtttttttgagacagtgtcactttgtcacccaggctggagtgcaatggtgtggtctcggctcactgcaacctccacctcccgggttcaagtgattctcccgcctcagcttcctgagtagctggaactacaggcgtgtgccaccacacccggctaatttttcgtatttttagtgtagacggggtttcactatgttgcccaggctggtctcgaactcctgaccgcgtgatccaccacctcagcttcccaaagtggtgggattacaggcgtgagccaccgcacccggcctccatatcccccttttaaaattctgtagtgtatggtaagtcatatcagatatcagacctaatttaaatttcattttagctttacaagtccaaaaacacagaatttatatattcagatactctagcactaattttagtcttaaaatattcccacgatattctgtacacaaaatgttctttttgttacaagagctgagttgcatatactgtagataaatcatattatttttgccaatttcacaaattcctctggcccatcatgtcagtcattattgagtatatgcacacattgctacttatttgattatgtatcttttaaattgattcagtgcatagaaaactatctcttacaaactttaagtgctctgatatgacttcccccccaaattttattatgaacatttttaaaaacaggaaaattgaaaatctgtttggtaagcacatgtatatctaccatttagattcagcagttgttaatgttttgtcatttgttttctctatacctatatatgtatagatacagctagttatgcatatatatgcatatatgtgtttgtttgtgtatgtatatatgcttttttccccctgaaccatttggatgttacagacatacttatcaccgtgaaaatacttcaagtatctcctacagataatgacattctcctaaaaatccgtaataccattgtaaaagtaataattccccaatatcatctaatcaagccatatttaaatttctgaagttaactccaaatttctttatagctgattatttcaaactaggatccaattaaagtttacatatgacacttggttataactctttagttggatataacattattattattttgataaaatatggaacaaatcaattctattaataagtggtcacatttgttttgggcttaaattactttttaaagatactggattttcctaagatttctgatttacactgatatttttttttgtcattcttaattgcatcacacaatagatgtaaatgaagatgtagtcacctcagataaaattggtatcgggtatgataatattgtatcatttatatttgccttatgttaactttaagaaattgatttttttgtattaatcattttcccattgcaacagagctatattttttctattttaagaatcatattttaggattatttttggcaaatacagtgagcacttatgtaaccagatgataatgaactcaaatgtcatgatagcttgcataaatggtgactctagtagatttgactcaagcacttctagaatcatgcactgaattcaaaagaaaaatcttgctgctttttgtccagggcttgttctattcaacttctaatttgaaagctgtacaaagtaatagaagttccatttaaatatgagttcaaaactgtatttactttttatgtggccctctctttaggggattctaattttacttagggtctctaagtgcagcataatgttcctgatgttaacagaagactgtatttttaaagttacaaatttgtatatggaattaagtaatggcgctatatacgctgttgtggggaggggggaagaaaaggaggaaccaattaaataggaccttttaaaaattgttaattttgtaaactttgcttctcttataagttattgtgattcattttagttactgtgttttattttgaaaatatttaaatattgcacttctataaatagtatgataaatgcacagacaattgcagtaaattcttttttaagctaggatatttgaaatgacaacctttggttaagtgtgtcaaggttgcaacagaattttcacaatttttttgttgtttgcaaattgttactaatattgaagaggtaagggaggcaatgcaaatgatttttaatctttttttattatcttttcagcagtttatattttttgtgactttatgcaaccatatttttactttgtcttgacaactgaaagatgtataaggttttttgccagaaatgtactgtatacatagttttaagtataacagattttactgatatgtaaaaattttgccattaaaataaatgatttctcactgagaggaacttttctaccaggttggggcatatgggagcttaatatatcatatctaatttaaaataatttcactgaaataaactccattgcttttacctaatttttttcttgagatgcttttgtagtttttcagagttttagatgattttatacaaaatcctctgcctagcactgctctttttgatgttgtagtgacaccatttacattgaattaatgcttggtagcctggggctagatgtggaactccatggatctgtgttctgactggcacctttggaatgaaaggaaaagtgtgtgctgtcccaaattttttcccccttaattctttcccctcatccttctcaccccataatagaaattttatttccattgtgagttctgacaagaatgaaattccacatacaacataactgtaaattgttggtaggtagaagttaatatttgtggttcatgtatattttgaccagagtatatttaagtatataatttcagcttccttgatttagaaatatgatataataaagaaaaactccatttatcatctgttaaaaaa

SEQ ID NO: 366 - DNA, 246 bp, Homo sapiens
ttttgaatcagtttgttgctgagttttaggagttcttcatatattgtggccattaatcccttatccagatacataatttgcaaatatttttctcccattctgtggttctctttatagtatccctcaatacacaattttttaattttgataaagttcagcttatctattttttcttttgttgcctgtgctttgggtgtcatatcaaaatcattgccaaatctaatgtcatgaagcttttcccctaca

SEQ ID NO: 367 - DNA, 2367 bp, Homo sapiens
gacaaaaactgaagcagaaccaaccaaagagagcacatgtagaagatggaggttcaagatctaaacaaggaaatgagcaaagtaagaagacaccaattgagaaatctgattttgctgctgctacacatcctcgtgctttttacctcagtaaaccagatgaaactccaaatgcttggatgtctgattcaggaacaggattgacttactggaaactagaggaaaaggatatgcaccactctttgcctgaaactttagagaagacgttcatatcattgtcttccacagatgtgtcaccaaaccaggtcctgactctagatcctacgttacacatgaagccaaagcagcagatttcagggattcaacctcacggccttccgaatgcccttgatgacagaatatccttttccccggactctgttctagagcctagtatgtctagtccctctgacatagactcattttcacaagcaagtaatgtcacttctcagttacctggatttccaaaatatccctcacacacaaaagcttctccggtggactcttggaaaaatcagacattccaaaacgaaagtaggaccagttccacgtttccgtcagtatataccattactagtaatgatatctcggtcaacactgtagatgaagaaaacactgtcatggttgcttcggcctcagtcagtcagtcccagcttccaggtacagccaacagtgtcccagaatgcatttcattgacttccttggaagatcctgtgatattgtctaagattaggcagaatctgaaggaaaagcatgctcgacacatagcagatcttcgagcttattatgaatcagaaataaatagtttgaaacagaagctggaggcaaaagaaatctctggagttgaagattggaagataaccaatcaaattcttgtagacagatgtggccaattagatagtgctttgcatgaagctactagtcgcgtgagaacacttgaaaataagaataacttactggaaattgaagtgaatgatttgagagaacgcttcagtgcagccagcagtgcttccaaaattttgcaggaacgaattgaagaaatgagaacaagcagtaaagaaaaagacaataccatcattcgactaaaatctagactgcaagatttagaagaagcatttgagaatgcttacaaactctcagatgataaagaagctcaactaaaacaagagaacaaaatgtttcaagatcttttaggagagtatgagtcccttggaaaagaacacaggagagtaaaggatgcattaaatacaactgagaataaattgcttgatgcatatactcagatttctgatttgaaaagaatgatttcaaaacttgaagctcaggtcaagcaagtagaacatgaaaatatgttaagccttcgtcataattctagaattcacgtgagaccctcgcgtgccaacacactagcaacttcagacgtcagcaggcggaaatggctgattccaggtgcagagtattccatctttactggccagcctctggacacccaggacagtaacgtggataaccagctggaggaaacctgtagcctagggcaccgttcacctctggaaaaggattcttcacctgaagttcatcaacaagcttgttgataaaaaagcaaagagagacttcagacacgccgatcatgagagctttaaaagaacttgatgagggaaaaatatttaaaaattgggggacacagacagagaaagaggacacctcaaatagtctgctgtagtaaatcctcggcaaactgaaacttcagttaatgcaagtcgttctccagaaaagtgtgcccaacagagacaaaagagacttaattcggcctcacagagatcatcatctttaccaccttcaaatcgtaaatcaagtactccaacaaaaagagagattatgctaacaccagtgactgtggcttatagtccaaagcgatcccctaaagaaaacttgtccccaggatttagtcatctgcttagcaaaaatgagagcagtccaattcgagaaaaaacttattctgagaaagccaccgataaccatgttaatcatagctcttgccctgaaccggtgccaaatggagtgaagaaagtatctgtgagaacagcctgggagaagaataaatcagttagctatgaacagtgtaagccggtttcagtcactccacaggggaatgattttgaatatacagcaaaaattcggaccctagctgaaacagaacgattttttgatgaacttacaaaagaaaaggaccagattgaggcagcactaagcaggatgccttctcctggaggacgaatcactttacagacaagattaaatcaggtgaaatgtcttagcttgaatctgctt

SEQ ID NO: 368 - DNA, 2664 bp, Homo sapiens
ggaattcaaaagtggcgggtgtggcgcggggctggtagcggccggagccgtgctagttctctaccctgcttcgcgagcgggcgagagaacgcgagtcccaggatccccggcacccagttctcttccactgcattcccccggcgcgtgtgggaccgaggtggacatggatccgcagaggtcccccctattggaagtaaaggggaacatagaactgaagagacctctgattaaggccccttcccagctgcctctctcaggaagcagactcaagaggaggcctgaccagatggaagatggcctggagcctgagaagaaacggacaagaggcctgggtgcaacgaccaaaattaccacatcccacccaagagttccatccctcactacagtgccacagacacaaggccagaccacagctcaaaaagtttccaagaagacaggaccccggtgttccacagctattgccacagggttgaagaaccagaagccagttcctgctgttcctgtccagaagtctggcacatcaggtgttcctcccatggcaggagggaagaaacccagcaaacgtccagcctgggacttaaagggtcagttatgtgacctaaatgcagaactaaaacggtgccgtgagaggactcaaacgttggaccaagagaaccagcagcttcaggaccagctcagagatgcccagcagcaggtcaaggccctggggacagagcgcacaacactggaggggcatttagccaaggtacaggcccaggctgagcagggccaacaggagctgaagaacttgcgtgcttgtgtcctggagctggaagagcggctgagcacgcaggagggcttggtgcaagagcttcagaaaaaacaggtggaattgcaggaagaacggaggggactgatgtcccaactagaggagaaggagaggaggctgcagacatcagaagcagccctgtcaagcagccaagcagaggtggcatctctgcggcaggagactgtggcccaggcagccttactgactgagcgggaagaacgtcttcatgggctagaaatggagcgccggcgactgcacaaccagctgcaggaactcaagggcaacatccgtgtattctgccgggtccgccctgtcctgccgggggagcccactccaccccctggcctcctcctgtttccctctggccctggtgggccctctgatcctccaacccgccttagcctctcccggtctgacgagcggcgtgggaccctgagtggggcaccagctcccccaactcgccatgatttttcctttgaccgggtattcccaccaggaagtggacaggatgaagtgtttgaagagattgccatgcttgtccagtcagccctggatggctatccagtatgcatctttgcctatggccagacaggcagtggcaagaccttcacaatggagggtgggcctgggggagacccccagttggaggggctgatccctcgggccctgcggcacctcttctctgtggctcaggagctgagtggtcagggctggacctacagctttgtagcaagctacgtagagatctacaatgagactgtccgggacctgctggccactggaacccggaagggtcaagggggcgagtgtgagattcgccgtgcagggccagggagtgaggagctcactgtcaccaatgctcgatatgtccctgtctcctgtgagaaagaagtggacgccctgcttcatctggcccgccagaatcgggctgtggcccgcacagcccagaatgaacggtcatcacgcagccacagtgtattccagctacagatttctggggagcactccagccgaggcctgcagtgtggggcccccctcagtcttgtggacctggccgggagtgagcgacttgaccccggcttagccctcggccccggggagcgggaacgccttcgggaaacacaggccattaacagcagcctgtccacgctggggctggttatcatggccctgagcaacaaggagtcccacgtgccttaccggaacagcaaactgacctacctgctgcagaactctctgggtggtagtgctaagatgctcatgtttgtgaacatttctccactggaagagaacgtctccgagtccctcaactctctacgctttgcctccaaggttgaacccagtgtgttattcggtactgctcagtccaacaggaagtggaagacggatccagatctctgtgtgtgtgtgtgtgtgtgtgtgtgtgtgtgtgtgtgtgtgtgtgtgtgtgtccctatgtctatgtatcgggtgaggggtgggagggttgctggagggtgctttattgggtggagggcaccatgtcccagggctatcaaataaagaatagtttggttttttttttaaataaaggttttattagcatttgcccaagaaggcagatactttcatatctgtaaaagtgggagctgtgatctgtaccctctgccaaacgtttacgtgggaggcgggagcgggggctgagggcttcgtcttttctcccctctgctatcaccggttctggaccttggcctggatcatcttcccctctgctaataccccctaccccgtccgtcacatcagggaggtgtgccctctagctatccacgccccctccttggtcactagttataggtaactttcacccttccgccggc

SEQ ID NO: 369 - DNA, 401 bp, Homo sapiens
tatctgctaggatgagtcacccaatttttttctcctcattatgtagaaggttttgattctatttttggcaatcttggtcttcagtacaaattttagaattagcttatcaagatttataaaaaatctggttaagattttaactggaattgcatcaaatctatagatttagagagaattgatatctttacaatatttagtaaccccaccccaccaaaatttattcaatttttcttatatatttaaatttattcaatttttcttatatatcctggcaatgcattaaaattattttcatgcagcgattctgtgtttgcagtgagagggcctcgttctatatcaatccatctgccttgactggtatatcctcaaatactattaaccagatctatatttttaacaag

SEQ ID NO: 370 - DNA, 392 bp, Homo sapiens
agagacagcaggaacaggggagaggaggcagcccattcacctggggaaatgactgcgatggacagggacggtggcggcagccccaagggggacgtgtacccgatgtactatgactataagaccgttctgattgggggcctgatcttcgctggactggccttaattgcgggggtcctcatcctcctcagcagaagattgcgctgcggcggcaataataagcgcatgcaagacactgaaaatgagccgaaacagcagactgacgcggtgccacccactgctctggggccatgtgctaatccaagcatggccctgcctcttgcgcctcctgttcttgcatgggctttagaccttcgaccccgtcaataacagcgcttggactgatcgatgctccg

SEQ ID NO: 371 - DNA, 770 bp, Homo sapiens
gctttggctactttgtgcatccttgacctcatccacctattaaatccacatcagagctatttcccacccctaaccaagcaaggccctattttctctgggtctggaggttactcctgactccagcttaaaactactctcagaaccaccctaaccctatctctggcatctttagactttcccattcttttctctaaccattttctctcctcacagggcattttgggttccttggaaaatttgttctgatggcttttcctcacttgaataatgtaatctttggactgcttggcattgtggttgatgtgcgtggatcttgagccttctctgatcttctcatgcttcctggaccccattttctttttctctttcctgcttttcacatgtccatctcccagagatatcatcaaagaagacggtttgaaatggtaggtttatctacctgattacatggaaatcatgagaaaacataaatctgaaaatatccgaatcttgattcataagctcttaaaaatataaattttggggccgggcaaggtggctcacgcctgtaatcccagcgctctgtgaggccaaggcaggtggatcacaaggtcaggagatcgagaccatcctggctagcacggtgaaaccctgtctctactacaaatacaaaaaaaataactgggtgtgggggcgggccgcggggactcacccctacttaggaggctgccgcgcgagaaagcgcctaaatgggaagggggaatttgactgagcccacaccccccgttgcc

SEQ ID NO: 372 - DNA, 381 bp, Homo sapiens
ttcctttaggaggagtcttcaaaaagtttgtggaaaattggaattaaaaaataaacacaaaaggtacaaactttatttctcaacataagctcaataatgttgaagacacttttgtaagcagtgataccagccatttagtctatccttgtagaactgagcattctggaatgtaaccatgtcgaaacagtcttttttacattatcaactaaagaaaaatgggttctctttaaatatgtttttaagattaagaaacaaaaagcagccagaaggagccaaatcaggactttaaggtaaatgcctaatttccaactgaaactcttgagaaatttccctcttttgaggagaggaatgagcaggaacattgtcatggtggaggactct

SEQ ID NO: 373 - DNA, 14887 bp, Homo sapiens
cagcggtgcgagctccaggcccatgcactgaggaggcggaaacaaggggagcccccagagctccatcaagccccctccaaaggctcccctacccggtccacgccccccaccccccctccccgcctcctcccaattgtgcatttttgcagccggaggcggctccgagatggggctgtgagcttcgcccggggagggggaaagagcagcgaggagtgaagcgggggggtggggtgaagggtttggatttcggggcagggggcgcacccccgtcagcaggccctccccaaggggctcggaactctacctcttcacccacgcccctggtgcgctttgccgaaggaaagaataagaacagagaaggaggagggggaaaggaggaaaagggggaccccccaactggggggggtgaaggagagaagtagcaggaccagaggggaaggggctgctgcttgcatcagcccacaccatgctgaccccgccgttgctcctgctgctgcccctgctctcagctctggtcgcggcggctatcgacgcccctaagacttgcagccccaagcagtttgcctgcagagatcaaataacctgtatctcaaagggctggcggtgcgacggtgagagggactgcccagacggatctgacgaggcccctgagatttgtccacagagtaaggcccagcgatgccagccaaacgagcataactgcctgggtactgagctgtgtgttcccatgtcccgcctctgcaatggggtccaggactgcatggacggctcagatgaggggccccactgccgagagctccaaggcaactgctctcgcctgggctgccagcaccattgtgtccccacactcgatgggcccacctgctactgcaacagcagctttcagcttcaggcagatggcaagacctgcaaagattttgatgagtgctcagtgtacggcacctgcagccagctatgcaccaacacagacggctccttcatatgtggctgtgttgaaggatacctcctgcagccggataaccgctcctgcaaggccaagaacgagccagtagaccggccccctgtgctgttgatagccaactcccagaacatcttggccacgtacctgagtggggcccaggtgtctaccatcacacctacgagcacgcggcagaccacagccatggacttcagctatgccaacgagaccgtatgctgggtgcatgttggggacagtgctgctcagacgcagctcaagtgtgcccgcatgcctggcctaaagggcttcgtggatgagcacaccatcaacatctccctcagtctgcaccacgtggaacagatggccatcgactggctgacaggcaacttctactttgtggatgacatcgatgataggatctttgtctgcaacagaaatggggacacatgtgtcacattgctagacctggaactctacaaccccaagggcattgccctggaccctgccatggggaaggtgtttttcactgactatgggcagatcccaaaggtggaacgctgtgacatggatgggcagaaccgcaccaagctcgtcgacagcaagattgtgtttcctcatggcatcacgctggacctggtcagccgccttgtctactgggcagatgcctatctggactatattgaagtggtggactatgagggcaagggccgccagaccatcatccagggcatcctgattgagcacctgtacggcctgactgtgtttgagaattatctctatgccaccaactcggacaatgccaatgcccagcagaagacgagtgtgatccgtgtgaaccgctttaacagcaccgagtaccaggttgtcacccgggtggacaagggtggtgccctccacatctaccaccagaggcgtcagccccgagtgaggagccatgcctgtgaaaacgaccagtatgggaagccgggtggctgctctgacatctgcctgctggccaacagccacaaggcgcggacctgccgctgccgttccggcttcagcctgggcagtgacgggaagtcatgcaagaagccggagcatgagctgttcctcgtgtatggcaagggccggccaggcatcatccggggcatggatatgggggccaaggtcccggatgagcacatgatccccattgaaaacctcatgaacccccgagccctggacttccacgctgagaccggcttcatctactttgccgacaccaccagctacctcattggccgccagaagattgatggcactgagcgggagaccatcctgaaggacggcatccacaatgtggagggtgtggccgtggactggatgggagacaatctgtactggacggacgatgggcccaaaaagacaatcagcgtggccaggctggagaaagctgctcagacccgcaagactttaatcgagggcaaaatgacacaccccagggctattgtggtggatccactcaatgggtggatgtactggacagactgggaggaggaccccaaggacagtcggcgtgggcggctggagagggcgtggatggatggctcacaccgagacatctttgtcacctccaagacagtgctttggcccaatgggctaagcctggacatcccggctgggcgcctctactgggtggatgccttctacgaccgcatcgagacgatactgctcaatggcacagaccggaagattgtgtatgaaggtcctgagctgaaccacgcctttggcctgtgtcaccatggcaactacctcttctggactgagtatcggagtggcagtgtctaccgcttggaacggggtgtaggaggcgcaccccccactgtgacccttctgcgcagtgagccggccccccatctttgagatccgaaatgtatgatgcccagcaccagcaagttggctccaacaaatgccgggtgaacaatgccggctgcagcagcctgtgcttggccacccctgggagccgccagtgcgcctgtgctgaggaccaggtgttggacgcagacggcgtcacttgcttggcgaacccatcctacgtgcctccaccccagtgccagccaggcgagtttgcctgtgccaacagccgctgcatccaggagcgctggaagtgtgacggagacaacgattgcctggacaacagtgatgaggccccagccctctgccatcagcacacctgcccctcggaccgattcaagtgcgagaacaaccggtgcatccccaaccgctggctctgcgacggggacaatgactgtgggaacagtgaagatgagtccaatgccacttgttcagcccgcacctgcccccccaaccagttctcctgtgccagtggccgctgcatccccatctcctggacgtgtgatctggatgacgactgtggggaccgctctgatgagtctgcttcgtgtgcctatcccacctgcttccccctgactcagtttacctgcaacaatggcagatgtatcaacatcaactggagatgcgacaatgacaatgactgtggggacaacagtgacgaagccggctgcagccactcctgttctagcacccagttcaagtgcaacagcgggcgttgcatccccgagcactggacctgcgatggggacaatgactgcggagactacagtgatgagacacacgccaactgcaccaaccaggccacgaggccccctggtggctgccacactgatgagttccagtgccggctggatggactatgcatccccctgcggtggcgctgcgatggggacactgactgcatggactccagcgatgagaagagctgtgagggagtgacccacgtctgcgatcccagtgtcaagtttggctgcaaggactcagctcggtgcatcagcaaagcgtgggtgtgtgatggcgacaatgactgtgaggataactcggacgaggagaactgcgagtccctggcctgcaggccaccctcgcacccttgtgccaacaacacctcagtctgcctgccccctgacaagctgtgtgatggcaacgacgactgtggcgacggctcagatgagggcgagctctgcgaccagtgctctctgaataacggtggctgcagccacaactgctcagtggcacctggcgaaggcattgtgtgttcctgccctctgggcatggagctggggcccgacaaccacacctgccagatccagagctactgtgccaagcatctcaaatgcagccaaaagtgcgaccagaacaagttcagcgtgaagtgctcctgctacgagggctgggtcctggaacctgacggcgagagctgccgcagcctggaccccttcaagccgttcatcattttctccaaccgccatgaaatccggcgcatcgatcttcacaaaggagactacagcgtcctggtgcccggcctgcgcaacaccatcgccctggacttccacctcagccagagcgccctctactggaccgacgtggtggaggacaagatctaccgcgggaagctgctggacaacggagccctgactagtttcgaggtggtgattcagtatggcctggccacacccgagggcctggctgtagactggattgcaggcaacatctactgggtggagagtaacctggatcagatcgaggtggccaagctggatgggaccctccggaccaccctgctggccggtgacattgagcacccaagggcaatcgcactggatccccgggatgggatcctgttttggacagactgggatgccagcctgccccgcattgaggcagcctccatgagtggggctgggcgccgcaccgtgcaccgggagaccggctctgggggctggcccaacgggctcaccgtggactacctggagaagcgcatcctttggattgacgccaggtcagatgccatttactcagcccgttacgacggctctggccacatggaggtgcttcggggacacgagttcctgtcgcacccgtttgcagtgacgctgtacgggggggaggtctactggactgactggcgaacaaacacactggctaaggccaacaagtggaccggccacaatgtcaccgtggtacagaggaccaacacccagccctttgacctgcaggtgtaccacccctcccgccagcccatggctcccaatccctgtgaggccaatgggggccagggcccctgctcccacctgtgtctcatcaactacaaccggaccgtgtcctgcgcctgcccccacctcatgaagctccacaaggacaacaccacctgctatgagtttaagaagttcctgctgtacgcacgtcagatggagatccgaggtgtggacctggatgctccctactacaactacatcatctccttcacggtgcccgacatcgacaacgtcacagtgctagactacgatgcccgcgagcagcgtgtgtactggtctgacgtgcggacacaggccatcaagcgggccttcatcaacggcacaggcgtggagacagtcgtctctgcagacttgccaaatgcccacgggctggctgtggactgggtctcccgaaacctgttctggacaagctatgacaccaataagaagcagatcaatgtggcccggctggatggctccttcaagaacgcagtggtgcagggcctggagcagccccatggccttgtcgtccaccctctgcgtgggaagctctactggaccgatggtgacaacatcagcatggccaacatggatggcagcaatcgcaccctgctcttcagtggccagaagggccccgtgggcctggctattgacttccctgaaagcaaactctactggatcagctccgggaaccataccatcaaccgctgcaacctggatgggagtgggctggaggtcatcgatgccatgcggagccagctgggcaaggccaccgccctggccatcatgggggacaagctgtggtgggctgatcaggtgtcggaaaagatgggcacatgcagcaaggctgacggctcgggctccgtggtccttcggaacagcaccaccctggtgatgcacatgaaggtctatgacgagagcatccagctggaccataagggcaccaacccctgcagtgtcaacaacggtgactgctcccagctctgcctgcccacgtcagagacgacccgctcctgcatgtgcacagccggctatagcctccggagtggccagcaggcctgcgagggcgtaggttcctttctcctgtactctgtgcatgagggaatcaggggaattcccctggatcccaatgacaagtcagatgccctggtcccagtgtccgggacctcgctggctgtcggcatcgacttccacgctgaaaatgacaccatctactgggtggacatgggcctgagcacgatcagccgggccaagcgggaccagacgtggcgtgaagacgtggtgaccaatggcattggccgtgtggagggcattgcagtggactggatcgcaggcaacatctactggacagaccagggctttgatgtcatcgaggtcgcccggctcaatggctccttccgctacgtggtgatctcccagggtctagacaagccccgggccatcaccgtccacccggagaaagggtacttgttctggactgagtggggtcagtatccgcgtattgagcggtctcggctagatggcacggagcgtgtggtgctggtcaacgtcagcatcagctggcccaacggcatctcagtggactaccaggatgggaagctgtactggtgcgatgcacggacagacaagattgaacggatcgacctggagacaggtgagaaccgcgaggtggttctgtccagcaacaacatggacatgttttcagtgtctgtgtttgaggatttcatctactggagtgacaggactcatgccaacggctctatcaagcgcgggagcaaagacaatgccacagactccgtgcccctgcgaaccggcatcggcgtccagcttaaagacatcaaagtcttcaaccgggaccggcagaaaggcaccaacgtgtgcgcggtggccaatggcgggtgccagcagctgtgcctgtaccggggccgtgggcagcgggcctgcgcctgtgcccacgggatgctggctgaagacggagcatcgtgccgcgagtatgccggctacctgctctactcagagcgcaccattctcaagagtatccacctgtcggatgagcgcaacctcaatgcgcccgtgcagcccttcgaggaccctgagcacatgaagaacgtcatcgccctggcctttgactaccgggcaggcacctctccgggcacccccaatcgcatcttcttcagcgacatccactttgggaacatccaacagatcaacgacgatggctccaggaggatcaccattgtggaaaacgtgggctccgtggaaggcctggcctatcaccgtggctgggacactctctattggacaagctacacgacatccaccatcacgcgccacacagtggaccagacccgcccaggggccttcgagcgtgagaccgtcatcactatgtctggagatgaccacccacgggccttcgttttggacgagtgccagaacctcatgttctggaccaactggaatgagcagcatcccagcatcatgcgggcggcgctctcgggagccaatgtcctgacccttatcgagaaggacatccgtacccccaatggcctggccatcgaccaccgtgccgagaagctctacttctctgacgccaccctggacaagatcgagcggtgcgagtatgacggctcccaccgctatgtgatcctaaagtcagagcctgtccaccccttcgggctggccgtgtatggggagcacattttctggactgactgggtgcggcgggcagtgcagcgggccaacaagcacgtgggcagcaacatgaagctgctgcgcgtggacatcccccagcagcccatgggcatcatcgccgtggccaacgacaccaacagctgtgaactctctccatgccgaatcaacaacggtggctgccaggacctgtgtctgctcactcaccagggccatgtcaactgctcatgccgagggggccgaatcctccaggatgacctcacctgccgagcggtgaattcctcttgccgagcacaagatgagtttgagtgtgccaatggcgagtgcatcaacttcagcctgacctgcgacggcgtcccccactgcaaggacaagtccgatgagaagccatcctactgcaactcccgccgctgcaagaagactttccggcagtgcagcaatgggcgctgtgtgtccaacatgctgtggtgcaacggggccgacgactgtggggatggctctgacgagatcccttgcaacaagacagcctgtggtgtgggcgagttccgctgccgggacgggacctgcatcgggaactccagccgctgcaaccagtttgtggattgtgaggacgcctcagatgagatgaactgcagtgccaccgactgcagcagctacttccgcctgggcgtgaagggcgtgctcttccagccctgcgagcggacctcactctgctacgcacccagctgggtgtgtgatggcgccaatgactgtggggactacagtgatgagcgcgactgcccaggtgtgaaacgccccagatgccctctgaattacttcgcctgccctagtgggcgctgcatccccatgagctggacgtgtgacaaagaggatgactgtgaacatggcgaggacgagacccactgcaacaagttctgctcagaggcccagtttgagtgccagaaccatcgctgcatctccaagcagtggctgtgtgacggcagcgatgactgtggggatggctcagacgaggctgctcactgtgaaggcaagacgtgcggcccctcctccttctcctgccctggcacccacgtgtgcgtccccgagcgctggctctgtgacggtgacaaagactgtgctgatggtgcagacgagagcatcgcagctggttgcttgtacaacagcacttgtgacgaccgtgagttcatgtgccagaaccgccagtgcatccccaagcacttcgtgtgtgaccacgaccgtgactgtgcagatggctctgatgagtcccccgagtgtgagtacccgacctgcggccccagtgagttccgctgtgccaatgggcgctgtctgagctcccgccagtgggagtgtgatggcgagaatgactgccacgaccagagtgacgaggctcccaagaacccacactgcaccagcccagagcacaagtgcaatgcctcgtcacagttcctgtgcagcagtgggcgctgtgtggctgaggcactgctctgcaacggccaggatgactgtggcgacagctcggacgagcgtggctgccacatcaatgagtgtctcagccgcaagctcagtggctgcagccaggactgtgaggacctcaagatcggcttcaagtgccgctgtcgccctggcttccggctgaaggatgacggccggacgtgtgctgatgtggacgagtgcagcaccaccttcccctgcagccagcgctgcatcaacacccatggcagctataagtgtctgtgtgtggagggctatgcaccccgcggcggcgacccccacagctgcaaggctgtgactgacgaggaaccgtttctgatcttcgccaaccggtactacctgcgcaagctcaacctggacgggtccaactacacgttacttaagcagggcctgaacaacgccgttgccttggattttgactaccgagagcagatgatctactggacagatgtgaccacccagggcagcatgatccgaaggatgcaccttaacgggagcaatgtgcaggtcctacaccgtacaggcctcagcaaccccgatgggctggctgtggactgggtgggtggcaacctgtactggtgcgacaaaggccgggacaccatcgaggtgtccaagctcaatggggcctatcggacggtgctggtcagctctggcctccgtgagcccagggctctggtggtggatgtgcagaatgggtacctgtactggacagactggggtgaccattcactgatcggccgcatcggcatggatgggtccagccgcagcgtcatcgtggacaccaagatcacatggcccaatggcctgacgctggactatgtcactgagcgcatctactgggccgacgcccgcgaggactacattgaatttgccagcctggatggctccaatcgccacgttgtgctgagccaggacatcccgcacatctttgcactgaccctgtttgaggactacgtctactggaccgactgggaaacaaagtccattaaccgagcccacaagaccacgggcaccaacaaaacgctcctcatcagcacgctgcaccggcccatggacctgcatgtcttccatgccctgcgccagccagacgtgcccaatcacccctgcaaggtcaacaatggtggctgcagcaacctgtgcctgctgtcccccgggggagggcacaaatgtgcctgccccaccaacttctacctgggcagcgatgggcgcacctgtgtgtccaactgcacggctagccagtttgtatgcaagaacgacaagtgcatccccttctggtggaagtgtgacaccgaggacgactgcggggaccactcagacgagcccccggactgccctgagttcaagtgccggcccggacagttccagtgctccacaggtatctgcacaaaccctgccttcatctgcgatggcgacaatgactgccaggacaacagtgacgaggccaactgtgacatccacgtctgcttgcccagtcagttcaaatgcaccaacaccaaccgctgtattcccggcatcttccgctgcaatgggcaggacaactgcggagatggggaggatgagagggactgccccgaggtgacctgcgcccccaaccagttccagtgctccattaccaaacggtgcatcccccgggtctgggtctgcgaccgggacaatgactgtgtggatggcagtgatgagcccgccaactgcacccagatgacctgtggtgtggacgagttccgctgcaaggattcgggccgctgcatcccagcgcgttggaagtgtgacggagaggatgactgtggggatggctcggatgagcccaaggaagagtgtgatgaacgcacctgtgagccataccagttccgctgcaagaacaaccgctgcgtgcccggccgctggcagtgcgactacgacaacgattgcggtgacaactccgatgaagagagctgcacccctcggccctgctccgagagtgagttctcctgtgccaacggccgctgcatcgcggggcgctggaaatgcgatggagaccacgactgcgcggacggctcggacgagaaagactgcaccccccgctgtgacatggaccagttccagtgcaagagcggccactgcatccccctgcgctggcgctgtgacgcagacgccgactgcatggacggcagcgacgaggaggcctgcggcactggcgtgcggacctgccccctggacgagttccagtgcaacaacaccttgtgcaagccgctggcctggaagtgcgatggcgaggatgactgtggggacaactcagatgagaaccccgaggagtgtgcccggttcgtgtgccctcccaaccggcccttccgttgcaagaatgaccgcgtctgtctgtggatcgggcgccaatgcgatggcacggacaactgtggggatgggactgatgaagaggactgtgagccccccacagcccacaccacccactgcaaagacaagaaggagtttctgtgccggaaccagcgctgcctctcctcctccctgcgctgcaacatgttcgatgactgcggggacggctctgacgaggaggactgcagcatcgaccccaagctgaccagctgcgccaccaatgccagcatctgtggggacgaggcacgctgcgtgcgcaccgagaaagcggcctactgtgcctgccgctcgggcttccacaccgtgcccggccagcccggatgccaagacatcaacgagtgcctgcgcttcggcacctgctcccagctctgcaacaacaccaagggcggccacctctgcagctgcgctcggaacttcatgaagacgcacaacacctgcaaggccgaaggctctgagtaccaggtcctgtacatcgctgatgacaatgagatccgcagcctgttccccggccacccccattcggcttacgagcaggcattccagggtgacgagagtgtccgcattgatgctatggatgtccatgtcaaggctggccgtgtctattggaccaactggcacacgggcaccatctcctaccgcagcctgccacctgctgcgcctcctaccacttccaaccgccaccggcgacagattgaccggggtgtcacccacctcaacatttcagggctgaagatgcccagaggcatcgccatcgactgggtggccggaaacgtgtactggaccgactcgggccgagatgtgattgaggtggcgcagatgaagggcgagaaccgcaagacgctcatctcgggcatgattgacgagccccacgccattgtggtggacccactgagggggaccatgtactggtcagactggggcaaccaccccaagattgagacggcagcgatggatgggacgcttcgggagacactggtgcaggacaacattcagtggcccacaggcctggccgtggattatcacaatgagcggctgtactgggcagacgccaagctttcagtcatcggcagcatccggctcaatggcacggaccccattgtggctgctgacagcaaacgaggcctaagtcaccccttcagcatcgacgtctttgaggattacatctatggtgtcacctacatcaataatcgtgtcttcaagatccataagtttggccacagccccttggtcaacctgacagggggcctgagccacgcctctgacgtggtcctttaccatcagcacaagcagcccgaagtgaccaacccatgtgaccgcaagaaatgcgagtggctctgcctgctgagccccagtgggcctgtctgcacctgtcccaatgggaagcggctggacaacggcacatgcgtgcctgtgccctctccaacgccccccccagatgctccccggcctggaacctgtaacctgcagtgcttcaacggtggcagctgtttcctcaatgcacggaggcagcccaagtgccgctgccaaccccgctacacgggtgacaagtgtgaactggaccagtgctgggagcactgtcgcaatgggggcacctgtgctgcctccccctctggcatgcccacgtgccggtgccccacgggcttcacgggccccaaatgcacccagcaggtgtgtgcgggctactgtgccaacaacagcacctgcactgtcaaccagggcaaccagccccagtgccgatgcctacccggcttcctgggcgaccgctgccagtaccggcagtgctctggctactgtgagaactttggcacatgccagatggctgctgatggctcccgacaatgccgctgcactgcctactttgagggatcgaggtgtgaggtgaacaagtgcagccgctgtctcgaaggggcctgtgtggtcaacaagcagagtggggatgtcacctgcaactgcacggatggccgggtggcccccagctgtctgacctgcgtcggccactgcagcaatggcggctcctgtaccatgaacagcaaaatgatgcctgagtgccagtgcccaccccacatgacagggccccggtgtgaggagcacgtcttcagccagcagcagccaggacatatagcctccatcctaatccctctgctgttgctgctgctgctggttctggtggccggagtggtattctggtataagcggcgagtccaaggggctaagggcttccagcaccaacggatgaccaacggggccatgaacgtggagattggaaaccccacctacaagatgtacgaaggcggagagcctgatgatgtgggaggcctactggacgctgactttgccctggaccctgacaagcccaccaacttcaccaaccccgtgtatgccacactctacatggggggccatggcagtcgccactccctggccagcacggacgagaagcgagaactcctgggccggggccctgaggacgagataggggaccccttggcatagggccctgccccgtcggactgcccccagaaagcctcctgccccctgccggtgaagtccttcagtgagcccctccccagccagcccttccctggccccgccggatgtataaatgtaaaaatgaaggaattacattttatatgtgagcgagcaagccggcaagcgagcacagtattatttctccatcccctccctgcctgctccttggcacccccatgctgccttcagggagacaggcagggagggcttggggctgcacctcctaccctcccaccagaacgcaccccactgggagagctggtggtgcagccttcccctccctgtataagacactttgccaaggctctcccctctcgccccatccctgcttgcccgctcccacagcttcctgagggctaattctgggaagggagagttctttgctgcccctgtctggaagacgtggctctgggtgaggtaggcgggaaaggatggagtgttttagttcttgggggaggccaccccaaaccccagccccaactccaggggcacctatgagatggccatgctcaacccccctcccagacaggccctccctgtctccagggcccccaccgaggttcccagggctggagacttcctctggtaaacattcctccagcctcccctcccctggggacgccaaggaggtgggccacacccaggaagggaaagcgggcagccccgttttggggacgtgaacgttttaataatttttgctgaattctttacaactaaataacacagatattcttataaataaaattgt

SEQ ID NO: 374 - DNA, 1909 bp, Homo sapiens
  misc_feature (1)...(1909): n = a,t,c or g
tgttaatatttgaagttttgctcacttttatttttcctagtagagcaggataaaaggagagacttagggtcttatttatttctttatacagatctgatagatagattcatttattattattattttttaactgcaagggtaattgtaaaatcatagtgtaaagtttgtgtggtgtttctgctttttgtaatgtttggaacttgcctctgcaggtaaaatcccagaggaatccaaagccctctctttattggctcctgctccaaccatgacaagtctgatgcctggtgcaggattgcttccaataccgaccccaaatcctttgactactcttggtgtttcacttagcagtttgggagctataccagcagcagcactagaccccaacattgcaacacttggagagataccacagccaccacttatgggaaacgtggatccttccaaaatagatgaaattaggagaacggtttatgttggaaatctgaattcccagacaacgacagctgatcaactacttgaattttttaaacaagttggagaagtgaagtttgtgcggatggcaggtgatgagactcagccaactcggtttgcttttgtggaatttgcagaccaaaattctgtaccaagggcccttgcttttaatggagttatgtttggagacaggccactgaaaataaatcactccaacaatgcaatagtaaaaccccctgagatgacacctcaggctgcagctaaggagttagaagaagtaatgaagcgagtacgagaagctcagtcatttatctcagcagctattgaaccagggtggctgcactcaacgagtttatgcaatgactttcttggatgtttctgaaggaggaggatgtacagagagtaggccccttgcactatatgtggtacattccacttgtgcctgattattaactgggatctttaattgttctgagcttacactgcaaagtgattttttcctcccagagtctggaaagagcaatgaaagaaaaggcggtcgatctcgttcccatactcgctcaaaatccaggtctagctcaaaatcccattctagaaggaaaagatcacaatcaaaacacaggagtagatcccataatagatcacgttcaagacagaaagacagacgtagatctaagagcccacataaaaaacgctctaaatcaagggagagacggaagtcaaggagtcgttcgcattcacgggacaagagaaaagacactcgagaaaagatcaaggaaaaggaaagagtgaaagagaaagacagggaaaaggagagagagagggaaaaggaacgtgaaaaagaaaaggaacggggtaaaaacaaagaccgggacaaggaacgggaaaaggaccgggaaaaagacaaggaaaaggacagagagagagaacgggaaaaagagcatgagaaggatcgagacaaagagaaggaaaaggaacaggacaaagaaaaggaacgagaaaaagacagatccaaagagatagatgaaaaaagaaagaaggataaaaaatccagaacaccacccaggagttacaatgcatcgcgaagatctcgtagttccagcagggaaaggcgtaggaggaggagcaggagttcttccagatcgccaagaacatcaaaaaccataaaaaggaaatcttctagatctccgtcccccaggagcagaaataagaaggataaaaagagagaaaaagaaagggaccacatcagtgaaagaagagagagagaacgttcaacgtctatgagaaagagttctaatgatagagatgggaaggagaagttggagaagaacagtacttccttnagagaaagagcncattaagaccngattcagtgtgaccaagaatngatacaggatcncccaggctgngaaacaatacacacattgggaatgtcgct

SEQ ID NO: 375 - DNA, 413 bp, Homo sapiens
tgggaacacagagccaaactatatcaaacatacgtgaggggacttcaaaaagtttgtggaaaatggaattaaaacataaaaataaaaaatgtaaactttatttcttaacataagctccatcaagatcaggacacttttgtgagtgatgataccagtcatttaatccattcctgaaggatgagggtatctggagatctggagactagggataaaaaagaaccaagggtcctgggaatttaaccatgtcaatgtagtcttttttgactgaagaaaaatgggtgccccttaaagattttttaagattaggaaatgaagccagaaagagccaaattaggaccttagaggtggatgcctaataatgtcccattgaaattcctgtaaaattgcccttgtttgatgagaggaatgagcag

SEQ ID NO: 376 - DNA, 975 bp, Homo sapiens
gtggtggaattcaccgcacctaaaatgcacttgcactattactcagcagcagtaacatggtaacacttaaaatggtactcggggacctccaaagactaaactgacaagccttcaaggagcccaggggctagagtataatggtgcgatctgggctcaccgcaacctccaccacctgggttcaagcaattctgcctcggccgctcgagtagctgggattacaggcatgtaccaccacacccggctaattttgtatttttattagagacggggtttctccatgctggtcaggctggcctcaggtgacccacctgcctcggcctcccaaagtgctgggattacaggcgtgagccacacctggcctaaaaatcatttaattttttatgcttgcctagttataaggtcaaagagaatcaaatgactgatgcagtcagcacctaacaacctctgtatatgggaagggggtaatgagaacatactatttggaaataataacagcctaagagccaagtgctgaagttacatttctgcctaccacagctaaagctctcctcactgtctcctacccagtcctcctttccatcaattaccagtctcttgtataaatgtatccattaccaggctcacagactgggagtgatttttctcctttggagctcgtccagaatccatcagcctcacacacatatttacctgcaaatcattggaaaagcaaaaatgtttaactgcatgtataagatggttgtcatttgcttgaatacccccttgaaaaatgttgattcttgagcatcagtgggacatagaggtgtctgaagaaccattttacatgatttcataaataggaggtctctgcattaccatgtttgcttgcaaagtggaaaccttttagatgtgtaacttgaatgtatcaagatctcaagtgcttaatgataaggtgttgacttgttaaattaaaccatttggaatacaaaaaaaaaa

SEQ ID NO: 377 - DNA, 2305 bp, Homo sapiens
  misc_feature (1)...(2305): n = a,t,c or g
caaagacgttcacctcatcagagaaatccctgactcctttgcagtggtgtagacatgtcctagataacccaactcctgagatggaagcagcgagacgttccctgtgctttagactggagcaagctagccgatggcggagtctcttctccttcaactgcctcactggcttttccttatagtcctgttgcaagactcagccccttatagccaatggccattaatactccccagcttctcttaaaacctcaaataaagcaatactaacaccctgnaaaaacaggttacacttccaggggctccccactcagtccccagtcatctatcgacagtgagctgagtacttcagaattggaggatgattctatctccatgggatataaattacaggacctcactgatgttcagatcatggctcgtctgcaagaagaaagtctcaggcaagattatgcttctacttcagcatctgtatcaagacatagttccagtgtgtcattgagttcaggaaaaaaagggacatgtagtgatcaagaatatgaccaatacagtctggaggatgaagaggaatttgatcatttgccaccacctcagcctcgtcttccaagatgttcccctttccaaagaggaattccccattcacagactttctccagcattcgggagtgtaggaggagccccagttcccagtattttccttcaaataattaccagcagcaacagtattattcacctcaagcccaaactccagatcagcaaccaaataggaccaatggagataagctccgaagaagtatgcctaacctagcccggatgccaagtacaactgccattagtagcaacattagttctccggtcaccgtgcgaaatagtcagagttttgactcaagcttgcatggagctggaaatggaatttcaagaatacaatcttgtattccatcaccgggacagcttcaacacagggtccacagcgtggggcatttcccagtgtctatccgacagcctcttaaagccacagcctatgtgagtccaaccgttcaaggcagcagtaacatgcctttatcaaacggcttacagctgtattccaacacaggaatccccacaccgaacaaagctgcagcttctgggataatgggtcgcagtgcactcccaagaccttcgttggcaataaatgggagtaacctgcctcgaagcaaaattgcacaacctgttagaagttttcttcagcctccaaagcctctgtcttcactcagcactctgagggatggaaattggagagatggttgctactaatgcagttttatgtacccttgaaaaatgggaaagaagtaaaaatgagggttgtgttacctagctggctgggtagcagtggatgttgggatattctttcccttttgtgttttaatatatttactgcattgtttctcaatggaccagtcaccagagactaattattgcacttaaatatttgcctgagatactgcaacattctcaaacccatggttgcagtattgtgacacttagatctaggaagtttttgtagaactgctctgtacctgaatactttttgagagaattaagatgtatcaataatgctttgccatatgagttttttaaagtaacttgttcaatttactcacgtgttctaaacatctttccattacatgttctgtattttaatacattgcatattgacaactaggttctataatgtatgctttgaaatttacttttttatagtttacaggaattttattttttgtgcctatttctttttacacctatgtgaaccactatggaacaacttaaattttgtgccataaaaatatttttgtggtaaggtactatttttttagctctagggatatatcagcaaaaacacatcatgcaatttgagacacataattttgtgttgaatgagcacaacataatttgaagcattgcaaggagataaccagacagcagaattaaatggtcctgtctttttcatttttaatttattgtcatacatgggtttcatatttataacggcatcatgagctcattgcacttaatacctgcaatgtttgctactgtaccacaattgattttcaatactttattacgaaggatgaaactgtaatgttttattaacaatgcttctggaaatgaatgcattttaaagcaaataaatctttttgatagaccttttacaaaatccatttgcactaatgaatgctttcttatggcatataacttaatatttgttcctggggcccccgctgttttggaatgttcaaaaataaagactctatttcccccaaaaaaaaaa

SEQ ID NO: 378 - DNA, 2107 bp, Homo sapiens
aggttagaaggccagtctcagtccttgtcccttaaaggtctggggaacctgggggctgggctccagcgtccatccctgggacagaagcttgcttgtgttcacaccccataggttcctggagtgactgagagccgcccctcagtgctacggggcgaccacctgtttgcccttttgtcctcggagacacaccaggaggaccccatcacatataagggctttgtgcacaaggtgggaattggaccgtgtcaagctgagcttttccatgagcctcctgagccgctttgtgggatggggctgacctttcaaggtgaacttttacctttcaaccgccagccgctgcgagttccagcaccgtgccctggagctgacagggcgctggctgctgtggcccatgctctttccttgtggcacctcgggacgtcccgctgctgccctcagatgtgaaactcaagctgtacgaccggagtctggagtcaaacccagagcagctgcaggccatgaggcacattgttacgggcaccacccgtccagccccctacatcatctttgggcctccaggcaccggcaagactgtcacgttagtggaggcaattaagcaggtggtgaagcacttgcccaaagcccacatcttggcctgcgctccatccaactcaggggctgacctactctgtcaaaggctccgggtccaccttcctagctccatctaccgcctcctggcccccagcagggacatccgcatggtacctgaggacatcaagccctgctgcaactgggacgcaaagaagggggagtatgtatttcccgccaagaagaagctgcaggaataccgggtcttaattaccaccctcatcactgccggcaggttggtctcggcccagtttcccattgatcacttcacacacatcttcatcgatgaggctggccactgcatggagcctgagagtctggtagctatagcagggctgatggaagtaaaggaaacaggtgatccaggagggcagctggtgctggcaggagaccctcggcagctggggcctgtgctgcgttccccactgacccagaagcatggactgggatactcactgctggagcggctgctcacctacaactccctgtacaagaagggccctgatggctatgacccccagttcataaccaagctgctccgcaactacaggtctcatcccaccatcctggacattcctaaccagctctattatgaaggggagctgcaggcctgtgctgatgtcgtggatcgagaacgcttctgccgctgggcgggccctacctcgacagggctttcccatcatctttcacggcgtaatgggcaaagatgagcgtgaaggcaacagcccatccttcttcaaccctgaagaggctgccacagtgacttcctacctgaagctgctcctggccccctcctccaagaagggcaaagcccgcctgagccctcgaagtgtgggcgtcatctccccgtaccggaaacaggtggagaaaatccgttactgcatcaccaaacttgacagggagcttcgaggactggatgacatcaaggacttgaaggtgacatgctgttccacagtcactccctgccttccgtgtgcccccacttgcccacttccagagacttcctcaagcttccactccagcccacgtccccgtcccacccctgctgccttgaatagagctcgagctctccctgagcctctcactcctggagattccaacttaagggtctgggatgggatcaggaagcctgcatgtttaacaaacacctcctgtcattcttagactgaggcaggtttgaggcctctgccctaaggataaagtccaaattccgtggcctgtcatgtgatgctgccacccccacccccagtagcctctctcttaaggatctggtctcaacactggctgcagataacaatcacctggagagcttttaatactgccgaccgcatgccacgggcccacccaccagctcatacagctatcggggcagagccaggtcactggcagtttttacagcttttcaggcgactctaatatgcagccagggttgaaaacacttgtcctaagacttacagggcccttcccttggaatatgcgg

SEQ ID NO: 379 - DNA, 432 bp, Homo sapiens
  misc_feature (1)...(432): n = a,t,c or g
gatcncnngaattctgcggcccccgcgtcgaccctttcccgtggtngggggggtgganngggttgagaaaacctttatgaacattnnctgtagggnngccactgggtctgctcnncacggtgctcccttttcatgcgtnngacctggcagctgtagctttttgtggggaaacttccactgctcannggcgtcaggctcnaggtagctgctggcccgcgtacccttgttgttgctttgtttnnggagagctgtggtggtctccactttcccgccttgacgggnngctgctatctgccttccaggnccactgtcancggcttcccgggtagaaagtcactttatgnagacacanccagtgtggcccttggttggcttgaagcttcctcagaggaagggcgggaaccagagtnngaccgagggggcagccttggg

SEQ ID NO: 380 - DNA, 507 bp, Homo sapiens
  misc_feature (1)...(507): n = a,t,c or g
gcgccgcccccccattgaactgatagctatggtcggancccatgntggtacaggcccncgctctgctgntgngaggncgacctcacgacccagcacaggatttggatgcgaggtgcacgcgaggctctccacagcgcaggaaggcagcctgtcaccctgctctccgagccaggggccaaggtgtgggggggcacaggccatcctcatcctgccaggcccccgctttcaggagtgggggggtgccaatgctcccactcaaaaccctggactgcggggtcccctgagcagagggaccatccagctccccataaacagattgaagctggacaggggctgcctgggccccaggcttggggagggtagaaaggccctgcantgctgctgcctgggcccggaggagggcctggccccgtagcatcattggaggccagagcccaagccagttccggagtcacacccaacggcggagggagaacctacccatatcccaccttcagctctggggag

SEQ ID NO: 381 - DNA, 1097 bp, Homo sapiens
ggcacgaggccaggacatctaccggctccttctgatggattttgtgttctctttagtcaattccttcctgggggagtttctgaggagaatcattgggatgcaactgatcacaagtcttggccttcaggagtttgacattgccaggaacgttctagaactgatctatgcacaaactctggtgtggattggcatcttcttctgccccctgctgccctttatccaaatgattatgcttttcatcatgttctactccaaaaatatcagcctgatgatgaatttccagcctccgagcaaagcctggcgggcctcacagatgatgactttcttcatcttcttgctctttttcccatccttcaccggggtcttgtgcaccctggccatcaccatctggagattgaagccttcagctgactgtggcccttttcgaggtctgcctctcttcattcactccatctacagctggatcgacaccctaagtacacggcctggctacctgtgggttgtttggatctatcggaacctcattggaagtgtgcacttctttttcatcctcaccctcattgtgctaatcatcacctatctttactggcagatcacagagggaaggaagattatgataaggctgctccatgagcagatcattaatgagggcaaagataaaatgttcctgatagaaaaattgatcaagctgcaggatatggagaagaaagcaaaccccagctcacttgttctggaaaggagagaggtggagcaacaaggctttttgcatttgggggaacatgatggcagtcttgacttgcgatctagaagatcagttcaagaaggtaatccaagggcctgatgactcttttggtaaccagacaccaatcaaataaggggaggagatgaaaatggaatgatttcttccatgccacctgtgcctttaggaactgcccagaagaaaatccaaggctttagccaggagcggaaactgactaccatgtaattatcaaagtaaaattgggcattccatgctatttttaatacctggattgctgatttttcaagacaaaatacttggggttttccaataaagattgttgtaatattgaaatgag

SEQ ID NO: 382 - DNA, 375 bp, Homo sapiens
ggcacgagcggcacgagcttcgaattcctctggttctaaagacatgcatttgaaaataagaaatcaaagactaagcatttactaaatactaggattatgttgtatgataaatatacaggcaaagttgaagaattgctggaagatttaagagaaaagaagaggctgttgtggccctgatgatgacgatggtgatggtgatggtgatgatgaagatgacagctaaaacaagtactgctaactttgatcattaataattatagcttcgataatgatactgaatatcttgtaaagcgcttaataaataaaaacgtcaactgcagaaaagcatgtcaaaatgaatacagattaatgagatctagatgaatggtgtagctt

SEQ ID NO: 383 - DNA, 1541 bp, Homo sapiens
ttttttttttttaaatttaaaatgtctttattcatttacatggtatatatcaccctctacaaaaaaaaatgacacttgtctttcaatctgtcaagcttagctaaaaaattcacgtatctcttttctatatcacatattgacatgatataggatgcaagatataaatatcaatttaatagacattattaaataattttacacttagtagaatcttggataaatggttaaaattatagattgacattaagtgtgggcacaggaatattctgtgtataccaatgggtttaacagaagatgtgtttgcactgatttctggtcatcaacttgctttccgtgaatctttaaatacccaattccaaatcttccagctcctggagaagggctgtttctttctgaattttctccaactgatttttttctagctgttttccagttgctgcttgttctttcagttgttcgattgctttcagtttcttctttaggttcttgatttttttgtctatctcagggtccccagaaattgactgagagacagtgtttcgtggtgtgctctgtggggcaggagtaggtgccaaatctggactcttgtcacttcttgcttcctgctttgcagctttcttagcttcatgcttcctttgatttttaagagctgtttttgataatggcttatcgtttcctgattgtggtttcatattctgaggtggttcctcttcatgcaatttggaattggtgattggtttatttcttaaagctgggggtctataagctgttgcaactttaggttcctcattgggtacttcacttggaactgcttggtaagttattgtttttgctggaaatattccatccaaaaatggctgccaagaaacctgccataattctgcatttgatggcacatcatacttgtgcaagatagagccagtataatgccaaattttgtatccattattaacccgtaacctgggagcacatgtagctgttaaaatatgctcaccatccgggcaccaagcaaaatatgtagaatcagaagccaccggtttagaaataagtttgtagtttttcacattccacactttcatttgtccgctcagatttgtaaaatcagatttccaaatccagctaatactaatatatgtccatgagggctatagtaggctgcattacgaggaccagttccaaagtcaaatacaggatcacatttcaagttgaaaattgtcgctttggcaggcataaaaccatatacagcacaaaactcagtagaactagaattccaaactacatcataaatggggccattttttggtaattgcactacagcactttctccatttgttgcaatgtagtgtagagtttgttctccatagtaggaagctcctgtcttgtcaacatctgtgctagctattaccaacacagcagtagcttttttattccacagcattgtaactttatctgccttaaagaaacttttattagctaaagctgcatgaggtccagcaaagttggggtactgatataatctaacaaatgaaggtgcaccttta

SEQ ID NO: 384 - DNA, 2161 bp, Homo sapiens
tcatccggtctccggcagccaggtccccaggcctggagacgcccacttgcctcctgtttgtcatcgctgctattgccgctgtttttgtagacagtgctatccccagattgactcagcacagaccacaggacgggagtttcccgtacacaatccttgaccctcccctgtacctgccaggccagtgtgcccctcctcagcccctatctcaatgcgcccgccgtgtccatggagagaagctgaggcggccgaccttcggcccgaggcaccggggcgccgggacggcgaagatgtcggcttccttagtccgggcaactgtccgggctgtgagcaagaggaagctgcagcccacccgggcagccctcaccctgacaccttcagcagtaaacaagataaaacaacttcttaaagataagcctgagcatgtaggtgtaaaagttggtgtccgaaccaggggctgtaatggcctttcttatactctagaatatacaaagacaaaaggagattctgatgaagaagttattcaagatggagtcagagtattcatcgaaaagaaagcacagctaacacttttaggaacagaaatggactatgttgaagacaaattatccagtgagtttgtgttcaataacccaaacatcaaagggacttgtggctgtggagaaagctttaatatttgaaatctcaggactcttctggccgtaggttccaggaaagctcgtggaagctttggggctcactgcagaaatcatgtgactgtcacatgctggaaaataaagtgatacatcttgaaaatgaatccagtgtgttggattccagaagaaatgatatttatattctctataggggacagaaaatgagaagccatcactctttttggatcatttaggtctcttgtatcctttgttttagaaccagtttcattaaagttgccttcctgggcacctgtttatccatttcctgaactgtgtgcactccttagatcgctattgatggcttgatcatccctcagcatttctcccaaccagatcggtgactcctaaaatctgagacaggacatcgtgactgctggtagtaatatggtggtgcattgttttttccacccaaacttaacatagcctttttatacatttttatgaaaaatttcattgtcagctgcctcactgcatactctttaatagtaccaggcaaagattttcttcaactatagtacagattagttctgagtgatggtatcaaaaggtgagaaagacgtcatccgcctttttttaatccatttcttttgccaccctatatgtctgttcagagatgggctctcaagctgactttgattcttttagttgagaagtctcttaaagccatctagcccacctccctcaattccctatgtgaggaagcaaaaccccagggaagccaaagggctcctgtccaccctgacaccacaggccgggggagagtagggactctacccccctctccccttgtaggtgacacatgctctgccctctgaggcagtcagcgaaggcaaatggtctgacttctttatgtggtcaacattttgatagaatttctttataatttgatagagattatattatttttattttattttgagtgggaagaattttaaaacctttttatgtcaattaccatcttgtttctttcacctttgaaacaatgatttgtagcagagatgacattgtagcaacccagaattatgcttttggaatgtggtcctcactgtacaggagaatgtgtaatcttttgttaaaattcccagtgtgcatacattttctggttcctcggtccagttgctaaagttcttagtattttagcctaacatatttatcaccaacttttctttaaaagtgttccttttgtcacttagttactgattttcctgggtttgacataagtattctatgagatgatatatatgctttttttgaaagctgattctcatgaattcaagtagctgagttcctttatgtttcgtttattcactaaagtagctgacacaaaacacaccaaaacctagagcggtagttttatgtaaatgctcatgagtttgtatcaataatataattgttgatccacttataattcgtgcaatactgtatgtatgtagagattgagttgtcaattaaaaaaaatgtggcctctt

SEQ ID NO: 385 - DNA, 3268 bp, Homo sapiens
  misc_feature (1)...(3268): n = a,t,c or g
gtgttaaaacccgggcccgggaatttatttttggggccccataaaaaaaatttttccttgccagcccgggggagttaaaattggttcctttaaaagggcccccccnnnnnnnnnnnnncaagtggtgattttctgtttattgctcaaaaacaagaattcagaagcaaaggtggagagactgtgggttggggagatggcaggaagggggcaaggccttgtcccagctctcccctttgtccttcttctgaccctcctggccggagtcaggcctagggccagggcatctgggaggctgttcccttcgtggccaagggaacagtagagctatcgggggcagtccttgaggggtgccctgggcagggaggggctgcaagatttgcagggtaggtcagagttcccctcccagaattccaaaagccggtagggcggggggcaggcccctcgtttgggcaactgagaagaggcggctttggggcggcaggatgctggtttatttactgtaggatctccagggccatcaaagccccctcgtgggatagggagactatttacacagccagggaggagggcagccaggaggcagagaccgggtcccgtatttccctctgcccgaatgaggaggggaggggcgtcctgggtcctgcagctgtagtcttggggttcagatggaaacttcatactcccgcgtatccccagcttcatacagcgggttgctgaagtccgactccacggtgatggggctgtaggagtgggagcccgagaagccgaaaagggactttccctgaagcttggtgtagtagatgtaaacgccactgccgaggacaatgaccaagcctagaggcagcaggatggccagggccaggttccccccttccagctgccgtgatggatctgtggtctgggtcactttgcagagtgggggctggctggtccactgggaggggtggccgggcacacaggtgatggtgacctcgccgataagctcaaagccctcatagcagaagaagcgcagagactcgcccgcctggtagtggtgcttgtacagcgtctggtagccattctcgggaacccccgggttcaggcacggctcgtacttcaaggcgcatttggggaccctatcgctccacttgggtgtgcctgtgtcccggctgtagcaggtgagcatggctgccccctcgaggctgtaccctggcaggcagcggtactggacgtgggagccaacggggaagccggcgtccgaggcggtgcggtgcccgttggcaatctcgccagggtcagcacaagtcatgatcttttggcaggcgggcggcgcggcgctccaagacaggtcccactggcaagtgagaatgtcggagcctagcagctcgtagccaggctcgcactggtaggtgagcaccgtgccccggatcaggtccccgtgggatgccgttctccagccccactccggaggtggcagctcggggcacgtgtcgttcctcgggacctctttgaagtgcaatacgaagccctggcccaggcctggatttgggggcccgggcggtgcctgaaactgcagtgtgaggtcgggcccagaggagagaaggcggcggcgcggctgaggtccccgcagctgggccaagactcgggcgctgggaccgtccccgtcgaacagcgtcagcatgtccccttcccgcacattcaatatctcaacttggagcaagatgcgcttctcttcctggacgtgcacgccccacacgcagtcttggcccgggctatagctctggggccagtcgggagagaggaccacgccagctggttccgacagctcccctccacacatggctttgcaggccggctctgtgtcgttccagtggggttctgtgggatccacacattcgatggcattggggggcccagggggctccagggcatatcctgggaggcacgagaaggttgccagtgcccctgggcgatactcagggtccgtggtagtgacatttccatgtgccaggaagggggcgaagcagcgatcctcctcaaaggcttcaaatcgaaggcttaacagcaggggattggcaggtgtctctgacagcagctccacgtagagggactgggcgtcactgatgagaccccgctcgggaacatcgtccatgtccgaatcatagatcacgggggatagggggctgccccctgagcgcaccatcagccggtcattgtcctcatccagcgagaccctttcaaagtgcaggtgcagccggcgcccctcagctgcttcaatgacccaacggcaggtgaggttgggccctacggctcccccaggctctggggacacgatgcggcccagggtggcattgtggatggtgccaccacaggatgccatgcagctgggggtttcaccgttccaggatggccgggtgccattgaggcagatgagggtctcctctccctgcagctggtagcccgaatcacagtgaaaggtggcagtgcccccagggtgcaggtccgtcacactcacgtccccatgggccggccggggagggaagccacagctcaggaggtaggcctgatagtggatcctgaagccaccgccccttgggacccgtgggctctggaagtgcagaagcagccggttggttgggctccgaaggacttgtccttctccaagcatggatgagttggccaggagtcggggggccaggcctggggatcccccaccagccagcaccaggagctcctcttcctgtgacaggttcagcgtctgcacctggatctcaatgccgtagccagggtagacatggatgctgtaagtgcagtccaggagccccagggtgcggctgacggggctccccagatctggagactccacatacccttcgccctcggagatgttgttattacacagaactgggctggtcaccgtagtggtaacagttgtcgtggtgatgatggtggtcgtcgtctcctcctctcctccctcaggcccaaggggaggccctggcaggtagcccatctctgggcccctcctcagcagggccccatgaagcagttcagccagggcctcagaggccaccgtgggggtctcacttccaggctctggcaatatctcctcctccttcaggggcagaccctggatccagggacagctcagcagaattaggaacagcagctggggaggcggcgggtgctgggccctgggagtccccatggcgactcaccccgatctctctcctctgtgcctctctaagtaatctggctgccacctttcctccgtctccgacctgcccgggcg

SEQ ID NO: 386 - DNA, 5725 bp, Homo sapiens
  misc_feature (1)...(5725): n = a,t,c or g
ttttttttttttaaggactgcagtatttattttatttttatattatttatttattctttgttagtttttggagtgtgggttttgttttgttttttgaattttttattttgttctaactcggttttattcttattgctcaaggcttgagtgcaactggcctcttctcaagcntcaacctccgccttcttgggttcgggtaatgatggttccacgtcagcggccctccgccttcttgggtttgcgttaagggttccacggtcaccgaaccctccgccctccttgggtttcgggtgaatgaaggttcccacggtcagcggaccctccgccctccttgggtttgccgtgaacggttccacaatcaccgaaccctcccgccctcttggggttccgggtgaatgaagggttcccacgttccaacgggcccgtccgccctccttgggtttgccttgaacggttcccacggtcaccgaccctccgcctcttgggttccgggaggtggttccatctcagccgcccctctgcctcttggggtttgccgtggtttttctggcctcagcctcctgagtaagctaagggaaggtgtcttgagattatcatcggctgaagggtggaaagcggccccacgcagacgctcggcaggtgtcttgatattatcatcttgctgagggtggagctgaagggtggaaggggaagtgaatgacgctcagaaggtgtcttgagattatcatccgctgagggtggaagcggcccccgcagacgctcagcaggtgtcttgatattatcatctgctgagggtggagctgagggtggaaggggagtgagctgacgctcggaaggtgtcttgagattatcatccgctgagggtggaagcggcccccgcagacgctcggcaggtgtcttgatattatcatctgctgagggtggagctgagggtggaaggggagtgagctgacgctcggaaggtgtcttgagattatcatccgctgagggtggaagcggcccccgcagacgctccccgcagacgctcggcaggtgtcttgatattatcatctgctgagggtggagctgagggtggaaagggagtgagctgacgctcggaaggtgtcttgatattatcatctgctgagggtggaagcggcccccgcagacgctcggcaggtgtcttgatattatcatctgctgagggtggagctgagggtggaagcggagtgagctgacgctcggaaggtgtcttgaaaatatcaaacgctgagggtggaagcggccctcgcatgacgctcggcaggtgtcttgttattatcatctgctgagggtggagctgagggtggaaggggagtgagctgatgctcggaaggtgtcttgagattatcatccgctgagggtggaagcggcccccgcagacgctcggcaggtgtcttgatattatcatctgctgagggtggagctgagggtggaaggggagtgagctgacgctcggaaggtgtcttgagattatcatcggctgatggtggaagcggaatccgcagacgctcagcaggtatcttgatattatcatctgctgagggtggagctgagggtggaaggggagtgagctgacgctcggaaggtgtcttgagattatcatccgctgagggtggaagcggcccccgcagacggctcgccaggtgtccttgatattatcatctgctaagggtgaagctaagggtggaaggggagtgagctgacgctcggaaggtgtcttgagattatcatccgctgagggtggaagcggcccccgcagacgctccccgcagacgctcggcaggtgtcttgatattatcatctgctgagggtggagctgagggtggaaagggagtgagctgacgctcggaaggtgtcttgagattatcatccgctaagggtggaaaacggccccccgcagacgctcggcaaggtgtccttgaatattatcatctgctgaggcgtggagctgagggtggaaaggggaagttgagcgcacgctcggaaggtgtcttgagattatcatctgctgagggtggaagcggcccccgcagacgctccccgcagacgctcggcaggtgtcttgatattatcatctgctgagggtggagctgagggtggaaagggagtcgagctgacgctcggaaggtgtcttgagattatcatccgctgagggtggaaggggagtgagcagacacactcaggaggtgtcttgagattatcatccgctgagggtggagctgagggtggaaggggagtgagctgatgctcggaaggtatcttgagattatcatccgctgagggtggaaggggatggagcagagtactcggcacgtgtcttgagattatcatccgctgagggtggggctgggggtggagctgagggtggaaggggagtgagcagacactcgggaggtgtcttgagattatcatccgctgagggtggaaggggagtgagcagacactcgggaggtgtcttgagattatcatccgctgagggtggagctgagggtggaaggggagtgagcagacactcaggaggtgtcttgagattatcatccgctgagggtggagctgagggtggaaggggagtgagcacacactcgggaggtgtcttgagattatcatccgctgagggtggaaggggagtgagcacacactcgggaggtgtcttgaggctcagggagttatcagttatagaatgttgttgagttggaggaggtggctggtggcccatcctgttttttaaagtttcagctgtgaggtagggccagtagggcaatcctgaagaatgacgatgctccgctgccgccattctgacccagttgcaaagagcctttcttgcagaaggggggattttgcatttgtggtagtcctctgctcgccgccgcaactcttgcgcacgttgaaacattttctgttttctggcggtcttcctctttccattgattttgtcatgacggttgattttcgttgtcaccttcctcttacggattttagctctaacttttgtttccacatgcctccgtagagtaatgacgtctttcaggccaattttatttcctcgaaaggaagaaactcttttctttgtgtgcatacaaatggacctcagccctttctgtctactgcggttggacctccaggctctctgctgtacatccatggatccatcatgtccatttcgagaccagaagatagtcttcaggagagacacccaaaggtaaactatccagagggtaatgacaactttataacttgtcggaaacgcaataatgacatgtaaccaaggacttccaccaaagtcagtcccacgatgatgatggtcagacagagtattgataaccttcctcaggtactcgcatgggcatgtcactgactttacatgctgctgcagctccttggtgagctggccctggtcatgggacaggaactgtggggtcaggacaatagagagcttcaccatttgcagaatgagaacaggggctcatgatgagtgccaacctcagttttcttctgtgtgaaacaggaacaatagtttcattcgtcattcagtttctctcaagatttcacgagatcatacctttaattttctccaacaactgattctggtacacagtataccttaatgcctgcatccacggcctcacgtcatgctgtttacatgaacgtaaagcttcgccgaagagtggaataagacagtcctctgttgaaagtctgttagaaactgtggtctccaaagcagacgagcaatacagctgcaaggtacttagaactggcaaagactgtgaaactgttaaagtagaaagtctcagaggtccaatagcgatgcgggatgtttgcttcaagtactttaccacattttcagttatagactgccacttctgatcttgttctatcgggtttaaagcagttgccaaacaaacagaacttcttaacaatggaacttcaatggatttctgaggttcccttggatctggacttcacatgttacgaagcagttttttcatgtctattttttcttttgatcctccagcaagtagattgatattttctcctggtaacaattctaattgctcggtacattcaacaaattttccagactcaaagctgcttaatgattttatatagttgaagtcagctttcaggttgagggaagtgctactggtactctttttcaagtcatggatagcgttctgccattcctgcacagcagcccaatcggcagttgagatgtagcactcacatgctttgtttcctaaataatttataacctcaggggaagagtcagtcggtttggacagcacactttttctggattcaccattcagacaatgtttcaggctggcactcttacacccagcactggctaaggtgagcaccgatttgtcaaagctggagatgcagcaatcaacacctgtcatggcacacaggtgttcctggtactccacagaggccttttcaaacctcccttcagcctgttgagccactgagttaatccacagaagatgttttccaacaatagatgatgaccagacagcaattccctgtatagcttcaggacaatgaagttcacatagtgcttctaccaccatcataatgcttacttccaattcattcccctgagataggctggttgttttcatctctgtaagcaagtcaaagccatgtctcactgtcactgcaggctggcctgccaacaatcctaccctcatgatggagagtcgaatccgcgttagccagtcctgacaagtttggcgattggtatacaaaaaagttctaatgaccttgggaggtgaagttaaggcattagcacatccctcgtatgcattatacattaatttctccagattttccagatactgcagaagaagaacaagtctaagttggttgttaccatggccttcatcattgtctgcagttgtccactgactaacatcctgatcagggtttaatgtgtgacctgcgagacttcgaatgataccttcaattgtctggaaggtgtcttgagctctgcccagtggggttctcagcttagaaagaacagtgaattgtgcagcttcccatatggcccactgccaaaggacagcatctgtcttcaggagattgcgtggaattgttgactggtcacgcttatccagtctctggcagctatagaacagtctttccaaccaattgtccttccctgttctatgagagttcccatacaaaataaaactaatacatcagagaaatcttgggggtggaatgtattacttggtgctttactcatgtgacttcttaatgctaaagaaatttcttgaatttctgtgtgattgttattgcttaggaaaacacctaaaggaattgatttcaacagttttccaaatgcttgtcgaatacaagttccacggtgcactagttggacacggcaaacatcaacacatctctgtaaaagatcatctggcaaggaagaggatagagcatgtagactgctgcatgcctgcagacagatattcacatcttcaacgagagtgtcggctaaaaggcctttgcaaaatttatggaaagacggaagacagaataaaggtgcatatgtttcggacttcttcattacaacagctacttccaaagcccaagtcattaacagtttcctcgtgtcctggttatctttcttaagtaacattcccagaagatttaatataattgagaaatgtttctttgtggccatagttacagtgctcgtgcc

SEQ ID NO: 387 - DNA, 378 bp, Homo sapiens
aaaaaacaaataacacattaaattttatttggctttcatatcaattgtttcctttggctttgtatatacattttattgcatgtttgtctctatgaaatatgttgctgggattttgatataaattgccttaaatctaaagatcgttttggtgggaattgacatcttgttgagtcttgcagttcatgaatatggtacgtccctctgtttattgaggtcctcgttgatttatttcataagggttttgtaattttcagcttatagattatggacatattttaaaaatctagacagtttcttagagggccattatatgttgtattgagttttaaatttcagtttgcacttgatacttgcaattatagagaaatatatccattg

SEQ ID NO: 388 - DNA, 794 bp, Homo sapiens
  misc_feature (1)...(794): n = a,t,c or g
ttttgatggggaggggatggagtattggaaagcaaatcctagatatattttcactcaaaatgcctcattatgtatctgtaatagataagaacttaaaaaaaactgcaatgccattatcatatctgaaaaagtgattaatttcttaatatcagatagtctacattttgtctcaaaaatgtcttttaaaaaaatcttatttattcaaatcaaatcctcacaagatctaaatattggatttagttgttactaacattttagaatgttatttattttagaagtcatttatttacatgcatttaacctttatattaaaccaacgcagaaggtatggtcccagctcagagaggttaagaaaccttaccaaggtctcattgctggcaggcaccggacacataatttgaattaaatcttcttaactccaaagcctccatgccactccttctgatgcaggctaacagaatttttcctgtgttgcagagaggcaaaagggccactatttaagagagagggtccgggcgtggtggctcatgcatgtaatcccagcactttttgaggccgaggcaggcaaatcgcttgagtccaggagttcgaaaccagtctgggcaagaatggtggacctcatctctacaaaaaatacaaaattagctgggggtagggcgtacacctgtagtcccagccactggggatgccgaggtgggaggatcacttgcgcctgggaggttgagccacagtgagctgacagctaaccctgattgctncatagactgtgcactgcttgcaatctggctgacagg

SEQ ID NO: 389 - DNA, 332 bp, Homo sapiens
ttagacggataccatacccccatttacatgctcaatcgaattatacggctgccagctgctttataaatcatatctgatcaaaccggtcacgccttgactattctgacccggctagaaactcaaatgataaacgctgactatcagaataaattgactctcgactacttgctaacaactgacagagaggtctatgaaccatttaaccttactaattactgtctacacatacataatcaaaggcttggagcttatgacctaggttaagtatgacagaactggcacatgtgcccgtacaagtgtagcatggattcgaccctgaggccatgtttaga

SEQ ID NO: 390 - DNA, 372 bp, Homo sapiens
gggccggtgccatgaccaaaataaaggcaaatcccgacgggcccgacgctcaagcggaggcgtgtggcggggagagcacctaccaagagctgctggtcaaccagaaccccatcgggcagcccctggcttgtcggcggctcacgcggaagatctatgaaggcatcaagaaagcggtgaaacccaatcatagtccgcgcggggtgaaaaaggttcataaatttgtcaacaaaggagaaaaagggatcatggttttggcaggagacacactcggcattggggtgtactgccttctaccctgcatgtgttaggaccgaaaattgacatatgcccatatcccctctacgacggacctgggtgcaggcgcaggctacc

SEQ ID NO: 391 - DNA, 709 bp, Homo sapiens
  misc_feature (1)...(709): n = a,t,c or g
ttttttcaggaaatgcttgatataatgaaagcaatatccgatatgatgggtaaatgtacatatcctgtcctcaaagaagatgctcccagacaacacgttgaaacattttttcaggtaggaattaaccagaagtcaagagggcatgaagttaggagaaaatttcctgatgtttgccatgccccccgatgattcaaaagagagcaaaggaaaataatttttactgaaacaaaacagtatttagcatcctattaatttaatagctttggttttgaatttacaatgctgataactgcatttattgaacattcactaaatccaagatacaacactaaacagttctcatgtttcacaagttttgttttcattcagttttacaagaatcctataaatcctcattaatctcattttacagatgagacaaaaagcaagccctgaaagtttcagcaaattgcgcaagtcctgtcacatctaggaaggtggggattttacctaggacagagtgactctacatcttcaccacattataggtggaaaggggaaaagccaggaaggcatttgggcccctatccatttttatctcttaaaaaactgctggggttccctgctctggaaacaggttccctccccggngggaaataaataggccggctgggggnttttccttttttatcnggcttcagntccatttgggtccggggggntttagggg

SEQ ID NO: 392 - DNA, 900 bp, Homo sapiens
ctaatacgttgcatgcccgcgtaaacttgggcccccccagggatcctttaaaacggccgccccttttttttttttttttttctcaaatgtcatttattagaaaatacaattcccgagaaaggagatacaagggattctgggaagtgggaagtaaacagtacacagatctctttaaatcaggagcatataggtcataataaaatgagctacaggcacaaagccagtaacacatttatggtccgttcatctggaaaagtttcaccgcccactccccactcctcttccccctcctggaagcagccagctttatccttggcattttaattttagagaaaatttaaacttccatgctgccctgtggcttcggtcaatggagcttctttctccagttatggaatgagtcagcaaaacggggagtttctgatccttggaattagggagggacagtttacagaatgtcctcatttcactcttttcccaatcatgggaaatatccagccaattctggttttaaagattcatatcaaattcaaagtccctccctccttttggcgaggaagacaaccctttagagcgaaacacaaaagagcaaatgtaaaatccatctggggcggggcatggtggctcacgcctgtaatcccagcactttgggaggccaaggcaggcagatcacgaggtcaagagatcgagaccatcctggccaacatggtgaaaccccgtctctactaaaaatacaaaaattagcttggcgtggtagcacatgcctgtaatccccagctactcgggaggctgaggtaggagaatcgcttgaacccgggaggcagattttgcagtgagtcgagatcatgccactacactccagcctggcgacagggcgagactccgtctccaaaaaaaaaa

SEQ ID NO: 393 - DNA, 383 bp, Homo sapiens
cccacgcgtccggatggcaacatagcggtcataggccatcacagcaagcagggaggattcagtgcccccagtggcaaacacaaagaagacctaagccatgcagccctctactgagatggttttcttctcagacaggaggttctccaacagcttaggtgcagtgacagaggaatggcagagatccaagaaggacaattgtcccaggaagaagtacatgggtgtgtggaggcaagaatcagcattaatcaccaccagcagcagcaggtttcccatcacagtcaggaggcaaatcaccacgaacagcacaaagagcagagtctgggtctgggggccagctgacagcccgaggaggacaaactcagggacaacactgcggtttctca

SEQ ID NO: 394 - DNA, 1345 bp, Homo sapiens
gcggccgccccggcggctcctggaaccccggttcgcggcgatgccagccaccccagcgaagccgccgcagttcagtgcttggataatttgaaagtacaatagttggtttccctgtccacccgccccacttcgcttgccatcacagcacgcctatcggatgtgagaggagaagtcccgctgctcgggcactgtctatatacgcctaacacctacatatattttaaaaacattaaatataattaacaatcaaaagaaagaggagaaaggaagggaagcattactgggttactatgcacttgcgactgatttcttggctttttatcattttgaactttatggaatacatcggcagccaaaacgcctcccggggaaggcgccagcgaagaatgcatcctaacgttagtcaaggctgccaaggaggctgtgcaacatgctcagattacaatggatgtttgtcatgtaagcccagactattttttgctctggaaagaattggcatgaagcagattggagtatgtctcatcttcatgtccaagtggatattatggaactcgatatccagatataaataatgtgtacaaaatgcaaagctgactgtgatacctgtttcaacaaaaatttctgcacaaaatgtaaaagtggattttacttacaccttggaaagtgccttgacaattgcccagaagggttggaagccaacaaccatactatggagtgtgtcagtattgtgcactgtgaggtcagtgaatggaatccttggagtccatgcacgaagaagggaaaaacatgtggcttcaaaagagggactgaaacacgggtccgagaaataatacagcatccttcagcaaagggtaacctatgtcccccaacaaatgagacaagaaagtgtacagtgcaaaggaagaagtgtcagaagggagaacgaggaaaaaaaggaagggagaggaaaagaaaaaaacctaataaaggagaaagtaaagaagcaatacctgacagcaaaagtctggaatccagcaaagaaatcccagagcaacgagaaaacaaacagcagcagaagaagcgaaaagtccaagataaacagaaatcggtatcagtcagcactgtacactagagggttccatgagattattgtagactcatgatgctgctatctcaaccagatgcccaggacaggtgctctagccattaggaccacaaatggacatgtcagttattgctctgtctaaacaacattcccagtagttgctatattcttcatacaagcatagttaacaacaaagagccaaaagatcaaagaagggatactttcagatggttgtcttgtgtgcttctctgcatttttaaa

SEQ ID NO: 395 - DNA, 340 bp, Homo sapiens
cgagtattatatgttcccagcatggggttctgtattttggtagcccatggatggcagaaaatatcaacaaaaagtgtatttaaaaagctatcctggatttgtctgtctatggtgatactcactcattccttaaaaacattccacagaaattgggattgggagtctgaatatacattgtttatgtcagccttgaaggtaaataaaaataatgccaaactttggaataatgtgggtcatgctctggaaaatgaaaagaactttgagagagctttgaaatacttcttacaggctacccatgttcagccagatgatattggtgcccatatgaatgtaggaagaa

SEQ ID NO: 396 - DNA, 430 bp, Homo sapiens
ggatttcgtgcggtggtgatgacggtgaaaactgaggctgctaagggcaccctcacttactccaggatgaggggcatggtggcaattctcatcgctttcatgaagcagaggaggatgggtctgaacgactttattcagaagattgccaataactcctatgcatgcaaacagtaagtttgaccggatttgaggaaataactagtatagtttgaatttgccagaggtaaacattctcatcacggcgtttatcgggaaggcgaagacttcttctgggggggggatctcatttctccttaaattctagtatatttgacacattttaaacattaaagttaatttgctgatttggcttgaactggagatgtaagataaatggttcgtgttggccgaattcacggcctttctccatgagcaacaatccttatttctg

SEQ ID NO: 397 - DNA, 401 bp, Homo sapiens
tttcgtcctgagcagagccagcctgcggggccagcagctgtacgcctccgtccttgaggtccagctccagccagtctgtgggacccctgaggccaggtcgccctctgtggtctgaagcctgtgcctttctctgagcagcagctccccaaggcccagcatccccatgctgtggtctgccctcaggtttcccgagggtctgggctcaatgctgtcccccaggaggtgccctcaggtttcccgagggtctgggctcagtgctgtcccccaggaggtgccctcaggtttcccgagggtctgggctcagtgctgtcccccaggaggtaccctcaggtttcctagggcctgggctcagagcctgcccccaggaggcgccctcaaggttcctaagggctgggctcact

SEQ ID NO: 398 - DNA, 2987 bp, Homo sapiens
attggctcatgtaacaattttattttattaaggattatggattacctcttgtgagggaatttttaatgtcaaggctgtcttcttggcaaattccgttaataagttgcatttgtgaccttggttttatacaaggcatgccaaaggcatataatagaatcacatggaacaaagaatttaaaaattaaatgaggcaaaggaatagcaatttttgctgatattttgcttatttccatagatactccttttattgattttatgaacatacctatttatgcactatactcaaatactgtacaaaactgcaataaatgttactatttgactacttatgtttctacaaaaacaccatcgtaaaggtgcatgttttagtaaaagtcaactaataactgctaatgtacatgtcaatcaaaagtatttgaagtttgccaaaaactttgaatctaggcataatacacaatctttaacttttattagcatatttcggggcataaataatattttagatattaaaagaaaaatgaattttacccattaataactagtaattatataaaatttaaaattgtgttttctaatttagctgtgtatgtgtgtgcatataattatttataaaaatttagtatctgtgctataattaaatagtgctttggtgaaatgtttccctaaaaattgataatgaaaaccaatggtaactatcatttattatctatatgttatgttcaaattgagaagttactgttttaataagggtaaccaatttttttaacaatactatttgcttcatttcattcatttattgctcacatttcagaagtactaggacttagattggcagtgagacaaaacagaattcaagaagctggaagctgagatattgagacagaaaactgtaaataataatgattccaattaattttcagagaggtttttctaaggggtcaagtgaatggataaaaatattttatcacctcagtgcacaaagtgagctcagagcttccccccgaaagccaaaagtttcaacctgaggtaggtcggcaaactcttgaatcttagatgtgtgatgtttcagagctgaaagagagtataaagtaaggactaagatatcttaagtgctataacaacaaatatacatgatatctagtaactggctttaaaaaactgtttttgtgtttcccaagacagtgttactcaaaattctaagacatgtggcccaattattttataataggattagaaaaagttaacttacttaagccttcgaagttttcttcttctaccccacatccattgcctgaaacttcaatgagatccactccatagtcctttagctttaggatcaatattagtggcaccagcatccagactgttttctaccatcttcttcaccgcagtgcttagactcagtactaccggcccagagcaaatctgatggactgacttccgatcaataggtttgatggccttagcaggttctgtacggactgcgttttttttccgaacgcccgcaccagggtcagaagggaggtggtcgccctccgtcgtggtctggcgtgtattccgagccttggtgtctggcggtttccgagcgttggtgtctggcggtttccgagcgttggtgtcttggcggtttccgaccgttggtgtctggcggtttccgaccgttggtgtctggcacgcgccaccctctcttgctttggttgcgccatgccgatgtaccaggtaaagccctatcaccgggtctgcgcccctctccgtgtggagcccacctgcatgtactggctccccaacatgcacggcaggagcggcggcccagcacttggcactggccacttgcagacaagaagacaagaaaatgatttgaggacagcttcaatcgcggtgtgaagaagaaagcagcaaaacgaccactgaaaacaacgccggtggcaaaatatccaaagaaagggtcccaagcggtacatcgtcatagccggaaacagtcagagccaccagccaatgatcttttcaatgctgcgaaagctgccaaaagtgacatgcagggatgtccttcctgagatccgtgctatctgcattgaggaaattgggtgttggatgcaaagctacagcacgtctttcctcaccgacagctatttaaaatatattggttggactctgcatgataagcaccgagaagtccgcgtgaagtgcgtgaaggctctgaaagggctgtacggtaaccgggacctgaccgcacgcctggagctcttcactggccgcttcaaggactggatggtttccatgatcgtggacagagagtacagtgtggcagtggaggccgtcagattactgatacttatccttaagaacatggaaggggtgctgatggacgtggactgtgagagcgtctaccccattgtgtaggcctctaattgaggcctggcctctgctgtgggtgaatttctgtactggaaacttttctaccctgagtgcgagataagaacgatgggtggaagagagcaacgccagagcccaggcgcccagaggactttcttccagcttctgctgtccttctttgtggagagcaagtctcattctgtcacccaggctggagtgcagtggcagttctcagctcaccgggacctctgcctcccgggctcaagcaattctcatgtctcagcctcccgagtagctgggattgcgggtgcacaccgccacacctggctgatttatgtatttttttcgtggagacagggttttgccgtgttggccgggctggtctcgaactcctgacctcgggtgatccacccacctcggcctcccaaagtgctgggattgcaggtgtgagccaccgtgcccggccttgactaccatattttaaatttactggaggacttttttgttctcttcttttttctttttttaatagcatcccgctcttatttcagaataaaaaaaattttaaggtatgttgagtaagaatctatagagcaatgaaaatgcaagagcaa

SEQ ID NO: 399 - DNA, 2789 bp, Homo sapiens
ctggggacgctaggttccggaacctgacctgagctggggcctgtgcttccagcgggtggtggggggcctggtgtgctggcatcaagtaagccgactacctcggcaaaggcttagggacaagagaccagcagcctgaactggctggggcatccggaaggcttagatcttgtggccaagagttcagaccgtggcgaagtggagagtgacatgcagttggatggcggtgactgcgtggtcctgcaaccctggttccagtctggcaagcattgtagacctggctgctgaagactgacggggcccagggtccgctgcccccaccgccatcaccacctcggaacccagggtaacgctgtcagtctttggaccaacctcgctgtgcctaacaagaattccagaagtcacccatccgaaaggcactggcccatgacactctccacttccaatcttaaatcttttacttcataccttgtctcagatctctcctggtaccccttccccacgcccttagataatccatctcaattcctcatgctaattgaggagctatggctgcaaggcaccttccaggatttcacacctacacaaatctcctttttctccttttgccttctctgcttatgggatattctgagtccccacccccaatcactgacagctgggcccccttcatcagcctcacacaccacgtattaagtcagtcacaatctcccctctcctctaactgctggatttgtctttctacacacacccaatgattcacggctcttccggctgacctacttacatggacacagtccaacgtgagcttacacatttcttacttggctataccattcttggctgattcattcctgaaaccggttcataacctggaaactcagctaaacacctttccttcaaactcagctctctcagcatggtttcaggtagggctgttgccctccttcacctaatagcttctggactaacatccatacaaaccaacacagcatcatctaaaccaccaatatgggggtaccatttctactcaaacttccttcatatccccaccccccttatgtctcagccgaacctaccctaatccagcccacgccacaatggtgggacaggttccccagtccctatgtgggcttatttttacccttgcactccctgtagaccatcaattctacaccctaattacaaaatcatatccacctctgcctggcagaaggtgttatgcttttctggctcgcctaccatccacacatccctacacctcaccaccggatcctcttttctttccttccatccaattcctggcttccccgctgccaactctgctctctatgtctccagtttaaaggggccccctggaaaaaatgtaacaattccctcacctgtgactggtacctgacagccaccacaccggggcagcaatggctaacggttgacaaagacaatttctttctctctccaaaaccaaacagccttcatcaactccctagccaagactccctatcaggcccttacaggtgccgctctggctggcagttacccaatttgggaaaacgaaaataccctatcatggctacctaccttcacctacaacttctgcctgtccacccccagtctcttctttttgtgtgatacaaactgatatctttgcctaccagccaactggtcaggaacttgcaccctggtctttcaggctccaaccatcaacatcctaccccctaaccaaactattctaatttctgtagaagcctctatctcctcttcacccataagaaataaatgggctctacatctcatcaccctgctaacaggattaggcatcactgctgcacttggcactggaatagcaggcataaccacctcaatcacctcataccaaacactattcacaaccctttctaacaccgtagaagatatgcacacttccattaccagtctccaacgacaattagacttcctcgtgggagtcatccttcaaaactggagagtcctggacctcctaaccactgagaaagggggtacctgcatatacctccaggaagaatgctgtttctgtgttaatgaatctggcattgttcatatcgcagttcgtaggcttcatgacagggctgcagagctttgacatcaagtcgctgactcctggtggcaaggatcatcccttctaagatggataccctgggttgcccccttcctaggacccctgatcttcctcttcctgttactaatgattgggccatgcatatttaaccttgtatcccgcttcatttcccaaaggctgaattgttttatccaggcaagcatgcaaaaacacattgataatatatttcacctttgccacgtctaataccagagcctacgaggaaaccattcggaagctccagaacccaggccctaatcacaacgcccctatccagcaggaagcagccagatgatcaacgacgccctttttcctttttatactaaagtaagaaataagaatgttagcccaaactgcactattttgcagacccctaccattttacaaactggtcagagtggaaaattccaccagggcctgagctgtgagaaacatcctgtcaggcaggtcccaggcctaacccctggctgcactaaattccttcattatcagcagccaaacacaccgcccccaccccattttcacaacaatcccagacctctcctgcccgggactgtaactggtccagcctgtaagcgggaagggggctctggcactagctggtaccccctctccgcaggtctttctcccaataaatctgtgttgccattgaaaa

SEQ ID NO: 400 - DNA, 453 bp, Homo sapiens
tacgcactggaggcacagttccggggttcccgggtcgacgactgcgagaagacgacggagggaactggaaattgccacatctgacaaccaagagtattacaacagactctgccaggaggtgacaaatcgtgagaggaatgaccagaagatgcttgctgacctggatgacctcaacagaaccaagaagtatctcgaggagcggctgatagagctgctcagggacaaggatgctctctggcagaagtcagatgccctggaattccagcagaagctcagtgctgaggagagatggctcggagacacagaggcaaaccactgcctcgactgtaagcgggagttcagctggatggtgcggcggcaccactgcaggatatgtggccgcatcttctgttactactgctgcaacaactacgtcctgagcaagcacggtggcaaaaaggagcgctgctgccc

SEQ ID NO: 401 - DNA, 702 bp, Homo sapiens
atggcaccacagcactccagcctggatgacaaggtaccacagcaagccagcactgtgtgcttcgaattccaggatatcttgcagcacagccagtgcactgagcacaaggactctctgtggggcccaggagcaaggagtcaaccctttggagcccacaacacccggctatccccagactcgtgtccagagaagatcgtgttgagggccctgaaggacagcagggcagggatgcctgagcaggacaaggaccccggagtccaagagaatcctgatgatcagagaagggttccccagggcaccggggatgcaccgtctgcatttcggcccctgtgggacaatggaggcctctctcccttcgtgtccaggcccgggcctctggagagagacctccatgcccagaggtcagaagtcacatataaccagagatcccagtcctcctggatgagctccttccccaaacgaaatgccttcgtaagcccctacagttccatggggcaggctcagcctgtctacccaaaaccaaccccataggtgaatcctgctgttgggaggggctcagcctgtccacccaaattctgggctagcagaaaccttccaaatacatccccagcttatgcaaaagataaacacatctccaccttaggtgcatgcagtacctcttggactttcacttaatccccccttctgtcgtcttctcgcagc

SEQ ID NO: 402 - DNA, 1678 bp, Homo sapiens
ttttttttttttgaatgaaaacccatgaaatttaaatgtgacattgggggagcctcatccttccctttttaaccaccccacccatcccagcctgttgtgagttgggtgagggctgcccccagtctccggtcctgcgggctctcgggtgccatccatgttcctttcgagctcagtccagccctcctggggctcgtctctctgtgaatctccttcttgcgtattcatatagtgccttgcttgcgctcctgcagggctcgtcctgcccgggcccagggaagacttgggcaaatgttaggggctgttgggctgatgggtgttacaaaaccccccccctggctgggccatagctggggaaacttgggaggccagaggcttgttgggtagggacttaggttccccttgggtgaatgtctttcagggcatgaaaagcttacgggcccccctcaaagcaagattaagtgaatagtcaaagttttacaacagccagtttttggccaaggtctctctggaatgaacaccccaatggccacatgggggcaaaaactttccttgaactctctgaagcccagagtttgcccagtttgcacatccaggaagaaaggacccagggggagggagggaaagaagactgggctgactgggggcgcaaatctggggtgtctttgtcgcttcatgtgctctgctttgtcaggctggagtgagccgtgtccctgtctggccccaattccttggccaccagcctgttggacacggagtgcaaactcctcattcgcttcccctagttggcgatgaacaggacgaagccaccttacttgatacaccgtgaaagggacgaaaagtgaccaacagcagttctgagacccaggaggcatctgacaccgtcacagagaccagggttctctgaacttgcagggtaagaggttgtaccacatcttggatagaaaatggccaggaactgaagcgcaggagcccctcccggccattggtggcctcttcctcagggaatagcagcagaggagtggggggaagcctcgtggaagcacagaatctcttgagtgactccaccaactccccccgcccattcatctccatgaagccccgagaccagcacacaaagctggggggactattgagtagaggctgggaaccaggagaagagaaagcaagaagaaaaatattgaggaaaatgaaaaaaaaaaaactgacatgttgggtagaggatcggggttaggggtaaggcctcagtatcctccatgcggaacgcgagtggggacaggggggccttcagctgggccccagggaaccgccccgtggcgctctcggcctcgctctcactcacggtgctacaggtggtaagcaaattgactatgttgtggtcgaaaggtgtcacatggttggaaatgaggaccctgacactgtgatcccggagtccggagtcctcctgccgggccacgagccctagcaccgcacacatggtccgcactacgaatctgcgaaggacgctgtctggcagcgcgcagctgaccaggaagacgtggatcccgagaaagaggcgcaggacgaggaggcagaacccgactggcgcgtagagcagcagcacgagcagtaggaagcagtcacccggaagccggtgcgagtcaaagagccgctccggccccggccctgagggaagctccat

SEQ ID NO: 403 - DNA, 447 bp, Homo sapiens
  misc_feature (1)...(447): n = a,t,c or g
gacgacttcgtccgggacctggacggcgcgggccggggcctgagacccctcgccctcgctcctagccgtggccctggggctgcgtgcaggggagaggacccggagcggccccggctccagcagtccgagcgggggcatcagcggaggcgcttccgcgggcctggccagcagccccgagtgtgcttgtggtcggagccacttcacatgtgcagtgagtgctcttggagagtgtacctgcatccctgcccagtggcagtgtgatggagacaatgactgcggggaccacagcgatgaggatggatgtatactacctacctgttcccctcttgactttcactgtgacaatggcaagtgcatccgccgctcctgggtgtgtgacggngacaacgactgtgaggatgactcggatgagcaggactgtcccccccgggagtgtgaggaggacag

SEQ ID NO: 404 - DNA, 409 bp, Homo sapiens
ttcgccattcgcgctctcttttctctttctcaatttttgcaaactttgtctcatagtctttccaggctttgtcaaatggcttcttgagatctcctttgactccctttaggtctccttttaacaaagaatccaacgtgaagatcacattgcggctcaaaccctggagcagatttttcagcagcgcggacagttactttgtaagagtagaaaacttgacaaacgcggtgccaaggtcggcgttgtctcgacttaaaaaattactcccaaacttatcaagaactcgcgcatagatctcttcattctgcacatgatcttgaccaggaatatatattgcttttacagacttcttcactttctgaaggcgtggtctatctcgccctagaacccttcttccccaaccgtgacgggg

SEQ ID NO: 405 - DNA, 458 bp, Homo sapiens
  misc_feature (1)...(458): n = a,t,c or g
ntttgatcngcgctgcggtaccggtcgagaacccctgggacgacccacgcgtccgcccacgcgtccggatatttacttgggaagattgtattgcagggcaagcaaaggtgttgtgtaatgattcatatggagtcactattgattggtcccctaaaggggcatttataaggctcacttctcaatctgtaggtaatggtcaccctgcatctaaagaaaatgatcagatggtagacactataaaaaatacaacaaaagttcctattatttggacatatggtgatatggtggaacctcgaccccaaatgatacgacctgctgtaggagctaaacataaggaattgtggaaaatattaatggcactgaaaaagataaaagatttgggaagggaaatatactaagccatcccaatataatcctaattacatgttagaattggctcacaatgattcagtctggat

SEQ ID NO: 406 - DNA, 426 bp, Homo sapiens
  misc_feature (1)...(426): n = a,t,c or g
ctgagcatgctgagcaccatcagcaccgagcaccgcctgtccgtcctgtggcccatctggtactgctgccactgccccacacacctgtcagcggtcatgtgtgtcctgctctgggccctgtccctgttgcagagcatcctggagtggatgttctgtagcttcctgtttagtgatgttgactctgataattggtgtcaaatattagatttcctcactgctgtgtggctgatttttttaatctgtggttctctgtgggttcaccctggtcctgcttgtcaggatcatatgtggatcccagaagatgccgctgaccaggctgtatgtgaccatcctgctcacagggctggtcttcctcttctgcagcctgcccctcagcattcagtgattcctattatactggatcgagaaggatttggatgacttacn

SEQ ID NO: 407 - DNA, 2214 bp, Homo sapiens
tgggaacacaagttgacgctttttgtgttccttgagtccagtcgggaagggcccttgtgactgggtctcatgccaaacaacttgttacaataagagctagggtcccagaccatgcggaaacttcatgagaatcctctgtagtctggtgagtgtagtgtccgactctggagcccaggctgttgcttcccggtctggtggtgaatcctccatagtctggagatctcagccctgctgagctgatgatgctgactataggagatgttattaaacaactgattgaagcccacgagcaggggaaagacatcgatctaaataaggtgaaaaccaagacagctgccaaatatggcctttctgcccagccccgcctggtggatatcattgctgccgtccctcctcagtatcgcaaggtcttgatgcccaagttaaaggcgaaacccatcagaactgctagtgggattgctgtcgtggctgtgatgtgcaaaccccacagatgtccacacatcagttttacaggaaatatatgtgtatactgccctggtggacctgattctgattttgagtattccacccagtcttacactggctatgagccaacctccatgagagctatccgtgccagatatgaccctttcctacagacaagacaccgaatagaacagttaaaacaacttggtcatagtgtggataaagtggagtttattgtgatgggtggaacgtttatggcccttccagaagaatacagagattattttattcgaaatttacatgatgccttatcaggacatacttccaacaatatttacgaggcagtcaagtattctgagagaagcctcacaaagtgtattggaattactattgaaaccagaccagattactgcatgaagcgacatttaagtgacatgttgacctatggctgcacaaggctggagattggggtgcagagtgtttatgaagatgtggctagagacaccaacaggggccacactgtgaaggcagtgtgtgagtcatttcacctggccaaagattccggttttaaagtggtggcccatatgatgcctgacctgccaaacgtgggactagaaagagacattgaacagttcacagagttttttgagaaccctgcttttcgtcccgatgggctgaaactctatcctaccctggtgattcgtgggaccgggctttatgagctttggaaatcaggaagatataagagttactctcctagtgacctggttgaattggtggctcggatcctagccctcgtgcctccatggactcgagtgtaccgagtacagagggatattccaatgcctttagttagctcaggagtagagcatggtaacctgagagagctggcacttgcaagaatgaaagacctcggaatacagtgtcgagatgtgagaaccagagaagttggaatccaagaaattcatcacaaagtacggccataccaggttgaattggtaaggagagattatgttgcaaatggtggctgggaaacattcttgtcatacgaagacccagatcaagacattttgattggcctcctacgattacgcaagtgttcagaagaaactttccgtttcgaattgggtggaggtgtctccatagtacgagagctgcatgtgtatgggagtgtggtccctgtgagcagccgggatcctactaaatttcagcatcagggatttggcatgctgctgatggaggaagcagaaagaatagctagagaagaacatgggtctgggaaaatcgctgtgatatcaggggtcggcaccaggaattattatagaaagatcggctacagattacaaggcccgtacatggtgaagatgctgaaataatggccacaccagtccactcttctgcagtatcctccctggcagaacacggagaatcaggatttcttaaatactcaacagagaggctgagcagagcaaatggggggcttcaccctcatcccgcagctgcagagactggaaactgccttcaaggccacggctggtcatctgctgaccacaccccagatccgccctctcctgcgtgcaccccaaaaaatcacttgcgtttttgaggcttaaatcatctatccagtttctacattttgcatgaggcctgcaggtggcctattttgactcagacggtgaaaaaagcaaattaactcatttggacaccataactcatgcaataaaactgattgtcattcgaaaaaaaaaa

SEQ ID NO: 408 - DNA, 467 bp, Homo sapiens
  misc_feature (1)...(467): n = a,t,c or g
ccgccattgcatcgcctcgcgctgcaggaattcggcacgagctgaccagcaccatggcggctggcaagaacaagcgccttacgaaaggcggcaaaaagggagccaagaagaaagcggttgcaatataataaatattggaaagacgctcgtcaccaggacccaaagaaccaaaattgcatctgatggtctcaagggtcgcgtgtttgaagagagtcttgctgatttgcagaatgatgaccgatggttacttgcttcgtgtgatctgagttgcttttactactgaacgcaccaatcagataaagaagtgttcaataaattgattccagacagcattggaaaagacatagaaaaggcttgccaatctatttatcctctccatgatgacttcgctagaaaagtaaaaatgctgaagaagcccaagtttgaattgagaaagctcatggagcttcatggtgaaggcagtagtn

SEQ ID NO: 409 - DNA, 1339 bp, Homo sapiens
ttttgaccgcgctggaggaactctgcacgagatgaaatcctgctttcttttcctcagaactactatattcagtggctaaatggctccctgattcatggtttgtggaatcttgcttcccttttttccaacctttgtttatttgtattgatgccctttgcctttttctttctggaatcagaaggctttgctggcctgaaaaagggaatccgagcccgcattttagagactttgggcatgcttcttcttcttgcgttactcattcttgggatagtgtgggtagcttcagcactcattgacaacgatgccgcaagcatggaatctttatatgatctctgggagttctatctaccctatttatattcctgtatatcattgatgggatgtttgttacttctcttgtgtacaccagttggccttttctcgtatgttcacagtgatgggtcagttgctagtgaagccaacaattcttgaagacctggatgaacaaatttatatcattaccttagaggaagaagcactccagagaccgactaaatgggctgtcttcatccggtggaatacaacataatggagttggaacaagaacttgaaaatgtaaagactcttaagacaaaattagagaggcgaaaaaaggcttcagcatgggaaagaaatttggtgtatcccgctgttatggttctccttcttattgagacatccatctcggtcctcttggtggcttgtaatattctttgcctattggttgatgaaacagcaatgccaaaaggaacaagggggcctggaataggaaatgcctctctttctacgtttggttttgtgggagctgcgcttgaaatcattttgattttctatcttatggtgtcctctgttgtcggcttctatagccttcgattttttggaaactttactcccaagaaagatgacacaactatgacaaagatcattggaaattgtgtgtccatcttggttttgagctctgctctgcctgtgatgtcgagaacactgggaatcactagatttgatctacttggcgactttggaaggtttaattggctgggaaatttctatattgtattatcctacaatttgctttttgctattgtgacaacattgtgtctggtccgaaaattcacctctgcagttcgagaagaacttttcaaggccctagggcttcataaacttcacttaccaaatacttcaagggattcagaaacagccaagccttctgtaaatgggcatcagaaagcactgtgagacgcacagacggcgtcttctgccaccaagagacccgagaactccagattcacgacattcctgtcccatgtagaagcatttccat

SEQ ID NO: 410 - DNA, 1475 bp, Homo sapiens
attcccgggtcgacgatttcgtggccgtccggcctccctgacatgcagatttccacccagaagacagagaaggagccagtggtcatggaatgggctggggtcaaagactgggtgcctgggagctgaggcagccaccgtttcagcctggccagccctctggaccccgaggttggaccctactgtgacacacctaccatgcggacactcttcaacctcctctggcttgccctggcctgcagccctgttcacactaccctgtcaaagtcagatgccaaaaaagccgcctcaaagacgctgctggagaagagtcagttttcagataagccggtgcaagaccggggtttggtggtgacggacctcaaagctgagagtgtggttcttgagcatcgcagctactgctcggcaaaggcccgggacagacactttgctggggatgtactgggctatgtcactccatggaacagccatggctacgatgtcaccaaggtctttgggagcaagttcacacagatctcacccgtctggctgcagctgaagagacgtggccgtgagatgtttgaggtcacgggcctccacgacgtggaccaagggtggatgcgagctgtcaggaagcatgccaagggcctgcacatagtgcctcggctcctgtttgaggactggacttacgatgatttccggaacgtcttagacagtgaggatgagatagaggagctgagcaagaccgtggtccaggtggcaaagaaccagcatttcgatggcttcgtggtggaggtctggaaccagctgctaagccagaagcgcgtgggcctcatccacatgctcacccacttggccgaggctctgcaccaggcccggctgctggccctcctggtcatcccgcctgccatcacccccgggaccgaccagctgggcatgttcacgcacaaggagtttgagcagctggcccccgtgctggatggtttcagcctcatgacctacgactactctacagcgcatcagcctggccctaatgcacccctgtcctgggttcgagcctgcgtccaggtcctggacccgaagtccaagtggcgaagcaaaatcctcctggggctcaacttctatggtatggactacgcgacctccaaggatgcccgtgagcctgttgtcggggccaggtacatccagacactgaaggaccacaggccccggatggtgtgggacagccaggtctcagagcacttcttcgagtacaagaagagccgcagtgggaggcacgtcgtcttctacccaaccctgaagtccctgcaggtgcggctggagctggcccgggagctgggcgttggggtctctatctgggagctgggccagggcctggactacttctacgacctgctctaggtgggcattgcggcctccgcggtggacgtgttcttttctaagccatggagtgagtgagcaggtgtgaaatacaggcctccactccgtttgctgtgaaa

SEQ ID NO: 411 - DNA, 3092 bp, Homo sapiens
cggacgcgtggggtaagagaaaggggaaggggaggtgggagaggcacctcaactttgatgtcccgagccttgagtggccactcgcaagctggccaagggcttcacacaatttgccaagatgacagaggggaccaagaagaccagcaaaaagttcaagttcttcaagttcaagggctttgggagtttctccaacctccctcggtccttcactctgagacgatcctcagcttccatcagtaggcagtcccatttggagcctgacacctttgaagccacgcaggatgacatggtgacggtgcccaagagtcccccagcctatgcccgctccagtgacatgtacagccacatgggcaccatgcctcgccccagcatcaagaaagcacagaactcacaggctgcccggcaggcccaggaggcgggtcccaagcccaacttggtacccggaggtgtacccgaccccccaggcttggaggcagccaaagaggtgatggtgaaggccactggccctctagaggacaccccagcaatggaacccaacccttcagcagtggaggtagaccccatcagaaagcctgaggtccccacaggagacgtagaagaggagagacctcccagggacgtgcactcagaaagggctgctggagagccagaggctggcagcgactatgtgaagttctccaaggagaagtacatcctggactcatcgccagagaaactccacaaggaattggaggaggagctcaaactcagcagcacggatctccgcagccatgcctggtaccatggccgcatcccccgagaggtctcggagaccttggtacaacgcaacggcgacttcctcatccgggactcactcaccagcctgggcgactatgtgctcacgtgccgctggcgcaaccaggccttgcacttcaagatcaacaaggtggtggtgaaggcaggcgagagctacacacacatccagtacctgtttgagcaggagagctttgaccacgtgcccgccctcgtgcgctatcatgtgggcagccgcaaggctgtgtcagagcagagtggtgccatcatctactgcccggtgaaccgcaccttcccactgcgctacctcgaggccagctatggcctgggacaggggagtagcaagcctgctagccccgtcagcccctcaggccccaagggcagccacatgaagcggcgcagcgtcaccatgaccgatgggctcactgctgacaaggtcacccgcagcgatggctgccccaccagtacgtcgctgccccgccctcgggactccatccgcagctgtgccctcagcatggaccagatcccagacctgcactcacccatgtcgcccatctccgagagccctagctcccctgcctacagcactgtaacccgtgtccatgccgcccctgcagccccttctgccacagcattgcctgcctcccctgtcgcccgccgttccagtgagccccagctgtgtcccggaagtgccccaaagacccatggggagtcagacaagggcccccacaccagcccctcccacacccttggcaaggcctccccgtcaccatcactcagcagctacagtgacccggactctggccactactgccagctccagcctcccgtgcgtggcagccgagagtgggcagcgactgagacctccagccagcaggccaggagctatggggagaggctaaaggaactgtcagaaaatggggcccctgaaggggactggggcaagaccttcacagtccccatcgtggaagtcacttcttccttcaacccggccaccttccagtcactactgatccccagggataaccggccactggaggtgggccttctgcgcaaggtcaaggagctgctggcagaagtggatgcccggacgctggcccggcatgtcaccaaggtggactgcctggttgctaggatactgggcgttaccaaggagatgcagaccctaatgggagtccgctggggcatggaactgctcaccctcccccatggcccggaagctacgcctagacctgctggaaaggttccacaccatgtccatcatgctggccgtggacatcctgggctgcaccggctctgcggaggagcgggcagcgctgctgcacaagaccattcagctggcggccgagctgcgggggactatgggcaacatgttcagcttcgcggcggtcatgggtgccctggacatggcccagatttctcggctggagcagacatgggtgaccctgcggcagcgacacacagagggtgccatcctgtacgagaagaagctcaagccttttctcaagagcctcaacgagggcaaagaaggcccgccgctgagcaacaccacgtttcctcatgtgctgcccctcatcaccctgctggagtgtgactcggccccaccagagggccctgagccctggggcagcacggagcacggcgtggaggtggtgctggctcacctggaggccgcccgcacagtggcacaccacggaggcctgtaccacaccaatgctgaagtcaagctgcaggggttccaggcccggccggagctcctggaggtgttcagcacggagttccagatgcgccttctctggggcagtcagggtgccagcagcagccaggcccggcgctatgagaagttcgacaaggtcctcactgccctgtcccacaagctggaacctgctgtccgctccagcgagctgtgaccccagggacatttcccctctgcagctgcggacagcgtcaggggcagaggggcacacaactttccccagagcaccccaaggacactgtgatcaacccgagaatgttctgggttcaactcaagcatctcccttgcacctccagggtcctgcgtggactctgggttccatcccacctgctacatgctcaccaggtctccattgaggaagaacaggaacgccggttcccccaccagcttttgctgctccccttcctgctggggttccctgttttcgagccatgggaggcaggctgctcacgcctcctcactctctgtctgtccctcaccaacaccaaggcctccatctcactgtaaataagtctcttgttcttgtaaataagatgtacagaag

SEQ ID NO: 412 - DNA, 1468 bp, Homo sapiens
atcgaccgcgctgccgaatgtcgtactaagcccctgcctatggcagtatccatccgcgggaatgcggactctattgtcgcctgcctggtcctgatggtcctctacttgataaagaaaagactcgtcgcgtgtgcagctgtattctatggtttcgcggtgcatatgaagatatatccagagacttacatccttcccataaccctccacctgcttccagatcgcgacaatgacaaaagcctccgtcaattccggtacactttccaggcttgtttgtaagagctcctgaaaaggctgtgtaatcggactgcgctgatgtttgtagcagttgctggactcacgttttttgccctgagctttggtttttactatgagtacggctgggaatttttggaacacacctacttttatcacctgactaggcgggatatccgtcacaacttttctccgtacttctacatgctgtatttgactgcagagagcaagtggagtttttccctgggaattgctgcattcctgccacagctcatcttgctttcagctgtgtctttcgcctattacagagacctcgttttttgttgttttcttcatacgtccatttttgtgacttttaacaaagtctgcacctcccagtactttctttggtacctctgcttactgcctcttgtgatgccactagtcagaatgccttggaaaagagctgtagttctcctaatgttatggtttatagggcaggccatgtggctggctcctgcctatgttctagagtttcaaggaaagaacacctttctgtttatttggttagctggtttgttctttcttcttatcaattgttccatcctgattcaaattatttcccattacaaagaagaacccctgacagagagaatcaaatatgactagtgtatgttccacaccctctgctactgtgttacattctgattgtcttgtatggaccagaagagagctttgggacattttttctgaacattctaagcattctagtgaaagttcccatgttccaacagaacttaaaagcaatgtttgccttatatataaaagggacacaataattgaggtccaccttctaggaaatcctaggactcgtttatttgggacatggtgggaataaaggtcacatattggaaaatggaaaggctgatgaaactatcagatactaaaacattcttaaaatagaggaatatagttagagacatcaggtttaagccagtatttgttcctgttttacaatgcttctgtcttaagctgtgtcttaacttttaacacccatcttttctttctaaagctttcctgacagctgtgaaaatccaaaaaatattcttaaactgtgtatggtggcccttgcctgtagtctcagcactttgggaggctgaggtgggagggtcgcttgagttcaggagttctagacccacctggggcaagatggtgagacctagtctcaaaaaaaaaa

SEQ ID NO: 413 - DNA, 1130 bp, Homo sapiens
tccctattccagtgaggtggaattcgctggaagggcgcctcctccgcgggtatgaacagcacgccaacgatggcaaggattacatatcccggaactaggacctgcgctcctggaccgcggcggacatggcggctcaaatcaccaagcgcaagtgggaggcagaagaatttgcagagcagatcaaggcctacctggagggcacgtgcgtggagaggctcgcacacacctggagaacgggaaggagacgctgcagctcacggagcagtcttctcagcccaccatccccatcgtgggtatcgttgctggcctggttctccttggagctgtagtcactggagctgtggtttctgctgtgatgtgcaggaagaagaactcaggacattttcttcccacagatagagtgagctactctgaagctgcaagcagcgaccatgcgcagggttctgatgtgtctctcacggcttgtaaagtgtgagacagctgccttgtgtgggactgagaggcaagatttgttcacgccttccctttgtgacttcaaaaaccctgactctctttctgcaaaggcacctgaatgtgcctgtgttcctgtaggcataatatgaggaggtggggagaccaacccacccccatgtccaccatgaccctcttccctcatgctgacctgtgttccctctccaataattaatcattcctgctccatagacgtgaggctgagatgtctccatctctgtctcaactttatgtgcactgagctgtaacttcttacttccctattaaaattagaatctgagtataaatttactttttcaaattcttgccatgagaggttgatgggttaattaaaggagaagattcctaaaatttgagagacaaaataaatggaagacatgagacccttccagagtccacatgtttcttatgctgatttgttgcatgagaggagagtagatggggctgtgcccagtgggtgctcaggccaccgtgcgctttatgtggtcactactcagctgggtcatctttgctgctccgttgtccttggctgtatgatccagccctacgggacttagagggttttctccccgtgtgcggagataagagattgtaataaataaaagcacaagacttgtatt

SEQ ID NO: 414 - DNA, 1622 bp, Homo sapiens
ttttttttttttgagacaaagtctcactctgtagccaggtgctggggtgcagtggcatgatctcggctcactgcaacctccgcctcctgaggtcaagtgattctcctgcctcagcctcccaaatagctgggactacaagagtgcgccaccacgcctagctaatttttgtatttttagtagagacggggtttcaccttgttggccaggctggtctttaactcctgacctcaggtgatccacccgcctcggcctcccaaagtgctgggattacaggcataagccaccacgcccagccaggaaagtatttaaaaacaaattaagcaaagattataaaagtttttggagtaacacatttcccgaaatgatcacgatccacatcaagtctgagccatgttgacatccccacgtcggggcccttcctggtggtcgaggaatcttcagaggtctctaaaatatattaaaaatgtcccaacatttcaggacattccaccggcttttcttgctgggcttcctggttttcttcttgggctttctggttttcacttcctcttccactttggtcttttctgttgcttcttctgcaggtgcagaggaaggacttgctgacatctgctggtggctgcctgtaatggtggagtcttccaattgctttgccagtgtggctgggtccacctgcatcatgtgaacccctgtggcttcctcagagactgtctgctctggcacatgctcctccaggtcttccaggtcactctttgccagcgtggctgggtccacctgcatcatgtgaacccctgtggcttcctcagagactgtctgccctggcacatgctcctccaggtcttccaggtcaccacgttgtggaactcccaaggatgtcttcacctcctctgggtccctcctcctcgccgttgtaactggacagctcctgaagtacatccctgatcagaagttcggccagtgtgtctgggtccccctccatcatgtgaacttctgtggcttcctcagagactgtctgccctggcccatgctcctccaggtcttccaggtcaccgttggtttgggtgcctgcgtctgcatgggcaacagtgaggagactctgattggatgcttcagggagatgttctgctataaactcctctagatgatcttctgatggaaagcatacccttttcttcacagagcctggcaacgtctccgagagtatctcgggtggacacaatggcttgcccaaggagccttcgtcacgctcacgttgtggaactcccaaggatgtcttcatcgcctcttggtacttcttccatgtgctgtataggtggagctcccgtagtcgccgtagttgccgtttcatctcaatgtctctctctgtgtctttgtccaccatatgaacgcccaggacatcttcagatgaagcttcctgcaccaggtcctcatcgtaatctggattgtaagttttaagaatcttctttttaagttccaaaatttggtgtcaaattctatatataaaaaagtaataaataaaattgctattttaatactgaaataaaagttaccatattaaattcttaatgtttggtaaatgtataatcaaactgattcttttttcctcgctggctaaaacaaaa

SEQ ID NO: 415 - DNA, 447 bp, Homo sapiens
  misc_feature (1)...(447): n = a,t,c or g
nttcgaagactcttagtcagtgcggtggaattcgtttattgtaaatcagcaatccataatgcatgggtctgtttctgggatctctctttgattccattggtctctttggctatccttggattagtatcacactaaactactatgactttataacgtgtcaatatttagattttataataagttttggtatttagtagacagagcaaagtcctccagattgggattttttcaataatgtgtaagttattcttgactttttgtgtttgtatataatctttagaatcagcttgtcaagtgccatgaaaggaaggaagaagggaaggagagaatgaaggaggagttttgtttaggattgcattgtaattataggtcagttagaagagaattgacatcttcctaacactgagtcttccaacccatgaccatggtatatattccatttattta

SEQ ID NO: 416 - DNA, 810 bp, Homo sapiens
ttttttttttttaacatcttaatattgagtttattagataaagacaagaaaaaatggggcttggggaaattggggcttctggggttttaaggagcatgctgaaagaacgtaagaaacaaaacatgaagggaaatggaaatgttaccctcactcccctcctccctgctgtccagtgtggatgccacctccagcctgcaggacggagccccctcccatcatcacacagtgcacctgggctctgcagccccttgcatccattgcagccgcagcaagaggcctccacttgtccgtcagggacgctccaaggaagggaaaaagccgcccccggacaggggagaccactgtgttctctgtgggcaggtggggcaggtgcttccaggggaaaggggggctgaaggtagggggcccagtgatcaggcacctgatcccaaaagtgggccttggctctttcctcctggactgggagctccggcagaagtcaggctacacaatgtgccccacaatctgagaaggcctcccctaccttaggccagagggaagtagccaccaaactcaggatgtccctggtcagaggggagggccaagcagcctctgagttgtggtcctaaaccccagtgttccctcccctcccaggttccgggtgacacacattgagaagcgctatggactgcacgaacaccgtgatggctcccccacagacaggagctggggctctggtgggggacaggacccagggggtggtcaggggtctgggggagggcagcccaaggcagggatgcctgacctcgtgccgaattcctgcagcgcggt

SEQ ID NO: 417 - DNA, 3787 bp, Homo sapiens
ggaggcccaagacccgcgggcttgcggaccggacgcaggcggcagatttgcagcccgggatgcgccagggaacagcctgcgcccccctccctcctctccgcccgctggccgggccaactccggcttctgccgcgcgtgcctggctcggagctccgctgcggaaaacccgagcgcgggcggctccccgcctcgccgcccgggaaaatccgggggtggccgccagggatctccaagcggcctgggctgggcggccggagcttccctcccggatttgcgccccgaacctggcgccctgaagctagaggcccgtcggtccagtccttgcctcccatcttctctccgcagagcgcccagacgacggcgagatgacggccgggagccccgaagaatgcggggaggtgcggaggagccccgagggccgcgtctctcgcttgggccgccgcctgggccgccgccggcgcccgcgctccccgcccgagcctctgcgggtgcgggcgcggctgcggctgcgctcgccgtcgggggcgttcgcggcgctgggggcgctcgtggtactggtgggtatgggcattgcagtggccggctactggccgcaccgggccggggccccagggtcccgggccgccaatgccagctcgccccagatgagcgagctgcgacgcgagggtcgcggcgggggccgggctcacggcccgcacgagcggctgcggctcctcgggccggtgatcatgggcgtcggcctgttcgtgttcatctgcgccaacacactgctgtatgagaaccgagacttggagacgcgacggctccgccagggggtgctgcgggcccaggcgctccggccccccgacggcccgggctgggactgcgccctccttcccagccccggccctaggagtccccgagccgtaggctgcgcagagccagaaatctgggacccgtccccgcgtcggggtacttcacccgtcccgtcagtgcggagtctgcgttcagagcccgctaatcctcgcttggggttacctgccttgctcaacagctacccgctgaagggccccgggctgcccccaccctggggtccacggacgcagactggccatgtgatcatcaccgtgcagccgtctggctcctgcattgaacattccaagtctctggatctgggccttggggagctcctccttggggccccagcagctcgggactgtgctcaccgaagctggccacggctggaccgcctcagtcttgggggctatgccaaattgggaggaggaggggacttgggggcccgggtctgaagagaggggagacagcctgctctgaggctgcagcatggaccatgctaataggaccaaaggaccaggagtcccaacgtctaatagatgtttcagtcacatcccaggctggggatggatgctctgaccacagcagctgtgaagggcatcctgacctgcatgcgggcagagaaatgccagctgcaccagggctcagtgagctggagagggtgcgtttcactgtggggtgtggaggactcgcctcaggaatttcttcagcctctgtaagtggccttagccctaacagggctggaggtccaggccagggtgactgggagatgtacccagtgtcttggcaaacccaagaaagtggtgggcaagggcccctaagactgggaggtaggttgggatgttacaggctggggcaggctccctccaaggcggcactggtgatggagtgtggggcctctgggaagatggaccacgggatgagactctccactgccatctgggacggggactgagccttgaactcctaccacctcaatccctttcttccctcagccatctggggtatatccctctagagctacactactgccaatgccttcatactgagctctgggcccctctgcaaataagtctgagaagccccttctctccttcctttatcgtggcctatgctgcagaatctcactgcagctggcaaaaggcattggccagctctcagaaatccctttactcaacgttgaaactgcattttggtcaatgtgggtaacttactttagaaaatgacttgagtttaggtctcccccacccatatttaatttttcccaagttgctggtagaagagaaatttaaaagtggatcaatcctcacagagagagttctttttgttgttgtttattgaaaaaaatgcaatacaagaagcaagaccaaacagatatctaaacactacaaccacttctactacgaaaggccaaaacagcagacttgattattgcctgtgtagtctaaagattctgccaatctgattctgctgcccgagttcctattttttcaagaaatgtaaacaactacttgatatgattcataattttaaaaaaatttacaaagctccttcatttttgtcaccaaaataatacatttgagagagatttgtagaaacaaccagcctggggctgagatcctgggcagaaatttcccgtgagcatcaaaaggcgtcagtcaggccgcagctctggctccagttcccgaggtttgttgtctcctcacccccagctgccaagcatccccccaacacacactgatgggcccagcggtggaggggggggtggggacggggatgggtcacggggccctgacgggtcccgcagttaggctccctgagccctcggcttataaatacaggtcttgctttgtgggtgggtgccagagtcctcatgtggcttggaggaaatctttatttctcaaattaaaataaaattgcagcgagagttgttactgtggtgtgtctgagtcactctaggaaaactgttgccaagtttctgaccctggaaatgtaattctcttccccctcctcaccatttctacctggacagagtctgtttttcttcacacaaacacacatacacacaactgcagaaagaaaaaaaatccaaacaattgccaaaccccaagaactgttgccagagatggaggaaaggggaagaggcctggaaggacacccatcttgctgggcttgtccaaatctatggcttctaagagcctgaaaggcattagagctcttttcatccaatttacagacaacgaagccgagagaagtgagttggtgacagagctgagggaaacgtttaggcccccgatgaacggtcctgtgctgtgaaagctgccacactgttctagatcacacggaatattcagtgtgttagtttttaaagggacactcagtgccctctgccttttccccatcctcttcgttccacaggtctggaagccctggtagctcttcctacaggccatctggccatcaggcagtgggcatgcactacatgttcgtttgatgtaagctgcatttcttgtcaccactcctggcaacacgaccaggcttgggcactaccccaaagcccacctttcagaccctctgcccacagcctataattttgttcctgagataggacaagctctttcccctaagcctgtcccacgtcccacctgggctctttccctccctcctgttgttcatgtctcacatgggtaccaaaagaaaaatgcacacacccgaaatgagttcaaaccagccgaaacaaaactcaggcagtggagactttggacggtgttgggagaagcagctttagacatttctcttgctcactgcccttgagccccagtgactgctgcccgatacccactgtctattttaggaagctggaactgggattctaaggagccttgaggccaatgtgtttgtgggaagcagttggaaggttagagaagttctgttaaataaaaatgccccaaat

SEQ ID NO: 418 - DNA, 3846 bp, Homo sapiens
aatataataccaagagaagaaaagcctattgaggatgaaattgaaagaaaagaaaatattaagccctctctgggaagtaaaaagaatttattagaatctatacctacacattctgatcaggaaaaagaagttaacattaaaaaaccagaagacaatgaaaatctggatgacaaagatgatgacacaactagggtagatgaatccctcaacataaaggtagaagctgaggaagaaaaagcaaaatctggagatgaaacgaataaagaagaagatgaagatgatgaagaagcagaagaggaggaggaggaggaagaagaagaagaggatgaagatgatgatgacaacaatgaggaagaggagtttgagtgctatccaccaggcatgaaagtccaagtgcggtatggacgagggaaaaatcaaaaaatgtatgaagctagtattaaagattctgatgtcgaaggtggagaggtcctttacttggtgcattactgcggatggaatgtgagatacgatgaatggattaaagcagataaaatagtaagacctgctgataaaaatgtgccaaagataaaacatcggaagaaaataaagaataaattagacaaagaaaaagacaaagatgaaaaatactctccaaaaaactgtaaacctccggcgcttggcccaaacccaccatttcagacaaatcccatctcctggaaatggtatcccaaactggatctcactgatgccaaaaactctgatactgctcatattaagtccatagaaattacttcgatccttaatggacttcaagcttctgaaagttctgctgaagacagtgagcaggaagatgagagaggtgctcaagacatggataataatggcaaagaggaatctaagattgatcatttgaccaacaacagaaatgatcttatttcaaaggaggaacagaacagttcatctttgctagaagaaaacaaagttcatgcagatttggtaatatccaaaccagtgtcaaaatctccagaaagattaaggaaagatatagaagtattatccgaagatactgattatgaagaagatgaagtcacaaaaaagagaaaggatgtcaagaaggacacaacagataaatcttcaaaaccacaaataaaacgtggtaaaagaaggtattgcaatacagaagagtgtctaaaaactggatcacctggcaaaaaggaagagaaggccaagaacaaagaatcactttgcatggaaaacagtagcaacagctcttcagatgaagatgaagaagaaacaaaagcaaagatgacaccaactaagaaatacaatggtttggaggaaaaaagaaaatctctacggacaactggtttctattcaggattttcagaagtggcagaaaaaaggattaaacttttaaataactctgatgaaagacttcaaaacagcagggccaaagatcgaaaagatgtctggtcaagtattcagggacagtggcctaaaaaaacgctgaaagagcttttttcagactctgatactgaggctgcagcttccccaccgcatcctgccccagaggagggggtggcagaggagtcactgcagactgtggctgaagaggagagttgttcacccagtgtagaactagaaaaaccacctccagtcaatgtcgatagtaaacccattgaagaaaaaacagtagaggtcaatgacagaaaagcagaatttccaagtagtggcagtaatttcagtgcttaaataccccttccttacttacacctgaatcgccttcatcagtcactgtaacagaaaggcagccggcagcagtcttctgtaacagtatcagaaccactggctccaaaccaagaagaggttcgaagtatcaagagtgaaactgatagcacaattgaggtggatagtgttgctggggagctccaagacctccagtctgaaagggaatagctcgccagcaggttttgatgccagtgtgagctcaagcagtagtaatcagccagaaccagaacatcctgaaaaagcctgtacaggtcagaaaagagtgaaagatgctcagggaggaggaagttcatcaaaaaagcagaaaagaagccataaagcaacagtggtaaacaacaaaaagaagggaaaaggcacaaatagtagtgatagtgaagaactttcagctggtgaaagtataactaagagtcagccagtcaaatcagtttccactggaatgaagtctcatagtaccaaatctcccgcaaggacgcagtctccaggaaaatgtggaaagaatggtgataaggatcctgatctcaaggaacccagtaatcgattacccaaagtttacaaatggagttttcagatgtcggacctggaaaatatgacaagtgccgaacgcatcacaattcttcaagaaaaacttcaagaaatcagaaaacattatctgtcattaaaatctgaagtagcttccattgatcggaggagaaagcgtttaaagaagaaagagagagaaagtgctgctacatcctcatcctcctcttcaccttcatccagttccataacagctgctgttatgttaactttagctgaaccgtcaatgtccagcgcatcacaaaatggaatgtcagttgagtgcaggtgacagcaggacttgctaaagcactttgcacttaatggctgttgagggccactttttttttatactgcacagtggcacaaaaaaatatcagacaagcactattttatatttaaaaattgtttcttgacaagctgacttggcacttaagtgcacttttttatgaagaaaaagtacaatgaactgcttttcctcaagcaataattgtttccaacttgtctgggaattgtgtgtctggtaactggaaggccttccactgtggcaaatggaggcttttcactgcctgtagagacaatacagtaagcatagttaaggggtgggtcagaacatgttaagataacttactgtatatgtattcccttgtattttgttaaagctggaacatttgatatttttccatttatttatgaaaaaatatgaacctattttcatttgtacaaggtaattgttttttaaagcaagtcaccttagggtggctttaattgtataagtcaagcacatgtaataaattcaaaacctgcagttaacaggatattagacatcaatcctggtaaccaaatattaaagattctctttaaaaaagactgaacatgtttacaggtttgaattaggctaaaaggtcttgcagtggcttttcatggcccttcaaattggaatggaactactgtactttgccatttttctataaatcagtatttttttttaattttgatatacattgtgtgaaaaaagaaaatggctaataaactgtattaaatcttaaacaatgtataaagattgtacttagccagttcaaagtgtatatttattcataatgaattataacagttatatttttgtgttttcttgtaaatgtttcttttcccttaaataccagataattcatttgtattgcttattttattatgagctacaacaaaaggacttcaggaacaagtaatgtattagtatggttcaagattgttgataggaactgtctcaaaaggatggtggttattttaaatataaatagctaatgggggtggtaggcctataaaattaaatgccttgtataaaatccaaaatgaatgcaaaattgttttcacttgtattgactttatgttgtatgattccaatctctgttctgtttggcacttgtatttaattcttcacctttgtaagacatttgtatattgtgcatgtgttcattcaagctatttaatatctggcactgttaatacacagtactttattgt

SEQ ID NO: 419 - DNA, 463 bp, Homo sapiens
  misc_feature (1)...(463): n = a,t,c or g
nattgaaacctcgtagaccctagtccagngtggnggaattcagtggacagctgagctactgagttctagaaggcaccgggcattggtggggcagagcctcacgtggacccacgtggggaaagaagcagaggctccgtcacggggagttgtcgtgaccttgaacttggcatcatctttgaagaagctgaagggaaagaaggaatgacagagggagtgcctttccatccacatcggtcaagctggcatccagattggggacgcctgctgggaactctattgcctggaacatggaatccagccaaatggcgttgttcttgacactcaacaggatcagctggaaaatgcaaaaatggagcacacaaatgcatctttcgataccttcttctgtgagacaagagctgggaagcatgtgcctagagcactcttcgtggacttggagccaactgttatagatgggatccgg

SEQ ID NO: 420 - DNA, 1010 bp, Homo sapiens
cgccaccccccatctcctccatctcctctatccttccatcccctccatcccttcgtccctccatcccctccgtccctccatccctccgtcctctccgtctccttcatcctctctgtccctccatccggtacagttccgtctgccagaggcagggcttgcttcatgccttctgtgctcctcctccacactcaacctccttttccccccaacaggccaccctgcagttctgtgtggtgaagccactcatggcggtcagcactgtggtcctccaggccttcggcaagtaccgggatggggactttgagtaagcagcgggtgctccccggggtgtgtgggaggagtgttggcgcaggctggtgccttggctcagggaagggggcagccagagtggccgcacagccatgaccttcctgggtgtctggtgctcacaacccccctgaagtctgagcccagcagtggacacccttgcagttggccccgctgccagccccggagtgagccattggcagcagtcacgttcatgtccaggctgcagagtggtaccatgaagggatgggccacaaagggacagtgaccactgctgaggcagggagcgagagggtcagagccccaagaggtcggctcaagtccacagatacaaagcccgtgctgtgtaaattgtccacacccatttcattctgggcttagtgaaagtgaccccgtggctgggcacagtggttcacgcctgtaatcctagcactttgggaggccaacgcgggtagatcacctgaggtcaggagttcaagaccagcctggccaacatggtgaaaccccatcactactaaaaatacagaaaattaaccgggcgtggtgacgggtgcctataatcccagctactcgggaggctgaggcaggagaatcgcttgaacccaggaggcagaggttgcggtgagccaagatcacgccattgcactctagcctgggtgacaagaacagaactccatatctaaaaaaaaaaaagaaagtcgacg

SEQ ID NO: 421 - DNA, 1365 bp, Homo sapiens
tttcgtctggcttgtggactgagcaatctgcggcccggtctcgaggggaaaataggtctgtggtccgcaaggccccagtggagcccttgggttcccgcagaaccgactgggtctccagtagtctctgaggagccgctcgaccttctcccgaccctggatctgaggcaggagatgcctcccccgcgggtgttcaagagctttctgagcctgctcttccaggggctgagcgtgttgttatccctggcaggagacgtgctggtcagcatgtacaggtcagaggaagggacgctggcgccccaggaacagctctttggagggggtggggagcagggccggaaccttgctggcgcttgagccgattcaaatctgattgagtcatgttggcaagagctgggtctaggaccctggggtggggactggagggttgagcaggtcggggcctcagcctccctccggttccccagggaggtctgttccatccgcttcctgttcacggctgtgtcgctgctgagcctctttctgtcagcattctggctggggcttctgtacctggtctctcctttggagaatgaacctaaggagatgctgactctaagtgagtaccacgagcgcgtgcgctcccaggggcagcagctgcagcagctccaggccgagctggataaactccacaaggaggtgtccactgttcgggcagccaacagcgagagagtggccaagctcgtgttccagaggctgaatgaggattttgtgcggaagcccgactatgctttgagctctgtgggagcctccatcgacctgcagaagacatcccacgattacgcagacaggaacactgcctacttctggaatcgcttcagcttctggaactacgcacggccgcccacggttatcctggagccccacgtgttccctgggaattgctgggcttttgaaggcgaccaaggccaggtggtgatccaactgccgggccgagtgcagctgagcgacatcactctgcagcatccaccgcccagcgtggagcacaccggaggagccaacagcgccccccgcgatttcgcggtctttttcctcctttcattcttcacccaccagggcctccaggtttatgatgaaactgaagtttccttggggaaattcaccttcgatgttgagaaatcggagattcagactttccacctgcagaatgaccccccagctgcctttcccaaggtgaagatccagattctaagcaactggggccacccccgtttcacgtgcttgtatcgagtccgtgcccacggtgtgcgaacctcagagggggcagagggcagtgcacaggggccccattaaacatgctgatttttggagtagaattgaaaaaaaaaa

SEQ ID NO: 422 - DNA, 421 bp, Homo sapiens
ggaattcgatgcacagccttcaattggtgctttggtggtttttaagcggccttgagcaaccacaggctcggaccccgggccaaagcggggcatgaattaccttgtcagttgcagcatgagatccccagagtccggaaaaggagagccggggactgcgcgggactacacaccaatggggcgcccccctcctcctgtcccctcagtctctccagggccgctgccagggagcttggcgatcgcgccacactctccggagccccacccttgggagcagcaaccacccagaggtcaagcacgttccccgccgggcggatggctgggaagcgctacgctgttcgacgaccacacaaccaccctctggccaccctctcctgtggacaccgccggagccccggcttccccgggcccggatgtgtgtgaa

SEQ ID NO: 423 - DNA, 836 bp, Homo sapiens
gacccacgcgtccgcccacgcgtccggccaggaggcggagtggaagtggccgtggggcgggtatgggactagctggcgtgtgcgccctgagacgctcagcgggctatatactcgtcggtggggccggcggtcagtctgcggcagcggcagcaagacggtgcagtgaaggagagtgggcgtctggcggggtccgcagtttcagcagagccgctgcagccatggccccaatcaaggtgggagatgccatcccagcagtggaggtgtttgaaggggagccagggaacaaggtgaacctggcagagctgttcaagggcaagaagggtgtgctgtttggagttcctggggccttcacccctggatgttccaagacacacctgccagggtttgtggagcaggctgaggctctgaaggccaagggagtccaggtggtggcctgtctgagtgttaatgatgcctttgtgactggcgagtggggccgagcccacaaggcggaaggcaaggttcggctcctggctgatcccactggggcctttgggaaggagacagacttattactagatgattcgctggtgtccatctttgggaatcgacgtctcaagaggttctccatggtggtacaggatggcatagtgaaggccctgaatgtggaaccagatggcacaggcctcacctgcagcctggcacccaatatcatctcacagctctgaggccctgggccagattacttcctccacccctccctatctcacctgcccagccctgtgctggggccctgcaattggaatgttggccagatttctgcaataaacacttgtggtttgcggccaaaaaaaaaa

SEQ ID NO: 424 - DNA, 9401 bp, Homo sapiens
tagaggcaagtgaccagggtcgggacccgggtcctcgggagtaccacagccgctgttttcctttctgtggaggatgacaatgataatgccccccagtttagtgagaagcgctatgtggtccaggtgagggaggatgtgactccaggggccccagtactccgagtcacagcctcggatcgagacaaggggagcaatgccgtggtgcactatagcatcatgagtggcaatgctcggggacagttttatctggatgcccagactggagctctggatgtggtgagccctcttgactatgagacgaccaaggagtacaccctacgggtgcgagcacaggatggtggccgtcccccactctctaatgtctctggcttggtgacagtacaggtcctggatatcaacgacaatgcccccatcttcgtcagcacccctttccaggctactgtcctggagagcgtccccttaggctacctggttctccatgtccaggctatcgacgctgatgctggtgacaatgcccgcctggaataccgccttgctggggtgggacatgacttccccttcaccatcaacaatggcacaggctggatctctgtggctgctgaactggaccgggaggaagttgatttctacagctttggggtagaagctcgagaccatggcactccagcactcactgcctcggccagtgtcagcgtgactgccctggatgtcaacgacaacaatccaacctttacccaaccagagtacacagtgcggctcaatgaggatgcagctgtgggcaccagcgtggtgacggtgtcagctgtggaccgtgatgctcatagtgtcatcacctaccagatcaccagtggcaatactcgaaaccgcttctccatcaccagccaaagtggtggtgggctggtatcccttgccctgccactggactacaaacttgagcggcagtatgtgttggctgttaccgcctccgatggcactcggcaggacacggcacagattgtggtgaatgtcaccgacgccaacacccatcgtcctgtctttcagagctcccactatacagtgaatgttaatgaggaccggccggcaggcaccacggtggtgctgatcagcgccacggatgaggacacaggtgagaatgcccgcatcacctacttcatggaggacagcatcccccagttccgcatcgatgcagacacgggggctgtcaccacccaggctgagctggactacgaagaccaagtgtcttacaccctggccattactgctcgggacaatggcattccccagaagtccgacaccacctacctggagatcctggtgaacgacgtgaatgacaatgcccctcagttcctgcgagactcctaccagggcagtgtctatgaggatgtgccacccttcactagcgtcctgcagatctcagccactgatcgtgattctggacttaatggcagggtcttctacaccttccaaggaggcgacgatggagacggtgactttattgttgagtccacgtcaggcatcgtgcgaacgctacggaggctggatcgagagaacgtggcccagtatgtcttgcgggcatatgcagtggacaaggggatgcccccagcccgcacacctatggaagtgacagtcactgtgttggatgtgaatgacaatccccctgtctttgagcaggatgagtttgatgtgtttgtggaagagaacagccccattgggctagccgtggcccgggtcacagccactgaccccgatgaaggcaccaatgcccagattatgtaccagattgtggagggcaacatccctgaggtcttccagctggacatcttctccggggagctgacagccctggtagacttagactacgaggaccggcctgagtacgtcctggtcatccaggccacgtcagctcctctggtgagccgggctacagtccacgtccgcctccttgaccgcaatgacaacccaccagtgctgggcaactttgagatccttttcaacaactatgtcaccaatcgctcaagcagcttccctgggggtgccattggccgagtacctgcccatgaccctgatatctcagatagtctgacttacagctttgagcggggaaatgaactcagcctggtcctgctcaatgcctccacgggtgagctgaagctaagccgcgcactggacaacaaccggcctctggaggccatcatgagcgtgctggtgtcagacggcgtacacagcgtgaccgcccagtgcgcgctgcgtgtgaccatcatcaccgatgagatgctcacccacagcatcacgctgcgcctggaggacatgtcacccgagcgcttcctgtcaccactgctaggcctcttcatccaggcggtggccgccacgctggccacgccaccggaccacgtggtggtcttcaacgtacagcgggacaccgacgcccccgggggccacatcctcaacgtgagcctgtcggtgggccagccgccagggcccgggggcgggccgcccttcctgccctctgaggacctgcaggagcgcctatacctcaaccgcagcctgctgacggccatctcggcacagcgcgtgctgcccttcgacgacaacatctgcctgcgggagccctgcgagaactacatgcgctgcgtgtcggtgctgcgcttcgactcctccgcgcccttcatcgcctcctcctccgtgctcttccggcccatccaccccgtcggagggctgcgctgccgctgcccgcccggcttcacgggtgactactgcgagaccgaggtggacctctgctactcgcggccctgtggcccccacgggcgctgccgcagccgcgagggcggctacacctgcctctgtcgtgatggctacacgggtgagcactgtgaggtgagtgctcgctcaggccgttgcaccccgggtgtctgcaagaatgggggcacctgtgtcaacctgctggtgggcggtttcaagtgcgattgcccatctggagacttcgagaagccctactgccaggtgaccacgcgcagcttccccgcccactccttcatcacctttcgcggcctgcgccagcgtttccacttcaccctggccctctcgtttgccacaaaggagcgcgacgggttgctgttgtacaatgggcgtttcaatgagaagcatgactttgtggccctcgaggtgatccaggagcaggtccagctcaccttctctgcaggggagtcaaccaccacggtgtccccattcgtgcccggaggagtcagtgatggccagtggcatacggtgcagctgaaatactacaataagccactgttgggtcagacagggctcccacagggcccatcagagcagaaggtggctgtggtgaccgtggatggctgtgacacaggagtggccttgcgcttcggatctgtcctgggcaactactcctgtgctgccccagggcacccagggtggcagcaagaagtctctggatctgacggggcccctgctactaggcggggtgcctgacctgcccgagagcttcccagtccgaatgcggcagttcgtgggctgcatgcggaacctgcaggtggacagccggcacatagacatggctgacttcattgccaacaatggcaccgtgcctggctgccctgccaagaagaacgtgtgtgacagcaaaacttgccacaatgggggcacttgcgtgaaccagtgggacgcgttcagctgcgagtgccccctgggctttgggggcaagagctgcgcccaggaaatggccaatccacagcacttcctgggcagcagcctggtggcctggcatggcctctcgctgcccatctcccaaccctggtacctcagcctcatgttccgcacgcgccaggccgacggtgtcctgctgcaggccatcaccagggggcgcagcaccatcaccctacagctacgagagggccacgtgatgctgagcgtggagggcacagggcttcaggcctcctctctccgtctggagccaggccgggccaatgacggtgactggcaccatgcacagctggcactgggagccatcggggggcctggccatgccattctgtccttcgattatgggcagcagagagcagagggcaacctgggcccccggctgcatggtctgcacctgagcaacataacagtgggcggaatacctgggccagccggcggtgtggcccgtggctttcggggctgtttgcagggtgtgcgggtgagcgatacgccagagggggttaacagcctggatcccagccatggggagagcatcaacgtggagcaaggctgtagcctgcctgacccttgtgactcaaacccgtgtcctgctaacagctattgcagcaacgactgggacagctattcctgcagctgtgatccaggttactatggtgacaactgtactaatgtgtgtgacctgaacccgtgtgagcaccagtctgtgtgtacccgcaagcccagtgccccccatggctatacctgcgagtgtcccccaaattaccttgggccatactgtgagaccaggattgaccagccttgtccccgtggctggtggggacatcccacatgtggcccatgcaactgtgatgtcagcaaaggctttgacccagactgcaacaagacaagcggcgagtgccactgcaaggagaaccactaccggcccccaggcagccccacctgcctcttgtgtgactgctaccccacaggctccttgtccagagtctgtgaccctgaggatggccagtgtccatgcaagccaggtgtcatcgggcgtcagtgtgaccgctgtgacaacccttttgctgaggtcaccaccaatggctgtgaagtgaattatgacagctgcccacgagcgattgaggctgggatctggtggccccgtacccgcttcgggctgcctgctgctgctccctgtcccaaaggctcctttgggactgctgtgcgccactgtgatgagcacagggggtggctccccccaaacctcttcaactgcacgtccatcaccttctcagaactgaagggcttcgctgagcggctacagcggaatgagtcaggcctagactcagggcgctcccagcagctagccctgctcctgcgcaacgccacgcagcacacagctggctacttcggcagcgacgtcaaggtggcctaccagctggccacgcggctgctggcccacgagagcacccagcggggctttgggctgtctgccacacaggacgtgcacttcactgagaatctgctgcgggtgggcagcgccctcctggacacagccaacaagcggcactgggagctgatccagcagacagagggtggcaccgcctggctgctccagcactatgaggcctacgccagtgccctggcccagaacatgcggcacacctacctaagccccttcaccatcgtcacgcccaacattgtcatctccgtagtgcgcttggacaaagggaactttgctggggccaagctgccccgctacgaggccctgcgtggggagcagcccccggaccttgagacaacagtcattctgcctgagtctgtcttcagagagacgccccccgtggtcaggcccgcaggccccggagaggcccaggagccagaggagctggcacggcgacagcgacggcacccggagctgagccagggtgaggctgtggccagcgtcatcatctaccgcaccctggccgggctactgcctcataactatgaccctgacaagcgcagcttgagagtccccaaacgcccgatcatcaacacacccgtggtgagcatcagcgtccatgatgatgaggagcttctgccccgggccctggacaaacccgtcacggtgcagttccgcctgctggagacagaggagcggaccaagcccatctgtgtcttctggaaccattcaatcctggtcagtggcacaggtggctggtcggccagaggctgtgaagtcgtcttccgcaatgagagccacgtcagctgccagtgcaaccacatgacgagcttcgctgtgctcatggacgtttctcggcgggagaatggggagatcctgccactgaagacactgacatacgtggctctaggtgtcaccttggctgcccttctgctcaccttcttcttcctcactctcttgcgtatcctgcgctccaaccaacacggcatccgacgtaacctgacagctgccctgggcctggctcagctggtcttcctcctgggaatcaaccaggctgacctcccttttgcctgcacagtcattgccatcctgctgcacttcctgtacctctgcaccttttcctgggctctgctggaggccttgcacctgtaccgggcactcactgaggtgcgcgatgtcaacaccggccccatgcgcttctactacatgctgggctggggcgtgcctgccttcatcacagggctagccgtgggcctggaccccgagggctacgggaaccctgacttctgctggctctccatctatgacacgctcatctggagttttgctggcccggtggcctttgccgtctcgatgagtgtcttcctgtacatcctggcggcccgggcctcctgtgctgcccagcggcagggctttgagaagaaaggtcctgtctcgggcctgcagccctccttcgccgtcctcctgctgctgagcgccacgtggctgctggcactgctctctgtcaacagcgacaccctcctcttccactacctctttgctacctgcaattgcatccagggccccttcatcttcctctcctatgtggtgcttagcaaggaggtccggaaagcactcaagcttgcctgcagccgcaagcccagccctgaccctgctctgaccaccaagtccaccctgacctcgtcctacaactgccccagcccctacgcagatgggcggctgtaccagccctaacggagactcggccggctctctgcacagcaccagtcgctcgggcaagagtcagcccagctacatccccttcttgctgagggaggagtccgcactgaaccctgggccaagggccccctgggcttggggggattccaggaaggcctgtttcctgggaaggttcaaagaccagcagcattgattcctgaacaagggatttcgacagtgacctgtccttagaagacgaccagagtggctcctatgcctctacccactcatcagacagtgaggaggaagaagaggaggaggaagaggaggccgccttccctggagagcagggctgggatagcctgctggggcctggagcagagagactgcccctgcacagtactcccaaggatgggggcccagggcctggcaaggccccctggccaggagactttgggaccacagcaaaagagagtagtggcaacggggcccctgaggagcggctgcgggagaatggagatgccctgtctcgagaggggtccctaggcccccttccaggctcttctgcccagcctcacaaaggcatccttaagaagaagtgtctgcccaccatcagcgagaagagcagcctcctgcggctccccctggagcaatgcacagggtcttcccggggctcctccgctagtgagggcagccggggcggccccccttcccgcccaccgccccggcagagcctccaggagcagctgaacggggtcatgcccatcgccatgagcatcaaggcaggcacggtggatgaggactcgtcaggctccgaatttctcttctttaacttcctgcattaaccctgggccgtggttcctacgcccgaggctcccttcccttccccagccgcactcatgccctgctcctgtcttgtgctttatcctgccccgctccccatcgcctgcccgcagcagcgacgaaacgtccatctgaggagcctgggccttgccgggaggggtactcaccccacctaaggccatctagtgccaactccccccccaccattcccctcactgcactttggacccctggggccaacatctccaagacaaagtttttcagaaaagaggaaaaaaagaatttaaaaaaggatctccactcttcatgacttcagggattcattttttttatacgctggaaattgactcccctttcccttcccaaagaggataggacctcccaggatgcttcccagcctctcctcagtttcccatctgctgtgcctctgggaggagagggactcctggggggcctgcccctcatacgccatcaccaaaaggaaaggacaaagccacacgcagccagggcttcacacccttcaggctgcacccgggcaggcctcagaacggtgaggggccagggcaaagggtgtgtctcgtcctgcccgcactgcctctcccaggaactggaaaagccctgtccggtgagggggcagaaggactcagcgcccctggacccccaaatgctgcatgaacacattttcaggggagcctgtgcccccaggcgggggtcgggcagccccagcccctctccttttcctggactctggccgtgcgcggcagcccaggtgtttgctcagttgctgacccaaaagtgcttcatttttcgtgcccgccccgcgccccgggcaggccagtcatgtgttaagttgcgcttctttgctgtgatgtgggtgggggaggaagagtaaacacagtgctggctcggctgccctgagggtgctcaatcaagcacaggtttcaagtctgggttctggtgtccactcacccaccccaccccccaaaatcagacaaatgctactttgtctaacctgctgtggcctctgagacatgttctatttttaaccccttcttggaattggctctcttcttcaaaggaccaggtcctgttcctctttctccccgactccaccccagctccctgtgaagagagagttaatatatttgttttatttatttgctttttgcgttgggatgggttcgtgtccagtcccgggggtctgatatggccatcacaggctgggtgttcccagcagccctggcttgggggcttgacgcccttccccttgccccaggccatcatctccccacctctcctcccctctcctcagttttgccgactgcttttcatctgagtcaccatttactccaagcatgtattccagacttgtcactgactttccttctggagcaggtggctagaaaaagaggctgtgggcaggaaagaaaggctcctgtttctcatttgtgaggccagcctctggcttttctgccgtggattctccccctgtcttctcccctcagcaattcctgcaaagggttaaaaatttaactggtttttactactgatgacttgatttaaaaaaaatacaaagatgctggatgctaacttgatactaaccatcagattgtacagtttggttgttgctgtaaatatggtagcgttttgttgttgttgttttttcatgccccatactactgaataaactagttctgtgcgggtaaaaaaaaaa

SEQ ID NO: 425 - DNA, 2186 bp, Homo sapiens
cccgggcacttttcagaaaaagaatctgcatcctggaaaccagaagaaaaatatgagacggggaatcatcgtgtgatgtgtgtgctgcctttggctgagtgtgtggagtcctgctcaggtgttaggtacagtgtgtttgatcgtggtggcttgaggggaacccgctgttcagagctgtgactgcggctgcactcagagaagctgcccttggctgctcgtagcgccgggccttctctcctcgtcatcatccagagcagccagtgtccgggaggcagaagatgccccactccagcctgcatccatccatcccgtgtcccaggggtcacggggcccagaaggcagccttggttctgctgagtgcctgcctggtgaccctttgggggctaggagagccaccagagcacactctccggtacctggtcctccacctagcctccctgcagctgggactgctgttaaacggggtctgcagcctggctgaggagctgcgccacatccactccaggtaccggggcagctactggaggactgtgcgggcctgcctgggctgccccctccgccgtggggccctgttgctgctgtccatctatttctactactccctcccaaatgcggtcggcccgcccttcacttggatgcttgccctcctgggcctctcgcaggcactgaacatcctcctgggcctcaagggcctggccccagctgagatctctgcagtgtgtgaaaaagggaatttcaacgtggcccatgggctggcatggtcatattacatcggatatctgcggctgatcctgccagagctccaggcccggattcgaacttacaatcagcattacaacaacctgctacggggtgcagtgagccagcggctgtatattctcctcccattggactgtggggtgcctgataacctgagtatggctgaccccaacattcgcttcctggataaactgccccagcagaccggtgaccgtgctggcatcaaggatcgggtttacagcaacagcatctatgagcttctggagaacgggcagcgggcgggcacctgtgtcctggagtacgccacccccttgcagactttgtttgccatgtcacaatacagtcaagctggctttagccgggaggataggcttgagcaggccaaactcttctgccggacacttgaggacatcctggcagatgcccctgagtctcagaacaactgccgcctcattgcctaccaggaacctgcagatgacagcagcttctcgctgtcccaggaggttctccggcacctgcggcaggaggaaaaggaagaggttactgtgggcagcttgaagacctcagcggtgcccagtacctccacgatgtcccaagagcctgagctcctcatcagtggaatggaaaagcccctccctctccgcacggatttctcttgagacccagggtcaccaggccagagcctccagtggtctccaagcctctggactgggggctctcttcagtggctgaatgtccagcagagctatttccttccacagggggccttgcagggaagggtccaggacttgacatcttaagatgcgtcttgtccccttgggccagtcatttcccctctctgagcctcggtgtcttcaacctgtgaaatgggatcataatcactgccttacctccctcacggttgttgtgaggactgagtgtgtggaagtttttcataaactttggatgctagtgtacttagggggtgtgccaggtgtctttcatggggccttccagacccactccccacccttctccccttcctttgcccggggacgccgaactctctcaatggtatcaacaggctccttcgccctctggctcctggtcatgttccattattggggagccccagcagaagaatggagaggaggaggaggctgagtttggggtattgaatcccccggctcccaccctgcagcatcaaggttgctatggactctcctgccgggcaactcttgcgtaatcatgactatctctaggattctggcaccacttccttccctggccccttaagcctagctgtgtatcggcacccccaccccactagagtactccctctcacttgcggtttccttatactccacccctttctcaacggtccttttttaaagcacatctcagattaataaaaaaaaaaaatatctcgagggggggcccggtaccca

SEQ ID NO: 426 - DNA, 2202 bp, Homo sapiens
tttttttttgctaggagcagttctctttattaatggctagaaagtcaggatcacccaaggaagtcactgaggggccacagcattgaagggtatggggtttggagagataggagcaggacccaccactcacgtccagaacccagggggcacacctggtccaagaggtggaggcattggtcactggagtcacgagggtcaggacaggcactgagaggctgagggagtgtcataagcactctcttctacactacacccagcctagttgggctctaccaagccccactttgcaccccctgtgtccactcctttggaagccccaggactcactgagaggctgagggagtgtcggtccggagggaggcagtcacgggctagggctgggagtcgtagccagtgtgcagggcctgggagccccagggctgatgccctggctggcgtagtactccaccacctgccgtggcacctcagccaggacacacttggcgagtgcagagggggcagcctagggtggggacagtgatgtggttaggggtgagaggaagagtaggggaggcagggtcatctgagggagaagtggggcttcagggtggccagctgggctcccgcgtccttagcaggacatcaaatggtggaagacgaaggtcagatttggggggatgagaagctgaggagtccttcagccggaaggggcccgggggactcacatccttgaagtctcggaagggcacgaactggacaatgtctcgggctgcaggcacccctcgggggcagcgcaaggggccgtcgtcgccatccagcagccgcatgtcagagaagtcagcattgcccacgcctacgatgatgatggacatgggcaggcgggaggcacgcacgatagcagtgcgagtctcagccatgtcgctcaccacaccgtcagtgagcaccagcagcaccgagtacttcgtggcttggccggtgctctgctcccgctgggccggctcagccacacggttgatgatgggggccacattggtggggccgtagagctggatctggggcaggcaacgacggtaggaggcgatgacccctgagatctctgataaagacaggcctgggatgggtggaagggacaggaagctgggccctggggagtggagtctgtgctcctgtgtggagtgtgtctgcggggaggcggggcaggtgaaaatctccccttttaccttcacattcaggattttccgggtcaaagttgatagcaaagtcatgggacacctgtgagggcaaggcgggagcagtgagggcctgccttttctgcctgactgacacgccccccatctccttctttccctcgcatctagcctacctcgaagttgggggggattcgagccccaaagccaaaagctgggaaccgcttatcactggggagaagaaaaagctgtggaatccgttgggcaaggcctccctgcctgttccctcccgccccactctctcctacctgtcatagtcctggcagatgcctcccactgcacgcagggcctgcaggtagtggttgggctgtcggggactgaggcagtgcagggactggctgctcctcgggtccccattggaggcagtgaagtcaatggccacctgggtgggggtgggaagaaggtcatgctgcaaccatgagagccaccagattgcctaggccagagctgggatctgtagggaggactaagatgagtggtggggaggctacaggtagccacataatgatgtgggggtgcataagctgacaatgcgaaggctcatgagcagcccaagttggggcagtggagattctgggctccttcctttcactatggactcagcccctccctcttgcctgtgtgccctccctctgagtctttaccgtgaagctgatctggcagccacccatgatgtaatccaggaaggtgtgcaccttctccacctggaggtagggagaggggtaaggcgaggggatggggtggtcctttgaggagggagcttgggtagggcttctgtggggaacatgggggagccagagttttttgggttgcagttgggggtggtttccagttcccagaagcagagaaactggtctttgaaacaagggaagggttgaacctgagagtgtggtaggggcaggggctggggcaaggcttgaagcaggaagtgaaatttaccgtgcactgggccagcactaccgtccctgagctccca

SEQ ID NO: 427 - DNA, 10348 bp, Homo sapiens
ttgctgtgtgaggcagaacctgcgggggcaggggcgggctggttccctggccagccattggcagagtccgcaggctagggctgtcaatcatgctggccggcgtggccccgcctccgccggcgcggccccgcctccgccggcgcacgtctgggacgcaaggcgccgtgggggctgccgggacgggtccaagatggacggccgctcaggttctgcttttacctgcggcccagagccccattcattgccccggtgctgagcggcgccgcgagtcggcccgaggcctccggggactgccgtgccgggcgggagaccgccatggcgaccctggaaaagctgatgaaggccttcgagtccctcaagtccttccagcagcagcagcagcagcagcagcagcagcagcagcagcagcagcagcagcagcagcagcagcaacagccgccaccgccgccgccgccgccgccgcctcctcagcttcctcagccgccgccgcaggcacagccgctgctgcctcagccgcagccgcccccgccgccgcccccgccgccacccggcccggctgtggctgaggagccgctgcaccgaccaaagaaagaactttcagctaccaagaaagaccgtgtgaatcattgtctgacaatatgtgaaaacatagtggcacagtctgtcagaaattctccagaatttcagaaacttctgggcatcgctatggaactttttctgctgtgcagtgatgacgcagagtcagatgtcaggatggtggctgacgaatgcctcaacaaagttatcaaagctttgatggattctaatcttccaaggttacagctcgagctctataaggaaattaaaaagaatggtgcccctcggagtttgcgtgctgccctgtggaggtttgctgagctggctcacctggttcggcctcagaaatgcaggccttacctggtgaaccttctgccgtgcctgactcgaacaagcaagagacccgaagaatcagtccaggagaccttggctgcagctgttcccaaaattatggcttcttttggcaattttgcaaatgacaatgaaattaaggttttgttaaaggccttcatagcgaacctgaagtcaagctcccccaccattcggcggacagcggctggatcagcagtgagcatctgccagcactcaagaaggacacaatatttctatagttggctactaaatgtgctcttaggcttactcgttcctgtcgaggatgaacactccactctgctgattcttggcgtgctgctcaccctgaggtatttggtgcccttgctgcagcagcaggtcaaggacacaagcctgaaaggcagcttcggagtgacaaggaaagaaatggaagtctctccttctgcagagcagcttgtccaggtttatgaactgacgttacatcatacacagcaccaagaccacaatgttgtgaccggagccctggagctgttgcagcagctcttcagaacgcctccacccgagcttctgcaaaccctgaccgcagtcgggggcattgggcagctcaccgctgctaaggaggagtctggtggccgaagccgtagtgggagtattgtggaacttatagctggagggggttcctcatgcagccctgtcctttcaagaaaacaaaaaggcaaagtgctcttaggagaagaagaagccttggaggatgactctgaatcgagatcggatgtcagcagctctgccttaacagcctcagtgaaggatgagatcagtggagagctggctgcttcttcaggggtttccactccagggtcagcaggtcatgacatcatcacagaacagccacggtcacagcacacactgcaggcggactcagtggatctggccagctgtgacttgacaagctctgccactgatggggatgaggaggatatcttgagccacagctccagccaggtcagcgccgtcccatctgaccctgccatggacctgaatgatgggacccaggcctcgtcgcccatcagcgacagctcccagaccaccaccgaagggcctgattcagctgttaccccttcagacagttctgaaattgtgttagacggtaccgacaaccagtatttgggcctgcagattggacagccccaggatgaagatgaggaagccacaggtattcttcctgatgaagcctcggaggccttcaggaactcttccatggcccttcaacaggcacatttattgaaaaacatgagtcactgcaggcagccttctgacagcagtgttgataaatttgtgttgagagatgaagctactgaaccgggtgatcaagaaaacaagccttgccgcatcaaaggtgacattggacagtccactgatgatgactctgcacctcttgtccattgtgtccgccttttatctgcttcgtttttgctaacagggggaaaaaatgtgctggttccggacagggatgtgagggtcagcgtgaaggccctggccctcagctgtgtgggagcagctgtggccctccacccggaatctttcttcagcaaactctataaagttcctcttgacaccacggaataccctgaggaacagtatgtctcagacatcttgaactacatcgatcatggagacccacaggttcgaggagccactgccattctctgtgggaccctcatctgctccatcctcagcaggtcccgcttccacgtgggagattggatgggcaccattagaaccctcacaggaaatacattttctttggcggattgcattcctttgctgcggaaaacactgaaggatgagtcttctgttacttgcaagttagcttgtacagctgtgaggaactgtgtcatgagtctctgcagcagcagctacagtgagttaggactgcagctgatcatcgatgtgctgactctgaggaacagttcctattggctggtgaggacagagcttctggaaacccttgcagagattgacttcaggctggtgagctttttggaggcaaaagcagaaaacttacacagaggggctcatcattatacagggcttttaaaactgcaagaacgagtgctcaataatgttgtcatccatttgcttggagatgaagaccccagggtgcgacatgttgccgcagcatcactaattaggcttgtcccaaagctgttttataaatgtgaccaaggacaagctgatccagtagtggccgtggcaagagatcaaagcagtgtttacctgaaacttctcatgcatgagacgcagcctccatctcatttctccgtcagcacaataaccagaatatatagaggctataacctactaccaagcataacagacgtcactatggaaaataacctttcaagagttattgcagcagtttctcatgaactaatcacatcaaccaccagagcactcacatttggatgctgtgaagctttgtgtcttctttccactgccttcccagtttgcatttggagtttaggttggcactgtggagtgcctccactgagtgcctcagatgagtctaggaagagctgtaccgttgggatggccacaatgattctgaccctgctctcgtcagcttggttcccattggatctctcagcccatcaagatgctttgattttggccggaaacttgcttgcagccagtgctcccaaatctctgagaagttcatgggcctctgaagaagaagccaacccagcagccaccaagcaagaggaggtctggccagccctgggggaccgggccctggtgcccatggtggagcagctcttctctcacctgctgaaggtgattaacatttgtgcccacgtcctggatgacgtggctcctggacccgcaataaaggcagccttgccttctctaacaaaccccccttctctaagtcccatccgacgaaaggggaaggagaaagaaccaggagaacaagcatctgtaccgttgagtcccaagaaaggcagtgaggccagtgcagcttctagacaatctgatacctcaggtcctgttacaacaagtaaatcctcatcactggggagtttctatcatcttccttcatacctcaaactgcatgatgtcctgaaagctacacacgctaactacaaggtcacgctggatcttcagaacagcacggaaaagtttggagggtttctccgctcagccttggatgttctttctcagatactagagctggccacactgcaggacattgggaagtgtgttgaagagatcctaggatacctgaaatcctgctttagtcgagaaccaatgatggcaactgtttgtgttcaacaattgttgaagactctctttggcacaaacttggcctcccagtttgatggcttatcttccaaccccagcaagtcacaaggccgagcacagcgccttggctcctccagtgtgaggccaggcttgtaccactactgcttcatggccccgtacacccacttcacccaggccctcgctgacgccagcctgaggaacatggtgcaggcggagcaggagaacgacacctcgggatggtttgatgtcctccagaaagtgtctacccagttgaagacaaacctcacgagtgtcacaaagaaccgtgcagataagaatgctattcataatcacattcgtttgtttgaacctcttgttataaaagctttaaaacagtacacgactacaacatgtgtgcagttacagaagcaggttttagatttgctggcgcagctggttcagttacgggttaattactgtcttctggattcagatcaggtgtttattggctttgtattgaaacagtttgaatacattgaagtgggccagttcagggaatcagaggcaatcattccaaacatctttttcttcttggtattactatcttatgaacgctatcattcaaaacagatcattggaattcctaaaatcattcagctctgtgatggcatcatggccagtggaaggaaggctgtgacacatgccataccggctctgcagcccatagtccacgacctctttgtattaagaggaacaaataaagctgatgcaggaaaagagcttgaaacccaaaaagaggtggtggtgtcaatgttactgagactcatccagtaccatcaggtgttggagatgttcattcttgtcctgcagcagtgccacaaggagaatgaagacaagtggaagcgactgtctcgacagatagctgacatcatcctcccaatgttagccaaacagcagatgcacattgactctcatgaagcccttggagtgttaaatacattatttgagattttggccccttcctccctccgtccggtagacatgcttttacggagtatgttcgtcactccaaacacaatggcgtccgtgagcactgttcaactgtggatatcgggaattctggccattttgagggttctgatttcccagtcaactgaagatattgttctttctcgtattcaggagctctccttctctccgtatttaatctcctgtacagtaattaataggttaagagatggggacagtacttcaacgctagaagaacacagtgaagggaaacaaataaagaatttgccagaagaaacattttcaaggtttctattacaactggttggtattcttttagaagacattgttacaaaacagctgaaggtggaaatgagtgagcagcaacatactttctattgccaggaactaggcacactgctaatgtgtctgatccacatcttcaagtctggaatgttccggagaatcacagcagctgccactaggctgttccgcagtgatggctgtggcggcagtttctacaccctggacagcttgaacttgcgggctcgttccatgatcaccacccacccggccctggtgctgctctggtgtcagatactgctgcttgtcaaccacaccgactaccgctggtgggcagaagtgcagcagaccccgaaaagacacagtctgtccagcacaaagttacttagtccccagatgtctggagaagaggaggattctgacttggcagccaaacttggaatgtgcaatagagaaatagtacgaagaggggctctcattctcttctgtgattatgtctgtcagaacctccatgactccgagcacttaacgtggctcattgtaaatcacattcaagatctgatcagcctttcccacgagcctccagtacaggacttcatcagtgccgttcatcggaactctgctgccagcggcctgttcatccaggcaattcagtctcgttgtgaaaacctttcaactccaaccatgctgaagaaaactcttcagtgcttggaggggatccatctcagccagtcgggagctgtgctcacgctgtatgtggacaggcttctgtgcacccctttccgtgtgctggctcgcatggtcgacatccttgcttgtcgccgggtagaaatgcttctggctgcaaatttacagagcagcatggcccagttgccaatggaagaactcaacagaatccaggaataccttcagagcagcgggctcgctcagagacaccaaaggctctattccctgctggacaggtttcgtctctccaccatgcaagactcacttagtccctctcctccagtctcttcccacccgctggacggggatgggcacgtgtcactggaaacagtgagtccggacaaagactggtacgttcatcttgtcaaatcccagtgttggaccaggtcagattctgcactgctggaaggtgcagagctggtgaatcggattcctgctgaagatatgaatgccttcatgatgaactcggagttcaacctaagcctgctagctccatgcttaagcctagggatgagtgaaatttctggtggccagaagagtgccctttttgaagcagcccgtgaggtgactctggcccgtgtgagcggcaccgtgcagcagctccctgctgtccatcatgtcttccagcccgagctgcctgcagagccggcggcctactggagcaagttgaatgatctgtttggggatgctgcactgtatcagtccctgcccactctggcccgggccctggcacagtacctggtggtggtctccaaactgcccagtcatttgcaccttcctcctgagaaagagaaggacattgtgaaattcgtggtggcaacccttgaggccctgtcctggcatttgatccatgagcagatcccgctgagtctggatctccaggcagggctggactgctgctgcctggccctgcagctgcctggcctctggagcgtggtctcctccacagagtttgtgacccacgcctgctccctcatctactgtgtgcacttcatcctggaggccgttgcagtgcagcctggagagcagcttcttagtccagaaagaaggacaaataccccaaaagccatcagcgaggaggaggaggaagtagatccaaacacacagaatcctaagtatatcactgcagcctgtgagatggtggcagaaatggtggagtctctgcagtcggtgttggccttgggtcataaaaggaatagcggcgtgccggcgtttctcacgccattgctcaggaacatcatcatcagcctggcccgcctgccccttgtcaacagctacacacgtgtgcccccactggtgtggaagcttggatggtcacccaaaccgggaggggattttggcacagcattccctgagatccccgtggagttcctccaggaaaaggaagtctttaaggagttcatctaccgcatcaacacactaggctggaccagtcgtactcagtttgaagaaacttgggccaccctccttggtgtcctggtgacgcagcccctcgtgatggagcaggaggagagcccaccagaagaagacacagagaggacccagatcaacgtcctggccgtgcaggccatcacctcactggtgctcagtgcaatgactgtgcctgtggccggcaacccagctgtaagctgcttggagcagcagccccggaacaagcctctgaaagctctcgacaccaggtttgggaggaagctgagcattatcagagggattgtggagcaagagattcaagcaatggtttcaaagagagagaatattgccacccatcatttatatcaggcatgggatcctgtcccttctctgtctccggctactacaggtgccctcatcagccacgagaagctgctgctacagatcaaccccgagcgggagctggggagcatgagctacaaactcggccaggtgtccatacactccgtgtggctggggaacagcatcacacccctgagggaggaggaatgggacgaggaagaggaggaggaggccgacgcccctgcaccttcgtcaccacccacgtctccagtcaactccaggaaacaccgggctggagttgacatccactcctgttcgcagtttttgcttgagttgtacagccgctggatcctgccgtccagctcagccaggaggaccccggccatcctgatcagtgaggtggtcagatcccttctagtggtctcagacttgttcaccgagcgcaaccagtttgagctaatgtatgtgacgctgacagaactgcgaagggtgcacccttcagaagacgagatcctcgctcagtacctggtgcctgccacctgcaaggcagctgccgtccttgggatggacaaggccgtggcggagcctgtcagccgcctgctggagagcacgctcaggagcagccacctgcccagcagggttggagccctgcacggcatcctctatgtgctggagtgcgacctgctggacgacactgccaagcagctcatcccggtcatcagcgactatctcctctccaacctgaaagggatcgcccactgcgtgaacattcacagccagcagcacgtactggtcatgtgtgccactgcgttttacctcattgagaactatcctctggacgtagggccggaattttcagcatcaataatacagatgtgtggggtgatgctgtctggaagtgaggagtccaccccctccatcatttaccactgtgccctcagaggcctggagcgcctcctgctctctgagcagctctcccgcctggatgcagaatcgctggtcaagctgagtgtggacagagtgaacgtgcacagcccgcaccgggccatggcggctctgggcctgatgctcacctgcatgtacacaggaaaggagaaagtcagtccgggtagaacttcagaccctaatcctgcagcccccgacagcgagtcagtgattgttgctatggagcgggtatctgttctttttgataggatcaggaaaggctttccttgtgaagccagagtggtggccaggatcctgccccagtttctagacgacttcttcccaccccaggacatcatgaacaaagtcatcggagagtttctgtccaaccagcagccatacccccagttcatggccaccgtggtgtataaggtgtttcagactctgcacagcaccgggcagtcgtccatggtccgggactgggtcatgctgtccctctccaacttcacgcagagggccccggtcgccatggccacgtggagcctctcctgcttctttgtcagcgcgtccaccagcccgtgggtcgcggcgatcctcccacatgtcatcagcaggatgggcaagctggagcaggtggacgtgaaccttttctgcctggtcgccacagacttctacagacaccagatagaggaggagctcgaccgcagggccttccagtctgtgcttgaggtggttgcagccccaggaagcccatatcaccggctgctgacttgtttacgaaatgtccacaaggtcaccacctgctgagcgccatggtgggagagactgtgaggcggcagctggggccggagcctttggaagtctgtgcccttgtgccctgcctccaccgagccagcttggtccctatgggcttccgcacatgccgcgggcggccaggcaacgtgcgtgtctctgccatgtggcagaagtgctctttgtggcagtggccaggcagggagtgtctgcagtcctggtggggctgagcctgaggccttccagaaagcaggagcagctgtgctgcaccccatgtgggtgaccaggtcctttctcctgatagtcacctgctggttgttgccaggttgcagctgctcttgcatctgggccagaagtcctccctcctgcaggctggctgttggcccctctgctgtcctgcagtagaaggtgccgtgagcaggctttgggaacactggcctgggtctccctggtggggtgtgcatgccacgccccgtgtctggatgcacagatgccatggcctgtgctgggccagtggctgggggtgctagacacccggcaccattctcccttctctcttttcttctcaggatttaaaatttaattatatcagtaaagagattaattttaacgt

SEQ ID NO: 428 - DNA, 430 bp, Homo sapiens
ggaattcgaggcctagcccctccgcagccctggtggaggtcctcctgcgcagcgggagcaccttcccgcacacggtgagcgggggctgggccgcctggggcccgtggtcgtcctgctcccgggactgcgagctgggcttccgcgtccgcaagagaacgtgcactaacccggagccccgcaacgggggcctgccctgcgtgggcgatgctgccgagtaccaggactgcaacccccaggcttgcccagttcggggtgcttggtcctgctggacctcatggtctccatgctcagcttcctgtggtgggggtcactatcaacgcacccgttcctgcaccagccccgcaccctccccaggtgaggacatctgtctcgggctgcacacggaggaggcactatgtgccacacaggcctgcccagaaggctggtcgcg

SEQ ID NO: 429 - DNA, 625 bp, Homo sapiens
  misc_feature (1)...(625): n = a,t,c or g
ctttctgaatctgtttcacccgaagccatctcccctcggcactcctttctcgccctgactgctccttgcttcgtcccgatctttcctcctccctttcacctgcgtcctgcgttcctaccccgcgctctccagctcccggcctcccttcctgagctgtgctggccagtttggacggtccccccttgtcagctagactttcgggagggatggtggagttttaaggtggaggcctgaattttgatctatgttctacctacatccagctggctgaaagtacttgaggatcacatgaccctggacatggatgctgttctgtcagattttgtccgttccacaggagcagagccagggctagcgcgagatctcctagaaggaaagaattgggatgtgaatgccgccctcagtgattttgaacagctacgtcaagtccatgctggaaacctacccccatcctttagtgaggggagtggtggctccaggacccctgaaaaagggttttctgacagagagcctactcgccctccccgacccatcctccagcggcaggatgacatcgttcaagataacgcctgtctagggcatcntccacgccagcttcagcattgtttccttgcccggtcccatg

SEQ ID NO: 430 - DNA, 3398 bp, Homo sapiens
gttttgtttgtgtgttttttttgcataataccaaagaatttattgtaaatgtagtggcaaatacattcagaataatcatcattaaaaaggaactagaaaattatacatgtttaaagtatgtgcttttttcccaccacctttaagttaatggctagtaccaacattttaagtaatgaaatacttaatgtgatgacccattttcagataatttcatgactgtatcttcatcttaatttttaaagcagttgaccatgaatttcagtttcagttattctctgtttttatcaattccgtaatgatctgcagaatcttgtcattttcaagggacatctttggattttcaagcttttttcttaaaactgaatcaatgagaactctcagctgcttgaaaatgacagctatctttacaggggcctgaaaatagatccagccatcaatagaaagaagacgttctcggtgctgaacttctatatcaccaccaaaaagtaaaactggaaaaggggttattagggtagtttctctcaaatacactctggcataccttatcttctcctggtataagagccatccatgagtttgcaaatctcgatttactgaggatgggtgtacttgtgctttgccttgggccgtctccacaatgcaagccaatttttctgtaacatccactgactttgtatagattatcttccccacattgtcatacagtccagccaccagtacagctttaagaagggcaatttcttggaatgagagggtctgtgaggctctgtttccttcccagctggtagaagttgtggaagatgaaaatcctgctgccttaaccaactttattaactcctgctttacatcctctagggttaacagtgatgttctattaagaaagttcctccggcagtatgtgatttcagaacgataacctccttcttgtcgtgctttcttccatcctagatatgcattgtagatcgtcaggtggtctgaatccgccatggccaaagctgattttgcaagatctgcttcatcttttcgaccaattggtgtggtaaaaggagacttctctgtcataactgcagctagtgttgccactgggtcaaggcagccaaatatggcaccaaaaataagcatcttgccaatcttgacattcacaggtaaagctgcaaggtgttggcccaacggagtcagtttaggctcatttaattcacaagctccaatttttcggagcaaattcattgcattgctgatcacttggagctgaggaggatctaaggctttggagaggaaatcttcaggagaaccaagattacatttcataatatgaaggcataattcctccaaaggtacacgtaagatttcaggaacagaataatccataaagccttcaaatctttctcttgtgtacattcggaaacagaagccatctctgacccgcccagctcttccctggcgctgcaaagcactggctttactgacaaacgtctccaccaaagaactcatctgactgctttcatggtacttattttcttttgttcttccagtatcaattacaaatacaacatcaggaatagtgatacccgtctctgcaatattggttgctaaaacaatcttcctgactcctggagggggaagtgtgaatgctgcagcttgatcttgggttgaaagaatagaatgcagagctatcactttatatcgttcagaataaaatcttctatcatttgatagaagatcatacaactgctgaatatgagcaagtcctggtaaaaagatcaatactgctccttcaatatttctgaattggggacttttatctaagtatgcaagaagttccaaaatgagatccaggttgattttatgaggattcatgtatagaatagcatgctgagtgcggctgctgtacttttggtaaaatggatttaaatcagcatgtgctccagtctgaactgggatgtattcctgatatttttttattccccctgctttgcttgtaacattaatggttacttcttcttcctcttccagaaatttctgacaatattctgagtctttttccagtacaaagcctgtttcttctattatatcttcaagatgaaaaacctcaacaggataacttcttcctgaaattctgagaatggggcagtgtgtgaaatatgtagaaaatttttcgctgtccacagtggcactcattagaatcaagtgtagatcagaacgtttctgtaaaatttccttcaagataattagtaggaagtctgactggacacttcctttcatgaaacctcatctacaataaacatggagacacattacttagaagaccatcttcttgaagtttccttagcaaaacccctgttgtacaatagagtaacctggtagattcacaagctcgagattccatccggatctgatatccacacaaggaattccttcctccaggtccattttcacagcccaattcatcacatactctgttggctaaactaactgctgagattcttcggggttgggtacagacaatgttacatttacttgcttcccactcatttagaagcaaatcttccaatagaaaatgtggtacctgagtacttttaccactccctggtttcacctgccacaaccactacccgatgccttttaagagtttcaacaattgagtcccgatgtttaaatacaggtagctagttagtctttcctttagaagtttctgaatacttaggtgtgctttgcaactttctaaagaggtttctaacaggttccaaatcttccacatttgctgattccaaggacagtgcagaaaaatcctcatccgaaactaaattttcccaagattcctcgggatcttcagagttttctctcttattttcagaatgctgttgttgctgctgttgctgctgtttcagtttattcagaagtttggcaataaaaagatcacgtggtttattggtttccattttatttaattcttcccttttcttttctgcatcactccactccagccaaacatctcggtaagtgggaggaagtaactgatgaactgactgccctttaactaaacggtaaagggctaaagtagctcccaggtgctgagcttgcatgccatcttctgttaagattgtagggcatactaccaggacatcatcttcagacttgattaccctaaccctacatttccagtatctacctactggaactttttcaaaggaaggatttggactcttgggaagattcttcctgacccaatcaatcagaaattgtttgggagattttccagtccaacttcgagcaggatagtcaaaatttcttacatcatgaggttcgttgtttctaactttctcttccttaggcggcacctgccgaattctttaaataaagtataaactcattgcactttctccttttagaggctcaac

SEQ ID NO: 431 - DNA, 571 bp, Homo sapiens
tttcgtccggcacctggccatgtgcaaccctgaggaggcagctctgctgcggctggaggaggtcttctcagccaccctcgcccatgtcaacagccttgtcctccagcccctgctcccagccgccccagatccctcggatccctggggcagagagtgcctgcggctcttgcaacagctgcacaagagctcccagcaactctgggaggtgacggaggaaagcctgcactcactgcaggagaggctgcgttacccggactccaccggtctggagtccctgctgctgctgcgaggtgctgaccgtgtactgcaggcccacatagagtacattgagtcctacacaagctgcatggtggtgcaggccttccagaaggcagcaaagaggagaagcgagtactggcggggccagcggaaggcgctgcggcagctgctttcaggtgtgagctcatagggctcggtgggcgcatcgctgatccctgctttacaacaaccaatcagcacataacttgtctcacttcatgcgtatcccgctgagccgtttggtcacccttgtggggtttactctcgcctcttg

SEQ ID NO: 432 - DNA, 475 bp, Homo sapiens
  misc_feature (1)...(475): n = a,t,c or g
tgaggttnaggggnnnnnncctcgagatccactattgagtgcgcgtgaataccccaggtcacctggatattcttgatctagaagttttgtgattctgcattctacatttagatctttgatccattttgagttttaatttttgagaagggtgtaaagtctgaacttagattctttttttttgtacatggacatccaatttttaagcaccatttgttgaagagactgcattccttcatttaattgcctttgcttctttgtcaaagctcagctaactatatttgcataggtcaatttccgggctctctcttctgaaccattgatcaatctgcatattctttcactaatgccatgctatctcaattatttagctggagagtaagtcttaaagttgggtagtgtcagtcttctgagttgttattcttcagcattttgactatgagtcttttgcgtcttcatataagctttagaataaatg

SEQ ID NO: 433 - DNA, 2243 bp, Homo sapiens
gtacgtgcggtggaattcgggggaagaaaggaagtcagagggcttagacagtgaggggggacagaacatctccatgtgcactctcatctcttggagtcagcaacaggtatctacggggagggccgtgcatcctctactaccctgcaggatctggaggtaagaggccctgggccgaggtgcagtgaccctgcaggccagccctccaacctcctcccacagcaggggcttgttgcccctctgccagctgaggcagcccacacacccccaccagccctaatgattattctctctacccctccccacaatcttcctccaactccttctctctgcatgcacctcagagccagtaccaagaactagcagtagccctggattcaagctccgcaataatcagtcaactcactgaaaacatcaattcactggttcgcacatctaaggaggagaagaagcatgagatacatctggtacagaagcttgggaggagcttgttcaaactcaaaaaccagacggctgaacccctggccccagagcccccagcagggccatctaaggtagagcagctacaagatgagaccaaccacctaaggaaggagctagagagtgtgggaagacagctccaggctgaggtggaaaacaatcagatgttgagtctcctgaacaggagacaggaggagaggctacgtgaacaggaggagaggctacgtgaacaggaggagaggcaacgtgaacaggaggataggctacatgaacaggaggagaggctacatgaacaggaggagaggctacgtgaacaggaggagaggctgtgtgaacaggaggagaggctacgtgaacatgaggagaggctgtgtgaacaggaggagaggctacgtgaacaggaggagaggctgtgtgaacaggaggagaggctacgtgaacaggaggagaggctacgtgaacaggaggagaggctacgtgaacatgaggagaggctgtgtgaacaggaggagaggctacgtgaacaggaggagaggctgtgtgaacaggaggagaggctacgtgaacaggaggagaggctgtgtgaacaggaggagaggctacgtgaacaggaggagaggctgtgtgaacaggagaagctgccagggcaggagaggctgctggaagaggtggagaagctgttagaacaggagaggcggcaggaggagcaggagaggctgctggagagggagaggctgctggaagaggtggagaagctgttagaacaggagaggcagcaggaggagcaggagaggctgctggagagggagaggctgctggaagaggtggagaagctgttagaacaggagaggcggcaggaggagcaggagaggctgctggagagggagaggctgctggacgaggtggaggagctcctggacgaggtggaggagctcctggagcaggagaggcttcggcaacaggatgagaggctgtggcagcagtagactctgcaggagctggagaggctgcgggagctggagaggctgcgggagctggagaggatgctggagctggggtgggaagccctgtacgagcagcgggccgagccacgcagcggcttcgaggagctgaacaacgagaacaagagcacactgcagttggagcagcaagtaaaggagctgaagaagtcaggtggagctgaagagccaagaggctccgagtctgcagcagcagccagaccagtagctggagccccagtcccacaaggagcttggatgtgcggacaagcagggtggactccccaggagcacccaggcttgagtggagaagctgttggtacaggagaggcggcaggaggagcaggagaggctgcatgccattcttttcgggctgcggagaacagggagctaaacatcaccatcatctaagagcgggtcaaggaattgagaaaaaaaaacaaaacatttaaggggttaatatcctacacaattcatttacttcatttgaatgttagagccacttatgtttatttgtgtttctaatttatagtttaaatttatttgtgtttctaatttatagtttaaatttatttgtgtttctaatttatagtttaaatttatttgtgtttctaatttataatttaaatttatttgtgtttctaatttataatttaaatttatttgtaaaaagttaaatgagagtgggtctttctctcatgttcactctggcatcttttagcatttttttaatttgataattataggacgttagcatgcatatcgagt

SEQ ID NO: 434 - DNA, 728 bp, Homo sapiens
ggcacgagggaggctgaggctggaggatcgcttgagtccaggagttctgggctgtagtgcgctatgccgatcgggtgtccgcactaagttcggcatcaatatggtgacctcccgggagcgggggaccaccaggttgcctaaggaggggtgaaccggcccaggtcggaaacggagcaggtcaaaactcccgtgctgatcagtagctgggactacaggcacccaccaccacgcccagctagtttttttgtatttttagtatagacggggtttcaccgcgttagccagaatggtcttgatctcctggccttgtgatctgcccacctcagcctcccaaagtgctgggattacaggcgtgagacaccacgcccagcctattatattttgagcaagagtctcactctgtcacccaggctggatggagtgcagtggcacaatcttggctcactgcaacctttgtctctggaggatcgcttgagtccaggagttctgggctgtagtgcgctatgccgatcgggtgtccgcactaagttcggcatcaatatggtgacctcccgggagcgggggaccaccaggttgcctaaggaggggtgaaccggcccaggtcggaaacggagcaggtcaaaactcccgtgctgatcagtagtgggatcgcgcctgtgaatagccactgcactccagcctgggcaacatagcgagaccccatctctactaaaaatacaaaaaaaaaa

SEQ ID NO: 435 - DNA, 3163 bp, Homo sapiens
atgagtttggtgagggcagccctggaagcattagatgaactggatctgtttggtgtgaaaggtgggcctcaatcagttatccatgtcctggctgatgaagtacagcactgccagtctatcctaaattcactactgccccgtgcttcaacatcaaaagaggttgatgctagtctactctcagtggtttccttccctgcctttgcagtagaggatagccagttggtggagctcacaaaacaggaaatcatcaccaagcttcagggtcgttatggttgctgtcgctttctacgagatggatataaaactcctaaagaggatcccaatcgtctgtactatgaaacccagctgagctgaagctatttgaaaacattgagtgtgaatggccattgttctggacatactttattcttgatggggtcttcagtggcaatgcagaacaggttcaagaatataaagaggctcttgaagcagtcctcatcaagggcaaaaatggagtcccacttctgccagagctgtacagtgttcctcctgacagggtcgatgaagaatatcagaatcctcacactgtggaccgagtccccatggggaaattgcctcacatgtggggtcagtctctatacattttaggaagcttgatggcagagggatttttagcccctggagaaattgatcccctgaatcgcaggttttctactgtaccgaagcccgatgttgtggttcaagtttacccttctctacctcatggttgttcatctaaatctcccagtcaccaatgcaccataatttctattagaaccactcgaaaaatcacagccccagtctccattctagctgaaacagaagaaatcaagaccattttgaaggacaagggaatttacgtggagaccattgctgaggtataccccatcagagtacaaccagctcgtattctcagccacatttattccagcctagaaatatttttaccatttctcaattctgtatcaggatgcaacaatagaatgaaactcagtggacgaccctacagacacatgggagtgcttggaacttcaaaactctatgacattcggaaaactatctttactttcactccacagtttatagaccagcaacagttctacctggctctggacaacaagatgatagtggaaatgcttagaacagacctctcctacctctgtagccgctggcggatgacaggccagcccaccatcaccttccccatctcacacagcatgcttgatgaagatggaacaagcttgaattcaagtatcctggcagcactccgaaaaatgcaagatgggtattttggtggggcaagggttcaaacaggtaaattgtcagagtttttgacaacatcttgttgcacacacttgagcttcatggaccctggacctgagggtaagctgtacagtgaagattatgatgacaactatgattacctggaatctggcaactggatgaatgattatgattcaaccagtcatgctcgctgtggtgatgaagttgctcgttatttagatcaccttttggcgcacactgctccccatcctaaactagcccctacctcacagaagggagggctagatcggttccaagctgctgtgcaaacaacctgcgacttaatgtccttggtgaccaaggccaaggaactgcatgtacagaatgttcacatgtatcttcctacgaagttatttcaggcttcccggccttcattcaacttacttgattcacctcatccccgacaggagaaccaggttccctctgttcgtgtagaaatacatcttcctagagaccagtctggggaggtggactttaaagcactggttttacagttgaaggagacctcaagcttacaggaacaagctgatatcctctatatgctgtatactatgaaaggacctgactggaacactgaattgtataatgaacggagtgctacagtgagagagcttcttaccgagctgtatggcaaagtgggagaaattcgtcactggggcctgatccgatacatttctgggatcttaaggaagaaagtggaagcacttgatgaggcctgcacagaccttctctcccaccagaaacatttgacagtaggacttcctccagaacctcgagaaaagactatctctgcacctctgccctatgaggcgctcactcagctgatagatgaagccagtgaaggggatatgagcatttcaatccttacacaggaaataatggtatatctagccatgtatatgcgaacccagcctggcctctttgctgaaatgtttcgacttcgaattggtctgatcatacaagttatggcaacagaactggcccactcccttcgatgctcagctgaggaagccacagagggcctgatgaatctcagtccttcggccatgaagaatctcctgcatcacattctcagcggcaaggagtttggagtggaacgaagcgttcgtcccactgattcaaatgtcagtcctgctatttctatccacgagattggtgctgttggagcaaccaaaacagaacgaactgggatcatgcagttaaaaagtgagataaagcagtcacctggaacctctatgactccaagtagtgggtcctttcctagtgcatatgatcagcagtcatctaaagatagtcgtcaaggtcaatggcaacgccgaagaaggctggatggggcactgaatagagttccagttggattttatcagaaagtatggaaagttttgcagaagtgtcacggactttctgttgaagggtttgtccttccttcctctaccactagagagatgactccaggtgagattaaattctctgttcatgtggagtctgtcctgaatcgtgtacctcagccagagtaccgtcagctgctggttgaagccatcctttgtcctcaccatgctggcagatattgaaatttcatagcatcggaagcatcattgctgtggaaaaaatagtgcatattgccaatgacttgttccttcaagaacagaaaacccttggcgcagatgataccatgttggcaaaggatcccgcatctggcatctgtactcttctgtatgacagtgcacccagtggcaggtttggcaccatgacctacctctccaaggcagccgccacctacgtgcaggagttcctgccccacagcatctgtgccatgcaatga

SEQ ID NO: 436 - DNA, 398 bp, Homo sapiens
  misc_feature (1)...(398): n = a,t,c or g
accttgtctnggctgttgacgaggaccggatctagactgacctagaggaagaagaagaccattgccctcgcatgcccctagctcacctgggagctactggaagtaaaaaaggctgaagtcttgcaggactcactggatggacgctattcaactccttccagctgtcttgaacagcctgactcctgccggccctatggaagatccttttatgcattggaggaaaaacatgttatcttttctcttgacgtgggagaaacagacaacaaggggaaggggaagactataaggggaatataaacttttaaggggagaaaagggggaacataccaacgggagcacgatgctaacccccttgccccangctcagcaaggagctgctggatgagaaagggcctgag

SEQ ID NO: 437 - DNA, 5157 bp, Homo sapiens
ttttttttgagctaagtttttttttaatttttcacaaagagctccagaaggcaaatagtttatcacttccccactctgaaatagcacgcaagacagatgatgcaggggaatgggtgtccactctttcttgttctcagagctcctgcagcaggcctgaatgaaccgcaagcggggcccatgcagcgtgtcctctgcaaagtgcaggtgttcagtccacacacagcagcaccagcactgctgatgtcacggttgtctgtccagaagatcccacgttagatcccaagagaaatccagacagggtttagcctccagaggcagagagcgggtgccaggcccagatgcaaaggcctctatactgacgccctcacatgaccctgcaaaggtcaaatgtcaaaggtcaaatgtcttggcttaggactataagggagagataggacaaataatgaggtcaaggaacctctggattgctgaagagatgactttaaaaaaaaagtcacatctgcggctcacagtgctcaccagaaaagaacactgcttgggattctagacctgagcagggagaaacaaaccgggctaaaggagacagaactttcttcacagtagaacagtcctagtctaaaatgctagaatttaagtccaaagtcttttaagaatgagagttcttaaatctgtcagaccagctgacaggggaacaggaaaaaaaaaaattctctattaaacaaaacaccacaaaaatcaacccaaacttccttcaaccccagcaccccagccacctcccaccccattaaaaaagtcattaaagtcatgcacacatgcacacactcaaatatgaaaacaaaaaccagataccccaggaaatcttaggaatcacctaaggaattttcactcgctccccagatgctctttctgtttttctgggggtgggtgggaaaggaagtcacactgacagctaagtctaagcggcacaatttagagttgggtgagttccctttcctccagcggcctagcttgctggtcagtgtagaagggtacccacagtgagtcgggaaggaaggccgaggctggcgtctggtggaaggcaagctgcctcttgtcctaaagtggggacccgcccctcacctggggagatgaggctgccttgactacctatttggtgatgagacagcttggtgatcactttctctagactctgagccatgctgttcaaccttaatgtggcaatcagtatcacatgggcagtgaactgaagaattaggtgtctggcttaaagtgtatcttacactcgtacactaagcttgtgtatgtagcaccacccgcctgtggactctgctctgaagggccctccccatgagtttaagtgtgaagctcagggtttggggtgtgcacggccccccatatggctgcatggtgcatggacagtgatgaggaacggtgctggtatgggatgcctgggagggtttttctggagacaaaaatttacagattgagggcatgagaacataaacttgagggaaaccaccatgatctatactaggatgacagattgtggagtgggaagaaatcgtgtagtccaactctgcattttacataaaatcaatctgtgaagaaagcagaaaggactcttaggggatatcttttgagaaagggtgtccacctgggattctaagagcttccctggttgctggcctaaatcaggtgaccagccctttgtttctgaccaggtttctcacctgagatagagaatcatttgtttccaaatagttcaaatccccccatccacaggcctccccacaagagcctggctgggaaattcaggagaatcagattgccgaaccaatgtgtccacacccaccactcccccgggtgccgtggaagtctgcaacatctgtttctctgccttatcctaaagacaatatcttcgcccattttgtaaaataaataattcaaaatataatgaaaaaactctggcaaggatagttgctggcctgaaaatgtgctctgtctcttagcagtgactcacagaactcacacctgcggtgggttcccaggctaaggggtggagcggagagcgtgaagctctgtagcagcgcgcaaacccgggacagggcaggatgcacagccagtcctcaccctttatatattacatttatctttataaatagagcatcctgactcgagtggccataataaaaaagccaaacattgagttttttccctcaaatacctacacaaactgtcaaatatctactaaattatatccacatggcaaactggtcacctctatatgagaactccaactgccatgatggtcacaggccaagtctcagtcggacccaaatacccacccctactggataacagggactaagatttttttttttaaaaaatctacttttcaataagacttgtgacagaatcctttaaataaaaagccaaataaatatgattttaagtgattgattcctgtcccccaaaagttgcacacacaagttttcaatgtcatataaaacggacaaactagaccaataagtgtggtctagttggcctggctgccttgactacatatttgctgatgtgacagctcggtgatcactttctcttgaacaagactctgagccatgttgttcaaccttaatgtgggaatcagtatcacatgagtagtgaactgaagaattaggtgtctggattacagtttatcttaacagtttccagaaaacctgtctttcagccgtcttgggaaatttgggttgaatttccttatttccttccatggtcaaaaatatgttaatttcgatctatcacactagatcactttggttagatgactgtgaccactaagaacaaaacaaaacagaaaactggagcaaacagatgaatagccctttagaaaaaccagaggatgttgaactgatgtgggccacactcccagggagccttcatagctcatcccttgaaggcacagtgtccagggaggttggcggtggcagggcctctgtgttcttggcattgctgtagatgcggctttgcttccgggacttccaggcatgtgtcctatcccagtcggtggccactgtctcattgtcccagatggtggaggtctccgtgtcactcaggtaccccggctggcctgtgtagtgcgtagggtagatgagcaagggttctgcagagaaggctttcaggtccctggattcataatactccttgtactcggctacgggatgcttgttgtacatgactggcagaaactcatccactggcagcatcttcccaaaaggattggctccaaccagcttctgtgctccttccagagagatgacgtagcccagggtccagtaggaatagtcggcttcgaccaggtttgccacattgggcactgctttctctggctcctttacttgcatcctcttcctaccaatataaatcagttcccagtccagctgagcctggtcaatgttatccatcagcttcatcagcttcttcttaaactgatgctcaaaacgcacatcgtcttcaattacaagagtcttctctagctctcgatcaattacctctttccagactgagtagtggctgagaaagcagccgatttcaccccttgttagaggcctggaggaatagggatctcgatagccaggcagcatttcaatattcagtgccttcagctggcttgtgttgagtgcctttccatccacagcctcgacaatcttgacctcaatctcctgttcatacagtgtgcgcaaccaccggtccccgccctgtccctttctgcgtttgaggtttatcatgaaaatctcatcaaatcccatcttgtctggatatttagggacaactgagacatactgggagggttccattggaggacggtcaatcattgcttcaatctgcacatggatgaggttctcgatgtcttcctgcagtgtctgatggggcttcagggggatgggcaggtacccatagtgctctctgttgcagaggtacatctggatgcctgcttgcctgctggagaaggcaaagacaatgatgtcatcaaaggtccaggtgtagtcctggtgtggggggtagaaagtcagcttgtccgaggcctccttcctgaggtcaattaggaaggtggagtggaccatggggacggggaagcagcctgtcctcttccattctcgaatctgaaccgtagtctggggtcctcttatagaagcccttaggggtgattccgcaccagaaattagaatacaggccccgagactccagcatgggggccacaatagttttgttttctgcaatcagtagattgagggtctgtggattagtcaggaaattgtcaacatctatgaacagaatgtagtctgaccatttttccctcgcagttcgaagggctgcctgtcgtagtttcatcacatgggcaaaccgggaggttggccagtgctttggtccaatttcatcagggtaagactctggttcatccataggcctccactccacatagtgatagagtctctgtacatttttcaaccactccctgaatatttctgttgtattatccacattgtgatcagtggctgcccagatggccatcctgctcttggggtagtccagccgctccaggcagccgaggaagtgcggcagcgtgtgcgccgcgttgcgggcgaggaccgccacgagcaccgtggggctctgcaggggcgactccgggaaaaccaccggctcctctccgtcgtcctccgagtcccgctcggcgacgaagcgcgctcggcagccttcgcggagcagggctgaggagaggagcagtagcgaccaggcgagggtggcagcagggcgcgcagccatgttccgggccgaggcgggcggcggggaagtcctggcgcgagcgcccggctgggctgcgtgagggcggcggcggctgccggggagcaaggggctgcgaggggcggccgggggatgcggcttgccgcggccggccggctcacacactggcctcggcggctgcggttcccaggaccctcccgccgccgctgcaccgcccaggccccagtgcgggtgcgcagcgtacctgcagccgctggcgctcccctgcgcctcgggctcgcagacagtagtggccgaggggctgtgtgccctgagtcctgaggaaagttcctctagtccaggttccgctcgtacagc

SEQ ID NO: 438 - DNA, 871 bp, Homo sapiens
tgtgctggaattcctagaattctgcctatcacaacagttaacattgattctgtagatcattttgagaactgacatctttaacagcagtctgccaatctatgaatatggtatatctctacatttatttagatctttttcaattcctcatcactgttttgcagggttttttgtttgtttttgagatggagtttcactcttgtcgcccaggccagagtgcaatgatgcaatctcagctcgctgcaacctctgcctcccgggttcaagtgattctcctgcctcagccccccaagaagctgagattacaggcgcccgccaccacgtccagctaattttttgtatttttagtagagacagggtttcactgtgttaggccaggctggtctcgaactcctgacctcgtgatccgcccacctcggcctcccaaagtgctgggattacaggcgtgagccaccgtgcctggccggttcatgccatttctactcatatttcattggtcaaaacaaggccaagcttgacgacattagggtgagaagtctttcaccctaatctcctagggacaggccagatagcaacggctttagaaagggaagggcagaggctattgataataaagactatagcaaggactaatattaggcttatatgtatcaattgactgttatcagttataacattgactattaaaatactgaaatattctagtactacctggtaaatagctgctgtcccaaacctcctgaccactcccttcccctgggatcccttgggacctcctattcacaaaccagcaactgaagggttaacacctagcacagacgtatacctccaggatcctagctgcatttctaattctgcttcatctatgcttgag

SEQ ID NO: 439 - DNA, 1834 bp, Homo sapiens
tgcccgtacgagcgcctgagccaagcttggcacgaaggttaaatttttctgcatttaaaaaatgtgcggattggtctccggatccagaggctggtaccaccttcctttctaaaataaaatctctctggcatgaagtcaccgcctatttcacatccggtttgccctgggacgtattactactgtcttggtaaagagaaatcttttgttgtatagctgcagattggatattgggaagcaaatttgggtgtgaaatcttcagcaaaggagcacgcagagtccatgatggctcataccaagtgagtgagaggcagagcgaggacgcccctttgctctggcgcgcccggactcggactcgcagactcgcgctggctccagtctctccacgattctctctcccagacttttccccggtcttaagagatcctgtgtccagagggggccttagctgctccagcccgcgatgaggaaaagtccaggtctgtctgactgtctttgggcctggatcctccttctgagcacactgactggaagaagctatggacagccgtcattacaagatgaacttaaagacaataccactgtcttcaccaggattttggacagactcctagatggttatgacaatcgcctgagaccaggattgggagagcgtgtaaccgaagtgaagactgatatcttcgtcaccagtttcggacccgtttcagaccatgatatggaatatacaatagatgtatttttccgtcaaagctggaaggatgaaaggttaaaatttaaaggacctatgacagtcctccggttaaataacctaatggcaagtaaaatctggactccggacacatttttccacaatggaaagaagtcagtggcccacaacatgaccatgcccaacaaactcctgcggatcacagaggatggcaccttgctgtacaccatgaggctgacagtgaggagctgaatgtccgatggcatttgggagggacttccctatgggatggcccatgcttgcccactaaaatttggaagttatgcttatacaagagcagaagttgtttatgaatggaccagagagccagcacgctcagtggttgtagcagaagatggatcacgtctaaaccagtatgaccttcttggacaaacagtagactctggaattgtccagtcaagtacaggagaatatgttgttatgaccactcatttccacttgaagagaaagattggctactttgttattcaaacatacctgccatgcataatgacagtgattctctcacaagtctccttctggctcaacagagagtctgtaccagcaagaactgtctttggagtaacaactgtgctcaccatgacaacattgagcatcagtgccagaaactccctccctaaggtggcttatgcaacagctatggattggtttattgccgtgtgctatgcctttgtgttctcagctctgattgagtttgccacagtaaactatttcactaagagaggttatgcatgggatggcaaaagtgtggttccagaaaagccaaagaaagtaaaggatcctcttattaagaaaaacaacacttacgctccaacagcaaccagctacacccctaatttggccaggggcgacccgggcttagccaccattgctaaaagtgcaaccatagaacctaaagaggtcaagcccgaaacaaaaccaccagaacccaagaaaacctttaacagtgtcagcaaaattgaccgactgtcaagaatagccttcccgctgctatttggaatctttaacttagtctactgggctacgtatttaaacagagagcctcagctaaaagcccccacaccacatcaa

SEQ ID NO: 440 - DNA, 350 bp, Homo sapiens
tctacttcctcctgcttccccgccgccgccgccgccatcatgagggaaatcgtgcacttgcaggccgggcagtgcggcaaccaaatcggcgccaagttttgggaggtgatcagcgatgagcacggcatcgaccccacgggcacctaccacggggacagcgacctgcagctggaacgcatcaacgtgtactacaatgaggccaccggtgaggccccggtcccttccccgaccgccctccggggaccccgcgggccctgccttgggtgacgccctcccgtccccgcaggcgggaagtacgtgccccgcgccgtgctcgtggatatggagcccggcaccatggactccgtgcg

SEQ ID NO: 441 - DNA, 1998 bp, Homo sapiens
tttcgtggcggtggctggggcggtgtccggggagccgctggtgcactggtgcacccagcagttgcggaagactttcggcctggatgtcagcgaggagatcattcagtacgttttgtcaattgagagtgctgaagagatacgagaatatgttactgatctcctccagggaaatgaaggcaaaaaaggtcaattcatagaagaacttataaccaaatggcaaaagaatgatcaggagttgatttcggatcctttgcagcagtgcttcaaaaaagatgaaattttagatgggcagaaatcaggcgaccatctaaagcggggtaggaagaaagggagaaacagacaggaagttcctgcatttactgaacctgacacgactgcagaggttaaaacaccttttgatttggccaaggcacaagagaacagcaactccgtaaagaagaagacaaagtttgtcaatttatacacaagagagggacaggacaggcttgcagtcctgctccctggtcgtcacccttgtgattgcctgggccagaagcacaagctcatcaataactgtctgatctgtgggcgcattgtctgtgaacaagaaggctcaggcccttgcttattctgtggcactctggtgtgtactcatgaggaacaagatattttacggggggactcaaaccaagagccagaaactgctaaagaaactcatgtcaggagtggagaattctggaaaggtggacatctctaccaaggaccttcttcctcatcaagaattgcgaattaagtctggtctggagaaggctatcaagcataaagacaaactgttagagtttgacagaactagtattcgaaggacccaagtcattgatgatgagtcagattactttgccagtgattctaaccaatggttgtccaaacttgagcgggaaaccttgcagaagcgagaggaggagctgagagaacttcgacacgcctctcgactttctaagaaggtcactattgactttgcaggaaggaagatcctggaagaagaaaattcactagcagagtatcatagcagactagatgagacaatacaggccattgccaatggaaccttgaaccagccactgaccaaattggatagatcttctgaagagcctttgggagttctggtaaatcccaacatgtaccagtcccctccccagtgggttgaccacacaggtgcagcctcacagaagaaggctttccgttcttcaggatttggactagagttcaactcatttcagcaccagttgcgaatccaggatcaagaatttcaggaaggctttgatggtggctggtgcctctctgtacatcagccctgggcttctctgcttgtcagagggattaaaagggtggagggcagatcctggtacaccccccacagaggacgactttggatagcagccacagctaaaaaaccctcccctcaagaagtctcagaactccaggctacatatcgtcttcttcgtgggaaagatgtggaatttcctaatgactatccgtcaggttgtcttctgggctgtgtggacctaattgactgcttgtcccagaagcaatttaaggagcagtttccagacatcagtcaagaatctgattctccatttgttttcatctgcaaaaatcctcaggaaatggttgtgaagtttcctattaaaggaaatccaaaaatctggaaattggattccaagatccatcaaggagcaaagaaggggttaatgaagcagaataaagctgtctgacccaggagaaaaggaactatacagcatagtggagttttgtgtactaaaattgctatctactggtcctttggaattgaagtagtagaaacctaaaggcttggcgtcaggcttgaatatctcagaacttaaactcttaccaaaatctgtatatttttcttaaggagtgggattcctactttatgtaatggggtcgaaatctttgaacacattatttataaaaacctgtttaaaaattctaaaaaaaaaa

SEQ ID NO: 442 - DNA, 2170 bp, Homo sapiens
atgccaagaagccatacgggagagagactctgtgaaggtaaagaaggtagtcaatgtgcagaaaacttcagtcccaatctcagtgtgacgaagaagactgccggagtaaaaccatatgagtgtactatctgtggaaaagccttcatgcgtctctcatcccttactagacacatgaggtctcacactgccatacgagctatttgagaagccatataaatgtaaggagtgtgagaagagcctttagtttatctcaaatcctttcaaagacatgaaaggagtcacactggagaaaaaccctataaatgtaaacaatgtggaaaaaccttcatatatcaccagccctttcaaagacatgagcggactcacattggagaaaaaccctatgaatgtaagcaatgtggaaaagctcttagttgttccagttcgcttcgagttcatgaaaggattcacactggagaaaagccctatgaatgtaaacaatgtgggaaagccttcagttgttccagttctattcgagtacacgaaagaactcacactggagagaaaccctatgcatgtaagggaatgtgggaaagccttcatttcccacaacaagtgttcttacacacatgataacacacaacggagatagaccttataaatgcaaagaatgtggaaaggcattcatttttcccagttttttacgagtacatgaaagaattcacactggagagaaaccctataaatgtaaacaatgtggtaaagccttcagatgttccacctccattcaaattcatgaaagaattcatactggagagaagccctataaatgtaaagaatgtgggaaatctttcagtgcacgcccagcctttcgagtacacgtgagagtgcatactggagagaaaccctataagtgtaaagaatgtgggaaagcctttagtagaatcagttactttcgaatacatgaaaggactcacactggagagaaaccctacgaatgtaaaaaatgtgggaaaactttcaattatcctctagatttgaaaatccacaagagaaatcacactggagaaaaaccctatgagtgtaaggaatgtgcaaaaaccttcatttctcttgagaactttcgaagacacatgatcacccacactggagacggaccttataaatgtagggactgtgggaaggtgttcatttttcctagtgcgttacgaacacatgaaagaactcacactggagagaaaccctatgaatgtaaacaatgtggaaaagcctttagttgttctagttacattcggatacataaaagaactcacactggggagaaaaccttatgaatgtaaggaatgcgggaaggcctttatttatcccacaagctttcaaggacacatgagaatgcatactggagagaaaccctataaatgtaaagaatgtgggaaggcctttagtcttcacagttcctttcgagagacatacaagaattcacaattatgagaaacctcttgaatgttagcagatgtggaaaagccttcagtgtgtccacatccttaaaaaaacctatgaggaatgcgcaatccgataggaaactctataatgtgagaaataggagaaagttttcaattctaacagatgctttcaaagttgtgaaaattcccactgaagagagaaatcctgtcaatgtaagtaatatagaaagcgagatacaagatgattcatgtatagtcaggtaccacataatcatgtttcagtcagcaatggaccatataggttggtagccccataagattatataacacctaaaacatttctatcaaccgcaatttagtagcagtagtaacaccatagtgcagcacattatttaagtgtttatggtgctggtgtaaacgtgctgcactttcagttgtataaaagtacaagacagcggccggggacggtggctcacgcctgtaatcccagcactttgggaggccaaggcgggcggatcacgaggccaggagatcaagaccatcctggctaacacggtaaaaccccatctctactaaaaatacaaaaaattagccgggcgtggtggtgggcgcctgtagtcccagctacttgggaggctgaggcaggagaatggcataaacccaggaggccgagctgacagtgagctgagatccggccaacagagcgagactctgtctcaaaaaaaaaa

SEQ ID NO: 443 - DNA, 428 bp, Homo sapiens
cttaactggaaagatgagtcccttcattcactattattttctaaaactgccttatttttagccatttcccatttcacataaattttagaatcagcttgtcaaattagaaggagaaaaaaaactttttggaatctcattgaagctgcactgaattatagattattttggaggacagacttctttatgatactgagctttcttttccatgaacataatagatctctccacttatttacaatttgcttatgtccttcaataaattgttcaaatttcctttcataaaagtcttacgaacttttgttgtagatagtcttaggaactttatgactttcttgatgttataaaatggtgttttctaaattacattttctaatcatttattattggtgtacagaaatgcaattagcatggttgcaaagggtagactc

SEQ ID NO: 444 - DNA, 3800 bp, Homo sapiens
ttttttttttttactgtttttacacagtttattcagaagtttaaaagttaaaatgtgggcattttcccctgaaacaaatcatcccctgccactccccaacacaaagactctcccaacaccgcagttccttctctttacccaggcttaccacacattcttgcaaaacacacaggagtcaacaccccaactatttggtaatacaaagagactacaaagtcacacaaaagaatctcatttacttccttttcactagcaggctatgaatgaaagactgagaggcaaacacatcaccttcatccagagttgacacttccctaaccttttttcttcctctaagaggttaaaatccaaagtagtttcactgacaactgtaactctgatattccatttttctcttctgaatggctaagctaggacatactttcctttcaaagctgatcttcagaacctcaagactggcagaaagcaggctcccagctgcagctcggccacaatactttgcaacaggcaaagttcccacataggtgcaaatgatgctttaagagttatcaaaacttttttaaaaaataatgcattaatatggagcctccacatttttctgacgaaattcctctaaaggtggtggcagctgtgaaacagaaggcactttgtgctaaaattcagagggtctctcaagagagaacgccacagcagagagacccaatccgcctaagttgcaggcgaccctttagggtggggaggagtatcccccaggaaggcatctgcaaaggaaaaaattgtaatcatgattccaaggcaaaatggctaaagttgggagagaagaaataccaagagagaagacaaaacatggctgtgccaaggactgaggagtgagctttacaaggacttgtcagctggctctgtacttctattgggctggttccttcaccatttccaaaggggttctggagaccttgcaggaacaggaacagcaccttagccaagagggttccaggcctcctgcctaggcctgggctctcctcgttaggttcccaggaataaattgagttcccattggcagcacttgcaggtattgctagtccacggcaagatctgtcttagggattttctggtacagccgtgaagagaaagtgagggttttccacataatccgggatttcttggcaatgcccaaagactttctgggccttctaagagcaacagtggatcaagctggtaacccccatcaacactcagaaaagcagcatgggtattttagatgggggacaggaggagataaatcaatggattgacagtctttatcttagtaccataaataaagtgcaccatgaatggaggctataagccactcgcctgaggctgaggtatgggtagaaactaccatcaccaccctcagggtggcggatcatttccttcagccagaatcctggctgctgagactgtctttattgctttatttccttagtactatggaacttttagctataaaggaaatacttggtgggcttggcagagagcgtgtcacaaaattacaggaactggctgatattcgatgactatacacgacaatctcaataatgttggatgatggctgtttttccccttcattctgatgaacttaggaaaactcaagttatttttaaaacacctatcaaattggctcatgatgcttctcttccaaagcaggatagctgtttatggccgacgtagtagaaatggttgtctttgtttacagtttttcagatgcattatggaagaaaatcctcttactaccacatttcaggagactttactatgacatattggtgggttccatcaacttcttggaagctcttcaagagtgtgagaggaaaagcatgatgttatacaaagaactctgctccacataggattccgtggcaagagtactattttgctgctttcatgtaggaaggtattgccccccttgcagtcaggccctcaaagcgcttgtacgtgtaattgatgaagacccagtctttgttcttgtagtcagtctcaggatgattacttgtggccactgttggcttaagaatatcagattctggaaactcatcgaagtttgaggtatcatcaatgcttttgatttcaatagatattgcagcaggtctctctctgatatgttcccagtcaacgccttcaaaaaaagagttactttttatttcctcaactccaggagctccaattctatgttcccattcacagcagaacctcaaaattagatccttggctttctcagagatgggaacttctggaggaaaagtcaaagtttctttccagttcatcaccttcttatatgtctcttgaggggtctcagaacagaaaggtgggtagccgatgagcatctcatacatgatcaccccaagcgaccaccaatcacagagcttgttgtacccggtctgcatgaacacctcaggagcaatgtagtcaggagtgcctactgtggagaaggctagctgacgtctatttcttttccaggtttctgctttccttttggaattcatgttctggaaagtgaaatcactggggaggctgtggttcagattcctataaaattctgtcctatgtgcttttttcagtcctgtgcaaagaccaaagtcagaaagtttcacatggcccttgctgtccaaaagaaggttgtctggtttgatgtctctgtggatgaatccaagttggtgaatagagtctatggctaatactgtttctgctatataaaactgagtctcctcttctgtcagagtgtcttttttcatcaacaaggtcatcatgtcccctccaggcaggaactccatgattaggtagaggtttagcttatcctgaaaactatagaacattttcacaacccacaaactgtctgcctccactagaatgtcacgctccgcacgaatgtggccaacctgctctttttcaagcatatctgctttacggagtattttcattgcatacacatgtcccgtatctttcttctgaacaagccgtacctcaccaaatgctcctctgcctattacttttaaggactcaaaatcttccaatccaagtcttgttctcttcaaacgaagaaactctgtttccttccgagcatgtgctgatctccggagtcgtttctcctcatcttttaggccttcttcttccatcaccttttctaacttcttttgtctcatttctcgttcttcatgttgagcgataaggttgctataaaaattctccagtgtcactttggtcattgtcaccctttcctttgtgtggttactcatggatgagcaaggtgttgagcctgtcattgccatggctgctagaaacaaagaaaagaagaggtgttagatttggagttagaatccacccattgtgcactctcctaccctattggtaggaatgtaaattggtgcaagttttctggaggacaaacaggtaatatgtaacaaaagccagagaaagagaatacttagtgaaaataaatataaattactgtcctatgacccagaaatcccacccctaggtataaagactaaagaaaccgtcacacaggcttctaaagtgacatacacaggatgttcagcacagagaggatgttcatcatgccttaatttgtgttatgggaagttggaggcacttaagtaagaaaataaagagctgtggctgcataggaaataccatgcaacaaccagaaaaccagaagcaactttacctgtacctgtaagtcacacaaatatatctttttttttctttttgagatggagtttcgctcttgttgcccaggctggagtgcgacaggatgatcttgg

SEQ ID NO: 445 - DNA, 6807 bp, Homo sapiens
cggacgcgtgggattgagaaacgatttgcctatagtttcctccaacaactcattcgctatgtggatgaagcccatcagtatatcctggagtttgatggtggcagcagaggcaaaggagaacatttcccttatgaacaagaaatcaagttctttgcaaaagtcgttcttcctttaattgatcagtatttcaaaaaccatcgtttatacttcttatctgcagcaagcagacctctctgctctggaggacatgcttccaacaaagagaaagaaatggtgactagcctattctgcaaacttggagttcttgtcaggcataggatttcactatttggcaatgatgcaacatcaattgtcaactgtcttcatattttgggtcagactttggatgcaaggacagtgatgaagactggcctggagagtgttaaaagtgcactcagagcttttctggacaacgctgcagaggatctggagaagaccatggaaaacctcaagcagggccagttcactcacacccgaaaccagcccaaaggggttactcagattatcaattacaccacagtggccctgctgccaatgctgtcgtcattatttgaacatattggccagcatcagttcggagaagacctaatattggaagatgtccaggtgtcttgttatagaattctgactagcttatatgctttgggaaccagcaagagtatttacgtggagaggcaacgttctgcattaggagaatgtctagctgcctttgctggtgcttttcctgtagcatttttggaaactcatctggacaaacataatatttactccatctacaataccaagtcttcacgagaaagagcagctctcagtttgccaactaatgtggaagatgtttgtccaaacattccgtctttggagaaactcatggaagaaatcgtggaattagccgagtccggcattcgctacactcaaatgccacatgtcatggaagtcatactgcccatgctttgcagctacatgtctcgttggtgggagcatggacctgagaacaatccagaacgggccgagatgtgctgcacagccctgaactcagagcacatgaacacacttctagggaacatattgaaaatcatatataataacttggggattgatgagggagcctggatgaagaggctagcagtgttttcccagcctataataaataaagtgaaacctcagctcttgaaaactcatttcttgccgttaatggagaaactcaagaaaaaggcagctacggtggtgtctgaggaagaccacctgaaagctgaggccaggggggacatgtcggaggcagaactcctcatcctagatgagttcaccacactggccagagatctctatgccttctaccctctcttgattagatttggggactataacagggcaaagtggctaaaggagcctaacccagaagcagaggagctcttccgcatggtggctgaagtgtttatctactggtcgaagtcccataatttcaaaagagaagagcagaacttcgttgtacagaatgaaatcaacaatatgtctttccttattactgataccaagtcaaagatgtcaaaggcagctgtttctgatcaggaaaggaagaaaatgaagcgcaaaggagatcggtattccatgcagacctctctgattgtagcagctctgaagcggttactgcccattgggttgaacatctgtgcccctggggaccaggagctcattgctctggccaaaaatcgatttagcctgaaagatactgaggatgaagtacgagatataatccgcagcaatattcatttacaaggcaagttggaggatcctgctattagatggcaaatggctctttacaaagacttaccaaacaggactgatgatacctcagatccagagaagacggtagaaagagtattggatatagcaaatgtgctttttcatcttgaacagaagtctaaacgtgtgggtcggagacattactgtctggtggaacatcctcagagatctaaaaaggctgtatggcataaactactgtctaagcagaggaaaagggctgttgtagcctgcttccggatggcccccttatataatctgccaaggcatcgggctgtcaatctctttcttcagggatatgaaaagtcttggattgaaacagaagaacattactttgaagataaactgatagaagatttagcaaaacctggggctgaacctccagaagaagatgaaggcactaagagagttgatcctctacatcagctgatccttctgtttagtcggacagctttaacagagaaatgcaaactggaggaagattttttatatatggcctatgcagatattatggcaaagagttgtcatgatgaggaagatgacgatggtgaagaggaagtgaagagttttgaagaaaaagaaatggaaaagcaaaagcttctataccagcaagcccgactccacgatcgtggcgcggctgagatggtgctacagacaatcagtgccagcaaaggtgaaactggaccaatggtagcagctactctgaaacttggaattgctattttaaatggtgggaactccacagtacagcagaaaatgcttgactacctcaaggagaaaaaggatgtgggcttctttcagagcctggccggcctgatgcagtcatgtagtgtccttgacctaaatgcatttgagcgacaaaacaaagctgaaggtcttgggatggtgacagaggaaggatcaggagaaaaggttctgcaggacgatgagttcacctgtgacctcttccgattcctgcaactactctgtgagggacacaactcagattttcagaattatctgagaactcagactggcaataatacaactgtcaacataattatctccactgtagactacctactgagagttcaggaatcaattagtgacttttattggtattactctgggaaagatgttattgatgaacaaggacaacggaatttctccaaagctatccaagtggcaaaacaagtctttaacactcttacagagtatattcagggtccttgcactgggaatcaacagagtttggcacacagcaggctgtgggatgctgtggtcggctttcttcatgtgtttgcccatatgcagatgaagctgtcgcaggattccagtcaaattgagctattaaaagaattaatggatctgcagaaggatatggtggtcatgttgctgtccatgttagaaggtaatgttgttaatggaacgattggcaaacagatggtggatatgcttgtggaatcttccaacaacgtggagatgattctcaaattttttgacatgttcttaaaactaaaggatttgacgtcgtctgatacttttaaagaatatgaccccgatggcaagggagtcattttcaagagggacttccacaaagcgatggagagccataagcactacacgcagtcagaaacggaatttcttttgtcttgtgcggagacggatgagaatgaaaccctcgactacgaagagttcgtcaaacgcttccacgaacctgcgaaggacatcggcttcaacgtcgccgtccttctgacaaacctctctgagcacatgcccaacgatacccgacttcagacttttctggaattagcagagagcgtcctgaattatttccagccctttctgggccgcatcgaaatcatgggaagcgccaaacgcatcgagagggtctattttgaaatcagtgagtccagccgaacccagtgggagaagccccaggtcaaggagtccaaaagacagttcatatttgacgtggtcaacgaaggcggagagaaagagaagatggaactctttgtgaacttctgcgaggacaccatctttgaaatgcagctggcggctcagatctcggagtcggacttgaacgagaggtcagcgaataaggaagaaagcgagaaggagaggccggaagagcaggggccgaggatggctttcttctccattctgacggtcaggtcggccctgtttgcgctcaggtacaatatcttgacccttatgcgaatgctcagtctgaagagcctgaagaagcagatgaaaaaagtaaaaaagatgaccgtgaaggacatggtcacggccttcttttcatcctactggagtattttcatgaccctcttgcacttcgtggccagcgttttcagaggctttttccgcatcatttgcagcctgctgcttgggggaagcctcgtcgaaggtgctaaaaagatcaaagttgcagaactgttagccaacatgccagaccccactcaggatgaggttagaggagatggggaggagggagagaggaaacccctggaagccgccctgccctccgaggatctgaccgacttaaaggagctgacagaggaaagtgaccttctttcggacatctttggcctggatctgaagagagaaggaggacagtacaaactgattcctcataatccaaatgctgggctcagtgacctcatgagcaacccagtccccatgcctgaggtgcaggaaaaatttcaggaacagaaggcaaaagaagaagaaaaggaagaaaaagaagaaaccaaatctgaacctgaaaaagccgagggagaagatggagaaaaagaagagaaagccaaggaagacaagggcaaacaaaagttgaggcagcttcacacacacagatacggagaaccagaagtgccagagtcagcattctggaagaaaatcatagcatatcaacagaaacttctaaactattttgctcgcaacttttacaacatgagaatgttagccttatttgtcgcatttgctatcaatttcatcttgctcttttataaggtctccacttcttctgtggttgaaggaaaggagctccccacgagaagttcaagtgaaaatgccaaagtgacaagcctggacagcagctcccatagaatcatcgcagttcactatgtactagaggagagcagcggctacatggagcccacggtgcgtatcttacctattctgcacacggtcatttctttcttctgcatcattggatactactgcttgaaagtcccattggttatttttaagcgagaaaaggaagtggcacggaaattggaatttgatgggctttatattacagaacagccttcagaagatgatattaaaggccagtgggatagactcgtaatcaacacacagtcatttcccaacaactactgggacaaatttgttaaaagaaaggttatggataaatatggagagttctacggccgagacagaatcagtgaattacttggcatggacaaggcagctctggacttcagtgatgccagagaaaagaagaagccaaagaaagacagctccttatcagctgtactgaactccattgatgtgaagtatcagatgtggaaactaggagtcgttttcactgacaactccttcctctacctagcctggtatatgactatgtctgttcttggacactattaacaactttttttttgccgctcaccttctcgacattgctatgggattcaagacattaagaaccatcttgtcctcagtaactcacaatggcaaacagctcgtattaaccgttggcttattagctgttgttgtatacctatacactgtggtggcattcaattttttccgaaaattctacaataaaagtgaagatggtgatacaccagatatgaaatgtgacgatatgctaacatgctatatgttccacatgtatgttggagttcgtgctggaggagggatcggggatgaaatcgaagacccagcaggagatgaatatgagatctatcgaatcatctttgacatcactttcttcttctttgttattgtcattctcttggccataatacaaggtctaattattgatgcttttggagaactaagagaccaacaggaacaagtcaaagaagacatggagaccaaatgcttcatctgtgggataggcaatgattacttcgacacagtgccacatggctttgaaacccacactttacaggagcacaacttggctaattacttgttttttctgatgtatcttataaacaaagatgaaacagaacacacaggacaggaatcttatgtctggaagatgtatcaagaaaggtgttgggaatttttcccagcaggggattgcttccggaaacagtatgaagaccagctaaattaaactcagacccaatcacctctaaaaaccaaaaccctacccctctctctccctctctcaatttctctgctctcttggaaacattttgctgattttgtgaattgccagcgttgtgtgttttctgggagcatcgaagctctgtttcggaagagctgtttcctccccccaccttttgtatttactttgagactaaagactgaagaataatctaaattcatactcagacaaaaaaaggaattctggaaagaaaaccattctggacactgtcataacacacatagatagattttcttctgagactcccggagtcttctcgagctacgagaccttcacagagacacgtggcagccacactcacccagcctctttatttcaccatcctggaaggaaactgtctgtctaatggtcacagagcactgtagcacttaacagattgccatggacaccagttgcgaagggaaatagtgccttactatatgtgggttgagctatgcagaagatacgtgcatgaaaaaacatctttattttctttatgtcgacctttcttttcttagattgattttgtgaggttttttttttttcctttagccttttctttagggggggagggtaaaaaaagcagtttgcccttaaaaaaaaaa

SEQ ID NO: 446 - DNA, 880 bp, Homo sapiens
gctggtctcgaactcctgaactcagatgatccacccgccttggcctcccaaagtgctgggattacaggcgtgacacgcacgcccagcctgtttttctgagacacggttttgctctgttgctcaggctggagtgcagtggcaccatctcggctcactgcagccttgttctcctaggctcaagcagtctgcctcagcctcccgaggagctgggactacaggcgttggcaccacacccagctaatttttgtattttttgtagagatgaggtctcgctagttgccaaggctggtctcaaactcctggactcaagcgatcctcctgcctcggcctcccaaaatgctgggattacaggtgtgagccactgtacctggcctccctttgtgctcttgatctcagggtcttctctgggctctccatgtaccagttacctccgatgggtgaaggtcgggttggggcatccccggggagcaccacttttgcactcggcaggctgtttcccagcgctccatctgctccgtcccacagcagaccgatccatgagcagctccctctcagcctctcagctccacacggtcaacatgcgggaccctctgaaccgagtcctgggtgagttccccacccctgctgccgaacctggggctaagctggacgagtccctcttctcatggaggctgggagaccttgtcagctggaaggggccttgcggtgcccctcccttccctctccatgcccctcattgttggctgtcctggcccccaggctcctgtctagttccccctcctcccctccccaattgccttttatattttctctctctgacaccccattttggggacatgctcagcatgtggttcttttcccttttcagtcccaccatctc

SEQ ID NO: 447 - DNA, 1200 bp, Homo sapiens
cgcttctccttctcccccggccccctagatggcccttccctgacctagaaagagggagacagagtttcataggggaggcaaaatggagactccgtggcttgggggtggggggaatggaggcccaaagggtaggaaggagacctagaaagaggggtgagatggagacccagggagaagtagtggcaaagaaagatggtgagatggggccttgcaaggctataaccaaattcaaatcctggctctgctagttactaatggggtgattgggcaagtcatttaacctctctgtgatcttgggaaaatcacttaacttctttgggccttactctccttatggacaaaaaggggatgacaacaggcctggcacacagggtgtttttcaggattatgaaagttaataaaactgctgaggtcaatattttgcacataataagtgctcaataaaaattagccttcactcctattatagcatacatattgtgtgcaaccagatggactggctggggcagtgattaaaatgacttattctactcttccccccacccgcccagggaggcccctgcctcttggttctcaggcacattgagccctggaagggcctcctgcagttggctgtcaatgctgctcctcacttacctctcctccacagagctgaaggtcaggcccaggacagtgagacctgactccttgctcctaccagcctactatggcttaagacccagggccagggtcccgttgatgtaacagagcagaggaccagcagatgaatggacaccttgaagcagaggagcagcaggaccagaggccagaccaggagctgaccgggagctggggccacgggcctaggagcaccctggtcagggctaaggccatggccccgcccccaccgccactggctgccagcaccccgctcctccatggcgagtttggctcctacccagcccgaggcccacgctttgccctcacccttacatcgcaggccctgcacatacagcggctgcgccccaaacctgaagccaggccccggggtggcctggtcccgttggccgaggtctcaggctgctgcaccctgcgaagccgcagcccctcagactcagcggcctacttctgcatctacacctaccctcggggccggcgcggggcccggcgcaaagccactcgcaccttccgggcagatggggccgccacctacgaagagaa

SEQ ID NO: 448 - DNA, 3115 bp, Homo sapiens
tttttttttacctaaaaagaaataaaatgttttactcatttacacaaatacacacactgaagtccaccctgggagctggtaaaacaatttcagtctcagacccgtctgttttccagggtcctccgagcctgggcttcctcaagagcgtggcccaagggccccacagcccagatccgggcagccccaccaccttcactgaggaggctccgaagctccgttcccgctgctccttacagacaggggaggcagatatacacaaacgcgcctcggcccagcttggggctggcgggggaggctgtgtcttcaaacctttgcccccagttgggtcagtagaaccaccagtgtcctccccttctacctcccagctccactttggaggctgaggaagcgagaggttttctaggcagatttggagccctggagattgagttcacagtgtatgttctgggggcgctggtgcagtcagcggtccagtctccagcctgcaggcgtgcacactggggtggacgatgggtggccccgcaggtgtacacatttgggtggccccggcccctataccccagtgttctctttgatccagtcccgaaacagagggagccttgtgtacacgcctggcttgttcctctgagcgcagccgtctccccagctcaccacaccggcctggaagatccgcccatccgcctccacgctggacaggggtcccccggaatcaccctggcaggagtccacgccgccgctgaggaagcccacgcacatcatgcgcggcgtgatctgctgcggcaggaggttctcgcaggtggtctggttgatgacgcggatctcacccttttgcaggatcagcgcgccagtgcctccatactgggtgtgtccccagcccgtgacccagatggccttgccggcagggaagacatgggaggcgtccggcaggcagatgggccgcaccatggagctgtactctgccggtttctccagctccagcagcgcgatgtcatagtcgaaggtgaagtcattgaagaaggggtgggagatgatgcgcttgagcctgcgctcctgcaccccaggggcgctgcgctggctctggtcgtgcaagcccaggaaggccgtccactgcgtggggtctgagtacctgaatcctctgtcatcgatgtagcagtgtgcggcagagaccagccagttgggagagatgagggaagcaccgcagatgtggccctggcccagagcatgcaggcttacctgccagggccactcgccctcatccgcatccgtgcccccaacaacacgagcctgtctcgtgaatgaccgcagcccacagtcgcagtccttctcatctgagccgtcgctacagtcctccttcccgtcacactcagggttgcccttgctcaagcagagcccattgaggcagcggtaggtgtgtttggtacaagtgacgacgttcaccttggggcaggaggcctcgtcggacccgtccccacagtcgtccttcccattgcactgctggcttttcgagaggcacttcccattggaacacctgaaggtctgggtccggacaactgcacccctgctcgtcgctgttgtctccgcagtcgttcaaactgtcgcagacccagaagaggggcttgcagaacttgttcttgcacgtgaactggtggccggcgtcgcaactgcagttgagctcatcgctgtggtcggtgcagtcggcccagccatcacagcgcagctccttccggatacaccgccccgtgcggcacgtgaactgccccgggcatgggtcactggagtcgtaggagaggtattcagctaagaagccggtgtcggtgtaggactgatctgagtggaagcgaactgtgatcttgttgctgttgctggtgacgacgaactgggacctctctccgcagtatttctccccattgatctccacgtagtccttggggcaggtgcccgcaggcacgccgggctccagcaggtagaagaatttgaagcgcaccttcacatgctggttgttgggcacctcaatgttccatgtgcagtcaatgttgggtgggtagtggcctgggtagtaggggctgttgaatgtcccctgggctttacgtaagcggcctccacagctgctcatcctaggcagctggaagaaggtggcctcaaagcccgggatgccgccgctcagtgttggttatcagtgtgatgagcaggacgttcgtgggagggagtggaaggtcaggttgtaggagggagggtaggtgccacacaactgcaccaggggcgtggggctccatggggctcatgggtgttgtacaccgtcaaccaggtgtctgccgcgctcgtcgcaggacgcaaggtcaaagctgcggaaggtgaggctcagcactgagtcggcgtccccccgcagggcccactggcagcgggcatgagcggggtaggggctgtcagggaagccgggcgtggtgaagcgcatcagctccacaccgcgggcgtgcaggccaaagctgcagctgttgtcctgggtcctctgtactgttttggagtccgtggggaaagccaccactgaggtgaccacaaaggacttcagggagcgcgcccgcgggggcagcatgactacgcgctcctcggccatgacgcgctcggcctcctccaccaggtgctgcgggatgctgaactcagaccagtagtaggcgatgacgctgccctcgctgaaggccgtcacagccgactccttgtggtaggggcccaggaatgggactccgctgtacagcagcttcagcgcgtccttcaccttgctggccaggcttacaaactcagtggagttggagttctcgtaggcatccacaaaattctcatttgtgatcctcatgtagccattgaagaccttctggacacgcacgtcccggtactgcaaatgccacaccaggaagccgatccccagcaagaccaagaggaggccgatcagcacggctgccagcaccacccagcgccccgggccatgcttttccaccttcttgacgttgttgactggcaggaactccacgccttcctccaagccattcactttctcgtgccgggagttgtacttgagtcccgcgccgaagtccttcgggccccctccgcccttgcgacgaaa

SEQ ID NO: 449 - DNA, 613 bp, Homo sapiens
tttcgtatctggcagcccatggaggatggatgggagcacggagaggctggaggcaaggagaccagccgggaggctgccgtggtcatccaggcaagaaatgacgaggcgtccctccctgatggcgggcagacagcacggatggagcgcccagcagagtgccaccgtggccaacccagtgcctggtgccaacccggacctgcttccccacttcctgggggagcccgaggatgtgtacatcgtcaagaacaagccagtgctgcttgtgtgcaaggccgtgcccgccacgcagatcttcttcaagtgcaacggggagtgggtgcgccaggtggaccacgtgatcgagcgcagcacagacgggagcagtgggctgcccaccatggaggtccgcattaatgtctcaaggcagcaggtcgagaaggtgttcgggctggaggaatactggtgccagtgcgtggcatggagctcctcgggcaccaccaagagtcagaaggcctacatccgcatagcctatttgcgcaagaacttcgagcaggagccgctggccaaggaggtgtccctggagcagggcatcgtgctgccctgccgtccaccggagggcatccctccagccgag

SEQ ID NO: 450 - DNA, 2676 bp, Homo sapiens
atggaacccagcttgggacagggaatggatttgacttgtccttttggcgtctccccagcctgtggagcccaggcctcttggagcatctttggggctgacgcagcggaggttccgggcacacgtggccactcccagcaggaggctgccatgccccacattcccgaggacgaggagccccccggagagccacaggcagcccagagccctgccggccaacagggtcctcctaccgcaggagtatcttgcagtccaactcccacgattgtcctgactggggatgccacttcaccagaaggagaaaccgacaaaaacctggccaacagagttcacagtccccacaagaggctttctcaccgacacttgaaggtgtccactgcctccctgacatctgtggaccccgcggggcacatcattgacctggtgaatgaccagctgccagacatcagcatctcagaggaggacaagaagaaaaacctggcgctgctggaagaagccaagttggtgagtgagcgattcctgacccgccgtgggaggaagtccaggagcagccccggagactccccatcagctgtttccccgaacctcagccccagcgcttctcctacatcctctcgaagcaactcacttacagtccccaccccgccagaaggggatgaagccgacgtctcttcacctcaccctggcgagcctaacgtcccaaagggcctagctgacaggaagcagaatgaccagaggaaagtgtctcagggcaggctggctcctcgtcctcctccagttgagaagtccaaagagattgcaatagaacaaaaggaaaacttcgatcccctccagtaccccgagaccacacccaaaggcctagctcctgttacaaacagcagtgggaaaatggccctgaacagccctcagcctggccccgtggagagcgagctggggaagcagctcttgaaaacgggctgggagggcagccctctgccgagaagtccaacccaggatgcggcaggagtgggtcccccagcctcccaggggagaggcccagctggagagccgatggggcccgaggctggctccaaagctgagcttccacccactgtgtcccggcccccgctgctgcgagggctttcctgggacagaggccctgaagaacctggcccccggctgcagaaagtgcttgccaagctgccactggcagaggaagaaaagcgttttgcaggcaaggccggcggcaagctggccaaggcccctggtctcaaagactttcagatacaagtgcagcccgtgcggatgcagaaactgaccaagctccgagaggagcacatcctgatgagaaatcagaacttagtggggctcaagcttccagaccttagtgaagcagctgagcaggaaaaagggcttccttctgaactctccccagctattgaggaagaagagtcaaagagtggcttagatgtcatgcctaatatttctgatgtgctgctgcgcaaactgcgggtccacaggagtctccctggaagtgcccctccactcactgaaaaggaagttgagaacgtgtttgtgcaactgtcctaggcctttagaaatgacagctacactctggaatctagaattaaccaggctgaaagggaacgcaacctgacagaggagaacactgagaaagaactggaaaacttcaaagcttccattacgtcctcagcttcactctggcaccactgtgagcaccgggaaacctaccagaagttgctggaggacatcgctgtcctgcaccgcctggctgcccgcctctccagccgagctgaggtggtaggcgccgtccgccaggaaaagcgcatgtcgaaagcaacggaagtgatgatgcagtatgtggagaatctaaagaggacgtatgagaaggaccatgcggagctcatggagtttaaaaagcttgcaaatcagaattcaagccgcagctgtggcccctctgaagatggggtccttcgcacggcacggtccatgtccctcacgctgggaaagaatatgcctcgccggagggtcagcgttgctgtggttcctaagtttaatgccctgaatctgcctggccaaactcccagctcatcatccattccctccttaccagccttgtcggaatcacccaatgggaaaggcagcctacctgtcacttcagcactgcctgcacttttggaaaatggaaagacaaatggggacccagattgtgaagcctctgctcctgcgctgaccctgagctgcctggaggagcttagtcaggagaccaaggccaggatggaggaagaagcctacagcaagggattccaagaaggtctaaagaagaccaaagaacttcaagacctgaaggaggaggaggaagaacagaagagtgagagtcctgaggaacctgaagaggtagaagaaactgaggaagaggaaaaggacccaagaagcagcaaacttgaagaattggtccatttcttacaagtcatgtatcccaaactgtgtcagcactggcaagtgatctggatgatggctgcagtgatgctggtcttgactgttgtgctggggctctacaattcctataactcttgtgcagagcaggctgatgggccccttggaagatccacttgctcggcagcccagaaggactcctggtggagctcaggactccagcatgagcagcctacagagcag

SEQ ID NO: 451 - DNA, 502 bp, Homo sapiens
tttttggtaataatcttttatttgagttcattttcaaaaccattaggccttcgtagtagaggccccctgtaaaaccagcccctcttgcacccttaatgaggttagccctctccactgtctacatacacagtataatctggaaaaaacagtgggattcccacatgtttagtgcatgaaaaacaggccagactcagtcattttccataattgaccggggttctgttctgttcttttacagcaagcacagccagcatctctgcccctctgccctttagctccttacattggtagggcctctctccagtgtgaattctctgatgttgcttgagttgtgagctcactctaaaggcctttccacatactttgcactcatagggtttctcaccggtatgaattctctgatgtcgtataagagttgagccttgattaaaagccttcccacattccttacattcatagagtttcctgccagtatgaacagtctgatgttgaatcaactgag

SEQ ID NO: 452 - DNA, 395 bp, Homo sapiens
catgacctgccttcattctgcaaaagcatttcattattagtctagctgcagcttcagttgtgaagagggatttgcattaattggaccggaagtggtgcaatgcacagccttgggggtatggacagccccagccccagtgtgtatagctgtgcagtgtcagcacttggaagcccttaatgaaggaaccatgggctgagactatcctttcactgcttttgcctatggctccagctgtaaatatgagtgccataccgtctacagagtgaggggcttggacatgctacactccagaggctgttacctgtgtaatggacactttacaacatgagaagctatttcgtgtgagccgttggagagaccctgtcactgaagcgtgtgatgttcttgattcttga

SEQ ID NO: 453 - DNA, 662 bp, Homo sapiens
ttttttttttttttcttgagtcaatatgatttattgttttcctcttctgccattaacattctagctactgggtaagttgttctccatccttgggatctcatggttgggaggagaggtctgggttccctcccacaaaactctcaacgatagaatagaagcacagctgccctcagttatctcacggctgctgctgtaaccaacatggagttccatatccactccaatcaaaaccagaaaaatctccacactgctggggactggcctctggaaagtatcctcctccaccaatgcagtggtgctcagtgttacatccggtgaccctcattccagcacacaaggcgttggctgctctctcgttattaaataccctgaactgaacaaatcccgcagtgaattcccgctggccatagggtgagtaataagatgctgttttctgggcgtcgccaaaatcatagaccacagggatcaccgggccgttgtcagtccaacactttccttctccatatttcactggatatttctggtagatgcccaacaaattatgtcccagtgtctggaggaaaccagtgtccgtgcggtacctcagcagggagcctgtttctccagtgctgcatgggggacttattgggcacgtgccagatgcccagtcctttggcctgaat

SEQ ID NO: 454 - DNA, 440 bp, Homo sapiens
acgcaggtccatccggcgatgctgggtctggacgagctcgggaggagtggttgtggccattgcacacaggcggatctgaggttcggcgacgccgctggtcgcgacccgggacaggacaacgacaggaacaccgccgagcccgcgttcccccccccgcccagagtcatggcggcagcagccgctctgagggcgcctgctcagagcagtgtgacctttgaagacgtggctgtaaacttttccctggaggaatggagtcttcttaatgaggctcagggatgcctgtaccatgatgtgatgctggagaccttgacacttatatcctccctgggtaaggtactcatacttaactgtgacctgagttagtctctgcccctcccctttattcctcttggtaataacgtctttctcacgtcaggactgtggcacagcttcattctcca

SEQ ID NO: 455 - DNA, 414 bp, Homo sapiens
cgcagcagccgggcggggcgcgagcggagcgctgactggggagggaggcggggagcaagggaggcgcgtcggtctgggaagtcgcgcgcactcgctgctcctgggaccgacgtttaactcttgccaagtctcgtcgcagccgccgcgggtggcgggccttgggcttcccctgaagcatgagccctctcgcccgcagccaccctcaccgcgtggcccgcggacagtgcgcgccggggtcccgggtgcacaccctcaggataccccgtgcccagagttcgtgcgcccgaggaaggtaccgcttgtgggggaagccccagggctgcccccggaggagaggtcacgaggatggcggagagacacacccggtttacaggagtccagagtacgtgcgccttcatacgacgacataactct

SEQ ID NO: 456 - DNA, 408 bp, Homo sapiens
tctgtttaaaacttttgttcttttttaatgtcaaaaactggtctatttactgtcttattgaattgcaagaatgcttcatatattctagatacaagttctttaacagatatatgtattataaatgtttgttcccagactatggtttgtcttttcattttcttaatggtgtcactcaaagagcagaagttttaatttttataaaggccagtgtatcagtattttccttttgatgagtgctttctgtatctagtttaaaaaaaactttgcctaccccaggttatgaatattttttaattccagaagcttgatcatttcagtatttacatttaggtctttcattgacttcaagttattttttgtatataatgtaaggtaggagttaaagctcactatttgctatttagatgg

SEQ ID NO: 457 - DNA, 4360 bp, Homo sapiens
ccgcgctctctgatcagaggcgaagctcggaggtcctacaggtatggatctctggcagctgctgttgaccttggcactggcaggatcaagtgatgctttttctggaagtgaggccacagcagctatccttagcagagcaccctggagtctgcaaagtgttaatccaggcctaaagacaaattcttctaaggagcctaaattcaccaagtgccgttcacctgagcgagagactttttcatgccactggacagatgaggttcatcatggtacaaagaacctaggacccatacagctgttctataccagaaggaacactcaagaatggactcaagaatggaaagaatgccctgattatgtttctgctggggaaaacagctgttactttaattcatcgtttacctccatctggataccttattgtatcaagctaactagcaatggtggtacagtggatgaaaagtgtttctctgttgatgaaatagtgcaaccagatccacccattgccctcaactggactttactgaacgtcagtttaactgggattcatgcagatatccaagtgagatgggaagcaccacgcaatgcagatattcagaaaggatggatggttctggagtatgaacttcaatacaaagaagtaaatgaaactaaatggaaaatgatggaccctatattgacaacatcagttccagtgtactcattgaaagtggataaggaatatgaagtgcgtgtgagatccaaacaacgaaactctggaaattatggcgagttcagtgaggtgctctatgtaacacttcctcagatgagccaatttacatgtgaagaagatttctactttccatggctcttaattattatctttggaatatttgggctaacagtgatgctatttgtattcttattttctaaacagcaaaggattaaaatgctgattctgcccccagttccagttccaaagattaaaggaatcgatccagatctcctcaaggaaggaaaattagaggaggtgaacacaatcttagccattcatgatagctataaacccgaattccacagtgatgactcttgggttgaatttattgagctagatattgatgagccagatgaaaagactgaggaatcagacacagacagacttctaagcagtgaccatgagaaattacatattaacctaggggtgaaggatggcgactctggacgtaccagctgttgtgaacctgacattctggagactgatttcaatgcccatgacatacatgagggtacctcagaggttgctcagccacagaggttaaaaggggaagcagatctcttatgccttgaccagaagaatcaaaataactcaccttatcatgatgcttgccctgctactcagcagcccagtgttatccaagcagagaaaaacaaaccacaaccacttcctactgaaggagctgagtcaactcaccaagctgcccatattcagctaagcaatccaagttcactgtcaaacatcgacttttatgcccaggtgagcgacattacaccagcaggtagtgtggtcctttccccgggccaaaagaataaggcagggatgtcccaatgtgacatgcacccggaaatggtctcactctgccaagaaaacttccttatggacaatgcctacttctgtgaggcagatgccaaaaagtgcatccctgtggctcctcacatcaaggttgaatcacacatacagccaaggcttaaaccaagaggacatttacatcaccacagaaagccttacccactgctgctgggagcccctgggacaggagaacatgttccaggttctgagatgcctgtcccagactatacctccattcatatagtacagtccccacagggcctcatactcaatgcgactgccttgcccttgcctgacaaagagtttctctcatcatgtggctatgtgagcacagaccaactgaacaaaatcatgccttagcctttctttggtttcccaagagctacgtatttaatagcaaagaattgactggggcaataacgtttaagccaaaacaatgtttaaaccttttttgggggagtgacaggatggggtatggattctaaaatgccttttcccaaaatgttgaaatatgatgttaaaaaaataagaagaatgcttaatcagatagatattcctattgtgcaatgtaaatattttaaagaattgtgtcagactgtttagtagcagtgattgtcttaatattgtgggtgttaatttttgatactaagcattgaatgactatgtttttaatgtatagtaaatcacgctttttgaaaaagcgaaaaaatcaggtggcttttgcggttcaggaaaattgaatgcaaaccatagcacaggctaattttttgttgtttcttaaataagaaacttttttatttaaaaaactaaaaactagaggtgagaaatttaaactataagcaagaaggcaaaaatagtttggatatgtaaaacatttattttgacataaagttgataaagatatttttaataatttagacttcaagcatggctattttatattacactacacactgtgtactgcagttggtatgacccctctaaggagtgtagcaactacagtctaaagctggtttaatgttttggccaatgcacctaaagaaaaacaaactcgttttttacaaagcccttttatacctccccagactccttcaacaattctaaaatgattgtagtaatctgcattattggaatataattgttttatctgaatttttaaacaagtatttgttaatttagaaaactttaaagcgtttgcacagatcaacttaccaggcaccaaaagaagtaaaagcaaaaaagaaaacctttcttcaccaaatcttggttgatgccaaaaaaaaatacatgctaagagaagtagaaatcatagctggttcacactgaccaagatacttaagtgctgcaattgcacgcggagtgagttttttagtgcgtgcagatggtgagagataagatctatagcctctgcagcggaatctgttcacacccaacttggttttgctacataattatccaggaagggaataaggtacaagaagcattttgtaagttgaagcaaatcgaatgaaattaactgggtaatgaaacaaagagttcaagaaataagtttttgtttcacagcctataaccagacacatactcatttttcatgataatgaacagaacatagacagaagaaacaaggttttcagtccccacagataactgaaaattatttaaaccgctaaaagaaactttctttctcactaaatcttttataggatttatttaaaatagcaaaagaagaagtttcatcattttttacttcctctctgagtggactggcctcaaagcaagcattcagaagaaaaagaagcaacctcagtaatttagaaatcattttgcaatcccttaatatcctaaacatcattcatttttgttgttgttgttgttgagacagagtctcgctctgtcgccaggctagagtgcagtggcgcgatcttgactcactgcaatctccacctcccacaggttcaggcgattcccgtgcctcagcctcctgagtagctgggactacaggcacgcaccaccatgccaggctaatttttttgtattttagcagagacggggtttcaccatgttggccaggatggtctcgatctcctgacctcgtgatccacccgactcggcctcccaaagtgctgggattacaggtgtaagccaccgtgcccagccctaaacatcattcttgagagcattgggatatctcctgaaaaggtttatgaaaaagaagaatctcatctcagtgaagaatacttctcattttttaaaaaagcttaaaactttgaagttagctttaacttaaatagtatttcccatttatcgcagaccttttttaggaagcaagcttaatggctgataattttaaattctctctcttgcaggaaggactatgaaaagctagaattgagtgtttaaagttcaacatgttatttgtaatagatgtttgatagattttctgctactttgctgctatggttttctccaagagctacataatttagtttcatataaagtatcatcagtgtagaacctaattcaattcaaagctgtgtgtttggaagactatcttactatttcacaacagcctgacaacatttctatagccaaaaatagctaaatacctcaatcagtctcagaatgtcattttggtactttggtggccacataagccattattcactagtatgactagttgtgtctggcagtttatatttaactctctttatgtctgtggattttttccttcaaagtttaataaatttattttcttgg

SEQ ID NO: 458 - DNA, 543 bp, Homo sapiens
  misc_feature (1)...(543): n = a,t,c or g
tcgttcttaatagatcaacttcagacgtactcacttattatcttcttcaattcacttttaccatccacactttgacacgagggcggnnnnnnnnnaattgaaacctcgagaaccgtccgcangnccnaccggnccggaatcccgggacgacccacgcgagcgccggcctccggacggtcgggggcaggccttgcgctatctgcgaacgcacctgactcaggtgggcaccccggagctacggaggggccagcgggctcccttgcccatgcgtctgggagcgcgcgggggacgtggcgagtgcggggccggggcagccatggctgggagaggaccgtgggtgcggggggatgtgcgaaccccgtcccggctctgcattcctgcgcctctgcgccccgagggaccggccgggtctctgcactgggaccgaaaacgggctcctccccgctttcttcccctaagggctgaaaatgagtctctggaagaggaaacccgatgggatgatgcctggagtctctccctctctcatcaaagtgcaatcggcat

SEQ ID NO: 459 - DNA, 901 bp, Homo sapiens
ttttttttttttgcaggcctgtgtgtcactttcaggcccttcctcatttattcataatatgtgtagccacgaggtagcatttcctttggcatcctggagaaacatgtctcacttagggttggacctgttagttaatagttctgcagcttctggtatttggtagtctgcccgttgatttacaaaatgcctcactgtgattgtcgctacagtcaccacattcagagctagaaccatgaaggaaaacagatgcacactgttgaaaggctggtttggagtttcttccgcatgtgtttcatgctgaaatcctgaattgccactttgcacttcgatcccttttcagacgaatgggtcctatgatggaatctgttttccatttatatgaagaaatgtctcgtttgcttctggagacacaaccttgattggcagcgagactggtggtcactgctatcacatatcaaaactttacactgcagatacacagagctcatacttctcaagaatttaaaggcattaaactggaatctcccatagtgtccaaataagggatacacctttacaagtttcatctcgactacatccactcttgattaggtcgtaggttggagatgcaaagtcagaggtgggagaggctctacaggtatcaagaaacaccaccaaatttggatctgaggtgtgcagactaacttgaacaaaaagagtttggttcaaatccacataatatggtgattcaagtatagtcttttcaaatgaattggattcaaaaagagccatgctggtgttatatttgcccagtgcattttgactttgtatcacatcatcttctgttatgtatcttatctcccctgtagaattatgtaatacaaagtcaaaaagagccatgctggtgttatatttgcccagt

SEQ ID NO: 460 - DNA, 848 bp, Homo sapiens
tcagagcagagcaaggctgagccctgggggtaactgagcttagtgttactcatggagacaggagccaggaagcgcaggcctcccggcccatcggtgcagcctgacttggcgtggacagccccacctccacgggcagcgcccacgtcctcttcacacgggatgatctctacaacccatctggcagctttctccttgctgtgtgagtcttgggcctggtagaagtcaggagtgtacacttggttttttgaggagcagctcagagcttcaaggcagttacaacaataaagctcactgcacactgtgaatatgtgccccagagcatcgcagttttgaggatgggagtgagactagcagttcagaggcacggtgccagagtgtcacagttcctccctcccccaaagccagcttgtacttgaacctgtcgggagggttctattagtttcttatggccgctgtcacaaatacccacacacttagtggcttaagacaacacaaatctatcatcttacagttctgaggatagaagtatggaatgggtctcactgagatcaaatcacgatattgccaggggctgggcgcgatggctcacatctgtggtcctagcactttgagaggtcgaggcgggcggatcacctgaggatcaggagatctagaccagcctggccagcatggggaagacctggctctactagaaatacagaaggtacttcggggggtgaggcgtcaagcctggggacacccactacttcgtagggtgaggggcgaaaattgcatgcacccgggggggggggttaaaagagcttagatttcaccggcctcaacctgaggactcatgagaatgcccaagg

SEQ ID NO: 461 - DNA, 2490 bp, Homo sapiens
  misc_feature (1)...(2490): n = a,t,c or g
cgaaaagaaagtgggggactctaaagattttctccttttaagaaaaaatagttccggctggggagtacaaaatggagtgtaaaaagggccttgggccccagggaggcccctgtggactaaggggagttcatgcaccccttctttccccagaggggctggactcaggtgagtatgggggtgggggctcctgcacttcgacacaggcagcggaagggttttctccccattccctctgcactcccaacttgagctatactttttaagaaagtgattcaccctgcctttgcccccttccccagaacagaacacgttgatcatgggcgatatttttcattgtgccaaaaagttgccatgaccgtcattaaacctgtttaacaccaaataataaggaaaataaaacaaaaagttcgggcatggtgcagaaactcactccaaataaattacctaccaaaatatataatggtggaaatattccaaaattccatattttgggatttatacacaaaagataaacaaattagaggccaagaggctgccggaagggaaaaacggggcctggaaaggccgttgtgaggaatgagcttggcctaaagaggccactggcaggcagtagctggacctgccgaagtggccgaaaggcaggagctttggacgggggaggccgcagtgaggcgagagctagctgggcgtggagagtccactgtgaggccaaggccaaggccgggcccgtgcaggcctttgagaggcaggaggccgggccttgtcgaggcctgcagaggccaccaaaagtcaaaagcggggcttgggaaggccgccgggaggcatgagctgggctgggccgaaagaggccactgggaggcaggaggagctgggcctggagaggctgctgaaaggcaggagctttcgcctgaggatgccacagtgagacaccatctgggtctggaaggttccactgtgaggcagaggctgggcgtgaagaatctgctgtgaggcagatgttgggattgtagaggccgacgggaggcagaggctgggcctggaggggccaccaagatgcaggagctgggcctggagaggctgcaaagaagcatgagctgggcctggtgaggtcgacttgagaaagttcagggcctggagagaaggctgggaggcaggagctgggtctaaagaggccattgtaacgatggagctgtgcctgtggaggctgttgtgaggcagtaggctcatctgcggagactgccgtgacgtagggtatgggcctaaataggccattgtgagtcatgagcttggtctgtagaggctgactggagaaagttctgggcctggagaggctgccgggaggtaggagctgggccaaaagatgtaagcacatttgcatttattaggcactttatttccattattacactgtaatatataataaaataattatagaactcaccataatgtagaatcagtgggcatgttaagcttgttttcctgcaactggatggtcccacctgagcgtgatgggagaaagtgacagatcaataggtattagattctcataaggacagcacaacctagatccctcacatgcacagttcacaacagggtgcgttctcctatgagaatctaatgctgctgctgatctgagaaggtggagctcaggcgggaatgtgagcaaaggggagtggctgtaaatacagacgaagcttccctcactccctcactcgacaccactcacctcctgctgtgtggctccttgcggctccatggctcaggggttggggacccctgctcaagtgcatcagaaacgacccttcttcccacaccagtcttcacagtggtcaagtgcagcaaccacttagctcccaaggcatgtgcctcagctggcatttcgtcacaatcaacagtaagtggtagcttgagtcactgtgaggtcacctactggaaatcaccagcatcccatttcccactggcaaagagctcagcactgcccaaatcccatctgtgtgggtttatctcctgggacccttcctaacatattagtcagagtccaatcaggaagcataaaccactcaaaagtttaaagtggtaaaatttaatacagagaattattcattataacaggtgaacagcataatgagagattgactagcacaaagtaaagagaactctagagaatataggactagcccaggccaggcacggtggctcatgcctgaaattccagcaatttgagaagctaatgcaggaggattgcttaaggccaggagctagagaccggtctggacaacacagtgagaccctgtctctatccaaaagaagaaaaaagttagctgggggtggtggtgcacacttgtagtcccagctattcggaatgcggaagtttgagcctgccaggtcaaggctgcagtgaggcatgattatgccaatacagtacagcctggtgacagagcaagaccctgtctcaaaggccaaaacgccaatganttacaccgcactttc

SEQ ID NO: 462 - DNA, 400 bp, Homo sapiens
  misc_feature (1)...(400): n = a,t,c or g
cccacgcgtccgcccacgcgtccgcccacgcgtccgctttctaccttcataacctcctacttatgaatcaagaactaaattctggagacaagatgaaggtactacttaactaccatgacccctgctgactctgcttctgtggaaaccaataacttctctttcttcataaccccagnggtcactatttgaatgaagtgggattccaaacattttggcattcagtcttctgttttcagcccaggttggttttcattttttaaccacaggagatataaaagaatgatttagtaaatcataatagcagttaagtctgaagctgttcatcagcttctccttcacaagtttgggtatcagctcctcagtctcttttgctttcaccatttacaggcttcacttattg

SEQ ID NO: 463 - DNA, 423 bp, Homo sapiens
tttcgtcgagctcttaggacgtatccgcctccatcctcccccggccggggctgcccgaggtttcgggattcctactggggatggccgggcagaggcgaagggatcacggcctccgtggtaggccgggacgggctccagggcgaagggcgaacgctggcctagggttggggaggcgcacatctggtgctgctgttgggaaggcctcggtttctgacccggccatacgtcctgatcccgggagaagctgcttttcctcccgggccggagccgcggctgggccaggagctcagactgcgagcccgaggttggtgggcgctgggggtgcccggcggagaaaggatttctttgtcattgcctttttggcacggcctgactttaccatacgtggccgggaagcatctggacacagcattaaaaaggctt

SEQ ID NO: 464 - DNA, 2251 bp, Homo sapiens
ttttttttttgcatctgcacagactgtttttattattacctattgtaaaacatcaggttcactcaggagaaatatacgtgtaaacatttgctgtctgtcatgacaggtttggttgttggtggtgtcattttaagaaatagcaggtgcagctccatctcccgagtggggtttatggccaacagtctgaatctaggacgtgtgctcctggtttgcagcgctgggcaggcagtgtttttttgtcgtggtggttgttgggatgtttcagaaacacattttaaaaagaaagagatcagcagcgaaaaaccatatggctggctacatctttggattactggactccaggacgcccaagccaaacctttcaaaccggggtacaactttgctgctgttaatgtcagctgactttcagaagtgtccagggtgggagagccgccggttcagcttgggaagtttctccagcatgtccatcagcaggctgaagactgggtctctcctgcaggtcgaaagcccagcaggccgacagattctcactgacttccttccccaagctgacagaagtcaggacacgcttcattccttccccgcttccaatctgccagatggatgcctctgcagcctggttcttcaagggccagtctcttgcttgcagctcataccaaacagtcccaaatgcatagacatcagcagctttggagaatggcagctgatcctcgtccttcccgggggtcatctcgcgtacaatctcaggggccagatagcacagccagtcgtgggacagctttagctggttctcacgccgtccctctggggaccacgcctgagatcccaaaacagcccgaagtctgtgatgaccaccttgcccgttgtcatagaagacgtttctagatttgagatctttgtgtacgatgcccttggcatgaagatatcccatgcccttgatgatctcctgagcgatttgcctcgtcttgttgatgtccagagacgtcttggggtccctcacaaacgagtgcaacgtccgccccttgcagaagctggtgataatggccaggtggggcgggttcatgcaggcccccatgaagagcaccacgttctcatgccgcgtctgccggtagttcatcacctctttcttgaagagcttcaggtggtcctggttgtggccgtccatctccagcaggcgaatggccacctcgccatgccagcggccgcggtgcacccggccccagcggccctgcccgatgggctcgcccagctctacctgctcgaaggggatgtcccactcctgcaggtacacgctggtctggctggccttgcgagagatggggccccgccagggccggcgagagctcggcaagtcgtccacctcgtcctcatcgtcttctgcctctgacttgccagcctctggctcctcagcctccgcttcgtgagcttccaacacatctgctttcggctggtcatcgagccgggtaccgtcggcagcttcagggagcggggctgcgtgtgcaaaggctgaaatgtctggaaagataaactgcctgtcctatgatgaatgaagtagggcagctggggaagttgaacctgctgttcccgctggccagggtgaggggttgggggggcgtggtggcgctggatgggttggatgatgtcgggaagggcgccggtgaggagggtgtggagaaggtggtggaggaagggttgctgctggagtccaggtgattcatggccggagggtgctccttctttgtcagtgctttggggagggttccaaaatggggttcggctgctctgtccaccgggttgttgatgtccgaggggacagattctgtcctccgaagccgagttagtggcaggaaggatattctacaggcaggggcttctttggtacatttgttgtgacacttcaacctgcaatgcttgcacttcactccaaatatcatgctcttctggcacacgtggcagacctgcgacagccaggacttggtggagaacctgtgcgtcaccgacagcccgatatccctccgtaccatctgtggggatccatgcgagagatcaaacctcatcgaggagacgtcatcaatgcggttccccagctgagactcatgggacttgctccgggtgagtgtggggaagctgggcagcagctggaagaccttgcggctgggtggttgttgggatgtttcagaaacacattttaaaaagaaagagatcagcagcgaaaaaccatatggctggctacatctttggattactggac

SEQ ID NO: 465 - DNA, 824 bp, Homo sapiens
tctgtagatccctagtccagcgtggtggaattccacctgggcagacaccttctctctgctcttggctcttgccgttgccctctacttgggctactactgggcatgtgtgcttcagacccacagggctttttgtgccagcaatactgaagatctagagacagtcgtgaaccacataaagcatcgttatccccaagctccactgctggccgtgggcatctcttttggagggatactggtgctgaatcacctggcacaggccaggcaggctgcagggctggtggcagcactgactctgtctgcatgctgggattcctttgagaccactcgctccctggaaaccccactcaactcactgctcttcaatcagcccctcactgctgggctctgccaacttgtggaacgcctatcctatggtaagacctgcaggcccgtacaatccgccagtttgatgagcgctacacatctgtggcctttggatatcaagactgtgttacctactacaaagcagcaagccctagaaccaagatagatgccatccggatccctgtgctctatctcagtgcagcagatgaccccttctccaccgtttgtgcccttcccaaacaggccgcccaacactccccgtacgttgcgctgctcatcacagcccggggtggccacatcggcttcctggaagggctgctcccgtggcagcactggtacatgagccgcctcttgcatcagtacgccaaagccatcttccaggacccagaggggctgcctgacctcagggctctcttaccttctgaggacagaaacagctgacaagagtaccatttggggtc

SEQ ID NO: 466 - DNA, 435 bp, Homo sapiens
  misc_feature (1)...(435): n = a,t,c or g
tttcgtcgcaatacatcgtgcagtcaaagacaaagatattcttataagcagcaagggagaagcaactcacacatgcaggagattctcgataagattatcagcaaatatctcatcanaaactggggaggccagagggcagtgtcccagtgtattcaaagtgcttaaagaaaaaaaactgtcaactaagaaatcctttggccaaaagtaagggagaagtgaagacattcccagacaaacaaaagccagggagtttgataccactagacctaccatccaagaaatgctaacaggagtcctgcagggttgaaatgaaaggacactgacagtaacctgaagctgtgtgaagaaatagagatctcagcgaaggtaaatattatgattgcaacgacaatgtgcaattccactttttgttttctacatgatttaagaaactan

SEQ ID NO: 467 - DNA, 2464 bp, Homo sapiens
cgcccccgggagaccaagagaagggggaaatggggctgggggccgtccccgggagacaggcggccttccgagagggactggagcaggccgtgcggagtgggcattgcttgatgggcaggaagttgagtgttccttgcaagggtgctgtggcaagaggaggcctggtgtatttggcagcgttcctgaggctggacatgatccacctgatggctggccgagtaccccagggagctgatcgaatagcagtcaaggctgagatggaggccgtttttctggagaacctgaggcatgcagctggggttttggctcaggaggacctcgtgggactgctggagcccatcaacacccgcatcactgacccccagtacttcctggacacgccccagcaggcggcagccatcttacagaaggtaggaagacccaacctccaattacaaatggacatattccactggcagatcatggatgggaacctgacaggaaacatccgggagttcctgcccattgttgggcatgtgcaggtggcacaggtcccaggtcgaggggagcccagcagccccggagagctgaatttcccctatctgtttcaactgctggaagatgaaggctacaaaggcttcgtgggctgagacacagtagagggcttgagttggctacgttcatactgggataggcggggccacccagaggctggccagtgagggcccgcacaccacccacgtgcctccagacagcgagtgacatcccatctcctcctctgcattaaagatgacctgctgaacattgtcatatgtctctgtaatggggtggtgggacacatagtgtctaacacttcagtttctctgctgcttccctcccattgagaagccagtgccagggttgctgtgaagatgggagagcttctgaacccacctcattaaaggatgagaaacccagggtccgagagcaaagggacttgacggtggccgcaagtgcttcaaaggcagagctgggattggaacccaggtgtcatctcgatgggaatgtccagcagtgatgtccaagtgggaagtgaagacccgaaggctcaagggacacaggtggctgacagtggtcaaaggctagggggcaggattcaggcagaggagctctagggggtgtttgccaccctgtgtgaactcccgagactctaccaggggggccgaaaggagtaccccagaagggcccaaggggtcctcggggttgacctgactctctggagtcctggatgggtcagtggctgtgggtgtttggggagggcggttcctgctgccaggctggggcagcagaccctcaagacatagttacaaagcctttggtgtcactcagtgtctggcttgccctggggcccagaagggctggtcagtcctgcctctggcaggcaatctggtaggcccatgattcaaggaacagtgacattcagtggtccagtccactccctcagaggaggcgggtccagagggtgaaacaggctgtgttgatgacagactccaggtggtggtaggtggagaccagttgggcaggggggctctcgctgtcctggggctgtactgggaagggctctcggaaaaccactgtcagagacgtctttcctaagtgggagtccagaaacactagcacaaagcagtcagtgaacttctgattcagcacaaccaggtactgagttcccaagtctgggctttggaaatggcgacagctctgggggaagcggcttaggagaactttgatcaggctctggtaccaggagaccgtcatggataggaagcagtccagctgggggtcgatgtccccaatggatttggcatggactgcttctaggagttcctccagctctgccagggccaggcgcccccctagccgcagtcgatcaggccccggtggctccagcaagaagaggcgcttccaaagggtgtcccgacggcagtgccctccagccagccgcaccagctgagccagccgtgctcgtgccatgcccacctctgcagccagtggtgggaacagaggagccggtccaggcgctagaataagccctgaggcctccccagggctgccagctgaactcccaggagcctctggctcagggggcagtctgggtggcttccggaagcggcgcatgtcagcagtgagcctggggaagagctctcgctggctggtgagcaccacgaagaactgtagccgcagaacgtgccgctcagcctctccttgctcctcaaagggtgcagcacagtgacagacaagcagagacacatcaaagtcatcctggtgtcgaagtccctcagagtccaggtaggagccagaactgtgccatgccgacaccagggcatactcgttgtgttctgggccccctggccgggccattcgcaatggcttcatgtggtaagagctggcgtgatcagccacgtagttgtatagctggtgggcagcaatgagtggtgtggggagctcc

SEQ ID NO: 468 - DNA, 1354 bp, Homo sapiens
tctaaagagcttttatttctttctagagaataaggaaaatgatactctgcagaatttctatttcttttgtaattatctcaggggaaggtagttattaagtgttcactgattaggattaatgtttccaatttttgtcaagaacagaatgtatgtattactaatttaaccataatttcaatcaaaactgtgtcattaaaaatgttggcagtcatgcatttcctgcatggttatgaattttttcatgtatctatagtatttttctaacagtctaattttaattcattcactttctcacgaaaatgtattttttttccatttcagcatgtagtacttgtgttaccttttcacgaggcccacactcctccaaggaggctgctgattgtctctaaactgattacctccatttgttctttccttgatcttacagtgtccatcagcttcctatgattgaagaaaagcttccacttgtaataaaccaacttctctcatccagttatcaacatagaccaaaaaaaaaaaagaaaaaaaagggccaggcgcaggggctcatgcctgtaatcccaccattttgggaggccaggggggccaaatcacttgaagtcaggagttcaaaaccagtctggccaacatggggaaaccctgtctttactaaaaatacaaaaattacccggaaatggggggggcgcgcctatagttccagctactcaggaggctgaggcaggtgaattgcttgaatccaggaggcggaggttgcattgaaaggaaatcatgccactgcactgggcggcagagcaaaactctgtctcaagaagaaaaagaaaaaagaaaaaagcggagtcgttctgtgagtgaaaacactgaattccaccggttcctgatcatattgcctttatttcattcattcattcattctggaaatggggataaatagcccgtttgtctttcctgcaggtttgttacgatggtgaaggcaatttagaaggaactatttagtggaggataaaagtgttttgtaaatgttaagatgcattgttttgtttctgtcctgctgcccaattttctctcagcccaacacctgcctctatttggttcttaggttacacattaattccatttgcttagtaatttaaagaatgtactgtagtacaccaataagctaacaaactcgggcccttgaccccaagtcaccagtgtcacctagattcaaaaaccaatataacgagtcaagtatgaatgcacaatattttagctaagccctttctgtcccacctctaatgaatccacatgctgccccagggcttggcacatgctggtaaagtaagcaggctttgctccctcctgctccctggttttg

SEQ ID NO: 469 - DNA, 4747 bp, Homo sapiens
ttttttttttttgaattaattgatgaggtttatttgattgtctttcttataaaatacattaaaaatactgcttttaactgtaggcacacaattaaaacaaatgtaaacctatgtttaatttaaaatatattaaaatgatttaataaaggtcttttattattttacacatcaaatttcatgcaatcagtactccactgaaggagaaaaggattatgaaaaaacaatgaaagcacagggtaggaaaataaacaacacaaaagactaattctggattttttttctgtgtccttaataccctgtgctgtctttgacaacaaagatgccttacttatgtgattcagaggcccggaagtgaaaaaaatacaagtagttaatgaataatgcatatgttcatagcaatggtcaaattatactgtttcctaatggataccatttttctttatcgagtgggacactacagagtcggatgttaattgctcccacaaatacagttttactcttcacaataagcattaagacatgtccttggagctctgtgacttcatcatatactacaatttcattgtaagtggggtccgtacattttggaacagattttgttttcctcctacgaacttcactgggatatggtaaaagataaaattcaacatgtgcactgggcgcagagccatctgggagatgaatgtttttcatgtgtttcactagtatggtcagcttcacatcctcgtaggatatgactaactgcaccttaggcttcttgtctggaaacttctcacctaggtacacaggtgatgattcttcaactgtttgttgcccagcctcagagaggaaaaagctaagtacacaatcactgtttgtaacttcatgtgatacatttaatatctgttccatgtaatgatttagatctctgaatcttctgtgatctgaatttgtaaaaggtaggtgccaccaatgaggaaactctgggagagtcagtgatgcaaactgcttctgaagttggctgtgaagttttgaaaactgctcaaatgatttttctgtcaggcttgtttcgttgttgctgtgtgtcacctggatcagatacagattactggatttcttgctgaaccctaaaattgttgctctttcaatcgacctagttgtactcagcaaacaggattcctgaggaaaagtctgtgaagtagatttggcagggcttatggctgacatttgtgcaagtgtgtggatcaagttattcaatttaacagggaaacactccagactttcctttattttcttggtaaaatgacttgttgcttccaggtctgtgtcttgtggacgaagattattatacacatatttcaggtcttgaaatcccacttagctcaggcagtccctgcatacagcatcatttcccagcaggttccaagagcagttggctgtgctttctgataatattataagcacgacagcaaagttcccacaaaatcttgaaaatgctgtgggtttttccccaccctctgtaataaagtattcccatctctgaagtaaaaatgaaaggagctcggtccctttttatccctccaaatgtttgtgcatgacctaagaattttccaaagtcaatatgaaacatgtggcccgactttgtcagcatgatattatcattgtgacggtcacatactcccaggatgaatgttaccacacaccagccagcacaggagtagaaaaagttcctcaaggccttttcataatctgcctttaagtggttgtgctgactgaaccactttttaatggtattttctttcaatggtcctatcagtccagaatggcgatgaatctttgctagggtcacagcatcaggtaccatctgcaccaatcgttggtcttttcctgtggatagacatctataaatgatcatttgcatatccaagccttcctgcagccaaatattgtccatcacttgaataagctgcagaacaagcatatcctgacgaagatcatctccagccttaaaaataatgctgatgtttttgcccatcagattagcattgatgaaagtaatcttcaatggcaaagcattagatgtaaaatatgaacatgcatcgtgatcaatcccttttatacatagggcagggttcagaggaagatgacaagtatttacatcttgaaagaactcttctagtctgccaatttctttcttcagtacctcctgtctttgatggtcactggcagacttgactctttccccaatatctcccagaattttgataagtttctgctccttggaaaactcatcattcaaggctttacctgcacagaattggagagcagctagtagcttctgataccagcttttaaaataagcttcattttctgcattttttagcagccagtaaagacgatgggcaacctggatgctctgcaaggagcggtggagtagaagttgcactaaaggactctcaaggttccattcaaacttgacagcctgaactagctgtgggagatattccagtagttcatcattcaagaggttgtctaattgttgaactgccactttacgaatttcttgatctggaaaactggaagtcaaaagcccaagagcctctaaaggttgagaaaatgtccatcttctcaaaatggtatgcatttctgaaacagtcctttcatcccatccaggggcactacccaggactaaaggaagggagcagttttcattattgcagtagaagcgataaaaccataaatatcttttcttttcttcagagagtagtaggggagtctgtttctgtgaaagtctggcaatatgttttatacactcctttagtggctcttcaagattacttctattctcttcagaatcaggtttcatatactcccacccagtagctggaaaatcaatctgcagggtcaccggggatggctgacttacatcccacactcctggagttatcatttctacgggaggctcactctgtaatgtcatgctgaacagcatagacccgagaatggatttttcttttggaaacagtggaagacaagtccacgccagtaaatttgcattgttggttgcacaggcaatcccaaacagttttacagtgagcatggattcccttggaagtgactttatttcaaggggaaaattgatcctgtgcacccaggtttctggaatgttgtgtgctgcatacactgtgaagctgaggtgggaaggaagcccgggatttagataggaagtgcatctaggtacatttacaggctgaaaatctgcataaaagctgttacagtagacattgattagctggtagatggatgtggatagttcagttgttaccttctctatcaagccttttgctgaagtctctgaactttgataaaaattctctccttttctctgaagaattagacttagttcatttactgcatctgtaatttgtttggtttccacacaccctagaacactgcatatttttttaacttcttcaataatattatacacgttttcctgggttttcaataggtatttcaggtggaagtcatattttctgatgagtgttaagagacattgtctggatactttccaaatatgcataaattctagaagttgattcagataaaactgactgtggtcctcttcatgctttcgagatagctttcctggagcttccctacttttctgcaggtggagctgaataacagatttatctttttgaaacattttgtggctccccaaacagtggtcgttttgtaaaaattcttcagagccccatacacttagaatatgatctttggggagtagctggtcatttgtgcaaaaatgcagaatttctgcaattagatctttgacaagataattagcacatggcataaaatgaagaggttgtgttgagttatcaataaaaatatgtatattaaacttggtcttagaaaagagctgatacggaaatgctgtagtagtgctccagatcttcccagaattgaaattaacatcagctgcatgatatctttctctgattttttttactttgttgcaaaaagaggccagactcgtattgctgctttgaggtacttccactagctgaatggaacaacctattgactctatattcttctgccatgtactttcccacattccgggttgaagagagcctttcaaaagcatcaaagatggttccacaatgttcacatgtccactccttttattctcttctttcggcatgaagtcacttgagaaggatgaatttgttggaggaatgctactttcaaatcctatatggtagttatgattttcattttctaattctttctctagattaattttatccaaacttgtgaatgatggagctaaaatactgaatctggaatcatcagcaccatgatgttttcctatggggcttccccaggagcattctttattcgtattttgaggttttggtaacacagaaggactaaaaccaattgctggtgctttgctaacttgatgccaggagagttcacggcttttagaagtgaattcattcaaggatatttggtgtgcttcatttaatgaatgccctgttgagtcccattttggtgcagtgggcacaaaaaaggtgttttcatcaatttcactctcgtagtgtggaattttgccactgatctcatctactatctgatcaaaacccagactgacttggctagaagaatggggttgatttacaaagagaaattcttggtgttcatactgcttttcgtgtgattcattaggatttggatccgtttgccaagaatatgccat

SEQ ID NO: 470 - DNA, 429 bp, Homo sapiens
tcgaaaccaagcagctggtgacgcacagggactgagggtaggcctgcgggggagagggcgggaaaggccctcacagcagggcccagaggaagactgaccccaggctgagcaggagctgtacgcacagggcccaggggctgccggctgccaggaccaccgcattgcagaggtctcccttgcagcaagagatctgggagtccacaacggcacttaacctgccctctgccctggcaccccagggactcactgccaaagacgctcactttctgggagacacagaccccatccaggaaggggcacgagaccacgctgcaggaggccccttccaagaccgccaagcatctgtagcagcgcagaccctgagctgggagagagggcaagaaaacacacccctggtggagatttaagatgcttatggacccatgcgac

SEQ ID NO: 471 - DNA, 890 bp, Homo sapiens
atccatactggagagaaaccgtacagatgaaatgtgtgtggtaagatctttagtaataattcacaccttgcacagcatgagagaattcattcatgagagagttcttacaaactgagtatggcaaactcttcatgctaagttctagcattaatcaacatcagagattccatactaaagagaaatcatagcaatgtatgtgaatcaggtctcttgaggcctgccaaatgactagatatcaaaacatacatcttggatgaaaccatacagatggattatgtatgctgaggctattattcaaggaccattactatggaacatgataagatttacacaagcgataattcagtctctagttctccaatatttatgatactgcatgctgcagaaaagtcacagctccaaatacgttgaatctcatgacgcgatgcatgtcgaaggtccaagggcatgtggaaatggtcagttatattcaggcaattaaaaaacctaattatatggggttttttgaaaaggctactttacattttatgactttcatcctcaactctgaaatcacttcatgtgacttctttacagacctttcactgtggtctcttgaatcagtaggatgctgggcgcggtggctcccgcctgtaatctcagtacttttgggaggctgaggcgggcggatcacgaggttaggagatcaagaccatcctggctaacatggtgaaaccccgtctctactaaaaatacaaaaaattagccaggcatggtggcagacgcctgtagtcccagctactcgggaggctgaggcaggacaatggtgtgaacctgggaggtggagcttgcagtgagctatcacgccactgcactccagcctgggggacggagtgagactctgtctcaaa

SEQ ID NO: 472 - DNA, 441 bp, Homo sapiens
  misc_feature (1)...(441): n = a,t,c or g
atcgtagacatagagcaccgcggnggaattcgatgacccaaaagttactgccgcttccctagaaatgtccacataaaccaccccttgatctgcacgcagttaaaagtgggtataaatatgactgcgacactgccctgagctgctgctttctgcctggggggcagccccgctctgcaggagctgtagccctgccgcttccatacctcccattcacccttaaatccttccctggccaaagccaagaaccctcacaggctaagccctgctgtggagctcacctgctctgcatcaagatgtcgtaagagttcttgacatattctagacacaagccccttatcagatatctaatttgcaaatacatttttccattttgtgggcagtcagacagtttcttgctggtgtcctttgaaacacaaaagttttaagtttcgatgaaaccca

SEQ ID NO: 473 - DNA, 500 bp, Homo sapiens
cgacccacgcgtccgggggcgcgcggtcgggggcaggttgggccggaagaggggtccgggccggcactgaggcgggaaggggtggcatcttccttactttgtccatcctccggactcgcgatcttccttccggagccatgtcagaaggagtggacttgattgatatatatgctgacgaggagttcaaccaggacccagagttcaacaatacagatcagattgacctgtatgatgatgtgctgacagccacctcacagccctcagatgacagaagcagcagcactgaaccacctcctcctgttcgccaggagccatctcccaagcccaacaacaagacccctgcaattctgtatacctacagtggcctgcgtaatagacgagctgccgtttatgtgggcagcttctcctggtggaccacagaccagcagctgatccaggttattcgctctataggagtctatgatgtgggggaggtgaaatttgcagagaatcgagccaag

SEQ ID NO: 474 - DNA, 5583 bp, Homo sapiens
  misc_feature (1)...(5583): n = a,t,c or g
gcggccgctctttgccagggagggtggcatctatgctgtgctggtctgcatgcaagaatataagacttctgtcttcggtgcagcaggctgggctggcggcactgaagatgctggccgtcgccagctcctcggagatccccacttttgttactggccgagattctatccactctttgtttgatgctcagatgaccagagagatcttcgccagcatcgactcagccacacgcccgggctctgagagcctgctcctcactgtccctgcagccgtgatcctgatgctgaatactgaggggtgctcttctgcagcgagaaatggcttactcctgctcaacctacttttgtgcaaccaccacactctgggagaccagattataacccaagagctgagagacacgttgtttaggcactcagggatagcaccaagaacagaacctatgcctaccacacgcaccatcctcatgatgcttctcaatcgctactcagagccgccgggcagcccctgagcgtgcagcactagagacccccatcatccagggtcaggatgggtcccctgagctactgattcgatccctggttgggggcccatctgcagaactactcctggacttggagcgtgtgctgtgccgtgagggcagccccggaggtgccgtgaggcccctcctcaagcgcctccagcaggagacccagcctttcctcctgttgctgcggactctggatgctccggggcccaacaagactctgctgctgtctgtgctgagggtcataacccgactgctggatttccctgaggcaatggtcctcccctggcacgaggtcttggagccctgcctcaactgcctgagtggccctagcagtgactccgagattgttcaggagctgacctgcttcctacatcgcctggcctcgatgcataaggactatgctgtggtgctctgctgcctgggagcaaaagagatcctctccaaagtcctggacaagcactcagctcagctgctgctgggctgtgagcttcgggacctggtgacagagtgtgagaagtacgcacagctctatagcaacctcacctccagcatcctggccggctgcattcagatggtgctgggccagatcgaagaccacagacgaacccaccaacccatcaatatccccttctttgatgtgttcctcaggcatctctgccagggctccagtgtggaagtgaaggaggacaagtgctgggagaaggtggaggtgtcctccaacccgcaccgagccagcaagctgacggaccacaaccccaagacctactgggagtccaacggcagcaccggctcccactacatcaccctgcacatgcaccgtggtgttcttgttaggcagctcactttgctggtggccagtgaggactcaagctacatgccagccagggtggtggtgtttgggggtgacagcaccagctgcatcggcactgagctcaacacggtgaatgtgatgccctctgccagccgggtgatcctcttggagaacctgaaccgcttctggcccatcatccagatccgcataaagcgctgccagcagggcggcattgacacccgggttcggggtgtggaggtcctgggccctaagcccacattctggccactgttccgggagcagctgtgtcgccgaacatgtctcttctacacaattcgggcacaagcctggagccgggacatagcagaggaccaccggcgcctcctccagctctgtcccagactgaacagggttttgcgccacgagcagaattttgctgaccgcttcctccctgatgatgaggccgcccaggcactgggcaagacctgctgggaggccctggtcagccccctggtgcagaacatcacctctcccgatgcggaaggcgtgagtgccctgggatggctgctggatcagtacttagaacagagagagacctctcggaaccccttgagtcgagcagcgtcctttgcttctcgagttcgtcgcctttgccacttgctggtgcatgtggaacctcctcctgggccttctcctgagccatccactcggcccttcagcaagaacagcaagggtcgggaccggagcccggcgccttcgccagtgcttccaagcagcagcctgaggaacataacccagtgctggctgagcgtggtgcaggagcaggtcagcagattcctggctgcagcttggagggccccagactttgtgcctcgttactgtaaactctatgagcacttgcagagagcaggctccgagctgtttgggcctcgggcagccttcatgctggctctgcgcagtggcttctctggcgccttgctgcagcagtccttcctcactgctgctcacatgagtgagcagtttgccaggtacattgaccaacagatccagggtggcctgattggtggagcccctggagtggaaatgctggggcagcttcagcggcacctggaacccattatggtcctttctggtctggaactggccacaacttttgagcacttctatcagcattatatggcggaccgtctcctgagctttggttcgagctggctggagggggctgtgctagagcagattggcctctgttttcccaaccgcctcccacagctgatgctgcagagcctgagcacctctgaggagctgcagcgccagttccacctcttccagctccagcggctcgacaagttgttcttggagcaggaagatgaggaggaaaagagactataggaagaggaggaggaagaggaggaagaggaagctgagaaagaattatttatcgaagatccaagtccagccatttctatactggtcctgtcaccacgctgctggcccgtctccccactctgctacctgtaccatcccagaaagtgccttcccacagaattctgtgatgcccttgaccgtttctccagtttctacagccagagtcagaaccatccagtcctggacatgggaccacatcggcgactgcagtggacgtggctgggccgggctgagctgcagtttgggaagcagatactgcatgtgtccaccgtgcagatgtggctgctgctgaaattcaatcagacagaggaggtgtcagtagagaccttgctgaaggattctgacctctccccagagctgctgctccaggcactcgtgcccctcacctcagggaatggccctttgaccctgcatgagggccaggactttccacacgggggtgtgctgcggcttcatgagcctgggccccagcgcagtggggaggccctgtggctgatacctccccaggcatacctgaacgtagagaaggatgaaggccgaaccctggaacagaagaggaatctcttgagctgtcttcttgttcgtattctcaaagcccatggggaaaagggcctccacattgatcagctggtttgtctggtgctggaggcctggcagaagggtccaaatcctcctggaaccctgggccacactgttgctgggggtgtggcctgtaccagtacagatgtcctctcttgcatcctgcacctcttaggccagggctacgtgaaacggcgtgatgaccggccccagatcctgatgtatgccgctccagagcccatggggccctgccggggtcaggcagatgtccctttctgtggcagccagagcgaaacctccaagcccagcccagaagctgtggctaccctggcatctctacagctgcctgcaggccgcaccatgagcccccaggaagtagaagggttgatgaagcagacggtgcgtcaggtgcaggagacgctgaacttagagccagatgtcgctcagcaccttttggctcattcccactggggcgctgaacagctgctgcagagctacagtgaggaccctgagccactgctgctggcagctgggctgtgcgtacaccaggctcaggctgtacccgtacggcctgaccactgccccgtctgtgtgagccccctggggtgtgacgacgacctgccctctctctgctgcatgcactattgctgtaagtcttgctggaatgagtacctgacaactcggatcgagcagaaccttgttttgaattgcacctgccccattgccgactgccccgcccagcccaccggagccttcattcgtgccatcgtctcctcgccagaggtcatctccaagtatgagaaggcgctcctgcgtggctatgtggagagctgctccaacctgacctggtgcaccaacccccagggctgcgaccgcatcctgtgccgccagggcctgggctgtgggaccacctgctccaagtgtggctgggcctcttgcttcaactgtagcttccctgaggcacactaccctgctagctgtggccatatgtctcagtgggtcgacgacggtggctactatgacggcatgagcgtggaggcgcaaagcaagcacctggccaagctcatctccaagcgctgtcccagctgtcaggctcccatcgagaaaaacgaggggtgcctgcacatgacctgtgccaaatgtaaccatggattctgctggcgctgcctcaagtcctggaagccaaatcacaaagactattacaactgctctgccatggtaagcaaggcagctcgccaggagaagcggtttcaggactataatgagaggtgcactttccatcaccaggcgcgggagtttgctgtgaacttgcggaaccgggtgtctgccatccatgaagtgcccccgcccagatccttcaccttcctcaatgatgcctgccagggactggagcaggctcggaaggtgctggcctacgcctgcgtgtacagcttctacagccaggacgcagagtacatggatgtggtggagcagcagacagagaacctggagctgcacaccaatgccctgcagatcctcctggaggaaaccctgctgcggtgcagagacctggcctcctccctgcgcctcctgcgggccgactgcctcagcacgggcatggagctgctccggcggatccaggagaggctgcttgccatcctgcagcattctgcccaggatttccgggttggtcttcagagtccatcagtagaggcctgggaggcaaaaggacccaacatgcctggcagtcagccccaggcctcctcagggccagaggcagaagaggaggaggaagacgatgaggatgatgtgcccgagtggcagcaggatgagtttgatgaggagctggacaatgacagcttctcctacgatgagtctgagaacctggaccaagagactttcttctttggtgatgaggaagaggatgaagatgaggcctatgactgagggggcagatgcaggaaacacctagagcagccccagagtcacggggctgagggggcgggagctgcccctgtcatagggagggggattcccagcgtctgtagtgcttcctgtttgctgaataaaggtctctttctcacacacccnnnnnnnnnnnnnnnnnnnnnnnnnnnnnnnnccttttaagggaacaaattttaaggccnnnnnnnnnnaaagaaaaannnnnnnnnngggggccccaaaattaaattccggggccgggttttaaaaacnnnnnnnnnnnaaaaacccgggggtaccccaatttaaacccctggg

SEQ ID NO: 475 - DNA, 1093 bp, Homo sapiens
cgactgtggctcggaccaagggaccttcagggccgctagaccctcccaggcgccttgagacccgaggcgccctaccggcccccctccccaggttagcgggccggttgtaaggtctccggcgggcgctgcctgccttcctcccagagggtgtttcctagaaactgataaatcagatcgtgcctctttacccttggctttcgaagcaaattgatgttcacgtctgacgtgggcgcgggctgcgcagggcggcgccagaccccagccgcctcccaggggctagactgagcccggcacaaggggtgtgaaatagaatttattgtggctctgattatgtacacgtgagatggcctggctgggccggccgggctcacatggtttgtacaataaatacatctgtggggcgggctctccgcagccgggaagggccaccgccacggttcagtccagcttccgggctcccagcttcatggggcccttggccaccttcctctcggcgcgtttggcctccatctcccgccgccgctcctcgcgcttcttccgggccagctcagccttgacctgtcgactgtcagtctcgaggccctcccagttgtcctcaccccaagagtctggcctcggctgggtgctgggacgtgcagacagggtagcgaaggggtcgcccttgtcgctggactctgggccaccccagttatactcgctggccagccgtgtaccgtcaggaggtggctcctgggagcttggctcctgccagccctgttcccaggagccctcagcttcccagctgctccagtcggactctggggatttggaggatttgtggtcggagttgctgacctgactagcacggctcacttggcccccggtgctccagtcgtcctgctgggccagcacagactcggcctcctgctccaggctgccccagtcttcgtcgtcccatctgtcagcagtgctgctgtcctctgctgtgtccttgtcctcctcctgcgtctcccagtggcctgaggttgtaggggtggcaggaacaggggtgggggctggggcaggaactccttcaggcgtgggtctttggggaatgttggtttctgctcgtgcc

SEQ ID NO: 476 - DNA, 900 bp, Homo sapiens
ctaatacgttgcatgcccgcgtaaacttgggcccccccagggatcctttaaaacggccgccccttttttttttttttttttctcaaatgtcatttattagaaaatacaattcccgagaaaggagatacaagggattctgggaagtgggaagtaaacagtacacagatctctttaaatcaggagcatataggtcataataaaatgagctacaggcacaaagccagtaacacatttatggtccgttcatctggaaaagtttcaccgcccactccccactcctcttccccctcctggaagcagccagctttatccttggcattttaattttagagaaaatttaaacttccatgctgccctgtggcttcggtcaatggagcttctttctccagttatggaatgagtcagcaaaacggggagtttctgatccttggaattagggagggacagtttacagaatgtcctcatttcactcttttcccaatcatgggaaatatccagccaattctggttttaaagattcatatcaaattcaaagtccctccctccttttggcgaggaagacaaccctttggagcgaaacacaaaagagcaaatgtaaaatccatctggggcggggcatggtggctcacgcctgtaatcccagcactttgggaggccaaggcaggcagatcacgaggtcaagagatcgagaccatcctggccaacatggtgaaaccccgtctctactaaaaatacaaaaattagcttggcgtggtggcacatgcctgtaatccccagctactcgggaggctgaggtaggagaatcgcttgaacccgggaggcagattttgcagtgagtcgagatcatgccactacactccagcctggggacagggggaaactccgtttccaaaaaaaaaa

SEQ ID NO: 477 - DNA, 843 bp, Homo sapiens
tcctttttcatcatttaacgagcatttattgcacacgtctgttcaagcaccaggctcaggctggaaaccatccaaagcgcaatccctgacctcaggcagctcacagtccagtggggaagccgagaagcaaattaatgactctgaagaagcgcaggcaagtgctatgatcaaggcatgtgtgtgggtagggtgtctgggaaccccaaagtcagcctcaggtggggaggtaagtcaaggaagggtgaggggactgggctcagcctgggtctcggaggagagcggggccagccccggggatggtagagtcaacctgccaggcactgtgcactgctggccaggcccggccaatgagagcacaacttgttcagggtccaggaagcaaccccaggagaacaaagcctcgtggggagggaggaacctggagggtggaaggagtttgggcttttcctgaaggtgatgagagccactgaaggattctgggggaggagacatagggttatcctgggtcatgggggagagagctttgaaaggcagggaggtgggaggccgcagggactctcagaagtggagtctcagagctccttaagaggtgaaggcagccgggcgcgtgtgcacgcctgtaatcccagcactttgagaggccgacgcgggcggatcacaaagtcaggagatcaagaccatcctggctgacatggtgaaaccctgtctctactaaaaatacaaaaatttagctgggtgtggtgcgggcgcctatagtcccagctacttgggaggctgaggcaggagagttgcttgaacccggaaggtggaaaggcggaggttgcagtgagccgagatcacgcc

SEQ ID NO: 478 - DNA, 1307 bp, Homo sapiens
gggaagtgcacgcccacccagggggaaacccccccgttatttaccagaaaaaacaaaaattaggttggatgtgttcatacacaactgtattcctactgactggggaggtcaaagtacaagtctcgcccttatcttcggtgcgcttggcccgtccttctcagttttggcacggcaccccgctctttaaggtaagacctttatcataatcatcttcttcacctcttctcccacccttctgtatttcctctccagctctggggagttgacacctgctgtccttccacctttggtctgcaagtctggattgcttagagcagctaagtcaggagagacatgtaaaggggatgctgcttggtcctcctcctgttaatgaaagcacgaaaccttccccctctccttggaagctgactccacccatgtgttcaatcccaccagtcttccctcccaagtctggaagccccacgacctcttggtctcatctggtcacagcaagttagaggtggaaagagctcagacggggcccttctgtttacacatatactgcccatagccaggagttactgacaacactaccagccttctacactacattccttttccaagacttttctgggttagtttgctttccagcccactgatttccttcttattggacaggtcactcttttgcatcccaagcctggcttaggcaagtccctgaggttagtaaacaccttcagtgcccctcagccgagtcccttttgaccatggaataccatcagcctgaggatccagcccctggtaaggccgggactgcagaagcagtcatccctgaaaaccatgaggttctggcaggcccagatgagcaccctcaggacacagatgcaagagatgctgatggggaggctagagaacgggagccagcagaccaagctttgctgcctagccagtgtggggacaaccttgagtcccctctgcctgaagctagctcagctccaccggggccaacccttgggacactgcctgaagtagagacaataagggcatgctccatgccccaggagcttccttagtcccccaggacccgacagcctgagccagatttctactgtgtcaagtggatcccttggaaaggagaacagacacccatcatcacccagagcactaacgggcccttgccctctccttgccatcatgaacatcctctttcttcagtggaaggagaagctccccccgcagaaggaagtgatcacatcggatgagctcatggcccatcttggaaactgcctcctgtccatcaagccccaggagaagtcagagggacttct

SEQ ID NO: 479 - DNA, 3081 bp, Homo sapiens
ttattctcccattcggcttcttgaagtatgtgttccactccccaaaatattcattaagcgtcaggccccattaaaagtgtcccttcttcaggatctgaaggacttctttcaaaaagtttcacaggtatatgttgccattgatgaaagacttgcatctttgaaaactgatacatttagtaaaacaagagaggaaaaaatggaagatatttttgcacagaaagagatggaagaaggtgagttcaagaactggattgagaagatgcaagcaaggctcatgtcttcctctgtagatacccctcagcaactgcagtcggtctttgagtcactcattgccaagaaacaaagtctctgtgaagtgctgcaagcttggaataacaggttgcaggaccttttccaacaggaaaagggtagaaagagaccttcagttcctccaagtcctggaagactgagacaaggggaagaaagcaagataagtgcgatggatgcatctccacggaatatttctccaggacttcagaatggagaaaaagaggatcgcttcttaacaactttgtccagccagagctccaccagttctactcatctccaattgcctacgccacctgaagtcatgtctgaacagtcagtgggagggccccctgagctagatacagccagcagttccgaagatgtgtttgatgggcatttgctgggatccacagacagccaagtgaaggaaaagtcaaccatgaaagccatctttgcaaatttgcttccaggaaatagctataatcctattccatttccttttgatccagataaacactacttaatgtatgaacatgaacgagtgcccattgcagtctgcgagaaggaacccagctccatcattgcttttgctctcagttgtaaagaataccgaaatgccttagaggaattgtctaaagcgactcagtggaacagtgccgaagaagggcttccaacaaatagtacttcagatagcagaccaaagagtagcagccctatcagattacctgaaatgagtggaggacagacaaatcgtacaacagaaacagaaccacaaccaaccaaaaaggcttctggaatgttgtccttcttcagagggacagcagggaaaagccccgatctctcttcccagaagagagagaccttacgtggagcagatagtgcttactaccaggttgggcagacaggcaaggaggggaccgagaatcaaggcgttgagcctcaagatgaagtagatggaggagatacgcaaaagaagcaactcataaatcctcatgtggaacttcaattttcagatgctaatgccaagttttactgtcggctctactatgcgggagagtttcataagatgcgtgaagtgattctggacagcagtgaggaagatttcattcgttccctctcccactcatcaccctggcaggcccggggaggcaaatcaggagctgccttctatgcaactgaggatgatagatttattttgaagcaaatgcctcgtctggaagtccagtccttcctcgactttgcaccacattacttcaattatattacaaatgctgttcaacaaaagaggcccacggcgttggccaaaattcttggagtttacagaattggttataagaactctcagaacaacactgagaagaagttagatctccttgtcatggaaaatcttttctacgggagaaagatggcacaggtttttgatttgaagggctctcttaggaatcggaatgtaaaaactgacactggaaaagagagttgtgatgtggtcctgctagatgaaaatctcctaaagatggttcgagacaaccctctatatattcgttctcattccaaagctgtgctgagaacctcgatccatagtgactcccatttcctttctagccacctcattatagattattctttgctggttgggcgagatgatactagcaatgagctagtagttggaattatagattatattcgaacatttacatgggacaaaaagcttgagatggttgtgaaatcaacaggaattttaggtggacaaggttaaatgccaacagtggtgtctccggagttgtacaggactaggttttgtgaggcaatggacaattatttcctaatggtaccagaccactgtacaggcttgggtctgaattgctgaaatcaagcacatattttgaaatggactgtgaaggaaaaggggacaggaacaaaggaccataaataagctacatgttttatttcttcatcgtgttcaccactgtatgccaaggcttttcagttctgtgtctgtttagactgtccgtaatggaatggtaaaactccatgaatttgcactttggtttttgatacctgtggagctgtctgtacgttgggaagtggcatgaaaattttcttaagctaaaatacagacatgtttcaaagggctaaagttggagatgagtagatagggtgaaaaacgggttaaatttgctagcttaattgttttaagaagaaaacagtgtctcataaattgactatcctggcatcacatttaacatgttatctacttaaaaagcatttgtagagctgctgaatttgttttgtgtttttctgtaataatttaatgttacttattatcagaatttctgaaacctttacaaaaattctgatttattccattaatggccagttaaacacgtgggcatttattgttttattgaggaatttgacttaaactgggaatcctgtcatgttgtttatctttccagccttgcctgtttttgagtatgtttgatgtttttaaaattttgtcttctctgtggatgacaggaggctacagcaatttaacctttaagcctcccttttagaggatatttttaaagccttggtttaaaaatttttggtgcaattcatatattaaaattgcaccttaccttgcatacgctcatattctagggttttttctctatttttagggtatcatagtaaatcattagtaaatgagtctgtagttactaaaccctaatggaataattattaatgaaagatttttgaaatataaaaaataaattaggcccaatccaagaataaaccaaaaaggaaacc

SEQ ID NO: 480 - DNA, 417 bp, Homo sapiens
  misc_feature (1)...(417): n = a,t,c or g
gcgtccgtactgaaggatgtgttggttgcttccaagatttggccattataaagttggtataaacatctgggtgtaggtttttgtgcggacataatttttcacctcatttgggtaaacatcaagtgtgattgctggatcttattatgtttagttttataagaaactgctaaactgtcttccaaagtagctgtaccattttgcattcctatcagtaatgaatgagagttcctgctgatccacacccttgttaaaaaattctttccagcatcatctgtagattcacaatcccaaacaaaatcccagcaaattaattttactgacaaactgatttttcgagtttatatagagaggaagaagatccagtatagccagcacaacactgaagaagaataaaactgaaagactgacactctactn

SEQ ID NO: 481 - DNA, 332 bp, Homo sapiens
gttgaatttttgcccttgaaaacagctcactgggagaacgattggaggcgaccacttagttgtataaactacctacataatacgttcgcagattagaataatcgctgtctggacgagcaccacgagacacatcttcttgcgagattttttctgatagtagagcaggtcgctgtagctggccaggggctctttctacgagcacctctgagctttccgcattggcttctatgctatcaatcagatcaccctggtcatggatgatcatggccaaatctttaaatatctgattgacatccaaaatgttaggctccggctgacgaattgccgcttct

SEQ ID NO: 482 - DNA, 371 bp, Homo sapiens
cacgggagggaggcagggaaagaatgaccatacatcaataacagaaaagccatcaagagactttaacaggcacttaataacacaaaatatttagatgcccaatcaagatatgaaaagttcctctaattcattaatcatcaggaaagtgcaaatcaaacccacaattctttaccatcatatattcaccagaaaggctaaaatgaaaaccacagacaaaaccaagtataggtgaggatttaaagcaataacaactctcattcactgctcacaggattgtaaattgcaataatcacctgagaaaaccatttcatgatatttcctaaagctgaacaacacataacctatgacacaacaattccattccttaggta

SEQ ID NO: 483 - DNA, 565 bp, Homo sapiens
cacgcgtccgcctaggtaatggaaacgcagtatattttgtaactgatgaaagatttgagtccctatgtaatggagacgcactatattttaaacaggttaaatgaaagaaatccatgtggagacacatcataggaaagctcccaaacaccaaagaccaagagaagattttaaaagcaatcagaggtaggagagaagtcatccagggcagtgccagcagtacagacggccagctgccttctcagcagcagagaaagccagaagactgtggtgttcatcttcaatattgagagaaggaacctattgagtatccaacaaaattatcttttaacatcaaaggtgaaatgacattttcagataaaacagagtttactaccaacagaccatcattaaagatgcttctaaaagacaggattcaggaagaaggaaaaatgttttaaaaggaaagaatgagctgggcgtggtgggtcatgcctgttatcgcagcactttgagaggctgaggaaggaggattacttgaggccaggagttcaagaccagcctaagcaacatagcaagacccctctct

SEQ ID NO: 484 - DNA, 805 bp, Homo sapiens
ttttttttttttgagacggagtctcgctctgtcgcccaggctggagtgcagtggtgcaatctcggctcactgcaagctctgcctcccgggttcatgccattctcctgcctcagcctcccgagtagctgggactacaggcacccgccactaggcccggctaattttttatatttttagtagagacggggtttcaccgtgttagccaggatggtcttgatctcctgacctcgtgatccgcccgcctctgcctcccaaagtgctgggattacaggcgtgagccaccgcgcccggcctaattttttgtatttttagtagagacagggtttcaccatgttggccaggatggtctcaatctcctgacctcaggtgatctgcccgcctcagtctcccaaaatgctgggattacaggcgtgagccactgcgcctggccttgtcttcacttttgtttttttggttttttttttgagatggagtcttgctctgtcgcccaggctgaagtgcagtggcatgatctccgctcactgcaagctccgcctcccgggttcacgccattctcctgcctcagcctcccaggtagctgggactacaggcgtccaccaccacgcccagctaattttttgtatttttagtagagacggggtttcaccgtgttagccaggatggtctcgatctcctgacctcgtgatccgcccgcctcggcctcccaaagtgctgggattacaggcttgagccactgcgcccggccttcagttttcatatctgttaaagtgaaggatcttaaggagatgattttatgtttatttat

SEQ ID NO: 485 - DNA, 275 bp, Homo sapiens
  misc_feature (1)...(275): n = a,t,c or g
ttttttttttttgagatggagtgtctcactgtcagccaggctggagtgcagtggtacaacctccactcactgcaacctctgcctcctggattcaagcaattctcctgccctcagcctcccaagtagctgggattagagggtgcccacatcacgcccggctaaatttttgtaattttttgagatggagtgtctcactgtcagccaggctggagtgcagtggtacaacctccacttcattgnaacctctgcctccttggatttcaaacaatttctcc

SEQ ID NO: 486 - DNA, 376 bp, Homo sapiens
  misc_feature (1)...(376): n = a,t,c or g
tcgatatgaacaaagtcagattccaggacaaatagacaggtgatgtggtcacccaaaaaccataatagcccttcagttagttatgcggcaagctcacatatattctactatatgaacaaagtcagattccagttcgtaatttaaaaagtgctggtgaattgtcagttgtatttcaatatggaacccccattcaatggctaggagatgagagcagcagagatggaagagaaaccttataaaattctgctgagaatatgctttttttcttcataatgctcatgtttctcatgccaagagtagctgtgcattaggggtattttaagagaaattccttttaggggaatattttctgactgacttgatcaatcatatctan

SEQ ID NO: 487 - DNA, 770 bp, Homo sapiens
aggggaagcagaagctaccagtgtgcgttgatatacaggaccctgcagtccccttcttcccaacctgctgcacagaaccagacagacagggccctggggctctgatcagactctttttattgttttgttttttataaacaagtctcaggtggaaaaagaaagaaagggaggagctagctctctgccttctcagccaattgaaatcgtggaaaccaatgggcttcagctagccccactcatcactgctgggggggaaaagacatccctactccccttccccgtggcactcatgatattctcaatgccccaacaagggtcatcttggttcctctcggcgtttctgtcctggcctttggctctggctccggctctgactccgactccggctccggccagggccccgggagcccctagagctgctggagcccctggaagagttgctgccggccgtggaacatgtgctggtgccctggccccgggacaggaagcttggtctgctgtatgggagccaggcctcttcatctgggtggagcacccgctgggctgccaggggcacggcctggaccgctttcctctccccactgcgctcccgctccagggaggacatgctgcctgctgccctcagctctagggcccagctcgcctcttcctctggcggtggcaagggtggtgggggcaagtccccaggactgttctccctcctgtaggcaagagccttgggtttcttctcgtgccgaattcctgcagcgcgggtccagtcggggtcaaaa

SEQ ID NO: 488 - DNA, 781 bp, Homo sapiens
tttcgtgcctgcctcctagagctcattccctacgccccgactctgtcctggacagcgtgcccaccagccatggcggggccccggggcctcctcccactctgcctcctggccttctgcctggcaggcttcagcttcgtcagggggcaggtgctgttcaaaggctgtgatgtgaaaaccacgtttgtcactcatgtaccctgcacctcgtgcgcggccatcaagaagcagacgtgtccctcaggctggctgcgggagctcccggatcagataacccaggactgccgctacgaagtacagctggggggctctatggtgtccatgagcggctgcagacggaagtgccggaagcaagtggtgcagaaggcctgctgccctggctactggggttcccggtgccatgaatgccctgggggcgctgagaccccatgcaatggccacgggacctgcttggatggcatggacaggaatgggacctgtgtgtgccaggaaaacttccgcggctcagcctgccaggagtgccaagaccccaaccggttcgggcctgactgccaatcggtgtgcagctgtgtgcacggagtgtgcaaccatgggccacgtggggatggaagctgcctgtgctttgctggatacactggcccccactgtgatcaagagctgcccgtctggcaagagcttggctttccccaaaacaacccaaggctccgaaaggctcccaactgcaagtgcctgcccggctaacacaggaatggattgattgcgactcccaacccctgcaggcccg

SEQ ID NO: 489 - DNA, 934 bp, Homo sapiens
gcccctcgagggatactctagagcggccgccctttttttttttttttttttttttttttttgcatcaacatttttattgaaatacaaaaagtgcaaagcggtgaaatacatgattggtgccaaggaagtcattaagtgtgaatgtgaacactggattcacacagtacaagcacccgctccctggggtacagaccagtgggggacatgagaaagaccaaatagatccgaaaggctccccagtgaatggggctgtgagcgacacttgatacacaaaggagggcggagagcagagcagccctggccgaggctagagaccaagggactgatgaagaaccagcagcagcccaggccccagggggctggatgcactgctgatggtcttgggagagcccagcgaagttatgcccaggcccagcctggcttgcggatggggctgggctggtcagtgaggatccccacagtacgggctctggaatcatcctgcctggccaaggtcatgggggcagggtcactgcaggtacttccctgtactccccaaggacaaggctgcaggaagagggatccccaggaaggagtgtaattctacgagacagtgggagtgagatcagccatcactggggccgaggttctttgaaagacaacagggctggcccgggcgcagtggctcacgcctggaatcccagcactttgggaggccgaggtgggtggatcatgaggtcaggagatcgagaccatcctggccaacatggtgaaaccccgtctctactaaaaatacaaaaattagctgggcatggtggcatgcacctatagtcccagctactcaggaggctgaggcaggagaattgcttgaacccagaaggcggaggtgtgccgagatcgcgccactgcactccagcctggtgacagagcgagactccatctcagaaaaaaaaaa

SEQ ID NO: 490 - DNA, 10348 bp, Homo sapiens
ttgctgtgtgaggcagaacctgcgggggcaggggcgggctggttccctggccagccattggcagagtccgcaggctagggctgtcaatcatgctggccggcgtggccccgcctccgccggcgcggccccgcctccgccggcgcacgtctgggacgcaaggcgccgtgggggctgccgggacgggtccaagatggacggccgctcaggttctgcttttacctgcggcccagagccccattcattgccccggtgctgagcggcgccgcgagtcggcccgaggcctccggggactgccgtgccgggcgggagaccgccatggcgaccctggaaaagctgatgaaggccttcgagtccctcaagtccttccagcagcagcagcagcagcagcagcagcagcagcagcagcagcagcagcagcagcagcagcagcaacagccgccaccgccgccgccgccgccgccgcctcctcagcttcctcagccgccgccgcaggcacagccgctgctgcctcagccgcagccgcccccgccgccgcccccgccgccacccggcccggctgtggctgaggagccgctgcaccgaccaaagaaagaactttcagctaccaagaaagaccgtgtgaatcattgtctgacaatatgtgaaaacatagtggcacagtctgtcagaaattctccagaatttcagaaacttctgggcatcgctatggaactttttctgctgtgcagtgatgacgcagagtcagatgtcaggatggtggctgacgaatgcctcaacaaagttatcaaagctttgatggattctaatcttccaaggttacagctcgagctctataaggaaattaaaaagaatggtgcccctcggagtttgcgtgctgccctgtggaggtttgctgagctggctcacctggttcggcctcagaaatgcaggccttacctggtgaaccttctgccgtgcctgactcgaacaagcaagagacccgaagaatcagtccaggagaccttggctgcagctgttcccaaaattatggcttcttttggcaattttgcaaatgacaatgaaattaaggttttgttaaaggccttcatagcgaacctgaagtcaagctcccccaccattcggcggacagcggctggatcagcagtgagcatctgccagcactcaagaaggacacaatatttctatagttggctactaaatgtgctcttaggcttactcgttcctgtcgaggatgaacactccactctgctgattcttggcgtgctgctcaccctgaggtatttggtgcccttgctgcagcagcaggtcaaggacacaagcctgaaaggcagcttcggagtgacaaggaaagaaatggaagtctctccttctgcagagcagcttgtccaggtttatgaactgacgttacatcatacacagcaccaagaccacaatgttgtgaccggagccctggagctgttgcagcagctcttcagaacgcctccacccgagcttctgcaaaccctgaccgcagtcgggggcattgggcagctcaccgctgctaaggaggagtctggtggccgaagccgtagtgggagtattgtggaacttatagctggagggggttcctcatgcagccctgtcctttcaagaaaacaaaaaggcaaagtgctcttaggagaagaagaagccttggaggatgactctgaatcgagatcggatgtcagcagctctgccttaacagcctcagtgaaggatgagatcagtggagagctggctgcttcttcaggggtttccactccagggtcagcaggtcatgacatcatcacagaacagccacggtcacagcacacactgcaggcggactcagtggatctggccagctgtgacttgacaagctctgccactgatggggatgaggaggatatcttgagccacagctccagccaggtcagcgccgtcccatctgaccctgccatggacctgaatgatgggacccaggcctcgtcgcccatcagcgacagctcccagaccaccaccgaagggcctgattcagctgttaccccttcagacagttctgaaattgtgttagacggtaccgacaaccagtatttgggcctgcagattggacagccccaggatgaagatgaggaagccacaggtattcttcctgatgaagcctcggaggccttcaggaactcttccatggcccttcaacaggcacatttattgaaaaacatgagtcactgcaggcagccttctgacagcagtgttgataaatttgtgttgagagatgaagctactgaaccgggtgatcaagaaaacaagccttgccgcatcaaaggtgacattggacagtccactgatgatgactctgcacctcttgtccattgtgtccgccttttatctgcttcgtttttgctaacagggggaaaaaatgtgctggttccggacagggatgtgagggtcagcgtgaaggccctggccctcagctgtgtgggagcagctgtggccctccacccggaatctttcttcagcaaactctataaagttcctcttgacaccacggaataccctgaggaacagtatgtctcagacatcttgaactacatcgatcatggagacccacaggttcgaggagccactgccattctctgtgggaccctcatctgctccatcctcagcaggtcccgcttccacgtgggagattggatgggcaccattagaaccctcacaggaaatacattttctttggcggattgcattcctttgctgcggaaaacactgaaggatgagtcttctgttacttgcaagttagcttgtacagctgtgaggaactgtgtcatgagtctctgcagcagcagctacagtgagttaggactgcagctgatcatcgatgtgctgactctgaggaacagttcctattggctggtgaggacagagcttctggaaacccttgcagagattgacttcaggctggtgagctttttggaggcaaaagcagaaaacttacacagaggggctcatcattatacagggcttttaaaactgcaagaacgagtgctcaataatgttgtcatccatttgcttggagatgaagaccccagggtgcgacatgttgccgcagcatcactaattaggcttgtcccaaagctgttttataaatgtgaccaaggacaagctgatccagtagtggccgtggcaagagatcaaagcagtgtttacctgaaacttctcatgcatgagacgcagcctccatctcatttctccgtcagcacaataaccagaatatatagaggctataacctactaccaagcataacagacgtcactatggaaaataacctttcaagagttattgcagcagtttctcatgaactaatcacatcaaccaccagagcactcacatttggatgctgtgaagctttgtgtcttctttccactgccttcccagtttgcatttggagtttaggttggcactgtggagtgcctccactgagtgcctcagatgagtctaggaagagctgtaccgttgggatggccacaatgattctgaccctgctctcgtcagcttggttcccattggatctctcagcccatcaagatgctttgattttggccggaaacttgcttgcagccagtgctcccaaatctctgagaagttcatgggcctctgaagaagaagccaacccagcagccaccaagcaagaggaggtctggccagccctgggggaccgggccctggtgcccatggtggagcagctcttctctcacctgctgaaggtgattaacatttgtgcccacgtcctggatgacgtggctcctggacccgcaataaaggcagccttgccttctctaacaaaccccccttctctaagtcccatccgacgaaaggggaaggagaaagaaccaggagaacaagcatctgtaccgttgagtcccaagaaaggcagtgaggccagtgcagcttctagacaatctgatacctcaggtcctgttacaacaagtaaatcctcatcactggggagtttctatcatcttccttcatacctcaaactgcatgatgtcctgaaagctacacacgctaactacaaggtcacgctggatcttcagaacagcacggaaaagtttggagggtttctccgctcagccttggatgttctttctcagatactagagctggccacactgcaggacattgggaagtgtgttgaagagatcctaggatacctgaaatcctgctttagtcgagaaccaatgatggcaactgtttgtgttcaacaattgttgaagactctctttggcacaaacttggcctcccagtttgatggcttatcttccaaccccagcaagtcacaaggccgagcacagcgccttggctcctccagtgtgaggccaggcttgtaccactactgcttcatggccccgtacacccacttcacccaggccctcgctgacgccagcctgaggaacatggtgcaggcggagcaggagaacgacacctcgggatggtttgatgtcctccagaaagtgtctacccagttgaagacaaacctcacgagtgtcacaaagaaccgtgcagataagaatgctattcataatcacattcgtttgtttgaacctcttgttataaaagctttaaaacagtacacgactacaacatgtgtgcagttacagaagcaggttttagatttgctggcgcagctggttcagttacgggttaattactgtcttctggattcagatcaggtgtttattggctttgtattgaaacagtttgaatacattgaagtgggccagttcagggaatcagaggcaatcattccaaacatctttttcttcttggtattactatcttatgaacgctatcattcaaaacagatcattggaattcctaaaatcattcagctctgtgatggcatcatggccagtggaaggaaggctgtgacacatgccataccggctctgcagcccatagtccacgacctctttgtattaagaggaacaaataaagctgatgcaggaaaagagcttgaaacccaaaaagaggtggtggtgtcaatgttactgagactcatccagtaccatcaggtgttggagatgttcattcttgtcctgcagcagtgccacaaggagaatgaagacaagtggaagcgactgtctcgacagatagctgacatcatcctcccaatgttagccaaacagcagatgcacattgactctcatgaagcccttggagtgttaaatacattatttgagattttggccccttcctccctccgtccggtagacatgcttttacggagtatgttcgtcactccaaacacaatggcgtccgtgagcactgttcaactgtggatatcgggaattctggccattttgagggttctgatttcccagtcaactgaagatattgttctttctcgtattcaggagctctccttctctccgtatttaatctcctgtacagtaattaataggttaagagatggggacagtacttcaacgctagaagaacacagtgaagggaaacaaataaagaatttgccagaagaaacattttcaaggtttctattacaactggttggtattcttttagaagacattgttacaaaacagctgaaggtggaaatgagtgagcagcaacatactttctattgccaggaactaggcacactgctaatgtgtctgatccacatcttcaagtctggaatgttccggagaatcacagcagctgccactaggctgttccgcagtgatggctgtggcggcagtttctacaccctggacagcttgaacttgcgggctcgttccatgatcaccacccacccggccctggtgctgctctggtgtcagatactgctgcttgtcaaccacaccgactaccgctggtgggcagaagtgcagcagaccccgaaaagacacagtctgtccagcacaaagttacttagtccccagatgtctggagaagaggaggattctgacttggcagccaaacttggaatgtgcaatagagaaatagtacgaagaggggctctcattctcttctgtgattatgtctgtcagaacctccatgactccgagcacttaacgtggctcattgtaaatcacattcaagatctgatcagcctttcccacgagcctccagtacaggacttcatcagtgccgttcatcggaactctgctgccagcggcctgttcatccaggcaattcagtctcgttgtgaaaacctttcaactccaaccatgctgaagaaaactcttcagtgcttggaggggatccatctcagccagtcgggagctgtgctcacgctgtatgtggacaggcttctgtgcacccctttccgtgtgctggctcgcatggtcgacatccttgcttgtcgccgggtagaaatgcttctggctgcaaatttacagagcagcatggcccagttgccaatggaagaactcaacagaatccaggaataccttcagagcagcgggctcgctcagagacaccaaaggctctattccctgctggacaggtttcgtctctccaccatgcaagactcacttagtccctctcctccagtctcttcccacccgctggacggggatgggcacgtgtcactggaaacagtgagtccggacaaagactggtacgttcatcttgtcaaatcccagtgttggaccaggtcagattctgcactgctggaaggtgcagagctggtgaatcggattcctgctgaagatatgaatgccttcatgatgaactcggagttcaacctaagcctgctagctccatgcttaagcctagggatgagtgaaatttctggtggccagaagagtgccctttttgaagcagcccgtgaggtgactctggcccgtgtgagcggcaccgtgcagcagctccctgctgtccatcatgtcttccagcccgagctgcctgcagagccggcggcctactggagcaagttgaatgatctgtttggggatgctgcactgtatcagtccctgcccactctggcccgggccctggcacagtacctggtggtggtctccaaactgcccagtcatttgcaccttcctcctgagaaagagaaggacattgtgaaattcgtggtggcaacccttgaggccctgtcctggcatttgatccatgagcagatcccgctgagtctggatctccaggcagggctggactgctgctgcctggccctgcagctgcctggcctctggagcgtggtctcctccacagagtttgtgacccacgcctgctccctcatctactgtgtgcacttcatcctggaggccgttgcagtgcagcctggagagcagcttcttagtccagaaagaaggacaaataccccaaaagccatcagcgaggaggaggaggaagtagatccaaacacacagaatcctaagtatatcactgcagcctgtgagatggtggcagaaatggtggagtctctgcagtcggtgttggccttgggtcataaaaggaatagcggcgtgccggcgtttctcacgccattgctcaggaacatcatcatcagcctggcccgcctgccccttgtcaacagctacacacgtgtgcccccactggtgtggaagcttggatggtcacccaaaccgggaggggattttggcacagcattccctgagatccccgtggagttcctccaggaaaaggaagtctttaaggagttcatctaccgcatcaacacactaggctggaccagtcgtactcagtttgaagaaacttgggccaccctccttggtgtcctggtgacgcagcccctcgtgatggagcaggaggagagcccaccagaagaagacacagagaggacccagatcaacgtcctggccgtgcaggccatcacctcactggtgctcagtgcaatgactgtgcctgtggccggcaacccagctgtaagctgcttggagcagcagccccggaacaagcctctgaaagctctcgacaccaggtttgggaggaagctgagcattatcagagggattgtggagcaagagattcaagcaatggtttcaaagagagagaatattgccacccatcatttatatcaggcatgggatcctgtcccttctctgtctccggctactacaggtgccctcatcagccacgagaagctgctgctacagatcaaccccgagcgggagctggggagcatgagctacaaactcggccaggtgtccatacactccgtgtggctggggaacagcatcacacccctgagggaggaggaatgggacgaggaagaggaggaggaggccgacgcccctgcaccttcgtcaccacccacgtctccagtcaactccaggaaacaccgggctggagttgacatccactcctgttcgcagtttttgcttgagttgtacagccgctggatcctgccgtccagctcagccaggaggaccccggccatcctgatcagtgaggtggtcagatcccttctagtggtctcagacttgttcaccgagcgcaaccagtttgagctgatgtatgtgacgctgacagaactgcgaagggtgcacccttcagaagacgagatcctcgctcagtacctggtgcctgccacctgcaaggcagctgccgtccttgggatggacaaggccgtggcggagcctgtcagccgcctgctggagagcacgctcaggagcagccacctgcccagcagggttggagccctgcacggcgtcctctatgtgctggagtgcgacctgctggacgacactgccaagcagctcatcccggtcatcagcgactatctcctctccaacctgaaagggatcgcccactgcgtgaacattcacagccagcagcacgtactggtcatgtgtgccactgcgttttacctcattgagaactatcctctggacgtagggccggaattttcagcatcaataatacagatgtgtggggtgatgctgtctggaagtgaggagtccaccccctccatcatttaccactgtgccctcagaggcctggagcgcctcctgctctctgagcagctctcccgcctggatgcagaatcgctggtcaagctgagtgtggacagagtgaacgtgcacagcccgcaccgggccatggcggctctgggcctgatgctcacctgcatgtacacaggaaaggagaaagtcagtccgggtagaacttcagaccctaatcctgcagcccccgacagcgagtcagtgattgttgctatggagcgggtatctgttctttttgataggatcaggaaaggctttccttgtgaagccagagtggtggccaggatcctgccccagtttctagacgacttcttcccaccccaggacatcatgaacaaagtcatcggagagtttctgtccaaccagcagccatacccccagttcatggccaccgtggtgtataaggtgtttcagactctgcacagcaccgggcagtcgtccatggtccgggactgggtcatgctgtccctctccaacttcacgcagagggccccggtcgccatggccacgtggagcctctcctgcttctttgtcagcgcgtccaccagcccgtgggtcgcggcgatcctcccacatgtcatcagcaggatgggcaagctggagcaggtggacgtgaaccttttctgcctggtcgccacagacttctacagacaccagatagaggaggagctcgaccgcagggccttccagtctgtgcttgaggtggttgcagccccaggaagcccatatcaccggctgctgacttgtttacgaaatgtccacaaggtcaccacctgctgagcgccatggtgggagagactgtgaggcggcagctggggccggagcctttggaagtctgtgcccttgtgccctgcctccaccgagccagcttggtccctatgggcttccgcacatgccgcgggcggccaggcaacgtgcgtgtctctgccatgtggcagaagtgctctttgtggcagtggccaggcagggagtgtctgcagtcctggtggggctgagcctgaggccttccagaaagcaggagcagctgtgctgcaccccatgtgggtgaccaggtcctttctcctgatagtcacctgctggttgttgccaggttgcagctgctcttgcatctgggccagaagtcctccctcctgcaggctggctgttggcccctctgctgtcctgcagtagaaggtgccgtgagcaggctttgggaacactggcctgggtctccctggtggggtgtgcatgccacgccccgtgtctggatgcacagatgccatggcctgtgctgggccagtggctgggggtgctagacacccggcaccattctcccttctctcttttcttctcaggatttaaaatttaattatatcagtaaagagattaattttaacgt

SEQ ID NO: 491 - DNA, 611 bp, Homo sapiens
cccacgcgtccgattaaatggaaagataattaaatatgtaaattcataaggaacaaaagacgagaagttaattatacaataggctggtgacaccagagttcattgttatgtgccacaagaaaattaaattttttaaaaaactagaacgctcttcttttagtgttttgctgaaatcctgttttgtatttgtttctttacaacaggtgtaggtataggaggtcaagaaaaggagttcggtaaagggcatagctaataacaaccacacattgggccaggcgcagtggcttacgcctgtaatcccagcactttgggaggctgagacgggcagatcacctgagatcaggagtttgagaacagcctggccaacatggtgaaactccatctctactaaaaatacaaaaattagccaggcatgctggtgcacacctgtaatcccagctactcgggaggctgaggcaggaggattgcttggagaatcacttgaacgcaggagaatcacttgaacgcaggagaatcgcttgaacccaggaggcagaggttgcagtgagctgagatcatgccactgcactccagcctgggcaacagagcaagactctgtctcaaaaaaaaaa

SEQ ID NO: 492 - DNA, 391 bp, Homo sapiens
ttcgccattcgtgctttcttggaaactggtgtttatttccttcagcgttatttccatcttgtttaagagcttgtggaagaacagcttaaggccactcagtggttattcttacccattcagtggtctgagcagtggaagttgcagaccagtcattcatggtaggctaagtgctccaatcttcagtagggaactgctgaataggcacagagggcacctgcatgtctttaaaccagtctgcaacctcagattgagtagcagtaaacttgcactacagcagtccattcactttgaaattcctcctttttcagctgcagcctactcttccttttcaatctcttcaggatctctatagaagtagagatcaggcatgatcatgggagatggtgcaaca

SEQ ID NO: 493 - DNA, 402 bp, Homo sapiens
aaagtccacctcatgtagacaccatcggatatgaatagggcttttgaaacagacacccaaagcattggagagaaaaacagatctccatctgagccagattattttgagagaaaaaagttcaaaagatcttaagaaaaagctcatattagatataagattgatcagccagaagatattcccctaaaagcaatttctctgtaaacactcaaagtgcacagctactctcagcatgagaaacatgagccttatgaaaaaaaagtgcagtttttcagaagaattttatagcctttttcccatctttgctggtctgtcatctcctagccattaaattggggttctatattgaaatacatctgacaactttcaacaacactttttgatgaagaaatagaaactgactgg

SEQ ID NO: 494 - DNA, 588 bp, Homo sapiens
ttttttttttttgagacggagtctcgctctgtagcccaggctgaagcgcagtggttgtgagctcggcttactgcaagctccacctcccgggttcaagccaatctccctacctcggcctcccgagtagctgggactatgggcgcccgccaccatgcccggctaatttttgtatctttagtagagacggggtttcactgtgttggctaggatggtcttgatctcctgaccttgtgatccgcccaccttggcctcccaaggtactgcgattacaggcatgagctaccatgcccggccacaagacatagattttctatatgcacatcaagggaggtgctggtttaggttgctataggacagagctatcctgtattccagttggtttttgtagagaaacaattagacttctctagatagagccctgatttttctctcacgctttcagttttttaaaagcactaatgatatttcctgttttctcataagaaaaagtcaatactatgccttacaaagagacctttccttctaatatagaattttatttgaaagtgagtacatgtttataactagagaataaaaggagaatttttg

SEQ ID NO: 495 - DNA, 1772 bp, Homo sapiens
ttttttttttttaagattattctaaaatacaacgtttattaaaaaaacatgcgatcttgccaataggccaattccatgagaacaaaagattttttttcccacctacaagtctttttagagaaacaaacggaactatttccagatgaggcggggtgtctgggaggggctgtgggtggtctggggctggtgactggtgaggttgggtggccctctgggggtccgggaggcactttccgttttgcttctgttggagatgttcccgtcggatgctgaagaacaagcctgccggctggggccactcccgacctgggctgtggcacccgtgtggccctcggccctcctggcctgagaaaggggagtgagaaggagccactgtcctgatatgggcaaaactcggggtcactggtctcatgcttccaaggccccgtgagcaggccaggtggggggatccctgggggaagcccctcacccttctccaacccccagccttcggggagcccctgccctccaggccctgtgctcggaggtggggggaggacggctcagtgacttttggttcccatgacattgacagagacagggacctcgacgcatcctccatacccgctgcggggaaatggaccccaccagccagcacggggtgagttgggggccagtccctggcagagtgtgggtgtccacagagggtctcttctgcagtggcggatcgggcgccagcagggtcccggcctcagtgctgcctgtgcgggcgaagggtggcctgtgggcaagggctggagctgccccagcagccgcgggctctgcctcacgacccagtgggtgccccgtgatgtggcagggctggccttgagtttcctgcttctcacgagcctggcaccgccaagcccaggcccctctggcccatctccacaacaccctgtgtggccgccgcttggggcaggccctgtgggccccacccagcctggctgaggggcggtggagagtgtccgcctggacggtgaggtcagctggcggctgctggccaccctcgtgctcgaaagatgcccctagcgccccctccgttgcatcaggaccctaggccagcctgtcccagtgtctcctcagctcaccatggcaggctcaatggtgaccccccttttatatagggggaaactgaggcctggcgaaagaaagatgcggcctgaggtgggacgtgaacccgcggccctgcagcccagacagcggccccggagtgaccaccagcttcaccgaagcccctttactgtgcccccgaggacacctgcctgccgttccccagggccgtcaccgccgatagcggtagcgcttgaagtgaaaccacagctggaagatgccgttggcaaactggcagcggaagccgtggcggtgcgagtattcccactcgcggttgacgatcttgaaagcgatgtcctcgtagggcggccccgcgtggaagcgcaggatggcgaaatccttgttgtcggcgcaggcctccaggaagtactcgggcgtggagcgcttgtcgatgaggtcggggtagaagatgttgaacttgtatccctgcacgatcttgggcggtgggttgtcaaagtcgtagtgcgtctggttgtacttgttccactcgaagcccgtgtgcacgcggttgaagaagcgcggcttgcgtggccggtacttgtcggcccacaggtaggccttgccggtgagtggcatctccacgctgaactgcgcctcgtcttggcccatgccctccttggcccgccgaaagaagatgtcct

SEQ ID NO: 496 - DNA, 1123 bp, Homo sapiens
aatgctcctaggaggcattaatttcccagcacttctgggctgcctccaacgctggagagtgggaacagtctgagagggtccttaggcagggacacagttcctgacagttggaactgtgtgtttaaggaattgagaggtactgaagggatgtggatggggcattgacagcatctgaccccacatggttcagatgcatccataccccactttttactccatcctatcactacttcttcaagtcccaacttccaaaaacagacacacacacatacaaatgaaacagttagcaggaccagctatatttcctgttcttacagataatcttaaatccataattgatattcatcatctccttcctccccctactattatggatgaatcatgcaccccaccctcacacacaattcatatgttgaagtcccagctgccagccagtacttcagaatgtggccatgtttggagatagagcctttaaagaggtgattaaattgaagggaagccgttgaggtggggccctaatcctaatgactgggggtctcctaagaagaggaagaggccagatgcggtggctcatgcctgtaatctcagcactttgggacgccaaggctggcagagcacttgaggtcaggagtttgagaccagcctggtccacatggtgaaaccccaactctactaaaatacaaaaattaaccggccgtgggggcagggacctgtaatcccagctactcaggaggccgaggcaggtgaatcacttgaaccccgggagccgaagtttgagggagcccagttgcgccactgtattcaacctaagggaagaggagatttggcttaacggcccgtcctctgccctaataaacatggggggcgcgttaagaatcaattttctcgcgcgcctccgcggtaaattttttataggaacaagatcattttttcgcccggttaaaatttgggttgggggaggacccctctttggctcaaatattcttccttgcgtggggggatcttgggtgactttggagcaggcaccagcttttggcacgggactcttttgctgaatcacactcggctaactttcctttccccctttccttttacgtgatacaaagcccccttttgacgttcc

SEQ ID NO: 497 - DNA, 444 bp, Homo sapiens
agctttacgcaagacccgccgcgacggaatcgcgcggacgggagcgcagcccgcagcgtcgtggaaaggtacgaacaactatccctggagattggagatggctgggaggccgggttctcaagagcaaagcaaggataggggcaccggtagcctcccgccgccgtctcaacggcctctgggcccatcccctgagggggcggggccgtctcctccacctcccggtattccccgaggaggcggctcctcatcctccgagggtcctcacagctactttttgtccctcgtcgattcccagctcctaagaaggggcttccctctgacacccctcattcaaaggcacctcccaccccgcacctcatccttggcggagaggactcacaggtaccgattctctaggctgccgcccccaaccccatttcgtacccccggaaggccaaacatccc

SEQ ID NO: 498 - DNA, 1061 bp, Homo sapiens
cccacgcgtccgaggaattatagataaaccttaggtcaaatcatttcacaattgcattggtggtattgaaaaatgatgagatttctctgacagagagctttgtcctagtttttgttcttcataggtcaaaactggcaatattctcttgtctgcaagataaagtgtttgtgcttctatcaccatatgcatgaacatgtaagaatcagatacaatttctgcttcatcagtttcacatgttcatgttgtcactgaaaaaatgcatctactgtttatagctcccaaggagaccccaaatcctttttttttcttttgagatggagtcttgctcttgttgcccaggctggagagcagtagcgcgatctcagctcactgcaacccccacctcctgggttcaagtgattctcctgcctcagcctccccagtagctgggatttacaggtgcccgctaccatgcctggctaatttttgtatttttagtagagacaggctttcaccatgttggccaggctgatctcaaactcctgacctcaggtgatccacccacctcggcctccgaaagtgctgggattacaggagtgagccaccgcgcctggccccgtattcattttttatactggaaaacattttttttgtaatttttctttgcaaagaaatgagcataaaaatgaatactccaaagaaaaggaattattatggcaaattaaaagggacacggtactatgatttaattactgtcttgtctttttaaaatgtcatctcttgttttaccctttttttaaataaaagctttaaaaacatgtctttgggtattattctggaggtatgtttcttttatataagatttcaagtttaaacatttacaataagtaataatatttaaattcttataacaagtaatgaaatatttggtttagtaattagcttagtctatttttaaaaatcattaaaatttactttgtttttaagaatgccatactacaaatgatgttatttggttttaatggtgttttgtgtttaagatagaataaatagagtttgaagaatgtgaaaaaaaaaaaaaa

SEQ ID NO: 499 - DNA, 421 bp, Homo sapiens
cgtgagccaccacagctggcccagctttattctttttgctcaatattgctttgggtatttggaggttttttgtggttccatatgaattttatgattgatttttctatttctgtgaaaaatgtcattggaattttggtagggattgcattgaatctgtagattgcttttggtggtgtggacattttttaaatattgatttttccaatccattaatacaggatatctttccatttatctgtgttttgatttctttcatcagagttatatagttttcagtgtacagatattttacctccttggttaaatttattcctattttaattttgctgacgctattataaatgggatttttttttaaatttctttttcaaatagcttgttgctgcgtatagaaatgctactgatatttggctgggcgccg

SEQ ID NO: 500 - DNA, 15359 bp, Homo sapiens
tctacctcgcgggtgcctctggtgtctccagaggtctccgaccccagcccgcccccagccctcccgcccagcccgcagccccctccctctgttccccgacctcagaccctgggcttccgacctcgacatcatgggtgacgcagaaggcgaagacgaggtccagttcctgcggacggacgatgaggtggtcctgcagtgcagcgctaccgtgctcaaggagcagctcaagctctgcctggccgccgagggcttcggcaaccgcctgtgcttcctggagcccactagcaacgcgcagaatgtgccccccgatctggccatctgttgcttcgtcctggagcagtccctgtctgtgcgagccctgcaggagatgctggctaacacggtggaggctggcgtggagtcatcccagggcgggggacacaggacgctcctgtatggccatgccatcctgctccggcatgcacacagccgcatgtatctgagctgcctcaccacctcccgctccatgactgacaagctggccttcgatgtgggactgcaggaggacgcaacaggagaggcttgctggtggaccatgcacccagcctccaagcagaggtctgaaggagaaaaggtccgcgttggggatgacatcatccttgtcagtgtctcctccgagcgctacctgcacctgtcgaccgccagtggggagctccaggttgacgcttccttcatgcagacactgtggaacatgaaccccatctgctcccgctgcgaagagggcttcgtgacgggaggtcacgtcctccgcctctttcatggacatatggatgagtgtctgaccatttcccctgctgacagtgatgaccagcgcagacttgtctactatgaggggggagctgtgtgcactcatgcccgctccctctggaggctggagccactgagaatcagctggagtgggagccacctgcgctggggccagccactccgagtccggcatgtcactaccgggcagtacctagcgctcaccgaggaccagggcctggtggtggttgacgccagcaaggctcacaccaaggctacctccttctgcttccgcatctccaaggagaagctggatgtggcccccaagcgggatgtggagggcatgggcccccctgagatcaagtacggggagtcactgtgcttcgtgcagcatgtggcctcaggactgtggctcacctatgccgctccagaccccaaggccctgcggctcggcgtgctcaagaagaaggccatgctgcaccaggagggccacatggacgacgcactgtcgctgacccgctgccagcaggaggagtcccaggccgcccgcatgatccacagcaccaatggcctatacaaccagttcatcaagagcctggacagcttcagcgggaagccacggggctcggggccacccgctggcacggcgctgcccatcgagggcgttatcctgagcctgcaggacctcatcatctacttcgagcctccctccgaggacttgcagcacgaggagaagcagagcaagctgcgaagcctgcgcaaccgccagagcctcttccaggaggaggggatgctctccatggtcctgaattgcatagaccgcctaaatgtctacaccactgctgcccactttgctgagtttgcaggggaggaggcagccgagtcctggaaagagattgtgaatcttctctatgaactcctagcttctctaatccgtggcaatcgtagcaactgtgccctcttctccacaaacttggactggctggtcagcaagctggatcggctggaggcctcgtctggcatcctggaggtcctgtactgtgtcctcattgagagtccagaggttctgaacatcatccaggagaatcacatcaagtccatcatctccctcctggacaagcatgggaggaaccacaaggtcctggacgtgctatgctccctgtgtgtgtgtaatggtgtggctgtacgctccaaccaagatcttattactgagaacttgctgcctggccgtgagcttctgctgcagacaaacctcatcaactatgtcaccagcatccgccccaacatctttgtgggccgagcggaaggcaccacgcagtacagcaaatggtactttgaggtgatggtggacgaggtgactccatttctgacagctcaggccacccacttgcgggtgggctgggccctcaccgagggctacaccccctaccctggggccggcgagggctggggcggcaacggggtcggcgatgacctctattcctacggctttgatggactgcatctctggacaggacacgtggcacgcccagtgacttccccagggcagcacctcctggcccctgaagacgtgatcagctgctgcctggacctcagcgtgccgtccatctccttccgcatcaacggctgccctgtgcagggtgtctttgagtccttcaacctggacgggctcttcttccctgttgtcagcttctcggctggtgtcaaggtgcggttcctccttggtggccgccatggtgaattcaagttcctgcccccacctggctatgctccatgccatgaggctgtgctccctcgagagcgactccatcttgaacccatcaaggagtatcgacgggaggggccccgggggcctcacctggtgggccccagtcgctgcctctcacacaccgacttcgtgccctgccctgtggacactgtccagattgtcctgccgccccatctggagcgcattcgggagaagctggcggagaacatccacgagctctgggcgctaacccgcatcgagcagggctggacctacggcccggttcgggatgacaacaagaggctgcacccgtgtcttgtggacttccacagccttccagagcctgagaggaactacaacctgcagatgtctggggagacgctcaagactctgctggctctgggctgccacgtgggcatggcggatgagaaggcggaggacaacctgaagaagacaaaactccccaagacgtatatgatgagcaatgggtacaagccggctccgctggacctgagccacgtgcggctgacgccggcgcagacaacactggtggaccgtctggcagaaaatgggcacaacgtgtgggcccgagaccgcgtgggccagggctggagctacagcgcagtgcaggacatcccagcgcgccgaaaccctcggctggtgccctaccgcctgctggatgaagccaccaagcgcagcaaccgggacagcctctgccaggccgtgcgcaccctcctgggctacggctacaacatcgagcctcctgaccaggagcccagtcaggtggagaaccagtctcgttgtgaccgggtgcgcatcttccgggcagagaaatcctatacagtgcagagcggccgctggtacttcgagtttgaagcagtcaccacaggcgagatgcgcgtgggctgggcgaggcccgagctgaggcctgatgtagagctgggagctgacgagctggcctatgtcttcaatgggcaccgcggccagcgctggcacttgggcagtgaaccatttgggcgcccctggcagccgggcgatgtcgttggctgtatgatcgacctcacagagaacaccattatcttcaccctcaatggcgaggtcctcatgtctgactcaggctccgaaacagccttccgggagattgagattggggacggcttcctgcccgtctgcagcttgggacctggccaggtgggtcatctgaacctgggccaggacgtgagctctctgaggttctttgccatctgtggcctccaggaaggcttcgagccatttgccatcaacatgcagcgcccagtcaccacctggttcagcaaaggcctgccccagtttgagccagtgccccttgaacaccctcactatgaggtatcccgagtggacggcactgtggacacgcccccctgcctgcgcctgacccaccgcacctggggctcccagaacagcctggtggagatgcttttcctgcggctgagcctcccagtccagttccaccagcacttccgctgcactgcaggggccaccccgctggcacctcctggcctgcagccccccgccgaggacgaggcccgggcggcggaacccgaccctgactacgaaaacctgcgccgctcagctgggggctggagcgaggcagagaacggcaaagaagggactgcgaaggagggcgcccccgggggcaccccgcaggcggggggagaggcgcagcccgccagggcggagaatgagaaggatgccaccaccgagaagaacaagaagagaggcttcttattcaaggccaagaaggtcgccatgatgacccagccaccggccacccccacgctgccccgactccctcacgacgtggtgcctgcagacaaccgcgatgaccccgagatcatcctcaacaccaccacgtactattactccgtgagggtctttgctggacaggagcccagctgcgtgtgggcgggctgggtcacccctgactaccatcagcacgacatgagcttcgacctcagcaaggtccgggtcgtgacggtgaccatgggggatgaacaaggcaacgtccacagcagcctcaagtgtagcaactgctacatggtgtggggcggagactttgtgagtcccgggcagcagggccggatcagccacacggaccttgtcattgggtgcctggtggacttggccactggcttaatgacctttacagccaatggcaaagagagcaacacctttttccaggtggaacccaacactaagctatttcctgccgtcttcgtcctgcccacccaccagaacgtcatccagtttgagctggggaagcagaagaacatcatgccgttgtcagccgccatgttccaaagcgagcgcaagaacccggccccgcagtgcccaccgcggctggagatgcagatgctgatgccagtgtcctggagccgcatgcccaaccacttcctgcaggtggagacgaggcgtgccggcgagcggctgggctgggccgtgcagtgccaggagccgctgaccatgatggcgctgcacatccccgaggagaaccggtgcatggacatcctggagctgtcggagcgcctggacctgcagcgcttccactcgcacaccctgcgcctctaccgcgctgtgtgcgccctgggcaacaatcgcgtggcgcacgctctgtgcagccacgtagaccaagctcagctgctgcacgccctggaggacgcgcacctgccaggcccactgcgcgcaggctactatgacctcctcatcagcatccacctcgaaagtgcctgccgcagccgccgctccatgctctctgaatacatcgtgcccctcacgcctgagacccgcgccatcacgctcttccctcctggaaggagcacagaaaatggtcacccccggcatggcctgccgggagttggagtcaccacttcgctgaggcccccgcatcatttctcgcccccctgtttcgtggccgctctgccagctgctggggcagcagaggccccggcccgcctcagccctgccatcccgctggaggccctgcgggacaaggcactgaggatgctgggggaggcggtgcgcgacggtgggcagcacgctcgcgaccccgtcggggcctccgtggagttccagtttgtgcctgtgctcaagctcgtgtccaccctgctggtgatgggcatctttggcgatgaggatgtgaaacagatcttgaagatgattgagcctgaggtcttcactgaggaagaggaggaggaggacgaggaggaagagggtgaagaggaagatgaggaggagaaggaggaggatgaggaggaaacagcacaggaaaaggaagatgaggaaaaagaggaagaggaggcagcagaaggggagaaagaagaaggcttggaggaagggctgctccagatgaagttgccagagtctgtgaagttacagatgtgccacctgctggagtatttctgtgaccaagagctgcagcaccgtgtggagtccctggcagcctttgcggagcgctatgtggacaagctccaggccaaccagcggagccgctatggcctcctcataaaagccttcagcatgaccgcagcagagactgcaagacgtacccgtgagttccgctccccaccccaggaacagatcaatatgctattgcaattcaaagatggtacagatgaggaagactgtcctctccctgaagagattcgacaggatttgcttgactttcatcaagacctgctggcacactgtggaattcagctagatggagaggaggaggaaccagaggaagagaccaccctgggcagccgcctcatgagcctgttggagaaagtgcggctggtgaagaagaaggaagagaaacctgaggaggagcggtcagcagaggagagcaaaccccggtccctgcaggagctggtgtcccacatggtggtgcgctgggcccaagaggacttcgtgcagagccccgagctggtgcgggccatgttcagcctcctgcaccggcagtacgacgggctgggtgagctgctgcgtgccctgccgcgggcgtacaccatctcaccgtcctccgtggaagacaccatgagcctgctcgagtgcctcggccagatccgctcgctgctcatcgtgcagatgggcccccaggaggagaacctcatgatccagagcatcgggaacatcatgaacaacaaagtcttctaccaacacccgaacctgatgagggcgctgggcatgcacgagacggtcatggaggtcatggtcaacgtcctcgggggcggcgagtccaaggagatccgcttccccaagatggtgacaagctgctgccgcttcctctgctatttctgccgaatcagccggcagaaccagcgctccatgtttgaccacctgagctacctgctggagaacagtggcatcggcctgggcatgcagggctccacgcccctggacgtggctgctgcctccgtcattgacaacaatgagctggccttggcattgcaggagcaggacctggaaaaggttgtgtcctacctggcaggctgtggcctccagagctgccccatgcttgtggccaaagggtacccagacattggctggaagccctgtggtggagagcgctacctggacttcctgcgctttgctgtcttcgtcaacggcgagagcgtggaggagaacgccaatgtggtggtgcggctgctcatccggaagcctgagtgcttcggacccgccctgcggggtgagggtggctcagggctgctggctgccatcgaagaggccatccgcatctccgaggaccctgcgagggatggcccaggcatccgcagggaccggcggcgcgagcactttggtgaggaaccgcctgaagaaaaccgggtgcacctgggacacgccatcatgtccttctatgccgccttgatcgacctgctcggacgctgtgcaccagagatgcatctaatccaagccggcaagggtgaggccctgcggatccgcgccatcctccgctcccttgtgcccttggaggaccttgtgggcatcatcagcctcccactgcagattcccaccctgggcaaagatggggctctggtgcagccaaagatgtcagcatccttcgtgccggaccacaaggcgtccatggtgctcttcctggaccgtgtgtatggcatcgagaaccaggacttcttgctgcacgtgctggacgtggggttcctgcccgacatgagggcagccgcctcgctggacacggccactttcagcaccaccgagatggcgctggccgtgaaccgctacctgtgcctggccgtgctgccgctcatcaccaagtgtgcgccgctctttgcgggcacagaacaccgcgccatcatggtggactctatgctgcataccgtgtaccgcctgtctcggggtcgttcgctcaccaaggcgcagcgtgacgtcatcgaggactgcctcatgtcgctctgcaggtacatccgcccgtcgatgctgcagcacctgttgcgccgcctggtgttcgacgtgcccatcctcaacgagttcgccaagatgccactcaagctcctcaccaaccactatgagcgctgttggaagtactactgcctacccacgggctgggccaacttcggggtcacctcagaggaggagctgcacctcacacggaaactcttctggggcatctttgactctctggcccataagaaatacgacccggagctgtaccgcatggccatgccttgtctgtgcgccattgccggggctctgccccccgactatgtggatgcctcatactcatctaaggcagagaaaaaggccacagtggatgctgaaggcaactttgatccccggcctgtggagaccctcaatgtgatcatcccggagaagctggactccttcattaacaagtttgcggagtacacacacgagaagtgggccttcgacaagatccagaacaactggtcctatggagagaacatagacgaggagctgaagacccaccccatgctgaggccctacaagaccttttcagagaaggacaaagagatttaccgctggcccatcaaggagtccctgaaggccatgattgcctgggaatggacgatagagaaggccagggagggtgaggaggagaagacggaaaagaaaaaaacggcgaagatatcacaaagtgcccagacctatgatcctcgagaaggctacaaccctcagccccccgaccttagtgctgttaccctgtcccgggagctgcaggccatggcagaacaactggcagaaaattaccacaacacgtggggacggaagaagaagcaggagctggaagccaaaggcggtgggacccaccccctgctggtcccctacgacacgctcacggccaaggagaaggcacgagatcgagagaaggcccaggagctactgaaattcctgcagatgaatggctacgcggttacaagaggccttaaggacatggaactggactcgtcttccattgaaaagcggtttgcctttggcttcctgcagcagctgctgcgctggatggacatttctcaggagttcattgcccacctggaggctgtggtcagcagtgggcgagtggaaaagtccccacatgaacaggagattaaattctttgccaagatcctgctccctttgatcaaccagtacttcaccaaccactgcctctatttcttgtccactccggctaaagtgctgggcagcggtggccacgcctctaacaaggagaaggaaatgatcaccagcctcttctgcaaacttgctgctctcgtccgccaccgagtctctctctttgggacagacgccccagctgtggtcaactgtcttcacatcctggcccgctccctggatgccaggacagtgatgaagtcaggccctgagatcgtgaaggctggcctccgctccttcttcgagagtgcctcggaggacatcgagaagatggtggagaacctgcggctgggcaaggtgtcgcaggcgcgcacccaggtgaaaggcgtgggccagaacctcacctacaccactgtggcactgctgccggtcctcaccaccctcttccagcacatcgcccagcaccagttcggagatgacgtcatcctggacgacgtccaggtctcttgctaccgaacgctgtgcagtatctactccctgggaaccaccaagaacacttatgtggaaaagcttcggccagccctcggggagtgcctggcccgtctggcagcagccatgccggtggcgttcctggagccgcagctgaacgagtacaacgcctgctccgtgtacaccaccaagtctccgcgggagcgggccatcctggggctccccaacagtgtggaggagatgtgtcccgacatcccggtgctggagcggctcatggcagacattggggggctggccgagtcaggtgcccgctacacagagatgccgcatgtcatcgagatcacgctgcccatgctatgcagctacctgccccgatggtgggagcgcgggcccgaggcacccccttccgccctgcccgccggcgcccccccaccctgcacagctgtcacctctgaccacctcaactccctgctggggaatatcctgagaatcatcgtcaacaacctgggcattgacgaggcctcctggatgaagcggctggctgtgttcgcacagcccattgtgagccgtgcacggccggagctcctgcagtcccacttcatcccaactatcgggcggctgcgcaagagggcagggaaggtggtgtccgaggaggagcagctggccctggaggccaaggcggaggcccaggagggcgagctgctggtgcgggacgagttctctgtgctctgccgggacctctacgccctgtatccgctgctcatccgctacgtggacaacaacagggcgcagtggctgacggagccgaatcccagcgcggaggagctgttcaggatggtgggcgagatcttcatctactggtccaagtcccacaacttcaagcgcgaggagcagaactttgtggtccagaatgagatcaacaacatgtccttcctgactgctgacaacaaaagcaaaatggctaaggcgggagatatacagtccggtggctcggaccaggaacgcaccaagaagaagcgccggggggaccggtactctgtgcagacgtcactgatcgtggccacactgaagaagatgctgcccatcggcctgaatatgtgtgcgcccaccgaccaagacctcatcacgctggccaagacccgttacgccctgaaagacacagatgaggaggtccgggaatttctgcacaacaaccttcaccttcagggaaaggtcgaaggctccccgtctctgcgctggcagatggctctgtaccggggcgtcccgggtcgcgaggaggacgccgatgaccccgagaaaatcgtgcgcagagtccaggaagtgtcagccgtgctctactacctggaccagaccgagcacccttacaagtctaagaaggccgtgtggcacaagcttttgtccaaacagcgccggcgggcagtcgtggcctgtttccgtatgacgcccctgtacaacctgcccacgcaccgggcatgtaacatgttcctggagagctacaaggctgcatggatcctgactgaagaccacagttttgaggaccgcatgatagatgacctttcaaaagctggggagcaggaggaggaggaggaagaggtggaagagaagaagccagaccccctgcaccagttggtcctgcacttcagccgcactgccctgacggaaaagagcaaactggatgaggattacctgtacatggcctatgctgatatcatggcaaagagctgccacctggaggagggaggggagaacggtgaagctgaagaggaggttgaggtctcctttgaggagaaacagatggagaagcagaggctcttgtaccagcaagcacggctgcacacccggggggcggccgagatggtgctgcagatgatcagtgcctgcaaaggagagacaggtgccatggtgtcctccaccctgaagctgggcatctccatcctcaatggaggcaatgctgaggtccagcagaaaatgctggattatcttaaggacaagaaggaagttggcttcttccagagtatccaggcactgatgcaaacatgcagcgtcctggatctcaatgcctttgagagacaaaacaaggccgaggggctgggcatggtgaatgaggatggcactgtcatcaatcgccagaacggagagaaggtcatggcggatgatgaattcacacaagacctgttccgattcctacaattgctctgtgaggggcacaataatgatttccagaactacctacggacacagacagggaacacgaccactattaacatcatcatttgcactgtggactacctcctgcggctgcaggaatccatcagcgacttctactggtactactcgggcaaggatgtcattgaagagcagggcaagaggaacttctccaaagccatgtcggtggctaagcaggtgttcaacagcctcactgagtacatccagggtccctgcaccgggaaccagcagagcctggcgcacagtcgcctatgggacgcagtggtgggattcctgcacgtgttcgcccacatgatgatgaagctcgctcaggactcaagccagatcgagctgctgaaggagctgctggatctgcagaaggacatggtggtgatgttgctgtcgctactagaagggaacgtggtgaacggcatgatcgcccggcagatggtggacatgctcgtggaatcctcatccaatgtggagatgatcctcaagttcttcgacatgttcctgaaactcaaggacattgtgggctctgaagccttccaggactacgtaacggatccccgtggcctcatctccaagaaggacttccagaaggccatggacagccagaagcagttcagcggtccagaaatccagttcctgctttcgtgctccgaagcggatgagaacgaaatgatcaactgcgaagagttcgccaaccgcttccaggagccagcacgcgacatcggcttcaacgtggcggtgctgctgaccaacctgtcggagcatgtgccgcatgaccctcgcctgcacaacttcctggagctggccgagagcatccttgagtacttccgcccctacctgggccgcatcgagatcatgggcgcgtcacgccgcatcgagcgcatctacttcgagatctcagagaccaaccgcgcccagtgggagatgccccaggtgaaggagtccaagcgccagttcatcttcgacgtggtgaacgagggcggcgaggctgagaagatggagctcttcgtgagtttctgcgaggacaccatcttcgagatgcagatcgccgcgcagatctcggagcccgagggcgagccggagaccgacgaggacgagggcgcgggcgcggcggaggcgggcgcggaaggcgcggaggagggcgcggcggggctcgagggcacggcggccacggcggcggcgggggcgacggcgcgggttgtggcggccgcaggccgggccctgcgaggcctcagctaccgcagcctgcggcggcgcgtgcggcggctgcggcggcttacggcccgcgaggcggccaccgcagtggcggcgctgctctgggcagcagtgacgcgcgctggggccgctggcgcgggggcggcggcgggcgcgctgggcctgctctggggctcgctgttcggcggcggcctggtggagggcgccaagaaggtgacggtgaccgagctcctggcaggcatgcccgaccccaccagcgacgaggtgcacggcgagcagccggccgggccgggcggagacgcagacggcgagggtgccagcgagggcgctggagacgccgcggagggcgctggagacgaggaggaggcggtgcacgaggccgggccgggcggtgccgacggggcggtggccgtgaccgatgggggccccttccggcccgaaggggctggcggtctcggggacatgggggacacgacgcctgcggaaccgcccacacccgagggctctcccatcctcaagaggaaattgggggtggatggagtggaggaggagctcccgccagagccagagcccgagccggaaccagagctggagccggagaaagccgatgccgagaatggggagaaggaagaagttcccgagcccacaccagagccccccaagaagcaagcacctccctcaccccctccaaagaaggaggaagctggaggcgaattctggggagaactggaggtgcagagggtgaagttcctgaactacctgtcccggaacttttacaccctgcggttccttgccctcttcttggcatttgccatcaacttcatcttgctgttttataaggtctcagactctccaccaggggaggacgacatggaaggctcagctgctggggatgtgtcaggtgcaggctctggtggcagctctggctggggcttgggggccggagaggaggcagagggcgatgaggatgagaacatggtgtactacttcctggaggaaagcacaggctacatggaacccgccctgcggtgtctgagcctcctgcatacactggtggcctttctctgcatcattggctataattgtctcaaggtgcccctggtaatctttaagcgggagaaggagctggcccggaagctggagtttgatggcctgtacatcacggagcagcctgaggacgatgacgtgaaggggcagtgggaccgactggtgctcaacacgccgtctttccctagcaactactgggacaagtttgtcaagcgcaaggtcctggacaaacatggggacatctacgggcgggagcggattgctgagctactgggcatggacctggccacactagagatcacagcccacaatgagcgcaagcccaacccgccgccagggctgctgacctggctcatgtccatcgatgtcaagtaccagatctggaagttcggggtcatcttcacagacaactccttcctgtacctgggctggtatatggtgatgtccctcttgggacactacaacaacttcttctttgctgcccatctcctggacatcgccatgggggtcaagacgctgcgcaccatcctgtcctctgtcacccacaatgggaaacagctggtgatgaccgtgggccttctggcggtggtcgtctacctgtacaccgtggtggccttcaacttcttccgcaagttctacaacaagagcgaggatgaggatgaacctgacatgaagtgtgatgacatgatgacgtgttacctgtttcacatgtacgtgggtgtccgggctggcggaggcattggggacgagatcgaggaccccgcgggtgacgaatacgagctctacagggtggtcttcgacatcaccttcttcttcttcgtcatcgtcatcctgttggccatcatccagggtctgatcatcgacgcttttggtgagctccgagaccaacaagagcaagtgaaggaggatatggagaccaagtgcttcatctgtggaatcggcagtgactactttgatacgacaccgcatggcttcgagactcacacgctggaggagcacaacctggccaattacatgtttttcctgatgtatttgataaacaaggatgagacagaacacacgggtcaggagtcttatgtctggaagatgtaccaagagagatgttgggatttcttcccagctggtgattgtttccgtaagcagtatgaggaccagcttagctgacacacccccagctggccctccacccccacctcaagtgccttattctcacagcaagccccttagtccccaagcccctccccctaaggcagctgggggagaggtgacctagtac

SEQ ID NO: 501 - DNA, 665 bp, Homo sapiens
caacatatatacaaagtgctgagctcttgacactctgttagcatgacttctctgctttcattgaggaggaaagcagggcttagagaggctgacttccccaaagccagggcaaggcctgcaactctgacgtatgtgacccctgcactgtcttcaggtttaaactcagtccctggaacagaggcgccaattggagaaacagaaagtgcactcttagacagttgccagaatattgttacatgcatgaggagacttaggttttaaatttgcttttgtcctttttagggcgtttgaccctgatgaatatagtacctaggtatgaaaagcactgtgtgggcttgttagatgagaattcaatttgggttggcttttaggttagccttaaagttttctcttgttgaggtctaaagcaaatagaaatttatggagatgattcataggaatgaaaaaagttggactttagaattaagtaatagtggcaatctattgtcaacttatttttgacaagggtgccaagaccattcagtgacctttccaacaaatagcgctggcaaaagaatgaagttaggtccttgtttcacaccatgtggaaaaattaattcagaatggatcagagagctaagtgtaagagtcaaaactataaaacacttagaaataggagtaaatca

SEQ ID NO: 502 - DNA, 1041 bp, Homo sapiens
cggacgcgtggggtgattgggggggcttccctgatgagtcctcatggagggtgctgaggcagggaacaggggtgcagggacagtgatcagggcacctggtaccctgaccaacttgatgatggcatctcttttaagatgcccaagtctgcgcacttttattcctttattcggcccctagcaccccctccccaccccaaagaaggtcagttgcatgcgtgtggggatgtagctcaaaaaagaaataagatggagtggaaaggaaagaaaggaagaagcaggaattcaaggtgggtgggctgagcttggggccacctagcccacctgctccaatcaagggctggaacaaacctgaggccacttggagaggcagggctgggcagggacagggggtgggggccgaaatcacagcttccccatcagagccagatgtgtgaaggaaatgtcccagatggcagtagtttctcggcaaggaggggaatcctggagatggttcatgtctgtgatcccagtgctttgggaggctgaggtgggaggattgcttgagcccgggagttccagaccagccctgggcaacacggcgagaccccatctctacagaaattaaaaaaaaaaattagccagttgtgtgtcaagcacctgtagtcccagctacttgggaggctgagttgggaggcttatctgagcccaggaggttgaaggctgcaatgagccatgattacactactgtaccccagcctgggcaacagagcaagaccctgcctcaaaattaagaaaaaaaaaaggggggccaggcgcagtgcttatgcctgttatcccagcactttgggaggccaaggcagactgatcgcttgaggccaggagtttgcgaccagcctggccaacatagcaaaaccccatctctactaaaaatacaaaaattagtcaagagtggatggtgcgtgcctgtaatcccagctacctgggaggctgagacaggagaattgcttgaacctgggaggcagaggttgcagtggtgtgagatcacgccactgcattccagac

SEQ ID NO: 503 - DNA, 1785 bp, Homo sapiens
tggaattcaaagatacaaagtagatgtcaccttgaaaatttcaagatttatttaattaataagcaaaatttgaaaaggaataagaactttttatttcagaggtgaatggttactatcagcatttactaacattccttatgagaactcagatattaagcattccaaaccataatatgattaacacaacatggtaagtgttacgttcactcgttattatacaactatcagtatgtaatgaacaacattgcccaggacattatgcctagcatttaattgagcactctacaatgtgttgtgacaggaagcagttttacgtggatgtctgcacaaacctgaatttaaaaccagacctgttttgagcttcagctttattcatcagtaaaatatttacagtaagctcatgtgtttggagatgacagagaaagctttgctacaagatctgtctaaagggttaatcaggccacttgagtcaataacacattaaagctctctgcacagcaaatgtgtgtgtctgttatttatgtatgtatgaatgatttctttgtttttttttattccagtcaaatgtttatgaaacctccagattgcctcgttaaatccttaaccttggtgaaatggtttgggaaaatgcaggtctgggctataagtttagctttttctttagtcactactttagatttcacagaataactggaagtgtacatggtaattttatagatctttttctttatggaatcctgtatttcttggcattagacgtcaacttcagattttgagaaggaatgtatttgctaagagtaatacagaaatgcttgttatgatatttctgtattaataacaagccatgctcaaaatgtggtttcatccagtttgaccattaagccctcagcactcagggacatgactaaaggcactcacatggaagaacggcagttcataacactgggaataaacaagtggaacagcgggaatcaggcagtgtgtttattgaggtacatcttcaggcagtactgggattagcaattaggtattcatatgaattcagtttgtgagaggattccatcaatggctcttcaaatttaagcagcaaaggccaccactaactcctaaaatatagtgatctttaataccagtttatttgaatggggaaaatttgccacacattttctcgttttcttcttcttgtaattttagagcagcaggagcattttaaaagttatactcaccaagcctgggcaaggtggtgagaccctgtctacatgaaaaataaaaaaactagccgggcatggtggtgcacacctgtggtcccagctactcaggagcctgaggcaggaggatggcttgagcccaggaatttgaggccagcctgggtaacatagcaagacccatgtctctttaaaaaataaaattaaaaagggtatatcataaattcgcgtatgttaaaactattctctaatgcaagatatttttctaaacatttagaaattgaaatgtggtccggcacagtggctcatacctgtaatcccagcagtttagggggctgaggcaaaaggattgcttgaaggaaggagtttgagaccaccctggacaagtgtagtgagacctcgtctctacaaaaataataataataataataataacaacaactagccaggtgtggtaatgaggacctgtagtcctgtctactcaggaggcaagatctttgagcccaggagtttgaagctgcagtgagccaggagcttgctattgtactccggactgggagtctacctcttaaaaaaaaaa

SEQ ID NO: 504 - DNA, 414 bp, Homo sapiens
agcagagccttcccagacacctcctgcttcactgttgcctcgatgtagtttggactacacacaagttacttgattctcatagtactccttttgataaaatggcatcatgaaagaccgcatggcatcctttcccgtggaccaaaagatgacctggtaagggataaggtaaattgtatgtttctgggtccttctaaaggcctctggcatcttcttcatgtcactgaatgtaagttccacatggttataggacataaggatgctcttgcttttgctgaccatcactctgccaccctctgagcgattcttgttgaatgctttagtctctcctgtatactctcattttgatgcccttttgcatagctgcttttccatatcaggttatttgaacaatatcttatcttgcctttcagggat

SEQ ID NO: 505 - DNA, 1800 bp, Homo sapiens
agagcctggagttcctacaaagaagacttggtttgataagccagattttaatagaacaaacagcccaggctttcagaagaaggttcaatttggaaatgaaaataccaagcttgaacttagaaaagttcctccagaattaaataatatcagcaaacttaatgaacattttagtcgatttggaaccttggttaacttacaggttgcttataatggtgatcctgaaggtgccctaatccaatttgcaacatacgaagaagcaaagaaagcaatatcaagtacggaagcagtattaaacaatcgctttattaaggtttattggcacagagaaggaagcacccaacagttacaaactacttctccaaaggtaatgcagcctttagtccagcagcccattttgcctgttgtgaagcagtcagtcaaagagcggctgggtccagtaccttcaagtactattgaacctgcagaagcccagagtgcctcttcagaccttcctcaggtgttgtctacatctactggcctaacaaaaacagtgtataatccagctgctttgaaggctgcacagaaaaccttacttgtttccacctctgcagttgataataatgaagcacagaaaaaaaaacaggaggcattgaaacttcagcaggatgtaaggaaaaggaaacaagaaattttagaaaagcacattgaaacacagaagatgttaatttcaaaactggagaaaaacaaaacaatgaagtctgaagataaagcagaaataatgaaaactttagaggttttgacaaaaaatattaccaagttgaaagatgaggtcaaagctgcttctcctggacgctgtcttccaaaaagtataaaaaccaagactcagatgcagaaggaattacttgacacagaactggatttatataagaagatgcaggctggagaagaagtcactgaacttaggagaaagtatacagaattacagctggaagctgccaaacgagggattctttcatctggtcggggcagaggaattcattcaagaggtcgaggtgcagttcatggccgaggcagggggcgagggcgagggcgaggtgtgcctggtcatgctgtggtggatcaccgtcccagggcattggagatttctgcatttacggagagcgatagagaagatcttcttcctcattttgcgcaatatggtgaaattgaagattgtcagattgatgattcctcacttcatgcagtaattacattcaagacaagagcagaagctgaagcagctgcagttcatggagctcgtttcaaagggcaagatctaaaactggcatggaataaaccagtaactaatatttcagctgttgaaacagaagaagttgagcctgatgaagaagaacagagagagatcatcattgcctgaatttagctttgtgactgcaagagcaaagaccagttcctgtctggagacgactgttacaataatatcatcctattattttatgttcactctttatcaatttgaacagatgtttacatgtactataattagcattttatctctacagttcttttaaaaagtacctctgaagtcccaaagtgtatctgaatgtgtgctctgaccttattcttaaatgttttctccccatactttatagccatttattttttaaacaccttaagaaggaacgaaaaagttctcttggatgacgtatattcaagtctgagccaaattgaggattgtgtctaggaaatctgtaaagccatactactgtgttcattagcatgagcaatttaaaatgaaaatgaattaaaaagttaaaaaaa

SEQ ID NO: 506 - DNA, 1950 bp, Homo sapiens
ggcacgagcacaatgtttgatgctggtgcacatatacaatacacacatgcacaacactgtgtctgcaatgatataatagggctaccaagaccaagagagtaaatatcaacttaagaacacttctaactttagaatttcattttattaaacatacttttaaaacaagcacctcttggcaataaaagcaaaaacaaaaaacaaacaaacaaaaacccaaccaaacaatagtactccttccactctatgctaacggaagacttctcacaccagccagttaaacaatgaaattcttaaacacgcagcctgctggggctgcatgcagagctaaaatgcaggtgtgctgacttcttggagctggagcagaggaaaacatcaaaaagcatatctggaatctatcacagctttctttcttaagcaaataaaaatgcaaattagtttcataaccacaattcaatttatcaaactttttctgaagaattttcatttaattatgtatacataacaggaaataaaactttttcacaaacactctcaaggcttacgattatcaagaaaatgacaaaagtaaaagcaggaggaatattaaacacatggcggggaggtcaatttccgtttctgctcttaaaaagtaaaaaaatcaccatataattaagtacaaaaacctgcattgaatgacaactgctggtgtatttacttgatcagaaatgaagaccaagaatataataaagccctatgataatattcaccgggagcactcccctcagtgtgtgtacactaacaggttggcaaagtttctggagcattagcttatagaaacacaggagtccttggttagctgcattatatggaacgttctcttctgaaatgcacccacgattcagtttcacttacaaattgcaaactaaagttatctcttcagaaaaatatctgtttggcatctcctggactttgttccattggacagtagggacattttaatttgctaccattaaacattttattcagggcatctcttgatataatatgaccacagaccaatttcatgggtggattgttatctgttgtttgctgacgaagaatggggcaggcaaatatagagtgatacccagcacttttttacccaaggtcccacttcaataggtaattcatctttctggttccaaactccagtacactgcctctgttcaatcacggctttgatgttaattaaagctggcagcgccacacaacctgctgagaaactgacactgagaggggactccacggagagccccaggagggcacaagcatcccgtgtaaagatgtcacagatatcagcccactggtttgcatcaagtaggtgaacatatggtgagttctcaatcccttgtctcaggtacacaaggcttcccatcaaaacctgaatgtctttttgatgatttagggcaaatggctgaaaatttttagcatattgtaatgcctctcgctgatttgtggttccacccattaacaagctaataaaatacagtctgtgtagcttaaattccaaggagctgttttgagctataagcatttcccggtttgacactgcccactccagagcaggtctcagaactctgacctttaatgcctctaatattctatttaactccacaaatggttccttctgacttgggtctacagaaagaccagattcctgacagagctcctcagccacatccagcattccttgtcgaaagaagtgctccaccatcacctcattgagaagcctttggctgtctgcctgccagcagccatctattcccacactgctaatgtcagaatcaaaattcttatcaatggcttttccaacccgagaaacactgctgtggatgtctttgtggtcggaggccaatttttgaacagtatcctttattcttttacagcactgtgtcaaaacaagtgaaagtgtccctgataattcagcatctt

SEQ ID NO: 507 - DNA, 554 bp, Homo sapiens
  misc_feature (1)...(554): n = a,t,c or g
cgaggcatttctctatctgcccaggtgacggttccttttgtccctctgtttggctggcctctggactgtagttccaggagggcaaaagcatgaccccagagctgggccttggcacctgggcataccccaggctcctcagcctggttcccaagcctggctggtactgccgctggcatccttgctgtcctcaccccgacacaggtgtgcctgggccttgcacaacaaggtgacgccatgcgagcgtggcagggccggggaagcctttgctcctcaccctggggaggcccatgaggggctgcaggtggagggagggtggcaccgggccccagagccaggagcccctgctgtccccggatggccgagacccttggagggccttgggagaggcggtggggcatctggacaaatgcctggtgcaggtgagaaggggtgggactacctccggcatccctgggctgagcccacctggtctccccggttgctcctgcacatggcagngcccacctgcttccctcaactcctgaggggctgggcagagcctgttgctcacgcca

SEQ ID NO: 508 - DNA, 412 bp, Homo sapiens
ggcctcgtgccaagcttggcacgaggaggagaggcaaggaggaggctgagcagtgatctgggcaaggctagcaggcctgttcaagggtgcgggtatggagggtgggtggcagggagtgatggtgcccagctggtacccttgacttccctggtccccaggaaatggtgttgctggagattgaggtcatgaaccagctgaaccaccgcaatctgatccagctgtatgcagccatcgagactccgcatgagatcgtcctgttcatggagtagtgagtgcccgaagtagtggtaggggctgggtgggggtaccaccaggcacggagcaagccgtggaggggtctgtgcacacagcatcgagggcggagagctcttcgagaggattgtggatgaggactaccatctgaccgaggtgg

SEQ ID NO: 509 - DNA, 453 bp, Homo sapiens
cgcgggaattcctgcccttcacctgagtgactcactaaaactccgtctccaagggaaaagggaaggggagtgttgtcagtgctactcatgatgatatagaaatgtagggtgatttttgtcaaaatcccaatggtattttttttgcagaatttttgtgtataattctaaacgttgcttaggacaggtgactagccaaacaccctttaaaaagaacaaagaggtattacattttctgattcaaaatcatgatacaaagctacaaaaataaaaacaatgtggtattgccacaaaaacagatacatagatgacgaaacagaatagagatcccagaaataaacccttgcatatgtgataaaataatcttccgtaagctttccatgaccacacaatagaaaaataagaatccatttaacaaagagttttccaaattgaatatttacagagaaaaaaatg

SEQ ID NO: 510 - DNA, 1108 bp, Homo sapiens
aggtgaaggacccggccggaattcccgcgtcgacgatttcgtcgcggagccgggcagaggttttaggggtgcgcaggagtcaagtggtggttcagtggggacggtgaggtggaggacgatctggtcggatagccgcgggcacgaacctgggaaccagagggtggaggccatgctggggactgatgtagggcgggaccgactggaagcggcatccagaggcccagtgagcctcggtctcagctcctgaaggggttgcatggggccctacgcttccttctccattttttagctaagagattgagagagtcggtttacttttgggcttggagtatcatttagatctgttaacagtacagttgagagagttggtgtcttttgttgaggtgcgaggacccgaggcggcgaccctcgcctttattcggagaagcccacttccacccacagagttggggtagtcctccgaaatgcatttttgttttgccgtttgttttccaaccccctttcactctccccaaagcttcagattcactgatttttcatacaggaatgattaacaaaggcgtccgaagaaatcgttgttggaaggtgaccaaggtggaaagagacgttgctttggccctgcaagtaagaagagagagggaatagcctgaaggagtaacactaaatttaaaatgacacttttttaccaaccagcgaaagcagatgttcaaaggggatattggccaggtgcggtcgctcacgcctttaatcccagcactttgggggcagacgcggggagatagcgtgattctaggagttcaaccccagcctgggcaacatgcggagaccccgtaccgtctctacaaaaacattaaacaaaaaaattagctgggcatggtggtgtaccctgtagttgcagctacactagaggctgaggtgggaggatcgcttgagcccgggatgttgaggctgcagtgagcctcgatcctaccactgtgctccagcctgggacagcaagcccgtgtctcagaaaaggcgggaggggtgggatattattgatgataggccttctgacgtctggcaatagattccagagtaacatcggtcatggataaattttttttttaac

SEQ ID NO: 511 - DNA, 1567 bp, Homo sapiens
ccgccagcctgggctccgcgcagcccactgatctgggcgcccacaagcggccggcatccgtgtcgagcagcgctgccgtggagcacgagcagcgtgaggtggcagccaagcgagaaacaaccgccgccgcctgcgcaccggggcccggccgacagcctgtccaccgcggccggggccgccgagctgagcgcggaaggtgcgggcaagagccgcgggtctggagagcaggactgggtcaacaggcccaagaccgtgcgcgacacgctgctggcgctgcaccagcacggccactcggggcccttcgagagcaagtttaagaaggagccggccttgactgcagttgcaagaacagcaaggaaaaggaagccctctccagaaccagaaggtgaagtcgggccccctaagatcaacggagaggcccagccgtggctgtccacatccacagaggggctcaagatccccatgactcctacatcctcttttgtgtctccgccaccacccactgcctcacctcattccaaccggaccacaccgcctgaagcggcccagaatggccagtcccccatggcagccctgatcttagtagcagacaatgcagggggcagtcatgcctcaaaagatgccaaccaggttcactccactaccaggaggaatagcaacagtccgccctctccgtcctctatgaaccaaagaaggctgggccccagagaggtggggggccagggagcaggcaacacaggaggactggagccagtgcaccctgccagcctcccggactcctctctggcaaccagtgccccgctgtgctgcaccctctgccacgagcggctggaggacacccattttgtgcagtgcccgtccgtcccttcgcacaagttctgcttcccttgctccagacaaagcatcaaacagcagggagctagtggagaggtctattgtcccagtggggaaaaatgccctcttgtgggctccaatgtcccctgggcctttatgcaaggggaaattgcaaccatccttgctggagatgtgaaagtgaaaaaagagagagactcgtgacttttccggtttcagaaaaacccaatgattacccttaattaaaactgcttgaattgtatatatatctccatatatatatatatccaagacaagggaaatgtagacttcataaacatggctgtataattttgattttttttgaatacattgtgtttctatattttttttgacgacaaaaggtatgtacttataaagacatttttttcttttgttaacgttattagcatatctttgtgctttattatcctggtgacagttaccgttctatgtaggctgtgacttgcgctgcttttttagagcacttggcaaatcagaaatgcttctagctgtatttgtatgcacttattttaaaaagaaaaaaatgtctttataagtacataccttttgttaacgttattagcatatctttgtgctttattatcctggtgacagttaccgttctatgtaggctgtgacttgcgctgcttttttagagcacttggcaaatcagaaatgcttctagctgtatttg

SEQ ID NO: 512 - DNA, 1085 bp, Homo sapiens
cctgctgagcgagttggaattgcgagaccggtctggccggcttggtggaatccggtctctactggaaatgcaagactcagccaggtgtgatggcacatacctgtgggtgtagctacttggggggctgaggcgggagaatcggcttgagcctgggacacggaggttgcagtgagccgagatcgcgccactgcactccagcctgggcgaccaagtgagactccgtgtctcaaaaataagaacaaaatgtagatgcctacgtaccatctctctacccttggctcctggggagtaaggggtcacccagtgacctcctagaaggccagtgacaatggggggtgtcagagtgctcttcagagccaagggagcagtaggaattgggatcttagtctcttagtctgactccaagctgtgagggagagagttgcagggcacttaagcttggtggagaccgtcagtgcctccttgcctgtccctgcagcaaaagttcaggacaccagagccaagctcagaggccgtggtggaacaggggtgaagagcatgggttctgactttaaactgctgggctgcagccctggctctccctccccgggtaggggcaggctgcatgcctccctgtgcctcagtttccccctcttcatagtgggattgtattggtgcctaccccagagagttgtgtcatcaattaggatggcacctggcaccttggtcagtggcaggaaaggttccagaagctctgctctggtcccggggtgcctcgggccctgccaccatctccttggggtggtgccatgtggtgggaaagaccccaacttcaaggccagacgcagtggctcatgcccataatcccagcactttcagaggccgagatgggaggatcacctgaggtcaggagttcaaggccagcctggccaacatggtcaaaccctgtctgtactgatgatccaagaattagccaggtgtggtggtgcgtgtctgtagtaccagctactcgggaggctgaggcaggagaatctcacgaacccgggaggcggaggttgcagtgagccgaggttgcgctactgcagtccagcctggctctgtcttgg

SEQ ID NO: 513 - DNA, 3038 bp, Homo sapiens
ccaaacactagttcccctagtagagccagcctatgagaagaaaagctttgttggccaagttcttacattaatgacttcatagtaagaaactgatttcaaagtgaattaaggaaatcatcacagagaatattttcaaacagatgtttctctttttaaaaagtgatagtaagatgaacttgtaaaaaatttcctctgatgttaattgtagagttgtgggggacggcctatttttctctaccgttgggactggcagggcattgcccaccatataccatagtggtcaccaaaaaagaaacctcttcaacttgaaaagggaagtgaacatgagccatgagagagatttaaaagacccctgtgcttgcagttaatgccacgttgattgattatctgtgcttcaaaggtcacagaaatcttaaaggatttttagcaccatgtagatattgtcttttgtcctgctttataaaaagcgttgctataatgtattagtgggttctcgtgtctccaaattaccaccgtggctaggctgctggaaaaaagcactgttctgttcacttcaatctcctggtagactctgttggtctatagacttctgtgaagccagtgggtttctactaataaccaggtccagcttattcccggattctgctatgaggggcacaacaaggcagcagtcaaagtctctggttcggacatgattcacctgtaagagcctgtcatagggctttaagccaccaagatctcctggcccagctgggcgaatatttttgacatacactcctttctccagtaagccatctgctacactgaacccaaagtcctccatgtcagagtccttgtacaaggtcaccttgtgcagctccacaggagttggagacatgatctcctttatttcttgtttcatttttctcagggttactgacttcctacccacatctgaaggcagggtgttgctccgagttgtttggctgtagtgcggccgcgagctgctgcgctcctggaagctgggcctgtcgctcccagctggactgcgaggtgttggagcctcatgattcaaactcatcgtgctccccgacatgattgttgcctccagttctctcagaattcctgactgtccgcaggtttccaaatcctccagcgcttgagaccagaagttctcctcttgttctgtctctgcactatcgggcagcccctgcaaaaccactggctgtggaccggtcccagtcttcataactcagccccacatctgggtaagtctggcttcgaggcttaagtgactggggacaaagctgcctctctgttttggactcctccagtcataggtgttgaaatttgtatcctgaggcctgaaaactaagtgccttcagttccataagctggtgtctattggcagacccatcccatgaatccacagcactgtccacactggggcacccgtgggaggggtacatgtcggagagcttgcctggcttctgtgctggtgaggagtcctcctccacatcccccaggtcactcaaatggctagaaatagggaacttcttggggctcgatgctgactgggcatctgtctgtttcttaattttcaaggtgacagtctctcctgccatctgtaacaaatggatggcttcactcagaggcttccctttcaagctgctgctattgatggcctaggattcggtctcctatgtggattgcgccagttctttcagctaatccccccttagtgaggcttgaaatgatttatagatcaaaccggctcttcagttcctgaaattgtgatgcccaaggggccccccgtagcgtttaagctccacggtgtaaataattgctccggaactttcttgctcatctgaattatcttcatctttgcggattttgagcttcaccaggtcttcacattgctggaggatctgaactgcatcttccatggaacagttgtccagccggatattatctattgcgagcaatttatccccaagttccagggtcccagttctgtgtgccacactccctttcttgatatctgaaatgacgagggggtctcctggttttctactggatggtgaacttatggttattccaagttccacattgtgcttcttaggcagctttacatgaaatgttccactacttgggatgacagactctgcaacatcaaactcgatttccagtgtgaccttgctcgtgattgaagagtctcggaggagctgactggcttcttcgaaggtgctgtcttctgttggaattccattgatggccatcactctgtctccaatctgtagcaccccacatctctctgctgggctgtcagcttcgatataggaaatcagaggtggagaagagagagtttctgtggcaaacacactgccctgcagttggatcccaaatcctgtgacaggatctgccgtcagaacaacctctgtggtttctgtgtgaacaacctgcccagccaatcctactgtgctggaggctaaggacaatgagcttttgaagtctttctttttcagtctcctcctcatcatggttccacgtgggctggtggagtagaggcttcgaggtagagtccccatgttcagggaactcaggctgtatgcactcatggaggtaggagagaaggatgaagacaccaaagctggagggctgtttggaggaggtgctttcgggaatgtcagggctggtactctgcaatggtcagggtggtacgtgttatagtgatggttggtgtgaaggctgctgtggttgctggcccaggaatcccaggtaagttgcctgtcgctcctctgaattttcacatggtcgggcccctttagggccagccgggtctgatgatggggaaggatctcaagcttgacctggtcagtggtgttggccaggaactgggttgcttctgcaagtgtacagtactccatgctggttccatcgatggagaggatgtgatctcccacatgcaatgcgccacatctgtctgcaatacttgcagatttgattttgtctatgacaatgacttgtttgttacagcacatcgaggtagttagggcaac

SEQ ID NO: 514 - DNA, 831 bp, Homo sapiens
taagtgtcaaagcataaaagcaaaggatgttgagctgatgaagactgtagaaaatagcataagagtgttcactaaatcatctttgcttaattcttaacagtggaactctagaaacatttttttaagttcaggcttaatattttaaggtatcccaaaaggttaatttaaaaaatatgtattaatttacttttcttggctaacatctgctaggcatttaaattttttttcctagcccagaagattaacaaacataattctaggttagcaagtataaaactagaaataaagaattacatagtggtaatgctacccatctgtgattaataggtataacttattctttacctgaccaagtaacaaatgcacataattttacttcagaagcagaaggctctgaaatcccagtagcaaaaataatgttcttctgttgctgaatcttatgaatccatttacagaactgagataagcaaatcttcagagggactccttcatcaacttgagcctgctttatgcctgtcaattccatgcaaaattctgaaagaattggatgttcctgaggttgaacataagcctggaactcagagtcaatctgtccagttgatgtgttcagcaacactgctggaaactcaattatttcctggctatggtggtgcttcccatcattccagcatgtcgattcaaaatcaatgacaattaagtagtcaaacaactgcttggatttgcttcttccgagatttccatttgctggcgcaattgactttctcctaattaatccaagctgccgcgcgagccgcttggtcgccattcccgacactccttgcttttccaagt

SEQ ID NO: 515 - DNA, 491 bp, Homo sapiens
attttttcttaacatccaagacaaggccaccagtcaaaactatcaagttttagtagtattttcctgcttgattatataatagcctggcttagagatacaacctttaaataaggaatcttaagatgatgtgcagctgttctttgccttatttgtttgtttgttggttagtttgtagtttctaagaatctgctctgttcagctgtacagttccttcttctggagttaacctgtggcaaggattatgtttcacctgtcacaaaaatgagatctgtgccttcctctattataaagttagggcatgtgattcattcttcgaaatacttcaaaatgtactttggtatgtttttgtcttgaaaagaggttttctagctagaaattcggggcccagaaggtcaaggctccagagatccccttctcatcatccttcagttgtctgaggagacagaggatcacatgtgtcacagtgagtgctgattccccagaatctgcag

SEQ ID NO: 516 - DNA, 1357 bp, Homo sapiens
aaagatgctttgccaaaagaatctaattacatccgtcttaaaagggctaaaatggacaagtctatgtttgtgaagataaagacactaggaataggagcatttggtgaagtctgtctagcaagaaaagtagatactaaggctttgtatgcaacaaaaactcttcgaaagaaagatgttcttcttcgaaatcaagtcgctcatgttaaggctgagagagatatcctggctgaagctgacaatgaatgggtagttcgtctatattattcattccaagataaggacaatttatactttgtaatggactacattcctgggggtgatatgatgagcctattaattagaatgggcatctttccagaaagtctggcacgattctacatagcagaacttacctgtgcagttgaaagtgttcataaaatgggttttattcatagagatattaaacctgataatattttgattgatcgtgatggtcatattaaattgactgactttggcctctgcactggcttcagatggacacacgattctaagtactatcagagtggtgaccatccacggcaagatagcatggatttcagtaatgaatggggggatccctcaagctgtcgatgtggagacagactgaagccattagagcggagagctgcacgccagcaccagcgatgtctagcacattctttggttgggactcccaattatattgcacctgaagtgttgctacgaacaggatacacacagttgtgtgattggtggagtgttggtgttattctttttgaaatgttggtgggacaacctcctttcttggcacaaacaccattagaaacacaaatgaaggttatcaactggcaaacatctcttcacattccaccacaagctaaactcagtcctgaagcttctgatcttattattaaactttgccgaggacccgaagatcgcttaggcaagaatggtgctgatgaaataaaagctcatcccattttttaaaaccaatttgacttctcccagtgacctgaagacagcaggtcggctttcaaacaattcccctaaaatcacaccaccccaacagatacatcaaattttgatccttgttgatcctgataaattatggagtgatgataacgaggaagaaaatgtaaatgacactctcaatggatggtataaaaatggaaagcatcctgaacatgcattctatgaatttaccttccgaaggttttttgatgacaatggctacccatataattatccgaagcctattgaatatgaatacattaattcacaaggctcagagcagcagtcggatgaagatgatcaaaacacaggctcagagattaaaaatcgcgatctagtatatgtt

SEQ ID NO: 517 - DNA, 1356 bp, Homo sapiens
tttttttttttcattattcagcaataatatattttactccttataatgtaaaaaatataaaccgtttgagtggttttcagcatgatctgttaattttgaatacagagaatgaacaaagcaggtaaatatatgtatatgctgaataatgtaattccatatacaattcacagttagatgcacttaattgtggaaaataaaggaagacaataacatcaagatctttttccaaaacacggtaaaaataacgttcacatgcattaaacatttcaagccatctcagtatatgtctttcttgagtaagtagtgaaccaatggaccagtggttattgttggagaaaacaattaggcaactcatcaatgcgctatttatacaatcttagtgactatttaccacttcacctaagtagactttcccactcatttgaagctattgctatctataaataaatggcaacaggaaatgtttcacaagggcctttgatttccaaaactctcaaattccacagcaaagactcaatttaaggcaattatttatgcactgaatatttgaatgaagatgtattattttccttaagtgaaaaaagctgatactattttgtaatgataaaatttgtataccatagtagaaaatgatttgcaattatgtgttaggacttttcatattccatattgaaacatagtgattctgtagctggcatcagctgtaccctgacttcacatgaatggcctggaggggatcatatttttaaacaggaaatcagtgtgaattagctgagtaattaacattcagtgtacagtgagcattcttaactaaatcaaagtagtcatgaaagaaagtactgttggtaaatccaaaaacatacatcaaaattaaatggtgaggttgaaggttgtagttaagtaccaactagtgtgagttctgggagcattttgaaatggtggaggaatgtactaaatttctgaggaattaatactgatgggaaggatgcagtaaagagtaaaaacgggggcattgtggtttatacctgtaatcccagcactttgggaggctggggctggaagattgcttgagcccaggtgttcaagacaagcctaggtaacgtggtgaaactcgtctctacaaaaattacataaattagctggtgtggtggcctgcacctctagtcccagctaggtgggaggtttcagtgacctgtgattgcaccactgcactccagcctgggtgacagagtgggaccctgtctaaaaaaacataacaaaacaaaacaaaatgaaaaaaaaaaaaacaagaaaaaagaaaagaaaaagaaaaaagtaaaaagcctagggattgggtgaactttttgaaaaaaaaaa

SEQ ID NO: 518 - DNA, 974 bp, Homo sapiens
aattcagcgcttgatagttcttcctctgctctgcttcccttcggaggaaaatttcaggctgaaggtttagcgggtgccgcctctaaagagagcaatcactacacttatggctgggattttgcgcttagtagttcaatggcccccaggcagactacagaccgtgacaaaaggtgtggagtctcttatttgtacagattggattcgtcacaaattcaccagatcaagaattccagaaaaagtgtttcaggcctcacctgaagatcatgaaaaatacggtggggatccacagaaccctcataaactgcatattgttaccagaataaaaagtacaagaagacgtccatattgggaaaaagatataataaagatgcttggattagaaaaagcacatacccctcaagttcacaagaatatcccttcagtgaatgcaaaattgaaagtagttaagcatttgataagaatcaagcccttgaagttgccacaaggacttccaacagaggagaacatgtctaacacgtgcctcaaaagcactggggagttagtagtgcagtggcatctgaaacctggggagcagaaagcacatgagtcctaatgccccagcagcttccgattggaaaatgcaaattgtttttatttaaagatggtgagaaagtgttttcattaaaatatgttttcaaaaccattttcaggccgggcacggtggctcacctgtaatcccagcactttgggaggccaaggcgggcagatcacctgaggtcaagagttcgagaccagcctgaccaacatggagaaacccccatctctactgaaaatacagaattagccaggcatggtggcacatgcctgtaacccagctactcagggaggctgaagcaggagaatcacttgaacccgggaggcagaggttgcagtgagctgagatggtgccactgtactccagcctgggtgataggatgagactccatctcagggga

SEQ ID NO: 519 - DNA, 872 bp, Homo sapiens
ttttttttttttagagaaacaacagcgggcccaggggacctgcgcttagcatgctaaggacctgcactggcacaggtctctgaattccctcagtttttattgattattatcttcattatttcagcaaaaaggaatgtagtaggagggcagggtgataataaggagaaggtcagcaacaaacgtgagcaatagaatccatgtcataatgaagttcaagggaaggtactatgactggacgtgcatgtaagccagatttatgtttctctccacccagacatctcagtggagtaaaggataacaaggcagcattgctgtaaacatgtctcgcctcccaccatagggcggtttttctcccatctcagaactgaacaaatgtacaatcgtgttttataccgagacattcagttcccaggggcagtcaggagacagtggccttcctccatctcaactgcaagtctttcctctttgactaatccacctcagcacagatcttttatgggtgtcgcgctgggggaccgtcaggtctttctcatcccacgaggccatatttcagactatcacatggggagaaactttggacaatacccagctttcaagggcagaggtccctgcggctttccacagtgcattgtgcccctggtttattgagatgagagaatggtgatgacttttaccaagtatactgcttgcaaacatttggttaacaaggcacgtcctgcacagccctacatgccttaaaccttgatttcatacaacacatgtttttatgagctccagattgggtcaaagtggttggggcaaagtggctggggcaaagctacagattaacaacatctcagcaaagcaattgtttaaagtacaggtctttttca

SEQ ID NO: 520 - DNA, 881 bp, Homo sapiens
ggatgtgtcttgcctccataaatacatcataaaaagcagaaatgtcctgaggcccctttgaattacagaaaccttgaggactatgcctaaaacctcaaaaatatctccaagctatttgtggatttttgtaacttaaatgattcataaaaccaatcccaacacaactggattctactgaaattaccacatatttgaggtccacaagcacaagtatagatctaatgcaaactgggctcagattagcagatccatgccaaaaacgacccctcccagtgtgttctggttttcaaaagactagtcccaggtcatctcttaaattagcatgtctattccatatacctctcctcttaatcacccatttgcctaattccacactatcatttgcagttgattacagtgggcacctgtatgtttaccttccctgttctccaaatacagaactgttatacaagtacagtctacccttgaataacacaggacttgggagtgctgatccccaagcagttgaaaatccacgtataacttgactctccaaaacttaactgctcatagcctactgttgaccagaagcctcactgatagcatatatagtcgattattttgtatgttatatgtattatatactgtattcttacaataaagtaagctagagaaaagaaagtgttattaagaaaatcatgccagacatagtgtctcacgtttgtaatcctagcactttgggaggccgaggtgggaggattgcttgaggccaggagtttgagacaagcctgggcaacagagcaagaccctatctctacagaaaaattgtttaaaaattagccaggcgtggctacatgtgcctgtagtcccagctactcaggaggctgagacggaaggattgc

SEQ ID NO: 521 - DNA, 1346 bp, Homo sapiens
cccagcaacattcttagcacctccaggacagagacaggacaggattgtgacatacagcaagaaaacagcatttccaggagggaggggtatctagggagaagtgcctgtcaggagatccttggcaagatgacagtgtgtcctggaggaaatgtgttattcctccctttgaaagccagggagcagggtgcctcctcatgaggaggcctagcatgaacctgacactcagaatatctgttcccatgcgggcaggggctccctggcctttgtggcccccactgaggttgtgtgtcttgccttccgcagcgcgagcccagcattgacctgctgcaggccttcgtggagcactggaagggcatcacgcactactacatcgagagcacaggtaacctgcccagtcgttcagaattggagccgagttcacggagacagagaaccagacagacagaagacccagagccctgggccactccactcctgatgatttagctgccggtcccactctgaccttttggaaagaggctgtgtgaggaaggagtagcctggttgggggtctcactggcctgactctgcaaggaagaggtggctgcacttcccccagcttccagctccagaccttcaggccccagatgaaagcacccccgccaagaagacagacattccctggcggctgaagcagatgctggatatcctggtgtatgaagagcagcagcaggcggccgcgggtgaggcagggccctgcctggagtacctgctgcagcacaagatcctggagactctctgcacgctgggcaaggccgaggtgggaggccctctgcgcgctgggccaggccgaggtgggaggcctctgcgcgcttggccaggccgaggtgggaggcctctgtgcgctgggccaggccgaggtgggagaccctctgagtgctgggccaggctgaggtgggcggtgggcagtgggcagcctggggctccctggattccaggcctttctgcctatgctcttcccagtcctgacactgaaagtggcagttcagggcgagaggagcaaacaggacgggcactgtggctgtctcacttagaacactccaccatcccagcgctcctgttcccagttcactccacaaagatgggcctgccatgtgccaggctctgctctagatgctggggacacagcagggattcatactgacaagagccaggcatggtgatgcgtgcctgtagccccagctacgtgggaggccgaggtgggtggattgcttgagcccaggagatggaggctgcagtgaactgttatcgtgagaccgcactcctgcctaggaggcagagcaagacactgtctcttaaaaaaaaaa

SEQ ID NO: 522 - DNA, 377 bp, Homo sapiens
gcaagggatagcattgctgaccagaatgggcgagtcagtcaagcacgtcactggcggctacaagctgaggactcggccgcttgagtttgctgccataggtgactacttagatacatttgcactcaaactgggaaccattgatcgaatagcccagcggatcatcaaagaagaaatagagtaccttgtggagctgagagaatacgggcctgtgtactccacatggagcgccttggagggtgagctggctgaacccctggagggtgtgtcagcttgcattgggaactgctctacagccttataagagctgacagatgacatgacagaagacttcctatttgtgctcagggaatatattttatactctgactccatgaagg

SEQ ID NO: 523 - DNA, 376 bp, Homo sapiens
gaggaattatctgctgttacttggctgggaaagacgttatgtctccttcatttccgaaggatagatttgctggatataccatttttgataaacaactgtttttctttcaggactttgattgcctcatcccattctctcctgttctataagggttctgctaagaaatttgctcttaacctaatggagactcccttatatatgacttgacactcttgctggtcttacaaacctctttcacttttggcagctcgactatattgggcctagagaagaccttcttgcattgaatatatgtggcgatctttgagcctgctgtatctggttgtgtatcactctctctcacgactgggacaaatgtaaactattatttattaag

SEQ ID NO: 524 - DNA, 1065 bp, Homo sapiens
gagttttttttttttttttttttaaaattaagacaagtttattgagtaaaaaaatgcatacattggaacggcaaaacatcaataaggccctaaaacaaaaaatacagttatgctttaacaaattcttagcaatgtggcccacgctttttaaaaaattgacgtgttggcagtgttggttaggaacactgacgtacatcccaaatagtaataaattcagtatgaaattatacgcataaccttactcaccatactactttttctcccaaactattgtgacttctttttgctctctgattaaaacaaacaggtaacatccttacacctttgctccatcccttgggctttaaaaagaatggctgtagttagttttgattcactatatactctctgtacttgaggaagagtaagctgtgtttaaaagtgcccttttccatgtcgtcatgtaccaataccctctgcatttcaaaatgttgactcagatgtttttccctctacagaactagaaaattgtccccccactttggtctatttactcatttgaagacaaacagggttactaagagttttacataagttatttctttagagtgacgaagtgttagtttacttcttgcttagtggagacaaaaattgtgagataaagaggaaggaataggatgtacacatttacccatcaatatagcacccagtgttatttgagcaggacccttctgttagcatctaaggtaaggttaggacagtcaagataaaatactggatgttggccaggagcagtggctcaagcctgtaatcccagcactttgggaggctgaggcaggcagatcatgaggtcaggagatcaagaccatcctggctaacacagtgaaaccctgtctctactaaaaacacaaaaagttagttagttagttagccaggcgtggtggtgggtgcctgtagtcccagctacttgggaggctgaggcaggagaatggcgtgaacccgggaggcggagcttgcagtgagccgagattgcaccacttcactccagcttgggcgacagagcgagactccatctcaaaaaaaaaa

SEQ ID NO: 525 - DNA, 1188 bp, Homo sapiens
gcttcctctgattctcaccaaagtgttggcccaaatgatttttaaatttgaattcattgccattattaaacatatatagatgtcacacaaaatatccagatttctgctcctctaagaaacttgggaggtctggccaccctgggcctgcatgcccccatggcaataaatcaagccctggctgctgcttcagatgtggcatggactctccgagctgccacagcccggccactctttgtcagttcccaccactgcagccaaaagccagctgctgtttttcatctcttacccagcctgtttgctcatttaagctaattgtctagtccctgttgagattggagtttagatctcaaaagctagactctacagggtgggtaggcctgttaatgattttgttatttaccctggaagcactgcaaaggcattggaaggtttcacgtagagcagcaataacacaagcaaatctgatgtcgaaagatcactctggctggccttggtggctgatgcctgcgatcccagcactttgggaggctgaggcaggaggattgcttgagcccaggagttggagacaaggctggcaagaccctgtctctacaaaaaaaattgaaaagttaaccaggcacggtggaacacgcctgtagtcccatatacttggggggctaaggtgaggattgcttgagcctgggaggtagaggctgcagcaagctgtgatcatgccactgcattccagcctgggcaacagagtgagaccgtctcaaaaaaaaaaaaattactctgaattgttaaaactccaggtaaacagctatttgactatacaatagggacaaatcaagacctcccccagtctcctgtggcttttttatacaaaaaccttaattatattcctggagataattgtcagtaaaaaaggatattttcaccaaaattttttgtgaaaaatagctggagaaccactgtgttaggatgaaaatggattggaactaaatggtggaaagagttgtattagagccctaagggacttttaccactgatccttttaccttggctatgccctcttctatcaggtgggaattgtaacatttagacctgtttaagtaatcccccaggggccatttggcaggaacttttctatgaaaagatgacccggtgtttaaaaacccttctaaagggggatccaggggtgttttatgt

SEQ ID NO: 526 - DNA, 512 bp, Homo sapiens
  misc_feature (1)...(512): n = a,t,c or g
cattcccattttcatgcccaaatgttgccttttccaagaccactctggcctgccacacccctatcctgtgcccatataaaccccaagctctacaagcagaggaacagaagagcagcagagtagcaaaatggcatggcagaggagagaagagaaggagcatctgaatgtcaggaggagttcggctgaggacggttggaaagcagataagccggggatggctgaactccaggggaagatcatcttcccactccatcccctttccagctccacatccattcctctgagagccaactccatcactcagtaaaatccccaccttcactatccttcaggttgatgtgacctgattcttcctagatgccagacaaaggacgggattaccaaggaggaggcaggattttaaaaagggctgttcaccctggattnttcccattgagtgggaattagggccttccaggaaaaggcaactggttaaaggggcattnatttgttaaccacacccttaggatggt

SEQ ID NO: 527 - DNA, 678 bp, Homo sapiens
ttttttttttttgtacatcaaaatgagttattttaatgaatgaaaaacattaaatctaccagtctacagaaaaagaaaatgtgtatttgacatcgtttaaggtggctcttacatcaactccttacttggaaaactggtatttaaatgtcaagaattaagcttttctcctgtcttcccagcattgacgatttcgaaaaatttttgatactattctacgtaacactgctttagctaaggtaagtatatcttcttagttccaagtatcctatccagcctgctctccagtcattcctgcttaaggaactccctgtggctgggctgaaacaggactctttcccttgctccagatgagaagaccaaagctggtttggaagtggggtggcactacaaagggccacagcctccatagttctccagcatcacatccctgtacaaggccctctcggcaggcacccatgatggcccattccttcgtagtgaagtacacagccacgtcctcaaaagccactgattcctggggcctggttgttaaggacacagctgtcatcatctgacctcttttcttcctttctgggtaaaggtaaaagtctcaggtgctgaggatatgccccttggggcctctccatccagagctccccgaggaaccgagcaccagggtgtttcccctcgctccagctg

SEQ ID NO: 528 - DNA, 1160 bp, Homo sapiens
ttttttttcaaggtttacatatacctttttaaagtaacatttaaaattacttcctttaatataaaagaaacacacaaagacacaaagaaagcccaataaagctgtgagtcccagtttggtagctgaggaggagtctaagaaaacaagccattcctcagtatccctcgggaaagaaggggtgagaggacacagatatcaccaggccctgggtgactgcattgctggggccatgcagggctcagctctccaccaagggaaagtgctgattttccttgtcatgggtcctggccttgctcccatgctcgtccttcagttttcagaagtccgtccagttccaagaatgggctccttccttttagttcactaacattttcacttaggggtttgaaggccgctttaccctgtcgtagtgtcagggtgccaggggagttgtcatcctggcaggatgggtgaaggggggatttccctaagtaccttgctgctgttttggtttccatctattgcgcatagaaccttgaagatctgggagtctcagggtcccttgagggcttgtcggagctctggctggccacaggggtttctgtgggctgtcttgcttcctccttggaaaacacctgtttggaggggaactcagtctggttccaaggtggcatctgttcctcaacagataactgggtacccagaggcaagtccaattcagaagataaaggtgcctctgggggcagaacaggctctgggggaagatttgatttagagtcttcagtttcaaatacttcactcagctgtttcaccagtgggcttggggggtctccactgctggtcttcataggtgtccgtgcaataccaagagtaggagagcggggatctgagtcctgggcatgtttaagaccctccagttgctcccctgctggtaggcctggctgtggagagctctccacctggatgggagtgcgcaggatgccagcactaggtgaacgggggtccgccactcgagccagatgcttgttgtgcggcggaggccgcgctggtgtgactgggacgctcttggctgagcccatctcaaccaggagttgcagggtgggggcaagggccagcccgggacgaggagggaatgccgggccccaattccacctctggatgcacaacagctcgctcgtgcc

SEQ ID NO: 529 - DNA, 366 bp, Homo sapiens
aaaagatatggtactcattatggaaatgcaaagtatgatcacaatgaaatgcccacaatacctatgagaatagagaaaaattcctgatattaccaaatgttggtgaggatgtggatcaactggaatcctcatattttgctgtcatagccactttgaaaaacaatttgacaacctcgttgatttaagcagatttaaacgatacttaccatcatatattctatcatgtaagaacatacttttcataatgcaggagtctgactctcagatatttacccaagatttatgaaaggttatgttcacactgaaatctgtacatgaatgtttattgcagttttatttgtagttgtcaaaacctggaaacaattc

SEQ ID NO: 530 - DNA, 397 bp, Homo sapiens
aaaattgccattataattttgatagagattaaatagaatctgtagttcactttgggtagtatggatattttgacaacatgagttcttccaatccatgaacacaggatatctttcatatgaattcttctaatccatgaacataggatatctttccatttatctgtgttgcttcaatttctttcatttatgttttatagttttcagtgcatatatttttgtcatgttttgattttaatagatttattctgctgccatattttcttagctgtttaaataaaatacttcttgagcccttattttttttgttctgagccttagtgaatactgtaactatagtatttccatttacctcaagtaactaaaattggaaattactcaatattatgtggggaaaact

SEQ ID NO: 531 - DNA, 475 bp, Homo sapiens
  misc_feature (1)...(475): n = a,t,c or g
cggcacgagcaccatggctgatttcaagctactaatgtgacatcgctgaacacagggtacggaagagatatacaagatcagttcttgtgaatgggtgcaagccagtttcagcacaccacttattacactacatgattttaagatttatcataaagccacagtaatcaaaatggtatggtactggcataggcaataaaaattcagtaagaatgtatagagagttcagaaatagagccacacatatatgaccaattcatttttgacaaaggtgaaaagataattcaggagaaaggaaacagttttttcaacaatagtgctggaagaattggatatttacataaaaaagaactatccatacattatacaactgttaacttagatcatggttctaaatataaaatataaaacttcagaatttttaggataaaaactttgtaaccttgagttatacaaaatacttactatgtatgacccn

SEQ ID NO: 532 - DNA, 384 bp, Homo sapiens
  misc_feature (1)...(384): n = a,t,c or g
cgtttcgagcggttttagaatgatcttctagaaaacttcaagttctgggaatagtttaaagagtaattagagaacataaatggaacagtaactgagaaagaaacaggaggagtgtacaaagaattatcctccccaaaatactctggtactaggcagttttatgggcaaactatttcaaactttccaggaaaaataatttctatggtatataaactatttcagaataccgaaaagaaggaaggcatcctatttcactatatgaatttagaataactctaataaccatacccaacaaagataacatttacttacaaatctggatgccagtctcacttatgaatatagttaccctaaaatgccctacctaanacaatagcaaaatag

SEQ ID NO: 533 - DNA, 357 bp, Homo sapiens
ccaatacgcaagtttaccaaagttgcaggatagaaaagcaacacaccaaaatgacttgcatttctacacattaacaatgaacaatttgaaaataaaattaaacaaatattcatttataatagcatcaaaaagaataaaatattcaggaataagcttaaccaaggagatgaaagacttgtacactgaaacattactgagaaaaattaaagaagacacaaataaatggaaagacatctatgtttctgggttggaagactaatattgttaagatgccaaaatgatctgtatattcaatgcaattcctatcaaaatgccaatgatgtgcatggcaaaaatagaaaaaaattcatcctaaaa

SEQ ID NO: 534 - DNA, 2618 bp, Homo sapiens
agataatagactcctcaaccaggagaatggagagcgaaagatcaccgctttatcgccagctaattgacctgggctatctgagcagcagtcactggaactgtggggctcctggccaggatactaaagctcagagcatgttggtggaacagagtgaaaagctgagacacttgagcacattttctcaccaggtgttacagactcgcctggtggatgcagccaaggccctgaacctggtgcactgccactgccttgacatctttattaaccaggcatttgacatgcagcgggacctgcagatcactcccaaacgtctggaatatactcgaaaaaaggagaatgagttgtatgaatcattgatgaatattgccaaccgaaagcaggaggaaatgaaggatatgattgttgagacacttaataccatgaaggaggaacttctggatgatgctactaacatggagtttaaagacgtcattgtccctgagaatggagaaccagtaggcaccagagagatcaaatgctgcatccgacagatccaggaactcatcatctcccgacttaatcaggcagtggctaataagctgatcagctcagtggattacctgagggaaagcttcgtcggaaccctggaacgatgtctgcagagcctggagaagtctcaggatgtctcagttcacatcaccagtaattatctcaaacagatcttaaatgctgcctatcatgttgaagtcacgtttcactcagggtcgtcagttacaaggatgctatgggagcaaatcaaacagatcatccagcgcatcacatgggtgagcccacctgccatcactctggaatggaagaggaaggtggcccaggaagccattgagagcctcagcgcctccaaattggctaagagcatttgcagccaattccggactcggctcaatagttcccacgaggcttttgcagcctccttgcggcagctggaagctggccactcaggccggttagagaaaacggaagatctatggctgagggttcggaaagatcatgctccccgcctggcccgcctttctctggaaagccgttctttacaggatgtcttgcttcatcgtaaacctaaactgggacaggaactgggccggggccagtatggtgtggtatacctgtgtgacaactggggaggacacttcccttgtgccctcaaatcagttgtccctccagatgagaagcactggaatgatctggctttggaatttcactatatgaggtctctgccgaagcatgagcgattggtggatctccatggttcagtcattgactacaactatggtggtggctccagcattgctgtgctcctcattatggagcggctacaccgggatctctacacagggctgaaggctgggctgaccctggagacacgtttgcagatagcactagatgtggtggagggaatccgcttcctgcacagccagggacttgtccatcgtgatatcaaactgaaaaatgtgctgctggataagcagaaccgtgccaagatcactgacttaggattctgcaagccagaggccatgatgtcaggcagcattgtggggacaccaatccatatggcccctgaacttttcacagggaagtacgataattccgtggatgtctacgcttttggaattcttttctggtatatctgctcaggctctgtcaagctccctgaggcatttgagaggtgtgctagcaaagaccatctctggaacaatgtgcggaggggggctcgcccagaacgtcttcctgtgtttgatgaggagtgctggcagttgatggaagcctgttgggatggcgaccccttgaagaggcctctcttgggcattgtccagcccatgctccagggcatcatgaatcggctctgcaagtccaaattctgagcagccaaacagaggactagatgattctacttgaaagcaaagaccctttcctctttcactctcctagttatttcccttccccctcaccttttggcccatggggagaatttgacatttattcactataggacacaactcccaagggaactggtgcttgctgggaaacttggaaccttcccaggcagggatgactcctggacagtgaagagttgaatgactgagcatattcagcagctcactgaagcgccaagctatccctttagcaaaaaagtgtctcagatgtgtaaaagctgaggaatgtggtgttctggcttcacaaatgaaaaggaggcagatgttaccattgtcttttcactgtatatacttctaagacagcaagcgggacactgcagtggcaatagtgttaaaaaatctcattctcatgatttttggctctagctaggaatagtttagtcaggactcagaaaatttgagcttagttctgggattatgaaaacatggggacaaaaacaataacttgtggatgtctggttcctgctgtctgcagccaggtatctcaggttgcaatggtcagaagtcccagtgagggagctagaaacagagctatctgttcctcatagtgccagtgtgtttacatttataggaccacatatccctggtttctgggggagggtttcactgttacatcaccaagaggccctgaaaagaggaaaaaaaaaa

SEQ ID NO: 535 - DNA, 417 bp, Homo sapiens
ggccctaatgccgcacgaggctaactatgaggaaatcttcctgaaaactgataaagatatggacggatttgagtctggattggaggtccgcgaaatattcttgaaaacacgtgtttaccttctaccttactagcccatatatgggcattatgcgactcaaaggactgtgggaagctttcaaaggatcattttgccttggcttttcacttaatcacggcagaagttaatcaagggcattgatcctcctctcgttcttactcctgaaaagatttctccatcaaacagggccagtttacaaaaggtaacagagcttacaaggaaacctgtgtgtattattttcaaaggaacaatactctggcgaattacagattcaatttggatgaaacataacagaaaacgtatctggctaagagcaca

SEQ ID NO: 536 - DNA, 864 bp, Homo sapiens
ttggtgtttttaactcaaacagataatcagcaactgctgtgatgagatgctgcctttaatgctgctgcatgtggtcaaacctccactcccagtctacccagaccaggacttggcttccaggatccaggggtgtctgtgtgaaatgatcagcctgggcccccaagcaggtcactcccagcacagagatgtcattgattgtacctccgtcatcaggctgtcttccgccctcagggaaaagtagcatgtcttccagcaccatatgacaactgctcagcacttatttcttgtcattgctcccttctgactgcagctccgtgggatcacaggagattatggtggtggtggactcccaggcattgctattctcctgacaccagaacaccatcatggtcatctctgaggcatcagtagtgtttctatatgccaacagtgaacaatctgaaaaagatattaaaaagtaatctcatttacaatagccacacataaaattaattcctaggtatttaaccaaagaagttaaatatctctataatgaaaactataaaacactgatgaatgaaattgatgagatcaccaaaaatgaaaaaatattccatgttcatggattggaagaatcaatattgttaaaatgtccatactacccaaagcaatctacagattcagtgcaatccctataaaaataccaatgacattcttcacagaaatatgatcctaaaatgtatacagaaccacaaagacccaggaataggccaaagctatcctaagcaaaaaggaacaaaacttggaggaatcacattacctggactttaaataatactacagagctgtttaactcaatcagcatggtattgtcttataatcagt

SEQ ID NO: 537 - DNA, 419 bp, Homo sapiens
  misc_feature (1)...(419): n = a,t,c or g
caaataaccctgaagtgcaaggtgattcttgtgacttttgtaacattgtgttttctatagattgcgagcaccttatccgaaggatgttggtcctagacccatccaaacggctaaccatagcccaaatcaaggagcataaatggatgctcatagaagttcctgtccagagacctgttctctatccacaagagcaagaaaatgagccatccatcggggagtttaatgagcaggttctgcgactgatgcacagccttggaatagatcagcagaaaaccattgaggtaaagtgatcagagatttcggggttctactgcacttagctacttgaaatttcatgctcacacctgtcatcctggtcttttagcacatgtatctccagcgcctaggcgtactgttcagtgttccctatagatgacatn

SEQ ID NO: 538 - DNA, 549 bp, Homo sapiens
gccatgaaagtatgggataatggattgggggaggaagtatttttaaaaagccttcttgagtttttatgcatattacatttttattcaataaaaaattccccattgttttattgaaatggattaggtggccgaccctctgaattagacatattcctttaaaaataagatccgttgtcagccatctaaaatgtttttataaattcatacttacattcttttttgccggttgcagtcagcctttagtgccaagagagaacattacagcatggatgaatgcaattggtttgatcatcactgccctaccagtgagttaataattgtgatttgtacttagtgatgaaatacagccagctgttccatgtcagcaaaaagaaaaagatgcatataggatgcccttgtacgggacgtcatgcaaattaatgaagtattttatgtttttaaagttttttcatattattactgctttaaaaatctacagtgactagtttttgcttttctgtattagatctaaatatatctatgtgacttacgggtctctgcattttctgg

SEQ ID NO: 539 - DNA, 395 bp, Homo sapiens
attaaggtgatgctggcttcatagaatgaatgagggagggttccttctctatatatcttggggaataatggccacaggattggtaccaggtcttccttgaatgtatgggaaaattctgctgtgaatctgtatgggcctggactttttttatgttgcgaatttttaaatcatcatttaaatctcgctgctggctattggtctcttcaaggtatctacttcttgctgattaaactaggggtaagaatgtccccatggcctggaagcttaaggagatgtataactcctcgcttttcaagcccagtcccaaggcgcaaggccacttgcgtcagctgagtgtgcggcagcatgcaccatcacgatagctgaggcagaagaatagccagtcagaatacacg

SEQ ID NO: 540 - DNA, 2064 bp, Homo sapiens
tcacttagcagcctcgacattaaccgcgctcgcgctctcatccctttctggtcctactccttggagaaccttcctgcacctccaagaacttgccgatcgggtctgcggcggtctggacgaggtcactccacaggcgcccaggaccttctcatccgtagtgacgtgcgccggtgacgccatacagtgacgtgtggtgaccggagccaggtgccggcagggcagccacaccctggggccccctgttctggaggggcagagggtcgggccgatgcgaaaaagccgcggaagctgccttaggcgactttctgggcctgcatcgccggacccagcagcccgctgtcgatcggttgctaagtgacgccagcgcgcagtggcgcgtgcgcggccacggcggagtgcgtgaaagcggacgcgcgccgcagcagccggggcggcggcgaggacggcggccacggaagcggccaagggggcggtggcgcagagaggggtgcggagcgggcggaagaggcgtctgtgtcgcagcttggtctcagaggagcatcgctgggaacaacgactatcgtctattccacaagatgagtaacagccaccctcttcgcccctttactgcagtgggggaaattgatcatgtgcacattttgtctgaacatattggtgccttgttgattggggaagaatatggcgacgtcacattcgtggtggaaaagaaacgttttcctgcccacagggtaattttagcagccaggtgccaatattttcgagcattattatatggtggaatgcgagagtctcagcctgaagcagaaattcctctccaagacaccactgcagaagcattcacaatgctactcaaatatatctacactgggcgggcaacgctgacagatgagaaggaggaggtgctgctggactttttgagcctggctcataaatatggatttccagagctagaggattctacctctgagtatctctgcaccatacttaacattcagaatgtctgcatgacttttgatgttgccagtctctactcacttcccaagttaacttgtatgtgctgcatgtttatggataggaatgctcaggaagtcctctcaagtgaaggtttcctctccctttctaagacagcacttttaaacatcgtgttaagagactcatttgcagctcccgaaaaagatattttcctagccttattaaactggtgtaagcacaattcaaaggagaatcatgctgaaatcatgcaggctgtgcgtttacctctcatgagcctcacagagcttctgaatgttgtgaggccttcaggactgctgtctcctgatgccatcctggatgccattaaagtgcgatctgagagccgggatatggacctcaattatagaggcatgctcataccagaagaaaacattgcaactatgaagtatggagcccaagttgtaaagggggagctgaaatcagccttattagatggtgatactcaaaattatgatttggatcatggattttcaaggcacccaattgatgatgactgccgttccggcatcgagattaagctaggtcagccatccattatcaatcacgtacggatactcttgtgggaccgagatagccggtcttactcatacttcattgaagtgtcaatggatgaacttgattgggtcagagtgatagatcattcacaatatctgtgtcgttcttggcagaaattatattttccagcccgtgtctgcaggtatattcgaattgttgggactcacaacacagtgaacaagatttttcacattgtggcttttgaatgtatgtttacaaacaaaaccttcactcttgagaaggggctgatagttcccatggagaatgttgcaacaattgctgattgtgccagtgtgattgaaggagtcagtcggagccgaaatgccttgctgaatggggacactaagaattatgactgggattctggctacacatgtcaccagctaggaagtggtgcgattgtggttcagttggcacaaccgtacatgattgggtcaatacgggtactactttgggattgtgatgatcgaagctata

SEQ ID NO: 541 - DNA, 778 bp, Homo sapiens
ggtcatcagcaagggctgggtttcaggcagggcatggggtggaggccccacccatcactgttgcggggaacttttcaggcttgagcaggggttctggaggacgccatagacagggccagccaggggagcttctgaggaagagcgagtgagaagggagaacataggggcctcatgggaagaagggaggatgatgggtttaggaggtggccaagggtgatagggacaggaaacctggaaccaactggtcttgtggtacttaggggaactaggggtgggaataagggactttggggtaccctaatggtgctcggggacagcctcaagataacttctttgctcaccaaggtctcccaccacccccctatctcggcctgccatgcagagtctgagaacttcgccttctggcaagatatgaagtggaagaacaagttctggggcaaatccctggagattgtgcctgtgggaacagtcaacgtcagcctgcccaggtttggggaccactttgagtggaacaaggtgacatcctgcattcacaatgtcctgagtggtcagcgctggatcgagcactatggggaggtgctcatccgaaacacacaggacagctcctgccactgcaagatcaccttctgcaaggccaagtactggagttccaatgtccacgaggtgcagggcgctgtgctcagtcggagtggccgtgtcctccaccgactctttgggaagtggcacgaggggctgtaccggggacccacgccaggtggccagtgcatctggaaaccca

SEQ ID NO: 542 - DNA, 434 bp, Homo sapiens
aagggccccccgtatcgtgtggacccacgcgtccgcccacgcgtccgttgacgcgtacgtttgtaatgacattgttttctcctacagaaccaccatcaccttattggagggcgcatgactaacccaccgctacgtggcacaggacccgaaacaagggcagctgcgttccctgcacctgacatgtgacagcgccccagctgggagccagggcacctggagcaccagctgcagaatcaaccacctcatcttccgtggcggcgcccagatcaccttcttggctacctttgacgactcccccaaggctgtcctgggagaccggctgcttttgacagccaatgtgagcagtgagaacaacactcccaggaccagcaagaccaccttccagctggagctctcggtgaaggatgctgtctacactgtggttagcagccacc

SEQ ID NO: 543 - DNA, 677 bp, Homo sapiens
  misc_feature (1)...(677): n = a,t,c or g
tttcgtctcaccagcaccatgatgagtgtgagcccctactgaagagccttctcacagcctcctggacctccttgttcatcagactgtagatgaaggggtttagcatagaggtcaccacagtgtacatgatggttgctatggcgtcctgggctgagaaggagtctgggggtcatatgcagatccccaggacagttccatagaacagggtgaccagagacaggtgggagctacatatggaacatgccttgcgccttcttgtaggagatggaatccggaggatggctgcagcaatgcggatgtaggagaccaagatgagcgcacagggagccaggaacaggaccacagcccccaggaacacatgctgattgtcatgtatgtgagcaggcaatcttcatgagcaggtaggcgtcacggtagaagtgtgaaatctgggcggaggagcagaaggccagtctgctcatgatgaccgtgtggaccggggagatgaggctggagcctgctcacgctagcacggncagcccctgacagagccgggggtgatgatggagcactactgcagggcgctgcagatggccacatagtggtccagtgccatgatgggcagcagaaaggtgtccacgttggcaaaggagatgaggaagtacatctgagtcaggcactggggataagagatcgtc

SEQ ID NO: 544 - DNA, 742 bp, Homo sapiens
gattactctatgcccaggctggagtgcagtagctcaatctcagctcactgcagcctcaacctgctggactcaagcagtcctcccaccccagcctcccaagtagctgggactacagatactcaacaccacacccggctaatttttttgtagagatggaatttcaccatgttgcccaggctggtctcgaactcctaggctcaggcgatctgcccacctcaacctcccacagtgctggtattacaggcgtgaagccaccacgcgccaccaagattgatttcttctgaggggtctcttcttggccatcttctgtgtcttcccatggtcttccctctgttatgcgtctttgtcctgatttcttcttccttggctggtgaggaggccgccgggctccgggtccagaagctctggccggctgttgttctgagccatctgccggtctgctggtttcactgctctggaatctggagtgaggtcattgagctgaaggttggacgggagggacatgttctcccgtggcaggcgcacgttgttgagttttaggttgttggagtcacttgatatcagagatgggtgccgggaggggcctgtggagaaagaaaccatgtccctaattctcagtgtgccctcccacgctgggctgtcctaccctttcagacccaggaccctcaggcaaggggtctctcaaatgcccaggcctggccctggggccagagactgggttcccagtgcttgaccggattct

SEQ ID NO: 545 - DNA, 412 bp, Homo sapiens
cacccgcttggcctaggcctcgtgccaagcgagatcttcagcccccaggacaagaaggccgccgacggcagcatcctggcgcccgcccggggcgaggacctggaggccgggctcaagggcagtttcatggacggccggctgcaggccagcgtgtcggtgttccgcatccagcgcgtgggcagcgccatgcaggacacggcatcggccatgccctgcctgccgtactacccgaccagccactgcttcatggccggcggcaagagccgcagccagggctgggagctggagctgtccggcgagcccgcaccaggctggcaggtgctggccggctacacctacacccaggccaggtacctgcgcgacgcctccgaggccaacgtgggccagccgctgcggcccgtggacccgcgct

SEQ ID NO: 546 - DNA, 1250 bp, Homo sapiens
  misc_feature (1)...(1250): n = a,t,c or g
cgaagcacggaatgtgtctcctgctgggggccacgggcgtcgggaagacgctgctggtgaaacggctgcaggaggtgagctcccgggatgggaaaggcgacctgggggagccgcccccgacacggcccacggtgggcaccaatcttactgacatcgtggcacagagaaagatcaccatccgggagcttggggggtgcatgggccccatctggtccagttactatggaaactgccgttctctcctggcctgtgccgcggataccagtatggagaactgatggccacatgaggacagagacgagtgacaccaggtcgtcttcataaaactcgattccctctgcttctgcttgttcccaaagctttgtttaaagctacnnnnnnnnnnnnnnnnnnnnnnnnnnnnnnnnnnnnnnnnnnnnnnnnnnnnnnnnntgtgatggacgcctctgaccccacccagctctctgcatcctgtgtgcagctcttaggtctcctttctgcagaacaacttgcagaagcatcggtgctgatactcttcaataaaatcgacctaccctgttacatgtccacggaggagatgaagtcattaatcaggcttccagacatcattgcttgtgccaagcagaacatcaccacggcagaaatcagcgcccgtgaaggcactggcttagcaggggtgctggcctggctccaggccacccacagagccaacgattgactgcacggcagaggcgcagctggcctgagctggggagaggtggcagagggcagtatggctttgctgccaatagtttcttctcacaggggcagaataacccaaagtaaccctacatgatggggctctgtgctgagatgcaatgatgtgtaaactgaggcatgtggagatggaagttgacatctggcctctgaaaaaagtgtccccaggggctaggcatggtggctcacacctgtaatcccagcactttgagaggcgcgaggcgggtgtatcacctgaggtcgggagttcgagactagccctgaccaaacatggagaaaccctgtctctactaaaaatacaaaattagctgggtgtgctggtgcatgcctgtaatcccagctacttgggaggctgagacaggagaatcccttgaacctgggaggtggaggttgcagtgagtcgagatcatgccattgcactgcacctgggcaacaagagtgaaactccgtcttaaaaaatataagaaataaaaaaataaaaacctgaaaaaaaa

SEQ ID NO: 547 - DNA, 3039 bp, Homo sapiens
tttcgtcctacctcctgggagatgcagtccccactgtagagcgggaggcgcaggcggctgaggaactgggggtggtggcggtgggaaagacagggaagattgtagaggaggaagcccaggaggacctggagggccttagaggcagccaaaacgagggggctggaaggctgagagggcctggagatgacagaagacatgaagtggggagctcagctgtagaacagacctggggctggggagatggcagctcccatgggtcccaagcagagaggcaggacagtggggctggggagacagccaaggctgccaggtgccaggagccaagcgcccacttggaggccagaaagaaatccaaggcagggtctggggcttgccaagacaggagcggccaagcccaggagaggcaggagtcccatgagcaggaagtgaacagagaagagaggctgagaagctgggaacaggaggaggaggaggaagaggtcagggcaagagagccagggatggccagaggggcggagtcagagtggacctggcatggggagacggaggggaaggctggtgctgttgggccaaaggcggcaggggacaaccgggagatggagcagggggtcagggaggcagatgcaggggaaactgaggagcctggggccgaaggggctgggaaaggagaagaggtggtagtggtggagaaggcctgtgaaagcactagggcatgggggacgtggggcccaggggcagagcctgaggactggggaatcttaggcagagaggaggccaggacaacctcaggcaaagaggaggctgacctgctgggagtcagacagacagaatatggagcagtcccaggagaaaggctcctagaggctactggaaaagtctgggtcctagaggaggagggggatgaggagagagaggctgaggtgagccctttccccaaacagccccaggtcctgggcactgaaagaacagaagaggctgctgagagccagaccgcagggagggaagctgtgggaggccaggaggcaggggagagctttgagggccaggtagacctgcgtggtaaggaggctgagatgaggcaggacttggggatcagggccgaccgggccaggatggaagagctggtacaggcagaggaggcccaggaggagagagggagcagcagggatccagtggctgagctgccctcagatggagaggctgaaggcactgccgacttggaggcaactccagaggccaggcctgaggaggagctcacaggggaggagagtgaggcggcccagactagctgtggcctactgggcgtggaatggggtggcctcacacacagcgtcaccaaaggccagggacctgagctgatggggggtgcccagaccccaactaagcaacccgaggaaagggaggcaggggaggtggagctcatgggagttctggccctgagcaaagaggagcaggagaggagcctggaggcaggtcccaggcacgcggggtctgtaaagcctgaggcctccgaggccttcccaggagcctgggaaaaccgcacgagaaaggacatggagagaggaaatactcaggaggatgcggccgatggcgagcagcgggaggaggaggagactgcgggaggccagaccctggcggctgaggctgaaggagaccgagagtctgaactatcagaagtcccagaggcaggcggggaggggctgacaacccaggacgcgggatgtggaactgaggagggagaggcgtctgtctcagagaaccaggagctggacggaagcacaggggcagacgcaagggccttgcccgtcactgggagaggcctatgccagagaaactgaggatgaggaggcggaggctgacagaacatccagaagaggctggaggctgcaagcggtggctgtgggcctcccggaccgtgaggatgcacagactggctctgtggctgctgggattatggggggtgatgtggtcccacacatcagcgctgctggcgctggtgaagctttggaaggggcgcttgggcaaggctgggactcgaaagaaaaggaagaggcagcagcaggagagcatgcaggtgggcaagaatttggtctggagggctcagcagaggaagaggtgactggcagaggcagccaagtagaggcttttgagtccagggagggaggaccttggggagggcgggtagaggccgaggaatctgcaggcgcagaggacagctgtgggctggatcccgcgggctcccagacagcgagggcagaggggatgggagccatggtggaggctggggggcttctagaaaagtggacgctgttggaagaagaggctgttggatggcaggagagagaacagagggaagacagtgaggggcggtgtggggactaccaccctgagggagaggcaccaaggctccttgatgcagagggtctcatggtgaccgggggccggagggcagaggccaaggagactgagccagaaagcctggaacatgtcaggggccaggaggagcagccaacacaccaggcccctgcagaagctgcgccggagtcagtcggggaagccgagacggctgaggccatgggcagtgccagaggaggtgctgccaacagctggagcgaggtgagggctcttggtggggtctcggggggaacgagtggaatcccgaagccggccccatggtcctctgtgccccctttcctgcaggccccgctccccgggtccctcctagacgtctctgtcccaaggagtcgcgtgcacctctcgagaagctcctcacagcgtcgctcccggccctcttttcgtcggactccggcctgggagcagcaggaggagcccccagcccccaaccctcctgaggaggagctgtcagctcctgagcagagacccctccagctggaggaacccctggagccaagccctctgaggcatgatgggaccccggtgccagccaggagaaggcccctgggacacgggtttggcctcgcgcaccctggcatgatgcaggagctgcaagcccgtctgggccggcctaagccccagtga

SEQ ID NO: 548 - DNA, 2369 bp, Homo sapiens
  misc_feature (1)...(2369): n = a,t,c or g
ttttttttttttggggagcaggaggttttattgtaaagaggccgattgtacagagcaaagtttgtttctgaacacggggggctgggtggtgggacccagaggtccagagctgggtgaaggatgaggggtggcatcgccccatccaggcagtgggcagggcagggaggactaaacggctgcctcccagttcccttccctgcccctcattactgggtaagagggagccaggctatttccacggatccaggagaatatagcaggagaccctcaccaccccacaccatgccccaaggatacgggaggtgccccagtctggcttttgcagtcggccagctcccagcctcctcgaggagcagcctggccacacctttttcccctggagcctggaacagctggctttgggttaggaggctggaagcacccccttaccctgtccaggcacctcaagggacagcccgtggttccctggtcaaaccccttagggcacagtgacccattggcttctgcctctggggctgggtagcacaggagtgggtgggcactgaggggccagcactgagccaggtcttaaagagggagtccgagtgttgggggcagtggtctctggtgggggcatagccccagagatggggctcctgtgagtccagcctaggggttgagggggatctgagccagttcacattgtcctggccacaggggtctctagggcatgacactcagggccactctgcctgttccaggccctgatcgtggtaatttaaagctcagaatggtggatgggggaagcctcagggaccaaggccctgccttcccctagactgagcccctcgtcggcttcatcctcacacccgctgtatctcaaacagcttcacgtcggtgtcgtaccagacaggggggtccacattcctcagatagatgacgccccacatgtaggtgcggaaccacatggcagtgcccgagttggcctggtacttgcggatgaggatggggtggggcacgggcagcagccccaccagggtgccatgctgcaggaaccgcaggatctcagactcatccgtcaggcccttgtcgatgcagatcttctccacctgcggaaccagcacctgcagcagcctcatgatggtctgcagcggcagcttcgacttccaggagaggacccactctggcgttgggctccactgcccactggctgatgaggtggacggtcgccgctgctccctccatgcctggctgggctcccccttagccgggctgccatcctccaagctctgctggggctcaggttccagggaccgcaaggtgccatcctctgacacctgggacttctcggtcagcttgtcaatgcctggagtagccaccagactggtcttgagggtgcctggctctgcaggggcagcggggcgggagccctccatggaggtgcccctccctgggagccggtgcgagacaagggctcaggtgtccgccggcgccgctgcagggccttgtgaatggtgggcgggtccgtgggcaggttggccagctggtggaagatgctgcgcttgcggatgatggcgtagaccaggttggagttgccatcaaattggtactggatgatgttgttgaagacctccaggaggaagaagaccaggtggtggttctgggcggcagagaagaggaaccaggtggtggagaaggcctccagcaggtgcagcaacttgttggcggtcaccatggacaggctcttgaggtagggggacacgttgaccacgatggtgagcaggcagtcgaagaggggctgcaaccgctggtgcccgctggtgatgatcttgtggaacacccacaatgagcaggtcggcgtgggtccctgtgaagactgggatgtccatgggcacgcggattgagtagggtttgttcagccgcaccccgaagttncgctccccgctcagaagcagcaagatgaagacaccaatgtgcatcaggcccacccgagactgatcggcccgggcatcgttgaggaagaagaggatggggacaaggatgtctaggacgtcgctgctcttcagcacgaagaagaggaatttctaggggtgcggggaggggccaagtgggctgagttcaagggaggggcagctctgccccacccccctcagtctgacactgtccctgcccccgggttattggggcagctgctctccatctccctgcagggcccctcgaggctggcccaccttgttgaagtcgcagagcttccagaagagaactagcagctcctggtggaactggatcttcttggtggagttaggcaggtaggtctggagcagggggttggacagcagccgggctatacccttgaggatgaactggaagtcctcctcacgatggatgcg

SEQ ID NO: 549 - DNA, 857 bp, Homo sapiens
ttttttttttttgcagtaagtaactcagaatgactttactcaggaaatatgaccatgactcactggctaggagtgccccatgcccagttcttagagacccttgatagctcctagaagacaggaggctgccgtggtcaagaagggccaagccttgaagtctcacggcaccccctgtggtggaggtataaggctcaggggccaactactgggtcttgcagtccccatcgttgctgtgggctgtcttcaccttctttagttccttctgtagctcagactcggccaccacaacctcctttggcttctggtaagagatgatcagggtgcagttggcgtgggcaaagctcagcaaggcgtcatccagaggtagctggtgtctatctagatcaggaatggagaacttcttgtagtacttcttgttggttgttctgacaatgatgcagcgctccttctggtccacagagacactatagacatccttaggataggggaggtttcgaatccgccactggaaactcatcttggtgtccttgcgcatgaagataggattggcattgctttccttgatgagttcaggccccaggttccctgctcctaggggcgctgggtctcctacttcaagctgccactggcccatggctcccagggcacttttcacacgccactttctcacaagtagttcactcgtcttctcgtcatattcttcagccatttccttgccgtctgggaataaatagtgaaccttccttctcccgtcctgcagcagcgcagtcttctgggctgtccgcagactctccaaccagcccgtcaccgccatctttcccctgctaagcagcacgcccagccgctgccatggcaac

SEQ ID NO: 550 - DNA, 2276 bp, Homo sapiens
attcggcacacggggagtgacatcgccggggtttgcgggtggttgttgctctcggggccgtgtggagtaggtctggacctggactcacggctgcttggagcgtccgccatgaggagaagtgaggtgctggcggaggagtccatagtatgtctgcagaaagccctaaatcaccttcgggaaatatgggagctaattgggattccagaggaccagcggttacaaagaactgaggtggtaaagaagcatatcaaggaactcctggatatgatgattgctgaagaggaaagcctgaaggaaagactcatcaaaagcatatccgtctgtcagaaagagctgaacactctgtgcagcgagttacatgttgagccatttcaggaagaaggagagacgaccatcttgcaactagaaaaagatttgcgcacccaagtggaattgatgcgaaaacagaaaaaggagagaaaacaggaacctgaagctacttcaagagcaagatcaagaactgtgccgaaattctttgtatgccccactatgatattgacagtgcctcagtgcccagcttagaagagctgaaccagttcaggcaacatgtgacaactttgagggaaacaaaggcttctaggcgtgaggagttttgtcaagtataaagagacagatcatactgtgtatggaagaattagaccacaccccagacacaagctttgaaagagatgtggtgtgtgaagacgaagatgccttttgtttgtctttggagaatattgcaacacctacaaaagttgctacggcagcctggaaatgcagaaatcacaaaatgaagcagtgtgtgaggggcctgcgtactcaaatcccgagagctctgggacaggttgcaaatacctgaagaagaaagagaagctgtggccaccattatgtctgggtcaaaggccaaggtccggaaaagcgctgcaatttagaagtggatcggttggaagaacttgaaaaatgcaaaaccatgaagaaagtgattgaggcaattcgagtggagctggttcagtactgggaccagtgcttttatagccaggagcagagacaagcttttgcccctttctgtgctgaggactacacagaaagtctgctccagctccacgatgctgagattgtgcggttaaaaaactactatgaagttcacaaggaactctttgaaggtgtccagaagtgggaagaaacctggaggcttttcttagagtttgagagaaaagcttcagatccaaatcgatttacaaaccgaggaggaaatcttctaaaagaagaaaaacaacgagccaagctccagaaaatgctgcccaagctggaagaagagttgaaggcacgaattgaattgtgggaacaggaacattcaaaggcatttatggtgaatgggcagaaattcatggagtatgtggcagaacaatgggagatgcatcgattggagaaagagagagccaagcaggaaagacaactgaagaacaaaaaacagacagagacagagatgctgtatggcagcgctcctcgaacacctagcaagcggcgaggactggctcccaatacaccgggcaaagcacgtaagctgaacactaccaccatgtccaatgctacggccaatagtagcattcggcctatctttggagggacagtctaccactcccccgtgtctcgacttcctccttctggcagcaagccagtcgctgcttccacctgttcagggaagaaaacaccccgtactggcaggcatggagccaacaaggagaacctggagctcaacggcagcatcctgagtggtgggtaccctggctcggcccccctccagcgcaacttcagcattaattctgttgccagcacctattctgagtttgcggatccgtccctctctgacagttccactgttgggcttcagcgagaactttcaaaggcttccaaatctgatgctacttctggaatcctcaattcaaccaacatccagtcctgagaagccctgatcagtcaaccagctgtggcttcctgtgcctagactggacctaattatatgggggtgactttagtttttcttcagcttaggcgtgcttgaaaccttggccaggttccatgaccatgggcctaacttaaagatgtgaatgagtgttacagttgaaagcccatcataggtttagtggtcctaggagacttggttttgacttatatacatgaaaaagtttatgggcaagaagtgcaaattttagcatatgggggcctgacttctctaccacataattctacttgctgaa

SEQ ID NO: 551 - DNA, 3173 bp, Homo sapiens
aagcttggcacgagggtcttgtcagcagcccggccattggagcatatctttctgccagttacggagacagcctcgttgtgctggtggccacagtggtggctcttctggacatctgcttcatcttagtggctgttccagaatctctgcctgagaaaatgagaccggtttcctggggagctcagatttcttggaaacaagcagacccttttgcgtcgttgaagaaagttggaaaagattctactgtcttactaaatctgcatcaccgtgtgtctttcataccttcctgaagctgggacagtattcaagttttttttctctatctcagggcaggtcatagggtttgggatctgttaaaattgcagcattcatagctatggtaggaattctgtctattgtggctcagacggcctttcttagcatcttgatgagatcattaggaaataagaatactgtcctccttggcttgggcttccagatgctccagttagcctggtacggttttggatcacaggcctggatgatgtgggcagcagggaccgtggctgccatgtccagcatcacgtttccggcaatcagtgccctcgtctctcggaatgcagagtcagatcagcaaggagttgcccaggggatcataactggaataagaggactatgcaatggcctggggccagcactgtatggcttcatattctacatgttccatgtggaactgactgagttgggcccgaaattgaattctaacaacgttcccctgcagggagctgtcatcccaggcccgccgtttttatttggggcatgtatagtccttatgtcttttctggttgccttattcattcctgaatacagtaaagccagtggagttcaaaaacacagtaacagcagcagcggcagcctgaccaacaccccagaacggggcagtgatgaggacattgagccactactgcaagacagcagcatctgggagctctcttcatttgaggagcctgggaatcagtgcactgagctgtaaactcggcagaaagtgggattctgcatacgccatctctgagagccatggagggagccacacccctggtgacttcatggtgctggatgggagacgctagcggcatccttcagggccaagtttgataaataccaccgccatcattctgctcatcctcctcctgtttttttttttctcttacattcttttttttttcccggttaatccttaaaacaagaaaaaaatttgaaatacttccttgcaaataatgtgcaactcccaaggtgaaactcaaatagaaaaagtcatctctctggtagaaaggatggctttcctgtaatgactatagagtaagagtggcagcaatctttccatgcccttttcagcagaaggcacagaacagtagcgggactgccatctctggcaagatttcaggtaaagaatctcttcttaatttctaccttcctgtttctctgaatcagcccataggtgttgatgagtggccactcttaaagagtcactcagtatcagggatctactgtctttgttcaaaggtcaaataaaaacctagtctccttttattctactttctattcttagctagaatgaaactcagcatatatacacttctggacataataatattgaatagtaattacctttactagatgaaagaaattttcattacaaacttaaatcatgtaaaactcaacaactcagattcctggacctggtgtcctggttgggtccaaggtgattttacagaagaaaaaaacaactcaagcattctggtggcaacatagagattgtaggctgcttctaagaaagttattaacaatttggaaattcctaagtaggatgagagttagtaactggatacgagtgaagtttatatccaagttcagactcaaaggcattattatgatttgcttcttcccatgtcttccatgtcctgcttctcaaagtttttctcatccatcacactcctgccttaactgctctgagtatgcatttgttttcaattcatctttatttcaatctgtttaacttttgaatcgcatgggaatacgcacattaagttcctttctaaaataaggttttatgaagctgagtttcacgataagtgtcttgctattttttgagatgttttatggacaaagaaaactttacagatttatatgtattttgctgcaccagtaaatggaccattaactagggcccacctttaacagagcacccctttgaaagttttataggtatgaaatatatgtagatatttgtaaagggttttaattttttttttgatggggtgctgtgtaaatcttgtatttataaatgtaatgaaggtattgacagaaaaaaatatatacaacttttataaaggattgtgtactgactgaatacatttaaaagaaaatatattttgaaacctgttctgctatgaacagagataacatatctttttactatgctattatgcattaggaagcttaacctaaaaaccaatagcatagtaaaaagatatgttatctctgttcatagcagaacaggtttcaaaatatattttcttttaaatgtattcagtcagtacacaatcctttataaaagttgtatatatttttttctgtcaataccttcattacatttataaatacaagatttacacagcaccccattcaaaaaaaaaattaaaaccctttacaaatatctacatatatttcatacctataaaactttcaaaggggtgctctgttaaaggtcacctagttaatggtccatttactggtgcagcaaaatacatataaatctgtaaagttttctttgtccataaaacatctcaaaaaatagcaagacacttatcgtgaaactcactcagcttcataaaaccttattttagaaaggaacttaatgtgcgtattcccatgcgattcaaaagttaaacagattgaaataaagatgaattgaaaacaaatgcatactcagagcagttaaggcaggagtgtgatggatgagaaaaactttgagaagcaggacatggaagacatgggaagaagcaaatcataataatgcctttgagtctgaacttggatataaacttcactcgtatccagttactaactctcatcctacttaggaatttccaaatatgttaataactttccggacgcgtgggcggacgcgtgggtcg

SEQ ID NO: 552 - DNA, 14302 bp, Homo sapiens
cgcgcggccccctccagcccccggctcccggcagcagaagcagaaggcagcgccaggggccgccgccgccgccgagctccgcggggctcgggagccggccccggcgaggaggcgcggaaccatggccgatgggggcgagggcgaagacgagatccagttcctgcgaactgatgatgaagtggttctgcagtgcaccgcaaccatccacaaagaacaacagaagctatgcttggcagcagaaggatttggcaacagactttgtttcttggagtccacttccaattccaagaatgtgcccccagacctctccatctgcacctttgtgctggagcagtccctctctgtccgggcgctgcaggagatgctggctaacaccgtggagaaatcagaagggcaagttgatgtggaaaaatggaaattcatgatgaagactgctcaaggtggtggtcatcgaacactcctctacggacatgccatattgctgcgccattcctatagtggcatgtatctgtgctgcctgtccacctcccggtcttcaactgataagctggcttttgatgttggcttgcaagaggacaccacaggggaggcttgttggtggaccatacaccctgcctctaagcagcgatcagaaggagaaaaagtacgagttggagatgacctcatcttagttagcgtgtcctctgaaaggtacttgcacttgtcttatggcaacggcagcttacacgtggatgccgctttccagcagactctctggagcgtggccccaatcagctcaggaagtgaggcagcccaagggtatctcattggtggtgatgtcctcaggttgctgcatggacacatggacgagtgtctcactgtcccttcaggagaacatggtgaagagcagcggagaactgttcattatgaaggtggcgctgtgtctgttcatgcacgttccctttggagactagagacgctaagagttgcgtggagtggaagccacataagatggggacagccattccgactacgccatgtcacaacaggaaaatacttgagtctcatggaagacaaaaaccttctactcatggacaaagagaaagctgatgtaaaatcaacagcatttaccttccggtcttccaaggaaaaattggatgtaggggtgagaaaagaagtagatggcatgggaacatctgaaataaaatacggtgactcagtatgctatatacaacatgtagacacaggcctatggcttacttaccagtctgtggacgtgaaatccgtgagaatgggatctatacaacgtaaggctattatgcatcatgaaggccacatggatgatggcataagtttgtcgagatcccagcatgaagaatcacgcacagcccgagttatccggagcacagtcttccttttcaatagatttataaggggccttgatgctctcagcaagaaagcgaaggcttccacagtcgatttgcctatagagtccgtaagcctaagtctgcaggatctcattggctacttccaccccccagatgagcatttagagcatgaagacaaacagaacagactacgagccctgaagaatcggcaaaatctcttccaggaagagggaatgatcaacctcgtgcttgagtgcatagaccgtttgcacgtctacagcagtgcagcacactttgctgatgttgctgggcgagaagcaggagagtcttggaaatccattctgaattctctgtatgagttgctggcggctctaattagaggaaatcgtaaaaactgtgctcaattttctggctccctcgactggttgatcagcagattggaaagactggaagcttcttcaggcattctggaagttttacactgtgttttagtagaaagtccagaagctctaaatattattaaagaaggacatattaaatctattatctcacttttagacaaacatggaagaaatcacaaggttctggatgtcttgtgctcactctgtgtttgccacggggttgcagtccgttctaaccagcatctcatctgtgacaatctcctaccaggaagagacttgttattgcagacacgtcttgtgaaccatgtcagcagcatgagacccaatatttttctgggcgtcagtgaaggttctgctcagtataagaaatggtactatgaattgatggtggaccacacagagccctttgtgacagctgaagcaactcacctgcgagtgggctgggcttccactgaaggatattctccctaccctggagggggcgaagagtggggtggaaatggtgttggagatgatctcttctcctatggatttgatggccttcatctctggtcaggttgtattgctcgtactgtaagctcaccaaaccaacatctgttaagaactgatgatgtcatcagttgctgtttagatctgagtgccccaagcatctcgttccgaattaatggacaacctgttcaaggaatgtttgagaatttcaacatcgatggcctcttctttccagtcgttagtttctctgcaggaataaaagtacgctttctgcttggagggcgacatggagaattcaaatttcttcctccacctgggtatgctccttgttatgaagctgttctgccaaaagaaaagttgaaagtggaacacagccgagagtacaagcaagaaagaacttacacacgcgacctgctgggccccacagtttccctgacgcaagctgccttcacacccatccctgtggataccagccagatcgtgttgcctcctcatctagaaagaataagagaaaaactggcagagaatatccatgaactctgggttatgaataaaattgagcttggctggcagtatggtccggttagagatgacaacaagagacaacacccatgcctggtggagttctccaagctgcctgaacaggagcgcaattacaacttacaaatgtcgcttgagaccctgaagactttgttggcattaggatgtcatgtgggtatatcagatgaacatgctgaagacaaggtgaaaaaaatgaagctacccaagaattaccagctgacaagtggatacaagcctgcccctatggacctgagctttatcaaactcaccccatcgcaagaagcaatggtggacaagttggcagaaaatgcacataatgtgtgggcgcgggatcgaatccggcagggctggacttatggcatccaacaggacgtaaagaacagaagaaatcctcgccttgttccctacactcctctggatgaccgaaccaagaaatccaacaaggacagcctccgcgaggctgtgcgcacgctgctggggtacggctacaacttggaagcaccagatcaagatcatgcagccagagccgaagtgtgcagcggcaccggggaaaggttccgaatcttccgtgccgagaagacctatgcagtgaaggccggacggtggtattttgaatttgagacggtcactgctggagacatgagggttggttggagtcgtcctggttgtcaaccggatcaggagcttggctcagatgaacgtgcctttgcctttgatggcttcaaggcccagcggtggcatcagggcaatgaacactatgggcgctcttggcaagcaggcgatgtcgtggggtgtatggttgacatgaacgaacacaccatgatgttcacactgaatggtgaaatccttcttgatgattcaggctcagaactggctttcaaggactttgatgttggcgatggattcatacctgtgtgtagccttggagtggctcaagtgggtaggatgaactttggaaaggatgtcagcaccttgaaatatttcaccatctgtggcttacaagagggctatgaaccatttgccgttaatacaaacagggatattaccatgtggctgagcaagaggcttcctcagtttcttcaagttccatcaaaccatgaacatatagaggtgaccagaatagacggcaccatagacagttccccatgtttaaaggtcactcagaagtcttttggttctcagaacagcaacactgatatcatgttttatcgcctgagcatgccgatcgagtgcgcggaggtcttctccaagacggtggctggagggctccctggggctggcctttttgggcccaagaatgacttggaagattatgatgctgattctgactttgaggttctgatgaagacagctcatggccatctagtgcccgatcgtgttgacaaagacaaagaagctactaaaccagagtttaacaaccacaaagattatgcccaggaaaagccctctcgtctgaaacaaagatttttgcttagaagaacaaagccagattacagcacaagccattctgcaagactcaccgaagatgtccttgctgatgatcgggatgactatgatttcttgatgcaaacgtccacgtactattactcagtgagaatctttcctggacaagaacctgctaatgtctgggtgggctggattacatcagatttccatcagtatgacacaggctttgacttggacagagttcgcacagtaacagttactctaggagatgaaaaaggaaaagtgcatgaaagcatcaaacgcagcaactgctatatggtatgtgcgggtgagagcatgagccccgggcaaggacgcaacaataatggactggagattggctgtgtggtggatgctgccagcgggctgctcacattcattgccaatggcaaggaactgagcacatactatcaggtggaaccgagtacaaaattatttcctgcggtttttgcacaagctacaagtcccaatgttttccagtttgagttgggaagaataaagaatgtgatgcctctctcggcgggattattcaagagtgagcacaagaaccccgtgccgcagtgccccccgcgcctccacgtgcagttcctgtcacacgtcctgtggagcagaatgcccaaccagtttttgaaggtagatgtgtctcgaataagtgaacgccaaggctggttggtgcagtgtttggatcctctgcagttcatgtctcttcatatccctgaggaaaacagatctgttgacatcttagagttgacagagcaggaggaattgctgaaatttcactatcacactctccggctctactcagccgtctgtgctcttgggaaccaccgggtggcccatgccctgtgcagccatgtggatgaacctcagctcctctatgccattgagaacaagtacatgcctggtttgctgcgtgctggctactatgacctgctgattgacatccacctgagctcctatgccactgccaggctcatgatgaacaacgagtacattgtccccatgacggaggagacgaagagcatcaccctgttccctgatgagaacaaaaaacacggccttccagggatcggcctcagcacctccctcaggccacggatgcagttttcctcccccagttttgtaagcattagtaatgaatgttaccagtacagtccagagttcccactggacatcctcaagtccaaaaccatacagatgctgacagaagctgttaaagagggcagtcttcatgcccgggacccagttggagggactactgaattcctctttgtacctctcatcaagcttttctataccctgctgatcatgggcatctttcacaacgaggacttgaagcacatcttgcagttgattgagcccagtgtgtttaaagaagctgccactccggaggaggagagtgacacgctggagaaagagctcagtgtggacgatgcaaagctgcaaggagctggtgaggaagaagccaaggggggcaagcggcccaaggaaggcctgctccaaatgaaactgccagagccagttaaattgcagatgtgcctactgcttcagtacctctgtgactgccaggtccggcaccggatagaagccattgtagccttttcagatgattttgtggctaagctccaagacaatcaacgtttccgatacaacgaagtcatgcaagccttaaacatgtcagctgcactcacagccaggaagacaaaggaatttagatcaccacctcaagaacagatcaatatgcttctcaattttaaggatgacaaaagtgaatgtccatgtccagaagaaattcgtgaccaactattggatttccatgaagatttgatgacacattgtggaattgagctggatgaagatgggtctctggatggaaacagtgatttaacaattagagggcgtctgctatccctggtagaaaaggtgacatatctgaagaagaagcaagcagaaaaaccagttgagagtgactccaaaaagtcctccactctgcagcagctgatttctgagaccatggtccgatgggctcaggagtctgtcattgaagaccccgagctggtgagggccatgtttgtgttgctccatcggcagtatgacggcattgggggtcttgttcgggccctgccaaagacctacacgataaatggtgtgtccgtggaggacaccatcaacctgctggcatcccttggtcagattcggtccctgctgagtgtgagaatgggcaaagaagaagagaagctcatgattcgtggattaggggatattatgaataacaaagtgttttaccagcaccctaatctcatgagggcactggggatgcacgagactgtgatggaggtcatggtgaacgtccttggaggtggagagtccaaggaaatcacctttcccaagatggtggccaactgttgccgttttctctgttacttctgtcgtataagtaggcagaatcaaaaagctatgtttgatcatctcagttatttactggaaaacagcagtgttggtcttgcctccccagctatgagaggttcaacaccactggatgtggctgcagcttcggtgatggataataatgaactagcattagctctgcgtgagccggatctagaaaaggtagttcgttatttggctggttgtggactgcaaagttgccagatgctggtgtctaagggctatccagacattgggtggaacccagttgaaggagagagatatcttgactttctcagatttgctgtcttctgtaatggggagagtgtggaggaaaatgcaaatgtcgtggtgagattgctcattcggaggcctgagtgttttggtcctgctttgagaggagaaggtgggaatgggcttcttgcagcaatggaagaagccatcaaaatcgccgaggatccttcccgagatggtccctcaccaaatagcggatccagtaaaacacttgacacagaggaggaggaagatgacactatccacatggggaacgcgatcatgaccttctattcagctttgattgacctcttgggacgctgtgctcctgagatgcatttgattcatgccgggaagggagaagccatcagaattaggtccattttgagatccctcattcccctgggagatttggtgggcgttatcagcatcgcttttcagatgccaacaatagccaaagatgggaatgtggtggaacctgacatgtctgcggggttttgcccagatcacaaggcagccatggttttattccttgacagggtctatgggattgaggttcaagacttcctcctccatcttcttgaggttggctttctgccagatctccgggcggctgcttctttagatacggcagctttgagtgctacagacatggccttggccctcaatcggtacctttgcacagccgtcttgccattgttaacaagatgtgctcctctctttgctggcacagagcaccacgcttctctcattgactcattacttcatactgtgtatagactttctaagggctgttcacttaccaaagctcagcgggattccatagaagtttgtttactctctatttgtggacaactgagaccttctatgatgcagcacttactcagaagattagtatttgatgtcccattattaaatgaacacgcaaagatgcctcttaaactgctgacaaatcattatgaaagatgctggaaatattactgcctgcctggagggtggggaaactttggtgctgcctcagaagaagaacttcatttatcaagaaagttgttctggggcatttttgatgccctgtctcaaaagaaatatgaacaagaacttttcaaactggcactgccttgcctgagtgcagttgcgggagctttgcctccagactacatggagtcaaattatgtcagtatgatggaaaaacagtcatcaatggattctgaagggaactttaacccacaacctgttgatacctcaaatattacaattcctgagaaattggaatacttcattaacaaatatgcagaacactcccatgacaaatggtcaatggacaagttggcaaatggatggatttatggagaaatatattcagactcttctaaggttcagccattaatgaagccatataagctattgtctgaaaaggaaaaagaaatttatcgctggccaatcaaagaatctttaaaaactatgctggctaggactatgagaactgaaagaactcgggagggagacagcatggccctttacaaccggactcgtcgtatttctcagacaagccaggtttctgtggacgctgcccatggttacagtccccgggccattgacatgagcaatgttacactatctagagacctgcatgctatggcagaaatgatggctgaaaactaccataatatatgggcaaagaaaaagaaaatggagttggagtccaaaggaggaggaaaccatcctctgctggtgccctatgatacactgacagccaaagagaaagccaaggatagagaaaaagcacaggacatcctcaagttcttgcagatcaatggatatgctgtatccagaggatttaaggacctggaactggacacgccttctattgagaaacgatttgcctatagtttcctccaacaactcattcgctatgtggatgaagcccatcagtatatcctggagtttgatggtggcagcagaggcaaaggagaacatttcccttatgaacaagaaatcaagttctttgcaaaagtcgttcttcctttaattgatcagtatttcaaaaaccatcgtttatacttcttatctgcagcaagcagacctctctgctctggaggacatgcttccaacaaagagaaagaaatggtgactagcctattctgcaaacttggagttcttgtcaggcataggatttcactatttggcaatgatgcaacatcaattgtcaactgtcttcatattttgggtcagactttggatgcaaggacagtgatgaagactggcctggagagtgttaaaagtgcactcagagcttttctggacaacgctgcagaggatctggagaagaccatggaaaacctcaagcagggccagttcactcacacccgaaaccagcccaaaggggttactcagattatcaattacaccacagtggccctgctgccaatgctgtcgtcattatttgaacatattggccagcatcagttcggagaagacctaatattggaagatgtccaggtgtcttgttatagaattctgactagcttatatgctttgggaaccagcaagagtatttacgtggagaggcaacgttctgcattaggagaatgtctagctgcctttgctggtgcttttcctgtagcatttttggaaactcatctggacaaacataatatttactccatctacaataccaagtcttcacgagaaagagcagctctcagtttgccaactaatgtggaagatgtttgtccaaacattccgtctttggagaaactcatggaagaaatcgtggaattagccgagtccggcattcgctacactcaaatgccacatgtcatggaagtcatactgcccatgctttgcagctacatgtctcgttggtgggagcatggacctgagaacaatccagaacgggccgagatgtgctgcacagccctgaactcagagcacatgaacacacttctagggaacatattgaaaatcatatataataacttggggattgatgagggagcctggatgaagaggctagcagtgttttcccagcctataataaataaagtgaaacctcagctcttgaaaactcatttcttgccgttaatggagaaactcaagaaaaaggcagctacggtggtgtctgaggaagaccacctgaaagctgaggccaggggggacatgtcggaggcagaactcctcatcctagatgagttcaccacactggccagagatctctatgccttctaccctctcttgattagatttgtggactataacagggcaaagtggctaaaggagcctaacccagaagcagaggagctcttccgcatggtggctgaagtgtttatctactggtcgaagtcccataatttcaaaagagaagagcagaacttcgttgtacagaatgaaatcaacaatatgtctttccttattactgataccaagtcaaagatgtcaaaggcagctgtttctgatcaggaaaggaagaaaatgaagcgcaaaggagatcggtattccatgcagacctctctgattgtagcagctctgaagcggttactgcccattgggttgaacatctgtgcccctggggaccaggagctcattgctctggccaaaaatcgatttagcctgaaagatactgaggatgaagtacgagatataatccgcagcaatattcatttacaaggcaagttggaggatcctgctattagatggcaaatggctctttacaaagacttaccaaacaggactgatgatacctcagatccagagaagacggtagaaagagtattggatatagcaaatgtgctttttcatcttgaacagaagtctaaacgtgtgggtcgaagacattactgtctggtggaacatcctcagagatctaaaaaggctgtatggcataaactactgtctaagcagaggaaaagggctgttgtagcctgcttccggatggcccccttatataatctgccaaggcatcgggctgtcaatctctttcttcagggatatgaaaagtcttggattgaaacagaagaacattactttgaagataaactgatagaagatttagcaaaacctggggctgaacctccagaagaagatgaaggcactaagagagttgatcctctacatcagctgatccttctgtttagtcggacagctttaacagagaaatgcaaactggaggaagattttttatatatggcctatgcagatattatggcaaagagttgtcatgatgaggaagatgacgatggtgaagaggaagtgaagagttttgaagaaaaagaaatggaaaagcaaaagcttctataccagcaagcccgactccacgatcgtggcgcggctgagatggtgctacagacaatcagtgccagcaaaggtgaaactggaccaatggtagcagctactctgaaacttggaattgctattttaaatggtgggaactccacagtacagcagaaaatgcttgactacctcaaggagaaaaaggatgtgggcttctttcagagcctggccggcctgatgcagtcatgtagtgtccttgacctaaatgcatttgagcgacaaaacaaagctgaaggtcttgggatggtgacagaggaaggatcaggagaaaaggttctgcaggacgatgagttcacctgtgacctcttccgattcctgcaactactctgtgagggacacaactcagattttcagaattatctgagaactcagactggcaataatacaactgtcaacataattatctccactgtagactacctactgagagttcaggaatcaattagtgacttttattggtattactctgggaaagatgttattgatgaacaaggacaacggaatttctccaaagctatccaagtggcaaaacaagtctttaacactcttacagagtatattcagggtccttgcactgggaatcaacagagtttggcacacagcaggctgtgggatgctgtggtcggctttcttcatgtgtttgcccatatgcagatgaagctgtcgcaggattccagtcaaattgagctattaaaagaattaatggatctgcagaaggatatggtggtcatgttgctgtccatgttagaaggtaatgttgttaatggaacgattggcaaacagatggtggatatgcttgtggaatcttccaacaacgtggagatgattctcaaattttttgacatgttcttaaaactaaaggatttgacgtcgtctgatacttttaaagaatatgaccccgatggcaagggagtcatttccaagagggacttccacaaagcgatggagagccataagcactacacgcagtcagaaacggaatttcttttgtcttgtgcggagacggatgagaatgaaaccctcgactacgaagagttcgtcaaacgcttccacgaacctgcgaaggacatcggcttcaacgtcgccgtccttctgacaaacctctctgagcacatgcccaacgatacccgacttcagacttttctggaattagcagagagcgtcctgaattatttccagccctttctgggccgcatcgaaatcatgggaagcgccaaacgcatcgagagggtctattttgaaatcagtgagtccagccgaacccagtgggagaagccccaggtcaaggagtccaaaagacagttcatatttgacgtggtcaacgaaggcggagagaaagagaagatggaactctttgtgaacttctgcgaggacaccatctttgaaatgcagctggcggctcagatctcggagtcggacttgaacgagaggtcagcgaataaggaagaaagcgagaaggagaggccggaagagcaggggccgaggatggctttcttctccattctgacggtcaggtcggccctgtttgcgctcaggtacaatatcttgacccttatgcgaatgctcagtctgaagagcctgaagaagcagatgaaaaaagtaaaaaagatgaccgtgaaggacatggtcacggccttcttttcatcctactggagtattttcatgaccctcttgcacttcgtggccagcgttttcagaggctttttccgcatcatttgcagcctgctgcttgggggaagcctcgtcgaaggtgctaaaaagatcaaagttgcagaactgttagccaacatgccagaccccactcaggatgaggttagaggagatggggaggagggagagaggaaacccctggaagccgccctgccctccgaggatctgaccgacttaaaggagctgacagaggaaagtgaccttctttcggacatctttggcctggatctgaagagagaaggaggacagtacaaactgattcctcataatccaaatgctgggctcagtgacctcatgagcaacccagtccccatgcctgaggtgcaggaaaaatttcaggaacagaaggcaaaagaagaagaaaaggaagaaaaagaagaaaccaaatctgaacctgaaaaagccgagggagaagatggagaaaaagaagagaaagccaaggaagacaagggcaaacaaaagttgaggcagcttcacacacacagatacggagaaccagaagtgccagagtcagcattctggaagaaaatcatagcatatcaacagaaacttctaaactattttgctcgcaacttttacaacatgagaatgttagccttatttgtcgcatttgctatcaatttcatcttgctcttttataaggtctccacttcttctgtggttgaaggaaaggagctccccacgagaagttcaagtgaaaatgccaaagtgacaagcctggacagcagctcccatagaatcatcgcagttcactatgtactagaggagagcagcggctacatggagcccacggtgcgtatcttacctattctgcacacggtcatttctttcttctgcatcattggatactactgcttgaaagtcccattggttatttttaagcgagaaaaggaagtggcacggaaattggaatttgatgggctttatattacagaacagccttcagaagatgatattaaaggccagtgggatagactcgtaatcaacacacagtcatttcccaacaactactgggacaaatttgttaaaagaaaggttatggataaatatggagagttctacggccgagacagaatcagtgaattacttggcatggacaaggcagctctggacttcagtgatgccagagaaaagaagaagccaaagaaagacagctccttatcagctgtactgaactccattgatgtgaagtatcagatgtggaaactaggagtcgttttcactgacaactccttcctctacctagcctggtatatgact

SEQ ID NO: 553 - DNA, 1633 bp, Homo sapiens
gcacgagggcggcaggcgcggcgcgcttagttgccggagctgaacggccgcggagctggtctgaggcgagccgagccgagcgagcgcggcggtggggccgagaggacgcagcaggtggcggcgttgccattgtcgcacggtcacagccacggcgggggtggctgccgctgcgccgccgaacgggaggagccgcccgaggcagcgcggcctgcgcctacggcctgtacctgcgcatcgacaaggggcggctgcaatgccttaacgagagccgcgagggcagcggccgcggcgtcttcaagccgtgggagcgagcggaccgaccgctccaagtttgttgaaagtgatgcagatgaagagcttctgtttaatattccatttacagggcaatgtcaagctcaaaggcatcattataatgggagaggatgatgactcacacccctctgagatgagactgtacaagaatattccacagatgtcctttgatgatacagaaagggagccagatcagacctttagtctgaaccgggatcttacaggagaattagagtatgctacaaaaatttctcgtttttcaaatgtctatcatctctcaattcatatttcaaaaaacttcggagcagatacgacaaaggtcttttatattggcctgagaggagagtggactgagcttcgccgacacgaggtgaccatctgcaattacgaagcatctgccaacccagcagaccatagggtccatcaggttaccccacagacacactttatttcctaagggctggccaaggctcccatagaggcgctgtgtcagtgaagatgtacgactacctgttgggaaggacaaagggatgaggctccagagagagttggctgccacagcctctgccaagctttgtctttggggcttgctgcagaaacctggcctacggaagatacgacaccactgggagggttgtgtaggtgccaggggaccatcgtggttctctagggcgctgtggaaattgggtcttgggctgggtggcatctggcagtcatgggtaacacttgcttttccagttaatgtggccatgtgattccaagtgtcatgttgctttgtggcaagattgttgtgtgacttgtttttttgtttttgtttttgtttttttaaaggaaactatttgtgggctataggaaactttctgatgcctccggattgtgttagtagtagccatcaggagggtctccaactaaaacacttgttcctgcttgctcctttcccctctcattgttcagcattcttgtcaagttgcccagcttggagttgtctgtcacgcacatgtgtcctgtggttatagctagaaggacaggagtctcctgctgatgcgtgatagcttaagcttggggagaaggtcttttccactgcctagctaagcagtctggggagagcatggggatcatttctatgtgtgtgggtaatctggtcagtaagattgagacttagttaagattccccttggaaattccttaatgtttattagcttctaactagtgttgtaagtccgatgccagaatttggagatttgagttcttcttttcatggcttttattcactgtgactaataagcttcctaataaatccttgccagacttaaaaaaaaaa

SEQ ID NO: 554 - DNA, 1404 bp, Homo sapiens
ggaattccctgtacagagatgggcaattttgacaatgctaatgtcactggagaaatagaatttgccattcattattgcttcaaaacccattctttagaaatatgcatcaaggcctgtaagaaccttgcctatggagaagaaaagaagaaaaagtgcaatccgtatgtgaagacctacctgttgcccgacagatcctcccagggaaagcgcaagactggagtccaaaggaacaccgtggacccgacctttcaggagaccttgaagtatcaggtggcccctgcccagctggtgacccggcagctgcaggtctcggtgtggcatctgggcacgctggcccggagagtgtttcttggagaagtgatcattcctctggccacgtgggactttgaagacagcacaacacagtccttccgctggcatccgctccgggccaaggcggataaatacgaagacagcgttcctcagagtaatggagagctcacagtccgggctaagctggttctcccttcacggaccagaaaactccaagaggctcaagaagggacagatcagccatcacttcatggtcaactttgtttggtagtgctaggagccaagaatttacctgtgcggccagatggcaccttgaactcatttgttaagggctgtctcactctgccagaccaacaaaaactgagactgaagtcgccagtcctgaggaagcaggcttgcccccagtggaaacactcatttgtcttcagtggcgtaaccccagctcagctgaggcagtcgagcttggagttaactgtctgggatcaggccctctttggaatgaacgaccgcttgcttggaggaacccagacttggttcaaagggagacacagctgttggcggggatgcatgctcacaatcgaagctccagtggcagaaagtcctttccagccccaatctatggacagacatgactcttgtcctgcactgacatgaaggcctcaaggttccaggttgcagcaggcgtgaggcactgtgcgtctgcagaggggctacgaaccaggtgcagggtcccagctggagacccctttgaccttgagcagtctccatctgcggccctgtcccatggcttaaccgcctattggtatctgtgtatatttacgttaaacacaattatgttacctaagcctctggtgggttatctcctctttgagatgtagaaaatggccagattttaataaacgttgttacccatgtcctccagtgcttatcaaatgaggtaaaaggccggctggtgggcatggtgactcccccctgtgatcccagcaactttgggaggctgcagtggatggcttgagctcagaagtgtgagatcagcccaggcaacatagataccctgtctacaaaaaaaccaaaaaattatccaggggtggg

SEQ ID NO: 555 - DNA, 3497 bp, Homo sapiens
tggcgtcgtggctgtcgggaaagaagggttggggcctgttgttcttcctcccgagtatcccctccagctggacgaccccacgctgcagcacgggcttccggcttctctcctcagtggccaattcgagggcacagcgggctccggaggcgcggcggcaagcctatcccgcctcccaaccacagcctccagcacccgagagaacggccgcccacagcacacgttctccggacaggagggcgaaggcccaagacctggagagatggtcagctctcaaaaaaggcacaaacaattgaaggatggataccatggcatatgttaaaagcgtgttgaaaggaaaataagaaagccaggaatctcaggatgaatcagtctagatcgagatcagatggtggcagtgaagaaaccttacctcaagaccataatcatcatgaaaatgagagaagatggcagcaagagcgtctccacagagaagaggcctattatcagtttattaatgaactcaatgatgaagattatcggcttatgagagaccataatcttttaggcacccctggagaaataacatcagaagaactgcaacagcggttagatggcgtcaaggaacaactagcatctcagcctgacttgagagatggaacgaattacagagactcagaagtccctagagaaagttcacatgaagattctcttctagaatggttgaacacctttcggcgcacaggaaatgcaactcgaagtggacaaaatgggaaccaaacttggagagctgtgagtcgaacaaacccgaacaatggagagtttcggtttagtttggaaatccacgtaaatcatgaaaatagaggatttgaaattcatggagaagattatacagacattccactttcagatagtaacagagatcatactgcaaataggcaacaaaggtcaacttagtcctgtggctaggcgaacaagaagccaaacctcagtgaatttcaatggtagtagttccaacattccaaggactaggcttgcttcaagggggcaaaatccagctgaaggatctttctcaacattgggaaggttaagaaatggaattgggggagcagctggcattcctcgagctaacgcttcacgcactaatttcagtagtcacacaaaccaatcaggtggtagtgaactcaggcaaagggaggggcaacggtttggagcagcacatgtttgggaaaatggggctagaagtaatgttacagtgaggaatacaaaccaaagattagagccaataagattacgatctacttccaatagtcgaagccgttcaccaattcagagacagagtggcactgtttatcataattcccaaagggaaagtagaccagtacagcaaaccactagaagatctgttaggaggagaggtagaactcgagtctttttagagcaagatagagaacgagaacgcagaggtactgcatataccccattctctaattcaaggcttgtgtcaagaataacagtagaagaaggagaagaatccagcagatcctcaactgctgtacgacgacatccaacaatcacactggaccttcaagtgaggaaggatccgtcctggagaaaatagagatcgggatagtattgcaaatagaactcgatccagagtagggctagcagaaaatacagtcactattgaaagcaatagtgggggctttcgccgaaccatttctcgtttagagcggtcaggtattcgaacctatgttagtaccataacagttcctcttcgtaggatttctgagaatgagcttgttgagccatcatcagtggctcttcggtcaattttaaggcagatcatgactgggtttggagaactgagttctctaatggaggccgattctgagtcagaacttcaaagaaatggccagcatttaccagacatgcactcagaactgagtaacttaggtacagataacaacaggagccagcacagggaaggttcctctcaagacaggcaggcccaaggagacagcactgaaatgcatggtgaaaacgagaccacccagcctcatactcgaaacagtgacagtaggggtggcaggcagttgcgaaatccaaacaatttagttgaaactggaacactacccattcttcgccttgctcacttttttttactaaatgaaagtgatgatgatgatcgaatacgtggtttaaccaaagagcagattgacaatctttccaccaggcactatgagcataacagtattgatagtgaactaggtaaaatctgtagtgtttgtattagtgactatgtaactggaaacaagctcaggcaattaccttgcatgcatgaatttcacattcattgtattgaccgatggctctcagagaattgcacttgtccgatctgtcggcagcctgttttagggtctaacatagcaaacaatgggtaaggtgatgggatctactcaaatactgttttttagtagaactgaatgttcaagcattgttttgctgagttatttgtgattagctaaccaggatgaaaaataacagattatatatagtttgaactatttttcgtgtgcttttttaaacttgttaaaaagaaatttatataaaatttaaaatacaaatgttaaattatccagaaatacagaatagttaatattgctagaaccaaataacctctaaaatgtttttattttggtaattttgtcatgctaagcacttttgtatctgcacaattcagtaggttaagaatcaatcttctttttcttaatagtacagcagactttagcttcaagtttcataggcttagtacttatatctagacatttgtgtctaaataagcttttcattaactttttattttaaggacagtatcttttcatgaaagagtatttggctgaatgtttgctatatatatgttacttgaaatgttaaatttaatatgcagcataccataggtgtatatataggtatataattttaaggttaaaatattcagtctacaagtttggttcttatttaagcttttgggctaatactgccatatggcacaatgtttaatattggcaagttcatctcagagaaaggggattcagatataattttaaagtagagataatttactgaagcgtctctgacaatctaacttattagacagcaagcaatatataatactgaaaaagtattcagaaatgggaaaatttacatccatatagggttatttaacttgtgttcagcctttttgtaacttttttgaaagtgcaaacaattctttggattattaaataaggtatacagtatgcatggtttctcaaatttagttttaaaatctaaaagtctataaagaatccagatgcataggcaatatgttaagttcacttggaggctaaaaatctccagtgaaaacaaaacgaaaacctttaagaagaaatgtagcagtttatataaacacaaagtatgcattgcaagcatctgtttctaccaataacacacttacaacaaagactgtaaaaaaaaaa

SEQ ID NO: 556 - DNA, 1633 bp, Homo sapiens
  misc_feature (1)...(1633): n = a,t,c or g
agctgcagcggcagaggcagcatccagcggcggcgccagcagttccagtccgttgctttactttttgcttcaccgacatagtcattatgccgaagagaaagtctccagagaatacagagggcaaagatggatccaaagtaactaaacaggagcccacaagacggtctgccagattgtcagcgaaacctgctccaccaaaacctgaacccaaaccaagaaaaacatctgctaagaaagaacctggagcaaagattagcagaggtgctaaagggaagaaggaggaaaagcaggaagctggaaaggaaggtactgcaccatctgaaaatggtgaaactaaagctgaagagatccacatctctcgctcaactgttaatgtctcaacctccagaggcaccccacccagcacactgtcagtaaaggggcagattgaaacagtgagagttaagggcacagaaaactgaatctgtagataacgagggagaatgaattgtcatgaaaaattggggttgattttatgtatctcttgggacaacttttaaaagctatttttaccaagtattttgtaaatgctaattttttaggactctactagttggcatacgaaaatatataaggatggacattttatcgtctcatagtcatgctttttggaaatttacatcatcctcaagtaaaataaatatcagttaaatattggaagctgtgtgtaagattgattcagcattccatgcacttgctttaaaatttagtcctgtgcatactgtggtgtttttactgtgcatatttgaatttttttgcagacaagtaaaccttttattttaaaccacaaatagtcagcaggtggccacaactatccatgtttcattaaaatcacataaaacctaggtacaaaagcaccactgattattgctctagaaaaactgcatgaaaaattcaaatatgcacagtaaaaacaccacagtatgcacaggactaaattttaaagcaagtgcatggaatgctgaatcaatcttacacacagcttccaatatttaactgatatttattttacttgaggatgatgtaaatttccaaaaagcatgactatgagacgataaaatgtccatccttatatattttcgtatgccaactagtagagtcctaaaaaattagcatttacaaaatacttggtaaaaatagcttttaaaagttgtcccaagagatacataaaatcaaccccaatttttcatgacaattcattctccctcgttatctacagattcagttttctgtgccttcctttccagcttcctgcttttcctccttcttccctttagcacctctgctaatctttgctccaggttctttcttagcagatgtttttcttggtttgggttcaggttttggtggagcaggtttcgctgacaatctggcagaccgtcttgtgggctcctgtttagttactttggatccatctttgccctctgtattctctggagactttctcttcggcataatgactatgtcggtgaagcaaaaagtaaagcaacggactggaactgctggcgccgccgctggatgctgcctctgccgctgcagctgctcacgcgcagggcgagttcctccncatagacttcgatctccattggngccg

SEQ ID NO: 557 - DNA, 774 bp, Homo sapiens
tgctgcaagagaaggtgaccttggtagaatctaaactactgtacttcttgacacagtgagggaaagcagttgatattggtattaacacaattatgttgttaaatgcatcacaggtgaggtatttaaagcaaattaaacaagtgacgttcttatttcataaatgcatttaatctcatgcttggctgtttttatggtagaattacagcaatggagaaaattaggcaagaacggaagaggaacagatttgttcataaacggacgcttagaatttgaacttaaagtgagtaaggagcatcaaaagtcaaataggacaaacagggtagatggtattcatggagacaaaggattaactgaggttattttaagactatttatatggaagggatgacattacatagggagacctccaggagtcctgactttgagccccagctatatcaatgactcacactgtgtaacctggaacaaattactcaacctctttgtactccatatttcttatttataaagtgtacataattttatatacgataaagttcttgcaagaatcaattagaaaagaggcaagaaaccaggtacggtggctcatgcctgtaatcctagcactttgggaggccgaggcggggggatcacctgaggtcgggagtttgtgaccagcttgaccaatgtggagaaaccctgtctctactaaaaacacaaaattagcctggccgtggaggccacatgcctgtggccccagctggtttggagggtgaggcaggagaaacgcctggc

SEQ ID NO: 558 - DNA, 2681 bp, Homo sapiens
aaacttatcgacatgctgagagggaacacccagagaccagttcagcaaccaaagtatcctatgactatcgtcacaaacgtcctaagctcttggatggggaccaggacttttctgatgggagaactcagaagtactgtaaggaagaagatagaaaatatagttttcaaaaaggccctctaaatagagagttagattgttttaatactggaagagggagagagactcaagatggacaagtcaaagaaccttttaaaccgtctaagaaagacagcattgcctgtacttattcaaataaaaatgatgttgatttgcgatctagtaatgacaaatggaaggaaaaaaaaaaaaaagaaggggattgtagaaaagagagcaattcttccagtaaccaacttgataaaagtcaaaaacttcctgatgtgaaaccctcgcctatcaatcttaggaagaaatcacttacagttaaagtagatgtgaagaaaacagtagatacattcagggttgcttctagctattccacagagagacagatgtcacatgatttggttgctgttggcaggaaaagtgagaactttcatccagtgtttgaacatcttgactcaactcagaatactgaaaacaaacctacaggagaatttgctcaggaaatcataacaataatccatcaagttaaagcaaattattttccatcacctggcattactttacatgagcgtttctccaacaatggcagatatacacaaggcagatgtaaatgaaattccattgaattcagatccagaaatacacaggagaatagatatgtctttggccgagcttcagagtaaacaagctgtgatctatgaatcggaacagactctgatcaaaataatagatccaaatgacctacgacatgacattgaaagaaggcgaaaagaacggttacagaatgaagatgagcacatttttcacatagctagtgctgcagagagggatgatcagaattccagtttttcaaagaattatactacgcagagaaaagacataattactcacaaaccatttgaggttgagggaaaccaccgaaacacaagagtaagaccttttaagagcaactttagaggtggcagatgccagcccaattataaatcaggcctggtacagaagagcttgtacattcaggctaagtatcagcgtttacggttcactggcccaaggggatttatcactcataagttcagagaaagattaatgagaaaaaagaaggtcccctagctctcaaagctagacaagccaagctggaaacgtgtcctactaattctcccagttctctttccaactttaatggtttcaagtcttctcatttccatcactcattcattactacatttgtttcatccattttaatggctgcatattattccactctgtggatatatgaattatttcagtggtcttcaacctttttgctccatactgtaaagttttgaaaagttatctaccttcttgcacattggaatatacagatgttgccacaggaatctaatctgaaatcgtacaaatggaaatgacgctacaggaggatgtttgggagcatctctctctttttgtcaggagttagaagtgacactaaggcactaatactgtaacttcttgataaaataactttattttttagtagtggaatgctgcaacttttttacacctaacaattgcttttaaattacagtattcaatttaaaagttgtattaactacagtttcctttgcaaaaagtctcaaaagaatcacttgaagggcattatttgttgatgcatttttctctgagcatggtttcatagagagaacttcaccaagtaatattcagacgtttatatgttgaaagttttgcttacataataaaaacaaaaacaagtgtctgaattgtatagtgtctttacatgaaagaactttaaacagtggccttatggtagaaaattttataccagatttttctttttctgatgacattttggcttataactcgaagttttcttaagtttctgaagatcaaggcctatataattcatacatttcatattataagaaggcaagagacaaggtgcttcaaatattccatcaggtagttgtgagtgcactgaatttttagtaatatgttcattcagtttttttccacaactatttgctcttttccaatttcaaaatgctattgtggaaaatatgtaaagattttgtaatctatagtccatcttatttttccctcagggcaagcttgtgcatatcatatttttaaaggctttttaaaaatctgacaaacaaaatctcatatttgaaaattgtactttactactacagcattacacattttgcaagcacatcttatagagtgtttacttttagttcagttgatatgtattgcatacctactatgtgtaagagcaaatggatgggatttttaaatgaaatttttaggccccaataccttatttctttatgttttctgtgttctgcttaacagtacatatacattcccaattacatttttgtgaaatgtttatttgtaataaaataaaatgttgttgctctttctgcttaaataagttacttgccagtttgtgagagcattattttaattttgtttgagacttatagccttggatagcacctctgtttaaacagtgtttaaagcactgttctgtgctt

SEQ ID NO: 559 - DNA, 757 bp, Homo sapiens
aagttctcaattcctttttttttgagatggagttttactcttgtcaccgaggctggagggcaatgacatgatctccgttcactgcaatctcggcctcctgggtttaagccattctcctgcctcagcctcccaagtaggtgggattacaggcacccaacaccacaccgggctaatttttggatttttaatagagacggaatttcaccatgttggccaggctggtctcgaactcctgacctcaggtgatccacctgccttggccttccaaagtgctgggattacaggcgtgagccaccatgcctggctacaagttcttaattcttaagagacaccatgcctggctacaagttcttaattcttaagagacatggcgataattcatgctgaagaggaaatctggaaacctgaaagatgcgacattgcttttaccaacacctccacatttcctatacataaaaataaattatactagtgtaataccctagaaatgtataaaatgtgacaaagcctttatatgattgtcatacatgattgtaggtgatagaagtcatactgccaaaactcctgtaagtgtgaagaatgtggcaaaatattttattagtgcttataccttatttcacaggaaagctcttatccttgagaaaaattgtgcaaatacaaagaatatggaaaaaccattaatgcctactcacatcttactgaacagaagaaggttcatagttaataaagcattaaaagtgcaattactgtcaaaaaa

SEQ ID NO: 560 - DNA, 2633 bp, Homo sapiens
tactctctcactcttggaaagggttttgatgaaagatattgttaccccagtgccacaagaggaggtaaaaacagttatccgtaaatgtctggaacaggctgcgttagtcaactattctcggctctcagagtatgccaaaatcgaagggaaaaagagagaaatgtatgagcttcctgtcttctgcttggcctcccaagtgatggatttaaccattcagaatcaaaaggatgcagaaaatgtaggccggttaatcactcctgccaaaaagcttgaagatacaatacgtcttgctgaactagtcattgaagttcttcagcaaaatgaggagcaccacgcagaggcctttgcgtggtggtcagatttaatggtggagcatgcggagacgttcctgtcactctttgcagtagacatggatgcagccttagaggtgcaacctccagacacatgggacagttttccactatttcagctgctggaatgattttctccgtactggactattaatttgtggcaatgggaaaatttcacaaacacctgcaagacctgtttgccccacttgttgttaggatatgtgggatcttgatgggagttccccaattgcacaatccattcacagggggcttttgagccgggagtcatgggaaccagtcaataatgggtcaggcacctcagaagatctgttttggaaacttgacgcccttcagaccttcattcgggacctgcactggcctgaagaagagtttggaaagcacctggaacaacggctgaagttgatggcaagtgacatgatcgaatcttgtgtcaaaagaaccagggattgcatttgaagttaagctgcaaaaaaccagttcgattcaacagatttttcgagtcccacagttcaatatggcaccatgttttaatgttatggggttgatggccaaaggttcaattcaaccaaaacttttgcagcatggaaatgggccaagagtttgctaaaatgtggcatcaataccattcaaaaatagacgaactaattgaagaaactgttaaagaaatgataacactcttggttgcaaagttcgttactatcttggaaggagtgctggcaaaattatccagatatgacgaagggactttgttttcttcttttctgtcatttaccgtgaaggcagcttccaaatatgtggatgtacctaaacccgggatggacgtggccgacgcctacgtgactttcgtccgccattctcaggatgtcctgcgtgataaggtcaatgaggagatgtacatagaaaggttatttgatcaatggtacaacagctccatgaacgtgatctgcacctggttgacggaccggatggacttacagcttcatatttatcagttgaaaacactaattaggatggtaaagaaaacctacagagatttccgattgcaaggggtcctggactccaccttaaacagcaagacctatgaaacgatccggaaccgtctcactgtggaggaagccacagcatcagtgagtgaaggtgggggactgcagggcatcagcatgaaggacagcgatgaggaagacgaagaagacgattagaccatttggtcctagagtctgctgggacagagtcctgtaatcagtgcatgtccttagtctgttagttaaacccattaggaattttctgtcaactaccatgcccatgagatgtttatcaatacaactgccattttagctatgtggtaccaagattagcaaatgaccttcatatccactgatttcctgatgtccatgtctatatgtttacaagcaatatggagcaccattctttaaatactgttcatggagaatacatagtctaaccactaggcgtgtccctgttatcagcaaagatcaatgatgcttcattcatgtactatgtatgcattggtggtaaatggatgtgagggcaagtacatcaagtacattcactctgtttcacgtatgtggatgccagttaattaaatgagtacgtaaataaattaattaaaacacatagatctgctttgtgtttttatttttattttttgaaaaacaaaaggcaagtctccaacaattaacttttgatgctttctgttcccctaaaaccaaaaaatgaaccccttgtgtcgttgttaacccatcctttcatttactcatataattagccaaaaaaaaaaggatggctacatacccaatggattgattctcttaattgccacggcaagggggcgatcctatcatgacttaacatcaagcgcgcagttcaaaactactgtcttctgtcaaagttttctcctcttaaatgttattttgcttttacggtctcaactgtgtatgtaaaaaaaacgaatatttaaattacaaccctaaactaaaaatgtgtttataataagatgtggatatttccttcagtagattgtaaccataatttaaattattttggttccacactgagaaattatatctgtcatgtacattgcattttgatctgtaactgcacaaccctggggtttgctgcagagctatttcttaccatgtaaagtagtggatccatcttgcttttgccttatataaagcctacagttatggaagtgtggaaaactgtggcttctcaataaatattcagatgtcctaagaatat

SEQ ID NO: 561 - DNA, 1299 bp, Homo sapiens
ttttttttttttgcttcaaaaatacagtatttattgtaataactacagtagcaagaagaaaaaaacgaatggatactacgtgtttagcagcagagctgaataattatgaaatataaacaattactattgggagaaaatacattacactcattgcttggaaccatgaataatacttatatatgtacgaaatatagaaaaataaaataggttaacataataaggatataggcaattattttttttaattttataaaaacttttatttttccttacaaactggggtagttaggagacctgataatagcttttttattttcttggcaccaaagcaacttacttatgtgttccttcttgcattatctgttccagatcatagtcaagttttccaattcgttttactaagctagcaaaattttttataccaaaaagagtaaaatcaaaacaaatgctcctttgtttatagatgaaaatctggagcaaaataacacaacattaaaaaaacaaaactttgcaaacacatcctaaagctacacacattgaagcgtttacagcaatatgctccctgggttcgttctcccttcccccaatcctctaaactgtgcctttgggtctcagacccttgtcccgggggtccctctgaatccacctttcaagaggatggagctgggccactaggctgaggtctggccctgttctcctcatctgccaaagcctcacagtactgcgctggccagtccttggggtcttgattatggaccttggccacaaacttaagaactttcatcttgctggtttccaggttggttcgcgggccccactggaattcgtagtcgacggggtcggtgtggggtatccgccggtattccaggtaacgctgtcgcacaaagtcctcagtaatgagtttctttggatctccgaaaattaaatgcttcttggtggggtagacccctaagcgccagcagaaagtcccaggcttcagtttccttgatggtgttgcccttcataaagatgagccctaaaacgatcatcaggaggcccgtagtgggcgtgccttggtcacccctcatctcggcatcctcctccacaggctccagggtgttgatgaggatgtaagtgttgctcttgggttcaagttccaccagcttatacccgaagacgtactggaggcgctcggcggcccgtttgaagaggtcggggaagatgtccttgtagtccccgatgacgtgcttcagtatgtcggcccgcttgatcggaatcttcttctggtctttaatcagcaagaactgcaccagctcggac

SEQ ID NO: 562 - DNA, 2262 bp, Homo sapiens
atggtaacgtggctttacagatttttacccacttcaaatatggccgccaagctccgttctcttttaccgcctgatctacggctacaattctggcttcatgcccgcctccaaaagtgcttcctctcgaggggttgtggttcttactgcgcaggcgcaaaagcaagtcctcttccgggcaaaatggcgatgggactaatgtgcggacgccgggagcttctgcgcttgctacagtccgggcgtcgggtccacagcgtcgcagggccctcgcaatggcttgggaaaccgctgaccacacggctcctattcccagcagccccgtgctgctgtcgcccacactacctcttccttgcggcttccggcccccgcagcctcagtacctctgctatctcttttgcagaagtccaggttcaggcccctcctgttgttgctgcaactccctcacccacagcagtacctgaggtggcttctggagagactgcagatgtagtccaaactgctgcagagcagagcttcgctgaactggggctggggtcatacaccccagtgggactgatccagaatttactggaatttatgcatgttgatctgggcctaccttggtggggggccattgctgcatgtacagtctttgcccgctgcctgatttttcctctcatcgtgacgggccagcgagaggcagccaggatccacaatcacttgccagagatccagaagttttccagtcgaatcagagaggccaagttagcaggagaccatattgagtattacaaggcttcctcggagatggcactttaccagaaaaaacatggtattaaactctataaacctctcattctccctgtgactcaggccccaatcttcatctccttcttcattgctttgagagagatggccaaccttcctgtgcccagcctgcagacaggtggcctctggtggttccaggatctcacggtatccgatcccatctacatattaccactggcagtcactgctacaatgtgggctgttcttgagctaggtgctgagacaggtgtgcaaagttctgaccttcagtggatgagaaatgtcatcagaatgatgcccctgataaccttgcccataaccatgcatttccccacggcagtgtttatgtactggctctcctccaatttgttttccctggtccaagtatcctgtctccggattccagcagtacgcactgtacttaaaatcccccagcgtgttgtacatgacctggacaaattacctccacgggaaggcttcctagagagcttcaaaaaaggctggaaaaatgctgaaatgacgcgtcagctgcgagagcgtgaacaacgcatgcggaatcagttggagctagcagccaggggtcctttacgacagacctttacccacaaccctctcctacaacctggaaaggataaccctcccaatatccctagcagccagcagcagcagcagcaaaccaaagtcaaagtatccctggcacgacacacttggctgacttatgttctgtgcgcattctggcaggaattctgtctcttcagagactcatcctcaaaacaagacttgacactgtgtccttgccccagtcctaggaactgtggcacacagagatgttcattttaaaaacggatttcatgaaacactcttgtacttatgtttataagagagcactgggtagccaagtgatcttcccattcacagagttagtaaacctctgtactacatgctgcttcctgatacttattgaacagggaaatgagtgtgcacttcagaaaactgaagaatacccagcattttgggaggccgaggtgggtggatcacctgagatcaggagtttgagaccagcctggccaacatggggaaacgccatctctgctgttttacaaaaatagccacacgtggtggtgcacacctgtagtcccagctactcgggaggctgaggcaggagaattgcttgaatccgagaggcggaggttgcagtgagccaagatcgcaccaccgcactccagcctgggcaatagagggagactgtctcaaaaaaaaaagaaaacctgaagaatagagtgagtcatgattgcttttgctggcccatggccttggaaaatataatgttttaacctggcattaagggtttaaacttccacccaggcgcagtggctcacgccagtaatcccagcacttttgggaggccaaggcgggcggatcacgaagtcagcagatcgagaccatcctggccaacatggtgaaaccccgtctctacta

SEQ ID NO: 563 - DNA, 623 bp, Homo sapiens
ttttttttttttgatcacaagtaatttgcctttttattcatatagaacaaaatttacaaagtcattcatacagtttttgtgtttttttactgacttcgaaaattgggaatattcaaaatacacttttaccccactccattctgtcattatttacacatatgtacaagaaaaatgaaagagtctctgtgtatgtgtgtgtgtgcgagtgtgtgtggtttgtgttgttgttttcttgtattaaaaagctctgctgtgtcgggtgggtgggagggtggggcaggagggcaggcggcgcagtcagaatggaggtcccgtggggagggtttccagagcctctgggaagggacgcctccaggcacgggctggaaggacatggggatgggggggtcttcaccgggctctgccggaacagccccccgttgggtgacctgtgtttgcactgcatggagggcatggtcgccgagctgctcagcggcagcggcaggttgttgctgggccctgatgagagtgtccgcctggtgccatgggtgttctgctctggcagaaggtagctgaccgagagctgggtgttctggtactcccgctgtcggctccaaggtctgggtgggagccaggccccccat

SEQ ID NO: 564 - DNA, 563 bp, Homo sapiens
  misc_feature (1)...(563): n = a,t,c or g
ggattttgaaaagaaaactttcctccctcaatagtgaagtgtcaaccatccagaacacaaggatgctggctttcaaagcaacagctcagctcttcatcctgggctgcacatggtgtctgggcttgctacaggtgggtccagctgcccaggtcatggcctacctcttcaccatcatcaacagcctccaaggcttcttcatcttcttggtctactgcctcctcagcccagcaggtccagaaacaatatcaaaagtggtttagagagatcgtaaaatcaaaatctgagtctgagacatacacactttccagcaagatgggtcctgactcaaaacccagtgagggggatgtttttcccaggacaagtgaagnggaaatattaaaactagaatattcaactccatatggnaaatcatatccatggntctctttggcattatgaagaatgaagctaaggnaaagggaattcattaaacatatcatccttggagaggaagtaatcaacctttacttcccaagctgtttgttctccacaataggctctcaacaaatgtgtggtaaattgat

SEQ ID NO: 565 - DNA, 558 bp, Homo sapiens
atggacgagaagcagaaccgaggccctttagggctcagcggaggcctgcctgtctctctaaggtccctcttggagcaactgaagaaactccaggccattgtggtgcagtccaccagcaagtcagcccagacaggcacctgtgtcgcagtcctgttgctgtcctttgccctcatcatcctcccctccatcagcccttttggccccaacaaaaccgagagccctggggactttgcgcctgtacgagtgttctccagaactttgcacaacgatgctgcctcccgcgtggctgctgatgctgtgccaggctccgaggccccaggaccccgacccgaggctgacacaacccgagaagagtctccaggaagccccggggcagactggggcttccaggacaccgcgaacctgaccaattcgacggaggagctggacaacgccaccctggtcctgaggaatgcaacagaggggctgggccaggtcgccctgctggactgggtggcgcctgggccgagcactggctcaggacgtgcagggctggaggcggcgggagacgagctgtga

SEQ ID NO: 566 - DNA, 1039 bp, Homo sapiens
ttttttttttttccatgtgtaacatgtttattctcagcatatgcttgtgaatgaactaggagagggggctttgtgaggctttgccacagtgacctctgcggggaccgactgtgtcagcagagccactgggtgaaggttgggatggtggcagcagccacaaggcctggaacaaggtatggggaggcatttgaggacctccaggggacccgattggttggctgcttggtcacctccagatgagtagcctgggtgtccattctgaggcaccaaggtggaagtggcaggatgtgctcagttgcccatatggaaactcagcctccacggggctctgcgccctgctctcctctctcaccttttccacttgtctgaagacccgcagcaggtttccacgaaggacaccttgaagctcttcctcgctccagctacgactcagcaactcctctatcaggactgggtatgtggacacatcctcacagcccctgagggaaccggccagtcccgtcataatttccaccaatcccgatgaactcagatccaatgactgccctgatgtggtcaaagtgatctgccacagtggacacgttagcaagcaggttgcactgcagcacccccatggacagtgtcaccatcacgatgccaccgttcttcttcagaagctgcaggatatcatcgggaacattcaacaaattgtcacacacagctctggcagctgagtgggagaagatcacaggagcctgagacacttccaggacccttcttatcaaggtgtccgatgcataggacaaatctatcatcatgcccaggcggttcaactcctctactactttctcaccaaagcttgtcaatccgctgacgttggtgtacatgtggtgtctgaacttggtggaactctctgcccatggtgtactgcaggtgaaggtaagtgtcaggtagcgcacccccagcacatagaaactgcgcagcacagagaggctgctgtccagtgagtgaccaccctccacgccaatgaggcaggccagcttttgagagctgttcagac

SEQ ID NO: 567 - DNA, 5651 bp, Homo sapiens
ggagcgacgccgctcgggtcagtcggcggccggactgggaagatggacgcagctactctgacctacgacactctccggtttgctgagtttgaagattttcctgagacctcagagcccgtttggatactgggtagaaaatacagcattttcacagaaaaggacgagatcttgtctgatgtggcatctagactttggtttacatacaggaaaaactttccagccattggggggacaggccccacctcggacacaggctggggctgcatgctgcggtgtggacagatgatctttgcccaagccctggtgtgccggcacctaggccgagattggaggtggacacaaaggaagaggcagccagacagctacttcagcgtcctcaacgcattcatcgacaggaaggacagttactactccattcaccagatagcgcaaatgggagttggcgaaggcaagtccataggccagtggtacgggcccaacactgtcgcccaggtcctgaagaagcttgctgtcttcgatacgtggagctccttggcggtccacattgcaatggacaacactgttgtgatggaggaaatcagaaggttgtgcaggaccagcgttccctgtgcaggcgccactgcgtttcctgcagattccgaccggcactgcaacggattccctgccggagctgaggtcaccaacaggccgtcgccatggagacccctggtacttctcattcccctgcgcctggggctcacggacatcaacgaggcctacgtggagacgctgaagcactgcttcatgatgccccagtccctgggcgtcatcggagggaagcccaacagcgcccactacttcatcggctacgttggtgaggagctcatctacctggacccccacaccacgcagccagccgtggagcccactgatggctgcttcatcccggacgagagcttccactgccagcacccgccgtgccgcatgagcatcgcggagcttgacccgtccatcgctgtggtacgtggcggccacctgagcacacaggcatttggtgctgaatgctgtttgggaatgacgaggaaaactttcggatttttgcgtttttttttcagcatgttgggataagtactgtgttcacgtggttgggaatctgaagggtataagagccggaactgtgtccttgcaccctcacgtccctcccccaggcaccacctcctgtgcagccttcatggccttcgagtggcccagagagcgtgtgtctggatgtgagcgtgtgtgggcgcgtgctgagtgtgcatggatgagtgtgagccatggtgagtgtgtccccctcacacctacatttaaacacacgggcggcccctccacccacccctgcaccaccttcgtcacacccacatttaaacacgggcggcccctccacccacccactcctgcaccaccttttgttttccggaggctctgacttgacctctctgggggatttcctaagaaggagcttccctgtttttccattttgattacctagttgtgatttttggtgtgtgatttatgcagacctgcctgccctcaaatatatttgatggggaaagaggccaaaaaacccccctagaaatcatgaatgacggtgacatgctcagggaagcagttaaccgaatcgggggctctgttgtggatgctccgccccatttaggaggaagaaggcagatctgggcctgaaatgggacggtctctgagctgtggcgcagccccagagtgcacaccacgctccatgcacctcctgggcagggtggcagtagtggggaacatgggctggagctctgtggctcacactttttgtttgtttgtttgtttttgagacggagtctcactctgtcgcccaggctggagtgcagtggcgcgatctcggctcactgcaagctccgcctcccaggttcacgccattctcctgcctcagcctctggattagctgggactacaggcacccgccaccacgcctggctaattttctgtatttttaatagagacgggttttcactgtgttagccaggatggtcttgatctcctgacctcatgatccacccacctcggcctcccaaagtgctgggattacaggcgtgagccactgcgcgcagcctggcgcacacttcttaccagaacctagtcacgaattcctcgtcgaactagaattaggtatgtttgttactgtaaacgcagcttggtggcttacagtgattggcactctaacagtcaggtcaggctagagagccagccaccgcagacagaggagtggacgcgtgaacgttgagttgagaccaaaggggccacctggtgggataactgtcctcacccgtgaggaggaggaatgtcccctgtccccgggggagagtgctcctacaccagcgccgaggcggcagaatggtgtcttcaggggaagagagtgcccagtttgagcttctccccccatttcgtttctttttgtgttaacatctgcgcatctggcagcgttgagaattcctagtgactgtcattacaggcggcagctttaaggatgtgattgccggtgacccttggccggtcccctgtctcctggctcctcagcaggaggctccctgtgtcacggtgtccttgggcagttctcggtggcctttgccgccaagcttccagggagctgctgggcgaaggctgagacccagcggccctgtctcacagtcacagagagaagagctccccacttggccctaactcataacctgccccaatcccggaacactcggtgaggtttgagagatgcacaccacgtaacatctcgtgggcgaatcaaggcacagcaacgcagtggagcctgaggggagccgggcactggtgcaggggaccatgcacagggcaccctcggagctccattcccggccacaggagccaaggcaggctggaatgtccagcacctgcatgctgggggcctctgctgcgccactggcagtgggaatggaagcccccacctcttatccgactgcagatgggggtgtcgtgttctgctcatcgtcatttcgttttaggggtttttctgtaagactgaagatgacttcagtgattggtgccagcaagtcaaaaagctgtctctgcttggaggtgccctgcccatgtttgagctggtggagcagcagccttcacatctggcctgccccgacgtcctgaacctgtccctaggtgagagctgccaagtccaggtggggtccctcggaggtacgatctgtgcccttgcttccccagtcctggcccccttggttttgaccattaaggtgtgtgtgagcctgagccgtgagcacttggcagtggttcgcctgtgagaccaggtatggagtggagcgtcccctcctccaagcttgcgcccagcagcccaggacccacctcgtcttccccaccagcgctgcctgccggggcgctgtggagctgggcgtgctaccatggagtcctcaggggtctggagcagacagaacatgcaggctctgtggtgacgcagtcctgggtgggggactggttcacttgggcaccactggccatgggtggcgtagacccctcggaccatggccagcgtgccgcaggagccggcctgggctcgtgcagtgaagtgagtggccgtgagcgcgtcctcctcatctctgtctccctgtgggaaactctacaaacaaggcaatggcaatggaaccactcctgatgaccacgagggtcagacgcgggacagaggcccctcaggcctgagattgtgccggccgccccctgccctcctcaccctgccctgctcctcttctctgctccctccccccatattcgcaggtctgcacaacccccggacctgttcacacccgcatggggacagctgtctgtgggctgcagagcaggcactgctcagtctgccccacgccaagggcccttgactcacacccaggtggcccacccaagatgcctgatgcgctatgtcctgttccttctagattcttctgatgtagagcgactggaaagattcttcgactcagaagatgaagactttgaaatcctgtccctttgaaaatcctggggtcgggggtggcacctgtgagagcctggggctcctggtgccgctgcgtttcatccatcccgcccgctcgcctgccgagggctgcgccccgtgctgcctccccccagagggccacccgctgtgctcgtggactgaggctgcgctgcccgggaggccttactgcttggtgtcagactgcccagctcagagtgcccgtcagggcctgtgcatccgcacgcggagccgtctgttaggagcttccagagcgttctctcgacactgccagccccgtgttagcacctgggcctcagtcccacttgctcccaggcgccggttctgtggttggtttggaattaaagtcctgtttgaagttgtcagacacagacatgaatttctggggcgctccctgagtcagtctcagaagacctgtgcaggctggcgtgagaggagcggcagccacactgcggccccacgcccaaggactgggctgctctcgaggggggcgcgcccaccgctgtgtcctctctgcccagcctggcttaccaagggctacctcagtgggagatgaggttggaggaacgaaggcgaggttcctccttgctttggggagaaaagtattcaggaagtgggtgtgtgggaaacctgaagatggcgtgcacaggacacagcgtggtcggcctgggcagaagggcggctggctgtcctggagctgctgctggagcctgccctcagagtgtccctttccagtgctgtggcattctgtggcagcttccccaggtgtggtgacggggggggggcggggcctccacctgtgacagccaggcttgagggtggacggcgtgcctctcccaggagccttccccatgtccttgccttgctgagaattgccctcccatgccgctgaggtgttaggtggtttagggccaaaaggggaaaaccacttgagtcttgtggtgtgtggtgggcagacaccacagggtggcatcacctggtggcatttccagaacctcagccccgattccagcacccaccaccgcctgaccctgtgtaacctgctgtcccgggtcccagagtgcactctgccccactgctctgctgcctgtcctgggaaagtagctttgccccactaggaaatgtaaacaggagggcttggggagcgtgggcacttttctcatgagcagctactgcggcgttggcaggactcgctgctgctgctgctgctgcttgtgtaggtcggggagccggagatccccgaggacgcgcgccggacagtcggcactgaccggcccacctggtagcagaggacacccccagccccccaagcattgaagacatagtgtatttcctcgtatcctttctcccttgggtgtagttggggtggggaagcagggaaggctggtgcgatctccattccttgggctccgcgtccgagttcatggtgcgccgctgtgctgggagctgcagtgggaatgtgtgggacaccttgaccaaaggggagctttgtctcgtgtgttttgaaaaaggcttaatgaagagaatgttgttcattcttagtagtatagtttgcaattcttaatggcaaataataagtttcagtagaaacccaaaaaaaaaa

SEQ ID NO: 568 - DNA, 2012 bp, Homo sapiens
gccatgaggtttcctcccaaatcgtacaacaaggacttggagtctgcagaggtcaccccagcctctggggccaaggcgcaagacctgtcggagaacagccaggcaaaagcacagagaattttgctctctgactaccgctgccgccgccagttccctcacagcccccttgggggatttccctgctgaagccagcagaaagcccagcagtcccagcgcccctcctgccaccgtcagagctgcactgatgccccaccagcacctcagcgggagccgctgcccacacccctgccccctcccctcagccttccaggaagcgaaggccagacacagggaaacagaaacatgttgcccttttatttgcgtttctcagaatactgtacaaagggagtaaaaatcctattcacactttgcttagaaagattttaaggtgaaagttccctatgatacacggggtgggagatgcagggtcaggagggagaaaacaggcccagtgacctctcctgttcccttggacccctggaagaggacacagggacccacaccttttcaaaattaacactgcccctagtccaactggggaggggagaaggctccagcccaggctcaggctcccggcctcactttcttctctgcaggctgagacagtgcctacaggccacgtcttgccccttcctctgtgctgcttgagcagggatcctacaggactctcaccacagaccccacatggggtggcctcacaacgccacatgtggctgccacatgagaggccctgcccagtgccagtctgtatgaggaagttaaggggtgagggcctgcagaggaccacagcacccatcgtttctgtcacagcttccccatacccccgcaggagtcagggccaagttggacctgtgcttacaatgactcacgggccttttccccacctgtctacccaacagccaacccaggagttaaacccacagcagcctccctcccctattactatcacattctgtgggtaaattaaccctccaagcctgcttccctccctgcccacatcccaaaggagattgggtctagcttctgtccctacccctccctcccttacaccagtcctctgctgctatgtggccccattcttctaagtctcgactcactagctctcctacagctccccaacctccaccaggccaggatggcagcagccctggccccctcacctctggaaccaagccatctacactctaccccatctttccccaacctgaccctccccactcccaaccaggacccacggtgggttgcagagaagctgccaaaagcctgggacttggattagacagctccctacccagaaaggcaaagacccatcccacacttgcttccatacacaaaagcacacactgcgtggcatcgaaaaaacctaggaatcacagtgaaacaatccagaagccgtaccgccctctgctccctatgcaggggttaaagtgctttggctgcctgagggcaaacaagtgagcaggggtttttcccctggcctcctgtcgcaactgcgtggtccatgttcagcccaggagcccagcccattccatgaccaactccatggagtctctattcaaaaagcaaaaggaaaagatcaaaaaattcagaaaaggtcagagcccagggggcctaccccaaccccactacaagctactccaagttggctactgggggaagcgaggggggaaattaggccagaggctcaacccccatctctggcagtgtccagaggcttcttctttctgtcttcagtgttgcagcacatgccttttaccctacccctcccctgccaccctggggcagggagaggggctgcactctcagtacttattgattccaaaaatccggactccgtggagctggggcagcttggggataagcacgctcatcagggacacggtgttgagcacaaaatggatctggtcgtacttagtgtagaagctggtgaggaagtacagcacgatgggtgtgatggtcaagaacttccgaga

SEQ ID NO: 569 - DNA, 531 bp, Homo sapiens
gcacccagcccagaggtggcttttaaactgggcattaaaagatgaataagagctcatcaagtgtggagggcttggggaggagatgatgttccaggctaaggggactacatgagcaagagcctggaagttgagagcctgtagtatgtccaggaacatgtggcttagggtcatgactttctggctgatggaccttctgcctattcctaggtgggtgcctgagtctgcacgctggcttctgacccaaggccatgtgaaagaggcccacaggtacttgctccactgtgccaggctcaatgggcggccagtgtgtgaggacagcttcagccaggaggtgagggtgaacgtgtgtgtgagcatgcatatctgtgtgtggtggggagtgggctgtgtcaagtgcctccctcccagagcccaccatatatggcaggaaaagcccctgggccctcacagaacagtgacagaatcaaagttagaggcagaaggaaagacaaaagaaaaagccagagagaaagaaagaaagaaaaaaagcta

SEQ ID NO: 570 - DNA, 1131 bp, Homo sapiens
accgaagtgggcagggcaaggtgtatggactcattgggcggcgacgcttccagcagatggatgtgctggaggggctcaacctgctcatcaccatctcagggaaaaggaacaaactgcgggtgtattacctgtcctggctccggaacaagattctgcacaatgacccagaagtggagaagaagcagggctggaccaccgtgggggacatggagggctgcgggcactaccgtgttgtgaaatacgagcggattaagttcctggtcatcgccctcaagagctccgtggaggtgtatgcctgggcccccaaaccctaccacaaattcatggccttcaagtcctttgccgacctcccccaccgccctctgctggtcgacctgacagtagaggaggggcagcggctcaaggtcatctatggctccagtgctggcttccatgctgtggatgtcgactcggggaacagctatgacatctacatccctgtgcacatccagagccagatcacgccccatgccatcatcttcctccccaacaccgacggcatggagatgctgctgtgctacgaggacgagggtgtctacgtcaacacgtacgggcgcatcattaaggatgtggtgctgcagtggggggagatgcctacttctgtggcctacatctgctccaaccagataatgggctggggtgagaaagccattgagatccgctctgtggagacgggccacctcgacggggtcttcatgcacaaacgagctcagaggctcaagttcctgtgtgagcggaatgacaaggtgttttttgcctcagtccgctctgggggcagcagccaagtttacttcatgactctgaaccgtaactgcatcatgaactggtgacggggccctgggctggggctgtcccacactggacccagctctccccctgcagccaggcttcccgggccgcccctctttcccctccctgggcttttgcttttactggtttgatttcactggagcctgctgggaacgtgacctctgacccctgatgctttcgtgatcacgtgaccatcctcttccccaacatgtcctcttcccaaaactgtgcctgtccccagcttctggggagggacacagcttcccttcccaggaattgagt

SEQ ID NO: 571 - DNA, 960 bp, Homo sapiens
  misc_feature (1)...(960): n = a,t,c or g
ggaattcggcttctcgggaaatggatgtcacaaaggtgtgtggagaaatgcgctatcagctgaataaaaccaacatggagaaggatgaggcagaaaaggagcacagagagttcagagcaaaaactaacagggatcttgaaattaaagatcaggaaatagagaaattgagaatagaactggatgaaagcaaacaacacttggaacaggagcagcagaaggcagccctggccagagaggagtgcctgagactaacagaactgctgggcgaatctgagcaccaactgcacctcaccagacaggaaaaagatagcattcagcagagctttagcaaggaagcaaaggcccaagcccttcaggcccagcaaagagagcaggagctgacacagaagatacagcaaatggaggcccagcatgacaaaactgaaaatgaacagtatttgttgctgacctcccagaatacatttttgacaaagttaaaggaagaatgctgtacattagccaagaaactggaacaaatctctcaaaaaaccagatctgaaatagctcaactcagtcaagaaaaaaggtatacatatgataaattgggaaagttacagagaagaaatgaagaattggaggaacagtgtgtccagcatgggaggagtacatgagacgatgaagcaaaggctaaggcaggtggataagcacaggcaggccacagcccaggaggtggtgcaggtccccagaagcaggaccngcttcttccnggagagggagggnctgtcggaagaggtgggnccgncttggggnccnngttacccagnatncncaatcttttttggttgacccggttggacagggtggacttnantgttttncaaaggngntttttcattccancttgttttngcttaatttngcncaacgnacccacggcctncccggnntgaaaccccccnccctgagggggggttntccccc

SEQ ID NO: 572 - DNA, 5665 bp, Homo sapiens
ggagcgacgccgctcgggtcagtcggcggccggactgggaagatggacgcagctactctgacctacgacactctccggtttgctgagtttgaagattttcctgagacctcagagcccgtttggatactgggtagaaaatacagcattttcacagaaaaggacgagatcttgtctgatgtggcatctagactttggtttacatacaggaaaaactttccagccattggggggacaggccccacctcggacacaggctggggctgcatgctgcggtgtggacagatgatctttgcccaagccctggtgtgccggcacctaggccgagattggaggtggacacaaaggaagaggcagccagacagctacttcagcgtcctcaacgcattcatcgacaggaaggacagttactactccattcaccagatagcgcaaatgggagttggcgaaggcaagtccataggccagtggtacgggcccaacactgtcgcccaggtcctgaagaagcttgctgtcttcgatacgtggagctccttggcggtccacattgcaatggacaacactgttgtgatggaggaaatcagaaggttgtgcaggaccagcgttccctgtgcaggcgccactgcgtttcctgcagattccgaccggcactgcaacggattccctgccggagctgaggtcaccaacaggccgtcgccatggagacccctggtacttctcattcccctgcgcctggggcttcacggacatcaacgaggcctacgtgggagacgcttgaagcactgctttcatggatggccccagttccctggggcgttcatcgggaggggaagcccaacagcgcccactacttcatcggctacgttggtgaggagctcatctacctggacccccacaccacgcagccagccgtggagcccactgatggctgcttcatcccggacgagagcttccactgccagcacccgccgtgccgcatgagcatcgcggagcttgacccgtccatcgctgtggtacgtggcggccacctgagcacacaggcatttggtgctgaatgctgtttgggaatgacgaggaaaactttcggatttttgcgtttttttttcagcatgttgggataagtactgtgttcacgtggttgggaatctgaagggtataagagccggaactgtgtccttgcaccctcacgtccctcccccaggcaccacctcctgtgcagccttcatggccttcgagtggcccagagagcgtgtgtctggatgtgagcgtgtgtgggcgcgtgctgagtgtgcatggatgagtgtgagccatggtgagtgtgtccccctcacacctacatttaaacacacgggcggcccctccacccacccctgcaccaccttcgtcacacccacatttaaacacgggcggcccctccacccacccactcctgcaccaccttttgttttccggaggctctgacttgacctctctgggggatttcctaagaaggagcttccctgtttttccattttgattacctagttgtgatttttggtgtgtgatttatgcagacctgcctgccctcaaatatatttgatggggaaagaggccaaaaaacccccctagaaatcatgaatgacggtgacatgctcagggaagcagttaaccgaatcgggggctctgttgtggatgctccgccccatttaggaggaagaaggcagatctgggcctgaaatgggacggtctctgagctgtggcgcagccccagagtgcacaccacgctccatgcacctcctgggcagggtggcagtagtggggaacatgggctggagctctgtggctcacactttttgtttgtttgtttgtttttgagacggagtctcactctgtcgcccaggctggagtgcagtggcgcgatctcggctcactgcaagctccgcctcccaggttcacgccattctcctgcctcagcctctggattagctgggactacaggcacccgccaccacgcctggctaattttctgtatttttaatagagacgggttttcactgtgttagccaggatggtcttgatctcctgacctcatgatccacccacctcggcctcccaaagtgctgggattacaggcgtgagccactgcgcgcagcctggcgcacacttcttaccagaacctagtcacgaattcctcgtcgaactagaattaggtatgtttgttactgtaaacgcagcttggtggcttacagtgattggcactctaacagtcaggtcaggctagagagccagccaccgcagacagaggagtggacgcgtgaacgttgagttgagaccaaaggggccacctggtgggataactgtcctcacccgtgaggaggaggaatgtcccctgtccccgggggagagtgctcctacaccagcgccgaggcggcagaatggtgtcttcaggggaagagagtgcccagtttgagcttctccccccatttcgtttctttttgtgttaacatctgcgcatctggcagcgttgagaattcctagtgactgtcattacaggcggcagctttaaggatgtgattgccggtgacccttggccggtcccctgtctcctggctcctcagcaggaggctccctgtgtcacggtgtccttgggcagttctcggtggcctttgccgccaagcttccagggagctgctgggcgaaggctgagacccagcggccctgtctcacagtcacagagagaagagctccccacttggccctaactcataacctgccccaatcccggaacactcggtgaggtttgagagatgcacaccacgtaacatctcgtgggcgaatcaaggcacagcaacgcagtggagcctgaggggagccgggcactggtgcaggggaccatgcacagggcaccctcggagctccattcccggccacaggagccaaggcaggctggaatgtccagcacctgcatgctgggggcctctgctgcgccactggcagtgggaatggaagcccccacctcttatccgactgcagatgggggtgtcgtgttctgctcatcgtcatttcgttttaggggtttttctgtaagactgaagatgacttcagtgattggtgccagcaagtcaaaaagctgtctctgcttggaggtgccctgcccatgtttgagctggtggagcagcagccttcacatctggcctgccccgacgtcctgaacctgtccctaggtgagagctgccaagtccaggtggggtccctcggaggtacgatctgtgcccttgcttccccagtcctggcccccttggttttgaccattaaggtgtgtgtgagcctgagccgtgagcacttggcagtggttcgcctgtgagaccaggtatggagtggagcgtcccctcctccaagcttgcgcccagcagcccaggacccacctcgtcttccccaccagcgctgcctgccggggcgctgtggagctgggcgtgctaccatggagtcctcaggggtctggagcagacagaacatgcaggctctgtggtgacgcagtcctgggtgggggactggttcacttgggcaccactggccatgggtggcgtagacccctcggaccatggccagcgtgccgcaggagccggcctgggctcgtgcagtgaagtgagtggccgtgagcgcgtcctcctcatctctgtctccctgtgggaaactctacaaacaaggcaatggcaatggaaccactcctgatgaccacgagggtcagacgcgggacagaggcccctcaggcctgagattgtgccggccgccccctgccctcctcaccctgccctgctcctcttctctgctccctccccccatattcgcaggtctgcacaacccccggacctgttcacacccgcatggggacagctgtctgtgggctgcagagcaggcactgctcagtctgccccacgccaagggcccttgactcacacccaggtggcccacccaagatgcctgatgcgctatgtcctgttccttctagattcttctgatgtagagcgactggaaagattcttcgactcagaagatgaagactttgaaatcctgtccctttgaaaatcctggggtcgggggtggcacctgtgagagcctggggctcctggtgccgctgcgtttcatccatcccgcccgctcgcctgccgagggctgcgccccgtgctgcctccccccagagggccacccgctgtgctcgtggactgaggctgcgctgcccgggaggccttactgcttggtgtcagactgcccagctcagagtgcccgtcagggcctgtgcatccgcacgcggagccgtctgttaggagcttccagagcgttctctcgacactgccagccccgtgttagcacctgggcctcagtcccacttgctcccaggcgccggttctgtggttggtttggaattaaagtcctgtttgaagttgtcagacacagacatgaatttctggggcgctccctgagtcagtctcagaagacctgtgcaggctggcgtgagaggagcggcagccacactgcggccccacgcccaaggactgggctgctctcgaggggggcgcgcccaccgctgtgtcctctctgcccagcctggcttaccaagggctacctcagtgggagatgaggttggaggaacgaaggcgaggttcctccttgctttggggagaaaagtattcaggaagtgggtgtgtgggaaacctgaagatggcgtgcacaggacacagcgtggtcggcctgggcagaagggcggctggctgtcctggagctgctgctggagcctgccctcagagtgtccctttccagtgctgtggcattctgtggcagcttccccaggtgtggtgacggggggggggcggggcctccacctgtgacagccaggcttgagggtggacggcgtgcctctcccaggagccttccccatgtccttgccttgctgagaattgccctcccatgccgctgaggtgttaggtggtttagggccaaaaggggaaaaccacttgagtcttgtggtgtgtggtgggcagacaccacagggtggcatcacctggtggcatttccagaacctcagccccgattccagcacccaccaccgcctgaccctgtgtaacctgctgtcccgggtcccagagtgcactctgccccactgctctgctgcctgtcctgggaaagtagctttgccccactaggaaatgtaaacaggagggcttggggagcgtgggcacttttctcatgagcagctactgcggcgttggcaggactcgctgctgctgctgctgctgctgcttgtgtaggtcggggagccggagatccccgaggacgcgcgccggacagtcggcactgaccggcccacctggtagcagaggacacccccagccccccaagcattgaagacatagtgtatttcctcgtatcctttctcccttgggtgtagttggggtggggaagcagggaaggctggtgcgatctccattccttgggctccgcgtccgagttcatggtgcgccgctgtgctgggagctgcagtgggaatgtgtgggacaccttgaccaaaggggagctttgtctcgtgtgttttgaaaaaggcttaatgaagagaatgttgttcattcttagtagtatagtttgcaattcttaatggcaaataataagtttcagtagaaacccaaaaaaaaaa

SEQ ID NO: 573 - DNA, 1096 bp, Homo sapiens
cggacgcgtgggaaaaaaaataaggttattcagaaatataacacaaaaagtttatttgaagttaaggaataataaatctgtagattaaaaggggaaataacatacttggaaaaattaacccaagactgtcaacattgcaaaaatttatgttaaggttttgagcttagttaagtttttgagatggagaataattcagaaatccaagtagaaatgtaagaatgagtactattatgaatagactcagtggttgtaactagttgcaatgttagtttgtgattagaaggtttaaatgcaatataaaccttgtgaaaaacaggaaacaagaaaccacctttacctttgcttttctcttggattattagggaggtgttcctgtgggcttagcatctaaaccttttcagattctttatggacacaccaacgaggtactgagtgtcggcatcagcactgagctagacatggcagtgtcaggatcaagggatggaacggtgattatacataccattcagaaaggtcagtacatgaggactttacgaccaccttgtgagagttctctgttcctgaccattcctaatttggctatatcttgggaaggacatattgttgtctactccagcactgaagaaaagaccaccctcaaggataagaatgcattacatctgtttttctataaatggcaagtatctagggtctcaaatcctgaaggaacaagtatcagatatatgtataatcggagaacacattgtcacaggcagcatacaaggattcctgtctataagagatctccacagcttgaatctcagcatcaacccattagccatgcgactgcctatccattgtgtttgtgtcaccaaagaatacagccatattcttgtaggtttagaagatggcaaattgattgtagtgggtgttggcaagcctgctgaggtaaaacctagcatcagtaatttcatttctcatgctgttggggattactttggttctccttcattccaactgattgagaagtcaccattagggataaacaaattaaaagccaaatttgatttttcaaaaggcagtaaataaaaacaggataaagctgttaaaaaaaaaa

SEQ ID NO: 574 - DNA, 1938 bp, Homo sapiens
tttcgtctgggacttgtgggactgtggccgttttcgcaatttgggctggacgaaaaagacggtcttgctttcccggtcgccgctgtcgggaagggctgcagggtgtccgcgagacccgcggcccggcgagctgaccccgcctcgcctttcctgcctagccctcattccacggagccggtcgcgcccggtccttgcgcgacgcttcccggcccaggccgcctggtctggcgctggaggccggagtcccgcggcctgtgctggatccgcgcacacccagtggcggcggatgggcggccggggcggccggggcggccggtcctgagcgcggcccgggctgtcagggctggctgctggcgggatggacaccctggaggaggtgacttgggccaatgggagcacagcgctacccccacccctggcaccaaacatcagtgtgcctcatcgctgcctgctgctgctctacgaagacattggcacctccagggtccggtactgggacctcttgctgctcatccccaatgtgctcttcctcatcttcctgctctggaagcttccatctgctcgggcgaagatccgcatcacctccagccccatttttatcaccttctacatcctggtgtttgtggtggcgctggtgggcattgcccgggccgtggtatccatgacggtgagcacctcgaacgctgcaactgttgctgataagatcctgtgggagatcacccgcttcttcctgctggccatcgagctgagtgtgatcatcctgggcctggcctttggccacctggagagtaagtccagcatcaagcgggtgctggccatcaccacagtgctgtccctggcctactctgtcacccaggggaccctggagatcctgtaccctgatgcccatctctcagctgaggactttaatatctatggccatgggggccgccagttctggctggtcagctcctgcttcttcttcctggtctactctctggtggtcatccttcccaagaccccgctgaaggagcgcatctccctgccttctcggaggagcttctacgtgtatgcgggcatcctggcactgctcaacctactgcaggggctggggagtgtgctgctgtgcttcgacatcatcgaggggctctgctgtgtagatgccacaaccttcctgtacttcagcttcttcgctccgctcatctacgtggctttcctccggggcttcttcggctcggagcccaagatcctcttctcctacaaatgccaagtggacgagacagaggagccagatgtacacctaccccagccctacgctgtggcccggcgggagggcctggaggctgcaggggctgctggggcctcagctgccagctactcgagcacgcagttcgactctgccggcggggtggcctacctggatgacatcgcttccatgccctgccacactggcagcatcaacagcacagacagcgagcgctggaaggccatcaatgcctgagggcagctgccagggcctgtggaggacaggccagagaggaggccagcaggcccagagtccccaggggaggaggaccaggtcaagggacgttctgtgggcagtagccctgtgtggccctgttcccaccatgagtctggaggccccacctccctggggctcccaatcccctttgccatctctgctctcactggggaccctcctccccttcccacctgctctcatactgctcagtgacatggcccaggctttccttccagggccatgcttggcaaggttggctgagggcaccctccttctctgcacccttggcacgagggcagggctggctctcccaatgcctccatcccatccccatggtgctttggcctcctcaaagcatccaccatggtggatggactgaagtgtgtatattttcttgatctattttttaataaaaaggaaaaggagcaaaaaaaaaa

SEQ ID NO: 575 - DNA, 2222 bp, Homo sapiens
aatggagggcagtagaaagaccacagctcgcctcaacctggggtttatggggctcaattattatcccccgccagcttccaaattgtttttgtttactttttttttgtttcattttctagttattttattttgtttttttttttttaaaaatatgtttatctttaatgatccaagattctgcaagtcacgctgatatacccagaattgggtggaaatacagcatctcagcagtgctactgccagcctgggggtggggagctggatgctggctgaaggacccccatggtgaagtcgattccaacctcacgggagcctcagtgccctatctccatggaaaccagcctggcactgggatggggccctagggagcctgcatgaacatctctgagaggtatttcccattaaaaacaaccacaggtgcccacccccaccccaagctactgcccagctccccctcctctctgtgttgtcggccaagataaaggaaatgggagtgaccacttaacgacaaacaaaagcagattgtacctcctattagggaagaaaaaggaagggaaagggtagtaagggagctgcacttcaagctcagaattctgccaagaccctagagcggctatggcagacagcggtgcatgactgccagagggcagcgctacccaaacccctggaggtaccctttgttactgctggggcccctgctgctgtgggggaaagacgggtcttcaaggctgcttcctgccatctagcgctgcccaatgtttggaccaaaaggggatggcacctaggatggctctacaactccatactcagtacgaaaagagggctcccaggatctcaatgtggtatcagggatgagagtttgcccaaactccctccttcccaccctgctggactgtcagagctctgggctaggaagaactccagggaaggccaggatgagtgggggaaggagacaagaaaatggtctccaatttggcatcaaaacagagtaagttcaaagaaacaaaaccttgatttttttatagcaggttctcctggccagctcatgacagcaggtctccacccactcagggatggcccaataaaaagttgggcaaagcaagggcatggctaccctcagggcagtgcatggaactcagaaaagtgagtctacaggatgcaggagagaacagcagagcccacagctctgccactctgatatgtcctccatcagtcccacgtgccctaggcactgacctcatacctgcctcaggagcagcttccttcaggctgagtcctggcaggggaaagttcccaggcaggtgtcccagaaggaacatgagtgttctctgcagggccctgcctgagctcttcaggggatggagaggaggccacccactcctcatgccaggtgcaatgctccccagtcccttttcaagagggggaagaagccagcactgtgggccccaggtggccccatctcaggaatgacagggcattctgcaggggtggcacattctgaggctcttaggccctgtgcatctggatgaaggagaggacgtcctccttggacagcttgtcctggtcctggggcttctgggagtcatgcacacgaatgccatccccccactcccagaagagccggccatagtagcaaatgtgaaatggggcaatggagtctgcagggaggtcaaaagtagagtccttggttttcttgttgtagaagaacttcttcttgaagcttttgctgaatcccatagtccagggctcattcactgtcctgacgatgtagaggcccatgggtacaaagtgccggtcatcacgccctgtgtagctgagctttggggtgccactggagcccttgatgatcttcatctccaacctgacaaaaatcttctccatctcttccagtctgtacacctccttcaccctgatgggattcatgtcgggccgactaggcttggaaacggctttcacaaatttctcggcaagctgaattctacaatccaaacagtctctctgagaggcaagccaaggatgcctccaccagcacccctacccccagggcattttcacagctccagtaggagaaccttctgaatctgcggcaagactgctctaagaggcagcacccatgtcccccaggaagcccgccctgcccttctccaccgacgtctttattcctgcgcctcgtgccaagctgggcgtaatcgtgttctactgtatcaatcgcaccccccccg

SEQ ID NO: 576 - DNA, 500 bp, Homo sapiens
  misc_feature (1)...(500): n = a,t,c or g
gagagccnnnaatgatncccttgccgcnnnaatggaagccgtacgcctgcagaaccgcgccggaatagcaggttgagggccgacagggacgggaagtgaagaggacagcgtggcgaatctcccctgtgtggcggccagccagatgccgacggcggagcacgccacagcctcggagctggggcacagcaacaggagagacacagacagggtgaggccccaatgcaagctctggaccccagggcagagcccggcccacaagcccaaagccatgccgcctgccagcctgagccagaaccacccagagtcctgctagatcccacggcagcccgggggggtgtccagggcaggccagtctttcccgacaccctgggctggcaccccatccccaaacccacactccatggccacagtcggggaggctcccttgtgcctctgaaccactccctctaggagggatccgcccaacccctggcctggagccaaagggacgggatcttatg

SEQ ID NO: 577 - DNA, 844 bp, Homo sapiens
  misc_feature (1)...(844): n = a,t,c or g
cacaggtaacacccggggcctctcgctggaaataatggggcaggtgcttggccatggatttgctcaggagggaaggtcttgcggaaattccggacactattctttttaatgttagtatctgtcggtattttctatacagatgtaaaacacacgtaaacatgaccctgcttttttttctcaccaagtaagcatttcagaataacttaaacttgtgatcatgtggaccagggcttcccttattcattcctgagaccaaaccattcgtcaggacaccaatgatttctgccgtagctcctccttaatgggagccttgcccgtgactatgtcgagatcttgaaattatgtccttgccacacccgattcagcccctttgttagggttgctgcaaatgaccccatgcaagttattcagtcttaatgtgccctccttagggtctctctaaagatgtaacgcatgggtgtgtggattgtaaaagacactcctgaccgggcgtggtggctcacatctgtaatcccagcagtttgggaggctgaggcgggcagatcacgagggtcagagttcgagaccagcctggccaacattgtgaaaccccatctctattaaaaatacaaaaattatccgggcatgggggcgtgcgcctgtaatcccagctactttgggagttgaagcacgagaattgcttgaagcccagagggtaggggtggagtgaacccaaatcgcgccactggacttcaacctgggggacaagaacaagaccccgtttttcttttttgggggggcgcttnnggggggggggcccgtttagaagaccacgttttttctcccgcggtatgtgaaagttttc

SEQ ID NO: 578 - DNA, 235 bp, Homo sapiens
ttttttttttttctgaaaaagtctcgctgtgtcacccaggctggagtgcaggggcgcaatctcactgcatcctccgcctcccgggttcaagcgattctcccgcctcagcctcctgagtagctgggattacaggcacccgccgctgctaatttttgtatttttagtagagatgggggtttcaccatattggtcaggctggtctcgaactcctgacctcaggtgatcaacccacctt

SEQ ID NO: 579 - DNA, 906 bp, Homo sapiens
tttgagacagagtctcactctgtcacccaggctggaatgcagtggcacaatctcggctcactgcagcctatgcctccgggctcaagcgattctcctgcctcaggctccagagcagctgggatcacaggcatgcgccaccacacctggctcatttttgtatttttagtagagatggggtttcaccatgttggccaggctggtcttcaactcctgacctcaagtgatccgaccacctcggccttacccaaagtgctgggattacaggcatgagccaccacactcagacttaagtgttagtaggtaatattaatagaaatggaagttccgaggtaattcttagatacactgggttatggaaaggcaaacaaactttctacaccacagtgcacgtcaatcttgtgagaggttaatcatgtggtttttgtttgttccaagagcaggagattgcttcattggcttgtctaagaacataaaccatttttcaattatcaagtacagtggtcatctaacctatagcaaaatcattctgcattgtgttttatttcattatcaaaacttaaaattgcataggggaaatgatgttaatatttaaaggcgaattatttcctttgtggacaaaagggatatgagcatgtagatcacaacgaatgatcacactgacactacagacacaatgaatgatcacgctgacactaaagacacaacaaatgatcacgctgacactacagacacaatgatgacgctgacactacagacacaatgaatgatcacgctgacactacagacacaacgaatgatcacgctgacactacagacacaacgaatgatcacgctgacactaaagacacaacaaatgatcacgctgacactacagacacaatgttcacgctgacactacagacacaa

SEQ ID NO: 580 - DNA, 408 bp, Homo sapiens
  misc_feature (1)...(408): n = a,t,c or g
atctnnncccattacacatggaataattattgactattgaaccacccttgcatttctgggataaaatccacgtcatgatatattatccttttatagatcgctggatttaagctgcttgtattttgacatgaggatttttgtatctgtactcaagagggatattgtactgtagctttcttcttttgcaatatctctgtctgattttggtctcaaggtaaagctggcttcataaatgagttgggaaaggcaccctcctctttattttggaagagttcgtgtagaatatgacattattccttttttaaatatcttgatagagtttcgccgtgaaacaatctaagtttggaatatttgttgctggaagctttttagctgtaacatttgttgaataaggctttaacctactcc

SEQ ID NO: 581 - DNA, 685 bp, Homo sapiens
  misc_feature (1)...(685): n = a,t,c or g
ggctccgggctgccccgggtcttcttgagcgtcgtccgggatggagggtgctgaactagggaagtgctgctgctgcgagaccccgttacctccggccctccaggatctgggctgcgatctggccatgacgggacaactccttttcggggctctcccacccctcgaggcttgccagggtgggtctccagaggccgacgaataaccaggtggagctgggggcctccagctcggatccgctccacggcctgggcatggggtgaggccctgcgttgactctccgttgatgtggagcacgaggtccccgacctccaaacgaccacagcgctgtgctggggccatccttcagcagcccgcgcacggccagcggagtgtccccagctacatcccggcccccacctaaggtgaggccaaagcctgcgtaaccgcgaaccagctccacagagaaatgaccagaggcctgggatggcttcggagcactacgtgccttaccctggatcaattggggaggtgcgttacatgtctctaaccaacggtgctggggccggtgatccacaatagtggcatgaggcaggcgactgtctgtgacctctatgtccgcagagtccagcacgctaacagcctccttccggcgcaggcgcagaattccaccacactgcctatggacaagaactcataanccccgcac

SEQ ID NO: 582 - DNA, 635 bp, Homo sapiens
  misc_feature (1)...(635): n = a,t,c or g
gccagcgctcgcggatgcggctggtgcgcagtagcgggcctggccagcggctcggggcttgcagggagggcggatctcgggtcggacccgcagccccagacgccgggcttgggggttccccccgccccggcctcctgccagtcactaccacccctagcctctccaactgagctcggcgccgggagaggattaagttttgtacatcaggaagaagaagaggctggagaagctacgccaccagctcatgcccatgtacaacttcgaccccacggaggaacaagatgagttggagcaggagctgctggagcatgggcgggacgccgcctctgtacaggctgctacttctgtgcaggccatgcagggcaagactactctgccctccccagggcccactgcagagacccagccggctggtgtttaccngatgtggccaatgccatccatgtgtgagtggcctgggacaagcctgggacttctgattagaggacccattcaagggtggcctacagaggttccccactcccttgattgtcaagacctaatctgaagatctttccctgccaagacacaagagggctgagccaggttcctagctgttctccagacccacctgcttgactttagactctaagaga

SEQ ID NO: 583 - DNA, 410 bp, Homo sapiens
gcgccggggcccccggttcctcctccaggttcacctccagagcaaatgcccggcccctgcccagcatccatgcccccggccctcctccaggttcacctccagagcaaatgcccggcccctgcccagtgtccgcgccccctgccctcctccaggacacttctgtttgagtagcacctgccacgtgcagcaggctcaccccaacctcactaccaaaagtgccactgagacagatgaggaaacacacactgctctcactccattttacagacagggaaatggaggcagaaaggccgtggcgtggcctaagtcccgctggtggcagcagtggcgcaggaggtgagcccatgctgccagctaccaagctcaggctcagcaccccaaggggagggttgggcgggacctccatgctg

SEQ ID NO: 584 - DNA, 692 bp, Homo sapiens
tcagccacaccccagcagccatccgcaccccaacaccaagggactctgaaccagcccccagtccccggcatggatgagagcatgtcctaccaggctccccctcagcagctgccgtcggctcagccccctcagccctcaaatcccccacatggggctcacacgctgaacagtggccctcagcctgggacagctccagccacacagcacagccaggcggggcccgccacgggccaggcctatgggccacacacctacaccgaacctgccaagcccaagaagggccaacagctgtggaaccgcatgaaacccgcccctgggactggaggtctcaagttcaacatccagaagcgaccctttgctgttaccacccagagctttggctccaacgcagagggccagcacagtggttttggcccccagcccaaccctgagaaagttcagaaccacagcgggtcctctgcccgggggaacctgtctgggaagccggatgactggccccaggacatgaaagagtatgtggagcgctgcttcaccgcctgtgagtcggaggaggacaaggaccgcacggaaaagctgctcaaggaggtgctgcaggcgcggctgcaggacggctcggcctataccattgactggagccgggagcccttgccggggctgacccgggagcctgtggctgagagccctaagaagaa

SEQ ID NO: 585 - DNA, 1749 bp, Homo sapiens
gatatttgacacaaaccggttaccaattcaagggacactcaagaggtacccctagaaaaagctaagcaagtgcttaaaataattgctactttcaagcataccacctcaatctttgatgactttgcacattatgaaaagcgtcaagaagaggaggaagccatgcgtagggagagaaatagaaacaaacaataaccgtatgaagatgtcctgttaaatttacaacactaacgatgtagactctggaaatgcctaataagtcaaagaagacgtattaaagctcttttctgcttaaggtgacatctttgaacactttaacacaaagttgactcttctcgtaatggttttcatcagcgcatctgcccttatactcttcaccaaacacacttgagaactgtaacttcgtcaagcactttctgtcctgaagcttttaccagtatctgctgtcttttgtaattatgcatcctagctaaggcacagaagactgaatgaatgcaaggattcattaactctttgaatttgttaaatactaacagttaaccattagaagtggttcaatgatgtaagagtcacactgcttcaactttttctttgttgtagtttttaaattgtcgatttttagctatttgacagattaaaagcaaaataatcatgccatatttagtcctggagttcaatgtctaaatgttggatgtgaaaaattattgtagtaaacttttaatatgggcaaagcaaccttaagctctattttagccaaatgaaacataatctgaaattatattagaacatttcccttgtcttcaaactgtttggtgtaacagaatattgatatgccagcttggtggatttcaccaggttaatgcacattcttcttccctcctccccccattaatatgtatactgaaaaatgtgcatttgtctgaggaattattttgtttgctaccacttaatgaatctcaaaattttgagtaaatgtacctcagtctaatcagactttttatgacctttataactacatttaaaacccttaattcctatttctgggtgtttgcgagcctgattgctatcatgaagtaaaaatttattactctaggtattcactagctaaataaacatagttcttgtttagcaagcatatgttgttcctcagctcttttctccagcttttgcagtgtcctggcatccttaaaatactttgaaaatatggccttgatccatggattaaatcagtatctaagtgaatgtgttgatgttttattgatcagatctatataagtgggaatacagcatatatctggatattcttatagttatctttttaacatcttatttttttcattaattacatatcaacattaattttgtatcttgaagcaaattgattttggtataattaaatgtgtcaagcatctgtattaattgatttgatggcataagggttatgaaaataatgtactgccccatgtattactgttccaaaaggagaaagctatgtagaaagatacattaagggtgaaaatagcaatacagatgcttgacacatttaattatacaaaatcaatttgcttcaagatacaaaattaatgttgatatgtaattaatgaaaaaaataagatgttaaaaagataactataagaatatccagatatatgctgtattcccacttatatagatctgatcaataaaacatcaacacattcacttagatactgatttaatccatggatcaaggccatattttcaaagtatttt

SEQ ID NO: 586 - DNA, 1308 bp, Homo sapiens
ttttttttttttgctagttgtatataaaatttaatctcaccgaatgtacagttttcaaatttcacgtgtatattaaggaactgatgcatctgagcattgtcaaacaaacgggaagaagaagttaaagggcagcctggcattgatggctggtggagctctgaagcctgcctctgcaggtgcagacacatccacaaaagtaaccgcagtggaaataagaatcgtcctttcatttcctgagttggcctcaggaaaggaggatgaaattagatttgcagttacattgactattttggcctgtggattcagcagggatccgtatttagtccacttcacttctataaccaaagcccctgggagctggcaggaatccttcctgttgaatgactgggtgatgaagtggatgggcacccagtccagcatgtccctgggccctgggaatttccaaaaggggccacgtaatctgggaagccctggccccacagcaggctcttcaccttctgtgctacgagctgacacgggagagctccagtcagtcttagtttacagccagattgcatagtgtaaccaaataatactggggtccggaccccctccagtgctaagcagtcttgctcagttgtgctatgaagaatagtaagctgtccatatctatttgtggtctgaataatcccagaccccttatgaggctggaatccagcagctaatgggagccccacgacataaccagggtttccactgagagggactggctgggtattttcctgaagaaaatgaatttcaaacttttgctgcagtgggaccactacgctgctaactgtccccagaacgaatgagagatcagctttggtgacttcacctgcatctgtgtatgtgaggctgtactttacctcaagaacaacattcacgcaaaggctaaagtgtccagcgttgacgagagtcggctgcagcacatcagtgtcctcccgtcgggtgagcgttttatttagagactgaatgacgatggactgaacagtgatagggaccttttttcttgaatcaggtaccctcagaatttccgggctgctgtaaaaagccatgctgagggcttcaatttcttcacactgttctaaatttatttttctggtgcacttaacagcctggttcaccagaaacgctgcagggttattatcagtgcacagagatgatgtcagggacgaaggaaatctcagaaacgaatctgaagtctgcagaggaaccccatactcatatttagcagcagtaggaatatccagtttggttgtgaaggaaacatatgattcagcattcaat

SEQ ID NO: 587 - DNA, 683 bp, Homo sapiens
ccacggtgagtcatgagcagcttcctggatggtgttctgagagttggcacctatagcccccaagccagtggtccctggaattgctgcttcattggcactgcctcaaaaatattgagggatatttgtgaccaggctccaaattgtaggtgtctagatggagagtcatggtcttgcacatcttcccttggtgtcccttctctgtaggtcttgtacgaatgatgtgccttgactcctctttcaccttatcccacttccggtgatggccagtgatgaccagtgatagtcagcgaggctattccttgggggagaagggaatctacatctcctgcttagggtcttatatcgcatttgctgtctgacatagacttcaaaatacctatgtcagatacttcctgaatgcctcctctttgtagctgggcatggaggctcatgcttgttatcacaacctgtgggaggccaaggcaggaggatcacttgaagccaggagtttaataccagcctgggcaaccaagtgaaaccctatctttacaaaaaacaaaattagccagatatggcagcatgggcctgggcccagctactttgaagctgaaacaggcggatgctctacccaggagtcagggttgagaaatttttttggcccatttcttcccctgtgggaaacctacaaaacaaaggtttttttc

SEQ ID NO: 588 - DNA, 1780 bp, Homo sapiens
cagaaccggaggatctaatgtactacttctgaaaacggaaatccacagacattcaatacaggccgaaacagactctcaccccaaaaatattagtgaaagtgcatacactttattatgtacattgttggaaagggaggccacctggagaaacttctgcactggcactgtgttcctagagctccttctatgcgtccctcccaagtgatttaatttcagctgattggactacgaattcacaaggcagaaaagtcaaggtcatttggtatctggagacaggagaactcaaggaaccaaaagtactgttactctaagtctcagaaaaggttttcagtcaggatatggaggctcctggtcctcaagggtgaaccacttcacacaacagataaaaccatcattttaaaattcaaaatgtaagtgcaacttgagtttaagttgcactgctccatacctctaataaactcagctaggagccaggatacatggtagttcaaggcttcctaaaataagcttgaaattggggtacaggggaagggacatccattggctggatggacagagtggttgagctaaagagagctataaaggctcgtgctgggaaagaaagctgttatgcttagacttctctaggtgaactcagagtctcaaagaggaaatgttacaaatgtcacccgccagctttctggccagtaagcagaatgccaggttgctcagattcacagacatttgcaaaacagaagatgtctcctaatattatagactaagaatttgttgtccagaggagctgaccagttcctctttcagcatcaatatacatgatagaagaatgactaggtaaatttaaaaagacctacatctatatagatattgtaagtttgacagtatctgcccaagatcattagacactatatagtcaatatactgtgaattccttatactatgtaatgaatgggtttgtaatcaacatatttcacagtgtaccacagttaacagcatgcagatagtaaaatataatggtttcctgaagttatctcttaaaaaagtattttagtccttcagctattcaaatagatatataacaattgcatatagaacgtagagaaaattttattaaaaaattaaaactatttaaaacctgatatatgaaaataggcaacagtgagaaaaaagcacttttgtgacaaatatttagctggtttgaaagacagaacaaggaggaatcatttactcataaagaaggctcaaataagttaaaacatggatgtatttttaaaatgaccactctagtagtgaatttaaaagtcttttaagggttagagtaatctttttcattagtcttggctatttcctctagttctgacaagtacaggcaagaaaatggctactctcaagtaaggattattctgaaacacggtctggatttagaaaataaatgaacattagggaaatttccttaattaagactctccaaaccaggtgtggtagctcatgcctgtaatcccagcactttgggaggcagaggtgggtggatcacctgaggttaggagttcgtgactagcctggccaacatggtgaaaccccgtctctactaaaaaacaataataataatacaaaaattagctgggcatggtggcatgagcctgtaatcccagctactggggaggctgaggcaggagaatctcttgaacccaggaggcggaggttgcagtgagccgagatcatgctatttgcactccagcctggggcaacaaggagtgaaactccatcttcaggaaaaaaaaaa

SEQ ID NO: 589 - DNA, 920 bp, Homo sapiens
tttttttttgtgagaaaagccgttgaggtcctctcaaatctgcatgtgagcaagtaggtctacaacaggcaaacatactgcttcccgacttctgaaaagtcaaggaatcctaagtaatctagatgaaaaagtgactccttggtttcttcacattcccctccaagagcccagtgagccatcagctcctggccagcaacacacctgatacaaaatgggagaagtgtataaattattatgttgataagcaagataagtgccaaagggtagataagagtgaaagcattgggaagcctggcagagtgcagtcagcaggtcagttcctggcggttcattgagcagcttggcccaaagatgtaagtgaagtccctcctggtggagggatgagagcagctccagttactcggccttcatgacacaggaagttgaaggtggcacaggcattgggcgtgtcctgcacttccacagcaatgccccgctgcctcatggcttgaagcacctgggactgcagcctctcggtccggtctccagtccccaccaccacgatctctatccggggctccagcaaccagaagagggaaaagctgtcttcggtgatgtcctggtgggatcccacgttccactgcaccaccgagtgcgggagcagagcgcaggggccgagcacgcggtttccgtttatcatgaagccgcggctgttgtagctgtcgatgtacattgcctgagcggcctcgcgttgcagcagagagatgcgcgtccgctgatacagctcgtcatccgccggcgagagccgatgccctcgccgcggggcccagggaagctcaacgggcggacagcgcagcgagggtcgcgctcggtacaagctacgtagcgcgagagcggtggccatggctgaccaacgcgcggcgaagtcgtcaccggcgccg

SEQ ID NO: 590 - DNA, 2187 bp, Homo sapiens
ttttttttttttgagacggagtctcgctctgtcgcccaggctggagtgcagtggcgggatctcggctcactgcaagctccgcctcccgggttcacgccattctcctgcctcagcctcccgagtagctgggactacaggcgcccgccactacgcccggctaatttttttgtatttttagtagagacggggtttccccgttttagccgggatggtctcgatctcctgacctcgtgatccgcccacctcggcctcccaaagtgctgggattacaggcgtgagccaccgcgcccggcccaagagaataggggagccaaggaggaaatgtggaaacgcagttgtgtggcccagcacgagcctgggcgaccaccgggtgacatccgtcccacatcagggcggcctcccaggtcccataagggtagccccctcatctgcaggacagagggaagccagtcagggcccccccggacgttaggaccaggagaaatcaacaggagggcagcccgtcctctctcttggggcgcccacccggcccggctgagccctgccccacccaactccacagggctgttttgcctccccacggaaggcgggctgaggagacaaccagatcaggagagcaaggtcatgaaggaggggacctctccacacaggtgttccgtgggaccctcagcagctctggctctgcctcaggaggtcacctgccgccctgtgggagccgcagagcctgacgctcagccccaggccagctgcggccaggcctgcgggcccctggtgatggggttacgtggggtgcgggatacagctgagtgggaaccggaaacctattctctttttaacaaaaataatcttaggataagaattattttaacaacatataaaactgtttcaagccctcctccccagagctggcgctcagcagccctagcggctgctccttcaggcgaagggtggtttgcagatgtggggagggtgtctggggacgttgctgagctggctgcagaagggtggggatatcagggcacagtctccatgtgtgtgccaagccctggcccccacagcgctcgatggacctcagcaagctgcccagccctggcccaggtgccccgactgtgggactcagttgttctgagcacatttgactccacttttcccttaaaaatgaatgtcttgttcctgtgcattggtggcatcacagaccccagctggggcgcgatgtcaaaggtcgggacagctgtgccgggaggcagccacagggaagctcacacatcctgtcagtgtcaccttggtttgcaaaacccatatccccggtaaaatgaggccggacagaggggctgttaggacagcaaagcagcagtgtccagagacccctcaatccccaaaggtccgcaccctgtcctgcacaccctgggccacgccggccacacccctctgctgcaacaagctcatccctggacttctgggagaatgaacccgaggttggtttggggagacaggtgaggcggtcggatctacagaacaacccaccatttctgggggccgcagaggatccatcacagacggatactggggagtaaacggcccaggccaggtgcccaggaaaggacggctgagcatgtggagcgagagggaggcaggtggacgctgcagaccccaggttcagtgcggcccctcggctgttcctcccctgtagggtttggacagacccacccccagccttgcccagctttcaaaggacaaaagggagcatcccccacctactctcaggtttttgaggaaacaaagatttgtggtaactgaaggtgttgggtcagtggccaggtgccgacactgagctgtgacccagaggggacgctgaggaagtgggcgtgagtggacatgtcaggtggttaccagggcactggttgttgatggtcggtggttgggtgtgggcagtcatcagtcatcaggtgtgctcaggggacaatctcccctcaaccgcacatgtgccactgtttcagcggagctgactggtttcccctggtagaggggccggctgtttcctgacagatgcctggtgagcaggggaagcaggacccagtggtcaacaggtgtctttaactgtcattgtgtgtggaatgtcgcagactcctccacgtggcgggaatgagctgtgtaaatacttcaataaagcctgacttcacatctgca

SEQ ID NO: 591 - DNA, 1442 bp, Homo sapiens
  misc_feature (1)...(1442): n = a,t,c or g
atcttgagaggacgtgaccctgaattatccggctgtgcttgacatccaatgactggtgatgttgtaagagaaagacggagggagatgtaagatatgagagaaggccacgccgagactggagtgatgtggccgtgagccgaggaatgcctggagccaccagaagctggcaaaggcagaaggagcctcctctggaccctgtggtgggtacgcagcctggcagatatannnnnnnnnnnnnnnnnnnnnnnnnnnnnnnnnnnnnnnnnnnnnnnnnnnnnnnnnnnnnnnnnnnnnnnntccctgggaagcccaaatagggcgagaccttttgccaagtggtctccaagtgtcacgtcatcgaatccttctcccgggcttgtgccatagtctttccactttagagaggaggaaacggaggctctgggcgcacaaagccagtcagtggcgggggctgactttcaacccagcctgcatggggtcagagaacccactttccccgtgggcctgcgctcatgctaaggatgcttgttcatctctcctgggcccgggagtggttcttctggcctagaaggcaagagaagccagtctttcggtttcaaggtttcccattagtggagtcaagcaaaaatggtgtgttgcgcttcttcctgagctcagcctgggagcacggccttaacatgctcagtggatcccaagacggcagcatggcggtgccagcctggcagccttagctccttgcagctgtgcttgtgaagggagcagtgagtggcttccctctgtgaccaccttgggtcctaagtttcactggggctgggatccatgcgtcttgcaattggctaggaatttcccgggctttccctcccttccctgttcagggcactgggtgtgaggcattgcatccgttcttctgctcacctgcttccccataagagtgtgagctgtataaaggcaggaaccaaacaggagcctccacgtgttcccagttcaagggcagtgtcccttgtgtgtttcttcaataattcagtggatgacttattctgcacggacactgcacacactcggccctgccgtctccggagctgggaggtgtggagctggctcctgacctatttacacacccgaggagggatgtggaaaacaggaggagtcccagggctccaatgcaaagaggagcctcttcattccctctgccgtggccgtgcaagggacagcgccttgtgggattgtgtcctccacccaattatccttaagcattagtttgctaaggataatggcctccagctccacccatgtccctgcaaaaggacatgatctcattcctttctgtgtctgcatagtattccatggtgtatatgtacccgcgttttctttatcgagtctatcattgatggggcgcttcagttgattccatgtctttgctaatgtgaatcgtgctgcaatga

SEQ ID NO: 592 - DNA, 919 bp, Homo sapiens
gcggacccgcccgttattttcgggtcgacccacgcgtccggtctgcaccatgagtgatgagcggcggctgcctggcagtgcagtgggctggctggtatgtgggggcctctccctgctggccaatgcctggggcatcctcagcgttggcgccaagcagaagaagtggaagcccttggagttcctgctgtgtacgctcgcggccacccacatgctaaatgtggccgtgcccatcgccacctactccgtggtgcagctgcggcggcagcgccccgacttcgagtggaatgagggtctctgcaaggtcttcgtgtccaccttctacaccctcaccctggccacctgtttctctgtcacctccctctcctaccaccgcatgtggatggtctgctggcctgtcaactaccggctgagcaatgccaagaagcaggcggggcacacagtcatgggtatctggatggggtccttcatcctgtcggccctgcctgccgttggctggcacgacaccagcgagcgcttttacacccatggctgccgcttcatcgtggctgagatcggcctgggctttggcgtctgcttcctgctgctggtgggcggcagcgtggccatgggcgtgatctgcacagccatcgccctcttccagacgctggccgtgcaggtggggcgccaggccgaccaccgcgccttcaccgtgcccaccatcgtggtggaggacgcgcagggcaagcggcgctcctccatcgatggctcggagcccgccaaaacctctctgcagaccacgggcctcgtgaccaccatagtcttcatctacgactgcctcatgggcttccctgtgctgggccccttctccttggcagatacccacctgtcagacctgccgtacacatggggagaccgagactcagggggagcttgtgtgatg

SEQ ID NO: 593 - DNA, 2389 bp, Homo sapiens
ttttttttttgaggcagagtcttgctctgtcccccaggctggagtgcagcggcccgatcttggctggctgcatgctccacctcccaggttcatgccattttcctgcttcagcctcacaagtagctgggacgacacacgcccgccaccacacccagctaattttttgcatttttagtagagaatggtctgtgttagccaggatggtctcgatctcctgaccttgtgatccgcctgccttggcctcccaaagtgctgggattacaggcgtgacaacccgcacctggcctattcagggaaggtttcaagcagaaagatgaactgagttggctttggagagattcacaggactcccacaggcagagtgaaataagggcattgtagatggacaaaggcacagatgagcagcaatggggacagtgtgactgggggacgctgaggggctgctgtggctggaatggagggctgccaccataatggaaatggccaatgaggcaaataaggttggattaggagcatagcatcaagggtgccagcttattaaatccctcttccagtatgctagcactggcctgctgggaaaagtaatacatcacataatcaaacaaaaggcaaaaagaggcgagctccaggaataggcactgtaaacaggactcgccccagggtagccagatgcaggctttagatttgttgatgcaggttgagcatctctaatccgagggggaatgtctcatatggtgtccaagaaatggtgacacatctcacagagggcctaggctcaggagggctggagtatgagacattccccctcccctgtgaatttgaaaacgtggccaaaatttttttttaaaaatggctaccctgtagttctttaactggacctatttagacaacaccttacacactggagaaggatgatactatgtgaatctagtaagtctacaagacaatacttctctcttttggctgtcttcttcctctccagggtgatgacaactccgtgagggtggagattatatgtctctcatcatttaagcaacaaggaaataaattagtggcagagtaaggggtgactcagtgagtacatccaattgttgacatagttttgggtgggagaaattttgctattatatcaacttaacttcttaaaatagtctagtgggattaacttggttttatttcacagagacctcctggaagcgaggatcctttaacaatcctggaatatacattgcagtaaaagaacaaagcacacctcagccttaaatgacagaagaagaatgtcaagtgggaaagtgacgttggttttcagtttgtggattctgaatccacacaaacacaggattgtattttgaaaacctgaattaattattgtctttacctctataaaacaaaaaattataatcaaaattattagtatgacagtcacagatattgcgaagatgagtttgttcttatagtcatatcctggaacttctttcatgagctcacttgacttctgctctttctgttcattctgttccatgttctcattaatataatttgttttttgttggtccgtatcccattctacattcaatgcctttgcttcctgctgctcgctgagaagcttcatcaggaggcctgttcgcgacatgagcttggcacagctcccttgcacatgtgtttctgaacattccattttcaaggtccagataacatgagacatgaactttctcacatcctcgttggggatgagggaccgtagctgctcggttagctgaatttcaagctgatcacccccaaagcctgacaagttgatgccactgctgtctgagggcgcctccgactcaatagtcagctgagtgctcatgtgctgcttccgggcttgtaacatcttcatgaacgctccttctggattccctacagatgcttcttcaggacaatgtatgctgttagtcagacatgcagtgttgcaatgcagcttgactgtcttgcagacagcctcaatgctatttttaaattggcagaggcagcaggccatatggctaggtaagatcctatagatgaaaacacaaaacaataaattagtggtaaagcggttacttgagtaggtaaaggaggcagccaacgctaccacagggctgggcaaagaggtgttactgagacccgtggactggacacttgggtaggaaccagaaggccaatgggaaggaggacacaggtgcccaactgaagggtaagcatggcagtgagtatggtatgcctagaataaaggtggttgggattagaattgggtgacactgatcagtagtttaaattcagaggtatctcttcccgactcaaaagtctcactttgggctgaaagatacaggaagaaggtagacttctaagaagagtctgactcgtgccg

SEQ ID NO: 594 - DNA, 1325 bp, Homo sapiens
ttttttttttatttcttaacttgcaattttattaatttttcagtactcttaccttttatatactactaagaaaatttaaaccataactagacataaacattctgscagtttaattcaaattttcatatatacagaccagactacatatgtattacactgcaaaacttacacatgactgaagctgagcgtaataacttcaattagccaacaacagaagcactcccacttcctgcagtcacagcaattagctaacaataaaaacactcccacttcctgcagtcacagctgaaagacttttcaaggcagactacatttgggctggagatacaagtgatgtagtttgacttgggcaatacaaaacaaaagtcataggaattaaatggattttcaatcactgtataattcattctcctggcttaagtacgttttaattttttcacagaaaaaaatatatttcaggcaaataaaaacaaattccagattagcatagttcagcgtttcatttatcttacctttatcaaggcaaacaaagtacagatgctgtacattaaaaacatagaaatatatcactcacaccacatcaactcctacggacaaaagggctttttctaagccctgctcctttctgaagcacacaccacagctaaatgtacaaagagccatctgctggtccaacatagccaactccaatgagcaggacgtctatcagcgtccatattcccaggccaccgaagctgaagagcttgccsgaggccgtccccgctactggccccaggtagraaacggtctgctcccaaaccccaccgagggtgatgccttaagagccagagcccgtagacccacttatagcctccagtccaattgcaatatagcattttgggaaaagtacggttacccaagcagtggacgtggtccccgcaccgtgcagttggcagggtagcgctgccgaggacaggacaccgtcatgcagctggtggagttggtacactcgtaatctgtttcaggaagctgccagcaaaatctgcaagtcatgttaatgatgaagttcttttgggatttgaagtcttgatcaacacaggtaacagatggtttcactgcacagtcaaaagtgacaggcttcccataggtacaggagaaatttgttgtgcagtctatacagtctgcaggaagcctgctacacaaaccattgctcggacacttcatcacataaggtgggatttcagtactttcaccgcccgacagaatgcagaactgcgaaaggaagagcagcacgcgacacaaggcgcggaggcccctcagcgggcgcacccctcccgccatcttgc

SEQ ID NO: 595 - DNA, 532 bp, Homo sapiens
tttttttttttttttttttcagcattattaacaaatttattgaacaactagaacttgacaagcacatgccaggtagaggggatacagtggagagcaataataatgatgataatgaggagtagttttttccctagcaggcagcagttgaaaggaatattggtttaacatccaccaatgagcaggggtggatagacccctctcctggagacagagtccataacgggattaaaaatatccctgtaagccggtcacccggtggctcaagcctgtaatcccagcactttgggagaccgaggtgggtggatcatgaggtcaagagatcgagaccatcctggccaacatagtgaaccctcatctgtactaaaagtacaaaaatttgttgggtgtggtggcgtgcacctatattcccagtactcgggaggctgaggcaggagaattgtttgaacccaggaggtggaggttgcagggagctgagatcgcaccactgcactccagcctagcaacagagtaagactccatcttaaaaaaaaaa

SEQ ID NO: 596 - DNA, 1998 bp, Homo sapiens
cccacgcgtccgaccatctgtatcctaatttcttggtgaatgaactcattcttaaacagaagcaaagatttgaggaaaagaggttcaaattggaccactcagtgagtagcaccaatggccacaggtggcagatatttcaagattggttgggaactgaccaagataaccttgatttggccaatgtcaatcttatgttggagttactagtgcagaagaagaaacaactggaagcagaatcacatgcagcccaactacagattcttatggaattcctcaaggttgcaagaagaaataagagagagcaactggaacagatccagaaggagctaagtgttttggaagaggatattaagagagtggaagaaatgagtggcttatactctcctgtcagtgaggatagcacagtgcctcaatttgaagctccttctccatcacacagtagtattattgattccacagaatacagccaacctccaggtttcagtggcagttctcagacaaagaaacagccttggtataatagcacgttagcatcaagacgaaaacgacttactgctcattttgaagacttggagcagtgttacttttctacaaggatgtctcgtatctcagatgacagtcgaactgcaagccagttggatgaatttcaggaatgctttgtccaagttttactcgatataattcagtacgacctttaggccacattgtcatatgctagtgatctctataatggttcccagtataagtctctagtatttgaatttgaccgggattgtgactattttgcgattgctggagttacaaagaagattaaagtctatgaatatgacactgtcatccaggatgcagtggatattcattaccctgagaatgaaatgacctgcaattcgaaaatcagctgtatcagttggagtagttaccataagaacctgttagctagcagtgattatgaaggcactgttattttatgggatggattcacaggacagaggtcaaaggtctatcaggagcatgagaagaggtgttggagtgttgactttaatttgatggatcctaaactcttggcttcaggttctgatgatgcaaaagtgaagctgtggtctaccaatctagacaactcagtggcaagcattgaggcaaaggctaatgtgtgctgtgttaaattcagcccctcttccagataccatttggctttcggctgtgcagatcactgtgtccactactatgatcttcgtaacactaaacagccaatcatggtattcaaaggacaccgtaaagcagtctcttatgcaaagtttgtgagtggtgaggaaattgtctctgcctcaacagacagtcagctaaaactgtggaatgtagggaaacccatactgcctacgttccttcaagggtcatatcaatgaaaaaaactttgttaggcctggcttccaatggagattatatagcttgtggaagtgaaaataactctctctacctgtactataaaggactttctaagactttgctaacttttaagtttgatacagtcaaaagtgttctcgacaaagaccgaaaagaagatgatacaaatgaatttgttagtgctgtgtgctggagggcactaccagatggggagtccaatgtgctgattgctgctaacagttcagggtacaatttaaggtgctagaattggtatgaagggttaactcaagtcaaattgtacttgatcctgctgaaatacatctgcagctgacaatgagagaagaaacagaaaatgtcatgtgatgtctctccccaaagtcatcatgggttttggatttgttttgaatatttttttctttttttcttttccctcctttatgacctttgggacattgggaatacccagccaactctccaccatcaatgtaactccatggacattgctgctcttggtggtgttatctaatttttgtgatagggaaacaaattcttttgaataaaaataaataacaaaacaataaaagtttattgagccac

SEQ ID NO: 597 - DNA, 1026 bp, Homo sapiens
tcccgtctcgacgatttcgtatcttaatgtcaagggaaaaatacatttttgatatctgctagatctagttcaaaccttatcttgtccatttactagcttgtatgttcttggacaggttaacccctgaaaattcagtgtcctcatttgcaatgtgggaataatagcgcttgtcttcaaaggttgtggtgaggattaagatgatatatagagagagcctagtggtactattaaactattaaatattaaaaatattaatggtagctactatatattgagtgtttattacgtgccaggcattgttctgaactctttacaaatgcagtctcatttaagccttccagcaacctgatgaggttgatgcattataaatttcatttgataaatgaagatactgagtcagagagagtaattccctcaaggtttagtgagtgtttaggctttgggttatgggtggtagctgttggagctatttaaaagcacgtagggttcataggagcttgtttggaaacttttgaggaactcgacgacttcttgacggagtctcgctctgtcgcctgggctggagtgcagtggcatgatctcggctcattgcaacctccatctcctgggttcaagtgatcctcccacctcagcctcccaagtagctgagattacaagcgtgcgccatcacacctggctaattttttgtatttttaggacagatggggtttcaccatgttggagaacaggctggccttgaactcctgacttcatgggatccggccatcttgccctctcaaagtgctgggattatcggaatgagcccccacgcctggcctccatgacttttttttaatttattaagagaaatggatttggctccctgttttaataaagcctggcctgaaatacggagttccactatcccaccgtcacagccccccccctcttgaattacgggaataaaccccggacccgcgttccgcccctttttgcccccccccccactttcccccccccccccccccccccccttttttttccccc

SEQ ID NO: 598 - DNA, 542 bp, Homo sapiens
ttcgacaccgagttcgtcaacattggcggcgacttcgacgcggcggccggcgtgttccgctcgccgtctgcccggcgcctacttcttctccttcacgctgggcaagctgccgcgtaagacgctgtcggttaagctgatgaagaaccgcgacgaggtgcaggccatgatttacgacgacggctcgtcgcggcgccgcgagatgcagagccagagcgtgatgctggccctgcggcgcggcgacgccgtctggctgctcagccacgaccacgacggctacggcgcctacagcaaccacggcaagtacatcaccttctccggcttcctggtgtaccccgacctcgcccccgccgccccgccgggcctcggggcctcggagctactgtgagccccgggccagagaagagcccgggagggccaggggcgtgcatgccaggccgggcccgaggctcgaaagtcccgcgcgagcgccacggcctccgggcgcgcctggactctgccaataaagcggaaagcgggcacgcgcagcgcccggcagcccaaaa

SEQ ID NO: 599 - DNA, 871 bp, Homo sapiens
tttcgttggccaccttgcgagcgctcgggttgagtttcccgggcttccctgactcggctacctgttctggaggtcaggctttgggcccttgcagaggtcgccgaggggcccgcgccgccgccagagcctgggcccagtccccagtcttcagagacgccctcgaccttcctgctccgaagagctggcctgatgtcctcgggtcgcgctccgcaggttcttacttttccaaacctagagggcagtgcatgaagccaggggtcatcagccatgctccagacagtgtggttccagggcttgggcaggaacctgttgtttcaggagccagtaacctttgaggatgtggctgtgtacttcacccagaatgaatgggccagcctgcaccctacgcagagggccctatacagggaggtgatgctggagaattatgcaaatgtgacttccttgttttcacttctccgaaccctgaggcagtgtgtgaagctgggacgccagccatgttccagaccgcttggcgccaaatggagtcttgctctatcgacaggctggagtgcagtggcgcgatcctggttcactgcaccctccccctctggggttcaagcgattctcctgcctcagcctcccgagtagctgggactacaagcacgcgcccccacacccagctaatttttgtatttttagtagagaccaggtttccccatgttggccaggatggtctcgatcccttgacctcgtgattccccccccttggcttcccaaagtgctgggattacaggcgtgagcccccgtgcccaccctctctttgttaatgtggtgaattacatgatttttctttcaaatattaaaccacctctgcggtgggataaaaaaaaaa

SEQ ID NO: 600 - DNA, 775 bp, Homo sapiens
gggtgcaggaagtaacaggcatcttagaaagaggcagcccttcgtagcgtatcatgaaaaatactaaaggggagaaaggaatatctggggaggagagcccgtttccggttctctatggtgcccgaaggcagggaccacagaaacccacccctgtggcataaacctggcagctgacagccgtgcctgtagtcccagctactcgggaggctgaggtgggaggatcgcttgagcccaggagttctgggctgtagtgcgctatgccgatcgggtgtccgcactaagttcggcatcaatatggtgacctcccgggagcgggggaccaccaggttgcctaaggaggggtgaaccggcccaggtcggaaacggagcaggtcaaaactcccgtgctgatcagtagtgggatcgcgcctgtgaatagccactgcactccagcctgggcaacatagcgagaccccgtctctactaaaaatacaaaaaaattagccaggcgcggtggctcacgcctgtagtcccagctactttgggaggctgaggcaggaggatcacttgaggtcaggagtttgagaccatccctggccaacatggtgaaaccctgtctctactaaaaatacaaaaattagctgggtgtggtggcgggcgcctgtagtcccagctactcgggaggctgaggcaggaggatcacttgaacccgggaggcggagcttgcagtgagcagagatcacaccactgcactccagcctgagcaacatagcaagactccgtctcaaaaaaaaaa

SEQ ID NO: 601 - DNA, 1459 bp, Homo sapiens
ttttttttttttttctaaagtaatacctttattctggagaaaacaaacacctccaaaaaaattctaaaagattttgagaggggaaaatatagacacacaactgcattcattctgatcttccacacaaagatcaggtgaagaaatctatgcagctatacatgctaggacctgttgtacaccatccctgcaaccccatagaaagaaaaaaaactcttttttcaaaatagaagcagtattcttctacgaaaacaaaacaatcacatgtgactactggaaatgttagtgttacacagagtcctttaaaaataaatcacagccaaagttccataaagtacagaagcttgaaacagaaaataaaaatcgactcgaagagtgatgatgggagcctgaagctccatcctcacaaggacggcagcctctggacatcactgcaaaggtcacaggaggacagcttcacttcagagttgtaacttctcaccgcctgtctccttggctcatagtaatccactatggacactgaagcatcttgggtatttgaaactttaaagtttctcacagcaggaatattaacacaaaactgggtttcatttacagaatctaaatagaggttgagttttccatgatcatattccactttcttcactgtctcgctcagagaaattgcttctgaaggcaccataaagccacttaataggttaacttccataagagccatgccactcctacccgggcccgaaaagcttgtacacacattcaaatccacatgattgagatcatctttattttcttttacagcaacatctaaatcaaaggcttcttgattttggatagatcttcgtcttctagaagacccagaagccttcacattatatacaacattgagctgacaaatagcaaatccaaaaccatttgcggaaatattacactgccattggctgtaccatcagcaagctctgctgtctgaaggagtaagcggttgtgtgtgtcaatcagaaactttacaggacttggtgagctaggccccgtcacggtcacttggatatttgtcctttctgtattcattagggctgcaaattcagacagagcctttaaagccacagtggtatcctgagtagatgcaaaaccacccaagctatttctttgcctgcttagccacctcataattgggattccctcagaagtctgaaattgtaagaagtgtgagagcagtgcataggctgcaacttcaatatccagggagcgtggctgccaggagtcagaaagtttggactctgatgacacccagaattgcatgccaccttcttgttctgctctccaagtcagcatattcaaagcttccttcgctttaggactccccactgatgacaatgcataagttataagggctagagtataattgtctgaaattcctctactgaattcagactccaaaaaatggatagactcttgcacctcgtgc

SEQ ID NO: 602 - DNA, 1963 bp, Homo sapiens
ttttttttttttaaattctgcacccagtctggcaaacatttattgactgctttctctgcatagaacaaccggccagcccctggactccagaggcccaccatcattgttaagagacctacatgcatgaaccaatcacacacgtgctatgagaatagagaaaagaaataagtaattctcacagacactgacaaactggaaaaaacttctttcatcccaggtactttatggctgggatcaaaggggtgactcacttgtttgcacaggaaacaaaaggcaaaaggaagtgttggcatcagttttccatctgcacatataacccccattcctccatgaattgcatgagataggtttcattttctcctggtggcctgtctggagccggctcctcatagagtctagatagaagaccctcctctccgagcccatccccctcagaaggctcgcagccctctgaatcctggtcgaagctggacagcgaaggaatacacagcctgccagtttggggatcccagtcgaccagggtcgtcgatggctcttcctccggcccctcctccgagtctgtgtgctcctgcgccagggggtctaagtcttggagctgaggggtgtatgagtactgtaacgtttgcgggcccaagactgccaacgctgcctgcgactccaataatgttccttgtgtggacacctcctcctgcaaactgagctcctgctcttcaggccccgcacaaatgtcagtggttctgacatcatattcatattcaatgactgttttatccgggggtattgttctgctgagggactcttgctgggtgaaagaagtaccttccggtgttttcttcagagtcacaaaaaatttccatcaaatgcgaagcataccctaaatgtttcacctcctcttcctcctgagggggcctcaggttcccgctgggctgaggatcattaaggctggatacatcactgctttttcccagtaaactcatatcctgatgagaaattttagaatcatcccgagatattgagggtgaataaagttaatccacgattttttccagcaggcacaaagaatcttttgtcaaattcatttcccataaatcaaaatcaaatttgcctgggtgtttctctttgcccaacgtggatatatcggtagatggaatagcccatcacagaaaaaagaaacacggtaatagatatgggcaaaacataccagaagatgattttagccttgaactctgatgattgatctttcaaagtcctggcacactgcttctcagaaggctgagcacggcgagggggccctgggacgaaggactccacgtgtacgcagtaaagagtgttcggctccagcccaggtgagcaccagcgtgtggttggtcacacactgggaccacgttctgtttgatttagtattcaacacagacacgttatacttcagattggagtatatttgttgcatggaaacaggaaggtcttctggatttctcttccacttctctggagctgtcaggacaacagaaatggacttctcatctgtagtcagtgccacctctggtgggccaatttgtgtttctaaaaaaggatagaaccgtccactttcagcccatttggaacactttgttccccaaatggccttaactttggcataatactggtgttcgtagtcagaagtttcagcagaaagatcacagtaggttctattgatatttctgcattctgatttattcagccatttcttttgcccatatatgaaatactgcacagtgtaagtaactttaactccttgaagaccctctggtggagtccattgtaggacattcttcatgttgatggataagaaggtgatgtttgcaggtttaggcaaaccaccagagacacagggaactgcccgtccccaaggcgaagacaggagcaacagcagcagcggcggcagcggcagcggccgcagggccgggcggccgggagcccgcat

SEQ ID NO: 603 - DNA, 957 bp, Homo sapiens
cgtacagtgcggtggaattcgtggaacaagcctcggggatctcagactggtggaatcctgccctgcggaaacgcatgctgagtgacagtgggctggggatgatagctccctattatgaggactcagatctgaaagatctcagccactcccgcgtgctacagtcaccagtctcttcagaggatcatgcaattttgcaggcagtaatagctggtgatcttatgaagctaatagaaagctataaaaatggaggcagtctgctaattcagggaccagaccactgttcactccttcactacgcagctgaaaccggcaacggggagattgtgaaatatatccttgaccacggaccttccgagttattggatatggcagacagtgaaacgggtgagactgcactgcacaaggctgcctgccagcggaaccgggctgtgtgccagcttctggtggatgcaggagcatctctgaggaaagacggactccaagggtaagacacctcaagaaagagcacagcaggcctggggacccagacttggctgcgttaccatagaaagccgtcagaactataaggtcattggccatgaggacctggaaactgctgtttgaccctggtattcgggcaaaagaggacatgagcaagcgtatcacatctgccctccctgcaattgggcagctcccctggaagaagctgatggaattcatatatctgtctctctcctgcaagattctacctgagaccatgccactagcttttaagggctaccaagatgtacaacagaacatgatagcccattgagaaggaggcaggatacctggagatttgtggaatacagtacgagttccacaaaatttgatccttattgcttccagcaagtagcatgaacttctgtgttcacctgtataatttattttaaagattcaaaggatgttcgtataaatggcactgctccatcctccaaa

SEQ ID NO: 604 - DNA, 2685 bp, Homo sapiens
gacaagataataaagtacaaaatggttcgttacatcagaaggatacagttcatgacaatgactttgagccctaccttactggacaggcaaatcagagtaacagttacccctcaatgagcgacccctacctgtccagctattacccgccgtccattggatttccttactccctcaatgaggctccgtggtctactgcaggggaccctccgattccatacctcaccacctacggacagctcagtaacggagaccatcattttatgcacgatgctgtttttgggcagcctgggggcctggggaacaacatctatcagcacaggttcaattttttccctgaaaaccctgcgttctcagcatgggggacaagtgggtctcaaggtcagcagacccagagctccgcgtatgggagcagctacacctaccccccgagctccctgggtggcacggtggttgatgggcagccaggctttcacagcgacaccctcagcaaggcccccgggatgaacagcctggagcagggcatggttggcctgaagattggggacgttagctcctccgccgtcaagacggtgggctctgtcgtcagcagcgtggcactgactggtgtcctttctggcaacggtgggacaaatgtgaacatgccagtttcaaagccgacctcgtgggctgccattgccagcaagcctgcaaaaccacagcctaaaatgaaaacaaagagtgggcctgtcatggggggtgggctgccccctccacccataaagcataacatggacattggcacctgggataacaaggggcctgtgccgaaggccccagtcccccagcaggcaccctctccacaggctgccccacagccccagcaggtggctcagcctctcccagcacagcccccagctttggctcaaccgcagtatcagagccctcagcagccaccccagacccgctgggttgccccacgcaacagaaacgcggcgtttgggcagaccggaggggctggcagcgatagcaactctcctggaaacgtccagcctaattctgcccccaagcgtcgaatcccaccccgtccttgaaaaactgaaggctgctcacagctacaacccgaaagagtttgagtggaatctgaaaagcgggcgtgtgttcatcatcaagagctactctgaggacgacatccaccgctccattaagtactccatctggtgtagcacagagcacggcaacaagcgcctggacagcgccttccgctgcatgagcagcaaggggcccgtctacctgctcttcagcgtcaatgggagtgggcatttttgtggggtggccgagatgaagtcccccgtggactacggcaccagtgccggggtctggtctcaggacaagtggaaggggaagtttgatgtccagtggatttttgttaaggatgtacccaataaccagctccggcacatcaggctggagaataacgacaacaaaccggtcacaaactcccgggacacccaggaggtgcccttagaaaaagccaagcaagtgctgaaaattatcagttcctacaagcacacaacctccatcttcgacgactttgctcactacgagaagcgccaggaggaggaggaggtggtgcgcaaggaacggcagagtcgaaacaaacaatgagggcgaaccagtttcttacatgttctaacgtttgactttgaaaacagtttaaaacacgtgtgcttggtcagctccagtgtgtcgtcccgtgcgggggttgagtgttgcatctttgcctttcttgtcgttgatttttgcccagatggatctgcatttatttgtactttttctatgtattataatcctgtagaagtcactaataaaggagtattttttttgtcagcttatcaatcagactgatctaatgtgaaatgtaagtatccttaaaaacaaagcatctattttggcagaaattgtgttcttaaattcagtcatttgatattctgtgagacttcatatttctcatccctttattgctttttagcaaacataagaaaccatgagtcattttgtcatttagagtattctgataaaatctcttgaaaatactgaaatcaaaaggttaatgattttttgttcattctgatttgtcattttattatctgttatcggtctaaagtgctaatttacccatttgatttttctgctagacagataacttttaatttttcaaatttggcagacacttttttttttttttgaaaatttttcccttccagatctgtttgcccactgaacagccaccccgtccctcactgtcctggtgtccgattgggctggatggtgttggggcatgatgtgtggaggaactggaaggtgctttaggtctggttcagggtcgggcattctttgttgtttgcacatctttttaaattttacaccttttcttaagaatttctaaatgccgtcttaagtttttataccaataatgctgagctttaagtgtaaggatctggtagtacagacagtgtgattggatgatgctgctgggtttgtaaatttcatcgtgtgtgtctaattttttttcccgttgaaatggggtaaaaacaaaacaaaactttttttaggaaggatggaatttgctgtcatgttttgtgggatgaggggaccctttgagctcactaccaccgggagttttgagttgaagcatgaaaatggtgc

SEQ ID NO: 605 - DNA, 2423 bp, Homo sapiens
gattctgcttcaggaaaaaaggaattgtctacttatgcagctggaagaagccacccgcttaacatcctacctccagtcccagttaaaaagcctgtgtgccagcaccctgacggtgtcctcggggagcagccgcgggtccctagcctccagccgtgggtctctggcctccagccggggctccctgagctcggtcagcttcacggacatctacggcctcccgcagtacgagaagcccgacgctgagggcagccagcttctacgcttcgacctcattcccttcgactctctggggcgagatgctcccttttcagagcccccaggcccctcgggcttccacaagcagaggcggtccctggacacgccccagtccctggcatcgctgtcctcccgctcctcgctgtcctcgctgtcgcccccaagctcgcccctggacacgcccttcctccctgcctcacgggactcgccgctggcgcagctggcggacagctgtgaggggccaggcctgggcgccctagacagactgcgggcacacgcctcggctatgggggacgaagacttaccaggcatggcggcccttcagccacacggggtccccggggatggggaagggccgcacgagcgaggacccccaccagccagcgctcccgtgggtggaacagtgactcttcgagaagacagtgccaagaggttggagaggagggcacgccgcatctccgcatgtctgtcggattattcgctagccagcgacagtggggtgtttgaacctctaaccaagaggaacgaagatgccgaggagcctgcctacggagacacggccagtaacggagatccccagatccacgtgggactcctgcgcgacagtggcagcgagtgtctcctcgtgcacgtgctgcagctgaagaacccggcggggctggcggtgaaggaagactgcaaagtccacatccgagtctatttgcccccactggactcgggcacgcccaacacttactgctccaaggctctggagttccaagtgccgctggtgtttaacgaagtgttcagaatccccgtgcattccagcgcgttgacactgaagtcacttcagttatacgtgtgttcagtgactccgcagctgcaggaagaactgctgggcattgctcagattaacctggctgactatgacagtttgagtgagatgcagctgcgctggcattccgtgcaggtgttcaccagctctgaaccatcaaggacgcgggaggctgggtgtgcaggagagagctccgcccgggaccctgcacacaccatctccatctccggcaagacggatgcggtgacggtgctcctggccagaaccacggcacagctgcaggcggtggagagggaactggccgaggagcgggccaagctggagtacacggaggaggaggtcctggagatggagcgcaaggaggagcaggccgaggccatatccgagcggagttggcaagcggactcggtggatagcggctgtagcaactgcacccagaccagccctccgtacccagagccctgttgcatgggtatcgactccatcctgggccacccatttgctgctcaggcagggccttacagccccgagaaatttcagccctcgcctcttaaggttgataaggaaaccaacacggaagatctctttctggaagaagcagccagcctcgtgaaggagcggcccagccgccgggcccgagggtcgccttttgttcggagtggcacgattgtccgttcccagacattctcgcctggagcacgaagccagtatgtttgcagactttatcgtagtgacagcgacagttcaacgctgccccggaagtccccctttgtccgaaatactttggaaagacgaacccttcgctataagcagtcatgcaggtcttccctggctgagctcatggcccgcacctccctggacttggagctggatctccaggcgtcgagaacacggcagaggcagctgaatgaggagctctgcgccctccgtgagctgcggcagcggttggaggacgcccagctccgtggccagactgacctcccaccctgggtgcttcgggacgagcggctccgtggcctgctgcgggaggccgagcggcagacaagacagaccaaacttgactaccgtcatgagcaggcggctgagaagatgctgaagaaggcctccaaggagatctaccagctgcgtgggcagagccacaaagagcccatccaagtgcagacctttagggagaagatagcattcttcacaaggccaaggatcaacatacctcctctcccagccgacgacgtctgatggagtgcattgtgcacatgaagtatttatccacctgttttattttcatgaagttcttagactagctgaatttgtctttaaaatatttgtgcaaagctattaatatacacattttgta

SEQ ID NO: 606 - DNA, 3429 bp, Homo sapiens
tttttttttgacaagtaatattttttattattgaaaaatacacaaaggtgaaaggttgctgagcagctgattttccatagtacaacagagtattataagaaagagggaaatgtatctgttatatatggcagtttacatttctaaggcatttaggcttaagagcactaggtcttgcacagctaggtgcattgtcttgagtttaaatatactgaggcacaccaggcaggcaaaggattcaaaactatacattaaaaccttgttcatgcattggtgtcttaggattttattccctaccctccttattcatttttttcccacaatggggttttggagttgttcatagaacactggaaataatccgactcttcaagagtttgtttacaatgacaacacccaatgggacacaccaaacagaactacttcacagatacattctggtctcttaccaaaatgaagctcccagtaagaaaaacactggatttgcaaaggcacagtggagacaggtttaatgcattaaatataacatgaatcattcacaataacaagtttcgtgtttcagggaacttttgttaatacaacacagttggtcacacaaaatacaaatgcttctgttgatttgtcttggcaactcagatacatcaacagtgctaacagtttaacagctttgttctcatctgacagaaaataatggcagttctgcaaggcaaatgttaaacctgaccgtatgtatttattagttccacagtgttttgacagattataggagatggaactcagaggatgctgacacgctcaccgagggctttcatttctgtttcttcagtctcaggagtgtcactgtggctagcacttggattgatcaggtgtgtggggtactgcagcccctgctcgcctgcatacttctcccacctcaggtcatcactttcatgggtgatgtagcgctccccgattttgcattccagctctcgcaaatctaaccaggtctgatagtcctgtagccaagggtggctcaaggtcttatccacactgtagcgctttctcatttttacttgcagcaaattgttgataagatcaatggcttcatgagatatttccttccagggatttggtggatacatgaaagctgcattctgaatttggtcgtgtatgtcttcatcttcattaaatgggaatgtgccgcttaggcttacatagatgatgaccccaacagaccacatgtctagagagcgattgtagcccttgttccttaggacctcaggagccaggtaagcgggggtacccaccactgacctccggaaagacttctctccaatgatccgggcaaaaccaaaatcacaaagtttcacctgaggaaaaggatcagctgaggctagcaacacattttctggtttgaggtcacagtgaacgatatttttaaaatgaaggtgccgcaaagccacgagtatctgagtaattaaaaacttcgttatgtgctctggcaacctgcccttttcacttgacaagatcatttccagcatgtctccatggagtttttccataacaacaaacactctttcaggcgtctcaaacatacactccaaatttacaacaccagggtgatgaaggttctgtagaattgcaacctcattacgaagctggctttcttgttttgttggaaatcgtaatttgtcaatgattttaatagctacatctcttcctgttttacgatgttttcctccataaacaattccaaactgtccagaacccagtacttcatcaggaaaaatctgatatactgtgctgatgtccacattttcttgaatctggcaatttgatactgaaatactcacagagatatctctgtgcaagttggttcctgtacccacggaggagcccttgggaatgacgggcataagggcatgctggatggctatctcccacatcctggccacatctgcaccaacgccactggtgagaacactgttatttggtgatgggctggaaggattgaccacattttctcccacataatacactacatttgccgtagtgatttcgaaacaatgaggattggccccattaggaattaaagctgaagtttttactggttccagagacaaaatttcagataaaggaatttccttgtagtacctgcttcctgtgtcattctgaaagagggtaatacatttgctatccaatctccaatagtgccgtttccgcagcgtgtccttgctggtgtagtggaccatccatccttctttcatgactgtgctgcttttcctcttcgtgtgtttgacagactgcactaccctcatgagtgggatattgttgcttgttgatggactgatggttctgttggcgtcctcgtggtctgggtctggatcttgcatctcgccactgtcgttctggcactctgccattgccatctctgcatcttggaccattgcttcttccatatcatccatgagcccactgttcctttcactatcattgtcatcactcccttcttccatgaccacatcagactctgccccagggctaagcaaatctccattaatggtcacttcgccaaggcagttgtttggtactttcggtgcacaacgtttatggcagttgaatctgcaatctttgcactgcaagccctgcctgaaaagccccttcagaagcttcttgcagtactggcacactgtgggccgggtgtaggagtggatgacaaatgtgtgcggcactttaactttagacatcaaaatcttgtcaaggtgaattggtcgtccaatgtatgattgagaatttgacctcttctctcgaccaataaacgactctgatggtgatttttgcagaaggggctcatcaggggcacttgtagagagttcagcagatgatgtgcggatggtgctgaccccagtgagggaaacgtttgagagccttctccgcctcacaccgctgcaattgttgggtattttaaatgcacatctcttatggtaattcagaccacacccttcacatttaagcccttgacggtacaagcccccacagcatttctccacagtgatcacagaaagctggagctctgtatgaatgaacaaagagagcgtggggacgaatctgaaagtcttcaaaggtggcggaagctgacaagaccacttcaataagatcgccttcctggatatcactggccgctttcaccagctgaaggatgttttcagaggtagggtcatggcgaaaaagcaggatcttatcatacattccgtagaaaccacattcagggaacttctggtcgacaatggagcaagccatctcgcggacgtgcgccaggctgtagtccccggacgagtcctgcagcagcagcaccggctcacggctcaggccgatctgcagatggaacgagatgcccccgaccggggccgcgacaggagccaagaacggcgcgggcccgggcccggaccctgg

SEQ ID NO: 607 - DNA, 5530 bp, Homo sapiens
agccggccgtggtggctccgtgcgtccgagcgtccgtccgcgccgtcggccatggccaagcgctccaggggccccgggcgccgctgcctgttggcgctcgtgctgttctgcgcctgggggacgctggccgtggtggcccagaagccgggcgcagggtgtccgagccgctgcctgtgcttccgcaccaccgtgcgctgcatgcatctgctgctggaggccgtgcccgccgtggcgccgcagacctccatcctagatcttcgctttaacagaatcagagagatccaacctggggcattcaggcggctgaggaacttgaacacattgcttctcaataataatcagatcaagaggatacctagtggagcatttgaagacttggaaaatttaaaatatctctatctgtacaagaatgagatccagtcaattgacaggcaagcatttaagggacttgcctctctagagcaactatacctgcactttaatcagatagaaactttggacccagattcgttccagcatctcccgaagctcgagaggctatttttgcataacaaccggattacacatttagttccagggacatttaatcacttggaatctatgaagagattgcgactggactcaaacacacttcactgcgactgtgaaatcctgtggttggcggatttgctgaaaacctacgcggagtcggggaacgcgcaggcagcggccatctgtgaatatcccagacgcatccagggacgctcagtggcaaccatcaccccggaagagctgaactgtgaaaggccccggatcacctccgagccccaggacgcagatgtgacctcggggaacaccgtgtacttcacctgcagagccgaaggcaaccccaagcctgagatcatctggctgcgaaacaataatgagctgagcatgaagacagattcccgcctaaacttgctggacgatgggaccctgatgatccagaacacacaggagacagaccagggtatctaccagtgcatggcaaagaacgtggccggagaggtgaagacgcaagaggtgaccctcaggtacttcgggtctccagctcgacccacttttgtaatccagccacagaatacagaggtgctggttggggagagcgtcacgctggagtgcagcgccacaggccaccccccgccgcggatctcctggacgagaggtgaccgcacacccttgccagttgacccgcgggtgaacatcacgccttctggcgggctttacatacagaacgtcgtacagggggacagcggagagtatgcgtgctctgcgaccaacaacattgacagcgtccatgccaccgctttcatcatcgtccaggctcttcctcagttcactgtgacgcctcaggacagagtcgttattgagggccagaccgtggatttccagtgtgaagccaagggcaacccgccgcccgtcatcgcctggaccaagggagggagccagctctccgtggaccggcggcacctggtcctgtcatcgggaacacttagaatctctggtgttgccctccacgaccagggccagtacgaatgccaggctgtcaacatcatcggctcccagaaggtcgtggcccacctgactgtgcagcccagagtcaccccagtgtttgccagcattcccagcgacacaacagtggaggtgggcgccaatgtgcagctcccgtgcagctcccagggcgagcccgagccagccatcacctggaacaaggatggggttcaggtgacagaaagtggaaaatttcacatcagccctgaaggattcttgaccatcaatgacgttggccctgcagacgcaggtcgctatgagtgtgtggcccggaacaccattgggtcggcctcggtgagcatggtgctcagtgtgaacgttcctgacgtcagtcgaaatggagatccgtttgtagctacctccatcgtggaagcgattgcgactgttgacagagctataaactcaacccgaacacatttgtttgacagccgtcctcgttctccaaatgatttgctggccttgttccggtatccgagggatccttacacagttgaacaggcacgggcgggagaaatctttgaacggacattgcagctcattcaggagcatgtacagcatggcttgatggtcgacctcaacggaacaagttaccactacaacgacctggtgtctccacagtacctgaacctcatcgcaaacctgtcgggctgtaccgcccaccggcgcgtgaacaactgctcggacatgtgcttccaccagaagtaccggacgcacgacggcacctgtaacaacctgcagcaccccatgtggggcgcctcgctgaccgccttcgagcgcctgctgaaatccgtgtacgagaatggcttcaacacccctcggggcatcaacccccaccgactgtacaacgggcacgcccttcccatgccgcgcctggtgtccaccaccctgatcgggacggagaccgtcacacccgacgagcagttcacccacatgctgatgcagtggggccagttcctggaccacgacctcgactccacggtggtggccctgagccaggcacgcttctccgacggacagcactgcagcaacgtgtgcagcaacgaccccccctgcttctctgtcatgatcccccccaatgactcccgggccaggagcggggcccgctgcatgttcttcgtgcgctccagccctgtgtgcggcagcggcatgacttcgctgctcatgaactccgtgtacccgcgggagcagatcaaccagctcacctcctacatcgacgcatccaacgtgtacgggagcacggagcatgaggcccgcagcatccgcgacctggccagccaccgcggcctgctgcggcagggcatcgtgcagcggtccgggaagccgctgctccccttcgccaccgggccgcccacggagtgcatgcgggacgagaacgagagccccatcccctgcttcctggccggggaccaccgcgccaacgagcagctgggcctgaccagcatgcacacgctgtggttccgcgagcacaaccgcattgccacggagctgctcaagctgaacccgcactgggacggcgacaccatctactatgagaccaggaagatcgtgggtgcggagatccagcacatcacctaccagcactggctcccgaagatcctgggggaggtgggcatgaggacgctgggagagtaccacggctacgaccccggcatcaatgctggcatcttcaacgccttcgccaccggcggccttcaggtttggccacacgcttgtcaacccactgcttttacccggcttggacgagaacttccagcccattgcacaagatcacctcccccttcacaaagctttcttctctcccttccggattgtgaatgagggcggcatcgatccgcttctcagggggctgttcggggtggcggggaaaatgcgtgtgccctcgcagctgctgaacacggagctcacggagcggctgttctccatggcacacacggtggctctggacctggcggccatcaacatccagcggggccgggaccacgggatcccaccctaccacgactacagggtctactgcaatctatcggcggcacacacgttcgaggacctgaaaaatgagattaaaaaccctgagatccgggagaaactgaaaaggttgtatggctcgacactcaacatcgacctgtttccggcgctcgtggtggaggacctggtgcctggcagccggctgggccccaccctgatgtgtcttctcagcacacagttcaagcgcctgcgagatggggacaggttgtggtatgagaaccctggggtgttctccccggcccagctgactcagatcaagcagacgtcgctggccaggatcctatgcgacaacgcggacaacatcacccgggtgcagagcgacgtgttcagggtggcggagttccctcacggctacggcagctgtgacgagatccccagggtggacctccgggtgtggcaggactgctgtgaagactgtaggaccagggggcagttcaatgccttttcctatcatttccgaggcagacggtctcttgagttcagctaccaggaggacaagccgaccaagaaaacaagaccacggaaaatacccagtgttgggagacagggggaacatctcagcaacagcacctcagcccttcagcacacgctcagatgcatctggggacaaatgactttcagagagtttgttcttgggaaatgcagaagaccatcacagacctcagaacacagataaagaaacttgaatcacggcgtcagtaccacagagtgcgtggatgccgggggcgaatctcacgccaacaacaccaagtggaaaaaagatgcatgcaccatttgtgaatgcaaagacgggcaggtcacctgcttcgtggaagcttgcccccctgccacctgtgctgtccccgtgaacatcccaggggcctgctgtccagtctgcttacagaagagggcggaggaaaagccctaggctcctgggaggctcctcagagtttgtctgctgtgccatcgtgagatcgggtggccgatggcagggagctgcggactgcagaccaggaaacacccagaactcgtgacatttcatgacaacgtccagctggtgctgttacagaaggcagtgcaggaggcttccaaccagagcatctgcggagaaggaggcacagcaggtgcctgaagggaagcaggcaggagtcctagcttcacgttagacttctcaggtttttatttaattcttttaaaatgaaaaattggtgctactattaaattgcacagttgaatcatttaggcgcctaaattgattttgcctcccaacaccatttctttttaaataaagcaggatacctctatatgtcagccttgccttgttcagatgccaggagccggcagacctgtcacccgcaggtggggtgagtctcggagctgccagaggggctcaccgaaatcggggttccatcacaagctatgtttaaaaagaaaattggtgtttggcaaacggaacagaacctttgatgagagcgttcacagggacactgtctgggggtgcagtgcaagcccccggcctcttccctgggaacctctgaactcctccttcctctgggctctctgtaacatttcaccacacgtcagcatctaatcccaagacaaacattcccgctgctcgaagcagctgtatagcctgtgactctccgtgtgtcagctccttccacacctgattagaacattcataagccacatttagaaacaggtttgctttcagctgtcacttgcacacatactgcctagttgtgaaccaaatgtgaaaaaacctccttcatcccattgtgtatctgatacctgccgagggccaagggtgtgtgttgacaacgccgctcccagccggccctggttgcgtccacgtcctgaacaagagccgcttccggatggctcttcccaagggaggaggagctcaagtgtcgggaactgtctaacttcaggttgtgtgagtgcgttaaaaaaaaaa

SEQ ID NO: 608 - DNA, 1135 bp, Homo sapiens
ttttttttttttctcgagacagagtctctctctgtcacccaggctggagtgcaatggcatgatctgggctcattgcaaccaccacctcccgagttcgagtgattctcctgcctcagcctcccgagtagctgggattacaggcacacaccatcacacccagctaattttttgtatttttagtagagatggggtttcaccacactggccaggcttgtctcgctcgaacttctgacctcatgatccacctgcctcggcctcccaaagtgctgggattacaggtgtgagccaccgcacctggcaaaagagaatcttacagaacctattcactgggaaggaagccctcattataatgattttcattcttatgtgtgtttcaggacgactgggtttggattcagaagaggattattatacaccacaaaaggtggatgttcccaaggccttgattattgttgcagttcaatgtggctgtgatgggacatttctgttgacccagtcaggcaaagtgctggcctgtggactcaatgaattcaataagctgggtctgaatcagtgcatgtcgggaattatcaaccatgaagcataccatgaagttccctacacaacgtcctttaccttggccaaacagttgtccttttataagatccgtaccattgccccaggcaagactcacacagctgctattgatgagcgaggccggctgctgacctttggctgcaacaagtgtgggcagctgggcgttgggaactacaagaagcgtctgggaatcaacctgttggggggaccccttggtgggaagcaagtgatcagggtctcctgcggtgatgagtttaccattgctgccactgatgataatcacatttttgcctggggcaatggtggtaatggccgcctggcaatgacccccacagagagaccacatggctctgatatctgtacctcatggcctcggcctatttttggatctctgcatcatgtcccggacctgtcttgccgtggatggcataccattctcatcgttgagaaagtattgaattctaagaccatccgttccaatagcagtggcttatccattggaactgtgtttcagagctctagcccgggaggaggcggcgagggcggcccggacgcgtgg

SEQ ID NO: 609 - DNA, 531 bp, Homo sapiens
ttttttttttttgagacggagtctcgctctgtcgcccaggctggagtgcagtggcgggatctcggctcactgcaagctccgcctcccgggttcacgccattctcctgcctcagcctcccaagtagctgggactacaggcgcccgccactacgcccggctaatttttttgtatttttagtagagacggggtttcaccgttttagccgggatggtctcgatctcctgacctcgtgatccgcccgcctcggcctcccaaagtgctgggattacaggcgtgagccaccgcgcccggccgaggatcaatcttagaaatgttatttactcatttgccgtaacttattgccttaattacatatcacttgcaatgtcatccaccctaaagctaagctttcatgtactgtctggatcttagtttatcagaacacattaatatctataaacttatccctttgcacttgatcttttaataatttgatctcttctgaatgaagcacgaaatcgtcgacccggtaattccggagcggtacaacg

SEQ ID NO: 610 - DNA, 697 bp, Homo sapiens
cggcacgaggctaatatgaattatgacatacgttcatgactttattggttattaagtgtacttcattaatctataacttggtggtggtgccctatttctactatatttgagcttttccaccttcttctaattcctttcgtgtttttactcagaccttagttgaaacgtcttcatctggtatctatccataatttcctgtctcttctcagtaagatacgtggatgtaacatcttatttggaaagggaaatgtagattttaaatttaaaaatacagctttctataatagcatgtaatttggagtcccaaatacgtaaaataaaattgcagttcagatagaagttactttaaagaaacactgtcagcttttgcatatctaattttcttatactggactaaaatgacatttccattcaaacaaagtaatgtttaaaacaagcaaatttcaggccaggtgcagtggctcacgcctgtaatcccagcactttgggaggccgaggcgggcggatcacaaggtcaaaagatggagaccatcttggccaacatggtgaaaccccatctctactaaaaatgcaaaaattagctgggcatagtcacaggtgcctgtagtcctagctactcaggaaggctgaggcagaatcgcttgaactcgggaggcagagggtgcagtcagtgagctgagatcacgcccctgcactc

SEQ ID NO: 611 - DNA, 1891 bp, Homo sapiens
tgcaggaattcggcacgaggctgagcggatcctcacacgactgtgatccgattctttccagcggcttctgcaaccaagcgggtcttacccccggtcctccgcgtctccagtcctcgcacctggaaccccaacgtccccgagagtccccgaatccccgctcccaggctacctaagaggatgagcggtgctccgacggccggggcagccctgatgctctgcgccgccaccgccgtgctactgagcgctcagggcggacccgtgcagtccaagtcgccgcgctttgcgtcctgggacgagatgaatgtcctggcgcacggactcctgcagctcggccaggggctgcgcgaacacgcggagcgcacccgcagtcagctgagcgcgctggagcggcgcctgagcgcgtgcgggtccgcctgtcagggaaccgaggggtccaccgacctcccgttagcccctgagagccgggtggaccctgaggtccttcacagcctgcagacacaactcaaggctcagaacagcaggatccagcaactcttccacaaggtggcccagcagcagcggcacctggagaagcagcacctgcgaattcagcatctgcaaagccagtttggcctcctggaccacaagcacctagaccatgaggtggccaagcctgcccgaagaaagaggctgcccgagatggcccagccagttgacccggctcacaatgtcagccgcctgcaccggctgcccagggattgccaggagctgttccaggttggggagaggcagagtggactatttgaaatccagcctcaggggtctccgccatttttggtgaactgcaagatgacctcagatggaggctggacagtaattcagaggcgccacgatggctcagtggacttcaaccggccctgggaagcctacaaggcggggtttggggatccccacggcgagttctggctgggtctggagaaggtgcatagcatcacgggggaccgcaacagccgcctggccgtgcagctgcgggactgggatggcaacgccgagttgctgcagttctccgtgcacctgggtggcgaggacacggcctatagcctgcagctcactgcacccgtggccggccagctgggcgccaccaccgtcccacccagcggcctctccgtacccttctccacttgggaccaggatcacgacctccgcagggacaagaactgcgccaagagcctctctggaggctggtggtttggcacctgcagccattccaacctcaacggccagtacttccgctccatcccacagcagcggcagaagcttaagaagggaatcttctggaagacctggcggggccgctactacccgctgcaggccaccaccatgttgatccagcccatggcagcagaggcagcctcctagcgtcctggctgggcctggtcccaggcccacgaaagacggtgactcttggctctgcccgaggatgtggccgttccctgcctgggcaggggctccaaggaggggccatctggaaacttgtggacagagaagaagaccacgactggagaagccccctttctgagtgcaggggggctgcatgcgttgcctcctgagatcgaggctgcaggatatgctcagactctagaggcgtggaccaaggggcatggagcttcactccttgctggccagggagttggggactcagagggaccacttggggccagccagactggcctcaatggcggactcagtcacattgactgacggggaccagggcttgtgtgggtcgagagcgccctcatggtgctggtgctgttgtgtgtaggtcccctggggacacaagcaggcgccaatggtatctgggcggagctcacagagttcttggaataaaagcaacctcagaacaaaaaaaaaa

SEQ ID NO: 612 - DNA, 161 bp, Homo sapiens
cccacgcgtccggtggtggcgggtgcctgtaatcccagctactggggaggctgaggcaggagaaccacgtgaacccgggaggtggaggttgcagtgagctgagatcgcgccactgcactccagcctgggcgacagagcgagactccgtctcaaaaaaaaaa

SEQ ID NO: 613 - DNA, 698 bp, Homo sapiens
atttgaaatcttaagctctcccaaagaaagttatcagatattcgaaaatgtgaacttagtgtaaaaatatggtgataatttcctttcaggagcaaacaactactttgggaaatacatttgattagaaaatttttcaagctaaagacaacatttcttttggataaattgcatggctaaattttataacttggcaaacctgctttgctgatagcaaataagtaagcttttcctacaaataatgcttttgtattcaacacagtggatttttagtccaaattaggaatgctagtttttagaaaatgttacatggtaagtttatatatatatatgcacagacatacacataaagtgaacattaaactgaatcatagaaatatatttatgggctgggtgtggttttatatttaaattacatgcctgtaatcccagcactttgggatgctgaggcaggcagattgcgaggtcaggaatccgagaccagcccggccaacgtggtgaaacctcggctctactaaaaatacaaaaattatccgggcctggtggcgggcatttggaatcccagctacttgggaggctgaggccgagaattgcttgaaccccaaaagtggggataggtggaagagccccaaatatggccattggttttaactgtgacccaaagaaagggtctcctttgggccaggggttataaaaacttc

SEQ ID NO: 614 - DNA, 917 bp, Homo sapiens
  misc_feature (1)...(917): n = a,t,c or g
ttttagtttcacatcagttttattaggccccagaaagttgctctaatggatagtccatttttctaacaacctgccaggcagacggggacttgagtcttctcagctccctcccatgggccctattcttcctccttccagcctaggaccaggagtcagcctccccccacaaacccacagtccagaactgagccccctcattcccctaggaaccaggatttcaggcctctagaccctcctcctcctcttcagtggcctcactttaacttccagatgaagttgggggacacatttgggctcagcggggtgtagacaggcgccggcattcatgcacccggtaggcgcacatgtagaaaatccctgcgaagaacgtcatgagcactgccacccagcgaaggccatgatgcccatgatgatgccggagatggcgcatagggcagacaggatcatgaaggcccgggtggcattccagtatgcgatgctgtctgtctgcaggtagcacttgttgcccaggcagtaccgccacangccctggtgggcgaaggaccctgacagccggtactgcatccagtggtctgttgccatggccaccaccaggaggatggtccccacccaggcacagaacaggccaccacccatgaagctgtacatggtgatctgagtggcagagcctgcccgagccctccttctgccacggcccctctgtgcagactgagctgagcctggtcactggcctctttgcccccttaggttccccaaatcccttaagcctccctacacaatggtcccactacccagcagcttccagcaggcagaaatgcagcggtggcagaggcctcaaatggaattcgctgaagcaggcatccagggggctccccccacccactcactgacctctgtgaccctccccggaacccaat

SEQ ID NO: 615 - DNA, 414 bp, Homo sapiens
caccattttacccgagaagattcaggcttgggcacagaagcagtgtccgcaaagtggagaggaagcggtggccctggtagtgcatttggagaaagagactggaagactaagacagcaggtcagcagtcccgtgcaccgggagaagcactccccacttggagcagcgtgggaggtggcagacttccagccagagcaggtggagacccaacccagggcggtgtctcgggaggaacctggaagcctccactcaggacaccaggaacagctgaaccgaaagcgagaacgtcggcccttacccaagaatgctcggccttctccctgggttcctgcccttgctgatgaatggaataccctacatcaggaagtgacaaccacacggcttcctgctgggtcccaggaaccagtgaaagatgt

SEQ ID NO: 616 - DNA, 771 bp, Homo sapiens
attaatttgctttgcagaaggaaccctgcggtcagttctcttaattctgatttcttgtgaataaaaccttgtgttttaccaaaaaatctatcaataaaggaatacctgcatgttccctctccgtttctgtgtgcagcattgcttgctggctgagatacaagcctgccgtctggtcagctttgtttctggagttggggcccagtgctgcttctgactttttcctctccattttaggttgcagaattgtcggagtgcataggctcagcactgatacagaagggcttcaagactgccccagatcagttcattggcatctttgctcaaaatagacctgaggtatgaaccagtaggtacttgctatgcatgattttgagaattctcagatataagagcctaacttctgctagagaccagattttgtagtctgatttctactaaaagtatagctttacgttacaccttagaaagttacacatatgaaaacctcaaccagggccgctgggcacagtcgtcacgcctgtaatcccagcactttgtgaggccaaggcgggtgggtcaccagaggtcgggagttccagaccagcctgaccaacatggagaaaccccatctctactaaaaatacaaaattagccaggctggtggcacacatctgtactcccagctactcgggaggctgaggcaggagaatcgcttgaatccgggaggcagaggttgcggtgagccaagattgtgccattgcactccagcttgggcaacaagagcgaaatccg

SEQ ID NO: 617 - DNA, 488 bp, Homo sapiens
ccggggaattcggcacgagctgcccgctcgcctaccgttcaggctgctgagccttttccttcgtggatccgctcccacggcagcgcgccatggcctccgggagccgctcctggagaggaggtgcgctgccgcctcctccttccagcactcatcgagtctgggacgcgagcttccttatgaccccgtggacacggagggctttggagaaggtggtgacatgcaggagcgttttctgttcccggagtacatcctggatccggagccgcaacccacccgcgaaaagcagctgcaggagctccagcaacagcaggaggaggaggagcgacagaggcagcagcggcgggaggagcggcgacagcaaaacctacgggccaggtcccgggagcacccggtcgtggggcacccggacccggcattgccgcccagcggcgtgaactgctcgggctgcggagcagagctgcactgccaggacgccagagtgcccggct

SEQ ID NO: 618 - DNA, 2944 bp, Homo sapiens
ttttttttttttgacctgtacaataggcactttattagtggttggaatgcagttacacgcaggggtgtgcagacgcaatgggggcagggctggtgcaggcacaggaaacgggagacccccccctctttcccctggggccaggggttctccctctccaggatcctgggacagtgctgatgagcagagacatgaagtctgagggggacttggaatatggcaaaggggcaactgggaagccagttcccctgagtttgacaagtttggcaaaaggatcaagtgaggtgtgtgggcagaggggcccggtttgcccaggacatctgccctccacctctccccctgaaatcatcccttgggtgggtttagtttctttcctctcttacaaagagagctgtgtcaataactggcagaggaagtcgggaaattcagcctaactccctccagcccagcaggtttccattaaacagctattagccatctcctctccagcctgctctccactgccaacccccgcaaaactctccctccctttccctccttcccagccaggagacacccccacctgggcacacacactcccacccgtcactcccagctaggagggagcaaaaggaaggcactccttggcggccccatctcagctgttgagacagacggaaagaaagctaatagaccctttaatgcatgtccaggttaaaaaataataataataaagaaatgcttctggtggcccttgagccaactgttcaggtgtggagaaggggttcagtcctggccggagcaggcaggaataaacgtgggtgttcactgtggccagcagctccctcagacacaaacaccgtccttcccgtggtctggcccgttgtcgtgtaagcgggggacaggaagcatgagggagcttgtggaggtcgggccacgtgccatcccagacatcaagaggccccaatgggtttttacttgtttctcgcagtctggaggggcagccatgaaaactccaagcgccccttggcataagaaggagatgccccagactctccacgtccagaaactggtgggatctggctcatggggaggggcagagcggcagtgataggacttcaggtgagcccaaggggctgggggaacagacccagctactgagcaccctgcggcatgagactccttgagaggtggggagcacggggccttcaggactccgctgccttcttgttggtcttgttcaagagtttcttgagggtggaagacatgaagtaaggcctctcggccgagccgtcattcctctccaggtcctccaagaagcagaggaacagcgtgtccacacacatgccatagacgctgaagaaaccgtgtgcaatcaagtaggagccaacgatcaccgtcagtataggaacccagtaataattgaggggtggtgctgtatcctgcacgatcctgatacggtgggtgaagaagaagaaagccaggatccccacactaccaacgatcagaagtttgcccaacaggaagaggaagtcagtaactttatccaggacagccactctgatgatgtttctcatgagcaggaagaaggcattcctggccgaggtgcagaaattggtgccgtagatggcaatcatgatgtaggcattcctattaaggaatttgatgaacttctccaggcaccagaagcagcatttgagacaggtcatgaggcacttggcaaacttgttctctgcagctttcagccgctgatccaggtactcgagtatcacacggatgatctgcacaatggccaggatgagcgcgccaaaggccagggagcctgtgtggtacctgagcgcccggccaaaggcagagaagagcgggaaggccggcaggtcgtccggcttgcgcagggcccagtagtaggaggcaaaggccccggccagcgtgacctggcccagcgccagcacgaagttggccaaccagaagaacatgaaggcattgaagatctgcaggcccagcagggcccggtggtagcccgactcaccaccgtagaaggcgaactggcaacgggcattggggcattggcgggactcattggaggaggggaaggtctctgggttgcaggttttcgcagtaaatgggcaggggctgtcatcaaagatcttatagaccgcttcgttggaagtggacaggaagacagcagtgctggcccagtaggcgatgcagaggcacagcaagaagaaggtgaccagtgggtagagcaaggagcacatgacgtatcccacagccctgctggcttctttgatgagtgcaatcgcgatgagaattctcttccggagaaagatgagcagcaagatgataatgacttcaaggatactcagaatgatcataaaggccaaccaggtctgccgtaagtgcaggtacacccggaaatccgtctgaaagccgaggtccaccaaagagacatcagagccggcctccccacgcagtcgggagtactccatgtagcagtgaaatattcggtagcccagctccgagaatctccatgatgatcatcacccagcccataataccagccagtaagtgaagcaggatgatggacaggaggctcatcgccatggcaatgaccaggcctatgataatccagtaccaagagacggtgtaatcttcaaatatgcgcatggcgagttgccgcgcctctaggactccattggctttcttggcgccctccaccaggtctgtgatgtttttccgggagccatgcccatcctcataggtcgtctcattgcccaccatcaggacacccttgtaggcgtggatagcggggaagcatctccgggccaagggtttcttgagggtggaacacatgaagtaaggcctctcggccgagccgtcattcctctccaggtcctccaagaagcagaggaacagcgtgtccacacacatgccatagacgcctcgtgcggaattccgcgagcgcgct

SEQ ID NO: 619 - DNA, 1776 bp, Homo sapiens
tcgcacgagtgtggagccttacatactgggagaatttgaaaattgtcaaataacacgaaagtggtgaagacagaatacaaagccacagaatatggcttggcctatggccatttttcttatgagttttctaatcatagagatgttgtggtcgatttacaaggttgggtaaccggtaatggaaaaggactcatctacctcacagatccccagattcactccgttgatcagaaagttttcactaccaattttggaaagagaggaattttttacttctttaataaccagcatgtggaatgtaatgaaatctgccatcgtctttctttgactagaccttcaatggagaaaccatgtaagtcataggctgtatggattggtaatgtgacagaccttagtgatgctctcaaatatctggtgatgctcgcaaatatctggttctctccttccaggcacatagaatacggcacagtctggtcctttggggcttgggcagggccgtgacacaggttctggccaatgatttgcaagaggaattgatcagtatcactttaagtcctgcatttaattggcagcacaagatcctgcagagcctctttccctctgccacagttatcaagaatgggtcaggagaccgctgcttctgggcataagtcctgcaaggaaagcaacatggaaaacagccccaactcacccatgagggatgaaaagcactgttgagaaaggcatgtgttgtttaagccattgagattttagagctttttgtcactatctgtcaagactgatactactggggcttttcctattgatttgggagttctttacatattaaaaaaatgtgagcctttgtgatacgaattcaatttgttttcctgtcttttgacatttgactttgcataaaagtttatctgtgcataattttatatgtagttgaattcatcaatcttttattttgtatggctttttggttatgtataatacttagatcctccttatactctgagtttctttctttttaattctcctgtatttccttctagtataattaaatctgtaaaaagtaagatggaagagtggtacagttttctttatccagtctgtccttgatgggcatttaggtagactggataaagaaaatgtggtacatatacaccatggaacgctgtgtgtattaatccactctcacactgctatgaagagatacctgagactgggtaatttagaaagaaaagaggtttaattaactcacagttccacatggctggggagacctcaggaaacttacaatcatggcagaaggcgaaggagaagcaagcacttttttcacaaggcagcagatgagagagagagtgtgtgtaaaggaggaattgtcaaacacttataaaaccatcagatctcatgagaactaactcactatcccaagaacagcatggggacaactgcccccgtgatccaatcacctcccgtcaggtccctcccttgacacatggggattataattcaagatgagatttgggtggggacatatagccaaaccatatcaaatagcaattaaaaaaaatcacataagaaaagacactcttaataaaatacaaatagaaaatgaaaaaaaaccaactcataaacttggtttaaataatccatttgtattgggtcttagtaagaatactactactagtaactattatcaagcaactactgtgtcatgtacttttcacacattcttttaattaaaaactctccactaacccttacagttcagtattatccttgttttacaga

SEQ ID NO: 620 - DNA, 2865 bp, Homo sapiens
atggagcggctttggggtctattccagagagcgcaacaactgtccccaagatcctctcagaccgtctaccagcgtgtggaaggcccccggaaagggcacctggaggaggaagaggaagacggggaggagggggcggagacattggcccacttctgccccatggagctgaggggccctgagcccctgggctctagacccaggcagccaaacctcattccctgggcggcagcaggacggagggctgccccctacctggtcctgacggccctgctgatcttcactggggccttcctactgggctacgtcgccttccgagggtcctgccaggcgtgcggagactctgtgttggtggtcagtgaggatgtcaactatgagcctgacctggatttccaccagggcagactctactggagcgacctccaggccatgttcctgcagttcctgggggaggggcgcctggaggacaccatcaggcaaaccagccttcgggaacgggtggcaggctcggccgggatggccgctctgactcaggacattcgcgcggcgctctcccgccagaagctggaccacgtgtggaccgacacgcactacgtggggctgcaattcccggatccggctcaccccaacaccctgcactgggtcgatgaggccgggaaggtcggagagcagctgccgctggaggaccctgacgtctactgcccctacagcgccatcggcaacgtcacgggagagctggtgtacgcccactacgggcggcccgaagacctgcaggacctgcgggccaggggcgtggatccagtgggccgcctgctgctggtgcgcgtgggggtgatcagcttcgcccagaaggtgaccaatgctcaggacttcggggctcaaggagtgctcatatacccagagccagcggacttctcccaggacccacccaagccaagcctgtccagccagcaggcagtgtatggacatgtgcacctgggaactggagacccctacacacctggcttcccttccttcaatcaaacccagttccctccagttgcatcatcaggccttcccagcatcccagcccagcccatcagtgcagacattgcctcccgcctgctgaggaagctcaaaggccctgtggccccccaagaatggcaggggagcctcctaggctccccttatcacctgggccccgggccacgactgcggctagtggtcaacaatcacaggacctccacccccatcaacaacatcttcggctgcatcgaaggccgctcagagccagatcactacgttgtcatcggggcccagagggatgcatggggcccaggagcagctaaatccgctgtggggacggctatactcctggagctggtgcggaccttttcctccatggtgagcaacggcttccggccccgcagaagtctcctcttcatcagctgggacggtggtgactttggaagcgtgggctccacggagtggctagaaggctacctcagcgtgctgcacctcaaagccgtagtgtacgtgagcctggacaacgcagtgctgggggatgacaagtttcatgccaagaccagcccccttctgacaagtctcattgagagtgtcctgaagcaggtggattctcccaaccacagtgggcagactctctatgaacaggtggtgttcaccaattcccagctgggattgctgaggtgatccggcccctacccatgggacagcagtgcctatttccttcacggcctttgtgggagtccctgccgtcgagttctcctttatggagggacgaccagggcttacccattcctgcacacaaaggaggacacttatgagaacctgcataaggtgctgcaaggccgcctgcccgccgtggcccaggccgtggcccagctcgcagggcagctcctcatccggctcagccacgatcgcctgctgcccctcgacttcggccgctacggggacgtcgtcctcaggcacatcgggaacctcaacgagttctctggggacctcaaggcccgcgggctgaccctgcagtgggtgtactcggcgcggggggactacatccgggcggcggaaaagctgcggcaggagatctacagctcggaggagagagacgagcgactgacacgcatgtacaacgtgcgcataatgcgggtggagttctacttcctttcccagtacgtgtcgccagccgactccccgttccgccacatcttcatgggccgtggagaccacacgctgggcgccctgctggaccacctgcggctgctgcgctccaacagctccgggacccccggggccacctcctccactggcttccagggagagccgtttccggcgtcagctaggccctgcttcacctgggacgcttgcaagggggcagccaatgcgcttagcggggatgtctggaacattgataacaacttctgaggccctggggatcctcacatccccgtcccccagtcaagagctcctctgctcctcgcttgaatgattcagggtcagggaggtggctcaaagtccacctctcattgctgatcaatttctcattacccctacacatctctccacggagcccagaccccagcacagatatccacacaccccagccctgcagtgtagctgaccctaatgtgacggtcatactgtcggttaatcagagagtagcatcccttcaatcacagccccttcccctttctggggtcctccatacctagagaccactctgggaggtttgctaggccctgggacctggccagctctgttagtgggagagatcgctggcaccatagccttcatggccaacaggtggtatgtggtgaaaggggcgtggagtttcaatatcaataaacccacctgatatcaataaaaaaaaaa

SEQ ID NO: 621 - DNA, 791 bp, Homo sapiens
ccatggccgcgggattttcccgggtcgacgatttcgtccgcgcgctccgataccagttgatagttaatgatgagaaaaagaccaataaatgacagtgctgccaataaaaataaaattatcagccttatctttatcttttcgtataaactcagcatgttaatacatttaacaaaataactatctgaacgctgtgccgctgcaaaaattgtcccttgctgcggctttttaaccgaattacccgattctacaaaatcagcagaaagttacaacacttgcttagggcaataatttcctgtgaggtgattaccctttcaagcaatattcaaacgtaactatcctttaattttcggatccagcgcatcgcgtaaaccatcgcccaacaaattgaacgccagtacggtcagaaaaatagccagggccggaaaaacagcgacatgcggcgcgataaccatatccgctcgagcctcattgagcattgctccccactctggtgtcggcggttgcgcaccgaggccgagaaatgagaggctggcggcagagataatcgaggtaccaatgcgcatggtgaaaaacaccacgatagaagagccggtcccaggcaggatatgacgcaacaaaacggtcatatcgctggcaccaatactgcgtgctgactcaataaaggtctgctgtttcaacaccagcgtgtctgccgcgcaccaggcgggcaaacgcggggatggaaaaaatggcgactgcaataatcacgttagcaatgccgcttcccacgaaatcgtcgacccgggaaatca

SEQ ID NO: 622 - DNA, 1484 bp, Homo sapiens
gttggtttatgttatgatagcaattttctgcatagcatcagcaatgagtctgtacaactgtcttgctgcactaattcataagataccatatggacaatgcacgattgcatgtcgtggcaaaaacatggaagtgagacttatttttctctctggactgtgcatagcagtagctgttgtttgggctgtgtttcgaaatgaagacaggtgggcttggattttacaggatatcttggggattgctttctgtctgaatttaattaaaacactgaagttgcccaacttcaagtcatgtgtgatacttctaggccttctcctcctctatgatgtattttttgttttcataacaccattcatcacaaagaatggtgagagtatcatggttgaactcgcagctggaccttttggaaataatgaaaagaatgatggaaacttggtggaagccactggtcaaccctcagctccccatgaaaagttgccagtagtcatcagagtaccaaaactgatctatttctcagtaatgagtgtgtgcctcatgcctgtttcaatattgggttttggagacattattgtaccaggcctgttgattgcatactgtagaagatttgatgttcagactggttcttcttacatatactatgtttccgtctacagttgcctatgctattggcatgatacttacatttgttgttctgggtgctgatgaaaaaggggcaacctgctctcctctatttagtaccttgcacacttattactgcctccagtttgttgcctgggagaccgtaagggaaatgaaaaagttctgggaaagggtaaccagctaaccagatgatgggaccattttgggattggtgcaacaaatgaagaaaaccctgtgatatctggtgaacagattgtccagcaataatattatgtggaactgctataatgtgtcattgattttctacaaatagacttcgactttttaaattgacttttgaattgacaatctgaaagagtcttcaatgatatgcttgcaaaaatatatttttatgagctggtactgacagttacatcataaataactaaaacgctttgcttttaatgttaaagttgtgccttcacattaaataaaacatatggtctgtgtagtttccgagatgtactatatacagtatatttttctaaaaaaaaatgccttgacccacccctatacttttttttaacgaaatctgtttctttcagctctgatggtagatacaagtagttactatttctgaatgggttttactgtaaagaattatgcaaattggccgggcgcggtggctcacgcctgtaatcccagcactttgggaggccgaggcgggcggatcacgaggtcaggagatcgagaccatcctggctaacacggtgaaacccctctctactaaaaataccaaaaattagctgggcgtggtggagggtgcctgtggtcccagctactgggaaggctgagacaggagaatggc

SEQ ID NO: 623 - DNA, 1281 bp, Homo sapiens
tttgagaccttcgtagaccctagtcagtgtggtggaattcgtgagaagggcagatctcacgagagaggatttggcgccctcctctgtggattctggccaggccgggttcggcggttgctgtgagagcgggcttcccaacaccatgccgtccgccttctctgtcagctctttccccgtcagcatcccagccgtactcacgcagacggactggactgagccctggctcatggggctggccaccttccacgcgctctgcgtgctcctcacctgcttgtcctcccgaagctacagactacagatcgggcactttctgtgtctagtcatcttagtctactgtgctgaatacatcaatgaggcggctgcgatgaactggagattattttcgaaataccagtatttcgactccagggggatgttcatttctatagtattttcagccccactgctggtgaatgccatgatcattgtggttatgtgggtatggaagactttgaatgtgatgactgacctgaagaatgcacaagagagaagaaaggaaaagaaaaggagaaggaaagaagactgaggggcagcagctgcttggagtttgcgtccttcccgtccacccagtgcagctcccagtgctgcagtgtgcgtggcgtgggcatccttccagctgactcatggtttgaaaaaccgttgttttatttaaatatccacagtggtagggcacacactgaagttggcttttcagccagcactgaatgtatccatcaggacatgcgtcttcaggtgcctgatctttgtagtcaggctgtgggaacggtctctgcagagcttcataactgggaatttgatttgaagaagtccatgtcatatgtgtaactagtactaattataaatataaaatacacaatataaaatatgaaactcaataataaacagtgccacctgtacatgggcaccatgccctcctcctcgtgctgtgttttctagtgcatgccacagttcgcagtagagggtgttttcaccttccaagacatggggcaaagtttggagacacctggttgtcactggagggggtggtgctcctggcttctcctgtggagcccggggtgatgcataaaatcctgtgtgcctgggtcagccgcatcacagacaatgacttgacatgaaatgtcagctgtgctggggcagagagaccttggaaggaagctcttggaaaatacgttgtatctcagtttgatgaaccaattcacaagaggctaggccctctctagcaaagttatgggctgctttact

SEQ ID NO: 624 - DNA, 757 bp, Homo sapiens
ggctggtcacaactccggcggcccaaggagctgctcggttcacccacaaggaatgagagctgcctgcctgctgctgcttggagagccccagacagtcgcttgaagaggtgtgtggatgtctcctagatcttgacttgctcctgaggaaatattgtgtgactgagtttcctgttatactgctctccaatccatcatgaaccagccagagtctgccaacgatcctgaacccctgtgtgcagtgtgtggccaagcccactccttggaggaaaaccacttctacagctatccagaggaagtggatgatgacctcatctgccacatctgcctgcaggctttgctggaccccctggacactccgtgtggacacacctactgcaccctctgcctcaccaacttcctggtggagaaggacttctgtcccatggaccgcaagcctctggttctgcagcactgcaagaagtccagcatcctggtcaacaaactcctcaacaagctactggtgacctgcccattcagggagcactgcacccaggtgttgcagcgctgtgacctcgagcatcactttcaaaccagccaggcatggggcacgcacctgtagtcccagctacttgggaggctgaggcaggaggattgcttgagcccaggagttcaccactgcagtgaggtataattgtgacacagcactacagcctgggtgacagagcaagacccccatctctgaaaaaaataaaatacaataacattaagctaaaaaaaa

SEQ ID NO: 625 - DNA, 502 bp, Homo sapiens
  misc_feature (1)...(502): n = a,t,c or g
cattggtcctggtgcattctttcaccataggatcatctaacaaaatcagagggtcacaaggctaggtaaataaaggtgttattatgtgaagtcaatttttactatttgtcgatactggaaggctgtgagtttttcagtacagctgaaaatcaatgtgtcttcaatagaggaaatcaatttcttgccatgttggtactcgaagagccatatcctacatgacatttgccctagaatcctgttattggctagaaaattctgaagttataatatctgaaaagtatagccattaaggaatacttctaatgctaatataactctttttagtgaaggatgagttaagatgaaggaataagcagaggaggaggaagagtagaaggaagaagggttgggggaggaggaagaggaaaggagggggaggaagaagaggagaggagcaggggaggaagaagaggagatggggagaggaagcanctattcactttcacacacactgggacctttc

SEQ ID NO: 626 - DNA, 331 bp, Homo sapiens
tggtggtgtgtgcctgcaatcccagctacttgggaggctgaggcaggagaattgcttgaaccctgtagctggaggctgcagtgagccgagatagtgccactgcactccagcctggtgaaagagtgagactacgtctcaaaaaataaaataaaataaatttagcataaaaacagaccttactttttaatcattaggaatatgcaaacattacaatggtaacagaagcattcattgccttttaatttttagtctcatacctttgaatacttgttacagtgctcagaagaaagaatcaatccaggtaagttactgggcaagtcaagacgtctgg

SEQ ID NO: 627 - DNA, 304 bp, Homo sapiens
ttttttttttttgaaacaaagcctttttttgcccctcaggcgggagggcaggggcccagccggggctcactgaatcctctgccaaccgggttaaagcagttctccggcctaaccctttcgagaagcgggaataacgggccccggccccccccccgggtaaattttggaattttaaggggaaacggggttcccccaggtggggcgggctagcctcgacccccggacctaaggggaccccccggcctggcccccccacagggggggaataacgggggggaccccccggcccgggcctacctttgaa

SEQ ID NO: 628 - DNA, 1596 bp, Homo sapiens
ctgttttagccaaaaaagaggaagagaagaagcgggaaagtcataaacaatctttgcttaaggagaagaaaaggttaacaattaacaacgtagctcgacagtgggacttgcaacaacgagtagccaatattgctacaaatgaagatagaaaagattctgactctcctcaggacccctgtcagattgatggaagcaccctctctgcattcccagaggaaacagggcctctagactcaggactcaacaatgctttacaaggtttatctgtcatagacacataccttgttgaagtggacggggatacactttccctatatggctcaggagcactggaatctctggataggaattggagtgttcaaacagcaggaatgatcacaacagtctccttcactttcatagaatttgatgaaatcgtccaagtgcttcctaaactgaagattaagtttcctaattctctgcaccttaaattcaaggaaacaaatcttgtaatgctgcagcaatttaacgcactagcccaactccgtcgtattgaccagttgacaattgatcctcaaggaaatccagttgtcaattttacactctggaaatactatgtactgtttaggctaagccatttcagtatgcagaaaataaatggaacagaggtgacacagaatgatatgataatggctgaaaggctctttggaatcctagcacatgtagcatcttctgagttaccccagtatcgtctgatttccattctgggtgatgccaggaaaaagcaatttcggtatctactagaatccaaaggaaaaaaacctggtattatcaacgaagaaaataatgacagcaaaagacttgtaggagaaaacacaaatcgtgctacattaaattatactacaagagacttttataatgaaaagctagaggaaataaaggaaaagaagaaattctgtaaaacatatatagaagaccttgtgaaggaagccacagaaatcaacatgaaaaatgaggctttgcagaagctttggccacagatgttcattgagcttgttagggatgcagtcatagaaattcgcaataaaaattcctatatgaagctctgcctacagcagataacagaccaaaaataaaaatggcctttagttacagttgattttggcagttttattttttgaaggttgaaaatatgcaggttatacatgttaaaacaacaacaacactatcctataaactagaaagactagtataaaagcattattgcccactgttctcatagctaaaagttaagaaggaaagaaggaaagcaggagaaaggaaggattaattgcctgtatgtgaggaccaaacaacctttgggaactaaacagttttcagagatggcgtggcactgcatccttggttcttgctttgattggtgccctgctatagcccaaagcacgtagtatttgctgatgattcagcatgagctgcatctacctacttttagctgataattttcagttatttccctttttattttatgtcatgatttcaaagccaaaaatatgttctttttatgagtgaagaataaacttactaacaaattagtcaaaataaagtatgtttgcctcc

SEQ ID NO: 629 - DNA, 2029 bp, Homo sapiens
ggcacgaggagagctagcaccatgagcttcataccctggagctgcttcagaatccaaaagaagtgttgaccaggagtgagatccaggatgtgaactattcccttgaagctgtgaaggtgaagacagtgtgccagataccattgatgaaggaaatgctaaagcgattccaagtggctgtaaacctagctgaagacacagctcatcccaaactcgtcttctcccaggaagggagatacgtgaaaaatacagcatcagccagttcttggccagtgttttcttcagcatggaactactttgctggatggaggaatcctcagaagactgcttttgtagagagatttcagcacttatcctgtgttctgggaaaaaacgttttcacctcagggaaacattactgggaagttgagagtagagatagtctggaggttgctgttggggtgtgtcgggaggacgtcatgggaattactgatcgttcaaaaatgtccccagatgtgggcatctgggcgatttattggagtgctgctggctattggcccttgataggcttccctggaactcccacccagcaagagccagctctccaccgagtgggggtttacctggatcgtgggactgggaatgtctccttctacagcgctgtggacggagtgcacctgcacaccttttcttgttcttctgtctcacgcctccggccatttttttggttgagtccattagcatctttagtcattccaccagtgactgataggaaatgaggcttttcttcccctgaccaaaactccttccctgtagtccagctgagggacacacatccctgggccctcttctgcccttcatgtctctatcctggatggtccatcttctgggtctccctaacggtaccgtttggtatctgccctttgtgtgcttcacaagaggcagtcccatgggaggtgggtctggccaatggagatgggacaggaaattttccaagacgcttttgggaaatctttttgtagcttttaaagagatgtgcggggaagacatatggatgttagcagccatattggaactgagaacacaggaatggtggaaaggtagaagaaacagagtttttgttgccgttgtgaaattgttgaaatttccttcatgccaagcttcttgttatatgagataattacgcccttattgtataagacaattttagttgtatttggttacttgcagcctgaagtaccgtaactgcactaaagggacgtagtgtgaacatcccgcagtataggcttaagtcacttttgtgaaatttgacaaaggcatagaatctttttctatccagtcaggcattgcctattctttccagtaactactgattcccccacttttctgtcttagaaaattgtgggaatcccccctcactctgcctatgttgcactctctctcttcccaaccataactctgccctcagctattaactgtgctgtgtatttatcaagttggtatgttgtatgtacagtgttattcatgtcatcatgagaatgttgaacgcttgttaaataccttttgctagcctcttcatatgctgttgcatatgactctcatcacaactcagtgagatggaaagtcaaatcctatttgtacaaatgagaaaactgaactctttagagtaactagctcagtattggccagctggtaaatggcagtgttgggattaaaatccagttcttatctactctccctttattcagaagcatttattggatgttgatctttgtttcaggttttgattttgttacttttttatactgtgtatattttcctcagtctacccttctgctctagattgtctggactcaggagattgtggcagttactggatagttatttttaagataatgattgcttttctctgtttatataagtcatgtgtacttattgtagaaagtttgtaagatgcaaaaagtataaaaattaaagttatgcactactaacatttcaatatattttctcccagattttcaataaagactttcaggcagtgaaaaaaaaaaaa

SEQ ID NO: 630 - DNA, 423 bp, Homo sapiens
ttttttttttttctttgagacagagtctcactctgtagcccaggctggaatgcagtggcgcaatcttggctcactgccagctccacctccagggttcacaccattcttctgcctcagcctcctgaatggctgggactacaggcgcccgccaccacacctggctaatttttttgtattgttggtggagacggggtttcacgatgttggccaggatggtcttgatctcctgacctcgtgatccaccccctcagcctcccaaagtgctgagattacaggcgtgagccactgcacccggctgaaaaagattagatttgcaaaggggcatgtggaatttttttttgaaagtcatgtagaatagtttataagccagccctttcagaaagaaaaaccaccacacaaaactttcttttacttgtaaattac

SEQ ID NO: 631 - DNA, 1009 bp, Homo sapiens
gaaacacagattgaaacatgagaacgtctctcttccctctagagcctcacacttgctgcctcctctgcctggaactctctccctctgctctcacagggttccctaagtgtcgcttcctccaagaagccctccctgatgagttgagccactttagtttgtgctcaggctcaccctgcacgtcttggttgctctcatcactgtaatgatctaaaacacacgtctgctcatgagacccgcatcccacccccgatgctggggccgctcttggattttcatgcctgctgccagcacccagggggagctccggaaatgtctgctgggggctcggaatacccacctttctggtaatgcagcccagcgggtcccagcctcgttttccagccctcactcaaaatggagtcgctctggttcgaacgcctctgacaagtgtgtacctacgtgtcaggcccatccttcctgcaggcctttgtcttggtgtcaccctgcctgagctggccccaaccacagtagcaacagtgatgctgatgtgtgactgctgccaggagcctgctcacatgaccgtgtggagaaagttctttccctgaggaccatctggagtggacgcgtgcactacccctctctgaatacaccctccccacgaggccctctggagcatcctgtagagccagcccctacccagagaccctgagcccagagaatgcgctgggtggtgagccctggggacgaatgcagagccctaggtctcctctccagaaagaccggattttgccatgttggcccaggctggtcttgaactcctgaccctcaagtgatccacctgcctcggcctcccaaagtgcagggattgcaggtgtgagccactgcacccggcctcaggcaggtatttttaccagccgaatactcttgcactgtgcactcttcgtgttcatcatcagtcccccggatgggtgtttaaggcattttccaaagctctgttattaaaaacacggtgcaatgagtttttttcagc

SEQ ID NO: 632 - DNA, 488 bp, Homo sapiens
  misc_feature (1)...(488): n = a,t,c or g
cactgatnacctcactgacggcnctgaaatncncggtcgacccacgcgtccggcatgatctcacccagctttggcttcatgggccatctcctgcggttggaatttgaaatcctcccttccacacccaatccctagcttccctcctaccagggggaggcagcaggctcttcattgataagccatttgcagacatttagccctgacttgaagggtgtctactgcacattccctgcctcagggctggctccagtgcccacccactggacagtctcagagctcagcaggagccctgtggccacagccacattctgctaaaactgggatagaggaacaagcccagccccaagagcagctatgacttttgtttttaagaatggacatttcacatctgtgcaatactgaagacctcactttgtcatgttgccccagtgacatagtgagaggtcaccaggcttgcaaatgaacttcacacagacctcagggtangt

SEQ ID NO: 633 - DNA, 1734 bp, Homo sapiens
cgcactctcgggatggagggcgagcgccgggcatcgcaggcgccctcctcgggcctcccggccgggggcgccaacggggagagcccggggggcggcgccccctttccgggcagcagcggctcttccgccctgctgcaggcggaggtgctggatctggacgaggacgaggacgacctggaggtgttcagcaaggatgcctcattgatggacatgaactccttcagccctatgatgccaacatcccctttatcaatgataaaccaaatcaagtttgaggatgaaccagatttaaaggatctcttcatcacagttgatgaacctgaaagtcatgttactacaatagaaactttcattacgtataggattattactaagacatctcgtggggaatttgactccagtgaatttgaagttaggagacgatatcaagatttcctttggttgaagggaaaactggaagaagcacaccccactctgattattccaccattgccagaaaagtttatagtaaaaggaatggtggaacgctttaacgatgacttcattgagacacgcaggaaggctttacataaatttttgaaccgaattgctgatcatccaactttaacatttaatgaagacttcaaaatttttctcactgcacaagcttgggaactctcttctcacaagaagcaaggtcctggcttgctaagcaggatggggcaaaccgtcagagctgttgcgtcctcaatgagaggagttaaaaaccgcccagaggagttcatggaaatgaataactttattgaactatttagccagaaaataaatttgatagataaaatatctcagagaatttataaggaagaaagggaatattttgatgaaatgaaagaatatggcccaattcatattctgtggtcagcgtcagaagaggatctggttgatactctaaaggatgttgccagctgcattgacagatgctgtaaggccactgaaaagcggatgtctggactctcagaggccctgcttcctgttgtacatgagtacgtgctttatagtgaaatgttaatgggtgttatgaaaagaagagaccaaatacaagcagaactggattccaaagttgaagttttgacctataaaaaggcagatactgatctgcttccagaggagattggaaaacttgaagataaagtggaatgtgctaataatgccctgaaagcagattgggagagatggaaacaaaatatgcaaaatgatatcaagttagcatttacagatatggctgaggagaatatccattattatgaacagtgccttgctacgtgggaatcattccttacatcacagaccaaccttcacttggaagaagcctctgaagataaaccttaatcccattgaggacttctgtttgatctttgggagacagcatttattaaccaaagttattctttctggatctgccgtgtccttataaagtggatgaaaaatgttttgtacccatctggaaaaccaacaacttgaaatctcaggtattccaggtcactgacatgaatttgaagatatatctatctgtatggatatatatctatatgtatatagatatataaatacagagagatatctggcttggttttaattatgttcttaaatttgtgtgccaataattgcatatagatttttttcttaaatatttgactgtggaacatgccattttaaatatgttgtaaggactgttttaataaaaagtttagtatg

SEQ ID NO: 634 - DNA, 420 bp, Homo sapiens
  misc_feature (1)...(420): n = a,t,c or g
ncattctatgtgtcatttactggggacacatagtgtacaagacttttgtggcctctggtcccttgaaggagaataaaaatattaaaatagcttatttatttatttttttgactgccctaaattatgagggatgaattttacaaactttacttatattagtggtaacaggggaactggagagttttgcgccttctctaagctgcccggcaagaaccaccaatagcatgggggaacatacggtccttttcaagcccatggctctttcggcctgtagatgtcagcccacacatctccctgtgcttatagactgctttggagatccattgggtgtcaggatttcttctgatagctttatggaatggatcaatgaggataacctcaaaaaatttgtatgtgtaatcttcaccaacccaataagaa

SEQ ID NO: 635 - DNA, 414 bp, Homo sapiens
cccacgcgtgcggagcagccgccgaattacacttcctatagtacattaaacaacctgacgcaaaggaaagaagaagaactgttcactggaaaaaagaaacagagtccgaggcctcagaaattactattcctcccagcaccccgggggtaccacaggctcccggccactgggaagactacggaagaggtgacaacttttatctcccacactgagaccctggggggattgtgctatggaacatctttaaccgaatgccaatagcaaggaagaacattacggacggggagcaccatgaatatctcattgaagtacccagactattccacacttctgaagactgaggccccacactggaattgtgaaacccactgcgtcccgtgacaggacgtcgaaagggtaaaggagcctgggttg

SEQ ID NO: 636 - DNA, 398 bp, Homo sapiens
ggaaaaaccggaccactttttccctgagggcacttctttcatacatgaaccccgccgcccgaactgaggagacttggtacattgcttgggtggcattagccgctcaactactgtgactgtggcttaacttatgcaaaagctcaatttgtcgatgaacgatgcctattacattgtcattatgaaaatgtccagcatatcccctaacttcaactccatggatcagcccctggacttccaaaggacgctgggactcaggagcccatgttacaacagggttcctgcccaaaaaatgtattttaccaccccttccaaccataatgcctaccaggtggactctgtgcaatctacgtgaaagagcccacacccctccttgctagaatgtgtctggccctctagct

SEQ ID NO: 637 - DNA, 943 bp, Homo sapiens
  misc_feature (1)...(943): n = a,t,c or g
ctcggttagggcctcacttccctgcttccacacctcagggaggcctcggtgattttgccagagcctcagcctccatcgctctgtaacctgcgggtattggatgattcgtagctaagacttcgcgacacccttgaagctgagaaatggaacccttaacattcagggatgtggccatagaattctctccagaagagtggaaatgcctggaccctgcccagcagaatttgtatagagatgtgatgttggagaactacagaaacctggtctccctaggccgggcatggtggctcacgcctgtaatcccagcacttcgggaggctgaggcgggtggatcacctgaggtcaggagttcaagaccagcctagccggcatggagaaaccctgtctccactaaaaaaaaaaaaattagccaggcgtgatggtgcacacccgtaattccagctgctcgggaggatgaggcggaagaatcgcttgagcctgggaggcggaggttgcagtgagccgagatcaggccgctgaactccagcctgggtgacagagtaagaacctggaaactctcagacttcaaatggtcctgcaacaggagtatcaacctattttcttcccttctgtacaactgtgtttctccacatttcctctggatactgcaagtcaaacctgtgttttactactggctcttctgttgtgagcaagtcatttttctctgtggctctgttccttcctctagggagaccaggtttctgtagttctccaacatcacatctctatacaaattctgctgggcagggtccaggcatttccactcttctggagagaattctatggccacatccctgaatgttaagggttccatttctcagcttcaagggtgtcgcgaagtcttagctacgaagaattccnccngnctgtctagagagtagtcagtcaaannnngggggccatt

SEQ ID NO: 638 - DNA, 592 bp, Homo sapiens
ggctctggcagcagcttcactaaggtgggatggatagcagggtctcaggcacaaccagtaatggagagacaaaaccagtgtatccagtcatggaaaagaaggaggaagatggcaccctggagcgggggcactggaacaacaagatggagtttgtgctgtcagtggctggggagatcattggcttaggcaacgtctggaggtttccctatctctgctacaaaaatgggggaggtgccttcttcatcccctacctcgtcttcctctttacctgtggcattcctgtcttccttctggagacagcactaggccagtacactagccagggaggcgtcacagcctggaggaagatctgccccatctttgagggcattggctatgcctcccagatgatcgtcatcctcctcaacgtctactacatcattgtgttggcctgggccctgttctacctcttcagcagcttcaccatcgacctgccctggggcggctgctaccatgagtggaacacagaacactgtatggagttccagaagaccaacggctccctgaatggtacctctgagaatgccacctctcctgtcatcgagttctggga

SEQ ID NO: 639 - DNA, 1038 bp, Homo sapiens
ggcacgaggcccagcctacactgcctaaattcaaatcttagctcctcactcacatgctttatggttctgcacaaatgactccacctctgttccctcagctgcaaagtagtgataattgtgtcgcctaacctacagaggtgtcatgtaggttcaatgaaataatgcatggaaagcccttcaacagagcctggtgtgtggaaaatgctcagtcaatagtagctggttttattgttcatgtggactttattttttaaccatctcccatcttccctttgctttttcagctccagggtttgagccacaatgtgatcttcaccttggattctttgttaaaaggagacctaaagggagtcaaaggagtaagtgttcagaaatttgattttcactttaacttgaaaggattaattttttttttcctctttcaagatcatagtagtacttgtatttgaaagactctttgaacattttcagcgttaaaaatgctcttggaaaatgatcattggaaaaaatgtgcctcttcacataatggtattgacagaggaatgagattaggcactttcaagaagattgggaaggtcctccatgggtggggagagagaagctaagcccgagtcttggctcccacagtgtgaccactggggacccagcccttctgaacctcgggctcctgcttcatcagcatgaccaggggcgcttacccttcttttcctctcctcaggccttcttgtgtatataacacatggtttgatgttgcccaggcacagtggtcatgccctataatctgagcactttgggagaccatggcggcgggtaaattgcttgagcccaggagttcaagaccagcctgggcaacataataagacccccatgtctacagaagaagtacaagaattagccaggggtggtggtgagtgcctgtagttctagctactcaggaagctgaggtgggaagatcaattgagcctgggagttcaaggctacagtgagctgtgattgtggcactgcactccattctaggcaacagagtgagaccctgtc

SEQ ID NO: 640 - DNA, 643 bp, Homo sapiens
  misc_feature (1)...(643): n = a,t,c or g
ccttggaaagcagtcgttgcgccagacagcccagggaagagcggcagcctgaggacctagggccacctgctgttccctgggattcatgtccttctggggaggagggaggacccaggacaatggctgctgttcatgatctggagatggagagcatgaatctgtagtcccgggaggctgaggcaggagaattgcctgaacctgggaggcggaggttgcagtaagccgagatcgtgccattgcactccaggctgggggacaagagtgagactccatctgcagtcccagctacttgggaggctgacgaaggaggatcgctttgagtccaggagtctgagaccagcctgggcaacatagagagtgctgcagaggtccgatctctctgttcatcttcaagcaacctgaaggcaggcagggtctgcgtcggatccagttctgtgccccttggtaggcacccaggacactgcaggcatcaataaatatcggttgggcaagtacagttgcaggatgaggacaatcaattcttcctcaaatgccgggagagcatctccatagcggtgctctgggagcccggaagaaggcaggggagcggctcgtgcgaattcgacgagccgtcaataantcaattttcacccggccccggccg

SEQ ID NO: 641 - DNA, 494 bp, Homo sapiens
  misc_feature (1)...(494): n = a,t,c or g
attgaaacccattgaagaccctctagtcagtgtggtggaattcccacaggatggaaaaaggggctggccccagagttgagttctgagctcagctctccacctcttcctgcccgtctccagctcgctgcctccccctacttttccccaagctgggcagaatgccctcagcctgtgccggctggcacacatgccacatggtgcctggcgcgcgtctgggcaaggatgacgcccccaggaccggctgggataccaagccacccgctgcctcccccacctccagaacggagcgtccccatcccatcccctttcccagccagggactcggggagcaggcagggacacagcacagacagatacaaacacacagatgcacccagagacgcccacaggcgtgtgccccagagggacacagacacaggcgttcacacaggctcgggtacacacacgcacgctcacacccccccagagaaanttatgagtggtcaccacttgcg

SEQ ID NO: 642 - DNA, 487 bp, Homo sapiens
ggttattcatttcgatgtgacattgttgactattcacggtcacccacagctttgaggatggcacgtacctgctggctttattacttctccaaatttattgagctattagatacgatcttttttgttctgcgcaagaaaaatagccaagtgactttccttcatgtattccatcataccatcatgccgtggacctggtggtttggagtcaaatttgctgcaggtggtttgggaacattccatgcccttctaaatacagctgtacatgtagtcatgtattcctactatggactttctgcattggggccagcctaccagaagtatttgtggtggaaaaaatatttgacatcattacagcttgtccagtttgttattgtcgccatccacataagccagttctttttcatggaggattgcaagtatcagtttccagtctttgcgtgcatcattatgagttacagtttcatgtttctgctgctctttctccatt

SEQ ID NO: 643 - DNA, 489 bp, Homo sapiens
  misc_feature (1)...(489): n = a,t,c or g
cttaatggcattcattgaaatgcatatctctggttctttagtgtatttaaaaataaaaacaaagatctattcttatttttcaatgcttaattttttacttcaggaaattccactttcagaaattctccgcatatcttcaccacgagatttcacaaacatttcacaaggcagcaatccacactgttttgaaatcattactgatactatggtatacttcgttggtgagaacaatggggacagctctcataatcctgttcttgctgccactggagttggacttgatgtagcacagagctgggaaaaagcaattcgccaagccctcatgcctgttactcctcaagcaagtgtttgcacttctccagggcaagggaaagatcacagtaagcaatgagcttcttgatggctttttctcctctttaattcttaagcattttgtgggtatggttgngnttcctgcgacgcagtagttttcattgggngnggcctggc

SEQ ID NO: 644 - DNA, 489 bp, Homo sapiens
  misc_feature (1)...(489): n = a,t,c or g
gggcgccgnnnnnccacctagagcgtacgtagngacgcgcannctctgtttgctgtccatcctgtgcacaccgagtgtgttgctggtgttgtcggccgtgcatacctcctgtgtgccctgttcttcttgttatctttccttggctactgtaaagcatttagagaaagtaacaaggagggagcgcattcttccaccttctgggtgctgctgagtatctttctgggagcagtggccatgctgtgcaaagagcaagggatcactgtgctggtgagagccgcaacatggctggggcctgctttttctgtgtgtccttttccctcctataaagacatctggggctggccctgcctctgtggcgttctccacgcctacatcccattgctggtctgaggtgatagacctttctggacaaatggctttcgctgtcacaattctggcattgcagatggagaattgactgacttccttgacagtcatgtgcaactgggg

SEQ ID NO: 645 - DNA, 456 bp, Homo sapiens
ttttttttttggtgtttcaattgttttattacaatccaaaagttggggcgggggttcctgtgccaccacacaccatccaggatgagagggtcagaagtcaaaggtccaagctgcaggagggtcagcccctgcctggcatgttgatgtagactttgccatcttcttgggcggggctgcggcgtgggcgtgcgcacaggaacaccgcccccacgatgagcagcgatgccaccgcatcagcagccacgaggcctgccaggagcggcagagagagggacccacatccggaacaagagcctgaagtgccagggtaaaaggcagggagtgatgatctctctcctggagtcgtctgagctgcagccactgggagcaaaagcaggaagaggatgtgacccagatggatcatggtggactggggtctggcaggggtctggcagaggactgtggtccagagaagtc

SEQ ID NO: 646 - DNA, 1245 bp, Homo sapiens
tggaagaagggagtgagactgctcagagaggcaggattcctgctgactccagggggacacctggcacctcagcttcctttcccacttctccaggctgcatggaggggtgccgggcaggggcctcctggaagggaacctcctgcagcctcaagcaccaggtcatgacatgacatctatccctttcccaggtgaccgactcctgcaggtggatggagtgattctgtgcggcctcacccacaagcaggctgtgcagtgcctgaagggtcctgggcaggttgcaagactggtcttagagagaagagtccccaggagtacacagcagtgtccttctgctaatgacagcatgggagatgaacgcacggctgtttccttggtaacagccttgcctggcaggccttcgagctgtgtctcggtgacagatggtcctaagttttgaagttcaaactaaaaaagaattgccaatggtttgggattcagtttcgtgcagatggagaaagagagctgcagccatctcaaaagtgatcttgtgaggattaagaggctctttccggggcatccagctgaggagaatggggccattgcagctggtgacattatcctgggccgtgaatgggaaggtccacggaaagcctcatcttccaggtgccgggggtcatgggcaatgcagctctctgtgcaggctggccccagctttgcctcttactatcctgctgccgtggaggtgctgcatttactgagaggggccccacaggaagtcacgctcctcctttgccgaccccctccaggtgcgctgcctgagctggagcaggaatggcagacacctgaactctcagctgacaaagaattcaccagggcaacatgtactgactcatgtaccagccccatcctgggatcaagaggacagctgggagggacagtgcctccccagatgcaggggaaggcctggggtctcaggccagagtcttcccaaaaggccatcagagagggcacaatgggggccaaaacagagagagaccttgggccagttccttgacacattctcctgagtcccaccctcatttatgcaaacttcaccaagaaagggatgaatcaacattggcgacctctttggaaaaggatgtgaggcaaaactgctattcagtttgtgatatcatgagacttggaagatattccttctcatctcctctaaccagactttcgacagatattttctgagcaccttctctgcatgtctgcagtgctgtg

SEQ ID NO: 647 - DNA, 1043 bp, Homo sapiens
ttttttttttttaataaaaataaaggggggtttattataaaatgctaaaaatgtactttaaagtacagtcatgagaatactgcataagtagaaatgtgtcttcatactgcaaacaatcacacagattttatattgtccatggaattaatacttaaaaaaattcttctttttagttaagaagagtcttcagagcaccattattctaatagaagttattttgcatatcaaagttcatttttggtctttttccctatgggcaagtaccaagggaagaggtcgtcctcagtctgtggttctacccttttcatgccctcccggatttggggctcactcacttgtaaattggcatattcctgggaaaagtttggaaataataacagaatatgtcatcgcccatgagattatttcttgcaaattcttgtcctgcttttgctatctttttggcctcttcatcgtgatctttcgcccatttaagtttttctagcagatcgctcaggttgctcttaactggaatgtagtgtttccagggctgcagctcattgtaaaaatgttcatagtagatggaatcctgcttcagcacaacactgtcaccaactagcaaatatggcaggcgataagctgctacagtgccatcgatatttatttgatacttatgcttgaagaaatcaaaaaatgaaatatgtttcacaatgggaccatacaggttttcatcgtgtttaaagaagaaaaagttggtgaaagcagcgtctatgagttctgggtgttttctactgagtttaaccagctcgagtctctctttgcggctgtctcgccctctccagacggcagtggaatttttgctttcccagggaggacccgtgttagcttgcacggacatcatatccagacttacccggcccatggtttccagaacagaatcagtcaaatcgtacgtaggcatcacgatatccttggaatctgtggagccacaccaggaaaagatcggatggatgtttgaattggatttctttttttccaaaggccagtctccccggacgcgtggg

SEQ ID NO: 648 - DNA, 2061 bp, Homo sapiens
aacaaaacacaaaactcacattgatgggggtatgtcaaaggcgggaacaggagataacggaaagagttcccaatggtcaaagctgggataatttgagcaacaaaataaagtagtattaaattgtaacccaaagtataaaatattcatgtgtccacactgataaacataaatgatcgaactaataaagcgaaagggacaactgtccctcgcagaagaatttcaattaattatgtagaccactcccaagaaagtacactacaactccccattcctttagtgtgggctgtgcatagtgatttccttccaaagagcacagtatgaaatgggggaaaagagtaactttacaatggagaaacctgacaaacactccttcagccaggtgatcaggtcgtcaacatcaacatcaataacagtcataaccttttatttcatgtcataaaatggtgacacttacttgtgttaaaaaaatttaataacaatgtaatcattatatctctgcaatcagctgaagttctaagaaaaaatgacaatgttgaaagttgtatcatcattattataaactttcatgttcagtatatgtaaactccaaagccaatttcaaaagacatttttgtgaaataccattctttaaaaaaaaggatattatatataactgtatgaatgttaaatgttttacagtaccgatttgctacattttatgtatgctgtaaaacaaataccattttaaagtatattggaattcgtaactaaagtaataaataaatgcttgaaatatacccagtagaaacttatttttattatccaatccttttgataagaaatgcctctagtgttatgtacaaacttgatcttctttgaaatgtgttgtccactgcttttctgtttctgtcacagtagctataaacagctgtttaaggatatccttatctaaatttctgccaaggaggaccaatcgatttgttctctcagtgtcatccttccagctcactggagtctcctccagatcatagagctcatggacaccctggacaatcacttgttgtgatttgtctttgattgacaccaatcccttcagccttatgacctccatgcagtgattgtccttgtttctcacattcttttcccacagaagattctgaataaacatattaagatgttcttcctttgcatttcctggtacgtcaaatgtgattgtaacaatactctgatcaaggtgaggttgtgttcctggcacatgctgaagttttttctgcaaacttattccagagagactatcaaaggcatgaagatctaatacattagagagatcaactcttgatctttgtgtttctaagatttgtcctagtccatttatggatctaattgtcgttcttaatttctttacatcttcttctggaaccaagtctgttttattaatgagaatggcatctgccaaagcaacttgcctagtagcttcattgataaggccatcaggtttctcttctgctaaatgttttaatccatattttgaatccactatagttatgataccatcaaggtaaatatcactccctaattcagcatcaacccaaaacatagaagccactgcacctgggtctgccaatccagtggtctctaacagtatgtaatcaaatttccccttcttttgcatcaaattctcaatagctctaaggccattgtccttcactgaacagcagaggcaaccgtttctaagttccagccactcttcatagagctctccaccttggctgacagctaaggatttctccagcgcacttccttccccaaattcatttaaaatgaccgctactcttttactatgttgctctgtcaaaatatagttcagaagtgttgtcttcccagcacctaaatacccggtgataattgtgactgggatcttggcgccgaggccagacttttcctcctcctcgctttgcgtcgtctccatgggaaccaattcaggacaatcctcctccgcaggatcctcctcctcatccgcagatccaacagccggtaacattccggcctacagcacgtccctacctcagctgaaccgctggg

SEQ ID NO: 649 - DNA, 1287 bp, Homo sapiens
ttttttttttttaacagttaagatttttgtttaaatttattttttgaactggtaataattttacatgtttcaaaattccaaaaatataaaatgataaagagtgaaaattattcctcatcactgtcctcccaattcttctggccaaccagtatgccacttttaccctttcagagattatgtgtgtacatataaacaaatgtttcttatttatttatttatttttgagatggagtttcgctcttgttgcccaagctgggagtgcaatgggcacaatattgggctcactggcaacctccacttcctgggttcaagcgattctcctgccttagcctacggagtagctgggattagaagtgtgcaccaccacacccagcttttgtatttttagtagagatggggtttcaccgtgttggtcaggctggtcttgaactccggacctcaggtgatccacccgcctcggcctcccaaagtgctgggattacaggcgtgagtcaccttgcctagcctgtttcttctttacataaatggaaacatactctacagtttgacaccttgcttttatctacttaactatcttagagctctttctcacattagtatagtttgaggatccctaattcaaaaatctgaaatctgaaacacttctggtcctgagcattttggataagggatactcaacctgtatataaagagtcttcatttttaaggctatgatctccattcccccataaatgtacttagccagttccccatggtggacatggagggttgtttccaaattctgacttttaaaatcaatagcataatgaaaaccatgtacaaacagtctgcacacatacaaatatatgtgtaggatttattcccagcaagtttgcttagacaaagggtttatgtatgtgtaatttagatagtggctgataaactgccctccacagaagttgtatcaattcacattcccactgtaaatgtataagaacccctccaatgccccctttgagaaaactcaaggctggtaaaatactgggtggagagcacattgttacaatcctcctgaaagttaatttaaagagctacatgaaattcatagaagaaaatcctcaaaatagagtaagcacatgttacaagacaactagaagggattccaaatttctaaacacaagataactatacacatatatattcctctgtgtgtatgtaaaatttagtgtacactatgtatgtgtagacacacgtgtatattttaagaaaaagctgcaaggaaaattagtaaaatcctattggtaagga

SEQ ID NO: 650 - DNA, 442 bp, Homo sapiens
ttttttttttttgagacggagtttcgcttttgtcgcccaggctggagtgcaatggtgtgatcttggctcaccgcaacctctgcctcctgggttcaagtgattctcctgcctcagcctcccaagtagctgggattacaggcatgcaccaccaccatgccccagctaatttttgtatttttagtagagacagggtttcaccatgttggccaggctggtcttgaactcctgacctcatgatctgcccacctcgccctctcaaagtgctgagattaaaggcgtgagccaccggtgcccggcctctttttatttattcctaaaatattaccttgaggccaaattctgcgcttaaggagaatgtgcaccaagtgctggggtgggggctggttataaacgaggccacaaatcatgcttgttaataaattgtgtggttcaaatctgaaaa

SEQ ID NO: 651 - DNA, 1699 bp, Homo sapiens
atatagaagctgaggaaaatgtctaacacaaaatttggagaataagaaattagataggtcatgtaagtgaatgtaagtatagtgctatgggcatataaggggcatggatgaaacatcgaaaagttggaaatataatacgtccagacaaccaagtggcatgggtgttatactgtaagaaattttcgagaatcctatctgcaactccatgagggtaggatacgaagatagctgaggtaagtgaaggtcaggaagggtaagtcctgaaccaaactgccactgctagtaagcggcagagctgggattggaactaggggctgtctggcttcagatctttatccttaaccaccatgttatacggggactaaagagtgccggtgagttgtgaacccagacccttccccagccacacctggcaacaccccctgatctctgggaccacagctgggttgtagggaaagaatggagtctcctaaatggtgatttttctttatttccccgcaccttcaatctcatggcatggtctgcaggaaacctcagagtcctgccaactcgcaggcttcgctgatcgcatggcacctgggcaccccgccaaagagctgaaactcccaaggctcagccaggactctccagctgtggtgtttctaaaagccgttctgggtgagatgtagagccgagttttcccagtcgctcagtcctcctcccgtgaggacaacactgcttgctctcctggcttgcctcacccatccaggaaaaggtggggaggggctctaggcagcggcctctcctggttgaaagaaactgagacctgggccttccgtccagtttaacctggagcaggcctggcccctgggcaggctcagagcaggtcccccattcagcaaatgagggtatcctcctattttgccaacatccatcttcaccgacttggcctgaacccattctgagtacagagggacacccatgacagaaatcccaggtcaactctgctggaagccactgtgctggaagaggacttctttcactttgtccacgatggtccccacttcagccatggccccgagaccttcatctccgcacaccagcttcttggccacacaggggatctcgacatagccaaaggccttgagctggtctacctgctgcgctgtgatcgggtgctcccacatggcggtgttcatggccgggcagaagagcaggggcttgctgcggtcccaggcccgcatgacgcaggtaagcaagttgtcacagatgccactggccaccttccccagagtgttggcatcaagaggagccaccagcaggaggtctgcccacctccgcaggtcaatgtgcagaactgggtcagagcggctcttccacatctcccattcatcagcgtcgctgtagagggtgacaggaatgtcctgggggctgtagaaatgtttggctctctcagttgtgaccactgctacttccagcccaggaatgtccaaaagctttgacaccagaagaggcaacttcagggctgcgacactccccgtgacacccacaagaacatggaattttctctccatcaagggtgcagcagctggacaggaggcctttggttccatgtggggtctggtggcttcaagttctgggagcctgccaggcctgggctctataaagctgtcgggatttaggatccgcgccaggcgcgtctcggggccccacgcgtccg

SEQ ID NO: 652 - DNA, 611 bp, Homo sapiens
tttcgtggcagacagacctccaggcccgctaggggattctcgccatggaggccgcccgggactatgcaggagccctcatcaggcgagtgccccgcgtccccctgattgccgtgcgcttccaatcgccttgcgttcggtggcctcatattcccctgtgcgcctctagtaccgtaccccgctcccttcagccccctgctccccgcattctcttgcgctccgcgaccccgcgcacacacccattcgcgcacacacccatccgccccactggtgcccaagccgtccagccgcgcccgcgggcagagcccaatcccgtcccgcgcctcctcaccctcttgcagctgggcacaggtaccaggtgtggctcttgcgaggtgcgcgggcgtctgcaaaccaggtgacagctggcgagtggctgcatgcatctctggccgctgctgcagtcgcgggcgcagaagagggtccggtcccaggaaccccgagcaaagcttccgcggtgcatggggaccgagcttctgggggtcctggaaatcacaacgggagctgagcgcgggaggggcccaggcttggcccctcctgggaagcgcgggctctggtctccgaggggaggcccc

SEQ ID NO: 653 - DNA, 1968 bp, Homo sapiens
ttttttttttttcatttgagacggagtctcgctctgtcacccaggctggaatgcagtggcacgatcttggctcactgcaacctctgcttcccgggttcaagcagtttcctgcttcagacttccaagtagctgggattacagacatgccaccatgccaggctaatttttttaatatttttagtagagatggggtttcaccattttggccattctagtcttgaactcctgacctcaggtgatctgcccgccttggcctcccaaagtgctgacattacaggcctgagccactgcgcccagccaataccatgagttttaagcctcacatcgtcacttgctgtcactgccagtgcctgttttattcatattgctggacaacagacatatgccaccaattgtatgattaataaagtctttttctggccattttgtccattataaaggaaataaactaattgttaacttgcatagattacttcttagtttcctatgctaccaccactgccaagggagaaaaaaatacatcattttgtaatgtctttagtatttctttataactagtgttaaggttttgttaattttattgtatacatttgtaacatttattaggagccttttaggttccaaaacaaacaaaaggcataaaaaagtctagcttagaaccacttttcacttgctttcatttttaattttattcacttaacagctaacatctttcttgtttcttgttttttccattatatggttatcgattcaactcttgctatattccttaaatttgtatgtatcatcagaagaaagagatgaacaatttagtgtagatattttattctggagaataatattcaattaaattatttctacagcaggccagtaacaactagattatttgtcctttctcagtataattttaaagagcattttgttttattgtcacaatttggtaccactagtcccaggtaaccattgggccaaaggatcagttgagaaacagttaaggatgaattagcataagttatggaacagtgttagaaaacaactcaaaagtatattctttattaatgaggtggtcattattacatttgtgtcaatgaagggcagtgtagttattttaaaatgactaatattttctccccaaatacagaataattcagatgggcaaccaagttttcaagagactgctgtaggtgaagtctgtctagccaaggcagaacacttacaggagtccctaactgtgccacccttggaatgggttagtgtacaggctcagaatattgtggattacagtttttcagagaaaactaccacagatgtagacaaaaatgatctctgaaagcattgccagcagccaggtatgttccttagatttccacttaggtttggcattttggcagataagctaatcttgtataaagcatcacattttactatgcttagtgttcctgggttgtatttatctacattattagagggaatttttattttaaaaaaattgtcattcatgagaagaatgggagttcatgccacatagtattttaccaatttatataaagtgggaaaagtctttaatacttcatgatcacttgaattaaagtttttgtatctctggaaagtagaatagtgctttcatttgaatgaaaagtgtttatagattcagaaagagagatgatatctttgtatcttgatttatatacagaccatttcagaggaagttaaatgtcttacaaatccaatactttctaatgctctaacagtgttggctatttaaaagaacatgtggcaagttctatatgaatattcttggtcatctcgactaattctgaggcaatgatggacagagatgctacttcttatttaactctaggcatgttgacttttcaaagcggtttccttatttctaaacagagatgatgatcaatgagttactaattctttagaggaaaaaatgcataatttgagtgtggaagtgat

SEQ ID NO: 654 - DNA, 1101 bp, Homo sapiens
accggcccggaatcccgggtcgacgatttcgtcgctcctggttctgccagctcccctgagagcctgaacccgggcttgagagcctcgccaccccgggtgacatccctgccgtgggcttgggggctctgggtgtgattccgccggtccgggtcccgcagcgaccacctacccagcgcagtcaggggcggggctgggacccagagcgggaccccggctgccgagtccaggtgtcccgcgggcctcgatttggggagcagaaaacgccaggtcttcaagggtgtctgccaccaccatgcctgacccatttggcagcagcctcgtgtgtggtggtctggtgtggacggtggaagcgtgattctgctgagtgtcagtgtgaccactcgtgctcagccgtatctcagcaggaggacaggtgccggagcagctcgtgcagctaagcagccaactgcagaaacgtcaggtgggtggtgcattcgcaggcatgctgaagaagcagttccaggcatgggccgccggcagagaggctggctgcagcaccccccaccaccatgcacatcgtgctttgcttcttcctagagttagcggctttggcaggccatgccttgtttgtgttcacagcctgcctgtcaggagcgaagacagaacgtctgacttttggatccgtaacaggggtgggggctccccagaagagaagaggctttgggtcctggccagtgtccactactcagtcaaacattcagaaacttacatgattcttcatcgtcccaagcaagtctgacttgggccctttattgaaactctgtttcctctcccgctgcctgtctgcctccctctcggagtgcacctactgagcaccagccctccattccctgccagccacacccagaaagcaatggggctttctgggaaggcagaaatattctgtgacctgggctattcagaggggtggcgtgagtcgtgtgtgcctagcaaacactcaggacatggccggtgagacagaagggctgagcttttgtcctagctaatatattaattaattcattcattatttattttgagacggagtctctctgtcgcccaggctttccggtttaggaatca

SEQ ID NO: 655 - DNA, 397 bp, Homo sapiens
tattggaagagtgaagagcagagaactttaagtttgaaatttggcatcactgccctgaacaatataaccttagttggcataaactactcatacagacaaaggcattatccatcacaataagtaactttttgtctttatttcaaccggacaatcgtgattagaaaagctcctgtgacaaaattcaagaaaacctgacataaatgaacaacaatacaacatgtattcaaccatctatgatctcttccatggctttaccaatcatttacatcctcctttgtattgttggtgtttttggaaacactctctctcaatggatatttttaacaaaaataggtaaaaaaacatcaacgcacatctacctgtcacaccttgtgactgcaaacttacttgtgtgcgc

SEQ ID NO: 656 - DNA, 633 bp, Homo sapiens
gtaggttagataatggaattgtgaaacctttgaggattggcatttagaatcacaatcggtagtgcccattttcctaaaaagtggtgtcagtttatactcttgccaatagaatatgagtctgtttatcatatattctcatcgatgttggatattctcagtctttaatgttgtttttgttcttttccaatcttatgggtaaaaaatgtcatctcattgttttaatgtgtacttccctgattactagtgaggtcaaacatcttgtcacatgtttattgctggcttgggcttcttcctcaaaaaattccctgtacatgtccttgtggacaagctatcggtaccacaagacttcaatacttagcacagcgcgataccacgatacccgcactcacacacacaccagtgaagcaaattacgacgtccagacacagttcccagtatataaaataatttgacacacaataagcgcgccaacttagctaagggatgatgcgtggagtgaagacatagtgctaggaacacttgccaattatttggtaggaaccctatagttatgccttcacacagaatacaatactttctagacgaagtaaagatctaaatgtaccctatgaaatatagaaaaaatatgtctat

SEQ ID NO: 657 - DNA, 482 bp, Homo sapiens
  misc_feature (1)...(482): n = a,t,c or g
cacaagcaagggctgccctgaaggaagctccgagagaaaggagggcaggaagcccacggcccacaggggtgtagcccgagacccacctgcagcccccagcccttgccaggaaagcagcagccgcagccatggcggggatgaagacagcctccggggactacatcgactcgtcatgggagctgcgggtgtttgtgggagaggaggacccagaggccgagtcggtcaccctgcgggtcactggggagtcgcacatcggcggggtgctcctgaagattgtggagcagatcaatcgcaagcaggactggtcagaccatgctatttggtgggaacagaagaggcagtggctgctgcagacccactggacactggacaagtacgggatcctggccgacgcacgcctcttctttgggccccagcaccggcccgtcatccttcggttgcccaaccgccgcgcactgcgcctncgtgccagcttctcccag

SEQ ID NO: 658 - DNA, 1363 bp, Homo sapiens
ttttttttttttaaagagacagagtctcactctgtcacccaggctggagtgcagtggcacgatcttggctcactgcaacctccgcctcctgggttcaagcgattctcctgcctcagcctcctgagtagctgggattacaggtgtgcgccgccacacccagctaattttgtatttttagtagagacggggtttcaccatgttgctcaggctggtctcaaactcctgaccttgtgatccgccaaccttggcctgtcgacctctttacccattccattgttcattcttctttcttgaaatcccaaaccttctattaacatttcttttcagttatacactgaactttactgtagcctttcttctagagtaacaaatgttctttgttttccttcctctaaagatgtctttatgtttccttcattcccaaagaatatttttgtggaatataagattcagagttggcagttgttttcttttagacttcagagatgtatctctctgttctgtacattattgtttaatataagaaacctactaccattcaaataatcattccctattttacaatgcatcagttctgtcaagcttcattcaaagtgtttttcattgtctctagtgttcagaagtttggctgtgatgtgcgtggcatggaagtttttgggtgtattctatttggcgctccctggtgcttgcccagctttttgatctgtaggattatgccttttgcaaaatttggggaactttcaactattatttcttcaaatattttttcaccccccagtcttgtcttttttagggacttcaataacatgagtggcagatcttgttttacactcccatgggtccttcaggctctcatcttttttctttttccagtctattttctgtcttgttaatattgattaatttttattgaccttccatggtcctcactgattgttttctttgtcatacctaatctggtgagtttgtgcagtgagttttcattttggttttgtattttccagttgtttaatttccattgggtgggttcttttgtacaccttctgtttctttgcttattttttaacgccaaagaaagactctcagagaatagacaactatattccaaagtcatggttctctggtggtttgtcttgacatttgaatagaaatgttaaactatctgggggaatagaaagcccacagtcttctgagttgtgctacaccaatatttctatgaacagatcttacaactgagagtgatctgcagatttttcagagtcatgttctccatggaatgtttgtaaaattccctagctctctgcactgagctgagatcgtgccactgcactccagcctgggcaacagagcgagactccatctc

SEQ ID NO: 659 - DNA, 934 bp, Homo sapiens
tttcgtctagccttagcgaggccatgggggaaaaagtctaactggcggaactcctgggaactggggcgatgggctcttagtatcggaggattggagccatctgatttttacctgaaattccttagtctctcctgtgttggggaaatggtcaccttgccttcagggacctgggctttcagctgtccatacctggccctggttgatggcggcatgctgggcagtgcacgtgaagacgcacatgagaccgggacttgctgtgttgcccaggctggtcttgaactcctggtcttaagcaatcatactgctttggccacccaaagcactgggattacaggcgtgaaccaccacacccagctcttaaaaccacagtatttctaggtcagtataacacacctgccccagggacttacaggtgtggcagaagcttggacttctggcttttctctctcttgcacccaggcacgctgcagctaccatttcctcccttcactacgttttagattctttccttttcattcctgtcattaccatgctaacgtacatctctatccaccttgctgttgggcaggtatgagcggcttgctggctgttcttccttgccttttggtctgtttctacttagctgactcctcaattgggtagaaacattcttcatcaatactatactgttataggctgtcccttgtgatttcaaactctagtaccagatactgttctctggttggttcttatgggcatcacttgtttttctggctaaatactagatctaaggtaggaatatggcttttgttttactaagcagtggttcaagccctactgtgagcgcactgctagactggcagatctctgagaatttcagaggattcctatataatgttaagtgactaaacttaataaacttaattaaaatcaacatctcaagatattgaaaaaa

SEQ ID NO: 660 - DNA, 642 bp, Homo sapiens
  misc_feature (1)...(642): n = a,t,c or g
atcccgggtcgacgatttcgtgggcgagcggcgcggcggctgcgatgagtgcctctgcggccaccggggtcttcgtgctgtccctctcggccatcccggtcacctatgtcttcaaccacctggcggcccagcatgattcctggactattgtaggggttgctgccctcatcctgttcctggtagcactgctggctcgtgtcctcgtcaaaagaaaaccaccccgggacccactgttctatgtgtatgcagtttttggatttaccagcgtggtgaacctcatcataggactggagcaagatggaatcattgacgggttcatgacacactacttgagagagggtgaaccgtatctgaacaccgcatatgggcacatgatctgctactgggatggctctgctcattatctgatgtacctggtgatggtgggcagccatagcatgggaggaaactttattaggaaccattggcctatattgggttggatctattattatgagtgttgttgtttttgtgccaggaaacattgtagggnagtatgggacacgaatttgccctgcttttttcttaagcataccatatacttgtcttcctgtctgggctggtttcagaanctataatcagccatcagaaaattataattac

SEQ ID NO: 661 - DNA, 955 bp, Homo sapiens
gactatgtattatactgttttatccttcatgttacatgtaacagtatagcacagtggggtctcagtaatggttggcttgatatgctgatttgacctagataacaaaaagtttatatttttgaaatattaataacttgaacattaaaacccatccatttacagttaatttattttagagatatatttttctctaaatatccttctttagacaattataatagttcaagcttatgcatttggaattaggtagtcaatggctgaattttatagtagttggtaaatactataggacatacgggcttatttatataaatgttctaatacttatatttggtagccattattaaagtcttcgaatcatagttaagtctccatggtagcagtggtttcgtgattatgttttaatggatgcagtatacgataaagttaattcatagttaaagtttggtactgatttaaattaaatcatttgagaggccaggcacgatggctcacgcctgtaatcctagcactttgggaggcggaggtgggaggatggcttgagcccaggagttcgagactagcctgggcaaaatagggagaccctgtctctgcaaaagaaaagatagctagacgtggtggcacgtgcctgtggtcccggctatttgggaggctgagttgggaggactgcttgagccccggaggctgagactgcagtgggccataatgaaaccactgcactttagcctgggtggaagagcaagactgtcttcaaaaaagaaaaaaagggcgggccgctctaggggatccagttttcggtcccggggcggggagggaaacgtttttttttaggggacccaagatgagattggcggcggcgcgtttaaacagtcaagacgtggacgacaccacacacgactagtgaggagatgacgacgcggcagtgtcgacgagcggagatgcgccgacccccccc

SEQ ID NO: 662 - DNA, 766 bp, Homo sapiens
atgagggcacggccttgtaaagaaacccaaagcagcacagcctctgagaactgaataatggccccttccagatgcctctttgcaatggtggaaatttggcagtaacaggttcctgggcagatcgatcaccactacatgaagcagcaagtcaaggtcgccttcttgctctgagaacattattatcacagggttataatgtaaatgcagtaaccttagaccatgtcaccccattgcacgaagcctgccttggagatcacgtggcatgtgccagaactctgctggaagcaggagctaatgtaaatgcaatcacgatagatggcgtgactccgttattcaacgcatgctcccaaggcagtccaagctgtgcagagctgcttctggagtatggcgcccaagcccagctggagtcatgtcttccatccccaacgcatgagggcgccagtaaaggtcaccatgaatgtcttgacatcctgatatcctggggcatagatgttgaccaagaaattcctcattcgggaactcctctctatgtagcttgcatggcacagcaattccattgcatttggaaccttatttatgctggggctggcgtacggaaaggcaaatattgggataccccattacccggtgctggccaccaatccacacaaaaactggaatagttaccggctcaattggagacgaatgcatggccacatccccggcttcggcgactatttatctagtgctgccaacgcacgggaacaacgatttctccctcgctccc

SEQ ID NO: 663 - DNA, 951 bp, Homo sapiens
ttttttttttttaggttgaatcaaagcaagttgtcttcagagactgggatccgagatagaaaacacacagtgaagtttaatcaggaacccaacctccggtcctctgctacaaccacggaaacggctccaaacttgaggggggaccccccaacgcctgcttttggcccaaagctctgccttccagccctcctcatacccactggccacctaggaccaggaaaggggggtagagccctgagaattctgggtctggggtcaccagctcccacacctgtgctccccggccccacacacatgatgcccaggggtgggcaatccctgacagcggtggccggcacttgggagctcctgctcagccacctgccacggcccaccctgggggtccggcaggagccagggcagtgcatggcagcataaggccccgctgcagatcgactgccttcagaaacaaaaagtcccggcgcaaaggcgttcccggagtggcagcctggcctgcaccccagctgtgctgcccctgcagagccccagcagcgaggcacacccaggtcaggggagggggcttgggtaccaggggcctcactggctcttcaccaggaccctgtagagtgagaagctgaggactgcggccacggcggccccgacaacccccagcagcccccggagccagaaggaagagggatgcagctctgcgtggaccaaatgtgggaaggcggccatggtggcgagctgggtgaagatggtggtgctgggctcggctgggccagcacaggagaacggcacgggagcgggtagccggtgcttgcggcaaaactcggccggtgatgggccagacaccgcgacaccttcgggcaggtcggccttggaggagacaaagaggcagggggtctgcccgtccatgtaatggtgcttgtagacgctggcacaatgtgcaaaggactaggaattccgcac

SEQ ID NO: 664 - DNA, 571 bp, Homo sapiens
tttcgtgctggttggaggagtggaagggcagatgaaatactagggaggtggtgaccagggagacagtgaagccacaggcacaggcagcagccattagtcccatacacaccccatgtcccatgagcactgagtagcgcagtgggttacagatggccatatagcgatcatagcccatggctgccagcaggaaggagtgagaggagccaaagaagaggaaggaaaacatttggatggcacagcccaggaaagaaatggtcttcttctgggacagcaggtcaaccagcatcttgggtacaatgacaaaggtatagcaaatctcagagcaagaaaggatggcaaggaagaagtacatgggagtatgaagggctctgtccagcacaatggtggaaatgatgattgcattggtgcccagagtgaacaggtagaggagcaggaagataacaaagagcagctgctgcagcctggccagggatgagaagccgaggacgacgaactctctcaccacagtcttattgacttgctccatggagagcacttctataaaggagagtcaaggacagaggtagaaacc

SEQ ID NO: 665 - DNA, 694 bp, Homo sapiens
  misc_feature (1)...(694): n = a,t,c or g
tgcaccgccgcgccgtaattcccgggtcgacgatttcgtaagacacggaaggcttggtgggcagagagctcttgaggtggaggggggaggtgacagggctaatcgcctcacagccattgcctgcctcccggataacgctgttgaccttggggctgcagatggtcacatcgacagtcctcttgcctttcagggtaggcctctcctcagccgggtggtcgctgacatctttcccaaaggttgcgaaagtccgtttggtggggccgcagtcgtcataagcctcgacatcagcagcagtagcttcaatagacagcgcgatgatgttcctcacatgctcaggggacttggaacggatgggcatggggttccggggcatccagcacctgtcagagtggccaagaatccggcattcttcccggcaatgaaatccttcattctgatcatgatcaggcatctgagatcccatggaggtcacactggtgttcagcacatcgttgacagcagtatcacaatacaggctccgctggacatcatgctcactgtcaagttggacactctcctcatgtccactatccttcaggctgtggccctctaaanaattgaaggagggcaagcctctttgaatttaaagggggcttcgggctatttcaacgggagggtgggagggccaaaaagaaataggttttcaagccctttt

SEQ ID NO: 666 - DNA, 503 bp, Homo sapiens
ttttttttttttccccatgttctcacaataaactctttattgtttagctagccccagtgactttatgcatcttataaccaaaaaagccttcagtagagcaagtctgagccagaggttttatcacactttgtcctcagggtccaccaggaaccaggtcttggctcacagccaggctggaaacagtcttcacagttctgagcctggagtttgagatctgcctcccctttcaaggaagatccagaggtcacctgcgcttgtagagacatggctgaagctgcaggcctgaaagctgagccttgggccctaccagagggggcccagtcttttggaaatcaaacaagaagaaatggctgtctttggtgctgctttggaaatatactcagctactggtgctcaagagcattatttataaatcactggtcaaagcaagggtggccatgagttattgctgaagaatgcaggacaacttctgtaaaggatgtagaatagcaaaacatgctaag

SEQ ID NO: 667 - DNA, 407 bp, Homo sapiens
cagacattttgctcccaacggaagtgggagccctgggaagctttgtgagcagaggcagtacatagagggaggtgttttaaggagctgggatgaggatttggttctcactgagtcttttctgcccctaggacctgaccaacagccatttcttcctgtttgatttccaaaagactgggccccctctgggggggcccaaggctcagttttcaagcctgcagcttcagccatgtgtctactagcgcaggtgacctctggagcttccttgaaaggtgaggcagatctcaaactacaggctcagaactgcgtttactgttgccagactggcttggagccaccacctggttcctggtgggccctgaggacccagagggaaaaaacctttttgtcaacactggggggggctgatt

SEQ ID NO: 668 - DNA, 872 bp, Homo sapiens
  misc_feature (1)...(872): n = a,t,c or g
tttttttaattttaatagtatattttatttaatgcaaaatatccaaaacattatttcaatgtggagtcaatatgaaatattactgagatgttttacatcttcatactgttttctaataatatatgaattattgaatgaagtacgtattttacacttacactgtatcagaatttggactagccacatttcaagtgctcttggacagcacaggtctattattctccaggcctcagtcattttctgaaccaactggaggcaagaaaacgagtgtgtcattgaaatagtgtccaaatgccctgagccggtacaggccatacatcattacttccatcttttggggggtcagtccattgaaagtaatagccatatctgaacagcagccttctactacttgctgagggttattagacaatgcctcttcaataagctgtgcgattggtttggtattaaatacatctcttccttcataatcctctgcattttctgcatgaactcctgcatatttcaggcatattgccagctgcttatcttcagataacttccaaatcacactttgatctgcacaggtctcagagttatcgagaagtctgttaagtcttttcatcaactctctgcttaagacaatccctccttccacagtcacgtattcgaggtctccaaatataacagtgtggcccagatagaagggctgggatgcatcccttgtaaacaaaaggtactttaaattttcaatgtcagcaaacgtagtgggaagtgcacggaagacccagttgtagttgtcgccattcttttaaaaaaagtatttgtaagcggtcttaatctgtacccacctgtcattactttttatattganctaatggatttggcgtagg

SEQ ID NO: 669 - DNA, 431 bp, Homo sapiens
ccgggtcgacccacgcgtccgcctctcctaactctccttgcccacgtctcccctgaacctgctggccccagctgcgattcacttgctcaaccgggtgcgtcaggagtttgagttcaacatgacagccacccaccacttctctgtggatctcaatgcctctcggagcctgtcccaggtagccatggacctccacgaggctgtcagcatgaagctgcaccgtgtccgagaggccctggctctgatgggcttcaccacgcctctgctgcttgtgcttctctacctccaagccctattttaccggtattgttacctgaactgggaccattatgacaatatctacatcactagccgattcctgcgcatggaggctgtgcgctccacggcagggctgcccacagtgctaccgctcagtgctcacgaggccaggcgct

SEQ ID NO: 670 - DNA, 1589 bp, Homo sapiens
cggacgcgtggggaaaccgctgtgctgtgggcgcagcgccgagattgattcaccttcacctgtgctgcactccagctgacccaagtaggaagccagacgagctgtaaaacatgaacggaagagtggattatttggtcactgaggaagagatcaatcttaccagagggccctcagggctgggcttcaacatcgtcggtgggacagatcagcagtatgtctccaacgacagtggcatctacgtcagccgcatcaaagaaaatggggctgcggccctggatgggcggctccaggagggtgataagatcctttcggtaaatggccaagacctaaagaacctgctgcaccaggatgctgtagacctctttcgtaatgcaggctatgctgtgtctctgagagtgcagcacaggttacaggtgcagaatggacctataggacatcgaggtgaaggggacccaagtggtattcccatatttatggtgctggtgccagtgtttgccctcaccatggtagcagcctgggctttcatgagataccggcaacaactttgaaaaacttgctctctttcaatactcccaatgaagatacatttcactcaccctccacccctgctattctgccatgtctttccctctctctgcatagccagatttgaagtgactgatacccaccccaaaccttgctgttcacagtctccaattcttcatattctaatgggaaagtaaaggtattgtttgaaggaaaactgaagaaaagacttggcttagaacaaatgaggagttatatattttactaggacttttgatagaaattcagctacaacccaaagagagaaagattgagtcttcctgtcaccataggcaataccttttttcttagctggcatgccataaaggccagctatgtgatattagaggaagaaaggatttttctttttaatgatcttccttgggaaattattgtggcctttatttaatttctaactacgtacctgggtgcctatatcgacaaagagtgagaagagcatttttacttttttaaaaaagcaaatacatatatacacatacgtatgcaaatattatagtataatagtgatccctatggagaattaaaggtgagaaagctactttgtggtgatctaggtttctgataaaagggatgatcttaactgaagaatttaaagagatacttaaacagagcaaatgtagtaggaacaagggagtgagccttataagaggacgttcagtctcatttattaaaataataactgagactgggagaggtggctcatgcctgtaaatcccagcactttggtagcctgaggtgggagattgcttgagtccaggagaccagcctgggcaacatggcggggcctcatctctatttaaaaaaaaaatagaaaaaaatgtaataactgaagcaactaattaaaaatcttagaagaacaatatttattcttataacagccaactatggggagttattataaggtaaattgccataatccagcgctgctcacatctaaaaaactttgaggggtaaaggtaaatcgtaccaatctctgggctgccctagtgacttttttgatacct

SEQ ID NO: 671 - DNA, 672 bp, Homo sapiens
ttttttttttttacttgtcacaagcaaggagagcgctgggaatactctccaaagcggtgtctctgaaggaaagtgacaggagggttttatggggtgatggagaggggagaagagtgcattggtgcatgtaggaaaggggtcccagtggcgcagccgcagtgagtcgtcctgccagcacacaggtcacatgttacggtcatgaagctatagctccccctggggtagtgacttcaggatggtaatgaggaaagttcacttgggttcatctagaagttgccggggtctgtcaggagctggttccaggtgactaggtcaccacattccacacgaaacaagggaagaaacaggcagcaaggcaggaagctttccttcctggctgcaggtgcctcttgggattcagttgcattcatcttcctcctagtcttccatcctatttgtggtcacacctccagcctctttcaagtccacccagagagctttttctttccgtgtgttggaacgcagtgttgacaacttcctggccttccagtataagcagaggagggagatgagcagaaggaggagcaggacgaagggacagatgaacaggaaatagagtaaaggggccgaggagcagatcctggaaggaagcgtgggctcttgctgcagacacagttcttctcttccatcccg

SEQ ID NO: 672 - DNA, 399 bp, Homo sapiens
taaagataaagcttctgtctccaaaaaggaatgatttctgtacaaagatgttcattgtacatgataagtgaataatatatttctcctacaacatttttttaaagataactgaactgcttaatgatgtggaaagattaaaacaggcactcaacggcctttcccaactcacctacacaagtgggaaccccaccaagaggcagagccagctgattgacactctgcagcaccaagtgaaatctctggagcaacagctggccgtgagtaaccaggcacacggggctttgcaggaatatgtgctggctccctgtagttagtttggaaggctcatttagaaattaaagggatctgtagctatgttcggatcccagaatataattatttttatatgcgaaaagttac

SEQ ID NO: 673 - DNA, 335 bp, Homo sapiens
ttgagctggaagtacaccttaaaaacccgctaccctttatgttagcaccaaaaaattagctacttactgataacataacgaagcatgggtcctatatcaatccctatatgtccagaactaccaaactatgatgaattcgatcaaagatctaaatggagatcctttgagctgcaaggtaaaaaatttaataaaaataaataagtacatgaagagagattctatgttcacgaataggaagactcaatattgtttagatgtcactttttcccaacttgacctgtagattgaatgcaattcccatcaaaatccctgcaaatcattttgtggaagtcacg

SEQ ID NO: 674 - DNA, 2954 bp, Homo sapiens
atctcactgaggaccaacctttcgacattcttcagaaatccttgcaagaggccaatatcactgaacagacattggcagaagaggcatatttggatgccagtataggttcaagccaacagtttgcacaagctcagcttcatccttcttcatcagcatcctttactcaggcttctaatgtttctaattactcaggtcagacgctgcagcctataggggtgacgcatgtgcctgttggagcatcgtttgcaagcaatacagtgggtgtacaacatggctttatgcaacatgtggggatcagtgttcccagccagcatttgtctaatagcagtcagattagtggttctggtcaaatacagttaattgggtcatttggtaatcatccttccatgatgactattaataacctagatggatctcaaatcatattaaagggcagcgggcagcaagccccatcaaatgtgagtggagggctcctggttcatagacagactcctaatggcaactccttgtttgggaactctagttccagtccagtagcacagcctgttaccgttccatttaacagcacaaattttcaaacatctttacctgtgcataacatcatcatacaaaggggtcttgcaccaaattcaaataaagtcccaattaatatacagccaaagcctatccagatgggtcagcaaaatacatacaatgtgaacaatttgggaattcagcagcaccacgtacaacaagggatctcttttgcttctgcaagctcaccccagggctcagtagttggtccacacatgtctgtgaacattgtaaaccaacagaacacaagaaagccagtcacctcacaggcagtgagcagcactgggggcagtattgttattcattcccccatgggccaacctcacgcaccccaaagtcagttccttatacctacaagcctttctgtcagttccaactcggtacaccacgtccagactataaatgggcaacttcttcaaactcaaccctctcagctcatttctggccaagtggcctcagagcatgtcatgttgaacagaaactcttccaacatgctcaggaccaaccaaccatatactggaccgatgcttaacaaccagaatactgctgtccacttagtgtctgggcagacatttgctgcctctggaagtccagtgatagccaatcatgcctctcctcagcttgtgggtggacagatgcccttgcagcaggcatccccaactgtattacacctgtcacctgggcagagcagcgtttcccaaggaagacctggcttcgccaccatgccatcggtgacaagcatgtcaggacctagtcggttccctgctgtcagctcagccagcactgcccatcctagtcttgggtctgcagttcagtctggttcatcaggatcaaactttacaggagatcagctgacccagccaaacaggactccagtaccagtcagtgtgtctcatcgtcttccagtttcttcttccaagtctaccagcaccttcagtaacacacctggaacaggaacccagcaacaattcttctgccaggctcagaaaaaatgtctgaatcagacttcccccatttctgctcccaagaccacagacggcctgaggcaagcacagatccctgggctcttgagcaccacactgccagggcaggattctggaagcaaagttatatccgcatccttaggaaccgcacaaccacagcaggaaaaagtagttggatcatctcctggccatccagctgtgcaggtggagagtcattcgggaggacaaaaaaggcctgctgcgaaacagctaacgaaaggagctttcattctccagcagttgcagagggaccaagcccacactgtgacaccagacaaaagtcacttccgatcactaagtgatgcggtacagagactgctctcctaccacgtgtgccagggctccatgcccactgaagaagacttgagaaaagtggacaatgaatttgagacagttgccactcagctcctaaaaaggacccaagctatgcttaacaaatacagatgcctgctcctagaagatgccatgcgaatcaatccccctgctgagatggtgatgatcgataggatgttcaaccaggaggaaagagcttccctgtcccgagacaagcgtttggcacttgtagaccctgagggttttcaggctgatttctgttgttccttcaaacttgataaagctgctcatgagacacagtttggccggagtgaccagcatggcagtaaagcaagcagctctctgcaaccgccagccaaggcccaaggcagagaccgagccaaaaccggtgtgacggaacccatgaatcatgaccagtttcatctagtgcctaatcacatcgtggtctctgcagaaggaaacatttctaaaaaaacagaatgccttggcagagcactgaaatttgacaaagtgggcttagtgcagtaccagagcacgtctgaagagaaggccagccggagagagcctctgaaggccagtcagtgctctcccggccctgaggggcaccggaaaacctcatccagatcggatcatggtactgagagcaaactgtcaagcatcctagcagattcgcacttggagatgacgtgtaacaattccttccaggacaaaagtctgaggaattctccaaagaatgaagttttacacacagacatcatgaaagggtcaggcgaaccccagccagatctccagctgacaaagagcttggaaaccacatttaagaacatcttggaactcaaaaaggcgggacggcagccccagagtgaccccacggttagcggctctgttgagttagatttccccaacttttctcctatggcttcacaggaaaactgcctggaaaagttcatcccggaccacagtgaaggtgttgtagaaactgactccattttagaagcagctgtaaatagtatcctagagtgttaa

SEQ ID NO: 675 - DNA, 3181 bp, Homo sapiens
acctcattgtccccagtaaaggggttttatatataccacgaatgtaatggaatcctagccctttaccaacaatagagccaggtaccacggattccccccaaatatggaaatggtgaaaccgaaattcagggaaagacttttaggggagaaaggtcttagagaataaatgtgaactatacagtagaagaaggtagttcctcattgcccattttcttactgagttgtagtaccagattgagtccccaagtcatattcttactgatttttatgctgtagtatacaaaatttaaaactttaatgaacagccaagcacggtcactcatgcctgtaatcccagggctttgggaggcagaagggggaggatctcctgagcccaggagttcccaggctgcagtaagccctgatcatacaactgcactccagcctgggtgaaagagctagaccttgtctccaaaaaataaaaataaaaaaatcaaagctttaatgaacatccttaattagatatggcaataatatcctttggtcattgagtaaaactctttatttttatatacttaaaagtgttctttttattttaaaacatctgtataatttttagttaaaaaaaatggaacctttttcctgtgacactttcgtggcattacctccagcaacagtcgataacaggattatttttggaaaaaattcagatagactctatgatgaagtacaagaggtggtttattttcctgctgtagttcatgataacctgggagaacgtcttaagtgtacatatatagaaattgatcaagttcctgaaacatatgctgttgtcctgagtcgcccagcgtggttgtggggggcagaaatgggagccaatgagcatggagtttgcattgggaatgaagctgtatggggaagagaagaagtttgtgatgaagaagcactattaggaatggaccttgtcagacttggccttgaaagagctgatacagctgaaaaagccctcaatgtcattgttgacttactagaaaaatatggccagggtggaaattgcacagagggtagaatggtatttagctatcacaacagtttcctgatagctgataggaatgaagcctggattctggagactgcagggaagtactgggcagcagaaaaagtacaagagggagttcgtaatatttctaatcaactttccataacaaccaagattgcccgggaacacccagacatgagaaactatgctaagcggaaaggttggtgggatggtaaaaaggagtttgattttgctgcagcatattcctatcttgacacagccaagatgatgacttcatcaggcagatactgtgagggctacaagcttctaaataagcacaaaggaaatataacttttgaaacaatgatggaaattcttcgagataaaccaagtggcattaatatggagggagaattcctgaccactgcaagcatggtttttattttacctcaagactccagccttccttgcattcacttctttacagggactcctgatcctgagagatctgtttttaagcctttcatatttgtgccacatatttcacaactattggataccagttcaccaacatttgaacttgaagatctagttaaaaagaaatcacattttaagcctgacagaagacacccactctaccaaaaacatcaacaggcattggaagtagtaaataataatgaggaaaaagccaaaataatgttggacaacatgaggaaactggagaaagaactattcagagagatggaatcaatccttcaaaacaagcatcttgatgtggagaaaattgttaatctctttcctcagtgtacaaaagatgaaattcaaatttatcagtcaaatttatcagtcaaagttagttcttagtgatcatatggtcagctaatattagttcttagtgatcagtggtcagtaatcttcaaagtcaggaatctatccaccttgggtaaattatattaaacctaacttgagcagatctggattattcttggggtagtattccagtgggtatccttggactatttaaactacgtatagtgttgctgaaatagaaagaaaacagcattggaattggattcatgtatcgtgggatacaggtgttatttcaggtgatgtacttgcattattttctttagccatactaactttttgtcacaataactaagtattcaattatatataaagagtgaaacattaaaatgacgcatggatttatatttattataattatgtagtaccctcaaatcattttgtcagttacatcaagaaagcagatttttttttagtcatgaaaaatatctcaagtggtaagttgtttgtgctttaggcaaacattaaccagctctaacaagaaaaatgtctagatttacacattgtcaatacagtatattagttctgcaaatgcacttttgttaaactcaaacatgctctttgtcaagacttggctaaccagtgagcttgtagctctgattatctagcatttttagggtcattctccttaataggcttttatgttaataagatatatttttagaagagcttgtttgggagattagagaataagataaaagaaccaaaaccttaggatatactgtttctgggtctgaaatctctctcattgtttacttctgttcactcagtgaaaacagaaacaagaatgaggtagtggcaatgaaatagaattattagtatattatgaacattataacattttgaacactataatgcattatatattatgaacttttatgaactttatacatgagtaatagcttcctaaagtttataaaacattgtttaggttacataaagattaccaagtaagactcaaaattgcaaatataaacaaaagaaaaatccaactgaaaataacactaagtatttttgagtttctagaatgtccattttgggatttggttacattatcatatttactagtcactatcagcacaattaggttaataaagaagtgggtcattatattcaaagagtgctcaggaagttatgtgttcaaagttctctcataaataccatcgtctgcctgatactgctcttgtctaatagagggttgacattacaaaagaaaagatgtctgactcaagaactcagttgattctgtttggccttaagtttgggttcagtggtagggctgtcttcttaacccct

SEQ ID NO: 676 - DNA, 602 bp, Homo sapiens
  misc_feature (1)...(602): n = a,t,c or g
ttttttttttttgagacggagtctcgctctgtcgcccaggccggactgcggactgcagtggcgcaatctcggctcactgcaagctccgcctcccgggttcacgccattctcctgcctcagcctcccgagtagctgggactacaggcgcccgccaccgcgcccggctaattttttgtatttttagtagagacggggtttcaccttgttagccaggatggtctcgatctcctgacctcatgatccacccgcctcggcctcccaaagtgctgggattacaggcgtgagccaccgcgcccggcctacatgagtttacgatataacaaacctgcacatgtacccctgaaaataaaagttaaaaaataaaaataaaaccttctccttaatgaggatagtgttgccattggcagggaaagtgttaggaagtaaaagggggttctaggtgctaaaatgttctataattcatcagggtctacatggttgtgctcagttttggttgtctgtttttttttgagacgagttcactctgttgcccagctggagtgcacggcatgatctcggctactgcaagctcacctcccgagttacgccatntcctgcttagc

SEQ ID NO: 677 - DNA, 899 bp, Homo sapiens
ggccaaagtactttgttccccccgacaagggctagaatgtgttcacagaagaaaaagaaccacgtggactacactaaactctacagggccttgtgatttttccattccgtagacctcctggcattggagcagagcaagactttctataagccagattggtttgacatcgtggagtctgaagtcaagtgctgtaaggaagctgtgtgtgtcattgacatgtcctctttcacagagtttgagataacatccactggggatcaggcattagaagttctacagtacctcttctccaatgacctggatgtgcctgtgggccacattgtgcatactggcatgctcaacgagggtggagggtatgaaaatgactgcagcatagcacgactgaacaagcgcagtttcttcatgatctctccaaccgaccagcaggtccactgttgggcctggcttaagaaacacatgccgaaagacagcaacctgctcctggaggacgtcacctggaagtacacagccctcaatctgattggccctcgagctgtggatgtgctgtctgagttgtcctatgcccctatgactccagaccacttcccaagcctcttttgcaaggagatgagcgtgggctatgcaaatgggatccgggtgatgagcatgacgcacacaggagagccaggattcatgctctacatccccatagagtacagatggggcttcaccatgttgtccacgcttgtctccaactcctgacctcaagtggtccacacacctcagcctcccaaagtgctgggattacaggcatgagccactgtgcctggccccagggcgaccacggaacggatcagcgaggccaagtacactaccaccatctggtcattggtcttcaggtaaaaggccttgacgaactc

SEQ ID NO: 678 - DNA, 2052 bp, Homo sapiens
attgttgtggttgaattgtctccccaaagtccctaactgccagtacctcagaatgtgactacatttaaagacagggtctgtttggagaaaatcaagttaaaatgaggtcattagggtggaccctaatacaatatgactagtgtccttataagaagaggaaataggaccagatgcggtgcctcctgcctgtaatcccagcattttgggaggccaaggcaggcagatcacctgagtcaggagttcgagaccagcctggccaacgtggtgaaaccctgtctctactaaaaatacaaaaattagccaggcatggtggcgggcacctgtaatcccagctactcgggatgctgaggcaggagaatcacttgaacctagaaggcagaggttgcagtgagctgagatcgcgccattgcactccagcctgggcaacgagagtgaaactccatctcaagaagggcattcctaacttctgagggaacacctatcaatcatcagaaagccattaggagattattattggctgtacagaaacctaaagaggtggcagtcttacactgctggggtcatcagaagggaaaggaaagagaaatagaagggaaccaccaagcggatattgaagccaaaagagccgcaaggcaggaccctccattagaaatgcttatagaaggacctctagtatggggtaatcccctctgggaaaccaagccccagtactcagcaggagaaatagaatggggaacctcacgaggacatagtttcctcccctcaggatggctagccaccgaagaaagaaaaatacttttgcctgcagctaaccaatagaaattacttaaaacccttcaccaaaccttcgacttagccattgatagcacccatcagatggccaaattattatttactggaccaggccttttcaaaactgtcaagcagatagtcagagcttgtaaagtgtgccaaaggaataatcccctgcactgcaggccatacatttcaatccctgtatctttaacctccttgttaagtttgtctcttccagaatcaaagctgtaaaacaacacatcgttcttcaaatggagccccagatgcagtccatgactaagatctaccgcggatccctggaccagcctgctagcccatgctccgatgttaatgacatcgaaggcactcctcccgaggaaatctcaaatgcacaacccctactatgccccaattaagcaggaagcagttggagcagtcgacggccaacctccccaacagcacttgggttttcctgttgagagggggtactgagagacaggactagctggatttcctaggccggataagaatccctaagcctagctgggaaggtgactgtatccacctttaaacacagggcttgcaacttagctcacacccgaccaatcaggtagtaaagagagctcactaaaatgctaattaggcaaaaacaggaggtaaagaaatagctaatatctatcacctgagagtacagggggagggacaatgattgggatagaaacccaggcattcgagccggcaacggcaaccccctttgggtctccttccattttatgggagctctgttttcactctattaaatcttgcacagttcatccaggcagtcttcgggctgcttcaacctgtggccatggagaagatagtcatacatctcatggttctggaccccaggatagggagtcattccccgcgtagctatttcccacatggtcacgccaaatgcccacacatcacttttacttgtgtagactcggtctgcaagactttctatggcgatccatttaacaggcatcttagcaatgcggccttggcggtaataatcgccactgtaaatcttcttagagaggccgaagtccgcaacacagacagtcatgtcatctcgcaacctacagagagcaggttacgtcttcagcagcgtcagaggcaatgccgtaaattactggtctgcagtaagagcaacatgctgggcttcttgctaagatggccaggtggaagatgcagtttcgagcagctaaatctcgatgaagaaaattcctg

SEQ ID NO: 679 - DNA, 593 bp, Homo sapiens
gaggtttcgagcccggaaggtccggcgcccagagctaacgggagtcccaggttaaacactttaagatgagaaaaattgatctctgtctgagctctgaagggtccgaagtgattttagctacatcaagtgatgaaaaacacccacctgaaaatatcattgatgggaatccagaaacgttttggaccaccacaggaatgtttccccaggaattcattatttgtttccacaaacatgtaaggattgaaaggcttgtaatccaaagttactttgtacagaccttgaagattgaaaaaagcacgtctaaagagccagttgattttgagcaatggattgaaaaagatttggtacacacagaggggcagcttcaaaatgaagaaattgtggcacatgatggctccgctacttacttgagattcattattgtatcagcctttgatcattttgcatctgtgcatagcgtttctgcagaaggaacagtagtctcaaatctttcctcataatgataacaaaatggctcttgcatgattttttaacaatatatttaaacaggaagttgtcactgatatactttattaaaaggatttttatcaaaa

SEQ ID NO: 680 - DNA, 540 bp, Homo sapiens
tttcgtctggtggacctgcatcaggagcaagattcaaaccttaatggctttaagcctctcaaggtttgaggtcatgaccacagcacaacctagcctatgccagctgacaggggcagagggcagcagtagcagtgggatgctttcctggagagcaaacctcctctcagcagagttaggacggcagctttcacctctgcattcctcaggctgtaaatgatggggttcagcgagggcgtcacaaccccgtagaacaatgcgacagtcttatccacgttgggatccttggccttgggtttgaagtacatgaaggagattgtcccataaaaaaccaccaccactgtgcggtgggctgagcaggtggagaaggctttgcaccggcctgcagcagagggtaccctaaggatggcagacaggatgaaaaggtaagacaggcagatgagcaagaggggggccagtgtcaggacggctgtggccaccattaatgccagcgcattgagggagatgtccccacaggccagttttagcactgccaagatctca

SEQ ID NO: 681 - DNA, 1372 bp, Homo sapiens
acttattaagtgcctgacaacggagatgtaacgaaattgcctgtctgctccactctggttgaagaaaccagtctgactgtctctgaggctatggagcagtccatcaagaatgaaagccctctgccaggcacgttggctcacacctgtaataccagcactttgggaggccgaggcaggtggatcacttgaggtcgggagttcgacaccagcatggccaacatggtgaaaccctgtctctacagaaaataatactttgcaaggcctcagaaactctgctatccacaggcaggtcttacagtcatggctggctgcctctctctgagaactgggactcctgaacttggtgaaatacctcagccattgatcatgttaaattatcggtggcactcatttaaaatccgagtctgctccagatggactctctctttctgccctgactatgagagagagagatcgtgagagacagagaccatgagaaagaccgtgagagagagacacagagctagagagagagaccgtgtcctgacctgctggacagtggagatgcttgtgggctgtgagcaagggatgcaaaggctgccgggaatcccatttttccagcatcatctgccaaggcacatcagttcctgggtgtcttgatgggttctggcagcattactgtcattgaaggaaaacattttagccatattaaaggttaatgcagcaatctccacataggctgcctggaagggaagcaggacaaggttaggttttccttgtgatggacaggaggcaggcggccctcccacagccctgcctggcaatacagatgtgtccccaaaaggcactgggggccagctggagtgctatgccgaggcggactgacccgggccgtgggttcactctgctggcagcggtttcccgccagctccttgcagagttggcagatggcccagccccacagcaggagccgggaatggcagaacgagacacaacaatttgatatccacttgccagatgagccgggtgtcatcagtcgcctggctctatgcccaacctctttttgcataaacacttatggattcagccaagaggaaaagcactctgattatgaattgagcagaaggaaacaaagttctgcagataaacaccaatgaaacaaaaaaccacgaataagaaaaatgacagaaaaggagaaccttcccagaatcctcctgccagtgaacggtcaccagagcaagagcatggagtccctgggttttgaactgtgagataaggaagatgatgaaaacctccctagcagccagacttagatttttggctggactattggcttgggatagatgaaaatcattccttgtatcccctgatcttaaagtcaagactgaaccag

SEQ ID NO: 682 - DNA, 677 bp, Homo sapiens
ttttttttttgagacggagtcttactccatcacccaggctggagtgcagtggcccaatctcagctcactgaaaactttgcctcctgggttcaagtgattctcctgcctcagcctcccaagtagctgggattacaggtgcctgccaccatgcccagctaatttttgtatttttagtagaaatggggttttaccgtgttggccaggctggtctcgaactcctgacctcagttgatccgcctgcctcagcctcccaaagtgctgggcttacaggcctgagccaccacgctcagctcagcttcaccctgtcggagaagaactggctgatggaggtgggcaggagcgtgaggaaggccaaggggtgggcgaaggagatggaaaggacagcggagatgtaggccacgccggccaccatggagtagaggcaggccagggaggtgtagaggcagaacaggacgaagttgcgcatgttcctgctgccgatgcagttgccggtgaagaaacagtgatggtcgtgcctcagggtgactctggcgcacactcggcagaagtgggtgctaggtgaggggcatggagtcttcctggccgaggccccctggcaggcccccaggtcgtctggggagttctggatgacaaggacgtaattgcccagggcgttggccctcgtgccgaattcatgg

SEQ ID NO: 683 - DNA, 528 bp, Homo sapiens
acatcattactccaagcttggcaccaggaagactttgagctgctttttaaaaaaatcttcacataactttttatagtaacttgatgcccctctgtttcagggttaatcaagtctgatctgcgaagacacaacataaatataggaattacaaatgttgatgttaaagctgtaagtaatatttttatgattatactgttgagaagtatgtatagaataaatgtgaaaccatatttttttatttagctatttttctcccgagtcaactgttgatctgttataataggatatgccagatgctatacatttttaatcttctgattgtttttatagataccagctgacagtcccacagaccaagaaccaaaaacggttatgttgtccaagcagtcagaatcagcaatttgaagagaaaggcaaagttactgtcctgtagtaattggggacaatgtgatcatccttggagagagatgtgagcaccaaggctgggtttgtatgtggtgggggaataaacacacttacttgaaaatt

SEQ ID NO: 684 - DNA, 404 bp, Homo sapiens
aatttaatgaaagaaatgcaaaacctaaactctgaaaaccataaaacatgggaagaatataaagatactaaataaattatgtcgtatttttatggataggcacttaatgttattaaaatggcagtgctccccaaattaatgtacagattcagtgccacccttgtcaaaatcccccaacatttaactgattcctaatagcttaaaatcactttgaaaaatccatatatttataaccttttcttccctctatgatttctggtcagcttgggttttgtttttcattccatttacttcatcctcgaaaagatctatatttattctcgtttatggacattgagaaaagaaaataactttcatgtgagaaatgcaagtccttttaaataatcaggcccagagagatattc

SEQ ID NO: 685 - DNA, 440 bp, Homo sapiens
gccatagaaatcttttgccaccttttctacttttgctatttttgctgttattaagattcaagatttttagttcttcagaatccactcccgttttttggtgagtaaacccacggcacctctgccaattcatcacccctcagagatgccaccccagccccatttaagaatatcccaagaaggaggctgctgtgcaggcaggcggtgggaggctgcagagtgccaagccacacagtgcgccctgtgctgcctggcctgctagctacacagtcaggatggcaacagcgatccccggaaaccacaaggcgagatgtctgctcatgccttccctgtgcagacgtgcggggaggaagatcagaagaaaaccccacaagttcctatcaatttcacagaactttccaagtgctcttagagttgaaagataatgtctggggaaagagaag

SEQ ID NO: 686 - DNA, 508 bp, Homo sapiens
gacttcccgttcgacgacttcgcgccggtcttggatgaagcggcggccgtggtgagagcgtggggaagggtggggtgagggggcgaggccgcagctagggcggcgaaactctcctcccctcggccccaccgcgtgggacggcgtgaacgtggtgtcggagggatgtcagccttctctgaggcggcgctggagaagaagctgtcggagttgagcaactcgcagcagagcgtgcagaccttgtccctgtggctcattcaccaccgtaaacactcgcggcccatcgtcaccgtgtgggagcgggagctgcggaaagccaaaccaaacaggaagcttacttttctctacctagccaatgatgtcatacagaacagcaagaggaaggggccagagtttacaaaagattttgcaccagttatagtggaggcttttaagcatgtttcaagtgaaactgatgaaagttgtaagaagcaccttggaagagtgttatctatttgggaagaaaggtctg

SEQ ID NO: 687 - DNA, 614 bp, Homo sapiens
atggcggcggtggtagctgctacggcgctgaagggccggggggcgagaaatgcccgcgtcctccgggggattctcgcaggagccacagctaacaaggcttctcataacaggacccgggccctgcaaagccacagctccccagagggcaaggaggaacctgaacccctatccccggagctggaatacattcccagaaagaggggcaagaaccccatgaaagctgtgggactggcctgggccatcggcttcccttgtggtatcctcctcttcatcctcaccaagcgggaagtggacaaggaccgtgtgaagcagatgaaggctcggcagaacatgcggttgtccaacacgggcgagtatgagagccagaggttcagggcttcctcccagagtgccccgtcccctgatgttgggtctggggtgcagacctgaggagcgctgcgaccctcctaggctattgactgttaagtcctcaggtttggcccagattccagttcgtgcctctgaggtccaccagagggcgcatgaagcccaggctgttgccaaaccctaccctgccccacaccaaggagccagccaaaggcaaataaagttattgagtgtttagtaaaaaaaaa

SEQ ID NO: 688 - DNA, 4764 bp, Homo sapiens
cttcagcaaacagaggacaaatcactcctgaaccaggggagcagctcagaggaggttgcagggagctcccagaagatgggccaaccaggaccctcaggagatagtgatttggctacagcactgcatcgccttagcttgcgtcgacaaaactatttaagtgagaagcagttctttgctgaagaatggcagcggaagatccaggttctggcagaccagaaggaaggagttagtggctgtgtcaccccgacagagagccttgcctctctctgcaccacccagtcagagatcacagacctcagcagtgccagttgccttcgaggttttatgccagaaaaattacaaattgtcaagccccttgaaggatcacaaactctgtatcactggcagcagcttgctcaaccaaacttgggaaccatccttgatccacgaccaggtgtcattactaaaggctttacccagttgcccggggatgctatttatcacatctcagatttagaagaggatgaagaggagggtattacttttcaggttcagcaacctcttgaagtggaagagaaactttcaacatccaagccagtaacagggatcttcctgccacccattacttcagcaggtggaccagttacagttgcaaccgccaacccaggaaagtgcctgtcgtgcacaaactcaacattcactttcaccacctgtagaatattacatccctctgacatcactcaggttacccccagctctgggttcccttcattatcctgtggaagtagcggtagcagttcatccaacacggctgtgaattctcctgccttggcctatagactcagcattggtgagtccatcaccaaccgacgagattccactacaaccttcagtagcaccatgagcttggccaaacttctacaagagcgaggcatctctgccaaagtgtaccacagcccaatttcagagaaccccctccagcctctccctaaatccctggctatcccttccacaccaccaaattcaccatctcactcaccttgcccttctcctttaccctttgagcctcgagtgcatctctctgaaaattttttggcctctcgaccagctgagacattcctccaggagatgtatggcttgagaccctcccggaaccctcctgatgttggccagttgaagatgaacttagtggacaggctgaagagactggggatagccagagtggtcaagaaccctggtgcccaagagaatggaagatgccaggaggcagaaattggtcctcaaaaaccagattctgctgtttatttaaattcaggtagcagtttattaggtggactaaggaggaatcagagtcttccagtcataatgggtagctttgctgccccagtttgcacatcctcacccaaaatgggtgtcctgaaggaggactgaggttcagcagttaactgaccttttatacaagttagcacatgaaggatagatatgcactgaaacatgtggtctggtctgacttgagagaaaaggaatgttgcacaagggttgtgaatgtgaaagggggaatggaggaatggaaataaaattgggatgagccctaatggaggaagtcgggcaaattgaaagtataaatgaatggcccatgagtgttccagagggagaaaggaaaggtttaatatactccttcagttgagttttcttgtcttgaacataaaaagtgaatacaaataaattcagtaatactaaaacatacagagatactgaacttgctggcacatttacttctggtaagcataaagcagagagaacccaggttagaaggatgggaagagaaaaggagcagttttattgcttatagaaagccgttctgaggggttggtggggtaagctcagtctattactgagacaatagtgagatggcttatatgtttcccctgttaatatctggttaaattatgtatccatcaaatggtatgctcgcagcattagcaaaattaggagtttcatctttttcattgaatcacaggtggagactcctattttcctttctgttttcaggcctttgagcccctgggagcccaaataccactcaattattttgtatttatgattaataaaagttcattttttaaatttgtatttttatacaacctccaaaaaaaaaaacaactgggtagagggtgggagggatttacttttaagaggcaaaatgtgagtaaattgaaaccaagaaaacttgtttttagaatatttcgtctgaataagtacagtagccaaggaatacaaacataattgcatgtttttaaaaattccttggaggctggaaggggttaagccagaagtgcaatcaataggaattagggaatgttgtatatttatatatgtaaactttttttgtaagaaaagttggtgacaactaaaccaactttttccaaagtgcgctatgcatatttttaatgaaagatgacatgtatttgcacaaaaattctcaggcacattaaattattgtaaactgaagtaaaacccgggtgcttgctttgagattgtggttttttcttcctaatgtaaaataaaataaaacacatctgccttcttgatatttatagaattagagaataaactttttaatgggggagtcaaagctttttctttttctctaaggttctttttttttattcaaactgtatgaaatggcaaagtgaggctctggggttagatttcagcattcagcagttgacacaggctaagaaatggaaagaagtagatctgttttttctcaatgttgctgagcaaagtctgcttctcatcagatgacgtggctttgtctagacagcacgcagttcagaaagaaatgtctttatacaaaagacatgatagagaaaagatgagagaggggactaattattttgtttatgaaaatggcaagtaaattacttgatctttttggtgcttaatttgcaaatgttttgttcctttgtcctgacttaaaggcagttttctgaagaactcttgactcttgctcctatggttcccataggcacacctattcccaggccaaggagagtccttcctctccccttttgaggcatccccgccatccccccacttagagctatgtgctcaaaaagccaacatgaatgcagtggtaaaaatttgttagtttcttatactttttagaatctctcaataaaatttttctaaataaattccacaaaaacaaagggtgaagatggtctctccctttcgttccccttcactcagttgtgctgaggtcaatagagtgtagagtttcagaaaggattccagcaggtttatatgtgaatataagtgtccctgaatggggcaggcattaaatagaagaatccctgctgtttaaatttcccgcatattccaattcacttttaaaaaataccatttgaatttgtatttcataaagtgactctggggtgcttactttagtcaattcttaaaattttttatttgttccctaagaaagtaattactgtttctgttgcctggacagttacagtttccaggaaacatcaggaagtaggaaactgtagggccagagagtagtacaacgttaaattgtccgatttatgtgtattacttaaagctataaattgaactagatcttgccgtgctctgtattgagtataatttgtatacttttttataattaatgactaaatgatcactttggaggcagggtggtgggggtgtattagcagccaaataagcacatctgatcaaaaagaaccaggcttagattttttttaagtacattgatgttgatgttccaccagaaacaccttaagtgtatactgttgtgtaatgtctctagaaaggaatcctgtcttaaaactgggttttgctgttttttgaagtttctacctaaaatcatttttggtatatcctgataatctctataatactagaattgtctgcaaaatatagtaagaagaattggagcctaatagctgattcctcccaatttatctgttatgttttgtcactattcacattttagtcttttctacgataaaaattgtatgtgtactttcatgccagtataggaaacctcaatctttttttttttttcgcctttaaaaaggttttcagggattatacctcaggtatttctgagtgtcctattgtctaataggagaaatatcttcccgagctcagaattaaaagttctcctaaattatgaagatcccaaatcttatgtaaataaccttaggcatgagtccttagggagaagttaatgaccattgttaaagtgcttttttagaaaatgttgtgctgtatgttcttgatttgacataaatgaatagactttggcaagggaggaaataagttaaaaggcagcttacaagagcctattccctataaagggtataattttacacagtactcaaagcttgttatcttttctgaccattttagtacagaattagtacttggtggttactaacatcaacttgtgacatctagaactagggctcttagtgtttagtgggccacttctctgatgtcagatgcatgcagacctgtactccacatgcaacccaacagcagtgccagtgtggataactgagccgtcgccttggcagagggacatccccctccagagtggggcacaagtgccctctaggggcagccaggggaatactattggttcgatacctgggatttgactttgtcaaacagctctttgtgcccctatctttgttttgtcaaatgtagatcagttaataaacatgagtagcttgaattttaaaaaaaaaa

SEQ ID NO: 689 - DNA, 3235 bp, Homo sapiens
  misc_feature (1)...(3235): n = a,t,c or g
cctgtctctcttcgggtctcgggcccttgggcgcagcggggcgcgcgccatggcgaaggcgaagaaggtcggggcgcgaaggaaggcctccggggcgccggcgggagcgcgagggggcccggcgaaggccaactccaatccgttcgaggtgaaagttaacaggcagaagttccagatcctgggccggaagacgcgccacgacgtgggactgcccggggtgtctcgcgcacgggccctcaggaagcgtacacagactttactaaaagagtacaaagaaagggataaatccaatgtattcagagataaacgcttcggagaatacaacagcaacatgagccccgaggagaagatgatgaagaggtttgctctggaacagcagcgacatcatgagaaaaaaagcatctacaatctaaatgaagatgaagaattgactcattatggccagtctttggcagacatcgagaagcataatgacattgtggacagtgacagcgatgctgaggatcgaggaacgttgtctggtgagctgactgctgcccactttggaggaggcggtgggctccttcacaagaagactcaacaggaaggcgaggagcgggagaaaccgaagtcccggaaagagctgattgaagagctcattgccaagtcaaaacaagagaagagggagagacaagctcaacgagaagatgccctcgagctcacggagaagctagaccaagactggaaagaaattcagactctcctgtcccacaaaactcccaagtcagagaacagagacaaaaaggaaaaacccaagcccgatgcatatgacatgatggttcgcgagcttggctttgaaatgaaggcgcagccctctaacaggatgaagacggaggcagaattggcaaaggaagagcaggagcacctcaggaagctggaggctgagagacttcgaagaatgcttggaaaggatgaggatgaaaatgttaagaaaccaaaacatatgtcagcagatgatctgaatgatggcttcgtgctagataaagatgacaggcgtttgctttcctacaaagatggaaagatgaatgtcgaggaagatgtccaggaagagcaaagcaaggaagccagtgaccctgagagcaacgaggaagaaggtgacagttcaggcggggaggacacagaggagagcgacagcccagatagccacttggacctggaatccaacgtggagagtgaggaagaaaacgagaagccagcaaaagagcagaggcagactcctgggaaagggttgataagcggcaaggaaagagctggaaaagctaccagagacgagctgccctacacgttcgcagcccctgaatcctatgaggaactgagatctctgttgttaggaagatcgatggaagagcagcttttggtggtggagagaattcagaagtgcaaccacccgagtctcgcagaaggaaacaaagcaaaattagaaaaactgtttggctttcttttggaatacgttggcgatttggctacagatgacccaccagacctcacagtcattgataagttggttgtgcacttatatcatctttgccagatgtttcctgaatctgcaagtgacgctatcaaatttgttctccgagatgcgatgcatgagatggaagaaatgattgagaccaaaggccgggcggcattgccagggttggatgtgctcatttatttgaaaatcactgggctgctatttccaacttccgacttctggcacccagtggtgacccctgccctcgtgtgcctcagtcagctgctcaccaagtgccccatcctgtccctccaggacgtggtgaagggcctgttcgtgtgctgcctgttcctggagtatgtggctttgtcccagaggtttatacctgagcttattaattttcttcttgggattctttacatagcaactccaaacaaagcaagccaaggttccactctggtgcaccctttcagagcgcttgggaagaactcggaactgctcgtggtgtctgctagagaggatgtggccacgtggcagcagagcagcctctccctccgctgggcgagtagactgagggccccaacttcgacagaggccaatcacatccgactgtcctgcctggctgtgggcctggccctgctgaagcgctgcgtgctcatgtacgggtccctgccatccttccacgccatcatggggcctctccgagccctcctcacggatcacctggcggactgcagccacccgcaggagctccaggagctgtgtcagagcacactgaccgaaatggaaagccagaagcagctctgccggccgctgacctgtgagaagagcaagcctgtcccactgaagcttttcacaccccggctggtcaaagtcctcgagtttggaagaaaacaaggcagtagtaaggaggaacaggaaaggaagaggctgatccacaaacacaagcgtgaatttaaaggggccgttcgagaaatccgcaaggacaatcagttcctggcgaggatgcaactctcagaaatcatggaacgggatgcggaaagaaagcggaaagtaaagcagctttttaacagcctggctacacaggaaggcgaatggaaggctctgaagaggaaaaagttcaaaaaataaattacattttataaataaggcaaggaactggacattacctcacatctgcaattccaaccctctggtctcgaattcccgacctcaggtgatcccacctgccttggcccccccaattaaaaggtgtgagcccacagcaccccagcccaaaaaagtaattttttttagagtaataatgctataatgttggtgtgattccaacctccagctccccccacccgctgcctgcggttttgtttctgttaaaacgtcacctgatgaaatagaatgaatcctgaaatgcacctctgggatcgggaatggtctgtgtgttatcagctgcgactggttcactgcgtctggacaagcctcatggggactggggattctggccagtgtaatttctgtcaaccacggacgtttgcgtccttcagtggatgcttctgggtgctggggttctccattcaggacactgcactctcggaggtgggaggagactgggttgcgtctgtgccgacctgggatgcagtttcaggtcagaatcagaagatgtgcaagttacgcatgacacagctttttaaagtgcgnnttccgacgcncgtcaatgggtctcagttnnnnncccctnggaactct

SEQ ID NO: 690 - DNA, 304 bp, Homo sapiens
ttttttttttttgtatttttagtagagacggggtttcaccatgttggtcaggctggtctcgaactcctgacctcaggtgatccacccacttgggcctcccaaagtgctgggattacaggcgtgagccactgctcctggcctgttatatatgtcttaagtacccttctgcatgcagtcagaaatgttcttttcaagaggacatttcctttaaaaagttcaagtttcttatcttacgataaagagatatttcctatacttattgtcctaaaattctatttggtcactcttacctcttttgtgaaag

SEQ ID NO: 691 - DNA, 231 bp, Homo sapiens
tgaattgtcatacgactcactgtacggcgaattgggtacacttacctggtaccccacccgggtggaaaatcgatgggcccgcggccgctctagaagtactctcgagttttttttttttttttttgaagttttcatataaaccacagaatatagtttaattcaaattaaacatgaaacctagaataatgtcgggtccttatcaagtagcaattacattgtttaaaaaaaaaa

SEQ ID NO: 692 - DNA, 1306 bp, Homo sapiens
atcattacgcctagcttggcacgaggccgtaggactggttccggcgggctggtgaggaatggagccggtaggctgctgcggcgagtgccgcggctcctccgtagacccgcggagcaccttcgtgttgagtaacctggcggaggtggtggagcgtgtgctcaccttcctgcccgccaaggcgttgctgcgggtggcctgcgtgtgccgcttatggagggagtgtgtgcgcagagtattgcggacccatcggagcgtaacctggatctccgcaggcctggcggaggccggccacctggaggggcattgcttggttcgcgtggtagcagaggagcttgagaatgttcgcatcttaccacatacagttctttacatggctgattcagaaactttcattagtctggaagagtgtcgtggccataagagagcaaggaaaagaactagtatggaaacagcacttgcccttgagaagctattccccaaacaatgccaagtccttgggattgtgaccccaggaattgtagtgactccaatgggatcaggtagcaatcgacctcaggaaatagaaattggagaatctggttttgctttattattccctcaaattgaaggaataaaaatacaaccctttcattttattaaggatccaaagaatttaacattagaaagacatcaactcactgaagtaggtcttttagataaccctgaacttcgtgtggtccttgtctttggttataattgctgtaaggtgggagccagtaattatctgcagcaagtagtcagcactttcagtgatatgaatatcatcttggctggaggccaggtggacaacctgtcatcactgacttctgaaaagaaccctctggatattgatgcctcgggtgtggttggactgtcatttagtggacaccgaatccagagtgccactgtgctcctcaacgaggacgtcagtgatgagaagactgctgaggctgcgatgcagcgcctcaaagcggccaacattccagagcataacaccattggcttcatgtttgcatgcgttggcaggggctttcagtattacagagccaaggggaatgttgaggctgatgcatttagaaagttttttcctagtgttcccttattcggcttctttggaaatggagaaattggatgtgatcggatagtcactgggaactttatattgaggaaatgtaatgaggtaaaagatgatgatctgtttcatagctatacaacaataatggcactcatacatctggggtcatctaaataataattaaagtggctttcataatatgtaaaaaaaaaa

SEQ ID NO: 693 - DNA, 1781 bp, Homo sapiens
gcgcggtgtgtaggcggcagcaatgttccgttgagagacgcggctttcggcaagaactggattcgtggcgccacaagctcattcactgtgtaggtcccgtttccctctgtgcggcggccggcgggaccataagggcttaactcatatatttaacccccctccaaaaaggtttcgttggaaggaattatgcaaatcctgctttctggtgtccattcagcggcaatttcatgcgggtttgaaagtattcttgaagggctgtttggacctgcattattaaaagatctcagtttatttaaagactgtgaacctgaaagcatttctgattggacttttgatgaaaactgtttattctgttgcttgagaagagataaaagaaagatttgggccaggcttagtcatctattggtatggatttatccaggagctggactgcaaccgggaaaggggcatcctgctcaaagcctgtttccccacgaacattgtcaccttatgccacagcatagcttgaccctgaagatcctggaagagaagctgggaggaaaaggtgaatccggaagcaattttactttcctgcactgtaagatcctggcaacatctgccctgaacttcagctgaactcttgctgcccgtagtcacaccactacctctttagacaaacatatcaagagtttctgttttccttcatcccttgctgatgtgaacagccaagaactacagacacaacccactcattatcagcatttctgtctctgtcaaacaattagtttatagatagtcataatctttctttcttccggatggtttatccttgtatgctgaacaaaagaaaaaatgtgaagactgaaaggtgtgatttttcaattctcctcccagttaccgaatcaccctcttatttttttttccctaagcctccgttcactgtctctccctctccctttctcttcatgtgcactcacagagacccagcattgcattaccatcgtggaataatctagcgcaaacctaggaaagctgaagccacaaagtccaaagccacctttgtactcacctgcagagctccagaagaccttgatggcagcctgcctatgctgggggtttgctatattcaatctttacggcttcctgacttctgtgacagtaagccaagtgcaaaaatacacttgatgagaatttcctcttttaataatgttatttgaacaccacatattttagatttatcttatttgaaagtattagttccattgtgcctggaaaccacactcctttagattgggggccgagaggcgacaacccaacattgaggagagtttatttttaaacatggctagttgtcagtatgtacgtgagctagtatttttatgagtcgagttttttaaaggcacattctgtatactgcttagtatatgcattttataccatgtaattataaaacactcgagtaagttcagcattagaaatgtttagctttgtatgaactgagtgtgccagaaataaacctggagcaatttttaaataagcaaaataaaggagatttttctatttgttcactttaatttattcacttttgtgtacttttatgtactgcaaatcagatttcagtctaaagcgaaacatcagtaagttaataataaacctatctttcgggaagttgaatattaatctgtacccaaaacgtatttagtaaaatatttgcccccgccaccctgccatgctgacataacaacttttataatgttgaatagatgatatgggaaatactaataacaacaatgtaatttttg

SEQ ID NO: 694 - DNA, 426 bp, Homo sapiens
cgtgttctcacagctattaaccacactctgaaagaaaacctcaggaaattctacaagggcaagaaggacaagcccctggacctgcggcctaagaagacacgtgccatgcgccgccggctcaacatgcacgaggagaacctgaagaccaagaagcagcatcggaaggagcggctgtacccgctgcggaagtacgcggccaaggcctgaggggcgcatggtcaataaagcacagctggctgagaaagaaaagatatgatgcaatgatctaaaaccctggggggcgtttttaatataaccgtaggggggccgactgttattgggttaagcaaactattaattttcttctttattaggcgacaattaatacgttgtaggtgacttctggaaaggactattaatttgagtgggataaaacatggagacaag

SEQ ID NO: 695 - DNA, 2546 bp, Homo sapiens
  misc_feature (1)...(2546): n = a,t,c or g
cgcacggaaagtttggaggcttagcaaggagggtggtgccggcctccgcccggtggtggcagaactgcctgtgcgagcacggcttccacgtgggctgcgccgccgggcgtcatgtcgggcctaagagacacgctctacagctgtgaaatctgaagttcaggtttgcatttccttactgctttgtcttgaagacagaacgatgccaaagaaagcaaagcctacagggagtgggaaggaagaggggccggctccctgtaagcagatgaagttagaagcagctggggggccttcagctttaaactttgacagtcccagtagtctctttgaaagtttaatctcgcccatcaagacagagacttttttcaaggaattctgggagcagaagccccttctcattcagagagatgaccctgcactggccacatactatgggtccctgttcaagctaacagatctgaagagtctgtgcagccgggggatgtactatggaagagatgtgaatgtctgccggtgtgtcaatgggaagaagaaggttttaaataaagatggcaaagcacactttcttcagctgagaaaagattttgatcagaaaagggcaacgattcagtttcaccaacctcagagatttaaggatgagctttggaggatccaggagaagctggaatgttactttggctccttggttggctcgaatgtgtacataactcccgcaggatctcagggcctgccgccccattatgatgatgtcgaggttttcatcctgcagctggagggagagaaacactggcgcctctaccaccccactgtgcccctggcacgagagtacagcgtggaggccgaggaaaggatcggcaggccggtgcatgagtttatgctgaagccgggtgatttgttgtactttcccagaggaaccattcatcaagcggacactcctgcggggctggcccactcgactcacgtgaccatcagcacctaccagaacaattcatggggagatttccttttggataccatctcggggcttgtatttgatactgcaaaggaagacgtggagttacggaccggcataccccggcagctgctcctgcaggtggaatccacaactgttgctacaagacgattaagtggcttcctgaggacacttgcagaccggctggagggcaccaaagaactgctttcctcagacatgaagaaggattttattatgcacagactccccccttactctgcgggagatggggcagagctgtcaacaccaggtggaaagttaccgaggctggacagtgtagtgagactgcagtttaaagaccacattgtcctcacagtactgccggatcaagatcaatctgatgaaactcaagaaaagatggtgtacatctatcattccttaaagaatagtagagagacacacatgatgggaaatgaggaggaaacagagtttcatggacttcgcttccctttgtcacatttggatgcactgaagcaaatttggaatagtccagctatttctgtcaaggacctgaaacttactacagatgaggaaaaggaaagcctggtattatccctctggacagaatgtttaattcaagtagtctagtgcctttgcagaatcaaatgcctactattttatatgcatatattaaaagaaaagcaaagacctgagcccgagggagagggatggatttcaagtttccttacctgcgtatctactaacaaacatgagacctccctgttacaggtggtcagttggccaaatgtactaacgggcacatgaaagaaagaacagcaaattaccaagtgtctcagaaaatgacaaaaccatattttgacaagtttatttaatccagtgtggtagaaaaggcacaattccaatgtatcatttaaaattgaatgtcattaacctggctttgttctttggaagaaacaacttctttaaagagcttctttggctctagaaaaatttcaaacaattaaaataagaaaaaattttaaactggttttttataatgaaaatatacatacctttgtgtatagacaagcccatgcccattaaaataaagttatcctgtaacataaattttattaaataatacttccccacagatgagaggcacgcaacacctatggacaaaagggagttacagaggctgcttaaaagatggagaaaagcctgagattgaaggaggaaaaaaacccagtatttaaagtctataaaaaatactcaaaatagtggggtcctccgagtttaaaatagtccattggttatttttacattctaaagtgcctggtanggttgatattttttaaaatatcattggagaatttaatctttctttataaaaatagagcatttttctgctttctggcaaaagttggggataaaaggaaaaaaagttgtcaaaatgtaattttcagtccaattcaccaggaaaacatgcttgtgaattgtgcagtaaaaggtggtaatgactactggaagctaagtcaaaggtgatttcctacctgattttacttacttaaataaaagttactaaaaaagggaaaaa

SEQ ID NO: 696 - DNA, 1476 bp, Homo sapiens
  misc_feature (1)...(1476): n = a,t,c or g
ttttttttttttaaaattgagaaatttatttttttccatgaaatagtaagcagaattaaagaaatatacagcttaaaacagttgaaatgaccttagaattttaatgacaattacacatttatggccaaaggaaaaaaatgaatagtttttaataatgaattcactttaaaatgtttgcttaataattcatctgaaattacatggatacaaggataactgggatctgggcaccttgtaaaataaaataatgccactttatccttctcaaaaaaattgttatcccagtataacagtggtgcggttctgctccccactcacagtagccaccgttctaccatttacaaacgtgtcaagtcagtcttcctgatttgtaaggatgcctattttggttccacttaaaaatatttccagtaggcggtcagagaaaataacttatttagccccactcagagtagaggatcagtatgtcaacatattggtcggtcatggctttcttctcgtgatcactgaggtcaaatttcctcatataattataaatgttaaaagataaaattacatcttcacagcagccaaaaatttgtatattttttatgtatttacaatattgtatatatttacacgaccacatcaaatactgaattgtagaaacaagtgactatctataaaggcattcatttaatgcccaagcgcattttttcttgtgcaaacggaaacttttcttaaacttctattagaaagctaaagacagtcaacgttgcgaaggccaccatccatggttaaagagccaccgctttctaaaatgtggttattttcagcaagttctttaaccaccccttccatctcttcctttaatttcttcataccaagagtcatttctactaatgtgttagaacttggataaattggggtcatggtatgtttgattccactggaagctgtaaacattttctgaggcagagtttcttgtaactcattagtatattcttgatattttgatacttcttcttcaatatcaaaacactgattagtcagcgataataactgtttcctaagatgaagcatctttcttatccattcttctgacttattcaaaaatgcctcatactttttaacacattcatctgtaaagtgcgtcatagcttttgtggcatggtaatacagtttttgcttatcaaatttgtggatttgttcttcattataagctaatctacgttctgctttgtcttttttgaactgatagtaaatctctgtcatgcaatttaacaggacttgtagtttttctacatttctgtctttcggatgagtgccttcttgatgtgcccatgcgtctgccagtgatccacctggagataatctgctgtcgatatcctgaagactggtttctattgttccctgagaactggaaagtctcaacaatttggtgtgtatgtctgaaatttcacctaactctgccgcttccaggtanatcttcatcaa

SEQ ID NO: 697 - DNA, 520 bp, Homo sapiens
attcttacaaaggaaagagaacatcactattgtaactataccaaattactatgtatgtgagctcccagctttgacatcaagtcgttacagccacgtaatgggattacgggtgatttttactttattctttgggcttctctgaattttcctatattttgaaaaagcacctgcattattttgtaattataaaaaagtataaataagaattatacacactattatttcttcactgctatgacatgactagattacaatttttttctttttgagatgactttcggtcttgtttcccaggctggagtgcagtggcacgacctcggctcattgcaacctccacctcccgggttcaagcaattctcctgcctcagcctccccagtagctgggattacaggcacctgccaccacacctggctaattttagtagagaaggggtttcgccaagctggccaggctggtctcgaactcctgacttcaggtgattgatccacctgcctcggcctcccagagtgctgggattag

SEQ ID NO: 698 - DNA, 1586 bp, Homo sapiens
cccacgcgtccgcaaagcgaggccggggactgaaggtgtgggtgtcgagccctctggcagagggttaacctgggtcaaatgcacggattctcacctcgtacagttacgctctcccgcggcacgtccgcgaggacttgaagtcctgagcgctcaagtttgtccgtaggtcgagagaaggccatggaggtgccgccaccggcaccgcggagctttctctgtagagcattgtgcctatttccccgagtctttgctgccgaagctgtgactgccgattcggaagtccttgaggagcgtcagaagcggcttccctacgtcccagagccctattacccggaatctggatgggaccgcctccgggagctgtttggcaaagactgtcacgggaagtctttttaggataaacgtaggcctgcgtggcctggtggctggtggcataattggagccttgctgggcactcctgtaggaggcctgctgatggcatttcagaagtactctggtgagactgttcaggaaagaaaacagaaggatcgaaaggcactccatgagctaaaactggaagagtggaaaggcagactacaagttactgagcacctccctgagaaaattgaaagtagtttacaggaagatgaacctgagaatgatgctaagaaaattgaagcactgctaaaccttcctagaaacccttcagtaatagataaacaagacaaggactgaaagtgctctgaacttgaaactcactggagagctgaagggagctgccatgtccgatgaatgccaacagacaggccactctttggtcagcctgctgacaaatttaagtgctggtacctgtggtggcagtggcttgctcttgtctttttcttttctttttaactaagaatggggctgttgtactctcactttacttatccttcaatttaaatacatacttatgtttgtattaatctatcaatatatgcatacatgaatatatccacccacctagattttaagcagtaaataaaacatttcgcaaaagatcaaagttgaattttacagttcgtatattcatgtggtcctttgaaagggtattctagaaatcactggaaagaggagaggaaagaaccaggtaggcaaatggtctgtgaaacccttgggtcctggaagcagtgtgagtgtaaatgtgtagtgtttggtttcatctaaataaacaaagatgatttctttgacacttgaaataaaatacaaattcaacaaaaagtagatcagcattattaaagaaacggttcaactttgtttcttcccttagtattgctgacaaagtatctgctgtagaatacaggaattacttagaatagaaacatagtcatcacaactgttactaaatggaaaagaaaagaattattgagttaagtattcctgtcaatacgggaaacactgctagtaccttatgttggtgttagacctctctgccctacactgagaatatagttttacacaggagcaaggtttgtgaagcagcatagtgaggtagctaaagccatgggctggctctaaaggctttaaatcccagccatgtggcttagctgccatgagatgtgcattt

SEQ ID NO: 699 - DNA, 763 bp, Homo sapiens
  misc_feature (1)...(763): n = a,t,c or g
ttttttttttttaatggaaatgacaaaaatgggctgtctttatttttggaaaaaaaaagaaaaagaaaaacccaaaactcaaccaaataggtgatagcaacattattttcaaacccattgattgaaaattctagtccagataacagaataggagtggtacttgtggtctccagatatattcccctgtcagacaaaaatacttttcttcattgaagtacgcattatgtaacactgtgtatcagatgaccttagccatagagttggtctttagagcttcttcttttggtcagcaaagccatccattgcatgaaggatgcccaaatagtcagctataagcagtcctgtcttgaggggcaaaaagcttttaagaaacatcatgaagtataacaactttggcatatacaagtacattttttcttgtagaatagcttctactattttttcaactgcatattttggttccagaattggcaacagagaaggacagcctgtagtacaaccttcaaacattccagtttttataaaaaaggggcacacaatcgtggttttgatccccttttgtttttggacaaatgtttctacaaatacagattcagcaaacccaaaggctgcaaatttacttgcacagtaatctgccagcccatttactccacttaatccagctgaacttgaaatgcaaaccaaatgtccatgcggacgcgtgggtcnncccnnnagttnntnccagattnacagtagatcggtatnnnnnnnncggcacgcc

SEQ ID NO: 700 - DNA, 614 bp, Homo sapiens
tccctaccgctgaggagatgtccagcttgacgccagagtcctccccggagctggcaaaacgctcctggttcgggaacttcatctccttggacaaagaagaacaaatattcctcgtgctaaaggacaaacctctcagcagcatcaaagcagacatcgtccatgcctttctgtcgatccccagcctgagtcacagtgtgctgtcacagaccagcttcagggccgagtacaaggccagtggcggcccctccgtcttccaaaagcccgtccgcttccaggtggacatcagctcctctgagggtccagagccctccccgcgacgggacggcagcggaggtggtggcatctactccgtcaccttcactctcatctcgggtcccagccgtcggttcaagcgagtggtggagaccatccaggcacagctcctgagcactcatgaccagccctccgtgcaggccctggcagacgagaagaacggggcccagacccggcctgctggtgccccaccccgaagcctgcagcccccacccggccgcccagacccagagctgagcagctctccccgccgaggcccccccaaggacaagaagctcctggccaccaacgggacccctctg

SEQ ID NO: 701 - DNA, 1927 bp, Homo sapiens
cccacgcgtccgttcttttctgccgggtaatggctgcttccaagacccagggggctgtcgcccgaatgcaggaagaccgtgatgggagctgcagcacagtcgggggtgtaggttatggggacagtaaggattgtatcctggagccgctttccctgccagaaagtccaggtggcaccaccactttagaaggttctccatctgtgccttgtattttctgtgaagaacattttcctgtggctgaacaagacaaacttctgaagcacatgattattgagcataagattgtcatagctgatgtcaagttggttgctgatttccaaaggtacattttatattggaggaaaaggttcactgaacagcccatcacagatttttgtagtgtaataagaattaattccactgctccatttgaagaacaagagaattattttttgttatgtgacgttttaccagaagatagaattcttagagaagagcttcagaaacagagactgagagaaattctggaacaacagcagcaagaacgaaatgataccaattttcatggcgtttgtatgttttgcaatgaagaattccttggaaacagatctgttattttgaaccacatggccagagaacatgctttcaacattggattgccagacaacattgtaaactgcaatgaatttttgtgtacattacagaaaaagcttgacaatttgcagtgcttgtactgtgagaagaccttcagggacaaaaatacacttaaagatcacatgaggaaaaaacagcatcgtaagattaatcctaagaacagagaatatgacagattttatgtcatcaattatttggaacttggaaaatcgtgggaagaagttcagttggaagatgatcgggagttgctggaccatcaggaagatgactggtctgattgggaagaacaccctgcctctgcagtctgcttattttgtgaaaagcaagcagaaacaattgagaagttgtatgtccacatggaggatgcacacgaatttgatcttctcaaaataaagtcagaacttggattaaatttctatcagcaagtgaaactggtcaattttattcggaggcaagttcaccaatgcagatgttatggctgccatgtgaagttcaaatccaaagcagacttaagaactcacatggaagaaactaaacacacttcgctgctccccgatagaaagacgtgggatcaactggagtattattttccaacctatgaaaatgacactctcctgtgtacactatctgacagtgaaagtgacctgacagctcaggaacaaaatgaaaatgttcccatcatcagtgaagatacatctaaactgtatgctttgaaacaaagcagtattttgaaccagttgctactataagagtacttgaaaacctagaagaaactaccacagaagcaatttttcatgtttttctcctatgagacagatatgaaagaacaatttaaatttgaacatcaacaaaagattggtccttggtgaaataaacttttcaaaaatgaatgttcttttcaaaaaataaagtagaaaaatgcacttactaagaacatgaaaaaaaatgaagtaggaaaataagatgaagactttgtattttggctgtaaagttttattgtgtgatcatcttaaattatctcacttcattaaactcataattatatatagaagtatatgtcaattacaaagaaatgaaatgttcaaattatttataaacctgatttttcaatcagtagtttcagtctcctccccaaggaccttcttcatccaacaagttgcaaaatttgaatatcccttctgtactatattgggtgagctgtaaatgtaatgactaaaagaaaagccacagaagaaagaagaaatggtcaaagacgtggataatatgcaaattggccattatattagaacaatca

SEQ ID NO: 702 - DNA, 2502 bp, Homo sapiens
gcagtgcgcaggaattcctttggtgatgcgaatcctctgggccacaggccagtgtgagattgggaagccccttttcccagagctgtccagggcaggtgcggcaggcctgatgggtgcttttggcacccccttcctagtcaggaccacaggcacctcagagactgagatgtcggctatctgccaggaatacaggagcacctcagccaccgccgtgacattctctgactcgtcactgttgaagacgcaatcctcggactctgggaacaacagggaggcactaagccatggtcccagaaaaatcaaggccacccagggccagaggcagagccttagcaagactgagcccacccagagccagaggcggaactccagcaagaccaaggccactatacacaagaggaactccagcaagaccaaggccacccaaagccagaggcggaactccagcaagaccagggccacccagggccaggggcagagctccagcaagactgaggccactcagggccagaggcagagctccagcgagattgaggccacccagggcccaaggcaggagcccagcaagaccaagaccacccggagcccaaggcagaggcccagaaaggtcaaggctgctcgtggccggagctggagacccagcaagggttgatgccacccagggccgaagcaggggactgctccgaagttccaccaagactgaggctttgtatgactcaaactggagcctcagcaagactgagtatgcccaaggccagggctagaggtccagcaaggctgagggtgcccaggccaagagccagggcatgagctcaacttccagcaaggccgagtccacctggggacccagcccaagtctcagcaaaactgaggttgatcaggacctcacctactatgaagctgtctgaagggaccatccagaccctcccttcttgctggggaggggatgagttctacccacctccccacactggcactcagccagctgcctccttccagagcaattaaaagtcttagcaacagtcctctggtcccacagctgagtttattatacttgttttcttttacaaaattaaaaacatctaaaaccaggcccaagtggcagcttgagtccctccatttctggaaactgagaaggctccacctggcttgatatggacacagggtgtggggtggaggggaggaggtatggtgcccgaccaaggaggcaaggggcaagggtggcagactgaggagggagcaccgccacgagccacagtccctgagttataattcacagtaagaaggctcaggctgcagggggaggtcaaggctcagtgaggttctggggtgaccaggggtttccctggggaaggtggccggggccaagatgctctcgagccagtttagaggccagggcccttcctggccatctgtcccgtggcctagccgacactccgttcatctcacttggtgctctgggttcctgtgacagaggcccctggcctttcctgcatggcctggccatcaggggggccgaggacaccactcagagagtcagaggaagaaggcgattcgggaggccacggtcttgcagccgttggaggagaagagctgctcgtcttcagggaagaaggtggtgctgtccagcacagcctggacaacctcatcccttggctccaggcccagctgggccagctcgttgagcacgcagtgccggacgtggtgccgctggagcgggaggaagggcaccactgcgtctaggaggcgctcttccatgatgcccgagtttgagaagccatggtgcgggttgtccagcaccgcgcgggagatgaccggctccagctcctgcaggaggatctcctcgcggtcccgccggctgcgccacgcctccaatgccacctggttgatctgctcgccacccgtgttgctgatgaagatgaagatggctttgcggtaattggtcccgtataccacccaggaggagcccaggaaaggccgcaggacttccatcaggcctgggggcatcttgtccatctcatcgaagaggaagagggagcggccacaggcagtgaggttcccttggacccagctcttcagatccttcttgtagcgctcgatgtggctggggtgggggaagtggaggacgggagaaaagtggtgcacgcgggggctgcggaggccgccctggaagaggtagtgcgccagcagggagctgacataggatttgccggtgccggtccagccgtgcagggagaggaccagcggcttggtgggggctgggtcccgcacaaaggccttcagcgccttcaccaccagcgccttggccagatgctggccggccaggtgctgagccaggtcacactccagacccggcaagtcgggccggaagtcgcattcgcaaaaggcgcccaaggtgcagcgcagggaagccaggtcccaggcggcggccgcggccgagaccagcccgagcagcccgaggagcgagccccagggccggcagccgcgcgtcgcagccgccat

SEQ ID NO: 703 - DNA, 657 bp, Homo sapiens
ttaagccccacagccttgtgcccttggagcgccgtttctgtccttcagtgggcacctctgttcagctcacgggattgtgctcgtctcgttagggacacacgcagtccacacagtgccgcgccacgtggctctgcagtgttggtgaacaggagttgcagggaactgaaagcccgggatcccagctggtaaagggagcctcagctaccgaccgagctgctgctctcatcttgagaacttctgattcccagccctgcggggaagacgtactggtatctgattgttcttacagaaactcaggatgaaaaccgaagaagaggcccggactcatacagagattgaaatgttccttagaaaggagcagcagaaacttgaggagaggctggagttctggatggagaaatacgataaggacacagaaatgaaacagaatgaactaaatgctctcaaagccacaaaggccagtgacttagcacaccttcaagacctggcaaagatgataagagagtatgaacaggtcatcattgaagatcgtatagaaaaggagaggagcaagaagaaggtaaaacaggatctcttggaattaaagagcgttataaagctccaggcctggtggcgaggcactatgatacggagagaaattggtggtttcaagatgcc

SEQ ID NO: 704 - DNA, 1417 bp, Homo sapiens
tttcgtgggcgagccgtgaagatggcggcagtggtggaggtggaggttggaggtggtgctgctggggaacgggagctggatgaggttgatatgtcagatctctctccagaagagcaatggagggtcgagcacgcacgcatgcatgccaagcaccgtggccatgaagctatgcatgctgaaatggtcctcatcctcatcgcaaccttggtggtggcccagctgctcctggtgcagtggaagcagaggcacccacgctcctacaatatggtgaccctctttcagatgtgggttgttcccctctatttcacagtgaagctgcactggtggaggttcctagtgatctggatcttgttctctgctgtcacagcctttgttaccttccgagccacccgaaaacctctagtacagacaaccccaaggttggtttataagtggttcctgctaatctataaaatcagctatgccactggcattgttggctacatggctgtcatgtttaccctctttggtcttaacttattattcaagatcaaaccagaagatgccatggactttggcatctcccttctcttctatggcctctactatggagttctggaacgggactttgcagaaatgtgtgcagactacatggcatctaccatagggttctacagcgagtcgggcatgcctaccaaacatctttcagacagtgtgtgtgctgtgtgtgggcagcagatctttgtggacgtcagtgaagaggggatcattgagaacacgtataggctgtcctgcaatcatgtcttccacgagttctgcatccgtggctggtgcatcgtgggaaagaagcaaacgtgtccctactgcaaagagaaggtagacctcaagaggatgttcagcaatccctgggagaggcctcacgtcatgtatgggcaactgctggactggcttcgatacttggtagcctggcagcctgtcatcattggtgtagtccaaggcatcaactacatcctgggcctggaatagtgatgaagagcatcagtggaaaacccaccccacacgccatggacctcagggcactctcctccctgcccacaaagacctcctgggtgggaaagactcaaaggggcgcttgggccactcaggacccctccggctgtgtcggactggggagggatatgatggagagccagccagtggggctgtcagcagtggggggctttttaaaagaaaactattttgatgaatatatttaaaaaacctttttttattgtggagcataggaattgcccccctccaggcttcaccctccctgcctaagcagggtgggggcagagccatgacatttttggtttaaaggagccttctcatctctggccgagaacactgctgggctcccaggtagctgaaggcctcagcccacccactcccttcttcc

SEQ ID NO: 705 - DNA, 1636 bp, Homo sapiens
acatctatgatcgagatccactccagcttgccacgagggccggccaaccacttgatatcaacatggcaggagagcccaaaccatacagaccaaaacctggaaacaagaggcccctttctgcactttacagacttgaatcaaaggaacctttcctgtctgttggcgggtatgtctttgactatgattactacagagatgatttctacaatcggttatttgattaccacgggcgtgtgcctccacctccccgtgcagtaattccgctgaagcgtcccagagtggcagtcacaacgactcgcagggggaaaggagtcttttccatgaaaggtggatcgagatctactgccagtgggtcaacaggttctaaattgaaatcagatgagttacagaccatcaagaaagaattaacccagatcaaaactaaaattgactccgtgctagggcgcctggacaagattgagaaacagcagaaggcggaggcagaagctcagaagaagctattggaagagagtctagtgctgatccaagaggaatgtgtgtcagagattgcagatcactctacagaggagcctgctgaaggagggccagatgccgatggagaagagatgacagatgggatagaggaggccttcgatgaagatgggggtcatgagctgtttctacagataaagtgatcttgaaattaacgcatgatgccacaaagcaggaaaagaggaaactgttgacaacccccaggaatgttgaaagggaggttttctttactgggacagcagcatctttggttcaatttatataaaaacccaaatttataaaatggacagtattgctcagttttagaaattccatttcttctatgttttaagctgtacaattgtcaggtttttatggtttaaattgtaaatgggttttcccctttgctaattatgttttttttttcagccttaaaatgtgaaaggcatttatgaatggtaagggaaacactatatacaaatgtatatttgtaaaagctatttttatgattagcatgtttcactgttgatcatatataaagtcaggggattttgcaattctgtatttaaagcttatttccaacaatgtcatgtaagaaaagatgcatcttatgctagtttttataatttatttataatttatagtttaaagtacttcagatcataatgataaaatacttgaaaaagttatatttctgccctgtataagcaccctttttattaataaagaatgccagatatttccagatgtggatataatagttaaaagaactgttggtttgatctgtgattaagttgagcaatcgcccgctctactgaaactaaaatgatcccaattattacttcagtctgggtatgagattccattggacaagtaaggactagattgccaaggaaaagactgtccttgcccttggatcccaaaagtttaaattagtgcatacatccatgtcatttcacctcctgttcctaggaactctccattcccaagcattgccagtgttttccagataatcttagctgttgtcttgtgctgtggaaatggaagaaaccatcttcacagactgtaggagaattcaacatataatttcttaataaatactgtttcttttaaaacaaaaaaaaaa

SEQ ID NO: 706 - DNA, 388 bp, Homo sapiens
  misc_feature (1)...(388): n = a,t,c or g
cggacgcgtgggcttgaacctggaaggcagaggttgcagtgagccgaaatggcgccactgtactccaacctgggcgactgagcaagactccatctcataaattaaaaggaaagtatgatagtgttatggattttagctctgagtgagctggaaaactaggtcattatctagatgatttcagacttgaccctaattgaccatatatgaccaggaaacacttctgagtttacagctccgtggagatgacctcaacactgcctcttgatttgtttgatgcatgtcactttcattaattttccccctcctttttgaaagtcctgtggcagnactaatattttcattttatgtaatctctggtgctgctttccagtcactgtatgaagtgtcn

SEQ ID NO: 707 - DNA, 660 bp, Homo sapiens
tttgaccattcaaactaacgccttcatttctctcccatgctttctcctccgggcaggagcggaaggttttcatagagctgaatcacattaaaaagtgcaatacagttcgaggcgtctttgtcctggaggaatttggtaattacactattttgctcttaggtctggactcacatggcagtaactcaaacctcggagctccagaggagggtctaggggcagggagaaaaagaacctctgtagagaagtcaggaggagcaggagtgacaaggaagaaaagggacccctgagatgagagccgggatgtggaagggaaagatagataatggatcgcagaagagcaaatggggcctcaggtgggtttcgagtttagaggtggtcctgaagcagctcagtgaagtagcaccacctccccgtgctgggccagccagtggtcagaaagtttgggacacagcagactggcgacccccaagctccactatgtccatgtcacctgctgcaatctctctagcagcccagtgcgctagccagcctccctggcgccgctctggtctccacctggcctctgtgccagacaaaggggcaccgggcgtcgcaggcagactcacttgagggacagaggagtctagcgggacagctgtagccggaagctgggagccagcg

SEQ ID NO: 708 - DNA, 313 bp, Homo sapiens
gcagcagcagcaacccacttgggtccccttccacactgtggaagctttgttcttttgttcttcataataaatcgtgctgctgctcattctttgggtccacaccaactttaagagccataacactcaccgtgagggtctgcggcttcattcctgaagtcagcaagaccacaaacccactgggaagaacaaacaactctggatgcaccatctttaagactgtaacactcactgcgaggtccacggcttcattgttgaagtcagtgagaccaagaacgcaccagaaggaataaagtccggatacattttggcgacc

SEQ ID NO: 709 - DNA, 693 bp, Homo sapiens
  misc_feature (1)...(693): n = a,t,c or g
agcggccgccctccgtggaccaggttaccatgtccccgcccgcacgcccggccgggcagcccgagctcacgcgcgcccgcccacgtccgccggggtccctgctgatgctcggggggagtcctgtaaaagccacactgaggtcgcggcggcgagtccctgcaaggtcgcccttctgtgcgaacaggctttggtggttcttgttctaggaaacatccagcgcttcaactggccacggagttactaagtatcaaccgaacaaggtagttttaaaaggaagggaaatattgcgacacgaatgaagggacagattaacttgctcctcggatccgggcacacagctcctcctacttcttcttcctcttttcctggacacaccgtggacagaaccattttcctttgggtttcgtggtaaggtccacgcaggcaaagtgaaaccactcaattggacagtctggattgtcacagccaatcatctccccataggagacctggtggcacaggcagtacgtgggttcgtttgggtccacgggcatgtccagcacatcagaggggtgcacggacaggatggtgtcagtgaactcagaccctcctttgtgcttctttttctttggtgtgtcttcctctgatgtcctcctgcctcggccccgggaccctcttttttcctcgtgccgaattcgtcatcgcaagntcaat

SEQ ID NO: 710 - DNA, 1112 bp, Homo sapiens
gaaaatatttttagcatattatgttaaacattctttcttatttatatttccattacctaaagtctttctactcacaaatactaactccattatgtaaggcatggtaaccagtttgataatgaaggtattattttggttttgaacatatgtgagttgatgtgttgaaaacttcaatcacattacaatcttgaaaaaaaaatctcagtgccagcccctcctccccccaggttgataccaccgcaatacaattcaacaatatgcaacatgccctcaattttattttgttttgggggaaatgtgctgaagaacctagagctttttttgtttagcaccttatatcaaagtaatgaaaatgggtatgatgattacatgtgcaaatgtacaaaatcattaactctacaaagatacatcattccaaaattacagaaaaaatttaaagcatgcatttaattctttttctttaaagggttgctgaatgcttcccctgaaaaaaggtggctgttttcaaaatcagcaactgctggtgaggatttcttggcacagttatgaccagcatgttattgctgcatcttcctgataatctcagccgacaccgggggatggaaattgattgtgtggtgccgcaggccctgagctgtcttgtaactcttcccacagcgacacttgaatggtttgcggacacgaatctgtgttctgtgaccattcttagcgtgatactttatgccattcacattcttgtatctctttttacatccaggaactgggcaggcaaaaggcttctcttcccctccattcatgcacatggagctgaggatggcttcggagctgatggcactctctgtggtccaggactcatcgctgtccgactcctcatagtccacctcctcctcgtcatactcgctgcctgtcggagtgctgctgcggaatgaagaggagggggtgatgggtggggtcacggggggagtaaggcttccactgctgtggcgtgggggagtggacacattccctcgagacactgagctggacagagtcagcgagagcttcggctgaatcttcttctttagggactcctgctatcggcgggcagcatctgtcatgaacggacgcgtggg

SEQ ID NO: 711 - DNA, 1429 bp, Homo sapiens
ggggacagcctgtgtgtcccccagtataacaagtacagggaggagagggtgatcctcttcctgaagatggcctccgggcacgccttccagcctgacttggttaagaggatccgtgacgccatccgcatgggcttgtctgcgcgacacgtgcccagcctcatcctggaaaccaagggcatcccgtatacgctcaacggcaagaaagtggaagttgccgtcaaacagatcatcgctggaaaagccgtggagcaaggaggtgctttctcgaaccccgagaccctggatctgtaccgggacatccctgagctgcagggcttctgagtcagactggctggcgtgtcactcagccgcacccgtgtgcactgtaacttttgtgtgctcaagaaattatacagaaacctacagctgttgtaaaaggatgctcgcaccaagtgttctgtaggcttggggagggatcgtttctctgttttgttaaatctggtgggtacctggatcttccacacgagtgggattctggccttcagagaccaggagggagtgtctgggccgcaggtgtggcactgtggtgagagtgtgtgtctttgcacacacagtgcagcgggaacggtggggctggctggtgctgaagacagacacactcctgagccaaggtcttgtcttcaacctccccgtcccgttgtcccattttgctctgtgaaggtgcaaatccctttcttcccttcccatctcaggctctcctgttttccctcagggtccagtatgcctttgagctttagctgttagaaaggaacccccgtgacttgacacagctttcacagctggctgctaggaccggcgggctgggtgttcacgtgtgtctgtgtcatggatgcaatgcaggccctggaggactgtgcgtcacccgtcaaccagagcgtgcctccgggccagcttccctccaaggaatgagtggatttcatacaggatctctttattgcacagactgaatggctttacatgtttctaatgtgaattaggcatgtgaagcagtgggtgtccacccgtgtccctcatgggtgagccctccagctgtgagcccaggcagtgtggtcaccgagtgaggaccctcctcaccaggaaccgcatccctgtgctgcctccacctgagagttgctagggggttcttgtcgagatcatgtcatcagcacccctaagtcaagtcacgggtttccatagccaggcagttggtatgtacaattcagttcagcgtatgaacttgtatctctaatctgatgtccatttttatattttttgaaactgagcacaatgaaatcctttcttgaatcattttccttttggattataaaaatatgggggaaagtgctatgatgaattttatgcaataaatgtatacatgtgtgcacatgcacccatgctgtgaaaaaaaaaa

SEQ ID NO: 712 - DNA, 782 bp, Homo sapiens
cactgagtccatcgtgcgggcggaggaagacctccgcggacagacatgcgagacacccctgctcctcgttggcaagccgccccatgatgaaggcctacacctgggcacggagacttttggatgcagcctttaacgaaggacgcaggcatgagcctgtcctctgtgacgctggccagcgccctacaggtcaggggtgaagctctgtctgaggaggaaatctggtccctcctgttcctggccgctgagcagctcctggaagacctccgcaacgattcctcggactatgtggtttgcccctggtcagccctgctttctgcagctggaagcctttctttccaaggccgtgtttctcatatagaggctgctcctttcaaggcccctgaactgctacagggacagagtgaggatgagcagcctgatgcatctcagatgcatgtctattctttaggaatgaccctctactggtcagcagggtttcatgttccgccacatcagcccctgcagctctgcgagcccctgcactccatcctgctgaccatgtgtgaagaccagcctcacaggcggtgcacgttgcagtcggttctggaagcttgtcgggttcatgagaaagaagtgtctgtctacccagcccctgctggtctccacatcagaaggctggttggcttggttctgggtaccatttctgaggtcagtagagaaccgtgcttttcaagcagtagctgctggtcatgtgtggctattaaaatttgaattagttatattatcattaactaaaataaaat

SEQ ID NO: 713 - DNA, 478 bp, Homo sapiens
  misc_feature (1)...(478): n = a,t,c or g
natcgagatccctagtccagngtggaggaactcatcctggtgtcccggctggacccccacctccacacccccatgtacttcttcctcgcccacctttccttcctggacctcagtttcaccaccagctccatcccccagctgctctacaaccttaatggatgtgacaagaccatcagctacatgggctgtgccatccagctcttcctgttcctgggtctgggtggtgtggagtgcctgcttctggctgtcatggcctatgaccggtgtgtggctatctgcaagcccctgcactacatggtgatcatgaaccccaggctctgccggggcttggtgtcagtgacctggggctgtggggtggccaactccttggccatgtctcctgtgaccctgcgcttaccccgctgtgggcaccacgaggtggaccacttcctgtgtgagatgcccgccctgatccggatggcctgcatcagcactgtgg

SEQ ID NO: 714 - DNA, 493 bp, Homo sapiens
  misc_feature (1)...(493): n = a,t,c or g
natcgagaccctaggcagtgtggngcaattcgtccatattggtgtgaaaataatataataggaataggaaaattgtccacggctgatggtaaagcctttgcagatcctgaagtacttcggaggttgacatcgtctgttagttgtgcgttggatgaagctgctgctgcacttacccgtatgagagctgaaagcacagcaaatgcagggcagtcggacaagtaagtacatttttgctgccatcagtatgaaatcattttcttaaaaataataacaaatagctaacatttactgagcatttattttgtgcctggctggcactgtgctaaccacttaacatgtgatgtcttatttagattcacaaaaactttataaggtatagattttgtttttactcccattttacagatganaagttaaagagagatgagtaacttaatcaagatcaaatagataataagtggcagagcaccagtgtctttccgactggcaggcg

SEQ ID NO: 715 - DNA, 1909 bp, Homo sapiens
gcaaggtgaccgccccacggcggccccagcgctacagcagcggccatggcagcgacaacagcagcgtgctgagtggagagctgccgcccgccatgggccgcaccgcccttttccaccacagcggtggcagcagtggctatgagagcctgcggcgcgacagcgaggccaccggcagcgcctcttccgcccctgactccatgagcgagagtggggctgcctccccaggcgcccgcacccgcagcctcaagtcccccaagaagagggccacaggtctgcagcggcggcgcctgattcccgccccactgcccgacaccactgccctgggccgtaagcccagcctccccgggcagtgggtggacctgcccccgcccctggctggctccctgaaggagccgttcgagatcaaggtgtacgagatcgatgacgtggagcgccttcagcggccccgccccaccccgagggaggcccccacccagggtctggcgtgcgtcagtacaaggctgcggctggcggagcgcaggcagcagcggctgcgggaggtgcaggccaagcacaagcacctgtgtgaggagctggccgagacccagggccggctgatgctggagcctggccgctggctggagcagtttgaggtggacccggagctggagcccgagtcggccgagtacctggcggccctggagcgagccacggcggccctggagcagtgcgtgaacctgtgcaaggcgcacgtcatgatggtcacctgcttcgacatcagcgttgcagccagtgctgccatcccggggccgcaggaggtggacgtctgaggctgggcgccggacaagaggagggggcgtgcagcgggctggaggacgggacgtgggacggagcgaggatgtggtgggggctgcggggggaggatgcggaggggtttctgtgcaggacgggagtctcagagaggagacggagtgtgggggagggagggccggccacgcggtggacagagcgagggtgccagggtgacccgaagaccgtcaccacccgacagcaacgcaagtgcctttgaccttgatttggacttttctcccttttgcatttggtgctacagacttgagacaccagcagaagttgtgttcagcccggccccgctgcgcctgtccgggccggggctggcgccggttgtgtttgtgtccaccttgccttctttgcagccaagcagtttttgtggagtgggacttacctgcacgccccaggggtctttcaggattcaggatgacttttcttttacaatggtttcctctcggcagagcccgggttgtgggggatctgtgtggggttctcaacgcagatccatcctggggtctcccgggcagggatggctgacctcgagtcccctcccttcccgagaacccgctctgtcccgagggcagctaacaagggctgagccccaggtacaggttgcctcctccacggcaggaatttttaccaaaaccacaagcaaaaaacaaaacagaccaccacgaccaacaacaaagatggggggtagggttttgtaaaggttctgttaggttcatatttttatatcattttgcccataaatgcggaatttgccgtgggaatttgaagacaaatgatctatgtttttatggttttctagggaaggtgttctgggggccgggctctctccagctgtgggaggcctgctccctctggggggcaccctgggcagggtgggggggccttgggaggcgcttcttgccaaatgcagacgaggggtgagcctgccagcgtttgcgacgtccccgcacgacaggctcatactttctgaggatcgtgcatagcataggacgtctgaacctttgtacaaatgtgtagatgacatcttgctacagcttttatttgtgaattaaagatgcatcgatggtta

SEQ ID NO: 716 - DNA, 1664 bp, Homo sapiens
  misc_feature (1)...(1664): n = a,t,c or g
taacttatttaagctgaactggtgatatctattataagcagaagtagtcttttcttggtaaataatccagttagcaaacctgaatagtatttatgtcttatgaatcctgccagttgtttcccaagttatggtaaagtaacatagattagatatcaaaaggactagaccagaatcagttgttttcttcttttcctgtagagtacctaacagaaatagtgagaatatatggcaacaagattagacacaaatgtgtggaagtctcccagaaaaatggtagcaccagatcagcaccaggaggccagtgttgagtaatagaaccagaaggccaacatccagacaggcagattagtctgaggctattttaagtgctagaaggtgtgacttcctttcatcttcctggttctatcttaagtgacataaaaaatgttataatagcttttctctttctggtttttattctcctggatatggagaaaacaagtttactgtcactagtanaaatattgcagtacctctttgtgaaatgaacaagatttattcctattattctgattcctccagcagtgaaaggactatggatctggttttggaaatgtgcaataccaattccatccactggtgtggaatttcaggaagacagctgggaaagctgcatccaagttcttcgctctgtcttgcccttactctgctttcttcagtacagggactgcaaagcatctctggcttaagactaacagacacattcttaaagagaacatatgaatatgatgacatcgcacaagtctgtgtggtatcttctgccattaaagtggaaagctgaaggaaacttccaatgttaggcttttcatttagtttcacagaactgctctttttgttacctttgtaaaatgatgacgtcaacaacgaagtaaatatgttacttaaattttctttcctgtaaaatggttaaaatattaaatatttgttttgaagagatctgattttatcttgtaatttatatttgaaatgaacatgtgtatattttctacacctattatttaatttcatttcattttagatgaccattggactttgttctccaaaagctgtgtatctgagaccatttgtccctagcaagttatctagaacacgagtcagcacactttttatgtaaggtacaagatactaaatattttaggctttgcaggccgtaaggtttctgtcacaaatactgaactctgccatcgtacttcaagagcagccagtaggcaaaaaaagtacagtggtgtacacaaaaagaagcagttggactcgggaagctgaggcaggagaatcacttgaaccggggaggcagaggttgcagttaagccgagatcatgctactgcactctagcctgagcgacagagtgagactctgtctcagaaaaaaagaggcagctgggcagatttggcctgcagggtatagttggctgacctcaatctagaagatagagttgttcttagactttgtaatattttggttagaaatattcagttantccagtttttnctactatcggncacagaaaaagtttcttaaancaaaggggtagtcctcttatacctgatattgncacacagtataanttctagttgtttcaaaattctgtaatggttgtgctgattgatatatcctcaacatcata

SEQ ID NO: 717 - DNA, 620 bp, Homo sapiens
ggaattcggaagatctgctcaagtacttcaatccagagtcatggcaagaagatcttgataatatgtatctggacacccctcggtatcgaggcaggtcataccatgaccggaagtcaaaagttgacctggataggctcaatgatgatgccaagcgttacagttgcactcccaggaattactcggtcaatataagagaagagctgaagttggccaatgtggtcttctttccacgttgcctcctcgtgcagcgctgtggaggaaattgtggctgtggaactgtcaactggaggtcctgcacatgcaattcagggaaaaccgtgaaaaagtatcatgaggtattacagtttgagcctggccacatcaagaggaggggtagagctaagaccatggctctagttgacatccagttggatcaccatgaacgatgtgattgtatctgcagctcaagaccacctcgataagagaatgtgcacatccttacattaagcctgaaagaaccattagtttaaggagggtgagataagagacccttttcctaccagcaaccagacttactactagcctgcaatgcaatgaacacaagtggttgctgagtctcagccttgctttgttaatgccat

SEQ ID NO: 718 - DNA, 407 bp, Homo sapiens
atgaatgtaaactgcttagcacctcacctgtgagagcaagcattctgaaggtgctagctttcattattactttggcatctctggacttacgcgttttcttgggctgcctcttcggcttttgagacctttctgtagcaatatatcatctcgatgagcagccacaaggtgaggaagaccagaaggatgtacatcatgatttctgagaccacagaggtgaagtcctctccagctgaaagaaagagaatgaggttcagaatatgcaaatccagcaaacctagagccgtcattggagccatatttttaagtacagcttaaataaagactgagtaaagaaactcaagaagatgtcaaaggtattccaaatcctgactctcccgcccattggctttctcactgactgtcatcac

SEQ ID NO: 719 - DNA, 330 bp, Homo sapiens
  misc_feature (1)...(330): n = a,t,c or g
aaaaattgtgcaaatgaagctgtggttcaaaagattttggacagggtgctgtcaagatacgatgtccgcctgagaccgaattttggannnatgcttgctactaacagtacccggggccttaatgaagatgagctcatggcccatggccaagagaaggacagtagctcagagtctgaggatagttgccccccaagccctgggtgctccttcactgaagggttctccttcgatctccttaatcctgactacgtcccaaaggtcgacaagtggtcccggttcctcttccctctggcctttgggttgttcaacattgtagcggccgaacgatgc

SEQ ID NO: 720 - DNA, 1104 bp, Homo sapiens
  misc_feature (1)...(1104): n = a,t,c or g
tttttttttcgtgaggaagggctcatgccccttatttatgggaaccatttcattctaacagaataaaccgagaaaggaaaccagagctgggactgctgccgtctgtccggtagagtgaagcaagggggctggaatagggcctgttcagcccctgtccctgctgaaacggctgtgggaggctgggccctgggacgccctctcatagcgtccagcgatccagacaaataggagagccgtgacggcctgaatgccagccagcaggaagaagtagaggtccatccggcaattgttgatgttcccaaagtccttggggcagtgcagccagcccccgggcaaggacagcagtgccactaggctggagcccaacagtgagcccacccccgacaggcagaagaagatgcccatgatggcgccctgcatggagcgcggggcctctgagtaggcaaactccaggcctgggatgctggcaaagatctcactgatcccaatgagcaggtactgagggatctgccaccagatggacagtggtgccgcgttgtacaggacctccccaatctgctgggacacggtctcgttgtggtggatgtagtgtaagcgctccatctccaggactcctgccacaatgacggaggtaaaaccaaagaacatccccagcgccatcttctgcagagcagagggaagcagcttgcaccgcagcagtaaagggtcgatcaagcggtccttcagagggaccagaatcagcaccaccacaacattggccaggaggagccaggcttccgggatctgggcaggaggaagtcaggagaggcaggctagcagagtgcaaggagcctggctgcagtcaggagacctggactctagactggccctgggtgaccctggggtccagctcctttccctctctggagttcatgctcctcagctgtgtaaccagggagtgggattatgtagagatggcaaataggttcctcttgtattctaacttttatcaattggtagtggctgattatggaacatttatgggctcagcataaaaaaagtcatgattgactagtgatgtctccgaattcccccactggatacgaactcgagnnnngccgctcc

SEQ ID NO: 721 - DNA, 2716 bp, Homo sapiens
  misc_feature (1)...(2716): n = a,t,c or g
tgttctgannngggcccgttagcagcngcangnacnnngggnnaancnggaagcgcacgattgtcattttgggacccctctgcacgttgcctgtgtccgggagcatctggactgtgtcaaagtgctgctgaatgcagcttgatgaatgtctgctcttatcgtgagaaagttgaggagtgcagagcttactctcttctctgaattgcctactgttttgggggccaacgtgaatgcggcaaagcttcatgagactgcccttcaccacgcggccaaggtcaagaatgttgacctcatcgagatgcttatcgagtttggcggcaacatctacgcccgggacaaccgcgggaagaagccgtctgactacacgtggagcagcagcgctcccgccaagtgcttcgagtactacgaaaagacacctctgactctgtcacagctctgcagggtgaacttgaggaaggccactggcgtccgagggctggagaagattgccaagttaaacatcccgccccggctcattgattacctctcctacaactgaattgcaggtggggtccggaccgtgactgcccccgttgtgcccagcattgcccgggtgagggctctgcctgttcctctgaagcagcgtgattgctgtagatagaacaacgctccttcgagtcccttcctgcgatcctgtttaggcttctctcctggatcctggataatgtttccagggtgttgggaaggcctgcgtctcaggtcacagttgtgggtgtggccctgcgctgttctacagaacctaccctctcaatgggcatgggcccaaccatccagttttcctcttttacggaccatcctcaaaggcactctcaggacagacggcgtggggagcacagaggaggctggcagagctggggactgagggcattgttgctgattctcactcaccggggcagcctgccgcagatgcacaggccccaggtgcaggccaccacctccgggtcggcaccaggactgccctcggtgctcatagggaatggctgggcccacggaaggtcggcctgggatgtggcctgggactgctgctctgctggctgctgtgtggatgcttttcctggagcactttccaaggcatcccccagccccaagcctgcgcgcatctgtcactcagggactttctatgggtctttgtgggggaaggccctggctttgtattccccacaagtagcactgagtttcttaggaaatttgtcttcagtattaggtctccaactcttgtaaaaagtttatatgtaggataaaaaccttttagaggacacgtaggcggtaccactaaggttttggtaatgagccattcaaaccgacagcagtgtgaaggtgtgtcaaggtgtatattctcgtggctcggcattctcagtgcaaaggcctgtttggagactctgtgggaattgtttttcatctgtttctatggttgtcaaatgaattcttcacccaccctacagtttgctaactccttgaagctatcaaattagtaagagaggctgcccgcacccagggggcaccatcgcccacttattatttagttttgcggatactcatggaccatctatcacatccagcattgtcccagtgctttgagttggacgggaatgggactctgcagccaaggcaggataagataatcttgcaatcccgtcctgcagtgatagaaacaggtcgttctgcattataagccataggtggagcattcggtagcgtattcagactgcatgggccggcctaggagtctttgccttcataaattttaagaaccccgcccacaacagggagttaaactggaggactttgcatgattagttcagggatgagtggtttctggggcatctgaggtcaggagttcgaaaccagcctggccaacttgatgaaaccccatctctacccgttctggagaacaggtcacgcctgtcctggagacagtgtgccgggaaaagggaacgtggtactcactggatgcacccaggccggcccgagcctcccaccgcagacagtgtggaacagagtgagcctgagctgcccaaggcgatgccctttgtgctgtatgactggaggcctctccgcgtgggtacttgggggtggggccacaaatctggcgaaaaacttcatgctggccgccgtgaggttttactccagcgttcccgccattgtcatggcgggtcttcgtcctaaactgagaagaaaagcattcctgtttaatcaccgccttagttaccagttctggatcagtcagtgtttctgcatggaataacaaccattaaaaaaagcactgggttctgccctttcatctttgtaagagattcttgcctctagcaatgacaacctgtgatgtctcacagtagagcacttagcgcagaatcaggtccccacggctgttgctcaataaaagtggcggaataaagtgcatccctgtgttcacacgactctttccttatggggcagaaacaccaagatgggcgcatcctgtgtggatggagaggggtggctctcgtcttgctgtgtcccaggtcgattggcagcgctgtgcttgccagggagccacactttcccatctcttccccaggtctcctgatgccaacttcagcaccccccttatgtggactattcttgggggagacagacgctgtccacgggaccaggtgactgggattttgggtcctcccctgcccttatgcagggctgt

SEQ ID NO: 722 - DNA, 3806 bp, Homo sapiens
tgtgccccagcctggatattcgctcagaggtggcagagcttcgtcagctggagaactgcagcgtggtggagggccacctgcagatcctgctcatgttcacagccaccggggaggacttccgcggcctcagcttccctcgcctcacccaggtcaccgactacctgctgctcttccgtgtctacggactggagagcctgcgcgacctcttccccaacctagcagtcatccgcgggacgcgcctcttcctgggctatgcactggtcatctttgagatgccacatctgcgtgacgtggcactgcctgcacttggggccgtgctgcgtggggctgtgcgtgtggagaagaaccaggagctctgccacctctccaccattgactggggactgctgcagccagcacctggcgccaaccacatcgtgggcaacaagctgggcgaggagtgtgctgacgtgtgccctggtgtgctgggtgctgctggtgagccctgtgccaagaccaccttcagcgggcacactgactacagatgctggacctccagccactgccagagagtgtgcccctgcccccatgggatggcttgcacagcgaggggcgagtgctgccacaccgaatgcctggggggctgcagccagccagaagaccctcgtgcctgtgtagcttgccgccacctctacttccagggtgcctgcctgtgggcctgcccgccaggcacctaccagtatgagtcctggcgctgtgtcacagctgagcgctgtgccagcctgcactctgtgcccggccgtgcctccaccttcggcatacaccagggcagttgcctggcccagtgcccttctggcttcacccgtaatagcagcagcatattctgccacaagtgcgaggggctgtgccctaaagagtgcaaggtaggcaccaagaccatcgactccatccaggcggcacaggatcttgtgggctgcacgcatgtggagggaagcctcatcctcaaccttcgccagggctacaacctggagccacagctgcagcacagcctggggctggtagaaaccattactggcttcctcaaaatcaagcactcctttgccctcgtgtccctgggctttttcaagaacctcaaactaatccggggagacgccatggtggatgggaactacactctctacgtgctggacaaccagaacctacaacagctagggtcctgggtggccgcggggctcaccattcccgtgggcaagatctacttcgccttcaacccgcgcctctgcttggaacacatctaccgactggaggaggtgacaggcacgcgaggtcggcagaacaaggctgagatcaacccccgcaccaacggagaccgcgccgcctgccagactcgcaccctgcgcttcgtgtccaacgtgacggaggcagaccgcatcctgctacgctgggagcgctatgagccactggaggcccgcgacctgctcagcttcatcgtgtactacaaggagtccccattccagaacgccacagagcacgtgggtccagatgcttgtggaacccagagctggaacctgctggatgtggagctgcccctaagccgcacccaggagccaggggtgaccctagcctccctcaagccttggacacagtacgcagtgtttgtgcgggccatcacgctaaccactgaggaggacagccctcatcaaggagcccagagtcccatcgtctacctccgaacgctgcctgcagctcccacggtgccccaagacgtcatctccacgtccaactcctcctcccacctcctggtgcgctggaagccaccgacccagcgcaatgggaacctcacctactacctggtgctgtggcagcggctggcagaggacggcgacctctacctcaatgactactgccaccgcggcttgcggctgcccaccagcaacaacgatccgcgcttcgacggcgaagacggggatcctgaggccgagatggagtccgactgctgcccttgccagcacccacctcctggtcaggttctgcccccgctggaggcgcaagaggcctcgttccagaagaagtttgaaaactttctacacaacgcgatcaccatccccatatccccttggaaggtgacgtccatcaacaagagcccccaaagggactcagggcggcaccgccgggcagctgggcccctccggctggggggcaacagctcggatttcgagatccaggaggacaaggtgccccgtgagcgagcggtgctgagcggcctgcgccacttcacggaataccggatcgacatccatgcctgcaaccacgcggcgcacaccgtgggctgcagcgccgccaccttcgtctttgcgcgcaccatgccccacagagaggctgatggtattccaggaaaggtggcctgggaggcctccagcaagaacagtgtccttctgcgctggctcgagccaccagaccccaacggactcatcctcaagtacgaaatcaagtaccgccgcttgggagaggaggccacagtgctgtgtgtgtcccgtcttcgatatgcgaagtttgggggagtccacctggccctgctgccccctggaaactactctgccagggttagggcaacctcactggctggcaatggctcttggacagacagtgttgccttctacatccttggcccagaggaggaggatgctggggggctgcatgtcctcctcactgccacccctgtggggctcacgctgctcatcgttcttgctgcccttggtttcttctacggcaagaagagaaacagaaccctgtatgcttctgtgaatccagagtacttcagcgcctctgatatgtatgtccctgatgaatgggaggtgcctcgggagcagatctcgataatccgggaactgggccagggctcttttgggatggtatatgaggggctggcacgaggacttgaggctggagaggagtccacacccgtggccctgaagacggtgaatgagctggccagcccacgggaatgcattgagttcctcaaggaagcttctgtcatgaaagccttcaagtgtcaccatgtggtgcgtctcctgggtgtggtatctcagggccagccaactctggtcatcatggagttaatgacccgtggggacctcaagagccatcttcgatctttgcggcctgaggcagagaacaaccctgggctcccacagccagcattgggggaaatgatccaaatggctggtgagattgcagacggcatggcctaccttgctgccaacaagtttgtgcaccgagatctagcagcccgcaactgcatggtgtcccaggacttcaccgtcaagatcggggacttcgggatgactcgggacgtgtatgagacagactattaccgcaagggtgggaaggggctgctgcccgtgcgctggatggcccccgagtccctcaaagatgggatcttcaccacccactcggatgtctggtcctttggcgtggtactctgggagattgtgaccctggcagaacaaccctaccagggcctgtccaatgagcaggtgctgaagttcgtcatggatggcggggtcctggaggagctggagggctgtccccttcagctgcaggagctgatgagccgctgctggcagccgaacccacgcctgcgcccatctttcacacacattctggacagcatacaggaggagctgcggccctccttccgcctcctctccttctactacagcccggaatgccggggggcccggggctccctgcctaccaccgatgcagagcctgactcctcacccactccaagagactgcagccctcaaaatgggggtccagggcac

SEQ ID NO: 723 - DNA, 387 bp, Homo sapiens
ctggcctggattgacaacatcctcccagagaaggaaaaaaaggagacagacaagaagaggaagagaaaaaaaggggcccacgaggactgtgatgaggagccccagttccctcctccctcggttataaagattcccatggaaagtgtccaatcagatccccaaaacggtatccactgcattgccagaaaaagatcttccagttggagttactcactctgattcttccttcagggacacagaacttgaccgaagcatcaccttgcacttcaaaatatcctgtccagcttcacctgctttcagctactcacggaacccagtgttcatggtgccacaggtgaagatagagatggagtcagactatgacttcacagacatggataaataccg

SEQ ID NO: 724 - DNA, 4235 bp, Homo sapiens
tttgaacactgcaaaaggcttttattttataggcaccactgcaaaatgaggaatcacatcaaaacatatcaaatagaaaataataatttattttaacttcattttactgtttgtaactaatcatgattttgtgaacttgcctgtataagtctgtaccttcaaatctacaaagcaaaagtttactacaatgagcacttaaaattccacaaaccgtctccatccacaactttcctgtacatgcaaattctttcagtgggctgcaatatttgcaaacatgctttaaacttccataaagatgcaagatattttgctttctgctaaaacctttacactctcttgggaaccttaaccaggaaaatgtttaaatgtatatcccaactctaaacgctgccggtttggttatatgtattaaatcgttaaccaccgggttgggtggttttgagttgaaaccttcacctaaatgataatatcttaacggtcacgcatatgaaacacattcagtaacgtaccattataaaatagggttccattaaaaatacatactggcagttgtatttgtgttttaggcaggaaaaaaagcgtgtttaacttttttatatgaatatagtttaaacaagttattctgtgaaagtatgcttaataaaagatctttctgaaatttaaacactttatgtaaaagggtacaggtagaaaagtacaattgctatttgaaaaaagctctgtttgttaatattgccttccaagatagtaagggtgtttttctctctcttcccttaaaatagacctatgacacccagagttgtagggtttgcaaatttggactataaacatgaagaccgtacttatcttatatacaaaaacttgccgcattgaacgaggcaggaatttctaccccagtggtagtggtctcctttatgtacataatgcagaagtgaaaattatacagtagtcaccgataggaaggaattgtatactctagtgccgtccggggattttgtgccgtgggttaagagttcttggatcgtcatccagttatcgaagattttcttattcctcttcttcatcatctttttgtggctcagttcgagaatgttcatctccttcctgtcatcggctgcttgctgctccttgagacaatccaacctgctctgcatcatgaactcgcgccgccgccgctgctccttggccttcaccaggtgctgcttcctctcctccttgctccagtagcgccccatcttcatctcgctcaccgcgtcgtcgtcggtggtcatgccgctgcgctcttcccggatcttcagggcgcgctcccgcagcaggcggtcccgcacgggcctcttggtgatgtagcgcgtcccgtcgctgcggatcttcaccttccactccatgcgcggctccgacggggtgggagagctcaggtccttgcacatgctcaccaggctcatctggctttgcgcgtactccacggccgacttctgctggatcagctgcatgtagctctggtagtgctgggcgtgcgccgggatgtgcgcgtgcttgtatggggagtggtgataggagggcaggtaggcgctgcccagcttctggctgggcgtggggctccggctcccgtcgctggctctccgctctttgctttccaggggctggttggggtccagctccttcagggacgggctataggtaggggtgcccacttcgggatcttccgtgatggagagcagattcttggaggctggcccgtaggcttccgtggtccccacagccccttcgctgctcgggcagctgatgccctccgccgctctcctcaaggagttgtcgggggagatctccagggtgagcggggtgctgcggcagctctcgcctgtgttgtaggcgctcgagctgtccttgtcggatttctccgggagctcggtgatatctgagagctcgtgtctgcgcacgtcgatgctggtgttgtagttgcggaagccgctgttgtgcagcatccaggactcgcggtactgctccttgagctgctgcatcttgtgggcgcgcacgatgctcaggcactccagctcgatgctgcgcagctcttcgttcagcagctccagctccttgtccacgctctcagggtcactcttgccggcgtccagggggccgctagggtagtacaggccgtaaggggtggcgctcttcacctggcacttgagctccaggagctcgcggaagcgctcgcactcgtccaccgggatccccaggtagtcggcgtccgtgcagtcggccgaaatgaaagactcgttgctgaagggcaggtcgccgctgcccaaggtgtcctggctgcaggtgagcttcctctgccccgccagcgggttggaggatgcggtggcgtcgtcgccattgttctcttgctccgagctctcgtcattacgggtgctctcgtcggtccgccccacaccgctgtccttctcgtgctggttggacaagatggtggctgtatctgtggtcccaccgtcttcgtcgtgcttcttctgctgcagcacgctagctgtgaattgcatggcctggtggtgctgctcctccagcatgtccatgtgcaggtcatccagaaagtcgttcctgtcatcatccatccagccctcatccagctggagttcagcccttgcaatcagcaatgaaaagtttttattttcttcactggttagaagagccacagcctcttcacggttctgcacctctatcccattaatctggataatgcggtctccttctcggatgcgcccatccttggctgcaatgctgttagggtcaatctcactgatataaatcccaatgtcgtcttcatcgtccgtccggtagcacacagtgaggcccagcttgtcctggctgttcattctgtagaggtccacttcctccagctccagctcctccctgtccatctcctgatggatgtctccaatgtagtcatttggatcgtagtattcatgggctgagggatgctcctctggcaagagatagggatccagcacgggtgggctgggagaggacatcttagtgagggccatgatatgttcaaaggtgatgtcggtttgggttcccgtgtccaccagctgagactctgatggaggcgtgaacattttggtccttggtgttcttctcaacacctgcaccactatgggctccttggctgtcttgaaagcttccacagcctggtcatgagttgctctggataagtctctgccgttgacctcaataatcctgtcatgaatttgcaggcctccttccttggctgcaggcccactgtcaactatcttggatacaaagattccttcactggatgatccatcgtggttatccacactcggccggccaccaataatattgaatcccagggagccggagtcccgatgcaggacaagagtcagacttttggtttcttcgcccttgccgccgggcggcgcggccacgcagcggctgagcgagtcgaggcgcgcgctgtattcggtgaatttcttctggtagcgcagcgcggtcatctgcagctcaagctgcgccgcggccagctgggccaccagcgacttctcgcgcttcccagcgcgcagcgcctccttcttgagcgccttgtgcagcgcgcccaggcgggcctggagcgcgccgttgtgcgcccgcagcgctcgcgcgcagcagtggccgcccgcgcgctgctcgccgtgcgtcaagggtagcccgcagccctcctggcagcggcccactggccgcgcgtcgcacgcgtcgcgcatgtgcgcctccacgtcgcgccgcagcagcacctggccgcaacccgcgtggcgacagcgcgcgggcgcgaagtcgcagcgctcgaggtgctccggcagctgctgcagcttgaccacccggccgcagccgcgcgtcgcgtacgcgcacttgatgtccagcttgaggataaggcgcttgagcggcaggacgtggttgagctctttggccgacaggcgaccgcggcagcgcgccgggcagctgccctcctgcaccacccagggcagcacgcagccggcgcagaagacgtggccgcacggcgtggtcagcgggtcctccaggaccttgtggcacagcgcgcacttcaggtccgggtccacgtcgccgtcgaagcggtccagctcgaagcccatggtggcggccaggccccggggtcgccgccgggcggccgggcgccccctccctccccacgaggcggcccagacaggccggctacgccgcccgcgcgc

SEQ ID NO: 725 - DNA, 2863 bp, Homo sapiens
  misc_feature (1)...(2863): n = a,t,c or g
ggcagatctccaccgaggtcagcgaggcccctgtggccaatgacaagcccaaaaccttggtggtcaaggtgcagaagaaggcggcagacctccccgaccgggacacgtggaagggccgcttcgacttcctcatgtcctgtgtgggctatgccatcggcctgggcaacgtctggaggttcccctatctctgcgggaaaaatggtgggggagccttcctgatcccctatttcctgacactcatctttgcgggggtcccactcttcctgctggagtgctccctgggccagtacacctccatcggggggctaggggtatggaagctggctcctatgttcaagggcgtgggccttgcggctgctgtgctatcattctggctgaacatctactacatcgtcatcatctcctgggccatttactacctgtacaactccttcaccacgacactgccgtggaaacagtgcgacaacccctggaacacagaccgctgcttctccaactacagcatggtcaacactaccaacatgaccagcgctgtggtggagttctgggagcgcaacatgcatcagatgacggacgggctggataagccaggtcagatccgctggccactggccatcacgctggccatcgcctggatccttgtgtatttctgtatctggaagggtgttggctggactggaaaggtggtctacttttcagccacatacccctacatcatgctgatcatcctgttcttccgtggagtgacactgcccggggccaaggagggcatcctcttctacatcacacccaacttccgcaagctgtctgactccgaggtgtggctggatgcggcaacccagatcttcttctcatacgggctgggcctggggtccctgatcgctctcgggagctacaactctttccacaacaatgtctacagggactccatcatcgtctgctgcatcaattcgtgcaccagcatgttcgcaggattcgtcatcttctccatcgtgggcttcatggcccatgtcaccaagaggtccattgctgatgtggcggcctcaggccccgggctggcgttcctggcatacccagaggcggtgacccagctgcctatctccccactctgggccatcctcttcttctccatgctgttgatgctgggcattgacagccagttctgcactgtggagggcttcatcacagccctggtggatgagtaccccaggctcctccgcaaccgcagagagctcttcattgctgctgtctgcatcatctcctacctgatcggtctctctaacatcactcaggggggtatttatgtcttcaaactctttgactactactctgccagtggcatgagcctgctgttcctcgtgttctttgaatgtgtctctatttcctggttttacggtgtcaaccgattctatgacaatatccaagagatggttggatccaggccctgcatctggtggaaactctgctggtctttcttcacaccaatcattgtggcgggcgtgttcattttcagtgctgtgcagatgacgccactcaccatgggaaactatgttttccccaagtggggccagggtgtgggctggctgatggctctgtcttccatggtcctcatccccgggtacatggcctacatgttcctcaccttaaagggctccctgaagcagcgcatccaagtcatggtccagcccagcgaagacatcgttcgcccagagaatggtcctgagcagccccaggcgggcagctccaccagcaaggaggcctacatctagggtgggggccactcaccgacccgacactctcaccccccgacctggctgagtgcgaccaccacttgatgtctgaggataccttccatctcaacctacctcgagtggcgagtccagacaccatcaccacgcaggacaggggaggtgggaggacagttagacccctgggtgggccctgccgtgggcaaggatacccggtggcttctggcacctggcgggctggtgacctttttaatccaggccccatcagcatcccacgatcggccttggtaaccgccgcggtagatcatttttatcccgccagggagtgtgatgcaggaagaccacatgcgctcctggcttttaaacctgttcctgactgttctcttactgccgaaacccttgactgttatctcggactttgcaggagttcctttccctccgaacgctgctccatgcacaggaaaagggcattttgttacaatgggggactttcccgggaacgcttgctcttaagtaccagaagccggcggagctctggctttcgtgattttggttttctccttcccaaggcagctggattgaaaaaacaaaacaaaacaaaaaaacccaggggcgtcagtcgatattctcagggccgcttctcctgcagtctgtggagcgtccttgtccccgccgccggaatgaatgagcattctgcagcccgatgtccctgtcccctcctcgccgggccattctgattggacctggcccagtgcaatctgtccagacaagccctgcttgctggaaaactgccacaagcacaattgatctctttttatcgccattccaggggcctcaggtcctactggggaaacttcctataccggagctccagtttctcttaagctgcccaatttcacagagtacaaaatagttgtaggggaaatcaaggtgaaggatctgtccgacagtcaagacggatccacaggaatctttcggtctccttaaactaccaccctcgctgccacccaccccaaggtgnttgccgcctcaccttccttgaaatttctcagcgggagtctcaacacaaccactaaaacccacccagaccgtgtattgcggccgctcgagaggat

SEQ ID NO: 726 - DNA, 423 bp, Homo sapiens
actggaattcccgggtcgacgatttcgtggggaatggattggactccggtggggaaagcgggtgtctagaagtggtgctaatgggaagagaattctggtttcaaaagaggatgctctgccacaaagagcggctcgcgcgctggcctgggccctagccgaggagagatcccgggagaactccagagctccgggggagcgctcctcggaagaccggggccaacatgcctgtgcgcagggggcatgtggcaccacaaaatacatttctggggaccatcattcggaaatttgaagggcaaaataaaaaatttatcattgcaaatgccagagtgcagaactgtgccatcatttattgcaacgatgggttctgtgagatgactggtttctccaggccagatgtcatgcaaaagccatgcacctgcgact

SEQ ID NO: 727 - DNA, 395 bp, Homo sapiens
cccacgcgtccgaatattttttcaaactttgctcttttcaggtgtttttgtcatttccattagcaacaatagtcatcgacgtgggcttggttgtgataccattggtaaagtctccaaatgtgcattatgtctacgtgcttctgttagttctcagcggattactattttacatacctttaatacattttaaaataagattggcttggtttgagaagatgacttgctatttacaattactatttaatatttgcctccctgatgtgtctgaggaatagatgtcggaagtgcaaactcttaaaaaattggccttctaaaaaacatatatcagattccaaatcaaggttaaacatatgatagaacattcatggtgaaattcctatggtaaatattttttt

SEQ ID NO: 728 - DNA, 2004 bp, Homo sapiens
aatgaaattttgcttgcaaagccccacatgcgataatactaggtagaaattttttttgagtacacattatgtatgtccattttagaaaagatgtggtatgaagttgcaaagaaacaacattaaggaaaaacacagtttaaagcaaagatttgttgcttttattgctttcacttgcgtccctgtgaagagccccccaaacagggtttgtgtgcgcaataaagctttttaatcacctgggtgcaggcgggctgagtctgaaagagagtcagtgaagggagataagggtagggcgcttttataagatttgggtaggtaaaggaaaattacagtcaaaggggggttgttctctggcagacaggagtggaggtcacaaggtgctcagtaggggagcttttgagccaggatgagccaggagaaggaatttcacaagatagtgtcatcagttaaggcaggaacaggccattttcacttcttttgtggtggaatgtcatcagttaaggcaggaaccggccatctggatgtgtacgtgcaggttacagaggacatgatggcttagcttgggctcagaggcccttggctccagcaatgctgatgatgaggtgctggggtccccgaggacaggaggcctccaggaaggaaccggcctcagtccacgccgtccagggactgtggctctgccctctcgagctgtagcacctgattttctatgcaccgaaactgccaaggccagcttgtgttgtacagaaatggtcgcagatcaaacctgttgtcctcagggctgtagttctcggcgtggtacgcgggtgtgagcgtggtcatcttgtgtctgttcatggagtacttggagaaaaaccgcttcactttgtcagcgacctgtctcggggtgcagatgtgtctccacatgccgaggagtttgcagaacatgctgtagggccccatcttggccaccttcctgagtttcccatagaccgagagctccgcatatgtcatccccatatcttcctcgtcggtctgggacacctgtccatcagccaagggctccagctctgcggtggccggcgccaacaggatgctctgcagggcaggaagctggaagcgctggatgcagaactggacgaaggccctgaggtccgtcttgctgatcccgcctatggggttgatgtccgcactggagcagtcgtacttggtcaggtagcccaggagactctcatccacgttggcggatcccagcacgaggagcccaccgtggacaccccgagaccagaggctcaactgagcaaacagataggcgaggaccatccgtattcgagcctgcacattttgcagcgccaggttttccctgctgcttcctccatgagctgcaaacagagggctcttccccgtcaccaggctgaagatgcccatgacggccttcacggctggatcgatgttgagactgatgtggtggcttccaatctgctgggccaactctctggcccgggtgcacgtctcctgggaggagttcttgctggccatgtagcaggtggtcagtatgcgtccacagaggtctcggggatcctggggggtgtagctgatctggttcacgatggtgcggacatcagccagcacttcctcatttccactcctcacggcctcgcagacctggcagcacatggagtagatgaggcaggcggtggctgcgctgtccaccccgccactcaagggcagcaaaaaccctgcctgttgacttcgtcttaaaaaatcccagagccagcaggcaggtccaaggcttatctcctcctcagggctgtggtatttccactcgatgggctcagagatgggtgccagcaagtcctcgtggcacgagagggcaaagtccaccttcactctggggtaggggctcgccctgctggcttgaatctacgaggcagaggttgtgctgagctgggattgcgccattgtactccagcctatggtagttcacagcaagggtgaaactccgtctcaaaaaacaaacaaaaaacc

SEQ ID NO: 729 - DNA, 7080 bp, Homo sapiens
ccgggctgcgcggcgaggctgagccgggcccgggcgccggggccgggggcggctggcgcgggcaggaagcgcctcgcggacccgggcccgccccccgcctcccgccgcctccgggctcccggctcccggccgcgcctcgccccatgcactcgccgcgccgcgcagcccgcgcacgcccggatggctcctcgcgccgcgggcggcgcaccccttagcgcccgggccgccgccgccagccccccgccgttccagacgccgccgcggtgcccggtgccgctgctgttgctgctgctcctgggggcggcgcgggccggcgccctggagatccagcgtcggttcccctcgcccacgcccaccaacaacttcgccctggacggcgcggcggggaccgtgtacctggcggccgtcaaccgcctctatcagctgtcgggcgccaacctgagcctggaggccgaggcggccgtgggcccggtgcccgacagcccgctgtgtcacgctccgcagctgccgcaggcctcgtgcgagcacccgcggcgcctcacggacaactacaacaagatcctgcagctggaccccggccagggcctggtagtcgtgtgcgggtccatctaccagggcttctgccagctgcggcgccggggtaacatctcggccgtggccgtgcgcttcccgcccgccgcgccgcccgccgagcccgtcacggtgttccccagcatgctgaacgtggcggccaaccacccgaacgcgtccaccgtggggctagttctgcctcccgccgcgggcgcggggggcagccgcctgctcgtgggcgccacgtacaccggttacggcagctccttcttcccgcgcaaccgcagcctggaggaccaccgcttcgagaacacgcccgagatcgccatccgctccctggacacgcgcggcgacctggccaagctcttcaccttcgacctcaacccctccgacgacaacatcctcaagatcaagcagggcgccaaggagcagcacaagctgggcttcgtgagcgccttcctgcacccgtccgacccgccgccgggtgcacagtcctacgcgtacctggcgctcaacagcgaggcgcgcgcgggcgacaaggagagccaggcgcggagcctgctggcgcgcatctgcctgccccacggcgccggcggcgacgccaagaagctcaccgagtcctacatccagttgggcttgcagtgcgcgggcggcgcgggccgcggcgacctctacagccgcctggtgtcggtcttcccagcccgggagcggctctttgctgtcttcgagcggccccaggggtcccccgcggcccgcgctgctccggccgcactctgcgccttccgcttcgccgacgtgcgagccgccatccgagctgcgcgcaccgcctgcttcgtggaaccggcgcccgacgtggtggcggtgctcgacagcgtggtgcagggcacgggaccggcctgcgagcgcaagctcaacatccagctccagccagagcagctggactgtggagctgctcacctgcagcacccgctgtccatcctgcagcccctgaaggccacgcccgtgttccgcgccccgggcctcacctccgtggccgtggccagcgtcaacaactacacagcggtcttcctgggcacggtcaacgggaggcttctcaagatcaacctgaacgagagcatgcaggtggtgagcaggcgggtggtgactgtggcctatggggagcccgtgcaccatgtcatgcagtttgacccagcagactccggttacctttacctgatgacgtcccaccagatggccagggtgaaggtcgccgcctgcaacgtgcactccacctgtggggactgcgtgggtgcggcggacgcctactgcggctggtgtgccctggagacgcggtgcaccttgcagcaggactgcaccaattccagccagcagcatttctggaccagtgccagcgagggccccagccgctgtcctgccatgaccgtcctgccttccgagatcgatgtgcgccaggagtacccaggcatgatcctgcagatctcgggcagcctgcccagcctcagtggcatggagatggcctgtgactatgggaacaacatccgcactgtggctcgggtcccaggccctgcctttggtcaccagattgcctactgcaacctcctgccgagggaccagtttccgcccttcccccccaaccaggaccacgtgactgttgagatgtctgtgagggtcaatgggcggaacatcgtcaaggccaatttcaccatctacgactgcagccgcactgcacaagtgtacccccacacagcctgtaccagctgcctgtcggcacagtggccctgtttctggtgcagccagcagcactcctgtgtttccaaccagtctcggtgcgaggcctcaccaaaccccacgagccctcaggactgcccccggaccctgctctcacccctggcacccgtgcctacgggtggctcccagaacatcctggtgcctctggccaacactgcctttttccagggtgcagccctggagtgtagttttgggctggaggagatcttcgaggctgtgtgggtgaatgagtctgttgtacgctgtgaccaggtggtgctgcacacgacccggaagagccaggtgttcccgctcagcctccaactaaaggggcggccagcccgattcctggacagccctgagcccatgacagtcatggtctataactgtgccatgggcagccccgactgttcccagtgcctgggccgcgaagacctgggtcacctgtgtatgtggagtgatggctgccgcctgcgggggcctctgcagcccatggctggcacctgccccgcccccgagatccgcgcgattgagcccctgagtggcccgttggacggtgggaccctgctgaccatccgaggaaggaacctgggccggcggctcagtgacgtggcccacggcgtgtggattggtggtgtggcctgtgagccactgcctgacagatacacggtgtcggaggagatcgtgtgtgtcacagggccagccccaggaccactctcaggtgtggtgaccgtgaacgcctctaaggagggcaagtcccgggaccgcttctcctacgtgctgcccctggtccactccctggagcctaccatgggccccaaggccgggggcaccaggatcaccatccatgggaatgacctccatgtaggctccgagctccaggtcctggtgaacgacacagacccctgcacggagctgatgcgcacagataccagcatcgcctgcaccatgcctgagggggccctgccggctccggtgcctgtgtgtgtgcgcttcgagcgtcggggctgcgtgcacggcaacctcaccttctggtacatgcagaacccggtcatcacggccatcagtccccgccgcagccctgtcagtggcggcaggaccatcacagtggctggtgagcgtttccacatggtgcagaatgtgtccatggccgtccaccacattggccgggagcccacgctctgcaaggttctcaactccaccctcatcacctgcccgtcccccggggccctgagcaacgcatcagcgccagtggacttcttcatcaatgggcgggcctacgcagacgaggtggctgtggctgaggagctactggaccccgaggaggcacagcggggcagcaggttccgcctggactacctccccaacccacagttctctacggccaagagggagaagtggatcaagcaccaccccggggagcctctcaccctcgttatccacgtgagcaccaaaggggccgggaaggagcaggacagcctggggctccagagtcacgagtaccgggtcaagataggccaagtaagctgcgacatccagattgtctctgacagaatcatccactgctcggtcaacgagtccctgggcgcggccgtggggcagctgcccatcacaatccaggtagggaacttcaaccagaccatcgccacactgcagctggggggcagcgagacggccatcatcgtgtccatcgtcatctgcagcgtcctgctgctgctctccgtggtggccctgttcgtcttctgtaccaagagccgacgtgctgagcgttactggcagaagacgctgctgcagatggaggagatggaatctcagatccgagaggaaatccgcaaaggcttcgctgagctgcagacagacatgacagatctcaccaaggagctgaaccgcagccagggcatccccttcctggagtataagcacttcgtgacccgcaccttcttccccaagtgttcctccctttatgaagagcgttacgtgctgccctcccagaccctcaactcccagggcagctcccaggcacaggaaacccacccactgctgggagagtggaagattcctgagagctgccggcccaacatggaagagggaattagcttgttctcctcactactcgacaacaagcacttcctcatcgtctttgtccacgcgctggagcagcagaaggactttgcggtgcgcgacaggtgcagcctggcctcgctgctgaccatcgcgctgcacggcaagctggagtactacaccagcatcatgaaggagctgctggtggacctcattgatgcctcggccgccaagaaccccaagctcatgctgcggcgcacagagtctgtggtggagaagatgctcaccaactggatgtccatctgcatgtacagctgtctgcgggagacggtgggggagccattcttcctgctgctgtgtgccatcaagcagcaaatcaacaagggctccatcgacgccatcacaggcaaggcccgctacacactcaatgaggagtggctgctgcgggagaacatcgaggccaagccccggaacctgaacgtgtccttccagggctgtggcatggactcgctgagcgtgcgggccatggacaccgacacgctgacacaggtcaaggagaagatcctggaggccttctgcaagaatgtgccctactcccagtggccgcgtgcagaggacgtcgaccttgagtggttcgcctccagcacacagagctacatccttcgggacctggacgacacctcagtggtggaagacggccgcaagaagcttaacacgctggcccattacaagatccctgaaggtgcctccctggccatgagtctcatagacaagaaggacaacacactgggccgagtgaaagacttggacacagagaagtatttccatttggtgctgcctacggacgagctggcggagcccaagaagtctcaccggcagagccatcgcaagaaggtgctcccggaaatctacctgacccgcctgctctccaccaagggcacgttgcagaagtttctggatgacctgttcaaggccattctgagtatccgtgaagacaagcccccactggctgtcaagtactttttcgacttcctggaggagcaggctgagaagaggggaatctccgaccccgacaccctacacatctggaagaccaacagccttcctctccggttctgggtgaacatcctgaagaacccccagtttgtctttgacatcgacaagacagaccacatcgacgcctgcctttcagtcatcgcgcaggccttcatcgacgcctgctccatctctgacctgcagctgggcaaggattcgccaaccaacaagctcctctacgccaaggagattcctgagtaccggaagatcgtgcagcgctactacaagcagatccaggacatgacgccgctcagcgagcaagagatgaatgcccatctggccgaggagtcgaggaaataccagaatgagttcaacaccaatgtggccatggcagagatttataagtacgccaagaggtatcggccgcagatcatggccgcgctggaggccaaccccacggcccggaggacacaactgcagcacaagtttgagcaggtggtggctttgatggaggacaacatctacgagtgctacagtgaggcctgagacacatggagagttggtcaggctgctgctgggagaaatggacgcccactgggcctcaacttgatcttctaccccgtgcctgtgactcagactgggaaatactgagcagagacggctggggcgggggcaggaggaggggctgctctctgagacaggggcgcccccgccttgacccctgggcacctccatcccctcccacctgtccccagatcagtctctgggatggaggccagagagctggtcaggctcccccatctgcccagcacggcctgcactgtgcccacccacttgctccacaacgtccagttggtcctgctgccaagagccccgtgcatccaggcggccaagcacaaactgggggagaggaggccgccagcccggaggctgcagcccagaaactctacctcatccacactggtgcagggagccctccttgaactgacctttgattggtttctgcttcaactaccaaaatgttatctccacttccccctcacccgtagaggatcctggccacagacagtttcaagtagtgtcagatttttgttgcttgggcggctgttggtagagtgggcagtgcccgcgccatggggtgctctgtgggcttctccaggagcagggagggtggaggggagggatggggggcacaggagctgggagccccgtctccaggaaaaggagaggggttaagatgcaccgaggctgtagctgggctacttgatcttgctgaaagtgtttctaaagatagcaccacttttttttttaaagcttttatatattaaaaaacgtatcatgcaccaactgtgaatagctgccgcttgcgcaaaggacccggggaggggtcccgagaggctccccatgcaacactggaaatgactgttccagagagcgggcagacctggcagagcgcccctggcgcctgagactaccacccactccgttcctgccagaaacgaccctctgtggccgatgggccatgcgggcccctcgcagccaactcagccagtgttgggactggctcagagcccatgggggctggaggggggcagctgggactctggaatcttctttataataaaagccttacggacaaaaaaaaaa

SEQ ID NO: 730 - DNA, 392 bp, Homo sapiens
tgcagcccagccccctctttcactcccacctggagaccctgcagctgctgaggactgcacagctcccagaacaggtgagctggccttgggggcaggtggcaaatgggaaggggaaccaaaggaacatggggtccccccaaccctccctcctggcgtttgaaagaaacctggaactccagattatgggtcttgggtattccctattgatggggaaactgaggcctagggtggcaaaggacaccctaagggtacacagggactcaaccccttcacctctaaccctcaaggattagcatttgtgaagctgaaattctttgatctggtcctcaaatgccgggaaggacctgaacaaatgagatgaggttgtcttcaggttcccaccaccctgctct

SEQ ID NO: 731 - DNA, 1204 bp, Homo sapiens
ttccttaagtgcatgaggaaggccttccgctcaagcaagctgctgcaggtggggtacacacctgatggcaaggacgactaccggtggtgcttcagggtggacgaggtgaactggaccacctggaacaccaacgtgggcatcatcaacgaagacccgggcaactgtgagggcgtcaagcgcaccctgagcttctccctgcggtcaagcagagtttcaggcagacactggaagaactttgccctggtcccccttttaagagaggcaagtgctcgagataggcagtctgctcagcccgaggaagtttatctgcgacagttttcagggtctctaaagccagaggacgctgaggtcttcaagagtcctgccgcttccggggagaagtgaggacgtcacgcagacagcactgtcaacactgggccttaggagaccccgttgccacggggggctgctgagggaacaccagtgctctgtcagcagcctggcctggtctgtgcctgcccagcatgttcccaaatctgtgctggacaagctgtgggaagcgttcttggaagcatggggagtgatgtacatccaaccgtcactgtccccaagtgaatctcctaacagactttcaggtttttactcactttactaaacagtttggatggtcagtctctactgggacatgttaggcccttggtttctttgattttattcttttttttgagacagaatttcactcttctcacccaggctggaatgcagtggcacaattttggctccctgcaacctccgcctcctggattccagcaattctcctgcctcggcttcccaagtagctgggattacaggcacgtgccaccatgtctggctaattttttgtattttttaaatagatatggggtttcgccatgttggccaggctggtctcgaactcctgacctcaggtgatccacccacctcggcctcccaaagtgctgggattacaggagtgagccaccatggccgacacaaaaaatatttcttaaatgatgatgatgatgtgatagaaatctacacgattactcagacagatcaagagcaggctggagtaccacaacaatgccgcccggggctccaacttaccactagcgtccgggaggaagaccaggcagcggtcgccgcggcggcagctagacgagaaacggactcggctgcaatcgcccagcggagcccgcggcagtcg

SEQ ID NO: 732 - DNA, 859 bp, Homo sapiens
aacgatttcgtctggggacgactggctggtggaatccttgcgcttgtaaatcgtacggggctgggacatgggagctgggcctggagcttgcctggcgggcggatgggtgtgggtggaggcacgttggggatcctggtgcagagtgggccagctgtggcctcggggctcgccaccgtggaggactccgcctgggcctaggcccccatctctaggaaatggctccttcctgcgtgcgcgcgttgtgagattactagtaggagccgcgcttgtgaagacgcagtgcccagttagtttgcgccagcctctgagttcagctcagaacacagatgatctcattgattcctcacgtcaaccttgggaaatctgggtaccctgggacgtccacacatgaggaccgaggctcagggacatcaagggactggcctggtcccagaaacagggagtaaaatgggaagtaaactcagtcccacgtctgcctgactccagagtttgggccactgaaccatgcggctgccatcttggagttctttgagctgtgaagtgctgtgcatcgtgtgattctgtgtcccttttgtgcaggtaccaggatttctatgcattcgacctgtcaggagccactcgagtccttgaatggattgatgacaaaggagtctttgttgctggctatgaaagcctgaaaaagaatgaaattcttcatctgaaattacctctcagactttctgtaaaggaaaacaagggcttattcccagaaagagatttcaaagcgcgccatggaggattttcagacaggtctatctttgatctaaagcatgtgccacataccagattgctggttaccagtggccttccaggttgttat

SEQ ID NO: 733 - DNA, 5567 bp, Homo sapiens
ggccgcggggcccccaggcctggaggccgaggggcgggcgccggagagcgcgggccccgggcccgggggtgacgccgcggagacccccggcctgcccccggcccacagcgggaccctcatgatggctttccgggacgtcacggtgcagatcgccaaccagaacatatccgtctcctcctccacggctctgtcggtggccaactgcctgggcgctcagacggtccaggcccccgcagagcccgcggcgggcaaggccgagcagggcgagacctctgggcgggaggccccggaagcccccgctgtgggccgggaggacgcgtcagccgaggactcatgcgcagaggctggggctagtggggcggcggatggggccacagcccccaaaacagaggaggaagaggaggaggaggagacggcggaggtggggagaggggccgaggccgaggcaggcgacttggagcagctgaacagaaccagcacgtccaccaagtccgccaagtcaggctcggaggcgtcggcctccgcctccaaggacgccctgcaggccatgatcctgagcctgccgcgctaccactgcgagaacccagccagctgcaagtcgcccacgctctccaccgacaccctgcgcaagcggctctaccgcatcggcctcaacctcttcaacataaaccccgacaagggcatccagttcctgatctcacgcggcttcatcccggacacccccatcggtgtggcccatttcctcctccagcgaaagggcctcagccgccagatgattggagagttcctgggcaacagcaagaagcagttcaaccgcgacgtgctggactgcgtggtggacgagatggacttctccagcatggagctggacgaggccctgcgcaagttccaggcacacatccgtgtgcagggggaggctcagaaggtggagcggctcattgaggccttcagccagcgctactgcatgtgcaaccccgaagtggttcagcagttccacaaccccgacactatcttcatcctcgccttcgccatcatcctcctcaacaccgacatgtacagccccaacatcaagcctgaccggaagatgatgctggaggacttcatccgaaaccttcgaggtgtggacgatggcgctgacatccccagggagctggtggtaggcatctatgagaggatacagcagaaggagctcaagtccaatgaggaccacgtcacgtacgtcaccaaggtggagaagtccattgtgggcatgaagacagtgctgtccgtgccccaccgccgcctggtgtgctgcagccggctcttcgaggtgacggatgtgaacaagctgcagaagcaggcagcgcatcagagggaggtgttcctcttcaatgacctgctggtgattctcaaactttgcccgaagaagaagagctcctccacgtacaccttctgcaagtcagttggcctgctgggcatgcagttccagctctttgagaacgagtattactctcatggcatcacactggtgaccccgctctcgggctccgagaagaagcaggtgctgcatttctgtgccctgggctcggacgagatgcagaagttcgtggaggacctgaaggagtccattgctgaggtgacggagctggagcagatccgaatagagtgggagctggagaagcagcagggaacaaagacactctccttcaagccctgcggagcccagggggacccacagtcaaagcaaggatcgccgacagccaaaagggaagccgcgctcagggagaggccggcggagagcacggtggaggtgtcaattcacaacaggcttcaaacgtcccagcacaactccgggctgggggccgagaggggagcgccggtgccgccgccagacctgcagcctagccccccgagacagcagaccccaccactgccgccgccgccacccacgcccccgggcaccctggtgcagtgccagcaaattgtcaaggtcattgtcctggacaagccctgcctggcccgcatggagcccctgctgagccaggctctctcctgctacacctcgtcgtcctctgactcctgcggctccacacccctgggcggccccggctctccggtcaaggtcacccaccagcctccgctgcccccgcccccacccccctacaaccaccctcaccagttctgtcccccaggctccctgctgcacgggcaccgctactccagtggctcaaggagcctggtgtagactctgccccaccaccctgctgtcctgggagggctggccactggggggcctgggctgcccctccactgctccccataccctggcacgatgcgttcctggtcactgatcaccatcattttgggaagagaatcccaatccctggcacctgggtttgcctcatccaaccatccttccctttctcagctgcaccccctctgcagatctgaagacacacctcactctcccagggccctacacagccagacccggcgaggcctcctcttcccctggccaccactttcccccattggaccatggactgaagaaaacgagctgagggtctaacgagcttgcaggctttgagtctgttagtgcccggggcctcgggccttgggcagcagcatgaggctgggccggccggcagtggagcactagacagagtggctggctcgcagcccagaactagtgcctctgtagctgcactgaggggaggagggttggtcccacccctggagggacaggtgggaggagtgaggagggggctttttctgccacccccgcccccaagcctgaaactctcaggagtctacttcttggtccccagggacattggctgtcctgaccatgtccttccccctcctcccagggcctctgcttcctcaggagctgcccagactccagaaaagcctggaaaaagggaggcgggaaggggagcactttcggctttctataggtcagtccagcagggccatgggatcgcgaggtcatgtatctgcaaaatgcacctttttaaagagtgtcttagttccccagccccagctaatacccggccaatgccgtgtacgcacaggcatgtgcacgcaaacacgcatgagaaccaggccattccttccgctgtggaagcagaactggagacggggcaggaatgtgcccagcagagatggggctcagcccgaggcagggctccctcctgcatgaggctcggcccgaggcagggctccctcctgcatgagtctgtggcctccaggagggacttgggtgcagatgtaagcaagaaaaaccggggctccagaggcatgtgcatttcccctgcgcccctcagcctttaaatattccctcctcctagaagggtctagaccccccccttccagcaggggtgcccaagagtccctggaccctcaaaattgcaaaggagacccaagcggggctcgctgacctcccagggcccagcaagatgggatagccagccttaggtggccccacgagcccaagcctggggaagggcccctccccagccagacgagaggcagccaccccagagaccacaggagccgtaccatggcctgcgcagtcaggccctatcaggatgtgtctgtcccaagcctggccaggctccagtcctgtgccagtagctcactgctgtcctatgtgcaggtcccccaacacttggagcctgtggttaaggcctcctgggagaggcagtgagcatgagtcaaaggtgacatggacttgaatctccccaccccgccccgcctgcagtagccgggccaggtaggaggcaaggatcattccctgctcccagaggttccagatgacctagtttcgttttgtgtgtgtgtgtgtgtggtcacccagacgtcactgtgatatcacctagtgaatctatttctggccctgtcttcgtcggcccagtttctgtaacttgcagccaatttgccctctcccctgtggctgccagcccacctgcccctctgtgtccttgctgccctggccctcctctgttttctgtaacagatgctccagtcattgcctttcagagtggagcagatgacagatggggtgcacgcattcagacacctctgatgcccttagccagggcagggatcgtccttaaagtgaaggcctggacaggaggagtcagggacttgggaggaggtggagctgtggggatgggagtggaggaatcaaaatgagggaagctgaaaatagaatgaaaacgatgactaagaggcagggagtgcgaggtatgggggaataggaactatgagctaaatatacttatggggtgggggccgtgggggccagggacactctcccagacagccctgacccgccaggcaggaccccgtcccctgctcacacagcttttcaagcttaccaaggacaggcaggaccccgtcccctgctcacacagctcttcaaacttaccaagtgccctctcccctgttgagggcacagcaaccccaggccctccctcccacctcagctgaagccccaatcttccaaatcggaaccagcaagtcttagggctggcacgcatctgggcctctagctgagaacccggactctcaggcacctcagtgcccctgccccagggcagaggcccaccccgtgggttggtgcagtggctgccctgggctccacgggcagcacagggagtctgtccaggaagcagcccagccggggtcagtattccgtggagccagtcctgagctgggaggggcatttaacacccctgagggcctggggcaggacacagctggccctcctcattgtcaggggaagcaagtgcccaacatctgtaacctcccttccctgctcagtccccagggccaaggttgggacccctctccatccctgtccccagagcctagacctcagggacctaggaaaagcctcctgctccctccccacggcagcagacagggcagggcctccagcccccagagggccggtggggggtgctctcgggccttcctgctctcctaaggttgcggggacagtagagtgctgagccccagacccagtcaccccaagatggccccactctatccactctctagacctttgggaaatctgggtccctctcctgatttgatccattcggccccaactccagagtcgggaatgggagatgaaactaggtttccacccacttttggacaagtcccacccctagatctgaagcaagctctaccagcagcgtgtcctggaagcatgcctgcatgctgcctgcctgcctgcccgtctgcacaggtgtcttgatccagccctgcgtcttcgagcccctgtgccaccggtccccacggcccgccaggagtctctttgtacccactaggcttccctgatgaccatctgtctgtccgtccctgtttttgctgtacataactcctgctgcaccctctccccgcacacccgtcacccatgagagagagaaacctctctagggaaaggcagggtggctgcacccagcaactaatccaaatggcaaatattttgtaacaaaatagcccagaggtattttatctgttcaattcatagagttttagagattatattgaaagatgtcacttgaaaaaaaaaa

SEQ ID NO: 734 - DNA, 415 bp, Homo sapiens
cccctagtccagtgtgatgggcgatctggtcggtcaggggctggaagagcagattgtcgcccgtgatgagaactcatggctgattgacggcggcaccccaattgacgacgtcatgcgcgtgctggatattgacgagttcccgcagtcgggcaactacgaaaccatcggcggctttatgatgtttatgctgcgtaagatcccgaaacgcaccgattcggtgaaattcgccggctacaaatttgaagtggtggatatcgataactaccgcatcgaccagctgctggtgacccggatcgacagcaaggccaccgccctttcgccaaaactgcctgacgctaaagataaagaagaaagcgtcgcgtaacccccagaaacatcaacggctcctgaatcaggagccgtcttattactgcat

SEQ ID NO: 735 - DNA, 1257 bp, Homo sapiens
atggtcttctcggcagtgttgactgcgttccataccgggacatccaacacaacatttgtcgtgtatgaaaacacctacatgaatattacactccctccaccattccagcatcctgacctcagtccattgcttagatatagttttgaaaccatggctcccactggtttgagttccttgaccgtgaatagtacagctgtgcccacaacaccagcagcatttaagagcctaaacttgcctcttcagatcaccctttctgctataatgatattcattctgtttgtgtcttttcttgggaacttggttgtttgcctcatggtttaccaaaaagctgccatgaggtctgcaattaacatcctccttgccagcctagcttttgcagacatgttgcttgcagtgctgaacatgccctttgccctggtaactattcttactacccgatggatttttgggaaattcttctgtagggtatctgctatgtttttctggttatttgtgatagaaggagtagccatcctgctcatcattagcatagataggttccttattatagtccagaggcaggataagctaaacccatatagagctaaggttctgattgcagtttcttgggcaacttccttttgtgtagcttttcctttagccgtaggaaaccccgacctgcagataccttcccgagctccccagtgtgtgtttgggtacacaaccaatccaggctaccaggcttatgtgattttgatttctctcatttctttcttcatacccttcctggtaatactgtactcatttatgggcatactcaacacccttcggcacaatgccttgaggatccatagctaccctgaaggtatatgcctcagccaggccagcaaactgggtctcatgggtctgcagagacctttccagatgagcattgacatgggctttaaaacacgtgccttcaccactattttgattctctttgctgtcttcattgtctgctgggccccattcaccacttacagccttgtggcaacattcagtaagcacttttactatcagcacaacttttttgagattagcacctggctactgtggctctgctacctcaagtctgcattgaatccgctgatctactactggaggattaagaaattccatgatgcttgcctggacatgatgcctaagtccttcaagtttttgccgcagctccctggtcacacaaagcgacggatacgtcctagtgctgtctatgtgtgtggggaacatcggacggtggtg

SEQ ID NO: 736 - DNA, 431 bp, Homo sapiens
agtttacgcgttccgacgagctggcccgccactacaggacgcacacgggcgagaagcgcttctcctgccccctctgccccaagcagttctcccggagcgaccacctgaccaagcatgctcgccgccacccaacctatcatccagatatgatcgagtaccggggacgtcgtcgaactccccgcatcgacccgccactcaccagcgaggtggaaagctccgcctccggctccggtcccggcccggcgcccagcttcaccacctgcctgtaggacagtcattgctgtcagtcttaccctcaaggatgatcccccaggccgttgtccctgctttctctctgcacatccttctttcccagagtcattacaccaaggcacagactggttcctctgctctgagggtggtccaggcagacatgtggactctggggaggg

SEQ ID NO: 737 - DNA, 820 bp, Homo sapiens
cttgacatggccccagctcttcctggagaccctgccggagctcctgcacatgtcccgcccagcagaggatggacccagccctggggccctggtgcggaggagcagctccctgggatacatctccaaggccgaggagtacttcctgctcaagtcccgcagtgacctcatgttcgagaagcagtcagagcggcatgggctggccaggcgcctcaccactgcacgccggcccccagcaagctctgagcaggcccagcaggaactcttcaatgagctgaagccagctgtggatggggcaaacttcattgttaaccacatgagggaccagaacaattacaatgaggagaaagacagctggaaccgagtggcccgcacagtggaccgcctctgcctgtttgtggtgacgcctgtcatggtggtgggcacagcctggatcttcctgcagggcgtttacaaccagccaccaccccagccttttcctggggacccctactcctacaacgtgcaggacaagcgcttcatctagggtgggcctgttggggagccaggagacagcagggtctgagagaggagccacagtccctaatgacacccactcctagccctgaggctcgtgcccctcagactggggaagagtccaaggaagggagggagcagccactcctcaatgctcaatggctcccctgaaatcaagacaggggccacccgagatggtctgagggtggacatcggctacagtgggtgggcaggacgatttggggggaggcccgaggctggctcaggggccagggaggagaacactcagggtggcctcagggggaga

SEQ ID NO: 738 - DNA, 1811 bp, Homo sapiens
  misc_feature (1)...(1811): n = a,t,c or g
ctcgtcgtgacagccatcactgccatcctggctttccccaatgaatacactcggatgagcacaagtgagctcatttctgagctgtttaatgactgtggccttctggactcctccaagctctgtgattatgagaaccgtttcaacacaagcaaagggggtgaactgcctgacagaccggctggcgtgggagtctacagtgcaatgtggcagctggctttaacactcatactgaaaattgtcattactatattcacctttggcatgaagatcccttctggcctctttatccctagcatggctgttggtgctatagcaggtcgacttctaggagtaggaatggaacagctggcttattaccaccaggaatggaccgtcttcaatagctggtgtagtcagggagctgattgcatcacccccggcctttatgcaatggttggggctgcagcctgcttaggtggggtgactcggatgactgtttctcttgttgtcataatgtttgaactgactggtggcttagaatacatcgtgcctctgatggctgcagccatgacaagcaagtgggtggcagatgctcttgggcgggagggcatctatgatgcccacatccgtctcaatggatacccctttcttgaagccaaagaagagtttgctcataagaccctggcaatggatgtgatgaaaccccggagaaatgatcctttgttgactgtccttactcaggacagtatgactgtggaagatgtagagaccataatcagtgaaaccacttacagtggcttcccagtggtggtatcccgggagtcccaaagacttgtgggctttgtcctccgaagagatctcattatttcaattgaaaatgctcgaaagaaacaggatggggttgttagcacttccatcatttatttcacggagcattctcctccattgccaccatacactccacccactctaaagcttcggaacatcctcgatctcagccccttcactgtgactgaccttacacccatggagatcgtagtggatattttccgaaagctgggactgcggcagtgcctggttacacacaacgggcgattgcttggaatcattaccaaaaaggatgtgttaaagcatatagcacagatggcgaaccaagatcctgattccattctcttcaactagaatcatagagttctggatgtaaagcgggaaggacattacagaccatggatatgttgtattaactgggtacccaaaacacattttccatatttggatggtgaagtcacattagtgtgttgtctctttcctacaagttaaccagttgcactacataatctctggaaattaattttctctttaggagaaattatagttaggcttccatgatgttacatttaggaaggtatcatgaaaggtttaaataaggttggctatgggtgtnaattatatttgcctttttaaaagatttttttaacttaaaaagtagttagccaatatgcaatcactgaaaactatgcaagagaaattccaaccgtcctgacctataacctgtaggaaaccgacgaaaaagtcactcttttgggatctaactgttgttactggaagacgaaggtaaactaaggggctttgcttttcaaaccagagaaaggaaagccagaaggaaaagagtaatggtattttctagactgtgaagattcagttcaaatgttatccttgttcctgttacaatatttagcattattagtttgttatgtgtgtatgtttatgttaattttaatttctgattataagacaatgctgctttggttaatctcttctaaaggaattta

SEQ ID NO: 739 - DNA, 939 bp, Homo sapiens
  misc_feature (1)...(939): n = a,t,c or g
gactctccagctggcagcatcagtgcccttctttgccatctccctgatatcctggtggctgccagaatccgcccggtggctgattattaatggcaaaccagaccaagcacttcaggagctcagaaaggtggccaggataaatggccacaaggaggccaagaacctgaccatagaggtgctgatgtccagcgtgaaggaggaggtggcctctgcaaaggagccgcggtcggtgctggacctgttctgcgtgcccgtgctccgctggaggagctgcgccatgctggtggtgaatttctctctattgatctcctactatgggctggtcttcgacctgcagagcctgggccgtgacatcttcctcctccaggccctcttcggggccgtggacttcctgggccgggccaccactgccctcttgctcagtttccttggccgccgcaccatccaggcgggttcccaggccatggccggcctcgccattctagccaacatgctggtgccgcaagatttgcagaccctgcgtgtggtctttgctgtgctgggaaagggatgttttgggataagcctaacctgcctcaccatctacaaggctgaactctttccaacgccagtgcggatgacagcagatggcattctgcatacagtgggccggctgggggctatgatgggtcccctgatcctgatgagccgccaagccctgcccctgctgcctcctctcctctatggcgttatctccattgcttccagcctggttgtgctgttcttcctcccggagacccagggacttccgntccctgacactatccaggacctggagagccagaaatcaacagcagcccagggcaaccggcaagaggccttcactgtggaaagtacctcgcttttagaaattgttgccttgcatggagccctttagtcaaagattcctgggaaaggatt

SEQ ID NO: 740 - DNA, 2492 bp, Homo sapiens
gcgtccgatcaaaactttgggaattggatttcatttttcagtggatggagtacatttcttaacacagagggaagtacagaacttatggaaagaaaatttgattattctggatactgcaaaaaaacatggctatgaagtagttgacacattcactataacaatggggcgttacaaagagtttctacaggggaagtgtggatgtcatttccatgaggtagtgaaatcaaagttatccaaagaatataactttattaaaatgaaaagatcaagaaatcatatcatgggaagatatttcagcaatcaaagcaaactacaacaaggcactgtaacaaattttcgatcgccatatcatgtcagaggtccaataaatcaggtttgttctgaaatccttctcagcaggatgtgtgcaaataaaaggactatgtagggctccctgcagggggagctgaatctggagctggagacgagctagtcacccggacaatggtctaggagccaagcgctgcacatcgcacacatttgggatcgaccacacacacttgtgcacaccagcacatgcatgcacaccagtacacacacagttaaataatgataacacttcttacagctttatgaattcaagatgtgaccttgaacaccagtccatttcacagtgaaagatatacctagagaaacgttacttgaagtataattattaaccagaaccactgtgggccaggtatggcattgtgataataaagagaaatatagacacttaaaattatgtgaaaaaaaggataatgctctttcatgttgtcttaccatatctataggtacatcaatattgaaaaggagaaaaaccaatgacattccactggcaagtagaagttgtcctttcattctttaccaggagaaaatgtgatgtttatgatggcttaggctttgtgaatctaatgcttatgaaaaacatttcttcctatactttttaaattttattactgaaaggaaaagaacaggaatgttccacaagggaatttgaagagattctgtgagagagatatgaaatattttatagttaaaacaccaatatattcaactttacacttcttgtgtttttcataaacattccctcttgtcttatctgtgtacttcgatgggtaactgcagtctgaattaatgaaatatgtaattttaaagtaagtaacaaaatgtagttcctcatgtattactgtactatgtttcattgatgatattacttaaatcttgtgtttgccattacagccctatgtaacttaaaattacaattatattttatgtaaatattttgcaaaggactatgcattctgaaatgcataggtgctttttcccaccaagcatttgcatatgtccacaaatagtattatgttactagtatctatattttgattttcctgagcaactgtatcaaatccaaatttagattagacaaaaaattattattttaattaaactgtggcatacatataatacatacctaattatagtagtgagaactatttcttttatctctttaggttcaaaatggtgaatttctttattatatgaatgctttgttgtgagataacatcacactgttacaatggattttagaggtttgtcttttttgggtggggtgggaagctgagagggttaattcaatacatggctgaaattaccaaatgtataaatacctcattttcactaccatacaagaaaaaaacacctattttgattgatcagttcttttgtatgaatatccacctcctttaaatactctatttttatatatatttttatatgaagataaacatgaatttatatttaactgtcttaaattatatttacataaatgcaaatatcacttgatataaacaatacaaatctgcatcttacagatgataatttttttagaagaatgatacagaattaactttaaaaataaaacttttctaatatacacttaaatgcaaacatcatttttaaattttcagtgatttttttaatgacataaaacgttaccaatgtgtgcagcctctccatcatgttttaacatactgtatactctatagcagtattacagtcagtatttcatataattttctttagacctaactgttaccatctgactgaggttactctggtatttatctcttcgctgctgaaataataatggattttagaaacaattgtaataatatcattaataaatgtcttactagtaatagtctgtgtttgtagagtatcttttattttcttttttactgaagatgtacatctatgcaaacagtgaccacttggcagggatattatcatgtggattcaagtattatagcatggttaaacacgattaactatatagttccttctaagcctaatattctttaagtttatgatcagatgaacttcccactgtgcaatgaccaaaatgtatgaagataatgtattgtagtgacaagctttttaaaaataataataataagacacttacttaaatg

SEQ ID NO: 741 - DNA, 413 bp, Homo sapiens
  misc_feature (1)...(413): n = a,t,c or g
cccgaatgcctgaaagtactttactaattatctgtgaaaatggctatattcttgaagctccacttccaaccataaagcaagaagaggatgatcatgatgtagtctcctatgaaatcaaagacatgtgcataaaatgtttccatttttcaagtgtcaaatctaagattctgagattaatagaaattgaaaagagggagagacaaagggagttgaaggagaaaataagggaagaaaggaggaacaagctagcagcagagatgggagaagatggagaaaaagaatttcaggaggaggaagaggagaaagaggaggaggaggaggaagaagagccattacctgaaatatttattccgtcaaccccctctcccatcctctgtggattttactcagagccagggaagttctgggttttn

SEQ ID NO: 742 - DNA, 482 bp, Homo sapiens
atgggctgcaggctcctctgctgtgtggtcttctgcctcctccaagcaggtcccttggacacagctgtttcccagactccaaaatacctggtcacacagatgggaaacgacaagtccattaaatgtgaacaaaatctgggccatgatactatgtattggtataaacaggactctaagaaatttctgaagataatgtttagctacaataataaggagctcattataaatgaaacagttccaaatcgcttctcacctaaatctccagacaaagctcacttaaatcttcacatcaattccctggagcttggtgactctgctgtgtatttctgtgccagcagccaagacacagccctgcaaagtcactgcatccctgtgcacaaacctcccggctcagccaggaagctgcagggcagcgtgtgcacctgcacccagggctccagtctccattccctgatggcctctgatggagttccagtctgtag

SEQ ID NO: 743 - DNA, 1824 bp, Homo sapiens
atgaatagcttcttcggaaccccagcggccagctggtgcctcctggaaagtgacgtctcatctgcaccggacaaggaggcggggagggagcgcagagcactcagcgtccagcagcgcggcgggccagcctggagcggaagcctggagtggagcaggcagtccgcgggggacagacgtcggctgggattgagccggcagactgcgaaaagtagctggagccggagcagggacagaacctgttgctgcagacgggcttggtggattctggttcctgccgccgacagggctcgccgggagaggttcatcatgaatgagaaatgggacacaaactcttcagaaaactggcatcccatctggaatgtcaatgacacaaagcatcatctgtactcagatattaatattacctatgtgaactactatcttcaccagcctcaagtggcagcaatcttcattatttcctactttctgatcttctttttgtgcatgatgggaaatactgtggtttgctttattgtaatgaggaacaaacatatgcacacagtcactaatctcttcatcttaaacctggccataagtgatttactagttggcatattctgcatgcctataacactgctggacaatattatagcaggatggccatttggaaacacgatgtgcaagatcagtggattggtccagggaatatctgtcgcagcttcagtctttacgttagttgcaattgctgtagataggttccagtgtgtggtctacccttttaaaccaaagctcactatcaagacagcgtttgtcattattatgatcatctgggtcctagccatcaccattatgtctccatctgcagtaatgttacatgtgcaagaagaaaaatattaccgagtgagactcaactcccagaataaaaccagtccagtctactggtgccgggaagactggccaaatcaggaaatgaggaagatctacaccactgtgctgtttgccaacatctacctggctcccctctccctcattgtcatcatgtatggaaggattggaatttcactcttcagggctgcagttcctcacacaggcaggaagaaccaggagcagtggcacgtggtgtccaggaagaagcagaagatcattaagatgctcctgattgtggccctgctttttattctctcatggctgcccctgtggactctaatgatgctctcagactacgctgacctttctccaaatgaactgcagatcatcaacatctacatctacccttttgcacactggctggcattcggcaacagcagtgtcaatcccatcatttatggtttcttcaacgagaatttccgccgtggtttccaagaagctttccagctccagctctgccaaaaaagagcaaagcctatggaagcttatgccctaaaagctaaaagccatgtgctcataaacacatctaatcagcttgtccaggaatctacatttcaaaaccctcatggggaaaccttgctttataggaaaagtgctgaaaaaccccaacaggaattagtgatggaagaattaaaagaaactactaacagcagtgagatttaaaaagagctagtgtgataatcctaactctactacgcattatatatttaaatccattgctttttgtggctttgcacttcaaatttttcaaagaatgttctaaataaaacatttactgaaagccctctctggcaaaaaaattaaaaataaacaaaaatggtcataagatcataaacaatcttatgttgtataaaaatacgtagagtgacttagacatgtttgcatgaataaatatatttctagagaacagttaaaaaa

SEQ ID NO: 744 - DNA, 416 bp, Homo sapiens
  misc_feature (1)...(416): n = a,t,c or g
cgattcttctttttcttctgctctggctggtgagtgatgggaggagaagcaggagaatttgctcatgtccaggggagggtaagaggaagaagaatttctctattgccccagtaggatctttctctgtttgccttcttcatgttgatgatcccatgtttgtgtttctcattatgcaggatcatcaggctgcccggctggggctggggctggggctgtggctctggggatctcagctgtggctctatatgattaccaaggaggtaggttgggagtggcccgaggagcctggtacatggaggcccctgatataagacagggggacatgtgaaaagagattcatgtctgaccattctaatatcccctcaactttctccccagagggaagtgatgagctttcctttgatccggacgacgtn

SEQ ID NO: 745 - DNA, 1416 bp, Homo sapiens
  misc_feature (1)...(1416): n = a,t,c or g
ggggtaatcgagagggtgggtcggcgcgtgctgctcatcggtgggtacagcctgatgacctgctgggggagcatcttcactgtggccctgtgcctgcaggtagctggggtggatgagggctggggggtccaggccgggctgacttccacctcacccccgccccgtccacggcagagctccttcccctggacactctacctggccatggcctgcatctttgccttcatcctcagctttggcattggccctggtgagtgggcccaaggggctctgggcatccgtcatcacatagaaggagtgatgggtgcctgggtgcacagtgggtgggtgtgaatgcaatgtcccctgcaggccctcagagaccacctcatgccggggcttctgggagggaatggcaggaggagagcactgaggggccccccatacagactgggcctgggctcccactcccatgtctgggctggggtcggggagaggcaggcagggaaccctggccagcagccccctgtccctgcccctccttctagccggagtgacggggatcctggccacagagctgtttgaccagatggccaggcctgctgcctgcatggtctgcggggcgctcatgtggatcatgctcatcctggtcggcctgggatttccctttatcatggaggccttgtcccacttcctctatgtccctttccttggtgtctgtgtctgtggggccatctacactggcctgttccttcctgagaccaaaggcaagaccttccaagagatctccaaggaattacacagactcaacttccccaggcgggcccagggccccacgtggaggagcctggaggttatccagtcaacagaactctagtcccaaaggggtggccagagccaaagccagctactgtcctgtcctctgcttcctgccagggccctggtcctcactccctcctgcattcctcatttaaggagtgtttattgagcaccctttgtgtgcagacatggctccaggtgcttagcaatcaatggtgagcgtggtattccaggctaaaggtaattaactgacagaaaatcagtaacaacataattacaggctggttgtggcagctcatgactgtaatcccagcactttggggaggccaaggtggggaggatcaatttgagggccagagttttgaaaccagcctagggtaacatagttgaggaccccctattctcttacaaaaaattttaaacattaggctgggcatgggtgggtatgtgctaacagctctagctactcagggagggctgagggcagcaggatcactttgagttccaaggagtttcaagggtaggcagtaagctacaattcacaccactggcattgccaggactggggtgacagaggggaggacttcctncttctttttaaaacattattanttatta

SEQ ID NO: 746 - DNA, 2304 bp, Homo sapiens
cagcccaaacagcacgacggatcatagggctggagctggacactgagggtcacaggctttttgtggctttttctggctgtattgtctacctccctctcagccggtgtgcccggcatggggcctgtcagaggagctgtttggcttctcaggacccatactgtggatggcatagctccaggggctgtgtggatatcaggggatctggtgggactgatgtggatcaggctgggaaccaggaatccatggagcatggtgactgccaagatggagctactgggagtcagtctggccctggggattctgcttatggcgtgcgccgggacctgcccccagcctcggcctcccgctccgtccccatcccactcctcctggccagtgtggccgcagcttttgccctgggcgcctcagtctctggcctcctggtctcctgtgcttgtcgccgcgcccaccgacgtcggggcaaggacatcgagactcccgggctcccgcgccctctctccctccgcagtttggcccggctccacggtgggggcccagagcccccgccgccctccaaggacggggacgcggtgcagacgccgcagctctacaccaccttcctgccgcctccggagggcgtgcccccgccggagctggcctgcctgcccacccccgagtccacgccggagctgccggtcaagcacctccgcgccgccggggacccctgggagtggaaccagaacaggaacaacgccaaggagggtccgggccgctcacggggcgggcacgcggcgggcgggcccgcgccccgcgtgctggtgaggccaccgccgcccggctgtcccgggcaggccgtggaagtcaccaccctggaggaactgctgcgctacctgcacggcccgcagccgcccagaaagggggccgagccccccgcccctttaacctcgcgggcgctcccgccggagcccgcccccgccctcttgggcggccccagccccaggccccacgagtgcgcctcgccgctgaggctggacgtgccccccgagggcaggtgcgcctctgcccccgcccggcccgcgctctccgcccccgctccccggctgggcgtcggcggaggccggaggttgcctttctccggccaccgggccccccctgccctgctcactcgagtcccctcgggaggtccctccaggtactccgggggtcccgggaagcacctcctgtacctgggccggcccgagggctaccggggccgcgccctgaaaagggtggacgtcgagaagccccagttgtccctgaagcctcccctcgtcgggccctcctcccgccaggccgtcccgaacggcggccgtttcaacttttaaagggagcggtccacggcctccagcgtggggagcgcccgagtcctctcggccacgagctggacgctcttcaggacgtttgaccgccccctcgccccgcacctccagccttcccgactcgcagagtctcccgaggccccttttcgcctcgggtttatttattgactgtctttccccctgtcctcgacagaagagtgggaggtaagaagcccgtctcctcagtgagccagcatttcagggggagctggcggactcccactccccgctcccttccagccaagctgccttaactcgcccctcggggctcccccagagactgtgccccgggcgggccgcgcgcgctgtgtccagagtcctcgggcctcctgggtctgggacgtgcctctcctactgtgtaggagcctccgcttcccaatacagccgtgtctgcagccactgcctgacttcactcgggcgggggagggcggcagtcggtcggctcgctctgggcgccctcgctctctgccttcatctgggccctgggctctcccgggtaatgggatggctgcggtcccgccggggggcagtctggaaaggtttcctaaaggagacgagcgaattaacggtgtcgaggtgagccagggccagggggaccccggtaaagtttagttgaggctggggaaggccctcggagctcgtttccagatcgaggtaagagggactttcttaaaggcctagtctatgggatggggcggcggagggaattttttgagaaataaaatgaagctgcagtgtacgttacttgaagttccaaaaaacaaaaaaaaaaataaaaagggggccggggttttggaagaacaaattttaaaacccggggctgggaaagaaaaattttttttttgggggccccaaaattaaattccggggccgggttttaaaaacgggggggggggaaaaccccggggttcccccaattaaatccctt

SEQ ID NO: 747 - DNA, 1182 bp, Homo sapiens
  misc_feature (1)...(1182): n = a,t,c or g
cgaccacgcgtcgctcccatgtagctggaaccacagatttgatgttgaaacccggcatgtgtttatcggtgaccactcaggccaagtaacaatcctcaaactggagcaagaaaactgcaccctggtcacaacattcagaggacacacaggtggggtgaccgctctctgttgggacccagtccagcgggtgttgttctcaggcagttcagatcactctgtcatcatgtgggacatcggtgggagaaaaggaacagccatcgagctccaaggacacaacgacagagtccaggccctctcctatgcacagcacacgcgacaattgatctcctgtggcggtgatggtgggattgtcgtctggaacatggacgtggagaggcaggagacccctgaatggttggacagtgattcctgccaaaagtgtgatcagcctttcttctggaacttcaagcaaatgtgggacagtaagaaaattggtctaagacagcaccactgccgcaagtgtgggaaggccgtctgtggcaagtgcagctccaagcgctcctccatccccctgatgggcttcgagtttgaagtgagggtctgtgacagctgccacgaggccatcacagatgaagaacgtgcacccacagccaccttccatgacagtaaacataacattgtgcatgtgcatttcgatgcaaccagaggatggttactgacttctggaactgacaaggttattaagttgtgggatatgaccccagtcgtgtcttgatgactctcccaggaatcagaaagatagtatttactaaagaaacggttgttttaacccaaatcattaccagagtggtaaagcagacatgtgagaagtaagaaagaaactaaagaccctgaatgaatttgcagattacccatgtgcacagtggggacctggccagtgagcactcgcaaggggactcttccaacttgttcatacaatataaaagaagctatttttttaacaaatggtttatacagtctggctgtgctgcattgttttgagtgtaccgaaaaatctgtgttggggtgtttaatttttatacttttcaacaccccatttttacttgttggcctttgtccagggganttaagggaggtatctactccggngtattttttggnccattatacttnccgtngtttacttcaccnggtgtcangtgg

SEQ ID NO: 748 - DNA, 1922 bp, Homo sapiens
ggccatggtcttcggaggggtggtgccctacgtcccgcagtatcgggacattcgcaggacgcagaacgccgacggcttctccacgtacgtgtgcctggtgctgttggtggccaacattttgcggatactcttctggtttggaaggcgctttgagtccccgctgctgtggcagagcgccatcatgatcctgaccatgctgctgatgctgaagctgtgcaccgaggtccgtgtggccaacgagctcaacgccaggcgccgctcctttacagctgcagatagcaaggatgaagaagtcaaggttgcccccaggcggtccttcctggacttcgacccccaccacttctggcagtggagcagcttctcggactacgtgcagtgcgtcctggccttcacgggcgtggcgggctacatcacctacctgtccattgactccgccctgtttgtggagaccctgggcttcctggctgtgctgaccgaagccatgctgggtgtgccccagctttaccgcaaccaccgccaccagtccacggagggcatgagcatcaagatggtgctcatgtggaccagtggtgacgccttcaagacggcctacttcctgctgaagggtgcccctctgcagttctccgtgtgcggcctgctgcaggtgctggtggacctggccatcctggggcaggcctacgccttcgcccgccacccccagaagccggcgccccacgccgtgcaccccactggcaccaaggccctctgacagtggggaggacgaggatgtgggaccgccagccgtgggcactggtgggccctgacctccccgcggggagggtgggtaccgtggcccctgcaggtgtggcagagatggggcataggcattggggtctccatcagcctctgtagggtgtctcagggttgtcagtgggggtggggctgggacgctgtttgtgctcagcggggacagccagggttgatctggccccgagggttttggatgtttttaggatgacataaaaagcaagtgttttccccatttcctcttatgaaacaccgtctgagcccaaggtacacattgggcggcctgcaggaacctgctccaggtggacacacgggccagcagccgcgaaccttgaagctggggtgaccgcaggagaccctgtaaggcctgtgagcggagccctcgaccccgtgacaccctggccagacaccctgcttggactggggtggcctctgctacccaggggtctggcacgggggagggctggggctttctctgcctggtacacacggaaaggcggctgtgcggacgcagggtcaccgtgctccgggttttctgacagtcggtgtttcctgggcctttggagtggctgcgaggcctgaacgccttgtggatccgctgtgtccagcccggctgagcatcgccagggctagctcatgctgctcttgtcagcctctggttctcctcgagtccttggggacgtggcagatgccagcgaccatcagacaacgtggaggccctcatgggcaatggctgagggggccgggctgaggctgtgcacatgcagtctgcacgccactcttgggctctgctggcggagatccccttccttctgggtgcagactgcacctccggatgcagttttgatgtccatcttccaggagagagacggtctcgggtccagggagtggagggggctgcccctgccgtgcaggtcctggccgatggcgccttaccctgctgccctgggcttttggcctgaagcaaattcctgagtggggggtactggggcctgccgcatcctgtcctgtccactgcccacccccgtgtgctggctccctcacttctggctgcagtgggagccgccagtctgacccttgtcaccgcacgctctgcccccaccccgttgcaagaggtcacaccatgtcagcagcct

SEQ ID NO: 749 - DNA, 447 bp, Homo sapiens
gggtcgaccagatcgttctgaacttgtcaggatgcacattttagaagaaacatttgcagagccatccctgcaggctactcagatgaagttgaaaagagctcgactagcagatgatctgaatgaaaagattgctcaaagacctggtcctatggagctggtagagaaaaacatccttcctgtggactccagtgttaaagaagcaattataggcgttgggaaggaggactatccccacactcagggcgatttctcatttgatgaagacagcagtgacgctttgtctccggaccagcctgcgagtcaggagtcacaggggtcagccgcgtccccaagtgagccaaaagttagtgaatcgccatctcctgtgactacaaacactccagcgcagtttgcttcagtgtccccaacagttcctgaattcttgaaaactcctccaactgcagatca

SEQ ID NO: 750 - DNA, 427 bp, Homo sapiens
cttactcacacaggctatgctggtactgccccatcgaccgcagtggttcaccccaggcccaaggctccaggctcaggggccctgtcaggaaggatggagatgggaacttaggctgcggaactatgtgccggaggatgaggacctgaataagaggagggtgccccaggccaaaccggatgcagtgcaggagaaggtgaaggagcagctggaggccgccaagcccgagcccgtcatcgaggaggtggacctggccaagctcgctcctcggaagcctgactgggacctcaagagagatgtggccaagaagctggagaaactactgaagcggactcagagggccattgccgagctgatccgcgaaaggctgaaaggccaggaggacagcctagactctgcagtggatgctgccaccgaacataagacctgt

SEQ ID NO: 751 - DNA, 1839 bp, Homo sapiens
agccatgttaaccatttgttaatttcttctgaacagatcaagcaaaagtagataatcagccagaaaaattagtgcgtagtgctgaagatgtttccacagtgcctacacaacctgataatccattttctcaccctgacaaactcaaaaggatgagcaagtctgttccagcatttctccaagatgagagtgatgacagagaaacagatacagcatcagaaagcagttaccagctcagcagacacaagaagagcccgagctctttaaccaatcttagcagctcctctggcatgacgtccttgtcttctgtgagtggcagtgtgatgagtgtttatagtggagactttggcaatctggaagttaaaggaaatattcagtttgcaattgaatatgtggagtcactgaaggagttgcatgtttttgtggcccagtgtaaggacttagcagcagcggatgtaaaaaaacagcgttcagacccatatgtaaaggcctatttgctaccagacaaaggcaaaatgggcaagaagaaaacactcgtagtgaagaaaaccttgaatcctgtgtataacgaaatactgcggtataaaattgaaaaacaaatcttaaagacacagaaattgaacctgtccatttggcatcgggatacatttaagcgcaatagtttcctaggggaggtggaacttgatttggaaacatgggactgggataacaaacagaataaacaattgagatggtaccctctgaagcggaagacagcaccagttgcccttgaagcagaaaacagaggtgaaatgaaactagctctccagtatgtcccagagccagtccctggtaaaaagcttcctacaactggagaagtgcacatctgggtgaaggaatgccttgatctaccactgctaaggggaagtcatctaaattcttttgttaaatgtaccatccttccagatacaagtaggaaaagtcgccagaagacaagagctgtagggaaaaccaccaaccctatcttcaaccacactatggtgtatgatgggttcaggcctgaagatctgatggaagcctgtgtagagcttactgtctgggaccattacaaattaaccaaccaatttttgggaggtcttcgtattggctttggaacaggtaaaagttatgggactgaagtggactggatggactctacttcagaggaagttgctctctgggagaagatggtaaactcccccaatacttggattgaagcaacactgcctctcagaatgcttttgattgccaagatttccaaatgagcccaaattccactggctcctccactgaaaactactaaaccggtggaatctgatcttgaaaatctgagtaggtggacaaatatcctcactttctatctattgcacctaaggaatactacacagcatgtaaaagtcaatctgcatgtgcttctttgattacaaggcccaagggatttaaatataacaaaatgtgtaatttgtgactctaatattaaataagatatttgaacaagctaggaaaattgaatttctgctgctgcttcaaagaaaaagctgccccagagcattaaacatggggtattgttaagaagcaaaatgttcttgtttgccatcatgtgtttcacaccacaattctgtgccacagttaagagggtctggtacccttgcaggacctttgtaggttgtgggaaaaagtcgcagaaagatactcaaagtggagcagggaatggagacagacatcagtgatgataaaaaaaaaaaatggaccttaagaaactatttactctgtaatctctaataaaatatggaattccatattagggcaatgagaaaaaaaaaa

SEQ ID NO: 752 - DNA, 1353 bp, Homo sapiens
cggcacgaggaagctctttccactacggctgtattgcactggtgagtccgggcccatggatgagaaattgatgcgaggatcaatacaagcttaatttgaattaataaaaggaaatattttctccctttgaacttatctccgtaaagccattgtgcctcctcttgggggtcacgtgttcacaatcaatggcctttgaggagctcttgagtcaagttggaggccttgggagatttcagatgcttcatctggtttttattcttccctctctcatgttattaatccctcatatactgctagagaactttgctgcagccattcctggtcatcgttgctgggtccacatgctggacaataatactggatctggtaatgaaactggaatcctcagtgaagatgccctcttgagaatctctatcccactagactcaaatctgaggccagagaagtgtcgtcgctttgtccatccccagtggcagcttcttcacctgaatgggactatccacagcacaagtgaggcagacacagaaccctgtgtggatggctgggtatatgatcaaagctacttcccttcgaccattgtgactaagtgggacctggtatgtgattatcagtcactgaaatcagtggttcaattcctacttctgactggaatgctggtgggaggcatcataggtggccatgtctcagacaggtttgggcgaagatttattctcagatggggtttgctccagcttgccattactgacacctgcgctgccttcgctcccaccttccctgtttactgtgtactacgcttcttggcaggtttttcttccatgatcattatatcaaataattctttgcccattactgagtggataaggcccaactctaaagccctggtagtaatattgtcatctggtgcccttaatattggacagataatcctgggaggcttggcttatgtcttccgagactggcaaaccctgcacgtggtggcgtctgtacctttctttgtcttctttcttctttcaaggtggctggtggaatctgctcggtggttgataatcaccaataaactagatgagggcttaaaggcacttagaaaagttgcacgcacaaatggaataaagaatgctgaagaaaccctgaacatagaggttgtaagatccaccatgcaggaggagctggatgcagcacagaccaaaactactgtgtgtgacttgttccgcaaccccagtatgcgtaaaaggatctgtatcctggtatttttgagaaaaaaaaatctcaaggaaaaggcataaaaatgattgctacacaaaagtgaccaaattttaagaagccttcatgagctgattggtggggaaattcaga

SEQ ID NO: 753 - DNA, 1830 bp, Homo sapiens
gattcttttgagtctattttacgccttatctttgaaattcaccactcgggtgagaaaggtgacattgtagtctttctggcctgtgaacaagatattgagaaagtctgtgaaactgtctatcaaggatctaacctaaacccagatcttggagaactggtggttgttcctttgtatccaaaagagaaatgttcattgttcaagccactcgatgaaacagaaaaaagatgccaagtttatcaaagaagagtggtgttaactactagctctggagagtttttgatctggagcaactcagtcagatttgttatcgatgtgggtgtggaaagaagaaaggtgtacaacccgagaataagagcaaactcgctcgtcatgcagcccatcagccagagccaggcagagatacgcaagcagattcttggctcatcttcttcaggaaaatttttctgcctgtacactgaagaatttgcctccaaagacatgacgccactgaagccagcagaaatgcaggaagccaacctaacaagcatggtgctttttatgaagaggatagacattgcgggcctaggccactgtgacttcatgaacagaccagcaccagaaagtttgatgcaggcattggaagacttagattatctggcagcactggataatgatggaaatctttctgaatttggaatcatcatgtcagagtttcctcttgatccacaactctcgaagtctatcttagcgtcctgtgaatttgactgtgtagatgaagtgctaacaatcgcagccatggtaacagctccaaattgcttttcacatgtgccacatggagctgaagaggctgccttgacttgttggaagacatttttacatcccgaaggagatcactttaccctcatcagcatttacaaggcttaccaagacacaactctgaattctagcagtgagtactgtgtggaaaagtggtgtcgtgattacttcctcaactgttcagcactcagaatggcagatgttattcgagctgaactcttagaaattatcaagcgaatcgagcttccctatgcagaacctgcttttggctccaaggaaaacactctaaacataaagaaagctcttctgtccggttactttatgcagattgctcgggatgttgatggatcaggtaactacttaatgctgacacataagcaggttgctcagctgcatcccctgtctggttactcaatcaccaagaagatgccagagtgggtcctcttccataaattcagcatttctgagaacaactacatcaggattacctcagaaatctctcctgaactatttatgcagctggtaccacaatactatttcagtaatctgcctcctagtgaaagtaaggacattctacagcaagtagtggatcacctatcccctgtgtcaacaatgaataaggaacagcaaatgtgtgagacgtgccctgaaactgaacagagatgcactctccagtgactccccagcaaacacaaggtgcagcagggtcccaaaggtagctggatggctgaactgctggatatgggagatacatgacgcgaagacggatttcacatccacaggacggtcttgaagaaaataacactgtgtatattattttaaaataaaaaatagaagtttttattgagttctttaaattactactccatgcttttcttcttcttggaaaagtttttaaatcaaccactcataatttgaccaaaattttaaaaaactggtattttgtaaatgtgtcagagacacatgggacagaaccctactttttgtagaggaacttaatctgaataaagtctgagtttttcagtaaaaaaaaaa

SEQ ID NO: 754 - DNA, 394 bp, Homo sapiens
ctactacgcactgcaccactggcccttccccgacctcctgtgccagacgacgggcgccatcttccagatgaacatgtacggcagctgcatcttcctgatgctcatcaacgtggaccgctacgccgccatcgtgcacccgctgcgactgcgccacctgcggcggccccgcgtggcgcggctgctctgcctgggcgtgtgggcgctcatcctggtgtttgccgtgcccgccgcccgcgtgcacaggccctcgcgttgccgctaccgggacctcgaggtgcgcctatgcttcgagagcttcagcgacgagctgtggaaaggcaggctgctgcccctcgtgctgctggccgaggcgctgggcttcctgctgcccctggcggcggtggtctactcgtcg

SEQ ID NO: 755 - DNA, 1795 bp, Homo sapiens
ggctcgggctcggctccgggacgctgctctccgtgtccgagtacaagaagaagtaccgggagcacgtgctgcagctgcacgctcgggtgaaggagaggaacgcccgctccgtgaagatcaccaagcgcttcaccaagctgctcatcgcgcccgagagcgccgccccggaggaggcgctggggcccgcggaagagcctgagccggggcgcgcgcggcgctcggacacgcacactttcaaccgcctcttccgccgcgacgaggagggccggcggccgctgaccgtggtgctgcagggcccggcgggcatcggcaagaccatggcggccaaaaagatcctgtacgactgggcggcgggcaagctgtaccagggccaggtggacttcgccttcttcatgccctgcggcgagctgctggagaggccgggcacgcgcagcctggctgacctgatcctggaccagtgccccgaccgcggcgcgccggtgccgcagatgctggcccagccgcagcggctgctcttcatcctggacggcgcggacgagctgccggcgctggggggccccgaggccgcgccctgcacagaccccttcgaggcggcgagcggcgcgcgggtgctaggcgggctgctgagcaaggcgctgctgcccacggccctcctgctggtgaccacgcgcgccgccgcccccgggaggctgcagggccgcctgtgttccccgcagtgcgccgaggtgcgcggcttctccgacaaggacaagaagaagtatttctacaagttcttccgggatgagaggagggccgagcgcgcctaccgcttcgtgaaggagaacgagacgctgttcgcgctgtgcttcgtgcccttcgtgtgctggatcgtgtgcaccgtgctgcgccagcagctggagctcggtcgggacctgtcgcgcacgtccaagaccaccacgtcagtgtacctgcttttcatcaccagcgttctgagctcggctccggtagccgacgggccccggttgcagggcgacctgcgcaatctgtgccgcctggcccgcgagggcgtcctcggacgcagggcgcagtttgccgagaaggaactggagcaactggagcttcgtggctccaaagtgcagacgctgtttctcagcaaaaaggagctgccgggcgtgctggagacagaggtcacctaccagttcatcgaccagagcttccaggagttcctcgcggcactgtcctacctgctggaggacggcggggtgcccaggaccgcggctggcggcgttgggacactcctgcgtggggacgcccagccgcacagccacttggtgctcaccacgcgcttcctcttcggactgctgagcgcggagcggatgcgcgacatcgagcgccacttcggctgcatggtttcagagcgtgtgaagcaggaggccctgcggtgggtgcagggacagggacagggctgccccggagtggcaccagaggtgaccgagggggccaaagggctcgaggacaccgaagagccagaggaggaggaggagggagaggagcccaactacccactggagttgctgtactgcctgtacgagacgcaggaggacgcgtttgtgcgccaagccctgtgccggttcccggagctggcgctgcagcgagtgcgcttctgccgcatggacgtggctgttctgagctactgcgtgaggtgctgccctgctggacaggcactgcggctgatcagctgcagattggttgctgcgcaggagaagaagaagaagagcctggggaagcggctccaggccagcctgggtggcggcag

SEQ ID NO: 756 - DNA, 436 bp, Homo sapiens
tcgcctcttagtcagggcgccccacgcgtccggcaaaacccacaggccaaggaatgggaagatttatgttgacacttgtttgtcaagggtcaataatgatgtctgcccgggacctcatcatgaacaacctcacagagcttcagcctggcctcttccaccacctgcgcttcttggaggagctgcgtctctctgggaaccatctctcacacatcccaggacaagcattctctggtctctacagcctgaaaatcctgatgctgcacaacaatcagctgggaggaatccccgcacaggcgctgtgggagctgccgagcctgcagtcgctgcgcctagatgccaacctcatatccctggtcccggagaggagctttgaggggctgtcctccctccgacacctctggctggacgacaatgcactcacggagatccctagcag

SEQ ID NO: 757 - DNA, 714 bp, Homo sapiens
ctaggagcctcctaatgcagtcttctgcacagtcctggggactgactgactgaatcacacctctggggctgggggctgctgacatgtgtgcctttccttggctgcttcttctcctgctgctccaggagggcagccaaaggagactctggagatggtgtggatccgaggaagtggttgcggtccttcaggagtccatcagcctccccctggaaataccaccagatgaagaggttgagaacatcatctggtcctctcacaaaagtcttgccactgtggtgccagggaaagagggacatccagctaccatcatggtgaccaatccacactaccagggccaaatcctaactatgcttctgagaagccttcaacagccttctgcctcctggccaagggattgctcatcttcttgctcttggtaattctggccatgggactctgggtcatccgagtccagaaaagacacaaaatgccaaggatgaagaaactcatgagaaacagaatgaaattgaggaaggcagcaaagcctgtctccagccctgcctgactgctccttgggaaccccagtcctgagcttggtttcttcccagcacccagagaatccttcctcagctctcttctttccaggggaaggaggtgctcaggggtgggtatccagagagccatacttctgagggaagactggctggcaataaagtcaaattaagtgaccacaaa

SEQ ID NO: 758 - DNA, 1919 bp, Homo sapiens
aaatagttggacataaataagagaaaaacatacttctactattaagagggaatcatagggtctatattttttcttgtgtaagaatccgttttagttccatagtttagcaaaagatgcttactagattggtatatcttgtccagcaaccatttttgtgcccatgttttctcattcccttatagggatcggggaagaataccaattgccatattacaacatggtaccgagtgatccgtcatacgaagatatgcgtgaggttgtgtgtgtcaaacgtttgcggccaattgtgtctaatcggtggaacagtgatgaatgtctacgagcagttttgaagctaatgtcagaatgctgggcccacaatccagcctccagactcacagcattgagaattaagaagacgcttgccaagatggttgaatcccaagatgtaaaaatctgatggttaaaccatcggaggagaaactctagactgcaagaactgtttttacccatggcatgggtggaattagagtggaataaggatgttaacttggttctcagactctttcttcactacgtgttcacaggctgctaatattaaacctttcagtactcttattaggatacaagctgggaacttctaaacacttcattctttatatatggacagctttattttaaatgtggtttttgatgcctttttttaagtgggtttttatgaactgcatcaagacttcaatcctgattagtgtctccagtcaagctctgggtactgaattgcctgtttcataaaacggtgctttctgttgaaagccttaagaagataaatgagcgcagcagagatggagaaatagactttgccttttacctgagacattcagttcgtttgtattctacctttgtaaaacagcctatagatgatgatgtgtttgggatactgcttattttatgatagtttgtcctgtgtccttagtgatgtgtgtgtgtctccatgcacatgcacgccgggattcctctgctgccatttgaattagaagaaaataatttatatgcatgcacaggaagatattggtggccggtggttttgtgctttaaaaatgcaatatctgaccaagattcgccaatctcatacaagccatttactttgcaagtgagatagcttccccaccagctttattttttaacatgaaagctgatgccaaggccaaaagaagtttaaagcatctgtaaatttggactgttttccttcaaccaccattttttttgtggttattatttttgtcacggaaagcatcctctccaaagttggagcttctattgccatgaaccatgcttacaaagaaagcacttcttattgaagtgaattcctgcatttgatagcaatgtaagtgcctataaccatgttctatattctttattctcagtaacttttaaaagggaagttatttatattttgtgtataatgtgctttatttgcaaatcacccactcctttacaaccatactttatatatgtacatacattcatactgtagaaaccagctcatgtgtacctcatatcccatccttaagagaagaaatgttataaagtagaactaaatataaattttcagaattaatgcattcaaagtaatatatcaaatccaggactttgttaacttcaggtaaaaacttcattagggtaatatcatctcaattttttcaaaatgaaaggattctctaattagaaatttatatgtcagagctgttataaatttatccacctgtcaaatatgttctggacagctaaatcatttgagatttttggttttttgatttctattccctaacttgtgaagacaatgaaaaatcaggcagaaatatttagtatctagtcagtatctgtagctacactgtataactgttcttcaataaaatggttcatattttaaaaaaaaaaaa

SEQ ID NO: 759 - DNA, 650 bp, Homo sapiens
tcccgggtcgacgatttcgtccagccgcattggaggaacgggctatggaaaaattgagagaaaaagttccatttcagaatagaggaaaaggaacattatcatctattatcccgaataactctgatacaagaaaagcaactgaaactacttctctgagtagcaagcctgaatatgtaaatcctgactttagatggagtaaagatccttcctccaaaagtggaaatctgttggaaaccagtgaggtaggttggacatcaaaccctgaggaattggacccgatcaggctggctctcctgggcaagtcaggtctgagctgtcaggtggggtcagccacatcacaccctgtgtcctgccaggagcctatagatgaagatcaaagaataagtcctaaagataagtcaactgctggccgtgagttcagtggccaggtttctcatcagaccacctctgaaaaccagtgtactcctattcccagcagcacagttcacagctctgtggctgacatgcagaacatgcctgctgctgtgcacgcactcttgacacaaccctctctcagcgctgctccttttgctcagcggtatttgggaacactcccttcaactggaagcaccaccttgcctcagtgccatgctggcaatgccacagtctgg

SEQ ID NO: 760 - DNA, 2249 bp, Homo sapiens
ttccgttgaggctgaccctgatggaggaagtgctcctgctgggcctcaaggaccgcgagggttacacatcattttggaatgactgtatatcatctggattacgtggctgtatgttaattgaattaccattgagaggaaggttacaactagaggcttgtggaatgagacgtaaaagtctattaacaagaaaggtaatctgtaagtcagatgctccaacaggggatgttcttcttgatgaagctctgaagcatgttaaggaaactcagcctccagaaacggtccagaactggattgaattacttagtggtgagacatggaatccattaaaattgcattatcagttaagaaatgtacgggaacgattagctaaaaacctggtggaaaagggtgtattgacaacagagaaacagaacttcctactttttgacatgacaacacatcccctcaccaataacaacattaagcagcgcctcatcaagaaagtacaggaagccgttcttgacaaatgggtgaatgaccctcaccgcatggacaggcgcttgctggccctcatttacctggctcatgcctcggacgtcctggagaatgcttttgctcctcttctggacgagcagtatgatttggctaccaagagagtgcggcagcttctcgacttagaccctgaagtggaatgtctgaaggccaacaccaatgaggttctgtgggcggtggtggcggcgttcaccaagtaactctgctcggggtgaaccattctcctttctctcaagtaaaccagtagtttttcttctgttgacttctggttttctgtaatttgtactttcccacactataattggcttctgttttacaaaatggtgggtggctttttcttttttgtacgtgtacaggattctgctggtacgagaggccttcctctttctgtttttaaaaaaagttttactgccatattggcattccattccctgttgccatcctcactgttacctgttttgggtttctggtctactttgactttcaaagtacctccagcctcctcatacgcacagcttttggatgacctcagcttgagtttctccatatgtgcatgtacatctagcattctgcctacagttcagacagaagtcacaaaaaggccttcaactcaccaaaggtaaatatctgtatctattaggacattttttacatagacttcagttgagatgtatacttagcaaaattatttttaaattgaaacagcacagtaaatacttaatataaaatgtcccttggattttgcttcccatgtaaatctattgtattattacacttgttataattttaactataaaggtccaattgtttcacagagccagtttgggatgggctgcattccatttatgctgtatatagtttgaattatatataaattaccccttcttctggccacccctgctcccatcttagtattttgcaagatctaatcagttgtacacctggtgcccctcgcttgcttcaatcatggttatttgatggcaaaatcgacctcttgtcgctgaaggagagagaaaagatgtgtgtctgattggtcctgggattttttgagctgtgccatttatggtactctttgcctatgcatcccctttttagattttttttaaattttatcttactgtttttataatttctattgggaagaggcttgtgaccagtaccaatcttgagtttctttttctgtccacaagtaaattaatatctgctctgaaatgtcatttatctactcacacattcttggggaaaaaaatcaaatgtcagtcctagcagatgttgcatgtaaattggtagcaagtaatgattacaacccagaggattaagaattttgtaacagaaagctctatgttttaattttttatatacaattaggataattagcattgtcagactataaacctttgctttttaaagtttatttttactatttctttatcactttattgtatcatcaccattggtttcataatgtaaatactatatgttgaacaaattaaatgtcaaaattttttattaccatagtccatgttaatagtggggctttccagggtgtttggggattttttttgttgttgttaacattcattgcaaaagtactagatggtgtataactctagagttgaattttaagggattccctatatcacttgtcatactatctttttatctgaagtaataaataaacaattgatcttgaaagtgcctgaatcagaaaaaaaaaa

SEQ ID NO: 761 - DNA, 1170 bp, Homo sapiens
  misc_feature (1)...(1170): n = a,t,c or g
ttttttttttttaacatctttacattttaatgaaaaagtagataatctatttgaaaagtacaaactcaattgcaatttcaagaaaaaaatatgtatttatataccataaataagcaaaattggactctgaagccctaatacttcaaaagcattcatcctattccataaaaacctagtattattcagcaacagtactactactgatttaaaaatagaaagcaagtctatcttcacatgtagttctttgtctttaatttgtacaactcaccaaggttattttcattcttagcacccggggttcaccagggtgtgatccaaagcaaaccagcataggtttttaacagaaaatctttgccaggaacttcatgacctgtattttcctcacctaggaagaagctgtccccactcgcatgattttgaacagtgtgttgatgttattgcttcgaattgcatcccgacaagcagtgatcacctggttctttggttttccaacccgcagacgacctgctctttgaattgcttgatttactgctttgaggtttcccaacagctctgtgtgattgttacagcgaattttatatccatttagcaagtctctattaaggtcatagagttccatataacgactcttcattgttttcatgtccctcatcagacgagcatcctcagctccgaccagcaaacttcggatcaaattagaatgatcagccatatcagcactgagcttctgatgcactgaatgatattcatccacctggagaccatgaacactcaggaatgaaaaaggcctcacaaacttcttgaacccagacaaatgaaaagacactatttaccagatacagagacccccttctttcccctgttcgcttataccaattaagctacttcccgttatttcatctctgtctcaacaagttaactcatctgtgctgcctccaatttcaacacgacactccatgtgaatcttccccatgctttagcaccaggagcccccacaacacacatattaatattttagggatttgcagtgggaatattgtatactttggggccaatcagaatcatctttattttgctcttttatcttgaatttgggtttttggaaagacccaaactgaattccaccgcgctggactagggtctacgatnncctnnncncctgaaagaact

SEQ ID NO: 762 - DNA, 3426 bp, Homo sapiens
caaaaaggctattacctgtggggaaaaggaaaagcaagatctcattaagagccttgccatgttgaaggacggcttccgcactgacagggggtctcactcagacctgtggtccagcagcagctctctggagagttcgagtttcccgctaccgaaacagtacctggatgtgagctcccagacagacatctcgggaagcttcggcatcaacagcaacaatcagttggcagagaaggtcagattgcgccttcgatatgaagaggctaagagaaggatcgccaacctgaagatccagctggccaagcttgacagtgaggcctggcctggggtgctggactcagagagggaccggctgatccttatcaacgagaaggaggagctgctgaaggagatgcgcttcatcagcccccgcaagtggacccagggggaggtggagcagctggagatggcccggaagcggctggaaaaggacctgcaggcagcccgggacacccagagcaaggcgctgacggagaggttaaagttaaacagtaagaggaaccagcttgtgagagaactggaggaagccacccggcaggtggcaactctgcactcccagctgaaaagtctctcaagcagcatgcagtccctgtcctcaggcagcagccccggatccctcacgtccagccggggctccctggttgcatccagcctggactcctccacttcagccagcttcactgacctctactatgacccctttgagcagctggactcagagctgcagagcaaggtggagttcctgctcctggagggggccaccggcttccggccctcaggctgcatcaccaccatccacgaggatgaggtggccaagacccagaaggcagagggaggtggccgcctgcaggctctgcgttccctgtctggcaccccaaagtccatgacctccctatccccacgttcctctctctcctccccctccccaccctgttcccctctcatggctgaccccctcctggctggtgatgccttcctcaactccttggagtttgaagacccggagctgagtgccactctttgtgaactgagccttggtaacagcgcccaggaaagataccggctggaggaaccaggaacggagggcaagcagctgggccaagctgtgaatacggcccaggggtgtggcctgaaagtggcctgtgtctcagccgccgtatcggacgagtcagtggctggagacagtggtgtgtacgaggcttccgtgcagagactgggtgcttcagaagctgctgcatttgacagtgacgaatcggaagcagtgggtgcgacccgaattcagattgccctgaagtatgatgagaagaataagcaatttgcaatattaatcatccagctgagtaacctttctgctctgttgcagcaacaagaccagaaagtgaatatccgcgtggctgtccttccttgctctgaaagcacaacctgcctgttccggacccggcctctggacgcctcagacactctagtgttcaatgaggtgttctgggtatccatgtcctatccagcccttcaccagaagaccttaagagtcgatgtctgtaccaccgacaggagccatctggaagagtgcctgggaggcgcccagatcagcctggcggaggtctgccggtctggggagaggtcgactcgctggtacaaccttctcagctacaaatacttgaagaagcagagcagggagctcaagccagtgggagttatggcccctgcctcagggcctgccagcacggacgctgtgtctgctctgttggaacagacagcagtggagctggagaagaggcaggagggcaggagcagcacacagacactggaagacagctggaggtatgaggagaccagtgagaatgaggcagtagccgaggaagaggaggaggaggtggaggaggaggagggagaagaggatgttttcaccgagaaagcctcacctgatatggatgggtacccagcattaaaggtggacaaagagaccaacacggagaccccggccccatcccccacagtggtgcgacctaaggaccggagagtgggcaccccgtcccaggggccatttcttcgagggagcaccatcatccgctctaagaccttctccccaggaccccagagccagtacgtgtgccggctgaatcggagtgatagtgacagctccactctgtccaaaaagccaccttttgttcgaaactccctggagcgacgcagcgtccggatgaagcggccgtccccacccccacagccttcctcggtcaagtcgctgcgctccgagcgtctgatccgtacctcgctggacctggagttagacctgcaggcgacaagaacctggcacagccaattgacccaggagatctcggtgctgaaggagctcaaggagcagctggaacaagccaagagccacggggagaaggagctgccacagtggttgcgtgaggacgagcgtttccgcctgctgctgaggatgctggagaagcggatggaccgagcggagcacatgggtgagcttcagacagacaagatgatgagggcagctgccaaggatgtgcacaggctccgaggccagagctgtaaggaacccccagaagttcagtctttcagggagaagatggcatttttcacccggcctcggatgaatatcccagctctctctgcagatgacgtctaatcgccagaaaagtatttcctttgttccactgaccaggctgtgaacattgactgtggctaaagttatttatgtggtgttatatgaaggtactgagtcacaagtcctctagtgctcttgttggtttgaagatgaaccgactttttagtttgggtcctactgttgttattaaaaacagaacaaaaacaaaacacacacacacacaaaaacagaaacaaaaaaaaccagcattaaaataataagattgtatagtttgtatatttaggagtgtatttttgggaaagaaaatttaaatgaactaaagcagtattgagttgctgctcttcttaaaatcgtttagattttttttggtttgtacagctccaccttttagaggtcttactgcaataagaagtaatgcctgggggacggtaatcctaataggacgtcccgcacttgtcacagtacagctaatttttcctagttaacatattttgtacaatattaaaaaaatgcacagaaaccattgggggggattcagaggtgcatccacggatcttcttgagctgtgacgtgtttttatgtggctgcccaacgtggagcgggcagtgtgataggctgggtgggctaagcagcctagtctatgtgggtgacaggccacgctggtctcagatgcccagtgaagccactaacatgagtgaggggagggctgtggggaactccattcagttttatctccatcaataaagtggcctttcaaaaag

SEQ ID NO: 763 - DNA, 2507 bp, Homo sapiens
gtccacatcccattaggttttccaagctctgtgtcagctttaataatcaggaatacaaccagttctgtgtaatagaagaagcatccaaagcaaatgaagttttagaaaatctgactcaaggaaagatgtgcctagttcctggcaaaacaagaaaactgttatttaagtttgttgcaaaaactgaagatgtgggaaagaaaattgagattacttcagtggatcttgctctgggcaatgagacgggaagatgtgtggttttaaattggcagggaggaggaggagatgctgcttcctcccaagaagccttacaggcagctcggtctttcaaaaggcgacctaagctacctgacaatgaagttcactggggcagcattataattcaggcaagcacaatgatcatatccagagtcccaaacatttctgtacatctgctacatgaaccccctgcactgactaatgaaatgtattgtttggttgtgactgttcagtcccatgaaaagacccaaatcagagatgtgaagctcaccgctggcttaaaaccaggacaggatgccaatttaactcagaagactcacgtgactcttcatggaacagaactgtgtgatgaatcctacccggctttactcactgacattcctgttggagacttacatccaggggaacagctggaaaaaatgttgtatgttcgctgtggaacagtgggttccagaatgtttcttgtatatgtttcttacctgataaatacaaccgttgaagaaaaagaaattgtttgcaagtgtcacaaggatgaaactgtaacaattgaaacagtctttccatttgatgttgcggttaaatttgtttctaccaagtttgagcacctggaaagggtttatgctgacatcccctttctgttgatgacggacctcttaagtgcctcaccctgggccctcactattgtttccagtgagctccaccttgctccatccatgaccacagtggaccagctcgagtctcaagtggacaatgttatcttacagactggagagagtgctagtgaatgcttttgtcttcaatgcccatctcttggaaatattgaaggtggagtagcaaccgggcattatattatctcttggaaaaggacctcagcaatggagaatatccccatcatcacaactgtcatcactctgccgcacgtgattgtggagaatatccctctccatgtgaatgcagatctgccgtcatttgggcgtgtcagagagtcgttacctgtcaagtatcacctacagaataagaccgacttagttcaagatgtagaaatttctgtggagcccagtgatgccttcatgttctcaggtctcaaacagattcgattacgtatcctccctggcacggagcaggaaatgctatataatttctatcctctgatggctggataccagcagctgccatctctcaacatcaacttgcttagatttcctaacttcacaaatcagctgctcaggcgttttatacctaccagtatttttgtcaagccacagggtcgactcatggatgatacctctattgctgctgcatgatgttcaagaccggcccttggctgttgttacagagatgttgggcagagctatgcaggtgtttcattgtgaactctagctttgatcatggtaaaaagttaaccttttctattttttaatggatgttataccaactattcagaggaactcatacttcaaaaatattaggaaaatctgtcttatagtttctctaataaatatctgaaatctcagtacgacatgaaagaatgtcagaccattgttattgttgaaagtcatttgatgaatggtaaattctatgaaaagtaagtgatttgcatgtataatatcaggaaaattaagcatcccaagtgtgactggacaaagagagcagatgcaccagtgcctgtgccataaagttccgaatcccccatgtgtctctttcagagctggccagaccggaaataaatcattctcataaattcagtgtgtactcagaacacatacacaacaacatagggagttgtatgactgatacggaaaacttccagaaagttttaatcaaagcagtttaattaaggtatcaaaaatatctttgcttactatcaagaagtgtcaaataggttcagcttgctgccaaaatatggatcatttatgaagcaggttcatattttagaggtgttaataaaatcctcatcggaaaagatccaaagtgcaaggatttgattataaacataatttcctagactgaaagtttttggaaaagatgcagggtctgagtcaggccttctggttatattgtgcagtttcaaaagaactatttaaaactcttgaaaactcatgtaaataaaaatcatagggtgaaaattgtatttgttaaaataccttaataatttaaaatgacctgatttcctggaaaattttattattcaaaaggtggaggcattgtaaaaaggaaatagtgatgtaaataaacatgttctctttcaagta

SEQ ID NO: 764 - DNA, 2016 bp, Homo sapiens
gcggccgcggacctagccaacagcaacgccggcgccgccgtgggcaggaaggccgggccgcgcagcccgcccagcgcccccgcgccagcgccgccgccgcccgcgcccgcgccgcccacactcggcaacaaccaccaggagagccccggctggcggtgctgccgccccacgctgcgcgagaggaacgcgctcatgttcaacaacgagctcatggccgacgtgcacttcgtcgtggggcccccgggggcgaccaggacggtgcccgcccacaagtacgtcttggctgtcggcagctccgtcttctatgccatgttctacggagacctggcggaagtcaaatctgaaattcacattccagacgtggagcccgcagcctttctgatcctcttaaagtacatgtacagtgatgagatcgatctggaagccgacacggtgctggccactctgtacgctgctaagaagtacatcgtcccagcattggcaaaagcctgtgtcaactttctggagacaagtttggaagccaagaacgcctgcgtcctgctgtcccagagccggctgtttgaggagcccgagctgacgcagcgctgctgggaggtcattgacgcacaggccgagatggccctacggtccgaaggcttctgtgagatagaccggcagacgctggagatcattgtcactcgggaggccctcaacaccaaagaggcggtggtcttcgaggccgtcctgaactgggccgaggcggagtgcaagaggcaggggctgccaatcaccccacgaaacaagaggcatgttctggggcgagccctctatctggtccgaattccaaccatgaccctagaggagtttgccaacggcgctgcccagtcagacatcctgactctggaggagacccacagcatcttcctgtggtacacggccaccaacaagccccgcctggactttcccctgaccaagaggaagggcctcgccccgcagaggtgccaccgattccagtcttctgcctaccgcagcaaccagtggcggtaccgcgggcgctgcgacagcatccagtttgcagtggacagaagggtatttattgcagggctgggcctgtatggctccagctctgggaaggctgagtacagcgtgaagattgagctcaagcggctcggggtggttctggctcagaacttgaccaagttcatgtcagacggatccagtaacaccttcccggtctggtttgaacacccggtccaggttgaacaagacaccttctacacggccagtgccgtcctggacggcagcgaactcagctactttgggcaggaggggatgacggaagtgcagtgtggaaaggtggccttccagttccagtgctcctcggacagcaccaacgggactggggtccagggtgggcagatccctgagctcattttctatgcctgaggtgcccggggaggctgcagcaggtcagcgagtgagtggaggggaagtcaagatgctaactgcttcttgacaccatgaaaggctgctcttaactttgtctctctttgacatgtagtcagctgaagcttgactgtgtagagacattttccacacagccagaacccagggattggagtcttaggcatctctggtacagtggggtgcacgtctcaggtggaggaagatttacggctcaagacaggccccagatcccctcccagtggcacccatgccacctgctttgaggggttggatcttcctgctaccctcttggattctaagtggttccaagcttaacttgagaccttcccttcaaatctaaaattggcaaaaagtcacttaaaatagtggacttctgtaataaaggttgcctaaaataacaaaaaaaaaaaaaagggggggcccgtttaaaagaaccaaatttaactaccgggggctggcaaggaaaaattttttttttggggccccaaaaataaattccggggccggggttttaaaacgggggggggggaaaaacccggggggtacccaaattaattcgcttggagcaaa

SEQ ID NO: 765 - DNA, 2518 bp, Homo sapiens
agcggttttacacactatgcaatctatgatttcattgtcaagggcagctgcttctgcaatgttcacgctgatcaatgcatacctgttcatggcttcagacctgtcaaggccccaggaacattccacatggtccatgggaagtgtatgtgtaagcacaacacagcaggcagccactgccagcactgtgccccgttatacaatgaccggccatgggaggcagctgatggcaaaacgggggctcccaacgagtgcagaacctgcaagtgtaatgggcatgctgatacctgtcacttcgacgttaatgtgtgggaggcatcagggaatcgtagtggtggtgtctgtgatgactgtcagcacaacacagaaggacagtattgccagaggtgcaagccaggcttctatcgtgacctgcggagacccttctcagctccagatgcttgcaaaccgtgttcctgccatccagtaggatcagctgtccttcctgccaactcagtgaccttctgcgaccccagcaatggtgactgcccttgcaagcctggggtggcagggcgacgttgtgacaggtgcatggtgggatactggggcttcggagactatggctgtcgaccatgtgactgtgcggggagctgtgaccctatcaccggagactgcatcagcagccacacagacatagactggtatcatgaagttcctgacttccgtcccgtgcacaataagagcgaaccaccctgggagtgggaggatgcgcaggggttttctgcacttctacactcaggtaaatgcgaatgtaaggaacagacattaggaaatgccaaggcattctgtggaatgaaatattcatatgtgctaaaaataaagattttatcagctcatgataaaggtactcatgttgaggtcaatgtgaagattaaaaaggtcttaaaatctaccaaactgaagattttccgaggaaagcgaacattatatccagaatcatggacggacagaggatgcacttgtccaatcctcaatcctggtttggaataccttgtagcaggacatgaggatataagaacaggcaaactaattgtgaatatgaaaagctttgtccagcactggaaaccttctcttggaagaaaagtcatggatattttaaaaagagagtgcaagtagcattaagatggatagcacataatggcacttgtctatgtacaaaacacaaactttagagcaagaagacctcagacaggaaactggaattttttaaagtgccaaaacatatagaaatgtttgaatgcatgggtcttatctaatttatctcttctggacccatgtttaaatacagttttatttcatgaagagaaatgaaaacccctacactgatatctgttttctatgggactgattctgaaattcttaactattaagaatattttaatagcagcatgacatttagcagtaatccattaagggcagtacctctaacaaggacgccttccagcttcagcgatgttacttacgtttgatgctacttaaagtaatgaatgacgttttaaggaatccctaaccctactatcagaaaaggtgtttgtttaaagagccttctcttgtgtgttacgcatgaactttggtctgtaggtgttaaatggaacctctccatgtgtatatagtatttccttgtataaagcactttactacctaccacttgtgttgtgaacgtttggtgactgctgttgaaagaaggaaaagggtgtgtgagaaagcctactgaagcagcagcactgccactacatgtggacaaaagtgaccatataaaagaagttgtgctatttaactctgaatacttggagaaactaggtgaagatgcaaccagaaaggagaatatgtatgcgtgaagtctcagctttgagctggaggctagattccaagatgacagccatgatgaaactttttaaaaaactaaaccagaagagactttaaaataagagaaagaaatcataaatgtagacatatgcttggctaaaggggaaatggactttaaattttaaagagctcatttgcaatgcacttgtatacacttcaaaaattattgtagacacagaatttgttatatttttgtgcttagtatttaaacctgaacattgaaacagttttcctccttgtctttcttaacagtaatagtcattatatttacctgttttttaacacaatgtatgtgatagtcaaaaaatcacagtttttcattattattcatcttctgtacccacgcataaccactatacatagtttcttttgtacttgaatatacaaaacatgaacacagtgccatatgaataatttcacatacagaacctttttttctctgaagtcctgtggacttgcaaatatatatatatattgctttgttaatttgtttttatatttcatatatgtaataaaggaatatgatctgatttttgtctcatttcttaactctttcagtgatgctaaagattatcttctcataatgagggaacttaaatctaattcattaatataa

SEQ ID NO: 766 - DNA, 1145 bp, Homo sapiens
catgacggcggcggcgacggctaccgtgctcaaggagggcgtgctggagaagcgcagcggcgggctgctgcagctgtggaagcggaagcgctgcgtcctcaccgaacgcgggctgcagctcttcgaggccaagggcacgggcggccggcccaaggagctcagcttcgcccgcatcaaggccgtggagtgcgtggagagcaccgggcgccacatctacttcacgctggtgaccgaagggggcggcgagatcgacttccgctgccccctggaagatcccggctggaacgcccagatcaccctaggcctggtcaagttcaagaaccagcaggccatccagacagtgcgggcccggcagagcctcgggaccgggaccctcgtgtcctaaaccaccgggcgcaccatctttccttcatgctacccaccacctcagtgctgaggacaaggcagcttcgttgttccctctggcttgtgggggcacggctgtgctccatgtggcaaggtggaaggcatggacgtgtggaggaggcgctggagctgaaggaatggacgagccctgggaggagggcagaaggctacgcagggctgaggatgaagatgcagcccctggatggtcccagactctcaggacatgcccagctcaggggcttcgagccacaggcctggcctcatatggcatgagggggatctggcataggagccccctccctgctgtggtcctgccctctgtcctgcagactgctcttagccccctggctttgtgccaggcctggaggagggcagtcccccatggggtgccgagccaacgcctcaggaatcaggaggccagcctggtaccaaaaggagtacccagggcctggtacccaggcccactccagaatggcctctggactcaccttgagaagggggagctgctgggcctaaagcccactccctgggggtctcctgctgcttaggtccttttggggacccccacccatccaggccctttctttgcacacttcttcccccacctttacgcatcttccgccccactgcggtgttcggcctgaaggtggtgggggtgagggggggtttggccattagcatttcatgtctttccccaaatgaagatgctcctgcaaagggcagtaaccacacaaaaaaaa

SEQ ID NO: 767 - DNA, 827 bp, Homo sapiens
  misc_feature (1)...(827): n = a,t,c or g
tccgggtcgtcccacgcgtccgacggatcagggttccaggaactcaggatctgcagtgaggaccagacaccactgattgcaggaatgtgttccctccccatggcaagatactacataattaaatatgcagaccagaaggctctatacacaagagacggccagctgctggtgggagatcctgttgcagacaactgctgtgcagagaagatctgcacacttcctaacagaggcttggaccgcaccaaggtccccattttcctggggatccagggagggagccgctgcctggcatgtgtggagacagaagaggggccttccctacagctggaggatgtgaacattgaggaactgtacaaaggtggtgaagaggccacacgcttcaccttcttccagagcagctcaggctccgccttcaggcttgaggctgctgcctggcctggctggttcctgtgtggcccggcagagccccagcagccagtacagctcaccaaggagagtgagccctcagcccgtaccaagttttactttgaacagagctggtagggagacaggaaactgcgttttagccttgtgcccccaaaccaagctcatcctgctcagggtctannnnnnnnnnnnnnnnnnnnnnnnnnnnnnnnnnnnnnnnnnnnnnnnnnnnnnnnnnnnnnnnnnnnnnnnnnnnnnnnnnnnnnnnnnnnnnnnnnnnnnnnnnnnnnnnnnnnnnnnnnnnnnnnnnnnnnnnnnnnnnnnnnnnnnnnnnnnnnnnnnnnnnnaaggaggcaggaagggagagtcagagagagaatggaagataccatgcttctaat

SEQ ID NO: 768 - DNA, 440 bp, Homo sapiens
tctttatccttcaggcagttctacaactctcctctcaggaggcccgctacaaagcatttgggacatgtgtctctcacataggtgccatcttagccttctacacaccttcagtcatctcttcagtcatgcaccgtgtggcccgctgtgctgcgccacacgtccacattctcctcgccaatttctatctgctcttcccacccatggtcaatcccatcatctacggcgttaagaccaagcagatccgtgacagtcttgggagtattcccgagaaaggatgtgtgaatagagagtgaggaataagtggaaaaagagtggggcacagtgaatgctgtagtgggccagggctgtgctgagagtagatgggtcctagactccacgtttagttcttttcttgtattatgaaaagaataaatgatgtcctgaagctcagaaaaaaaaaa

SEQ ID NO: 769 - DNA, 1188 bp, Homo sapiens
cggcacgagcccagctgtagcaatggcgtcgcgtccaccaagagcaaacagaaccacagtaaataccctgcacccagctcctcatcctcgtcctcctcctcctcctcgtcctcttccccatcctccgtcaattactccgagtccaactcaacagactccaccaagtcccagcaccacagcagtaccagtaaccaggagaccagcgacagtgagatggagatggaggcagagcactaccccaacggtgtgctaggaagcatgtccacacgcattgttaatggtgcctacaagcatgaggacctgcagacggatgagtccagcatggatgacaggcatcctcggcggcagctctgcgggggcaaccaggctgccacagaaaggatcattctgtttggccgcgagttgcaggcattgagtgagcagttgggccgggagtacggcaagaatttggcccacacagagatgctgcaggatgccttcagcctgctggcatactcagacccctggagctgcccagttggccagcagcttgaccccatccagagggaacctgtgtgtgctgccctcaacagcgccattttagagtcccagaacctgccaaagcagccccctctgatgctcgccctgggccaggcatctgagtgtctccggctcatggcccgagcaggcctgggttcttgctcctttgccagagttgatgactacttgcactagctgactgtgctggctggctctggctggccctccactggccccagggctgggagctgccctgccctccataggcaactggtgcagggactgggaaaccatagacagagtccactcctcctgcctggcctttccccctctccctttccttccttccttcctttctctgcccaccaccccgctcagtctctctctctctccccttcacgtgcagcggcctgtaacacagtattggctggttactctcatgtagcgccttctattttgaaaggggggttttgttttgaggaggggttggggtttttaaatttttttctcctgactgagccaccagtatttatctctggagagtttgtgctgagctggtttctgctaatttagtgatgaagcctatccaagttggtgatagcttattattttcataagtaaaaaacaaatgagattatatatatatatataaaaatatatatattaaaa

SEQ ID NO: 770 - DNA, 653 bp, Homo sapiens
ctattttggccttaatctccatgtccagcatctggggaacaatgttttcctgttgcagactctctttggtgcagtcatcctcctggccaactgtgttgcaccttgggcactgaaatacatgaaccgtcgagcaagccagatgcttctcatgttcctactggcaatctgccttctggccatcatatttgtgccacaagaaatgcagatgctgcgtgaggttttggcaacactgggcttaggagcgtctgctcttgccaatacccttgcttttgcccatggaaatgaagtaattcccaccataatcagggcaagagctatggggatcaatgcaacctttgctaatatagcaggagccctggctcccctcatgatgatcctaagtgtgtattctccacccctgccctggatcatctatggagtcttccccttcatctctggctttgctttcctcctccttcctgaaaccaggaacaagcctctgtttgacaccatccaggatgagaaaaatgagagaaaagaccccagagaaccaaagcaagaggatccgagagtggaagtgacgcagttttaaggaattccaggagctgactgccgatcaatgagccagatgaagggaacaatcaggactattcctagacactagcaaaatctag

SEQ ID NO: 771 - DNA, 908 bp, Homo sapiens
ttttttttttttcattcaacactggctaggaatttattggctaacaaaatacaagtgatttcctggtccccaatccagattctccacctcttcttcacttctgactgatggaatgcataagaactaagatcttgagatgttatttgagggcagccttgcttgggtgtggtctatcatagctcctctgactaccgccgttgctacctggctgcaaatgattgttgtcaaggatagagggtccttcagaattcctgggagatcagaatcagtctctgaggtgtgggccagttgtcatggtgattattctgttgtagcatcactttatgaactaaattaaaaaaatcttcagtcacatctgttcagtaggagccatttcctttggagtcaggacacgcgagaagggcttcaaagtgttgcctacccttctattcctttgacttctcctccttttggtcaaatgactgattacagagatgattcccaaacccgtgatcagtatgcaaatgatgagaatggacgtcctggagcggtcagccttgcggacaactttgggagccttgcagcttctggttttgttgcctgataggtctttcccagaccaaaagtcattggccagggttcctttgtcgtcagttacaatcagctctgtaaaatccatgtcatccctggcaaagtcccgctggatgccacaccagtaccagcccgtgtcctctttggtcaggcaggacatagtgacaatgagctggttccctgtgtccctcagggccacatgattggtgctgttaggggagaaggcgatgatgttgcagtagtcacggaaatagcctcggcaccagtatttggggtgattcttgtagtgggcattgtagttgcagatggcagaagccgtgtccagcacaaagcttctc

SEQ ID NO: 772 - DNA, 1791 bp, Homo sapiens
  misc_feature (1)...(1791): n = a,t,c or g
gattncttcgtgctgggaatcctggccctgtcccacaccatcagccccttcatgaataagttttttccagccagctttccaaatcgacagtaccagctgctcttcacacagggttctggggaaaacaaggaagagatcatcaattatgaatttgacaccaaggacctggtgtgcctgggcctgagcagcatcgttggcgtctggtacctgctgaggaagcactggattgccaacaacctttttggcctggccttctcccttaatggagtagagctcctgcacctcaacaatgtcagcactggctgcatcctgctgggcggactcttcatctacgatgtcttctgggtatttggcaccaatgtgatggtgacagtggccaagtccttcgaggcaccaataaaattggtgtttccccaggatctgctggagaaaggcctcgaagcaaacaactttgccatgctgggacttggagatgtcgtcattccagggatcttcattgccttgctgctgcgctttgacatcagcttgaagaagaatacccacacctacttctacaccagctttgcagcctacatcttcggcctgggccttaccatcttcatcatgcacatcttcaagcatgctcagcctgccctcctatacctggtccccgcctgcatcggttttcctgtcctggtggcgctggccaagggagaagtgacagagatgttcagttatgaggagtcaaatcctaaggatccagcggcagtgacagaatccaaagagggaacagaggcatcagcatcgaaggggctggagaagaaagagaaatgatgcagctggtgcccgagcctctcagggccagaccagacagatgggggctgggcccacacaggcgtgcaccggtagagggcacaggaggccaagggcagctccaggacagggcagggggcagcaggatacctccagccaggcctctgtggcctctgtttccttctccctttcttggccctcctctgctcctccccacaccctgcaggcaaaagaaacccccagcttcccccctccccgggagccaggtgggaaaagtgggtgtgatttttagattttgtattgtggactgattttgcctcacattaaaaactcatcccatggccagggcgggccactgtgctcctggaagattctctgtttaagcacccagtgtcttgccctgggttttctaggtctcacctgcccacccaaaatcttttctgcaagccccttaagggtgcccaccccagtgcctggccagccctgcacccgtaaaacaccttttagccagtagagggggcccacgagccctctctcaccagctagcacttttctcaccaccttcctcgaaatacttgggggcagcaagggtgttggcagatgagagtctcccactcaccatggtgagagtggtggggagtacccagggctgacctgactcacaagggaagcagtaactgtagaacctgccagcctccctggtccctgtgcccatatggcttcggctgatgagggctcagactctaggttgccctgaagatcaaggctttgtctcccattctgcccattcctgggtttcttcccaaaatgactactgtggggccagtcatggcacaagggccaggacctctagaggctggggtggggaaggactgagctagtgattcttagaggccttctggggcctaagagctgaaatctcagcgcccgggtttccctaaagttagctgaagacagcagccccggccagcaggagaccgaccgagcaccaccaataca

SEQ ID NO: 773 - DNA, 1088 bp, Homo sapiens
tatgccaacccatgcttgtcacgaggaagaaccaccccaagctgctactgcgccggactgagtcggtggcagagaagatgctaactaactggttcaccttcctcttgtataagttcctcaaggagagcgctggggagccgctgttcatgctgtactgcgccatcaagcaccagatggagaagggccccattgacgccatcacgggtgaggcacgctactccctgagtgaggacaagctcattcggcacctgattgactacaagacactgaccctgaactgtgtgaaccctgagaatgaaaatgcacctgaggtgccggtgaaggggctggactgtgacacgggcacccaggccaaggagaagctgctggacgctgcctacaagggcgtgccctactcccagcggcccaaggccgcggacatggacctggagtggcgccagggccgcatggcgcgcatcatcctgcaggacgaggacgtcaccaccaagattgacaacgattggaagaggctgaacacactggctcactaccaggtgacagacgggtcctcggtggcactggtgcccaagcagacgtccgcctacaacatctccaactcctccaccttcaccaagtccctcagcagatacgagagcatgctgcgcacggccagcagccccgacagcctgcgctcgcgcacgcccatgatcacgcccgacctggagagcggcaccaagctgtggcacctggtgaagaaccacgaccacctggaccagcgtgagggtgaccgcggcagcaagatggtctcggagatctacttgacacggctactggccaccaagggcacactgcagaagtttgtggacgacctgtttgagaccatcttcagcacggcacaccggggctcagccctgccgctggccatcaagtacatgttcgacttcctggatgagcaggccgacaagcaccagatccacgatgctgacgtgcgccacacctggaagagcaactgcctgcccctgcgcttctgggtgaacgtgatcaagaacccacagtttgtgttcgacattcacaagaacagcatcacggacgcctgcttgtcggtggtg

SEQ ID NO: 774 - DNA, 859 bp, Homo sapiens
gagctgggttctttttaaggggccccccttttttttttttttgctcttagaatagactttattgactttagccaagggcaggccctgagatgggggtccagagagagaggcttggtggggctacgtcctgggggccaggttggttctgaggggtagaaggccatccacccactcgcacggctgctccaggagggcttgccacagctgcttctcctcaggtgtggaatccatccagggcacctgcagcccatagctgctgccggtgcccaggctgaggcgtgtgcctcccagctggcggttggccagggccccatggtcccagagggagagctcggcacaagcctggcgcaggtcagcaggcccaaagccatcgtacaccatggtgtgattgaacacagggctgaggctgcgtcgcacaacccttgtacgctggcggctggcccggctgtcatcaggcagcacgaagcattgtacgtaagtgtccagggatcctgcccgcagcggcaggaggtcccgagcctccttcacccagaagtgcagctccccgctcgggggcagtcctgcgccctcggagccggcggggacgtacttgagggacagggcgagtaacccgcggctcggaaggtcgtcgggagagggtgggacccggggctgcagggggagccaggtgggctcagagccccagtcccacgtgtccaggggcacttcaacttcgcccagaaagatgttgcgacccaggctttcgcggtgccacacagacaggctcagcacgcggccctgaagctcggcctgcgggacggagtaccggagagtctcgttgaaaaccggattcagattccgtttcttcaccgccgttttg

SEQ ID NO: 775 - DNA, 404 bp, Homo sapiens
ggcacgaggaatcggcagcttaggcagggaccactcggggtctggtggcggcacaggcatggcgggcgcgtgggtgcggaaagctgcggactatgtccgaagcaaggatttccgggactacctcatgagtacgcacttctggggcccagtagccaactggggtcttcccattgctgccatcactgatatgaaaagagtctccagagattatcagtcggcggatgacatttgcactatgatgctattctttgacattcgtgagatttgcccactatgtacaactcttggaactggctaatgcttggatgccacactgctgtagactttgaccagcttatttctagtatgccgtgtatctcacacgggatgactgcctcggcgtctgcgctatgactcggaaccgg

SEQ ID NO: 776 - DNA, 925 bp, Homo sapiens
tttcgtgggtactggggcgtgcgtgaggcgtttactgatgcttcctggtccggtggcctcggtcccggtaagccaggcatgaagatcacaaggcagaaacatgccaagaagcatcttggcttcttccgcaacaacttcggagtccgcgagccgtaccagatcctgctggacggcaccttctgtcaggcggcgctgcggggccgcatccagctgcgggagcagctgccccgctacctcatgggggagacgcagctgtgcaccacaagatgtgtgttaaaagagctagaaacattgggaaaggacttatatggggcaaaactgattgcacaaaaatgccaagttcgaaattgtcctcatttcaagaatgcagtgagtggatcagaatgtctgctttccatggttgaagagggaaatcctcatcattattttgtggcaacacaggatcagaatttgtctgtgaaagtaaaaaagaagcctggagttcctctcatgtttattattcagaacactatggttttggacaaaccttctcccaaaacaattgcctttgtaaaagcagtggagtcaggtcagcttgtctcagtgcatgagaaagaaagtatcaaacatctcaaagaggaacagggtttagtgaaaaacactgaacagaggtagaagaaaaaagcgcaagaaaataagtggtcccaatcctcttagttgtttgaagaaaaagaaaaaggcaccggacacacaatcatctgcttctgaaaagaaaagaaaaagaaaaagaattcggaacagatctaacccaaaagtactttctgagaagcagaatgcagaaggagaatgaatcctttggatactttcaaggacattcaaatgtgaaaatgaattttttacaactagaagtatttataataaaagaccaaacttatttttgtaaatg

SEQ ID NO: 777 - DNA, 1402 bp, Homo sapiens
  misc_feature (1)...(1402): n = a,t,c or g
tttcgagagcttttctgcatatttttgaaaaacatagtacatcagtgtgtagaaaaaaattatttgaactaaatcagtttgttgacaatggtgtatttatatacaatgactaaatcagtggtgtatttatgtgtaatactagaaactgcacatgtcaacaaccccactacaacctgataataaatatcttacatgatgtgacagttaacgtaaagggttgtcttaccaaagtaacgaaatgtttaatgggaacatattttaaaatgcatcaatacttaaaataattaattgtagtagtcatagtatgtcagcttttaataatcttgggagtggctactatattgtacggcgcaggtcttattgtcattttctcgactttggcccaaattgataaagaaggtgtgattgaaccagacactgatgctcctcaagaaatgggagatgaaaatgcggaggtaagttcggggacttgatttcctgcttgttctaagaaatgtgaaaggtcctgctgttgcaatgattttatgacacgattcttccaggaaaagcgcatagtaaatctttctctgacttcaggcgttttaggcaagcattgtattttactacttaaaatactaatgaaaataaatactgttactttctgttttatctgttttttaagtttgcatctggtgtgactgcttgcactgtaacgcanaattcacttaaaatacatacctattagtggagttgctcttgatggaatatctaatgccaaattgtattacagaatggtttgtcataacaggccctcaagggagtgaaaattggttcttgggaggagggcttaaaaaaaattctatatattacaatggttagtggtcctccaaagactcatagaatattaatatgtagtgtatctgtggtattaaaattggggatatggaaatgaggaaaagatgtctaaaaaggctccttagtgtctgataaaaatttgagaaacactctaatatagtaatagcagttttaaaagattggtttttatcctcaaaacttgatattatcagatttcatctttgccaagtattgtgggaaatggtatctttttgtggcttttaatttgcattttcctggccaaacagggggggtcccgcctgtaattccagccctttgggaggccgaggggggggggtcatttaaggtccggagttttaggccagcctggccaacatggggaaaccccctttttttttataattcaaaaataagcccggccttatggggcccgcccgtaatcccgtctgctttggggggtgaggcgggaaaatccctttagccccggaggcaaaggttccaaagaggtgggattgcccccctgccctccagggtgaggggcagagcaaaactttttttaaaaaaaaaa

SEQ ID NO: 778 - DNA, 1378 bp, Homo sapiens
  misc_feature (1)...(1378): n = a,t,c or g
tttttttttttggtgagataaccaaggactcttttttactcttctcacacctttgaagtgggagcctcttgagtcaaatcagtaagaatgcggctcttgcagctgagggtctggggggctgttggggctgcccaaggcagagaggggctgtgacaagccctgcgggatgataactttaaaagggcatctcctgctggcttctcacttgggcaacttaacaccggcaaggaaaaaaaaggggaagggttctgttctctcctgcgtgctttggagagcttggggggctataaaaagaggcggcactgggcagctgggagacagggacagacgtaggccaagagaggggaaccagaagaggaaccagaggggagagacagagcagcaagcagctggacttgctccttgaacgacgccagcatgagcttccttcttccaccaccaccgtggagctttcctccttttactggcaattccaggctcctagggtcaagaccagagcttaatccattggtcaaatgccgtgtccaacgcagaccctactggatttaaaagaattgactggaccattttggaagaaaagatgcctttaggaggtgaaggtcgtgcccccacaagtgcttcagtgagccgaattgaagaagcgggggctgcttctcagccccttcctttgaggtgcctccctggaccggggaagtcaagcccagccccagagagatggaggtgccctcggggcaggggnccctgggaattccttctgattcgattttggccctcctaaaaaagcaaacttgaagggcgctgctcaattggcccctcggaagcctgcggagatccagctgcttcgggggccaggatggacaggatttgaagcccagaagcggactgggctgtaacagcttccggtaccgaagataacagccagggaggacaagcagggctgggcctagggacagactgcaagaggctcctgtcccctggggtctctgctgcatttgtgtcatcttgttgccatggagttgtgatcatcccatctaagctgcagcttcctgtcaacacttctcacatcttatgctaactgtagataaagtggtttgatggtgacttcctcgcctctcccaccccatgcattaaattttaaggtagaacctcacctgttactgaaagtggtttgaaagtgaataaacttcagcaccatggacagaagacaaatgcctgcgttggtgtgctttctttcttcttgggaagagaattcaggccgatattcctgtcgttttactctttgtcagaggaaagaattctgagtttttcttcttcctttcatttcaccctccttttttggtaggtggttgggaggcctaattcatctagtgggtttttt

SEQ ID NO: 779 - DNA, 471 bp, Homo sapiens
  misc_feature (1)...(471): n = a,t,c or g
ttttttttttttactcaaagactttcttttattagtacatgggctgggattgatgggaagggacagatgtagttggcaaccatggttagcatcggatgcccatcccaatggccatgaatgtgccaaaggtgccgccactctgcatcatggttttcccaatgccgcccatcagctctcgaccccgcattccgatcctgaggaggaaaccaagatggagctgagacaggaaaaggtgccgaagagcgccccggccgccatgcccacggcgcaacccatcacgaagcccattttgacacggtcgaagcagcttggctgggactgtccgtagggacccacggccaccggcatctcacctcgctcgcgggctgggtcgctcagctctacgtctctcacggaaaacgacggggagggcgctcgcgcagntngaatcgcttccggagcgccggcagcacttccgggagcctggggcca

SEQ ID NO: 780 - DNA, 1383 bp, Homo sapiens
ttagattgacatcttgaccatcgatacgccaagcttggcacgaggcggggctgtgagaagccaggcgcatctcaaaccgagctggcagctccaggctccggagccatgccctgcacggaccctcgtctttaccacgctcctgaggaatgaaaggaacccagggaccctcagaaggcagcagtgatgcggaccaaccccccggagcctgcacccttccgagggccataggcgacccagggaactggagagagctccagaaaggaaatcccagctttcccaaagtccctgtggatgctgacaaaaggagacctgaatttttggaagagcctgtactaggttacccggctgcagagtgattttcccctccggcactgactctccccctccaacccccagccgtccagagtaccatgaagaattatgaggatgtgtgacagaggtatccagatgttgatcaccactgtaggagcctttgccgcttttagtttaatgaccattgcagtgggcacggactactggttatattccagaggtgtgtgcaggactaaatctacaagtgataatgaaaccagcaggaagaatgaagaagtaatgacccattcggggctgtggaggacctgctgcctagaaggggctttccgaggcgtgtgcaagaaaatcgatcacttccctgaagatgctgactacgaacaggacacagccgaatatctcctgcgagctgtgagggcctccagtgtcttccccatcctcagtgtcacgctgctgttcttcggcgggctctgcgtggcagccagtgagttccaccgcagcagacacaacgtcattctcagcgcgggcatcttttttgtctctgcagggttaagcaacatcattggcatcatagtttatatatcaggccaacgccgggaggaccccggggcagcgtggactccaaaaaaagttactcctatggttggtccttttattttcgggagccttctctttcatcatcggcaggaaatttgttagggagtgggtttgccgtggcacatctatattgaaaaacatcagcagttacgagccaaatcccactcggagttcctgaagaaatctacttttgcccgcctcccaccctacaggtatcgattccggaggcggtcaagttctcgctccaccgagcccagatcccgagacctgtcccccatcagcaaaggcttccacaccatcccttccactgacatctcgatgttcaccctctcccgggacccctcaaagatcaccatggggaccctcctcaactccgaccgggaccacgcttttctacagttccacaattccacacccaaagagttcaaagagtcactgcataataatccggccaacaggcgcaccacgcccgtctga

SEQ ID NO: 781 - DNA, 1015 bp, Homo sapiens
ttttttttttttcaactcatttttagctcattgctgttgggtgtaatagatgcagtttatctaatctacatttttattgactgtcatctaccaaaatattgacttaaatcctgtagctatttgatttcggactttaaattgatctggtgttccttgcggggcttcagttgcatctaaatagatgtgagagttgaaagacctataggggcttttctcgctttatgatgtcttcttcttattattattttttcctcttgttgatgaaatgtcagggtgaaagggatagccaaatggactaaagcacaagtgccactctagttactcggcagagtccccaataaaggtctaccacaataccaccacacatccgctttgggatgaacaagggctgactgagtgataagctcttgaaaattcttaagctcactgcatcccttcaggtctccaaggaattctaagtctcctccctgccatgagagacacgtagtaaaacttagtgttgggagatggaagctggatgggccttcgggggcttggacctggcagggactttgggatatagcagagagagagcttggcatcgacttattactccaggctatagaatcctggaaaagagctaccatgcagcccatgcctggcccgactggaggaccaccttagtggaagggggacaatcagggtctctggcctgccatgtgcacaagcatgctaattgcttttgtttaacctgcagatggaatatttgatccatttcaaccaggcatttgcatcttgggtatgctgtcttaattgccaaagtttgttttaagtccttaacttttatgatcctctagtaaaatgaatgcttcctttagcaccaatttttattagtttttagacaaaagaaagctaaacgctattttatatttactaatgcttcctgtatgacttttataccagataagctaaattttacctttatattagtgtgttattaatgttaaacttaattttaataaaaccttgtagacat

SEQ ID NO: 782 - DNA, 1663 bp, Homo sapiens
ttttttttttttttctagcgaaaaaaaactttaatagcttttaatctttatgctgcaacatatactcttgtatatgcacagaatgtatattctgtatataagacaccaaaatatatatttttgggggaaaggtgtcaggggctaaagtgaaagattcactttttactaactctcctcctataatggttgaatatttttaaaaccatgtgcacatattactttttaaagttaaaataacaaaaaataagctgctaaagatatctcaaaagaagctttttcctgagggacttactaatatggtaagtacagtagcactgtaaagccttttaacacttttggtcacataaaatttttgttgttaaaattcctgctgtgcaacaagtaagtccttacttgtcatctttcccttttgtctttttgtgcaccatctctcggaaactggctaaaatcttactttctctctttcgtctctcttcttggttaaaggatgcaagagctctcttctcatcagcactgtagatctggttctccttacgcagtcgtacagcctccattctgcgatgcctgctaccactcatgacataacctgagcattcaaaagaaccgatctcttcacttgtcaacccaatttcacctcttcgtgggattcgctttccagcttttacatactcagccatagctgcaccttcaccgggaagcaaagcatggccatacttcaaaggtttttcatcttgagaggtatgtattataggtgcttctggccctattaaatccatagtatctgccacatttggctgctccatccaggtagcttctgacaagtcctcttctgagtctttacagcttgagtcactggattcttttttggttttcttattcttctttttctttgttttgtgtttctttttcttctttttcttcttggctttaactctctttttatcatcatcagagtcagaatttgtgtcagactctgagttactgtcactatcagaatatttcctatgctttcttttagacgacttattctttctttttttcttgtttcttgaacgactggtcttctttttcctatgttcttccgagttggaatctgaactgctgcttttctgatgcgttacctcttcttcatcctcaactggggtatgttcgtcagaatctagctgagggaactttggagacggcccccacacttcaggcgctcccaattccccaatcctctctctctccttcagcctcctctgccgatggctctctcccttctgtcgtcttccgctgaactgccgttctttctgcatagcagtgacgatggtagcgatatccactatacgaggtcgaccaggaggacgcgaaggcgtagttgcggaatcttgggagccgccctcgcgacccagagcgactaaaggggtaaagagcgcccacgtccaactcactccaaggaggcctgaggccctcacggccgcgggagtgagagcgggaacagccatcccaagaggaacatctgctctgcggggatggtgggctccccgaggagctgcgtcgccttctccgagagcccacgatgtcctcggaatagctggaccgggatactgggggcatgagccgcgcctcaacgctgggcggttgctacagacccagaggctggctggtgattcgcggccac

SEQ ID NO: 783 - DNA, 1672 bp, Homo sapiens
tttcgtggggcggcgggagtgcgggtgggcgtttaaaggggccttcggcacccaggtcggttcgccgccgggactgctgacggggagggctaggtagccctgggagtcgggatctagaaggtagaggagaagcggggctgtctgacccccggaggtgacaaggggagaggggctgtgtgaataccctccatgggcagtaatgggatgactatccccagggagcattgcgaaggagagaggcggctgagggactgcactttctggggccccccgggagagtcagagggcagttaagagggatcacaggcccggcttggtactgtcactccccttcccactccctgctctcagcattctgtcacctccctaccccgtcgcggtgcccagccatggccagacctcccgtgcccggttcggtggttgtcccaaactggcacgagagtgccgagggcaaggagtacctggcttgcattctgcgcaagaaccgccggcgggtgtttgggctgcttgagcggccagtgctgctgccgcctgtgtccattgacactgccagctacaagatctttgtgtccgggaagagtggtgtgggcaagacggcgctggtggccaagctggctggcctggaggtgcctgtggtgcaccacgagaccaccggcatccagaccaccgtggtattttggccagccaagctgcaggccagcagccgtgtcgtcatgtttcgttttgagttctgggactgtggagagtctgcactcaaaaagttcgatcatatgctgctggcttgcatggagaacacagatgccttcctcttcctcttctccttcactgaccgtgcctcctttgaagacctccctggacagctggcccgcatagcaggtgaggcccctggtgtcgtcaggatggtcatcggctccaaatttgaccagtacatgcacacggacgtgcccgagcgggacctcacagccttccggcaggcctgggagctgcccctgctacgggtgaagagtgtgccggggcggcggctgggctgatgggcgcacactggacgggcgggctgggctggccgaccgttgcccacatacttcaatggccttgctgagcagctgtggcaccaggaccaggtggcggctggcctgcttcccaaccccccagagagtgctcctgaatgagtcacgagtggttgcctgtgatcccacccccaaccctcaggtctcgacatagggctggaggctggggcaggaacatggatcctatctggaggactggccagcatggcctgatcagggaggatgtggccagagaaggcccacccgcgagcagcgctttccttgcagaattcatggcagggaggtggggaccaaggccctgagctcgaacatctcccgtggcctttccccctttggcagcaccgatggaggatgactgggagagggggtgcctctcaagttacttcaatcaagaacctgtattggttgaggtgacaccatctgttgtaacagataaaccccgaaatcccagtgctgaactccagagacgtgttcgttctcacgtaggcctcagctcgggaggaggtgacagtgggcgtggggctctgctccaggcgctcctgcagagacccagccccagagaccctaccctgcccagttgccctagggtgtcagcacccagtcag

SEQ ID NO: 784 - DNA, 2523 bp, Homo sapiens
cgatttcgtcggctggccggcagcagttactcggtgtttccggtgcgaggccagaggtggggaagccatcggacgtcggcggtgaggatcttctcctgacccagcatcgctcatcacaatgaagaaccaagacaaaaagaacggggctgccaaacaatccaatccaaaaagcagcccaggacaaccggaagcaggacccgagggagcccaggagcggcccagccaggcggctcctgcagtagaagcagaaggtcccggcagcagccaggctcctcggaagccggagggggctcaagccagaacggctcagtctggggcccttcgtgatgtctctgaggagctgagccgccaactggaagacatactgagcacatactgtgtggacaataaccaggggggccccggcgaggatggggcacagggtgagccggctgaacccgaagatgcagagaagtcccggacctatgtggcaaggaatggggagcctgaaccaactccagtagtcaatggagagaaggaaccctccaagggggatccaaacacagaagagatccggcagagtgacgaggtcggagaccgagaccatcgaaggccacaggagaagaaaaaagccaagggtttggggaaggagatcacgttgctgatgcagacattgaatactctgagtaccccagaggagaagctggctgctctgtgcaagaagtatgctgaactgctggaggagcaccggaattcacagaagcagatgaagctcctacagaaaaagcagagccagctggtgcaagagaaggaccacctgcgcggtgagcacagcaaggccgtcctggcccgcagcaagcttgagagcctatgccgtgagctgcagcggcacaaccgctccctcaaggaagaaggtgtgcagcgggcccgggaggaggaggagaagcgcaaggaggtgacctcgcacttccaggtgacactgaatgacattcagctgcagatggaacagcacaatgagcgcaactccaagctgcgccaagagaacatggagctggctgagaggctcaagaagctgattgagcagtatgagctgcgcgaggagcatatcgacaaagtcttcaaacacaaggacctacaacagcagctggtggatgccaagctccagcaggcccaggagatgctaaaggaggcagaagagcggcaccagcgggagaaggattttctcctgaaagaggcagtagagtcccagaggatgtgtgagctgatgaagcagcaagagacccacctgaagcaacagcttgccctatacacagagaagtttgaggagttccagaacacactttccaaaagcagcgaggtattcaccacattcaagcaggagatggaaaagatgactaagaagatcaagaagctggagaaagaaaccaccatgtaccggtcccggtgggagagcagcaacaaggccctgcttgagatggctgaggagaaaacagtccgggataaagaactggagggcctgcaggtaaaaatccaacggctggagaagctgtgccgggcactgcagacagagcgcaatgacctgaacaagagggtacaggacctgagtgctggtggccagggctccctcactgacagtggccctgagaggaggccagaggggcctggggctcaagcacccagctcccccagggtcacagaagcgccttgctacccaggagcaccgagcacagaagcatcaggccagactgggcctcaagagcccacctccgccagggcctagagagcctggtgttgggtcatgctgggaagggagcggcagcccagcaagggcttggcccataaaaggctaccatgctaagcagcccattgctgaagccaggatgttgtggcctggctggcatctggcacttgcaattttggattttgtgggtcagttttacgtacatagggcattttgcaaggccgtgcaaatgcatttatacctgtaagtgtgcagtgggcttgcattggggatgggggtgtgtacagatgaagtcagtggcttgtctgtgagctgaagagtcttgagaggggctgtcatctgtagctgccgtcgcagtgagttggcagaagtaacttaagcatttctctgtctggtgtgaggctcagacccctccctgcccttcagagatcaagacaagtaatacacccaggtcttgactgcatttgtcttgtgagcagggcttgcttggtcagctcaggccctcctagctgctctggaggctcctttgattctctagacctggaaaaggtgtccctaggcagagccctggcagggcgctcagagctggggatttcctgcctggaacaagggacctggagaatgtttttgcgtgggatgatgtgctggtcaggagccccttgggcatcgcttcccctgccctttggtagtgccaggaccaggccaatgatgcttctcagtagccttatcattcacaggtgcctctctagcctgcacaaatgattgacaagagatcacccaaaggattatttctgaaggtgttg

SEQ ID NO: 785 - DNA, 1596 bp, Homo sapiens
ctccggcggcgcgtcccccgagcttggtacggctcagcccgtctcccccgaagccgcgcgcccgcgcccgcgcccctcagtcggtggagcccgcagccccccttgtggcccgcggcagctccccgcccgctcggcccgcgcccgccatggtccgtccgcgccgtgccccgtaccgctccggcgccgggggccccctcgggggtcgcgggcgccctccgcggcccctcgtggtgcgcgccgtccgctcgcgctcctggcctgccagcccccgaggcccgcagcctccgcgggatccgggcccgctcggcccctcccatggaaggtgctcgggtcttcggggcactgggtcccatcggtccctcctcacctgggctcaccctcgggggtctggccgtgagcgagcaccggctcagcaacaagctgctggcttggagcggcgtcctcgagtggcaggagaagcgcagaccctactctgactccactgcaaagctgaagcggaccctgccctgccaagcctacgtgaaccaaggcgagaacctggagaccgaccagtggccgcagaagctgatcatgcagctgatccctcagcagctgctgaccaccctgggccccctgttccggaactcccagttggcacagttccacttcaccaacagagactgcgactcgctcaaggggctctgccgcatcatgggcaacggcttcgcgggctgcatgctgttcccccacatctccccctgtgaggtgcgcgtgctcatgctcctgtactcgtccaagaagaagatcttcatgggcctcatcccctacgaccagagcggcttcgtcagtgccatccggcaggtcatcaccacccgcaagcaggcagtgggacctggtggtgtcaactcaggcccagtccagatcgtcaacaacaagtttctggcatggagtggtgtcatggagtggcaggagcccaggcctgagcccaacagtcggtccaagaggtggctgccatcccacgtctacgtgaaccagggggagatcctgaggaccgagcagtggccaaggaagctgtacatgcagctcatcccgcagcagctgctgaccaccctagtgccgctgttccggaactcgcgcctggtccagttccacttcaccaaggacctggagacactgaagagcctgtgccggatcatggacaatggcttcgccggctgcgtgcacttttcctacaaagcatcgtgtgagatccgcgtgcttatgctcctgtactcttcagagaagaaaatcttcattggcctcatcccccatgaccagggcaactttgtcaacggcatccggcgtgtcattgccaaccagcagcaggtcctgcagcggaacctggagcaggagcaacagcaacgagggatgggggggtagtggttaccccgggctgggcccctccaggagtcacagatgaggcccccgcagagactggtgacacgcttctgagcaggggcccctggggacttcaactgcccagcaacatggaggatggtgtcctgaggcctccaaggacggtccccacccctctacgtttccccaataaagccttttaaaaacctgccaaaaaaaaaa

SEQ ID NO: 786 - DNA, 1541 bp, Homo sapiens
ttttttttttttgcctcctgattacctacaatggtcaattttattacaaagaactgtatcaaaatatacaagtctgtttaagaacaaccaagaaatgcagctgtttaagggacaaatgagaatcaaccgttagagagcaggcagcctctccccgccgctgtccactgcaggagacggcatcctcagggccacattttccacgggacatccttctgaataatttaaagggtaagtccggcacattacaggtcttcgcgggagggcagctgtgtcgggctttctccttctgtggcttcagcctctgccggcggcacacaggcatcttccgtttcttcgaagccgtcaggacacacacagacgtagctccctggagtattgtagcagttttcgtttttcctcacacaggttttttctgctagtgagcactcgtccacatctgcacactgtccgtgctccctcgcgtagccagagatacactctttacagtttcctgggccttcccctgtgcagcccacacagctggagtcacactctgcaacagggagccagcgtcagaccccgacatgcacaaggcaccagtgcccgtcagaccccgacatgcacaaggcaccggtgccgccaggatttgggttttctcctcattcatcaccaagtgactttataacgatctgtctctgtctcccggcaaaagcacagactcgcgtcctgctgtgcagcaggtgctcccggagagccatggtgcagaccacctggcttggaactctttgggagaaactgggtgctacagagattttagaaacaaacccacctccagctcggtgaccattggtttgccagcctgccaggagcttcctaagaataaccagagcctctcgcatggcttccagtattagtggctcactgagggacccactgtctgcactcccaacagtgaaaactgcctggggctgtcacacacacggggcagaggcggcctcctccctgctgctgggactggggatcagcacaacttttctggggcactatggctctaaaagacacattcccttgactgagcgatttggaaattaatccacagaaaatcataaggaatgtgaaaagtttaccttcaagtgttcacagtttataagttgaaaaactgttatgacgtaaacgtccagcaacagacattgttgtaaaagtatgaaataatggctccaaaatcattagcgtgacagagaaaccacaggacgcagagacgttcgcaacaagctgctgagtggaaaacacccgacaggcgctgcggaaagtcacgcagggcacgttgcgggggcgctgggggggcacgagcagtggaggcaccagcagggtgcactctccagggagttcctgggtttttaactgttttcttttcatctgacttgaattttctgattttcctgcagcaaatacctatgacttactttgccacactaagtgttctcagggcaggcaggatgtatggaagtgacgctaagaagccataaatgaatgttgacaaaggcagcaacgaaacccggcag

SEQ ID NO: 787 - DNA, 2194 bp, Homo sapiens
  misc_feature (1)...(2194): n = a,t,c or g
atattattcttgtaagaagtaggaaaatatttcttttatttattaatccaatcaaaaatgatgagtgctaaactaaaattcccaaccaaaattccaaagatgagcaaaacgaatgcctgtggaaataagaaaaaagataaaagataagaaagataaaagaaaaaagataaaaaaatacaattggattatttgttaaatctctactctctgcaataatgtattctatattttaaaatatattgactttcttgatgcaggtaaaataatataaactgacaaactatttcttaaaatagaagtcttgaaagaaagaaacaaaaacaacctaccccaagctttttccatgacagaaaatcctctctgctaagtttaagataaaatagtcctgggaatataaaaatcaaacatgttgatgtactggcaccaactacaccaaatacatttctaatgtcaggaacatatattgcaagtaaaacgatgataatattgagtgctagagtgatcaaaaaatggcgaatccatgagaatggaaaattggagaaaaacatcattgttacagcttttctggcagggaagtggattaaagggactgtccaaaagcacagcaaatagtatgcataacttcacaggtcatgaccacaacatcatgtgattaaggtatttactattaaccttttagtaattctgactccactttgtctttaattctgtgacaggtcacttcacctctctgggctttagttgttcatcataaaaagtgaggtacccaaagagtgcagatataaaataaatgagaaaacttaaagcaattgctgtattggtaacattctgcattcttttctttgaaggactttgaagttcacagtatatgggcaatattgaggtatggcagagaaatgaaaaagccatggttggtaaggcataagcactctctttggagaaatgaaagagctttggcttacaatcatctgtaacatttgaaatctggaagcctttctctacataatttaatgtcagaggacaagggatggaccattttttaattattaccacaagagcaaagaacatcataaagaaaaatgataaactacttgtgtagccaagaaagcctattttgggaagaagtgcaagagggaacacaatgccaacacatatgattattagtagtgtttgtccatcaagataccaatatctactatagtctccagtcaaaaattctgcaatagcagcaggaagctctgttttaataattaaaagataagatgacatagctccaatattctgaattattatggtgcctgccaccaccaactttccaggtaatccaaatgcaaagagtccaagatcttcataagatgttacagctccacagagaattttacaaagattgaaggaattcaatcaacggaagacaggtgagtcaatgtgcaggcagaaccatgaagtagttagttcatgggcccaagtaggctgtctgaatacacatactaagcagaagatggactgagtaagaagccaggagagcaactgtcagcagcaagaagctaaatccaaagacaccggtattagccataacataagctaagccaaggatgccacttcccatgatggcattcatcaaattaaacactgataaaccaaatgaaacacctggggatcgctgtctgtgaagttcagcagtgagtacataatcctagggccgctcatcccatcatgttcgcagcttccactcaacgctgcatctcttccacccgacgcttttcatcttttctttctagagtatgctaggctgctatcacgttcataactgcgccaatctcatctgaatctcggcggctgccttcagaccccatcccccagggttcaggctccagcatctcccctgtcccggtgcggtcctccttttctgggtcttatttggcaggcacttgagggaagccggagggcgtcagcgcggggaagcgaacacagcccacttacgttgcttagcaacggactcaactcttcggcctccgcttcttcaggctgctggacagagacataccagccccgctcagcgttgaagctcccccaggacgcctccatgctgctatccagctgactaccagttccatgtacgagcctcgtacccgtgccctgcgacttccgccgctctcgccgatagtctcaagtttctcatttnnnngacgcacct

SEQ ID NO: 788 - DNA, 8734 bp, Homo sapiens
ccccggagtctgtgtttctctctctgggcggaggcggcggtactggcggatggtgggttgaggcgccggcggcggctgctgcgagggacgatgagtgcctccttcgtgccgaacggggccagcctggaagattgtcactgtaacctcttctgcctggctgacttgacaggaattaagtggaaaaaatatgtatggcaaggcccaacttctgcccctattctgtttcctgtgacagaagaagaccccattttgagcagttttagtcgctgccttaaggcagatgtacttggtgttggcggcgagatcaaagacctgaaagaagagaaattgtgaatattttgggggggtgaagaccccagttttgctgaccttattcaccatgacttatcagaagaagaagatggagtgtgggagaatggactttcctatgaatgccgtactctgcttttccaaagcagttcacaatctattggaacggtgtttaatgaacaggaattttgtacgtattggcaagtggtttgtaaagccttatgaaaaagatgaaaaacctataaataaaagtgaacacttgtcctgctccttcacctttttcttgcatggagacagcaatgtttgtaccagtgtggaaattaaccaacatcaacctgtataccttctcagtgaagagcatatcacccttgctcaacagtctaatagcccatttcaagttatcttatgcccatttggactaaatggcactctcacaggacaggcattcaagatgtctgattcagctacaaaaaaattaattggtgaatggaaacagttctatcctatctcatgttgcttgaaggagatgtctgaagaaaaacaggaagatatggattgggaagatgattctttagctgcagtagaagttcttgttgctggtgtccgaatgatctacccagcatgctttgttctagtccctcagtcagacattcctactcctagccctgtgggatccactcactgttcatcttcttgcttgggtgtccaccaagtgcctgcttccacaagagatcctgctatgtcttcggttacgcttacaccacctacgtctcctgaggaagtccaaacagttgatcctcagtctgtccagaagtgggtcaaattttcttcagtatctgatggcttcaactccgatagtactagccaccatggtgggaaaatacccagaaaattagcaaatcatgtggtggatagagtttggcaagaatgcaatatgaacagagcacagaacaagaggaagtattctgcttcatcaggtggtctatgcgaagaagcgacagctgctaaagtggcatcctgggattttgttgaagccacacaaagaacaaattgcagttgtttgaggcacaaaaatctcaagtcaagaaatgctggacaacaaggacaggcaccatctttaggtcagcaacaacaaatacttcctaagcacaagaccaatgagaagcaagaaaagagtgaaaagccacagaaacgccccttgactccttttcaccatcgtgtgtctgttagtgatgatgttggcatggaccgcagattccagccagccaaagacttgtgactctctgctcccagacagtcaaagtgagattttcaaatatccggaactaatgatgtagcaaaagactcctcagatgcatggcaccgaaatggcaaattcacctcaaccacccccacttagtccctcacccttgtgatgtggttgatgaaggagtgactaaaacaccttcaactcctcagagtcaacatttttatcaaatgccaacaccagatcccttggttccttctaaaccaatggaagataggatagacagtttgtcccagtctttcccacctcaatatcaggaagctgtagaacctacagtatatgttggtacagcagtaaacttggaagaagatgaagccaatatagcctggaagtattacaagttcccaaagaaaaaagatgtagagtttttaccacctcaacttccaagtgataaattcaaggatgatccagttggaccttttggacaggaaagtgtaacatcagttacagagttaatggtgcaatgtaagaaacctttaaaagtttctgatgaattagtgcagcaatatcaaattaaaaaccagtgtctttcagcaatagcatctgatgcagaacaagaacctaaaattgatccatatgcatttgttgaaggagatgaggaattcctttttcctgataaaaaagatagacaaaatagtgagagagaagctggaaaaaaacacaaggtagaagatgggacatctagtgtaacagtgttatcacatgaagaagatgctatgtcattatttagtccctctatcaagcaagatgctccacgccctactagtcatgcccgtcctccatcaacaagtttgatttatgactcagacctggctgtctcttatactgaccttgataatctcttcaattctgatgaagatgaactaacacctggatctaaaagatcagcaaatggatcagatgataaagccagctgcaaggaatcaaagacaggaaatctggacccgttatcttgcataagcactgcagatcttcataaaatgtatcctacaccaccatcattggaacaacatattatgggattttccccaatgaatatgaataataaagaatatggtagtatggatacaacacctggaggaactgttctagaaggaaatagttctagtataggagcgcagttcaaaattgaggttgatgagggattctgtagccccaaaccttctgaaattaaagatttttcttatgtctataagcctgaaaattgtcaaattctagtgggatgttccatgtttgcacctctaaaaactctaccaagccaatatctgccccttatcaaattgccagaagagtgtatttaccgtcagagttggactgttggaaaattggaattgctttcttcagggccttcaatgccattcatcaaagagggtgatggaagtaatatggatcaagaatatggcactgcttatacacctcaaactcatacttcttgtgggatgcctcctagcagtgcacctcctagtaacagcggagcaggaattcttccttctccatccacccctcggtttccaactccaaggactccaaggactcctcggactcctcgtggagctggtggacctgctagtgctcaaggttcagtcaaatatgaaaattcagacttgtattcaccagcttctaccccatctacatgcagaccccttaattctgttgaacctgcaactgtcccttccatccctgaagcacacagtctttatgtaaacctcatcctttcagaatcagttatgaatttgtttaaagactgtaactctgatagttgttgcatctgtgtttgcaacatgaacatcaagggtgccgatgttggagtttacattccagatccaacgcaggaagcacaatataggtgtacctgtggcttcagtgctgtcatgaacagaaaatttggaaacaattcaggattattttttgaagatgaactagatatcataggacgcaatacagactgtggcaaagaagcagaaaaacgttttgaagctctcagggctacctctgctgaacatgttaatggaggactaaaggaatctgaaaaattatctgatgatttgatattattgctacaagatcagtgcactaatttattttcaccctttggagcagcagaccaagatccttttcctaaaagtggtgtaattagcaattgggtacgtgttgaagagcgtgactgttgcaatgactgctaccttgcattagaacatgggcgtcagttcatggataacatgtcaggaggaaaagttgatgaagcacttgtgaaaagttcatgcttacacccctggtccaaaagaaacgatgtgagtatgcagtgctcacaggatatacttcgaatgctcctctctcttcagccagttcttcaggatgccattcagaaaaaaagaacagtaagaccttggggtgttcagggtcctctcacttggcaacaatttcataaaatggctggccgaggctcttatggaactgatgaatccccagaaccactgccaatccccacatttttgttgggttatgattatgattatctggtgctttctccatttgctcttccttattgggagagacttatgctggaaccctatggatctcaaagagatatagcctatgttgtactgtgtccagaaaatgaagccttgttaaatggagcaaaaagcttttttagagatcttactgcaatatatgagtcctgtcgattaggtcaacatagacctgtttctcgactgttaacagatgggatcatgagagttggatctactgcatcaaagaaactatcagaaaagttggtagcagaatggttttctcaggcagctgatggtaacaatgaagcattttctaaactcaagctttatgcacaagtctgcagatatgacctaggtccttatcttgcttccctgccattggacagctctctactttcccagccaaatttagttgcccctacaagtcagtctttgattactccacctcagatgacaaatactggaaatgctaatactccatctgccaccttagcatctgcagcgagcagcactatgacagtgacttcaggtgttgccatatctacttcagttgccacagctaattcaactttgaccacagcttcaacttcatcttcatcatcctccaacttgaatagtggagtatcatcaaataaactaccttcgtttccaccctttggcagtatgaacagtaatgctgcaggatccatgtctacacaagcaaatacagttcagagtggtcagctaggagggcaacagacatcagctctacagacagctgggatttctggagaatcatcttcacttcccactcagccgcatcctgatgtgtctgaaagcacgatggatcgggataaagtgggaatccccacagatggtgattcacatgcagtcacgtatccacctgcaattgttgtttatataattgatccttttacatacgaaaatacagacgagagcactaactcttctagtgtgtggacattggggctacttcgatgctttctagaaatggtccagactcttcctcctcatatcaagagtactgtttctgtacagattattccttgtcagtacctgttgcaacctgtgaagcatgaagatagagaaatctatccccagcatttaaaatccctggctttttcggcctttacccagtgtcggaggccacttccaacatcaaccaatgtgaaaacattgactggctttggtccaggtttagccatggaaactgcccttagaagtcctgatagaccagagtgtattcgactttatgcacctccttttattctggctccagtgaaggacaaacagacagagctaggagaaacatttggagaagctggacagaaatataatgttctttttgtgggatactgtttatcacatgatcaaaggtggattcttgcatcttgcacagatctatatggagaacttttagaaacttgtatcattaacatcgatgttccaaatagggctcgtcggaaaaaaagttctgctagaaaatttggtctacagaaactttgggagtggtgcttaggacttgtacaaatgagttcattgccatggagagttgtaattggtcgtctaggaaggattggtcatggagaattgaaagattggagctgtttgctgagtcgtcgaaacttgcagtctctaagtaaaaggctcaaagacatgtgtagaatgtgtggtatatctgctgcagactcccctagcattctcagtgcttgcttggtggcaatggagccgcaaggctcttttgttattatgccagattctgtgtcaactggttctgtatttggaagaagcacgactctaaatatgcagacatctcagctaaataccccacaggatacatcatgtactcatatacttgtgtttcctacttctgcttctgtgcaagtagcttcagctacttataccactgaaaatttggatttagctttcaatcccaacaatgatggagcagatggaatgggtatctttgatttgttagacacaggagatgatcttgaccctgatatcattaatatccttcctgcttctccaactggttctcctgtacattctccaggatctcattacccccatggaggtgatgcgggcaagggtcagagtactgatcggctactatcaacagaacctcatgaggaagtacctaatattcttcagcaaccattggcccttggttactttgtatcaactgccaaagcaggtccattacctgactggttctggtcagcatgtcctcaagcacaatatcagtgtcccctttttcttaaggcctctttgcacctccacgtgccttcagtgcaatctgacgagctgcttcacagtaaacactcccacccacttgactcaaatcagacttcagatgtcctcaggtttgttttggaacagtacaatgcactctcctggctaacctgtgaccctgcaacccaggacagacgctcatgtctcccaattcattttgtggtgctgaatcagttatataactttattatgaatatgctgtgatcttcatttgatggaactgtgcaagaaaagaacaaggaaaaatggatgtttcgctgcaggattaagttacaattatcttctcagtgaaggtcatttgtgatggggtctaattcttattacttcaacaaatattgttttgacttggggggaggggctataaccctgctatttttcattgactctattgaactctttaggatgatgactgatcatacaaaacgtattataacattttcgtagcaaaattaaccttttttttttccagccacagtatttgtgaaaagtaatgagccatagtacccagtcatgttaaatgaatattaaaagcatggagaggaaacatgaggaacaatgaatttcaacatatggcttcaaaacatgaaaatgttcttgtatggattatagtatctagtattcaaaaatgcctgcatctcttctcttatttattgtaagtttttaaatgtataaattgtcttatatttcttaacctcttttataaaaattttcctagaaggtttatactgccttcttgctttaaagcctattggtctaaaatatatgtaatcgtcttaattaaaaagttgcagtagggtcgcttttagagtattatttttttgtaagggggtgggtgggacagtaaatttgtattgtctcgatgtacagtttaacggggatagagggggaataatgtccataccattgtgtgtggaggatttacagctaagctgtagttgcagagtacatgtacagtaatgaagttcactgtgtttataaattgaaaaggtaccaggtcttacagcattttatatatcacatctttacagaataacatgatggcaatatacaagtggtattgttaggtggtttaacttagaataaaatgagaattcttcagttatattttgtactatggtttagggctatgactaatatttcaggccatttccggtgaaagaaacttagttttacaagaaaaaccatttgctactgaatgcttaaactaattttagtgtttaatgttacatgcttaaatttttttcagttttaacagtggcatatttaggcatggaaatattattatgaaatttattttcaggatctgctataaggttgaaatttagcccagctctaggcattttacaaattatttttcaagcagtcattcttgattgtttgacttttttttttaaattaaagattgggaatgtatgtgagagtatgccatatgtatgggtgtgtgtgtgtgcgcgccaatccaaactgtgggtgtaaatagattctcagtgaattctggtattcagactctattccactagtgaaagaaccattttttaaacttcccttgccttttttatttatttaattttcttggtttggagatgtcagtcccaaacaccagagtctgtacttttctataacacagctcagattaaggtagggcatatgccaaggaggttctcacctccctaaagaagggacttgaattttagggactttaattcacccctccttcaatacaactttcccccttcttgtttgcacatgccaagataactgcttttatgcaggctgtacccccttgaaaaatcctttctacagtgctgctcacaaaagagcccaagttcgcctcctacctgcattgctgacttgaattcacagtcgccgagtctacctagctttcttggaagcagtctagccaaaatttctatttggtaccgttcacctaattatctacaagaacaaaatccagttgtatttaccaaaaactctacttccaggtgtttgttttagttttttttttttactgaaacttgtttttggtgaatacctctgtgccttagaattaaatatcactttccttatgaacaacataaccttccttcagattgtgtatatgaaaacattagcaagtcttgttttttctatgaagcaaacacaattggtgacaaaggttgtcaatcatttcttcaaaattataatgcagttctaatggtcagcatattttgatattaaatttaaagatcacctctctgcatttgtttttaaattatgctaatacaccacacattatgttggtatgttttgttctgtactttctttaaaaaaaaaa

SEQ ID NO: 789 - DNA, 2276 bp, Homo sapiens
acgggcaccctcactgaggacggcttagacgtgatgggggtggtgcccctgaaggggcaggcattcctgcccctggtcccagagcctcgccgcctgcctgtggggcccctgctccgagcactggccacctgccatgccctcagccggctccaggacacccccgtgggcgaccccatggacttgaagatggtggagtctactggctgggtcctggaggaagagccggctgcagactcagcatttgggacccaggtcttggcagtgatgagacccccactttgggagccccagctgcaggcaatggaggagcccccggtgccagtcagcgtcctccaccgcttccccttctcttcggctctgcagcgcatgagtgtggtggtggcgtggccaggggccactcagcccgaggcctacgtcaaaggctccccggagctggtggcagggctctgcaaccccgagacagtgcccaccgacttcgcccagatgctgcagagctatacagctgctggctaccgtgtcgtggccctggccagcaagccactgccctctgtgcccagcctggaggcagcccagcaactgacgagggacactgtggaaggagacctgagcctcctggggctgctggtcatgaggaacctactgaagccgcagacaacgccagttatccaggctctgcgaaggacccgcatccgcgccgtcatggtgacaggggacaacctgcagacagcggtgactgtggcccggggctgtggcatggtggccccccaggagcatctgatcatcgtccacgccacccaccctgagcggggtcagcctgcctctctcgagttcctgccgatggagtcccccacagccgtgaatggcgttaaggatcctgaccaggctgcaagctacaccgtggagccagacccccgatccaggcacctggccctcagcgggcccacctttggtatcattgtgaagcacttccccaagctgctgcccaaggtcctggtccagggcactgtctttgcccgcatggcccctgagcagaagacagagctggtgtgcgagctacagaagcttcagtactgcgtgggcatgtgcggagacggtgccaatgactgtggggccctgaaggcggctgatgtcggcatctcgctgtcccaggcagaagcctcagtggtctcacccttcacctcgagcatggccagtattgagtgcgtgcccatggtcatcagggaggggcgctgttcccttgacacttcgttcagcgtcttcaagtacatggctctgtacagcctgacccagttcatctccgtcctgatcctctacacgatcaacaccaacctgggtgacctgcagttcctggccatcgacctggtcatcaccaccacagtggcagtgctcatgagccgcacggggccagcgctggtcctgggacgggtacggccaccgggggcgctgctcagcgtgcccgtgctcagcagcctgctgctgcagatggtcctggtgaccggcgtgcagctagggggctacttcctgaccctggcccagccatggttcgtgcctctgaacaggacagtggccgcaccagacaacctgcccaactacgagaacaccgtggtcttctctctgtccagcttccagtacctcatcctggctgcagccgtgtccaagggggcgcccttccggccggccgctcacaaacaatgtgcctttcctgttggcctcggcgctctagagctccgtcttggtggtccttgttctgtcccccggcctcctgcatgggccgctggcgttgaggaacatcactgacaccggcttcaagctgctgttggtgggtctggtcaccctcaacttcgtgggtggccttcatgctggagagcgtgctagaccagtgcctccccgcctgcctgcgccgcctccggcccaagcgggcctccaagaagcgcttcaagcagctggaacgagagctggccgagcagccctggccgccgctgcccgccggccccctgaggtagtgcaggcccacgggcaccccagacactggaactccctgcctctgagccaccaactggacccctctccagcaacaccaccgccaccacctcccacatccctgaggttggcgactgtctacactcctcccccgagaccacccccaccctggggaagcgttgactactgtcccctaccttggaccatcccgcgtaggggtggcagcccccagctcccctcagtgctgctgtcagtgtagcaaataaagtcatgatattttcctggcaaaaaaaaaa

SEQ ID NO: 790 - DNA, 1612 bp, Homo sapiens
  misc_feature (1)...(1612): n = a,t,c or g
aggaggcgggcgggcgcggttctttccggaaggattgaatctcctttagccccgcccgcctccgtagctgcctgaagtagtgcagggtcagcccgcaagttgcaggtcatggcgctggctgctcgactgtggcgccttctgcctttccgacgtggagccgccccggggtctcgtctccctgcggggacttcgggcagccgcgggcattgcggcccctgtcgattccgcggcttcgaggtaatgggaaacccaggaactttcaaaagaggccttttactctcagctttgtcgtatttgggttttgaaacttaccaggttatctctcaggctgctgtggttcatgccacagccaaagttgaagaaatacttgaacaagcagactacctgtatgaaagcggagaaacagaaaaactttatcagttgctaacccaatacaaggaaagtgaagatgcagagttactgtggcgtttggcacgggcatcacgtgatgtagctcagcttagcagaacctcagaagaggagaaaaagctattggtgtatgaagccctagagtatgcaaaaagagcactagaaaaatgaatcaagttttgcatctcataagtggtatgcaatctgccttagtgatgttggagattatgaaggcatcaaggctaaaattgcaaatgcatatatcatcaaggagcattttgagaaagcaattgaactgaaccctaaagatgctacttcaattcaccttatgggtatttggtgctatacatttgccgaaatgccttggtatcaaagaagaattgcctaaaatgcctgtttgcaactccctccctagttcccaccctatgagaaggccttaggctaactttcacagggcagaacaagtggatccaaacttctacagcaaaaacttacttcttttaggaaagacatacttgaaactacacaacaaaaagcttgctgctttctggctaatgaaagccaaggactatccagcacacacagaggaggataaacagatacagacagaagctgctcagttgcttacaagtttcagtgagaagaattgagaacttttcagagaagatttatgaaatagctaataaacattgccttttcttttaattctaaacttaatatatgaactataactgttctacggctttttaaatgttgtgaccatttaaccgtgtaaatataaaatattctaggcttcttcacaaataatagggtaaaataaataatcgccataagagtggtagaaataaatctccatggctcaggcaaagagattattttgcatcctggataccagcaatgcaaaatggtatgagatttctaaggattgatcacattgggatgggagatcaagcaaagaaatatttgtagaggaggggaaatggatctataggggatatacagggggatggattttcaaattggattgattctaagttgaaatcttgaagagaaggtgtggtgacagtggttaggatgttgtgggttcctgacataaagtagttaaatgatatatcttggagctaacctgtgaaataaaaaactaagtaaggagatgatgtattgcgnccgctctagagtattcaacctaacaaagagtgacttt

SEQ ID NO: 791 - DNA, 2348 bp, Homo sapiens
ctatagctctgctgattgtagatggcctggcctgggatgaccaaggaggtctggctctgcttcacatatcccccagcaagcttatcctctagcaagatagctcaggcatgtccttgtcatggtgaggtgcacaatcacacgagcctttttcaagtctctgctgtgtcacatttgtcaatattccattggtccacagtaagtcacatgaccctgggcaggatgcctgcaaagaatgaaagagcactgcaaactgaggtggttaacgcgaatgataaccacaagtgctgttttttgcttttctctccaacccagctgtgaagtttgggaggatgtccaagaagcaaagggacagcctgtatgctgaggtgcagaagcaccagcagcggctgcaggaacagcggcagcagcagagtggggaggcagaagcccttgccagggtgtacagcagcagcattagcaacggcctgagcaacctgaacaacgagaccagcggcacttatgccaacggcagcgtcattgacctgcccaagtctgagggttattacaacgtcgtttccggtcagccgtcccctgatcagtcaggacttgacatgacctggaatcaaacagataaagcaagaacctatctatgacctcacatccgtacccaacttgtttacctataggctctttcaacaattgggcagttagcaccagggataacccatgactgaaatcgaccgaattgcacagaacatcattaagtcccatttggagacatgtcaatacaccatggaagagctgcaccagctggcgtggcagacccacacctatgaagaaattaaagcatatcaaagcaagtccagggaagcactgtggcaacaatgtgccatccagatcactcacgccatccaatacgtggtggagtttgcaaagcggataacaggcttcatggagctctgtcaaaatgatcaaattctacttctgaagtcaggttgcttggaagtggttttagtgagaatgtgccgtgccttcaacccattaaacaacactgttctgtttgaaggaaaatatggaggaatgcaaatgttcaaagccttaggttctgatgacctagtgaatgaagcatttgactttgcaaagaatttgtgttccttgcagctgaccgaggaggagatcgctttgttctcatctgctgttctgatatctccagaccgagcctggcttatagaaccaaggaaagtccagaagcttcaggaaaaaatttattttgcacttcaacatgtgattcagaagaatcacctggatgatgagaccttggcaaagttaatagccaagataccaaccatcacggcagtttgcaacttgcacggggagaagctgcaggtatttaagcaatctcatccagagatagtgaatacactgtttcctccgttatacaaggagctctttaatcctgactgtgccaccgcgtgcaaatgaaggggacaagagaactgtctcatagtcatggaatgcatcaccattaagacaaaagcaatgtgttcatgaagacttaagaaaaatgtcactactgcaacattaggaatgtcctgcacttaatagaattatttttcaccgctacagtttgaagaatgtaaatatgcacctgagtggggctcttttatttgtttgtttgtttttgaaatgaccataaatatacaaatataggacactgggtgttatcctttttttaattttattcgggtatgttttgggagacaactgtttatagaattttattgtagatatatacaagaaaagagcggtactttacatgattacttttcctgttgattgttcaaatataatttaagaaaattccacttaataggcttacctatttctatgtttttaggtagttgatgcatgtgtaaatttgtagctgtcttggaaagtactgtgcatgtatgtaataagtatataatatgtgagaatattatatatgactattacttatacatgcacatgcactgtggcttaaataccatacctactagcaatggaggttcagtcaggctctcttctatgatttaccttctgtgttatatgttacctttatgttagacaatcaggattttgttttcccagccagagttttcatctatagtcaatggcaggacggtaccaactcagagttaagtctacaaaggaataaacataatgtgtggcctctatatacaaactctatttctgtcaatgacatcaaagccttgtcaagatggttcatattgggaaggagacagtattttaagccattttcctgtttcaagaattaggccacagataacattgcaaggtccaagacttttttgaccaaacagtagata

SEQ ID NO: 792 - DNA, 1627 bp, Homo sapiens
gtaaatgtgccacgtcttctaagaagggggagtcctgaacttgtctgaagcccttgtccgtaagccttgaactacgttcttaaatctatgaagtcgagggacctttcgctgcttttgtagggacttctttccttgcttcagcaacatgaggcttttcttgtggaacgcggtcttgactctgttcgtcacttctttgattggggctttgatccctgaaccagaagtgaaaattgaagttctccagaagccattcatctgccatcgcaagaccaaaggaggggatttgatgttggtccactatgaaggctacttagaaaaggacggctccttatttcactccactcacaaacataacaatggtcagcccatttggtttaccctgggcatcctggaggctctcaaaggttggggaccaggggcttgaaaggaatgtgtgtaggagagaagagaaagctcatcattcctcctgctctgggctatggaaaagaaggaaaaggtaaaattcccccagaaagtacactgatatttaatattgatctcctggagattcgaaatggaccaagatcccatgaatcattccaagaaatggatcttaatgatgactggaaactctctaaagatgaggttaaagcatatttaaagaaggagtttgaaaaacatggtgcggtggtgaatgaaagtcatcatgatgctttggtggaggatatttttgataaagaagatgaagacaaagatgggtttatatctgccagagaatttacatataaacacgatgagttatagagatacatctacccttttaatatagcactcatctttcaagagagggcagtcatctttaaagaacattttatttttatacaatgttctttcttgctttgttttttatttttatatattttttctgactcctatttaaagaaccccttaggtttctaagtacccatttctttctgataagttattgggaagaaaaagctaattggtctttgaatagaagacttctggacaatttttcactttcacagatatgaagctttgttttactttctcacttataaatttaaaatgttgcaactgggaatataccacgacatgagaccaggttatagcacaaattagcaccctatatttctgcttccctctattttctccaagttagaggtcaacatttgaaaagccttttgcaatagcccaaggcttgctattttcatgttataatgaaatagtttatgtgtaactggctctgagtctctgcttgaggaccagaggaaaatggttgttggacctgacttgttaatggctactgctttactaaggagatgtgcaatgctgaagttagaaacaaggttaatagccaggcatggtggctcatgcctgtaatcccagcactttgggaggctgaggcgggcggatcacctgaggttgggagttcgagaccagcctgaccaacacggagaaaccctatctctactaaaaatacaaaagtagccgggcgtggtgatgcgtgcctgtaatcccagctacccaggaaggctgaggcggcagaatcacttgaacccggaggcggaggttgcggtaagccgagatcacctccagcctggacactctgtctcgaaaaaaaaaa

SEQ ID NO: 793 - DNA, 3201 bp, Homo sapiens
  misc_feature (1)...(3201): n = a,t,c or g
ttttttttttttgggcgcagagggcgtttattggacctgtccttcccagccgctgcttgtccaggttcagcgctctccgcgggtgaggcaaggaaaccgaggagacgcccgagccgggtcaccacaaggtccgcctggacccccggccgtcacggacggtcctctggatgcagatggtccagggatctgggggtcctgggagagtggtgtgtggactgcgggcccagctggacaaaggcaggggcttcctcagaagctctgctggtcacgcaggcgtccggcccacggccttcaacagccctgcagggcgggctgaggttaaccgcgccgaggagagtccagggcgagcggtggctcttgcagcagccgggctcaggggcagctgaggggtagctgaggagtagctgaggggcagctgggctcaggggtagctgaggggcacccgccaccagagcccaccgcacaggcagttcttgatccagcgctgctcccactgcttcaccgccgtggttctgttgggcgacttgagcatggtgacacagccgcacctggtgcaggccttgcattcctccgtggggcaagcgccaaggtgcagcctccgcaggtggtcgatcttgggctggcctggggccctggcgaggccgtcgagctgcagggtggcagcactgccaggcagcgtgggcgcccggccaaactgcagacgaaggggctgcttgggctgcaggcggctaaccaggccgtcgctggctggcagccagtccaggctggggataagcagctggctgggcagcaggcagcattcatccaccagcgcctcgtccggctcgctcgctgggccctcatcgcgacagcagatccagagcttggtgagcaggcggaagagcagggacatgctgtcctgggtatccgaggtggccgtatacacgggcaggcagctgggcttcagaaggccccagatgcggatgaccaccatcaattcccgaagcatgcccagcgaggtgccgtcccgcaggaagctgtggcccggcctcagcagggaaccagcagaggcttcatggagaggagggctccgaggtgggggagggctccgaggtgggggagggctccgaggtggggcagggctccgaggtggggcagggctggttgggtaggctggccagcaggtacagcacgaagtcgcccacccactgcaagagctgctgcagcgcctgcagtgtgttcatgtccagcacaaattcctccgtcttgaggttgatcatgaccttgtcaatgtcgacgtcggtgatcttggtgcagatctcggtcagccggtcgccggggctcttgtcaggcgtgttgagaaagtgggggcgcagcagcgacttcagggtggagctgatggcgatgaggaagagcttggtgtggtagtcgcacacgcgggtcaccgtgcagggcgacagcttgcagagcgaggccttcatggccaggatccgggtggagaggacctgctgcagggcagcggtctggcgcgtgtactcctcgtgcagcttctccaccaggctctgtaccatactgggctgcacgtgcagcaggatgtcccaccagtcgtagccggtcaccatgcagtactccagcaggaagagcaggtgccgcagcgccagccccacctccagcgggtggcccatggaaggtgagaggcggagccacgctcagcttcccgtggctgtcaatccccaccagggccagtgacgtccacgatagctgcatagcctttaagtggacggcggggcccgcggtgcgggggcgcttcatggccggctcatccacaggcctcggggccgcggagctgtagaagaccgccatggtctgcagtgagagccggtgcacgatgtggacgctgccgtcgtggaaggccagggccagcccgaggccagggtagaactgtgtgtcgctggccaccttgaggtcggtgttggtgagcgagatgggcagcttgggcagcgcccacggccgacacacggtccagatcgttggtggccgataggatccgccatttgagaattgtgggctgtttgtcgccaaccacgggggagatctgctggaagatgttgttcacggggagtccctccttgcgcagggaccagcactccacgatgctgctggtctggctggacgcgcacaaaagcacctgctccgacatgtcccgggccaggaacttgaggtgggtgatggcggggaacttgtccttgcggttgaggtcggtggtgcagcgcatgaacagggagggcaggatatccgtgtcgatacggcacttctcgctcaccacgctcacgcacaccttgtagaactgcacgggcgtacgcgctgctgccgtccgccgtggccaccacgatgttgccgccgccggtgaaggcgatgtcggccagggccacgcgggcgcgcagccggcacaggctcatcggtggacgtcgagcacctgcccgctggcgttncagcagggacacggtgaccaggccgctgaccgtcaccgcgatccagccctccatggcattgccgcacgaacagcgtgagcgacgggtgagaacttgactccgggagaacttctccccgaagctggaggcgcccgacttctccacgtgcagggccagtttcacaccatttgtgcagccagggacagggcccacaaatggggtcccccctccactaaggctgcccactgagcttctcccagctattaagccagggtnggtacccccatgctccagcaccttgatctgccccgtcggccatctgctgaacaggaagccggggaagcctgactggtcccactccagggcaggtgatagcctcgtggtgctctgaggggatcgagtgcaggtcccaggggtgctccgtgtccaggatgtggatcatgcgggtcaggtcctggtcatcgctgcgcaggtccatggtgaaggcgatgagatttcggcaggaccaggcgcaggccaggggcaccgatgggcagtgggtgctcttggaccatttctcccactcacagacgtaggccaagtccatcatcccacctgccgctggccgccgcaaatcacacatgagggcagtcaccagctcctggtcggcccgtgcgccaagctcagcgggcgtccgcggtgcgatcttccctagcgcctcgggtctggcgccgccatcttcctcggtaacaaccagtcgcttgaggcgtgg

SEQ ID NO: 794 - DNA, 608 bp, Homo sapiens
gaaagttaaatattagaacaaattctatgtcaagcaaattaagtaaacatctatgaagagactgaaaatggaatgtttttggaagtaaatagaaattgctaagcacctagcaataaagaattacaacaactcaaggaaatatgtttattagcaggatcatgaattaattgacccatttccggtacctctggtcataattggaagtaaatatgatgtttttcaggtaagctcttccgcttctagctgagtttgttgtacatatatggctgtgctttttatgagggaggtacaaaaataatatcaaaataagaaaaataattattgaaggaatcggttaagtcatgcatcttaaagattttggaaaagacatagttgggacagaaaaaaataggtaaagaaaataaatgcagtgattagaatggggataaggcagatttagaaaatgaatcttgccgggcacaagtgcttatgccagtagtcccagcactttgggaggctgaagggggagggtcaattgagcccagggatttgaggttacagtgagctgtaatcacaccactatactccagcctgggttacacagtgagacacttgtctcaaaaaaaaaa

SEQ ID NO: 795 - DNA, 1027 bp, Homo sapiens
ccctttgcctcccccctggggtccaaagcccaaatttccccccccaaaaaaaaaaaagaaagaaagaaagaaagaaagaaaagaaaaataaaaaagaaattttattaccagataggatttggctgagtctcccagagtcaaatttgggggtgccccacccttggcattgtccttgataactttattccactcttacactcaattcctcagtaattctgtctgctgcctctaaaatctatctagaatccacggggtctgggcttagctggaatctccatcattgttcctgtggctcagtgcagccccccttcaccttctctggttttcaacctcccatggaggccacaagacacctgtgatcacctgaattagggcaagtccctcttctgcttagaagcttctatggctcccacctcactcagagcaaaagcgaagtcctctatatcacccacaaggtccttcgggaactactccttcagctccttgtctcctcccattctccccctccgtccctgctccaggcacaccagcatcgctgcatttcttagaacacatgggcacatttcagcctcagggcctttgcgcatgccattccctcatcctgaaatgcttttcttttggtcttcccaggacagaggtctcagctcacatcacaagtcactacctctgcagagaggtcttccctgaccaccatcaccatctctgtcgtttgtcactggaatcatctccattatttcatcaccgagttcttttctgtgttcccaagcagaacgtcaattccacgagggcacagattttttgtctgtttgttcacattgtggggtgtcgctgcataaatacatttcccctgcatcttttccgactgcacctttggctgcatttcctacaaattcctttatgtaaaaagaacaagtctgtaaaacttgggaagacagtcgtgggccgagggtgtcagtctgcagccggttctgataccagagtccgggcggctgtgggtgcaccggggctgcctgtggagccgctggtg

SEQ ID NO: 796 - DNA, 1514 bp, Homo sapiens
aagtttaaacttgtaagcttaagcttccgtttataaacagaagtttaaaattataggtcctgtttaacattcagctctgttaactcactcatctttttgtgtttttacactttgtcaagatttctttacatattcatcaatgtctgaagaagttacttatgcagatcttcaattccagaactccagtgagatggaaaaaatcccagaaattggcaaatttggggaaaaagcacctccagctccctctcatgtatggcgtccagcagccttgtttctgactcttctgtgccttctgttgctcattggattgggagtcttggcaagcatgtttcacgtaactttgaagatagaaatgaaaaaaatgaacaaactacaaaacatcagtgaagagctccagagaaatatttctctacaactgatgagtaacatgaatatctccaacaagatcaggaacctctccaccacactgcaaacaatagccaccaaattatgtcgtgagctatatagcaaagaacaagagcacaaatgtaagccttgtccaaggagatggatttggcataaggacagctgttatttcctaagtgatgatgtccaaacatggcaggagagtaaaatggcctgtgctgctcagaatgccagcctgttgaagataaacaacaaaaatgcattggaatttataaaatcccagagtagatcatatgactattggctgggattatctcctgaagaagattccactcgtggtatgagagtggataatataatcaactcctctgcctgggttataagaaacgcacctgacttaaataacatgtattgtggatatataaatagactatatgttcaatattatcactgcacttataaacaaagaatgatatgtgagaagatggccaatccagtgcagcttggttctacatattttagggaggcatgaggcatcaatcaaatacattgaaggagtgtagggggtgggggttctaggctataggtaaatttaaatattttctggttgacaattagttgagtttgtctgaagacctgggattttatcatgcagatgaaacatccaggtagcaagcttcagagagaatagactgtgaatgttaatgccagagaggtataatgaagcatgtcccacctcccactttccatcatggcctgaaccctggaggaagaggaagtccattcagatagttgtggggggccttcgaattttcattttcatttacgttcttccccttctggccaagatttgccagaggcaacatcaaaaaccagcaaattttaattttgtcccacagcgttgctagggtggcatggctccccatctcgggtccatcctatacttccatgggactccctatggctgaaggccttatgagtcaaaggacttatagccaattgattgttctaggccaggtaagaatggatatggacatgcatttattacctcttaaaattattattttaagtaaaagccaataaacaaaaacgaaaaggcaaaaaaaaaa

SEQ ID NO: 797 - DNA, 1184 bp, Homo sapiens
cccgggtcgacccacgcgtccgcccgctcgcaggtcccgaggagcgcaggtgaggcggcaccccactcccggcggcctccgggcctccttccgcacgcaccccgagctgcctccgcacagttggaggagcgtatgagggacccccacccagggatgacactccaggaaggggactgcagaggaagccagactgtgtccctgacaatgggaacagccgacagtgatgagatggccccggaggccccacagcacacccacatcgatgtgcacatccaccaggagtctgccctggccaagctcctgctcacctgctgctctgcgctgcggccccgggccacccaggccaggggcagcagccggctgctggtggcctcatgggtgatgcagatcgtgctggggatcttgagtgcagtcctaggaggatttttctacatccgcgactacaccctcctcgtcacctcgggagctgccatctggacaggggctgtggctgtgctggctggagctgctgccttcatttatgagaaacggggtggtacatactgggccctgctgaggactctgctagcgctggcagctttctccacagccatcgctgccctcaaactttggaatgaagatttccgatatggctactcttattacaacagtgcctgccgcatctccagctcgagtgactggaacactccagcccccactcagagtccagaagaagtcagaaggctacacctatgtacctccttcatggacatgctgaaggccttgttcagaacccttcaggccatgctcttgggtgtctggattctgctgcttctggcatctctgacccctctgtggctgtactgctggagaatgttcccaaccaaaggggtgagtccctaagaaaagagaccagaaggaaatgttggaagtgagtggaatctagccatgcctctcctgattattagtgcctggtgcttctgcaccgggcgtccctgcatctgactgctggaagaagaaccagactgaggaaaagaggctcttcaacagccccagttatcctggccccatgaccgtggccacagccctgctccagcagcacttgcccattccttacaccccttccccatcctgctccgcttcatgtcccctcctgagtagtcatgtgataataaactctcatgttattgttcccaaaaaaaaaa

SEQ ID NO: 798 - DNA, 3194 bp, Homo sapiens
ggaatccatctccttttttgtggaggctgtgaagccccatggctagtcttgccccaggcctacctgtgggctgccctatgagccgcctgcagcattgctcaccttctcagcagtctggcatctcattgaaagaaaggaatgatggtccttaagaactccacttccgaagactgtccctccatagttagagcaaattcattcccttgctgggttgctgggctctggcactgcgctggccctcgttggaggtctgcagaagtgcacagaaagtgtgggcaatggactggccatttccacagttttggaaacttttaaaaatccatattcttgctgggattacagatgtgagccatcgtgcccagcccacccactttgttaatcatgatcagagcaggggtgccattctaccaccttggcacacctgcctagaggagtgagtggcgctgggagcagactgaggaacatcttagctgagcagtgaatccagcactgttctaaggaagctcagatggtctgtgactcatccctgtcctctggactgaatctgaggccttggaactcacccagggtcttagtggaggcacagctctgagctatgggtgaagagcatctgaacccatctacacattgaccaaacacaggcaggttccagtctgcgggggagatggagaaggtgccaccatgctgctgcacaaatcccaggatagctggggaatgagaatccagcactttgggcctaggacctggaaggagaggtcttttgggagaggtatggggacatctgaaggaggacttcttggaaggggaggggctggagcagaggcaagagtgattttgtcagatggagagaaggttctccacatgggcggggctggcagaggcagatgcccagacaggtcacaactctctaggtgcccaattacctgccctcggtgagctcagccatcggcggggaggtgccccagcgctacgtgtggcgtttctgcatcggcctgcactcggcgcctcgcttcttggtggccttcgcctactggaaccactacctcagctgcacctccccgtgttcctgctatcgcccgctctgccgcctcaacttcggcctcaatgtcgtggagaacctcgcgttgctagtgctcacttatgtctcctcctccgaggacttcagtgggtgcctggatgagggaggagtggggaagtgttccctgaggggacgggcctgcccctaccacattcggaccttcctacttcgtggtgtgggcactccctgcaatgtggctcccaatcctctttccctccagccatccacgaaaatgctttcattgtgttcattgcctcatccctcgggcacatgctcctcacctgcattctctggcggttgaccaagaagcacacagtaagtcaggaggtacggtctatccctagcgggggctccaaggcagcccagaagaaaatcaaggacatctgtcctcaggattcgggtaatggtgaggtgggaactgagttctaatgggaaccctggcagaggggtgctggggttggggctggggcttgggaacaaactgagggtggttggtcagaatctaggactatagcactgtgtttgggtagtgtgggagactggagaatagaagagatggaggctgcaaatggggatagaatgaggagtcgcatctaggcggcagtgagttaggaacagtgtcagaggactggtctgtcataattccagcgccccacccatgtacatgggtttcttttcccccacagtatttggaggtggggttggtgggtgactccatgtaactttcatactccatccccctgaagtggaagcggcaggaataccactgctcctcggcccatcactcccccagaggcagggacgtgaacacatagtcgtcattcttgctgcccctgcctgtgctcccttccatgaccgctagtgggagccaagggagataaggcccagcccttaggagttagggctgagaggggagcccacgctctcatacccagcaagctgcagagtgatcagacagcccattccctaggatcgcaagtcctacagctggaaacagcggctcttcatcatcaacttcatctccttcttctcggcgctggctgtctactttcggcacaacatgtattgtgaggctggagtgtacaccatctttgccatcctggagtacactgttgtcttaaccaacatggcgttccacatgacggcctggtgggacttcgggaacaaggagctgctcataacctctcagcctgaggaaaagcgattctgaacccttcagtcctgcttgggaggacgcagcccactgcccagaaacaagaaacacgataccattctggccttccccaccccacatcctctcttggccttactgaagatgggggaagggtaagaaggaagggtgtaggccaaggctcaccccagtgctgctggcttctcctctccacccctcatatgggcgtggggtcctcaaacatcacctttacctgagaggccccaagaagctgagctggcagagagctccaccatttggtgctaaaaaaaaaaaacgtcctgaggttcatgaccaccatccagtttctggcctttacacagtcacctttcactgaggtcaggagcccctgagcaggggctgctccctgacaaccacagccatttttttgcacgggggtcattcataggactaatgtatttcatgatctactgtgcacatccaggcctgtggccacagtcccctgctaaagttgctcaggtgttctagtcctgacttcacctttttgatttggtgtgtgccctagggtatgtacccttccccatctgagcctcggtgtgtccatgtgtctggcgggggatgggtggactgtatgatttccaaggactctaccagtcagtggttctgatgtcatcgggtggaggtggtgttctatacctaaaggatgacctgctccagaaacagcaccagcacagcatgtattttcttctcttctgaaagttctggcttgtagacccctcccttcctttgcaaaggtatgggatagaggggtcagatgcagatctctactgtaaaatgggctccctggtatctcctgtcttccctactgctccaaaccctaaattttggttgtacattttatttgaaaggaaaataaattttttttttgggccaacaaaaaaaaaa

SEQ ID NO: 799 - DNA, 874 bp, Homo sapiens
ttttttttttttcaaagaatcaactttattgaacattcagggtcagtttctcttcttgctcttgcctgtgaccttggctggtgtgaggactggagctgctgcctggtacagggtggaggagatcttgttgatgtagtacagaccaaccatggagaagatgaagcaggtggtgacacagactcggtggatgaggccagatgcaaagagagccaacaggaggcacaggagaatctcagggaagatctttgcttggaatcctttgccaaagacaagattctccagattattgaaggcagtgagcgagaacacgaagagacccgaaccaagcaggccgccctggatggtgagccactcggtggaggccagctgacggctgtacatctgcatcccagcaaagagcagcagggacaggagggaggagagcgccagcgaggtgcccgtacccaccactggaggggatgggagaagggacggagagtcaggctccgccctccctccggcaagctacgggcagatcagccggtccggaagctcggtgggccgaccccctccaagaactcccgggactgcagccacacgccccaactccccacaccgcgcggcaacccctacgtattccccagccccggacaccccgaaccctcccgtccggtggaaatgcccgctcccggtggaacccaggacacgtcagctctgtcgggagaggacgaggaaagcttgtccacccaaaccccgaccccctctaggacttcctggggaccccaccggtcctgttacccatcatgccccgcccgtgagtccaaccggcgcctctggccaagaaaggcgagctgaaccgggtgcggttagctatgcgcatgcgtcagcgacgaaa

SEQ ID NO: 800 - DNA, 3648 bp, Homo sapiens
gtccgcgcagcgctgggcggccgtcgcgggccgttgggggtgcaggctgctcgcactgctgctactggtgcctggacccggcggcgcctctgagatcaccttcgagcttcctgacaacgccaagcagtgcttctacgaggacatcgctcagggcaccaagtgcaccctggagttccaggtgattactggtggtcactatgatgtagattgtcgattagaagatcctgatggtaaagtgttatacaaagagatgaagaaacagtatgatagttttaccttcacagcctccaaaaatgggacatacaaattttgcttcagcaatgaaattttctactttcacacataaaactgtatattttgattttcaagttggagaagacccacctttgtttcctagtgagaaccgagtcagtgctcttacccagatggaatctgcctgtgtttcaattcacgaagctctgaagtctgtcatcgattatcagactcatttccgtttaagagaagctcaaggccgaagccgagcagaggatctaaatacaagagtggcctattggtcagtaggagaagccctcattcttctggtggttagcatagggcaggtatttcttttgaaaagctttttctcagataaaagaaccaccacaactcgtgttggatcataactacgttttgagaattgatgcaccattgccactgtaatattgctgtcctctaattaattttaggtactgaagaacttaatattggcaacatttttaaatccttactcatacacttgttgggagggatgtacaatgcatattcccaaactgtggaaaggacacctttttttatttgtaaaggtggaaaaactttggaactcattttgggctattcatgttaaatattcaacaccaatgatctactctgttcgcagttgtttatatctactcttcgcacactaaactttggtattttgattccttttaaccatttaagactacttttcttataggtagttgatattttaaaaaccttagatttaatgtctacatgtgttagggaggaagaaaattgccttttaattgttaataagaaaaccaaatgtgatgaactgtagcccaagccctattctgcactgttcagttttatggaggaaaaataaatctaccataggaatgttagttaatattgatatatcatggtaaaattgatttctcactagcttagaaaatgtcagacttttgtttttggggtttataatttaaaccagctatgctattttttcataaaggcatttgtagtacacagaaaacagtagtttcagtagtgtaaaagagtttatacaggccttaaatatcagactttgtaacaggtagaaatattacagaataatttaagacactacaatgggggcaaatgaaataggaaaatttttagtgagttacccgtactcattacattttcagtgcttttacaaggaaaaaaggtgatatgtttaattttaacattttaattggctagctcttgcccttatatgactttaatgtctgtgagtcattcccagcttaaattaacaattgttagtattagtctcacacataagtgccatacattttatcctcatggatgtgatgcactgaaaagttagttgctctccttttttcttttttttgtcgtgcatattttatttctgtagtttctggttagctaccctaaagtgatttaaaaatttagaatgctttgtgtttcctatttggtaatcttcattgacttttctttagttaatgagtattaaatagtgcatattctgtagactatagggtttacattgtgttgcatcttataacttgtatagattgagctgattgaaataagattttgttccaagtattatctgatagaatacaagatgattcaaaattatatagatatttaaagcttttctgctgttttttttttttttaaatggcaacggtttttttgccgggccttttttccttacccaaaagggaggagttttgaacaagacaaaactgtcatattgtaaaaactttggtatgggatcccttaaaatactgattggatacccttcctagtcacttaccaatactgactagaagttaactcttaattctaagctatcttaaaatgcatatatatacttcttgcatggaagagcaaaacaaattcaagttgtcatgcctgataatttcagatgccaccgtatagcaaagggtgaacatgttttcaaccctttaactttttacggtgtttgaagaccagctactccttaatatttatcaatggattaagaagtttaagattttgcagatttatcaatttgggtttttgtactgaagttgtcttgcggctttgcaagtgtccctttatatttaaatttgaaagttgtaagcactgatgttaatgtgattgatcagcatgggcatatgtaaaatgtccttttctggttgcctctctatgctattgtgttcagatacttacaccataattaaacagtaagttatagacttgctgagtttggcatagatagtgcactcatttaatctgtgcctctcaaaacttcagaatattagcatattaccacaaataatttttggtgaaactattgagatattaaaatttttgaaatcactactgttacctgttatagaaaatagtgttggcttagtctagtctctgtgtaactggttacattttgatggttgtctatactcaactggatatgtgtatgtaaattagaaaatacatacctatccagacataaatgctaagtaacatttttttcttcctccaactacataatttgtagctcatcatttttccttaatcctttcctaacttgttgcagcagtttgaatttcccagatatttatgtttgaacataatggctcagaatacatatttgaacatcatagttgtatatatttttaaagtagaataaataatggaaagcaacttgatatacaagtttatactaaaatttcaactgtgtgaagatacattttaaggcattactttgctaataatctacacattcttttttctattaaataaacaaatggtttgtggttcacagctttcatccaagcttggtgataatcaattttgaaaatacagtggactgaaaagcaaatttattctttcgaagatttcatttaaatctctgtactatgcatttttgtttcagtttgtaaatgtgtaacatttatagttaaataggacaaagcaggccctatgactattgttttcaaaaaattaatatataaataattcagaggggtttttcatttacttttgaaaagaaatttctttaacaggattgcacctatcaatttcttgtagaataaaaaaaaatctttcaacaaactgactttacttgtttctgtcaggatttaaatctttctaaagctccttataaacttaaagcctagagtacagttctgtaatgagagtgattatttatttggtattttattaaaatatctgagggactgtccaagaaagaaggtgaaagagaaataccacgtctgtactgcctaatttgtaaccttctctttgcattccttactgaaagtttgtgtaggtgaaaagcagttaaatcatcagttgctctaaagaggtcttaatttttaagtaaattacctt

SEQ ID NO: 801 - DNA, 1527 bp, Homo sapiens
accccatgcatggagtgtataaaaggggaagggctaagggagccacagaacctcagtggatctcagagagagccccagactgagggaagcatggatggatggagaaggatgcctcgctggggactgctgctgctgctctggggctcctgtacctttggtctcccgacagacaccaccacctttaaacggatcttcctcaagagaatgccctcaatccgagaaagcctgaaggaacgaggtgtggacatggccaggcttggtcccgagtggagccaacccatgaagaggctgacacttggcaacaccacctcctccgtgatcctcaccaactacatggacacccagtactatggcgagattggcatcggcaccccaccccagaccttcaaagtcgtctttgacactggttcgtccaatgtttgggtgccctcctccaagtgcagccgtctctacactgcctgtgtgtatcacaagctcttcgatgcttcggattcctccagctacaagcacaatggaacagaactcaccctccgctattcaacagggacagtcagtggctttctcagccaggacatcatcaccgtgggtggaatcacggtgacacagatgtttggagaggtcacggagatgcccgccttacccttcatgctggccgagtttgatggggttgtgggcatgggcttcattgaacaggccattggcagggtcacccctatcttcgacaacatcatctcccaaggggtgctaaaagaggacgtcttctctttctactacaacagagattccgagaattcccaatcgctgggaggacagattgtgctgggaggcagcgacccccagcattacgaagggaatttccactatatcaacctcatcaagactggtgtctggcagattcaaatgaagggggtgtctgtggggtcatccaccttgctctgtgaagacggctgcctggcattggtagacaccggtgcatcctacatctcaggttctaccagctccatagagaagctcatggaggccttgggagccaaggagaagaggctgtttgattatgtcgtgaagtgtaacgagggccctacacttcccccgacttttcttttcctcttgggaggcaaagatacaccgctcaccagcgcggactatttatttcaggaatcctacagtagtaaaaagctgtccacactggcaatccacgccatgtatatcccgccacccactggacccacgcttggccctgggggccacctttcatccgaaagttttacacagagtttgatcggggtaacaacccgcatggcttcgccttggcccgctgaggccctttgccaccgcagggaaggccctgccttcagccctggcccagagttggaaccctctttgaaatgcccctctgcctgggcttatgccctcaaatggagacattggatgtggagctcctgctggatgggggccctgacccctgccccagcccttccctgctttgaggacaaagagaataaagacttcatgttcacaaaaaaaaaa

SEQ ID NO: 802 - DNA, 7028 bp, Homo sapiens
cgtggtttgtagatgtgcttggggagaatgggggcctcttctccaagaagcccggagcctgtcgggccgccggcgcccggtctccccttctgctgcggaggatccctgctggcggttgtggtgctgcttgcgctgccggtggcctggggtcaatgcaatgccccagaatgggcttccatttgccaggcctaccaacctaactgatgagtttgagtttcccattgggacatatctgaactatgaatgccgccctggttattccggaagaccgttttctatcatctgcctaaaaaactcagtctggactggtgctaaggacaggtgcagacgtaaatcatgtcgtaatcctccagatcctgtgaatggcatggtgcatgtgatcaaaggcatccagttcggatcccaaattaaatattcttgtactaaaggataccgactcattggttcctcgtctgccacatgcatcatctcaggtgatactgtcatttgggataatgaaacacctatttgtgacagaattccttgtgggctaccccccaccatcaccaatggagatttcattagcaccaacagagagaattttcactatggatcagtggtgacctaccgctgcaatcctggaagcggagggagaaaggtgtttgagcttgtgggtgagccctccatatactgcaccagcaatgacgatcaagtgggcatctggagcggccccgcccctcagtgcattatacctaacaaatgcacgcctccaaatgtggaaaatggaatattggtatctgacaacagaagcttattttccttaaatgaagttgtggagtttaggtgtcagcctggctttgtcatgaaaggaccccgccgtgtgaagtgccaggccctgaacaaatgggagccggagctaccaagctgctccagggtatgtcagccacctccagatgtcctgcatgctgagcgtacccaaagggacaaggacaacttttcacctgggcaggaagtgttctacagctgtgagcccggctacgacctcagaggggctgcgtctatgcgctgcacaccccagggagactggagccctgcagcccccacatgtgaagtgaaatcctgtgatgacttcatgggccaacttcttaatggccgtgtgctatttccagtaaatctccagcttggagcaaaagtggattttgtttgtgatgaaggatttcaattaaaaggcagctctgctagttactgtgtcttggctggaatggaaagcctttggaatagcagtgttccagtgtgtgaacaaatcttttgtccaagtcctccagttattcctaatgggagacacacaggaaaacctctggaagtctttccctttggaaaagcagtaaattacacatgcgacccccacccagacagagggacgagcttcgacctcattggagagagcaccatccgctgcacaagtgaccctcaagggaatggggtttggagcagccctgcccctcgctgtggaattctgggtcactgtcaagccccagatcattttctgtttgccaagttgaaaacccaaaccaatgcatctgactttcccattgggacatctttaaagtacgaatgccgtcctgagtactacgggaggccattctctatcacatgtctagataacctggtctggtcaagtcccaaagatgtctgtaaacgtaaatcatgtaaaactcctccagatccagtgaatggcatggtgcatgtgatcacagacatccaggttggatccagaatcaactattcttgtactacagggcaccgactcattggtcactcatctgctgaatgtatcctctcgggcaatgctgcccattggagcacgaagccgccaatttgtcaacgaattccttgtgggctaccccccaccatcgccaatggagatttcattagcaccaacagagagaattttcactatggatcagtggtgacctaccgctgcaatcccggaagcggagggagaaaggtgtttgagcttgtgggtgagccctccatatactgcaccagcaatgacgatcaagtgggcatctggagcggcccggcccctcagtgcattatacctaacaaatgcacgcctccaaatgtggaaaatggaatattggtatctgacaacagaagcttattttccttaaatgaagttgtggagtttaggtgtcagcctggctttgtcatgaaaggaccccgccgtgtgaagtgccaggccctgaacaaatgggagccggagctaccaagctgctccagggtatgtcagccacctccagatgtcctgcatgctgagcgtacccaaagggacaaggacaacttttcacccgggcaggaagtgttctacagctgtgagcccggctatgacctcagaggggctgcgtctatgcgctgcacaccccagggagactggagccctgcagcccccacatgtgaagtgaaatcctgtgatgacttcatgggccaacttcttaatggccgtgtgctatttccagtaaatctccagcttggagcaaaagtggattttgtttgtgatgaaggatttcaattaaaaggcagctctgctagttattgtgtcttggctggaatggaaagcctttggaatagcagtgttccagtgtgtgaacaaatcttttgtccaagtcctccagttattcctaatgggagacacacaggaaaacctctggaagtctttccctttggaaaagcagtaaattacacatgcgacccccacccagacagagggacgagcttcgacctcattggagagagcaccatccgctgcacaagtgaccctcaagggaatggggtttggagcagccctgcccctcgctgtggaattctgggtcactgtcaagccccagatcattttctgtttgccaagttgaaaacccaaaccaatgcatctgactttcccattgggacatctttaaagtacgaatgccgtcctgagtactacgggaggccattctctatcacatgtctagataacctggtctggtcaagtcccaaagatgtctgtaaacgtaaatcatgtaaaactcctccagatccagtgaatggcatggtgcatgtgatcacagacatccaggttggatccagaatcaactattcttgtactacagggcaccgactcattggtcactcatctgctgaatgtatcctctcaggcaatactgcccattggagcacgaagccgccaatttgtcaacgaattccttgtgggctacccccaaccatcgccaatggagatttcattagcaccaacagagagaattttcactatggatcagtggtgacctaccgctgcaatcttggaagcagagggagaaaggtgtttgagcttgtgggtgagccctccatatactgcaccagcaatgacgatcaagtgggcatctggagcggccccgcccctcagtgcattatacctaacaaatgcacgcctccaaatgtggaaaatggaatattggtatctgacaacagaagcttattttccttaaatgaagttgtggagtttaggtgtcagcctggctttgtcatgaaaggaccccgccgtgtgaagtgccaggccctgaacaaatgggagccagagttaccaagctgctccagggtgtgtcagccgcctccagaaatcctgcatggtgagcataccccaagccatcaggacaacttttcacctgggcaggaagtgttctacagctgtgagcctggctatgacctcagaggggctgcgtctctgcactgcacaccccagggagactggagccctgaagccccgagatgtgcagtgaaatcctgtgatgacttcttgggtcaactccctcatggccgtgtgctatttccacttaatctccagcttggggcaaaggtgtcctttgtctgtgatgaagggtttcgcttaaagggcagttccgttagtcattgtgtcttggttggaatgagaagcctttggaataacagtgttcctgtgtgtgaacatatcttttgtccaaatcctccagctatccttaatgggagacacacaggaactccctctggagatattccctatggaaaagaaatatcttacacatgtgacccccacccagacagagggatgaccttcaacctcattggggagagcaccatccgctgcacaagtgaccctcatgggaatggggtttggagcagccctgcccctcgctgtgaactttctgttcgtgctggtcactgtaaaaccccagagcagtttccatttgccagtcctacgatcccaattaatgactttgagtttccagtcgggacatctttgaattatgaatgccgtcctgggtattttgggaaaatgttctctatctcctgcctagaaaacttggtctggtcaagtgttgaagacaactgtagacgaaaatcatgtggacctccaccagaacccttcaatggaatggtgcatataaacacagatacacagtttggatcaacagttaattattcttgtaatgaagggtttcgactcattggttccccatctactacttgtctcgtctcaggcaataatgtcacatgggataagaaggcacctatttgtgagatcatatcttgtgagccacctccaaccatatccaatggagacttctacagcaacaatagaacatcttttcacaatggaacggtggtaacttaccagtgccacactggaccagatggagaacagctgtttgagcttgtgggagaacggtcaatatattgcaccagcaaagatgatcaagttggtgtttggagcagccctccccctcggtgtatttctactaataaatgcacagctccagaagttgaaaatgcaattagagtaccaggaaacaggagtttcttttccctcactgagatcatcagatttagatgtcagcccgggtttgtcatggtagggtcccacactgtgcagtgccagaccaatggcagatgggggcccaagctgccacactgctccagggtgtgtcagccgcctccagaaatcctgcatggtgagcataccctaagccatcaggacaacttttcacctgggcaggaagtgttctacagctgtgagcccagctatgacctcagaggggctgcgtctctgcactgcacgccccagggagactggagccctgaagcccctagatgtacagtgaaatcctgtgatgacttcctgggccaactccctcatggccgtgtgctacttccacttaatctccagcttggggcaaaggtgtcctttgtttgcgatgaagggttccgattaaaaggcaggtctgctagtcattgtgtcttggctggaatgaaagccctttggaatagcagtgttccagtgtgtgaacaaatcttttgtccaaatcctccagctatccttaatgggagacacacaggaactccccttggagatattccctatggaaaagaagtatcttacacatgtgacccccacccagacagagggatgaccttcaacctcattggggagagcaccatccgccgcacaagtgaacctcatgggaatggggtttggagcagccctgcccctcgctgtgaacttcctgttggtgctgcctgcccacatccacccaagatccaaaacgggcattacattggaggacacgtatctctatatcttcctgggatgacaatcagctacacttgtgaccccggctacctgttagtgggaaagggcttcattttctgtacagaccagggaatctggagccaattggatcattattgcaaagaagtaaattgtagcttcccactgtttatgaatggaatctcgaaggagttagaaatgaaaaaagtatatcactatggagattatgtgactttgaagtgtgaagatgggtatactctggaaggcagtccctggagccagtgccaggcggatgacagatgggaccctcctctggccaaatgtacctctcgtacacatgatgctctcatagttggcactttatctggtacgatcttctttattttactcatcattttcctctcttggataattctaaagcacagaaaaggcaataatgcacatgaaaaccctaaagaagtggctatccatttacattctcaaggaggcagcagcgttcatccccgaactctgcaaacaaatgaagaaaatagcagggtccttccttgacaaagtactatacagctgaagaacatctcgaatacaattttggtgggaaaggagccaattgatttcaacagaatcagatctgagcttcataaagtctttgaagtgacttcacagagacgcagacatgtgcacttgaagatgctgccccttccctggtacctagcaaagctcctgcctctttgtgtgcgtcactgtgaaacccccacccttctgcctcgtgctaaacgcacacagtatctagtcaggggaaaagactgcatttaggagatagaaaatagtttggattacttaaaggaataaggtgttgcctggaatttctggtttgtaaggtggtcactgttcttttttaaaatatttgtaatatggaatgggctcagtaagaagagcttggaaaatgcagaaagttatgaaaaataagtcacttataattatgctacctactgataaccactcctaatattttgattcattttctgcctatcttctttcacatatgtgtttttttacatacgtacttttcccccttagtttgtttccttttattttatagagcagaaccctagtcttttaaacagtttagagtgaaatatatgctatatcagtttttactttctctagggagaaaaattaatttactagaaaggcatgaaatgatcatgggaagagtggttaagactactgaagagaaatatttggaaaataagatttcgatatcttctttttttttgagatggagtctggctctgtctcccaggctggagtgcagtggcgtaatctcggctcactgcaagctccgcctcccgggttgacaccattttcctgcctcagcctcctgagtagttggccttaccagtagatgggactacaggcacctgccaac

SEQ ID NO: 803 - DNA, 3821 bp, Homo sapiens
ccatggtaggagcgctcgcctcgctgcggtgcccgctgaggccatgccggggccccggcgccccgctggctcccgcctgcgcctgctcctgctcctgctgctgccgccgctgctgctgctgctccggggcaagccacgcgggcaacctgacggtagccgtggtactgccgctggccaatacctcgtacccctggtcgtgggccgcgcgtgggacccgccgtggagctggccctggcccaggtgaaggcgcgccccgacttgctgccgggctggacggtccgcacggtgctgggcagcagcgaaaacgcgctgggcgtctgctccgacaccgcagcgcccctggccgcggtggacctcaagtgggagcacaaccccgctgtgttcctgggccccggctgcgtgtacgccgccgccccagtggggcgcttcaccgcgcactggcgggtcccgctgctgaccgccggcgccccggcgctgggcttcggtgtcaaggacgagtatgcgctgaccacccgcgcggggcccagctacgccaagctgggggacttcgtggcggcgctgcaccgacggctgggctgggagcgccaagcgctcatgctctacgcctaccggccgggtgacgaagagcactgcttcttcctcgtggaggggctgttcatgcgggtccgcgaccgcctcaatattacggtggaccacctggagttcgccgaggacgacctcagccactacaccaggctgctgcggaccatgccgcgcaaaggccgagttatctacatctgcagctcccctgatgccttcagaaccctcatgctcctggccctggaagctggcttgtgtggggaggactacgttttcttccacctggatatctttgggcaaagcctgcaaggtggacagggccctgctccccgcaggccctgggagagaggggatgggcaggatgtcagtgcccgccaggcctttcaggctgccaaaatcattacatataaagacccagataatcccgagtacttggaattcctgaagcagttaaaacacctggcctatgagcagttcaacttcaccatggaggatggcctggtgaacaccatcccagcatccttccacgacgggctcctgctctatatccaggcagtgacggagactctggcacatgggggaactgttactgatggggagaacatcactcagcggatgtggaaccgaagctttcaaggtgtgacaggatacctgaaaattgatagcagtggcgatcgggaaacagacttctccctctgggatatggatcccgagaatggtgccttcagggttgtactgaactacaatgggacttcccaagagctggtggctgtgtcggggcgcaaactgaactggcccctggggtaccctcctcctgacatccccaaatgtggctttgacaacgaagacccagcatgcaaccaagatcacctttccaccctggaggtgctggctttggtgggcagcctctccttgctcggcattctgattgtctccttcttcatatacaggaagatgcagctggagaaggaactggcctcggagctgtggcgggtgcgctgggaggacgttgagcccagtagccttgagaggcacctgcggagtgcaggcagccggctgaccctgagcgggagaggctccaattacggctccctgctaaccacagagggccagttccaagtctttgccaagacagcatattataagggcaacctcgtggctgtgaaacgtgtgaaccgtaaacgcattgagctgacacgaaaagtcctgtttgaactgaagcatatgcgggatgtgcagaatgaacacctgaccaggtttgtgggagcctgcaccgacccccccaatatctgcatcctcacagagtactgtccccgtgggagcctgcaggacattctggagaatgagagcatcaccctggactggatgttccggtactcactcaccaatgacatcgtcaagggcatgctgtttctacacaatggggctatctgttcccatgggaacctcaagtcatccaactgcgtggtagatgggcgctttgtgctcaagatcaccgactatgggctggagagcttcagggacctggacccagagcaaggacacaccgtttatgccaaaaagctgtggacggcccctgagctcctgcgaatggcttcaccccctgtgcggggctcccaggctggtgacgtatacagctttgggatcatccttcaggagattgccctgaggagtggggtcttccacgtggaaggtttggacctgagccccaaagagatcatcgagcgggtgactcggggtgagcagccccccttccggccctccctggccctgcagagtcacctggaggagttggggctgctcatgcagcggtgctgggctgaggacccacaggagaggccaccattccagcagatccgcctgacgttgcgcaaatttaacagggagaacagcagcaacatcctggacaacctgctgtcccgcatggagcagtacgcgaacaatctggaggaactggtggaggagcggacccaggcatacctggaggagaagcgcaaggctgaggccctgctctaccagatcctgcctcactcagtggctgagcagctgaagcgtggggagacggtgcaggccgaagcctttgacagtgttaccatctacttcagtgacattgtgggtttcacagcgctgtcggcggagagcacacccatgcaggtggtgaccctgctcaatgacctgtacacttgctttgatgctgtcatagacaactttgatgtgtacaaggtggagacaattggcgatgcctacatggtggtgtcagggctccctgtgcggaacgggcggctacacgcctgcgaggtagcccgcatggccctggcactgctggatgctgtgcgctccttccgaatccgccaccggccccaggagcagctgcgcttgcgcattggcatccacacaggacctgtgtgtgctggagtggtgggactgaagatgccccgttactgtctctttggggatacagtcaacacagcctcaagaatggagtctaatggggaagccctggaagatccacttgtcttcttgagaccaaggctgtcctgggaggagtttggtggtttcgagctggagcttcgaggggatgtagaaatgaagggcaaaggcaaggttcggacctactggctccttggggagagggggagtagcacccgaggctgacctgcctcctctcctatccctccacacctccctaccctgtgccagaagcaacagaggtgccaggcctcagcctcacccacagcagccccatcgccaaaggatggaagtaatttgaatagctcaggtgtgctgaccccagtgaagacaccagataggacctctgagaggggactggcatggggggatctcagagcttacaggctgagccaagcccacggccatgcacagggacactcacacaggcacacgcacctgctctccacctggactcaggccgggctgggctgtggattcctgatcccctcccctccccatgctctcctccctcagccttgctaccctgtgacttactgggaggagaaagagtcacctgaaggggaacatgaaaagagactaggtgaagagagggcaggggagcccacatctggggctggcccacaatacctgctcccccgaccccctccacccagcagtagacacagtgcacaggggagaagaggggtggcgcagaagggttgggggcctgtatgccttgcttctaccatgagcagagacaattaaaatctttattccagtgaaaaaaaaaa

SEQ ID NO: 804 - DNA, 4688 bp, Homo sapiens
cgacgccccgggccgcccgcccgtccgcttgccaaccatggagctggaggacggtgtggtgtatcaggaggagcccggcggctccggggccgtgatgtcggagcgggtgtccggcctggccggctccatctaccgcgagttcgagcggcttatcgtgcgctatgacgaggaggtggtcaaagagctgatcccgctggtggtggctgtgctggagaacctggactcggtgttcgcgcaggaccaggagcaccaggtggagctggagctgctgcgggacgacaacgagcagctcatcacccagtacgagcgagagaaggcgctgcgcaagcacgctgaggagaaattcattgaatttgaagactctcaagaacaggaaaaaaaggacttacagacccgagtggaatctttagaatctcaaacaagacaacttgagctgaaagcgaaaaactatgctgaccagattagcatacttgaagaaagagaagcagaactgaagaaggaatataatgcattacatcaaagacacactgagatgatccataattatatggaacatttagaaagaacaaaacttcatcagctctcagggagtgatcaactagaatccacagctcatagtagaattagaaaagaacgccctatatcattaggaattttcccattacctgctggagatggattgcttacacctgatgctcagaaaggaggagagacccctggatctgagcaatggaaatttcaggaattaagtcaaccacgttctcataccagcctgaaggatgagctttctgatgttagccaaggcggatctaaagctaccactccagcatcaacagctaattcagatgtggcaacaattcctactgatactcccttaaaggaagaaaacgaaggatttgtgaaggttacagatgcgccaaataaatcagagataagcaaacacattgaagtacaggtagcccaggaaactagaaatgtatctactggctctgctgaaaatgaagaaaagtcagaagttcaagcaatcatcgaatctactcctgagctggatatggacaaagatctcagtggatataaaggttcaagcactcccaccaaaggcatagagaacaaagcttttgatcgcaatacagaatctctctttgaagaactgtcttcagctggctcaggcctaataggagatgtggatgaaggagcagatttactaggaatgggtcgggaagttgagaatcttatattagaaaatacacaactgttggaaaccaaaaatgctttgaacatagtgaagaatgatttgatagcaaaagtggatgaactgacctgtgagaaagatgtgctgcaaggggaattggaggctgtgaagcaagccaaactgaaactagaggaaaagaacagagaattggaggaagagcttaggaaagctcgggcagaagctgaagatgcaaggcaaaaagcaaaagatgacgatgatagtgatattcccacagcccagaggaaacggtttactagagtagaaatggcccgtgttctcatggagcgaaaccagtataaagagagattgatggagcttcaggaagctgttcgatggacagagatgattcgggcatcacgagaaaatccagccatgcaggaaaaaaaaaggtcaagcatttggcagttttttagccgacttttcagctcctcaagtaacacgactaagaagcctgaaccacctgttaatctgaagtacaatgcacccacgtctcatgttactccgtccgtcaagaaaagaagcagcaccttatctcagctccctggggataagtccaaagcctttgatttccttagtgaagaaactgaagctagtttagcctcacgcagagaacaaaagagagagcagtatcgtcaggtaaaagcacatgttcagaaggaagacggtagagtgcaggcttttggctggagtctgcctcagaagtacaaacaggtaaccaatggtcaaggtgaaaataagatgaaaaatttacctgtgcctgtctatctcagacctctggatgaaaaagatacatcaatgaagctgtggtgtgctgttggagtcaatttatctggtgggaagaccagagatggtggttctgttgttggagcaagtgtattttacaaggatgttgctggtttggatacagaaggcagtaaacagcgaagtgcctctcagagtagtttagataagttagatcaggaacttaaggaacagcagaaggagttaaaaaatcaagaagaattatccagtctagtttggatctgtaccagcactcattcggctacaaaagttcttattattgatgctgttcaacctggcaacatcctagacagtttcactgtttgcaactctcatgttctgtgcattgcaagtgtgccaggtgcacgagaaacagactaccctgcaggagaagatctttcagaatctggtcaggtagacaaagcatctttatgtggaagtatgacaagcaacagctcagcagagacagacagcctgttaggaggcatcacagtggttggttgttctgcagaaggtgtgacgggagctgccacttcccctagtacaaatggtgcttctccagtgatggataaaccaccagaaatggaagcagaaaatagtgaggttgatgaaaatgttccaacagcagaagaaagcaactgaagctacagaagggaatgcggggtcagctgaagacacagttggacatctcccaaactggcgtctacacagagcatgtctttacagatcctttgggaagttcagatcccagaagacctctccccagtgtatcagtcgagcaatgactcagatgcatataaagatcaaatatcagtactgccaaatgaacaagacttggtgagagaagaagcccagaaaatgagtagtcttttaccaactatgtggcttggagctcaaaatggctgtttgtatgtccattcatctgtagcccagtggaggaaatgtctccattccattaaacttaaagattcgattctcagtattgtacacgtgaagggaatcgtgttagtagccctggctgacggcacccttgcaatctttcacagaggagtggatgggcagtgggatttgtcaaactatcacctcttagaccttggacggcctcatcattccatccgttgcatgactgtggtacatgacaaagtctggtgtggctataggaacaaaatctatgtggtgcagccaaaggccatgaaaatagagaaatcttttgatgcacatcccaggaaggagagccaagtgcgacagcttgcgtgggtgggggatggcgtgtgggtctccattcgcttggattctacgctccgtctctatcatgcacacacttatcaacatctacaggatgtggacattgagccttatgtaagcaaaatgttaggtactggaaaactgggcttctcttttgtgagaattacagctcttatggtgtcttgtaatcgtttgtgggtggggacaggaaatggtgtcattatctccatcccattgacagaaaccgtaatcctccaccagggacgtttactggggctgagggcaaataaaacctcaggtgtaccaggaaatcgtcctggaagtgtaatccgtgtatatggtgatgaaaacagtgataaagtgactccagggacatttataccctattgttcaatggcacatgcacagctttgcttccatgggcaccgggatgctgtgaaattctttgtggcagtcccaggtcaagtcatcagcccacaaagtagcagtagtggcacggatctgacgggtgacaaaggcaggggccatctgcacaggagcctggtagtcagacgcccttgaagtctatgcttgtcatcagtggaggagagggctacatcgacttccgaatgggtgatgaaggtggagaatcagaacttcttggagaggatcttccacttgaaccttctgtcaccaaagcagaaaggagtcacttgatagtgtggcaagtgatgtatgggcaatgagtgagcccatgggaaacaggttggaagatgggggaagccgtctcttctgcatggtttatttttccctctatcctttttattttaatggtctttttgtggagataagtttccaccacataatgtgtgaagcatttttttcctgttaactttatattaccaaaatcccgttcttacccataaccaatacagaggaactagctgtgttactgcaccagtgttataggtaacttcagtatattatgaacaaatccaaagaatgtttacttccccgcaaactgggtgaattatagaaagccaatcccagatgtggtttactctgccacgagtctaatgtcattcacttcattttgatggggtcacttggttagctgtccacctaataatgggaattaatgggaaacactttgataaatgaaactgtacccgttaaatacaatagcctgagttttcccccagtgtattgtaaaattgacacacactaattacaagatggattatcgaggatgtatctaaatgtcccgagagggttaaaagctaactgtaaattactttaactttcactttcaaatctgacaaatcttgtttatatggtatataaaactttgttttcatcagatttgggggggttttatattaaagaaattaagactacactatttaaataaacgtttcctgtttctgactta

SEQ ID NO: 805 - DNA, 3120 bp, Homo sapiens
ggttgaaaggctgcatgtactcagaagatttgcaagcaacactccaattcttgtcatagagctcgcagacttctcacttatcggcttttttccttccttattttttaagaattattcttattttcccctctctttttctgctctctcctctctcagtctctccttttctatctgcctcttcatttttctcctagtctgttttttttttcccggctctgcacctggattgtatcttcagcaaacaatcgggcactttgagaactaactggagacagtcttgtagggaagatctgtatggaattatctgcttttatggtgaacttggcatttgtgaatgggaatcttgttcacaatattaattgctagcaaaaacaagaaaaagaacacaggagtaaaacgtggatttttctgaatacgcattgtgatgaccagcaattaccttaccgactaatatccagaggagaataatttggaagactgttgtggggaacagcctttaagagctggaagatgaaagctccgattccacacttgattctcttatacgctacttttactcagagtttgaaggttgtgaccaaaagaggctccgccgatggatgcactgactggtctatcgatatcaagaaatatcaagttttggtgggagagcctgttcgaatcaaatgtgcactcttttatggttatatcagaacaaattactcccttgcccaaagtgctggactcagtttgatgtggtacaaaagttctggtcctggagactttgaagagccaatagcctttgacggaagtagaatgagcaaagaagaagactccatttggttccggccaacattgctacaggacagtggtctctacgcctgtgtcatcagaaactccacttactgtatgaaagtatccatctcactgacagtgggtgaaaatgacactggactctgctataattccaagatgaagtattttgaaaaagctgaacttagcaaaagcaaggaaatttcatgccgtgacatagaggattttctactgccaaccagagaacctgaaatcctttggtacaaggaatgcaggacaaaaacatggaggccaagtattgtattcaaaagagatactctgcttataagagaagtcagagaagatgacattggaaattatacctgtgaattaaaatatggaggctttgttgtgagaagaactactgaattaactgttacagcccctctgactgataagccacccaagcttttgtatcctatggaaagtaaactgacaattcaggagacccagctgggtgactctgctaatctaacctgcagagctttctttgggtacagcggagatgtcagtcctttaatttactggatgaaaggagaaaaatttattgaagatctggatgaaaatcgagtttgggaaagtgacattataaattcttaaggagcatcttggggaacaggaagtttccatctcattaattgtggactctgtggaagaaggtgacttgggaaattactcctgttatgttgaaaatggaaatggacgtcgacacgccagcgttctccttcataaacgagagctaatgtacacagtggaacttgctggaggccttggtgctatactcttgctgcttgtatgtttggtgaccatctacaagtgttacaagatagaaatcatgctcttctacaggaatcattttggagctgaagagctcgatggagacaataaagattatgatgcatacttatcatacaccaaagtggatcctgaccagtggaatcaagagactggggaagaagaacgttttgcccttgaaatcctacctgatatgcttgaaaagcattatggatataagttgtttataccagatagagatttaatcccaactggaacatacattgaagatgtggcaagatgtgtagatcaaagcaagcggctgattattgtcatgaccccaaattacgtagttagaaggggctggagcatctttgagctggaaaccagacttcgaaatatgcttgtgactggagaaattaaagtgattctaattgaatgcagtgaactgagaggaattatgaactaccaggaggtggaggccctgaagcacaccatcaagctcctgacggtcattaaatggcatggaccaaaatgcaacaagttgaactccaagttctggaaacgtttacagtatgaaatgccttttaagaggatagaacccattacacatgagcaggctttagatgtcagtgagcaagggccttttggggagctgcagactgtctcggccatttccatggccgcggccacctccacagctctagccactgcccatccagatctccgttctacctttcacaacacgtaccattcacaaatgcgtcagaaacactactaccgaagctatgagtacgacgtacctcctaccggcaccctgcctcttacctccataggcaatcagcatacctactgtaacatccctatgacactcatcaacgggcagcggccacagacaaaatcgagcagggagcagaatccagatgaggcccacacaaacagtgccatcctgccgctgttgccaagggagaccagtatatccagtgtgatatggtgacagaaaagcaagggacatcccgtccctgggaggttgagtggaatctgcagtccagtgcctggaactaaatcctcgactgctgctgttaaaaaacatgcattagaatctctagaacacgaggaaaaacagggtcttgtacatatgttttttggaatttctttgtagcatcagtgtcctcctgttttaccatgtcttttaccattacattttttgactttgttttatatgtcgttggaatttgtaaatttacattttttttaaagaagagactgatgtgtagatagaaaaccctttttttgcttcattagtttagttttagaatgggtttttattttatttccttttttaaaattttactttgcttttaacatttccttggggtgcttggacaaatctatccgatgggacaaggagcaccggattctttctcgggttctgcctagcatcaactgggccacgtcggccttcagagaacagtgcaacaaatgccagcattgccattcgggggaaaaaaaaaa

SEQ ID NO: 806 - DNA, 1715 bp, Homo sapiens
cgaattcggcacgaggaggagttggcgtccggggagcaagggccatggccaccgtgcaggagaaggctgctgcgctgaacctctcggctctccacagccccgcgcacaggcctccgggtttcagtgtagctcagaagccatttggagccacgtatgtatggagcagcatcataaacactcttcaaacacaagtggaagtgaaaaaacgaaggcaccgtttaaaacgacataatgactgctttgttggttcagaagctgtggatgtcattttttctcacctaattcagaataagtattttggtgatgtagatattcctcgagccaaagtggtgagagtgtgtcaagcgcttatggactacaaagtatttgaagcagttccaaccaaagtctttggaaaagacaaaaaacctacatttgaagatagtagttgcagcctttatagattcaccacaatacctaaccaagacagtcagttaggcaaagagaacaaactatattcacctgccaggtatgcagatgcattatttaagtcatccgatatcagatcagccagtttagaggacctgtgggaaaatctgagtttaaagcctgccaactcccctcatgtaaatatctctacaaccttgtctccacaagttattaatgaagtgtggcaagaagaaacaattgggcgtctactacaacttgtagaccttccacttcttgactccttactgaaacagcaagaggctgtacctaaaattcctcaacctaagaggcagtccaccatggtcaacagcagtaactatctggatcgagggattctcaaggcttatagtgactctcaggaagatgagtggctctcggcagcaattgactgtttagaataccttccagaccaaatggtggtggaaataagcagaagctttcctgagcaaccagaccgaacagacttagtgaaagaacttctgtttgatgccattggcagatattacagtagtagggaacctctgttaaatcacttatctgatgttcataatggaattgcagaactcttagtgaatgggaagacggaaatagctttagaagctacccagctccttctaaagcttttagatttccaaaatagagaagaatttagaagactactgtatttcatggctgttgcagcaaatccttctgagtttaaattacagaaagaaagtgacaaccgaatggttgtgaaaaggatattctcaaaagctattgttgacaataaaaatttatccaaaggcaaaacagatcttctggtactctttttaaatggatcatcagaaagatgtttttaagattcctggaactctcacataaaattgtaagtggttaagccttatggccatacagaacggaagagatccaaatagagatgcaggatatatctattgccagagaattgatcaacgtgactattccaacattacagagaagacaaccatagatgagctgttgtatctactaaaaactcttgatgaggattcaaaactttctgccaaagagaagaaaaaatttgctaggtcaattctataagtgtcacccagacatctttattgagcattttggagactgagtttttaatatctgtatataagttgtgtattttaagaataaattatgtatcctaaatatccaatcacatttgtaagcgtggaagctctaaatttgaaactgtactcccataaaaatttttttgtataaaa

SEQ ID NO: 807 - DNA, 4428 bp, Homo sapiens
ttttttttttttctccaaaattagtttttaatacattcaggtaggttatacaaagagttggtcccgaggcctgggctgaggcctgggccctgggaagtgacagcagccctgtgtagtgttttcaaagatcaggcgtggggacccacaccttggcctccaggcctaaggaggagtgttacgtgcagtagcacccgtgggtgtgatcccaaccaggactgggtctgcctgggtgctccacacaccaccagggcctagccctggctctgcccattgactctcccttaacttcctctgggccttggtgttctcctctgtaaaatggggtggagagagtggcattttcactttctcgcacattactgagcccacatcatgagccagactgtgggccaagcacaggtaagatgatgaagacagcaaaacaaggtcttgagttggtcccagcacgtccattcttcccagacagctcatgactccatggtatgagggatgggggtcatctgggtgaggctttttacctgtttttgtaagagggaaaaaagatccttgcatgatgaggcacagaaaggaagtttggagccagcattatcttgtgatgtgatagctgagagaggacatcactctggtccaacccccaatctcaccccacaaataagggctcttttttcccccagaggctctgtataagctctccacaagtttcattctcttcctaagcctcagtttccccatctgtgcaatggggaggttggattccatagtctcaaactccaggctctgctcaatagaggaaaagggaatgagagaatgcaagagcacagagagaacaggagaacccacaccagggtggaaaggaagggaggagggaaacaggcagagaaggaggagagcgcctgcagctgcctgcctgggagagaggagagagcaggtgtgcacagcacaggatgcttccagaccctgctcgggctatgtggggccacttcctgtccacttaacggcctgcagcccctgcagtggtaaagatcaggccctggagacagaaggatgaaggtttgaatctcacctatggcattagttagctggggccctggaaggagattttcagaacttcagtttcctcttttataaaacggggataaaatatagagatgtcacataggggcagacacaaggcttggattcaaatccacatctgccaagctgggtgcaaaacagaaccagatatctaaggttttagctcctggctcagcagccaaggtggggctgcgatggagaagtggggctgggcagggacggtgcttaaagcagcactggggtcagggtatgcaacatgagagtgccaggaagggagaaggcaagtccagagcaggagacggaatggtccagtgctgggctggaccccttaaccagaccctgctggagccgccgtggcccacctaacaacaccagatccgagacacactcgtacagctccaattctctcttccggtcctaagcttttcattttcagagagactgaaagtcattctcagaagacgtgacaaacagtctgcttggaaatgtctcagacaaatcctcctgggcttggccctccctcaccctggcacagccggggcaggactcaccgcaccaaaccagcggggcctgccgagctctggagccctgggctttcacacctcaggccctaagcacactgcgtggcggccacgtggctctgcagcactctctcctaccagactgggagattcttgagggcgggaatgtatctcatttcccagcattcccagtgcccagagcagggtgtggcacaaaatacatgctcagtgaagatttgttgatctgacaggtcaacattattctcggctgtcccctgaaaccgcccaaacttctggcttccacagctggacccaaagtgcagcccgggaagggggtcacccactgatgcagcaggcggcagagaaaggtgtcctgggctgtaatttggagaccagagttctgggatcccggatcactgtgtgaccttgagtcagtcctcactcttctctgtacctcaggctcccccactgacctagagtgtctcccggcttctttaggctttatactgttggttaaacttctgccggcggacgcagcagcaggcggccagcgtggtgaggaggatggcagagaccagtatgaaggtgaggatgatgatgaggttgatgttcttcagtccccccttctcacagtcctcgggacgcacgtggctcagggacacctcctcctgggagctgaagcggcagatcaggtcctgggtggcgtccacgtccacacggccctggtgcagctgggctgccagccagccattgccgcagcagctgagtggattcccctgcaggtagaggcgccggaggctggtctccaggccacccatggcactgcctggcaggaggctgaagctgttgtttcgcaggtccagcacctccagtgacacagcctgtgtccaggcgggaaggtggctcaggcggttctcggcaagattgagccgcttgaggcagatgaagcagggcaggtccacctgcaggaccatcagcccgttgccctgcagtgccaggacctccaaggaggcctccaggcctcccaaggcccccgtggccacctccagcccaggattggaagaaaggtccagctcagtcagtggggtgtggaggaaggcccctgccctgagcagctctatctcattatccaccaggctcaggctgcggagggaggtgatgccggagaaggcccacacagccggaagggcccaggctcatctgggcccccacaggggctgactcggttcccctgcaggttgagccgctgcaggctggccagattggcaaaggtgtatgggggcaggtcccgcagggcattgccctgtaggagcagcgtccgcagagacccccagggctctggcgcccagttccagtgtctccagggcattgtggcttaagtcaaggagcatcaggcagggcagggagcctaagcgccgggcctcaaaggtccgcaagcagtttctgctgaggttcaggaagcacagggaggtcaggtgctcaagaaagctgtcggggatgagctcaatctcattgtagctcaaatccagattcaagagctgggaaagggggcggccgctggcattcccgctgggggctggagaggggcagggctgaccagccctcggaaggtgcgtggatgcccttgctgtcctggggtggccctgtggggagccggatgaggttgttggacaagttcaggtagatgagtctcgggagcgcggccaggtcggggaaatggagcagtttgttctcccgcaggtcaagccaggtgagctggaactcagcctggggctggcgaggccgtctgaaaggcctcgatgctgttgcagctcaggtctagcacccgcagctgctggaggctgaagtcggagatgcaggtgagggaattcctggagaggttgagatgggtcaggcggggcaggccctcgaaggcgccatcctcgatgtccatcagcacgttgctatgcaggtcaagctgctccagcgcaggcatgtcccggaaggtgtggcgggtgaggcgagtcagactgttctccgccagtgagagggtatgcaggctgggtgcctcccccagcagccgctccagcaggccgctgtacaggctgttcccagacaggtccagggaggtcacgcgtggcagggggcccaggccaccagcactcagcgcagtggccatcgccagccggttgtgagccaggctgaggtgctccaggtgggtcagggcctggaaggctcctggctggaggaagctgatctcattggtgctcaggtccaggtgacgaagtgccgtgtagaagcccaggggtgaggccaggatactccgcagctggttcccagatagatcaagggtctcagtgtctggcgggagcaccgaggggacctggagcaggcccagaacctggcacgagaccttcttgtccaccctgtctgggcagagcatcttaccatcttacagggcactttgtcttggtgttgtgcagccaggcctagggtcagcagggccaggagcagcaggatctggggtctcatggctccaaagtcacacaaggagaaaatagcagggtcacgatcagaatccagttcatctgtctccaaagcaaatgttcccactataccaaatcaaggtctccttccctaagccctgccaacgacccctcacacgcaggagcagggcagactagctcacagtctggcctctgaggtcctctctccctcctctcggcctcagctgacttactggcagagtggggtcctgggagagctgctgcggacgttcctgtcaagcagtgaatcactaagggcaagcctcgatctggagacatgtgcatcccacgggggaattagaccttaa

SEQ ID NO: 808 - DNA, 3735 bp, Homo sapiens
ttttttttttttagcaacacttttcttgtttgtaaacgcgagtgaaccagaaagtgtgaatgcggagtaggaatatttttcgtgttctcttttatctgcttgccttttttagagagtagcagtggttcctatttcggaaaaggacgttctaattcaaagctctctcccaatatatttacacgaatacgcatttagaaagggaggcagcttttgaggttgcaatcctactgagaaggatggaagaaggagccaggcaccgaaacaacaccgaaaagaaacacccaggtgggggcgagtcggacgccagccccgaggctggttccggagggggcggagtagccctgaagaaagagatcggattggtcagtgcctgtggtatcatcgtagggaacatcatcggctctggaatctttgtctcgccaaagggagtgctggagaatgctggttctgtgggccttgctctcatcgtctggattgtgacgggcttcatcacagttgtgggagccctctgctatgctgaactcggggtcaacatccccaaatctggaggtgactacttttatgttaaggacatcttcggaggactggctgggttcctgaggctgtggattgctgtgctggtgatctaccccaccaaccaggctgtcatcgccctcaccttctccaactacgtgctgcagccgctcttccccacctgcttccccccagagtctggccttcggctcctggctgccatctgcttattgctcctcacatgggtcaactgttccagtgtgcggtgggccacccgggttcaagacatcttcacagctgggaagctcctggccttggccctgattatcatcatggggattgtacagatatgcaaaggagagtacttctggctggagccaaagaatgcatttgagaatttccaggaacctgacatcggcctcgtcgcactggctttccttcagggctcctttgcctatggaggctggaactttctgaattactgtgactgaggagcttgttgatcccttacaagaacctttcccagagccatcttcatctccatcccaactggtcacatttgtgtatgtctttgccaatgtcggctttatgtcactgcaatgtccccccaggagcttgctggcatcagaacgccgtcgctgtgacttttggagagaagctcctaggagtcatggcctggatcatgcccatttctgttgccctgtccacatttggaggagttaatgggtctctcttcacctcctctcggctgttcttcgctggagcccgagagggccaccttcccagtgtgttggccatgatccacgtgaagcgctgcaccccaatcccagccctgctcttcacatgcatctccaccctgctgatgctggtcaccagcgacatgtacacactcatcaactacgtgggcttcatcaactacctcttctatggggtcacggttgctggacagatagtccttcgctggaagaagcctgatatcccccgccccatcaagatcaacctgctgttccccatcatctacttgctgttctgggccttcctgctggtcttcagcctgtggtcagagccggtggtgtgtggcattggcctggccatcatgctgacaggagtgcctgtctatttcctgggtgtttactggcaacacaagcccaagtgtttcagtgacttcattgagctgctaaccctggtgagccagaagatgtgtgtggtcgtgtaccccgaggtggagcggggctcagggacagaggaggctaatgaggacatggaggagcagcagcagcccatgtaccaacccactcccacgaaggacaaggacgtggcggggcagccccagccctgaggaccaccattccctggctactctctccttcctcccccttttatcctacctccctgccttggtcccgccaacacatgcgagtacacacacacccctctctctgcttttgtcaggcagtggtaggactttggtgtgggtggtgtgagaaattgtaaacaaaaactgacattcatacccaaagaaccagcctctcaccccagggtccatgtcccaggccccactccagtgctgcccacactcccagctgctggaggagaggggagatgccaaggtgccctgcaggacctccctccgggccacaccctcagctgcctcttcaggaaccggagctcattactgccttccctcccagggaggccccttcagagaggagaggccacaggagctgcattgtggggggacaggctcaagcaattctgtccccatcaaggggtcagctggagagacccaagaccctatctgttcaccagggacccaaaatccaaggggatgcttccctctgccctctttcctgcccctccccatcatacctgcacccaccccagccagggctccctgtccagaattcggttctcctcaggacgccaactcccagagctaaggaccaaggagaagaacagcctctccacccccaagccaggcggttgaggaacatattgagaaaggttcagattgcagaaacccagccctgcccctgcctcctgcatccagcccccaacatggtgccaaagcttccagaagccaaaaagcttctgatttttaaggtagtgggcatctctctcctaatgacgaagctgctcagcaactccacctgcccgccgcaggaaggagcagtcccctgctatccctgcagccactcccagcacacccgcacacagccagcaccaccgcccccaccgtgcacttctcctctctgggccttggcttgggaccaggtacgaaggatccccaagcccttcaggcctgagatcagagccagatcagccttaagtcacctcccatccaagaacttggcctaaaaatactcccctatttctaaccctcaggacggatctgatattaaatgccttccctgggaggaagggtgctttccccctccctagaggtgcccattccataccctgggagactgaggagagcattggctgaagcccagttcctttcccatccatccccaactccaataatcccccactcctcgcaggtctcagtgtcatgctgtcttggggcagggtgaaagggtagtggcagcagggcgcccactctggagatcctcaaaaaaggccctcctctgtggctggcagcctctgacctttccctgggcttcaaaggaaggctatggagtttgctgtgggccctgcaaccttcccagccactcctgctgcactaaggacttaggatccttttatcacaaatcgggattctctcccccaccccgaattctgtctgcttaaactggaatacacaggagcccttcctggcctggatggtgtctcccagcttccccgcccagcttgcccaccccatagttggtgagatgccaagtttggtctgagttgtgaccccttcagagtagatgcccggcaggctggggttggcccctggagggtcaggggaccatcttcttattccctcttttctcattcctccaacttcctcccctccttcaattatttttttgtaaagttgatgccttactttttggataaatatttttgaagctggtatttctatttcttttggattttttttaatgtaaggttgttttgggggatggagttagaaccttaatgataatttctttcgtttggtgtaggttttagagatttgttttgtggagaggttttttttcttttgatgtaataaaatttaaaatggaaatg

SEQ ID NO: 809 - DNA, 1165 bp, Homo sapiens
ttttttttttttagtttaaaaaatatttattatagaaatgtacatttaattagttttaaggaatgtacctgaccacagtgttaatatatatttcttcaaatttgcaaactttacacctttaagatatctacaaagatgatagtttatttacaagttttacaagaaatgatcacttcacaatactgttgacacagttacgattgaatcttcttctcactttttatttcactctgtacttatagaaagaacagagagtatgggtgaagttccatcccagtgccagggaaagcccgtagagcagaatcagaggtgcaaatggatacagaagaattactgtatttttcaaaaatggcaatgctggaaaagaaaaggagtccaacactgtatcccaggaaagttacatagatataatagccaactgcaaccaaccataaggtatttccaactaaatatccaataaatgtgtctgtcaggataacatggttgatgaaaaaaagctggataaaatgcaaaatgaccaggagtggataaaaagcattgagatgcacatcaaaagcatagccccattccacatcatagtctctgctctgtcgtttcactaaatacttgttagagatgaaccacattaaagttgctatcagaagaccaacgcctacacaatctatgagtacaacccaaaggagaagctttattgtctcaaagaatcccatgtccagcacaaagccaaatcctatagtggacacacagagccagatacttaacaggaccaagaaagcagggtcatctctggcccactggtccttcgtctgttttcgataatgaaaatttctgtaaactctctgtggggatgtgaacaggtagagcatctgccaggcagcaaattcaaagtccatttgccgaaagcggaaaagccttctcagatatttgtagcgtttcgctccggctgtgtgtcttgccgcatccctggaattcaagactccgttcccctgcactaaggaattcactgaagtactcggtaacatcttcctggagtcctgctacagcctcgacccacgtccgaaccagcccaccacctcctcccagcagccgaccccagccgccaccgggcgggcttcccttccctcaacggagccggcccttggggcgcgccgcgtcacgggaaccg

SEQ ID NO: 810 - DNA, 1103 bp, Homo sapiens
ctgagcagtgggctgcttaggaagagaaggtcagagttcgcgggggcagaggcattcttgccgctggcccagtcactatgtagtggaggggcagacaccctcccgcaaattctggaaggttcttagtctcgactagggcagtagccccaggactcctagtcgccggcttcaggtcactgccggctgaacggagctgccgtcgccatgtttggctgcttggtggcggggaggctggtgcaaacagctgcacagcaagtggcagaggataaatttgtttttgacttacctgattatgaaagtatcaaccatgttgtggtttttatgctgggaacaatcccatttcctgagggaatgggaggatctgtctacttttcttatcctgattcaaatggaatgccagtatggcaactcctaggatttgtcacgaatgggaagccaagtgccatcttcaaaatttcaggtcttaaatctggagaaggaagccaacatccttttggagccatgaatattgtccgaactccatctgttgctcagattggaatttcagtggaattattagacagtatggctcagcagactcctgtaggtaatgctgctgtatcctcagttgactcattcactcagttcacacaaaagatgttggacaatttctacaattttgcttcatcatttgctgtctctcaggcccagatgacacccaagcccatctgaaatgttcattccggcaaatgtggttctgaaatggtatgaaaactttcaaagacggactagcacagaaccctctcttttggaaaacataatttggattaaaataaatttttaatggattctgaaatttgtcatgttttgaagataactgactccatctaaaagtatgaggtcaaaggatcacgaaacctaagtttaaaaactgcttagagactgaagcttaattaaaaatctttattaaaaattaaaaacattgaaaaatgaaaatatgttcatcattaaagacttttttccccttaagcttaaaataccattcaaaggcaagacattttgttttggctatgattcattttttttacttaaaaataaaacctataccaaacagtaaaaaaaat

SEQ ID NO: 811 - DNA, 3367 bp, Homo sapiens
gcacgagggaaaactaactggaaggaagtttaaatacagaaagagcaaagtattatctaactataacaatgccacattttactgtgactaaggtagaggacccagaggagggggcagcggcttcgatctctcaagagcctagtttagcagacataaaagcccggattcaggattcagatgaaccagacctgagtcagaactccatcacaggggaacacagccaactgttagacgacggacataagaaagctcgaaatgcttatctcaataattccaattatgaagaaggagatgaatattttgataaaaatttggcactctttgaggaagaaatggacaccagaccgaaggtgtcttccctcctcaaccgcatggccaattacactaatctgactcaaggagcaaaggaacatgaagaggcagaaaacatcactgaagggaaaaagaagcccaccaagaccccccaaatgggtaccttcatgggtgtctacctcccatgtctacaaaatatttttggagtgatcctttttttacgccttacatgggtggtgggcacagctggagttcttcaggcttttgcaattgtccttatctgctgctgctgtacaatgttgactgctatctccatgagtgccattgccactaatggagtggtgccagctgggggctcatactttatgatttcccgggcactgggcccagagtttggtggggctgttggcctctgcttttatcttggtaccacatttgcagcagccatgtacatccttggtgccattgaaatctttctggtctatatcgtcccccgagctgccatctttcacagtgatgacgcactcaaggaatcagcagccatgctaaataacatgcgtgtctacggcacagctttcttggtccttatggtattagtggtatttatcggcgtacgctatgtgaacaagtttgcctcacttttcctggcctgtgtcattgtgtccatcttggccatctatgctggagccatcaagtcttcttttgctcctccacacttcccggtctgcatgctgggtaaccgcaccctttcatcaagacacattgacgtttgctctaagaccaaggaaattaacaacatgacagtcccatcaaagttatggggattcttctgtaactcgagtcaatttttcaatgccacctgtgatgaatactttgttcacaataacgtcacttcaatccagggcattcctggattggctagtggtataattacagagaatctttggagtaattacctacccaagggagagatcatcgaaaagccttcagccaaatcttctgatgtcttaggcagcttaaaccatgaatatgttcttgttgacatcaccacctccttcacgcttctggtgggaatcttctttccctctgttacaggtatcatggctggatcaaacagatctggagatctgaaagatgctcagaagtctattccgattggtactatccttgccatcctgaccacctcctttgtttatttaagcaatgttgtcctttttggtgcatgtattgaaggggttgttctcagagacaagttcggtgatgctgtgaaaggtaatttggtggtaggcaccttatcttggccatccccatgggtgattgttattggctccttcttttcaacatgtggggctggacttcagagcctcacaggtgcaccgaggctgctacaagctattgccaaggataacatcataccgtttctgagggtttttggccacagcaaagccaatggggaacctacctgggctttacttctaactgctgccattgcagagcttggaatactcattgcctccctggatcttgtggccccaattctttccatgttttttctcatgtgttacctctttgtaaacttggcatgtgccttgcaaacattacttcgaacacccaactggagaccccgattccgctactaccattgggccctttctttcatgggaatgagtatctgtctggctctgatgttcatttcttcctggtattatgccattgtagccatggtaatagctggtatgatctacaagtacattgaataccaaggagctgagaaagaatggggtgatggtatccgtgggctgtccctcagtgcagcccggtttgctttgcttcgattggaggaaggacctccacacactaaaaactggaggcctcagttgcttgtattactgaaactagatgaagacttacatgtcaagcatcctcgcctcctcacctttgcctcacagctcaaagcaggaaaaggtctcactattgtgggctctgtcatcgtggggaacttcctagagaactacggtgaagctttagctgctgagcagaccataaagcacctaatggaggcagagaaggtaaaaggattctgccagctggtggtggccgccaagctgagagagggcatttcccacctcatccagtcatgtggccttgggggcatgaagcacaacacggtggtgatgggctggcctaatggctggcgtcaaagcgaagatgcccgcgcttggaagacttttattggcacagttcgagtgacaactgctgcccatcttgcactgctggtggctaaaaacatctccttctttcccagcaatgtggagcaattttctgagggcaacattgatgtgtggtggattgtgcatgatggggggatgcttatgctactaccattcctactgaaaacagcacaaggtgtggcgaaagtgcagcatacggttctttcacagtagcccaattagaagacaacagtatccaaatgaagaaggacctagccaccttcctatatcacttacgcattgaggcggaggtagaagtggtggagatgcatgacagtgatatatcagcatatacttacgagcgcactttgatgatggaacaaaggtcccagatgcttcggcacatgcggctatccaaaacagagcgagacagagaggcacaattggtgaaagaccgaaactcaatgctacgattgaccagcattggctctgatgaggacgaagagacagaaacctatcaggagaaggtgcacatgacttggacaaaagacaagtacatggcatcccggggacaaaaagcgaagtcaatggaaggattccaggacctgcttaacatgcgtccggaccagtccaatgtgaggcggatgcatacagcagtgaaactcaacgaggttatagttaacaagtcccatgaagcaaagctggttttattgaatatgccagggccaccccgaaaccctgagggtgatgaaaactacatggagttcctagaggtgcttaccgagggactagagcgagtcctacttgtccggggtggtggcagtgaagtgatcaccatttattca

SEQ ID NO: 812 - DNA, 2083 bp, Homo sapiens
ggcacgcgcacgaacgcacggccgcgcagcatctgtcttgctggaagctttttcctagaggttgagcggtttgcacaatgtcggaaatggctgagttgtccgagctgtatgaagagagcagtgacctgcagatggatgtgatgcctggcgagggtgaccttccgcagatggaggtaggcagcgggagccgggagctatccctgcgtccctcccgcagcggggcccaacagctcgaggaggaaggcccaatggaggaggaggaggcccagccaatggcggcgccagaggggaaacggagccttgctaacgggcccaacgctggggagcagccaggccaggtggcgggcgcagacttcgagagcgaggacgagggcgaggaatttgatgactgggaggacgactacgactatcccgaagaggagcagctcagtggtgccggctacagagtatcagccgctcttgaagaagccgacaagatgtttctgagaacaagagaaccagccctggatggcgggtttcagatgcattatgagaagaccccgtttgatcagttagcttttatcgaagagctttttttcactgatggttgtcaatcgtctgaccgaagaactcggctgtgatgagattattgatagagagtagttagatgctgttaaaagaggaggaaactacttgaggagggacccaactttccgctatcttttgggttcattccaaatagttttgtgccattgaaaaacttgaccttcaaaaaaatttgtttttcagaatagaacacaataggacagtgactgcacagttgtgaaaaaggaagagaatcattaaagaaaaagaaaaaagattttaagaccgttgaaatcaattatcaagaacgtcctaaaacacctatggctttgactttgttattgatccagattattttccttgcattggggaaaatatctttcatatttgtttgctgtaaagatggttttgcaagaataagtcatgaccaagacaaactgccaatacaaaagcccactgatactaattatataatgagaaaaaaatgtatccaactaggacacatatcttttgagttatttggactgaaagcttaagaaaacttggaaaattctattttgtgatctagtcaagccacagttatcaaaggctacattttcagtgtaagataaatggatgagtaaactcaaatatgtatcacgtgtgctttgtatcttaagatgtgtttccaagagcatctgaaattttgtttgtacatgtatcttgatcatttataaagccactgtgatctataaatcaagaaaatccattgtcataaccatttttaaaagtcaaaaattaagacatccttaattaaaaagtttcaaatctagacactaaatgtgtgtgaatgtacaaagaaaacaaaccattgcttatgctgttatatactagagaaattttgttttgcttgctgttttaacttgacagatgaaggactttagttgaacttcatattgtaagaactgttaataaaagttgtcaagtaaaaagcgctatatctaaaaagactttatgaacagttattctatcaacttttaaaggttttaaacctgcccagaaattaccttggtatctgaagtttccctctgtctcctcctctaattaagcttgttatttgtcatgcaccagcattggagataataaaatttcttgttctgtgtattttgtttggctaatagtattgcatacatactttctctgtatactactttctattgtatgtgttaaccagtattaagggaaaatgatccagcttcagctatctaattcacaaattaatttctggaaattaaactttgtaaattaagtttttgcctataagaatttgctggtctgggaaaacctgccctatcaatgagtatgttgccgtggttaccttactaagatgctgaagttctaggagagtaatgattacatcagaaggctaggttcagcaaaataagtgtatcagcaggttttatcatgatcagtaaaaatgttccaaatgcttctgctccattatagcagtaaagaacgaatatccaatgcaaaaaaaaaa

SEQ ID NO: 813 - DNA, 2296 bp, Homo sapiens
cccacgcgtccgggcggcagccatcaggtaggctgcgttgaggatctttgctcttccatccgcctttgatcgtcttcctcttcagccatccaggtccggggaccctgcgtcctcggagataggtctccctcctgtgcggccagagtttggtcaggatgcgggacagcaaaggggtggagaggcggcccccggggcgggttgagcgaagatgtgatggcggcgcgaattcgagctgggcccggatcctggaggaggcgtggggctgacgaatggggcgcccgggacaaggcagcctaaagtgaggctgctggttgggtggggtagatgcattttcctcgagagttaatcctcggtggccgcagcagtaccttgtcctgtgatgtcagcggcatctcctttcaggtcctccttggggacgccgcctgccgcagccacccgcccccttggtgctcagttctggttctgttaattcgccccaccaaaacgtgccgagcaccgctctgtgctggggttgcggaagtgactgaacgcggctccgtgggcgcagtggtgggggttgggctagctgtccccggcagttggtgcagagccattttcattcccggcggtttccttgtttttgttggggaactaagatggacggatacagtcgtcttattgtacttaaagcggatgatatttaatacacagtttgatttcacaggtaagccaagatgggtgcatacaagtacatccaggagctatggagaaagaagcagtctgatgtcatgcgctttcttctgagggtccgctgctggcagtaccgccagctctctgctctccacagggctccccgccccacccggcctgataaagcgcgccgactgggctacaaggccaagcaaggttacgatatatatatataggattcgtgttcgccgttatatataggattcgtgttcgccgtggtggccgaaaacgcccagttcctaagggtgcaacttacggcaagcctgtccatcatggtgttaaccagctaaagtttgctcgaagccttcagtccgttgcagaggagcgagctggacgccactgtggggctctgagagtcctgaattcttactgggttggtgaagattccacatacaaattttttgaggttatcctcattgatccattccataaagctatcagaagaaatcctgacacccagtggatcaccaaaccagtccacaagcacagggagatgcgtgggctgacatctgcaggccgaaagagccgtggccttggaaagggccacaagttccaccacactattggtggctctcgccgggcagcttggagaaggcgcaatactctccagctccaccgttaccgctaatataagtaaagtttgtaaaattcatacttaataaacaatttaggacagtcatgtctgcttacaggtgttatttgtctgttaaaactagtctgcagatgtttcttgaatgctttgtcaaattaagaaagttaaagtgcaataatgtttgaagacaataagtggtggtgtatcttgtttctaataagataaacttttttgtctttgctttatcttattagggagttgtatgtcagtgtataaaacatactgtgtggtataacaggcttaataaattctttaaaaggagagaactgaaactagccctgtagatttgtctggtgcatgtgatgaaacctgcagctttatcggagtgatggcaatgctctgctggtttattttcaagtggctgcgttttttttagtttggcaggtgtagactttttaagttgggctttagaaaatctgggttagcctgaagaaaattgcctcagcctccacagtaccattttaaattcacataaaaggtgaaagctcctggttcagtgccatggcttcatggcattcagtgattagtggtaatggtaaacactggtgtgttttgaagttgaatgtgcgataaaattattagccttaagattggtaagctagcaatgaatgctagggtgggaagctggtgagccagtggccattagataaatacctttcaagtgtgagcttagacgtcaaccctaaaatacttaaccgtaatgctaattgtgatcattatgaatcccttcagtcacattaggggggaagtagttggctataagtacgtcattcttagtccagtcagtcttaaaaacatcttgggttacccactctgtccactcccataggctacagaaaaagtcacaagcgcatggtttccaaccatatgtgttttctgcagttatttctcttgttaagaccgacgtattcgaaa

SEQ ID NO: 814 - DNA, 2550 bp, Homo sapiens
tgcccgcctgctgaattcggcacgaggacacgctgaacagaattcacctcacgtccagtatgagatgggagtatgaacaaacagtcatgcagagtgatgagtgcaaacatggactataaagcggccatagagaatgaactgtgtttgtgtttagagaagacacactccccacccctgaacaggcttcttaaaagtactagaaaggaacagaaatgaataaaagtcgctggcagagtagaagacgacatgggagaagaagccaccagcagaacccttggttcagactccgtgattctgaagacaggtctgactcccgggcagcacagcccgctcacgattccggccacggtgatgacgagtctccgtcaacctcgtctggcacagctgggacctcctctgtgccagagctacctgggttttactttgaccctgaaaagaaacgctacttccgcttgctccctggacataacaactgcaaccccctgacgaaagagagcatccggcagaaggagatggagagcaagagactgcggctgctccaggaagaagacagacggaaaaagattgccaggatgggatttaatgcatcttccatgctacgaaaaagccagctgggttttctcaacgtcaccaattactgccatttagcccacgagctgcgtctcagctgcatggagaggaaaaaggtccagattcgaagcatggatccctccgccttggcaagcgaccgatttaacctcatactggcagataccaacagtgaccggctcttcacagtgaacgatgttacagttggaggctccaagtatggtatcatcaacctgcaaagtctgaagacccctacgctcaaggtgttcatgcacgaaaacctctacttcaccaaccggaaggtgagattcggtgtgctgggcctcgctgaatcacttggattcccacattctgctatgcctcatgggactcgcagagactccaggctgtgccaccctgctcccagcatcactgttcgtcaatagtcacccagcaggaatagaccggcctgggcatgctctgcagtttccggatccctggtgcctggtcctgtgcctggtccctgaatatccaagcaaataactgcttcagtacaggcttgtctcggcgggtcctgttgaccaacgtggtgacgggacaccggcagtcctttgggaccaacagtgatgtcttggcccagcagtttgctctcatggctcctctgctgtttaatggctgccgctctggggaaatctttgccattgatctgcgttgtggaaatcaaggcaagggatggaaggccacccgcctgtttcatgattcagcagtgacctctgtgcggatcctccaagatgagcaatacctgatggcttcagacatggctggaaagatcaagctgtgggacctgaggaccacgaagtgcgtaaggcagtacgaaggccacgtgaatgagtacgcctacctgcccctgcatgtgcacgaggaagaaggaatcctggtggcagtgggccaggactgctacacgagaatctggagcctccacgatgcccgcctactgagaaccataccctccccgtaccctgcctccaaggccgacattcccagtgtggccttctcgtcgcggctggggggctcccggggcgcgccggggctgctcatggctgtcgggcaggacctttactgttactcctacagctaattctgcagggcacagcccagagccatgtggatttgacttacgggagtaaagcgtaactttttactgcatctaatgagggtgttttaagtgacactcagtgtacacagatcccatcctctggctgctaggagagaagtgctgaatgttccgtgtggagatgctcaggaaagttatttgagttaaattgctggctgagagagcttggaagtccttttcataaaaggtacctctttccttttcttattgaattcttagaacttagttaaccctccctgccttttcttaacaaaaaggacttttctaaggactgaagattggcaaaaacgaaaagcttcttcctccaagagcccattgaagaagcccagtgatgagacggtgagatggtttgagtcctcggtgcctgggtagcaggaagaaagacctgcatcctgcatctgtacttggggaagccagcggagaggacggggaggttacttctctaagtttctgcagaaatattgaaggctggagtttggaatccttaaacttggccttctcaaactcagcagcagatctccgggattctgctgttattatccaaaggcggtggaagggaaagatggatcttcttacatgctagaagttttaaacggtccttaacatgcctttgttcaagcaccttccagaatgtaaggttcagcagctctggtttctattacggtgacttgaatgtcagattcaagggcccggcgtcaaaggaaattggttttgactttttgtaatctaggagcgacagttcgtgagatgtttattcagtgttaaagagcctgtttttctaccaaacaataaaaccaagagaagaaaaa

SEQ ID NO: 815 - DNA, 3439 bp, Homo sapiens
ggcttatagggctcgagcggccgcccgggcaggtatagaattcagcggccgctgaattctagggttttcaggagcccgagcgagggcgccgcttttgcgtccgggaggagccaaccgtggcgcaggcggcgcggggaggcgtcccagagtctcactctgccgcccaggctggactgcagtgacacaatctcggctgactgcaaccactgcctccagggttcaagcgattctcttgcctcagcctcccaagtagctgggattacagattgatgttcatgttcctggcactactacaagattcatactcctgatgctactgacaacgtggcttctccacagtcaccaaaccagggatgctatactggacttccctactctcatctgctccagccccctgaccttatagttgcccagctttcctggcaattgactttgcccatcaatacacaggatttagcatccagggaagatgtcggagcctcagatgttaattttctaattgagaatgttggcgctgtccgaacctggagacaggaaaacaaaaagtcctttctcctgattcaccaaaaaataaaatactgactaccatcactgtgatgagattcctatagtctcaggaactgaagtctttaaacaaccagggaccctctgcccctagaataagaacatactagaagtcccttctgctaggacaacgaggatcatgggagaccacctggaccttctcctaggagtggtgctcatggccggtcctgtgtttggaattccttcctgctcctttgatggccgaatagccttttatcgtttctgcaacctcacccaggtcccccaggtcctcaacaccactgagaggctcctgctgagcttcaactatatcaggacagtcactgcttcatccttcccctttctggaacagctgcagctgctggagctcgggagccagtatacccccttgactattgacaaggaggccttcagaaacctgcccaaccttagaatcttggacctgggaagtagtaagatatacttcttgcatccagatgcttttcagggactgttccatctgtttgaacttagactgtatttctgtggtctctctgatgctgtattgaaagatggttatttcagaaatttaaaggctttaactcgcttggatctatccaaaaatcagattcgtagcctttaccttcatccttcatttgggaagttgaattccttaaagtccatagatttttcctccaaccaaatattccttgtatgtgaacatgagctcgagcccctacaagggaaaacgctctccttttttagcctcgcagctaatagcttgtatagcagagtctcagtggactggggaaaatgtatgaacccattcagaaacatggtgctggagatactagatgtttctggaaatggctggacagtggacatcacaggaaactttagcaatgccatcagcaaaagccaggccttctctttgattcttgcccaccacatcatgggtgccgggtttggcttccataacatcaaagatcctgaccagaacacatttgctggcctggccagaagttcagtgagacacctggatctttcacatgggtttgtcttctccctgaactcacgagtctttgagacactcaaggatttgaaggttctgaaccttgcctacaacaagataaataagattgcagatgaagcattttacggacttgacaacctccaagttctcaatttgtcatataaccttctgggggaactttacagttcgaatttctatggactacctaaggtagcctacattgatttgcaaaagaatcacattgcaataattcaagaccaaacattcaaattcctggaaaaattacagaccttggatctccgagacaatgctcttacaaccattcattttattccaagcatacccgatatcttcttgagtggcaataaactagtgactttgccaaagatcaaccttacagcgaacctcatccacttatcagaaaacaggctagaaaatctagatattctctactttctcctacgggtacctcatctccagattctcattttaaatcaaaatcgcttctcctcctgtagtggagatcaaaccccttcagagaatcccagcttagaacagcttttccttggagaaaatatgttgcaacttgcctgggaaactgagctctgttgggatgtttttgagggactttctcatcttcaagttctgtatttgaatcataactatcttaattcccttccaccaggagtatttagccatctgactgcattaaggggactaagcctcaactccaacaggctgacagttctttctcacaatgatttacctgctaatttagagatcctggacatatccaggaaccagctcctagctcctaatcctgatgtatttgtatcacttagtgtcttggatataactcataacaagttcatttgtgaatgtgaacttagcacttttatcaattggcttaatcacaccaatgtcactatagctgggcctcctgcagacatatattgtgtgtaccctgactcgctctctggggtttccctcttctctctttccacggaaggttgtgatgaagaggaagtcttaaagtccctaaagttctcccttttcattgtatgcactgtcactctgactctgttcctcatgaccatcctcacagtcacaaagttccggggcttctgttttatctgttataagacagcccagagactggtgttcaaggaccatccccagggcacagaacctgatatgtacaaatatgatgcctatttgtgcttcagcagcaaagacttcacatgggtgcagaatgctttgctcaaacacctggacactcaatacagtgaccaaaacagattcaacctgtgctttgaagaaagagactttgtcccaggagaaaaccggccatgccaatatccaggatgccatctggaacagtagaaagatcgtttgtcttgtgagcagacacttccttagagatggctggtgccttgaagccttcagttatgcccagggcaggtgcttatctgaccttaacagtgctctcatcatggtggtggttgggtccttgtcccagtaccagttgatgaaacatcaatccatcagaggctttgtacagaaacagcagtatttgaggtggcctgaggatctccaggatgttggctggtttcttcataaactctctcaacagatactaaagaaagaaaaggaaaagaagaaagacaataacattccgttgcaaactgtagcaaccatctcctaatcaaaggagcaatttccaacttatctcaagccacaaataactcttcactttgtatttgcaccaagttatcattttggggtcctctctggaggttttttttttctttttgctactatgaaaacaacataaatctctcaattttcgtatcaaaaaaaaaa

SEQ ID NO: 816 - DNA, 4380 bp, Homo sapiens
agagaccgtgctggagttcgccctgccggaaagcagcacgccgccgcggcattttacgacgtcggcggtgacaggccctgggactctgggaatacccagcttcctccccgcaacccggtgaaagccaacgcaatgttcggtgcgggggacgaggacgacaccgatttcctctcgccgagcggcggtgccagattggcctcactttttggactggatcaggcagctgctggccatggaaatgaatttttccagtacacagccccaaaacagcctaagaaaggccagggaacggcagcaacaggaaatcaggcaacaccaaaaacagcaccagccaccatgagcactcccacaatactggtcgcaacagcagtccatgcatatcgatacacaaatggtcaatatgtaaagcagggcaaatttggtgctgcagttctggggaaccacacaaccagagagtataggattcttctttatatcagtcaacaacagccagttacggttgctaggattcatgtgaactttgagctaatggttcggcccaataactatagcaccttttatgatgaccagagacagaactggtccatcatgtttgagtcggaaaaggctgctgtggagttcaataagcaggtgtgcattgctaagtgcaacagtacctcttccctggatgcagtgctctcccaggacctcattgtggcagacggccctgctgtagaagttggagattctttggaagtggcctataccggctggctctttcagaatcatgtgctgggccaggttttcgactccactgctaacaaagataagttgcttcgcttgaagttaggatcaggaaaagtcatcaagggctgggaggatggaatgctgggcatgaaaaaaggaggaaagcgattgcttattgtccctccagcctgtgctgttggctcagaaggggtaataggctggactcaagcaacggactcgatcctggtgttcgaggtggaggttaggcgggtgaagattgccaaagattctggctctgatggtcacagtgttagttcccgcgattctgcagctccgtctcccattcctggtgctgacaacctctctgctgatcctgttgtgtcaccacccacatcaatacctttcaaatcaggggagccagctcttcgtaccaaatctaactccctcagtgaacaacttgcaataaatacaagtcccgatgcagtcaaagccaagttgatctctcggatggctaaaatgggccagcccatgctgcccatccttccaccacagctggattccaatgattcagaaatcgaagatgtgaacactctgcaaggaggtgggcagcctgtggtgactccgtccgtccagccctctcttcagccggcccatccagcgttaccacagatgacctcacaggcacctcagccatctgttactgggctccaggcaccttctgctgccttaatgcaagtgtcatctctcgattcccactcagctgtatctggaaatgcccaatcctttcagccctatgcaggtatgcaagcctacgcttatccccaggcatctgccgtcacctcccagctgcagcccgttcggcctttgtacccagcaccgctctctcagcctccccatttccaaggatcaggtgatatggcttcatttctcatgactgaagcccggcaacataacactgaaattcgaatggcagtcagcaaagtggctgataaaatggatcatctcatgactaaggttgaagagttacagaaacatagtgctggcaattccatgcttattcctagcatgtcagttacaatggaaacaagcatgattatgagcaacatccagcgaatcattcaggaaaatgaaagattgaagcaagagatccttgaaaagagcaatcggatagaagaacagaatgacaagattagtgaactaattgaacgaaatcagaggtatgttgagcagagtaacctgatgatggagaagaggaacaactcacttcagacagccacagaaaacacacaggcaagagtattgcatgctgaacaagagaaggccaaggtgacagaggagttagcagcggccactgcacaggtctctcatctgcagctgaaaatgactgctcaccaaaaaaaggaaacagagctgcagatgcagctgacagaaagcctgaaggagacagatcttctcaggggccagctcaccaaagtgcaggcaaagctctcagagctccaagaaacctctgagcaagcacagtccaaattcaaaagtgaaaagcagaaccggaaacaactggaactcaaggtgacatccctggaggaggaactgactgaccttcgagttgagaaggagtccttggaaaagaacctctcagaaaggaaaaagaagtcagctcaagagcgttctcaggccgaggaggagatagatgaaattcgcaagtcataccaggaggaattggacaaacttcgacagctcttgaaaaagactcgagtgtccacagaccaagcagctgcagagcagctgtctttagtacaggctgagctacagacccagtgggaagcaaaatgtgaacatttgttggcctccgccaaggatgagcacctgcagcagtaccaggaggtgtgcgcacagagagatgcctaccagcagaagctggtacaacttcaggaaaagtctgtttgttttgcagtgtttagccctccaggcccaaatcacagctctcaccaagcaaaatgaacagcacatcaaggaactagagaagaacaagtcccagatgtctggggttgaagctgctgcatctgacccctcagagaaggtcaagaagatcatgaaccaggtgttccagtccttacggagagagtttgagctggaggaatcttacaatggcaggaccattctgggaaccatcatgaatacgatcaagatggtgactcttcagctgttaaaccaacaggagcaagagaaggaagagagcagcagtgaagaagaagaagaaaaagcagaagagcggccacgaagaccttcccaggagcagtcagcctcagccagttctgggcagcctcaagcacccctgaatagggagaggccagagtcccccatggtgccctcagagcaggtggtcgaggaagctgtcccgttgcctcctcaggccctcaccacttcccaggatggacacagaaggaaaggggactcagaagctgaggcactctcagagataaaagatggttcccttccacccgaactgtcttgcatcccatcccacagagttctagggcccccgacttcaattccacctgagcccctaggccctgtatccatggactctgagtgtgaggagtcacttgctgccagcccaatggcagctaaagcccgacaacccatcagggaaaggtctgtgtcagggaagtagcaccagatggcccactacaagaaagctccacaagactgtccctgacttcaggaccccgaggagggggacccactggccttagggcctgaaagcccaggagagcctcagcctccacagctcaagaaagatgatgtcactagctccaccggtccccacaaggagctgtcaagcacagaggcaggttccacagttgcaggagcagccctcagacccagccatcattcccagcgttccagtctctctggggatgaagaggatgaactgtttaaaggggcaactctgaaagctctgaggcccaaagcacagcctgaggaggaggatgaagacgaggtgagcatgaagggacgcccgcccccaacgcccctttttggagatgatgatgatgacgatgacattgactggctgggatgaagacccaggaaactggtgcaaaggtttctctgcaacccttccctaagcatgattttgcacagccaaccctgggtctaggcgagccacagggtgaggtcaaggtgagcattctgggaacaatatttgggctcagagggtgggttggccaccttctgagccccacccccgccagacctggtgaagaggatcataaccctgtcttcaagaacactgggatttcagcagcaagttggaagaaggactggtaggttcccctccaagccagtcacctgtaagagtcctgtcctctgccagactttttaatctcttcattaactctcagactgacctgggagccctctacctgaatccagtgctcaactgtgccccggcaacaagacctgggctgaggtctccctggtagaactaagggagattacaccatctaaatcccagtgcagtcaacagcctggcctatagtcctgggacatgtatcttcttctttgccttaaatctgatacaagaggtcaatgactttgaaaataaaactaaaataaatgtctataatgaaacttgaaaaaaaaaaaaaa

SEQ ID NO: 817 - DNA, 1976 bp, Homo sapiens
tacggctgcgagaagacgacagaagggggtgtgcaaaatcagagaggggtgcaagatcctgatttttcaggagttcaagcgacaatggcagcccaatacggcagtatgagcttcaaccccagcacaccaggggccagttatgggcctggaaggcaagagcccagaaattcccaattgagaattgtgttagtgggtaaaaccggagcaggaaaaagtgcaacaggaaacagcatccttggccggaaagtgtttcattctggcactgcagcaaaatccattaccaagaagtgtgagaaacgcagcagctcatggaaggaaacagaacttgtcgtagttgacacaccaggcattttcgacacagaggtgcccaatgctgaaacgtccaaggagattattcgctgcattcttctgacctccccagggcctcatgctctgcttctggtggttccactgggccgttacactgaggaagagcacaaagccacagagaagatcctgaaaatgtttggagagagggctagaagtttcatgattctcatattcacccggaaagatgacttaggtgacaccaatttgcatgactacttaagggaagctccagaagacattcaagacttgatggacattttcggtgaccgctactgtgcgttaaacaacaaggcaacaggcgctgagcaggaggcccagagggcacagttgctgggcctgatccagcgcgtggtgagggagaacaaggaaggctgctacactaataggatgtaccaaagggcggaggaggagatccagaagcaaacacaagcaatgcaagaactccacagagtggagctggagagagagaaagcgcggataagagaggagtatgaagagaaaatcagaaagctggaagataaagtggagcaggaaaagagaaagaagcaaatggagaagaaactagcagaacaggaggctcactatgctgtaaggcagcaaagggcaagaacggaagtggagagtaaggatgggatacttgaattaatcatgacagcgttacagattgcttcctttattttgttacgtctgttcgcggaagattaaacttaatgaaaatctgtttgtattttctgcatattctctggcaaccttgccccatacttacttatttagcatagtcgagtgctctagtttctgtctctcaggcactcgtaactaaggaccaccattggccattggtagatgtttgattgacttaacaagagagggacaaattttcaatttgtgaaactccaaagcagaaagtattggtgcttgctaccttgtgaattcttccttagacatgcagagaaaatgtatgcaagagaccaaaaagatggctccaagctatgtcatgttacctgtaataaaatcttttcttctagattctttctatgttggcagataatctccccttgtagcttccactcacttattcttgcattcagagtcacaatgatcatcttacccatgtggtttttgagaaagaaagatcaattctttgtttgcagtaggtaatcttagagatggagatgattgtagaattattcctagatgagtgtcaatttatttaattccattgtcatataaggagtcaaattgtttcttatcatttgttcattgaagaacagagacctgtctggaaaatcgatctctacaaattcaattaaataatgatccccaaatgctgaaaaagtgaaatacagcaattcaacagataatagagcaatgtttagtatattcagctgtatctgtagaaactctttgacgaacctcaatttaaccaatttgatgaatacccagttctcttcttttctagagaaagatagttgcaacctcacctccctcactcaacactttgaatacttattgtttggcaggtcatccacacacttctgcccccactgcattgaattttttgcttatgttgtttataataaaacttttcaattatctcaaaaaaaaaa

SEQ ID NO: 818 - DNA, 2095 bp, Homo sapiens
gcgtggaattctggtggtacaacgcgaaggtgtgggaaggccgcgataaaccggaactgcagcccgccggacacctccggcttcacttccgtaagaggagaggagtgtacggcaaggggcgggaactggaacttggcccgcctcgttgtgagctgagctcagcggcacgcttttgtggcgtcactgcactgttaccccgccctacgtgtctctgacgctgacaccttctcactgtgaaacgtcgcgacctgtgacgtctggggggcgcctcaaatcttccactccagcatcggatcccggaaaggcagcgtcggagactggacccaaaactcttcctgttctgcctgcagagttgagccccgtccgggtcctggacccgcgtagtactgaccctggatccctgttcactgcgttctcgctccccgcgctccctgctggaccccgggatgccgggcatctccgcccgaggcctctctcatgaggggaggaagcagctagctgttaacctcacccgtgtcctggcactctaccgttccatcttggatgcctacatcatcgaattttttcacagacaacctatgggacacactcccttgctcatggcaggaagcattggatggactgaaaccaccacagctggccacaatgctgctggggatgcctggggaaggggaggtcgtcaggtacaggtcagtgtggccactcaccctgctggccctgaagtccacggcgtgtgccctggcctttacccggatgcctggctttcagaccccctcagaattcctggagaaccccagccagagctcccgactaacagctccattccggaaacatgtcaggcccaagaagcagcatgagatccggaggctgggagagttggtgaagaagctgagtgatttcacaggctgcacccaggttgtagacgtgggctcaggccagggccatctctcccgcttcatggctcttggcctggggttgatggtgaagagcatcgaaggggatcagagactggtggagagagcccagcgcctggaccaggagcttctgcaggctctggagaaagaggagaagaggaacccgcaggtggtccaaaccagccctcgtcactccccacaccacgtggttaggtgggtagaccccacagccctgtgtgaggagcttctgcttccactggagaacccgtgtcagggcagggcccgcttgctgctcacaggcctccacgcctgtgggcgatctgagtgttgccttgctgagacacttctcctgctgtcctgaggtggtggccctggcctcagtgggctgctgctacatgaagctgagtgaccctggcggctacccactgagtcagtgggtggctgggctgcctggctatgaactgccctaccggcttcgggagggggcctgccatgccctggaggaatatgctgagcggctacagaaagctggccctggccttcgaactcactgctaccgtgcagcactggagacagtcatccgacgggcccggcccgagctccgtcggccaggcgtgcagggtatccccagggtccacgagctcaagattgaagaatatgtgcagcgggggctacagcgagtggggctagatccccagctgccactgaatctggctgcccttcaggcccacctggcccaggagaaccgtgtggtggccttcttcagcctggctctactgcttgccccactggtggagacgcttattctactggaccggctgctgtaccttcaggaacaggccctttctcccaggtttccatgctgagctcctgcccatcttcagtcctgaactctctcccagaaacctggttctggtggccaccaagatgcccctgggtcaggctctttctgttctggagactgaagacagctgatgcagcctgaggagacatctcagaccccatcatctgaaagtgcccagagagcacagtggcagagtacatctcatccagagaaacagcatcctgcatcctccagagtcctggttccttcagtttcatcccctttctctccttccatggattatgtaatacattgtaaagttttaattaattaaaaattggatatctgaaaaaaaaaa

SEQ ID NO: 819 - DNA, 5194 bp, Homo sapiens
gacgtgggccccgagtgcaatcgcgggaagccagggtttccagctaggacacagcaggtcgtgatccgggtcgggacactgcctggcagaggctgcgagcatggggccctggggctggaaattgcgctggaccgtcgccttgctcctcgccgcggcggggactgcagtgggcgacagatgcgaaagaaacgagttccagtgccaagacgggaaatgcatctcctacaagtgggtctgcgatggcagcgctgagtgccaggatggctctgatgagtcccaggagacgtgcttgtctgtcacctgcaaatccggggacttcagctgtgggggccgtgtcaaccgctgcattcctcagttctggaggtgcgatggccaagtggactgcgacaacggctcagacgagcaaggctgtccccccaagacgtgctcccaggacgagtttcgctgccacgatgggaagtgcatctctcggcagttcgtctgtgactcagaccgggactgcttggacggctcagacgaggcctcctgcccggtgctcacctgtggtcccgccagcttccagtgcaacagctccacctgcatcccccagctgtgggcctgcgacaacgaccccgactgcgaagatggctcggatgagtggccgcagcgctgtaggggtctttacgtgttccaaggggacagtagcccctgctcggccttcgagttccactgcctaagtggcgagtgcatccactccagctggcgctgtgatggtggccccgactgcaaggacaaatctgacgaggaaaactgcgctgtggccacctgtcgccctgacgaattccagtgctctgatggaaactgcatccatggcagccggcagtgtgaccgggaatatgactgcaaggacatgagcgatgaagttggctgcgttaatgtgacactctgcgagggacccaacaagttcaagtgtcacagcggcgaatgcatcaccctggacaaagtctgcaacatggctagagactgccgggactggtcagatgaacccatcaaagagtgcgggaccaacgaatgcttggacaacaacggcggctgttcccacgtctgcaatgaccttaagatcggctacgagtgcctgtgccccgacggcttccagctggtggcccagcgaagatgcgaagatatcgatgagtgtcaggatcccgacacctgcagccagctctgcgtgaacctggagggtggctacaagtgccagtgtgaggaaggcttccagctggacccccacacgaaggcctgcaaggctgtgggctccatcgcctacctcttcttcaccaaccggcacgaggtcaggaagatgacgctggaccggagcgagtacaccagcctcatccccaacctgaggaacgtggtcgctctggacacggaggtggccagcaatagaatctactggtctgacctgtcccagagaatgatctgcagcacccagcttgacagagcccacggcgtctcttcctatgacaccgtcatcagcagagacatccaggcccccgacgggctggctgtggactggatccacagcaacatctactggaccgactctgtcctgggcactgtctctgttgcggataccaagggcgtgaagaggaaaacgttattcagggagaacggctccaagccaagggccatcgtggtggatcctgttcatggcttcatgtactggactgactggggaactcccgccaagatcaagaaagggggcctgaatggtgtggacatctactcgctggtgactgaaaacattcagtggcccaatggcatcaccctagatctcctcagtggccgcctctactgggttgactccaaacttcactccatctcaagcatcgatgtcaatgggggcaaccggaagaccatcttggaggatgaaaagaggctggcccaccccttctccttggccgtctttgaggacaaagtattttggacagatatcatcaacgaagccattttcagtgccaaccgcctcacaggttccgatgtcaacttgttggctgaaaacctactgtccccagaggatatggtcctcttccacaacctcacccagccaagaggagtgaactggtgtgagaggaccaccctgagcaatggcggctgccagtatctgtgcctccctgccccgcagatcaacccccactcgcccaagtttacctgcgcctgcccggacggcatgctgctggccaggggacatgaggagctgcctcacagagggttgaggctgcagtggccacccaggagacatccaccgtcaggctaaaggtcagctccacagccgtaaggacacagcacacaaccacccgacctgttcccgacacctcccggctgcctggggccacccctgggctcaccacggtggagatagtgacaatgtctcaccaagctctgggcgacgttgctggcaagaggaaattgagaagaagcccagtagcgtgagggctctgtccattgtcctccccatcgttgctcctcgtcttcctttgcctgggggtcttccttctatggaagaactggcggcttaagaacatcaacagcatcaactttgacaaccccgtctatcagaagaccacagaggatgaggtgcacatttgccacaaccaggacggctacagctacccctcgagacagatggtcagtctggaggatgacgtggcgtgaacatctgcctggagtcccgtccctgcccagaacccttcctgagacctcgccggccttgttttattcaaagacagagaagaccaaagcattgcctgccagagctttgttttatatatttattcatctgggaggcagaacaggcttcggacagtgcccatgcaatggcttgggttgggattttggtttcttcctttcctcgtgaaggataagagaaacaggcccggggggaccaggatgacacctccatttctctccaggaagttttgagtttctctccaccgtgacacaatcctcaaacatggaagatgaaagggcaggggatgtcaggcccagagaagcaagtggctttcaacacacaacagcagatggcaccaacgggaccccctggccctgcctcatccaccaatctctaagccaaacccctaaactcaggagtcaacgtgtttacctcttctatgcaagccttgctagacagccaggttagcctttgccctgtcacccccgaatcatgacccacccagtgtctttcgaggtgggtttgtaccttccttaagccaggaaagggattcatggcgtcggaaatgatctggctgaatccgtggtggcaccgagaccaaactcattcaccaaatgatgccacttcccagaggcagagcctgagtcactggtcacccttaatatttattaagtgcctgagacacccggttaccttggccgtgaggacacgtggcctgcacccaggtgtggctgtcaggacaccagcctggtgcccatcctcccgacccctacccacttccattcccgtggtctccttgcactttctcagttcagagttgtacactgtgtacatttggcatttgtgttattattttgcactgttttctgtcgtgtgtgttgggatgggatcccaggccagggaaagcccgtgtcaatgaatgccggggacagagaggggcaggttgaccgggacttcaaagccgtgatcgtgaatatcgagaactgccattgtcgtctttatgtccgcccacctagtgcttccacttctatgcaaatgcctccaagccattcacttccccaatcttgtcgttgatgggtatgtgtttaaaacatgcacggtgaaggcccgggcggcaaggtgtcacgcctgtaatcccaagcacttttgggaggccgaggcgggtggatcatgaggtcaggagatcgagaccatcctggctaacaaggtgaaaccccgtctctactaaaaaatacaaaaaattagccgggcgcggtggcgggcacctgtagtcccagctactcgggaggctgaggcaggagaatggtgtgaacccgggaagcggagcttgcagtgagccgagattgcgccgactgcagtccgcagtctggcctgggcgacagagcgagactccgtctcaaaaaaaacaaaacaaaaaaaaaccatgcatggtgcatcagcagcccatggcctctggccaggcatggcgaggctgaggtgggaggatggtttgagctcaggcatttgaggctgtcgtgagctatgattatgccactgctttccagcctgggcaacatagtaagaccccatctcttaaaaaatgaatttggccagacacaggtgcctcacgcctgtaatcccagcactttgggaggctgagctggatcacttgagttcaggagttggagaccaggcctgagcaacaaagcgagatcccatctctacaaaaaccaaaaagttaaaaatcagctgggtatggtggcacgtgcctgtgatcccagctacttgggaggctgaggcaggaggatcgcctgagcccaggaggtggaggttgcagtgagccatgatcgagccactgcactccagcctgggcaacagatgaagaccctatttcagaaatacaactataaaaaaaataaataaatcctccagtctggatcgtttgacgggacttcaggttctttctgaaatcgccgtgttactgttgcactgatgtccggagagacagtgacagcctccgtcagactcccgcgtgaagatgtcacaagggattggcaattgtccccagggacaaaacactgtgtcccccccagtgcagggaaccgtgataagcctttctggtttcggagcacgtaaatgcgtccctgtacagatagtggggattttttgttatgtttgcactttgtatattggttgaaactgttatcacttatatatatatatacacacatatatataaaatctatttatttttgcaaaccctggttgctgtatttgttcagtgactattctcggggccctgtgtagggggttattgcctctgaaatgcctcttctttatgtacaaagattatttgcacgaactggactgtgtgcaacgctttttgggagaatgatgtccccgttgtatgtatgagtggcttctgggagatgggtgtcactttttaaaccactgtatagaaggtttttgtagcctgaatgtcttactgtgatcaattaaatttcttaaatg

SEQ ID NO: 820 - DNA, 6564 bp, Homo sapiens
ttttttttttttttgagaaaggggaatttcatcccaaataaaaggaatgaagtctggctccggaggagggtccccgacctcgctgtgggggctcctgtttctctccgccgcgctctcgctctggccgacgagtggagaaatctgcgggccaggcatcgacatccgcaacgactatcagcagctgaagcgcctggagaactgcacggtgatcgagggctacctccacatcctgctcatctccaaggccgaggactaccgcagctaccgcttccccaagctcacggtcattaccgagtacttgctgctgttccgagtggctggcctcgagagcctcggagacctcttccccaacctcacggtcatccgcggctggaaactcttctacaactacgccctggtcatcttcgagatgaccaatctcaaggatattgggctttacaacctgaggaacattactcgggggggccatcaggattgagaaaaatgctgacctctgttacctctccactgtggactggtccctgatcctggatgcggtgtccaataactacattgtggggaataagcccccaaaggaatgtggggacctgtgtccagggaccatggaggagaagccgatgtgtgagaagaccaccatcaacaatgagtacaactaccgctgctggaccacaaaccgctgccagaaaatgtgcccaagcacgtgtgggaagcgggcgtgcaccgagaacaatgagtgctgccaccccgagtgcctgggcagctgcagcgcgcctgacaacgacacggcctgtgtagcttgccgccactactactatgccggtgtctgtgtgcctgcctgcccgcccaacacctacaggtttgagggctggcgctgtgtggaccgtgacttctgcgccaacatcctcagcgccgagagcagcgactccgaggggtttgtgatccacgacggcgagtgcatgcaggagtgcccctcgggcttcatccgcaacggcagccagagcatgtactgcatcccttgtgaaggtccttgcccgaaggtctgtgaggaagaaaagaaaacaaagaccattgattctgttacttctgctcagatgctccaaggatgcaccatcttcaagggcaatttgctcattaacatccgacgggggaataacattgcttcagagctggagaacttcatggggctcatcgaggtggtgacgggctacgtgaagatccgccattctcatgccttggtctccttgtccttcctaaaaaaccttcgcctcatcctaggagaggagcagctagaagggaattactccttctacgtcctcgacaaccagaacttgcagcaactgtgggactgggaccaccgcaacctgaccatcaaagcagggaaaatgtactttgctttcaatcccaaattatgtgtttccgaaatttaccgcatggaggaagtgacggggactaaagggcgccaaagcaaaggggacataaacaccaggaacaacggggagagagcctcctgtgaaagtgacgtcctgcatttcacctccaccaccacgtcgaagaatcgcatcatcataacctggcaccggtaccggccccctgactacagggatctcatcagcttcaccgtttactacaaggaagcaccctttaagaatgtcacagagtatgatgggcaggatgcctgcggctccaacagctggaacatggtggacgtggacctcccgcccaacaaggacgtggagcccggcatcttactacatgggctgaagccctggactcagtacgccgtttacgtcaaggctgtgaccctcaccatggtggagaacgaccatatccgtggggccaagagtgagatcttgtacattcgcaccaatgcttcagttccttccattcccttggacgttctttcagcatcgaactcctcttctcagttaatcgtgaagtggaaccctccctctctgcccaacggcaacctgagttactacattgtgcgctggcagcggcagcctcaggacggctacctttaccggcacaattactgctccaaagacaaaatccccatcaggaagtatgccgacggcaccatcgacattgaggaggtcacagagaaccccaagactgaggtgtgtggtggggagaaagggccttgctgcgcctgccccaaaactgaagccgagaagcaggccgagaaggaggaggctgaataccgcaaagtctttgagaatttcctgcacaactccatcttcgtgcccagacctgaaaggaagcggagagatgtcatgcaagtggccaacaccaccatgtccagccgaagcaggaacaccacggccgcagacacctacaacatcaccgacccggaagagctggagacagagtaccctttctttgagagcagagtggataacaaggagagaactgtcatttctaaccttcggcctttcacattgtaccgcatcgatatccacagctgcaaccacgaggctgagaagctgggctgcagcgcctccaacttcgtctttgcaaggactatgcccgcagaaggagcagatgacattcctgggccagtgacctgggagccaaggcctgaaaactccatctttttaaagtggccggaacctgagaatcccaatggattgattctaatgtatgaaataaaatacggatcacaagttgaggatcagcgagaatgtgtgtccagacaggaatacaggaagtatggaggggccaagctaaaccggctaaacccggggaactacacagcccggattcaggccacatctctctctgggaatgggtcgtggacagatcctgtgttcttctatgtccaggccaaaagatatgaaaacttcatccatctgatcatcgctctgcccgtcgctgtcctgttgatcgtgggggggttggtgattatgctgtacgtcttccatagaaagagaaataacagcaggctggggaatggagtgctgtatgcctctgtgaacccggagtacttcagcgctgctgatgtgtacgttcctgatgagtgggaggtggctcgggagaagatcaccatgagccgggaacttgggcaggggtcgtttgggatggtctatgaaggagttgccaagggtgtggtgaaagatgaacctgaaaccagagtggccattaaaacagtgaacgaggccgcaagcatgcgtgagaggattgagtttctcaacgaagcttctgtgatgaaggagttcaattgtcaccatgtggtgcgattgctgggtgtggtgtcccaaggccagccaacactggtcatcatggaactgatgacacggggcgatctcaaaagttatctccggtctctgaggccagaaatggagaataatccagtcctagcacctccaagcctgagcaagatgattcagatggccggagagattgcagacggcatggcatacctcaacgccaataagttcgtccacagagaccttgctgcccggaattgcatggtagccgaagatttcacagtcaaaatcggagattttggtatgacgcgagatatttatgagacagactattaccggaaaggagggaaagggctgctgcccgtgcgctggatgtctcctgagtccctcaaggatggagtcttcaccacttactcggacgtctggtccttcggggtcgtcctctgggagatcgccacactggccgagcagccctaccagggcttgtccaacgagcaagtccttcgcttcgtcattggagggcggccttctggacaagccagacaactgtcctgacatgctgtttgaactgatgcgcatgtgctggcagtataaccccaagatgaggccttccttcctggagatcatcagcagcatcaaagaggagatggagcctggcttccgggaggtctccttctactacagcgaggagaacaagctgcccgagccggaggagctggacctggagccagagaacatggagagcgtccccctggacccctcggcctcctcgtcctccctgccactgcccgacagacactcaggacacaaggccgagaacggccccggccctggggtgctggtcctccgcgccagcttcgacgagagacagccttacgcccacatgaacgggggccgcaagaacgagcgggccttgccgctgccccagtcttcgacctgctgatccttggatcctgaatctgtgcaaacagtaacgtgtgcgcacgcgcagcggggtggggggggagagagagttttaacaatccattcacaagcctcctgtacctcagtggatcttcagaactgcccttgctgcccgcgggagacagcttctctgcagtaaaacacatttgggatgttccttttttcaatatgcaagcagctttttattccctgcccaaacccttaactgacatgggcctttaagaaccttaatgacaacacttaatagcaacagagcacttgagaaccagtctcctcactctgtccctgtccttccctgttctccctttctctctcctctctgcttcataacggaaaaataattgccacaagtccagctgggaagccctttttatcagtttgaggaagtggctgtccctgtggccccatccaaccactgtacacacccgcctgacaccgtgggtcattacaaaaaaacacgtggagatggaaatttttacctttatctttcacctttctagggacatgaaatttacaaagggccatcgttcatccaaggctgttaccattttaacgctgcctaattttgccaaaatcctgaactttctccctcatcggcccggcgctgattcctcgtgtccggaggcatgggtgagcatggcagctggttgctccatttgagagacacgctggcgacacactccgtccatccgactgcccctgctgtgctgctcaaggccacaggcacacaggtctcattgcttctgactagattattatttgggggaactggacacaataggtctttctctcagtgaaggtggggagaagctgaaccggcttccctgccctgcctccccagccccctgcccaacccccaagaatctggtggccatgggccccgaagcagcctggcggacaggcttggagtcaaggggccccatgcctgcttctctcccagccccagctcccccgccccgcccccaaggacacagatgggaaggggtttccagggactcagccccactgttgatgcaggtttgcaaggaaagaaattcaaacaccacaacagcagtaagaagaaaagcagtcaatggattcaagcattctaagctttgttgacattttctctgttcctaggacttcttcatgggtcttacagttctatgttagaccatgaaacatttgcatacacatcgtctttaatgtcacttttataacttttttacggttcagatattcatctatacgtctgtacagaaaaaaaaaaagctgctattttttttgttcttgatctttggggatttaatctatgaaaaccttcaggtccaccctctcccctttttgctcactccaagaaacttcttatgctttgtactaaagggcgtgactttcttcctcttttcccggtaatggatacttctatcacataatttgccatgaactgttggatgcctttttataaatacatcccccatccctgctcccacctgcccctttagttgttttctaacccgtaggctctctgggcacgaggcagaaagcaggccgggcacccatcctgagagggccgcgctcctctccccagcctgccctcacagcattggagcctgttacagtgcaagacatgatacaaactcaggtcagaaaaacaaaggttaaatatttcacacgtctttgttcagtgtttccactcaccgtggttgagaagcctcaccctctctttcccttgcctttgcttaggttgtgacacacatatatatatattttttttaattcttgggtacaacagcagtgttaaccgcagacactaggcatttggattactatttttcttaatggctatttaatccttccatcccacgaaaaacagctgctgagtccaagggagcagcagagcgtggtccggcagggcctgttgtggccctcgccacccccctcaccggaccgactgacctgtctttggaaccagaacatcccaagggaactccttcgcactggcgttgagtgggaccccgggatccaggctggcccagggcggcaccctcagggctgtgcccgctggagtgctaggtggaggcagcacagacgccacggtggcccaagagcccctttgcttcttgctgggggaccagggctgtggtgctggcccactttccctcggccaggaatccaggtccttggggcccaggggtcttgtcttgtttcatttttagcacttctcaccagagagatgacagcacaagagttgcttctgggatagaaatgtttaggagtaagaacaaagctgggatacggtgattgctagttgtgactgaagattcaacacagaaaagaaagtttatacggcttttttgctggtcagcagtttgtcccactgctttctctagtctctatcccatagcgtgttcccttt

SEQ ID NO: 821 - DNA, 913 bp, Homo sapiens
tttcgtcgaacatgaggctccgagaggtgaaggcatagcgtgggttttgaagtcttaaacccaagggggccagctgcatagcccagagccttaaagatgatttagggaagagtcttatttcgcggctgtggtgtgggtcacaaagggcaggtcttgatggggacgttcattcttgcccaggattggctttcagagtctaatcatgttttctgtgtgtctagtatgctcaggcttcagaagaggctcgcctctagtgtcctccgctgtggcaagaagaaggtctggttagaccccaatgagaccaatgaaatcgccaatgccaactcccgtcagcagatccggaagctcatcaaagatgggctgatcatccgcaagcctgtgacggtccattcccgggctcgatgccggaaaaacaccttggcccgccggaagggcaggcacatgggcataggtaagcggaagggtacagccaatgcccgaatgccagagaaggtcacatggatgaggagaatgaggattttgcgccggctgctcagaagataccgtgaatctaaagataccgtgaatctaagaagatcgatcgccacatgtatcacagcctgtacctgaaggtgaaggggaatgtgttcaaaaacaagcggattctcatggaacacatccacaagctgaaggcagacaaggcccgcaagaagctcctggctgaccaggctgaggcccgcaggtctaagaccaaggaagcacgcaagcgccgtgaagagcgcctccaggccaagaaggaggagatcatcaagactttatccaaggaggaagagaccaagaaataaaacctcccactttgtctgtacatactggcctctgtgattacatagatcagccattaaaataaaacaagccttaatctgcaaaaaaaaaa

SEQ ID NO: 822 - DNA, 1010 bp, Homo sapiens
  misc_feature (1)...(1010): n = a,t,c or g
ttttttgttccccttctacataaaaacctcagtcacccactcctgagtggagatgggcagaggctctggcccctgctcctctggcttctcagcagcgtgctttcttattgctgcagcaaggcttgaagagatgtgtgtcaatgaggacttccccaaaacggcctttatagatcgatcccacaacatatcttctgtcttttccagtaagtggagatctaaaaaggaaaaaactgggtggttccggttagaaccngagaagcccacccctgtatctgagcccgtccatctgaactggttaactgtaaacaagggggattgagctgggggaggcactttgaggtggtactgtgagcatcagaattatgaccgtttaaattccttctgcagtttactgatctgggtgccttttaatcctgttcccagataagagttttcactttctttggtttcaatgtagtctttagaactgggtccagcccttgcatctaccacatgattccagttttttttttgatcctgctggcaacttcttccatcttttcaaaaagcaggacaccaggcattgccagatgtctcctgaaacgagtctcatgcaatccaaaacagctcttggaagtcctttttcatagcgtttactgtcagtgaatcggagaactggaggacttagctcctgaaataccagcacccctctatacttcggtacatctttggcttgtgaaaaccaaacatctttttctttctgggcaatagtaggcctggtctgaagtcttaggtcaaattagctgtccactcagatgttgtcaacttctcgtcctggtttcaggggttgaaggctgtttggtgaatcagagacagggatctttggtgggagtcatggtccattcaggaagttgtgccttccaaaagcaagccgttccacgcgcaataatgtccccgaggtgcggagtgcacgccaggccagtccccctcaagcgctccctcctcatcgactgccttgtctagaaagatag

SEQ ID NO: 823 - DNA, 6759 bp, Homo sapiens
caccttatttagccactctgcagcttgatagcagcctattgataccacctaaataccagaccccaccagcagcagcacagggacaagctacgccagggaatgctgggcccttagctccaaatggatcagcagctcccccagctggcagtgcatttaatcccacctcgaatagtagttctacaaatcctgcagcaagtagttctgcatctggttcctctgtgccaccggtctcatcgtctgcctctgctcctggtattagccagataagcactacctcttcttcaggattcagtggtagtgttggagggcagaaccccagcactgggggcatttctgcggatagaacgcaagggaacataggctgtggtggagacactgaccctgggcagagctcttctcagccctcacaggatggacaagagagtaacgtgcctagtgttgggagcctagcagatccagactatctgaacacaccacagatgaacacacccgtgacgttgaacagcgctgccccagccagcaatagtggggcaggagtcctaccatctccagcaacccctcgcttctctgtccccacaccacgaacccccaggaccccaagaactcccagaggtgggggcactgccagtggtcaagggtctgttaagtatgatagcaccgatcaaggatcaccagcctccaccccctctactacacggcccctcaactctgtggagcccgccaccatgcagccaattcccgaagcccacagcctctatgttaccctgattctctccgattccgtgatgaatatctttaaagacagaaactttgacagctgttgcatctgtgcctgcaacatgaacatcaaaggggcggatgtcgggctttacatccccgattcttccaatgaggaccagtaccgctgtacctgtgggtttagtgcgattatgaaccgcaaacttggctacaattcaggactcttccttgaagatgagttggatatttttgggaagaattctgatattggtcaggctgcagagaggcgcttaatggatgtgtcagtccactttccttcctcaggtggaaggaaccaaaaaaccccaggagccacccataagccttctcctcctcctccagaatcaacacacacaaccttttgcttcactgaatttcctggactacatttcctctaacaatcgccaaactcttccctgtgtaagctggagttatgaccgggtgcaagcagataataatgattactggacggaatgctttaatgcgttggagcaggggcggcagtatgtggataaccccactggtggaaaagtggacgaagctctggtgagaagtgccactgtgcactcttggcctcacagcaatgtgctggacatcagcatgctctcctcccaggatgtggttcgtatgctgttgtccctgcagccctttctccaagatgccatccaaaagaagcgcacgggcaggacctgggagaacatccagcatgtgcagggaccactcacttggcagcagttccataaaatggcaggacggggaacctacggttcggaagaatctcctgagccgttgcccatccccactctgctggtaggctatgacaaggatttcctcaccatctcgccattctccttgccgttttgggagaggctcttgttggacccatatgggggccaccgtgatgttgcctatattgtggtgtgtccagaaaatgaggccttgctcgaaggagccaaaactttcttcagggacttgagtgctgtatacgagatgtgtaggcttgggcagcacaagcccatctgcaaagtgctacgtgacgggatcatgcgcgtgggaaaaactgtggcacagaagctgacagatgagcttgtgagtgagtggtttaaccagccttggagcggcgaggagaatgacaatcattccagactcaaactttatgcgcaagtttgccgccatcacctagcaccttatttagccactctgcagcttgatagcagcctattgataccacctaaataccagaccccaccagcagcagcacagggacaagctacgccagggaatgctgggcccttagctccaaatggatcagcagctcccccagctggcagtgcatttaatcccacctcgaatagtagttctacaaatcctgcagcaagtagttctgcatctggttcctctgtgccaccggtctcatcgtctgcctctgctcctggtattagccagataagcactacctcttcttcaggattcagtggtagtgttggagggcagaaccccagcactgggggcatttctgcggatagaacgcaagggaacataggctgtggtggagacactgaccctgggcagagctcttctcagccctcacaggatggacaagagagtgttacagaaagggagagaataggaattcccacggagcctgactctgcagacagccatgcccaccctccagctgttgtcatttacatggtggacccgttcacgtatgctgcagaggaggactccacttctgggaacttttggctgttgagcttgatgcgctgctacacagaaatgctggataatttacctgagcatatgagaaattctttcattctccagattgtgccttgccagtacatgctgcagacaatgaaggatgagcaagttttctacattcaatacttgaagtccatggcattttcagtgtactgccagtgcaggcgaccactgcctacacagatccacattaaatccctcacgggatttgggcctgcagccagcattgagatgaccctcaagaaccctgagcggcccagcccaatccagctttactcccctccctttatattggccccaatcaaagacaagcagacagagctgggagagacgtttggtgaggcgagccagaaatacaatgtgctcttcgtgggctattgtctgtctcacgaccagcgctggcttttggcttcctgcactgacctccatggggaattattagagacctgcgttgtaaatattgctttaccaaacaggtcacggaggagtaaagtatctgcacgtaaaattggactacagaagttatgggagtggtgcatagggattgtccaaatgacatctctaccctggagagttgtaatcgggcgacttgggcgtcttggccatggggagcttaaagattggagtatcctccttggagaatgttcactacagacaatcagcaaaaagctcaaggatgtgtgccggatgtgtggaatctctgccgcagactctccttctatccttagtgcctgcctggttgccatggagccccaggggtcctttgtagtgatgccagatgctgtcacaatgggctctgtttttggccgaagtactgcactgaacatgcagtcatctcagctcaacacccctcaagatgcttcttgtacacacatcttggtgttcccaacatcatcaaccatccaggtggctccagccaactaccccaatgaagatgggtttagccccaacaatgatgatatgtttgttgaccttccattcccagatgatatggacaatgatattggcatattaatgactgggaacctccattcctctcccaactcttccccagtaccctccccaggctctccttctggaattggtgtgggctctcacttccagcatagtcggagccagggtgagcgtcttctttctagagaagcaccagaggagctaaagcagcagcccctggcccttgggtattttgtatcaactgccaaagctgagaatcttccccagtggttttggtcatcgtgtccccaggctcaaaaccgagtgccctctcttcttaaaggcttcgctgcatcaccacatttcagtagcacagacagacgaacttctgcctgccaggaattctcagcgggttccacaccctcttgactccaaaaccacgtcggatgttttaaggtttgttttggagcagtacaacgctctgtcctggctcacgtgcaatccggccacccaggaccgtacttcctgccttcccgtccactttgtggtgctcactcagttgtacaatgccatcatgaatatactttaattggaaaagcacttgttctctctggctcagttccttctccctgcaacctcagtccaaggaacctgctacactctgcaaataacccacatccttttcttcagaccactctccacagtcctgcactgtgattccttctcagcaggcacatgtcaattctgcagtgttcattaccagagtgactccttgacacttctctcatggacctggaaacttccataagtggtgactttcagccagtgcggtggtgtgtgtagccccaaccactggtccccaggaagtggtggtggttgatggcttttcagcgggaaacagaagagacagtgtccttttgcacaagagtctgtgttttcagcctctgtatacaattgagggcagtctagccctttggatgaaatcctcttagttactggtgtatggcctgtgggttacctgaactccataatctgggactttttaaaaataagaaccagctcaagtacatggtttcatactggggtttctgtctccctagtgttcccatccagattaccatgagtgctttggttgacttcaaacctgtgtgtcaatgcagaaggtctggagacagcttcattttgtttatttattttaatttgttttgtcatatggtttttgtgactttatttttttaattcacaaggaccaggtacagtagctgaaacccaattcagatccaccataggattctttgactacatacctctgtcctagaagccggaaaaggagtaaaaacacattggggagatcatgcctaaaagtaatatattcaaaaccacccagcagtaggttttgttaacaacaaactggattttaaaagttctgccatgttaagtggccagcatttcatgaaggataacatttttatacagaaggcagtcaagctcaactcagagccatggaggcaagtaccttaattagttttatatagtcacaacggaaatatattttctagtgaattcttattggaagccaggtctctcctctcattagatcaaaagggacttatgtacatacaacaattgaaagtgtttgctcatgaaatcagttataaatatggtgaattttttctggaccataggaatattatttcaaagaaatattacaacttaaccattaaattagtacttgaagttgagcctttgtggtgggactttttaaaaaaatgcctttttaaagcattaatggctaattgaagtattttatgactcctcattcctggcccagagggttgtctttgaaaccctgtttctaacccttgtgttgtgtgtttctgtctgaggacagtgggtgtgtactggcctcccgggagccactgtgaccaggcctttgagctcttgtcatctgtggagagaatcatgcaaattttaaaagttcttccaagagacttccatgtcctggttattaacaaaaaaggaaaaatgtaataattgatatgattttgtaaaagtatttttcttgaaataatctaaagtttaaaacattatattaaaaaaaaagttgtgtggtgggaatgtgaaagcagagaaataacttgtaaatggataattttgttctctgtaccaccagttgaagggggggttgactttcgcaatgtataggataaaaaatctgatatatcaaaccatttgtatctaatgtgtacagtgtaaaattgactttaaaaatattgcagtgctattttttcttaatcagaaaggaaaattctcaaggccttttgaagagcataagaagatgaagattgtaaacttgtataaaattatcttggtgagaagacaaattgtaaagtagatatttgtaatcttttaccactttggggttgcttttttcccggaattcatcagaactttgaatttttcttttttaaatgggctgtttttaatgcaggggcttttcttccctagaaacccaattctaagcagaaaaagaaaaaaaacacaaaaaataaaaaacccctacaaaaaaactttaaaaaaaatggcagcaaagggtagttttcatctggtgtcttttatttaagttttttaagttaagaaaagctggtgacatatttatacgtttttgtgcaaaaataaatgaatggcaatagattttaaaaaaccttattatgtacttctgtgtgaaaaagtctgtataatatttcccttaaatatgcattattttacttgtgagttttttactgaattaatctgaaatgtacaagccctggatttgctacagagtgagaagttattttatttttttttatttttaattttggaaattctgcagaaatcagaactcttaccatggtttgaacaaaaaaaaggggaaatggggaggggaaaagggtgggattgtccagcatgcttgtatgtatatttcagaaccttttttaaatgtaaaagctgtacatttctgggaagttctgaatttcttttgtttccttttttccttcaagcattttgcagtgagcttcttttatatatagcaaacaatttgaaagaatacaaaaatatgtgaagttcatttaaaaaaataactacagtatagcgctggtacagtacactaaaagactttgataaaaagaaacaataataaaaggcctccattttaaatgtcattcatatataccttgtggatgagagctatatacttttacacacttttttagaggaataaattattgaattactaaaaaa

SEQ ID NO: 824 - DNA, 4623 bp, Homo sapiens
tttttcccatgtttagcactagaagtaacatcacagtttattagcaaaataaagcagaaaatggaccaaaatggatcaggtaaataaatattacaacatataatgtactggtgatgaagctgcaataaagtaatataagtgatgtttacaatttttttttttttttttttttttttttactgggaaggctagttgtaaacataaacattctcactgaactactggccccccaaaacctaacctatctcacaatcaataatcatcttttgactataaaatcataaaaacttgtactctgtggctcttttgtctcgatgatttttcagagaaaaaaattagctgtgttaagtagtttcactgatttatccatcttgaatagctgccagttctggaacttcatacatcctcagaacgtcttcatagagcaaataattatgtaggcttctgggaagtggcagctgactaatataactgtcagaccgtagacgttctgattttagactggaccgaatttccaaacgacaaagatgggtcagggatggaacagtggcaatatgttgctgtagaatccaagcgtttgaggcacgagcagagagcatcctttcaacagctggtgcaagtgtcttccaattagtaaactccaaagtgaagataagggtgtcaatgctgactgagtcaatccaagaattgcacagtagaatcagtgggtcaaatccagcaaccagaagatgtggcaaccactccttatattttgcttgtgctttaattgcatgatttacaaattcatatatatggttccatggtcccaatgagcaacctttcctcaaaaagtagcgaaatatcgaaaacttctcgtacttcaggcagtatgccaaatgaagttcatttatctgggctccatatttcaaaagaatgttcacaattccaaagaactcacagtccttttggaaagccatgcacacaggagaactgaatccaaaaacaaggcacgcctgggcgtctgggctgtagccattccggagtaatatttctaggcaatcttcatgtcccccaaacactgctgagtaaacagggcttactttgtttagcccagtgtcacaggcccggttagtaagtggtattaacaagtccaagatttttgtatggcccatttgtgcagctgcatgaataggtaactgccaactgtcctcattacagtaaagatcaggatctgccccactggagagcaaaagctccacacattttgtgtgtccctcttgagcagcaatgaacaagggtgtagctttgtccaaggcttgacaattgacatttgcacccggatgaaataagtatgcttcaagctttctagcttggccatactgagcagccacaaataaaggtgtgattccaaagtcatcctggcattccttgtttgctccttttctaagaagcaattttatgatctcagcattttcctgaaaagaagcctggtgcaaggagttccatccacacatagaatgggatccattaacatttgctccgtgttgaagcaacagccttaacacatctatctgtccattttcaacagctaaaaacaatggtgtcgtttcttctaaagtagttgcattaggatctgccccagcttctaaaagaatctgtacgattttccaatgtccttgacttgcagcgagatgcaaagcacagaaaccttcaaaggtcttcatcttaatgtagttttcagatgaatctgcattaattaacatttgcaaacattctacagagttgtgataagctgcttcatgaattggcatccatcccctgttatcagcaacatcgacacttcggccctttttgagcagtttccttaagactttaacattgccttccctggcagcaagtccaactgtagagcacgtgtccgcgtaagcctctgtaaaatccatttgtttgaccagtcgacctgccgtgctgccacttctacaccgaaatggctggtccgaggccgcgtctccagagctgcgtcccagaagcccccgctttcgatccccaccgcgatgctgcagccgtccgaaaacgagagacgcgcaggcgacgtcccggcccccgtaggcggacggctccgcgacccccggatgttgatatgtcgtctgccccggaaacggtgacaggaggctcaagggggcggaggcggcgttgccgggctctccggaaggagacgtggcggcggttgggccggtgatacccgggcgctttatagtcccgccgcctcctcctccacctcctcctcctcctcctctcctcctggagcagaggaggttgtggcggtggctggagaaagcggcggcggaggatggaggaaggaggcggcggcgtacggagtctggtcccgggcgggccggtgttactggtcctctgcggcctcctggaggcgtccggcggcggccgagcccttcctcaactcagcgatgacatccctttccgagtcaactggcccggcaccgagttctctctgcccacaactggagttttatataaagaagataattatgtcatcatgacaactgcacataaagaaaaatataaatgcatacttccccttgtgacaagtggggatgaggaagaagaaaaggattataaaggccctaatccaagagagcttttggagccactatttaaacaaagcagttgttcctacagaattgagtcttattggacttacgaagtatgtcatggaaaacacattcggcagtaccatgaagagaaagaaactggtcagaaaataaatattcacgagtactaccttgggaatatgttggccaagaaccttctatttgaaaaagaacgagaagcagaagaaaaggaaaaatcaaatgagattcccactaaaaatatcgaaggtcagatgacaccatactatcctgtgggaatgggaaatggtacaccttgtagtttgaaacagaaccggcccagatcaagtactgtgatgtacatatgtcatcctgaatctaagcatgaaattctttcagtagctgaagttacaacttgtgaatatgaagttgtcattttgacaccactcttgtgcagtcatcctaaatataggttcagagcatctcctgtgaatgacatattttgtcaatcactgccaggatctccatttaagcccctcaccctgaggcagctggagcagcaggaagaaatactaagggtgccttttaggagaaataaagaggaagatttgcaatcaactaaagaagagagatttccagcgatccacaagtcgattgctattggctctcagccagtgctcactgttgggacaacccacatatccaaattgacagatgaccaactcataaaagagtttcttagtggttcttactgctttcgtgggggtgtcggttggtggaaatatgaattctgctatggcaaacatgtacatcaataccatgaggacaaggatagtgggaaaacctctgtggttgtcgggacatggaaccaagaagagcatattgaatgggctaagaagaatactgctagagcttatcatcttcaagacgatggtacccagacagtcaggatggtgtcacatttttatggaaatggagatatttgtgatataactgacaaaccaagacaggtgactgtaaaactaaagtgcaaagaatcagattcacctcatgctgttactgtatatatgctagagcctcactcctgtcaatatattcttggggttgaatctccagtgatctgtaaaatcttagatacagcagatgaaaatggacttctttctctccccaactaaaggatattaaagttaggggaaagaaaagatcattgaaagtcatgataatttctgtcccactgtgtctcattatagagttctcagccattggacctcttctaaaggatggtataaaatgactctcaaccactttgtgaatacatatgtgtatataagaggttattgataaacttctgaggcagacatttgtctcgctttttttcatttttgttgtgtcttataaactgactgtttttctttgcttggatactgtgattccaaaataaatctcatccaagcaagttagagtccagcctaatcaaatgtcataattgttgtacctattgaaagtttttaaataatagatttattatgtaaattatagtatatgtaagtagctaatgaagtaaagatcatgaagaaagaaattgataggtgtaaatgagagaccatgtaaaatatgtaaattctagtacctgaaatcctttcaacagatttttatatagcaactgctctctgcaagtagttaaactagaaactgggcacatggtagaggctcacatgggagttgtcctcacccttgttaatctcaagaaactcttatttataataggttgcttctctctcagaacttttatctattacttttttcttcttatgagtatgtttactctcagagtatctatctgatgtagacagttggtgatgcttctgagactcagaatggtttactctaacaaaacactgtgctgtctatcccttgtacttgcctactgtaatatggatttcacttctgaacagtttacagcacaatatttattttaaagtgaataaaatgtccacaagcagtgttaaaaaaaaaa

SEQ ID NO: 825 - DNA, 1252 bp, Homo sapiens
ccttttctttttaataaaaattacactgcaactggaacagtttctgatctcaaaaggcaagcctcttcccgtgtgatctttataatttacactcttttccgtgagctttcttacctccctttttttataactctccatattctctattcatacatatatccattatattagtaggggaataatttttatttttatttattttttttggctttagtacttgcaccctcacacacactctcccgagaaccagaagtcggttgggtgtttatataatgaagaattatggggctgtttgatcgaggtgttcaaatgcttttaaccaccgttggtgctttcgctgccttcagcctgatgaccatagctgtgggaaccgactattggctctactccagaggggtttgcaagaccaaaagtgtcagtgagaatgaaaccagcaaaaagaacgaggaagttatgacccattccggattatggagaacctgctgcctagaagggaatttcaaaggtctgtgcaagcaaattgatcacttcccagaggatgcagattacgaagctgacacagcagaatatttcctccgggccgtgagggcctccagcattttcccaatcctgagtgtgattctgcttttcatgggtggcctctgcatcgcagccagcgagttctacaaaactcgacacaacatcatcctgagtgccggcatcttcttcgtgtctgcaggtctgagtaacatcattggcatcatagtgtacatatctgccaatgccggagacccctccaagagcgactccaaaaagaatagttactcatacggctggtccttctacttcggggccctgtccttcatcatcgccgagatggtcggggtgctggcggtgcacatgtttatcgaccggcacaaacagctgcgggccacggcccgcgcccacggactacctccaggcctctgccatcacccgcatccccagctaccgctaccgctaccagcgccgcagccgctccagctcgcgctccacggagccctcacactccagggacgcctcccccgtgggcatcaagggcttcaacaccctgccgtccacggagatctccatgtacacgctcagcagggaccccctgaaggccgccaccacgcccaccgccacctacaactccgacagggataacagcttcctccaggttcacaactgtatccagaaggagaacaaggactctctccactccaacacagccaaccgccggaccacccccgta

SEQ ID NO: 826 - DNA, 7113 bp, Homo sapiens
gttcagatgacctacggacaggtctatttcaggatgtacaggatgctgaatctttgaaattgcctggcgtctatgaagtcttattttataatgaaactgaagattgcccagggatgatgttatggagatatccagaacctagaggactcacccttgtacgaataactcctgtaccttttaacaccacagaggatccagatattagcacagcagaccttggtgatgtgctacaggatccttgtagcttggaatactgggatgaactccagaaggtttttgttgcatttagagaatttaatctgtctgaaagcaaagtttgtgaactgcagttgccggatatcaatctcgtgaatgaccagaagaaattagtatcttcagatctttggagaattgtcttgaacagcagtcaaaatggagctgatgaccaaagctctgcaagtgagtctggttctcaaagcacttgtgatccacttgtgactccaacagccctggctgcctgtaccagagttgactcctgctttaccccatggtttgtcccatccctttgcgtttctttccagtttgctcacctggaattccatctttgtcatcaccttgaccaactaggcacagctgcaccacagtacctacagccatttgtttccgacagaaatatgccatctgaactagaatacatgattgtttccttcagagaaccacacatgtatcttcgacagtggaataatggttctgtctgtcaggagatccagttcttagctcaagcagactgtaaacttctagagtgcagaaatgtcactatgcaaagtgtggtgaaacccttcagcatcttcgggcagatggcagtttccagcgatgtagtggaaaagctgcttgactgcaccgtgatagttgattctgtatttgtaaaccttggacagcatgtagtccattcactaaacactgcaatacaagcttggcaacagaacaaatgccctgaggtagaggagttggtcttcagccattttgtgatctgtaatgacacacaggagacactgcggtttggccaggtggatactgatgaaaatattctgctggcgagtctccacagtcaccagtacagctggcgctctcacaaatccccacagctgttacacatctgtattgaaggttggggcaactggcgttggtcagagcctttcagtgtggaccatgccgggacttttattagaacaattcagtacaggggtcgaactgcttctctcatcatcaaggttcagcaactcaatggagtacaaaaacagattatcatctgtggaagacagatcatctgtagttacttgtctcaaagcatagaactaaaagtcgttcagcattacattggtcaagatggacaagctgtagttcgggaacattttgactgcctcacagccaaacagaaattgccttcgtacatactagaaaacaatgaactgacggagctgtgtgtgaaggccaaaggagatgaagactggtcaagagatgtgtgcctggaatccaaagcccctgagtacagcattgtcattcaggtgccatcttcaaacagttccattatttatgtctggtgcacagttttgactttagaacccaactctcaagtgcaacaacgaatgattgtgttcagccctctttttatcatgaggagtcatcttccagaccccattatcatacatttggagaaaaggagtctgggattgagtgaaacacaaattattccaggaaaagggcaggaaaaaccactgcaaaacatagaacctgaccttgtacatcacctgacattccaagcaagagaagaatatgatccttcagattgtgcagttcccatctcaacatccctcattaagcaaatagccactaaggtacaccctggaggcacagttaatcagatccttgacgaattctatgggccagaaaagtcgcttcaacccatatggccctataataagaaggattctgacaggaatgaacagctaagtcagtgggatagcccaatgcgagtgaagctgtcaatctggaagccatatgttagaactttgttgatagaacttctgccctgggccctgcttatcaatgaatccaaatgggacctctggctatttgaaggagagaaaattgttctacaggttcctgctggcaaaattattattcctcctaattttcaggaagcttttcaaattggaatatactgggcaaatacaaacactgtgcacaagtcagtagcaattaaactggtccataacctgacatctccaaagtggaaagatggaggtaatggtgaagttgtgacactggatgaagaagcgtttgttgatactgaaataagacttggtgcttttccaggacatcagaagttatgtcagttctgcatttcctccatggtacagcaaggtatacaaattattcagattgaagacaagactacaataatcaataatacaccatatcaaatattttataaaccacagctatctgtctgcaatccccattctggaaaggagtattttcgtgttccagacagtgctacttttagcatttgcccaggtggagagcagcctgctatgaaatccagctcccttccttgctgggacttgatgcctgacatcagtcagtcagtactggatgcatccctgcttcagaaacagatcatgctgggcttttctcctgccccaggtgctgacagctcacagtgctggagcctgccagctatagttagaccagagtttcccagacagagtgtggcagtacccctcgggaatttccgggaaaatggattctgtaccagggctatagtgctgacatatcaagaacacctcggagtgacttatttaaccctctcagaagaccctagtcctcgagtaattatccacaatagatgtccagtaaaaatgcttataaaggaaaacattaaagatattccaaagtttgaggtttattgcaaaaaaattccctccgagtgctcaattcatcatgagctgtatcatcagatttccagttatccggactgcaagaccaaagacttacttccaagcctacttttgagagttgaacctctagatgaagtaacaactgagtggagtgatgccattgacatcaacagtcagggaacacaggttgtgttcctgactggctttggctatgtgtatgtggatgttgtacatcagtgtggcacagtcttcatcactgtggccccagaaggaaaagcaggacctattttaaccaataccaacagagcgccagagaagattgttacatttaaatgttcatcactcagttaagcctggcagtgtttgatgacctcacccaccacaaagcatcagctgagcttctgagactcacactggacaacatttttctctgtgtggccccgggagctggtcccctccctggggaagagcctgtggctgcgttgtttgaactttactgtgtggagatctgctgtggggacctgcagctagacaaccagctttataacaagtccaatttccactttgctgtcttagtctgccagggagaaaaagcagaacccattcagtgttccaaaatgcagagtctcctcatatccaacaaagagttggaagaatacaaggaaaaatgttttatcaaactttgcatcaccttaaatgaaggcaagagcatcctctgtgatattaatgagttcagctttgaattaaaacctgctcggttatacgtggaagacacatttgtatactacatcaagactttgtttgacacctaccttcctaacagcaggttggctggtcactccacacacctctccgggggtaaacaggtgttgcccatgcaggtcacacagcacgccagggccttggtgaatcctgtgaagttacggaaactggtgatccagccagtaaatttgctcgtcagcatccacgcttccctcaagctgtacatagcctcagaccacactcctctctccttctcggtgtttgaaagaggacccatcttcaccactgcgaggcagcttgtgcacgccctggcaatgcactatgccgctggggccctttttagagcaggctgggtagttgggtctctggatattcttggcagccctgcaagcctggtgagaagcatcgggaacggggtcgccgacttcttcaggcttccgtatgaggggctgacccggggccctggagccttcgtgagtggcgtctccagagggaccacatcgtttgtaaagcacatctccaaaggtaccctcacatccatcaccaacctcgccacaagcctggcccggaacatggaccggctctcactggatgaggagcactacaaccggcaggaggagtggcggcggcagctccccgagagcctgggcgaggggcttcgacagggcctgtcccggctgggcatcagcctgcttggtgcaattgctggtatagttgatcagccgatgcagaacttccagaaaacatctgaggcacaggcttcagcaggacacaaggccaagggtgtcatctcgggtgtggggaaaggaatcatgggggtgttcacaaagcccatcggaggagctgctgagctggtgtcacagactggctatggtattttacatggagctggactttctcagcttcccaaacagcgccatcagccaagtgatggtacatgctgaccaggctccaaacagccatgtcaaatatgtctggaaaatgcttcagtctctgggcagaccagaagtccacatggccctggacgtggttctggtgaggggctcaggccaggagcatgaagggtgcttgctgctgacatcagaagtgctcttcgtggtgagtgtcagtgaggacacacagcagcaggccttccccgtcacagaaatcgactgtgcacaggacagcaagcagaacaacttactcacagtgcagctcaagcagccaagagtggcctgtgatgtggaggtagatggagtccgagagagactgtcagagcaacagtacaacagactggtggactacatcacaaagacatcttgtcacctggcccccagctgttcttccatgcaaataccatgccctgtggtggctgcagaacctcccccctccactgttaaaacataccattacctggttgatccacattttgctcaggtcttccttagtaaatttaccatggtgaaaaataaagccctgaggaaagggtttccttgagtcccctctgaggtgtttattcctgcttgtgtgatttagtttttgggtttctttgagacagggtctcactgcattgcccttgctgacctcaaattctggggttcaagcaatcctcccacctcaacccacaagtagctacgactgacaagcacctgccaccataaagggctgcattttgccaccataaagggctgcatttttttaaaaagcctaggcagctctaacatcatctgatatggacacaaggccaacagtttccttatttacatccttacctctaaaagatacttcaaagtgacaaaaacgtgttccttccccacttagagacaatgattaacagggccctatatgttcttaccacatacagaggatgcatttatttttgctctatgacacttgcaaaaatctctactgtaattaatttgggtctattaactctctgttccatcatagaatgtggccaggccttacaatggagagccagagttaaaacttcaagttgcatctgtttttgggctgagtcaccacctttgcctcatgctcctttgtctgcaaaggcctaggattctttctttaaatgaaatgcttaggactttttgtggcttgttacatttgtcatttaactgcagtgctattctttgaaagctgctatgtgtattttctctgaagtctgcattttactaaaatttacaacagtctgatgattgattgattactgtccaggtacattttagaaaaagtgttcttcttccagtttgttttactaagcaaactttgagtaaatcctttgtcctatattgaatccagtcccaaagtgttcaggtgagtttctctagttccataaacaaaacatacatagtgggaactccctggtatgccatagagcacacaagaaccccaatattaatgctaacaattataccagtccattttgtttattctgtggaattgacttgacaaagcatgaagatattcccagtgtctgtctgataatattttgcatctaagaatgggtttgactcaagatcttgggttaccaagatgtcttaaatgttcagtaaatatctttcttacagtccagtagcttagagcatgtttgctgattgatattacatttaaacttggggctacagcttgttacctagaattttgagatactaagagaatgcaattttaaatgcccactgggttttatttgttttggagagaggggtctcattctgttcacccggggttagagtacagtgggaacagtcatggctcactgcagcttaagctcactgcctgggctcaagtgatcttactccagcctcccaagcagctgggactacaccaccacaggtatgcaccaccatacctggctgatttttaaaaattttttctagagatgaggtctcactatggttgcccagctggtctcatactcctcagttcacgcaattcctcccactctccacctccccaaactgctggggattacaggtgtgagccaccatgcccaacacccactgatctttaactctccaccatgttgggccataagaagtcactatataattgttactggaaagcaagacttaacgaacaattctgactatgaaaaatgtctctttcagtttgttctgtaaatatttagaaaagtgacagctgtcaacctcagagtaactatttctaaaaatgtaaatatgtattaatccttgtatcttttatggtaattttgcatattgatatgaattatataaaattgtttaaaataaaaggtgtccttgaattactgaccacccatagatgtctactgttaccaggttttacaatgcaaattttcactaatacctgggtttaatacagctcacatcactgaatgttacacatgaatttaaatgggtaatatacaggttttgttataataaagttactgattaaattaaaaaaaaaa

SEQ ID NO: 827 - DNA, 3032 bp, Homo sapiens
  misc_feature (1)...(3032): n = a,t,c or g
tttcgtgggtgcgccaaggagaggtaaccccttcgggagcccggggaatcccggccgccaccaggggccgtgccaccgccctcgcgggaccaaagcttccggcgtgtccccaactttgtggcgccctcaggccgcggcgactgggttagagatgccttccagcggcagagcgctgctggactcgccgctggacagcggctccctgacctccctggactctagtgtcttctgcagcgagggtgaaggggagcccttggcgctcggggactgcttcacggtcaacgtgggcggcagccgcttcgtgctctcgcagcaggcgctgtcctgcttcccgcacacgcgccttggcaagctggccgtggtggtggcttcctaccgccgccccggggccctggccgccgtgcccagccctctggagctttgcgacgatgccaaccccgtggacaacgagtacttcttcgaccgcagctcgcaggcgttccgatatgtcctgcactactaccgcaccggccgcctgcatgtcatggagcagctgtgcgcgctctccttcctgcaggagatccagtactggggcatcgatgagctcagcatcgattcctgctgcagggacagatacttcagaaggaaagagctgagtgaaactttagacttcaagaaggacacagaagaccaggaaagtcaacatgagagtgaacaggacttctcccaaggaccttgtcccactgttcgccagaagctctggaatatcctggagaaacctggatcttccacagctgcccgtatctttggcgtcatctccattatcttcgtgggggtgtccatcattaacatggccctgatgtcagctgagttaagctggctggacctgcagctgctggaaatcctggagtatgtgtgcattagctggttcaccggggagtttgtcctccgcttcctgtgtgtgcgggacaggtgtcgcttcctaagaaaggtgccaaacatcatagacctccttgccatcttgcccttctacatcactcttttggtagagagcctaagtggggagccagaccacgcaggagctgggagaacgtgggggcgcattgtccagggtgtttgaggctgctcagggctcttgcgcatgctaaaagcttggggcagacattccacaggattacgctcccttgggatgacaatcacccagtgttacgaagaagtcggcctactgctcctatttctatccgtgggaatctctatattttcaactgtagaatactttgctgagcaaagcattcctgacacaaccttcacaagtgtcccttgtgcatggtggtgggccaccacctctatgactactgtgggatatggggacattagaccagacaccaccacaggcaaaatcgtggccttcatgtgtatattatcgggaattcttgtcttggccttgcctattgctattattaacgatcgcttctctgcttgctacttcaccttgaaactcaaggaagcagctgttagacagcgtgaagccctaaagaagcttaccaagaatatagccactgactcatatatcagtgttaacttgagagatgtctatgcccggagtatcatggagatgctgcgactgaaaggcagagaaagagcaagtactaggagcagcgggggagatgatttctggttttgaattaattttcaatttatttacaaaagctatgtacaattaactaaaatgataaagcagtgatgtggatttctgtattctgatgatgagtctcttcagagtactgctcatcttaattaatttttgctgatatattgcttcatctactagaatatttcacatcacctataacaactgcacagtgttctgacacatttgagtgtccaaaatagccaattaacacaaccaaatacaactgggccaatataaacatgtttgaattgtcaaatataaaataatgttattgcaatacatacaaaaaagttaaagattttatgtatcactaacattagaagttttttgcaccactaattttttaaaaatggaaggtaaactgcatagcccagagaaagataagtaaatatttaagaacatattgaacaactttgctatttaaagatattatccaagtacataaattactccgttctctatcagttaaagctattgaatataatactttagctttacaagagaaaacccatatttgatgggcagagattatatccctatcttctttttcatgtaaaccactggtcacaaatgaactgatctctgtatcccattattactataagaggtgggaatcccaaaactgcttagattgcagtaccatgagcctacacaaagacttcaacaattgcacatccttcattcctccccaactgagtgtagtatgtggagccataaaacagccatatttccttagtatttccatgaatatcagatggtcctttaaatgtctctttatggatgtattgttcacattatggctttaaaataatgaatatgtaaaagtgaggtagtgaacatcctaaatttctacactggaattactaaataatccttatttcataaaatgggaaatatatgttaaatgacatcactggatgaacttgaagatcttttacttgttaacaaaaaaatactatggacagctttctgattgttggggtaaatagcaaatgttcaaactttgcaggcattttgacattcatcataacaacacaattcctagacattgtattatataattaaagccaaaacctctaaagctaagaactagctcatgattcccattattttagtaaatgagattctacaacctaagaataacaaggaatgcatcactttaatacctacatttccaatataatagagcccccaaggggaagaaaattggttcttgaggaaaaaaaaatcttatcacttcatttacaaaacacagataagcatattgagtatatctgtggtattaacatttcatgggggtgagatgttaggnaaaaaagcctagaaggctctttgccaggggtgaatggtgataagaaat

SEQ ID NO: 828 - DNA, 6191 bp, Homo sapiens
ttttttttttttaagaaacaatatattttatttttctgacaccacagctctggcgagtggttttgtaccaaatttaatggaggttacacagaacgtcttacgcatgggagggggaggaaagggaaggaaccacaaaatttaaaacaaacagaaaccaaattcctggatagcttttagcatctgtcccactcccacattaataaaattcacttgggaattcctaataaaaggaaaacaaaaaacaaggtggggcagggaagggtatgatgggaaaggagaaagacttagggggaaaaaagaccagagagcatcccaaggacagacctttccctctcagagccaagaggacgctcggcatggaaggcgaggctttgctagatttatttccccaaaataacactgtgtattgcagctgccaaagggaaagagagagggaagcagagggtcaccagcggggggcacaaaggaaggaaacacttaactgaggagacagagcaaaatcggagagagaaacagagaaaatgtgccagtgggttggtatattgggagacaagacagtgctgaagagcacttgaactgaaaaacaaatgtcctaagagtcattatttttcaaaagaaaaatctcccccctccccccacccctcgctgaacttagttcctttttttgtgcttttcattaatactctgctctgaggtcgtagtttggtttttctatacactgcagttgaaagaaaatagtccaaaggtctgaagatggattctccacctaaagtaaacagcccagcattcctgttctcctcttgccccaaagactaaagtctctgctaaaatcccttttacaatatagtacagtacacagaaaaaaataaagcccaaatcaaaaaaacaaaaacagaaaagaatcctgggagaagccagtccaaaggacgtaaacatacagagaacggtgcaacacatgaccgatggcaattctcaaagcacagctacagattcccaaaagtaggtgccatcattgatacccaagtccacaaaaataatttttaaaaaataaatcttaaaaaaaacacacctgttgattaaatgaataatttgttttcaggtaaatccatacattctcgagttcccccctcccccaaagcagccctcgggtctctgttctcctattgcatgaccaatagtaagtactcctggaactccctcaaagcagctctcaggacctggaatctcatcttgacaaggatcggcacatcccatcttagcagcttaaaacatcatgtttcctgggttgccaggtccttggctaaatccacccatgcccacgtcagcagccatgccccggggcctcatctgtggggggatcatgatgttctgttggggtcccatcatgccctgcatggacatcatcatgcctggagagcccacaggcccagggtgggtgtagagcccggcaggcccccgatccttgccaggaatcatgcccacggcagcagctggattgctcatcagggtgggctggccgggcattgtagattgtgctggtgacatcatccgatggtgaggtcccatcatgccttgttggagaaaggctggtggtctcatggggttgtggcctggcatggatggagctgtaccaagagggatgtccggagttcccactggccctggacctcccatgccaggtaatgctagtcccattctgggggcttgttcgcccatcatcccctgcatgtgtgaaaacccaggtccaggaccctggggctgtttacggcctggaacttcccctcgagggaaatattgcagcgtctggctgggcttctcagatggaataatgcgggatagatcaaactcaggtattccggtggctccaggtcggatgacctcctgcagatctgggtctgtaaacaccgaaggcatgctgttccccaggacagtgaaggagtcaggacccccggggcctccaggcttgcaaagtgctgcatctgctgaactttggggcaggttgctggggcggccaagggggccttctcctgggaaacccatccctcctgggaagctgccctgccccccactggggccattgtgagggaatggaacctgctgtgggggagactgtactggagggaagccctgggggaagcccatccgtccttgaggtaccatcggtggctcttgggacccatgccccatgataggattgtgtgacatcaagccaggccccattgggaccccatgaggaggtatgttgggtcccacggcatttggagagggcatctgattggagtgagaaagtggctgggtcattcccattgggctgagggttggcatcggaaccacggggtttggacctgaaattcgaggattctgtgtattaatgcccattcctggcatattattcattgatggcaagttgggagaacgagctggaggggagtcgtcatctgagctggccacagtcttgatagcatcatggttataaccggggttggaaactgggccattgcaaacttggacattccgagacatccataatagagagtgggttctgggaaagggttggctctggaggcatggtataaggtgtactagagggaagacttcccagggatattcacagaggcaggctggctggctgtaggaggtggggggccacctgactctacatttcccagcatggctggggaggccatggtgaggggtgctttatggtttggagggatcccaggactctgaaggggaggctctggagaagaggtccatccaggtgacggggcaggaagtgatggagacttgaggtggacaggtgaagcagcagcagaccccaaaacagggggggacttaatggaagcagcagcagctgggcccgccagcatgcctgccagctgcgatggagtctggggggacttgaggttccccgagggcgagcccagcattggtgactggacttggtgcatcgtgggagacttcagagggttaatgcctggggaatgcacctggctgcctgccacagatatatccaagggcttccgccccaggccgcgctgaactggaggagctgtgttgaggctggtggggttactggaagggttgagaggtagtggtggcatatgactgagccggctgttagtcctctggtcgggcccaattggttctctgagattccgcaagccactgttgctgcctggaccctgagacatgggaaggaatggtctggggcccatgccatactcctgctgggggtgctcaccaaatggcagtggcaccatcttctgctgagcaggcagcatgtctgagccacctgggcgtaatttcagcatctcctcagggcccgccccagcctctctcatcttctgaggtatcatctgagagttggatcccatgttgacatttagattgacatctcccttcatcccactaggaaccatcccaaactcaagttcccgaccagggcccatctgtgggggaattccttttggaaagtcacccctagaaggactcagagggccctcaactggtattcgagggaaaatggggttattcccaggctccatgtggcgctgggagcctggaatcatcctgttcatctccatgctgggcctgatgccttccatggccatccctggggggagacccagctgtttctctgccagctgctgctgaaacatctcttcagacaatccttgggggtttgggaagcgttcccctcggccaggaccgctgaaaatgccctggccaggaggaaaatttcgaccatctgggatttttggcacatcatctggccaactgactccagaaagacctggtctagatgcagggttggggacattcggcccttccatttcagagtttatcatgcctgcaaatccagggaggcgcatctggctccctggcatgttggggtggggagccatgcccctcgggggcagagaatgtggcatgttgataccatcagaaaatggctctgtacccccaggtgcccagccttcactaggggtcatctggtatggaggggggggtcctcggaccactccccgaggcccgtgctgatggaccatcatgtcctggagggaacactgctggacaaccacttgttccggcttcctcctcttctcttcataaaactcctgctgcagtttcagccacgctatctgctcgggagtcatatggtcaaggtggtcgggtcctatggtcccagactgggagttcatagaaggtggaaccatttcatctggagaaaagggtacatctctatgtccttgagggccaaatggagctcccacgtctgtccggggcccaggtcccttacctaggctttgggattgggccatcatggcctgtattggcccttctggttttttctgaggcccatctaataccccaggattctgctgcggtcccccactttgtgctcctgtgaattctttctcatcaggaaaaagcatgcgctggatatctctgagagtttgtaaggagcgctcccggtgctccagctgctcctgagataggccatcgggattctctcccagtgtggggggctcgccactggacactggtggaggcggaggggctttgggatctgctgaagagctattgctcccctgggagacaggggtcactgccctattgttgggagttgagttgggcccagtaccatctgggggcagtggagtggagctggcaggacttcctacagaaggaatcagtttgttttctaccccaggactctcccggtccaggggacgtgggggtgcggcaggcttgggtgctggtgccggaatgggtggagttggctgcagtctggtattctgggaagaattctggtcctggttggccggagctgggggctgttgtgggagaggtttcggatcattccgaagggcagatatctgtgtgttcagaggcgctgtgcttctctctgtcttgttgttagaaatgttctggatgtggaaagagacgatagtttcaacctggcccttcaaaacagcttctgcagctttattggccatctcagtagaaaacacgtacaccactttggctggagtcttctgagcaggtgtgggctctgtggcagtagtttggccatgggggggggtagaagacctgggggctgtagcatttgatggggtcatcgagtgtggtgtgtgctgggaatcctgggactttatgtggtcagcagaattacattctttaatgtcagagtcatcgtttggagtcccaggatctctctgatcaaaggagtcggcggaaatacttcgctcccttttccccttgcccttggcaccatttccagccccattcttcagccccatgctcccacctgggccagggagtgctttaggggtatggcccccactcttggagtcacagggggatggctgggattggctggctgagcccccctgtttaccctgattggagaatttggaatccagctgggggtttccagatggggacatcactgtagggggacggaccatcacctcctgctttgacttagggctactctgtgtgtttcctgatggagagctcctcactttagggttactggaatgcattgattgaaatcctgagcttgcagtcacaaacgggacaggctcaccgagttcctctcgggttgcagcagaaacagctgctgggggcagtggcactggcccactgcttgctgggtgcgtcccttagcgctcgctgcctgtatgcctttttcctctttgtttttctctgctgtggaagtgggtcctttccccttgcagctccagcattctctgggtgcgtgcctcctgctgccagaggaaaatctcgcatctccagggcatacaaaaccccaagggtcacgacactgcagtgctcatcctggaggtgaggagtccaggaacccccttctcaaagatgacccttgtctttcaatatgtccaatttgctatttcttctacatcgggacacggaagaactttccaaaaatgatctctgccacccaatcagatgggaatgtttaggtcaaagcagaatgacgccaactgggcccacattcagtccttttttatgaggagaaattctggagaatcatttcagaaactgaggggggaaagtgaatgaagacaaaaaagacccttttcccgcaatccctggcctcctggtatcaagacaccaggacaacatcaaagcaacttagggggaacactttaggggccacgaaa

SEQ ID NO: 829 - DNA, 523 bp, Homo sapiens
ggcacgaggcgcggccgttccgaggggcggtccctgggctcccgctcgccgccgctgccgctcctcgttctgctcctcactccccagcggctggaggccggtaccggcgggcaggaggcgcccgaggatgtgctgctggccgctgctcctgctgtgggggctgcttcccgggacggcggcggggggctcgggccgaacctatccgcaccggaccctcctggactcggagggcaagtactggctgggctggagccagcggggcagccagatcgccttccgcctccaggtgcgcactgcaggctacgtgggcttcggcttctcgcccaccggggccatggcgtccgccgacatcgtcgtgggcggggtggcccacgggcggccctacctccaggattattttacaaatgcaaatagagaagttgaaaaaagatgctcagcaagattaccatctagaataagccatggaaaataacacacacccaataattgaatttaccagagagctgcatacatgtgacataaa

SEQ ID NO: 830 - DNA, 3707 bp, Homo sapiens
ggctgcccgagcgagcgttcggacctcgcaccccgcgcgccccgcgccgccgccgccgccggcttttgttgtctccgcctcctcggccgccgccgcctctggaccgcgagccgcgcgcgccgggaccttggctctgcccttcgcgggcgggaactgcgcaggacccggccaggatccgagagaggcgcgggcgggtggccgggggcgccgccggccccgccatggagctccgggcccgaggctggtggctgctatgtgcggccgcagcgctggtcgcctgcgcccgcggggacccggccagcaagagccggagctgcggcgaggtccgccagatctacggagccaagggcttcagctcgagcgtacgtgccccaggcggagatctcgggtgagcacctgcggatctgtccccagggctacacctgctgcaccagcgagatggaggagaacctggccaaccgcagccatgccgagctggagaccgcgctccgggacagcagccgcgtcctgcaggccatgcttgccacccagctgcgcagcttcgatgaccacttccagcacctgctgaacgactcggagcggacgctgcaggccaccttccccggcgccttcggagagctgtacacgcagaacgcgagggccttccgggacctgtactcagagctgcgcctgtactaccgcggtgccaacctgcacctggaggagacgctggccgagttctgggcccgcctgctcgagcgcctcttcaagcagctgcacccccagctgctgctgcctgatgactacctggactgcctgggcaagcaggccgaggcgctgcggccctttcggggaggccccgagtagagctgcgcctgcgggccacccagtgccgttcgtggctgctcgcgtcctttgtgcagggcctgggcgtggccagccgacgtggtccggaaagtggctcaggtccccctgggccgcggagtgcttcgagagctgtaattgaagctgggtcttactgtggcttcactgcgtgggagtccccggcgccaggccatgccctgactattgccgaaatgtgctcaagggctgccttgccaaccaggccgacctggacgccgagtggaggaacctcctggactccatggtgctcatcaccgacaagttctggggtacatcgggtgtggagagtgtcatcggcagcgtgcacacgtggctggcggaggccatcaacgccctccaggacaacagggacacgctcacggccaaggtcatccagggctgcgggaaccccaaggtcaacccccagggccctgggcctgaggagaagcggcgccggggcaagctggccccgcgggagaggccaccttcaggcacgctggagaagctggtctccgaagccaaggcccagctccgcgacgtccaggacttctggatcagcctcccagggacactgtgcagtgagaagatggccctgagcactgccagtgatgaccgctgctggaacgggatggccagaggccggtacctccccgaggtcatgggtgacggcctggccaaccagatcaacaaccccgaggtggaggtggacatcaccaagccggacatgaccatccggcagcagatcatgcagctgaagatcatgaccaaccggctgcgcagcgcctacaacggcaacgacgtggacttccaggacgccagtgacgacggcagcggctcgggcagcggtgatggctgtctggatgacctctgcggccggaaggtcagcaggaagagctccagctcccggacgcccttgacccatgccctcccaggcctgtcagagcaggaaggacagaagacctcggctgccagctgcccccagcccccgaccttcctcctgcccctcctcctcttcctggcccttacagtagccaggccccggtggcggtaactgccccaaggccccagggacagaggccaaggactgactttgccaaaaatacaacacagacgatatttaattcacctcagcctggagaggcctggggtgggacagggagggccggcggctctgagcaggggcaggcgcagaggtcccagccccaggcctggcctcgcctgcctttctgccttttaattttgtatgaggtcctcaggtcagctgggagccagtgtgcccaaaagccatgtatttcagggacctcaggggcacctccggctgcctagccctccccccagctccctgcaccgccgcagaagcagcccctcgaggcctacagaggaggcctcaaagcaacccgctggagcccacagcgagcctgtgccttcctccccgcctcctcccactgggactcccagcagagcccaccagccagccctggcccaccccccagcctccagagaagccccgcacgggctgtctgggtgtccgccatccagggtctggcagagcctctgagatgatgcatgatgccctcccctcagcgcaggctgcagagcccggccccacctccctgcgcccttgaggggccccagcgtctgcagggtgacgcctgagacagcaccactgctgaggagtctgaggactgtcctcccacagacctgcagtgaggggccctccatgcgcagatgaggggccactgacccacctgcgcttctgctggaggaggggaagctgggcccaaaggcccagggaggcagcgtgggctctgccaatgtgggctgcccctcgcacacagggctcacagggcaggccttgctggggtccagggctgttggaggaccccgagggctgaggagcagccaggacccgcctgctcccatcctcacccagatcaggaaccagggcctccctgttcacggtgacacaggtcagggctcagagtgaccctcagctgtcacctgctcacagggatgctggtggctggtgagaccccgcactgcagacgggaatgcctaggtcccttcccgacccagccagctgcagggcacggggacctggatagttaagggcttttccaaacatgcatccatttactgacacttcctgtccttgttcatggagagctgttcgctcctcccagatggcttcggaggcccgcagggcccaccttggaccctggtgacctcctgtcactcactgaggccatcagggccctgccccaggcctggacgggccctccttccctcctgtgccccagctgccaggcggccctggggaggggtggtgtggtgttgggaaggggtcctgcagggggaggaggacttggagggtctgggggcagctgtcctgaaccgactgaccctgaggaggccgcttagtgctgctttgcttttcatcaccgtcccgcacagtggacggaggtccccggttgctggtcaggtccccatggcttgttctctggaacctgactttagatgttttgggatcaggagcccccaacacaggcaagtccaccccataataaccctgccagtgccagggtgggctggggactctggcacagtgatgccgggcgccaggacagcagcactcccgctgcacacagacggcctaggggtggcgctcagaccccaccctacgctcatctctggaaggggcagccctgagtggtcactggtcagggcagtggccaagcctgctgtgtccttcctccacaaggtccccccaccgctcagtgtcagcgggtgacgtgtgttcttttgagtccttgtatgaataaaaggctggaaacctaaaaaaaaaa

SEQ ID NO: 831 - DNA, 1652 bp, Homo sapiens
agcgagccgccacggtatgaccccaggggctctgctgatgctgctgggggcgctggggccgccgctcgccccaggcgtccgcggctcggaggcggagggtcgactccgggagaaacttttctctggctatgatagctccgtgcggccagcgcgggaggtgggagaccgtgtcagggtcagcgttggtctcatcctggcgcaactcatcagcctgaacgagaaggatgaagagatgagcacaaaggtgtacttagacctggagtggactgactacaggctgagctgggaccctgcggagcacgacggcatcgattcgctccgcatcacggcggaatccgtgtggctccctgacgtggtgctactgaacaacaatgatgggaattttgacgtggctctggacattagcgtcgtggtgtcctccgacggctccgtgcgttggcaacccccgggcatctatcgcagcagctgcagcatccaggtcacctacttccccttcgactggcagaattgcactatggtgttcagctcctacagctacgacagctcggaggtcagcctgcagacaggcctgggtcctgacgggcaagggcatcaggaaatccacattcatgaagggactttcattgagaatggccagtgggagaatatccacaagccctctcggctaatccagcctccaggcgatcctaggggagggagggaaggacagcgccaggaagtcatcttctacctcatcatccgccgcaagcctctcttctacctggtcaacgtcattgccccatgcatcctcatcactcttctggccatcttcgtcttctacctgccaccagatgcaggagagaagatggggctctcaatctttgccctgctgacccttactgtgttcctgctgctgctggctgacaaagtacctgagacctcactatcagtacccattattatcaagtacctcatgtttaccatggtcctcgtcaccttctcagtcatccttagtgtcgtggttctcaacctgcaccaccgctcaccccacacccaccaaatgcccctttgggtccgtcagatcttcattcacaaacttccgctgtacctgcgtctaaaaaggcccaaacccgagagagacctgatgccggagccccctcactgttcttctccaggaagtggctggggtcggggaacagatgaatatttcatccggaagccgccaagtgattttctcttccccaaacccaataggttccagcctgaactgtctgcccctgatctgcggcgatttatcgatggtccaaaccgggctgtggccctgcttccggagctacgggaggtcgtctcctctatcagctacatcgctcgacagctgcaggaacaggaggaccacgatgcgctgaaggaggactggcagtttgtggccatggtagtggaccgcctcttcctgtggactttcatcatcttcaccagcgttgggaccctagatcatcttcctggacgccacgtaccacttgccccctccagacccctttccttgaagactggagggttgagacccatgccccctgccagttgaagtgagagagtttggtgatactgtcaagccctatccttctctgcctcttaactccttcacgaggaatctgggcctcttatttcgttctggg

SEQ ID NO: 832 - DNA, 1376 bp, Homo sapiens
gcgcttgcaactccacctcagcaggggtctctcagtcctcttaaagcaaggaaagagtactgtgtgctgagagaccatggcaaagaatcctccagagaattgtgaagactgtcacattctaaatgcagaagcttttaaatccaagaaaatatgtaaatcacttaagatttgtggactggtgtttggtatcctggccctaactctaattgtcctgttttgggggagcaagcacttctggccggaggtacccaaaaaagcctatgacatggagcacactttctacagcaatggagagaagaagaagatttacatggaaattgatcctgtgaccagaactgaaatattcagaagcggaaatggcactgatgaaacattggaagtacacgactttaaaaacggatacactggcatctacttcgtgggtcttcaaaaatgttttatcaaaactcagattaaagtgattcctgaattttctgaaccagaagaggaaatagatgagaatgaagaaattaccacaactttctttgaacagtcagtgatttgggtcccagcagaaaagcctattgaaaaccgagattttcttaaaaattccaaaattctggagatttgtgataacgtgaccatgtattgggatcaatcccactcttaatatcaggaacatttgcaaagcagttgcatcacaactttgcatttattatcttagtttctgagttacaagactttgaggaggagggagaagatcttcactttcctgccaacgaaaaaaaagggattgaacaaaatgaacagtgggtggtccctcaagtgaaagtagagaagacccgtcacgccagacaagcaagtgaggaagaacttccaataaatgactatactgaaaatggaatagaatttgatcccatgctggatgagagaggttattgttgtatttactgccgtcgaggcaaccgctattgccgccgcgtctgtgaacctttactaggctactacccatatccatactgctaccaaggaggacgagtcatctgtcgtgtcatcatgccttgtaactggtgggtggcccgcatgctggggagggtctaataggaggtttgagctcaaatgcttaaactgctggcaacatataataaatgcatgctattcaatgaatttctgcctatgaggcatctggcccctggtagccagctctccagaattacttgtaggtaattcctctcttcatgttctaataaacttctacattatcaccaacagcctgattgctgctgaacacactgggtaagtgtttgctgagaatattcacagcaactgaaatggagcagacccgtcaaacatagatgactatgctgaggctcagaaaacaatgccccaaaatgaaa

SEQ ID NO: 833 - DNA, 858 bp, Homo sapiens
ctgagtcttacctcgttgtggcgtcagaaccgccgtcgctcgctcccttctcggcagtggtacctgttcccggtgtccctgaggacgtgcgggccaggtacggccccgaaagtaggaagcggagggggagcaggtttgcggggccaagtgttgcggcgacgcacctcacgtcgagaatcgggaggaggagactgcaaggataggcccaggagtaatggagtccaaagaggaacgagcgttaaacaatctcatcgtggaaaatgtcaaccaggaaaatgatgaaaaagatgaaaaggagcaagttgctaataaaggggagcccttggccctacctttgaatgttagtgaatactgtgtgcctagaggaaaccgtaggcggttccgcgttaggcagcccatcctgcagtatagatgggacataatgcataggcttggagagccacaggcaaggatgagagaggagaatatggaaaggattggggaggaggtgagacagctgatggaaaagctgagggaaaagcagttgagtcatagtctgcgggcagtcagcactgatccccctcaccatgaccatcacgatgagttttgcccttatgccctgaaacctgatggttaccattctgatgttaatagggagacccctgcttcctaaacttacacatttgtggtgtacctttgtcgtaaacgttttgatgttacctatttcttgtgggtctcctattaccagcttctaaatgaatgttgtttttgacccagtttgtaagtttctgtcagcaggagagttttacctattgcatggaaaaatgccccttatatattgtgaagttaataaaacagttttaaaaagcaaaaaaaaaa

SEQ ID NO: 834 - DNA, 4322 bp, Homo sapiens
aaccaaacggcgtcgcccttttacaccttcccggagcggcagtcatcccaaatacaaactacatgttccaggatgctttgggcggcagatctcgcggaagccgcgaggagagcccggccccgtctcgcgcgcctgcttccgcctccctgtggcggcggcttgttgttgtggaggccaaaatggcggctcatgcggcggcagcggcccaggcggcggcggcccaggctgcgcatgccgaggcggccgactcgtggtacctggcgcttctgggcttcgctgagcacttccgcacttccagcccgcccaaaatccgcctgtgcgtgcactgcctgcaggccgtgttccccttcaagccgccgcagcgcatcgaggcccgtacacacctgcagctgggctccgttctctatcaccacaccaagaacagcgagcaggcgcgcagccacctggagaaggcgtggttgatatcacagcaaatcccacagttcgaagatgttaaatttgaagcagcaagtctgttgtctgaattgtactgtcaagagaattccgttgatgcagcaaagccgctgctgcggaaggcgatccagatctcacagcagaccccatattggcactgccgcctgctcttccagctcgctcaactgcacacgcttgagaaggacctggtgtctgcctgtgacctcctgggtgtaggggccgagtacgcccgggtggtgggatctgaatacacacgggcgctgttcctcctcagcaaggggatgctgctgctgatggagcgaaagctgcaggaggtgcacccgctgctgaccctctgcgggcagatcgtggagaactggcaggggaaccccatccagaaggagtcgctgcgtgtcttcttcctggtgctccaggtcacccactatctggatgccgggcaggtgaagagcgtgaagccgtgtctgaagcagctgcagcagtgcatccagaccatctccacactgcacgatgatgagatcctgcccagcaaccccgctgacctcttccactggctgcccaaggagcacatgtgtgtgcttgtctacctggtgactgtgatgcactccatgcaggccggctacctggagaaggcgcagaagtacacggacaaggccctcatgcagctggagaagctcaagatgctggactgcagccccatcctgtcatccttccaagtgatcctgctggagcacatcatcatgtgccgccttgtcacgggtcacaaggccacggcgctgcaggagatctcccaggtctgccagctgtgccagcagtccccccggctcttctccaaccatgcagcacagctgcacacattgctgggcctgtactgtgtctctgtcaactgcatggacaacgcggaagcccagttcaccacggccctgaggctcaccaaccaccaggagctgtgggccttcatcgtcaccaacctggcgagtgtgtatatacgggaaggaaatagacaccaagaggtagtagctctacagtctgctggagaggatcaacccggaccacagcttccctgtcagctcgcactgcctccgagcagccgccttctatgtgcgtgggctcttctccttcttccagggacgctacaacgaggccaagcgatttctgcgggaaactctgaagatgtccaatgctgaggacctgaaccggctcacagcctgctccctcgtgcttctgggccacatcttctatgtgctgggaaaccacagggagagtaacaacatggtggtgcctgccatgcagctcgccagcaagatcccggacatgtcggtacagctgtggtcgtcagcactgctgagagacctgaataaagcctgtgggaacgccatggatgcccatgaagccgcccagatgcaccagaacttctcgcagcagctgctccaggaccacattgaggcctgcagcctccccgaacacaacctcatcacgtggacagacggtccaccccccgtgcagttccaagctcagaatggacccaacaccagcctggccagcctcctgtgaggccttgatggggccatccagctccgcagggcctgcgcgtctccggcttccacccagacggcactcaagcctgcccccgaggcgtgcttccttcctgattgtctctagagcttccaagtcctgggaatgtgcggggccagtccctgccctcccaggaggggtggtagccgttcccacctcgcagcaggacccccagtgcagaggctcacaggtggcacacaggcgctgtctctccagagccatccttcagagtggacctcagtgccagtcctgcctcagcatctgggtcacgtcggccaggagtagggtgcaggcctccagcaggtcctaatcctgtgtgccagggcaggcagtgccccaggggcaccacgcctgactctccatcacccaggccttgatgccgagcgggagtagagtgtttcctctgctcaaggcaatttccagagcccggatgccagtttctggcctgaatttggagggaagaagtaatggccctagtgtgggacgaagcacagatcccagcacttttcccagctttctctccagcatcagtccctgcagcagctggggcctctggtcaggaaccctcagggacccaggaactcagcttccaaacatctgcaccttgaccggactcgccatcccgccgtgggggtgcaggtgattgtaaacacgggtgtgcatgtggatgcacacgggtgtgcggtgaagatctgtggagatggagctgggagctgaggctcctgttgcaccagccaccttcccccatcttgtggctgctgaggggcaggaagcgggggagtgggctcgtctcctaaatttaagatcacctcctcagctagcttagagtgcgtggcacgggccccccgcccccgagatctggagcccagggactttcttcctggcagatctgtggccttccctgctcagcctcttggtccccccactccctccaccgcctcaccttccctgctgggtctctggggcacagtgtgaaacccgcaccctagccaggccccagggagcctccgctgggcccagacagcagcgtttggttttatccacttttcttggataatcaggaggtgccccagtggtcacagtgtggcattccgagttggggcgggtggtcgggtcaagatagcagcagcaggtgtcagggctcaagacaccaccccctccagcttctggggcccaggagcctctccctgctacagggggtgggggtcctgctcagcagggtaggtggtggttttaggtcttgtcaccctcactcagtggaactgcctctgggagctttggcgtctgtgactaaagggacgctggattgctcaggtcagctgctcggggctcccaggctgggtgtgccttagccacaggcagggctgtcaataacccccttcctcactggccaccacctgacatcagcaccagtgacaggctggtcagagggcggggctggtgagggtttgtcctaagaggaccaccgccatctctgggtctccagggggagagcctggccctgtcctttgctacccagggctgcccccaggcccatgaagccaataggagagcgtgtggcactggcccacaaactgtccctgtcctgtcttcctcccgagccatggcctctgctagctccaccttgaaggagccccccacatcctcccctacatcccagagatgccaccacttgtgtctccacaatgtgctcctgcccacccgggttccgcactgtccgacccctgcacaccactcatgtcaccacggcgtgcatcatgttcatccccatctatttatttaagcctttctttgcttgtagggcattttgtatgtagagcagttgaaaacagaacctcagaacttaacatctgtcctgatgttaaagtgcttttcatgaccaccctgttatctatgtatatgtaaagttaaggatgagatcttaagtttacaattaaaaactcagtactcaatatttaatattctactcgagctttatggaagccaaatcatgtgcatgtgtgtgtgtgcgtgtgtgcaagctttgaacctccttccacagccgcatcttctcatgacacaaagcttttgataagtactttcctgtgggtcgctcagggcctcatagcatctcattcaattacaagaatagaggccagacacggtggcgcatgcctgtagtcccagctaactgggaggctgaggcaggaggatcacttgagcccaggagattgaggctgcagtgagcatgatcgcgacactgcactccagcctgggtgacggtgagactttgtctc

SEQ ID NO: 835 - DNA, 1585 bp, Homo sapiens
attgacgggtccatccacgcgtccgattgtctgtatcagacatcatgggagcagatccagggcgacatcaaagggaagcatgagtctccaggaccagaggggcttggatgcagatgatcatcatctgggcactgctggatactgaagttctcattatgttgcctagactggtctcaaacctccggcttcaagagatcctctcacctcgaccttcaaattactgggattacaggcatgagccaccatgtcctaccagactttgttaaaagaggaacaggccaggcatcgtgggctcacatgaacactcatgccccagaagtaaacaagtgttagccaaccaggaggcctatcctccccctaacctcacccaaagccatctctgtgccctcccccttgcaggggaaacagcacacactagtgaaatcttgtcttagtgtgtccggaattggtgggttcttggtctcactgagttctagaatgaagctgcagaccctcgcagtgagtgttacagctcttaagttctggtcagcctatgtgccatgccagacccaggaccgggatgccctgcgcctcaccctggagcagattgacctcatacgccgcatgtgtgcctcctattctgagctggagcttgtgacctcggctaaagctctgaacgacactcagaaattggcctgcctcatcggtgtagagggtggccactcgctggacaatagcctctccatcttacgtaccttctacatgctgggagtgcgctacctgacgctcacccacacctgcaacacaccctgggcagagagctccgctaagggcgtccactccttctacaacaacatcagcgggctgactgactttggtgagaaggtggtggcagaaatgaaccgcctgggcatgatggtagacttatcccatgtctcagatgctgtggcacggcgggccctggaagtgtcacaggcacctgtgatcttctcccactcggctgcccggggtgtgtgcaacagtgctcggaatgttcctgatgacatcctgcagcttcttgaagaagaacggtgggcgttcgtgatggtgtctttgttccatggggagttaatacagtggcaacccatcaggccaatgtgttccactgtggcagatcacttcgaccacatcaaggctgttcattggatccaagttcatcgggattggtggagattatgatggggccggcaagtacaggaagaaaacaacatgcaaagccccttggaggacaagttcccggatgagcagctgagcagttcctgccactccgacctctcacgtctgcgtcagagacagagtctgacttcaggccaggaactcactgagattcccatacactggacagccaagttaccagccaagtggtcagtctcagagtcctccccccacatggccccagtccttgcagttgtggccaccttcccagtccttattctgtggctctgatgacccagttagtcctgccagatgtcactgtagcaagccacagacaccccacaaagttcccctgttgtgcaggcacaaatatttcctgaaataaatgttttggacatagaaacagaaaaaa

SEQ ID NO: 836 - DNA, 530 bp, Homo sapiens
aatttcgtcaaggagggggccgccctgaaccaggaccggtgccgaaactggacccaaggcccaggtggcgctgggttgcctgcaaggccgttggccaggcctgaccctttgccaccatggccattgggcaaactctgccagggccactggagcctgttcttgaagctgccactgccccacaagctccagtcatgggtagggggagcagccttatttcaggccggccctgtcccggggggccagttcctccccaccaccacggccttcctgggcccaccttcttccgccagcaggatggcctgctacgggggggctatgaggcacaggagccgctgtgcccagctgtgccccctaggaaggctgtccctgtcaccagcttcacctacatcaatgaggacttccggacagagtcaccccccagcccaagcagtgatgttgaggatgcccgagagcagcgggcacacaatgcccacctccgcggcccaccaccaaagctcatccctgtctctggaaagctggagaagaacatg

SEQ ID NO: 837 - DNA, 5999 bp, Homo sapiens
tgtccttcgaggccagcgtggccctgctggaggcctcgctgaggaacgacgccgaggaaggaatgaatggagaatccatgatgtaaccacagcccccttccctgggcttgttcagaggcggtctcgcctgctcattgtgagccaagtacgctacttcctgaagaataaggtcagccctgatttgtgcaatgaggacggactcacagccctacaccagtgctgcatcgacaactttgaggaaattgtgaagctgctcctctcccatggtgccaatgtgaacgccaaggacaacgagctgtggacacctctccatgctgcagccacctgcggccacatcaacctggtgaagatcctcgttcagtatggggccgacttgcttgctgtcaactcggatgggaacatgccatatgacctctgcgaggatgaacccaccctggatgtcatcgagacctgcatggcataccagggcatcacccaagagaaaatcaacgagatgcgggtggctcctgagcagcagatgattgcggacatccactgcatgatcgcagcgggccaggacctggactggatagatgcccagggtgccacactgctgcacatagctggagccaatggatacctgcgggcagctgagctcctcctggatcatggagtgcgtgtggatgtgaaggactgggatggctgggagcccctgcatgcagctgccttctggggacagatgcagatggcagagctattggtgtcccatggagctaatcctcaatgcaaggacatccatggatgagatgccaatagacctgtgcgaggaggaagagttcaaggtcctgctgctggagctaaaaacacaagcatgatgtgatcatgaagtcacagctgaggcacaagtcatccttgagccggaggacctcccaccgccaggcaagcccgtgggaaaggtggtgcggcgaacccagcctgtcggaacaggacccaacctgtaataggaaggagtatgaagggaagaggccatcctgtggcagcggagtgccagctgaggatcagcggacctccacctacaacggggacatcagggagacccaggacagaccaagagaataaggaccctaaccccaggctggagaagcaccgtgctactctccgaatttcctaccaagatcccacgaggtgaactggacatgcctgttgagaatggcctccgggctccggtcagtgcctaccagtatgcgctggccaacggggatgtctggaaggtgcatgaggtgcctgactacagcatggcctatggcaaccctggcgtggccgacgccaccccgccctggagcagctacaaggaacagagccctcagacgcttctggagctgaagcggcagcgggctgcagccaagctgctcagccaccccttccttagcacacacctgggcagcagcatggccaggacgggcgagagtagcagtgaaggcaaggcccccttgatcggaggcagaacttcaccgtacagcagcaatgggacctcggtatattacacggtcaccagcggagatcccccactcttaaagttcaaggcccccatagaggagatggaggagaaggtgcatggctgttgccgtatctcctagtctccgtgtgatggaggagggagatgcctggggaggggctcctggaatccaggccagcccaacaaccctggctggggaggtgtcagggcagctggggagaggtgggctctgcttttcagaggaactcagaccccagccctcagctggctgcccatagcatcccatgtcccacgtcccgtggttctgcttcctgctgcatcgtctgccatctgacacaaggcctgtcgtggcctcctggttcactctgctgtctgatcttgggagggtgggcttgagatcccagctctattcttggtataaaggcttctccggatcagtacatgcatgtcacattaacacacacacacacacacacatatacacacacacacaagctcgatcagtgtgtgtaggaatgacatacctgggctcaggggaagcaagggggcttagaatttgtggggtattcccaaaaggatggaagttaagactcagagtctcattaccactgccaatgtggttttagcaggggaggggacctgctaagctgagacccatagtcctgctcagagttatcccaaagtctgagccaccagccacacctgacaggggtgagaagtcctcgctgtgttcagagggagccaggaatctacatgggtagatgagatagacacagacctgctccccgcagccttgttgagagccacacttctgcccatgccaggagccagctgtgtgaccatccaggggtggagggggaaaaccaggcaatttcgttcctggaatcaaccaaatcatgttttcctcttggatggaagtgtcaaaggcagaagggtgtgggagggggacaaggtcagtatttaccaaagtgtatctgattttaaaaattcctttagtctgtaaaactcctagagggagggaggtaactgaattcacttctttttgtggatcgtatcaaggtcactgggttttactggctggtgctgggaaaatgaagctaagtgaggagcttccattggaatgcttttccagggagagaggccagttaatttaaaaaaaacagtcgctagttaacagcgacagagcccagcaccctggggtctttgtgaatatccagactgtttcagcccagcccatctcagccaaccctccttagactgagctgtcagagcaagcaattaggggccagcctgcctccacctcccacccccttccacctccatcagtcatgtgtgcagagtcagtgctcgggatcccgggcccagcttttgcctttttggggatgcttggtgagacagatttgccagtcagcccttttgagttcccgcctcacccaggggctcccagcctgcacttgcaggagtggtgatgccccaagtctgcgaatccagggtgcacgtggtcaatatcccctcctgcattcaggagagccatggtagggctggagttgggtcttgcccagccctgcagtttcatagtcccagccttcctggtgctggggagggaggactgtgaatggctgttctcccctcactgctgagtctcccaggaccccctttggagatgcccatggcatgggcactgcccacaggctcagccagaacctcttggtgtacccgataagctgcaggttatcccttgctctgtgcgccttttatttgtccttaaactacctccttagagctctgaaggggtctcctagttccagattttaatttggggaacagatctgggttctttttaaccctcttctttctcagtctatgagaaacttgccctgaggggcacctgggctaggggcttgggactggaagaccatccccgccttgtgccacaactttggtcatgggatctgctctttgtcattcttagccccctactgtggcccccatagccccataacccagagagggagctggacttcagggagcctgagtgatgctttcccaggagcagggcagctggctggaccagaaagtagagggcccatgggagtgactgcacccttgttggctgctggaaggggagaggttctcagcatcaggccacctccaccccaatgccaggatagatgtattctggagtaggggtggaggcggcccaggaggctgaatgacaggtgcacagatgcttcccacgaccttgccatttggggtgggctcttcaacatctcaggctggggctggaacaggacaggatgatctaaaacacacgtaccattggctgtaaaacagtatgagcccagactgacgctgaaatccctcatgagccaaccttagctacaaggtagggagttctgagggaagccgcgtgctcctcaggagagagctgtttaggttttccgatctttttgctcaggggccaaacactgaaggcacgtactgcccaacccactgagcgcctgaggccattccctccttttccgcatgcctcctgcctcctgggctattcctctccacccagaaggctgggaatcccagctgattccctgacaggagccgacttcacacacaggtgactctcaggcattggctcatgttttcagccagggataaaccatcccttcttggggctttaagtccctggggagctttccctgtaggtctcctgggtgttgagagacaagttggagaccaacctccaatgaatgagccgcggtcattcattaattcactcacgtaatttactgagtagctgcaacatgccagcctctacgttaggttctgcggataaaggaggaataagacagagtcaggagaactgttccttgtggtttccgtcccttggggaccacaggcatcagcagtcccattcaagtcacctgaggcaaagtgtctgcatcttcgtccagcgaccctttgcttttcggctcctagaatccttagagtctgaattcctttagctgggaacagctgtcatggtcacccctggataacatttgccaccaagtatagatgctggatcttgggttccaggcagacatcatccaggtccatctggaactttcagtgatagctgccttcagccagcatctttgggggactctataatagcagcttgagatcagtgtctagaagactgttctgcaatttgctgccaaatgcatctcaggtttttaaagtcattgtttcttgctcatgggggctcatttattacatagtcccctcaccccactaatggataatgggaggaaaagttgctgcttccttcagcatcaaagcctttccttgggaatctgcctccctccatggcaggggtggattcgggagctgggagtaaccaggcaaagtcaaccagatgcctagctcctgctgagacccaggtcctatggcagctcctcattagattaaaggagaccacttccaaagcaggtgctgcatggctcaccatcatatgccccaaacaactgaaagttggcggttatcaccagactgtgagtttctggcaagtagcttggggaagctgaataaactctaggcccagggctactaaagacttcaggatagaattctccatcaaatatacagcataagtaaaactgctctgcactgtttaatccatttccaaggggcttagaaaagctaacaagggtgtgtcccctgtcctgccccaccggtttgctggctttgtaataacataagaccattgtggttgttggtgtcagataccttcccatcctgagctctctcacctacctgctctctctcctagagcaggatactggggtacttttaagaagggtgctccttttaagatgcccagaaaagctgtatttaactcttgctatttgtaacttggggatgggtctcccctgccccagggcacataagagcaaaggctccaatggtcagtggatgactctgcaaaagtgaccccctgtgccagaagctatagccctctccccaacaggtctctcttgttggccagagggcctgcttcccatgggcattgcaagtgccaccgtgcggggcctggctcctgcacacccaggaaaagtctgcagacccccagcccctccgcaataattcaccagaccagaagccactgggtgtacagagaacacttaaaaaaatgtattttatgtgaaaaaaaattaaaactctgtatacctgtatccagcagctttgtgtaaaaatggcaatcaagagagtcgtaatatatttaaaactttttttaaaaaaaatcttcgcagatctttgatatcgtactgaggtaacttccacgtagccccttgccactgcggcaccggtgggccttgggtccaaaatctgtggctcagccacatcccaaagggggcacatgtccctggagttgcttccagcttgccaagggcctgtgacagaattcgctgttaagagtttttaattaaaattattaaattccttttaataaccaaaaaaaaaa

SEQ ID NO: 838 - DNA, 6329 bp, Homo sapiens
ttttttttttttcggagtgaaaaagacgctgtatttgatttacaatgaacaagatttacaaaaaggggtggggtggtcttggaactgctcccagtccccccggactgggtggggctctagggcagcctgtctgacagaccaggaccccaggatgtctgggccccgacgtaggacttgacctacgtctcacttgacctttgacgtggggcccagcagccgtgagtccacccagagtgccggcacccttggggaggccggtgaggtcaggaaggcatcgtaccgctttttctcctcctcccatctcgtggtggacagacagacataggatctgggaacttgccctgggggccacaggccctcagatcccccaggggcccaacctagggcatggaggcggctgctggtgcgtgggcggaggcggaggccagctgcccccagcgtggcagcgtaaggcacattttcaaatcactcgagactcgacagtgaacacccgatgctggttctgcggccggagggagctggggctggggctggtgctggtgcggtgcccggcggtattgctcagaggaagatgctacagtctagacgctgggcgggttccggctgcacccactccggcttggggcgcgttccaggggagggtgggggcctcagccacagccactcggcctcctcccctgaggggctctcaggtacctcaggtacctatgtcccaaggcagcactggagattgtaggtcagaggtcagtgaccttgttctccagtgcagcggcaatctgctgcaggcggaaggccagctgcatcttctgggcggcaggatcctcctccaaggcattgatgatctcgtcatagtacttctgcgtgtattggtagagctggtggagtgccacgagggtgttcaaggagtccgtgtgcgcccgggaaatctctgccaggtgtgtgttcatgtcctggtcgctgacctgcaccatctgccggatccccttgtagtaatcctccaccatcttcttgtaggtggagatctccttggcgtacagcagcttgttgctgggagaatcgcggctcagcttatgctccgtgcgcgtgcaggcatccatgaaggtctgcgcgatgactgacagcgaggcgtccaccacctcgtggacatgcacgtcaaagatgaagtgggggttcttgaggatgttcacccagaaccggagcggtaaactgttcgtcttccagatgtggatggtgtcttcatcctggatgttgtgcttctctgcctgctcgtccaggaagtcgaagaagtacttgactgcaggtggcaccgcgtgcccaggcgccagcacgctctggaagaagttgtccacaaactgctgcagtgtgcccttgactgagagcagccgcgtcaggtagatctcggtgatggccttcgtccgctccttctctttcacgctgcctctcttggacttgccctcgtccacctcgtcggtcggccgcaccaggtgccacacccggttctcctcctccaggagggcatggcgctccccaggcaggtcctgctggctgtcctccggctgctgggagacccccaccttggacaggatgagggtggctccatcccggacattgtagtgcataagggtgttgacgcgcttccaccggccctcccgctgtgacgtcaggtccaggtccgacaggatctgcgctgtggagcccggacgccactccaggaccacgctgtctggcctgggccagcaggagcagggctgcccacggtacacctggtcaatgatcttctccttgacctgggagatggtgtcacagttgaggaccttcaccgggatggcgtccactccctcgtcctgcacgatcacgctcaccgtcaggggtgcgtactccacatcatcccccagcagccccgtgtcgttgagagtgtacttggccttcttctgtaccgcatccaccgggcccttttccacctgatgtttgatggccttgaagagcttgtacaggggctccccggcactgtccttgaggtactggtacaggcagatggacatccagttggacagcatcctctccaccacagtctcagacctgcgcagcatcagcttggggttcttggccaccacgtactgctccaggagctccaggaagagcgtgtgcatgatgtccgtgtagtactccagtttcccgtgcagcgccaccgtcagcagggacgcgaagtagaccttggcgcgggccgagaactccggctggttctcccagggtgtggatgaaattgatgaggaaagacttgctgttcagcaggttggagaactggtagagggcctgctccaccaccggccgccgcggctcggggatgtccagcttgccggtgatcatcacgtccttgtcgccgtccttggagggcaggaagaagacgcggtcggtgtaggtcttgtagtccagcacggggatgccggcctcgtgcacgtcgttggtctggtcctccatctcgatcatcaggtctgtgaattccttcttgcagcggtcccgcacgctctcctccaggccctccagctgggacttgatcttctcatactctcgttcggcctgctggctcttcctccagtagcagtagacagacaccgcgatgacgaccaccatgggcacgatgaccagcggcaagatgaggctgagcggcacgtcgctcacccgtgtgtcgtactccacgcggcccagcacccactcgcgagagccgaacttcacaatgaactcgggcaggttgtgtgtggtgtctcgtttctgccgccgcttgggcgggggctgcacctccgggggctcacagtacaggtcggtctccgtcagcgtcttcatggtgcagcgctcggcacccacgaaggcctcggcctcctgcagcgtcatcgccttgttcagattggtgccccgggcgcggatgagcttgttgacctgcttcttgacgccacctgtgaagttctcaaaggtggggtcaggcacgtactcgaaggccccggcctctgttctgagcagggcacggtgcccgtccatctcgatcagcaccgtgaggttgtaggcctctggctcctcaggcacagccggggacaggaagacgaccttggtgtcattgtggaacacgtagtctgtacccaccaccgtcatgggctgcagggattcagcctcccgcggcggctgccaggactgcaggggctccgcgatgaccaccatggcaaacctctggatcaggctgaagccctgacccgtgacgttgatgctgcggccaccactggcaaagcttcgtagcggctcgaaggctcgcagtacggggttttcgcggtaggtgaagaagatgccggggttgggcacgggggaccccccgtaggagacctccagaagcatctggccccgtgtcgcctgggggccagtgacacactggagctgcgccccaaacttcgtcactttacacgggacgccgttgagggtcacccgcacgtcctcctgggagcccgtgtccaggtgggtgccgtggatggtcagtgtggtgccgcccgcctgcggtccctgctgcggctccacactgagaggcttgggctgttggaaggtgaactggacattgggaggcgaacggcccagtttcccgaagacgtccacctcgacaccccccgtgaaaggcgtctccgcagcctcgatcacacacacgatccgggtggacacggagtaacgttccggctgaaaggagcagttccggccggccacagagatcctctggatgtcccctgcttggacgcccaaattggaccccaggatggtgatgcggatgcccccacccagggggcccgtctcaggctggatcctggtgatgacgggcggcgggcactcggaggtggtgttgcacagggcctcatacacgcacctgctctggcccccgcaccacgcacacctgtagtcggggttagcggcccggcacaggctgcagtcgctgcggccaaaggagcagtcgtagagggtcacatggagcttgctgtcgatattcttgccgtaagacttgacgtaaaggtgcaggggcagcgtctcgttggcatcgtgggacagctttggggtccgaaaggcgaaggtcccagattcctgcatggtcaccggctccatgaacttgagcaagtcactgcccacgtgcagggaggaacccttcacggtgtccaggttcttgccctggaagttcacatctgtctcgtggttcatggggatcaccagggggctgggtcccaggaactggggacagctgtcctccatgtgggcacggacgatgccgtcctcagggttgggcgaagcctcccggcactcgtggtagcgcaggtcccactggcaggtccagcggttgctcacgcaggagatgcacggcaggttctcctccaggctcatggcctggcggcagtcgtagaaggggtactggtaggacgtgaggaagatgttgcctcgtctaaggaggagctggatggtcacggccacgtggtcctggcctggcggtgtgacggggatgctgcttggggagttgcagatgacggcctcgccctccacgcgggcggggtgtggcggcgactccccaaaaaggcacagcaactcgtcctcctcgctcagggcagggagggggctgacggtcagctgcacctccccctgggcccgccggctcatgttctgtggctgggcgctggtgacggccacgcaggacttgcttcggctccacagccagtggctggcctcctcggcccgcggacactcggccttccgggtgcatcgtccctcgacgacgcaccagccgcagtaggggtcctgggagtcgcggcactgggtgcaggtcgggtagctcaggcactcctgcaccggcagccggaacaccttgtcctgggtcatggcgtacaggctgcccaggtctccagacagtaccaggtcgcgcttgactctcttgtttatctccacaaggatagagtcgtactctgaggaggtgccatctggggtgaggtacaccttgaggatccggccatcagaggtgcccagaaaagcaacagtgtggttgttctcggcggcgaccgtcacggccgtgaggttcaggcctccacgctgcagcacggctgtgcctctgagcccgtcgcggctgcccagcgggtagggcaggtgctccgagccacatgggaagctcttgctggagcccggcgcgtggccgccgcactggatatcgccgtggaagggcttgtagaagatgtcacgggcctcccgggtgcctgtgtaacaggcgttgcggttggcctccatcttggcgtgcacctcgtccagcgggaacaggcagaggcccgcaccgggccccccactgctccggctgtctctgctgaagacagcatatagcaccctgccagagccaggcgcagccacggaggcggccaggcaggtgccaaaggcagcggcgtggatgtcggggtcccggcactgcaggtccatctccaggtaggagtagtagttggggtcttctctgcacatgcgtgccagcagcgtgcggttccgggccgggtgcttgtcctgctggttgaagacaaagaagacgtaggggccgtcctcgaaggccgccacgaactgctgtgtgttggtggacaggtagccggccttgtaggtggcgtggtccgtgtaggcttcaaaggcctccctgctgtcagtccggtccaacagccgagtgctcacgatgatgccgttgtcgtgtggcccattgcctttgcccacaaacagcacgcggtcaccaccaggacccgtggagctcaccagccccactgtggccacgccctcatcattgctggccacgaaagacttctccccgctgccgtcctcgtagaacaggcggagggagatgttgctcagggcgcgcagagcgcaggatgcccttaagaagctgcccgcactccaccaggcgtttcctgggagggtcgaccagcagcagctggttgacattgtcagtcatctcagcctcatggcactggctggcctcgatgggcggcgtgcacttcttgttgtccaggaccgggcccgtggccacctgctgctccagctgcagcttcgcatccagctggtagagggcattcaccgcccccaggtacaccacgcctgaggcctcatccacagccaggtggttcagctctttctcgctgcggaagaagtccagcttgcggggcctcaggctggcacctgcgcccagcaggcccagcagggtcagggcccagagctgcagtgccattgccccctgcacccgaggctccagtggtccagctcagtttctgctccaggccagcatcgagattctcacgaaa

SEQ ID NO: 839 - DNA, 2197 bp, Homo sapiens
cgagcccggagacttgccttgcaatgccatgtttgtgtatgtgctctaactcccggagagcaatcagggagacggctccccggccagacttggctgatgttttcttgtttctgtttcagccttcaggataattccttcagcagcaccactgtaacagagtgtgacgaagatccagtctctctacatgaagaccagactgattgctccagtctcagagatgaaaacaataaagagaactaccccgacgcaggggctctggtagaagagcacgcgccgccctcttgggagccgcagcagcagaatgtagaggcgaccgtgctggtggacagcgtattgcgacccagcatgggcaacttcaagtccaggaagcccaagtccatcttcaaagcggagagcgggaggagccacggagaaagtcaggagacagagcatgtggtatccagccagtcagagtgtcaggtgagagcaggaacaccagctcatgagagtccacaaaacaatgccttcaagtgccaagaaaccagtgcgacttccaaccaagaatagaccagaggactgccacttcgccaaaggatgcttttgaaactcggccaggacttaaatgaggaagaagctgctcaggtgcatggagtcaaggacccggcgccagcatcaacccagagcgtgcttgccgaatgggacagattctgcagacccctcaccagtccacaaagatgggcagaatgaggccgacagtgcaccagaagacctccactctgtggggaccagcaggctgcttctattcacatcactgatggtgataaccccactgctgttcgccacggttgttccctctttcaggccaaagccagagattcaacttagaccccgagtcagccccatctccacccagcactcagcagtttatgatgccgcggagttcttcacgctgcagctgtggagatggcaaggagccacagaccatcacccagctcaccaagcacatccagagcctcaagcggaaaattcggaaatttgaagaaaaatttgaacaagaaaagaaataccggccttcacatggtgacaagacttctaatcctgaagtcctgaaatggatgaatgatttggctaaaggtcgtaaacagctcaaagaactaaagctaaagctgtcagaagaacaagggagtgctcccaaaggtccacctagaaacctgttgtgtgagcaacccacagtccccagagaaaatgggaaaccggaagctgcgggcccggagccaagctcctctggagaagagactccagatgctgccttgacatgcctgaaggagagaagagagcaacttcctccccaggaggattctaaggtaactaagcaagacaagaacctcataaagccgctttatgaccgatacagaattatcaagcaaatcttgtcaacaccttcccttattccaacaattgtaagtcaggatacttgcatgctgttactttgtactgatgtgtagttaacaggatgtcacatagtagtacaagagttataaaagacccttcatggcagtatatactgcaaacaaggctagttgtcatttcaaaaagtgaaaatttggtcttctctaaccccattactatatttaacagtggctgatattagaactattgtaaaataggaacatatagcacttgtatgtctagagccaattttaacatttgctttcattatcttgggtgaaaagaaatgatagatttcagtttggcattttctaatttgtaacacagctagacaaaacagagcctttctgttctgtgtgttggttaattttttcctttaatcagaaaattaacaatatattcttgatataatgcaacatttgtttttggtaccatttgaccatactgtacaagatatgagaagatttatttcaatagaaaatataagtactgaaattgaattaggctacttttaataaagaatgatttatggggaatacagaactaggaaaaggcatcacaaatcctactccatcaatatccagaacagttacttgttcaagatatcaatataaaaaggaataaatattaacaaatataaatttaagtatggcttggggtacatttatacttccatttttttgaggacaaattatacttccacatttttaaaggacattaaggtgaataattaattcatagtctttggggaattttccctttatgggaa

SEQ ID NO: 840 - DNA, 2211 bp, Homo sapiens
tttttttaggttttacttttcttttattaggttgtttgctatgtctttggctgatctaacaaaaacaaatatagatgagcatttcttcggcgtggcattagaaaacaataggaggtctgcagcatgcaagagaagcccaggcacaggcgatttttcacggaacagtaatgcttccaataagagtgttgattatagcagatctcagtgctcctgtggaagtttaagttctcagtatgattattcagaagactttctctgtgattgttcagaaaaggctattaatagaaattatttaaagcagcctgtggtaaaagaaaaggagaagaaaaagtataatgtttctaaaatctcccaatctaaaggccagaaggaaatatcagttgaaaaaaagcacacctggaatgcatcactctttaattctcaaatccatatgattgcccaaagaagagatgctatggctcatcgaatactctcagcaaggcttcataaaattaaaggactaaaaaatgaattagctgatatgcatcataaattggaagccatccttacagaaaaccaatttttgaaacaacttcagcttaggcatttgaaagctataggaaaatatgagaattcacaaaataatctacctcaaattatggctaaacatcagaatgaagtaaaaaatttaaggcaactacttaggaaatcccaggaaaaggaaagaactctatctaggaaacttagagaaactgacagccagttactgaagactaaagatatcttgcaggcactgcagaaactttctgaagacaaaaaccttgcagaaagggaagaactcactcataaattatctattatcacaacaaaaatggacgcaaatgacaaaaaaatacagagcttggaaaaacaactgaggttgaactgcagagcctttagccggcagctggctattgagactcggaagactttagcagctcagacagctaccaagactctgcaggtggaagtaaaacaccttcaacaaaaacttaaggaaaaggatcgtgagcttgaaattaaaaacatctatagtcatcgaatacttaaaaatttacatgacacagaggactatccaaaagtttcttcaacaaaatcagtccaagcagacagaaaaattttgccattcacaagtatgagacaccagggaacccaaaaatcagatgttccacctttgacactaagggtaaaaaggcaacaggaaacatcgatcataaagaaaaatcaactgaaataaatcatgaaattcctcactgtgtgaataaactaccaaagcaagaggattctaagagaaaatatgaagatttatcaggggaagagaaacatttggaagtccaaatactgctggagaatactggaagacaaaaagacaaaaaagaagaccaagaaaagaaaaacatttttgtgaaagaagagcaagaactaccaccaaaaataattgaagttattcatcctgaaagagaaagcaatcaagaagatgttctagtaagagaaaagtttaaaagaagcatgcagagaaatggtgtggatgacaccacttggcaaaggcactgctccctacacgaaaggccccctcagacaaagaagacattactcattcacagaagcaactgaaaacctgcatcatgggcttcctgcttcaggggggccagccaatgccggcaacatgaggtacagtcatagtacaggcaagcatctcagtaacagagaggaaatggagctagagcattctgtacagtgggtatgagccctcatttggtaagtcttccagaataaaagtgaaggatacaactttcagagataagaaaagcagtctcatggaagaactctttggatcaggctatgtcttgaaaactgaccaatcaagtcctggtgttgcaaaaggctcagaggagcctttgcaaagtaaggagtcgcatcccttgcctcccagtcaggcctccaccagccatgctttcggagactctaaagtaactgtggtaaattctattaagccatcgtcacctacagaaggaaaaagaaaaataattatttaaatataatcaatatcctaatgcattctggtttgatataatgctgcttatgtgccttgcatcttatttttgaaatgtgtgagagagggagtgtatgtatgtgtgtgttttagtacttaattgactttcgataattaaatttttgtttgattgctaaaaa

SEQ ID NO: 841 - DNA, 3277 bp, Homo sapiens
tttcgtcgcggactcgggagatggaggaaaaggagatattacggcggcagatccgcctactgcagggtctgattgatgactacaaaaccctccacggcaatgccccggcccctggtaccccagcagcttctgggtggcagccacccacttaccacagtggcagagcctttagtgcccgctaccctcgtccaagccggaggggctactcttcccaccatgggccttcgtggcgcaagaaatactccctcgtgaatcggcccccgggaccctcagaccctcctgccgaccatgctgtgcggccgttgcacggggcccgggggggccagcctcctgtcccgcagcagcatgtccttgagagacaggtccagctcagtcagggtcagaacgtggtcatcaaagttaaaccgccatcaaagtctggctctgccagtgcctcaggggcccagcggggctctttggaagaatttgaggacaccccctggagtgaccaaaggccccgggaaggtgaaggtgagccccctcggggacagctgcagccctcgaggccaacaagagccagggggacctgcagtgtggaagatcctcttctggtctgccagaaggagcctggtaagcccaggatggtgaagtcagtgggcagtgtgggcgacagcccccgggagccccgccggacagtcagtgagagtgtgattgccgtcaaggcgagcttcccatcctccgctctgcccccacgcactggcgtggccctgggccggaagctgggttctcattccgtggccagctgtgctccacagctccttggggacaggagagtagatgctggccacacagatcagccagttccgtctggctcagtggggggccccgccagaccggcctcaggacccaggcaggcccgggaggcctcgctggttgtgacctgtcgaactaacaagttccggaaaaacaactacaaatgggtggctgcctcctcgaagagtccccgggttgctcggagggccctcagtcccagagtggctgcagagaatgtgtgcaaggcctctgctggcatggcaaacaaggtggagaagccgcagctcatagctgacccagagcccaagcccaggaagccagccacgtcctccaagccagggtctgcccccagcaagtacaagtggaaggcctccagcccctctgcctcctcctcttcctccttccgttggcagtcggaggccggcagcaaggaccatgcctcccagctctccccagtcctgtctaggtccccgtcgggggaccagaccagcattagcacacagtggcttgaagcccctctctggggagaccccactctcggcttacaaagtgaagacccgcaccaagatcatccggagacgcggcagcacaagccttcctggagacaagaaaagcggcacctcacctgccgccaccgccaagagccacctcagcctccggcggagacaggccctcagggggaagagcagccctgtcctgaagaagacccccaacaagggcctggtacaggtcaccaagcaccgactatgtcgcctgccaccgagccgggcccacctccccaccaaggaagcgtccagcctgcatgccgtgcggactgcacccaccagcaaggtgatcaagacccgctaccgcattgtcaagaagacgccggcctcgcctctcagcgccccgcccttccccctgtctctgccctcctggcgggcccggcggctctcactatccaggtccctggtgctgaaccgcctgcgtccagttgccagcgggggtgggaaagcccaaccgggctccccttggtggcggagcaaaggctaccgctgcatcggaggggtcctctacaaagtatctgccaacaagctctccaagacctccggccagcccagtgatgcgggcagcaggcccctcctgcgcacaggccggctggatcctgcaggcagctgtagccgttccctggccagccgggcagtgcagcgcagcctggccatcatccggcaggcgcggcagcgcagggagaagaggaaggagtactgcatgtactacaaccgcttcggcaggtgcaaccgtggcgagcgctgcccctacatccacgatcccgagaaggtggccgtgtgcaccaggtttgtccggggcacctgcaagaaaacggatgggacctgccccttctcccaccatgtgtccaaggagaagatgccggtgtgctcctacttcctgaagggcatctgcagcaacagcaactgtccctatagccacgtgtacgtgtcccgcaaggccgaggtctgcagcgacttcctcaaaggctactgccccctgggtgcaaagtgcaagaagaaacacacgctgctgtgccccgactttgcccgcaggggggcgtgtccccgcggcgcccagtgccagctgctccaccgtacccagaaacgccacagtcggcgggcagccacgtcccccgccccagggcccagcgacgcaaccgccaggagcagggtctcggccagccacgggcccaggaagccttcagcatcccagcgccccaccaggcagacgcccagctcggctgccctcactgcggctgccgtggctgcacctccccactgcccaggggggtcagcctctccctcatcctcgaaggcttcctcctcctcctcctcctcctcatcccctcccgcttccttggaccacgagggcaccatctctccaggaggctgccttagcagcagcgtgctccaacaggctctgcaagctgccttccttcatctccctgcagtcctcgccgagcccaggagcccagcccagggtccgggcccctagggcccccctcaccaaggactcagggaagcctctgcacatcaaaccacgtctgtgaggaccccagggaccggcctgcacctacctcagaccctcatccttggagaggaaagaggctctgtccaccactctaccccacaggagggccgcccgccaccaagcctcacctgggggccacagggacactgctctgcctgcctggccctcaaccttccatgaccagcgtgtgcgcagggcctggtcttcctcccccaagccaggcccctgtccccaccccaccaccttccagggtgccaggcagggctggcctccaggcctgtccccgactgccattggcaacaggtggccctgcagcccccagccctccccacccaggttttcggcccagtgaagaggccatctggccaggcctcccaggtcaggtgttttatgttcagcaataaaggttctatccgtaaaaaaaaaa

SEQ ID NO: 842 - DNA, 2074 bp, Homo sapiens
ttagttaggagcccagaggctgatctgtgggcgcccggcgagagaggccccgccccgccctggaggccctggcagctccgggctgagagcagttccggtgccaaaacccttccctcccccgctcccccggaagtgcttttccaggattcgggccggagagaggccttgtaggcacagcggctgagactcgatctgctccaagtaggggctccagcgcgggtcggagtctgggggttcgcgcccgccgacccgcgccctgctccctctcagcacctgggcggacgaaatgaccattaagaagtagatgcccagatgcaaaagtgatgaaacagtccatttgtcataaagtaagatgcagctgtggcatgtcaaccagcttggaacaaaattgtatctgtttttctcagaagagaattccacaaggttaaatcagcaaacaaagaaaacatggtattttgaaatatgattaaactcctgatgctgcagcagaggctaagaatattaatggccagatctagtgcacacatggtcttctgaagaagccatgggtagctgttgtagctgtccagataaagacactgtcccagataaccatcggaacaagtttaaggtcattaatgtggatgatgatgggaatgagttaggttctggcataatggaacttacagacacagaactgattttatacacccgcaaacgtgactcagtaaaatggcactacctctgcctgcgacgctatggctatgactcgaatctcttttcttttgaaagtggtcgaaggtgtcaaactggacaaggaatctttgcctttaagtgtgcccgtgcagaagaattatttaacatgttgcaagagattatgcaaaataatagtataaatgtggtggaagagccagttgtagaaagaaataatcatcagacagaattggaagtccctagaacacctcgaacacctacaactccaggatttgctgctcagaacttacctaatggatatccccgatatccctcatttggagatgcttcatcccatccgtcaagcagacatccttctgtgggaagtgctcgcctgccttcagtaggggaagaatctacacatcctttgcttgtggctgaggaacaagtacatacctatgtcaacactacaggtgtgcaagaagagcggaaaaaccgcacaagtgtgcatgttccattggaggcaagggtttctaacgctgaaagcagcacaccaaaagaagaaccaagtagtattgaggacagggatcctcagattcttcttgaacctgaaggagtcaaatttgttttagggccaacccctgttcaaaagcagttaatggaaaaagagaaactggagcaacttggaagagatcaagttagtggaagtggagcaaataacacagaatgggacactggctatgacagtgatgaacgaagagatgcaccctctgttaacaaactggtgtatgaaaatataaatgggctatctatccctagtgcctcaggggtcaggagaggtcgtctgacatccaccagtacctcagatacccagaatatcaacaactcagctcagagaagaactgcattattaaactatgaaaatctaccatctttgcctcctgtttgggaagcccgcaagctaagtagggatgaagatgacaatttaggaccaaagaccccatctctaaatggctaccataataatctagatccaatgcataactatgtaaatacagagaatgtaacagtgccagcaagtgctcacaaaatagaatattcaaggcgtcgggactgtacaccaacagtctttaactttgatatcagacgcccaagtttagaacacaggcagcttaattacatacaggttgacttggaaggtggcagtgactctgacaaccctcagactccaaaaacgcctacaactccccttccacaaacccctaccaggcgcacagagctgtatgccgtgatagacatcgagagaactgctgctatgtcaaatttgcagaaagcactgccacgagatgatggtacatctagggaaaactagacacaatagtacttgatctgcccctgtgag

SEQ ID NO: 843 - DNA, 663 bp, Homo sapiens
cgccggacgtcccggaacgacccacgcgtccgggaagatggcgtaccagagcttgcggctggagtacctgcagatcccaccggtcagccgcgcctacaccactgcctgcgtcctcaccaccgccgccgtgcagttggaattgatcacaccttttcagttgtacttcaatcctgaattaatctttaaacactttcaaatatggagattaatcaccaacttcttattttttgggccagttggattcaattttttatttaacatgatttttctatatcgttactgtcgaatgctagaagaaggctctttccgaggtcggacagcagactttgtatttatgttcctttttggtggattcttaatgaccctttttggtctgtttgtgagcttagttttcttgggccaggcctttacaataatgctcgtctatgtgtggagccgaaggaacccctatgtccgcatgaacttcttcggccttctcaacttccaggccccctttctgccctgggtgctcatgggattttccttgttgttggggaactcaatcattgtggaccttttgggtattgcagttggacacatatattttttcttggaagatgtatttcccaatcaacctggtggaataagaattctgaaaacaccatctattttgaaagctatttt

SEQ ID NO: 844 - DNA, 2031 bp, Homo sapiens
ctggctattagtgtttatttatttgatggagtttcgctcttgttgccagggctggagtgcaatggcgtgatcttggctcactgcaacctccgcctcccgggttcaagcaattctcctgcctcagcctcccaagtagctgggattacaggtgtctgccaccatgccaggctaatttttgtattttcagtagagacggggtttctccatgctggccaggctggtctcgaactcctgacctcaggtgatccacccgcctcagcctcccaaagtgctgggattacaggcaaaagccaacacacccggcctggatatgaatttataataccctacagtgcagcacaagaagatgcactcaaagcactgatgtgaggaagtacttgccccgtagcagctattcactctaccagtgtaaacaaactctaagctagggcaagacagcacagacacaagtatatactaaccaggggtttaatataaatacaaccagcatagaaagacccaaaactatacagaaaccaaaaccagaatgccatgtggtggaggcaaagggcagaatttctgacccctttggctcagctgcccttccccacaaataaaaaccaacaaagaggacaaatcaggacaataaagaagattcatgctaagctgtggcagaggggggaaggtatgatcgggtgggggtgggacaaggaacggccatggaagatcactgggtcaggttggaccctgggctgggagcgggagggcaaggcccctcaccacaacttaacccaaacctaagctgcccccaggtgccataggtccctgtcccagcagggaggctgatgggcctgggcccatgcccctccccacctttgggggtcagaaagtggccacccaggcctgctgggatggggcctgacacaggctctgcatgcccattcagggtgcctgtggagaaagaatggagtcactgtttaaccatggtacctgcctcagccccagcagaccacaggaggttggccccagactcactgagtgcctgcagcagccgtacagacacagcatccttggccacctcatgcccatcccggccatctagggtcagcacaacccagatgaggccgctgaagggcaccggatgcccaggaatcaccacctggtaccagaagcggtgccagccagcaggtcctatgcccaaacacttggtgaggaacacagggctgcccagcttcattcgttggcacagcaactgcagggtagcccgagccccttggaaccctaacttgtcccttgccaaagccaactggctgccctctggctgtggggaccgcaagaagggacccacaagctgctggcgaagtcgctgcttcaggtctggcttgagccactccacagccacctgctctccacagaggtgtgactgccctgtaggaaaaatgcaaagacaagggcaggtctaaaccctgggcccaagcctccaggtggtgagccctttggagctacacagtcctgttatttgtagccttcccatttcctggtagtgtgaccatgggtaagaaaagacaatgaagccttcaccctccattatttgcaaagggagtataacacactgctaccttacaagtttcccttggagaagtactggttaattgccaggcctttgtcctgccctccataacccatccataatggcctaatcctttacctgggaaaaacttgcctgtaagtcagtccagtgtgcctaagtaccgtacaccccattatgttacttaaattctcataacagtcctgaggaaacagattcctatagtagtaaaaaggctcagttggattccccttgagcaaatcaatttctctaacagtttcctcatagccttgagggtccctgtgccctattttgcggtgtgggggtgggggaaggttgagaattaagtccaggaggtaatgctcgggaagtgtcacaaatttaggtaagcggtggtggtagcaccattggaagttttaaaaatctgaggtgcaaatagtaaaaggttgcaaattcaaaaaaaa

SEQ ID NO: 845 - DNA, 2066 bp, Homo sapiens
ttggggccggctgccttaaagcagtgaaaaagaaagcaaatagcctggcgtgaatgccaaaatgaccgctcaacaaggacagctggatagatacgggcagagaatggaacagagtatggacagaaggggggcagtgataaaccccgtctcctccccgctacacaatgggaaatgaggagatgctggaaggatcaacggccggatgatcaacaaccttaacaaaattaagggcagacgcaggggaccgcggcagcggccatgaggcaggtgggaagcaggcacagtgatgagccggctgaggctgtgggatcgtttattggggctctgtccagccaggctgcagcacccgcctgggcctggcccggtgccaccaggtgccgggtgggtggaggggagaaagtgcaggagcggccgccgcccctagggctcggccggctcctggtcctgtctccgtctctctgaagcggtgcggcgcttcagcgtagagcgaggtgtcgtcgtcgctgcccttcgccgcccgcgccgcccatcccgctcctctctgctctcggccaaccgcgctctcgtcgatgttctccagtggagtccgcatgctgcaccgacagctcccgacagcgccaggctcggcaacgggctctgctccgggtgccagccacggcttgaagtgaggccaggtgcttctgtttccactcggggtacttgaggcacgccttgtacatcttcttcatggccttgggagccaggaactgagaagatttattcaccacccacttgggtaaggagcctttggggtccacctgggccaggtaggtgatgacgcagctcttgggccctgtgctctggatgaggtagcccgtctggatggacacagctcggaccaagtctttccgaggtgggtatttgggatgtttgactgagtagttcataatgatgtaatcagcgcccatggggagccaggagcggagggtgatgacatcacggttcttcaggggcttgggacacctccaggagtaatagcccacgtcagcgttgactgtcaagcgggcgatgtcaaaagtctcaatgacgttgctgtcccatttcttgcggtactcaatgtcgtgtaggacgtcgtagagtgtctcggctggcacatcacagcactccatccggcacttgatcttgtgcagcgtccgatccatctccacagcctgcacccagacagacaccccagccctgctataggtcaggttccagcccacctcagcctcacactctgaccggaagctgcgaaagtcttggtcatcgggcacctggacactctcacggcccaggaccggccgaggcccttggggctctgtagaggccgccagcttctccatggggagtgtggggaggcccagggccctggtcctagtccggctctcctgggtcctccgcggaggctccgacaacgtcgacgcggctgcagatgctgacgccaccttcctgggacctgagaagcagggtctgtacagctccagcaacactctccttttcctccagaattctccagatcctcctcagtttcttggctctggtgctcatctcaacacagcagggtcttcctccatcaggccaaggtgggggtaggagaagaattgggaacagggactcccctaggttctcagggtacagtcagtcaatctaagcctgtatccaacaaagacactgacccctggggtacaaggaagggctccaggcccaaaggcaggaggattaggctttagctcttgctcacagcctgctgagacctggggcaagcccctgtccctctttgggccctcaggtttgcaatttgcagaatggaggaaatgggttcctcaatctacaatcacctgactataataatattttgcctttatataccgcgtgggtaaattcctgaaagtaaactaagctgttttcacccctggatctcatttgatcctcccaacagcctgtttgcatttacaaatgagaaagctccagttccctaagggaacaaaattacccaaagtcacacagcaagctggaagcagagcctgggtgcagtccttgaatcctga

SEQ ID NO: 846 - DNA, 5612 bp, Homo sapiens
tcactagtccatgtggtggaattcgtccagagtggcagtaaaggaggaagatggcggggtgcagggggtctctgtgctgctgctgcaggtggtgctgctgctgcggtgagcgtgagacccgcacccccgaggagctgaccatccttggagaaacacaggaggaggaggatgagattcttccaaggaaagactatgagagtttggattatgatcgctgtatcaatgacccttacctggaagttttggagaccatggataataagaaaggtcgaagatatgaggcggtgaagtggatggtggtgtttgccattggagtctgcactggcctggtgggtctctttgtggacttttttgtgcgactcttcacccaactcaagttcggagtggtacagacatcggtggaggagtgcagccagaaaggctgcctcgctctgtctctccttgaactcctgggttttaacctcacctttgtcttcctggaaagcctccttggtctcattgagccggtggaagcgggttccggcattaccgagggcaaatgctatctgtatgcccgacaggtgccaggactcgtgcgactcccgaccctgctgtggaaggcccttggagtgctgctcactgttgctgcaatgcttcttatttgggcttggaagccccatgatccacagtggttcggtggtgggagctggcctccctcagtttcagagcatctccttacggaagatccagtttaacttcccctatttccgaagcgacaggtatggaaagagacaagagagactttgtatcagcaggagcggctgctggagttgctgcagctttcggggcgccaatcgggggtaccttgttcagtctagaggagggttcgtccttctggaaccaagggctcacgtggaaagtgctcttttgttccatgtctgccaccttcaccctcaacttcttccgttctgggattcagtttggaagctggggttccttccagctccctggattgctgaactttggcgagtttaagtgctctgactctgataaaaaatgtcatctctggacagctatggatttgggtttcttcgtcgtgatgggggtcattgggggcctcctgggagccacattcaactgtctgaacaagaggcttgcaaagtaccgtatgcgaaacgtgcacccgaaacctaagctcgtcagagtcttagagagcctccttgtgtctctggtaaccaccgtggtggtgtttgtggcctcgatggtgttaggagaatgccgacagatgtcctcttcgagtcaaatcggtaatgactcattccagctccaggtcacagaagatgtgaattcaagtatcaagacatttttttgtcccaatgatacctacaatgacatggccacactcttcttcaacccgcaggagtctgccatcctccagctcttccaccaggatggtactttcagccccgtcactctggccttgttcttcgttctctatttcttgcttgcatgttggacttacggcatttctgttccaagtggcctttttgtgccttctctgctgtgtggagctgcttttggacgtttagttgccaatgtcctaaaaagctacattggattgggccacatctattcggggacctttgccctgattggtgcagcggctttcttgggcggggtggtccgcatgaccatcagcctcacggtcatcctgatcgagtccaccaaatgagatcacctacgggctccccatcatggtcacactgatggtgggcaaatgtacaggggactttttcaataagggcattttatgatatccacgtgggcctgcgaggcgtgccgcttctggaatgggagacagaggtggaaatggacaagctgagagccagcgacatcatggagcccaacctgacctacgtctacccgcacacccgcatccagtctctggtgagcatcctgcgcaccacggtccaccatgccttcccggtggtcacagagaaccgcggtaacgagaaggagttcatgaagggcaaccagctcatcagcaacaacatcaagttcaagaaatccagcatcctcacccgggctggcgagcagcgcaaacggagccagtccatgaagtcctacccatccagcgagctacggaacatgtgtgatgagcacatcgcctctgaggagccagccgagaaggaggacctcctgcagcagatgctggaaaggagatacactccctaccccaacctataccctgaccagtccccaagtgaagactggaccatggaggagcggttccgccctctgaccttccacggcctgatccttcggtcgcagcttgtcaccctgcttgtccgaggagtttgttactctgaaagccagtcgagcgccagccagccgcgcctctcctatgccgagatggccgaggactacccgcggtaccccgacatccacgacctggacctgacgctgctcaacccgcgcatgatcgtggatgtcaccccatacatgaacccttcgcctttcaccgtctcgcccaacacccacgtctcccaagtcttcaacctgttcagaacgatgggcctgcgccacctgcccgtggtgaacgctgtgggagagatcgtggggatcatcacacggcacaacctcacctatgaatttctgcaggcccggctgaggcagcactaccagaccatctgacagcccagcccaccctctcctggtgctggcctggggaggcaaatcatgctcactccgggcggggcacagctggctggggctgtttccggggcattggaaagattcccagttacccactcactcagaaagccgggagtcatcggacaccttgctggtcagaggccctgggggtggttttgaaccatcagagcttggacttttctgacttccccagcaaggatcttcccacttcctgctccctgtgttccccaccctcccagtgttggcacaggccccacccctggctccaccagagcccagaagccagaggtaagaatccaggcgggccccgggctgcactcccgagcagtgttccctggcccatctttgctactttccctagagaaccccggctgttgccttaaatgtgtgagagggacttggccaaggcaaaagctggggagatgccagtgacaacatacagttgcatgactaggtttaggaattgggcactgagaaaattctcaatatttcagagagtccttcccttatttgggactcttaacacggtatcctcgctagttggttttaagggaaacactctgctcctgggtgtgagcagaggctctggtcttgccctgtggtttgactctccttagaaccaccgcccaccagaaacataaaggattaaaatcacactaataacccctggatggtcaatctgataataggatcagatttacgtctaccctaattcttaacattgcagctttctctccatctgcagattattcccagtctcccagtaacacgtttctacccagatcctttttcatttccttaagttttgatctccgtcttcctgatgaagcaggcagagctcagaggatcttggcatcacccaccaaagttagctgaaagcagggcactcctggataaagcagcttcactcaactctggggaatgctaccattttttttccaaagtagaaaggaagcacttctgagccagtgaccactgaaaggtatgtgctatgataaagcagatggcctatttgaggaagagggtgtctgcccttcacaaacacctctctctcccctgcactagctgtcccaagcttacatacagaggcccttcaggagggcctcctgtggccgcagggagggtgcgtggggaagatgcttcctgccagcacgtgcctgaaggtttcacatgaagcatgggaagcgcaccctgtcgttcagtgacgtcattcttctccaggctggcccgccccctctgactaggcacccaaagtgagcatctgggcattgggcattcatgcttatcttcccccaccttctacatggtattagtcccagcaggcatccctggggcagacgtgctttggctcaagatggccttcatttacgtttagttttttttaaaaccgtggaggttgcccacgggcctcggcacctgggccctggcagcacagctctcaggcccagccctgggcgacctccttggccaagtctgcctttcaccctgggggtgagcatcagtcctggctctgctggtccagatcttgcgctcagcacactctagggaataattccactccagagatggggctgcttcaaggtcttttctagctgattgtggcccctccattttccgcattttcttatctccctgaccaaaattgctttgacttctaaatgtttctgcttcccagaatgcacctgacttatgaaatggggataatactcccaggaaatagcgcaggacatcacaaggaccaaaaaggcaattcttatttaaatgttactatttggccagctgctgctgtgttttatggcagtgttcaaagcttgatcacgttatttcttccttttattaagaaggaagccaattgtccaagtcaggagaatggtgtgatcacctgtcacagacactttgtcccctctccccgccccttcctggagctggcagagctaacgccctgcaggaggaccccggcctctcgagggctggatcagcagccgcctgccctgaggctgccccggtgaatgttattggaattcatccctcgtgcacatcctgttgtgtttaagtcaccagatattttgttcccatcagtttagcccagagatagacagtagaatgcaaatacctccctcccctaaactgactggacggctgccaaggaggccccaaacccaggccccatgcaaaggcacgtggtttccttttctcctctctctgcatctgcgctttccagataagcccaaagacagcaacttctccactcatgacaaatcaactgtgaccctcgctccttccatttctgtccattagaaaccagccttttcagcatctcacccattagcagccccatcacccagtgatcagtcgcctcagtaaagcagatctgtggatggggagcctacgggtggtaagaagtggtgttttgtgtttcatctccagcttggtgttccatggcccctaggcgaggtgatcagggagtggggccaatgggcccccggccctggctttgggaccttgtgctgagggatgatttgctcctgaccttgattaacttaacagttcccagctggaagggacactttcaggacccagtccactgtatggcatttgtgatgcagaattatgcactgacatgaccctgggtgacaggaaagcctttcgagaggcccaaggtggcctcgccagccctgcagtattgatgtgcagtattgcaccacagctctgcggaccttggccattgccgcagtcgcagcttccttttttctgtttgcactgtttgtttgtatgatgttagctaattccactgtgtatataaattgtattttttttaatttgtaaaatgctatttttatttgaacctttggaacttgggagttctcattgtaaccctaacatgtgagaataaaatgtcttctgtctcaaaaaaaaaa

SEQ ID NO: 847 - DNA, 2528 bp, Homo sapiens
gaaacacaaattcatccagtgttacaaattctgcagcaggtgttgaagatcttaacatcgttcaagtgactgttccagataatgagaaggaaagattatcaagcattgaaaagattaaacagctaagagaacaagttaatgacctctttagccgaaaatttggtgaagcaattggcgtggatttccctgtgaaagttccctacaggaagatcacattcaaccctggctgtgtggtgattgatggcatgcccccgggggtggtattcaaggcccccggctatctggaaatcagttccatgaggaggatcttggaggcagctgagtttatcaaattcacagtcatcaggccgcttccagggcttgagctcagtaatggtgagtattctacagtgggaaaacgcaagatagaccaggagggccgtgtgtttcaagaaaagtgggagagagcgtatttcttcgtggaagtacagaatatttcaacatgtctcatatgcaaacgaagcatgtctgtgtccaaagaatataacctaagacgccactatcaaaccaatcacagcaagcattatgaccagtatatggaaagaatgcgtgacgagaagcttcacgagctgaaaaaagggctcaggaagtatctcttaggcttgtcagacaccgagtgtcccgagcaaaaacaagtgtttgcaaacccaagtccaacccagaaatcccccgtgcagcctgtagaggacctagctgggaacttatgggagaagttacgtgaaaaaatcaggtcttttgtggcatattctatcgcaatcgatgagatcacggatataaataataccacccagttggccatattcatccgtggtgtcgatgagaatttcgatgtgtccgaagaacttctggacacggtgcccatgacgggtacaaaatctggcaacgagatcttttcgcgtgttgagaaaagcctgaaaaacttctgtatcaactggtcgaaattagtaagcgtggcctccactggcaccccaccgatggtggatgccaataacgggcttgtcacaaaactgaagtccagggtggcgacgttctgcaagggtgcggaactgaagtccatctgttgtataattcatccggaatcactctgtgctcaagaagttgaagatggaccacgtcatggacgtggtagtgaagtccgtgaactggatatgctcccggggactgaaccacagcgagttcacaaccttgctctatgagctggacagccagtatggtagcctcctgtactacacggagattaagtggctcagtcgcgggctcgtgctaaagagatttttcgaatccttggaagaaatcgactccttcatgtcatccagagggaaacccctgcctcaactgagctccatagattggatccgagacctggccttcttggttgacatgacgatgcatctgaacgctttgaacatctctctccaaggacactcccaaatcgtcacgcagatgtatgacctgatccgggcgttcctagcaaaactgtgcctctgggagactcatttgacgaggaataatctggcccactttcccaccctgaaattggtttccagaaatgaaagcgatggcctgaactacattcccaaaatcgcggaactcaagaccgaattccagaaaaggctgtctgatttcaaactctacgaaagcgaactgactctgttcagctccccgttctccacgaagatcgacagtgtgcacgaggagctccagatggaggttatcgacctgcaatgcaacacggtcctgaagacgaaatacgacaaggtgggaataccagaattctacaagtacctctggggtagctacccgaaatacaagcaccattgcgcaaagattctttccatgttcgggagcacctacatctgcgaacagctgttctccattatgaaactgagcaaaacaaaatactgctcccagttaaaggattcccagtgggattctgtactccacatcgcaacgtgatggagagaaaactcctggcagggccctatggtgggaaaggctggagtcttctagtcccaagggattgggagatgacaaaatgaattttttttttcttttttgagatggagtcttgctctgtcgcccaggttggagtgcagtggcgtgatctcggcttactgcaacttccagctcctgggttcgaacgattctcctgcctcagcctcccgagcagctgggactacaggcatgcgccaccatgcccggctaatttttgtattagtagagatgaggtttcaccatgttggccaggctggtctccaactcctgacctcaggtgatccacctgcctcgacctcacaaagtgctgggattacaggcatgaaccactgtgcccagctgacaaaatgagttcttaaactttttttttttttcagttttttttccactttgaatcagaaatataatctgcagtatcatacttgtttatattacattgtatgcctcactattcattaaaaatcaagaaagttttattgtaaaaaaaaaaaaaa

SEQ ID NO: 848 - DNA, 424 bp, Homo sapiens
gatcagtgcagtacctgccgggaagacccacgcgtacgcacgcctccacggacgcacctctcatgctgaagtttacacccttgccctccaagacgaaagcttctgcaccggtgcagtgcctgctgctcatggcagccactttcagccctcagggacttgctaagccacattcaggtaccattccaatcacactgctgctttaacgcgatcaacacgaaaattcctatccagaggctggagagctacacaagaatcaccaacatccaatgtcccaaggaagctgtgatgtgagtggacagtgcctggcacccccattcaaaagttctgatggacaacatagagaagtcaagattcatgtccatatgagtcggatgcatataacttttatcccaagggcccctctttcccatagagaaactcagtc

SEQ ID NO: 849 - DNA, 1315 bp, Homo sapiens
tcataaagccctttctactcccagcactctcttcaaagtattcttcacttctgagttcctaagactacagataaggggattgagcatgggattaaagaggctgtgaaacagcaggagatatttcttctgctccttggggttcccatatctgggtccaacatacatgataatggctgtgccataaaagagtccaatcacacagaggtgggagaagcaggtgcagaaggctttcctctgaacttcccttgattggatctgaaggatagcacagaggatgcacatatatgaaactacaattgtggacaagggtcccaccagcccagaaattgctccggccaagaccatgttctcattgatgtgggtatctgcacaggcaagtttgagaacagccaagatttcacaaaaaaagtgataaattttctggggcctacagaagggtaaaggtagaagtaacacaagatgaatcaaggataaaaggactccagtggtccaggaagtcaccgcgagggtgatgcagactctccaggtcatgatggccaaatatcggagggggtggcagatggcccacgtacagatcataggacatcaccaccaggaggagacattctgtgacagcaaaagtggaaaacagaaaggtctgcatcatgcggcccgcaaaggagatgggcttggctggatgcaggaggttcaccagcatccggggcaccgtgttgcaggcgtaggcgatgtcgacgaccgcccaggtgtgagaggaagaagtacatgggggcgtgcagtctggagtccagtgagatgagccccagtatggtcccgttccccagcagggtgaagacgtagaacagggagaagagcccaaagaggagcatctgaatccttgggccaacgggaaatcccagtaggaggaactctgtgatggatgttatattgtcccccatatccctatgacagaggaaatcaagttaatgctcatggtttaggagaagtgtttaaaaacagattcattttaacttgttcggcactctttggtgaagtagaaaagtgttcagacagctgcagtgagtttttgtgtttttaaatgaatgcttcaagacaatttggtaacgctaaaataaatgtttaaaaaatatatgcaggccgggtgcggtagctcacgcctgtaatcccagcactttgggaggccgaggcgggcggattgcctgagcttcaggaggttgagaccatcctggctaacacagtgaaactcccgtctccactaaagcacaaaaaatttagccggcgtgggcgcatgcgcctgtatcccagctacctgggattc

SEQ ID NO: 850 - DNA, 1014 bp, Homo sapiens
atggggaacgattctgtcagctacgagtatggggattacagcgacctctcggaccgccctgtggactgcctggatggcgcctgcctggccatcgacccgctgcgcgtggccccgctcccactgtatgccgccatcttcctggtgggggtgccgggcaatgccatggtggcctgggtggctgggaaggtggcccgccggagggtgggtgccacctggttgctccacctggccgtggcggatttgctgtgctgtttgtctctgcccatcctggcagtgcccattgcccgtggaggccactggccgtatggtgcagtgggctgtcgggcgctgccctccatcatcctgctgaccatgtatgccagcgtcctgctcctggcagctctcagtgccgacctctgcttcctggctctcgggcctgcctggtggtctacggttcagcgggcgtgcggggtgcaggtggcctgtggggcagcctggacactggccttgctgctcaccgtgccctccgccatctaccgccggctgcaccaggagcacttcccagcccggctgcagtgtgtggtggactacggcggctcctccagcaccgagaatgcggtgactgccatccggtttctttttggcttcctggggcccctggtggccgtggccagctgccacagtgccctcctgtgctgggcagcccgacgctgccggccgctgggcacagccattgtggtggggttttttgtctgctgggcaccctaccacctgctggggctggtgctcactgtggcggccccgaactccgcactcctggccagggccctgcgggctgaacccctcatcgtgggccttgccctcgctcacagctgcctcaatcccatgctcttcctgtattttgggagggctcaactccgccggtcactgccagctgcctgtcactgggccctgagggagtcccagggccaggacgaaagtgtggacagcaagaaatccaccagccatgacctggtctcggagatggaggtgtag

SEQ ID NO: 851 - DNA, 3515 bp, Homo sapiens
gcggccgcgtcgccgctgaggatgtcccgaaaggggccgcgagcggaggtgtgtgcggactgcagcgccccggaccctggctgggcatccatcagcaggggtgtgctggtgtgtgacgagtgctgcagcgtgcaccggagcctgggacgccacatctccattgtcaagcaccttcgccacagcgcctggcctcccacgctgctgcagatggtgcacacgcttgccagcaacggggccaactccatctgggagcactccctgctggaccccgcacaagtgcagagcgggccggcgttaaagcaaacccccaaggacaaagttccaccccatcaagtcagagttcatcagggccaagtaccagatgctggcatttgtgcacaagcttccctgccgggacgatgatggagtcaccgccaaagacctcagcaagcaactacactcgagcgtgcggacaggcaacctggagacatgtctgcgcctgctctccctgggtgcccaggccaacttcttccacccagagaagggcaccacacctctgcacgtggctgccaaggcaggacagacactgcaggccgagctgcttgtagtgtatggggctgaccctggctcccctgatgttaatggccgcacacccattgactatgccaggcaggcggggcaccatgagctggcggaaaggctggttgagtgccaatatgagctcactgaccggctggccttctacctctgtggacgcaagccggatcacaagaatgggcattacatcatcccacagatggctgacagccttgacttatccgaattggccaaagctgctaagaagaagctgcaggcgctcagcaaccggctttttgaggaactcgccatggacgtgtatgacgaggtggatcgaagagaaaatgatgcagtgtggctggctacccaaaaccacagcactctggtgacagagcgcagtgctgtgcccttcctgcctgttaacccggaatactcagccacgcggaatcaggggcgacaaaagctggcccgctttaatgcccgagagtttgccaccttgatcatcgacattctcagtgaggccaagcggagacagcagggcaagagcctgagcagccccacagacaacctcgagctgtctctgcggagccagagtgacctcgacgaccaacacgactacgacagcgtggcctctgacgaggacacagaccaggagcccctgcgcagcaccggcgccactcggagcaaccgggcccggagcatggactcctcggacttgtctgacggggctgtgacgctgcaggagtacctggagctgaagaaggccctggctacatcggaggcaaaggtgcagcagctcatgaaggtcaacagtagcctgagcgacgagctccggaggctgcagcgagagatccacaagctgcaggcggagaacctgcagctccggcagcctccagggccggtgcccacacctccactccccagtgaacgggcggaacacacacccatggcgccaggcgggagcacacaccgcagggatcgccaggccttttccatgtatgaacctggctctgccctgaagccctttgggggcccccctggggacgagctcactacgcggctgcagcctttccacagcactgagctagaggacgacgccatctattcagtgcacgtccctgctggcctttaccggatccggaaaggggtgtctgcctcagctgtgcccttcactccctcctccccgctgctgtcctgctcccaggagggaagccgccacacgagcaagctttcccgccacggcagtggagccgacagtgactatgagaacacgcaaagtggggacccactgctggggctggaagggaagaggtttctagagctgggcaaagaggaagacttccacccagagctggaaagcctggatggagacctagatcctgggcttcccagcacagaggatgtcatcttgaagacagagcaggtcaccaagaacattcaggaactgttgcgggcagcccaggagttcaagcatgacagcttcgtgccctgctcagagaagatccatttggctgtgaccgagatggcctccctcttcccaaagaggccagccctggagccagtgcggagctcactgcggctgctcaacgccagcgcctaccggctgcagagtgagtgccggaagacagtgcccccagagcccggcgccccagtggacttccagctgctgactcagcaggtgatccagtgcgcctatgacatcgccaaggctgccaagcagctggtcaccatcaccacccgagagaagaagcagtgacctctctccccacaccctcacctgcaccctaggacctcactggccataggagctgggccactccagacattaatccccaccccaacagagccactggcacaagtgcccttagtgctgccacactccctggcagccaggtgccctggtgcccacccctgtcgagcccctaaggatggggaggtgggggggcaggagcttctgtcccccacattccatgcacctcccctctgtatatagcatctcccccctcctagtgagcaggggcctgcaaggcatcactcccagcccctcgccttctagggcaccctcagcaaaggggcaggtggggacactccaagtggggcagctctccgtacatgcgccccacccccatgagccagttcagccctactgggggctgagcgggggcatcccctcctttgtacatagtctccatggatgtccctgccctgtagccaccagccccttgctgctctccctttaatgccatatggcccctgcctagggcacaggccccaacctgtgtgctggggtccccaagaggcgggccccagagaagcggagggagggcacccgcagcgccgacaacactttggagaggagggagaagcacgagaagagacgagacgtctctccggagcggaggcgagagcggtcacccacccgcaggagagacggctcccccagccggcggagacggtctctggagagactcctggagcagaggaggtcccccgagcgcaggagagggggctcgcccgagcgcagggccaagtccaccgaccggaggcgcgcacgctcccccgagcgcaggagagagcggtccctggacaaaaggaacagagaggacagagccagccaccgagaaagggaagaggcgaatctgaaacaggatgccggcagaagttccagacatcccccggagcagagaaggcgaccttacaaagaatgtagcaccgacctcagtatctgagacgctgagtcacattccaacctttaccgtgtcaaaggttctaagaggaaagtcacaaacctgaaattatttagtttcttacctaatgaagcatctgacacctgatgatcctatgaataacaacaaacattttatgcatttgaaatcttataagaaaaaatatatatgaaaagtattgtgcctgatgtatcatattaaagaaagtatttttaaatgcaaaaaaaaaaaaaa

SEQ ID NO: 852 - DNA, 1778 bp, Homo sapiens
atggagtacctaagcggcacagtccaggcactgtcccagggctttgcacgaattatctcagcctctcgacagtggggaggtctatcacataaagctgctatggacattgcagtacatgtcttggtaaacccacaagcactcatttcctgttgggcatataccctgaggtacaatgaatgggtcaaaggggagagctcccagggaggtggtgtggccattgcttccaaagcctccatcacctgcccatacacgccagctcattgtattggccttactcttccaagaggccatggaagtataaataataaagcaagaaaggcagatgcatttggctggctcagtggacttctgaatgtactgtgagtatgagaccttcccttccaaaagatccggtgcttcttgtctattccacacgaagcttgcttcagatcgagggaggatgtagcactgtccacaggtgggtgtatgaaaggaaaattctagaggatctccaaaatccaggtctactactcaacaggatattcttcaaggaaaatgaaccccacactaggcctggccatttttctggctgttctcctcacggtgaaaggtcttctaaagccgagcttctcaccaaggaattataaagctttgagcgaggtccaaggatggaagcaaaggatggcagccaaggagcttgcaaggcagaacatggacttaggctttaagctgctcaagaagctggccttttacaaccctggcaggaacatcttcctatcccccttgagcatctctacagctttctccatgctgtgcctgggtgcccaggacagcaccctggacgagatcaagcaggggttcaacttcagaaagatgccagaaaaagatcttcatgagggcttccattacatcatccacgagctgacccagaagacccaggacctcaaactgagcattgggaacacgctgttcattgaccagaggctgcagccacagcgtaagtttttggaagatgccaagaacttttacagtgccgaaaccatccttaccaactttcagaatttggaaatggctcagaagcagatcaatgactttatcagtcaaaaacccatgggaaaattaacaacctgatcgagaatatagaccccggcactgtgatgcttcttgcaaattatattttctttcgagccaggtggaaacatgagtttgatccaaatgtaactaaagaggaagatttctttctggagaaaaacagttcagtcaaggtgcccatgatgttccgtagtggcatataccaagttggctatgacgataagctctcttgcaccatcctggaaataccctaccagaaaaatatcacagccatcttcatccttcctgatgagggcaagctgaagcacttggagaagggattgcaggtggacactttctccagatggaaaacattactgtcacgcagggtcgtagacgtgtctgtacccagactccacatgacgggcaccttcgacctgaagaagactctctcctacataggtgtctccaaaatctttgaggaacatggtgatctcaccaagatcgcccctcatcgcagcctgaaagtgggcgaggctgtgaacaaggctgagctgaagatggatgagaggggtacggaaggggccgctggcaccggagcacagactctgcccatggagacaccactcgtcgtcaagatagacaaaccctatctgctgctgatttacagcgagaaaataccttccgtgctcttcctgggaaagattgttaaccctattggaaaataa

SEQ ID NO: 853 - DNA, 3293 bp, Homo sapiens
atgactcatgcctgtaatcccagcactttgggaggccaaggcaggcggatcacaaggtcacatggtcgccgtcgctcatcacgtggccccgtcgcgcgtcacgtggccgccggcgcgggtcacgagaacaaacacgggggcagccggcgcttcccggccggtgtcgctccgcggcgggccatggccaacgtctctaagaaggtgtcctggtccggccgggaccgggacgacgaggaggcggcgccgctgctgcggaggacggcgcggcccggcggggggacgccgctgctgaacggggctgggcctggggctgcgcgccagtcaccacgttctgcgcttttccgagtcggacatatgagcagcgtggagctggatgatgaacttttggaaccggaatatggaccctccacatcccttccccaaggagatcccacacaacgagaagctcctgtccctcaagtatgagagcttggactatgacaacagtgagaaccagctgttcctggaggaggagcggcggatcaatcacacggccttccggacggtggagatcaagcgctgggtcatctgcgccctcattgggatcctcacgggcctcgtggcctgcttcattgacatcgtggtggaaaacctggctggcctcaagtacagggtcatcaagggcagtatccttcccaatatcgacaagttcacagagaagggcggactgtccttctccctgttgctgtgggccacgctgaacgccgccttcgtgctcgtgggctctgtgattgtggctttcatagagccggtggctgctggcagcggaatcccccagatcaagtgcttcctcaacggggtgaagatcccccacgtggtgcggctcaagacgttggtgatcaaagtgtccggtgtgatcctgtccgtggtcgggggcctggccgtgggaaaggaagggccgatgatccactcaggttcagtgattgccgccgggatctctcagggaaggtcaacgtcactgaaacgagatttcaagatcttcgagtacttccgcagagacacagagaagcgggacttcgtctccgcaggggctgcggccggagtgtcagcggcgtttggagcccccgtgggtggggtcctgttcagcttggaggagggtgcgtccttctggaaccagttcctgacctggaggatcttctttgcttccatgatctccacgttcaccctgaattttgttctgagcatttaccacgggaacatgtgggacctgtccagcccaggcctcatcaacttcggaaggtttgactcggagaaaatggcctacacgatccacgagatcccggtcttcatcgccatgggcgtggtgggcggtgtgcttggagccgtgttcaatgccttgaactactggctgaccatgtttcgaatcaggtacatccaccggccctgcctgcaggtgattgaggccgtgctggtggccgccgtcacggccacagttgccttcgtgctgatctactcgtcgcgggattgccagcccctgcaggggggctccatgtcctacccgctgcagctcttttgtgcagatggcgagtacaactccatggctgcggccttcttcaacaccccggagaagagcgtggtgagcctcttccacgacccgccaggctcctacaaccccctgaccctcggcctgttcacgctggtctacttcttcctggcctgctggacctacgggctcacggtgtctgccggggtcttcatcccgtccctgctcatcggggctgcctggggccggctctttgggatctccctgtcctacctcacgggggcggcgatctgggcggaccccggcaaatacgccctgatgggagctgctgcccagctgggcgggattgtgcggatgacactgagcctgaccgtcatcatgatggaggccaccagcaacgtgacctacggcttccccatcatgctggtgctcatgaccgccaagatcgtgggcgacgtcttcattgagggcctgtacgacatgcacattcagctgcagagtgtgcccttcctgcactgggaggccccggtcacctcacactcactcactgccagggaggtgatgagcacaccagtgacctgcctgaggcggcgtgagaaggtcggcgtcattgtggacgtgctgagcgacacggcgtccaatcacaacggcttccccgtggtggagcatgccgatgacacccagcctgcccggctccagggcctgatcctgcgctcccagctcatcgttctcctaaagcacaaggtgtttgtggagcggtccaacctgggcctggtacagcggcgcctgaggctgaaggacttccgagacgcctacccgcgcttcccacccatccagtccatccacgtgtcccaggacgagcgggagtgcaccatggacctctccgagttcatgaacccctccccctacacggtgccccaggaggcgtcgctcccacgggtgttcaagctgttccgggccctgggcctgcggcacctggtggtggtggacaaccgcaatcaggttgtcgggttggtgaccaggaaggacctcgccaggtaccgcctgggaaagagaggcttggaggagctctcgctggcccagacaggccccaaggcccaagctacagccgagggcagggtggccggtgcagcccagcagccatgtcagctgagagccgtcaccctggaagacctggggctcctcctggcaggaggcctggccagccccgagcccttgagcctggaggagctctcggagaggtatgagtccagccatccgacatccacggcctctgtccccgagcaggacaccgccaagcactggaaccagctggagcagtgggtggtggagctgcaggccgaggtggcctgcctgcgggagcacaagcagcgctgtgagcgcgccacgcggagcctgctgcgggagctgctccaggtgcgggcccgcgtgcagctgcagggctcagagctgaggcagttgcagcaggaggcgcggccggcagcccaggcccccgaaaaggaggcgccggagttctctggtctccagaaccagatgcaggccctggacaaaaggctggtggaggtccgggaagccttgacccggctcaggaggaggcaggtgcaacaggaggcggagagaaggggcgccgagcaagaggccggcctcagactggccaagctgaccgacttgctgcagcaggaggagcagggccgggaggtggcctgcggcgccctgcagaagaaccaagaggacagcagccggagggtggacctggaggtggccagaatgc

SEQ ID NO: 854 - DNA, 4192 bp, Homo sapiens
gcggggaagcagcagcggccaggatgaatcccaggtgctctggagctggatggtgaaggtcggcactcttcaccctcccgagccctgcccgtctcggccccatgcccccaccagtcagccccgggccacaggcagtgagcaggcacctgggagccgaggccctatgaccaggccaaggagacgggcgctccagggtcccagccacctgtcccccccatggagctgaggccctggttgctatgggtggtagcagcaacaggaaccttggtcctgctagcagctgatgctcagggccagaaggtcttcaccaacacgtgggctgtgcgcatccctggaggcccagcggtggccaacagtgtggcacggaagcatgggttcctcaacctgggccagatcttcggggactattaccacttctggcatcgaggagtgacgaagcggtccctgtcgcctcaccgcccgcggcacagccggctgcagagggagcctcaagtacagtggctggaacagcaggtggcaaagcgacggactaaacgggacgtgtaccaggagcccacagaccccaagtttcctcagcagtggtaccttgtctggtgtcactcagccgggacctgatggtgaaggcggcctgggcgcagggctacacagggcacggcattgtggtctccattctggacgatggcatcgagaagaaccacccggacttggcaggcaattatgatcctggggccagttttgatgtcaatgaccaggaccctgacccccagcctcggtacacacagatgaatgacaacaggcacggcacacggtgtgcgggggaagtggctgcggtggccaacaacggtgtctgtggtgtaggtgtggcctacaacgcccgcattggaggggtgcgcatgctggatggcgaggtgacagatgcagtggaggcacgctcgctgggcctgaaccccaaccacatccacatctacagtgccagctggggccccgaggatgacggcaagacagtggatgggccagcccgcctcgccgaggaggccttcttccgtggggttagccagggccgaggggggctgggctccatctttgtctgggcctcggggaacgggggccgggaacatgacagctgcaactgcgacggctacaccaacagtatctacacgctgtccatcagcagcgccacgcagtttggcaacgtgccgtggtacagcgaggcctgctcgtccacactggccacgacctacagcagtggcaaccagaatgagaagcagatcgtgacgactgacttgcggcagaagtgcacggagtctcacacgggcacctcagcctctgcccccttagcagccggcatcattgctctcaccctggaggccaataagaacctcacatggcgggacatgcaacacctggtggtacagacctcgaagccagcccacctcaatgccaacgactgggccaccaatggtgtgggccggaaagtgagccactcatatggctacgggcttttggacgcaggcgccatggtggccctggcccagaattggaccacagtggccccccagcggaagtgcatcatcgacatcctcaccgagcccaaagacatcgggaaacggctcgaggtgcggaagaccgtgaccgcgtgcctgggcgagcccaaccacatcactcggctggagcacgctcaggcgcggctcaccctgtcctataatcgccgtggcgacctggccatccacctggtcagccccatgggcacccgctccaccctgctggcagccaggccacatgactactccgcagatgggtttaatgactgggccttcatgacaactcattcctgggatgaggatccctctggcgagtgggtcctagagattgaaaacaccagcgaagccaacaactatgggacgctgaccaagttcaccctcgtactctatggcaccgcccctgaggggctgcccgtacctccagaaagcagtggctgcaagaccctcacgtccagtcaggcctgtgtggtgtgcgaggaaggcttctccctgcaccagaagagctgtgtccagcactgccctccaggcttcgccccccaagtcctcgatacgcactatagcaccgagaatgacgtggagaccatccgggccagcgtctgcgccccctgccacgcctcatgtgccacatgccaggggccggccctgacagactgcctcagctgccccagccacgcctccttggaccctgtggagcagacttgctcccggcaaagccagagcagccgagagtccccgccacagcagcagccacctcggctgcccccggaggtggaggcggggcaacggctgcgggcagggctgctgccctcacacctgcctgaggtggtggccggcctcagctgcgccttcatcgtgctggtcttcgtcactgtcttcctggtcctgcagctgcgctctggctttagttttcggggggtgaaggtgtacaccatggaccgtggcctcatctcctacaaggggctgccccctgaagcctggcaggaggagtgcccgtctgactcagaagaggacgagggccggggcgagaggaccgcctttatcaaagaccagagcgccctctgatgagcccactgcccaccccctcaagccaatcccctccttgggcactttttaattcaccaaagtatttttttatcttgggactgggtttggaccccagctgggaggcaagaggggtggagactgtttcccatcctaccctcgggcccacctggccacctgaggtgggcccaggaccagctggggcgtggggagggccgtaccccaccctcagcaccccttccatgtggagaaaggagtgaaacctttagggcagcttgccccggccccggccccagccagagttcctgcggagtgaagaggggcagcccttgcttgttgggattcctgacccaggccgcagctcttgcccttccctgtccctctaaagcaataatggtcccatccaggcagtcgggggctggcctaggagatatctgagggaggaggccacctctccaagggcttctgcaccctccaccctgtcccccagctctggtgagtcttggcggcagcagccatcataggaagggaccaaggcaaggcaggtgcctccaggtgtgcacgtggcatgtggcctgtggcctgtgtcccatgacccacccctgtgctccgtgcctccaccaccactggccaccaggctggcgcagccaaggccgaagctctggctgaaccctgtgctggtgtcctgaccaccctcccctctcttgcacccgcctctcccgtcagggcccaagtccctgttttctgagcccgggctgcctgggctgttggcactcacagacctggagcccctgggtgggtggtggggaggggcgctggcccagccggcctctctggcctcccacccgatgctgctttcccctgtggggatctcaggggctgtttgaggatatattttcactttgtgattatttcactttagatgctgatgatttgtttttgtatttttaatgggggtagcagctggactacccacgttctcacacccaccgtccgccctgctcctccctggctgccctggccctgaggtgtgggggctgcagcatgttgctgaggagtgaggaatagttgagccccaagtcctgaagaggcgggccagccaggcgggctcaaggaaagggggtcccagtgggaggggcaggctgacatctgtgtttcaagtggggctcgccatgccgggggttcataggtcactggctctccaagtgccagaggtgggcaggtggtggcactgagcccccccaacactgtgccctggtggagaaagcactgacctgtcatgcccccctcaaacctcctcttctgacgtgccttttgcacccctcccattaggacaatcagtcccctcccatctgggagtccccttttcttttctaccctagccattcctggtacccagccatctgcccaggggtgccccctcctctcccatccccctgccctcgtggccagcccggctggttttgtaagatgctgggttggtgcacagtgatttttttcttgtaatttaaacaggcccagcattgctggttctatttaatggacatgagataatgttagaggttttaaagtgattaaacgtgcagactatgcaaaccagaaaaaaaaaa

SEQ ID NO: 855 - DNA, 3111 bp, Homo sapiens
cgcagcgtcccgccagccagctccttgcacccttcgcggccgaggcgctccctggtgctccccgcgcagccatggctcagcacttctccctggccgcctgcgacgtggtcggattcgacctggaccacactctgtgtcgctacaacctgcccgagagcgccccgctcatttataatagctttgcccagttcctagttaaggagaaagggtacgataaggaattgctcaatgtgaccccagaggattgggatttctgttgcaaaggtttggcattggatctagaagatgggaacttccttaaacttgcaaataatggcactgttctcagggcaagccatggcaccaagatgatgactccagaggtgctggcagaggcatatggcaagaaagagtggaagcacttcttgtcggacactggaatggcttgccgctcaggaaagtattacttttacgacaactactttgacctgccaggagctcttctgtgtgccagggtggtggactatttaacaaaactgaacaatggtcaaaaaacatttgatttttggaaggatatagttgctgctatacaacacaattataaaatgtcagcttttaaggaaaactgtggaatatattttccagaaataaaaagagatccaggcagatatttacatagtcgtcctgaatctgtgaaaaaatggcttcgacagctaaagaatgctgggaaaattcttctgttaattaccagttctcacagtgattactgtagacttctctgcgccatatattcttgggaatgattttacagacctttttgacattgtgattacaaatgcattgaagcctggtttcttctcccacttaccaagtcagagacctttccggacactcgagaatgatgaggagcaggaggcactgccatctctggataaacctggctggtactcccaagggaacgctgtccacctctatgaacttctgaagaaaatgactggcaaacctgaacccaaggttgtttattttggtgacagcatgcattcagatattttcccagctcgtcactatagtaattgggagacagtcctcatcctggaagaactcagaggggatgaaggcacgaggagtcagaggcctgaggagtcagagcctctagagaagaaaggaaaatatgagggaccaaaagcaaaacctttaaatacttcatctaaaaaatggggctcttttttttattgattcagttttgggactggaaaatacagaagactccttggtttatacatggtcttgtaagagaatcagtacttacagcactattgcaattccaagtattgaagcaatcgcagaattacctctggactacaaatttacaagattctcttcaagcaattcaaaaacagctggctactatccaaatcctccactggtcttatcaagtgatgagacactgatatccaaataagttgtctttactgaaaaatgaagtgaagacccatatatgcagttaaaaaaaagttaattttcaaaaaatactgtaaaagactttaaggaacaagttttattgaccaataagttgatatttgtccataggtctcctttctataaatcatcttgatgtttaacaactcttattatattaaaatctcagtatcctaaaacttagaaccttattgatattttctatacagtagttttgtgattagaattcacctggggacacacactcacacgcacagtcactcttacacatatgcctagtccagtggttctcaaagtgtgatccatagactaatagcatagcattacctgagaacttgataatgcatatttgcaggccccacgcaaaacctgctgaatcagaagctctgagagtaaggcctacccaatctggtttaacaagcccgtcaggtgattctgatttacagtacagtttgagacccactggctagaacatatcctccagagacttggcttaattggtctgggtaaatatggctgagcgttgttatcttttgttatcttttatatgccctaggaaagtacaaccagaattgaaaaccaactgaggtataccagttctttcaattaatagtcaagaacattgagtccagtgagattaagtgatttttgcaggctatgaggttttatgctattcctgtgttctccaaaacaagaaaataaaaagacatgacttattctctgttcatacagcaagtatggaaaaaagatgatctagaagtcaactatctcaacctccattgttacccactaggtttttttctaataatgttaaaggctatttaatttatttaatcaactttaagcattacattctcaattggggacaaaaattggttcttggggtgaaaaaatattagatatggcttgtggacttccaatatcatcctatccaacaaaatcttattccttagtattaatttatctcattgggaagaaatttgtagttaaaactaatataatttgaatttaatttctgtaattgggaaggagggtaataatgaacaaaaagtttgagaaaaaaatgctttaatgggttttacaggcatgctacaatccaggactgtggtgttctatgtgccgtgtatggtcatattagtagctatttgttgcaagatacttgaagccaaatgtttgcagtataggttcctggctactgtttatgctgtgatttcactctgtctatcatgggcagtattagaaaacacactggttttcactatctggtttacaaaccctatcattattttacctggattgaagtgcagaatttggcatatcgatgcatgcaatggaaagaaaaaaaatttgttaaaatttgtaaatgttcagctaaatctcagatatactgtgggatgagtatctcagggtaggtaacaaaaaaacaaacaaaaaaaaatcactgaaatttttccctcacagtcagtagctttgtttgatatttaacaataagtatatggtgatatacttgaaatttatgtccagaatgtcactggaatattacaatgagcataaataatcaagcttaggactaaatgaaagatactatctcatgtatgctttaaatagagaatttatttcttttaaaaataaagctatttttccttaaaaaaa

SEQ ID NO: 856 - DNA, 1659 bp, Homo sapiens
tttcgtaaggagattccgggccagggtcgcggcggcagtcggcaagcgttcgattctctggcgttggatcgcgagcggtgtctgcttgtcccgccgagggctcccaggacagggcagggatctagggggtttgcgcacctgctttttaatgccccgcccccccttttttttttaaaggggagggggtgaaagtgagggaggaaaatggacagaatactgactggaacgttaattcgagcatttcatatgcgaaaagcggaataacagttccgtattcttctttcagtttctccattagattagcttcattttcgaatgctccgttttgcatgcttaattttgaaactagcccgtggtttggcagaatttgactgaattcaggggtgagagtttgatccagtccaagtgtatttgaatttgagcacgcagttcaaccagtgtttacaatggaatttctgaagacttgtgtacttagaagaaatgcatgcactgcggtttgcttctggagaagcaaagttgtccaaaagccttcagttagaaggattagtactacctctcctaggagcactgtcatgcctgcttgggtgatagataaatatgggaagaatgaagtgcttcgattcactcagaacatgatgatgcctatcatacactatccaaatgaagtcattgtcaaagttcacgctgccagtgtaaatcctatagacgttaatatgagaagtggttatggagctacagctttaaatatgaagcgtgatcctttacacgtgaaaatcaaaggagaagaatttcctctgactctgggtcgggatgtctctggcgtggtgatggaatgtgggcttgatgtgaaatacttcaagcctggagatgaggtctgggctgcagttcctccttggaaacaaggcactctttcagagtttgttgtagtcagtgggaatgaggtctctcacaaacccaaatcactcactcatactcaagctgcctctttgccatatgtggctctcacagcctggtctgctataaacaaagttggtggcctgaatgacaagaattgcacaggaaaacgtgttctaatcttaggcgcttcaggcggagttggtacttttgctatacaggtaatgaaagcatgggatgctcatgtgacagcagtttgctcccaagatgccagtgaacttgtaaggaagcttggtgcagacgatgtaattgattacaaatctggaagtgtggaagagcagttgaaatccttaaaaccatttgattttatccttgataatgttggcggatccactgaaacatgggctccagattttctcaagaaatggtcaggagccacctatgtgactttggtgactcctttcctcctgaacatggaccgattgggcatagcagatggcatgttgcagacaggagtcactgtaggttcaaaggcattaaagcatttctggaaaggagtccattatcgctgggcatttttcatggccagtggcccatgtttagatgacattgcagaactggtggatgcgggaaagatccggccagttcattgaacaaacctttcctttttctaaagttccagaagccttcctgaaggtggaaagaggacacgcacgaggaaagactgtaattaatgttgtttaaataaaaatgcagtttagtgat

SEQ ID NO: 857 - DNA, 4113 bp, Homo sapiens
aatgaagccttgaggacgtcgcaccggactggaattcctgggtcgacgatttcgtggcagcggggaccagggctggcaggttaagcctctgggggtggatcctgaaaggtggtccagccgcctggccctgcgtgggaccctccacctggcagcaggtacccaaacaagggctggacagcagggtctcgctctgtcacacaggctggagtgcagtggtgtgatcttggctcatcgtaacctccacctcccgggttcaagtgattctcatgcctcagcctcccgagtagctgggattacaggtggtgacttccaagagtgactccgtcggaggaaaatgactccccagtcgctgctgcagacgacactgttcctgctgagtctgctcttcctggtccaaggtgcccacggcaggggccacagggaagactttcgcttctgcagccagcggaaccagacacacaggagcagcctccactacaaacccacaccagacctgcgcatctccatcgagaactccgaagaggccctcacagtccatgcccctttccctgcagcccaccctgcttcccgatccttccctgaccccaggggcctctaccacttctgcctctactggaaccgacatgctgggagattacatcttctctatggcaagcgtgacttcttgctgagtgacaaagcctctagcctcctctgcttccagcaccaggaggagagcctggctcagggccccccgctgttagccacttctgtcacctcctggtggagccctcagaacatcagcctgcccagtgccgccagcttcaccttctccttccacagtcctccccacacgggcgctcacaatgcctcggtggacatgtgcgagctcaaaagggacctccagctgctcagccagttcctgaagcatccccagaaggcctcaaggaggccctcggctgcccccgccagccagcagttgcagagcctggagtcgaaactgacctctgtgagattcatgggggacatggggtccttcgaggaggaccggatcaacgccacggtgtggaagctccagcccacagccggcctccaggacctgcacatccactcccggcaggaggaggagcagagcgagatcatggagtactcggtgctgctgcctcgaacactcttccagaggacgaaaggccggagcggggaggctgagaagagactcctcctggtggacttcagcagccaagccctgttccaggacaagaattccagccaagtcctgggtgagaaggtcttggggattgtggtacagaacaccaaagtagccaacctcacggagcccgtggtgctcaccttccagcaccagctacagccgaagaatgtgactctgcaatgtgtgttctgggttgaagaccccacattgagcagcccggggcattggagcagtgctgggtgtgagaccgtcaggagagaaacccaaacatcctgcttctgcaaccacttgacctactttgcagtgctgatggtctcctcggtggaggtggacgccgtgcacaagcactacctgagcctcctctcctacgtgggctgtgtcgtctctgccctggcctgccttgtcaccattgccgcctacctctgctccagggtgcccctgccgtgcaggaggaaacctcgggactacaccatcaaggtgcacatgaacctgctgctggccgtcttcctgctggacacgagcttcctgctcagcgagccggtggccctgacaggctctgaggctggctgccgagccagtgccatcttcctgcacttctccctgctcacctgcctttcctggatgggcctcgaggggtacaacctctaccgactcgtggtggaggtctttggcacctatgtccctggctacctactcaagctgagcgccatgggctggggcttccccatctttctggtgacgctggtggccctggtggatgtggacaactatggccccatcatcttggctgtgcataggactccagagggcgtcatctacccttccatgtgctggatccgggactccctggtcagctacatcaccaacctgggcctcttcagcctggtgtttctgttcaacatggccatgctagccaccatggtggtgcagatcctgcggctgcgcccccacacccaaaagtggtcacatgtgctgacactgctgtgcctcagcctggtccttggccctgccctgggccttgatcttcttctcctttgcttctggcaccttccagcttgtcgtcctctaccttttcagcatcatcacctccttccaaggcttcctcatcttcatctggtactggtccatgcggctgcaggcccggggtggcccctcccctctgaagagcaactcagacagcgccaggctccccatcagctcgggcagcacctcgtccagccgcatctaggcctccagcccacctgcccatgtgatgaagcagagatgcggcctcgtcgcacactgcctgtggcccccgagcccggcccagccccaggccagtcagccgcagactttggaaagcccaacgaccatggagagatgggccgttgccatggtggacggactcccgggctgggcttttgaattggccttggggactactcggctctcactcagctcccacgggactcagaagtgcgccgccatgctgcctagggtactgtccccacatctgtcccaacccagctggaggcctggtctctccttacaacccctgggcccagccctcattgctgggggccaggccttggatcttgagggtctggcacatccttaatcctgtgcccctgcctgggacagaaatgtggctccagttgctctgtctctcgtggtcaccctgagggcactctgcatcctctgtcattttaacctcaggtggcacccagggcgaatggggcccagggcagaccttcagggccagagccctggcggaggagaggccctttgccaggagcacagcagcagctcgcctacctctgagcccaggccccctccctccctcagccccccagtcctccctccatcttccctggggttctcctcctctcccagggcctccttgctccttcgttcacagctgggggtccccgattccaatgctgttttttggggagtggtttccaggagctgcctggtgtctgctgtaaatgtttgtctactgcacaagcctcggcctgcccctgagccaggctcggtaccgatgcgtgggctgggctaggtccctctgtccatctgggcctttgtatgagctgcattgcccttgctcaccctgaccaagcacacgcctcagaggggccctcagcctctcctgaagccctcttgtggcaagaactgtggaccatgccagtcccgtctggtttccatcccaccactccaaggactgagactgacctcctctggtgacactggcctagagcctgacactctcctaagaggttctctccaagcccccaaatagctccaggcgccctcggccgcccatcatggttaattctgtccaacaaacacacacgggtagattgctggcctgttgtaggtggtagggacacagatgaccgacctggtcactcctcctgccaacattcagtctggtatgtgaggcgtgcgtgaagcaagaactcctggagctacagggacagggagccatcattcctgcctgggaatcctggaagacttcctgcaggagtcagcgttcaatcttgaccttgaagatgggaaggatgttctttttacgtaccaattcttttgtcttttgatattaaaaagaagtacatgttcattgtagagaatttggaaactgtagaagagaatcaagaagaaaaataaaaatcagctgttgtaatcacctagcaaaaaaaaaaaaagggggggcccttttaaaagaacccttggggggcccaattttaacgggggagggcaaggaaaaatttttttctttatggggggcggaataaaaaccactttgggaattttggaaaggaaccttttttttgggggggggccatatgggcccaccccccccacggattttaagggctttagggaaaaaaaaaatttttaaggggaaaaggggggaaaacaaccccaaaagccttgctgttgaa

SEQ ID NO: 858 - DNA, 465 bp, Homo sapiens
ttgtgacaagtgcgtacacccctccaccaactgtcaatgttgtggtctgtggtatcagtccatcaacagatacgatgagcatggatactgttgttaccagtgagttgataatatcaagcaaaggccaacattaccggttcattattcgttcaagtctgagtacatataaaagtatgataaataagatgccggtgccgtcaaatccagtgataccaatatatggttcaggggcatgtgcgatgataaaaaaggtcatagatgtcccagttagggccagccgcagcattttcacgtggcctttcacactgaagcagaaggggcgatgttttattttcggctgcacgttatccatcgcgtcatgcagtcccagcagcagctctttccctcaactcttttcagctggctgcttgagtaggttctgcccaccgatagcccccgccacggcggcgtagcaccgccctcccc

SEQ ID NO: 859 - DNA, 1467 bp, Homo sapiens
ttttttttttttggagacagagtcttgctctgttgcccaggctggagtgcagtggcgcgaccggagctcactgcaacctccacttcccgggttcaagtgattgtcccacctcagcctcctgaatagctgggattacaggtgcatgctaccatgcctggctactttttgtatttttagcagagacagggtttcaccatgttggccagggtggtctcgaactcctgacctcaagtgatccgtctggctcagcctcccaaagtgctgggattacaggtgtgagccactgcacctggcctatataggcttttttcttaaacctatttagtaatgttttcccaagtttattttttatttttaattttttccccaagtttatttttctatttttttttcatggaaaaatggggtaacttagcagtttcaatattgaagactgaagtttaaaaaaaatttaaattcaaggtacttttaaaattcagttagaaaagtaggctttaaaaattattagagacaagagtaccaaagcggtgtgtgtatgtgtgtgtgtgtatgcatgcttgtggattggaaaaactttggagactgattacttttcattatatatgtgtcacagtgaaacagcttttatgtgtcatgtaagattactgcttgcctctctaaggaaggtcgtgactgtttaaatagacgggcaaggtggaaccttttgaaagatgagcttttgaatataagttgtctgctagatcatggtttgtattgaactaacaaggtttgcagatctgctgacttatataaagctttttgattcctactaagctttaagatttaaaaaatgttcaatgttgaaatttctgtggggctctatttttgctttggctttctggtgagagagtgaggaagcattctttccttcactaagtttgtctttcttgtcttctggatagattgattttaagagactaagggaatttacaaactaaagattttagtcatctggtggaaaaggagactttaagattgtttagggctgggcggggtgactcacatctgtaatcccagcactttgggaggccaaggcaggcagaacacttgaaggagttcaagaccagcgtggccaacgtggtgaaaccctgtctctactaaaaatacaaaaattgtttagctctgtttttcataatagaaatagaaaaggtaaaattgcttttcttctgaaaagaacaagtattgttcatccaagaagggtttttgtgactgaatcagcagtgcctgccctagtcatagctgtgcttcaaaaacctcagcatgattagtgttggagcaaaacaaggaagcaaagcaaatactgtttttgaaattctatctgttgcttgaactattttgtaataattaaactttgatgttgagaaatcacaactttattgtacacttcattgcaacttgaaattcatggtcttaaagtgagatttgaat

SEQ ID NO: 860 - DNA, 626 bp, Homo sapiens
atcagccactgcagctccctgagcactctctacagagacgcggaccccagacatgaggaggctcctcctggtcaccagcctggtggttgtgctgctgtgggaggcaggtgcagtcccagcacccaaggtccctatcaagatgcaagtcaaacactggccctcagagcaggacccagagaaggcctggggcgcccgtgtggtggagcctccggagaaggacgaccagctggtggtgctgttccctgtccagaagccgaaactcttgaccaccgaggagaagccacgaggtcagggcaggggccccatccttccaggcaccaaggcctggatggagaccgaggacaccctgggccgtgtcctgagtcccgagcccgaccatgacagcctgtaccaccctccgcctgaggaggaccagggcgaggagaggccccggttgtgggtgatgccaaatcaccaggtgctcctgggaccggaggaagaccaagaccacatctaccacccccagtagggctccaggggccatcactgcccccgccctgtcccaaggcccaggctgttgggactgggaccctccctaccctgccccagctagacaaataaaccccagcaggccgggaaaaaaaaaa

SEQ ID NO: 861 - DNA, 1340 bp, Homo sapiens
ttttttttttttatatttgtaccgtttttatttgtaaaaataaccatctgaatgcatttccatagtatattacagttaagtacttcattacgttattagagcattcagtagttgcaaaagtattaaactgtgcttgagaagattcagattgtttcaaagtcattcactgaactaaaagtcattttccccatttttacagtcatgacatttaccagagtcattcaactccaatttacataagaaaacattatagacaaaatcccactgaaatcatcaaacaatattttatgctgttacaaatatgttatgcaaaatataacactggcaccagatttgtatcatcgtgctttacaaagatatattgcacatgctagagcataaaatatgtagacaaaactaccaaataaaagatatttgcattgaatttttagatcacataagaaacgcatagaattacattttatacaaacactcagattgtcactatcttaaaatgcttttcccctataatactgacctatggtttatagtttcgtaagacgaaagcattttagcactgcaaaatcaaacaattcctatagaaaacttaagcattttcatattcatttcaatgcaagtacaaggggaaataggaaaaaagacactttatacattcaaagaaaagttgaaatgaaaactcactggtatcatattgctctgataacactcaaatgaaaaaatacaaaacattccacagaacattttcagaatatacaaatataaaaaggcactctaacttcatattacaagacaataaaacggatgagttcttcaaccaacacaacatataagcacaccaagttgctcaacagtacaaagaataactagtgcagcaaatccatttgatgttcttgttctaatttaataacaaaatgataaaccaagcagtgtttactgcctaaagtaccaaaacatactatggtgcccttttagtagtgataaatagaaataccctgagctatttactgtagaatcatagcagattttaggcaatttggagatagtaatgtatttagcaaagacaggcagacactggcaaataagtaagtgcaatgaaacatgatccttgtagttgtggttaaaatacagtctaaaaataacacaaataaaagcactaagcaactaagactcagttaaaaacccatttttttttcttagaaagctatggtgcaaacataattttatttctaagagatgtaattaaaatacagaaatgatagtttttaaagtcatttctttaaaaaaattttgccttggggtatgggagaaagagaaagagaggaagagagagagagagagat

SEQ ID NO: 862 - DNA, 2091 bp, Homo sapiens
ccatattccaagtgatgtgcaaagtgattaaatttctaaataggttttattttggccaccatcatttaatgacattcaattaaggatttcttgaacaatttctaccaaaaaaataatttcctcctctaaaacattgataaaattgataactgggtacctaacagttgcaaaacaagtctacaccattctttagtatgaaaagcaacataaaaaaatggagcatcaaaatattttatttcaaatttattttatgccagatccaagctgtaactggaacctattcccagtctatgggtttctgaatttcattttcctatttattgtatttttatgagaaacttgttgtaatgagtctgtaccactttatttgacatttactaaagctgtataaaagccatgcacagtttatttacagtattgtacattaaatgataatgtttgaagatcacacaaagatttcacaaaactataactaatacagaaagatgtgtgaaaacattaggggctttcaaaattttaggtatggaattttgcaaagattattttggcttataagtgttaggcaatcactaacctgaaataagtgacaaaaacatgcagatgattaccatttcaacaaatgaaaacctataaatgtctagctaaaagctaaaatattgtgtagctgaaatactaccatataacaatgggaatttataaaacaggaaaaaaggttattctttaaaagtcttccatgagtaatagattttcagtaattttctataaaaacattcagaaattaagtttctcaaattatgtttatcaccaaaattatgttttcagtagtgactggagctatgacttttaaataattatttattgtactataggggaagtatcagcttttccctgtaggggataggctggagaaggaaatcaaccagtaaatttagattcaagtaaaagatcctagtacaaatatatcattaacacagagtggagagttacaagaactgcaggtccacatacttttaactgtactcttagaagtgtaaactttaggtttgttcaatttaaggtctcctattaggaaatacctcttcattgagagtataggaaatatcaatagatatttcttctttaaatccatctcttccagtttttactgttgtggctgaagtacatttaaatattcagactgccccaactgataagttgtgtttcttccacagtcgacatactgatacctctcctgggatatctgttcagagtggccaaagtatgttgttgtcacagtaacttgcatcatgagtactatgttatgcactttgatggatatcagagtacagaaatcatacatataactcatttcctctgctataacggtaggtactgtgtaatcaatttgtttcatatcaagtggaccaataatggttatgttgtttaagcgtgcctttccaataactgtttttgaaaattgaacttgggcagtgatgttttcaacttcgacagagtaatagttattgtttgttatatttagtgtgtttgtgatatttaaataaattgtacgcttctgaacatcataactgacataggctgattttacaccaatgtatttcacgtcgatagagcgagggaaaaggaaaaacacagccaatccagaaaggagtagacagacaaacacagaagccatcacatacagctttgttcttcttggccttaatctctgatcactatatggaatcaatgccaccagttggttttcttgccccctaggaattcttcctgttccctgacaagtagggcaggtgacactatctcttcctgtaaattccacatatggaaactgagagacatctccatttcttccatcttcattatggacttcactattaaccagtccattcctcatgttttcagatgtgactccatcataagcatcttctttgcttgaatgcaaaggcaaatgagaaagagactttcccatgtcggcacgcggggcgctgcgcagtcccgggctgcttcggcgcggacagggccgaggacagggtcgtggagtccacagtcccgggagccggggggtggagcgaccggcctggagcgcgcggtcgc

SEQ ID NO: 863 - DNA, 1355 bp, Homo sapiens
actgcagaacggagtgaccacagaccaaagcaaatcacgcaagtggatcaaaaaatgtttattctgaattctttaatttaaaaaaatcatacctatgaggtgtgctacaggaattcagatacaataagttgcatataaaacccgacctcattgctcattgtggtaaagcaaggatgatgagaaaatgcacctcaggagcaaaaacacgcttcacgggcactccgggacccaagtcccgagacatttccacgtgaccttctggaaagacacaccgcccacctgactgcacgacgggactggtccagcctcccggctcctcaggaaggagatgagtttcctacaaagtgagtggccacaaatgccaggacagcggtgtcctggagctgtggggggaccttggggaagaacacacactcatctgcacttcacacttctagccttcaactgatcaaactactgaaattgaacatgatattttggcaaaaatactacacccccattgacaggaggagggttcctggcggctcacagcagagcaggcactgccttccttcccaaggccgagaggccatgctgtgacatggcacacacaccgccccaggctgcccggtggcccagggaccatatgggtgacagttaagacatcagcctttgtgaaaagccaagcccgacgcagacctcaactgcactgtgcgtcccaatccagagacccgcggggcaggggaggatttcaaggactcagtgacactgcccggcggggacaggagaggctcccagcagccctcccggtgacctgggcatcaggggatgggtagagatgaggacaagccggagtgggcacaggaaaaaaaccagggtctctgctagaagtcacctgatcctgcgggctgtcacggtatgacataggcagatttcccatctgacatggcagctcctgtgctctgggtgacttagctccgggttaacttccatcaggcccagtcctctcctccccagcagtgagactctagaggaagcccctcgtctgggacagtccttcctgcctacccgccacagggccgacctgaggcctcgtgcttgtcctgggaggtcccgactgcacttgatgggcacgagggcaacacgaacacaagagaatgcgagctccctgaagctgccgcgtgacagtcaatttggcaaaaaagaaaaaaaaaaccgatcaatgcataaaaccgaattaccaaagtcctcctaaggaatgtgattacaatatattagcaaattctgtggcataaacattttcgaaaagcatcagcaaaagtattaaatataaaagcaatgtgtatattcccctccccgaccttcaaaaaaaaaaa

SEQ ID NO: 864 - DNA, 2059 bp, Homo sapiens
tgttgtacatcaggtcatgctgtttgtcacgttttagccatcttaagaaaggacagaagctgcattccattctgcagtcttggcaaatgactttcttctgtttccacctctattttgccttgtttatttcatctccattatccctctttcagtcatgaatcatgacttttttttctacagtagtcagagttttgtaggacaaactcaggtctctctggcctctcagcaagcttcagggcttcatgcatgcctgcagctgagagtgtctggttgatattctggtactggcactggagccggctgcaataggtggtcctcaggtcccagttgaagaaggcataaataaaagggttaatgagagagtttgcatagcccagccatggaaatatcctctccacccacagtgggatgcagctgcaggcagtgccatagacagaagggtctggctgtcaggaggaaaaagggcggccagcacatggtggaggcccagacgatgatccccaaggtagtcgctgctttctgtttccgcttaaagatggagatattttttcctttcatgcttgaggagtctcgaaagttttgcacactcttccacctcctggaacttcactgtgccattcagggtgactactgctgtctggctccactcgagggaagccaggtaacctgtgttaggccgcgcttttcctggcggccttgtaaatctgttagtacatgaaaagcatgacgcacatggggattaggatgccaatgcggtggagtaaatcgtgtagccaaagtcttgactgaccaagcacaccttatcatcgtttacattctgagcccgaccaaaaatggtaggtaaagtgacaaaggcggaaagaaggcagacagaaagaatcatcttcgtcatgcatttccccttctgcctcatagggtacgtgagaggcttcatgatcccaaggtacctgtcgatgctgatcacgtacaaggtcaagatccaggccgtgcagcacatgacattcatggagaagacgttacagaaaaagtgtccaaagatccacttgcccccgatgaggtcggtgacactgatgaagggcatgaccgccatggccaccgagaggttggccagcgccatggacacgatcaggaagaagttgcctatgaagaaagggcctgtgaaggcggcaaatttgccacagtagaagtgacagataagcctgtggatgaggctctacgggaagcaatgcccaaggtcgcaaagtatgcggggggcaccaatgacaagggaattgggatggggatgacagtccctatttcctttgctgtgttccccaatgaagatggctctctgcagaagaaattaaaagtctggttccggattccaaaccaatttcaaagcgacccaccagctcccagtgacaaaagcgttaagattgaggaacgggaaggcatcactgtctattccatgcagtttggtggttatgccaaggaagcagactacgtagcacaagccacccgtctgcgtgctgccctggagggcacagccacctaccggggggacatctacttctgcacgggttatgaccctcccatgaagccctacggacggcgcaatgagatctggctgttgaagacatgagtgacccactgaaccaagaacttactggaagtgtgcctctgtgtctccttcctcgggggtaaggaggggacagtgcttcccaagttccagctgcaagtccaacttaaccaactttccttcaaagtcagttactgccaattttctgaaaaaagcatgttccatatactaagtctcttttctcacggtaggaaataatacagccaagatatgcagcatccttctcattgatgtagaaaattctgcgatagaccagaaaaatcctggcagcttttctccaggcatctgggtcactaaaaactgattttctaaaattattggatttgtattttgttattaagggggaaaatgtgatttgtgcctgatctttcatctgtgattcttataagagctttgtcttcagaaaaactaaaaataaaaggcattgacttaaaaaaaaaa

SEQ ID NO: 865 - DNA, 742 bp, Homo sapiens
cgtggtggaattcatgatactgtgtttcatattgaggtaagtcattgttttttatatagaaatgattagtgagtgatggttaacattgcattgtcaacaaaacctcccagaaaacctattgtggaagaaggcctatgagaattaataaactttcagttaagatttatgaagtagttttattttaattatgtatagtaacaaaacaaagaacactgtcaaggtgtcttccagaattgttccttcaatgtgtagttatttaatattttgcatattgatttttaaatgtttaggggcctctaaagtgcctaataactttagttgttttggcttttttacttaagtaacttaaaccattgagtaaacttactttattgtaagtaactttagccagacttaaacttgtaggttttgatttggtgaatatgagttcatgatgttttcttttctttttgttattataaatactggatttagtgctgaggtttagttgaatgttcctatttcttcagtctaagggaatgtccttaaaaagcataattcacgagaagaaaagtataaagaaggctgggcgcagtggctcacgcctatacttccagcactttgggaggccgaggtggctggatcacttgaggtcaagagttacagaccagcctggccaacatggcgaagccccgtctctactaaaagtgcaaaaattaggggtggggggtggcacgcatctggagtcccagctacttggggc

SEQ ID NO: 866 - DNA, 2083 bp, Homo sapiens
  misc_feature (1)...(2083): n = a,t,c or g
ggaattcccaggacccacagcggctgcaaaggaaacctaaaggcaatactagctccatttcaagaaccgaacaggaaatattccaagtagaattaaaccttcaaaatgcttctctgaatcatcaagggattgacaaaatatatgactgccaaggtttactgccacctccagagaagctcactgccgaggtcctaggaatcatttgcattgtcctgatggccactgtgttaaaaacaatagttcttattcctttcctggagcagaacaattcttccccgaatacaagaacgcagaaagcacgtcattgtggccattgtcctgaggagtggattacatattccaacagttgttactacattggtaaggaaagaagaacttgggaagaaagagtttgctggcctgtgcttcgaagaactcttctagtctgctttctatagataatgaggaagaaatggtatgtgtggggacttcccagttggctgtaagttgccatttgaactaaacgaaatagatcaggaactgaggacatatctaaattttctagttttatagaaggcttttatccacaagaatcaagatcttccctctctgagcaggaatcctttgtgcattgaagactttagattcctctctgcggtagacgtgcacttataagtatttgatggggtggattcgtggtcggaggtctcgacacagctgggagatgagtgaatttcataattataacttggatctgaagaagagtgatttttcaacacgatggcaaaagcaaagatgtccagtagtcaaaagcaaatgtagagaaaatgcatctccattttttttctgctgcttcatcgctgtagccatgggaatccgtttcattattatggtagcaatatggagtgctgtattcctaaactcattattcaaccaagaagttcaaattcccttgaccgaaagttactgtggcccatgtcctaaaaactggatatgttacaaaaataactgctaccaattttttgatgagagtaaaaactggtatgagagccaggcttcttgtatgtctcaaaatgccagccttctgaaagtatacagcaaagaggaccaggatttacttaaactggtgaagtcatatcattggatgggactagtacacattccaacaaatggatcttggcagtgggaagatggctccattctctcacccaacctactaacaataattgaaatgcagaagggagactgtgcactctatgcctcgagctttaaaggctatatagaaaactgttcaactccaaatacatacatctgcatgcaaaggactgtgtaaagatgatcaaccatctcaataaaagccaggaacagagaagagattacaccagcggtaacactgccaaccgagactaaaggaaacaaacaaaaacaggacaaaatgaccaaagactgtcagatttcttagactccacaggaccaaaccatagaacaatttcactgcaaacatgcatgattctccaagacaaaagaagagagatcctaaaggcaattcagatatccccaaggctgcctctcccaccacaagcccagagtggatgggctgggggaggggtgctgttttaatttctaaaggtaggaccaacacccaggggatcagtgaaggaagagaaggccagcagatcagtgagagtgcaaccccaccctccacaggaaattgcctcatgggcagggccacagcagagagacacagcatgggcagtgccttccctgcctgtgggggtcatgctgccacttttaatgggtcctccacccaacggggtcagggaggtggtgctgccccagtgggccatgattatcttaaaggcattattctccagccttaagatcttaggacgtttcctttgctatgatttgtacttgcttgagtcccatgactgtttctcttcctctctttcttccttttggaatagtaatatccatcctatgtttgtcccactattgtattttggaagcacataacttgtttggtttcacaggttcacagttaagaaggaattttgcctctgaataaatagaatcttgagtctcatgcccaanaaaaaaaaaa

SEQ ID NO: 867 - DNA, 396 bp, Homo sapiens
tttttcagtagagagaaaagggctttacttggcggctttgggtttacaagatcgttggtgaacaatcagtctgtctggcaggaaggtacgcccacaaacattacagggaaccaactggctgtgggcacttgtccaagcagcttcatttaaagcatcaagatcatagaagcctttggcagtaatggtcctgacttctggttttttaggtactggtctccttaactctttaggcaacaagttgttttcattatgccattttttcagacattgtggctcatgaatgctaatagattttgttccatattcacgaccacaaatgtagcaaacaactgctggtggacgccgtatcattgttggcttagtgttgtggtctgtcgatgtgagagccatgggatc

SEQ ID NO: 868 - DNA, 738 bp, Homo sapiens
ccccagatacagttattggggggagggggagcggtgggaaggaatttggccggtgggtcctctggtaggtttttgagtgacgtttgggaactccaaaggggtcttgtcctgctggaggctcgagaatggtctctgagagtgactaggagggaagaggatgctgagccagttacccatgtgcctgctgagcaggtagttgatggcggtgaggaagcaggcctgcaggaagagggacaccaccgcgatcactaagccatgccagacctccatgacttctgtcagcatgatgagctccttgctgataagttggggctcaggcactttcaggaaccaccctggcacctcgtctctcagtagtgccaccggcagggtgctggagatcaagtttcagatgtccggactccaagtgccagttccttcccggtgttcagccactgtgttaatcctccacagggaactgctacacgctgctctggtgaggcattccaccggggcaatttcctacccgggagtgctctttggatcgcgtcactcgggctggccggagtccgcctcagggatgctccacaggggaggcctaagccgcctaaggggctgcctcggctgtccatcagttacctcgtttcctggtcagggaaccaagaaatgtagcaggacgagccgcagacaaaacccctcagacaccaaattgtagaaggaaggcggacgcgtgggcggacgcgtgggcggacgcgtggg

SEQ ID NO: 869 - DNA, 1354 bp, Homo sapiens
ttttttttttttatgcacttggggtaataggtttattatctctatatacaagtaagcatttattgatgtttgtcaaaaataagagacaagataacaaaaactattttagcatgaaaacgagatagctgcaatagactaatactgagcttaaagactccaaaaagagcacagaacctgaaatgacagttttcaggttgtatagttatccagacaatgaagtcaactatacaaggcaagcaacacatgacaataaaacaccatcaacagtttcccactggaggatggagggaggcttgctggggcctggggccactagtgggaaaaatattaaaatctcataaatcctccgtatcttttttccatttcaggaacttctttggagtaactttcgccttcttcgtcggagggcagagcctcggcaaagcgcttcaggaaacctccataccggttttggggggaagtcattcaccacttttggggacctactcttctcatgaagcccccatatcgcttctgcagctctttggctttctctttcagttgggggcttctctttaagcctctcatgaagcccccatatctcttgctcacttcttcctcattatcactgccatcctggtggtggctacgctctcggttgtcccctgtttccagaagctcttttagcaggtctgaggaattggccagcgagtcgtcctcctctgcatccttcttcatgaagcccccataccgcttggcgaggatctcacttccattggcctcttcttctggctccatgggataaagctcatccattttcttcatgaagcctccataccttttcatgaagcccccataccttttggctagcaaatggctttcttccggtttgctattttctctgagggtgctggtgccatcttgaggaagctctggtttggacagctgcaggagctccttgcaggtttcccaaattttcagagaaggcagtttaccttcacattccattacgcaagccaggaagttgatgtcggccgggcgcactaggcggtagctgcacgtcgcgcaatcctggctgcattcggcccgcacggtcgccaggagcccggggccgagcaacagcagccaagtgcaaagtgtcaggaaccgcgccatggagttgacgctgttcggatggagcaggccaattggaaaagccgggttcagacacgactcgtcgcggtcctcagcgtctctgcggggtcacgggccaggctgcggggctctgagcgcctgcctcgccgtcccggggcttaacggctgctggagccactttataattagccccaaaccgaaggaggcgcgcgcgccccaatcgccggcgggctgcacgaaa

SEQ ID NO: 870 - DNA, 2252 bp, Homo sapiens
ttttcgtatcatattttcacgtcacttatcactatctgaaattgctatccatctgttttcttgtttattgtctgtctctgttactagggatcctgtgattttgggtagtacttggctgtcacccaagtacctagaacggggttcactgcacaccgaaagtacgcaaaaatactaagtgaatgaatgtcaggaggatgaaagatggagggaggtgagaaatccatcaaaggctcacagaaagaactcaattcttggatgaaagtcggaagaatcccaacagctaacaagcaaatttgctgagagggggcggggcgggccaagggcgggggcgggaaggggcggagtcaggcggaagccggggagaaggcccaggaagtgacggccgcctcccggctaccggggacttctggagtccgagaagtcaacggcgcggttgctgcggccgccgcgctccccggcccgaggcgatggagaacggagcggtgtacagccccactacggaggaggacccgggccccgccagaggcccccggagcggcctcgctgcctactttttcatgggccggctcccattgctccggcgcgttctcaagggcttgcagctgttgctgtctctgctggccttcatctgtgaagaagttgtatcacaatgtactttatgtggaggactttatttttttgagtttgtaagctgcagtgcctttcttctgagtctccttatactgattgtgtattgcactccattttatgagagagttgataccacaaaagtaaaatcatcggatttttatattactttgggaacaggatgtgtgtttttgttggcatccatcatttttgtttccacacatgacaggacttcagctgagattgctgcaattgtgtttggatttatagcaagttttatgttcctacttgactttatcactatgctgtatgaaaaacgacaggagtcccagctgagaaaacctgaaaataccactagggctgaagccctcactgagccactcaatgcctaaagactctggggagcagatgttacctaaggtagtgaccctgcattgtggtgcctgagccctggcagaagctcttgtaaaatttgttaattgtttaaaccacttcttttggagagcaaggggaaggtcaagaaggcagttttatcaatattgtgtcagtcaccacaaagtaggccagataagttaaaaaaaatttttttttaaataataattgaaacttatctcaaatggagattttggtgggaggaggagaaaacaattgtttttaaatcacacagctcaacggttgataaatgattctgtcattctgttacaggtcattcttttactaggcttagcttccaaattatgctttatagctgtataaacatcgtgattatattcatctacttagaaattgttttatttttaaattaatttgcttagctgtttgttttgatgcttagattatgttctgttaatgggaatttaacatatttaagaaaccaatatttaaaatgttggtctaggtttttttccttaacatatattaccaggctttactgtatttcactcagccttaaatgttataatatttttggataacggttattaattctttgagaccttcgtatagcctataaaatgtatgggagatgttggtattttatgtgtataaaagcaacaatatcagcaacttcgtgtttatactgcaccttggttgttgatgtcaagtaaaaaaaagattgttttgtaacacataaaaaaatggaagaaactgataccacacctaaggaccaaagataagaaagactttttgcccaagacagtgaaagtaattataaaaacaagctttgaccacttaccaagtatctgaagagatgagttcatactatgatttagaaagtggttcaattcccctgttggcatatgattatttttactaaaattaatacagctctgtgggtcttccttagtgttttctttgaagccaatctgttttttttaggacaccagcctttggtttttcatctgttcgagatgcctcttctctgtctccttatcagatagaaatggagtcatgtgctgctgcttcatctagcagaggttggcctctggctctgacactttttgtcagttgtctttaggtggtcctgaatcttgggcccttttgattgtgaatactgtgtagcaggatcttgagagtccttgttcttacataggcattgctctagtttgtctttggcaaaaaaaaaa

SEQ ID NO: 871 - DNA, 406 bp, Homo sapiens
tttcgtgcgccatgtgctccgggctcctgtagctcttgctgcccatctggctctcctggaccctggggacccgaggctctgagcctcgcagtgtgaacgatcccgggaacatgtcctttgtgaaggagacggtggacaagctgctgacaggcttccgctgcttcagagagcgggaggccgcgcctaggcgggctctcagaggagccgctctaccgggagagtcggaggctggcgacccagagtcacttaggtcttctgtgaatgcagactggattcaatattctgacctgtgggaagcggaggtcagtaccccgaggtgcgaagcgggcttttgccaggagtgctttaggacgccagggaatcaggagaaggatggccctttcatttgttaattgagctgaaacgg

SEQ ID NO: 872 - DNA, 1078 bp, Homo sapiens
  misc_feature (1)...(1078): n = a,t,c or g
tttttttttttttcaaaaccagcaaaaataaaatttaattggggctcaaagtctgggcaagtttgtccttccttcaggaccagccgtcagcagtccctgacgaaagcacccccattatctccacagacagctggttccagaaggaccctctgaggctggtcttccagggtaggatgtgctgtgggaggggttctgtttccgaggaggagaggcgcgacacagcgtgcaaggacctgcagcaccttccacgcagcaccccctgctcctcctcctgcagcccctgccgggctctgactcctaaagtaaggcaggagcttcttcaggcccctgggntgaggaagagccacagccaccctaaaatggcttcgggggcatgcagccctccatctccagcagctctggccatccctcgtatttgttttgggtctggggctgttcttttaagaactgctcaaaggggcttttacccctgaggtctttggctcctatgaagacccagctgtcccggaagcccagttgttttgcgtaggaactccccaagtcagagaagagtttcctgctttcatcgttcattttggtccctggatcgtcgtaggaggccaccagcaccagtgcaccccccggaatttctttaaggaatttcactaggtgcataacatctccagagtacatgtcaaatgccttctgtcccagcacagctcccgtggttccattcaccagggcgatgtttaggcctctgcccacattgtttttcacaggactcatgatcatgcggtcttcaaagcacatagtagggcccacgacgttggcggccccactgcagattttaaacgcaaagtagttggctgggcagggcttgatgaggccacacttgtactttttaacctggatctccttggtgggcgaggctgacactctcatcctgtccaggtgaagggtggcttggggtcagcttccacctgggcagagggttagcctcttgctgtcctgtccatgctgagcaggaaatctggcttcagggcagtgggggaattccaccacactgactatgtctacaaangcnnnncnagggctcaaa

SEQ ID NO: 873 - DNA, 2511 bp, Homo sapiens
gaaccaaaacaaaacttgactcaaagccaaggatgttccattcagtgtaaaaaagatgtggactttcttgtccaccttacaagacaatgacatctgtaatgtgacctgtacttgctaggctttagcaagtcactcgaggtcatggaacatgtttttgaagaaataatatcagttcatgaattctgtacctgtttcttgtcgctgaaggggtaagtgacatcagcagcatgttcattccttttcttgtcttctacctgttctccacaaaagtataaaaagccagaattgctttttgggttttgagatggcattgtcttccatttgcaaaaaacagtttataagacaaataataaagaaattgaaatgtttctgatggtttcaaaaatgtaaacataagccagagtagttatgtctcaacatcatctcttgccagccggcagctccttttcttccttgatcttctaaatgtacaggggaagacagctggcagcctgtcatgtttcaaaccttcattaaagttctggattttggcctcttcgttttcccctagatgtcattaaagctgtcagcaccattgctgtgcatgagaaagaggagagtctctggcctagggtggccgtcttctccacattggcacccggagtcctccatggggcgaggctccgcagtctgcaggtcgttgatctggagtcccggaagaccacgtacacctcaggtaccgtggtactttgtcccttgcttgctgctccagccggcatcaccccccagcccaactcagccactataaaaactgagttcaactctctgtgccaggtgttggggatacacagtgaataagaggtaagccctggcctctaagggctcctatgctggggcaggattaggcagtcccagggaccagcacccaaccagctgagcagacaatggtgagatgagtgggaagggagatgtgatttattctgcctgggactggtgggaagggacctgtgaccagccagccctgccaaattgccagacccatctgcctccagccgcttgtctcctttgctgtcggtcttccagatgtcagtgacagtgaggagctgagtagcctgcaggtcctagatgcagacacctttgccttctgctgtgcttcgggccggctggggcttgttgacacccggcagaagtgggcaccgttggagaatcgcagccctggccctgggtctggtggagagagatggtgtgctgaagttgggagctggggccagggccctgggcccagcattgccagccttggctcagatgggcgtctttgtcttcttgacccccgggatctctgccatcctgtgagctcagtccagtgcccagtatccgtacctagccctgacccagagctgctgcgagtgacttgggccccaggcctgaagaattgcttggccatctcaggttttgatggtacagtccaggtctatgatgccacatcttgggatggaacacggagccaagatggaacacggagccaagtagaacctctcttcactcacagaggtcacatcttcctagatggaaatgggatggaccctgctcctttggtcaccacccacacctggcatccctgcagaccaaggactttgttatcagcaacaaatgatgcctctctgcatgtgtgggactgggtggacctttgtgccccccgctgacaccagcatctttccatctaggcctctagaaaggggaggagctgctgtagtagcaagggtgctgatgtaggactcaagtgactaccagtccctgttaccagctgtgtggccttgggcaagtctgccagcgtcacttagcctcagtttccttatctgtaaaatgaggatagtaagaactacctcgtagtgatattgcgaaggttagaagaaacgcatggcataattacttggtagctattgttagatctgggagtgtgaaatggtagcgttttgtccctgtcttcacactatcatagggagaatcaaaagagctaacaaatataaacatgctttgtgaatttttttaaagaaaaaaatgtagaggggccaataaacatgaaaaaatcccagccctagtagcaattaaggaaatagcaaaacaggatttctgctcctcttgagtgggtctcatgggaacacaggtgcactttcccacactttgtccccccaggtgactaggttcaagagacatttgcttttggtggccccacaaacatttccttttgagggcccatagtgaatattaaagtgtgctggacatggtggctcatgcctgtaatcccagcattttgggaggctgagatgggaggatcgcttgaggctaggagttcaagaccatcctggtcaacattgtgaaaccccatctctattaaaaatagaaagaaaattattttaaaataaaattagggactcattgtcaagcctctcttttctgtattctcaggttttgatggtacagtcaaggtctatgatgccacatcttgggatggaacacggagccaagacgaaa

SEQ ID NO: 874 - DNA, 932 bp, Homo sapiens
cattgccctaccggaaaacgggaggagggagctggcgagtagaagcacctgcgtggtgtgcgggggtggagcgggggctggagggagagttaatgatttgccacaggctcatttcgcaacttaaccaagggtcagcttcccgtgaccatgtaccagctgcgtcctctgggccacgctccacttgcccgcttccacccggaaagccccccaggctgagtgcggcatgatctccatcaccgaatggcagaagattggtgtggggatcaccggtttcggcatcttcttcatcctctttggaacactcctgtactttgattccgtgctcctggcctttggaaacctgctgttcctgacgggcctgtccctcatcattggcctgaggaagaccttttggttcttcttccaacggcacaaactcaagggaaccagcttcctcctggggggtgtggttatcgtgctcctacgctggcccctcctcggcatgttcctggaaacctacggattcttcagcctctttaagggctttttccctgtcgccttcggcttcctgggcaatgtctgcaacatccccttcctgggtgcgctgttccggagacttcaaggcactagctcgatggtctgaaaaacagagatgagctccttgaacttggatcattggttgaagggggctaagagggaagaatgggaaccaccccctcagtcccctgcactgactcactccccgacatatcccggacctccccaagtccagaaggaaaggaatggagctgagcaactgacgtcaaatccccaagtcgactcaagaggctgccaggaagcagagatgcagaccccaaggagactgggctggggctggtatcacaccctcactctatatttatgggaggaaaagtgaagattaaattcccaagttgtgcgtgtgaaaaaaaaaa

SEQ ID NO: 875 - DNA, 509 bp, Homo sapiens
gaatgttccagataatccctttcccagtcctgcctgacatctgggtagggggtttgtccctggaattctgggacactggctggggtttgaggagagaagccagtacctacctggctgcaggatgaagctggccagtggcttcttggttttgtggctcagccttgggggtggcctggctcagagcgacacgagccctgacacggaggagtcctattcagactggggccttcggcacctccggggaagctttgaatccgtcaatagctacttcgattcttttctggagctgctgggagggaagaatggagtctgtcagtacaggtgccgatatggaaaggcaccaatgcccagacctggctacaagccccaagagcccaatggctgcggctcctatttcctgggtctcaaggtaccagaaagtatggactttggggcattccaagcaatgacaaagttgctgcaaccaactggatgtctgttatgacactttgcggtgccaacaaatatgg

SEQ ID NO: 876 - DNA, 794 bp, Homo sapiens
taccaatgcatctgtgatttgtgccacattactgggctaaatttgaagaggaaagctcggtcaaacattcttccagcttgtcatcttggataggctgaatgggaggtattttcaaggtgcatggtttgttgccatgtgttttttaagtagatctgccacctctagcttgactttaggttaccataaagctgcagaggtcacttttctgatttgtcagggccgaacacctgaagcatatatttcagttttcataacaggacctctgatctttgtcctgttatattgactggtttcataggagaatatatttttggattgagttttaattcttcagtagcagctgaataataaaataacgttgttacatttatgattcagcttaatgaatgattacattattagtattcctgcctgtgttttttgtttaaacatataacgtctttcaagaatagtgtacatatctgtctgggcactgtggtgcatgcttataatcccaacattttgggaggccagggtgggtggattgcttgaggccaggagttcaagaccagcctgggcaacacggtgagaccttgtctctacaaataattttttaaaaatcagctgcgcatggtggcatgcacttgtaatcctactacttaggaggtggaggcgcgaggatcactctaccccacgacgtagaacgtcgccggcgctatgaatgccccagtgccttcattctggggaacaccaacaacctgcccatacaaacaaaacaacagcactctcattacccgcccccactcttatccctc

SEQ ID NO: 877 - DNA, 1869 bp, Homo sapiens
gggctgcgcgcccgacacgcgcttcttcgtgcccgagcccggcggccgaggggccgcgccctgggtcgccctggtggctcgtgggggctgcaccttcaaggacaaggtgctggtggcggcgcggaggaacgcctcggccgtcgtcctctacaatgaggagcgctacgggaacatcaccttgcccatgtctcacgcgggaacaggaaatatagtggtcattatgattagctatccaaaaggaagagaaattttggagctggtgcaaaaaggaattccagtaacgatgaccataggggttggcacccggcatgtacaggagttcatcagcggtcagtctgtggtgtttgtggccattgccttcatcaccatgatgattatctcgttagcctggctaatattttactatatacagcgtttcctatatactggctctcagattggaagtcagagccatagaaaagaaactaagaaagttattggccagcttctacttcatactgtaaagcatggagaaaagggaattgatgttgatgctgaaaattgtgcagtgtgtattgaaaatttcaaagtaaaggatattattagaattctgccatgcaagcatatttttcatagaatatgcattgacccatggcttttggatcaccgaacatgtccaatgtgtaaacttgatgtcatcaaagccctaggatattggggagagcctggggatgtacaggagatgcctgctccagaatctcctcctggaagggatccagctgcaaatttgagtctagctttaccagatgatgacggaagtgatgagagcagtccaccatcagcctcccctgctgaatctgagccacagtgtgatcccagctttaaaggagatgcaggagaaaatacggcattgctagaagccggcaggagtgactctcggcatggaggacccatctcctagcacacgtgcccactgaagtggcaccaacagaagtttggcttgaactaaaggacattttattttttttactttagcacataatttgtatatttgaaaataatgtatattattttacctattagattctgatttgatatacaaaggactaagatattttcttcttgaagagacttttcgattagtcctcatatatttatctactaaaatagagtgtttaccatgaacagtgtgttgcttcagactattacaaagacaactggggcaggtactctaatataaaggacaggtggtgtttctaaataattggctgctatggttctgtaaaaaccagttaattctatttttcaaggtttttggcaaagcacatcaatgttagactagttgaagtggaattgtataattcaattcgataattgatctcatgggctttccctggaggaaaggttttttttgttgttttttttttaagaacttgaaacttgtaaactgagatgtctgtagcttttttgcccatctgtagtgtatgtgaagatttcaaaacctgagagcactttttctttgtttagaattatgagaaaggcactagatgactttaggatttgcatttttccctttattgcctcatttcttgtgacgccttgttggggagggaaatctgtttattttttcctacaaataaaaagctaagattctatatcgcacatgagcattaagttcttcattgccttgttaaggaaaatgagtaggcagactcagaatctgttatattgatttcagttacaatttaatctttacaattaaaagggcgaaagatgtagaattttagtttttgttgttgactcgaaataaccagttttcttgattagagtttaagcagatttaataccatgaccttgcttaaccgcttcttcttttttacttgcttgctg

SEQ ID NO: 878 - DNA, 2439 bp, Homo sapiens
ttctgtcttcctctctttcctcctctactgctccctccctctcttgcctcttaagtttcctgcaccgtgaatccaactgtgccaagccttggctcccgcgaaccaatcctgagcgcgacccgggcactgggacggcgactccgccaaagctggacgaggcagccggacccgtctgcgctcgagcatggagacggagcgcctgggagggcacgtccggggcgctggagacgccaggcccgagtagcttctccatggagcctgcccagagcggtcccttctcgcaggattcgccccaagtcctgtgcggctgctgagagcgctccttgctctgtaaagtggatgtcaggtggatctatgtttctgaaggaacaaagactcaaagaaggcaccgccaaggaagtttgagacgcgggagaatgcaggctgcgtgctggtacgtgcttttcctcctgcagcccaccgtctacttggtcacatgtgccaatttaacgaacggtggaaagtcagaacttctgaaatcaggaagcagcaaatccacactaaagcacatatggacagaaagcagcaaagacttgtctatcagccgactcctgtcacagacttttcgtggcaaagagaatgatacagatttggacctgagatatgacaccccagaaccttattctgagcaagacctctgggactggctgaggaactccacagaccttcaagagcctcggcccagggccaagagaaggcccattgttaaaacgggcaagtttaagaaaatgtttggatggggcgattttcattccaacatcaaaacagtgaagctgaacctgttgataactgggaaaattgtagatcatggcaatgggacatttagtgtttatttcaggcataattcaactggtcaagggaatgtatctgtcagcttggtaccccctacaaaaatcgtggaatttgacttggcacaacaaaccgtgattgatgccaaagattccaagtcttttaattgtcgcattgaatatgaaaaggttgacaaggctaccaagaacacactctgcaactatgacccttcaaaaacctgttaccaggagcaaacccaaagtcatgtatcctggctctgctccaagccctttaaggtgatctgtatttacatttccttttatagtacagattataaactggtacagaaagtgtgccctgactacaactaccacagtgacacaccttactttccctcgggatgaaggtgaacatgggggtgagactgaagcctgaggaattaaaggtcatatgacagggctgttacctcaaagaagaaggtcacatctgttgcctggaatgtgtctacactgctgctcttgtcaactggctgcaaaatacactagtggaaaacactctgatgtaatttctgcccagtcagcttcatccctcagtataattgtaaatcatcacagattttgaagtcacacctgaagacatgctctcacatatagaggtacacaaacacaccgtcatgcacatttcagcttgcgtctatcatgattcctgttgagagggctttcattgtctgactcataatggttcaggatcaactatcatcaaacggaaggattaactagacagagaatgtttctaacagttgctgttatggaaatctcttttaaagtcttgagtacatgctaatcaataatctccactcatgcattcctactgcttggagtagctgtactggtaaatactactgtaggagtatctgcttgttaaaatggaaaaatgtgtctttagagctcagtattctttattttacaaacacaacaaaatgtagtaacttttttccagcatacagtaggcacattcaaagtggtccaagatggctcttttttctttgaaaggggcctgttctcagtaaagatgagccaaaccatttggaatttaccatgtgggcagacattgggataccaactttcatcaccaatcattggacttttgtgaagtcgacaccagctaaggctgcttaaaataagttctgatcattatataagaagggaaatgcctggcagacaccatgtaagttataagtgtctgtcttatctttactacacatattgtaacaaattcaatatcctagtcttcatttgtatgaatggtttgtattgtacatagtttaaccaagtgttatttgagctgcttaattaatatttaacttgtaccttggtctctctgcttggttattggttaagaaaaaaggatatgaggaattcattttatcaatgtagctgtgaaggccattaaaaagacaaacttaatgtacagagcatttattcagatcaagtattgttgaaagctatacatatacaacattacagtctgtctgtatttagatattttatttctggaaaaaatgaaatgtacataaaaataaaacacttaaagttgagtttcaataaaaaa

SEQ ID NO: 879 - DNA, 641 bp, Homo sapiens
ttttttttttttggattgcaaaaatttattaaaattggagacactgttttaatcttcttgtgccatgagactccatcaggcagtctacaaagaccactgggaggctgaggatcacttgagcccagaagtttgaggctgtagtaagcttcaaaggccactgcactctagcttgggtgaggcaagaccctttcaagcagtaagctgcatgcttgcttgttgtggtcattaaaaaccctagtttaggataacaggtctgcctgcatttcttcaatcatgaattctgagtcctttgcttctttaaaacttgctccacacagtgtagtcaagccgactctccatacctttaaaaggtatgacaggaactgtcttcatgtccttacccaagcaagtcatccatggataaaaacgttaccaggagcagaaccattaagctggtccaggcaagttggactccaccatttcaacttccagctttctgtctaatgcctgtgtgccaatggcttgagttaggcttgctctttaggacttcagtagctattctcatccttccttggggacacaactgtccataaggtgctatccagagccacactgcatctgcacccagcaccatacctcacaggagtcgactcgtgccgaat

SEQ ID NO: 880 - DNA, 1032 bp, Homo sapiens
ggcacgaggcatttgcagagtgagacaaagcggagaacgctggtgggcctgttgtggagtacgctttggactgagaagcatcgaggctataggacgcagctgttgccatgacggcccaggggggcctggtggctaaccgaggccggcgcttcaagtgggccattgagctaagcgggcctggaggaggcagcaggggtcgaagtgaccggggcagtggccagggagactcgctctacccagtcggttacttggacaagcaagtgcctgataccagcgtgcaagagacagaccggatcctggtggagaagcgctgctgggacatcgccttgggtcccctcaaacagattcccatgaatctcttcatcatgtacatggcaggcaatactatctccatcttccctactatgatggtgtgtatgatggcctggcgacccattcaggcacttatggccatttcagccactttcaagatgttagaaagttcaagccagaagtttcttcagggtttggtctatctcattgggaacctgatgggtttggcattggctgtttacaagtgccagtccatgggactgttacctacacatgcatcggattggttagccttcattgagccccctgagagaatggagttcagtggtggaggactgcttttgtgaacatgagaaagcagcgcctggtccctatgtatttgggtcttatttacatccttctttaagcccagtggctcctcagcatactcttaaactaatcacttatgttaaaaagaaccaaaagactcttttctccatggtggggtgacaggtcctagaaggacaatgtgcatattacgacaaacacaaagaaactataccataacccaaggctgaaaataatgtagaaaactttatttttgtttccagtacagagcaaaacaacaacaaaaaaacataactatgtaaacaagagaataactgctgctaaatcaagaactgttgcagcatctcctttcaataaattaaatggttgagaacaatgcataaaaaaaaaaaa

SEQ ID NO: 881 - DNA, 1966 bp, Homo sapiens
accctggagctagcgtcatcgcgaaggaactcccacgaccggatggaagagcccagctgacacaaccaagacgagtctcagtgtctagggaagcttggggttctgctccttttacttcaggcgaacctgaactcagttaatgcaattttgaagcatgccctgaatagattcagtcattatcaagtcaaactaaaaacggtgaaaggttgcgactattaccaaataggaaaaacctgaagacataagaactacacatgaggaatatgtcatttagcactttcactttttgatctccacagaagacaatgagaagtcataccataacaatgacgacaacttcagtcagcagctggccttactcctcccacagaatgcgctttataaccaatcatagcgaccaaccgccacaaaacttctcagcaacaccaaatgttactacctgtcccatggatgaaaaattgctatctactgtgttaaccacatcctactctgttattttcatcgtgggactggttgggaacataatcgccctctatgtatttctgggtattcaccgtaaaagaaattccattcaaatttatctacttaacgtagccattgcagacctcctactcatcttctgcctccctttccgaataatgtatcatattaaccaaaacaagtggacactaggtgtgattctgtgcaaggttgtgggaacactgttttatatgaacatgtacattagcattattttgcttggattcatcagtttggatcgctatataaaaattaatcggtctatacagcaacggaaggcaataacaaccaaacaaagtatttatgtctgttgtatagtatggatgcttgctcttggtggattcctaactatgattattttaacacttaagaaaggagggcataattccacaatgtgtttccattacagagataagcataacgcaaaaggagaagccatttttaacttcattcttgtggtaatgttctggctaattttcttactaataatcctttcatatattaagattgggaagaatctattgaggatttctaaaaggaggtcaaaatttcctaattctggtaaatatgccactacagctcgtaactcctttattgtacttatcatttttactatatgttttgttccctatcatgcctttcgattcatctacatttcttcacagctaaatgtatcatcttgctactggaaagaaattgttcacaaaaccaatgagatcatgctggttctctcatctttcaatagttgcttagatccagtcatgtatttcctgatgtccagtaacattcgcaaaataatgtgccaacttctttttagacgatttcaaggtgaaccaagtaggagtgaaagcacttcagaatttaaaccaggatactccctgcatgatacatctgtggcagtgaaaatacagtctagttctaaaagtacttgaggtaaacatactaaaatgaattatataatgcagcctcttatttctttgaagaactaaaaaattaggaaacaaagttctagccatttaccaaaactcagatcttcaaggcttctgcttggtattttgtggatatttccatttgccttaactgtaaacccatttcaaggtacctatccttttaaatcctgtatgtaaaatcttttcaaaatacatttttaagcctaatactcttaacatagattatgaagttaagtgaaatttatgggctctaacaggcaaaataattaaagtgccatagtttctcaagtgactaaagtaggttatttaaaatcaaggcacttggtactaatttgaagtgtgtttaaaagtaaatgatttgggaactgacaatgtgtcagaaaatatatgttcatttatcattttaaaatcttgtataatttgcccctgtattcatttatgcctaaatctctataacagatgaaaagataattaataaaatcctaattaaaaaatgg

SEQ ID NO: 882 - DNA, 499 bp, Homo sapiens
ggcacgaggagagattcacgcaccctcaagagtgtgggtgagacatatacagcctgttagacctgaaggcagatggctcttcttaaggccaataaggatctcatttccgcaggattgaaggagttcagcgttctgctgaatcagcaggtcttcaatgatcctctcgtctctgaagaagacatggtgactgtggtggaggactggatgaacttctacatcaactattacaggcagcaggtgacaggggagccccaagagcgagacaaggctctgcaggagcttcggcaagagctgaacactctggccaaccctttcctggccaagtacagggacttcctgaagtctcatgagctcccgagtcacccaccgccctcctcctagctcagggacccagcccctcctctctgagaaactctgaccttcatgtccttaggctgtgctcctgccactctaccctgacacctcaataaagaccagtgctggtttttgttgggaaaaa

SEQ ID NO: 883 - DNA, 933 bp, Homo sapiens
ggcacgagaagaatacaacaattagacaatatttaagtaaattaaactatactataaataacatagctatttataaaaagttatgaagtacaggtattcatggagatacgctcaatgtaatatcaaatagaagcattgggtatgattattgcgtgtatagagtccatcatgctggtgtgtcatggtggtttactttttttctgcaataatttctatgaagaaagatgcttaccttttttatagaactggaagaagacatggcttgcaccaacagcaacagagatgggccccacagttgccactgccttcgccaggtccttctcccgtgaagggatgtccacaaaaccagtgtcattagcagcagaatacttgggattgtacctacaggttttaaccttttaaaggtgaagagggaggtgacttgattactaccatccttctcctggggaatgtgagtcagaaccacaacactcagcagtttgcagcatagaatttccaagtcaacactgttacaaatcatccaaggaagtgaaatgctattattaatagctaatttgaaactgaaaattaactcagttctcttcagtgagacccccaggtttactttccgtaagacattttttacaatggagacatttggattatatgtagaatggtctgtatattctccatggtacatagaagcaagaaacagtgcatggtaaccatggcatcacagaactggtccaagggctttaatttaataaggccaacactggaacttttgcaaatgaagattccccatctaacaccgggaatctgaaaaagggccgggaattttgaaagggtcccaattaacccatccggaattggcactcagaaaaaggagctccatttaccttttctctataagggataggagcctccaaaaccaagccctccgttctcctgaac

SEQ ID NO: 884 - DNA, 3378 bp, Homo sapiens
  misc_feature (1)...(3378): n = a,t,c or g
caggcatgagtgacggtgcccagccattcgtgacatgtttatacaaatataactttagcaaatatttagcataactatcaaaattacaaatcatattaaatttgtataaatgtatgcaatttttggaacacgcatatcaacaacatacccataaatataactgagatgagatctaatgtcacctcacttgacagtgccctcccatgcagtatcgccacatttgacaatgcctgcccatttaatctaccaaataaatcgaatcacttaatacctctacaagatgagagatacattctttagactccccaagggatgcagctgaaaaaaatcccaaagttagttttaagccaaaaagacttgatttaggattttgacactggagaaacccatcaaagatgtcaagtttgaaaacacttgatcaaaacagaatcacaggtcactattaaaagagtattaatttaaccagagacttccaaagcaatacagaaacttacatggatataaaaaccctaacccttttaaaggtcagatttgctaagtgatcaaaaggggtacttgaattgaatcgacacaggaagagtgtgtacagggttatgagtgtaggcaggtggttactttggtcatatctccatttgccacctgattacacatgagaatggcatctttactcaccagaaagccagtattataggaggtgtaggaggcattcttggacttgagacaagaacattgttgtgtagaaatttcattgactgtgttaaaattattctccatgggctggagaacacataacatggcctttataatgagacgggcattgattggatgcaaggtctccannnnnnnnnnnnnnnnnnnnnnnnacagagtgcttcatcattccgagactcagtttttaaaggaaaaacaactaactaccttgcaagcttgctagcaggtttaagtgtaataatgtgtgggaatgactgcaccgtgactaacatgcagtgacagcttaattaatgttaacccttatcattatcatataagaatgtgagttacataagagaggagtcctgtcagttcgttctctgctgtgtccccaagaccatgaatcatggctggcatgtagtaggcatttaataatatatgttcaacaagtatttggcagtcttggagggcagaaaaggaggtggggaagatttttaaataacattttttaaaaagtcacattgtcctacaatactgatttttcttgcatatttaggaaattgagggtttttttctaaaacatgcggacatatgggaaataggatgcaacatttgcactaatgtttcagacacagttagaggtttccaagagattttgcgctggggaggctgcttgctacaagctcccaaagctctgggaggacatagtattcattcctccctcagcagaagcggtgaggcaagaagctctggggagcacccagcgttggacttttagcatagtgtgtcaggtcttcatagtttgggcccagggcacagagaagtcacagctctctggcatcctgtgccctttaccctctttgccaagggaaaatgtggcccaccaaagcaagaaacttgagggcatgggtcaccccagccctggcatctgcccagagcccgagaaggaaggaacaatgatcctccagctacctcacagggctggcacaggtgaccactgccctggcatcacccatctgtgtccggcagcctgaaccccatctgtggggatgcgaggaggaaaatacaaaagtccttaggtgaacactgagaaggcagatgcagcagaaacctccaggccagaactacccagtcttggacctatggtggagatagagcatagctggcgatcatgtgtacttacactctaaggtcacctggttgcactatggcctcatctgtggctctgaaaatgaagatttggaaggagatcatcacagctaatgtttaacaagcccctcctgtgtgccaaatcattcacccctcaccacaaccgaatgagctaaggattctcattatatatagtttatggagagggaagtgcagacataaagaggtgaattatcttacccagatcacacagctgataagtggtggaggcagaatagaatctaaacagtgtggctccggagcccacatgcattgattcgacaagtgtttattgagcacctgccacggacaaggccttgtgtgattaaatagggttataattagtaatataaaaatgagaaatcactaatgctttttagacttaacattttgtttttttgtaggtttcaggcacagaactgtatatccaataatagtgaaatggatcccactaattatgacagaaatgatgatacatttaaatgacttggatgttttataggtatgatctcgtgaaatcttgagagaaactgaatgacgaatgaaactattgttcctgtttcacacagaagaaaactgaggttaaaaggggtaaagtaattttgcatggcatgaagtagaaattcaaagtacaggaatttgaacttggttctgtccttttctgaagcccttgaccactatagactcaaacatcaccttgtttttccactcattcaacactttttttttaaaattatctaataggttggcactcatcatgagcccctgttctcattctgcaaatggtgaagctctctattgtcctgaccccacagttcctgtcccatgaccagggccagctcaccaaggagctgcagcagcatgtaaagtcagtgacatgcccatgcgagtacctgaggaaggtgagtgagtgcagacagatggggcctggtgcccttgagcagttcccgggtctcagctgccacacatctcatagcgggtgatgctgggggaagcttacgcagtcacagtactggcttcttcctctttttctttccatacaagtggcttagggatggggtagagtagttgacttatttggatgaaaaccactatcttctgtcagaaactcaaaaggaatcattgctggcatggtaacctaaagaaaaacaaccagacaagtgcccaacgacacttaaaaaggtgatttattatcttgccaagtttaggctgggcatggtgactcatgccctctaatccccagcattttggggggctgaggctggtggatcacctgaggcccaggacttcgagaccagcctgaccaatatggcaaaacctcgtccctgcttgaaaatacaaaaattagccgggcatggtggtgtgagcctgtagtcccagctactcaggaggctgaggacagggagatttgctttggattcagggaggttggaggttttagtgggccgagatcacgccattgcactccacactgtgcgacagagcgagactctgtcaaaa

SEQ ID NO: 885 - DNA, 654 bp, Homo sapiens
tacggctgcgagaagacgacagaagggtacggctgcgagaagacgacagaagggtacggctgcgagaagacgacagaagggtacggctgcgagaagacgacagaagggtacggctgcgagaagacgacagaagggtacggctgcgagaagacgacagaagggggtcgacgtgttcttccggtggcggagcggcggattagccttcgcggggcaaaatggagctcgaggccatgagcagatataccagcccagtgaacccagctgtcttcccccatctgaccgtggtgcttttggccattggcatgttcttcaccgcctggttcttcgtttacgaggtcacctctaccaagtacactcgtgatatctataaagagctcctcatctccttagtggcctcactcttcatgggctttggagtcctcttcctgctgctctgggttggcatctacgtgtgagcacccaagggtaacaaccagatggcttcactgaaacctgcttttgtaaattacttttttttactgttgctggaagtgtcccacctgctgctcataataaatgcagatgtatagcaaaaaaaaaaaaaagggggggccgttttaaagaacccttggggggccccaaggtttacgcgggctggcaaggttatagttttcc

SEQ ID NO: 886 - DNA, 569 bp, Homo sapiens
  misc_feature (1)...(569): n = a,t,c or g
agaaatgattttccttttacctaggggaatgcaatttcatcacagccccttacaataaangctcctgaaaaccctttcagtagacagcatttcaattcagagaccaaagtgaaactatctttgaaaacagggacgtggctgggaaaccatgcacacctcggcgaacacttttccacccaccacgagcttggactttctgggaaggttgtcggttttctggtcaaaaacattcttgaagtcatcaggaatggaggaatggagactcggcatcccgggaaagtgagttcctggtttcatcgctgggattcaagagccgaacagcacaatcatgcagaacatcatgaagatgttccacagggcgatgaagattcgaaagtatctgaggctcagcaagaattcccggatgttgtcacctgtgctgggctccctggactcctccccaaagccctgcgtgtccttctttttcagcttaaagttcagcaccgccccggcattcatcagcaacgtcccgaacagcaggatgtctccgatcatcgttacggccgaagcgtccgtcagaaccggaagcg

SEQ ID NO: 887 - DNA, 414 bp, Homo sapiens
tcttataaatacagtgacgctccagcctctggaagcctctgtcagctcagcctccaaagaagccagcctctccccagttcctgaaatcctgggtgttgcctgccagtcgccatgagaacttcctaccttctgctgtttactctctgcttacttttgtctgagatggcctcaggtggtaactttctcacaggccttggccacagatctgatcattacaattgcgtcagcagtggagggcaatgtctctattctgcctgcccgatctttaccaaaattcaaggcacctgttacagagggaaggccaagtgctgcaagtgagctgggagtgaccagaagaaatgacacagaagtgaaatgaactttttataagcattcttttaataaaggaaaattgcttttgaagtaaaaaaaaaa

SEQ ID NO: 888 - DNA, 1298 bp, Homo sapiens
atggacctaacagacatttacagaacattttatccaacagctagagaaggcacattctttccatcagcactctccaggtctgccatgtggaggagtgtcaggaaaggcttttgggagaaagtggtacttacactgagtgtcaaaggaattacaaataatttagcagtgggggagcggggagcgcagctgatggccggcgatgggaacggagtggggccgtcgcctccgcgccgagccgtgagcgccgagccaccgccgccgctacctcagcccttcgcgaagcgccgggcagctcgggaacatggccctggagcggctctgctcggtcctcaaagtgttgttaataacagtactggtagtggaagggattgccgtggcccaaaaaacccaagatggacaaaatattggaatcaagcatattcctgcaacccagtgtggcatttgggttcgaaccagcaatggaggtcattttgcttcgccaaattatcctgactcatatccaccaaacaaggagtgtatctacattttggaagctgctccacgtcaaagaatagagttgacctttgatgaacattattatatagaaccatcatttgagtgtcggtttgatcacttggaagttcgagatgggccatttggtttctctcctcttatagatcgttactgtggcgtgaaaagccctccattaattagatcaacagggagattcatgtggattaagtttagttctgatgaagagcttgaaggactgggatttcgagcaaaatattcatttattccagatccagactttacttacctaggaggtattttaaatcccattccagattgtcagttcgagctctcgggagctgatggaatagtgcgctctagtcaggtagaacaagaggagaaaacaaaaccaggccaagccgttgattgcatctggaccattaaagccactccaaaagctaagatttatttgaggttcctagattatcaaatggagcactcaaatgaatgcaagagaaacttcgttgcagtctatgatggaagcagttctattgaaaacctgaaggccaagttttgcagcactgtggccaatgatgtaatgcttaaaacaggaattggagtgattcgaatgtgggcagatgaaggtagtcggcttaacaggtttcgaatgctctttacttcctttggtggagcctcccctgcacaagcagcactttccttttgccatagcaacatgtgcatcaataattctttagtctgtaatggtgtccaaaattgtgcatacccttgggatgaaaatcattgta

SEQ ID NO: 889 - DNA, 4494 bp, Homo sapiens
caataccctgctaatttttgtatttttagtagacaccgggtttcaccatgttggccgggctggtcttgaactcctgacctcaggtgatccgcccgcctcagcctcccaaaatgctgggattacaggtgtgagccaccacgtccagccaagaaaaaaagtttttaatgaaagaaacagaaactgatgccattatataatgaaccctagtacccatcacccagcttcagcagggggtagtattttgggactctttgatttttttggcttgggcctaggtgaaatgacaatggatgctctgttggctcgattgaaacttctgaatccagatgaccttagagaagaaatcgtcaaagccggattgaaatgtggacccattacatcaactacaaggttcatttttgagaaaaaattggctcaggctttactggagcaaggaggaaggctgtcttctttctaccaccatgaggcaggtgtcacagctctcagccaggacccacaaaggattttgaagccagctgaagggaacccaactgatcaggctggtttttctgaagacagagattttggttacagtgtgggcctgaatcctccagaggaggaagctgtgacatccaagacctgctcggtgccccctagtgacaccgacacctacagagctggagcgactgcgtctaaggagccgcccctgtactatggggtgtgtccagtgtatgaggacgtcccagcgagaaatgaaaggatctatgtttatgaaaataaaaaggaagcattgcaagctgtcaagatgatcaaagggtcccgatttaaagctttttctaccagagaagacgctgagaaatttgctagaggaatttgtgattatttcccttctccaagcaaaacgtccttaccactgtctcctgtgaaaacagctccactctttagcaatgacaggttgaaagatggtttgtgcttgtcggaatcagaaacagtcaacaaagagcgagcgaacagttacaaaaatccccgcacgcaggacctcaccgccaagcttcggaaagctgtggagaagggagaggaggacaccttttctgaccttatctggagcaacccccggtatctgataggctcaggagacaaccccactatcgtgcaggaagggtgcaggtacaacgtgatgcatgttgctgccaaagagaaccaggcttccatctgccagctgactctggacgtcctggagaaccctgacttcatgaggctgatgtaccctgatgacgacgaggccatgctgcagaagcgtatccgttacgtggtggacctgtacctcaacacccccgacaagatgggctatgacacaccgttgcattttgcttgtaagtttggaaatgcagatgtagtcaacgtgctttcgtcacaccatttgattgtaaaaaactcaaggaataaatatgataaaacacctgaagatgtaatttgtgaaagaagcaaaaataaatctgtggaactgaaggagcggatcagagagtatttaaagggccactactacgtgcccctcctgagagcggaagagacttcttctccagtcatcggggagctgtggtccccagaccagacggctgaggcctctcacgtcagccgctatggaggcagccccagagacccggtactgaccctgagagccttcgcagggcccctgagtccagccaaggcagaagattttcgcaagctctggaaaactccacctcgagagaaagcaggcttccttcaccacgtcaagaagtcggacccggaaagaggctttgagagagtgggaagggagctagctcatgagctggggtatccctgggttgaatactgggaatttctgggctgttttgttgatctgtcttcccaggaaggcctgcaaagactagaagaatatctcacacagcaggaaataggcaaaaaggctcaacaagaaacaggagaacgggaagcctcctgccgagataaagccaccacgtctggcagcaattccatttccgtgagggcgtttctagatgaagatgacatgagcttggaagaaataaaaaatcggcaaaatgcagctcgaaataacagcccgcccacagtcggtgcttttggacatacgaggtgcagcgccttccccttggagcaggaggcagacctcatagaagccgccgagccgggaggtccacacagcagcagaaatgggctctgccatcctctgaatcacagcaggaccctggcgggcaagagaccaaaggccccccgtggggaggaagcccatctgccacctgtctcggatttgactgttgagtttgataaactgaatttgcaaaatataggacgtagcgtttccaagacaccagatgaaagtacaaaaactaaagatcagatcctgacttcaagaatcaatgcagtagaaagagacttgttagagccttctcccgcagaccaactcgggaatggccacaggaggacagaaagtgaaatgtcagccaggatcgctaaaatgtccttgagtcccagcagccccaggcacgaggatcagctcgaggtcaccagggaaccggccaggcggctcttcctttttggagaggagccatcaaaactcgatcaggatgttttggccgctcttgaatgtgcagacgtcgacccccatcagttcccggccgtgcacagatggaagagtgctgtcctgtgctactcaccctcggacagacagagttggcccagtcccgcggtgaaaggaaggttcaagtctcagctgccagatctcagtggccctcacagctacagtccggggagaaacagcgtggctggaagcaaccccgcaaagccaggcctgggcagtcctgggcgctacagccccgtgcacgggagccagctccgcaggatggcgcgcctggctgagcttgccgccctgtaggcttggcgctgggctctcggtttgttcttcatttttaaagaaggaagggtcatatgtttattgctaaactgtcaaaaaggaatatattctgattaaattattactcctcactttgagggtgtgagaattttagaagatttaaatgttctatataacacttagatttctgatattttggaagaagttagaagttaatgaaagcaaactcagttaccaattttctggaaaatatccatgtggtaatggtagactttttaggtggcaatttctaggtctgaaatatagcagaggaaagggcgctgaggcagttgcaggcaggcagccctgtacttaccctgtactcacctcatccgacagacgctgtggatgaggaggggcttggcggaggcgtgagcaccgatgtccctttgataacctgcactcaccaagatgaactatttgccgccctgtcttttcctgggttggggggtggcatctgatggtggcagagtgcctgttggttcgcccgtgggtctcatggttcagacagagggaggtggacggcagggatcagggagccaggagcgcgcctcagacttgcagcaaccattgtgatttgggttgttcggaatatttaaattactgatcagaagatgaaagtagcttttctcttgggaagtcttgcagcccgtgggagtgataccaggagcaacacagagctcagcagcggcgccaaggtgttccctgtttcctcagcacgtgagccttcaccgcctgcttcattcaggagccagtgcagcagtaatacagtctatacattgttctgttttcaaatttatcctgaggctttgttgagcataaatgattatacgataaaggtatccgttattttggaactcatttcagttgggatctcctgtatgcagagtgttgcatttagaggtttgagtcccatcttggtttcttgccgtgctgactgtagccttcaccttgacttgaatgaaggtctgtggttggaatgtgtgaggagccgctgaggtgttcaggaggtgctgcctggaggtcggtttcttcctgggtgttacgggcaactgctcacacagttgtttctctgtgaacatttccagtgtttaatccaaaatgaaaacccaccaatgcttttgctaacttcagtgccttttataaatcatttttaaatttcctgaacttgctttttgaggatatacagggatattaagtagacgcaggattgtttttgtttgtaaaaattctgaattgaaactttgttttaaaaaaaggcttctttctttcatatgacaagagataggtcaggaatattggaatcaagatttaaatgttaaaattcgattttgttacacagggtgtgttcatttgttttgtagcagacaagatctagatcccagacagaaacaacacatgctattctaaaaagccgcattttaaaaggcaccttggttctcaaaagaaatcagaatatggatattcgtagtgatgatctgttttctctaaaatcttaccatattgtctgtatatggttgtaaattcaaatggaaagtaaaacgttttggccctgaaaaaaaaaa

SEQ ID NO: 890 - DNA, 1085 bp, Homo sapiens
tccgtaggaagtttggcccaatatgtcccccccccaaaataaaggtccctcccaaaaattcccaagtagcagattttccagtccccacgttgttaaaacacgggcaaggcctaggttataaataggccccccataaggaaaaaactattacctcgcaagcacgggtaaacttgggccccccaagggatcctttaaaacggccgccccttttttttttttttggctatttatttatttattttttaaataaagattgggtcttatctcactctgttgcccaggctgatcttgaactcctgggctcaagcagtcctcccacctcagcctcccaaagtgctgggattacaggcatgtgccgtcacacccagccctgcttgttttaaaaggggacttttttttttcttaatggaaaaaaatgaaacagagagccaaaagcttttaactgttgtttttttcttttcttcaatgaaagcctctcattttgaaaagacatgtttttcttcaagcaacaaaggtggtagaggaaattcctcaactttctcaacgagtcatgtaacgttacactggcctccataaagcaccgattaagaaagctaaagaataagatgttgtatttcttttaaaataatttaaaatatattaaattttcctaaggcaggttttgtttgaatgaggtgtcttgattagataactacatgccactgaaggagaacagtacttttaaggagctatttttgtttcgcagtagagttgaaaccagctgattaatccaatgaagttaaacagcagagacagatctcgtacataagagtatcagctaaagtcatgactacaccaattctttacacaattaagacatctttgcaactgttcaatttaagtactatggtttttagataatcgagaaaaacacagttgtaccttaacatctgttgagaaaatacaaataaatatgatgctaataaatggccactgataactcagtagccatctgaatagtcatgcggtttaagaatacatccttgtataatctgacatacaaatttgtcatttcctgcacatgcacaccattgttaaaaaaaaaa

SEQ ID NO: 891 - DNA, 1376 bp, Homo sapiens
tgcgcatgcgcgtgagggctgccgcggccaggcccagacatgtccgtccttgtaagttaaaagcttccatgggagccttccttcctaatcaagatgcaaataatacggcactccgaacagacactaaaaacagctctcatctcaaagaacccagtgcttgtatcacagtatgagaaattagatgctggggaacaacgtttaatgaatgaagccttccagccagccagtgatctctttggacccattaccttgcattctccatcagattggatcacctcccaccctgaggctccccaagactttgaacagttcttcagtgatccttacagaaagacaccctctccaaacaaacgcagcatttatatacagtccattggctctctaggaaacaccagaattatcagtgaagaatatattaaatggctcacgggctactgtaaagcatatttctatggcttgagagtaaaactcctagaaccagttcctgtttctgtaacaagatgttcctttagagtcaatgagaacacacacaacctacaaattcatgcaggggacatcctgaagttcttgaaaaagaagaaacctgaagatgccttctgtgttgtgggaataacaatgattgatctttacccaagagactcgtggaattttgtctttggacaggcctctttgacagatggtgtggggatattcagctttgccaggtatggcagtgatttttatagcatgcactataaaggcaaagtgaagaagctcaagaaaacatcttcaagtgactattcaattttcgacaactattatattccagaaataactagtgttttactacttcgatcctgtaagactttaacccatgagatcggacacatatttggactgcgacactgccagtggcttgcatgcctcatgcaaggctccaaccacttggaagaagctgaccggcgccctctaaacctttgccctatctgtttgcacaagttgcagtgtgctgttggcttcagcattgtagaaagatacaaagcactggtgaggtggattgatgatgaatcttctgacacacctggagcaactccagaacacagtcacgaggataatgggaatttaccgaaacccgtggaagcctttaaggaatggaaagagtggataataaaatgcctggctgttctccaaaaatgaggaccttcaaataggagtgattgaaataaataactacttgcatgttatgctttcatttgggtggaatacttcattggaataaactactgatcttgtgctgtgtcaaagtaacagactagaaccttctttcaagtacctgaattgaaatgaaactcattttgaataataaaaactctagaaactctttaaaaaaaaaaaaa

SEQ ID NO: 892 - DNA, 2900 bp, Homo sapiens
gagcgccccgacggcgcccgctcgcccatgccgagctgagcgcggcagcggcggcgggatgctggcgctgctggccgccagcgtggcgctcgccgtggccgctggggcccaggacagcccggcgcccggtagccgcttcgtgtgcacggcactgcccccagaggcggtgcacgccggctgcccgctgcccgcgatgcccatgcagggcggcgcgcagagtcccgaggaggagctgagggccgcggtgctgcagctgcgcgagaccgtcgtgcagcagaaggagacgctggccagcgcgagggccatccgcgagctcacgggcaagctagcgcgctgcgaggggctggcgggcggcaaggcgcgcggcgcgggggccacgggcaaggacactatgggcgacctgccgcgggaccccggccacgtcgtggagcagctcagccgctcgctgcagaccctcaaggaccgcctggagagcctcgagccgctgcccgcgatgcccatgcagggcggcgcgcagagtcccgaggaggagctgagggccgcggtgctgcagctgcgcgagaccgtcgtgcagcagaaggagacgctggccagcgcgagggccatccgcgagctcacgggcaagctagcgcgctgcgaggggctggcgggcggcaaggcgcgcggcgcgggggccacgggcaaggacactatgggcgacctgccgcgggaccccggccacgtcgtggagcagctcagccgctcgctgcagaccctcaaggaccgcctggagagcctcgagcaccagctcagagcaaacgtgtccaatgctgggctgcccggcgacttccgcgaggtgctccagcagcggctgggggagctggagaggcagcttctgcgcaagggggcagagctggaggacgagaagtccctgctgcacaatgagacctcggctcaccggcagaagaccgagagcaccctgaacgcgctgctgcagagggtcaccgagctggagcgaggcaatagcgcctttaagtcaccaaatgcgttcaaggtgtccctcccactccgcacaaactacctatacggcaagatcaagaagacgctgcctgagctgtacgccttcaccatctgcctgtggctgcggtccagcgcctcaccaggcatgggcacccccttctcctatgcggtgccagggcaggccaacgagatcgtgctgatcgagtggggcaacaaccccatcgagctgctcatcaacgacaaggttgcgcagctgcccctgtttgtcagtgacggcaagtggcaccacatctgtgtcacctggacgacacgggatggcatgtgggaggcattccaggacggaaagaagctgggcactggggagaacctggccccctggcaccccatcaagcccgggggcgtgctgatccttggacaagagcaggacaccgtggggggtaggtttgatgccactcaggcatttgtcggggagctcagccagttcaacatatgggaccgcgtccttcgcgcacaagaaattgtcaacatcgccaactgctccacaaacatgccgggcaacatcatcccgtgggtggacaataacgtcgatgtgttcggaggggcctccaagtggcccgtggagacgtgtgaggagcgtctccttgacttgtagccgccttctcctctgtccaggaggccgggatcaggctgttgccatggaagttcagggccatagactgccccacttaaactcttgtcagtctgggctcagggttcccagagctcattccccaggaatctctaagaccagggctggggcagtgtctgtcactggcttgtttgttccctaccaatattctgttgctgtttgaagtagtgccagggtcccctgggaagatgcccccaagacacctgccccaagtgggtggatatctgccttcctgctgcaagtggaggcaggtccagcagcccctcttcagagcccctgtaaatgctatcgcagcctgagtcctgccgccttccagttccttggtgtcccgtgcaccccttctgtctgtcccctttcatggctgtgcagccgtcccgctggagtggccatgtcccttgtgcattgagtgcatccccgctggtgactaagctcgcagcaagcggctaccccccgatctgcaaaagggcctctccctttgtgttctatacattgtgaatcttcccgtctgaagaacgcccagcctgcccagacaaagccccgccttccccaaagcagaggggctgtctgtgtctccagaaaggggacatcgggggggaggggggctcagaaaggagaagggctgtgatctccggtcccttcccccatcatccttccttagactgatgctttgactgaatcatcactagctatggcattaaaaggcctctcttctcatctggtgccaaaggttccgttgcagctttttacaaccatccggtgtggtttggaggatttgtttttttttttcccaacagaaaagaacagccattaaaagaaggctcccattttctgatgttccgccccactgggaaaagggggctcgttttaaattcatgttgattcttgtaagcactggactgtcttcatcaagtatttccctacagaactcctcaagaaaacagagatcatttggctagagattgtctgagtgactccaagctactcactgtattggacgggagtagtaatttattttaaagataaagtgactaagtggggaaatttataaagctaaatattatatattttatttttcatacatgtttgaagtgcaaatctgtggatattccatttgtaggaccaagtcgacatgcccatcctgacattgtatgctacgagaactcttctgatgatggaatttcgattaaagtgcactgaaagatgaaaaaaaaaa

SEQ ID NO: 893 - DNA, 3620 bp, Homo sapiens
gcaaggattgtcccttctgcccaggggctcaggggccatggtgacaggtctgtgctgtgcccgcccagggcgcagccactgcctccccctgggctccctggtcctagccaggagagctccctatccgcctgtggtcagagctgaagccatatacgagtgggtgtttgtccccctactttggccccaggagtaaaaaaacttctccttttctcacttcctttcctgcctcgggaggtggcagggcagttccctggctgaggccttttgcgccccacctccaggaccaagggccattctagacagggtgtcttctaccaggacccgtccctagccttcctggcctggagggcctggtcttgcactggcagctgtaatacaaagggaactcgccccacttctcccagcctggtgctgtcctctcggcccaccatcggccaggtccagcgcttcctctggggctgacaacaggcccctgactcaccccggtcacctcccagggtccatggccagggcctctgtgtttggggggccacttgcccttcatcctgccaggcgctttgcccgccctgcctcagcctgggccctgtgcccttgagccctccacccctggcccaagacccccccaaactgtctgactctgtgtttcctgccctgaggagagaggggtcagattgcagcgggccgagtgccctcttcgtcccctctcctcccacccacgccacaggccagcctactcttccctccatccatggccacacccccagccattttgtaccattatataaatatatatataaatataaatatataaatacaatatgtgaagacatcttcttggtttttattttgaaacaatttttaggcttgttccgggggtctctgtgctgcctgtactgtattgacctgttttataggtgcctttttattaaaaagaaaattcaaaatccagcctcttgcctctttgcatctgcttcagactcccccatcgattacccagcttgcgaggagatactcagagaaaaaaagggacgtcttagggcttcctcgttgtcctgccgtgaagacactctcacgtgagccacagctgttatttccccagtggggcctcccaaggagcttggctgcttggcttgagtgggacaagggcaggggtccctgactccccacctgatcaaaggctggggaggtggtagggagcacccagaactgccggacgggcctcccacaccccaggtgagcaaacaagcacggagcagcttcctgcggttccatctgagtgacatcctcacgggggcagggcacggcttcctgggcctgggagttcctgcctcagtgtgtttcttacacttccctgcctaaggtgatgccaacggaggggatggttgagatgactcccacgggccccttccagtccacctttctccgttccgactctgagtttcctcgggtctatagcttatgggaagggagtgaggaggggacaagccagcctccttccccatcaatgcccacaacctcccatcccctggacccagccaccctaggagttctccccccaccccatctcgcctgggcggaggggacagccgggtttgattgatccatctccctccttggggttcgggaagaaagctcttttcttccctctgtcgggtttctttcttgcttctcggccttcacgcttcctcaggtcactggctggcctccaagggcacctagagtcagccctgcctgcagaccacccaggatccggtgacatggggtggacccagcgctgtttcggtcagagccaggggcagctacctgaactcaaccagtctgagcttcctgcttggtcaagatgactgcaggcttgggggcctggcagaatgtctgtgtttttagggactgagttgtccgaagccacactctgctgccagctggcctttcctcagccttaacctccactcatcccctggtgctcagcttctggctttgtttgacaggtgggcaggaggagagaggggaagctgtggaggtcagcagcccctaagctgatggagtgtgttctgggaggggcaggcgctctccgttggcaagggcagaagtagaagttgtttcttgagcattggatgattaggatgggaggtgcgtgaggttctctcagcccaggggggtgcagatgggtaaggacagccttcactgtgccttcgagctgctttccgctccctgggctccagcctagccccagggccggcagaagagctggcagggatgttctagaaatggggttggttcctctagctaccccaaatgaggatactcctaggacactcttagccacggtgagcccttaggatcccagctcctgttggaaggagcatccagcatcactgcctgccccaaggaaaagcagcaataaaaggggacactgggacctagaacgtggtgagagaggtggcattctctgactcagagagactgctcctgcgccagctagggaagagctggcacagggaggcagggccggtacagcccagcttggtcaggagccgcgacaggtcactgcggaacttcacgccggcgaaagtgtagagcatggggttgaggcagcagtgggccaggcccaggaactcacacatggtgatggccacggggagagagccattcagcttgcaggtattgtccacggccttcagcctcgccagggtgtccaggaagatgacgatgtggtagggtgaccagcagaggaagaagatgcttgtcaccaggatggccaccctgactgccttctgccgctgagggcgccgctgggcctggcgcaacctgtgcactacccccacgtagcaccagcccatcaccagcatgggcagcaggaatcccgccacatggtagaggaatcgggaggtgaaccaggcatgcgtttctgcttggttctcttgggagaaggtgcaacgtggcagggagttgttgtgatggccttggctgactttggcgaagagaatctctggcaaggcaaggaggaagcccaccagccagatggtcccacaggtgatgtggatggagaggaggcggcggtggcggtaggcatggacggcgtggacaatggccaggtagcggtccacggcgatgcaggccaggagcaggctgctgcagtagaagttgactttgtgcagggcaatcacagttttgcagaggaaggtccccaggacccagcccacagagccctcggccacggcaaagggcaagatgaagaccagcaggaggtcggccacggccaggtggaacaggaaggtctccgtggaactgcgtgtctgccggtgccgctccaggatcaccagcaccaggacgttgccgatcacgcccaggaggaagatgaggctgtaggccacgggcacgaacacggccttgaaggaggccatgaggggaccctctgtggcagggcagagatgattttccaccagggaggtgtcgttatagttgtccaatctgtccagttcccagaacaggtcctccaggttctcgaggtccatttccagcgttagcgggtagttcatggctgtgccggctgtgagtcaccagactggtcactgtcttatgttgagaggctccccgccaggtgcctctagagaggtggcagc

SEQ ID NO: 894 - DNA, 669 bp, Homo sapiens
ttttttttactgagaaactgcagccatttttcagtcacgcacggctgatatttattatgtttattcataatttgattgcttgtttgtgcagtgcttagtggacagcacatctcagggagcctcccagaggcctggggtggaatacggtcatggaccatacaggaagcttcaccagactgggaggctgagggccttccccgagcctttctgctgatagggaaggcagagaaactgagagcatcaccatttcttcagttagtgctttctcctttctgtaattcctgttagtcatcatcatcatcatcctctggaacaaaaatgtcatgttcctcaagtagagcagcaaagttcttgctaatgagtgtcccgacatagagaaaggggatcacaatggagaacacacggagaaggccgaaggacattttcaccggtttgggcaaaatggcgccgctgcgggtaacgatgactgacctcgacggtaccaggctccggcctgagccgctccatgcggcggagacatcgccatctttcctcaagctaggcccgctccggagagccccggacctgacgggtgccaatactagccagcgagccgctccggacgccatgcccccagctccgcccctcacccgggcacccgcaccccaccgcccagccctcgtgacgaaa

SEQ ID NO: 895 - DNA, 355 bp, Homo sapiens
gatgcaggcctggagtactggaggagaggacgctgggcatggcagcctgctggggccggggctcacgcactccctcccatgtcggagcctcagactcagcctgcttctggggcgctgagcaccatatgcccactcccaggtgcactgcttggacaaggtgtgtgggctgctgcccttcctcaaccctgaggtcccagatcagttctacaggctctggctgtctctcttcctacatgctgggaaagaggctcctcactgcccccgaacccgacccctgtgatggccacccagccggacccctggggaaaggttcctgggccagggcatggccggcccaacctgccgaagcctactg

SEQ ID NO: 896 - DNA, 804 bp, Homo sapiens
agcccagcgtggtggaattcgcagcaaagagtagtcagtcccttcttggctctgctgacactcgagcccacattccatcacctgctcccaatcatgcaggtctccactgctgcccttgccgtcctcctctgcaccatggctctctgcaaccaggtcctctctgcaccacttgctgctgacacgccgaccgcctgctgcttcagctacacctcccgacagattccacagaatttcatagctgactactttgagacgagcagccagtgctccaagcccagtgtcatcttcctaaccaagagaggccggcaggtctgtgctgaccccagtgaggagtgggtccagaaatacgtcagtgacctggagctgagtgcctgaggggtccagaagcttcgaggcccagcgacctcagtgggcccagtggggaggagcaggagcctgagccttgggaacatgcgtgtgacctctacagctacctcttctatggactggttattgccaaacaggccacactgtgggactcttcttaacttaaattttaatttatttatactatttagtttttgtaatttattttcgatttcacagtgtgtttgtgattgtttgctctgagagttccccctgtcccctcccccttccctcacagtgtgtctggtgacaaccgagtggctgtcatcggcctgtgtaggcagtcatggcaccaaagccaccagactgacaaatgtgtatcggatgcttttgttcagggctgtgatcggcctggggaaataataaagatgctcttttaaaaggtaaaaaaaaaaaaaa

SEQ ID NO: 897 - DNA, 1725 bp, Homo sapiens
agaataaactttttatttctacaagattaatttctctatagtgacccagacttaggtgagggtagttaatttagtgtaaaatatatgtataaatgtaaacaaataaacgtatgtacatatatatctgtctataaatcatctcaactcttataacatagtactgtgatatcatccagtaattgtattgtatttcaaagaagtatggtcaccgagtgaaaagaaaaaggttaggagttgttgtcttaaatgtattactaattcccagatattcttttgaacctatgaatactgatgatttttctccatgcaagaatatttttcagttaccatcatatttttgaaaacaatgtaacatttataccagccaaatcaaatgtaataatcaacataacatatacaaactctagtaaaatgtattttatttagttgtaatatccatctctaattgtttcgaaataaaaatttccatggtcttaacttgaactgtatgttactttcttttagaatatcctttttttcattaaaataatttctaaaccactctatgtgttcaaccttctgtttaacactaagatatgggtttttggaaaggccacaagtcaccagctccatgaagtggcgaattggtccttgttttggaaagctctccaggtgtttctccagaaatatatgttcatgaaattctgaaccatcatcatcaaaacctgcttcattgttaattgggaactcccatagtttcccctcttttgtccactggatcagctcttcaaatccattctgaaggggttgttcatttactgtggctaactgcttagcaaattccacatcccaaagtgaaggtgatgtgtctgtttcaggtgcttctttagtaactgccatcatgtcaaaaatattaagtcttttccctgtgaatatatttttcctttttttaagatcatcggtcttctcctggccaggataattgtcatagccttcatcaaactgaatccgaagctctggtcttgaacgaactctagctgtagcagatctggcaactttcatatctgatattatgttactgaaactaattttaggtcgctttgcatctctctgtgcccttgactcttcctcatgctgctggagctggctcagcagctctgacttggttgtttgcttatcaaaagggagagaatctgccacagcagatgcagctgccaccaactcaggactcaggggctcaattctcttctttggagcatattctgtagctcttcgaagcctgccaagtgtagcttccaaacttttaagtggtcttcttttggggggctttgttgttcgtacatttactgtgcttaattcaactttcatgcccttaataatgcctaacaagtcttttttcgtattttccttttcactgtcttggctctctgaagtctccttggaagtctcctcagttcgaacagactgcttatctttcttgctacagatcacactgttagtgccaaaatatctttggatgttattttttgtccgggccaacagcgctgaactgcggtacctgactgttccgtgccgaacagtgagtagcataatcgcagccgctgatgtctccgggcttccagaggacaaagggtggcgggaaagggggcgaagaggtaggaacgtcgagactctaggaaacatcgccgagacacgaaatgaaccaagaacacaactgaaatggtgcgtcccgcgtcgacgcggccg

SEQ ID NO: 898 - DNA, 787 bp, Homo sapiens
ctccactcggtttctctctttgcaggagcaccggcagcaccagtgtgtgaggggagcaggcagcggtcctagccagttccttgatcctgccagaccacccagcccccggcacagagctgctccacaggcaccatgaggatcatgctgctattcacagccatcctggccttcagcctagctcagagctttggggctgtctgtaaggagccacaggaggaggtggttcctggcgggggccgcagcaagagggatccagatctctaccagctgctccagagactcttcaaaagccactcatctctggagggattgctcaaagccctgagccaggctagcacagatcctaaggaatcaacatctcccgagaaacgtgacatgcatgacttctttgtgggacttatgggcaagaggagcgtccagccagactctcctacggatgtgaatcaagagaacgtccccagctttggcatcctcaagtatcccccgagagcagaataggtactccacttccggactcctggactgcattaggaagacctctttccctgtcccaatccccaggtgcgcacgctcctgttaccctttctcttccctgttcttgtaacattcttgtgctttgactccttctccatcttttctacctgaccctggtgtggaaactgcatagtgaatatccccaaccccaatgggcattgactggtagaataccctagagttcctgtagtgtcctacattaaaaatataatgtctctctctattcctcaacaataaaggatttttgcatatg

SEQ ID NO: 899 - DNA, 981 bp, Homo sapiens
atctactgtgtctgggcgccaatcccgacgctgggcggagcgaggcccggtccctgcagcgggcgaaaggagcccgggcctggaggtttgcgtaccggtcgcctggtcccggcaccagcgccgcccagtgtggtttcccataaggaagctcttcttcctgcttggcttccacctttaacccttccacctgggagcgtcctctaacacattcagactacaagtccagacccaggagagcaaggcccagaaagaggtcaaaatggggtttatattttcaaaatctatgaatgaaagcatgaaaaatcaaaaggagttcatgcttatgaatgctcgacttcagctggaaaggcagctcatcatgcagagtgaaatgagggaaagacaaatggccatgcagattgcgtggtctcgggaattcctcaaatattttggaactttttttggccttgcagccatctctttaacagctggagcgattaaaaaaaagaagccagccttcctggtcccgattgttccattaagctttatcctcacctaccagtatgacttgggctatggaacccttttagaaagaatgaaaggtgaagctgaggacatactggaaacagaaaagagtaaattgcagctgccaagaggaatgatcacttttgaaagcattgaaaaagccagaaaggaacagagtagattcttcatagacaaatgaaatcatgcttaccaatcaaatctcaaagcacagaattattgacttgaatcatggtttttacagttttttaaatgctcaagattttgatattatagattttattttaaaatattaaaatgcaagatagttttgagctattttaaaataaaatttataacattcaacacaaaatcatggaggtgctctaaataacttttagatttcctctctctgtgtgcattaccaatatctaagtgtaaaattaataaattgttttgaattcctggaaaaaaaaaaaa

SEQ ID NO: 900 - DNA, 1517 bp, Homo sapiens
ttttttttttttcttgtgacgtcattttattttcagctacatagacatctttctcatgtattgttactagaacaacttgtatagggttttatggtttggggaaaacatttttaaaaaatggacttatctctattatacagagttataatataaaaatgatttaaaggctatatttttcagcatgtaggtagctacactgtaatcctgttgaagaaactttcctatttaagcttataggatgaaaatatataattaaagtcttctgatcatagcttgagaccatcaagggaatgtttagtttcctccacaaagagccaccaggattttctcataatctcctttggtttcatccaggatggcttggcaaagggagataccatacatcttctgatagaatgctttgatatcattcatgtcaatttcagaacgggaaaccataatcctgatcaatgccttatggcgagttccaacacctttcatggcttgatgaagcttctctgcaaagaaagctggtttgcttgtggcgcacttcacgatagctgtgaggcatttctcaatgtcacctttcaactccaggtccagaactttgttcatgtcatgcttactgtacttggtgtatttctgaaacactctgcgaagttgtggatagcttctggtggtaaggatggtattgaacacgtttacgtctgtcccctttctcctttctcctgcttcatacaaggccctggcatctgaatcagccaagtcttcattcacaccaaagtcctcagatcggtcacccttagcaagagaaagcaaagcgttccgaaaatctccagatgtgtctgaggttatgtctttggccagatctctcttcagttcctctctgtagaccctgttaatgtctctgatttctttgttagttcttgatgccaaaatctcaattagagtatcttcatcagttccaaggcccttcatggcagcacgaagttcatcagcatcaaattgcgctggagtttttagcagagctaaaacaacctcctcaaggtgacctgtaagggctttcttcagtgtttcatccaggggctttcctgtttcctggagatatgctgctttgatctgttgacgctgtgcattgtttcgcttagttagaatgtcaatgatggttgcttcatccacacctttaaccattatggccttatgcaaggcagcgacatccgaggatggattgaaggtaggataggggctcaccgctgatccgggaccacctttggatgacttcacagtttgaacatattcctgctcttcattttcaataaaccaggcctgcttgaggaattctgataccattgccatttttgaaaaagtgtctttatctctaccttcttgcaaagaactaaagagaaattcttctctgaagatttcacactggcagtggagacttgggcttctgattttataggattttaaaggaagccacacctagcaaccagaagttagtaattggctgccttctgtttgaagtacatggctcagct

SEQ ID NO: 901 - DNA, 1628 bp, Homo sapiens
ggtggaattccacccccagcgggcgcgggccggagcacgggcacccagcatgggggtactgctcacacagaggacgctgctcagtctggtccttgcactcctgtttccaagcatggcgagcatggcggctataggcagctgctcgaaagagtaccgcgtgctccttggccagctccagaagcagacagatctcatgcaggacaccagcagactcctggacccctatatacgtatccaaggcctggatgttcctaaactgagagagcactgcagggagcgccccggggccttccccagtgaggagaccctgagggggctgggcaggcggtgcttcctgcagaccctcaatgccacactgggctgcgtcctgcacagactggccgacttagagcagcgcctccccaaggcccaggatttggagaggtctgggctgaacatcgaggacttggagaagctgcagatggcgaggccgaacatcctcgggctcaggaacaacatctactgcatggcccagctgctggacaactcagacacggctgagcccacgaaggctggccggggggcctctcagccgcccacccccacccctgcctcggatgcttttcagcgcaagctggagggctgcaggttcctgcatggctaccatcgcttcatgcactcagtggggcgggtcttcagcaagtggggggagagcccgaaccggagccggagacacagcccccaccaggccctgaggaagggggtgcgcaggaccagaccctccaggaaaggcaagagactcatgaccaggggacagctgccccggtagcctcgagagcaccccttgccggtgaaggatgcggcaggtgctctgtggatgagaggaaccatcgcaggatgacagctcccgggtccccaaacctgttcccctctgctactagccactgagaagtgcactttaagaggtgggagctgggcagacccctctacctcctccaggctgggagacagagtcaggctgttgcgctcccacctcagccccaagttccccaggcccagtggggtggccgggcgggccacgcgggaccgactttccattgattcaggggtctgatgacacaggctgactcatggccgggctgactgcccccctgccttgctccccgaggcctgccggtccttccctctcatgacttgcagggccgttgcccccagacttcctcctttccgtgtttctgaaggggaggtcacagcctgagctggcctcctatgcctcatcatgtcccaaaccagacacctggatgtctgggtgacctcactttaggcagctgtaacagcggcagggtgtcccaggagccctgatccgggggtccagggaatggagctcaggtcccaggccagccccgaagtcgccacgtggcctggggcagggcactttacctctggggacctgggttctctttgtgaagctagggagttataggctgtacaaagcccccactgcctgtcggttgcttggaatccattgacgaagggggacattaccaacctgtaatccaggacagggggtggaaaggggcttgtaggcgtacccacaggctcttgtaaaaggaacccgcctcccaggcgggtaccccctctccgtccct

SEQ ID NO: 902 - DNA, 798 bp, Homo sapiens
taccgctgcgagaagacgacagaagggtacggctgcgagaagactacagaagggtacggctgcgagaagacgacagaagggtacggctgcgagaagacgacagaagggtacggctgcgagaagaccacagaagggtacggctgcgagaagacgacagaagggtacggctgcgagaagacgacagaagggtacggctgcgagaagacgacagaaggggctcgcgatagccagccgcggctgcccttgcgcttcccgagctggcggggtccgtggtgcgggatcgagattgcgggctatggcgccgaaggtttttcgtcagtactgggatatccccgatggcaccgattgccaccgcaaagcctacagcaccaccagtattgccagcgtcgctggcctgaccgccgctgcctacagagtcacactcaatcctccgggcaccttccttgaaggagtggctaaggttggacaatacacgttcactgcagctgctgtcggggccgtgtttggcctcaccacctgcatcagcgcccatgtccgcgagaagcccgacgaccccctgaactacttcctcggtggctgcgccggaggcctgactctgggagcacgcacgcacaactacgggattggcgccgccgcctgcgtgtactttggcatagcggcctccctggtcaagatgggccggctggagggctgggaggtgtttgcaaaacccaaggtgtgagccctgtgcctgccgggacctccagcctgcagaatgcgtccagaaataaattctgtgtctgtgtgtgaaaaaaaaaa

SEQ ID NO: 903 - DNA, 836 bp, Homo sapiens
ccgtggctgccgtggtcggatggccgggcggctaggagttcccggaagtgcccgcgcagccggtttccggtgcaggtggggaaaatggcggtgtctacagtgttctcgacttcgtcgctgatgcttgctctgtcaaggcacagcctattgtctcctttgctcagtgtgacatcattcagacgcttctacagaggtgacagcccaacagattcccaaaaggacatgattgaaatccctttgcctccatggcaggagagaactgatgaatccatagaaaccaaaagagcccgcctgctctatgagagcagaaagaggggaatgttggaaaactgcattcttcttagtctttttgctaaagaacatctgcagcacatgacagaaaagcagctgaacctctatgaccgcctgattaacgagcctagtaatgactgggatatttactactgggccacagaagctaaaccagccccagaaatatttgaaaatgaagtcatggccctgctgagagactttgctaaaaacaaaaacaaagagcagagactgcgtgccccagatcttgagtacctctttgaaaagccacgttgagctgtgctccacggcctggcatgggggttcagtctgtggatggtaactacttatgatggacgttagccttgcttccggcttcttagatgcccagctgccctaccccagaccactggtcctgcctcaagtgatggacataaccctctcctaggacatacatgtaaatgcacaatgtgactcattctcatacttttttggttcagctctgagcctcaaaagtgatttgtcagcagcgtgggccatgcaggctt

SEQ ID NO: 904 - DNA, 932 bp, Homo sapiens
cgtgggcggcggcgcgcgggtgcgatcgcggagctgtgaggcgcaggcagggctctggggcacctagagaccggggccggagacgtggcagccgccctgcccgccagaaagtttcctagaagtttgctgggcgcgggcgcacgactgactggctggaccatgaacgtgttccgaatcctcggcgacctgagccacctcctggccatgatcttgctgctggggaagatctggaggtccaagtgctgcaagggcatctctgggaagagccagatcctgtttgctctcgtcttcaccaccaggtacctggacctgttcaccaacttcatctccatctacaacacagtaatgaaggtggtttttctcctctgtgcctatgttacagtgtacatgatatatgggaaattccgtaaaacttttgacagtgagaatgacacattccgcctggagtttcttctggtcccagtcattggcctttccttccttgaaaactacagtttcactctgctggagatcctctggactttctctatctatctggaatcagtggctatcctgccccagctcttcatgatcagcaagactggagaggctgagaccataactactcactacctgttctttctgggtctgtaccgggcactctacctggctaactggatcaggcggtaccagactgagaatttctatgaccaaattgcagtcgtgtctggagtagtacaaaccatcttctactgtgacttcttctacttgtatgtgaccaaaggtaggtcctgggatgacagcaatgctgacactggcctaaggagttactcatccatttaataagtattccagcagatacagatgtgaacagtcaagtctctgccatccacaatgcttgtgttctaatgcaagaagacaaatattttcaataaagaaacaaatgccataaa

SEQ ID NO: 905 - DNA, 1566 bp, Homo sapiens
ttttttttttttgcggtgaactacagaatttattaaataagaaagctatcaattcggaacaggaggaaaaaaaagttttaaaaaaaatctataggaaaatagtcaaaaaagcatttagtgctcatcgccgtccctctgaggggggccgtcagaaaggcaactgggacctgacagacccgggcacatacttgaaattcctgaattctaacctgcattgtacaaaatgccacttgaaacgtccaccagaacccccagccaaagaggcacatctggacagcttcacagcacggaacgtgtgaccttggtccccgtgggtcccggaggaggacagcagcagccacgcggtggcccctgcgcactcaggccatgactgcagggaccacccactggggccacaagagtgacccgggagccagagggagccctgagcatcggcggaaggcacaggtccctgcccggggtggccatctcagaggcacatttagtgtttgttctacttatgaaatcaaggacaaccaattgtacttatcttacaactgatgttctgggatgggactggaaaacattgattccagaaccactctttttcttaaaatcactggcttttatgacaatgtcttccaagagctcattagaatctataagatcgcaggaatttcgccaagaagggctgcatagaaaccacagagacaactcggccagggctgctcccattgtggtggccaagaactggctgagggcacgacactggactcttgcgatcaacactttactctgggtgaagactgcatatttaaggacacaactgcacatttagatcgagcggtggtgacctcagggtatacacggagcttcatgctgagaacacccaggggtcctcaagagtcttcctcctcgtctttaacttcagaaattctgtctatagatttaaggatttcggcaacaagattcagtgtctcagctccggaaaccagttgctcgatggaagcctgtgcactgttcatgaccacccggaggttctgcagggccacgtcggcgttctgcttcaccacggtcaggctggcaccctggccgcaccgcagggcttcattctctcgctggaagttggagacctgcgcctggagcaaactgatttcctgttttagtttcacgacgtggttttctgcctttacagcccgtttggtcatcagctccaggttctgctccacctgctgaaccaccgactccaggtcgtggtagtcgctttcctccttgatcatttttgcttctaacttccgctcaagcgtcctcaccatttctgtttgagcttcagagaagctctgaacctcattcagctttcttctcagcttagaattttcatctttcagctgtggagagagaacatccttattagaaagtcagcatgtctggctcaaaagggcgtgtgcttctgcggtgtggctccagagcctcctgataagcagagatgctgggtcagtgcagcatccacctgcagccactacagagggagaccacagacggaggcaggcacttttcaaagacctgtggtcacagatgccagttaat

SEQ ID NO: 906 - DNA, 1856 bp, Homo sapiens
ctgatagccctcggaaccgcttcgaaatcctcggtagacccacgcgtacgcccacgcgtccgggcccgcgccccgccatggaggacctggatgccctgctctctgacctggagactaccacctcgcacatgccaaggtcaggggctcccaaagagcgccctgcggagcctctcacccctcccccatcctatggccaccagccacagacagggtctggggagtcttcaggagcctcgggggacaaggaccacctgtacagcacggtatgcaagcctcggtccccaaagcctgcagccccggcggcccctccattctcctcttccagcggtgtcttgggtaccgggctctgtgagctagatcggttgcttcaggaacttaatgccactcagttcaacatcacagatgaaatcatgtctcagttcccatctagcaaggtggcttcaggagagcagaaggaggaccagtctgaagataagaaaagacccagcctcccttccagcccgtctcctggcctcccaaaggcttctgccacctcagccactctggagctggatagactgatggcctcactctctgacttccgcgttcaaaaccatcttccagcctctgggccaactcagccaccggtggtgagctccacaaatgagggctccccatccccaccagagccgactggcaagggcagcctagacaccatgctggggctgctgcagtccgacctcagccgccggggtgttcccacccaggccaaaggcctctgtggctcctgcaataaacctattgctgggcaagtggtgacggctctgggccgcgcctggcaccccgagcacttcgtttgcggaggctgttccaccgccctgggaggcagcagcttcttcgagaaggatggagcccccttctgccccgagtgctactttgagcgcttctcgccaagatgtggcttctgcaaccagcccatccgacacaagatggtgaccgccttgggcactcactggcacccagagcatttctgctgcgtcagttgcggggagcccttcggagatgagggtttccacgagcgcgagggccgcccctactgccgccgggacttcctgcagctgttcgccccgcgctgccagggctgccagggccccatcctggataactacatctcggcgctcagcgcgctctggcacccggactgtttcgtctgcagggaatgcttcgcgcccttctcgggaggcagctttttcgagcacgagggccgcccgttgtgcgagaaccacttccacgcacgacgcggctcgctgtgcgccacgtgtggcctccctgtgaccggccgctgcgtgtcggccctgggtcgccgcttccacccggaccacttcacatgcaccttctgcctgcgcccgctcaccaaggggtccttccaggagcgcgccggcaagccctactgccagccctgcttcctgaagctcttcggctgacagcccgctcggctcgccgtctcccccggaggccgcgccctcccggaaaagccgggtcctccagaccccgagggccttgctctcagagcgggaggccccacccactggagagccccgcccctaaggtactatgagtcctcaggggtcaagttcagaaacggcccagccagacctaaacccacacgcccacaaagtggattgcacacagacaagaactcccgtgcgggcctccactctattcccacccttgagggagcccccttactgggggagggtccttgcaattccagcgaatcggaggccaggccaggacgtccttgctccctgcaccctcactgttctgtgcactttttctacctacataaacacacgcattccacctcaaaaaaaaaa

SEQ ID NO: 907 - DNA, 2126 bp, Homo sapiens
gcaaagtcctatgtattcttcagagttgttaggaaagaaaacaaataaggttagctacatatttagctaaccttagatttaataaactattaagttatttaggtcaaaaagaataactaaatggatgctacaaatttcaaccagtattttcgatttttttggggtctatcatctgaaccctcagtggcaaacaatacgaaaattcaacatatttttatttgttaaatatatgaatataattaaatatattccttcagtaaactgaactggacaaaactagagaacagaccttttccatactcatttaactttaaaatgatattactttgaattctactacataccatcttagatcctgttttgaaattccattcacattacattcgatttactagaatgcctttttttttcttttttgagatggggtctcactctgttgctcagcaggaatgcagtgggtacaatcacggactcactatacccttgaacttctggggctcaggggatcctcttgcctctgcaggcctaataatttttttttaatttttatttttttgtagagttggggatcttggcctggctaaccaggctggtctcaaacttgtggcttcacgcaatccccacacctcggccttccaaagtgctggggattacaggtgtaagccaccatgcctgatctggaatgctttctaaaaatatggcattataaacataatactaaagagaaaaaaaggttaaatttcacttcaagaaattatcagtctaatagcatcagtaaaaatggcacttttagtcatggcataaaatatacaataaggctatttttcaattattgttttcaagttggaaaatgcattatgaaacactcaaaaagatgctactgggtttactcatcaagtgcttttgacaccatataaatgacagagtaacaccacagttatgtgattgggactcaagaatccttaaatgttaggactgaaaacaggtatatgacttatttgtccagaatttatatttttctgtatcccaataaaataattaagccatgtgtattgtgtaaaattacagtctttcagtctgtcctatgtgcttgctctcctggctagatattagctaaaaattagcaaaaacagccatttcccctattattccccagcaaagatgtgaaaccaaaacgcctaaccttttctgcctggtggactgccctctactggactatttgaggtattcagccagcaggtcaatgtgactaaaaaggtaaacatagagataaatgtaaacattaaaaaaaaaggaaccctttagtatattaacttttaccatgaaaacaatttcagtcattttgagaactgacaatgaagatgtttatacagtcttagtctccttttcaaccttggaggcagatctgcagcaataatagtaacaagtaggagcaatgggtgtactatcatgaccatcttttatgatgactggtgcattaatacaaatcacatttttctgagtccattcatgctatggatgttttcttatgcataaacatagagtagacacatactaaatagatcacatctgttaagtctcttgccacaagcatcaaaacttttcagagctgtctcttccgtgaaaatccatttcatgtagtagcaagttgattttctttgtggttcatccccacgcctgagacttgcagtaatgtaaaaccagtttaccatcactgccaaaacactcatagagagttccaacttcttggtctggggaaggagcaaaggactgattcacataaataaactacaagaaaggaaggaaaaacagagatgtttaatggtatcctgattaatctgcatttttctgcattccaatcagctagctattttgtattgttttcacaattgaagaaagcttctctgaactcctaacttttctaaatagtcaatttaaagagatcattacgaagatctcatttttcctccagaggaataaaaataacacaattccagttcctagaacagtggttcctaactttgtataactaagaaacttttaaatattttttacaaataagctttttgaagagctgggctattcaagaaattaccttatcgtaaaaatgtccccacttacccaca

SEQ ID NO: 908 - DNA, 1870 bp, Homo sapiens
tcgatacgacttttttttttttttttttttttccggtaggtcgccagctgaggcggtttgtaagttttgggtcgcagtatgctagaattttgaggctcccttctgatgaaaattgagctgtccatgcagccatggaacccgggttacagcagtgagggggccacggctcaaggctggagtgcagtggcatgatcttggctcactacaacctccaccttctgggctcaagcagtcctcccacctgagcctctcaagtagctgggacttcaggcacgcaccaacacacccagaaacttacacatgtccaaaaatgattgagatggagcaggcggaggcccagcttgctgagttagacctgctagccagtatgttccctggtgagaatgagctcatagtgaatgaccagctggctgtagcagaactgaaagattgtattgaaaagaagacaatggaggggcgatcttcaaaagtctactttactatcaatatgaacctggatgtatctgacgaaaaaatggcgatgttttctctggcctgtattcttccctttaaatacccggcagttctgcctgaaattactgtcagatcagtattattgagtagatcccagcagactcagctgaacacagatctgactgcattcctgcaaaaacattgtcatggagatgtttgtatactgaatgccacagagtgggttagagaacacgcctctggctatgtcagcagagatacttcatcttcacccaccacaggaagcacagtccagtcagttgacctcatcttcacgagactctggatctacagccatcatatctataacaaatgcaaaagaaagaatattctagagtgggcaaaggagctttccctgtctgggtttagcatgcctggaaaacctggtgttgtttgtgtggaaggcccacaaagtgcctgtgaagaattctgggcaagactcagaaaattaaactggaagagaattttaattcgccatcgagaagacattccttttgatggtacaaatgatgaaacggaaagacaaaggaaattttccatttttgaagaaaaagtgttcagtgttaatggagccaggggaaaccacatggactttggtcagctctatcagttcttaaacaccaaaggatgtggggatgttttccagatgttcctttgggtgtagaaggacaatgacatcaagagtagttgaaaagtatcttgccactgttggccttttgatttttttttcccactttttcttgaaagattaagtaattttattttagttccattctagaatgttggggagtggggcacaagaaaaaatagtaaaaatgaaatgcatctgttaaaaatgtcatggattgaaagcagaactggagtttcaaattacaaccttaaaattgttgttagatatttccttcacattaccagctgccccattttgaaaaagaaattatcccataaaggtaatgttggtgctccaaatttgcccagcccattccccaaccccccttctccccttacctgcccttcacctaaagaaccccagaaaagctaattgctccccctttcagcctctgttgcaactaacaactctcagtggcctcaggacacagctttggccttggggaattctgggaaaacttttacttcctgattaaagatacatatgcagttaggccacctcctcccccccttactgccataaacaccaaagtgatgactggagctggaggagttatttgaaccacgacggaagggccaagagaaccacgaagatgccagttgccacattgttgagctgctgacccaacaccagccattgcctgtctctaaacatcttatgaaataaaaccagttttgtttaaaaaaaaaa

SEQ ID NO: 909 - DNA, 4519 bp, Homo sapiens
  misc_feature (1)...(4519): n = a,t,c or g
tttttttttttactttcatgcaaaatctttatttggaacatgtatgttactgagcaggccagccgccatcctgaaatagcaaggatatttacactgtgcagagaaatacaagagcttcttgaagacattcatctgtgctttgccggcattttatctgctactttgtcctgcttctctcttccctgtgctcattattcttcatgcaccctcacctctcatcaccttaaggcatcctgtaccagcctgatctgggggcgatgactgcagccggcaatcggccattaccaatggtgtctttctgggaccctttctacctgtcttaggtattaatggtgcccaaagaaaaaatgaagagatgaaagtttctgtgggttaggctggggcatgggtgggtttggcacctgtaggtcccagcttactaagggagggttgaggtgggggatagtgcttgaagccccaggagcttgaaggctgcagtgagcccgtgactgcacccactgccacttccaggctgggccaacagagccaagaccctgttttcaagggggggaaaaaaagtttctttggagttgcaaggccttgtcttcactaaattttagaagtccccccgagatgtttcctgccttaacttcctctgacaggcctgactgtgagggctcgaatttcagctgacctaggtggagagtacttcattgatttttataatctggaaatgactgcttttccccttgctgggacatatggttttcatttctgtttgctgccatatgcttctcaacttgaacttgcctttgtctccttgctccgtgacaatgaatgtctcacatctcggctctgctgcggggcaggggtgaagggaggtggaagaaagaagagatggtcctttggcttggttgtaagccctagtagggcctgtctttcatacggaaagggttcctcctaacccctatcaaagcatggggatgaacggccagacaatctgggcttgcctttgggtttaagtttcagtcactaaacagagaccacagaacaaggacctccctgtcctctgctgtattcgtacacacaagtatcgcagaggctttccaaggtcgatgccaggaatctgcaggagccttggctgccttcccacactgctgatgaaccaaggactgtttcgacaggcaggttgctagcccacatcaaccttttcaagaggcctcaatctgaatttatggtcttaatgactccctttttatttctttccaacaaaacctgcagggtggaggccattcttcctttaatgttattttatcatctcccccttcttagtgtggtgggtcccagagtggaccaacccacactcctggagaaggacctcccgccatgcagattcttaaaggtcactggaatgtgtctcttaaatcctgtcctgagtagcaactctcctcccacagacagatgtacagaatctgcagtcaaaaacaaaacaaaaagaaaatgcaaaaatcccccagcctgcaacagcttcggcttaagaaacacactcccaccccacatcccgtcttttaagcttcatctcccctgcataaatgggtctggtagaacaatgctccccaacgctaaagtaattgcttctaagaacttaggacatgggaaatgtttctctaagctcaaatatggatagaaagacaattctgctgcactggtcactttgcaagagatgctatcctgacatttaattgtgtattatttaatcatttaaaacaaacaataataaaaaactcagccagaacacgcaaacgtgatctctgggggtcacaagatgaaatggtaggtgaatgttatcttctatcagccccttttgcctccgagttgggaaagtagttgtttcaacagatcagcttcatcctttttcttcagaagccccaaaccgagatgctgtcagaataagtcattttgctgctcgcaaaaaatgatcacagtctggtttctgagtcatctgagttttaaaacgtaaacttccattaacaacggcccttcaccaacagtaaaatggggcagcaaaagttctacttagaatttccacgtgaatgaaacccgcaacctacaactctgctaaggaaaccaggatctcaaagaacagattcatgttttagggactttaaaagaagaaatccaagcagttatgcacatggacataatcctgaaaacccagtcaggggctgggtgcactgtcagtgaggagtttttctgtactttgcagaaacatgaggttgaaagtgataatatagatatttggttttcagtcattcagaaattttcttcaaagaaaggcaatttgagctaaattaccatcattttcccttcttttgcaaatcaagaaatactaatccattgcatatgtaatccctcatataatttttagcccaaatggtcaaaattacaacttttaattttatgagctccaaattattaaacaccaacagtaaattgtgtgcatgagaagaacaaagacaaatacaaaatatagaaactttttcttccagccacaaaaaacgaagttatgtatgtatgagaaatagaaacaataactaaacaattagtgttaaattcaagacctctgggaaagctgttgttggttataggctattatttaccttagaatatgaaagtttaaaggtcaaattttcaagttaaacttttcaagttaccttccccccaaaaaagatttacatgtaggcttaaatttagaacagttaaagtataaatgttgaaaatttcaacttaattcagaatggtttcagaaagatatgatacaacaatttaagataacaaaacagaagcgcatcacattttggtttgagaatcacagaaggtacaacagtttttcttccttggggatccttctctttctcttgaggaatgagctaaaattaagttattttgattcaaagaggtatttagatggtatcaacaaaatttcagaggaaatcagaacggagttcatatacatgtatgggtatgtgtgcatacatgtacgagtatacatgtgcacgtatataaatgtatatacacatataccttcttacgtttgcatttaaagagggaagaccccacaaagacctccaggcgcctcagcccttatttggtactaccaggtgacttcaatgattcaccagctacaacagtgtctgaactcttccccactcaacttttcctgggaagaggatctttttgtttcctgcacttattgctgctgtgaaaactggagtgcactctcacttttcataagagctgaattctggactgcagataagtgttttgaaaaggcttggaaagatttttcggggcgacttaggttctgttttgtttgttacagtccgaatacataaagttattatgaaataaaatcatacggtacagatgagaacnatgcgggacagcccggccagccgttttagggccaaaggacagatcacccaacggttcacattttaggaattcgaaatgtctaaaaatagataaggtggtttctctaaaagaaaagaaaatgaaagagaaggggaaaaaataaaagggaaaaggaggacagggtgaaggaaggagggcaagaggtagcnnnnnnnnnnnnnnnnnnnnnnnnnnnnnnnnnnnnnnnnnnnngagggagggaggggaaatgatttagggaatgttagttgtcaggaataccttacttagaaagaaggaaaaaaatgcatgaaaaaatgcataaactttgtgcaggttaatgcagtattaaccacagtagaatacattggcctcataatgcttttgtaatggcatatatataatgtccccaagcactttctaaaaatatgcagagactaattcaagatcattctagataaaaatacgtatttctttaaaggggtggggtggcagggtgggaagaaaagcatggtctcagggtagatccccacacacatacaaagataaaactatgttttttggtaattctagttgatacggcagcaaaaattgtcatgacaatgttggctggttttcagagggttattttcaaatataacctgatagctacacttgtacaaaaatctttgtgaaaagtttcttttattaaccctgtgatatgtctatattgacattttctaagataaaataaaagtagcagagttgtcagtgggtaagggacagagctttaaagcaaaagtgaaccctctttgggttcctctcacacaaagggatacagactcttaaataaaataatacttccttaaaaatctgccgcctaacaattgtttacatcatagaaaaatagcattttcgtaaaaagaaatatagtcactttgttaaaatggtctattttaaaccagcaattatttttcatataaagaatttctaaatacccatacagaaaataaaaatagataatactgagtgcgaagcagacaatggcgtgtttgcaaatgatcaaaatatttcactgccagataaataatactcttagtatattacagtacaagttttaatttttcag

SEQ ID NO: 910 - DNA, 4874 bp, Homo sapiens
tagggcaagcctttctgtggcattggatgtgggagtctagcttggattatcaagggcctttaggaagctgtgtcagaaacagcacaattagggtcccacaggggtaccaaattggggatatttttgaggcctggggtctttgagggtatcagaagactgcatgtcaaggatcatcacaccgggtggctggctctgcagtacttgaggctgaggtgccttaacatggtctcaccccttgctggctgtgtgtccacagggggtgtggctcggctccacaccctctggctccccggccctgctaccccccagccaccgagtgaatgcggagcctggctgtgttgtgaccaacgcctgtgcctctgggccctgcccacctcacgcaaactgccgggacctctggcagaccttttcttgcacctgccagccaggttactacggcccaggctgtgtggatgcctgcctcctgaacccctgtcagaaccagggatcatgccggcacctgccaggagccccccatggctatacctgtgactgtgtgggtggctatttcgggcaccactgtgagcacaggatggaccagcagtgcccacggggctggtgggggagcccaacctgtggcccctgcaactgtgatgttcacaaaggttttgatcccaactgcaacaagacaaatgggcagtgtcactgcaaggagttccactaccgaccgcggggcagtgactcttgcctcccatgtgactgctaccctgtgggctccacctcgcgctcatgtgcaccccacagcgggcagtgcccctgtcgcccaggagcccttggccgccagtgcaacagctgtgacagtcccttcgcagaggtgacagccagcggctgccgggtgctctatgatgcctgccctaagtccctgagatctggtgtgtggtggccccagacaaagtttggcgtcctggccacagtgccctgtccccggggggccctgggattgcggggtgcaggtgctgctgtgcggctgtgtgatgaggcccagggttggctggagcccgacctcttcaactgtacctcccctgcctttcgagagctcagtctgctgctggatggcctagagctgaacaagacggcactggataccatggaggccaagaagctggctcagcggctacgggaggtgactggccacactgaccactattttagccaagatgttcgagtcactgcccgcctgctggcccacctgctggccttcgagagccatcagcagggcttcgggctgacagccacacaggatgcccacttcaatgagaatctgctgtgggccggctctgcactgcttgccccagagacaggggacttgtgggcggcgctggggcagcgggcccctgggggctccccaggcagcgcgggactggtgaggcacctggaggagtatgcagccacactcgcaaggaatatggaactcacatacctgaatcccatggggctggtgacgcctaatatcatgctcagcattgaccgcatggagcaccccagttctccccggggggcccgtcgctaccctcgctaccatagcaacctctttcgaggccaggatgcctgggatcctcacacccatgtgctgctgccttcccagtccccacggccatccccatctgaagttctgcccacaagcagcagcatagaaaactccaccacctcaagtgtggtccccccaccagccccgccagagccagagcctgggatctccattatcattctcctcgtttaccgcaccttagggggactgctccctgcccagttccaggcagaacgccgaggtgccaggcttcctcagaaccccgtcatgaactccccggtggtcagcgtggctgtgttccacggacgcaacttcctaaggggaatcctggagtcccccatcagcctagagtttcgcctgctacagacagcgaatcggagcaaggcgatctgtgtgcagtgggacccacctggcctggcggagcagcatggtgtgtggacagcacgggactgcgagctggtgcacaggaatgggtcccacgcacggtgtcgctgcagccggacagggacctttggggtcctcatggatgcctctccccgtgagaggctggagggcgacctggagctgctggctgtgttcacccacgtggtcgtggctgtgtctgtggctgcgctggtgctgactgcagccatcctgctgagcctgcgcagcctcaagtccaatgtgcgtgggatccatgccaatgtggcagccgccctgggggtggcagagctcctcttcctgctggggattcacaggacccacaatcagctggtgtgcactgcagtcgtcatcctcctgcactacttcttcctcagcaccttcgcgtggctcttcgtgcaggggctgcacctctaccgcatgcaggttgagccacgcaacgtggaccgcggcgccatgcgcttctaccatgccctgggctggggcgtccctgctgtgctgctgggccttgctgtgggcctggaccctgagggctatgggaaccctgacttctgctggatctcagtccacgagcccctcatctggagctttgctggccctgttgtcctggtcatagtgatgaacgggaccatgtttctcctcgctgcccgcacatcctgctccacagggcagagggaggccaagaagacctctgcactgacccttcgcagctccttcctgctgcttctgctggtcagtgcctcctggctctttgggctcctggcagtcaaccacagcatcctagccttccactacctccatgctggactctgcggcctccagggcctggcggtgctgctgctcttctgtgtcctaaatgcagatgctcgggctgcctggatgccagcctgtctgggcaggaaggcagcgcctgaggaggcaaggccagcacctgggctgggacctggggcctacaacaacacggctctctttgaggagagtggcctcatccgcatcactctgggcgcctccaccgtctcctctgtgagcagtgcccgctccggccggacccaggaccaggacagccagcggggccgcagctacctcagggacaatgtcctggttcgacatggctcagccgctgaccacactgaccacagcctccaggctcatgctggccccactgacctggacgtggccatgttccatcgagatgctggcgcagactccgactctgacagtgacctgtccttggaggaggagaggagtctctccattccatcttcagaaagcgaggacaatggccggacgcgggggcgcttccaacggccactctgccgagcagcccagagtgagaggctcctcacccaccccaaagatgtggatggcaatgacctcctgtcctactggccagccctgggggagtgcgaggcagccccctgtgctctgcagacttggggctctgaaaggcgcctggggctggacaccagcaaggatgcagctaacaacaaccagccagacccggccctgaccagtggggatgagacttctctgggccgggcccagcgccagaggaaaggcatcctgaagaaccggttgcaatacccactggtgccacagacccgaggtgcccctgagctgtcctggtgccgtgcagccaccttgggccaccgtgctgtgccagctgcctcttacggtcgcatctatgctggcgggggcacgggcagcctttcacagccagccagccgctactcttctagagaacagctggacctgctcctccggcggcaactgagccgtgagcgactagaggaagcccctgcccctgttctacgtcccctgagccggccagggtcccaggaatgcatggatgctgcaccaggccgactggagcccaaagatcggggcagcaccctgccacggaggcagccacctcgggactaccctggcgccatggctggccgcttcgggtcacgggatgcgctcgacttaggggcacctcgagagtggttgagcacgctgcctccgccccgccgcacccgggaccttgacccacagcccccacctctgcccctgtctccccagcggcaactctcaagggaccccctcttgccatcccggccgctggactctctgtctaggagctcgaactctcgggagcagctggaccaggtgcctagccggcacccctcacgagaagcccttgggccactcccgcagctgctcagagctagggaggactcggtcagtggccccagccatggcccctccacagaacagttggacattctttcctccatccttgcctctttcaactcctcggccctctcctctgtgcaatcttcaagcacacccttgggccctcacaccactgccacaccttctgccacagcctctgtgcttgggccctccacgccacgttctgccacgtctcacagcatctcggagctgtcgccagactcagaaccgagggacacacaggcactgctgtctgcaacacaagcaatggacctgcggaggcgagactaccacatggaacggccgctgctgaaccaggagcatttggaggagctggggcgctggggctcagcacctaggacccaccagtggcggacctggttgcagtgctcccgtgctcgggcctatgcccttctgctccaacacctcccggttttggtctggttaccccggtatcctgtgcgtgactggctcctgggtgacctgttatccggcctgagtgtggccatcatgcagcttccgcagggcttggcctacgccctcctggctggattgccccccgtgtttggcctctatagctccttctaccctgtcttcatctacttcctgtttggcacttcccggcacatctccgtggagagcctctgtgtcccgggaccagtagacacag

SEQ ID NO: 911 - DNA, 1923 bp, Homo sapiens
ctcgacttcgatcgccttaggaattcggcacgagcaggagcagcaggagcatggccgaggatctgggactgagctttggggaaacagccagtgtggaaatgctgccagagcacggcagctgcaggcccaaggccaggagcagcagcgcacgctgggctctcacctgctgcctggtgttgctccccttccttgcaggactcaccacatacctacttgtcagccagctccgggcccagggagaggcctgtgtgcagttccaggctctaaaaggacaggagtttgcaccttcacatcagcaagtttatgcacctcttagagcagacggagataagccaagggcacacctgacagttgtgagacaaactcccacacagcactttaaaaatcagttcccagctctgcactgggaacatgaactaggcctggccttcaccaagaaccgaatgaactataccaacaaattcctgctgatcccagagtcgggagactacttcatttactcccaggtcacattccgtgggatgacctctgagtgcagtgaaatcagacaagcaggccgaccaaacaagccagactccatcactgtggtcatcaccaaggtaacagacagctaccctgagccaacccagctcctcatggggaccaagtctgtgtgcgaagtaggtagcaactggttccagcccatctacctcggagccatgttctccttgcaagaaggggacaagctaatggtgaacgtcagtgacatctctttggtggattacacaaaagaagataaaaccttctttggagccttcttactataggaggagagcaaatatcattatatgaaagtcctctgccaccgagttcctaattttctttgttcaaatgtaattataaccaggggttttcttggggccgggagtagggggcattccacagggacaacggtttagctatgaaatttggggccaaaatttcacacttcatgtgccttactgatgagagtactaactggaaaaaggctgaagagagcaaatatattattaagatgggttggaggattggcgagtttctaaatattaagacactgatcactaaatgaatggatgatctactcgggtcaggattgaaagagaaatatttcaacacctcctgctatacaatggtcaccagtggtccagttattgttcaatttgatcataaatttgcttcaattcaggagctttgaaggaagtccaaggaaagctctagaaaacagtataaactttcagaggcaaaatccttcaccaatttttccacatactttcatgccttgcctaaaaaaaatgaaaagagagttggtatgtctcatgaatgttcacacagaaggagttggttttcatgtcatctacagcatatgagaaaagctacctttcttttgattatgtacacagatatctaaataaggaagtatgagtttcacatgtatatcaaaaatacaacagttgcttgtattcagtagagttttcttgcccacctattttgtgctgggttctaccttaacccagaagacactatgaaaaacaagacagactccactcaaaatttatatgaacaccactagatacttcctgatcaaacatcagtcaacatactctaaagaataactccaagtcttggccaggcgcagtggctcacacctgtaatcccaacactttgggaggccaaggtgggtggatcatctaaggccgggagttcaagaccagcctgaccaacgtggagaaaccccatctctactaaaaatacaaaattagccgggcgtggtagcgcatggctgtaatcctggctactcaggaggccgaggcagaagaattgcttgaactggggaggcagaggttgcggtgagcccagatcgcgccattgcactccagcctgggtaacaagagcaaaactctgtcc

SEQ ID NO: 912 - DNA, 1261 bp, Homo sapiens
ttttttttttttattgacatttcgatctaagtggtcataaaccagataggtagttttattaaaagatttaccctaagaacactccttctattcccatttctgacatcctacccacacccacattcatcgactaccatgtcttcataatgtcgtagaatgacattgtcattattgtcctggtagagcatggaaatgggagacagcttggtggggatacacacagcctgggggatctctgggtcaacggcatgcatcagggcttgcatgaaagcataattggagctgttgagagagatggtcagtgagaagggacactctccatggcagtaatttgccatgaaccccttgggggcaatgatccacttgtgccaacccaggtcccggaagttaatgaatagctggtgacggtggcagaggttcttacaagaaagcttggggacagggatggctgctctccttttccgagaagggtggcactgatcagggttgagagtcaccaccagcagggaagcatgaagggagcatcttagtctggcacaggtgtcttcaggctgaaaattcacccctgagtctctatcttctttgaccagtatctccaggaataacccgaaatttttccgggggttgtcattccaatccttagctacatccagcaggttgaagtgaacagcaccttgtggccatgggactgaccgcaacacaaacattttacctggcttaggggtggtctggccccacacatgaggctcctgaaccaggaacagagccagttccagctctggtcccaggttatagtaagaattgggccccaagtccaggcccagctgggccaatgtcaactgttccctttctttgatggcagacaggttaaagtagaggagcttctgcaggcaggaggaagcttgggaaattttctttgggtaaagaaagaaaccttggtctgggagaaagcgaagtacattcccgcggacgcccagctcctttacgtagcataagtctcgggagaccccagtggtcgctgctgcctcgcgatcctggaaaattttcttcaagatataaggcacaggttggaacttctggggtgaaggcgccttatctaagcccagaaattggagaaagacatattcttgaaattggactgcctggcccaaagccagaattaacaggaagctgaaagccaaatctggcaagaaacgaagcatggcctctggagtggctgtcagaccggggagagctccctcgtgccgaataccgcaggcaa

SEQ ID NO: 913 - DNA, 1375 bp, Homo sapiens
cggagtgcaagtgagcttctcggctgccccgcgggccggggtgcggagccgacatgcgcccgcttctcggcctccttctggtcttcgccggctgcaccttcgccttgtacttgctgtcgacgcgactgccccgcgggcggagactgggctccaccgaggaggctggaggcaggtcgctgtggttcccctccgacctggcagagctgcgggagctctctgaggtccttcgagagtaccggaaggagcaccaggcctacgtgttcctgctcttctgcggcgcctacctctacaaacagggctttgccatccccggctccagcttcctgaatgttttagctggtgccttgtttgggccatggctggggcttctgctgtgctgtgtgttgacctcggtgggtgccacatgctgctacctgctctccagtatttttggcaaacagttggtggtgtcctactttcctgataaagtggccctgctgcagagaaaggtggaggagaacagaaacagcttgttttttttcttattgtttttgagacttttccccatgacaccaaactggttcttgaacctctcggccccaattctgaacattcccatcgtgcagttcttcttctcagttcttatcggtttgatcccatataatttcatctgtgtgcagacagggtccatcctgtcaaccctaacctctctggatgctcttttctcctgggacactgtctttaagctgttggccattgccatggtggcattaattcctggaaccctcattaaaaaatttagtcagaaacatctgcaattgaatgaaacaagtactgctaatcatatacacagtagaaaagacacatgatctggattttctgtttgccacatccctggactcagttgcttatttgtgtaatggatgtggtcctctaaagcccctcattgtttttgattgccttctataggtgatgtggacactgtgcatcaatgtgcagtgtcttttcagaaaggacactctgctcttgaaggtgtattacatcaggttttcaaaccagccctggtgtagcagacactgcaacagatgcctcctagaaaatgctgtttgtggccgggcgcggtggctcacgcctgtaatcccagcactttgggaggccgaggccggtgattcacaaggtcaggagttcaagaccagcctggcccaagatggtgaaatcctgtctctaataaaaatacaaaaattagccaggcgtggtggcaggcacctgtaatcccagctactcgggaggctgaggcaggagaattgcttgaaccaaggtggcagaggttgcagtaagccaagatcacaccactgcactccagcctgggtgatagagtgagacactgtcttgacaa

SEQ ID NO: 914 - DNA, 1333 bp, Homo sapiens
atagaatacaaaaatggcacaaagcaaggaagtaaggcaggaagggttttatgtaggttgtgactatatgatatgaatctcaaaagttatattttacagagtaaagaagtagggagctggaataattctaggcaggagggattcattttagcagtcagtgaattgtgatactatagttgggaagtacagtgatgtgctgaaatgtagggcatagtcagtggctagtatgagatgatgctgaaggagagatggacaggggtcactccttggccttctatgccaccccaaggatttgggccatggggaagaaaaagggatcacatcgacaccagcatcttagtaagcagcctttggctgctgtgtagaagattgcttggatcagtttaagcccatggaggcagagagctttcttattagattttgtcatgatcctctaaagtaccacggagctgaccgtccagtcatctttaagcgaagtgaatatccgtagaatttagtcatggagttgatattttgtgatgatagaggctaagaaagtctagaatgactcaactagtgccaccaaaataaggaatacaggaagtggactaggtaggtttcaaagggaagatgatgagatcagttttttatagctgagtataaactgcccctgtggattacaggtgggtgtgcacagtaagcagctgcataatttagtaggattcaacatcaagagtgaagatacagattttgactctgcagcactgaaaaccatttggattagattacctagacagaggagggatgtcactaaggacagagcttcaacatttaaaagtcaggctgggtgtggtggctcacgccattaatcccagcactttgggaggcccagacagaaggttcattgagaccagaagtcaagaaccggctaagtaacataacaagaccctttttttcaaaaaaaaaaaaaatattggtttaaaaaaaaccttttaaaaaggtagggcggggacccttgtggcccaccttaacggtctttttctttggggaaaaggccctcttgattggggggcaatccaccagggtttgggtggggaaaaattttcttgaagacaaatgtttaaacggaacatctgaaacagggtggaaggtggaaagcgcctatgggtgcccaggggggatataactttttggggagaccgtttgccacgacttttctttctctaaaagatcgatttgcaacttggtttaaaaaagaaaaaggaggcctttaaggctcccatccggctgcgtggttttctagcccatgtgcgggcgcgtagaggaggggaaaggatcctgcgggtccggagcg

SEQ ID NO: 915 - DNA, 819 bp, Homo sapiens
  misc_feature (1)...(819): n = a,t,c or g
cccacgcgtccggaccgggtggtttgcttaggcgcagacggggaagcggagccaacatgccagtggcccggagctgggtttgtcgcaaaacttatgtgaccccgcggagacccttcgagaaatctcgtctcgaccaagagctgaagctgatcggcgagtatgggctccggaacaaacgtgaggtctggagggtcaaatttaccctggccaagatccgcaaggccgcccgggaactgctgacgcttgatgagaaggacccacggcgtctgttcgaaggcaacgccctgctgcggcggctggtccgcattggggtgctggatgagggcaagatgaagctggattacatcctgggcctgaagatagaggatttcttagagagacgcctgcagacccaggtcttcaagctgggcttggccaagtccatccaccacgctcatgtgctgattcagcagtgtcatatccgtgtccgtgagcaggtggtaaatatcctgttcttcactgtccgcctggattcccagaagcacattgacttctccctctgcttccctattggggtggccaaccccagccacgtgaagaggaagaatgccagcaagggccagggtggggctggagccagagatgacgaggaggaggaataagcctgcttgtcccctcctgggctggtggattgtctagttttcctgtacgaggcctttcccggagcagcccggctacgaagcgacacccatggcggagaagctaaggaagactcccgctcccgaattcccgcncntggacagtggtcatcgagnaggggtttcaattggggcactgctc

SEQ ID NO: 916 - DNA, 968 bp, Homo sapiens
ctgttgcacacacacagtggcacacatgccaaagactctctcagctgacccacagatccattctcaagtatttactgatagacactcatgcgtgccaagtcctcatcctcaaacatacacatgcctctctttctctcccgtcttgccaggagtgtttcccctcctccatcccctctgcctcccatatggtgtcccaccctcaccccccacccagcccaaggtggggacagacacctgaggggctgccagctgcttccccgtgtgggcccgggccgcgctcatgcttctcgtccatcctgcccacaggggactcgtgggggatgttagcgtgcctgtgcacggtgctctggcacctccctgcagtgccagctctcaatcgcacaggggacccagggcctggcccctccatccagaaaacctatgacctcacccgctacctggagcaccaactccgcagcttggctgggacctatctgaactacctgggcccccctttcaacgagccagacttcaaccctccccgcctgggggcagagactctgcccagggccactgttgacttggaggtgtggcgaagcctcaatgacaaactgcggctgacccagaactacgaggcctacagccaccttctgtgttacttgcgtggcctcaaccgtcaggctgccactgctgagctgcgccgcagcctggcccacttctgcaccagcctccagggcctgctgggcagcattgcgggcgtcatggcagctctgggctacccactgccccagccgctgcctgggactgaacccacttggactcctggccctgcccacagtgacttcctccagaagatggacgacttctggctgctgaaggagctgcagacctggctgtggcgctcggccaaggacttcaaccggctcaagaagaagatgcagcctccagcagctgcagtcaccctgcacctgggggctcatggcttctga

SEQ ID NO: 917 - DNA, 1168 bp, Homo sapiens
gcggccgcggcggggccaggggcttgtacaggaagtacagacagagaacgtgacagtggctgagggtggggtggctgagatcacctgccgtctgcaccagtatgatgggtccatagttgtcatccagaacccagcccggcagaccctcttcttcaatggcacccgtgccttgaaggatgagcgtttccagcttgaggagttctccccacgccgggtgcggatccggctctcagatgcccgcctggaggacgaggggggctatttctgccagctctacacagaagacacccaccaccagattgccacgctcacggtactagtggccccagagaatcctgtggtggaggtccgggagcaggcggtagagggcggcgaggtggagctcagctgcctcgttccgcggtcccgtccggctgccaccctgcgctggtaccgggaccgcaaggagctgaaaggagtgagcagcagccaggaaaatggcaaggtctggagcgtggcaagcacagtacggtttcgtgtggaccgtaaggacgacggtggtatcatcatctgtgaggcgcagaaccaggcgctgccctccggacacagcaagcagacgcagtacgtgctggatgtgcagtactcccccacggcccggattcatgcctcccaagctgtggtgagggagggagacacgctggtgttgacgtgtgctgtcacggggaaccccaggccaaaccagatccgctggaaccgcgggaatgagtctttgccggagagggcggaggccgtgggagagacgctcacgctgccgggtctggtatccgcggataacggcacctacacttgcgaggcgtccaataagcacggccatgcgagggcgctctacgtacttgtggtctacggtgagagcaggctgcggccgactgagggcgggggcggggcgccagaccctggtgcggtggtagaggctcagacgtcggttccctatgccattgtgggcggcatcctggcgctgctggtgtttctgatcatatgtgtgctagtgggcatggtctggtgctcggtacggcagaagggttcctatctgacccacgaagccagtggcttggatgaacagggagaagcaagagaagccttcctcaatggcagcgacggacacaagaggaaagaggaattcttcatctga

SEQ ID NO: 918 - DNA, 3677 bp, Homo sapiens
gtcggcgtcgtctacctccagcttctcctccctcctcctccgtctcctcctctctctctccatctgctgtggttatggcctgtcgctggagcacaaaagagtctccgcggtggaggtctgcgttgctcttgcttttcctcgctggggtgtacggaaatggtgctcttgcagaacattctgaaaatgtgcatatttcaggagtgtcaactgcttgtggagagactccagagcaaatacgagcaccaagtggcataatcacaagcccaggctggccttctgaatatcctgcaaaaatcaactgtagctggttcataagggcaaacccaggcgaaatcattactataagttttcaggattttgatattcaaggatccagaaggtgcaatttggactggttgacaatagaaacatacaagaatattgaaagttacagagcttgtggttccacaattccacctccgtatatctcttcacaagaccacatctggattaggtttcattcggatgacaacatctctagaaagggtttcagactggcatatttttcagggaaatctgaggaaccaaattgtgcttgtgatcagtttcgttgtggtaatggaaagtgtataccagaagcctggaaatgcaataacatggatgaatgtggagataggtccgatgaagagatctgtgccaaagaagcaaatcctccaactgctgctgcttttcaaccctgtgcttacaaccagttccagtgtttatcccgttttaccaaagtttacacttgcctccccgaatctttaaaatgtgatgggaacattgactgccttgacctaggagatgagatagactgtgatgtgccaacatgtgggcaatggctaaaatatttttatggtacttttaattctcccaattatccagacttttatcctcctggaagcaattgcacctggttaatagacactggtgatcaccgtaaagtcattttacgcttcactgactttaaacttgatggtactggttatggtgattatgtcaaaatatatgatggattagaggagaatccacacaagcttttgcgtgtgttgacagcttttgattctcatgcacctcttacagttgtttcttcttctggacagataagggtacatttttgtgctgataaagtgaatgctgcaaggggatttaatgctacttaccaagtagatgggttctgtttgccatgggaaataccctgtggaggtaactgggggtgttatactgagcagcagcgttgtgatgggtattggcattgcccaaatggaagggatgaaaccaattgtaccatgtgccagaaggaagaatttccatgttcccgaaatggtgtctgttatcctcgttctgatcgctgcaactaccagaatcattgcccaaatggctcagatgaaaaaaactgctttttttgccaaccaggaaatttccattgtaaaaacaatcgttgtgtgtttgaaagttgggtgtgtgattctcaagatgactgtggtgatggcagcgatgaagaaaattgcccagtaatcgtgcctacaagagtcatcactgctgccgtcatagggagcctcatctgtggcctgttactcgtcatagcattgggatgtacttgtaagctttattctctgagaatgtttgaaagaagatcatttgaaacacagttgtcaagagtggaagcagaattgttaagaagagaagctcctccctcgtatggacaattgattgctcagggtttaattccaccagttgaagattttcctgtttgttcacctaatcaggcttctgttttggaaaatctgaggctagcggtacgatctcagcttggatttacttcagtcaggcttcctatggcaggcagatcaagcaacatttggaaccgtatttttaattttgcaagatcacgtcattctgggtcattggctttggtctcagcagatggagatgaggttgtccctagtcagagtaccagtagagaacctgagagaaatcatactcacagaagtttgttttccgtggagtctgatgatacagacacagaaaatgagagaagagatatggcaggagcatctggtggggttgcagctcctttgcctcaaaaagtccctcccacaacggcagtggaagcgacagtaggagcatgtgcaagttcctcaactcagagtacccgaggtggtcatgcagataatggaagggatgtgacaagtgtggaacccccaagtgtgagtccagcacgtcaccagcttacaagtgcactcagtcgtatgactcaggggctacgctgggtacgttttacattaggacgatcaagttccctaagtcagaaccagagtcctttgagacaacttgataatggggtaagtggaagagaagatgatgatgatgttgaaatgctaattccaatttctgatggatcttcagactttgatgtgaatgactgctccagacctcttcttgatcttgcctcagatcaaggacaagggcttagacaaccatataatgcaacaaatcctggagtaaggccaagtaatcgagatggcccctgtgagcgctgtggtattgtccacactgcccagataccagacacttgcttagaagtaacactgaaaaacgaaacgagtgatgatgaggctttgttactttgttaggtacgaatcacataagggagattgtatacaagttggagcaatatccatttattattttgtaactttacagttaaactagttttagtttaaaaagaaaaaatgcagggtgatttcttattattatatgttagcctgcatggttaaattcgacaacttgtaactctatgaacttagagtttactattttagcagctaaaaatgcatcacatattcatattgttcaataatgtcctttcatttgtttctgattgttttcatcctgatactgtagttcactgtagaaatgtggctgctgaaactcatttgattgtcatttttatctatcctatgttaaatggtttgtttttacaaaataataccttattttaattgaaacgtttatgcttttgccaacacatcttgtaacttaatatactagatgttaaggttgttaatgtacaaaaaaaaaaaacccttatactcacctgcgttttcatttgtttgacatttgtctattattggatatcattatcatatgaacttgtcagtgggaaacaaactgtctaaaaatttttctcttacgtttaacatacaatcatgtgaaatttaggcagagttcgataaattactggcaaaaacaaaactcttttataaagattttctaatgttgactttaatactctaacatggtacaaaccaaatggtaaaatcccaagtcatttcttttttcatctctatttagcaacagaattaagtggatgaagatattctactatgcattaaatcttgaactttataaaacatgtacaaaaattgtacaagataagttccacctggtaatgtctttccctaatacagggttgcgcttgcattggaccctagggatttgcactaaaattatatcaaggtctcagatgagcttagtgcacaagcactatcactttaaatactattatttgctaccacagcaactatatatttccatagcttttggctgggggcgggggacatttttattacaacttgaaattgctttgctggttg

SEQ ID NO: 919 - DNA, 1954 bp, Homo sapiens
  misc_feature (1)...(1954): n = a,t,c or g
gcacctcacagatagttatttgttgaaggatatacaaggcctgggtttactctaaggtttctgcacagagaccataacttgtgaggcttctctgaagctcattgcattctatattcattgcctattttctgatccttctggccactgccggtgtgattccccagcaggccctctccatcaatatccctgtcccagaaataggaattgacggtgcacaaataacttcctggaatgcaggaccattcctaagttatcactaacaccctaccaagagactgtatctagagacattaacctgaaatctaggactcagcagcttctctccacagggctccttcagtggtagatgtcccctgtatggtgtggccaccctgaatggctcctccctggccttatcccgtccctcagcaccatccctgtgctactttgtagctggggcctctggcctcttggccctctactgcctcctgcttttgctcttctggatctacagcagctgcatcgaggactcccacagagggtgctataggggctgcgcattgcactggccaatctcaggctatagccgtcttcctggtcttggtgtctgcctgtatccttcgatttggcaccaggtctctctgcaactccatcatctccttgaacactacaattagctgttctgaagcccagaaaattccatggacaccccctggaactgctctgcagttttactccaacctacacaatgctgaaacctcttcttgggtgaatttggtattgtggtgtgtggtcttggtgctccaggtcgtgcagtggaagtctgaagccaccccataccggcctctggagaggggtgaccctgagtggagctctgagacagatgctctcgttgggtcacgcctttcccattcctgaagaataagcggagtgcttcctgcagccgaagactccatgcccaagtgcctgtaatcccccccctcaaggccctgtttatgttgggagtcttagttttcctttcgttggggggtgggggggaaacataatgacaggcccccctccacctcttcctgcagctgtttttgtaccaaaatattatattactgtcttcatcttagtagtgagtttttgatgttaaagtacaactagataggaggaaggagtgaaggctaagcagacatggactgaaacttagaggtactgttaggcagctgccctagggatgactgctcctttatttgttgttaatgaatcttgacctccttgtgtgaccctggttgttactccattctaagattggcgtttttttttgttttttttttttgtaaatagagacaaggtctcgctatgttgcccagcctgggctcgagcagtgctcctgcctcaccctcccaaagtgctgggattacaacagggtgtgaaccaacacacctggctccccaaggttcagtttttatcctcctcttggagaggtgagtgacttgaggtcatttcttcacaagctccggtaggcacccacagtattgtcaaagagttttgtgttagggaagtgtccagttttgtccaagaggaaatagaagcgtcggcctttgactttcagaggtagcatggcagggacttcaccccggtgggccatgcaagatacctgcttcaaaggaactgtgaaatgggcccccaagccaaagggggcatgagtggtgagggtcacctgctgccctccagctcgaagcaccactgagcgcaccaatgcctacgacgaggaggactgcgtggagatggtggcctcgggcggctggaacgacgtggcctgccacaccaccatgtacttcatgtgtgagtttgacaaaaagaacatgtaaacctcaggctggggctgcccattgggggccccacatgtccctgcagggtgnnttccngcnctttgcggtagnctntcgattaatggtctccaattnggttcnnncgggggggcgcg

SEQ ID NO: 920 - DNA, 2023 bp, Homo sapiens
gcacgaggagaaacaataggacggaaacgccgaggaacccggctgaggcggcagagcatcctggccagaacaagccaaggagccaagacgagagggacacacggacaaacaacagacagaagacgtactggccgctggactccgctgcctcccccatctccccgccatctgcgcccggaggatgagcccagccttcagggccatggatgtggagccccgcgccaaaggcgtccttctggagccctttgtccaccaggtcggggggcactcatgcgtgctccgcttcaatgagacaaccctgtgcaagcccctggtcccaagggaacatcagttctacgagaccctccctgctgagatgcgcaaattcactccccagtacaaaggtaagtcccagctgctggaggggttgccacactggcgaggagatgtgagagatcgtggccatggaaggccctggcagccatccctggagccctcactccctcccactctgtgctttccctccctctcctccttctcctcctcctggccctcagcccagcatctcacaccctcagttttcaatccctggtaagattgctcaattctgttttgttgtgtggatttgagtttgattttggtagaagtgtagttgtgttttatgttcaggtgtctcttgatcacagtaacccatagtcccccactggggggacggtgggggaagactttgggaggattttacccagaatacttgccgcctgctttttgtcctccaggaaaccagaagcccgggtaattaggtaggccggggagcagcgttgagtcagatggaatgcaggagtgggaggcctgtgctgattagcccaagccctttgctgttacagaatgtccccaaaattgctatatgaaagcaacccttcgattcacatatgataattttttatttctttttataatgtattttacaggggacatcagcagccaccagcatggtggggtctttgttggggagtgggggagtcttttgtaaatcaagtaagaatccattaaagaaattaattttaaatgtgcattacctggttacataaaggactctagaacaacttaggttcttttgggactgttgaaacattgtctttaaggacagaatgtactgggtgcctttctctgtactctgaatatgcatgtgtattgcggtggggatgggggagttgggggccctcacttggtccttctctgttgtttttttccaggacaaagccaaaggccccttgttagctggccatccctgccccattttttcccctggtcctttcccctgtggccacagggaagtgtggcctgaataccccaccccggctcctctgcacccagagctgggggccacctcagaagtgtcatctctctctgagcacgcattcccctgcagcagtcgaggactgagcagattgagtgatgctggggcagagaggcctgggaggaaaggtgttcagccagtcgtttgtaaggcgctcgtcggcacctgctgaaacgcccccacctgacagccccatcctcaaagactgtcttaattactcatggcaggttctagagacttaaggggaaaagctgctttcaaggccaccacatgtctgtgctccccaaccagctctatctgccttgtgttcattttgttattttgtgacgtgagactgcaaagaccaataaaaacatattttataagaacaaaaggcctgggtgcctacccgtgtgggggcactgtgggaagcctttgctagggtgtcttgtgctgtgtggtttgttttgtttgcccctttattttgctttgcttacccagtcttcccttactcttggatgcttcttaaccctcaggcaaacctgtgttccccctgtattcaggctctgctttaaagcaagccatgaggctgttggagtttctgtttagggcattaaaaattcccgcaaactataaagagcaatgttttcagtcttttaggattagaagaattacataaaaattaataaacattttcaatgatggaaa

SEQ ID NO: 921 - DNA, 1017 bp, Homo sapiens
tttttttttttctcatgtgaagagattctttatttgattttcatcacctttcaatgaaagagtgggtcctgtcagcactacgtaaaatatatatcttaagagcattaatttctttttaaatgaaagacagtgaagaaagtctgtgttagaaaaaggcataatagaagcttggttaaatgtaagcaggtttctatcaagtaaagaataaaagtaccattactccattaaaccagtaataaaaacatactattgtggcatgttctcaaaataggttgttcataaaaggtgaaggcttgttaggtccttttcttctttttaggtggaccaaatcaacatggcggtggtatctaaccatcctggggaagaccatgaggtccaaggggaatgaggaaggcatgggttgcctaacctcctatggctcaaaggaggttcctgggtaggaaatacccacccctgttttcccagaaggtaagagagatacataacagtttccagatacaactaacacaagacctgtgagggtcatggctctggccccattaagtctgggtagctgacataactttagttctcttgggttctttctctggtctcagttcccttagcgctgacgatctggcaggaccgtagtcactgggattgggtattccaaggcattgcagtcatccaacaggaataccaaatctctcctgcagaacgagttcatgatggtgtacagcttccgtgctttgtccttcaaggaatctacctgggccactttccaacacgggggcgaggccacaaagtcccgcagcttgtccagcacacagtaattgtgtatgtccaggtacagcctgggcaggtatctcacacatggctccgagggctccgagacctgcaggaggttgaagtcgcgggtgatctcctggctcagggcccgcatgcgggagtagcaggtcgggggagtgggccgcgcggcgggggctcccgccaggagcagcagcagcacgggcagaggcccaggcgtcctcatggtgc

SEQ ID NO: 922 - DNA, 1751 bp, Homo sapiens
gataagagagtatttaagggcatttagatcatgtaaaaatgagaaacaaaaacaatgataataggattgttgtgaggattaagtgatactatccatgaaagcacctaaaagcatgtctaccaccaaatatgagcccaataatgttaacttattattcatatagattttcgggttcaacaagctctagcaggctaccagtttttctagtgatgaggaaagccagacttttcctataatctgtctctgccctgaaaagattccagttttaatgtggctgatgagggtattttccttgactgcttctccccagacttcatcctcatggcccaaagcatccacatgtatgcagccagggtccagtggggcctggtcatgtgcttcctgtcttattttggcacctttgccgtggagttccggcattaccgctatgagattgtttgctctgagtaccaggagaatttcctaagcttctcagaaagcctgtcagaagcttctgaatatcagactgaccaggtgtaaaccatcagtttttccttgctggtgaggtgggtgtgacagtgggggaggggccagtaggacacactcacaggacttgacatagaacctcatttcacacacacacacacacacacattcatggccacatttgccaaatgagcttttcagggcgagttatttctttaatgaaaaagcacaagcccttatgtgtcgaaatacacgctgttacactgaaaatatatgcacgacagagcaagaagcttgtgcatgatcacttcttatccgtccccttcccagcactccctcctcttcccattctctccacatgtctcaagcaccctaccgagtagggcaggccaaatgttccttgggagtaatgccaactcccgacgttgccttcaggtccaaagggcttggaaccagctcgtgaggaagttctgaatctggcactaatattcttgagtggataatagtgtatcatagaataggacggaaattgtattgagatgtgaccctgtgtcgcctgtggaaaggcatagtgagaagaactttcccacgaaagcccccttcatcgttgttcagtggtcggctgtgtggatcccaggagagacatatgccacagactgtgagagcaaagcccgccgctgtgatctggacttgatgcactgtgactgagaatgatttccaaatgtgaatatgtgtagggacgtggtctatcaggcctggaacaagatgggggcagtgaaggtatggtttagtgtttgctttcatagtatgccatgtacaatgttttatatttcatagtttcttttaagtaactaccatgagtctctctaagcctcatggacaaagatgtagaccaaatgcaagagctgagcttgctttgggttcaaccatgatcaaagaaaaactgaggtcacctgcaggcttacgtgggaagctaagaaaatatcacagaaaaatggaaagaaatatggatgtgcagaggtaataaaaagagctgctgctggacatttatcaaagataggcaccttacagtatcttgttgcaagtccaaatcaggggagactttgttaatatgtatcttttgctcaaatttagtagggttttttttttttgggataaggggcttttcaaattgggaattggtaaaacccaattaaaaaaataccctttcttaaaaccaaattgacacagttggcccccctgttagccaacccgcagttcccagttcccacctgctgagagttcaa

SEQ ID NO: 923 - DNA, 3836 bp, Homo sapiens
  misc_feature (1)...(3836): n = a,t,c or g
ggctcggctcctagagctgccacggccatggccagagcccgcccgccgccgccgccgtcgccgccgccggggcttctgccgctgctccctccgctgctgctgctgccgctgctgctgctgcccgccggctgccgggcgctggaagagaccctcatggacacaaaatgggtaacatctgagttggcgtggacatctcatccagaaagtgggtgggaagaggtgagtggctacgatgaggccatgaatcccatccgcacataccaggtgtgtaatgtgcgcgagtcaagccagaacaactggcttcgcacggggttcatctggcggcgggatgtgcagcgggtctacgtggagctcaagttcactgtgcgtgactgcaacagcatccccaacatccccggctcctgcaaggagaccttcaacctcttctactacgaggctgacagcgatgtggcctcagcctcctcccccttctggatggagaacccctacgtgaaagtggacaccattgcacccgatgagagcttctcgcggctggatgccggccgtgtcaacaccaaggtgcgcagctttgggccactttccaaggctggcttctacctggccttccaggaccagggcgcctgcatgtcgctcatctccgtgcgcgccttctacaagaagtgtgcatccaccaccgcaggcttcgcactcttccccgagaccctcactggggcggagcccacctcgctggtcattgctcctggcacctgcatccctaacgccgtggaggtgtcggtgccactcaagctctactgcaacggcgatggggagtggatggtgcctgtgggtgcctgcacctgtgccaccggccatgagccagctgccaaggagtcccagtgccgcccctgtccccctgggagctacaaggcgaagcagggagaggggccctgcctcccatgtccccccaacagccgtaccacctccccagccgccagcatctgcacctgccacaataacttctaccgtgcagactcggactctgcggacagtgcctgtaccaccgtgccatctccaccccgaggtgtgatctccaatgtgaatgaaacctcactgatcctcgagtggagtgagccccgggacctgggtgtccgggatgacctcctgtacaatgtcatctgcaagaagtgccatggggctggaggggcctcagcctgctcacgctgtgatgacaacgtggagtttgtgcctcggcagctgggcctgtcggagccccgggtccacaccagccatctgctggcccacacgcgctacacctttgaggtgcaggcggtcaacggtgtctcgggcaagagccctctgccgcctcgttatgcggccgtgaatatcaccacaaaccaggctgccccgtctgaagtgcccacactacgcctgcacagcagctcaggcagcagcctcaccctatcctgggcacccccagagcggcccaacggagtcatcctggactacgagatgaagtactttgagaagagcgagggcatcgcctccacagtgaccagccagatgaactccgtgcagctggacgggcttcggcctgacgcccgctatgtggtccaggtccgtgcccgcacagtagctggctatgggcagtacagccgccctgccgagtttgagaccacaagtgagagaggctctggggcccagcagctccaggagcagcttcccctcatcgtgggctccgctacagctgggcttgtcttcgtggtggctgtcgtggtcatcgctatcgtctgcctcaggaagcagcgacacggctctgattcggagtacacggagaagctgcagcagtacattgctcctggaatgaaggtttatattgacccttttacctacgaggaccctaatgaggctgttcgggagtttgccaaggagatcgacgtgtcctgcgtcaagatcgaggaggtgatcggagctggggaatttggggaagtgtgccgtggtcgactgaaacagcctggccgccgagaggtgtttgtggccatcaagacgctgaaggtgggctacaccgagaggcagcggcgggacttcctaagcgaggcctccatcatgggtcagtttgatcaccccaatataatccggctcgagggcgtggtcaccaaaagtcggccagttatgatcctcactgagttcatggaaaactgcgccctggactccttcctccggctcaacgatgggcagttcacggtcatccagctggtgggcatgttgcggggcattgctgccggcatgaagtacctgtccgagatgaactatgtgcaccgcgacctggctgctcgcaacatccttgtcaacagcaacctggtctgcaaagtctcagactttggcctctcccgcttcctggaggatgacccctccgatcctacctacaccagttccctgggcgggaagatccccatccgctggactgccccagaggccatagcctatcggaagttcacttctgctagtgatgtctggagctacggaattgtcatgtgggaggtcatgagctatggagagcgaccctactgggacatgagcaaccaggatgtcatcaatgccgtggagcaggattaccggctgccaccacccatggactgtcccacagcactgcaccagctcatgctggactgctgggtgcgggaccggaacctcaggcccaaattctcccagattgtcaataccctggacaagctcatccgcaatgctgccagcctcaaggtcattgccagcgctcagtctggcatgtcacagcccctcctggaccgcacggtcccagattacacaaccttcacgacagttggtgattggctggatgccatcaagatggggcggtacaaggagagcttcgtcagtgcggggtttgcatcttttgacctggtggcccagatgacggcagaagacctgctccgtattggggtcaccctggccggccaccagaagaagatcctgagcagtatccaggacatgcggctgcagatgaaccagacgctgcctgtgcaggtctgacaccggctcccacggggaccctgaggaccgtgcagggatgccaagcagccggctggactttcggactcttggacttttggatgcctggccttaggctgtggcccagaagctggaagtttgggaaaggcccaagctgggacttctccaggcctgtgttccctccccaggaagtgcgccccaaacctcttcatattgaagatggattaggagagggggtgatgacccctccccaagcccctcagggcccagaccttcctgctctccagcaggggatccccacaacctcacacttgtctgttcttcagtgctggaggtcctggcagggtcaggctggggtaagccggggttccacagggcccagccctggcaggggtctggccccccaggtaggcggagagcagtccctccctcaggaaactggaaggaaggggaactcccccggaaatggggaaaatgtgaacacccacccatccctgaaagcccancttgcaccctcccagtttgcaacagggatttgttcctgggggctgagggccctgtccccccacccccgcccttggtgcctgtccataaaagggcaggcaggggcaggctgaggagttgcccctttgccccccagagactgactctcagagccagagatgggatgtgtgagtgtgtgtgtgtgtgtgtgcgcgcgcgcgcgcgtgtgtgtgtgcacgcactggcctgcacagagagcatgggtgagcgtgtaaaagcttggccctgtgccctacaatggggccagctgggccgacagcagaataaaggcaataagatgaaaaaaaaaa

SEQ ID NO: 924 - DNA, 1199 bp, Homo sapiens
tttcgtccgcggacgaagaaggcgacggccatgtacttggagcactatctggacagtatcgagaaccttccctgcgaacttcagaggaacttccagctgatgcgagagctggaccagaggacggaagataagaaagcagagattgacatcctggctgcagagtacatctccacggtgaagacgctgtctccagaccagcgcgtggagcgcctgcagaagatccagaacgcctacagcaagtgcaaggaatacagtgacgacaaagtgcagctggccatgcagacctacgagatggtggataaacacattcgaaggcttgatgcagacctggcgcgctttgaagcagatctgaaggacaagatggagggcagtgattttgaaagctccggagggcgagggttaaaaaaaggccggggtcagaaagaaaaaagagggtcccggggccgaggcaggaggacatcagaggaagacacaccaaagaaaaagaagcacaaaggagggtaagaggctttcccctctttttcccaaaagaacgaatacccatagcctgtatcccggatgtaggaacactgatggaagctgacccgagtgaagtgcaccccgtgtgccgggtggtattctgattcttacgctgcgcgcctgtcgtcagcctgtcctcaccgcagcctttgagggggtgccgttgtcaggggcattttcagtgtcgcagggacctgcccaggctttagggctgctgtggtgcggctgggctgcacctggagtcttgattccagtgcctgtcctcttagccacagtgtgtgctgccccactagggacaggaggatggtgagcatcgtgttgttgacagaggccaatgtagaccactctttaagtagctagatttctgtatatctgtcagttattttatgtgtcaacatatagtgtgcatatattcattgttaattatgtggccacatttattaaatagacatgtcatttaacttgaagttttttgagatactttatttaaagcattctcccactgacaccctccctgccaaaggtgttgtataccctccaaagagatcgtagcattacctcagaggagtggcatttagagtaaagagaaaatgctcaaatgccacgtagcctctgtccagatgatctctcagagggagggtcaaagagtaaaagttttgggcacgaatggcgaaacgaaa

SEQ ID NO: 925 - DNA, 743 bp, Homo sapiens
  misc_feature (1)...(743): n = a,t,c or g
ttcaatgctaaatgattttattgaaacttaaagaaatcaaacataactagtagagaaaaatttcagaatgacatggtaaaaaccactggagcccatattttttctgcacagcatattcagatgactaaatccatagtggctttaaaaaattgtttagttctccaccgtgtctccacagaaggaaatgtccacaatccatagtacactggtcgtgtagcacgttcctgagtaaaaaaacaggcttggcctcttgcatctcctcagccatgtatgttggaatcccacgacacatgtttgcaatgttttttccgaacttgctcaggtcatcgactttgtttgggttgactgagtacatcaggcccttgggaggtggtccctncctggtcccttaccctgaagcttcttttccttgaccagtgcatcaagggattgaatggagggcatgacttccttgttcattttgtgcacaatgcatgtcttcttttgaaagagtctggttgcagcaaagccatttccataatcccagatggaattccaggagtcccatccgttgttattgtcaacattggccacattgtgttcattgttgacactcactgactgctgcccacttccagcattgttgttgtcatcattgacgttgatattatagttagctagggcaggagctagaaagactccaagaagtccagcaaagacaattgtgaacttcatcttgtcttcacgaaagcagtggacagagg

SEQ ID NO: 926 - DNA, 1271 bp, Homo sapiens
ttcacaccccggtgactaagctgaagagatttatcatgatgcctgctcttttctgttggccttggtcacttcccatgtgcatgagcatctccatccaaaagtggccttcttctcttagccccggatgggatgtcagtagcccatgtttctaatagaagacccatgccaaagccactttgacaactctccagctcgcaggaatgctgtcggcctctagctaaactgttatggtccactcaacgctgtacactgtgtggccactttcctccgcttcctgtacattgtcaggaggttgtaaggcagcaccaggggctgacctctcaggacttgcagcagcagagcccagctgggtacacctgtctaaaaaccacagcacagcagtagcagctcaatggagacattgttctctgcatcccaaagccaggaattcaaaataaagcttggcttccatgcaaaacattaatgtgcgtgattccttcataaattaaaagctgagaaactaaataaataaataaaagttgctgccccagaatgacctacttcctactacccctggccccactctgcacattctctctactgacgaatggtaatataatatctccctcccaatggtagtataggttgagtatcccttatctgaaatgcttgggaccagaagcatcctgggtttggaatttttttcagattttgcaatgtttgcattatacctactggctgagcatcccaaatccaaaaatccaaatctgaaatgctcaataaacatttccttttgagtgccatgtcagcactcaaaaagttctcgatttgagagtactttgggtttaaggatttaggatgctcaacctgtacgtcctttctgtagaagctgtgacactgaagcataatggccaaagtaatacaacagaccttgcatgggcctcagcacgtccaggacaatcaaatgcaactgatagagaaagcctgaaattaaccgtaaagcagaaagtccacggcagtcacagagtttcacccaggctacaccgtctcagaaggcacctgctgtgattttgtaatgaagcctttaataaactcacacactgtgaaagggagaaggtccctagaaactgaggaccaggaagatgcacaggacaagaggagtgggtaaacacaaaatatataccagcgactggatatatttatatacttatgaatatggtgtctacaatggagaatgggacacagggtttcaagcagtggaaaccccatggcaaacaatcccaaagcttccc

SEQ ID NO: 927 - DNA, 463 bp, Homo sapiens
tagaattcagcggccgcttaattctagaagtccaaatcactcattgtttgtgaaagctgagctcacagcaaaacaagccaccatgaagctgtcggtgtgtctcctgctggtcacgctggccctctgctgctaccaggccaatgccgagttctgcccagctcttgtttctgagctgttagacttcttcttcattagtgaacctctgttcaagttaagtcttgccaaatttgatgcccctccggaagctgttgcagccaagttaggagtgaagagatgcacggatcagatgtcccttcagaaacgaagcctcattgcggaagtcctggtgaaaatattgaagaaatgtagtgtgtgacatgtaaaaactttcatcctggtttccactgtctttcaatgacaccctgatcttcactgcagaatgtaaagatttcaacgtcttgctttaataaatcacttgctctcc

SEQ ID NO: 928 - DNA, 1014 bp, Homo sapiens
gcagcctccgccccctcaaccttcgcggggcgcgggccgcagcttttcggttcacagcgggcagggaaagccgcgggaagggtactccaggcgagaggcggacgcgagtcgtcgtggcaggaaaagtgactagctccccttcgttgtcagccagggacgagaacacagccacgctcccacccggctgccaacgatccctcggcggcgatgtcggccgccggtgcccgaggcctgcgggccacctaccaccggctcctcgataaagtggagctgatgctgcccgagaaattgaggccgttgtacaaccatccagcaggtcccagaacagttttcttctgggctccaattatgaaatgggggttggtgtgtgctggattggctgatatggccagacctgcagaaaaacttagcacagctcaatctgctgttttgatggctacagggtttatttggtcaagatactcacttgtaattattccaaaaaattggagtctgtttgctgttaatttctttgtgggggcagcaggagcctctcagctttttcgtatttggagatataaccaagaactaaaagctaaagcacacaaataaaagagttcctgatcacctgaacaatctagatgtggacaaaaccattgggacctagtttattatttggttattgataaagcaaagctaactgtgtgtttagaaggcactgtaactggtagctagttcttgattcaatagaaaaatacagcaaacttttaataacagtctctctacatgacttaaggaacttatctatggatattagtaacatttttctaccatttgtccgtaataaaccatacttgctcgtatataccccctgcctccttctgttccagtcagccaacatatgtacataaaagaacacacaaattcaagaagttggaagattaaattatctgcttatttagtgtaggatggtcaggtagctagctataagtgaaaggaaattttgctgaagagactgagaaatgggtagtggat

SEQ ID NO: 929 - DNA, 1963 bp, Homo sapiens
ggaattcgcccgccggagggtgtttatcgcggctagagagatgtcgctgctgcggtcgctgcgcgtgtttctggtcgcgcggaccgggagctacccggctgggtctcttctgcgtcagtcgccccagccaaggcacacattttatgctgggccccgtctgtctgcctcggcctccagcaaggagctcctcatgaagctgcggcggaaaacaggctactcctttgtaaattgcaagaaagctctggagacttgtggcggggacctcaaacaggcagagatctggctccacaaggaggcccagaaggagggctggagcaaagctgccaagctccaagggaggaagaccaaagaaggcctgattgggctgttgcaggaaggaaacacaactgtattagtagaggtaaactgtgagacagattttgtttctagaaatttaaaatttcaactgttggtccagcaagtagcccttggaaccatgatgcattgtcagaccctaaaggatcaaccctctgcatacagtaaaggtttcttgaattcctctgagctttctggacttccagctgggcctgacagagaaggctcactcaaggatcagttggctttagcaattggaaaactgggagaaaacatgattcttaaacgagctgcatgggtgaaggtgccatctgggttctacgttggctcttatgtccacggagcaatgcagagtccctcacttcacaagctggtgctggggaagtatggggccctggtcatctgtgagacgtctgaacagaaaacaaaccttgaagacgttggccgccgccttgggcagcatgtggtgggcatggcccccctctctgttggctccctggacgatgagcctgggggagaggcagagactaagatgctgtcccagccgtatttgctggatccctccattaccttggggcagtatgtgcagcctcagggggtgtcggtagtagactttgtgcggtttgaatgtggagaaggtgaagaggcagcagaaactgaataggttccagagacttttggcccaggaggaatatttacttttagctctggacatcattacaaaaaggaatatttcccaaacctcttcagaccgagaatgcatgggtaaaattattaaatagttgtataataaaaataattttttccttgtttgcgtaatactggatttagcttttctgtgcctttcaaaaacaacaggtgggccttattgacgtgatagtgtcgtggagaacaggcatcaacaatactgctgctcccttcaacatagatttattatggtatttctgaaatttctaacttatatgttctgtcttacaccttttatgacatagaactcttttgttctgtttttgctttgcgacactgtgaaccgtgcttctgcctcggaacctccctagttatattacttgtgccacatggatttctttaggattattgattcaaacctagagttgtctggaaaatgtgggttctcttctttgtgattgtctgtagtatgctttgaaggtgctctgcagtggtagacacactggttctggcctcatttaatgaaattaataacacatgcccctatttctcttttggatgatgtgtgggtgggtgggtactgaggtttcctggccagctgtaaggcagattttgacattcttgtgccagaaacagaaattagagtagtccagttacccagagagctcacttaacattgcctctttacttccccagtactgaaacatttcttcaagtattaacataaaattaccgtaacaagcagacccagaatactgaaaataactccatttgttcattataggtatcttttatttgaaaagtgaaaaatgctttggacacattacagatctgggtatttggattttgcctatggagtgcatatatgatttcaatgatttacaggctaaatagattttagaaataatcatcttaaaattga

SEQ ID NO: 930 - DNA, 1851 bp, Homo sapiens
ggaattccagagtctggggtccctggactgagccatcagctgggtcactgagacccatggcaaggaaacaaaataggaattccaaggaactgggcctagttcccctcacagatgacaccagccacgccgggcctccagggccagggagggcactgctggagtgtgaccacctgaggagtggggtgccaggtggaaggagaagaaaggactggtcctgctcgctcctcgtggcctccctcgcgggcgccttcggctcctccttcctctacggctacaacctgtcggtggtgaatgcccccaccccgtacatcaaggccttttacaatgagtcatgggaaagaaggcatggacgtccaatagacccagacactctgactctgctctggtctgtgactgtgtccatattcgccatcggtggacttgtggggacattaattgtgaagatgattggaaaggttcttgggaggaagcacactttgctggccaataatgggtttgcaatttctgctgcattgctgatggcctgctcgctccaggcaggagcctttgaaatgctcatcgtgggacgcttcatcatgggcatagatggaggcgtcgccctcagtgtgctccccatgtacctcagtgagatctcacccaaggagatccgtggctctctggggcaggtgactgccatctttatctgcattggcgtgttcactgggcagcttctgggcctgcccgagctgctgggaaaggagagtacctggccatacctgtttggagtgattgtggtccctgccgttgtccagctgctgagccttccctttctcccggacagcccacgctacctgctcttggagaagcacaacgaggcaagagctgtgaaagccttccaaacgttcttgggtaaagcagacgtttcccaagaggtagaggaggtcctggctgagagccgcgtgcagaggagcatccgcctggtgtccgtgctggagctgctgagagctccctacgtccgctggcaggtggtcaccgtgattgtcaccatggcctgctaccagctctgtggcctcaatgcaatttggttctataccaacagcatctttggaaaagctgggatccctccggcaaagatcccatacgtcaccttgagtacagggggcatcgagactttggctgccgtcttctctggtttggtcattgagcacctgggacggagacccctcctcattggtggctttgggctcatgggcctcttctttgggaccctcaccatcacgctgaccctgcaggaccacgccccctgggtcccctacctgagtatcgtgggcattctggccatcatcgcctctttctgcagtgggccaggtggcatcccgttcatcttgactggtgagttcttccagcaatctcagcggccggctgccttcatcattgcaggcaccgtcaactggctctccaactttgctgttgggctcctcttcccattcattcagaaaagtctggacacctactgtttcctagtctttgctacaatttgtatcacaggtgctatctacctgtattttgtgctgcctgagaccaaaaacagaacctatgcagaaatcagccaggcattttccaaaaggaacaaagcatacccaccagaagagaaaatcgactcagctgtcactgatggtaagataaatggaaggccttaacaagtttcctcctccacgttggacaattatgtcaaaaacaggattgtctacatggatgatctcacttttcaggaaacttaaaatttacccattattgggaagcttaaatgaattgaagctatgcaagtcttttatattattaaatatttaaaagtaaacctgtactaatcta

SEQ ID NO: 931 - DNA, 892 bp, Homo sapiens
ttttttttttttaaaatatatttgctttattatgtacacactatatttacatcacccaccctgaaaacagcaggttctggcttttccgtgaacccccagatgaatataaattggagcctctgagaacagttccttccccagagcggggagtgtgcacgtgtgtgtgtaaccttctgattccatgggacctggccagctcctctggagccacacagcacctccttgccttacaccctggctccagcttcactggtccgggggacgcctcagcctggggcagctgtgatgtaaaccagtcactccacctccatcttcctcttctgcaaagaatcgaggaagtcttgccactctgctgggtaaaagcgtttatagacgttgatcttactccgaatctgttttggggtatcttgatagtaattcttctcatcacgggccatggccttatagtcctccccgtggttctctaccatgtagcgtacatagtcaatgaggtcccgagacagagtatttcctttcttttctggaaggctggcttctgcctccaggtcattcagcacatagggcttccgtacaagctctttaggcctctcctctatgtccacctccatggccttcacctttctcttacggaggggcaccgccctgttggggtccacagccaaccccatctcggccaggttctgccgtaccgatttagcgtggtcccaggcatgtcggatgtgggagcattcgatccgcggcgctgccttccgtcgagcattccggttcagacgctttcggttgacactgtaaccaaacttctgcctccgggttttgcccttggccttgggcatcgcgctgaccaccgcaccagcagctcaaacacgctgcctctgtctctcagacctcgtgt

SEQ ID NO: 932 - DNA, 1060 bp, Homo sapiens
gtttggggttcggctgccgggaagaggcgcgggtagaagcgggggctctcctcagagctcgacgcatttttactttccctctcatttctctgaccgaagctgggtgtcgggctttcgcctctagcgactggtggaattgcctgcatccgggccccgggcttcccggcggcggcggcggcggcggcggcggccagggacaagggatggggatctggcctcttccttgctttcccgccctcagtacccgagctgtctccttcccggggacccgctgggagcgctgccgctgcgggctcgagaaatgggagcctcggatatctccggagcgtttggataatgtgacagttggaatgcagtgatgtcgactctttgcccaccgccatctccagctgttgccaagacagagattgctttaagtggcaaatcacctttattagcagctacttttgcttactgggacaatattcttggtcctagagtaaggcacatttgggctccaaagacagaacaggaaagacaagaaaatgtccagaagattatcttagaaggcacagagagaatggaagatcagggtcagagtattattccaatgcttactggagaagtgattcctgtaatggaactgctttcatctatgaaatcacacagtgttcctgaagaaatagatatagctgatacagtactcaatgatgatgatattggtgacagctgtcatgaaggctttcttctcaagtaagaatttttcttttcataaaagctggatgaagcagataccatcttatgctcacctatgacaagatttggaagaaagaaaataacagactgtctacttagattgttctagggacaacattacgtatttgaactgttgcttaaatttgtgttatttttcactcattatatttctatatatatttggtgttattccatttgctatttaaagaaaccgagtttccatcccagacaagaaatcatggccccttgcttgattctggtttcttgttttacttctcattaaagctaacagaatcctttcatattaagttgcactgtagatgag

SEQ ID NO: 933 - DNA, 1609 bp, Homo sapiens
tccgtagtgggctaagggggagggtttcaaagggagcgcacttccgctgccctttctttcgccagccttacgggcccgaaccctcgtgtgaagggtgcagtacctaagccggagcggggtagaggcgggccggcacccccttctgacctccagtgccgccggcctcaagatcagacatggcccagaacttgaaggacttggcgggacggctgcccgccgggccccggggcatgggcacggccctgaagctgttgctgggggccggcgccgtggcctacggtgtgcgcgaatctgtgttcaccgtggaaggcgggcacagagccatcttcttcaatcggatcggtggagtgcagcaggacactatcctggccgagggccttcacttcaggatcccttggttccagtaccccattatctatgacattcgggccagacctcgaaaaatctcctcccctacaggctccaaagacctacagatggtgaatatctccctgcgagtgttgtctcgacccaatgctcaggagcttcctagcatgtaccagcgcctagggctggactacgaggaacgagtgttgccgtccattgtcaacgaggtgctcaagagtgtggtggccaagttcaatgcctcacagctgatcacccagcgggcccaggtatccctgttgatccgccgggagctgacagagagggccaaggacttcagcctcatcctggatgatgtggccatcacagagctgagctttagccgagagtacacagctgctgtagaagccaaacaagtggcccagcaggaggcccagcgggcccaattcttggtagaaaaagcaaagcaggaacagcggcagaaaattgtgcaggccgagggtgaggccgaggctgccaagatgcttggagaagcactgagcaagaaccctggctacatcaaacttcgcaagattcgagcagcccagaatatctccaagacgatcgccacatcacagaatcgtatctatctcacagctgacaaccttgtgctgaacctacaggatgaaagtttcaccaggggaagtgacagcctcatcaagggtaagaaatgagcctagtcaccaagaactccacccccagaggaagtggatctgcttctccagtttttgaggagccagccaggggtccagcacagccctaccccgccccagtatcatgcgatggtcccccacaccggttccctgaacccctcttggattaaggaagactgaagactagccccttttctggggaattactttcctcctccctgtgttaactggggctgttggggacagtgcgtgatttctcagtgatttcctacagtgttgttccctccctcaaggctgggaggagataaacaccaacccaggaattctcaataaatttttattacttaacctgaaaaaaaaaaaaaagggggggccgttttaaagaatcaaattttacttccccgggcttgcaaggtaatagtttttttatggggccacctaaattaaattcccgggccggcttttaacaacgtggggaggggaaaaaccctggggtaaccaaatttaatcgctttgaaaaaaatccccttttcgccagggggggaaaaaaaaaa

SEQ ID NO: 934 - DNA, 1568 bp, Homo sapiens
tttcgtgagaaaggttgtgatggcggctatagctgcatccgaggtgagttccacccaccgtacaccgggggttttgttggtgagggttccggggagcggcctggagagaggtggaggcgaagtctagtttcgcttcagggaggctcagacactgtggggtcaagtcggcggtggaggccctaggcccagcctgtggggaccggcggggactcggcctgggcagtcctgggagaagctgagccggctctgcctgaagccagttctccttgtcgcaggtgctggtggacagcgcggaggaggggtccctcgctgcggcggcggagctggccgctcagaagcgcgaacagagactgcgcaaattccgggagctgcacctgatgcggaatgaagctcgtaaattaaatcaccaggaagttgtggaagaagataaaagactaaaattacctgcaaattgggaagccaaaaaagctcgtttggagtgggaactaaaggaagaggaaaagaaaaaggaatgtgcggcaagaggagaagactatgagaaagtgaagttgctggagatcagtgcagaagatgcagaaagatgggagaggaaaaagaagaggaaaaaccctgatctgggattttcagattatgctgctgcccagttacgccagtatcatcggttgaccaagcagatcaaacctgacatggaaacatatgagagactgagagaaaaacatggagaagagtttttcccaacatccaatagtcttcttcatggaacacatgtgccttccacagaggaaattgacaggatggtcatagatctggaaaaacagattgaaaaacgagacaaatatagccggagacgtccttataatgatgatgcagatatcgactacattaatgaaaggaatgccaaattcaacaagaaagctgaaagattctatgggaaatacacagctgaaattaaacagaatttggaaagaggaacagctgtctaatcccttcaagaactgtttatagaagcttgagaatggggtaaaaatttctgctagcaaaatcaagttctttttgaaattttatcagtaatccagaatttagtagtccatgccttctcactcagcatttagaaataaaaatgtggtttcttaaacgtatatcctttcatgtatatttccacatttttgtgcttggatataagatgtatttcttgtagtgaagttgttttgtaatctactttgtatacattctaattatattatttttctatgtattttaaatgtatatggctgtttaatctttgaagcattttgggcttaagattgccagcagcacacatcagatgcagtcattgttgctatcagtgtggaatttgatagagtctagactcgggccacttggagttgtgtactccaaagctaaggacagtgatgaggaagatggcagtggccaccggaggactggagcagtccctcctcatggcggcctgtgaccaaggtcggggaggagtggagctatccttccatgatctgatcatgtacagttccctttttaaaaagcaataaatgcttgggattagaatttct

SEQ ID NO: 935 - DNA, 399 bp, Homo sapiens
tttcgtcctggggccattttgcctgaagagagtcctgtgcgccatatgtgggttctgactcgtttcctccacagtgaacttgctgactgagaaggcaccttggaactctctggcctggactgttaccagttacgtcttcctcaagttcctccaggggggtggcactggcagtacaggtatgagagactccgccctcaccctgctaggtataggtccctcccacaggcattccctcagcatccgcctctcccagcattcctccccagcccccatgtactctcagacctttcacatcctggtgctgggctgacgtccctcagctcccaggccctactgaggcgtcccccggctccctgcaggcttcgtgagcaacctgcgcacctttctgtggatgcgggg

SEQ ID NO: 936 - DNA, 1986 bp, Homo sapiens
tcggggagagagtgtaatatggcgaagacctacgattacctgttcaagctgctgctgatcggggactcgggggtggggaagacctgtgtcctgttccgcttctccgaggacgccttcaactccacttttatctccaccataggaattgactttaaaattaggaccatagagctcgatggcaagagaattaaactgcagatatgggacacagccggtcaggaacggtttcggacgatcacaacggcctactacaggggtgcaatgggcatcatgctggtctacgacatcaccaacgagaagtccttcgacaacatccggaactggattcgcaacattgaggagcacgcctctgcagacgtcgaaaagatgatactcgggaacaagtgtgatgtgaatgacaagagacaagtttccaaggaacggggagaaaagctggccctcgactatggaatcaagttcatggagaccagcgcgaaggccaacatcaatgtggaaaatgcatttttcactctcgccagagatatcaaagcaaaaatggacaaaaaattggaaggcaacagcccccaggggagcaaccagggagtcaaaatcacaccggaccagcagaagaggagcagctttttccgatgtgttcttctgtgaggaacaccgccttactctgagcctcgctcagcccagctgactgtgcctgttctgagtgagcccctcactcagccggggccctcccacctccaacgccccgcccacgccgcggccaccgggcccacggccaccagaatgcaattgagaaatcgtttattttagtaactgtctgatctttttcaactttggagatggaataagttaaaaatttgctatttttcctgtaacatctgctgaacgggcccacccacacgttgtatattcagagagagagagggagtcaaggtgtgaccgtcgaccacagccagtgtcaggcctctgcctctgggcctttgctttgtggcctcactgcaacacaaagctccaccaggaggctggttcacgtcccctaccacggaagcgaggtcccagaaggccagcggtggttccaggagcaacagctcccaaaccctgagcaaggcaaccgatcgccaggaccaggaagcatcacccaggagatttggcgcccacttccacctcttctctcagttttggacaagtgacaaaccattttgccccctcactcttcttttttaactgttaaaccaaaggaaagcacaaatgaaggaaatcctgtgtaaagcattgagaaggaaagaagcctggagcagcctctcctgtccacagccaggggttaggtctgcaggcccgtctgcggtccccatcgagcatcaaggggacgctgtgtgtgctgcaagtgaccccgaaaacaaccacagccgtcacatggtcctcctgaagttggggcaccctcctctcagcaccaaaatggcccccactccttcgtgtcctcccgctatctccaaatcggacgttctttctagctgagatttttatttttccacatctgtagtgccatgaagcgattctgtctttgacttccaatggcaaacctgggtgatcgggaacaagcacgttgtacccttggctggacatggccaagacacaaggcattccacggcggcaagctgaccgcacagcagtctggcttgattttcagccgtcatcattgggttctgttttgacagctctgctgtcccatagggactgcgactgggaccaggtcaaccacgccaggggggtgtcaccagccttttctttttttctttcttttttttttttcccccctaagctgctgtcaatccaaaccattggcatcatcgtttcttttgacatctaacaccaacctatcagcaatagtctgctctccccgggaatctctaacatgctctgtttacatcgataaatgcacttaaggaaaacaaacaaattaaagctcatcttaaagtccaaaaaaaaaaaaaa

SEQ ID NO: 937 - DNA, 392 bp, Homo sapiens
ctgaagctgaagtcctctaatcacagatctaatgcagaggattaatgaaaccaagcaggtagggaacgttgctttctaggaatgctactgacattttgattgacagagacattcactgtgcctcccctcttttccctaaaggagtttggcaattttttcctcctccattataagaaggaagtttctgtttctgatcaaatggaatttgtcaatggatgggacattatgattattattagtgacatattgacaatcattggatcaattctaaaaatggaaatccaagctaaggtaatttttttcctaatcatgctattgttagtgtcagatttgcactaatgggaatgtatttttccagaatgtaagaattttcagaatgaattgtttcttcc

SEQ ID NO: 938 - DNA, 1464 bp, Homo sapiens
caagcaagctgcctgctcagatggcagggaatgggggaaaacagggagacagtttcctgtttgagatgttgggagatgcttcgagtagtatatttactggaaatagacattcaacttggatgtccctttttggaaatgtgcctgcgtccagggctgggttggggccccattgaactttggctctgacacagctgttgccacactcaacggaactgaatctatgtttgtcttccccggcatccttcaccccaactctccccgccacaacatacatcccatgccagcctggggaccctcaaaggtggcttcatcattaggtttgtggctgggtcctactgaagtaagtcttggcactcagagggataggaattgaatgaagacatgagattcctctgcgggaggcctctctaggaaatctgtggactcacacgtttactaatgttgctgcagccccgcacccaccttggccttgggcagccatactctagggcttttgtaacctctccatgtgaggaactcaaattagacctgggtttggaggcggtgctccgagctggcctttgggggaggttttgtgcgaggcatttcccaagtgctggcaggattgtgtcacagacacagagtaaacttttgctgggctccaagtgaccgcccatagtttattataaaggtgactgcaccctgcagccaccagcactgcctggctccacgtgcctcctggtctcagtatggcgctgtcctgggttcttacagtcctgagcctcctacctctgctggaagcccagatcccattgtgtgccaacctagtaccggtgcccatcaccaacgccaccctggaccggatcactggcaagtggttttatatcgcatcggcctttcgaaacgaggagtacaataagtcggttcaggagatccaagcaaccttcttttacttcacccccaacaagacagaggacacgatctttctcagagagtaccagacccgacaggaccagtgcatctataacaccacctacctgaatgtccagcgggaaaatgggaccatctccagatacgtgggaggccaagagcatttcgctcacttgctgatcctcagggacaccaagacctacatgcttgcttttgacgtgaacgatgagaagaactgggggctgtctgtctatgctgacaagccagagacgaccaaggagcaactgggagagttctacgaagctctcgactgcttgcgcattcccaagtcagatgtcgtgtacaccgattggaaaaaggataagtgtgagccactggagaagcagcacgagaaggagaggaaacaggaggagggggaatcctagcaggacacagccttggatcaggacagagacttgggggccatcctgcccctccaacccgacatgtgtacctcagctttttccctcacttgcatcaataaagcttctgtgtttggaacagctaaaaaaaaaa

SEQ ID NO: 939 - DNA, 1565 bp, Homo sapiens
  misc_feature (1)...(1565): n = a,t,c or g
tggacccctagtccagtgtggcggaattcccagaacgtgtgcagctcagccagccacagaactggaatttttcaggagcagggggagcatggagtttggactttgctgagcaactgaagtggagcgcagagcttgctcgcttaggagagagcatcatggatggcaaacaagggggcatggatgggagcaagcccgcggggccaagggactttcctggcatcaggcttctttcaaacccattgatgggcgatgctgtgtctgattggtctcctatgcatgaagctgcaatccacggacatcagctgtctctgaggaacctcatcagccaggggtgggctgtgaacatcatcacggcagatcatgtttccccactccatgaagcctgtcttggaggtcatctctcttgtgtgaagattttattaaagcatggagctcaggtgaatggtgtgacagcagactggcacactccactgtttaatgcttgtgtcagcggcagctgggattgtgtgaatttgcttctgcagcacggagccagcgttcaacctgagagtgatctggcatcccccatccatgaagctgctaggagaggccacgtggagtgtgtcaactctcttatagcttatgggggcaacattgaccataagatcagccacctgggcactccactctatttggcttgtgaaaaccaacagagagcctgtgtcaagaagcttctggagtcaggagcggacgtgaaccaagggaaaggtcaggattccccacttcatgcagtggccaggacagccagtgaagagctggcctgcctgctcatggattttggagcggacacccaggccaagaatgctgaaggcaaacgtcctgtggagctggtgcctccagagagccccttggcccagctcttcttggagagagaagggcccccttctttgatgcagttatgccgccttagaattcggaagtgttttggaatccagcagcatcataagataaccaaactcgtcctcccagaggatctgaaacagtttctcctacatctttaaatgcatctagggaatggattcacaaacgatgtgaaaacattattgagtgttgtagccactagaattttaaaatcaagttggatttatagagtttgactagttttttcgattagatttgtatttgttataaacttgtttatggagtttgactaattttttctattcaatttgtatttgttaaactcaagccagggtggaaagacactgcatacgtttgtattattagttagaaggcatgaagacttttttccctgcttggagagtgtcataagttattgttttgcatatctactgcatgccaagcactttttgcatcatctaatttagccctcacagccactgggtcaagatgtccaattttccagagtaaggatagaggagtcaaattcaaatacaggttttctgacattaacttatgtgatgacttgatcgaggcaggcttttccagcatcactgtcctggttccatctctgctatatggaagaaaaaaagaaacataggcatggtcaatcaaannnnacgccg

SEQ ID NO: 940 - DNA, 2009 bp, Homo sapiens
caaagtgctcagcataagggagccagcgcacagcacagccaggaaggcgagcgagcccagccagcccagccagcccagccagcccggaggtcatttgattgcccgcctcagaacgatggatctgcatctcttcgactactcagagccagggaacttctcggacatcagctggccatgcaacagcagcgactgcatcgtggtggacacggtgatgtgtcccaacatgcccaacaaaagcgtcctgctctacacgctctccttcatttacattttcatcttcgtcatcggcatgattgccaactccgtggtggtctgggtgaatatccaggccaagaccacaggctatgacacgcactgctacatcttgaacctggccattgccgacctgtgggttgtcctcaccatcccagtctgggtggtcagtctcgtgcagcacaaccagtggcccatgggcgagctcacgtgcaaagtcacacacctcatcttctccatcaacctcttcggcagcattttcttcctcacgtgcatgagcgtggaccgctacctctccatcacctacttcaccaacacccccagcagcaggaagaagatggtacgccgtgtcgtctgcatcctggtgtggctgctggccttctgcgtgtctctgcctgacacctactacctgaagaccgtcacgtctgcgtccaacaatgagacctactgccggtccttctaccccgagcacagcatcaaggagtggctgatcggcatggagctggtctccgttgtcttgggctttgccgttcccttctccattatcgctgtcttctacttcctgctggccagagccatctcggcgtccagtgaccaggagaagcacagcagccggaagatcatcttctcctacgtggtggtcttccttgtctgctggctgccctaccacgtggcggtgctgctggacatcttctccatcctgcactacatccctttcacctgccggctggagcacgccctcttcacggccctgcatgtcacacagtgcctgtcgctggtgcactgctgcgtcaaccctgtcctctacagcttcatcaatcgcaactacaggtacgagctgatgaaggccttcatcttcaagtactcggccaaaacagggctcaccaagctcatcgatgcctccagagtctcagagacggagtactctgccttggagcagagcaccaaatgatctgccctggagaggctctgggacgggtttacttgtttttgaacagggtgatgggccctatggttttctagagcaaagcaaagtagcttcgggtcttgatgcttgagtagagtgaagaggggagcacgtgccccctgcatccattctctctttctcttgatgacgcagctgtcatttggctgtgcgtgctgacagttttgcaacaggcagagctgtgtcgcacagcagtgctgtgcgtcagagccagctgaggacaggcttgcctggacttctgtaagataggattttctgtgtttcctgaattttttatatggtgatttgtatttaaattttaagactttattttctcactattggtgtaccttataaatgtatttgaaagttaaatatattttaaatattgtttgggaggcatagtgctgacatatattcagagtgttgtagttttaaggttagcgtgacttcagttttgactaaggatgacactaattgttagctgttttgaaattatatatatataaatatatataaatatataaatatatgccagtcttggctgaaatgttttatttaccatagttttatatctgtgtggtgttttgtaccggcacgggatatggaacgaaaactgctttgtaatgcagtttgtgacattaatagtattgtaaagttacattttaaaataaacaaaaaactgttctggactgcaaatctgcacacacaacgaacagttgcatttcagagagttctctcaatttgtaagttatttttttttaataaagatttttgtttcctaaaaaaaaaa

SEQ ID NO: 941 - DNA, 435 bp, Homo sapiens
agctatttatccctaggtcctttcctcctgcacgtcagctttgagccccgagctggtgcttctgctctctgagacatggcaggcctgatgaccatagtaaccagccttctgttccttggtgtctgtgcccaccacatcatccctacgggctctgtggtcctcccctctccctgctgcatgttctttgtttccaagagaattcctgagaaccgagtggtcagctaccagctgtccagcaggagcacatgcctcaaggcaggagtgatcttcaccaccaagaagggccagcagttctgtggcgaccccaagcaggagtgggtccagaggtacatgaagaacctggacgccaagcagaagaaggcttcccctagggccagggcagtggctgtcaagggccctgtccagagatatcctggcaaccaaaccacctgctaa

SEQ ID NO: 942 - DNA, 1708 bp, Homo sapiens
accttttgtagaccatagtacatgcggtggaattccggggagaggccatcacttgaagatgctgagtcttctgctccttctcctgggactaggtatgagccttgtcttttgaggagtctggggttaatgttaacactgggtggaaagactttctctccagagagtctgaagccaccagacagaagatgaaggggatatgttagattaaagaaccataacagagtaattgttggcacaataaaaaggaggcagttccctggggtcctttgggagctgaggtggtattggagaaataaagcagagaccttcctgcctggggagatgtctggaccccagcttgtcggtcctcatgaatatctctctgggactaggctctgtgttcagtgctgtcatctctcaaaagccaagcagggatatctgtcaacgtggaacctccctgacgatccagtgtcaagtcgatagccaagtcaccatgatgttctggtaccgtcagcaacctggacagagcctgacactgatcgcaactgcaaatcagggctctgaggccacatatgagagtggatttgtcattgacaagtttcccatcagccgcccaaacctaacattctcaactctgactgtgagcaacatgagccctgaagacagcagcatatatctctgcagcgccggacgacagggaacctacgagcagtacttcgggccgggcaccaggctcacggtcacagaggacctgaaaaacgtgttcccacccgaggtcgctgtgtttgagccatcagaagcagagatctcccacacccaaaaggccacactggtgtgcctggccacaggcttctaccccgaccacgtggagctgagctggtgggtgaatgggaaggaggtgcacagtggggtcagcacagacccgcagcccctcaaggagcagcccgccctcaatgactccagatactgcctgagcagccgcctgagggtctcggccaccttctggcagaacccccgcaaccacttccgctgtcaagtccagttctacgggctctcggagaatgacgagtggacccaggatagggccaaacctgtcacccagatcgtcagcgccgaggcctggggtagagcagactgtggcttcacctccgagtcttaccagcaaggggtcctgtctgccaccatcctctatgagatcttgctagggaaggccaccttgtatgccgtgctggtcagtgccctcgtgctgatggccatggtcaagagaaaggattccagaggctagctccaaaaccatcccaggtcattcttcatcctcacccaggattctcctgtacctgctcccaatctgtgttcctaaaagtgattctcactctgcttctcatctcctacttacatgaatacttctctcttttttctgtttccctgaagattgagctcccaacccccaagtacgaaataggctaaaccaataaaaaattgtgtgttgggcctggttgcatttcaggagtgtctgtggagttctgctcatcactgacctatcttctgatttagggaaagcagcattcccttggacatctgaagtgacagccctctttctctccacccaatgctgctttctcctgttcatcctgatggaagtcctcaaacaccatttccatacccaggcattctgggtccccactggagggttagtctgaagggcaatggctgggctttggaaaaccag

SEQ ID NO: 943 - DNA, 1131 bp, Homo sapiens
  misc_feature (1)...(1131): n = a,t,c or g
atggtgaaggtcgtgccggccacgcgaggaaatctgcctcgctcacaactcacaggcacacatcaacactgccaaccgagggagcccaaaatcaccgcaagcgaaaggctccggcggcggccacgggccacagcccgcctccgcgcacacgcagcccctcccgagcctccactcgccgtcttcgccccgccttcggaccggaaggagttgttggcgcttccggtggcctgcgaccccgtaattgcctcggtgatgtcgtgggttcaagcagcctccttgatccagggccctggagacaaaggggacgtgtttgacgaagaagcagacgagtcgctcctggcgcagcgggaatggcagagtaacatgcaaagacgagtcaaagaaggttatagagatggaatagatgctggcaaagcagttactcttcaacagggcttcaatcaaggttataagaaaggtgcagaagtcattttaaactatggacgactccgaggaacattgagtgctttgctctcctggtgtcaccttcataataataattcaactttgatcaataaaataaacaatcttctggatgcagttggccagtgtgaagagtatgtgctcaaacatctgaaatcaatcactccaccgtcccatgttgtagatttattggactccattgaggatatggacctttgtcatgtagttccagctgagaaaaagattgatgaagctaaagatgaaagactctgtgaaaataatgctgagtttaacaaaaactgtagcaagagccatagtgggatagattgttcatatgtagaatgttgtagaacacaggagcatgcacattcaggaaaacccaagccccacatggattttggaacagacagccagttttagttaaacagctgggcctatcagtagatgtattacaacacctcaaacaactataaaattaccttcccttttctaatgaaaataatgttcagaacatttggtttccctaccaatcgaaatttgtactggttttctgcatcaaaccacctcaactgtagggttaccccntttatggaagtttgaaattancacactattgttcttcaaaattacacaccctattaaatgtaatataagcctttaaaaaaaaaa

SEQ ID NO: 944 - DNA, 1211 bp, Homo sapiens
gagagcgcacggtggagccgccagttgagaaggactctgatccggctcagctttccaatcagctgcggaaggagccacgctttcgggggttgcaagatggcggccaccagtggaactgatgagccggtttccggggagttggtgtctgtggcacatgcgctttctctcccagcagagtcgtatggcaacgatcctgacattgagatggcttgggccatgagagcaatgcagcatgctgaagtctattacaagctgatttcatcagttgacccacagttcctgaaactcaccaaagtagatgaccaaatttactctgagttccggaaaaattttgagacccttaggatagatgtgttggacccagaagaactcaagtcagaatcagccaaagagaagtggaggccattctgcttgaagtttaatgggattgttgaagacttcaactatggtactttgctgcgactagattgttctcagggctacactgaggaaaacaccatctttgcccccaggatacaattctttgccattgaaattgctcggaaccgggaaggctataacaaagctgtttatatcagtgttcaggacaaagaaggagagaaaggagtcaacaatggaggagaaaaaagagctgacagtggagaagaagagaacaccaagaatggaggagagaaaggagctgatagtggagaagaaaaagaggaaggaatcaacagagaagacaaaactgacaaaggaggagaaaaagggaaagaagctgacaaagaaatcaacaaaagtggtgaaaaagctatgtaaggtatacagggaacagcactctagaagctatgactcaattgagactacaagtaccacggtgctacttgcacagacccctttggttaaatgtaaattcttgtacaattgaaggatacgcagaaggacatctttctagtctaacagtcaggagctgctctggtcattcccttgtatgaactggtctaaagactgttagtggggtgttagttgatttttcctggtatactgtttcttggctgacactactggtcaagtaagaaatttgtaaataactttcttttggttcttattatctatatctgtgactgactttaaaaaggtatttgacacttgaaatttttttcaaatatgtaatctcatccccatgtcttatataagataatttactcctgtttcttactgaaaaaaaaaaa

SEQ ID NO: 945 - DNA, 1389 bp, Homo sapiens
aggtgcggcgacgttactgcgtagcgccagctcggccgcacgtaaggccgcggaagcggagcaggtttggttgcacttacaccggtacttaagcgcggaccggcgtgtccttggacttagagagtggggacgtccggcttcggagcgggagtgttcgttgtgccagcgactaaaaagagaattaaatatgggtgatgttgagaaaggcaagaagatttttattatgaagtgttcccagtgccacaccgttgaaaagggaggcaagcacaagactgggccaaatctccatggtctctttgggcggaagacaggtcaggcccctggatactcttacacagccgccaataagaacaaaggcatcatctggggagaggatacactgatggagtatttggagaatcccaagaagtacatccctggaacaaaaatgatctttgtcggcattaagaagaaggaagaaagggcagacttaatagcttatctcaaaaaagctactaatgagtaataattggccactgccttatttattacaaaacagaaatgtctcatgacttttttatgtgtaccatcctttaatagatctcatacaccagaattcagatcatgaatgactgacagaatattttgttgggcagtcctgatttaaaactaagactggcttgtggttaaatgaatatgttcagtttttgaattttaatagtaactccaattcagtaaatggtatcactgtttaccccttttaaagatatgattagacttcgttagtaatgttcaacttttcacaaagatggtgagtgccatcttaaaacttactggagattggttttatatttagatttatataactggttatgtgaatatatttaaatactggggaaattgcttcactgtcttagaaccaagcaagattcacctgtgttttgtgttcatgttcatttgcctcttaaaggcaagggttgaagataaataaggtagcaatgtctatagttttggccttaactatgccaatctaattataattccctgtatttaaaatggtttcttttacttattgaaaggcattttagtgtggtttatgtgtaatattaaagattattcaacacctctcacatcttacagatctataaggtcacatgcttttaaaatagtagcaagttaaacttcactcttgaattctttacaatctaagtcaaactaagttataatttaggattgtctttaaacagccattcagaaacaaaactgtagaactgtgtatttgattgggaatggtgcttttgccaacttaaaaggattaaagtaacggagatatacacaaattttaaaattatgtgtgatcacaagactaaagataattaaaaagaaaaccacagatcatgaaaaaaaaaa

SEQ ID NO: 946 - DNA, 630 bp, Homo sapiens
  misc_feature (1)...(630): n = a,t,c or g
aggagaagagttgctgcagctccttccctgctttggnngnggaggggaggcggggtaagtttggtgggaaactctgtaatttccttttttactttcacagcaatagtgcagaatccagaatggatgtcctctttgtagccatctttgctgtgccacttatcctgggacaagaatatgaggatgaagaaagactgggagaggatgaatattatcaggtggtctattattatacagtcacccccagttatgatgactttagtgcagatttcaccattgattactccatatttgagtcagaggacaggctgaacaggttggataaggacataacagaagcaatagagactaccattagtcttgaaacagcacgtgcagaccatccgaagcctgtaactgtgaaaccagtaacaacggaacctcagagtccaagatctgaagcgatgccgtgtccagttttgcgaagtcctattccccttcctcctgtccgtgtgcctttgttcaggtggggatgtatttcatgtaagaaggtgggaagaaggctgcttatgactctttggatgggagtctggcaagaggaaattggaagataaaataaataataagtgaaataatctggttaaaaaaaaaaaa

SEQ ID NO: 947 - DNA, 549 bp, Homo sapiens
tctctaagtgaaaaatttgcatactagtgcttgttataaaggataatgcaaaaataaacttgggaactttgcattatgaattttatttttatatctacataagcatgagggaaagaactgtattttcagataattaaatccagaagagttacaaattttcattcgtcccaaagattttgtctgggtatttcttccttagctgtcgtcttgcagacaccatcgaagcatagatgatgcagccccaggagattaaaacgatggcaagcagcaacactgaataaatccagtccagcgtgcgacgacttactggcttcatggtaaggaggcggcagcagtccgcgggagctggcgggagctgcgggccttacagtaacctcccaggcggtggctgccaggcgccagcagccatcttttagccgggcacgagcgcccgcccactcgcttcgtgcagcgctgtcgctggcctcttccgcccggagttggggggcggtatcacgtgatcgggggccttgcccgcccgccataatgtatcagtcaagcaacaagtgt

SEQ ID NO: 948 - DNA, 3931 bp, Homo sapiens
ttttttttttttggcaatataacatgtctattttattttaaaaaacaaaacccaaaccacctgaccccttccccaggaggctcttgacgaaactctagggaagggcctggctccagccaagcaggggacagtcagaagatgtcaacatggatgccaggctggtgggctccgcccttctccaagccccccatccaccccctttgctcctcggtgctacaggcactgccgggttgaggggacaggcagggcaggactgtgggcatgcagagcctcctggcagccagggagggctgcccgcccccctgcatctggcgaggcaggcagctgtgtgcgcagtgatggagctaggaggaggaaacatgcgcagacaccccgtgttcccgcttccccacgtggccaggagagtgttcaaacacgaacaaggatggctgggcactcagggccccagcccccaacccaggagaggaagaggggggtcccgccctcctggttcttttgttcgtccttagatggatggtgttctcggtgccactcggcagaaattctgcagactgaggcggaggcccgggaggagggcgtgcatccgcagagcccacagggctcggaccctctgcccccagcgacctccattcgctacctgtcgggcaggatgcccaggggtgccgggcacctgatctggatccctggagtggagggaccctgtcttaagccacactcggtggttctgccgcccagggcaggggtggactgtaggctcccgacagcatgacaacagccgtgacagtgtgcctgccggctggcgtgccttcctttcctgcccaccagggacgccaaccagctctgcctcagcaccaggggtctcgggaggctcggccgcggcagagactgtcgctccgctgccaggcgctgtggatgaggctcaaggcatcctcgaatttcttcttgttggaggcttcctggatcgccgtgtgggggaggtccacctgatagatggttttccacccagagttcagtgcagacagcaatcggtccagttcagaagtgcagctcaggtagatgacccagggcgggaggagctgctggctgtcctgggagaactccaagacgcagtactccttgcccggctcggtggagacggcgctgatgtcgcccagcttggctgtgcccaaagagcggaagaagctggtctggcaatcctcatggcacgtaaagaggcggtcatccgtgaggaccaggcagcagggtatgcaggggctgggagctacgccctgggggatgacccctttggacacagcctggcagagatgctgcatccactcggccatctcggcctcgctctcggcacttagctccaggcagggcggatcggagagaatgacctggaaggcgtggggccgatccgtggtgttggctctccggcagccaccgcactgctccccccccatgttcaccgagagcagagggatgacgtcggtgcggtccgggtactggtagaggatcccgttgctgagcaccacgaagcacgtcttccagtgttccttgcccaggtaggaggtgcccgccttgtagtgcagcatgccttctttggtgatggtgccctcggggggtgagcagtggcagggcgtggggcccagggactcgtctgtggggtcctcccagtgcacaaggccgtagaagcgcacggtgacagcagatgcctcacacttcgattcttgggccacaaatttggccagtgccagcttctccatggtggcatccgtcaggatgctggggtagggaggttctcgacagcctttgatcatggctgacttcaaagaagccaaaaagaactcagccagcgccacatcagccgtgtccagcagaaactgcttcctgcggttggtgcacaccagcttcaccgtctgctggtcaaggccaaccgacacatagtcaagttcattgtaagaaacggcctcttccaccaggtatggcttctctgtggcccctttccggagcaggtagacatagcagtctgtgagcagcacgtacagcagctgcaggttgccctccatgtgcccggtgctcatccggatcattttgaacagctgctcttcgttttctcggaacacgtggatcatgagcaggagcaggtgattgttgtctactctgaactccgaggaatggaccatctccgaagggctcccctgtccctcatccaccccagaatcctcagcgctactcagacacgggctgggctggtctcgcttgagctggcagagaacctcctgggtcccaggctctggctcagacacaggcccctccctgaccagggacagctgggcctccagctcctgagcctccctcgtggtatcctctaggggccgaggcgtctgtccctctcctcctcctccctcttcttcttggccagcagcctcagggctactaggaacatgcagcggttggccaagccctgcagggtcatggtggccgccacctgatgtaacagtgcttggactctcgacggtaaagcggtagaagtccattggggctgaaagcccctcactaaagtcgcaaagcggcggcctctccggggcatccccgggagagccggtccgaaaggactggtctgggggctcagcacgggagcaccaggtgctggggtccagctgcccgttgagctggtcgataaccttgctcaggggctgccccaagcgctccatggaggtgtccttcatctcagggatcagcaggcccggctcggagcgctcgctgctctccgtggtgctgctcggcccctctccctcctcctggggggaggcaagcatagtgtctggcgagtcccgcccaaggcttgggctgccgttgcggctgtcaccgtccccctgcttggcacatttcttctggctgcaggcggggtggagtggacttgcctcctcatctgatctgctctttttcttcttgccaattttcttcttcttggtgaccctgatgacctcgagctccgtgcaggcatccggcgggtccagggcctgggcctcctccttctcctgagaggtggtgtgcacgggggtggtgtcagaggaggacacagtctctgccggctcctcgttgaaggggttctggcgctgggtggggctcctggtggaggccttgctgctggtcaggtcggaggctgtggagcggggaccactgaccgtgtctgtgaggtctccatcttcccagtctgtgctgggtacagacggcactgctggaaacacatctccaaaatcataatcctcactagatggggcaatcgcactgtcatcccactccaggttggtggaggtgacggagttgaaagagttgagggacagactgtctgagccgtggaccgagctgggaaggcggtcttcaaagtccagcaggtactgaggtttgtagtagtcgggcatgtagggggccaggtctaggtaaggggcatccagatccagctcgaaacgaatgaactctagcccggacaccaaggtcaggaagagcgtcaggtgatcgtggctgcagaccagggcattcttgacgtagtacttatgcagcaggcccaggttctcctggaacaaccgcaggtagctctccaaggagttctcgttgagggccaggtacagccaggcacggctgcgccccaggttggtggccacgtgctgcagcacctcgatctgcttgatggcctctctccgagtaaaatgcaccacgagcacccagtagccagaggagaggtcttgcagtccgtacagcagggcgtggtccaggtgctcacacagacgctgtaggaccttgtcatggttccggatggcagggatctcatcctcacatgcagcaaaatagctctgcaacttcttcaccgacagcgagatgttctccaggatccggtccttcacctcccccggctccatggcgctgccaccgtcgccgcacgaaa

SEQ ID NO: 949 - DNA, 3179 bp, Homo sapiens
ccatctgagcgagaagagcagacaccgtgctcctggaatcacccagcatgttgcaaggtctcctgccagtcagtctcctcctctctgttgcagtaagtgctataaaagaactccctggggtgaagaagtatgaagtggtttatcctataagacttcatccactgcataaaagagaggccaaagagccagagcaacaggaacaatttgaaactgaattaaagtataaaatgacaattaatggaaaaattgcagtgctttatttgaaaaaaaacaagaacctccttgcaccaggctacacggaaacatattataattccactggaaaggagatcaccacaagcccacaaattatggatgattgttattatcaaggacatattcttaatgaaaaggtttctgacgctagcatcagcacatgtaggggtctaaggggctacttcagtcagggggatcaaagatactttattgaacctttaagccccatacatcgggatggacaggagcatgcactcttcaagtataaccctgatgaaaagaattatgacagcacctgtgggatggatggtgtgttgtgggcccacgatttgcagcagaacattgccctacctgccaccaaactagtaaaattgaaagacaggaaggttcaggaacatgagaaatacatagaatattatttggtcctggataatggtgagtttaaaaggtacaatgagaatcaagatgagatcagaaagagggtatttgagatggctaattatgtcaacatgctttataaaaagctcaatactcatgtggccttagttggtatggaaatctggactgacaaggataagataaagataaccccaaatgcaagcttcaccttggagaatttttctaaatggagggggagtgttctctcaagaagaaagcgtcatgatattgctcagttaatcacagcaacagaacttgctggaacgactgtgggtcttgcatttatgtctacaatgtgttctccttattctgttggcgttgttcaggaccacagcgataatcttcttagagttgcagggacaatggcacatgaaatgggccacaactttggaatgtttcatgacgactattcttgcaagtgtccttctacaatatgtgtgatggacaaagcactgagcttctatatacccacagacttcagttcctgcagccgtctcagctatgacaagttttttgaagataaattatcaaattgcctctttaatgctccattgcctacagatatcatatccactccaatttgtgggaaccagttggtggaaatgggagaggactgtgattgtgggacatctgaggaatgtaccaatatttgctgtgatgctaagacatgtaaaatcaaagcaacttttcaatgtgcattaggagaatgttgtgaaaaatgccaatttaaaaaggctgggatggtgtgcagaccagcaaaagatgagtgcgacctgcctgaaatgtgtaatggtaaatctggtaattgtcctgatgatagattccaagtcaatggcttcccttgccatcacgggaagggccactgcttgatggggacatgccccacactgcaggagcagtgcacagagctgtggggaccaggaactgaggttgcagataagtcatgttacaacaggaatgaaggtgggtcaaagtacgggtactgtcgcagagtggatgacacactcattccctgcaaagcaaatgataccatgtgtgggaagttgttctgtcaaggtgggtcggataatttgccctggaaaggacggatagtgactttcctgacatgtaaaacatttgatcctgaagacacaagtcaagaaataggcatggtggccaatggaactaagtgtggcgataacaaggtttgcattaatgcagaatgtgtggatattgagaaagcctacaaatcaaccaattgctcatctaagtgcaaaggacatgctgtgtgtgaccatgagctccagtgtcaatgtgaggaaggatggatccctcccgactgcgatgactcctcagtggtcttccacttctccattgtggttggggtgctgttcccaatggcggtcatttttgtggtggttgctatggtaatccggcaccagagctccagagaaaagcagaagaaagatcagaggccactatctaccactggcaccaggccacacaaacagaagaggaaaccccagatggtaaaggctgttcaaccccaagagatgagtcagatgaagccccatgtgtatgatctgccagtagaaggcaatgagcccccagcctcttttcataaagacacaaacgcacttccccctactgttttcaaggataatccaatgtctacacctaaggactcaaatccaaaagcatgaagcaacagctaagcaagaactaatggctaaattatcaacttggaaaactggaaaatctggatggcagagaaatatactatctcaccagtatttgctctcgactcaagaaggttaacattttctgattcatgttagactttgaagagactaaagaaaattttcaagaggaacatatgcctgagaacctttgcatgaatttaaaatttcaattatccattcttataagaaggaagatgattgtaaagaaatatctccgaagttaaaatctgtaataggaattgattcattctctaatgaaaacaaaacataaaaacatcacactaatcttggaggaataagaaaaattgtacatccattaaatgtacaattgattgcaacatcttgattgttttaaccattaacttgtcaaattacaatcacagttaagaaaatgatgtaaaattctgttttgtggatctctttcctagattagcttctgaaatcattattagctatatcatttgaggttttctacaatttggtataactaagaatttaaaaatgttttatcatatatatttgtataattaattactggcatggttaaagtggtatttcactttttaaatggagaaaatttcagttaaattaataggataaaccaggttgcgaactgatgacctgtaggccatgttagcactgcaaatatatttggtctgaatgatattgatattggacacatagtacttttacatgttttgaatgtattgctaatatttaaaaattgagagatcttgcataaacaatagattcccaaaaaaaaaa

SEQ ID NO: 950 - DNA, 4470 bp, Homo sapiens
atggggctgctgctcatgatcctggcgtcggccgtgctgggttccttcctcacgctcctcgcccagttcttcctgctgtaccgcagacagcccgagccgccggcggacgaggccgcccgcgcgggcgagggcttccgctacatcaagccagtgccgggcctgctcctaagggagtacctttatggcggcggccgggatgaggagccctccggagcggcccctgagggcggcgcgacccccaccgcggcccccgagacccccgccccgccgacgcgggagacttgctacttcctcaacgccaccatcctattcctgttccgggagttgcgggacaccgcgctgacccgccgctgggtcaccaagaagatcaaggtggagttcgaggagctgctgcagaccaagacggccgggcgcctgctggaggggctgagcctgcgggacgtgttcctgggcgagacggtgcccttcatcaagaccatccggctcgtgcggccagtcgtgccctcggccaccggggagcccgatggccctgaaggggaggcgctgcccgccgcctgccccgaggagctggccttcgaggcggaggtggagtacaacgggggcttccacctggccatcgacgtggacctggtcttcggcaagtccgcctacttgtttgtcaagctgtcccgcgtggtgggaaggctgcgcttggtctttacgcgcgtgcccttcacccactggttcttctccttcgtggaagacccgctgatcgacttcgaggtgcgctcccagtttgaagggcggcccatgccccagctcacctccatcatcgtcaaccagctcaagaagatcatcaagcgcaagcacaccctaccgaattacaagatcaggtttaagccgttttttccataccagaccttgcaaggatttgaagaagatgaagagcatatccatatacaacaatgggcacttactgaaggccgtcttaaagttacgttgttagaatgtagcaggttactcatttttggatcctatgacagagaggcaaatgttcattgcacacttgagttaagcagtagtgtttgggaagaaaaacagaggagttctattaagacgggtacaatctccctcacagctgttttcatgggctggcatcgagtgtctgaggcttttccaggcttatggtacaagctgttggtggatcttccattctggggtctggaggatggtggccctcttctcacagttccacttaggcagtgccctggttgaattaataaaaggaaatttacaaagtgttggacttacacttcgtcttgtccagtcaactgatgggtatgctgggcacgtcatcattgaaactgtggctccaaactcgcctgctgcaattgcagatcttcagcggggagatcgacttatcgccattggaggtgtgaaaatcacatcaacactgcaagtgttgaagcttatcaagcaggctggtgaccgagtcctggtgtactatgaaaggcctgttggccagagtaatcaaggtgcagtgctgcaagataactttggccagttggaagaaaactttttgtcaagctcatgccaatcgggttatgaagaggaagctgccgggttgacagtagatactgaaagtagagagctggattctgaatttgaagacttggcaagtgatgtcagagcacaaaatgagttcaaagatgaggcacaatcattaagtcatagtcccaaacgtgttccaacaacactttctattaaaccccttggagctatatcaccagttttaaaccggtaaattaggctggtaggaagttcacccactaccaccggaaaatttcagtccaaagatgggaaataaacctccacccctaaaaacttctgagataacagacccagcacaagtgtcaaaaccaacccaaggatctgctttcaaaccacctgtgccaccacgaccacaagcgaaagttcctttgccttccgccgatgctccaaatcaggcagaaccagatgttctcgttgaaaagccagagaaggtggtgccacctcctcttgtagataaatctgctgaaaagcaagcaaaaaatgtggatgccatagacgatgcagctgcacctaagcaatttttagcaaagcaagaagtggccaaagatgtcacttcagaaacttcctgccctactaaggacagttcggacgaccgtcaaacatgggaatcatcagaaattctttatcgtaataagctaggaaaatggacaagaaccagagcatcctgtttgtttgacatagaagcctgtcacaggtacttaaacattgcattgtggtgcagggatcctttcaagttgggaggtctcatctgtttggggcatgttagtttaaaacttgaagatgtggctttaggatgcctagctacatcaaacacggaatacctttccaaattgagactggaagccccctcacctaaggctatagtcactagaaccgcactacgcaatctgagtatgcaaaagggattcaatgacaaattttgctatggtgacattactattcacttcaaatatttgaaagaaggagaatcagaccaccatgtagttactaacgtagaaaaagaaaaagaaccccatttggttgaagaagtttctgttctccctaaagaggagcaatttgttggacagatgggtttaacagaaaacaaacacagttttcaggatactcagttccagaacccaacatgggtgtgactactgtaagaaaaaagtttggactaaagcagcttccccagtgttatgtttttgtggcttatgtttgccataaaaaatgtcaagaaaagtgtctagctgagacttctgtttgtggagcaactgataggcgaatagacaggacactgaaaaaccttaggctggaaggacaggaaaccctcttaggcctgcctcctcgtgttgatgctgaagctagcaagtcagtcaataaaacaacaggtttgacaaggcatattatcaatactagttctcgtttattaaatttgcgtcaagtctctaaaactcgcctttctgaaccaggaaccgatctcgtagaaccttcaccaaaacacacacccaacacgtcagacaacgaaggcagtgacacggaggtctgtggtccaaacagtccttctaaacggggaaacagcacaggaataaagttagtgagaaaagagggtggtctggatgacagtgttttcattgcagttaaagaaattggtcgtgatctgtacaggggcttgcctacagaggaaaggatccagaaactagagttcatgttggataagctacagaatgaaattgatcaggagttggaacacaataattcccttgttagagaagaaaaagagacaactgatacaaggaaaaaatcacttctttctgctgccttagctaaatcaggtgaaaggctacaagctctaacacttcttatgattcactacagagcaggcattgaagatatagaaactttagaaagtctgtctttagaccagcactccaaaaaaataagcaagtacacagatgatacagaagaagaccttgataatgaaataagccaactaatagactctcagccattcagcagcatatcagatgacttatttggcccatccgagtctgtgtagcagacaggtctatttaaactttcaaatgaacagggtaaagttgcatctaaagtaccacagatacaaccatgtttaaatcctcgtatgcactctggcctgcttctccagttacttgcttgtgtaagaacaaaaatgagaaaggttgttttccagtaaaaacatgaccagcttactaattggttgttttggattgcatttatagctatgcttttttgggtttatactgggaatttatttttactaaattatttaacttttctaattatgtaattatgtaagctagcttttcatgtttatgtatgtatggtgtccccttgtgttattttttcttccttcttggtttttgaattagtggttaaatagaaatactgtcctggattccttaaaatattttcatttcccatcatggttataacaaatttgcctgcatgcccaaactgacaacagcaatcactgagggaacaggttttgaatctttcttttgtgttatgaagtttatcgtctctacttgcttgagatttttgttattttgggggtttgggggtgctttttgttttgtttttgccaaatgtaacatgaaagcagatgctgcacctttagtctgttatgctgatttagtaaaaaaaaattttttacatatattgcttgctttcgatgcttctgtgaaacttttttctaaagcttttgtgcagctgtatggtaaaaatatggtgattaatttgaagagcttacattgaaagacaatgtaataggaaataaatgcagattgcgagtggtcaagaatcttgtagagaggataacaagacttaattactgaacaacagcaacatagcattttgaag

SEQ ID NO: 951 - DNA, 1611 bp, Homo sapiens
atgcatgatttacaaagttttggagaccccctggtctgaggcccaccctccagcacctctgtctttcccaagttgagaacttacaagttctcggacagaggcaccactctggtttcatgtcgtgtcctaattctggcatgccatcctctcacatcgcatccaacccagaggacgcaaaatgaatgctcagcatgtttactaaaacagtgtctctacaataaacacagcaggccaacatgtatagcttttatttacctacccaagttccttttacatgtgagttatctgcattccaccttgccccctctcccaggatgaatcctcttggcacagaggaaggggtgccccttcaactagggccagagcctagatgacctggtggatcccccaccatgaaaaaagcaggaagggaatggagaagaaaagtgttgatcacacctagccctcaccacaggagggggaatgaagaggtctgggggactgcccccatgctatgccccagtccttaaatacaaagcaaggagaatgaaaaggaccctccctctgaaatacagcaccgacctcagcatggaggcaaaaggacagtgggcaagaccacgtccctccgaagggagagggctgaaggagagcacataccgttagtggctgcggcacccctccctaccagggtctgatgcagcctcagcaccgggagtggggagaggggaggagaagggatgacagcactgtgccatccactcctccctgaacccctggccccagcacaggcattcctctgcccactagcccaagtcaggggatgtggaagaaactgtgttggaatccaaggcccttatctatttcttcttccgttcttgggagcagcgtgggcaaaaccatttcccccgaggcttggttgtcagccccacacaggcaaaatggaaccactcaatggaacaatcagggttgtcacagccaatcatctctccataggagacctggtgacaaaggcaataggtgggttcgttgggatccacaggcatatccaacacatcagaggggtggacactgccaaaggtcactgagggcatcccatactcaggacttgtgcgcacgagctttaacttcttctgggcagtcttgggggcttcttcatccgagtttttccctttggaacgagcacgagcagctttcttctccttttgagtccggcctttctttttgcctttgctggaagagctgtcatagtcacttgactcaatctgtttctccttgagatcagcctcaaaacgggccaggtctgtgtccagccgccgaatgtgtttgtccaccatctcataggtctgcatggcaagctgcaccttgtcgtcaccaaattccttgcacttgccataggcttcctggatctgtttgagaagggccaatttttcctcggagctcaggctgcgggcactactcatatactcagtggccaacttgtcaatttcagccttcaggtcctctgttctttggtctaggtccctcatgagctgaaagtttctctgtaattcaaagggaaggttttcaatactgtccagataatgttccaaatacatccccgcagccatctcgaagcaaaacaaagcaacttcc

SEQ ID NO: 952 - DNA, 695 bp, Homo sapiens
ttttttttttttgaattacaaagctacttttaatactttggggtgagccccacaggaataaaaaacactgggaaggggtaaccccctcacccccgggagtggcccagggggagagaggctacctgaggggaaggaagcacaaaagggacccgctgcagactcagggcaaagggaatgccatcggtgctgggacctgtgagcactacaggaggaaacgcgagcgtggtgggactggctccaggcacacaggcgaagggcaagagggttggacacgaagccacaaagctacttgggttcctccttcttctcgtttgcctttttctgcttctgctgcatgatctccgagtccctgggggtagagtccctctgcttgcgggcggcagcagaaagcccgtcatctcggcgctttcccttaaccgagtcgctctgctttttcatattcttctggcgggcgagctcacgctggttaccgcccgggagggtggtcccgtgaagtagccgtgggcaaagggctcgatttccgggcaccgagtgtgagggtggccacagagcgcgcccagagaaacgccttgctagggaagctacggaaggtcaaagccggcgcctcgccggtggtgtttagggtgaacggaaagaaaagggcaaggagaagggctcgtgccgagttcctgcaggcgggtcaattgtgggggcgc

SEQ ID NO: 953 - DNA, 885 bp, Homo sapiens
gtttgtgctggaattcgcgacccttgttcaacgccgttggcgaagccagctgctggaggtgccgagaatctgagtttcggtaagcagccaggtctggaaactaatattttaaaaatgactacaccaaacaagacacctcctggtgctgaccccaagcagttggaaaggactggaacagtacgggaaattgggtcacaagctgtttggtcactctcatcttgcaaaccaggatttggagtggatcagttacgagatgacaatctagaaacttattggcaatcagatggttcccagcctcatttagtgaacatccaattcagaagaaaaacaacagtgaagacattatgtatttatgcagactacaaatctgatgaaagctatactccaagcaagatctcagtcagagtaggaaataattttcacaaccttcaagaaattcggcaacttgagttggtggaaccaagtggctggattcatgttcccttaactgacaatcataagaagccaactcgtacattcatgatacagattgctgttctagccaatcaccagaatggaagagacacccatatgagacaaattaaaatatacacaccagtagaagagagctccattggtaaatttcctagatgtacaactatagatttcatgatgtatcgttcaataaggtgactttaaaatgagacgaaaatcattaaacgtatctttgttttatcctgtatttaaataatatatcatgtacctttattgaacaaggcatccgttatatctaattttgtatatgtttaaaaatattttattgtaactttgacaaataaatttggggtcatattatctttattttctttaacatgtaataaagctcacatattttacattactaaa

SEQ ID NO: 954 - DNA, 1430 bp, Homo sapiens
  misc_feature (1)...(1430): n = a,t,c or g
cccacgcgtccgcggacgcgtgggcgcgcgggagctgggaggctgcgagatccctaccgcagtagccgcctctgccgccgcggagcttcccgaacctcttcagccgcccggagccgctcccggagcccggccgtagaggctgcaatcgcagccgggagcccgcagcccgcgccccgagcccgccgccgccctttgagggcgccccaggccgcgccatggtgaaggtgacgttcaactccgctctggcccagaaggaggccaagaaggacgagcccaagagcggcgaggaggcgctcatcatcccccccgacgccgtcgcggtggactgcaaggacccagatgatgtggtaccagttggccaaagaagagcctggtgttggtgcatgtgctttggactagcatttatgcttgcaggtgttattctaggaggagcatacttgtacaaatattttgcacttcaaccagatgacgtgtactactgtggaataaagtacatcaaagatgatgtcatcttaaatgagccctctgcagatgccccagctgctctctaccagacaattgaagaaaatattaaaatctttgaagaagaagaagttgaatttatcagtgtgcctgtcccagagtttgcagatagtgatcctgccaacattgttcatgactttaacaagaaacttacagcctatttagatcttaacctggataagtgctatgtgatccctctgaacacttccattgttatgccacccagaaacctactggagttacttattaacatcaaggctggaacctatttgcctcagtcctatctgattcatgagcacatggttattactgatcgcattgaaaacattgatcacctgggtttctttatttatcgactgtgtcatgacaaggaaacttacaaactgcaacgcagagaaactattaaaggtattcagaaacgtgaagccagcaattgtttcgcaattcggcattttgaaaacaaatttgccgtggaaactttaatttgttcttgaacagtcaagaaaaacattattgaggaaaattaatatcacagcataaccccaccctttacattttgtgcagtgattattttttaaagtcttctttcatgtaagtagcaaacagggctttactatcttttcatctcattaattctattaaaaccattaccttaaaatttttttctttcgaagtgtggtgtcttttatatttgaattagtaactgtatgaagtcatagataatagtacatgtcaccttaggtagtaggaagaattacaatttctttaaatcatttatctggatttttatgttttattagcattttcaagaagacggattatctagagaataatcatatatatgcatacgtaaaaatggaccacagtgacttatttggangttgtaagttgcctcctacctaagttgg

SEQ ID NO: 955 - DNA, 2340 bp, Homo sapiens
ggatgtcccccacagcccaacctgaacaccttgagttgaatcacgctcagcttggcacgagggggaagaccaaattgatagactggactttattcgaaaccagatgaaccttttaacactggatgttaagaaaaaaatcaaggaggttaccgaggaggtggcaaacaaagtttcatgtgcaatgacagatgaaatttgtcgactgtctgttttggttgatgaattttgttcagagtttcatcctaatccagatgtattaaaaatatataaaagtgaattaaataagcacatagaggatggtatgggaagaaatttggctgatcgatgcaccgatgaagtaaacgccttagtgcttcagacccagcaagaaattattgaaaatttgaagccattacttccagctggtatacaggataaactacatacactgatcccttgcaagaaatttgatctcagttataatctaaattaccacaagttatgttcagattttcaagaggatattgtatttcgtttttccctgggctggtcttcccttgtacatcgatttttgggccctagaaatgctcaaagggtgctcctaggattatcagagcctatctttcagctccctagatctttagcttctactcccactgctcctaccactccagcaacgccagataatgcatcacaggaagaactcatgattacattagtaacaggattggcgtccgttacatctagaacttctatgggcatcattattgttggaggagtgatttggaaaactataggctggaaactcctatctgtttcattaactatgtatggagctttgtatctttatgaaagactgagctggaccacccatgccaaggagcgagcctttaaacagcagtttgtaaactatgcaactgaaaaactgaggatgattgttagctccacgagtgcaaactgcagtcaccaagtaaaacaacaaatagctaccacttttgctcgcctgtgccaacaagttgatattactcaaaaacagctggaagaagaaattgctagattacccaaagaaatagatcagttggagaaaatacaaaacaattcaaagctcttaagaaataaagctgttcaacttgaaaatgagctggagaattttactaagcagtttctaccttcaagcaatgaagaatcctaacaatagagattgctttggtgaccatgataggaggaaacgaaacttgtaagattggaacagttgttatttttatgaaattactttaaatatgaattgtactaactgtacctaaatagcaaagccctgtgtagattctggtaatgatctgtctcagggtatgtgtatttttgaagagtgttatgtccttagttttaattttgagtaaagaaaaggctaaaatcatgaattagttacaagcaacagtaccaacttatgtgacccctgaggggtggggctgtgagctcttaatttgtttttgattctgaaaaactctgcttcctggcatccaggagttagagattgagcctttcatcttctttctcaaaactagtttttgatgctttctttcatgggaatagtcacttttttatttagtaaatcgcattgctggaaccaccaaggagtgtggaatgtccttgagtgtattatttatgcaagtcacagtcacgttgccatcatggcagctatgtgaaacactaataaatgtgtttttactttttattcccattaaaactgatgtaaaacaggataaaggcttgttatagtcacttataagtatctgggtctaagtaatttccttagatgtttctaaagaaacattttcagctttgctcccattatgattccaataaggaacgctttcctagtgcaattttaggagtaaagtttgaagagataaaaatagccaaagataggagacgtctgaattttgaatgataaacagtgatgttttaaaaaagctgttgttcttcaggaggcatttgcctaggatattgctggattataccccattggaggcttttaattttatttgtatgaattttccaggatttcattaaaaattattattgtattttttaccttaatgaaagattttgggttcaaatatctttctatattaaaagctgattgagtctgtacatatgtaaattatgcctagtggaggttctgttgactttcttccccactgtggaagaggccagttttgcctccatttgcacattcatttcagttatttctgatccataaatataacatttacaaaattcttccttgagctggtggaaatgcctcaccagtttcctctttaatgaatcaaataaaatctttaactgatgttaaaaaaaaaa

SEQ ID NO: 956 - DNA, 1999 bp, Homo sapiens
ttttttttttttggtttttattgattctttttaagattgaaacagactattacaacaatatttgagatttcacagagaactgcatgcttttgttattaaaagacttttgttgaaaaatttgacctttacctcttatgaacgaaagaaatatagaggtttcaagcatttttgccagcacagagtcattcacaacaaccttctagatgcttattttccaccttttcctacagaaggtaatattcagttaccagaaggccatctccaccactgaatgattcaaagcttcagagctcaaaagtgatcagaactcacaaattagcataattagtccaaagcttgatttaaatgtttgaagaacagcaaacatcaaataatataataccaaatagaatattatagtctctatgaggtaataactcatcagctacaaccacctaaaactgaaattttctgtacttagtttctattagtacaacaccttcattcttaatgcttcttagggcatcacaggttttagaaattaatgtatttttagcattccacagtaatgatcactttcaaaaactgcaatatacatctgcatgttacactgacatacaacacataagtattttgtcacacatcaacttttagcctcaaataatagaatacaaaaagctacactggacataacaccacagaacttttgaatatccccttttcccaattgttaacaggtagtactttttttctaaagagaaagtgatgaaaaatccaaaatttctgcatccagtgtttgactccaactttctactttatcgtctcctggtaccaccatatcctgatgcagttctggttttcgtgtctgagtttgaacataccgaatagctgcccgagcctccatgaaggggtgagtaagccctattccacgtgccagggtaggagggaggataggacgggtagtaccacgagtctgagaagggtgttgccgctctattgctgccaaacaaatatcctagtattccaccagttcccaagcctgtccagaaccctggtcctgaattttcatatccttgttgtcctgtaaaagcactgccaaaaccagaagttgcaccatggccagtattctgtggtcctgtgaactcagacttaaagcctgggggaggaggtcctgctgagttggtgaatctctggtaacggtgggaaaatggaggatactcagagtacggtggaggagaatactgcccgtcactcaggaacagcttatagactacaaaggcgatcccaaggagtaccacgatggtaatcaatccactcatgttacaggaatccgccgaggaccacttataataataatcagagaaagaggcaaagccgtgctgctttccagactccttcagtttctgcaggccaagttctgtataatctaaattatactccaagccacaagaacctcttagtacatactggtcttcagaggactcatagccttcacagctcaccacagtttttccaaatttgtatgcaatatctaagtccgtcttacattcccactgtacatcatacccatcccagcctttgttctgacactgtatgacttttggggtataagaatcacaaccagctgtgcctccaacacatttcaactgtgggatgggatccagcctgcgggaggtggtatagcggtcatagtggagggtaagagcttttacatcccgcagcaacattctgtcagggtcgttccagcccagggcagggcccgcggtcagcagaaacaaatgcaagccgaggagcaagcagtacccggccgctcccggcccgcaggctgcggccatggcgctcgatgaagatggcgccgggctgccagacgcctacgggccgaacctgggtgcggtagcgcgcgcgacgctgcgcagctacaccgctacccctggcggcggcgaaggaacggcccgactgcagagctgcagccgcaacggatccgtgcgccaaccctacgtcactgccgctgcggcccgtg

SEQ ID NO: 957 - DNA, 1748 bp, Homo sapiens
ttttttttttttcatacaaacattatgtatctttatttaaatttgcaaatgaaaacaacacatatttcatgttagttttaataagagattccctatcctctgccccagtaaaacctaaccaagccagcctgacaggttatatcaatacagggagctggagtgggagccaagggtggtgttagataggggtggggtacagatcaagggggcctgggagactcagtgactggaagtctctgcccctcactcttggtgagtagctaatttcagcagctggcttcataaggaggagtcaggggtgggtggaggctcctcccaattccagatccacttcctcttctccttctgtctcctggacacttaggtcttactgagatggttttcccacagtaaagagaggtgggggcagagtactaagggtcaggagtgtgactctttcccatgactcaggcctctgtgctagaggtgacccttataggaaggagagaccccaaatcctttagccaatgagtggtggggtcatcataccagagagccagcttgactctgggcaggcaccatcacaggcacagcacccatgcggctcaagccagaggaagaaacccccccagggatgggggatattggttgagggtgggccccatctgtcgtgggcagtcttggtgagggcagggcctggctggagagactgggcgtgggggtcaatgcaccaggcctgggagggccatggggtggccggagggctcgtgcggaggtgacagaggaaagggtcccattcttggagattgtgtctgagctcttgggccagggcagggtccggggagcaatggcatcctccttgatatcattggctggctcctccagggccttgccccggcggtggtacaagaggaccagcccagccagcaaccccagtccaaccagggtacccacaacagctccagcaaccactgcagctccaggccctgtgctcacttccagcgtcacattacattgggcagtgcccacctcattgtgggccttgcagacatagactccagccatggaagacgaaaggttggtgaggcttaaagacccacggatgacatctaatgctggtgcaaagaaagtctggaaggatggaagctgccgatcccactggtattggacagcgggcttactccttggagactggcagctcagggtcacgtttgcccccacatggggcacaccctggagacggcaggatggaggagctggaggaaccagtacattgagttctaaggttttgatgctgtggcccctagatttgccttgtttgtcttgcacattcacggagcagctgtaggggccagagtctttctcctggagaccctccagccgcagggacaggttccgggagggcatggagtagaccaaggatactccaggtttgcttgttgtgaccccattgatgtaggacaacacctggtgtggggcataacacatccccgtcattactacatgtgtctactgtgcctacaggctcagccactctccctcccccagctcgcattctccaaatgcccctcacatgcacccattcttctaacctgaaccagctccccattcaccttttgtccctagccccctctcactgcccctgggtcctcttcaccagaacagttcttcgttcctgcgcattgtctcatctcccaattgcggtgtttagaaaggtgacataatagtgggaggagggacatgtaaataggaggtatgtatctcgtgcc

SEQ ID NO: 958 - DNA, 2631 bp, Homo sapiens
ttttttttttttgaaaggaagcgagtaggttttaattcaagatacaggcccctcgcgttgatctcgtagaaggaaactcagtggactgacaagctcaagtcatgtatgagggcacgtcctgggacccccccccccctcctgccataggaaggacgacagcttcaggcagagggaaggaggtttgagatcagggttgggccccatacagattgtgtgaggtggtctcaagtacaaatacttatctgaggctcctgaacaggccagaaattggtgagtctcaagtaggtgtctggggaaagagagggaaggggcctgccctcgctccaggggagctggtcgccgtttggcaggcctaacagacctctaaggcacagactggtagcaggagagagctatgtcctgtactccagatgctgggtaaggagcagctggatgtgctcagatggggctcatctgagaaggtggaggtaggagagagggcagaagagagtaagccacttccaaacgtccctccaaaaaatctgaaaggagttactatgctaatgcgctgggcatgaatccaattcagaaccaatctggtgggcccctcatggctcagaaatactctgggtagggctggctgttactgcagtcacggacgctgagttatgtacagagagtacgtcaggaaagtggccttcagagaaagagccccatggcctaaccccaaagtcctagcccgtccaccagcacctctgagttcactggccacggcaccgggctgcttgatctctgggaatgcagcggtggcagcaaagtgcccttggctcacccggctgcaaggtcagcccttcaagctgcttgcagaaacgctggtagtttggggcaaggccttcggctgcaagcttgctgcccagtcctgcctgagacggctgccagagcctgtgcgcgctgcctgaagccttaaagaaaagagatggcggtgtcaaggcgacggtgccacgtgcctggccggggaggcccaggaggggcccggacgaaggcaggctattgaatggcctctggccccaggagcagagtggtctcctctgtccgcacactgagccagccctgtgtgccagggcccaaccgcttctccggccttcgctgggtgaggccttccccagcagggcacgaggccagaggctgggtacactgggtccctgggtgctagttcagctggtcataccccggtctctttctgtacaaacagaagtgctggatgaagaagacgacgtcgaagacgatggagaagaccccgagtccaaacttggttgggtctccgaagatcagcgtccactggtcgttgttgtaggactggaggaacatctgcaggaggctgaagctgcccccggtgaagtccaggagcacgttgccaatgctccagccctcagtgcttttgtagtaaaagttcatgtaggcctgtggaaaatacttgaccagcgtgactgcgagcttgatgtaggagaagcagaagagaaactgcagccacgtgatcactcccactgcagccacgatcatggtgacaaatgcgaagagccacgcgagcaccaggaagccgatggcaggccaggacacgcgctggccaccgcgctcatacaggcagcactgcacgatgatgatcagcgtgaggacaaccgcgtgcaggctgaagaagacgtcgttgctgttcacggggttcactccgttggggtatttgaggagaaactgctccttgatgtagggcacccagaggaggccgatgttgaatacactgtaggccacgaagcccgtcaggttcagagccacgaagtcgaagctcagaccaatgacacttttccgcctccaattcatgatcacctgagggtagaaggagatggaccaggccacaaagtagatccagccaatcacctggtttatgatgctaatggcgctgctgcggatcacaagaaagcgtatcctcgggccggtctgattggagtgatttccatgtagataaacagtaagttgtccaacattttgagatgtcacttgaaaagaggagtttgtcactccaggaggcaccacaacttcatcggggagctcaaggatagtaatatttttggaacgaaatgtgatttcaaaagtgatcaccagggttgcatttaatggtggccgcagggtgaggctgacgttggtcgagctgccgttctccagctttacgacaggaggaacagtgaggctgacgcttgactcacatttctctacgagcttcaggggaaaaaggataaaaatagtcagccaattccttatcatgtttctcgatttctcagaactctgttgcttagggcgcctagcgagctctcacaaaacacagtaatcctcaatgttactggaagaggcagagctcaggagtcctcccttcgcccagtgtgaaaacccggaggggaggatggggtctcgtgctgctcagtcccccggagccccgcactccgcacgtcaaccggcgctctcgcaaaggttctctcagcgtctccaaagcaatctgagcgcccccaggctcgaggaaccgccctcacgggacgcatgagcctcgccaggtgccggtcaggaatgcaccgcgttcccctgcccggctagactttgggagaggcg

SEQ ID NO: 959 - DNA, 1743 bp, Homo sapiens
atgaagagaagtgctctcaagttctatttcagagacagaacaagcaagatcgaaggggatttaagagcacagaccctttacgggtgtcgggttggaggacggtcaggtctttcccttcctacgaggccatatttcagactatcacatggggagaaaccttggacaacacctggctttcctaggcagaggaacaaaagcacccaaggaggaaaaagaggcctgagatttccacggaattacaagtgaacttcctgtcctgggtaaacttccggaatcaacaacaggaagacccaatcagaatcttcctccgggagccaatgggagagcacattacaaagagccaatccccagcgccgctgtcactgttatggtcctgtcagggtgccggcgtcgtggtgcttgggtggtcgccaccaagaagactttggtggggtagtctcggggcagctcagcggcccgctgtgcccgtttctggcctcgctcgcagcttgcacgtcgagactcgtaggccgcaccgtagggcgagcgtgcgggtcgccgccgcggccgcctcggggtctgggcccagccgcagcctcttctaccgcggccggttgggagtcgccgcgagatgcagcctccgggcccgcccccggcctatgcccccactaacggggacttcacctttgtctcctcagcagacgcggaagatctcagtggttcaatagcatccccagatgtcaaattaaatcttggtggagattttatcaaagaatctacagctactacatttctgagacaaagaggttatggctggcttctggaagttgaagatgatgatcctgaagataacaagccactcttggaagaattggacattgatctaaaggatatttactacaaaatccgatgtgttttgatgccaatgccatcacttggttttaatagacaagtggtgagagacaatcctgacttttggggtcctctggctgttgttcttttcttttccatgatatcattatatggacagtttagggtggtctcatggattataaccatttggatatttggttcactaacaattttcttactggccagagttcttggtggagaagttgcatatggccaagtccttggagttataggatattcattacttcctctcattgtaatagcccctgtacttttggtggttggatcatttgaagtggtgtctacacttataaaactgtttggtgtgttttgggctgcctacagtgctgcttcattgttagtgggtgaagaattcaagaccaaaaagcctcttctgatttatccaatctttttattatacatttattttttgtcgttatatactggtgtgtgatccaagttatacatgaatagaaaaagatggtgttaaatttgtgtgtaggctgggaattcttgctgaaggaattggagaaaacctgttgctgcaaaattttacatgttccagatggaaagggaagtctaagcgctttttaaaacaatttttttttgtatttaattaagcaattgcagttatctgggatttttgggtcagaattttaaattctgtttgattctccatattccagtgaataaaatacaaaagcattgtgtttttaagattgtgtcgatattcacctaaaaacttgtgccaaaagcacctggattggtaattatatttcacttaaagggtaaatttgacaatatcttgataatcaaaagtgcaatttttttcttcaaaatgttttctcaacg

SEQ ID NO: 960 - DNA, 3497 bp, Homo sapiens
atgacatgcttcaaagggcaaaaaggagaacaaagatcacatgcttttgaggccaataaagatcacaaggcaaaggttccatctcccaacctctatagccagctgaatgcactacagtttactgtggatgaaagaagcattctatggttaaatcaatttctgttggatttaaaacagagtcttaatcagttcatggctgtgtacaagttgaatgacaattcaaaatctgacgagcatgttgatgttcgagttgatggcttaatgctaaagtttgtcattccttctgaagtgaaatctgaatgtcatcaagatcagccacgtgcaatttctattcagagttctgaaatgattgccacaaatacaaggcactgtccaaactgtcgacattctgacctagaagctttgtttcaagactttaaagattgtgatttttttagtaaaacatataccagcttccccaaatcttgtgacaattttaatcttctacatccaattttccagagacatgctcatgaacaagataccaaaatgcatgaaatttataaaggaaatattactccccaattgaataaaaacactcttaaaacttctgctgccacggatgtttgggctgtgtacttttctcaattttggatagattatgaagggatgaaaagtggaaaaggacggccaataagttttgtagactcattccctctttccatttggatttgtcaaccaacaagatatgcagagtcacaaaaagagccgcagacttgtaatcaggtatctctaaatacatcacaaagtgaatctagtgatctggctggccgattgaagcggaagaagctcttgaaggagtattatagtacagagtctgagcctttgacaaatggtggtcagaagccttcttcatcagatacatttttcagattttccccttcctcgtcagaggcagatattcatctcctagttcatgttcataaacatgtcagtatgcagattaatcactaccagtatctgcttctacttttcctgcatgagtcacttatcctgctttcagagaacttaaggaaagatgtagaagctgtaactggcagtcctgctagtcagacatccatttgtattggaattttacttagaagtgcagaactggctcttttgctccatccagtggatcaagcaaatactcttaagtctcctgtttctgaaagtgtgagcccagtggtacctgattatttgcctacagaaaatggggattttttgtcttcaaaaagaaaacaaattagtagggatataaatagaattagaagtgtaactgttaatcatatgtcagacaacagatctatgagtgttgaccttagccatatccctttaaaggatcctttgctttttaaatcagctagtgatacaaatctgcaaaaaggcatttcttttatggactatttatcagataaacatttagggaaaataagtgaagatgaaagtagtggacttgtttacaaaagtggctcaggagaaattggatcagaaacaagtgacaaaaaggattcattttatacagattcaagtagtgtcttaaactacagagaagattcgaatatactttcatttgatagtgatggtaatcaaaacatactttcaagtactttaactagtaaaggaaatgaaaccatagagtccatctttaaagctgaagatttgcttccagaagcagcttcactctctgaaaacctggatatcagtaaagaagagacccccccagttagaacacttaaatcacagtcatctttaagtggaaagcctaaggaacgttgcccacccaacctggctcctctctgtgtttcttataagaatatgaaaagaagctcttcacaaatgtcattggataccatttcacttgacagcatgatattggaagaacagttattagaaagtgatggaagtgatagccatatgtttttggaaaaaggaaataaaaagaactcaactacaaattacaggggcacagcagaaagtgtgaatgctggtgcaaacctacagaattatggtgaaacttctccagatgccatcagtacaaattcagagggtgctcaggaaaatcatgatgacctgatgtccgttgtggtatttaaaattactggtgttaatggggaaattgacatccgaggggaagatacagaaatctgtcttcaagtgaaccaggtgacaccagaccaattaggcaatatcagccttcggcattacctttgtaatcgtccagttggttccgatcagaaagctgtaattcattccaaatcctctcctgagatttctctgagatttgaaagtgggcctggtgctgtaatacactctttacttgcagaaaaaaatggatttctgcagtgccacatagaaaacttcagcactgagtttcttacatcttctcttatgaatattcaacattttttggaagatgaaactgttgcaacagtaatgccaatgaagatacaagtttctaacacgaaaataaatttaaaagatgatagtccccggagtagtacagtatcccttgaaccagctcctgtaactgtacatattgatcatcttgtggtagagagaagtgacgatggctcttttcatatcagagattctcacatgcttaacactggaaatgatttgaaagaaaatgtcaaaagcgattcagtgctgctgaccagtggaaagtatgatctgaagaaacaacgcagtgtcacgcaagccactcagacaagcccaggggttccttggccttctcagtcagctaactttcctgagttctcctttgacttcactagggaacagctcatggaagagaatgaatctcttaaacaggaactggctaaagctaaaatggctcttgcagaggctcacttggaaaaagatgctcttcttcatcatataaagaagatgacagttgaatagcaggagtggcagtcaaaactgaaattatagctctgggagtaggaaggttatatttataatgtggatgttaccagttaggggaagacttttattttcatgaaaagacaataaaacaaaatggaatgtgatgaagtggtgactatttcaaagccagtttagaaagtattagtacgggcattacaatcttttggttgttttgtgttttggggcttaaccctcttttaagctgttgtgatctagggaagtcaacacatagtgtaaaataattacatgcctaatgaaaagaagatgtcatttcctaattttgatatctcattttcggcattttttaaaatgtaaaaggaaaacctcttgtgttcacacagattgctgaattgatttctccatatttgttaataatttactattatttacaaagattcaaatgcttttatgactaatgtaaaatgaaaagaggcttacattttaaatgttattaaaattatgtacttaaatctataattatttaattattgtaaaaagtccaagcagatcaataaactatataattaatgggtttggaaaaaaaaaaaaaa

SEQ ID NO: 961 - DNA, 1649 bp, Homo sapiens
ttttttttttttaataaacataagagtggttttattgattacatacaattttagctatattaatatatattataaactttaagaattagaaataagtgacttttattttttaaccaagaataatctaagttatggcagcatgttcaatgaaaggtaagtccggcacaatttttctatatctgtttctcagataatcaggaacatcatccaagctttacattacgataccataatgaccctcagaacacaagttccattaagtagaaatgaagcatcatatgttttcttttttaggaaagacccccccttttgttgtatagacatacccctaataatcttactctactgtacaaataacttttcacccacaagagctgcctcaagtaactttcattttggaaagctatcaaggcatgagacagagtagcaaaatgccactctggactttgcatcttggagtttcaattttgctttaggatttagaccccagtttataattaaaaccaaatcattcccacattattatacttatgtaggaaagccttgctgtgtccactgttaacacaaagatagaaaatgtcaaatagtttaagcaagtatttggcagaccacagacatgaaacagtgccgtcggaaacggaaacactttagtgttttagaggtgaagagattgatgggtgtcattcaaatttctcatctccttcttctacatctttcagattgagtacttccaaagaacctttgcctttagtttccttttttattagctcatcaatttctcggaagcagcccgggtcaatcagacatacgatttctaactgttggccataatcttcactttctatgaccttgatcagtggcttgagcttttctttcagcttcttgccttcattgactggaaggatgaaccgaagcctcatgtgagcacgttctatcttcattttctcttttaactgctttatcacttccaaagcctgctgttttgtactcttgttggttttcaccgaatagtggatgtccttcatggctctctcaataaggatcacggtgtatggtctctttgtttcaggattcacacatttgtctgccacaatagttgcaatgtccctaaacatctgctccagttgtgtgtgtctttctttatctgatacttgaacttctcctttagtcaaaatctgcttacagatttcagtttggtcatctgttccaaacgcactgatgagatcttcctttttggcaacctgacctttagaaacatttacaaacactgagtgggtctgcagaacttcatcgaggtctttttccacgccgctccgccagccgacgaccttgtttttgtagcaggcgatttcgaagcgcttcccggcacgcttcatccgtaccacggccacattggttaggcggatctggttggtgggggtgaagatcgacatcgcggctgttcaaagacccagaagccggcgaaccagggctgacccgcgccgtccagcctgaaggccaccagcgcctcgcggtaacgaccgatcggcgcgcggcactgacccaaccaccagtgcgcggcgccgcgactcactagcttcaggcagccgtcacagtgtgtctggcaggcttacttactgcgcaggcgtcaggtggagcaaaagacgaaa

SEQ ID NO: 962 - DNA, 860 bp, Homo sapiens
ccgatgtcgtgcctcccggccacgctcgctgtagtgaaggagcgttgcagcctggggctcgtttgggtgatttccctcggcggtggaggtcgctcctaatagaggcggcggcggatcacccgaacagccttcaggcgacgtactgtaagacgatattactttaatcatcttcacatcagtatttatggaatagccacaggtgcctcatcctttagtaggagttaattatacatttactggccgagtaaacatctccgaatgtattttttttagataaggaaataaaacatttccaataaagctgaagtctcatcccacccatccgttatcagtcactccatggattcctttgggcaacccagaccagaagataatcagtcagtactcagaagaatgcaaaagaaatactggaaaactaaacaggtctttatcaaagcaacaggaaaaaaagaggatgagcacttggtggcgtctgatgctgaactggatgctaaacttgaggtttttcactctgttcaagagacatgcactgaacttctgaagataatcgagaaataccagctaagactcaatggtatgaaatcatagttatctatctgataattcccatttaaaataaatattagcattttttaaaatgaaagatttaatgtaaaaacaattttgtgaatagcttcttatggcaaaatatgaatatttacagctacctgttctcaaaggccccagtattctctcttctttcctcagttaatcaaatcctctgacccagatttattttttgctgatattttttttctttgagacagggtctttctctgcactccagcctaggcaacagagcaagactccgtctcaaaaaa

SEQ ID NO: 963 - DNA, 2419 bp, Homo sapiens
tttcgtcgctgagctgaaggctgtgcggagcggcgcggcacagagcctgttgttgagctcagtatgtcgtgggaatccggggccgggccaggtctaggttcccaggggatggatctcgtgtggagtgcgtggtacggaaagtgcgttaaagggaaagggtcgttgccactctcggcccacggcatcgtggtcgcctggctcagcagggccgagtgggaccaggtgacggtttatctgttctgtgacgaccataagttgcagcggtacgcgcttaaccgcatcacggtgtggaggagcaggtcaggcaacgaactccctctggcagtggcttctactgctgacctgatacgctgtaagctcttggatgtaactggtggcttgggcactgatgaacttagactgctctatggcatggcattggtcaggtttgtgaatcttatctcagagaggaagacaaagtttgccaaggtccccctcaagtgtctggctcaagaggtaaatattccggattggattgttgaccttcgccatgagttgacccacaagaaaatgccccatataaatgactgccgcagaggctgctactttgtcctggattggctccagaagacctattggtgccgccaactggagaacagcctgagagagacctgggagttggaggagttcagggaagggatagaggaagaggatcaagaggaagataagaacattgttgttgatgacatcacagaacagaaaccagagcctcaggatgatgggaaaagtacggagtcagatgtaaaggccgatggagacagcaaaggcagcgaagaggtggattctcattgcaaaaaggccctgagtcataaagagctatatgaaagagcccgagaactgctggtatcatacgaagaggagcagtttacggtgctggagaaatttaggtatttacctaaggccattaaggcgtggaataacccgtccccacgtgtagaatgtgtcctggcagagctcaagggcgttacatgcgagaacagggaggctgtgctggatgcttttctggatgatggcttccttgtccccacatttgaacagttggcagctttgcagatagaatatgaagaaaacgtggacttgaatgacgtcctggtgccaaagccgttctctcagttctggcagcccctgctcaggggcctgcactcccagaacttcacgcaggccctattggagaggatgctctctgaactgccagccttggggatcagcgggatccggcctacctacatcctcagatggaccgttgaactgatcgtggccaacaccaagactggacggaatgctcgccgattttctgcaggccagtgggaagcaagaaggggctggaggctgttcaactgctccgcctcccttgactggccccggatggttgagtcctgcttgggctcaccttgctgggccagcccccaactccttcggatcatcttcaaagccatggggcagggcctgccagacgaggagcaggagaagctgctgcgcatctgttccatttatacccagagtggagaaaacagcctggtgcaggagggctctgaggcctcccccattgggaagtctccatatacactagacagcctgtattggagcgtcaagccagccagctccagcttcgggtctgaagcaaaggcccagcaacaggaggagcagggcagtgttaatgatgtcaaggaagaggagaaggaggagaaagaggtcttgccagaccaggtagaggaggaggaagaaaatgatgaccaagaggaggaagaggaggatgaagatgatgaagatgatgaagaggaagacagaatggaggtggggcctttctctacagggcaagagtcccccactgccgagaatgctaggcttctggcccagaaaagaggagctttgcagggctctgcatggcaggttagctcagaagacgtgcgatgggacacatttcccctaggccgaatgccaggtcagaccgaggacccagcagagctcatgctggagaattatgacaccatgtatcttttggaccagcctgtgctagagcagcggctggaaccctcaacatgcaagactgacaccttgggcctgagctgtggtgtcggcagtggcaactgcagcaacagcagcagcagcaacttcgagggccttctctggagccaggggcagctgcatgggctcaaaactggcctgcagctcttctgatggccatccctggtgcaagtgttcatccagccgtgccagggcaacagcccaccccctagtacaactgatgctccctgagacaacctgggagacagcctggatcagccacatcaactcagttgtccaccacaggggaattttgaatgtcttttgtttttgttttgttttgaaaaataataaacaggcaactgtaaaaaaaaaa

SEQ ID NO: 964 - DNA, 1823 bp, Homo sapiens
cttgagaaccgcgccggaatttccgggacgattccacgcgtccgcgcacgcgtgggcggacgcgtgggcgccgccgtcgtgcgtgccgctcggcggaggggacgggcctgcgttctctcctccttcctccccgcctccagctgccggcaggacctttctctcgctgccgctgggaccccgtgtcatcgcccaggccgagcacgatgccccctaaaaagggaggtgatggaattaaaccacccccaatcattggaagatttggaacctcactgaaaattggtattgttggattgccaaatgttgggaaatctactttcttcaatgtgttaaccaatagtcaggcttcagcagaaaacttcccgttctgcactattgatcctaatgagagcagagtacctgtgccagatgaaaggtttgactttctttgtcaataccacaaaccagcaagcaaaattcctgcctttctaaatgtggtggatattgctggccttgtgaaaggagctcacaatgggcagggcctggggaatgcttttttatctcatattagtgcctgtgatggcatctttcatctaacacgtgcttttgaagatgatgatatcacgcacgttgaaggaagtgtagatcctattcgagatatagaaataatacatgaagagcttcagcttaaagatgaggaaatgattgggcccattatagataaactagaaaaggtggctgtgagaggaggagataaaaaactaaaacctgaatatgatataatgtgcaaagtaaaatcctgggttatagatcaaaagaaacctgttcgcttctatcatgattggaatgacaaagagattgaagtgttgaataaacacttatttttgacttcaaaaccaatggtctacttggttaatctttctgaaaaagactacattagaaagaaaaacaaatggttgataaaaattaaagagtgggtggacaagtatgacccaggtgctttggtcattccttttagtggggccttggaactcaagttgcaagaattgagtgctgaggagagacagaagtatctggaagcgaacatgacacaaagtgctttgccaaagatcattaaggctgggtttgcagcactccaactagaatactttttcactgcaggcccagatgaagtgcgtgcatggaccatcaggaaagggactaaggctcctcaggctgcaggaaagattcacacagattttgaaaagggattcattatggctgaagtaatgaaatacgaagattttaaagaggaaggttctgaaaatgcagtcaaggctgctggaaagtacagacaacaaggcagaaattatattgttgaagatggagatattatcttcttcaaatttaacacacctcaacaaccgaagaagaaataaaatttagttattgctcagataaacatacaacttccaaaaggcatctgatttttaaaaaattaaaatttctgaaaaccaatgcgacaaataaagttggggagatgggaatctttgacaaacaaattatttttatttgttttaaaattaaaatactgtgtacccccccccctccatgaaatgcaggttcactaaatgtgaacagctttgcttttcacgtgattaagaccctactccaaattgtagaagcttttcaggaaccatattactctcatgatacttcattaatctccatcatgtatgccaagcctgacacatttgacagtgaggacaatgtggcttgctcctttttgaatctacagataatgcatgttttacagtactccagatgtctacactcaataaaacatttgacaaaaccaaaaaaaaaaa

SEQ ID NO: 965 - DNA, 1534 bp, Homo sapiens
ttttttttttttgatattaaatgttaaattttatttcaaaaaactatcacagcctaaagggaaatataatttaagcattaagatagtacatttcagaaaataagctagtattttcatgttacattttaggtacctatcatttgtcattccaagagatccttgcgttctagactctagaattaaatggggtaaagggttatgcttttaagaactataagctgaaatgatttacttcagttcaatatagaatatttgtcagtcaagataacaatcaatgtgtacaaaaatttacataacaagaggaaaaataggcagtgcagcacctttagaaaaataattaaaagtttcattgcatttacaggtaagtgccacactgagaatttacaatacagtaatttactgcaatcacaggggagttccataaagaaacaaagctcttacactccaggtttttggaaggtgttattggaatgcttaactgaaaccccacagaacttgtatatcccttaggattgagttgatggaaggtcataaaaggttttcatagcatctattatataaaaggagttcactgcatttggatagctggtttagtgtctctgacaagtgtgaagcctagaagaattactggcttgatggtgatctttctgtatccggcaagacagaccttctccacagtaacaacgctggaatatttctagtccatgagagccttttctcctatgcttggtacacacttgaccttctttcaggacaggtttacagatcttggaccagaagtgtctagcacaacacaatcctgaggcacagtctgatgaccggagacaaacagaaccttcttgtcctttggtgtgatacatttttgaagacaaggtggttcttctggaatacccatccaaggtgctatgatcattaccaaagctttcagtgatggtttcctcaatttctcctcggaaatgattttgatcagaagacacacatattccatttttgcagtaattcccggggcagcacatagcgtgacgcatgcagcgttttcggcgcttcctgcaggcgagacagatttgcacgcccgcgtcccctccgcgggtgggactagcgcagtactcatcagtgccgcactcctcgtcctctgcgcacgggtacggctggtagttgtcaatggtctggtacttattcccgcccgggtacaggattcccggcgcggcgctgactgcagagcctgggtgccccgcagcgccgcccagcggtgggggcaggttcttgatagcgttggaattgagaaccgagttcaaggtggcgctcactcccagcagagggtggccgccgagagccgccgctaccatcgcgacaaagacccgggtagctcccgctgcgcccagagccatcatctcagaaggactcaagagggagaaagaaagagaaaatgaccgtcactttgcaagcctgggtccccacgaaaccgtgccggttcggctgcagagtcagggtccgggagccccctgcggtcccagagtcctgactgcagggagca

SEQ ID NO: 966 - DNA, 5032 bp, Homo sapiens
gggagaggaatcgtatctccatatttcttctttcagccccaatccaagggttgtagctggaactttccatcagttcttcctttctttttcctctctaagcctttgccttgctctgtcacagtgaagtcagccagagcagggctgttaaactctgtgaaatttgtcataagggtgtcaggtatttcttactggcttccaaagaaacatagataaagaaatctttcctgtggcttcccttggcaggctgcattcagaaggtctctcagttgaagaaagagcttggaggacaacagcacaacaggagagtaaaagatgccccagggctgaggcctccgctcaggcagccgcatctggggtcaatcatactcaccttgcccgggccatgctccagcaaaatcaagctgttttcttttgaaagttcaaactcatcaagattatgctgctcactcttatcattctgttgccagtagtttcaaaatttagttttgttagtctctcagcaccgcagcactggagctgtcctgaaggtactctcgcaggaaatgggaattctacttgtgtgggtcctgcacccttcttaattttctcccatggaaatagtatctttaggattgacacagaaggaaccaattatgagcaattggtggtggatgctggtgtctcagtgatcatggattttcattataatgagaaaagaatctattgggtggatttagaaagacaacttttgcaaagagtttttctgaatgggtcaaggcaagagagagtatgtaatatagagaaaaatgtttctggaatggcaataaattggataaatgaagaagttatttggtcaaatcaacaggaaggaatcattacagtaacagatatgaaaggaaataattcccacattcttttaagtgctttaaaatatcctgcaaatgtagcagttgatccagtagaaaggtttatattttggtcttcagaggtggctggaagcctttatagagcagatctcgatggtgtgggagtgaaggctctgttggagacatcagagaaaataacagctgtgtcattggatgtgcttgataagcggctgttttggattcagtacaacagagaaggaagcaattctcttatttgctcctgtgattatgatggaggttctgtccacattagtaaacatccaacacagcataatttgtttgcaatgtccctttttggtgaccgtatcttctattcaacatggaaaatgaagacaatttggatagccaacaaacacactggaaaggacatggttagaattaacctccattcatcatttgtaccacttggtgaactgaaagtagtgcatccacttgcacaacccaaggcagaagatgacacttgggagcctgagcagaaactttgcaaattgaggaaaggaaactgcagcagcactgtgtgtgggcaagacctccagtcacacttgtgcatgtgtgcagagggatacgccctaagtcgagaccggaagtactgtgaaggtaatgactggaagtactgtgaagatgttaatgaatgtgctttttggaatcatggctgtactcttgggtgtaaaaacacccctggatcctattactgcacgtgccctgtaggatttgttctgcttcctgatgggaaacgatgtcatcaacttgtttcctgtccacgcaatgtgtctgaatgcagccatgactgtgttctgacatcagaaggtcccttatgtttctgtcctgaaggctcagtgcttgagagagatgggaaaacatgtagcggttgttcctcacccgataatggtggatgtagccagctctgcgttcctcttagcccagtatcctgggaatgtgattgctttcctgggtatgacctacaactggatgaaaaaagctgtgcagcttcaggaccacaaccatttttgctgtttgccaattctcaagatattcgacacatgcattttgatggaacagactatggaactctgctcagccagcagatgggaatggtttatgccctagatcatgaccctgtggaaaataagatatactttgcccatacagccctgaagtggatagagagagctaatatggatggttcccagcgagaaaggcttattgaggaaggagtagatgtgccagaaggtcttgctgtggactggattggccgtagattctattggacagacagagggaaatctctgattggaaggagtgatttaaatgggaaacgttccaaaataatcactattgagaacatctctcaaccacgaggaattgctgttcatccaatggccaagagattattctggactgatacagggattaatccacgaattgaaagttcttccctccaaggccttggccgtctggttatagccagctctgatctaatctggcccagtggaataacgattgacttcttaactgacaagttgtactggtgcgatgccaagcagtctgtgattgaaatggccaatctggatggttcaaaacgccgaagacttacccagaatgatgtaggtcacccatttgctgtagcagtgtttgaggattatgtgtggttctcagattgggctatgccatcagtaataagagtaaacaagaggactggcaaagatagagtacgtctccaaggcagcatgctgaagccctcatcactggttgtggttcatccattggcaaaaccaggagcagatccctgcttatatcaaaacggaggctgtgaacatatttgcaaaaagaggcttggaactgcttggtgttcgtgtcgtgaaggttttatgaaagcctcagatgggaaaacgtgtctggctctggatggtcatcagctgttggcaggtggtgaagttgatctaaagaaccaagtaacaccattggacatcttgtccaagactagagtgtcagaagataacattacagaatctcaacacatgctagtggctgaaatcatggtgtcagatcaagatgactgtgctcctgtgggatgcagcatgtatgctcggtgtatttcagagggagaggatgccacatgtcagtgtttgaaaggatttgctggggatggaaaactatgttctgatatagatgaatgtgagatgggtgtcccagtgtgcccccctgcctcctccaagtgcatcaacaccgaaggtggttatgtctgccggtgctcagaaggctaccaaggagatgggattcactgtcttgatattgatgagtgccaactgggggtgcacagctgtggagagaatgccagctgcacaaatacagagggaggctatacctgcatgtgtgctggacgcctgtctgaaccaggactgatttgccctgactctactccaccccctcacctcagggaagatgaccaccactattccgtaagaaatagtgactctgaatgtcccctgtcccacgatgggtactgcctccatgatggtgtgtgcatgtatattgaagcattggacaagtatgcatgcaactgtgttgttggctacatcggggagcgatgtcagtaccgagacctgaagtggtgggaactgcgccacgctggccacgggcagcagcagaaggtcatcgtggtggctgtctgcgtggtggtgcttgtcatgctgctcctcctgagcctgtggggggcccactactacaggactcagaagctgctatcgaaaaacccaaagaatccttatgaggagtcgagcagagatgtgaggagtcgcaggcctgctgacactgaggatgggatgtcctcttgccctcaaccttggtttgtggttataaaagaacaccaagacctcaagaatgggggtcaaccagtggctggtgaggatggccaggcagcagatgggtcaatgcaaccaacttcatggaggcaggagccccagttatgtggaatgggcacagagcaaggctgctggattccagtatccagtgataagggctcctgtccccaggtaatggagcgaagctttcatatgccctcctatgggacacagacccttgaagggggtgtcgagaagccccattctctcctatcagctaacccattatggcaacaaagggccctggacccaccacaccaaatggagctgactcagtgaaaactggaattaaaaggaaagtcaagaagaatgaactatgtcgatgcacagtatcttttctttcaaaagtagagcaaaactataggttttggttccacaatctctacgactaatcacctactcaatgcctggagacagatacgtagttgtgcttttgtttgctcttttaagcagtctcactgcagtcttatttccaagtaagagtactgggagaatcactaggtaacttattagaaacccaaattgggacaacagtgctttgtaaattgtgttgtcttcagcagtcaatacaaatagatttttgtttttgttgttcctgcagccccagaagaaattaggggttaaagcagacagtcacactggtttggtcagttacaaagtaatttctttgatctggacagaacatttatatcagtttcatgaaatgattggaatattccaatcccattaagatacagtgtaggcatttaactcctcattggcgtggtccatgctgatgattttgccaaaatgagttgtgatgaatcaatgaaaaatgtaatttagaaactgatttcttcagaattagatggcttattttttaaaatatttgaatgaaaacattttatttttaaaatattacacaggaggccttcggagtttcttagtcattactgtccttttcccctacagaattttccctcttggtgtgattgcacagaatttgtatgtattttcagttacaagattgtaagtaaattgcctgatttgttttcattatagacaacgatgaatttcttctaattatttaaataaaatcaccaaaaacataaacattttattgtatgcctgattaagtagttaattatagtctaaggcagtactagagttgaaccataatgatttgtcaagcttgctgattgttcttgtattcgatattttttctttttcccgagagagataataacc

SEQ ID NO: 967 - DNA, 770 bp, Homo sapiens
ccagctcggccatggggtcgcgcagctcccacgccgcggtcattcccgacggggacagtattcggcgagagaccggcttctcccaagccagcctgctccgcctgcaccaccggttccgggcactggacaggaataagaagggctacctgagccgcatggatctccagcagataggggcgctcgccgtgaaccccctgggagaccgaattatagaaagcttcttccccgatgggagccagcgagtggatttcccaggctttgtcagggtcttggctcattttcgccctgtagaagatgaggacacagaaacccaagaccccaagaaacctgaacctctcaacagcagaaggaacaaacttcactatgcatttcagctctatgacctggatcgcgatgggaagatctccaggcatgagatgctgcaggttctccgtctgatggttggggtacaggtgacagaagagcagctggagaacatcgctgaccgcacggtgcaggaggctgatgaagatggggatggggctgtgtccttcgtggagttcaccaagtccttagagaagatggacgttgagcacaaaatgagcatccggatcctgaagtgactccgtttgtgccttgggcttgatcctgtcaccagtatcttcttggaactcattcagagcccccatgtacgcttggacccaggttcaccgatacgctgtatatttgtttcttactgtatttagtggcaacgccaagagatcttccttgttgccctctattgagcaacg

SEQ ID NO: 968 - DNA, 600 bp, Homo sapiens
  misc_feature (1)...(600): n = a,t,c or g
aatttcatcctgcccacacactgcatatgagggaagcatgtctactttatccaatttcacacagacgctggaagacgtcttccgaaggatttttattacttatatggacaattggcgccagaacacaacagctgagcaagaggccctccaagccaaagttgatgctgagaacttctactatgtcatcctgtacctcatggtgatgattggaatgttctctttcatcatcgtggccatcctggtgagcactgtgaaatccaagagacgggaacactccaatgacccctaccaccagtacattgtagaggactggcaggaaaagtacaagagccaaatcttgaatctagaagaatcgaaggccaccatccatgagaacattggtgcggctgggttcaaaatgtccccctgataagggagaaaggcaccaagctaacatctgacgtccagacatgaagagatgccagtgccacgaggcaaatccaaattgtctttgcttagaagaaagtgagttccttgctctctgttgagaattttcatggagattatgtggttggccaataaagatagatgacatttcaatctcnnnnnanaaaaaaaaaa

SEQ ID NO: 969 - DNA, 5256 bp, Homo sapiens
gggatgccgaggagccggggcggccgcgccgcgccggggccgccgccgccgccgccgccgccgggccaggccccgcgctggagccgctggcgggtccctgggcggctgctgctgctgctgctgcccgcgctctgctgcctcccgggcgccgcgcgggcggcggcggcggcggcgggggcagggaaccgggcagcggtggcggtggcggtggcgcgggcggacgaggcggaggcgcccttcgccgggcagaactggttaaagtcctatggctatctgcttccctatgactcacgggcatctgcgctgcactcagcgaaggccttgcagtcggcagtctccactatgcagcagttttacgggatcccggtcaccggtgtgttggatcagacaacgatcgagtggatgaagaaaccccgatgtggtgtccctgatcacccccacttaagccgtaggcggagaaacaagcgctatgccctgactggacagaagtggaggcaaaaacacatcacctacagcattcacaactataccccaaaagtgggtgagctagacacgcggaaagctattcgccaggctttcgatgtgtggcagaaggtgaccccactgacctttgaagaggtgccataccatgagatcaaaagtgaccggaaggaggcagacatcatgatcttttttgcttctggtttccatggcgacagctccccatttgatggagaagggggattcctggcccatgcctacttccctggcccagggattggaggagacacccactttgactccgatgagccatggacgctaggaaatgccaaccatgacgggaacgacctcttcctggtggctgtgcatgagctgggccacgcgctgggactggagcactccagcgaccccagcgccatcatggcgcccttctaccagtacatggagacgcacaacttcaagctgccccaggacgatctccagggcatccagaagatctatggacccccagccgagcctctggagcccacaaggccactccctacactccccgtccgcaggatccactcaccatcggagaggaaacacgagcgccagcccaggccccctcggccgcccctcggggaccggccatccacaccaggcaccaaacccaacatctgtgacggcaacttcaacacagtggccctcttccggggcgagatgtttgtctttaaggatcgctggttctggcgtctgcgcaataaccgagtgcaggagggctaccccatgcagatcgagcagttctggaagggcctgcctgcccgcatcgacgcagcctatgaaagggccgatgggagatttgtcttcttcaaaggtgacaagtattgggtgtttaaggaggtgacggtggagcctgggtacccccacagcctgggggagctgggcagctgtttgccccgtgaaggcattgacacagctctgcgctgggaacctgtgggcaagacctactttttcaaaggcgagcggtactggcgctacagcgaggagcggcgggccacggaccctggctaccctaagcccatcaccgtgtggaagggcatcccacaggctccccaaggagccttcatcagcaaggaaggatattacacctatttctacaagggccgggactactggaagtttgacaaccagaaactgagcgtggagccaggctacccgcgcaacatcctgcgtgactggatgggctgcaaccagaaggaggtggagcggcggaaggagcggcggctgccccaggacgacgtggacatcatggtgaccatcaacgatgtgccgggctccgtgaacgccgtggccgtggtcatcccctgcatcctgtccctctgcatcctggtgctggtctacaccatcttccagttcaagaacaagacaggccctcagcctgtcacctactataagcggccagtccaggaatgggtgtgagcagcccagagccctctctatccacttggtctggccagccaggcccttcctcaccagggtctgaggggcagctctggccagtgctcaccagggccagcagggccctaggctggggtcgtacagctgaagttgtgggtgcattggcctaggctgagcgtggggcagggaattatgggggctgtgccgagaggtgggtgtctggcacccagctgccagccttctgtcctgggcaaactactccctacttaagggaataggccaggctccatccggaggcagggaccatgccaggaggagcccctgtggtcacggcatcctgtggtgtccatgaggtaccacagctccactcctggctggaacccggcaccctctgtgggaagccagcactagctctcatcccccatccgggagataccaccagtcctggtccccttttgccaacacctgctggtcagatgtccccctacccccaccccactgtcctccaaggctacaggacccctgcttctgacacagtgagcaacaagcctgggtttccctgctggcagacggcagatccctcaggaaacctgctccacttgtcagggtctcttcggagacccaggatttagggtcacatgctgcaggcagggctgtggcccagctgggtctgacaaggacccagctgtcacatcgtgaatatttaaatgtcctgtcactactgtcccattttgcaaaggctgcttgaggctttaggtgaactagaggtgactgtcttggtgatgaggccagcatagcggccctcccccaggcgacaaggaccaaggtgctgctaaggccactctagcgcccagacaccccagtagctgagctctgctcctatggctacagagctggggcagaagctgaccccatttctggaggaagatccgagtttgtgaccgtcctccactcccctctattgtcactgtccccagctttgctgccagtctgtcacttgcagcctggagctcaacctcaccatttaggtgaggcagagatggctgcagggccaacactgggcagagcctgggagtccttcggaaggggaccagggcgtctgaagtgctcagtgcccccactactctgaggccgactccagctactctgaggccgactcaatctctcggctggaagcagtgttttcccagagcttggcccttgctgacctcgctcactgggcccatcttcccacactgctcttggaaggacacccctaccggtagcagccccaagctgagggggctccctttttgaccttcactggcccgcccttcactgtctccagcaggagttcctagggcttggcctgccttgctccacagtacggcggaggcagccctgcttgtcactgaggagccctagacaaggccaatgggttcatcaatgcccactggctctctgccaaagccaaaaaggtgtcaggcagtctccagcgtgctggccgggtctcggatgccacccctgctcactgagcctgcatgggccttgcccccgaccctgtggtctctgggattggggtcggcttaccctgtagcacagacagggactcctgctgccctgggagctgtctcaagcaaaatctcttgtcccagaggtgcccatgtgggtccgctgtgtcccctgtcatcatccttgttttttctcattttggccaagggcaggctccctgggacaggcagggaacaactgcggagatattagtgattcataggtttgtacagtgttttatactttgcaaagcactttattagctcacacctgtccactcacatgaaactcgtgttaggccctgggaggccgacggtaactctcaccgtgccctcagatgaagcacagagaggttgttacttgcccgggccatccagtgggctggctgggtcttgtgtccccatctgtggacccctctagggtctgagatgagatgagaagtgtctcctgtatccacctcttcctggcctcccttcccccacttcctggtccctgtccactcctcaggttggtgctctcacttcttgaaagctctaggcacccccgcctcccgccaggctccccgttggctcctggcaggccagctgagaatgaacaggagatggaggcaggcagcccaggctgcagaggtgagggatgtggggccaggcccagagggctcagcctagaggcttccaatctcagattctcctgcctgtggtcatctgtttgtccatcaccccaggacagggcagacagaggggcaaagcactgggggccccagagcctagcttcccctcagcctgggggacatcacagcatttcagtgtcagtcacattttaaactgatcagcctttgtataatgttttttaaatcatttctaaataaaacagaaatacagagtgtgtcatttccctgggatgagggaacaaagatcaggttccaagagtaaccttaggacgctctgggaagagaaccgggtcctttggggtgtctgggagctgcccacccatctcctctgccagaccggcggtcagatagcctccctctacaacaggctggccctgggggcccagggttattggggttccaggaacacagcctgatgatgcctccttacgatccaggatggagagcagcccccccaggagtatggggagggtcactgtggcacgggcttctccatgacctgggacatgacctgggacacatagtcaagagcacggttatcagcaatacagatattaataaaaggcagacgaagtcaggaggtcagcaactttgcgggcttaccaggaggcctgtcctgcctctggaagccagcgacagagagggatgcccccgacccagccagccggagaaagggatggggtggtcacgaaggtctgagctgggtctgggtgtaggctgggaagcaggctggggtgtagactgcgaaggcggccctgccgggacttctttccagtccccggcgacctcttcgaattctctgctatctctggggagcctcgggtgggagggggtgtaagagacgcagggacgtggggagaggagacaaggcaggcaagaaccacaggggacggcggacagacgggcgacatcctgcggaggacgccgtcagtaccaggaagtgcaggcgatgaggaagcgcacgtcgtccagcggcccccacgggctgggctcgggctcgggctggggctggggctggggctggggctggggctggggctggggcggatgccggggctgttccgggccctccggcgccgcaggctggggctggggctggggctgggtttgcgcaggctccggggcgccgcggccgc

SEQ ID NO: 970 - DNA, 2681 bp, Homo sapiens
gtatacttgtaactatcaaaatgaatagttcatttttgatagatttgttgtgcagccattatgaattaaatggtttattaggagtttgactaaatttttatttttagtgtgtatagcatgaatactaccaaaggagacgacaaacttgcagcttaaaatgggcaccagttcccacactggcttaatttatataactgcttggctgtattgcgggtaataatattagaagcaagaagcacttcatttttaaaagagatgttactataatattgcttaaatgctttagcacttggacttcttgagatgcagatgtgtgatttggagtgctggcttatttaaaggtcaagccaaggagtttgtggttcagccacaactactgtttcctaagactattgatgtgaaggacttagtgaagtaatttttatattctgggcttcccagcaagatgtcctttttatgactgccatgcttcttttggactcagtaaatatttgtaatgttagaaaagtctcattatttttataaaatgcatgacattttaagtatgtgttgcataaaatggattatagcagttctcatggtttaggatttttaagaaatagtccatttaatttcagcttaaccttttaaatgatctgtaaaatttctttgatagtttaggaatgttgtggggagggttcattaataaaagttcagcaattttttaactgaaatagtttatctcttttacctagtcacaaaaaaggtatgtaaacaaggccattatatgtgtttattgctctttatttccctatctagattttctaagtatcttagctttcttaatataagtttaacttggtacttactgaaaatgcctttttacccctgttaacggtattttgagcttttgaaaagaacttggttgacactgcttttattgtggataaaggagagatggtcagtaattaatggcttgaagtattattggagtggtttatcatttctgaaactaatcgtgtcagaattgactttgaaaagcattgctttttacagaaatatattaactttttaggagtaatttctagtttggattgtaatatgaaataatttaaaagggcttcgctcatatataggaaaatcgcatatggtcctagtattaaattcttattgcttactgatttttttgagttaagagttgttatatgctagaatatgaggatgtgaatataaataagagaagaaaaaagaataaagtagattgagtctccaattttatgtaagcttcagaagaactggtttgtttacatgcaagcttatagttgaaatatttttcaggaattacatgaatgacagtcttcgaaccaatgtgtttgttcgatttcaaccagagactatagcatgtgcttgcatctaccttgcagctagagcacttcagattccgttgccaactcgtccccattggtttcttctttttggtactacagaagaggaaatccaggaaatctgcatagaaacacttaggctttataccagaaaaaagccaaactatgaattactggaaaaagaagtagaaaaaagaaaagtagccttacaagaagccaaattaaaagcaaagggattgaatccggatggaactccagccctttcaaccctgggtggattttctccagcctccaagccatcatcaccaagagaagtaaaagctgaagagaaatcaccaatctccattaatgtgaagacagtcaaaaaagaacctgaggatagacaacaggcttccaaaagcccttacaatggtgtaagaaaagacagcaagagaagtagaaatagcagaagtgcaagtcgatcgaggtcaagaacacgatcacgttctagatcacatactccaagaagacactataataataggcggagtcgatctggaacatacagctcgagatcaagaagcaggtcccgcagtcacagtgaaagccctcgaagacatcataatcatggttctcctcaccttaaggccaagcataccagagatgatttaaaaagttcaaacagacatggtcataaaaggaaaaaatctcgttctcgatctcagagcaagtctcgggatcactcagatgcagccaagaaacacaggcatgaaaggggacatcatagggacaggcgtgaacgatctcgctcctttgagaggtcccataaaagcaagcaccatggtggcagtcgctcaggacatggcaggcacaggcgctgactttctcttcctttgagcctgcatcagttcttggttttgcctatctacagtgtgatgtatggactcaatcaaaaacattaaacgcaaactgattaggatttgatttcttgaaaccctctaggtctctagaacactgaggacagtttcttttgaaaagaactatgttaatttttttgcacattaaaatgccctagcagtatctaattaaaaaccatggtcaggttcaattgtactttattatagttgtgtattgtttattgctataagaactggagcgtgaattctgtaaaaatgtatcttatttttatacagataaaattgcagacactgttctatttaagtggttatttgtttaaatgatggggaatactttcttaacactggtttgtctgcatgtgtaaagatttttacaaggaaataaaatacaaatcttgttttttctaaaaaaaaaaaaaag

SEQ ID NO: 971 - DNA, 5261 bp, Homo sapiens
gggactgtcggctgcaggcggccatgcccaccaacttcaccgtggtgcccgtggaggctcacgccgacggcggcggggacgagactgccgagcggacggaggctccgggcacccccgagggccccgagcccgagcgccccagcccgggagatggaaatccaagagaaaacagcccattcctcaacaatgtcgaggtggaacaagagagcttctttgaagggaagaacatggcacttttcgaggaggagatggacagtaaccccatggtgtcctcgctgctcaacaagctggccaactacaccaacctgagccagggcgtggtggagcacgaggaggacgaggagagccggcggcgggaggccaaggctccgcgcatgggcaccttcatcggcgtctacctgccgtgcctgcagaacatcctgggcgtcatcctcttcctgcgcctgacgtggatcgtgggggtggctggtgtcctggagtccttcctcatcgtggccatgtgctgcacatgtacaatgctgaccgccatttccatgagtgcgatcgctaccaacggtgtggtcccagctggcgggtcctactacatgatatcgcgctcgctgggacccgagtttggaggcgctgtcggcctctgcttctacctgggcacgacgtttgcaggggccatgtatattttggggaccatcgagatttttctgacgtacatctccccgggtgcggccatcttccaggcggaggctgcaggtggcgaggcggccgccatgctgcacaacatgcgtgtgtacggcacgtgcacgctcgtgctcatggccctggtggtcttcgtgggcgtcaagtatgtcaacaagctggcgctggtcttcctggcctgcgtcgtgctgtccatcctggccatctatgccggcgtcatcaagtctgccttcgaccccccggacatcccggtctgcctcctggggaaccgcacgctgtcacggcgcagcttcgatgcctgcgtcaaggcctacggcatccacaacaactcagccacctccgcgctctggggcctcttctgcaacggctcccagcccagcgccgcctgtgacgagtacttcatccagaacaacgtcaccgaaatccagggcatcccgggcgcggccagtggtgtcttcctggagaacctgtggagtacgtacgcgcacgcgggggcgtttgtggagaagaaaggtgtgccctcggtgcccgtggcagaggagagccgtgccagcacactgccctacgtgctcaccgacatcgcggcctccttcaccctgctggttggcatctacttcccttccgtgaccggtatcatggcgggttcaaaccggtccggggacctcaaggatgcacagaagtccatccccacggggaccatcctggccatagtgacgacgtctttcatctatctctcctgcattgtgctgtttggggcctgcattgaaggcgtggtcttacgagataagttcggggaggccctgcaggggaacctggtcatcggcatgctggcctggccctccccctgggtcatcgtcatcggctccttcttctccacctgcggtgccggcctgcagaccctcacgggggcaccgcgcctactgcaggccattgcccgtgacggcatcgtccccttcctgcaggtgtttggccacgggaaggccaacggggagcccacgtgggcgctgctgctgacagtcctcatctgcgagactggcatcctcatcgcctctctggacagcgtggccccgatcctctccatgttcttcctcatgtgctacctgttcgtgaacctggcctgcgccgtgcagaccctgctacgtacccccaactggcgtccacgcttcaagttctaccactggaccctgtcctttctgggtatgagcctgtgcctggcgctgatgttcatctgctcctggtactacgcgctgtccgccatgctcatcgctggctgcatctacaagtacatcgagtaccgcggggccgagaaggagtggggcgatggcatccgtggcctatccctgaacgccgcccgctacgccctgctgcgcgtggagcacggtcccccccacaccaagaactggaggccccaggtgctggtgatgctgaacctggacgcggagcaggccatgaagcacccccgcctgctgtccttcacgtcgcagctgaaggccggcaagggcctgaccatcgtgggctcggtgctggaggggacgtacctggacaagcacatggaggctcagcgggccgaggagaacatacggtccctaatgagcacagagaagaccaagggcttctgccagctggtggtctcgtccagcctgcgggatggcatgtcccacctgatccagtcggccggcctgggcggcctgaagcacaacacggtgctcatggcctggcccgcatcctggaagcaggaggacaaccccttctcctggaagaactttgtagacaccgtccgcgacaccaccgccgcgcaccaggctctgctggtggccaagaacgtcgactcgtttccgcaaaaccaggagcgcttcggcgggggccacatcgacgtgtggtggatcgtgcacgacggcggcatgctcatgctgctgcccttcctgctgcgccagcacaaggtgtggaggaagtgccggatgcgtatcttcaccgtggcccaggtggacgacaacagcatccagatgaagaaggacctgcagatgttcttgtaccacttgcgcatcagcgccgaggtggaggtggtggagatggttgaaaacgacatatctgctttcacctacgagaggacactaatgatggagcagaggtcgcagatgctgaagcagatgcagctgtccaagaacgagcaggagcgagaggcccagctgatccacgacaggaacaccgcgtcccacaccgcggcggcagccaggacccaagcgccgcctacgccagacaaggtgcagatgacctggaccagggagaagctgatcgctgagaagtacaggagcagagacaccagcctatctggtttcaaagacctcttcagcatgaagccggaccagtccaacgtcaggcggatgcacacggctgtgaagctcaatggcgtcgtcctcaacaagtcccaggatgcgcagctggtcctgctcaacatgccaggtcctcccaaaaaccggcagggagacgagaactacatggagtttcttgaagtcctgaccgaggggctgaacagagtcctcctggtcaggggtggcggccgggaggtgatcaccatctactcctaatgcccaacagcatcacggcactctgggacaggcacggaggacggcgtgggcagcctgggcctgggcttggcccagggaaacagacggcagacacacctgtcccccagtgatgccacccaagctgcccatggggcttcctacggaagtttctaggcccgtcacctagggctctcctgttcagccttaacaggctcagcaaatcagggcgtggctggacgatttccttgcatctgagggcagacgctgctaccggagtgacctggacgtggccagatcttctcgcaggtcacaagaagccagtgagcccttgccttggtttctggaagttcttttccttggctggatttacccagtggttaggttgcatttctaccccatccagaacattcttggaagagcacccggagctgaagctgtccctgatgatgaaggtgaaacgtcagccctggccatggctccgctcagggccccggtcacctccgagtcactctgttccttgactgtctttgtgtttctgtacctcaaggcactgaagctggaggactctgtccatgcccgtgtcaccctcgtgtgggagcctctgggctcggcaggtccacatttcatgagctgaggcgtgggccagggccatctggaaagggaactcggcttttccagaacgtggtggatcatctgtcgggtgtgtggtgaacacgttcagttcatcagggcctacgctccgggaaggggcccccagctgtggctctgccatgccgggctgtgtttgcagctgtccgagtctccatccacctttagaaaaccagccacttcttttcataagcactgacagggcccagcccacagccacaggtgcgatcagtgcctcacgcaggcaaatgcactgaaacccaggggcacacgcgcgcagagtgaacagtgagttcccccgacagcccacgacagccaggactgccctccccaccccaccccaccccaggagcacggcacacagttcagcctctgagctggctcacacgtgccatccccaccccggtgctccagggaaggaggacacggacccgacgtgggaggtcctcaggcagcagtggcgcctggtgtcaggtctgtctggctgagtcccgggcgtcccctgccatggcctgtgccttgcatggaggcggcggtggcactgaagagatagctttcaagggcccaacactttgcacttcggctggctgtgagtttctgctttgtaggttgtggtcacatttgcaggctgcgggcagtggcaccgacttgggcctccctttctatgtggcatatttatttatttaaacaccccagggagttacgtggtaacaaggttgtccataaagaggttgcttctatatactagaggccccagatggccaggccttgggctacgtctggcttgcatggtctcccaagggaatcagccccatcaacaaagttcaaatcggggcagaggctgcacttgtgcccccagatgtttctgaggagccagactagggctggcattgctgtagagtgacggctgctgcccagagcgtgtcccagacatcacagcggggctcagcagttcccacagcctctgcctgccttggctaagcatgagttaagcagcaaaacgctcctccatgtctggatggggccggcaggtcctgtgtcccctgcacctggaggagagcaggctagaggcacagcggccacatggtgctggctctgaacgttggttggtggctggaaaacagccctgcttctgagggccgctcagttctgcacacgaaaccacctcctgagggctcagctctgcccccgccctgggctgcagcctctgcacgcaagcaccaggcatcctttgtgttgtcaactccgtgtaaccagtaactacagccatttacaattgactccgtttccttttgtaggtttccctgtctgtctgtgttagtagaaaaataaaatcctatgaaatctgaaaaaaaaaaa

SEQ ID NO: 972 - DNA, 699 bp, Homo sapiens
ttttttttttttgatagtaagtggaatttatttataagacaatgcatatatctatgtggaattaggaagcatttcccattcttattcataaaattattacttaaaattgcaaaagtagatttacagaggcacaggtaacaaaacaggaaatgaaatgttccagacattccgaaaagttcgaaagaaacacaccctagcctcaaaatctccggttaaaccgtggttgcacaacaggttctatttattcctgcattttctcaataagttcttctttatatttgcctttctcttttccaacttgtcgagacttggctttgcgttcaagaatttttttccgatccttgtccagttttagcctggtgataaccaccttgcttgggtgaatgcccacgtggacagttgtgccgttggccttctcacgctgcacccgctcgatgtagatgacatatttctttctgtacacctggactaccttgccaatttgctgacctttgtagtgtcctcgaactacctggacctcgtcgtccttgcggatgggcatggagcggacattgtacttctgccgcagctccttggagagcggggatgacatgatcttcctgcgcacgtgtgagggggcattgaagtgacgtttgcggtttttactgcggtccgaggtaacgaagggattgaacttcatggtgaccctccggctcgtgc

SEQ ID NO: 973 - DNA, 5499 bp, Homo sapiens
tcgacaaaaatgccagggaaaggcgagcccagagcttggtgatggagaaattgggaagccaccccccacccttcaatcttaggatggggaattcgcaactgaagccggagcttcagacttggggcgcactcccagcttagcccaggaaagagatttaagggcgcagcagtgtggatacctctcaccccggccccgaaggtctagcgagggtctaacctgggccccttgccaggcccgccccccgcccctttccagcccccggcccgtgcgccgctgcccctttaagaagcccaggtaggcaggcccggctgctggagccgctcctatggcaacccgcgagctgcggcggcttcatgaatattccggggcgcgggagcccgagcgctgccggagggcgcttcgggggaggcggccgctgatgtaagcccggcgggtcgctgggctccgctcggttgcggcgggagccccgggacgggccggacgggccggggcagaggaggcgaggcgagctcgcgggtggccagccacaaagcccgggcggcgagacagacggacagccagccctcccgcgggacgcacgcccgggacccgcgcgggccgtgcgctctgcactccggagcggttccctgagcgccgcggccgcagagcctctccggccggcgcccattgttccccgcgggggcggggcgcctggagccgggcggcgcgccgcgcccctgaacgccagagggagggagggaggcaagaagggagcgcggggtccccgcgcccagccgggcccgggaggaggtgtagcgcggcgagcccggggactcggagcgggactaggatcctccccgcggcgcgcagcctgcccaagcatgggcgcctgaggctgcccccacgccggcggcaaaggacgcgtccccacgggcggactgaccggcgggcggacctggagcccgtccgcggcgccgcgctcctgcccccggcccggtccgaccccggcccctggcgccatggacaagctgccgccgtccatgcgcaagcggctctacagcctcccgcagcaggtgggggccaaggcgtggatcatggacgaggaagaggacgccgaggaggagggggccgggggccgccaagaccccagccgcaggagcatccggctgcggccactgccctcgccctccccctcggcggccgcgggtggcacggagtcccggagctcggccctcggggcagcggacagcgaagggccggcccgcggcgcgggcaagtccagcacgaacggcgactgcaggcgcttccgcgggagcctggcctcgctgggcagccggggcggcggcagcggcggcacggggagcggcagcagtcacggacacctgcatgactccgcggaggagcggcggctcatcgccgagggcgacgcgtcccccggcgaggacaggacgcccccaggcctggcggccgagcccgagcgccccggcgcctcggcgcagcccgcagcctcgccgccgccgccccagcagccaccgcagccggcctccgcctcctgcgagcagccctcggtggacaccgctatcaaagtggagggaggcgcggctgccggcgaccagatcctcccggaggccgaggtgcgcctgggccaggccggcttcatgcagcgccagttcggggccatgctccaacccggggtcaacaaattctccctaaggatgttcggcagccagaaagccgtggagcgcgaacaggagagggtcaagtcggccggattttggattatccacccctacagtgacttcagattttactgggacctgaccatgctgctgctgatggtgggaaacctgattatcattcctgtgggcatcaccttcttcaaggatgagaacaccacaccctggattgtcttcaatgtggtgtcagacacattcttcctcatcgacttggtcctcaacttccgcacagggatcgtggtggaggacaacacagagatcatcctggacccgcagcggattaaaatgaagtacctgaaaagctggttcatggtagatttcatttcctccatccccgtggactacatcttcctcattgtggagacacgcatcgactcggaggtctacaagactgcccgggccctgcgcattgtccgcttcacgaagatcctcagcctcttacgcctgttacgcctctcccgcctcattcgatatattcaccagtgggaagagatcttccacatgacctacgacctggccagcgccgtggtgcgcatcgtgaacctcatcggcatgatgctcctgctctgccactgggacggctgcctgcagttcctggtacccatgctacaggacttccctgacgactgctgggtgtccatcaacaacatggtgaacaactcctgggggaagcagtactcctacgcgctcttcaaggccatgagccacatgctgtgcatcggctacgggcggcaggcgcccgtgggcatgtccgacgtctggctcaccatgctcagcatgatcgtgggtgccacctgctacgccatgttcattggccacgccactgccctcatccagtccctggactcctcccggcgccagtaccaggaaaagtacaagcaggtggagcagtacatgtcctttcacaagctcccgcccgacacccggcagcgcatccacgactactacgagcaccgctaccagggcaagatgttcgacgaggagagcatcctgggcgagctaagcgagcccctgcgggaggagatcatcaactttaactgtcggaagctggtggcctccatgccactgtttgccaatgcggaccccaacttcgtgacgtccatgctgaccaagctgcgtttcgaggtcttccagcctggggactacatcatccgggaaggcaccattggcaagaagatgtacttcatccagcatggcgtggtcagcgtgctcaccaagggcaacaaggagaccaagctggccgacggctcctactttggagagatctgcctgctgacccggggccggcgcacagccagcgtgagggccgacacctactgccgcctctactcgctgagcgtggacaacttcaatgaggtgctggaggagtaccccatgatgcgaagggccttcgagaccgtggcgctggaccgcctggaccgcattggcaagaagaactccatcctcctccacaaagtccagcacgacctcaactccggcgtcttcaactaccaggagaatgagatcatccagcagattgtgcagcatgaccgggagatggcccactgcgcgcaccgcgtccaggctgctgcctctgccaccccaacccccacgcccgtcatctggaccccgctgatccaggcaccactgcaggctgccgctgccaccacttctgtggccatagccctcacccaccaccctcgcctgcctgctgccatcttccgccctcccccaggatctgggctgggcaacctcggtgccgggcagacgccaaggcacctgaaacggctgcagtccctgatcccttctgcgctgggctccgcctcgcccgccagcagcccgtcccaggtggacacaccgtcttcatcctccttccacatccaacagctggctggattctctgcccccgctggactgagcccactcctgccctcatccagctcctccccaccccccggggcctgtggctccccctcggctcccacaccatcagctggcgtagccgccaccaccatagccgggtttggccacttccacaaggcgctgggtggctccctgtcctcctccgactctcccctgctcaccccgctgcagccaggcgcccgctccccgcaggctgcccagccatctcccgcgccacccggggcccggggaggcctgggactcccggagcacttcctgccacccccaccctcatccagatccccgtcatctagccccgggcagctgggccagcctcccggggagttgtccctaggtctggccactggcccactgagcacgccagagacacccccacggcagcctgagccgccgtcccttgtggcaggggcctctgggggggcttcccctgtaggctttactccccgaggaggtctcagcccccctggccacagcccaggccccccaagaaccttcccgagtgccccgccccgggcctctggctcccacggatccttgctcctgccacctgcatccagccccccaccaccccaggtcccccagcgccggggcacacccccgctcacccccggccgcctcacccaggacctcaagctcatctccgcgtctcagccagccctgcctcaggacggggcgcagactctccgcagagcctccccgcactcctcaggggagtccatggctgccttcccgctcttccccagggctgggggtggcagcgggggcagtgggagcagcgggggcctcggtccccctgggaggccctatggtgccatccccggccagcacgtcactctgcctcggaagacatcctcaggttctttgccaccccctctgtctttgtttggggcaagagccacctcttctggggggccccctctgactgctggaccccagagggaacctggggccaggcctgagccagtgcgctccaaactgccatccaatctatgagctgggcccttccttccctcttctttcttcttttctctcccttccttcttccttcaggtttaactgtgattaggagatataccaataacagtaataattatttaaaaaaccacacacaccagaaaaacaaaagacagcagaaaataaccaggtattcttagagctatagatttttggtcacttgcttttatagactattttaatactcagcactagagggagggagggggagggaggagggagcaggcaggtcccaaatgcaaaagccagagaaaggcagatggggtctccggggctgggcaggggtgggagtggccagtgttggcggttcttagagcagatgtgtcattgtgttcatttagagaaacagctgccatcagcccgttagctgtaacttggagctccactctgcccccagaaaggggctgccctggggtgtgccctggggagcctcagaagcctgcgaccttgggagaaaagggccagggccctgagggcctagcattttttctactgtaaacgtagcaagatctgtatatgaatatgtatatgtatatgtatgtaagatgtgtatatgtatagctatgtagcgctctgtagagccatgtagatagccactcacatgtgcgcacacgtgtgcggtctagtttaatcccactgttgacaggatgcccaggtcaccttacacccagcaacccgccttggcccgcaggctgtgcacttgattggtctagggacgttctctctccagtcctcaaggaagaggaccccaagacttcgcagcaggccccctctctccccatctctggtctcaaagccagtcccagcctgacctctcaccacacggaagtggaagactcccctttcctagggcctcaagcacacaccg

SEQ ID NO: 974 - DNA, 658 bp, Homo sapiens
ttttttttgcaatgctcagtatctatttattaaatgaatgcacaattgaaagagtgaagattgaatgtctagatatttgttcctctaacccacaagctcacatgcagcagagcacacgaatgtgtgtgtgccaaggccccagaggctggatgcccacatatgtgctgatgcatgtgccctagggagtccctcttggttaacatctgtttaaaatctctgtcttcttcttgatagagaaacagcatggtttcctagactgaattgaagaatgaaggtgagagtacaaacagtgggagagacgtttcctcagctgtcagaacaggaacgacctgggttatgggaagcccagaaagggaggaggacttcttttggtcccagtgaaagatgcttccagaatctgtagccttacttatttgcttggatctcactggaataacttggtggtgaggtcaccggttctggggtgatcactgggtttgctgcatagatgtttggatagatgacactcacattgcttgattgacagcagaccaactggcagccaaagtgggaagatgcgcatgcgatgccaaactccaggaggcagaagaccagcagcacgccagaaatcgccattccagggttcacaccccaggcgtaaggataatagtcggggtag

SEQ ID NO: 975 - DNA, 2008 bp, Homo sapiens
  misc_feature (1)...(2008): n = a,t,c or g
cggaatttccgggtcgacgatttcgtcccggtacccggagcggctctgattcatggtttaacttgtggccctaaagaactggaaacccaaaggaacgaatattcctgccccacagagtcccgtctttggtgaggctgtttctggagtttacatgatgaccaaggtactaggcatggccccagttctgggccctaggcctccacaggagcaagtggggcctctgatggtaaaagtcgaggagaaagaagagaaaggcaagtaccttcctagcctggagatgttccgccagcgcttcaggcagtttgggtaccatgatacccctggaccccgagaggccctgagccaactccgggtgctctgctgtgagtggctgaggcccgagatccacaccaaggagcagatcctggagctactggtgctggagcagttcctgaccatcctgccccaggagctccaggcctgggtgcaggagcattgcccggagagcgctgaagaggctgtcactctcctcgaagatctggagcgggaactggatgagccaggacaccaggtctcaactcctccaaacgaacagaaaccggtgtgggagaagatatcctcctcaggaactgcaaaggaatccccgagcagcatgcagccacagcccttggagaccagtcacaaatacgagtcttgggggcccctgtacatccaagagtctggtgaggagcaggagttcgctcaagatccaagaaaggtccgagattgcagattgagtacccagcacgaggaatcagcagatgagcagaaaggttctgaagcagaggggctcaaaggggatataatttctgtgattatcgccaataaacctgaggccagcttagagaggcagtgcgtaaaccttgaaaatgaaaaaggaacaaaaccccctcttcaagaggcaggctccaagaaaggtagagaatcagttcctactaaacctaccccaggagagagacgttatatatgtgctgaatgtggcaaagcctttagtaatagctcaaatctcaccaaacacaggagaacacacactggggagaaaccttacgtgtgcaccaagtgtgggaaagctttcagccacagctcaaacctcaccctccactacagaacacacttggtggaccggccctatgactgtaagtgtggaaaagcttttgggcagagctcagaccttcttaaacatcagagaatgcacacagaagaggcgccatatcagtgcaaagattgtggcaaggctttcagcgggaaaggcagcctcattcgtcactatcggatccacactggggagaagccttatcagtgtaacgaatgtgggaagagcttcagtcagcatgcgggcctcagctcccaccagagactccacaccggagagaagccatataagtgtaaggagtgtgggaaagccttcaaccacagctccaacttcaataaacaccacagaatccacaccggggaaaagccctactggtgtcatcactgtggaaagaccttctgtagcaagtccaatctttccaaacatcagcgagtccacactggagagggagaagcaccgtaactttcaagcgctcctgttgttgtcgttgttttaaactttagaatctgaaaaccagaaagaagtcttgtcattgcagcagcatcgattccggtgatagagtttgtatcactcaacatcaggggatgcctgaggagtgcgagctccacagcaacatggcaggcaggaggtcctcagaaggtgtcaggaggttccacactcgccagttcactggagcagagtcccttcgccacacttagggtcccaggacatggccatagggtgagtctgttcccactgggcccactgagatggatttgggccaggactccatttatcagctgacctgtgtctggagggcaatggntcatcactctgctatcttctcctggagtttacacaagcccttcagagtgtaaacaccgatgtggattcaatcccactttcggagagaggatc

SEQ ID NO: 976 - DNA, 7086 bp, Homo sapiens
tttcgtgtgagtggggccgggacccgcagagccgagccgacccttctctcccgggctgcggcagggcagggcggggagctccgcgcaccaacagagccggttctcagggcgctttgctccttgttttttccccggttctgttttctccccttctccggaaggcttgtcaaggggtaggagaaagagacgcaaacacaaaagtggaaaacagttaatgaccagccacggcgtccctgctgtgagctctggccgctgccttccagggctcccgagccacacgctgggggtgctggctgagggaacatggcttgttggcctcagctgaggttgctgctgtggaagaacctcactttcagaagaagacaaacatgtcagctgctgctggaagtggcctggcctctatttatcttcctgatcctgatctctgttcggctgagctacccaccctatgaacaacatgaatgccattttccaaataaagccatgccctctgcaggaacacttccttgggttcaggggattatctgtaatgccaacaacccctgtttccgttacccgactcctggggaggctcccggagttgttggaaactttaacaaatccattgtggctcgcctgttctcagatgctcggaggcttcttttatacagccagaaagacaccagcatgaaggacatgcgcaaagttctgagaacattacagcagatcaagaaatccagctcaaacttgaagcttcaagatttcctggtggacaatgaaaccttctctgggttcctgtatcacaacctctctctcccaaagtctactgtggacaagatgctgagggctgatgtcattctccacaaggtatttttgcaaggctaccagttacatttgacaagtctgtgcaatggatcaaaatcagaagagatgattcaacttggtgaccaagaagtttctgagctttgtggcctaccaagggagaaactggctgcagcagagcgagtacttcgttccaacatggacatcctgaagccaatcctgagaacactaaactctacatctcccttcccgagcaaggagctggccgaagccacaaaaacattgctgcatagtcttgggactctggcccaggagctgttcagcatgagaagctggagtgacatgcgacaggaggtgatgtttctgaccaatgtgaacagctccagctcctccacccaaatctaccaggctgtgtctcgtattgtctgcgggcatcccgagggaggggggctgaagatcaagtctctcaactggtatgaggacaacaactacaaagccctctttggaggcaatggcactgaggaagatgctgaaaccttctatgacaactctacaactccttactgcaatgatttgatgaagaatttggagtctagtcctctttcccgcattatctggaaagctctgaagccgctgctcgttgggaagatcctgtatacacctgacactccagccacaaggcaggtcatggctgaggtgaacaagaccttccaggaactggctgtgttccatgatctggaaggcatgtgggaggaactcagccccaagatctggaccttcatggagaacagccaagaaatggaccttgtccggatgctgttggacagcagggacaatgaccacttttgggaacagcagttggatggcttagattggacagcccaagacatcgtggcgtttttggccaagcacccagaggatgtccagtccagtaatggttctgtgtacacctggagagaagctttcaacgagactaaccaggcaatccggaccatatctcgcttcatggagtgtgtcaacctgaacaagctagaacccatagcaacagaagtctggctcatcaacaagtccatggagctgctggatgagaggaagttctgggctggtattgtgttcactggaattactccaggcagcattgagctgccccatcatgtcaagtacaagatccgaatgggcattgacaatgtggagaggacaaataaaatcaaggatgggtactgggaccctggtcctcgagctgacccctttgaggacatgcggtacgtctgggggggcttcgcctacttgcaggatgtggtggagcaggcaatcatcagggtgctgacgggcaccgagaagaaaactggtgtctatatgcaacagatgccctatccctgttacgttgatgacatctttctgcgggtgatgagccggtcaatgcccctcttcatgacgctggcctggatttactcagtggctgtgatcatcaagggcatcgtgtatgagaaggaggcacggctgaaagagaccatgcggatcatgggcctggacaacagcatcctctggtttagctggttcattagtagcctcattcctcttcttgtgagcgctggcctgctagtggtcatcctgaagttaggaaacctgctgccctacagtgatcccagcgtggtgtttgtcttcctgtccgtgtttgctgtggtgacaatcctgcagtgcttcctgattagcacactcttctccagagccaacctggcagcagcctgtgggggcatcatctacttcacgctgtacctgccctacgtcctgtgtgtggcatggcaggactacgtgggcttcacactcaagatcttcgctagcctgctgtctcctgtggcttttgggtttggctgtgagtactttgccctttttgaggagcagggcattggagtgcagtgggacaacctgtttgagagtcctgtggaggaagatggcttcaatctcaccacttcggtctccatgatgctgtttgacaccttcctctatggggtgatgacctggtacattgaggctgtctttccaggccagtacggaattcccaggccctggtattttccttgcaccaagtcctactggtttggcgaggaaagtgatgagaagagccaccctggttccaaccagaagagaatatcagaaatctgcatggaggaggaacccacccacttgaagctgggcgtgtccattcagaacctggtaaaagtctaccgagatgggatgaaggtggctgtcgatggcctggcactgaatttttatgagggccagatcacctccttcctgggccacaatggagcggggaagacgaccaccatgtcaatcctgaccgggttgttccccccgacctcgggcaccgcctacatcctgggaaaagacattcgctctgagatgagcaccatccggcagaacctgggggtctgtccccagcataacgtgctgtttgacatgctgactgtcgaagaacacatctggttctatgcccgcttgaaagggctctctgagaagcacgtgaaggcggagatggagcagatggccctggatgttggtttgccatcaagcaagctgaaaagcaaaacaagccagctgtcaggtggaatgcagagaaagctatctgtggccttggcctttgtcgggggatctaaggttgtcattctggatgaacccacagctggtgtggacccttactcccgcaggggaatatgggagctgctgctgaaataccgacaaggccgcaccattattctctctacacaccacatggatgaagcggacgtcctgggggacaggattgccatcatctcccatgggaagctgtgctgtgtgggctcctccctgtttctgaagaaccagctgggaacaggctactacctgaccttggtcaagaaagatgtggaatcctccctcagttcctgcagaaacagtagtagcactgtgtcatacctgaaaaaggaggacagtgtttctcagagcagttctgatgctggcctgggcagcgaccatgagagtgacacgctgaccatcgatgtctctgctatctccaacctcatcaggaagcatgtgtctgaagcccggctggtggaagacatagggcatgagctgacctatgtgctgccatatgaagctgctaaggagggagcctttgtggaactctttcatgagattgatgaccggctctcagacctgggcatttctagttatggcatctcagagacgaccctggaagaaatattcctcaaggtggccgaagagagtggggtggatgctgagacctcagatggtaccttgccagcaagacgaaacaggcgggccttcggggacaagcagagctgtcttcgcccgttcactgaagatgatgctgctgatccaaatgattctgacatagacccagaatccagagagacagacttgctcagtgggatggatggcaaagggtcctaccaggtgaaaggctggaaacttacacagcaacagtttgtggcccttttgtggaagagactgctaattgccagacggagtcggaaaggattttttgctcagattgtcttgccagctgtgtttgtctgcattgcccttgtgttcagcctgatcgtgccaccctttggcaagtaccccagcctggaacttcagccctggatgtacaacgaacagtacacatttgtcagcaatgatgctcctgaggacacgggaaccctggaactcttaaacgccctcaccaaagaccctggcttcgggacccgctgtatggaaggaaacccaatcccagacacgccctgccaggcaggggaggaagagtggaccactgccccagttccccagaccatcatggacctcttccagaatgggaactggacaatgcagaacccttcacctgcatgccagtgtagcagcgacaaaatcaagaagatgctgcctgtgtgtcccccaggggcaggggggctgcctcctccacaaagaaaacaaaacactgcagatatccttcaggacctgacaggaagaaacatttcggattatctggtgaagacgtatgtgcagatcatagccaaaagcttaaagaacaagatctgggtgaatgagtttaggtatggcggcttttccctgggtgtcagtaatactcaagcacttcctccgagtcaagaagttaatgatgccaccaaacaaatgaagaaacacctaaagctggccaaggacagttctgcagatcgatttctcaacagcttgggaagatttatgacaggactggacaccagaaataatgtcaaggtgtggttcaataacaagggctggcatgcaatcagctctttcctgaatgtcatcaacaatgccattctccgggccaacctgcaaaagggagagaaccctagccattatggaattactgctttcaatcatcccctgaatctcaccaagcagcagctctcagaggtggctccgatgaccacatcagtggatgtccttgtgtccatctgtgtcatctttgcaatgtccttcgtcccagccagctttgtcgtattcctgatccaggagcgggtcagcaaagcaaaacacctgcagttcatcagtggagtgaagcctgtcatctactggctctctaattttgtctgggatatgtgcaattacgttgtccctgccacactggtcattatcatcttcatctgcttccagcagaagtcctatgtgtcctccaccaatctgcctgtgctagcccttctacttttgctgtatgggtggtcaatcacacctctcatgtacccagcctcctttgtgttcaagatccccagcacagcctatgtggtgctcaccagcgtgaacctcttcattggcattaatggcagcgtggccacctttgtgctggagctgttcaccgacaataagctgaataatatcaatgatatcctgaagtccgtgttcttgatcttcccacatttttgcctgggacgagggctcatcgacatggtgaaaaaccaggcaatggctgatgccctggaaaggtttggggagaatcgctttgtgtcaccattatcttgggacttggtgggacgaaacctcttcgccatggccgtggaaggggtggtgttcttcctcattactgttctgatccagtacagattcttcatcaggcccagacctgtaaatgcaaagctatctcctctgaatgatgaagatgaagatgtgaggcgggaaagacagagaattcttgatggtggaggccagaatgacatcttagaaatcaaggagttgacgaagatatatagaaggaagcggaagcctgctgttgacaggatttgcgtgggcattcctcctggtgagtgctttgggctcctgggagttaatggggctggaaaatcatcaactttcaagatgttaacaggagataccactgttaccagaggagatgctttccttaacagaaatagtatcttatcaaacatccatgaagtacatcagaacatgggctactgccctcagtttgatgccatcacagagctgttgactgggagagaacacgtggagttctttgcccttttgagaggagtcccagagaaagaagttggcaaggttggtgagtgggcgattcggaaactgggcctcgtgaagtatggagaaaaatatgctggtaactatagtggaggcaacaaacgcaagctctctacagccatggctttgatcggcgggcctcctgtggtgtttctggatgaacccaccacaggcatggatcccaaagcccggcggttcttgtggaattgtgccctaagtgttgtcaaggaggggagatcagtagtgcttacatctcatagtatggaagaatgtgaagctctttgcactaggatggcaatcatggtcaatggaaggttcaggtgccttggcagtgtccagcatctaaaaaataggtttggagatggttatacaatagttgtacgaatagcagggtccaacccggacctgaagcctgtccaggatttctttggacttgcatttcctggaagtgttccaaaagagaaacaccggaacatgctacaataccagcttccatcttcattatcttctctggccaggatattcagcatcctctcccagagcaaaaagcgactccacatagaagactactctgtttctcagacaacacttgaccaagtatttgtgaactttgccaaggaccaaagtgatgatgaccacttaaaagacctctcattacacaaaaaccagacagtagtggacgttgcagttctcacatcttttctacaggatgagaaagtgaaagaaagctatgta

SEQ ID NO: 977 - DNA, 1958 bp, Homo sapiens
caattcccgggtcgacgatttcgttttccctctgttttatttttcccccgtgtgtccctactatggtcagaaagcctgttgtgtccaccatctccaaaggaggttacctgcagggaaatgttaacgggaggctgccttccctgggcaacaaggagccacctgggcaggagaaagtgcagctgaagaggaaagtcactttactgaggggagtctccattatcattggcaccatcattggagcaggaatcttcatctctcctaagggcgtgctccagaacacgggcagcgtgggcatgtctctgaccatctggacggtgtgtggggtcctgtcactatttggagctttgtcttatgctgaattgggaacaactataaagaaatctggaggtcattacacatatattttggaagtctttggtccattaccagcttttgtacgagtctgggtggaactcctcataatacgccctgcagctactgctgtgatatccctggcatttggacgctacattctggaaccattttttattcaatgtgaaatccctgaacttgcgatcaagctcattacagctgtgggcataactgtagtgatggtcctaaatagcatgagtgtcagctggagcgcccggatccagattttcttaaccttttgcaagctcacagcaattctgataattatagtccctggagttatgcagctaattaaaggtcaaacgcagaactttaaagacgccttttcaggaagagattcaagtattacgcggttgccactggctttttattatggaatgtatgcatatgctggctggttttacctcaactttgttactgaagaagtagaaaaccctgaaaaaaccattccccttgcaatatgtatatccatggccattgtcaccattggctatgtgctgacaaatgtggcctactttacgaccattaatgctgaggagctgctgctttcaaatgcagtggcagtgaccttttctgagcggctactgggaaatttctcattagcagttccgatctttgttgccctctcctgctttggctccatgaacggtggtgtgtttgctgtctccaggttattctatgttgcgtctcgagagggtcaccttccagaaatcctctccatgattcatgtccgcaagcacactcctctaccagctgttattgttttgcaccctttgacaatgataatgctcttctctggagacctcgacagtcttttgaatttcctcagttttgccaggtggctttttattgggctggcagttgctgggctgatttatcttcgatacaaatgcccagatatgcatcgtcctttcaaggtgccactgttcatcccagctttgttttccttcacatgcctcttcatggttgccctttccctctattcggacccatttagtacagggattggcttcgtcatcactctgactggagtccctgcgtattatctctttattatatgggacaagaaacccaggtggtttagaataatgtcagagaaaataaccagaacattacaaataatactggaagttgtcccagaagaagataagttatgaactaatggacttgagatcttggcaatctgcccaaggggagacacaaaatagggatttttacttcattttctgaaagtctagagaattacaactttggtgataaacaaaaggagtcagttatttttattcatatattttagcatattcgaactaatttctaagaaatttagttataactctatgtagttatagaaagtgaatatgcagttattctatgagtcgcacaattcttgagtctctgatacctacctattggggttaggagaaaagactagacaattactatgtggtcattctctacaacatatgttagcacggcaaagaaccttcaaattgaagactgagatttttctgtatatatgggttttggaaagatggttttacacacta

SEQ ID NO: 978 - DNA, 2737 bp, Homo sapiens
ccgaggagggagcttgcggtgcgttctgggaaagttgctgggccagctcctttgtttccagtctgagcgttgcgttcggtttcccgagggtcttctgaggcaccgcggctgcgggcttctgagttcccggctctccgcagggaagcctcctcttcgtacctcgttttttggctcgtggggggtcctcccaccgctggccgacgcagccagcatgtccggggtgcgcgcagtgcggatcagcatcgaatcggcctgcgagaagcaggtccatgaggtgggcctggatggcaccgagacgtacctgcccccgctgtccatgtcgcagaatctggcgcgtctggcccagcggatagacttcagccagggttcgggctccgaggaggaggaggcggcggggaccgagggggacgcgcaggagtggccgggcgccgggtccagcgcagaccaggacgacgaggaaggagtggtaaaatttcagccttccctttggccttgggactcagtgaggaacaatttgagaagtgccctgacagagatgtgtgttctctatgatgttctcagtattgttagggataaaaaatttatgactcttgatcctgtctctcaggatgcacttcctccaaaacagaatcctcagacgttgcaattgatatctaaaaagaagtcacttgctggagcagcacaaatcttattgaagggggcagaaagactgactaaatcagttaccgaaaaccaagaaaacaagctacaaagagacttcaattctgagcttttgcgattacggcaacactggaaacttcgaaaagttggagataaaattctcggagatctgagctacagaagtgcaggatctctctttcctcatcatggtacatttgaagtaataaagaatacagatctcgatctggataaaaagatacctgaagattactgtcctcttgatgtccaaattcctagtgatttagaggggtctgcatatatcaaggtttcaatacaaaaacaggctccagatataggtgacctcggcacagttaacctcttcaaacgacctttgcccaaatccaaaccaggttccccacattggcagacaaaattagaagcggcacagaatgttctcttatgtaaagaaatttttgcacagctctctcgggaagctgttcaaattaaatcacaagtccctcacattgtggtgaaaaaccagattatctctcagccctttccgagcttgcagttatctatttctttgtgccattcctcaaatgataagaaatcccaaaaatttgctactgagaagcaatgtccggaggaccacctttatgtcctagagcataatttgcatctactgattagagagtttcataaacagaccttgagttccatcatgatgcctcatccagcaagtgcaccttttggccacaagagaatgagactttcgggtcctcaagcttttgataaaaatgaaattaattcattacagtccagtgaagggcttctggaaaaaataattaaacaagcaaagcatatttttctaaggagtagagctgctgcaaccattgacagcttagcaagccgaattgaggatcctcagatacaggctcattggtcaaatatcaatgatgtttatgaatctagtgtgaaagttttaatcacatcacaaggctatgaacaaatatgcaagtccattcaactgcaattgaatattggagttgagcagattcgagttgtacatagagatggaagagtaattacactgtcttatcaggagcaggagctacaggattttcttctgtctcagatgtcacagcaccaggtacatgcagttcagcaactcgccaaggttatgggctggcaagtactgagcttcagtaatcatgtgggacttggacctatagagagcattggtaatgcatctgccatcacggtggcctccccaagtggtgactatgctatttcagttcgtaatggacctgaaagtggcagcaagattatggttcagtttcctcgtaaccaatgtaaagaccttccaaaaagtgatgttttacaagataacaaatggagtcatcttcgtgggccattcaaagaagttcagtggaataaaatggaaggtcgaaattttgtttataaaatggagctgcttatgtctgcacttagcccttgtctactatgattttttccagatgtttcctaaagaagtttccagaaactttgacttgaaatgtttgcagatcaactataagcacaaagaagagataacttccaaaagagtgctgtttttaaaaataataattaggaaatgtttatttagcactttcaaacttttcactttataaatgacaagtgctttgaaatgcagaagtttatgtacagttgtatatacagtatgacaagatgtaaaataatatgtttttcatgcagtttaaaatattactaacttaagggtttctatgtgctttttaaaatattccttctttgatgttgacatcaaataaagtatgtggtttaaaaaaatctccaaatacctttttttccccccaaatactttctaaacttttttttttgagatggtatctcactctgtagcccagtctggagtgcagtggtgtgatcatggttcactgcagtcttgacctcccaggcttaggtgatccttctgtctcagccttccgagtagctgggaccacaggcatgcacaaccacggctggctaatttttgtattttttataaagacagggtttt

SEQ ID NO: 979 - DNA, 4670 bp, Homo sapiens
tttcgtctggaacccacgcggaggaaggaagagacgcaggcaggctgcggttacccaagcggccacccgggcctcagggaccccttccccgagagacggcaccatgacccagggaaagctctccgtggctaacaaggcccctgggaccgaggggcagcagcaggtgcatggcgagaagaaggaggctccagcagtgccctcagccccaccctcctatgaggaagccacctctggggaggggatgaaggcaggggccttccccccagcccccacagcggtgcctctccaccctagctgggcctatgtggaccccagcagcagctccagctatgacaacggtttccccaccggagaccatgagctcttcaccactttcagctgggatgaccagaaagttcgtcgagtctttgtcagaaaggtctacaccatcctgctgattcagctgctggtgaccttggctgtcgtggctctctttactttctgtgaccctgtcaaggactatgtccaggccaacccaggctggtactgggcatcatatgctgtgttctttgcaacctacctgaccctggcttgctgttctggacccaggaggcatttcccctggaacctgattctcctgaccgtctttaccctgtccatggcctacctcactgggatgctgtccagctactacaacaccacctccgtgctgctgtgcctgggcatcacggcccttgtctgcctctcagtcaccgtcttcagcttccagaccaagttcgacttcacctcctgccagggcgtgctcttcgtgcttctcatgactcttttcttcagcggactcatcctggccatcctcctacccttccaatatgtgccctggctccatgcagtttatgcagcactgggagcgggtgtatttacattgttcctggcacttgacacccagttgctgatgggtaaccgacgccactcgctgagccctgaggagtatatttttggagccctcaacatttacctagacatcatctatatcttcaccttcttcctgcagctttttggcactaaccgagaatgaggagccctccctgccccaccgtcctccagagaatgcgcccctcctggttccctgtccctcccctgcgctcctgcgagaccagatataaaactagctgccaacccagcctgtggccaggtcactgtctaccccagcccagcccagccctctgccgcttgtacatatgccatggggaccctgaggaactgaggccacgtcaatccctgtgccgccccattcgcccgttacatcttccaaactgggacggtcaaggctgaaggctcctctgggtttgagggtccaagggacaaggaggagaagcctagcaggatttcagatgcaggagagagacccaggaagcccggcagagccctgagccccactgcaattcctcctagggctgcacaatcatgtggccttagggcacactgtcctgcatccagtctgtgtcctcctgtctttctcatccaggtcaggcattgacactttgtaagaaagggggtaggggacacagctgggcaggtggagtgggtgggcaggatggctgtcccagtctgcccatcttctcttggctctgggaccagcggcttgttctagggatttggacctggaggccaagggcaataggagagggtctgaagcctgtgccgtctgctgcttgctgtgaatggccctcccgggtcatgacagagctcttttggggcaggaggtgagggcagggggccccgctccttggtaagggcctgccctggggctcccagggaagtgggagctggggagccaatccacccagacccgcgtccacctgggaggcatttggggttgcaggaccgagacccacatcctctcactcacttctccacccgccaggcagctgccacaggcctaaggctgagtgaggtgtgattgggccctccggctggatgttctgggggaggaggcaatcgctgtagctgccaggccagccccatctggaaggagtccctgctctgcctcagccctaacccgaggctgtgtgggagtcccttctgcacctcttatttcctaaacccttcctgtcagctgctgtttgctggctcgtccccagccaggcctcctgaggtcttcatagttggcacagtccacatctcttctagcttcactggccactcactcagcctagagtccctaagtgctcccccacttatctctgcatctctccaatttggaagccatccagctgatgctaacagccagggccagtccctccagctggtcccatgtaatgaggccagggctccttatcagcttccaggcggctgggatctcaggcagggtgtgcgtcagccctccaacccccagaggggcgcctgtggggagggaaccaggaggccacactgggggagcgtgcagccagcatgtgcagtggccaactccaggccagtggaaagttactgtgtggatacaggaaggctctgagtggatagcaggaccctcccttggcttcgccctctctctctctctcccctgtgctgggagctccgtctgccttgggaagggagacgaggtgtgctgttccttcccagccccatccctccccacccttcctactcccagctttcaagaaacattgcagaagcatttgaagttttgttccatcttggatatttgaagagaaaaggagccaagaactggcgggtggtgtgtgtgcagcaaaggcattgggggcacgggggagatgcccactgtgtgctgggctaaattaatccatcgcagagatcctccagagacagcgctctgctcatgtccgtagcagagggaaaagccgaggtgctcagaaaggctcggtaatgagtcccaggtcatacggctagcgagtggcgggcctggggttcagacccacagctgcctcaagcaaacagggtatcacgcttgcccctgggcctgggtgggggccggaatgagaccacatgagagcgcagagaggtgggtggtcaggccctgatgtcctggggatttcttgtcctcagtgccacccggcctcccgtctttcctgaaacccctcgccagattttgcactctgaggtttttatcttccagacaagagctgggaggcaagatttctggtttctggttcctagcctcactgccagcgggctcctgctattaggtgagggtttcttgctgtctggaattcagtttttccatctgccacatggaagttcatagccaggatagggcgggagaggcaccagaacatttctctccactgactttctcacccggttcccaccctcctccacctcctctcctccgggcccctcagtttcctctcctcatctctggcctcagttccagagggttagccccagcaccccactctcctgccactgtcagatagccttggtcatgcttcctagaatctacttgtccaagttctcctctccctgggataagttactgcagaaactggggatttagaagcttattcagggctgagtgccaaaagcttgggggaggagggacaggtcctcggcaataaacagtgtcacacacgcatcacagccatttgagaaatggcttctttgcagagctggggaagccgggcagaagatgccgcagcctcctactctgggtcctgagggggggtggcaggtaccacagtgtaggcagcagggtcagggcccaagtctatgcgtttcatctccaatccaggcagtgaggaatcctgaaacaccaggagaggcgtcagaagtaggaagggcaggggaacaggaatgcaagattaaggaaaccgcagctgagcaggtgtcacaagctgtaaaggaggaagggagtctgcaggcccttcacatttttggcctgggtggggctgggcccaggaaggggtgggctggattttgtaaagctggaggcagccaggaatctgactgtccggaatgtgagttgaggggtctcccactgaagtcctcttctggaagctgcagatgggggcccgggaggcacacacgagtctgggactcattcccgggcacacctatggctccttcggtatcacctggggaagccccggaatcttagttcttccattccctactcttccttccgagggagtcaggatgggacagacacccattttccaaaaggctccttgcctccttccctggcccacctgaagccaagtcccaggtgtcctggctgctctcctgggcggggtgggatttttgcataagcactttgcttgccctccagtggctgcttgaggaaaacgcagggcctggtttgggagagtcaccgagggcccatgtggctggaggttgggggcaggatctggcccgagctctcctcagacctccccagacctgtcttctcatcagccaccgctgttttcttttgccgaacgatggttgcatctctcggacacagtgtaccccctcccaagccctccctgagccgttctcctgagtccctgagggcagacacagctccagggacccaggccagctgccacacccccgacactcctgctgtccactggccttagctcctgcaagttccccagtgtccgcacctgttcccttccctgacctcaccttcctggggtctgtgactgactggagataaaaataaaagcaattgtgacacctgaaaaaaaaaa

SEQ ID NO: 980 - DNA, 1915 bp, Homo sapiens
aaattcccgggtcgacgatttcgtctgtcctcggagcaggcggagtgaagggacttgagcgagccagttgccggattattctatttcccctccctctctcccgccccgtatctcttttcacccttctcccaccctcgctcgcgtagccatggcggagccgtcggaggccactcagtcccattccatctcctcgtcgtccttcggagccgagccgtccgcgcccggcggcggcgggagcccaggagcctgccccgccctggggacgaagagctgcagctcctcctgtgcggtgcacgatctgattttctggagagatgtgaagaagactgggtttgtctttggcaccacgctgatcatgctgctttccctggcagctttcagtgtcatcagtgtggtttcttacctcatcctggctcttctctctgtcaccatcagcttcaggatctacaagtccgtcatccaagctgtacagaagtcagaagaaggccatccattcaaagcctacctggacgtagacattactctgtcctcagaagctttccataattacatgaatgctgccatggtgcacatcaacagggccctgaaactcattattcgtctctttctggtagaagatctggttgactccttgaagctggctgtcttcatgtggctgatgacctatgttggtgctgtttttaacggaatcacccttctaattcttgctgaactgctcattttcagtgtcccgattgtctatgagaagtacaagacccagattgatcactatgttggcatcgcccgagatcagaccaagtcaattgttgaaaagatccaagcaaaactccctggaatcgccaaaaaaaaggcagaataagtacatggaaaccagaaatgcaacagttactaaaacaccatttaatagttataacgtcgttacttgtactatgaaggaaaatactcagtgtcagcttgagcctgcattccaagctttttttttaatttggtgttttctcccatcctttccctttaaccctcagtatcaagcacaaaaattgatggactgataaaagaactatcttagaactcagaagaagaaagaatcaaattcataggataagtcaataccttaatggtggtagagcctttacctgtagcttgaaaggggaaagattggaggtaagagagaaaatgaaagaacacctctgggtccttctgtccagttttcagcactagtcttactcagctatccattatagttttgcccttaagaagtcatgattaacttatgaaaaaattatttggggacaggagtgtgataccttccttggtttttttttgcagccctcaaatcctatcttcctgccccacaatgtgagcagctacccctgatactccttttctttaatgatttaactatcaacttgataaataacttataggtgatagtgataattcctgattccaagaatgccatctgataaaaaagaatagaaatggaaagtgggactgagagggagtcagcaggcatgctgcggtggcggtcactccctctgccactatccccagggaaggaaaggctccgccatttgggaaagtggtttctacgtcactggacaccggttctgagcattagtttgagaactcgttcccgaatgtgctttcctccctctcccctgcccacctcaagtttaataaataaggttgtacttttcttactataaaataaatgtctgtaactgctgtgcactgctgtaaacttgttagagaaaaaaataacctgcatgtgggctcctcagttattgagtttttgtgatcctatctcagtctgggggggaacattctcaagaggtgaaatacagaaagcctttttttcttgatctttttcccgaggtttcaaatctccgattcccatttggggaaaagatcaaga

SEQ ID NO: 981 - DNA, 3432 bp, Homo sapiens
agcggccgccgcgcgccagcgggaggcgctccctctgcccacctccgccccctgcggaccgagacccggagatgtcgagttgtggagttcggctcggcccggcgacgggctagctgcccgggaacccccgcgggtggacacatgcatgccggagctccgggaggggccgcgccgccaccgtctgaactaggatgtcccgacatgaaggtgtcagctgtgatgcatgtttaaaaggaaattttcgaggtcgcagatataagtgtttaatttgctacgattacgatctttgtgcatcttgttatgaaagtggtgcaacaacaacaaggcatacaactgaccacccaatgcagtgcatattaacaagggtagattttgatttatactatggtggggaagctttctctgtagagcagccacagtcttttacttgtccctattgtggaaaaatgggctatacggagacatctcttcaagaacatgttacttctgaacatgcagaaacatcaacagaagtgatttgtccaatatgtgcagcgttacctggaggcgatcctaatcatgtcacggatgactttgcagctcatcttacacttgaacacagagcccctagagatttagatgaatcgagtggtgttcgacatgtacgtagaatgtttcaccctggccggggattaggaggtcctcgtgctcgtagatcaaacatgcactttactagcagttctactggtggactttcttcttctcagagttcatattctccaagcaatagggaagccatggatcctatagctgagcttttatctcagttatcaggagtgagacgttctgcaggaggacagcttaattcctctggcccttccgcttctcagttacaacaactgcagatgcagctgcagctagaacggcagcatgcccaggcagcacggcaacaactggagaccgcacgcaacgcaacccggcgtactaacacaagcagtgtcaccactacaatcacacaatccacagcaacaaccaacatagctaatacagaaagcagtcagcagactctacagaattcccagtttcttttaacaaggttgaatgatcctaaaatgtctgaaacggagcgccagtccatggaaagcgagcgtgcagaccgcagcctgtttgtccaagagctccttctgtccactttagtgcgtgaagagagctcatcctcagatgaggatgatcggggggagatggcagattttggtgctatgggctgtgtagatattatgcctttagatgttgctttagaaaacctaaatttaaaagagagtaataaaggaaatgagcctccaccacctcctctttgatgacatcccaattcgcagacaatgtcctctgtgctgtatttgccaatgaaagtggacaacaactatcttgggtttgtttggtgattgtaatttcaggtctgtcactcttgttacattgtgtacattcaaaaggaagagagaaaatatatatgataatcatttccacttaactaatttttacttctagcaggtaaatgtaggtagcagtgcaggggtgatctctgcttcctgtaccttgacatgcaaaaggctctcctaatactccacattcaaactgaagaggaaaattgaaatctctaatgaagctgctgtgtgtatttatgaatattaatgaataaaaactgcttggatggtttaccttaactactgcatgaggttttttgcagcgtgcatgagttttagtgaccttgttatttaagaagttaaatacaaggagtaaaacttaaaaaaaaaatacaaagcccaaagctttcccaaacattattcaatggttacacgacgaagtaggcttttgaataatgtctgcctgaatcacctttctttgtgtgcctcctacgcacaaagccagctctgcagtgggaatctgggggattatagccgggtgtggcactccgccctgtgtgactgtcctgtcgccctgttagtcatcttgcctgtgtggagctcagcctgtctctttaactcatctgtagaagacacaccagtaaagctactgttggaatctgctgcaggggcctttgtgtgccctaaaaacaaatcctgttcatgtttgtttaaagtttttactttttgtggttgtttaaaattttttcaattgttaaatatgttttattcaggtgtagatgaatttcatttattgactgttcaacagagttaacctgaattatgttgtctttgtttttaaaaatctcacattctcaatcatattttgcattatttatgtatttgctttgtagtttgctgagacagatcagtatcaggggagctttgaggatttgccttcccagatttgtcagtatattacaaccaaattcttaatgctaattttagcaccttttatttattgggttttttctggcataaaaagtaaagccttttaattgaatcatgccacctatatgcctatattattaatcctatgtgtaaaaaaaatgtacagctttttttgggtttgttttggggtttggaagggccgggttattttttatttcctgtttcagtttttgtgcatagactttcacaatagctccaaggcagggacagcgggtttgggggttgggagggcagtttttggaatgtaaatttaggacttttaaaaaggtgcgcacagcttctgataaatttataactagacttaacctaatcatgtctcgttccagttctcttttctctgagcccttttcaaagtctcctctctttctcctgtcatccttttcctttcctgtccgtgtatctccgtttcttcaacatgacaagcatacagacttgaacacccctccggtgttcttccgagaactgtgaagtccatgttcatccaaatgtaaccaaaaaagaagtcaccctacatgtctgaaaaactgttgcttctcctctgaaacttcaaactccaacgatttccaaatacaatagctttgttttctttagttctgtaatggataatgtttaaaggaaaactttacaccaggcttctggttacactagaagtcaagcccattagggattttcattttttttcatttggttgttgagaagtttcaaaaatcagttttcaagctgtggtctttcaaacacatctgcacataagtcacacatttcaataaagcattttcaagactgttgaccacttgaatttctttggtgttagtggattaacctaaccattactctgagattttatatctctaatccagtattttttttctttttatgctaaacatgggagatcctggttttgtgtgaatgcattattttggatgtgagaaataaatgccaattatatgtactttcccttttctgcacaaattctgggaaaatgtaaaagccttcattttttaacatggttttagggaacaactgtaagtccattcagagcagg

SEQ ID NO: 982 - DNA, 1544 bp, Homo sapiens
gggtcgacccacgcgtccgcggacgcgtgggcgcaatggttctgcactgaggccctcgtcatgggggcgcctgtgtggtacttggtagcggcggctctgctagtcggctttatcctcttcctgactcgcagccggggccgggcggcatcagccggccaagagccactgcacaatgaggagctggcaggagcaggccgggtggcccagcctgggcccctggagcctgaggagccgagagctggaggcaggcctcggcgccggagggacctgggcagccgcctacaggcccagcgtcgagcccagcgggtggcctgggcagaagcagatgagaacgaggaggaagctgtcatcctagcccaggaggaggaaggtgtcgagaagccagcggaaactcacctgtcggggaaaattggagctaagaaactgcggaagctggaggagaaacaagcgcgaaaggcccagcgtgaggcagaggaggctgaacgtgaggagcggaaacgactcgagtcccagcgcgaagctgagtggaagaaggaggaggagcggcttcgcctggaggaggagcagaaggaggaggaggagaggaaggcccgcgaggagcaggcccagcgggagcatgaggagtacctgaaactgaaggaggcctttgtggtggaggaggaaggcgtaggagagaccatgactgaggaacagtcccagagcttcctgacagagttcatcaactacatcaagcagtccaaggttgtgctcttggaagacctggcttcccaggtgggcctacgcactcaggacaccataaatcgcatccaggacctgctggctgaggggactataacaggtgtgattgacgaccggggcaagttcatctacataaccccagaggaactggccgccgtggccaacttcatccgacagcggggccgggtgtccatcgccgagcttgcccaagccagcaactccctcatcgcctggggccgggagtcccctgcccaagccccagcctgaccccagtccttccctcttggactcagagttggtgtggcctacctggctatacatcttcatccctccccaccatcctggggaagtgatggtgtggccaggcagttatagattaaaggcctgtgagtactgctgagcttggtgtggcttggtgtggcagaaggcctggcctaggatcctagataagcaggtgaaatttaggcttcagaatatatccgagaggtggggagggtcccttggaagctggtgaagtcctgttcttattatgaatccattcattcaagaaaatagcctgttgcacatttactctgtttctttgtgccctgcaagccctgcccccaagacctagataagatctttctcttcttttgcccccactcaaattagaagtggggagcctcttgggccacatctctgttaactggggaggggaggtctcatgggtctttttttaactgatcaggagccctaagtagggctgagagccagcggggagaagaattaatgagaagcatcaaggatagagtcctagggagctgtat

SEQ ID NO: 983 - DNA, 1501 bp, Homo sapiens
  misc_feature (1)...(1501): n = a,t,c or g
cggacgcgggggcggtttttgggtctgttacccaaagaatgataaaggtggttttatttcaagaagtcgatcaaaaagaaagccccagcgctctagagctcagctgacgggaaagggggtgcgcagcctcgagtttgagagctacccggagctccaagacaggggtgcgtgcgacgacctgggacgctggaaacccggagctgcgcgctgggcggaaaggactcctagtgggcccggctganaaggcggaggtggcgcgcgaggggcgggctcgtgccaacgctggcctgggccgaggccactggtgcatatgttcccgggagggataagccagacctgccaacctggaagaggaatttccgctctgccctcaaccgcaaagaagggttgcgtttagcagaggaccggagcaaggaccctcacgacccacataaaatctacgagtttgtgaactcaggagttggggacttttcccagccagacacctctccggacaccaatggtggaggcagtacttctgatacccaggaagacattctggatgagttactgggtaacatggtgttggccccactcccagatccgggacccccaagcctggctgtagcccctgagccctgccctcagcccctgcggagccccagcttggacaatcccactcccttcccaaacctggggccctctgagaacccactgaagcggctgttggtgccgggggaagagtgggagttcgaggtgacagccttctaccggggccgccaagtcttccagcagaccatctcctgcccggagggcctgcggctggtggggtccgaagtgggagacaggacgctgcctggatggccagtcacactgccagaccctggcatgtccctgacagacaggggagtgatgagctacgtgaggcatgtgctgagctgcctgggtgggggactggctctctggcgggccgggcagtggctctgggcccagcggctggggcactgccacacatactgggcagtgagcgaggagctgctccccaacagcgggcatgggcctgatggcgaggtccccaaggacaaggaaggaggcgtgtttgacctggggcccttcattgtaggctccctggggcccccagatctgattaccttcacggaaggaagcggacgctcaccacgctatgccctctggttctgtgtgggggagtcatggccccaggaccagccgtggaccaagaggctcgtgatggtcaaggttgtgcccacgtgcctcagggccttggtagaaatggcccgggtagggggtgcctcctccctggagaatactgtggacctgcacatttccaacagccacccactctccctcacctccgaccagtacaaggcctacctgcaggacttggtggagggcatggatttccagggccctggggagagctgagccctcgctcctcatggtgtgcctccaacccccctgttccccaccacctcaaccaataaactggttcctgctatgaaaa

SEQ ID NO: 984 - DNA, 1705 bp, Homo sapiens
gccaacatggctccagtggagcacgttgtggcggatgctggggctttcctgcggcatgcggctctgcaggacatcgggaagaacatttacaccatccgggaggtggtcactgagattcgggacaaggccacacgcaggcggctcgctgtcctgccctacgagctgcggttcaaggagcccttaccggaatacgtgcggctggtgactgagttttcaaagaaaacaggagactaccccagcctctctgccacggacatccaagtgcttgcactcacataccagttggaagcagagtttgttggggtgtctcacctaaaacaagaaccacagaaggttaaggtgagctcatcgattcagcacccagaaacacctctgcacatttctggtttccatctgccctacaagcctaaacccccacaagaaacagaaaaaggacactcagcttgtgagcctgagaacctggaatttagttccttcatgttctggagaaaccctttgcccaacatcgatcatgaactgcaggagctgctgattgacagaggtgaggacgttccaagtgaggaggaggaggaggaagaaaacgggtttgaagacagaaaagatgacagcgatgacgacgggggtggctggataacccccagtaacatcaagcagatccagcaggagctggagcagtgtgacgtccccgaggacgtgcgggttggctgcctgaccacagacttcgccatgcagaatgttctgctgcagatggggctgcacgtgctggcggtgaacggcatgctgattcgtgaggcccggagctacatcttgcgctgccatggctgtttcaagacaacgtctgacatgagccgagtgttctgctcacactgtgggaacaagaccctgaagaaagtgtccgtgaccgtcagcgacgacggcaccctgcacatgcacttctcccgcaaccccaaggtgctgaacccccgcggcctccggtactcgcttcccactcccaaagggggcaaatacgccatcaacccccatctcaccgaggatcagcgcttccctcagctgcgactctcccaaaaggccaggcagaaaaccaacgtgttcgcccctgactacatcgccggggtgtcaccctttgtcgagaatgacatctccagccgctcagctaccctgcaggtccgggacagcaccttgggagctgggcggagacgcttaaatcccaacgcttccagaaagaagtttgtgaagaaaaggtgaagagcgagttcccgcaggcaaattggatgggcgtctggccgccgtggagttccggtgacccatttccccagccgtgtcgtctccaggaccacccgatggaaataacaggcgggcttcacggtgcggctctgtccgcccatgccccgctgggtctgcagggaactggactgtcccatggcctgtgagcaccggagcgcctggctgcctgccaaggaagtgcaattgcataaaaacagaaagaacaacgccctggagccaatcttcaagaaaggaatttccaaaggataatatttttctaataaatgcggctgcaacctcctgtgcatttaattaaataggccaaatttttgctgcttaggtcatctcaaggctgatacttgagctgtgtgcccagagatcatgcatttagatttatatttttgccagaaaatacaaggttataataaaactaagaactacc

SEQ ID NO: 985 - DNA, 850 bp, Homo sapiens
acaacaatggttttattgtgcaaaagaagcggttgtctccgtaggagggtcagaaagatattttagtgagaaaagatgaaggaaaaattgcctctgcattccaggagaagggggtctctgaactgttgctcgctgagatggggccctgtgaaagactctttgcagaaagctctgctctgctgagcaaatgcacatggtggtccctgaccctgtgatccccaaggcccattttagtaacaaacaattacataatgtctcctttcctcgcccgaaattagaatcatagatagtatcacctcctacacgtattagaggaatacacatcagcataatgccctaactggaatatgaagaagaaataacataagacaattcataatgaaagtgtgcatttcaggccaggcgaggtggctcacgcccgtagtcccagtactttgggagactgaggcgggcagatcacttgagctcaagagtttgagaccagcctgggcaacatggggaaaccccatctctacgaaaataaataaataaagtgcatttcagcatatcaatgctcgggccaggccacaccaacagaagacacagtaagagacagacacttaggtctatccacggcgacagctacgaatacaagggaaaaggggcagttcaggcactgggaatgttggccttggattttccagaatggcaactgactctcagtgaagcgctgaaccaaagaacaatcttctctagagtcacacagaagggatattcctggattaaacaacatttttaaacacttgttgaaggctttcatttaaaagcctaaaaaatcttgaaccagccccagaggggctcacacctggta

SEQ ID NO: 986 - DNA, 1327 bp, Homo sapiens
tttcgtagaccttcctcagagccgctttcagaaaagcaagctgcttctggttgggcccagacctgccttgaggagcctgtagagttaaaaaatgaaccccacggatatagcagacaccaccctcgatgaaagcatatacagcaattactatctgtatgaaagtatccccaagccttgcaccaaagaaggcatcaaggcatttggggagctcttcctgcccccactgtattccttggtttttgtatttggtctgcttggaaattctgtggtggttctggtcctgttcaaatacaagcggctcaggtccatgactgatgtgtacctgctcaaccttgccatctcggatctgctcttcgtgttttccctccctttttggggctactatgcagcagaccagtgggtttttgggctaggtctgtgcaagatgatttcctggatgtacttggtgggcttttacagtggcatattctttgtcatgctcatgagcattgatagatacctggcgatagtgcacgcggtgttttccttgagggcaaggaccttgacttatggggtcatcaccagtttggctacatggtcagtggctgtgttcgcctcccttcctggctttctgttcagcacttgttatactgagcgcaaccatacctactgcaaaaccaagtactctctcaactccacgacgtggaaggttctcagctccctggaaatcaacattctcggattggtgatccccttagggatcatgctgttttgctactccatgatcatcaggaccttgcagcattgtaaaaatgagaagaagaacaaggcggtgaagatgatctttgccgtggtggtcctcttccttgggttctggacaccttacaacatagtgctcttcctagagaccctggtggagctagaagtccttcaggactgcacctttgaaagatacttggactatgccatccaggccacagaaactctggcttttgttcactgctgccttaatcccatcatctacttttttctgggggagaaatttcgcaagtacatcctacagctcttcaaaacctgcaggggcctttttgtgctctgccaatactgtgggctcctccaaatttattctgctgacacccccagctcatcttacacgcagtccaccatggatcatgatctccatgatgctctgtagaaaaatgaaatggtgaaatgcagagtcaatgaactttccacattcagagcttacttaaaattgtattttagtaagagattcctgagccagtgtcaggaggaaggcttacacccacagtggaaagacagcttctcatcctgcaggcagcttttt

SEQ ID NO: 987 - DNA, 804 bp, Homo sapiens
cttcgttatccgcgatgcgtttcctggcagctacattcctgctcctggcgctcagcaccgctgcccaggccgaaccggtgcagttcaaggactgcggttctgtggatggagttataaaggaagtgaatgtgagcccatgccccacccaaccctgccagctgagcaaaggacagtcttacagcgtcaatgtcaccttcaccagcaatattcagtctaaaagcagcaaggccgtggtgcatggcatcctgatgggcgtcccagttccctttcccattcctgagcctgatggttgtaagagtggaattaactgccctatccaaaaagacaagacctatagctacctgaataaactaccagtgaaaagcgaatatccctctataaaactggtggtggagtggcaacttcaggatgacaaaaaccaaagtctcttctgctgggaaatcccagtacagatcgtttctcatctctaagtgcctcattgagttcggtgcatctggccaatgagtctgctgagactcttgacagcacctccagctctgctgcttcaacaacagtgacttgctctccaatggtatccagtgattcgttgaagaggaggtgctctgtagcagaaactgagctccgggtggctggttctcagtggttgtctcatgtctctttttctgtcttaggtggtttcattaaatgcagcacttgggttagcagatgtttaattttttttttaacaacattaacttgtggcctctttctacacctggaaatttactcttgaataaataaaaactcgtttgtcttgtcaaaaaa

SEQ ID NO: 988 - DNA, 1204 bp, Homo sapiens
ttttttttttttaggtttttcaataccttctttattatgtctataaaattatatgtagcattggaaatgttattgaatatgacaccaacaacgtgctattggattttttaaattttgacttcttttaaagaaggggataacaatctgtggaaaatgcttttactcgtatcatgccaatatactgcaaggagtatttcaaaataatataaaagtaattcacagacttagattaagtgaagatcaaatgaccccaaaatttttcttccttagtttttcacagcaactgctaaagtccataagctgatttttccaagaaaattattctaataattttgagtgttcaatccgtgcaatggtccagtcaggctttactccttgtgtgaactccctctgaaactcatagcttgcactaagaagttgtttagtttccacattctgattccccaacttaacctggaatacactggctcctcttaaagtttcactggggatgttggcactggttagataccaaaagcacatcaggatgttaacaaacttccttcctttctcatcatagtaaatggagatgtctcctgttgatgtaaatacaatttcatctatgttagcagcaagggcatttttatggttgtcaggtagtgaagtaaccttttctttcaatgcatgtagcacctctttggccacaagttcttccaacagatcaaatttacactgtgacagcaacttggatacatgagcaaaagcctgcttcgctccctcggagaactctgtgatgctgaactctttgtcgaaataggcccagataaggaaggccttaattcgagtcctaacccagttgatggggttggagaatcccaggacgatcatcttggttttctggtgctgctggggcttctcctccgtgctgtagctgcgctgagggcaggcagggaaagaagcgaaggctgcggggagtcccgggctgctgagcactggccaccgggagccctgggcaggtagcgccgaggctgccaaggccctagcgcttcgtggaaataacgccgctcccaagccgaggcgacagcggcagaagtagcaaagtgtggccgacggcagcctcacctcggccacagcaggagtccggagtcggacggccccgcagggcagcgaccgagagtgcaggaactggggtagcaaacgagcggccagcgccatttttatgacg

SEQ ID NO: 989 - DNA, 395 bp, Homo sapiens
tcaccatctgttttctccatgccaggtcattcatgtaacattcattcacataacaaatacaaataaatgagtggattcattcatcagctattaattcagaatctcttttgtgtctaccacactaggctcaagacttcccagggtctttgtctcctctccctcaaatctctccacccaatgtcttgacaaatactgtagatccttcctgcacagcatcaccagaatgtttttctttcttttcattcacctctgtcatcatccatgctatggagtttatggaggatgtattctgcagcaggaagtgtgatgggcactgacgctgcagaaagactcctgttgtccacctcgggagctgacacgataaatgcgggtaaatctcaatcctttaatatctt

SEQ ID NO: 990 - DNA, 1251 bp, Homo sapiens
ggagagaagcagcttcggctgcagcaaaccacgcaggtccttcttgatcatctagaactgaccgctccgccttgccaggagtctgcagaaccacgtggctagcctgcctgaagttctcacctctccaggaaggcggggggtttctaatggctgcagctgcgctgggggctgggggctcccgctgggactccacttccgtggatgtctaagcttcacctttcttgcgcccgcaggggcatgactcaggtgaaagggagccattttctcagacccctggcctcatgcagcccttcagcatccccgtgcaaatcacacttcagggcagccggaggcgccaggggaggacagcctttcctgcctcagggaagaagagagagacagactacagtgatggagacccactagatgtgcacaagaggctgccatccagtactggagaggaccgagccgtgatgctggggtttgccatgatgggcttctcagtcctaatgttcttcttgctcggaacaaccattctaaagccttttatgctcagcattcagagagaagaatcgacctgcactgccatccacacagatatcatggacgactggctggactgtgccttcacctgtggtgtgcactgccacggtcaggggaagtacccgtgtcttcaggtgtttgtgaacctcagccatccaggtcagaaagctctcctacattataatgaagaggctgtccagataaatcccaagtgcttttacacacctaagtgccaccaagatagaaatgatttgctcaacagtgctctggacataaaagaattcttcgatcacaaaaatggaacccccttttcatgcttctacagtccagccagccaatctgaagatgtcattcttataaaaaagtatgaccaaatggctatcttccactgtttattttggccttcactgactctgctaggtggtgccctgattgttggcatggtgagattaacacaacacctgtccttactgtgtgaaaaatatagcactgtagtcagagatgaggtaggtggaaaagtaccttatatagaacagcatcagttcaaactgtgcattatgaggaggagcaaaggaagagcagagaaatcttaagacggtggccaaattaaagtgctggccttcagatgtctgtgatttctgcaactgaggacctaattatgcctgtctgcaaactaataatgtaaaaggtaataattaaagtatcatattttcatgtgggaaaaaattt

SEQ ID NO: 991 - DNA, 1258 bp, Homo sapiens
acctctagtccagcgtggtggaattcagtgccctgagcgtctccatggcctgcctgagcccctcgcagctccagaagttccaacaggatggattcctggtgctggaaggattcttgtctgcggaagagtgtgtggccatgcaacaaaggattggcgagatagtggctgaaatggatgttcctctccactgccgcacagaattctccacccaggaagaggagcagcttcgagcccagggcagcacagactatttcttgagcagtggtgacaagattcgattcttctttgagaaaggcgtttttgatgagaaaggaaatttcctggtccctccggagaaatccatcaacaaaattggccacgctctgcacgcccacgaccccgtcttcaagagcatcacacactccttcaaggtgcagaccttggccagaagtctgggcctccagatgcccgtggtggtgcagagcatgtacatctttaagcaacctcactttggcggtgaagtctcccctcatcaggacgcctccttcctgtacacggagcccctgggccgggtgctgggcgtgtggatcgcagtggaggatgccacgctggagaacggctgtctctggttcatccctggctcccacaccagtggtgtgtcaagaaggatggtccgggcccctgttggctcagcgcctggtaccagcttccttgggtcagagccagcccgggataacagcctctttgtgcccaccccagtgcagagaggggccctggtcctcatccatggagaagtggtacacaagagcaagcagaacctctctgaccgctcgcgccaggcctacactttccacctcatggaggcctctggcaccacctggagcccggagaactggctccagccaacagctgaactgccctttccccaactgtacacctaaaggctctcgcagggcaggagccctcgcccctcccgggtgaagctgtgggctgtaaacaccagtgccttgctcagcctcctggttgcaacagggaggtcttgtctcccctcctgggctttcctcctgccctgtgggcagcagcctaggctgggtcaggggcttccctaagatcttcacctctctgcctccctactgccccaacatagccttgaggaggcttctcagccaccaaagggttctggccccttctcactctcctctcctctcagatggaactctggttattatggtgttagttatcgaataaaaacgacttcagaatgcaaaaaaaaaaaaaa

SEQ ID NO: 992 - DNA, 906 bp, Homo sapiens
tcagagatgctctgggtcacccaaccaccttctcctcctggacacctcctgggcatctccttttcctttgaggtcaccagccttttttgaagttagatcaggccgtataactgacctctgctgtaagtatatgttaacaggatgcttatcttggttctggccaaggccccagaagccaagaataaaattagatgcaggtgcccccattaggtgcttgaatttgagataaaatctggaggtgtatctttctggggctcgatcagggtctctgctttcattcaaagtttctccaaagacttcttttgccaaggaaatccttccacaaaccaaaatccggggaactctccgaaacttggcatctgcctgtccctctctgcccaaggtgcaggatcctctgtaacccacagtaatgaaaccccacttgcggtcggcagggagcagggaggaaggggggcagattcttgtgtcgcttccttgggaggcatcttcaaagtcactgtggcagaattcatctgggctttgcttgatttcatcgggggtcaggagtttgaccaagtctgggagctggaagtattcagcttcccttttcagtcttcctttttctggaaagtgatcaggcaggaccacctgcctgtccctgagatagtccagaatataacggaacaagaatccatctctgtcaatgaaaaaccttcccttggagtccttggctagatcattagccgtgtctctctttggggaaaacattttccacaggagggaatgagggatgcttatcaatgtggaatggcgagtaaaataaacttgacccccgacattcagctctaccacctcagggaaggagttgggaactgcggacccttgttctcgaggataataacgactacagtttccactcagagccat

SEQ ID NO: 993 - DNA, 3199 bp, Homo sapiens
atgaggatgcaaaggcataagaacgacacaatggactttggggactcggggaaaaggataggagggggagttctgtgcctgctgcaccagtcaaatacttccttcattaagctgaataataatggctttgaagatattgtcattgttatagatcctagtgtgccagaagatgaaaaaataattgaacaaatagaggatatggtgactacagcttctacgtacctgtttgaagccacagaaaaaagattttttttcaaaaatgtatctatattaattcctgagaattggaaggaaaatcctcagtacaaaaggccaaaacatgaaaaccataaacatgctgatgttatagttgcaccacctacactcccaggtagagatgaaccatacaccaagcagttcacagaatgtggagagaaaggcgaatacattcacttcacccctgaccttctacttggaaaaaaacaaaatgaatatggaccaccaggcaaactgtttgtccatgagtgggctcacctccggtggggagtgtttgatgagtacaatgaagatcagcctttctaccgtgctaagtcaaaaaaaatcgaagcaacaaggtgttccgcaggtatctctggtagaaatagagtttataagtgtcaaggaggcagctgtcttagtagagcatgcagaattgattctacaacaaaactgtatggaaaagattgtcaattctttcctgataaagtacaaacagaaaaagcatccataatgtttatgcaaagtattgattctgttgttgaattttgtaacgaaaaaacccataatcaagaagctccaagcctacaaaacataaagtgcaattttagaagtacatgggaggtgattagcaattctgaggattttaaaaacaccatacccatggtgacaccacctcctccacctgtcttctcattgctgaagatccgtcaaagaattgtgtgcttagttcttgataagtctggaagcatggggggtaaggaccgcctaaatcgaatgaatcaagcagcaaaacatttcctgctgcagactgttgaaaatggatcctgggtggggatggttcactttgatagtactgccactattgtaaataagctaatccaaataaaaagcagtgatgaaagaaacacactcatggcaggattacctacatatcctctgggaggaacttccatctgctctggaattaaatatgcatttcaggtgattggagagctacattcccaactcgatggatccgaagtactgctgctgactgatggggaggataacactgcaagttcttgtattgatgaagtgaaacaaagtggggccattgttcattttattgctttgggaagagctgctgatgaagcagtaatagagatgagcaagataacaggaggaagtcatttttatgtttcagatgaagctcagaacaatggcctcattgatgcttttggggctcttacatcaggaaatactgatctctcccagaagtcccttcagctcgaaagtaagggattaacactgaatagtaatgcctggatgaacgacactgtcataattgatagtacagtgggaaaggacacgttctttctcatcacatggaacagtctgcctcccagtatttctctctgggatcccagtggaacaataatggaaaatttcacagtggatgcaacttccaaaatggcctatctcagtattccaggaactgcaaaggtgggcacttgggcatacaatcttcaagccaaagcgaacccagaaacattaactattacagtaacttctcgagcagcaaattcttctgtgcctccaatcacagtgaatgctaaaatgaataaggacgtaaacagtttccccagcccaatgattgtttacgcagaaattctacaaggatatgtacctgttcttggagccaatgtgactgctttcattgaatcacagaatggacatacagaagttttggaacttttggataatggtgcaggcgctgattctttcaagaatgatggagtctactccaggtattttacagcatatacagaaaatggcagatatagcttaaaagttcgggctcatggaggagcaaacactgccaggctaaaattacggcctccactgaatagagccgcgtacataccaggctgggtagtgaacggggaaattgaagcaaacccgccaagacctgaaattgatgaggatactcagaccaccttggaggatttcagccgaacagcatccggaggtgcatttgtggtatcacaagtcccaagccttcccttgcctgaccaatacccaccaagtcaaatcacagaccttgatgccacagttcatgaggataagattattcttacatggacagcaccaggagataattttgatgttggaaaagttcaacgttatatcataagaataagtgcaagtattcttgatctaagagacagttttgatgatgctcttcaagtaaatactactgatctgtcaccaaaggaggccaactccaaggaaagctttgcatttaaaccagaaaatatctcagaagaaaatgcaacccacatatttattgccattaaaagtatagataaaagcaatttgacatcaaaagtatccaacattgcacaagtaactttgtttatccctcaagcaaatcctgatgacattgatcctacacctactcctactcctactcctactcctgataaaagtcataattctggagttaatatttctacgctggtattgtctgtgattgggtctgttgtaattgttaactttattttaagtaccaccatttgaaccttaacgaagaaaaaaatcttcaagtagacctagaagagagttttaaaaaacaaaacaatgtaagtaaaggatatttctgaatcttaaaattcatcccatgtgtgatcataaactcataaaaataattttaagatgtcggaaaaggatactttgattaaataaaaacactcatggatatgtaaaaactgtcaagattaaaatttaatagtttcatttatttgttattttatttgtaagaaaatagtgatgaacaaagatcctttttcatactgatacctggttgtatattatttgatgcaacagttttctgaaatgatatttcaaattgcatcaagaaattaaaatcatctatctgagtagtcaaaatacaagtaaaggagagcaaataaacaacatttgg

SEQ ID NO: 994 - DNA, 987 bp, Homo sapiens
cggacgcgtgggctgccacctcattattttgcattgaagatacattgccagctactgcagccgaggaactaagagttgctaatgaattatgaatggaagtgatcattcatctccagttgtcttcctctttctgtgattgaaacccagatttggagctgagtcagctttgagcagacaagaatgctaatgcttaagagccacagcttgttctcggctctctccctgcatgaatcaacagcagtcccaggacaggcagagaccatcaggagcttaaccttcacacagagagagactccagatctcagagagcagtgctcaagattccaagacagaaccctgggattttctactggatatttcttccttcaaggagtcacagtgcttcacatgggtcaaggcaaagacaggtctcctgccaaggcacccaagatgaaatcttgaaaatgagaaacacatttgctgaactgaagaattcattagaggctctcagcagtagaatggaccaggcagaggaaagaattgggacccaggctggagtgcagtggcgtgatcatggctcactgcagcctcaacctcctgaattcaagcaatgctttcacctcagtctcccaagtagctgggactacagggcgtgcctttcttagagcaatcctggtgccactaaaagctgcattttcaatatgagataaaaatgtattttacaaaaagtgcaaggtcttcatgtctgctggcattgctgcaacagtggcttgtgtgagagatcactttttacggcaatacccaatttattggagagacaaactgctcaagcaaggatgattagcattctatggcattttaaaaggatacttgcaatgcttgaccttaccacaatagcaacaggaggtagctacaaaattattacaatagtagagtatggtaccacagttaattttatgtagctataatttaatactgcatctttaatgttgttcacatttctctgga

SEQ ID NO: 995 - DNA, 3421 bp, Homo sapiens
actttccatatgcccctgaagaataacttctttgaatgcaaagaggtggggacacggaggctctgtcattacgggttattatgggtgggacccagagacgggagtgaagggagggtgtggcccgcgggtgggatctgtagagcagacaaaatatggggcccctggcgcttaaagttcagtttgtctctcttgagcttggagaaaatcatccgtagtgcctccccgggggacacgtagaggagagaaaagcgaccaagataaaagtggacagaagaataagcgagactttttatccatgaaacagtctcctgccctcgctccggaagagcgctgccgcagagccgggtccccaaagccggtcttgagagctgatgacaataacatgggcaatggctgctctcagaagctggcgactgctaacctcctccggttcctattgctggtcctgattccatgtatctgtgctctcgttctcttgctggagatcctgctttcctatgttggaacattacaaaaggtctattttaaatcaaatgggagtgaacctttggtcactgatggtgaaatccaagggtccgatgttattcttacaaatacaatttataaccagagcactgtggtgtctactgcacatcccgaccaacacgttccagcctggactacggatgcttctctcccaggggaccaaagtcacaggaatacaagtgcctgtatgaacatcacccacagccagtgtcagatgctgccctaccacgccacgctgacacctctcctctcagttgtcagaaacatggaaatggaaaagttcctcaagtttttcacatatctccatcgcctcagttgctatcaacatatcatgctgtttggctgtaccctcgccttccctgagtgcatcattgatggcgatgacagtcatggactcctgccctgtaggtccttctgtgaggctgcaaaagaaggctgtgaatcagtcctggggatggtgaattactcctggccggatttcctcagatgctcccagtttagaaaccaaactgaaagcagcaatgtcagcagaatttgcttctcacctcagcaggaaaacggaaagcaattgctctgtggaaggggtgagaactttctgtgtgccagtggaatctgcatccccgggaaactgcaatgtaatggctacaacgactgtgacgactggagtgacgaggctcattgcaactgcagcgagaatctgtttcactgtcacacaggcaagtgccttaattacagccttgtgtgtgatggatatgatgactgtggggatttgagtgatgagcaaaactgtgattgcaatcccacaacagagcatcgctgcggggacgggcgctgcatcgccatggagtgggtgtgtgatggtgaccacgactgtgtggataagtccgacgaggtcaactgctcctgtcacagccagggtctggtggaatgcagaaatggacaatgtatccccagcacgtttcaatgtgatggtgacgaggactgcaaggatgggagtgatgaggagaactgcagcgtcattcagacttcatgtcaagaaggagaccaaagatgcctctacaatccctgccttgattcatgtggtggtagctctctctgtgacccgaacaacagtctgaataactgtagtcaatgtgaaccaattacattggaactctgcatgaatttgccctacaacagtacaagttatccaaattattttggccacaggactcaaaaggaagcatccatcagctgggagtcttctcttttccctgcacttgttcaaaccaactgttataaatacctcatgttcttttcttgcaccattttggtaccaaaatgtgatgtgaatacaggcgagcatatccctccttgcagggcattgtgtgaacactctaaagaacgctgtgagtctgttcttgggattgtgggcctacagtggcctgaagacacagattgcagtcaatttccagaggaaaattcagacaatcaaacctgcctgatgcctgatgaatatgtggaagaatgctcacctagtcatttcaagtgccgctcaggacagtgtgttctggcttccagaagatgtgatggccaggccgactgtgacgatgacagtgatgaggaaaactgtggttgtaaagagagagatctttgggaatgtccatccaataaacaatgtttgaagcacacagtgatctgcgatgggttcccagactgccctgattacatggacgagaaaaactgctcattttgccaagatgatgagctggaatgtgcaaaccatgcgtgtgtgtcacgtgacctgtggtgtgatggtgaagccgactgctcagacagttcagatgaatgggactgtgtgaccctctctataaatgtgaactcctcttcctttctgatggttcacagagctgccacagaacaccatgtgtgtgcagatggctggcaggagatattgagtcagctggcctgcaagcagatgggtttaggagaaccatctgtgaccaaattgatacaggaacaggagaaagagccgcggtggctgacattacactccaactgggagagcctcaatgggaccactttacatgaacttctagtaaatgggcagtcttgtgagagcagaagtaaaatttctcttctgtgtactaaacaagactgtgggcgccgccctgctgcccgaatgaacaaaaggatccttggaggtcggacgagtcgccctggaaggtggccatggcagtgttctctgcagagtgaacccagtggacatatctgtggctgtgtcctcattgccaagaagtgggttctgacagttgcccactgcttcgaggggagagagaatgctgcagtttggaaagtggtgcttggcatcaacaatctagaccatccatcagtgttcatgcagacacgctttgtgaagaccatcatcctgcatccccgctacagtcgagcagtggtggactatgacatcagcatcgttgagctgagtgaagacatcagtgagactggctacgtccggcctgtctgcttgcccaacccggagcagtggctagagcctgacacgtactgctatatcacaggctggggccacatgggcaataaaatgccatttaagctgcaagagggagaggtccgcattatttctctggaacattgtcagtcctactttgacatgaagaccatcaccactcggatgatatgtgctggctatgagtctggcacagttgattcatgcatgggtgacagcggtgggcctcttgtttgtgagaagcctggaggacggtggacattatttggattaacttcatggggctccgtctgcttttccaaagtcctggggcctggcgtttatagtaatgtgtcatatttcgtcgaatggattaaaagacagatttacatccagacctttctcctaaac

SEQ ID NO: 996 - DNA, 3364 bp, Homo sapiens
aggttcgggctggttgttccgttgcgagctgcagctgcgatctctgtggtaggcccagatattttttaccgtcatttgctttcttaagtgtatgctgacttgtaaagtgaagaagccagtggtgctgcgggtgttcttttggggtagtgtctgggatccagtacgagttgaatcattgttcaaataaggtgtaattgaaaagtgatcctctcttcagagatgtcaaaaacaaacaaatccaagtctggatctcgctcttctcgctcaagatctgcatcaagatctcgttctcgttcattttcgaagtctcggtcccgaagccgatctctctctcgttcaaggaagcgcaggctgagttctaggtctcgttccagatcatattctccagctcataacagagaaagaaaccacccaagagtatatcagaatcgggatttccgaggtcacaacagaggctatagaaggccctattatttccgtgggcgtaacagaggcttttatccatggggccaatataaccgaggaggctatggaaactaccgctcaaattggcagaattaccggcaagcatacagtcctcgtcgaggccgttcaagatcccggtccccaaagagaaggtccccttcaccaaggtccaggagccattctagaaactctgataagtcgtcttctgaccggtcaaggcgctcctcatcctcccgttcttcctccaaccatagccgagttgaatcttctaagcgcaagtctgcaaaggagaaaaagtcctcttctaaggatagccggccatctcaggctgccggggataaccagggagatgaggtcaaggagcagacattctctggaggcacctctcaagatacaaaagcatctgagagctcgaagccatggccagatgccacctacggcactggttctgcatcacgggcctcagcagtttctgagctgagtcctcgggagcgaagcccagctctcaaaagccccctccagtctgtggtggtgaggcggcggtcaccccgtcctagccccgtgccaaaacctagtcctccactttccagcacatcccagatgggctcaactctgccgagtggtgccgggtatcagtctgggacacaccaaggtcagttcgaccatggttctgggtccctgagtccatccaaaaagagccctgtgggtaagagtccaccatccactggctccacatatggctcatctcagaaggaggagagtgctgcttcaggaggagcagcctatacaaagaggtatctagaagagcagaagacagagaatggaaaagataaggaacagaaacaaacaaataccgataaagaaaaaataaaagagaaagggagcttctctgacacaggcttgggtgatggaaaaatgaaatctgattcttttgctcccaaaactgattctgagaagccttttcggggcagtcagtctcccaaaaggtataagctccgagatgactttgagaagaagatggctgacttccacaaggaggagatggatgatcaagataaggacaaagctaagggaagaaaggaatctgagtttgatgatgaacccaaatttatgtctaaagtcataggtgcaaacaaaaaccaggaggaggagaagtcaggcaaatgggagggcctggtatatgcacctccagggaaggaaaagcagagaaaaacagaggagctggaggaggagtctttcccagagagatccaaaaaggaagatcggggcaagagaagcgaaggtgggcacaggggctttgtgcctgagaagaatttccgagtgactgcttataaagcagtccaggagaaaagctcatcacctcccccaagaaagacctctgagagccgagacaagctgggagcgaaaggagattttcccacaggaaagtcttccttttccattactcgagaggcacaggtcaatgtccggatggactcttttgatgaggacctcgcacgacccagtggcttattggctcaggaacgcaagctttgccgagatctagtccatagcaacaaaaaggaacaggagtttcgttccattttccagcacatacaatcagctcagtctcagcgtagcccctcagaactgtttgcccaacatatagtgaccattgttcaccatgttaaagagcatcactttgggtcctcaggaatgacattacatgaacgctttactaaatacctaaagagaggaactgagcaggaggcagccaaaaacaagaaaagcccagagatacacaggagaatagacatttcccccagtacattcagaaaacatggtttggctcatgatgaaatgaaaagtccccgggaacctggctacaaggctgagggaaaatacaaagatgatcctgttgatctccgccttgatattgaacgtcgtaaaaaacataaggagagagatcttaaacgaggtaaatcgagagaatcagtggattcccgagactccagtcactcaagggaaaggtcagctgaaaaaacagagaaaactcataaaggatcaaagaaacagaagaagcatcggagagcaagagacaggtccagatcctcctcctcttcctcccagtcatctcactcctacaaagcagaagagtacactgaagagacagaggaaagagaggagagcaccacgggctttgacaaatcaagactggggaccaaagactttgtgggtccaagtgaaagaggaggtggcagagctcgaggaacctttcagtttcgagccagaggaagaggctggggcagaggcaactactctgggaacaataacaacaacagcaacaacgattttcaaaaaagaaaccgggaagaggagtgggacccagagtacacacccaaaagcaagaagtattacttgcatgatgaccgtgaaggcgaaggcagtgacaagtgggtgagccggggccggggccgaggagcctttcctcggggtcggggccggttcatgttccggaaatcaagtaccagccccaagtgggcccatgacaagttcagtggggaggaaggggagattgaagacgacgagagtgggacagagaaccgagaagagaaggacaatatacagcccacaaccgagtaggggccacccttgacgggattcctgcccaggggagagaggcgctgggaagatggctggtgaggagcttaacagaggaacctcaagaagattctgaaaatcctacccccaccccccaccagccgcacagattgtactaccgcgagaggcatccctggcgctgtctcccactggacagaggaggctggccatggggcccaggggtcaggcccagcttttgagcagaatacaacgcattgggctttagctgtttttctcatttggtggagtgtggggtggg

SEQ ID NO: 997 - DNA, 801 bp, Homo sapiens
ggagccagacgcatgctttaaaagagctgcttggccgcggagggcgtggtaggacaggaggcctggaggagaggagagagggatgtgtgttccaccatgggaccatgaggggccccaaaaggtgggggggggactccctgcaaggtgagtcagctcccataagccccagggcctggttcggctgtcctggccccggcctgatgccctgcactaggtggaagacaggatctccagggaacccggctgctttgggcccatgacagtggggtgggtgggcagaaggccaagagcaaacaggaaaatctggagtccctggaggcaactggcagagaagaggaaggaggccaaggcccaccagtgaccacgaagggtgtgctgcttgccctgttgatggcaggcttggccctgcagccaggcactgccctgctgtgctactcctgcaaagcccaggtgagcaacgaggactgcctgcaggtggagaactgcacccagctgggggagcagtgctggaccgcgcgcatccgtgagtggggggacgacagccgccaggcctaggtctctgccactgaactattaatctttctggccatctgtccgcatctgtgtgctgttttccttccacctgtccccgacccgtcccgcacctgcacccccaacaatcacccagcatctgtccctccagccatcctcctccatctgccactcctccactcatctgtccctccccatcctccatcttccactcctccacccatctgtccctccccatccctgagctcacttactcactcaccccatttc

SEQ ID NO: 998 - DNA, 1429 bp, Homo sapiens
ttttttttttttcagagtgaaaaactttattaacaacaggtttcaacgagaaagcaaatgaatacccctagaaacatggacagcatctcccccagcagcaggcaggggaagggaggcaggaggggtaagcctagggtgttccctaggaaagggccaggttccctctatccagctgggggcaccgagacggcctcattcagggaagtccaggatggcagctgaaggcagcaggtttagcagccaaagcccaggcctagtggatagacagggtccaaaatgtgacccttctaggctggtatcaccatgggggcgtcatgggctgaggattctgcagataggacatcaccacggcagagatggacagcatgaagctactcatcatttgcttcgtgtcctccgagctccgagagttggcaaagctgatgaaggagcagtagacagcgacccaagcacaccacttcagcttaagcatgaggccgcacatgctgaagatcatgcccagcaggttcatgtagtccggcgtcgggtcgtccaaggccgggttacattcgctcggcgggggcttgtacctcagcactttgttcggcctccgtgggtccgacatattgttagtggaccataccgagtcgaaggccagatcacgccctcttccgctgcaggaatcgcagcttccgggcgtgcaagctgagggcggattttagagtaacacccgagggccctcgcatttccgttcctcatgacagaggcttggactccccttacccagagaacggagatttaggagaagccagaagtcttcctttcaaagggaaaatggggaaaagaacctgaaagcgggcttcaatagttccaacccgatcaccgaaatgccaaaatgatgaacccggaagtgataaacaggaagtaggtcaggaagaacaataataaggttacacccaagcgtgggtttctaaggcgcggaattttccgtacagaccgatttaaggctgcaaggaaggagtcctgggagcatggctttccctgagccaaagccgcggcctccagagctgccgcagaaacggttgaagacgctggactgcgggcagggggcagtgcgagccgtacgatttaatgtggatggcaattactgcctgacgtgcggcagtgacaagacgctgaagctgtggaacccgcttcgggggacgctgctgcggacgtacagcggccacggctacgaggtgctggatgcggccggctcctttgacaacagtagtctctgctccggcggcggggacaaggcggtggttctgtgggatgtggcatcagggcaggtcgtgcgcaaattccggggccacgcagggaaggtgaacacggtgcagtttaatgaagaggccacagttatcctgtccggctctattgattccagtatccgctgttgggattgccgctc

SEQ ID NO: 999 - DNA, 2324 bp, Homo sapiens
ggcacgagatccggatgtctcggttatgaagtggagcagtgagtgtgagcctcaacatagttccagaactctccatccggactagttattgagcatctgcctctcatatcaccagtggccatctgaggtgtttccctggctctgaaggggtaggcacgatggccaggtgcttcagcctggtgttgcttctcacttccatctggaccacgaggctcctggtccaaggctctttgcgtgcagaagagctttccatccaggtgtcatgcagaattatggggatcacccttgtgagcaaaaaggcgaaccagcagctgaatttcacagaagctaaggaggcctgtaggctgctgggactaagtttggccggcaaggaccaagttgaaacagccttgaaagctagctttgaaacttgcagctatggctgggttggagatggattcgtggtcatctctaggattagcccaaaccccaagtgtgggaaaaatggggtgggtgtcctgatttggaaggttccagtgagccgacagtttgcagcctattgttacaactcatctgatacttggactaactcgtgcattccagaaattatcaccaccaaagatcccatattcaacactcaaactgcaacacaaacaacagaatttattgtcagtgacagtacctactcggtggcatccccttactctacaatacctgcccctactactactcctcctgctccagcttccacttctattccacggagaaaaaaattgatttgtgtcacagaagtttttatggaaactagcaccatgtctacagaaactgaaccatttgttgaaaataaagcagcattcaagaatgaagctgctgggtttggaggtgtccccacggctctgctagtgcttgctctcctcttctttggtgctgcagctggtcttggattttgctatgtcaaaaggtatgtgaaggccttcccttttacaaacaagaatcagcagaaggaaatgatcgaaaccaaagtagtaaaggaggagaaggccaatgatagcaaccctaatgaggaatcaaagaaaactgataaaaacccagaagagtccaagagtccaagcaaaactaccatgcgatgcctggaagctgaagtttagatgagacagaaatgaggagacacacctgaggctggtttctttcatgctccttaccctgccccagctggggaaatcaaaagggccaaagaaccaaagaagaaagtccacccttggttcctaactggaatcagctcaggactgccattggactatggagtgcaccaaagagaatgcccttctccttattgtaaccctgtctggatcctatcctcctacctccaaagcttcccacggcctttctagcctggctatgtcctaataatatcccactgggagaaaggagttttgcaaagtgcaaggacctaaaacatctcatcagtatccagtggtaaaaaggcctcctggctgtctgaggctaggtgggttgaaagccaaggagtcactgagaccaaggctttctctactgattccgcagctcagaccctttcttcagctctgaaagagaaacacgtatcccacctgacatgtccttctgagcccggtaagagcaaaagaatggcagaaaagtttagcccctgaaagccatggagattctcataacttgagacctaatctctgtaaagctaaaataaagaaatagaacaaggctgaggatacgacagtacactgtcagcagggactgtaaacacagacagggtcaaagtgttttctctgaacacattgagttggaatcactgtttagaacacacacacttactttttctggtctctaccactgctgatattttctctaggaaatatacttttacaagtaacaaaaataaaaactcttataaatttctatttttatctgagttacagaaatgattactaaggaagattactcagtaatttgtttaaaaagtaataaaattcaacaaacatttgctgaatagctactatatgtcaagtgctgtgcaaggtattacactctgtaattgaatattattcctcaaaaaattgcacatagtagaacgctatctgggaagctatttttttcagttttgatatttctagcttatctacttccaaactaatttttgtttttgctgagactaatcttattcattttctctaatatggcaaccattataaccttaatttattattaacatacctaagaagtacattgttacctctatataccaaagcacattttaaaagtgccattaacaaatgtatcactagccctcctttttccaacaagaagggactgaa

SEQ ID NO: 1000 - DNA, 1310 bp, Homo sapiens
aaaagaacgttgtcaattcgtagtcaaaccaatgttgtcaacagttggttcattccttcaggacctacaaaatgaagataagggtatcaaaactgcagccatcttcacagcagatggcaacatgatttcagcttctaccttgatggatattttgctaatgaatgattttaaacttgtcattaataaaatagcatatgatgtgcagtgtccaaagagagaaaaaccaagtaatgagcacactgctgagatggaacacatgaaatctttggttcacagactatttacaatcttgcatttagaagagtctcagaaaaagagagagcaccatttactggagaaaattgaccacctgaaggaacagctgcagccccttgaacaggtgaaagctggaatagaagctcattcggaagccaaaaccagtggactcctgtgggctggattggcactgctgtccattcagggtggggcactggcctggctcacgtggtgggtgtactcctgggatatcatggagccagttacatacttcatcacatttgcaaattctatggtcttttttgcatactttatagtcactcgacaggattatacttactcagctgttaagagtaggcaatttcttcagttcttccacaagaaatcaaagcaacagcactttgatgtgcagcaatacaacaagttaaaagaagaccttgctaaggctaaagaatccctgaaacaggcgcgtcattctctctgtttgcaaatgcaagtagaagaactcaatgaaaagaattaatcttacagttttaaatgtcgtcagattttccattatgtattgattttgcaacttaggatgtttttgagtcccatggttcattttgattgtttaatctttgttattaaattcttgtaaaacagaagtattgtttgaagttctcaactgagatttttactttttggatttttatgacttgctaatgttagaaagggcttgtatgcgtctatcaaagcaacagtggctgctgttagctaaaaatccttgtcagcttgtcccacgtttattctctatgtggaggtgaaagggtctgtgcttggcattcacttccattcttagacttaatttggaatcatccttttaaaaaaatcagagaccaggtcttgccaaatcaaactcctgggctcaagcaaccctcctgcctcaacctcccacggaatcgtcttgtcattaacttctttttttaatatgcagtagttgggagtaagatctttttatcatttatcaaaaaggcataaatgttccaccaaccataaagtatagttggtacttt

SEQ ID NO: 1001 - DNA, 1398 bp, Homo sapiens
tttttcactttacaagaagttcactcttattcatggaggcatcatgctgacaggactggatccaaggaaaatgctagtgactttcccaacttcattccccaatcaaagaggacagtttctggtttgccactggtgagtttattacacgactaaagttcaaataaaaaaataaaaaccaaaatcttggcagggaagctagagccagaatcaggaaaatctgcttccttgtccccagactccctggccaagcccagctccactaactcatcttgactcgatcaagttcctcatcaagacttgcatctgtaccctggacatctctgctgctcccactggagagtgagtctggagtccctggcactggggctttggtgagggctccatatacacccatggcctgagccaccatgctggtgacatcgccagggttggagggcagtaggatagtgttggagtccttggccagtttggagaacgcgctgacatactgctcggccacagtcagtgaagctgctgcatctccattatgttgtgtcagagctgcagccaggattcgaatagcttcagctttagccttggccttcgccagaactgcactggcctctcctgctgcctgatttatctgttcagccttttctgcttcggaggccaggatctgggcctgtttcttcccttctgccacattgatggccgactctcgggtcccctcagactctagaactgtggcccgtttccgccgctctgcctccacctgcatctgcatagactctttcacccggggtggcacatggatatccttgatctcataacggaggcagcggataccccagcagtcagcagcttggttgatggcatccacaatgctggcattcagggactcccgttcccggaagactttgtccagagagagtttgccgagctctgatctcatggttgtttgagctagctgggtgacggcatactcagggtcctccacaccgtagcttgccttgtaagggtccatgatgcgcaggtaaaggactccatcgatttgcagagttacattgtcgagagtcacagccgactgctcaggcacgttgatgacaatttccttgagactctgcacatatcggatccggtctaacacagggatgaggatgttcaaaccaggctccaggatccggtggaatcggcccattcgctccaccacccaggcctcctgctgcggcacgaacagtaccacggtgtttcggggcaatccagaggaggcgcggcgcggagcgcggccagaagccagtagagagcccctcagcaaaagggccccagtgccccgcgccgcgcgcgccagcatttcccaccgccgcagcgacctccggaaccaacgagacgagcggagcggtcgctcccagaagcctaccc

SEQ ID NO: 1002 - DNA, 2005 bp, Homo sapiens
tttcgtcggggactggctgggaagcggtcggtcgagtgtggcctgtgtggactcgcatcttgcccgaagccgggcggaggagagctcaagctaagggtgatcagcccatgacctaaacctccagacaaaataaaacagggaaaatttgctagaatcaagaatgatggatccatgttcagttggagtccagcttcgtactacaaatgagtgccataaaacctactatactcgtcacacaggttttaagactttgcaagaattgtcatcaaatgatatgcttttacttcaacttagaactggaatgacactttctgggaacaatacaatttgctttcatcatgtaaaaatttacattgacagatttgaggatttacagaagtcatgttgtgacccatttaacatacacaagaaattagccaaaaaaaatttgcatgtaattgacttagatgatgccacttttctgagtgctaaatttggaagacagcttgtacctggttggaagctttgtccaaaatgcacacagataatcaatggaagtgtggatgttgatactgaagaccgccagaaaaggaaacctgagtcagatggaagaactgctaaagctttgaggtcattacaatttacgaatccaggaaggcaaactgaatttgctccagaaactggtaaaagagaaaaaagaaggcttacaaaaaatgcaaccgctggttcagacagacaagtgataccagcaaagagtaaggtctatgatagccagggtctcctgatttttagtgggatggacctctgtgactgcctggatgaagactgcttaggatgtttctatgcttgtcctgcctgtggttctaccaagtgtggagctgaatgccgctgtgaccgcaagtggctgtatgagcaaattgaaattgaaggaggagaaataattcataataaacatgctggataatctgcggtaccaaactatggagcctttaaaggtctttatttctaaaaatctgttactctaagatacattttaagcttgattatcatatgacaaagattttaaaaccatctcagtgtgccctaatttttcatcttgggtgctttaagattcactatttgatataaattcagataggctatttttcagtagtcagcgttaagcctgtctggatcaatataaacaagtagggtgtaggcagtcctctatttgcatgtttcccatgggcacaaatttcagtgacctagatttagtttaaataccagtttccttaccaggaaggaaagaaaactggtaaggaaactgttgttgttaaaatctaggttaaaattttagttagcacattgtaactgagtaattacatgaagtacaaacctctctgctagctcttcagtctacaaatcgctatgtaaataacagatatgcttcatgattgtgaccagtcatgttatttctttcaaattcttccagtggtttgtccctgtgcatctgttaattcagttcacgtacagcagagcatgtagttatgctgtctctctgtcatctacttgacattctatagaagtgaacactcgaaagaactggtcaacaaagatgaaagtgcagcaaagcaatgaaaaatgataacactggaagtgaaattttaatcaaacataaatgaatttgtagaagaagtcactgaccatgggaatgttgttcttgctgctgtgtattcataggagcttagtgaaggcaaacttaccaacacaaataagcaaagtggttgcaataaagacagatacgtcccagaggaagtgatggttaaaaaaaaaaaactttacattaaaagatatttaatgtgaatatagaaatgttttcacaacattgaaagcacaagcaataaagggtggaagctgacccaaacttaaaaggagtatgggcagtttgccgtgaacataaaagatgcttactcagtatggtaagttacttgccagaaaaaaaggcaagccctattcaaactactttgtttttacaatgaaataaaac

SEQ ID NO: 1003 - DNA, 1612 bp, Homo sapiens
cgacagaatggggcctctctggaagttgtcccgggtgttcgccgctggagcccgggtcgagaggacgaggtgccgctgcctggagaatcctccgctgccgtcggctcccggagcccagccctttcctaacccaacccaacctagcccagtcccagccgccagcgcctgtccctgtcacggaccccagcgttaccatgcatcctgccgtcttcctatccttacccgacctcagatgctcccttctgctcctggtaacttgggtttttactcctgtaacaactgaaataacaagtcttgatacagagaatatagatgaaattttaaacaatgctgatgttgctttagtaaatttttatgctgactggtgtcgtttcagtcagatgttgcatccaatttttgaggaagcttccgatgtcattaaggaagaatttccaaatgaaaatcaagtagtgtttgccagagttgattgtgatcagcactctgacatagcccagagatacaggataagcaaatacccaaccctcaaattgtttcgtaatgggatgatgatgaagagagaatacaggggtcagcgatcagtgaaagcattggcagattacatcaggcaacaaaaaagtgaccccattcaagaaattcgggacttagcagaaatcaccactcttgatcgcagcaaaagaaatatcattggatattttgagcaaaaggactcggacaactatagagtttttgaacgagtagcgaatattttgcatgatgactgtgcctttctttctgcatttggggatgtttcaaaaccggaaagatatagtggcgacaacataatctacaaaccaccagggcattctgctccggatatggtgtacttgggagctatgacaaattttgatgtgacttacaattggattcaagataaatgtgttcctcttgtccgagaaataacatttgaaaatggagaggaattgacagaagaaggactgccttttctcatactctttcacatgaaagaagatacagaaagtttagaaatattccagaatgaagtagctcggcaattaataagtgaaaaaggtacaataaactttttacatgccgattgtgacaaatttagacatcctcttctgcacatacagaaaactccagcagattgtcctgtaatcgctattgacagctttaggcatatgtatgtgtttggagacttcaaagatgtattaattcctggaaaactcaagcaattcgtatttgacttacattctggaaaactgcacagagaattccatcatggacctgacccaactgatacagccccaggagagcaagcccaagatgtagcaagcagtccacctgagagctccttccagaaactagcacccagtgaatataggtatactctattgagggatcgagatgagctttaaaaacttgaaaaacagtttgtaagcctttcaacagcagcatcaacctacgtggtggaaatagtaaacctatattttcataattctatgtgtatttttattttgaataaacagaaagaaattttgggtttttaattttttttctccccgactcaaaatgccattggtcatttaatattagtagcctcttaaaaaaaaaa

SEQ ID NO: 1004 - DNA, 908 bp, Homo sapiens
ttttttttttttcagtttctacattttatttcattaacttaaaaggtggacaaaatgtttattttaaatctaattgaaatttatctgaaacaacttatttcaagtaacttattgtacagtccattgtccatttaaaaatattttcttccaaaaaactgcattgaaagacaaaaaaattcttttatacggcatatacgcgagatgcaaacttctgatgtaaatttgtttcactgtcaactccgatgataaagatgagaggcacaagggttcacagttcagttaaatgatgcaaacaaaaagcttctgtttccctccgataaaattagaagtctccattcatgtctcttacagtagtaccacatacttgatgctgatactaggttacttctttttctttcctttcccttttttacttccctctccttgttgaagactttggtcagcacctcctgttttttgtgtccttgtttttagtttaggtatcatttctgctgcatacaacattactgacttacgtgatgggaactgtacaaggcagaggctcccatcttcctgtttgagctggacccggactctgcctctgtattggacatcacgattccattctctagagtacattttatttttctcaagaaatacgttaagtccaactgctgaacatacatcttgaatctctgtagctgtaggattttcaacagccttacttatggggattcgccttccctctgcgatggtcttcttattatttaaataagcaggatagatacaaataaacctgtcctggtcggccggggaccgcgcggcagcgcaagccatcttcacaagagtctcaacaacccaggagccgcagggagaaacccggcagaaacccgggaggaacccggctctgagtttccgagacagcccgc

SEQ ID NO: 1005 - DNA, 879 bp, Homo sapiens
cagaaaccctcctcccctcccagcctcaggtgcctgcttcagaaaatgaagtagtaagtctgctggcctccgccatcttagtaaagtaacagtcccatgaaacaaagatgcagtcgggcactcactggagagttctgggcctctgcctcttatcagttggtgtttgggggcaagatggtaatgaagaaatgggtggtattacacagacaccatataaagtctccatctctggaaccacagtaatattgacatgccctcagtatcctggatctgaaatactatggcaacacaatgataaaaacataggcggtgatgaggatgataaaaacataggcagtgatgaggatcacctgtcactgaaggaattttcagaattggagcaaagtggttattatgtctgctaccccagaggaagcaaaccagaagatgcgaacttttatctctacctgagggcaagaggtaatccaggtctccagaacaggtaccaccggctctttagggaggaccattcaaaagggcattctcagtgattttccctaacccagctcacagtgcccaggcgtctttgcgcttcctcccacactcaatcctgggactctctggtaccacacggcatcagtgttttctggaatatagattaaacaccaatatgaggcttctgggtaaccccagtctgtgcgagatctaaaatagcaactccctaagagacaggactgggtcatttgcaccgcatcacacccaggttcatagcacaccaacatgagtttatctaatgcttcctccagagataaatttttcagaaaggtttgcaaaaaaacactcaaggccactatagtaaaatggcataagctaaggtataataataaaataataacaata

SEQ ID NO: 1006 - DNA, 1319 bp, Homo sapiens
aggctgtacagagaattcgtcacgagatgaacattttccggctgactggggacctgtcccacctggcggccatcgtcatcctgctgctgaagatctggaagacgcgctcctgcgccggtatttctgggaaaagccagcttctgtttgcactggtcttcacaactcgttacctggatctttttacttcatttatttcattgtataacacatctatgaaggtatggtatgccatccacaggaatgtatttcatctacagtgcacaggtctatggacacttaatttatgtcagctgtgtatttttaattaaaatgctccaaaaataatgtcttaatatgctgttcttgactttaaaactttcagaccaccttgtatatataactgggactaaacgagctatcagtaagcatacatttttggtttcaaaacagtagttaattaaaatactttgaagttagaacttttttattttaggttccttaagtatgataaatctaaagctcttgataactctgtaagtaagagcggtaactattatattttcaagccgtggggaaattacagagtccccagaggaaatccagccaagttgggtacataacaagggaacggaaagccagggactcctagttgcagtgtctcatttcgctgctgtgttgaggaactgtctataggctttctatcttttttctttgccactgagtcagttttacttaaactgttgtgtgtgtgtcatttttattacatttgccatgcttaaatgagtctctataccatcatttacttactaacgtatttttttaaacctttcaacttggcctaattattagtatctataacacctttgttggctttcttatattttttctaattcacattaaaacaagtgtataactattaaaatacaaaatgtttgcacaccacctaacactttgtgtagcactggttggcacacaccccacactggggggaagttgtggactacgtgagcttcagttctttcgcacagtgttgaattcatgcttgtgaacacctacagagctgggaactgaggatgcggcagaaaataagcagaagtctctaggctggtgtgggagagtacacagatcatggcagtacaaatgactgcgatttatgatgggtgccacaaaggaaaagtataagagttgcgaacctatggatataaaaaacatgaaacaggcccagtagctcccgcctgtaatcccagcactttgggaggccaaggtgggtggattgcttgagccaaggaatccgagaccagcctgagcaacatagttagacccctgtctcaaaaaaaaaa

SEQ ID NO: 1007 - DNA, 1333 bp, Homo sapiens
ggaagagccgtcaacttagcgagcgcaacaggctgccgctgaggagctggagctggtggggactgggccgcaatggacaagctgaagaaggtgctgagcgggcaggacacggaggaccggagcggcctgtccgaggttgttgaggcatcttcattaagctggagtaccaggataaaaggcttcattgcgtgttttgctataggaattctctgctcactgctgggtactgttctgctgtgggtgcccaggaagggactacacctcttcgcagtgttttatacctttggtaatatcgcatcaattgggagtaccatcttcctcatgggaccagtgaaacagctgaagcgaatgtttgagcctactcgtttgattgcaactatcatggtgctgttgtgttttgcacttaccctgtgttctgccttttggtggcataacaagggacttgcacttatcttctgcattttgcagtctttggcattgacgtggtacagcctttccttcataccatttgcaagggatgctgtgaagaagtgttttgccgtgtgtcttgcataattcatggccagttttatgaagctttggaaggcactatggacagaagctggtggacagttttgtaactatcttcgaaacctctgtcttacagacatgtgccttttatcttgcagcaatgtgttgcttgtgattcgaacatttgagggttacttttggaagcaacaatacattctcgaacctgaatgtcagtagcacaggatgagaagtgggttctgtatcttgtggagtggaatcttcctcatgtacctgtttcctctctggatgttgtcccactgaattcccatgaatacaaacctattcagcaacagcacataagccttgggtgcaagtgattcccaggtggcaaaaggcagccccatcagagatcacgggagcaacagtaagggacagagttttggggtccacttgtccctcagcatggaagccatcaccgtggtcctgcatagagtgagtctacttctactctggcatctgagaacaagtgactctgctttagacaagcccctggagagcctggccatggagtgaggtagaaaagaagcactttttggtggtatatgctgtttctgaatttgaatctaagcattcttggtgttctgattctgcgcctgactgtggaatgtattttctgacattaggtgcagactctttttctcttgggttttatttcccatccctccctccctctccctgcatatctttctttatgacctcctggcactagatggggaaagaacagagcagcagcagcagaaaatgctgctgttttttttggaca

SEQ ID NO: 1008 - DNA, 485 bp, Homo sapiens
  misc_feature (1)...(485): n = a,t,c or g
gcgccgaacggacccgcaannntggnnnnnnccacgcgtccgaacagcttggcagcacagaggcaaaccacagagtacattttaggcccagatctgcttatttcgagggtggggccgcgtttttctcctgccacagtgagctaattaaagaaaacaagcttcgggagttgggagagaactgtccacaggacacttggggaggcttgctttggttgtggaggcctccacagcccccggaaggcaggtggaagtgggcatggagggtcctacgcatccccagcgggggtctgagggcccactgttgctcagctgggggatttggggacggtgggagggcatacatggatgggagggtggactccgttcctgagggggccagtgtggaggagggtcaggcagcccatggagatgggacagtgttctgaaatgcttcacaaatgtggacttttgccccaaactgtggacagagcgtatgtcctgagcgn

SEQ ID NO: 1009 - DNA, 1106 bp, Homo sapiens
acggaagtgcaggaacatttcacaaatctacaatctgtgagtatcacatcctgtatagctgtaaacactggaataaggaagggctgatgactttcagaagatgaaggtaagtagaaaccgttgatgggactgagaaaccagagttaaaacctctttggagcttctgaggactcagctggaaccaacgggcacagttggcaacaccatcatgacatcacaacctgttcccaatgagaccatcatagtgctcccatcaaatgtcatcaacttctcccaagcagagaaacccgaacccaccaaccaggggcaggatagcctgaagaaacatctacacgcagaaatcaaagttattgggactatccagatcttgtgtggcatgatggtattgagcttggggatcattttggcatctgcttccttctctccaaattttacccaagtgacttctacactgttgaactctgcttacccattcataggaccctttttttttatcatctctggctctctatcaatcgccacagagaaaaggttaaccaagcttttggtgcatagcagcctggttggaagcattctgagtgctctgtctgccctggtgggtttcattatcctgtctgtcaaacaggccaccttaaatcctgcctcactgcagtgtgagttggacaaaaataatataccaacaagaagttatgtttcttacttttatcatgattcactttataccacggactgctatacagccaaagccagtctggctggaactctctctctgatgctgatttgcactctgctggaattctgcctagctgtgctcactgctgtgctgcggtggaaacaggcttactctgacttccctgggagtgtacttttcctgcctcacagttacattggtaattctggcatgtcctcaaaaatgactcatgactgtggatatgaagaactattgacttcttaagaaaaaagggagaaatattaatcagaaagttgattcttatgataatatggaaaagttaaccattatagaaaagcaaagcttgagtttcctaaatgtaagcttttaaagtaatgaacattaaaaaaaacccattatttcactgtcatttaaa

SEQ ID NO: 1010 - DNA, 1402 bp, Homo sapiens
caaatatcgttaccggaggccttatccagtcatgaggaagatctgtcaagtggggccagcaggtctggcttttatcctaaacatcagccctgtggcacaccgtgtggcgctctgtcacctggctggctgccaggagcaagcagcctggtaccacaccctccagatcctcttcttcctggttagcgcttatttcttctcctgccccgtgcctgagaagtacttcccgggttcctgtgacatcgtgggccatgggcatcaaatcttccatgcatttctgtccatctgtacgctctcccagctggaggccatcctcctggactaccaggggcggcaggagatcttcctgcagcgccatggacccctatctgtccacatggcctgcctctccttcttcttcctggctgcctgcagtgctgccaccgcagcccttctgaggcacaaagtcaaggccagactgaccaagaaagattcctgaggctggcaagtggggcaacgtgtggaggaagcccctcataatttggagaaaacttgatacaatagaagctgactcttaaggcattggcttttaaattaatacatatatccaaggatatgttatagctgcagtgtttgaaagccaaaggatttaagagttttgttgttgttaataaaaggaatactccttttccttttggatcatagcttaacaaggcacaggaagggaagggatcttgactaagattcatgagacattgaattaaggagaatcatcttcatgcctgaaaatttagcaaaattccgactatggcctccaggggcaattcctaaaagctgaatggataataaaattggactggaaagtaagtaggtggctggtcctcaccctgttggaatggctatcctactatgctgttctttggtaatggaataaattgacccaaggaccgaatttcatttggatttcaaattgtccagagtggaaaagccttcaagatgacatgatgaattactcagttcatctgatttctggtccctcctttctcgacaactataatactaacccttttctcaggataactgtctacacctggcagttttctctgacgtgctgttcactcacatccctaccttgcatggtaatataaaggactaggaagcagtcatacttccaggaaatgcttggattcatgtggacattcaggaagcttattctcatataatactaatctaaacagtactagaaattacagtgccaagagccaccaggaggcccagccaataagcatagatactatatggtatcatgggacccatctattttttaccagtggactacaggattacttgagagttatcagggctgcctaacagaccaggagatctgggggttgcaccagggaatcgccatatttgaccagcatgt

SEQ ID NO: 1011 - DNA, 510 bp, Homo sapiens
gtgaacggagctttcgcagctggagaaggctcatccacctgcagacatggggcgcagaaagtcaaaacgaaagccgcctcccaagaagaagatgacaggcaccctcgagacccagttcacctgccccttctgcaaccacgagaaatcctgtgatgtgaaaatggaccgtgcccgcaacaccggagtcatctcttgtaccgtgtgcctagaggaattccagacgcccataacgtgtatccttggaaacctgggctttttccagagggtggggagggggctggagtccggaccctgctcatctggcccactgtgtgccctggtgcagggccaaagccgtccagaggaacaggtgccacctagtgatttctgtggggtgagaagatgcagggcagggttccaatgccaatgatcgcccttgacctatgtgggccagatctgtcagaacctcgggatgtgtacagtgattgcatagactcctgccatgcggccaatcagtaacgacacagagga

SEQ ID NO: 1012 - DNA, 2857 bp, Homo sapiens
  misc_feature (1)...(2857): n = a,t,c or g
ttttttttttttaaagaattaccataagttttatttttgcttagttttattaaaaaaataaatatgtcataaagctttctttttccttagggagaaaaaaaggaacaagtctcataaaaccaaataagcaatggtaaggtgtcttaacttgaaaaagattaggagtcactggtttacaagttataattgaatgaaagaactgtaacagccacagttggccatttcatgccaatggcagcaaacaacaggattaactagggcaaaataaataagtgtgtggaagccctgataagtgcttaataaacagactgattcactgagacatcagtacagatacatcttgcttaaacaacacagaagttcctgaaaagttttgtgtaaatgatataaccacaaacattaccaggagagcttggtaactgaaagaattccatggcgaattcttttgtgaacaactactttcacttttgtaaatccaggtatttgctttttataaggagtttacctagttgctacctctctgaactgaggaaacagcatattcaccaaacgttgtgctccagctggaccactggcacaatttccaagtttgtgtttctattaagtaagtagtgtaagtaaggtacagagtcagccagggaacccagctgtatctgacaaagcaggtgtaggagtgggactgccatctaccaataattccagcaaatacttttgctaatatactttgtgcaaaacacagtaataaccttatcaattcggctatagatgtacttcctttttctaaaactttcagtcacaagctaggtctggaacccgaaaaggaagtaatacttctaaccctcaagactgcctttaaccaaattagctgcccaactccttcaaattggaatggatgataatgaaagagactgagttttccaaagctgaagtttaacaacacaaaaatcacatttcatatcactaattagtgaaaagttttgctggtgacaaaaatttttcaaatggttgttttttgttgttgttttaacttcctctaaatagaactctgaattctggggcaaactctgcagaagttaaagtcactgatgttctctggttggctgatacattttagtactgctgatagaaataaaaatttctttctacccaccagaatttcatgaacttatactataccaaagcagtgatgctttggacagggaatacgcatggtagtactagttccagtaagttttatcaaacgtaaataaataaatagaatcctcacattgctcacagcctccattccatttggtcaaacttctaccaggcccaagccacatttaaattaggctgttcagttttttaatttaatgctcctaataacattgctgtctatatgtacaagtgtgaatgaaaagagtgtgtaatctgtagtcttttcccccctgagtcccctagcaattagtaaataattaaagagtaagtggtcattttaaaacttgtattttttttttaaaaaaagcattttctagcactttaaaaaatgggtctgaaaagtgccctattaatgtccaatgctgttccccacccagtcccacccattcaaaacctgctacaaatgctggattgagttcatatcaaataatttagcagtaccaagatttttcaaatggaaacagtgttactgacttcttcatattggataacaaaataagggtaactctggtcatcattaaaaatgacaaaaatctgaggctcaaagaaattatccacacaagagtcataaaggtcactggtgacactgccaggattgactggcgggggccttctcatgccatgactgcccattgtgtatctgcccgtcagcactttggccagaaacatgaagtggactcctttggaggacttcttagaaaagttatgagagtagcttgccttctttgcaaaataactgccttgtccaaacattgtagcatgctttccacagactcgagggtcaaagttgtgtttgcagattccatctaccacatcctgggatgttccatgaaataaatgtctctcatttattatcctgtcacggccaaacattttcctgttcatatattcctttttccttttatatttctcccaaagaaactggttttggactctcaatatctgcaaaattctgtatttaaactcaggcacagtcttatgaaaaagattgtaaatgatccgataacttttatcctctgcagaaacagggacttggatgaagtcctgagatggatgcatataaacccaagtttcagggtaaaagtttgctgaagtgaccccatctgggcagataatttgtgatgatgaagttgcttcaagaggtggaggagcttgtgtgggaaccccaccaagtgtctgtaaatatggaagcagtataaaacaggagcggaagaggggtctcctttttatctctctcctgaagaatgaattgtggaggatgtagtggttattccacatcataaatcgaacctctttcagaccccgagagttggcttcttcaatcaatcgaatgacagactcgggatactctctccatccaaagtggtccctacagaagaatttccagactgtgtggtaaatagagttgacattgctagagggtggtgtggacagccttcgtagttggtcaaattcagttgtttcatacacgttcatggcattcaaatctgcccaaaattcttgtcctccatacttcattctcattctatcattttctgggttacagtaaaatctttccaagtgctcctgagaatcattgaatacactctgccacttttgagtagaagtccttngnntctgccaaagatatcagttcccgccnctnccaaggtctccagtg

SEQ ID NO: 1013 - DNA, 582 bp, Homo sapiens
cattgaaaactgtaggacacgcttacgccaagcttggcacgaggtttgcgggaacaagatggcagcccccatacctcaagggttctcttgtttatcgaggtttttgggctggtggtttcggcagccagttctggtgactcagtccgcagctatagttccagtaagaactaaaaaacgtttcacacctcctatttatcaacctaaatttaaaacagaaaaggagtttatgcaacatgcccggaaagcaggattggttattcctccagaaaaatcggaccgttccatacatctggcctgtacagctggtatatttgatgcctatgttcctcctgagggtgatgcacgcatatcatctctttcaaaggagggactgatagagagaactgaacgaatgaagaagactatggcatcacaagtgtcaatccggaggataaaagactatgatgccaactttaaaataaaggactttcctgaaaaagctaaggatatctttattgaaggctcacctttgtactaaataacttcaggaccatggaccgactttcattaccttgggtaactggaacactgttttttccagga

SEQ ID NO: 1014 - DNA, 362 bp, Homo sapiens
cccacgcgtccgcttattcgtccgacatatagctgtgcgtatagaatacatatgtatacataagctgtgcgtatagaatacatatgtatacataatctgtgcgtatagaatacatatgtatacataatctgtgcgtatagaatacatatgtatacataatctgtgcgtatataatacatatgtatacataagctgtgcgtatagaatacatatgtatacataagctgtgcgtatataatacatatgtatacataagctgtgcgtatagaatacatatgtatacataagctgtgcgtatataatatgtatacataagctgtgcgtatataatacatatgtatacataacctgtgcgtatatag

SEQ ID NO: 1015 - DNA, 2323 bp, Homo sapiens
ggaattcgtccgagcacttctcgcaggccccgcagaggctgtccttctacagctggtacggcagtgccaggctcttccgcttccgcgtgcccccagatgctgtgcttctacgctggctcctgcaggtctcccgggagagcggcgctgcctgcaccgacgcggagatcaccgtgcacttccgttccggcgcccctccggtcatcaacccgctgggcaccagcttcccggacgacaccgcggtacagccctccttccaggtcggggtgccgctgagcaccacaccgagaagcaatgcctccgtcaacgtttcccacccggcccccggggactggttcgtggccgcccacctgcccccctcatcccagaagatcgagttgaagggcttggctcccacctgtgcctacgtcttccagcctgaactgctggtcacgcgggtggtcgagatttccatcatggagccggacgtgccccttcctcagaccctcctctcccatcccagctacctcaaggtctttgtccccgattacacgcgggagcttctgctggagctgcgggactgcgtgtccaatgggagcctgggctgccccgtgcgtctcaccgtgggcccggtcaccctgcctagcaacttccagaaggtgctcacctgcaccggtgccccctggccctgccgcctgctgctgccctcaccgccctgggaccggtggctgcaagtgacagctgagagcctggtggggcccctcgggacagtggctttcagtgctgtagctgccctcacagcttgcaggccacggagcgtgaccatccagccccttctgcagagcagccaaaaccagagcttcaatgcctcctctggtctgctgtccccgagccccgaccaccaggacctgggcaggagtggcagggtggaccgcagccccttctgcctcacaaactacccagtcacgcgggaggacatggacgtggtgtcggtgcacttccagcccctggacagggtctcggtgagggtgtgttcggacacgccctccgtgatgcggctgcgcctgaacaccggcatggacagcgggggttccctcaccatctccctgcgggccaacaagacagagatgcggaacgagaccgtcgtagtggcctgcgtgaatgctgcctcgcccttccttggcttcaatacttcgctcaactgcaccacagccttcttccagggctaccctttgtctctgagcgcctggtctcgcagggccaacctcatcatcccctacccagagacagacaactggtacctctccctgcagctcatgtgccctgagaatgctgaggactgtgagcaggctgtggtccacgtggagaccaccttgtacctggtgccctgtttgaacgattgtggaccctatggccagtgcctcctgctccgcagacacagctacctgtatgccagctgcagctgcaaggcaggctggcgtgggtggagctgcacggacaacagcacagcccagacggtggcccagcagagggcggccacactgctgctcacgctcagcaacctcatgttcctggcccccatcgccgtctcagtgcggcgattcttcctggtggaggcctccgtctacgcctacaccatgttcttctccacgttctaccacgcctgcgaccagcccggggaggcggtgctgtgcatcctcagctacgacacgctgcagtactgcgacttcttgggctccggggcggccatctgggtcaccatcctgtgcatggcacggctcaagacagtcctgaaatacgtgctgtttcttctgggtacactggtcatcgccatgtccttgcagctggaccgcaggggcatgtggaacatgctggggccctgcctctttgccttcgtgatcatggcctccatgtgggcttaccgctgcgggcaccggcgccagtgctaccccacctcgtggcagcgctgggccttctacctcctgcccggcgtctctatggcctctgtgggcatcgccatctacacctccatgatgactagcgacaactactactacacccacagcatctggcacatcctgctggccgggagcgcagccttgctgctgccgccacctgaccagcccgccgagccctgggcctgctcgcagaaattcccctgccactatcagatctgcaagaacgatcgggaggaactgtacgcagtgacgtgacactggcctggggacagctgctgctctgatgacctcttcagccaggagctgtatcgagggggaggcgcctggtccagccctggacagattgatttccagctgaataaattggcctagataccctaaaaaaaaaa

SEQ ID NO: 1016 - DNA, 507 bp, Homo sapiens
aagtggtacccctcaggtcccgtccggattcccggtcgattctactacaaattgccggccggtcaccgacgctgcagaatggctcccgcaaagaagggtggcgagaagaaaaagggccgttctgccatcaacgaagtggtaacccgagaatacaccatcaacattcacaagcgcatccatggagtgggcttcaagaagcgtgcacctcgggcactcaaagagattcggaaatttgccatgaaggagatgggaactccagatgtgcgcattgacaccaggctcaacaaagctgtctgggccaaaggaataaggaatgtgccataccgaatccgtgtgcggctgtccagaaaacgtaatgaggatgaagattcaccaaataagctatatactttggttacctatgtacctgttaccactttcaaaaatctacagacagtcaatgtggatgagaactaatcgctgatcgtcagatcaaataaagttataaaattgccttcaaaaaaaaaa

SEQ ID NO: 1017 - DNA, 1605 bp, Homo sapiens
atgtggaagcgctcgcgcaggagaccccgggtgacggggcccggcgccgctaactggagcgaaccccagcgtccgccgacatggcctggaccaagtaccagctgttcctggccgggctcatgcttgttaccggctccatcaacacgctctcggcaaaatgggcggacaatttcatggccgagggctgtggagggagcaaggagcacagcttccagcatcccttcctccaggcagtgggcatgttcctgggagaattctcctgcctggctgccttctacctcctccgatgcagagctgcagggcaatcagactccagcgtagacccccagcagcccttcaaccctcttcttttcctgcccccagcgctctgtgacatgacagggaccagcctcatgtatgtggctctgaacatgaccagtgcctccagcttccagatgctgcggggtgcagtgatcatattcactggcctgttctcggtggccttcctgggccggaggctggtgctgagccagtggctgggcatcctagccaccatcgcggggctggtggtcgtgggcctggctgacctcctgagcaagcacgacagtcagcacaagctcagcgaagtgatcacaggggacctgttgatcatcatggcccagatcatcgttgccatccagatggtgctagaggagaagttcgtctacaaacacaatgtgcacccactgcgggcagttggcactgagggcctctttggctttgtgatcctctccctgctgctggtgcccatgtactacatccccgccggctccttcagcggaaaccctcgtgggacactggaggatgcattggacgccttctgccaggtgggccagcagccgctcattgccgtggcactgctgggcaacatcagcagcattgccttcttcaacttcgcaggcatcagcgtcaccaaggaactgagcgccaccacccgcatggtgttggacagcttgcgcaccgttgtcatctgggcactgagcctggcactgggctgggaggccttccatgcactgcagatccttggcttcctcatactccttataggcactgccctctacaatgggctacaccgtccgctgctgggccgcctgtccaggggccggcccctggcagaggagagcgagcaggagagactgctgggtggcacccgcactcccatcaatgatgccagctgaggttccctggaggcttctactgccacccgggtgctccttctccctgagactgaggccacacaggctggtgggccccgaatgccctatccccaaggcctcaccctgtcccctccctgcagaacccccagggcagctgctgccacagaagataacaacacccaagtcctctttttctcactaccacctgcagggtggtgttacccagcccccacaagcctgagtgcagtggcagacctcagctctctggacccctcctacagcactagagctaaatcatgaagttgaattgtaggaatttaccaccgtagtgtatctgaatcataaactagattatcatagttatctagtttatgagtcataagctagatttgattcttcaaagaagaaaagtcagtgagcaaatttaaaa

SEQ ID NO: 1018 - DNA, 1094 bp, Homo sapiens
ggaattcacagagattccccgcccgggtccccgccaacggcgctagccgcgatgccccgcctcactccccgcccccgggatgcacggcgcgtgctggtaatccgcggctcaagccccgcccccactgtccccattctccgctcacctctctccaaggacactgcgcacgcgccacgacgtcccgcctttctccccgccctgccgcggccccggggcgcagcgcgcacgcaatcgcgtttccggagagacctggctgctgtgtcccgcggcttgcgctccgtagtggactccgcgggccttcggcagatgcaggcctggggtagtctcctttctggactgagaagagaagaatggagaagcccctcttcccattagtgcctttgcattggtttggctttggctacacagcactggttgtttctggtgggatcgttggctatgtaaaaacaggcagcgtgccgtccctggctgcagggctgctcttcggcagtctagccggcctgggtgcttaccagctgtatcaggatccaaggaacgtttggggtttcctagccgctacatctgttacttttgttggtgttatgggaatgagatcctactactatggaaaattcatgcctgtaggtttaattgcaggtgccagtttgctgatggccgccaaagttggagttcgtatgttgatgacatctgattagcagaagtcatgttccagcttggactcatgaaggattaaaaatctgcatcttccactattttcaatgtattaagagaaataagtgcagcatttttgcatctgacattttacctaaaaaaaaaaagacaccaaatttggcggagggggggaaaatcagttgttaccattataaccctacaaagggggggagcatgtaacatgagcttattgagaccatcataaagaccgattcttgatattgattttatctctttctgtatctatagggaaacctcaagggtaaaatgttaggggttgacattgaaaaccctgaaaccccattccctgctcaaaggaacagtgtgaaaaaaaatctcttgagagattaaaaatatctttttttttgctcatcttaaaccac

SEQ ID NO: 1019 - DNA, 2617 bp, Homo sapiens
agtctccgccgccgccgtgaacatggagcccccggacgcaccggcccaggcgcgcggggccccgcggctgctgttgctcgcagtcctgctggcggcgcacccagatgcccaggcggaggtgcgcttgtctgtacccccgctggtggaggtgatgcgaggaaagtctgtcattctggactgcacccctacgggaacccacgaccattatatgctggaatggttccttaccgaccgctcgggagctcgcccccgcctagcctcggctgagatgcagggctctgagctccaggtcacaatgcacgacacccggggccgcagtcccccataccagctggactcccaggggcgcctggtgctggctgaggcccaggtgggcgacgagcgagactacgtgtgcgtggtgagggcaggggcggcaggcactgctgaggccgctgcgcggctcaacgtgtttgcaaagccagaggccactgaggtctcccccaacaaagggacactgtctgtgatggaggactctgcccaggagatcgccaccagcaacagccggaacgggaacccggcccccaagatcacgtggtatcgcaacgggcagcgcctggaggtgcccgtagagatgaacccagagggctacatgaccagccgcacggtccgggaggcctcgggcctgctctccctcaccagcaccctctacctgcggctccgcaaggatgaccgagacgccagcttccactgcgccgcccactacagcctgcccgagggccgccacggccgcctggacagccccaccttccacctcaccctgcactatcccacggagcacgtgcagttctgggtgggcagcccgtccaccccagcaggctgggtacgcgagggtgacactgtccagctgctctgccggggggacggcagccccagcccggagtatacgcttttccgccttcaggatgagcaggaggaagtgctgaatgtgaatctcgaggggaacttgaccctggagggagtgacccggggccagagcgggacctatggctgcagagtggaggattacgacgcggcagatgacgtgcagctctccaagacgctggagctgcgcgtggcctatctggaccccctggagctcagcgaggggaaggtgctttccttacctctaaacagcagggcagtcgtgaactgctccgtgcacggcctgcccacccctgccctacgctggaccaaggactccactcccctgggcgatggccccatgctgtcgctcagttctatcaccttcgattccaatggcacctacgtatgtgaggcctccctgcccacagtcccggtcctcagccgcacccagaacttcacgctgctggtccaaggctcgccagagctaaagacagcggaaatagagcccaaggcagatggcagctggagggaaggagacgaagtcacactcatctgctctgcccgcggccatccagaccccaaactcagctggagccaattggggggcagccccgcagagccaatccccggacggcagggttgggtgagcagctctctgaccctgaaagtgaccagcgccctgagccgcgatggcatctcctgtgaagcctccaacccccacgggaacaagcgccatgtcttccacttcggcaccgtgagcccccagacctcccaggctggagtggccgtcatggccgtggccgtcagcgtgggcctcctgctcctcgtcgttgctgtcttctactgcgtgagacgcaaagggggcccctgctgccgccagcggcgggagaagggggctccgtgagtggcctgctatctgcaatgaccaccatagcttaaccccatccccaccctcaaccccaagctcaacccataacctcaaccacatcttatcctccaccccacatcccaccacatccacctccatccccaacccatcctcatccccaactacagccccaaacccagccccagactaatccacagccatccccaactcatcctcatccccaactgcagccccaaacccaacccagggccatccccaaacccatccccaagccaaactcaacaccatccccttccctaatcacctctcctgcccctagctcagcctcatccccaactccatgcctgtctccaatcccaaccctgcccccaatctcccctcaactccaatccataacacccttcaaaccatcctcaactaagctcctctccagccctggccacatccccatcctcccccaacctccagccccaacacccatcatccccctgagctcacccttaactccaatttatcctccaagcctatctctcaccatccagccctcacctagccatttcccaaccctagtcctccaccgtcccgaagccaacttcacccatgtccccatccccaatcttgtccccattcctgactccaaatccaacccctaagcctccccaagctcctcctcatctaaccttgtctccagccccaaccacatggccgtcctcacctccaatccgtaaccatcccagaccgatcccaaagccaactccagctacattcccacctccaaccccaatagcatctgcatccccatgcccaaccctaaccccagtgccattgtcgacggtttttatt

SEQ ID NO: 1020 - DNA, 1253 bp, Homo sapiens
cccacgcgtccggcttctccgcccgagccgttcgcggagctgccgggggctccttagcacccgggcgccggggccctcgcccttccgcagccttcactccagccctctgctcccgcacgccatgaagtcgccgttctaccgctgccagaacaccacctctgtggaaaaaggcaactcggcggtgatgggcggggtgctcttcagcaccggcctcctgggcaacctgctggccctggggctgctggcgcgctcggggctggggtggtgctcgcggcgtccactgcgcccgctgccctcggtcttctacatgctggtgtgtggcctgacggtcaccgacttgctgggcaagtgcctcctaagcccggtggtgctggctgcctacgctcagaaccggagtctgcgggtgcttgcgcccgcattggacaactcgttgtgccaagccttcgccttcttcatgtccttctttgggctctcctcgacactgcaactcctggccatggcactggagtgctggctctccctagggcaccctttcttctaccgacggcacatcaccctgcgcctgggcgcactggtggccccggtggtgagcgccttctccctggctttctgcgcgctacctttcatgggcttcgggaagttcgtgcagtactgccccggcacctggtgctttatccagatggtccacgaggagggctcgctgtcggtgctggggtactctgtgctctactccagcctcatggcgctgctggtcctcgccaccgtgctgtgcaacctcggcgccatgcgcaacctctatgcgatgcaccggcggctgcagcggcacccgcgctcctgcaccagggactgtgccgagccgcgcgcggacgggagggaagcgtcccctcagcccctggaggagctggatcacctcctgctgctggcgctgatgaccgtgctcttcactatgtgttctctgcccgtaatttatcgcgcttactatggagcatttaaggatgtcaaggagaaaaacaggacctctgaagaagcagaagacctccgagccttgcgatttctatctgtgatttcaattgtggacccttggatttttatcattttcagatctccagtatttcggatattttttcacaagattttcattagacctcttaggtacaggagccggtgcagcaattccactaacatggaatccagtctgtgacagtgtttttcactctgtggtaagctgaggaatatgtcacattttcagcggc

SEQ ID NO: 1021 - DNA, 930 bp, Homo sapiens
cggcgtggtgaaatagatatggcgaccgagggggatgtggagctggagttggagactgagaccagtggaccagagcggcctccggagaagccacggaaacatgacagcggtgcggcggacttggagcgggtcaccgactatgcagaggagaaggagatccagagttccaatctggagacggccatgtctgtgattggagacagaaggtcccgggagcagaaagccaaacaggagcgttagtctttcaggggcagccaactttaccagttctttcctccccgggtccccagacaaaaataaaaaccattattaagcctttataccgttcttcaaatttatcaccaattcctgcagatctaggcgccacaactttactcttgttagcagaaggcctcctggcaacacctgctgccaagactccaggggaaaggagtattagtgggagtttttattttcaatcaagggtttatcaagatttatttacagggcacttctgggaatgacccttcctgggagtttatggtgttggttgagaatgaggactaatatatttaaatatttttgcagggagaaagaactggcaaaagtcactatcaagaaggaagatctggagctaatagtgagtggtagtgcctaactagtgtatgcggaggggaggctattctgcttaatttgggttgtttcctgaaacaagcggagtcagtatatttggtggcacattaatgcctgggaacctatgtaacatgatttttttctgcagatgactgagatggagatatctcgagcagcagcagaacgcagtttgcgggaacacatgggcaacgtggtagaggcgcttattgccctaaccaactgatgcgtgctttctcaaatatacctactggattaatttatggcaataaaatttttttttgtcttacaaaaaaaaaa

SEQ ID NO: 1022 - DNA, 1612 bp, Homo sapiens
cccacgcgtccgcccacgcgtccgggccacacgcctcagccagccccggcaagggcctatcaggggtgggtcggggcatccgagcgggtttgacggaaggagcggcggcgacggaggaggaggatggaggcggtggtgttcgtcttctctctcctcgattgttgcgcgctcatcttcctctcggtctacttcataattacattgtctgatttagaatgtgattacattaatgctagatcatgttgctcaaaattaaacaagtgggtaattccagaattgattggccataccattgtcactgtattactgctcatgtcattgcactggttcatcttccttctcaacttacctgttgccacttggaatatatatcgatacattatggtgccgagtggtaacatgggagtgtttgatccaacagaaatacacaatcgagggcagctgaagtcacacatgaaagaagccatgatcaagcttggtttccacttgctctgcttcttcatgtatctttatagtatgatcttagctttgataaatgactgaagctggagaagccgtggttgaagtcagcctacactacagtgcacagttgaggagccagagacttcttaaatcatccttagaaccgtgaccatagcagtatatattttcctcttggaacaaaaaactatttttgctgtatttttaccatataaagtatttaaaaaacatgaattgagtttctgtagatttctagttctcaactttagcctgaacgccaacacttgaaggtgtttttcatcctctgtatgttgaaggtggttatttgtatgtaggaacaggactgccatcccagctttgcatgccaaagaaataaagaacacactttaaagggcaaactgaagagatgagcgagcaaaggtgcccttcaggtctactgaaaagttagagtacaaaacaacactgttgatctggacaaaagaagaaaaattaccctttttgcttgtgttgtgacaacttcatttaatatggtttaaagatttatgagactgtcagctaaaagtcttttcacaagaatgtcaacagagaatggcatctcaaaatatatatatttctttgcacaatttgtgaaaccttataagccattttccccaggtacaatgtagttcctgctgatagaaaggaaatattttgtcaagagctttcatttaaaagctactacctccacaatcacccccaaacccagaaaatccccactggctcttgccagtctggttttcgtattgcagttattccaattgtatttgatctccctgataacgtattttcatgggtttgggtagaagatgctaatcagattagaagcaggaatagttatttgctgtctgtgaaattgagccttttggtgcgccacgtggtgccagatcaacacttctatccctctgcactgaccacgttgtgaactgggagacccaaatgcaagccatttcatggacatagcaatatacaaccaaactctgttccttggagttatattgtaaactcttgcaggtgggagagcagttcacctccttagctctgtttgccagctcttacagggtaaaataaacctgggcaatttatcctcaaaaaa

SEQ ID NO: 1023 - DNA, 460 bp, Homo sapiens
aattcaaaacacacttgataactgaaggatgatgaagtgtccacaggctttactagctatcttttggcttctactgagctgggtgagcagtgaagacaaggtggtacaaagccctctatctctggttgtccacgagggagacaccgtaactctcaattgcagttatgaagtgactaactttcgaagcctactatggtacaagcaggaaaagaaagctcccacatttctatttatgctaacttcaagtggaattgaaaagaagtcaggaagactaagtagcatattagataagaaagaactttccagcatcctgaacatcacagccacccagaccggagactcggccatctacctctgtgctgtggaggcacagtgctccctagtcacctgcagcctgtactcaaattctacagctgaggctctgcaactgtaagatggggaacttgctacattgagcaag

SEQ ID NO: 1024 - DNA, 1730 bp, Homo sapiens
ttttttttttttcaaaaggaaatcccaatctttttattacggaaagccatcaactgggtgtggggagtatgtcagagggttagtgaaagtccaggggatttctcctccaagtcctaccacacaaaggaaagtctcaagcctctattcaccccttctcaatccccacaaaatagggggttgttcaatattgtcttcaatgataaaaactttgtggttaaaggtttctccttaggactagcgacaaagttaggcttatacttttaatgaagaccataaacgaagccagaagggcttaaggaagcaagagtccttgggggaaaattcttagcgttctataccccagcatcttaccttagggttaaatctaggtctaaccaagctgtgcaggtcaactaagaaggaatgatgaaaccacagagtttcatggagaaaccatggagatgtctgaatagctgataagcagttaacacactgacccaagcttggagggaaaccatttccccctccgtcctatgagatctctttcttgctccagtgaaacagttggccacagcatggcaggccttcctgtagggtgcctgacaattccctagatgcctctttaaaatcagaagctgcatgctgccccacccagtcacagccaaagggaaaacataaataaaaggctgcagcctcaggcttgtggttatggaaagagcctggaattgacaggagaggaagcactgccaaagtgaggatcttatttatccttcttgttttccccatctgacactgtggtgggggttgaagccacaggctgctcctcagggatattgtctccagcctttgatagtttcttggcccgctggtatagctcatttaagttaaattctcggatcacattctcctcagagaaggtccatgagacagcccgtcctttcttgtcaatctgtggccgccgcattgcctccttgccaccttggaacaggatcagggtagggagttgcttggtgaggggtgatgtgctcactttgtaccgcgtactaacatcagtatagcgtccaacatccaccttcccaaaatttagccctgtacagttgtatttaagggagaggtcagcatagataggggcaaatgattggcagtcattagaccaattggcaaagaactccacaatccaagtgaccctcttgtcccgttctagttcctcatcaatggttttatcattgaagtacttgatatactcagggcccatatatagggggggtttgcacgtcatcaggaacactatgcagagtgtgatgtaaagtaggcccatgcgaatatccaagcggaagaaaagaattgtgttggccactttactaaacatgaaaatgttgcctatatgttgctccacagtgatggatctgcggttcttcatcatcacaatggcactgagaaacatcaggatctccacttctctccagtcaaagtcacacgggttaccgtcttcgcgttgggtgggcagaccgtggcagagcggcggcagtttcctcacgagtaggaaggcagcagagagcagggccgacagaaggtagtaaggttgggcgagccatcgtgaaagtcgcggcaccgaatacacgagagcaattagaggtgccaagaccgccatcttttcggccgtaacggccactgctcgccggcgtcgtaggtctcgccccgcctcccccaccataacgactgctattgggctatatcgcaaacgtaccccc

SEQ ID NO: 1025 - DNA, 2249 bp, Homo sapiens
  misc_feature (1)...(2249): n = a,t,c or g
ggaattcctgccaagggctccctgaatggtgtccacacagcgaggaagccacgcttgattcttttatccaggacattctccacactctgccggtcctaactcaggcagcagcataactggtgactcggctgaggccatgccagcccccatgcactgtggcaggaccaggtgttcatgactgactctatgctggagcttctggaatgtgggcgtgcccgggtgctggagcagtgtgcccgctgcatccagggtggctggaggcgacaccggcaccgagagcaggagcggcagtggcgggccgtcatgctcatccaggcagccattcgttcctggttaactcggaaacacatccagaggctgcatgcagctgccacagtcatcaagcgtgcatggcagaagtggagaatcagaatggcctgccttgctgctaaagagctggatggtgtggaagaaaaacacttctctcaagctccctgttccctgagcacctcgccgctgcagaccaggctcctggaggcaataatccgcctctggcccctgggactggtcctggccaatacggctatgggtgtaggcagctttcagaggaaattagtggtctgggcttgcctccagctccccaggggcagccccagtagctacactgtccagacagcacaagaccaggctggtgtcacgtccatccgagcgctgcctcagggatcgataaagtttcactgcagaaagtctccactgcggtatgctgacatctgccctgaaccttcaccctacagcattacaggctttaatcagattctgctggaaagacacaggctgatccacgtgacctcttctgccttcactgggctggggtgatccttggtgcctttgtttccacaaggccttttcctgccccctgccttgccaaagacatttaatcagcacacagctgccagactattcccacagtgctccaaatgcacatgaacaacagtgacggctccagccttcgacccagagccccgtgcccagtgcgtcagtgggcctggggttccaggctacatcaagcactgatggtgtcagggctggtagttaccaaatcagggttaagaaacatcagggccacatttcactaccttcacagatcaaactcagcagcagtcatgactgtctgtcactacactggggatcccaattccacataagcacttttggaagaaaacagccaaagttggcctaaaattggcgctggaatttgggctgggaaaaatcttgtggttatttcctttaaaaaggaacaaaactttagtatttaattagttgatttatttaatgtaatttcaaacaattaaattatgaataatgcaatgtacagtagaatcacgttttgattttattaacactgaccaagtttaactccatatgaagtgtaagcttgatatcgtttatgatgtctatcaactgtaccaaaagtaaaacatttaaaaacaatcatctgaatgtcaagttttctctccataaaggacttgccaccttaaggaccccaagtctgcctgaaacatgagccacatcaatgccggtaaaggcctgcatgacctaatctgcatcctggaaacctcttttgcctgagctccccagccccaaactagctggtctgggagagggagcaggcaggttccaggagtcaagcacacgcttgagcaagcagcacaataatccatcttaagactcctcattctgggatggctccacaattcctaaacagcagtctgcaaactccacaaacaaaggctcttgcatgtaagctctcatgagctttgctttgtcttctccctgatcgaggttgaccatcaactgcctgaggtgtggattgagcaataagcttcttaatgttgcagattcccctaaattctttaaattctgcaaagaaactctgtcttcttcctcatcactattgagaaaatcagctatagagtcatcatcatctttgttttccacaggctttacggttttggtaggaagagctgatcttatttttttctcaacaggacgagtttcagggttgcactgttctttgtgcttccggaagcagactaccgagcagtagggcacgcggcaggctggacagcggtatttgggcttctccaagcagatcacgcagacgacggtgctacatttgagcgacgccatggttttgtggaaggagactgttcactgcgccgccgcgcgcgaattccaccacactgagtatggacatcgatanngacctc

SEQ ID NO: 1026 - DNA, 1166 bp, Homo sapiens
ttttttttttttacagaattccccaaactttaatgctgtgctctgaaaagggaggctggaggttgtggtgggtcacagtgttgctgacacctctggcctccagccctgcatccctaggcaccatgtgaccaggcagtgagaaggacggggcctcactcccatgccagactgctcctcgggctgagcaggacctgaagctctcagggcttccaccaaagcccagcaaacttgggggaggcctgagggggcatcagcagtccttaaaggcctgagcttgcaacactcaggcaggactcggctgagggcctctgtggtgccaccatggggtaggaggtaaagagagaccctggttccagcctgggaaccagtgggtgccctgaagggaggggaggcctcagggagttcgggacaggagtgtgcatggtactgggcggcccatgggggctcctggcctcttggttcaggcaatccctgagctggggacacattccatcttaggtccaagagacggaggtcaggagcatccctagaacgacctcccaggcacgaggaaggcccggggcagggccgggcgcagcgtggctggcttcagtaccctcgggcatcttgactcctgccctctgggactgcaaagggatctgcgggcgcctctgctgagtcaatcgtctggtaggcactacggtcctgagaagacccaaggaaaccagtgtggaccaggagctcacccccgcgctcccggtacatgtggtagacgaagcagcaggagagcggcttgagcagcaagctgaggatggccatgcccacgccaaagcggcccgtgtccgtgaggctgacccgcgggtagaagatgctgatgtgcacgatgtccaggaagatggtggccagcaagccacccagaaacatgcttatggcgtcgatggagtcccgctgagccacagcccacacgcccaaggccaggatggtgaagttggcccaggcataggagcctgagaatacaatgcagccccaggttgtcagcagccagtgacctaggagaatcaccttcaggttcacagcaggcagctccatcccgactcaggccgagggcacctgcgccgcagccgcggggggctcctaggctccgaactcggggaacaaacttgcccggccccgccccgcccgttgcg

SEQ ID NO: 1027 - DNA, 478 bp, Homo sapiens
gattttctcggccctgccagcccccaggaggaaggtgggtctgaatctagcaccatgacggaactagagacagccatgggcatgatcatagacgtcttttcccgatattcgggcagcgagggcagcacgcagaccctgaccaagggggagctcaaggtgctgatggagaaggagctaccaggcttcctgcagagtggaaaagacaaggatgccgtggataaattgctcaaggacctggacgccaatggagatgcccaggtggacttcagtgagttcatcgtgttcgtggctgcaatcacgtctgcctgtcacaagtactttgagaaggcaggactcaaatgatgccctggagatgtcacagattcctggcagagccatggtcccaggcttcccaaaagtgtttgttggcaattattcccctaggctgagcctgctcatgtacctctgattaataaatgcttatgaaatgaaaaaaaaa

SEQ ID NO: 1028 - DNA, 2162 bp, Homo sapiens
cgtctcgacgatttcgtgaaagatggcggcgactctgggaccccttgggtcgtggcagcagtggcggcgatgtttgtcggctcgggatgggtccaggaggttactccttcttcttttgttggggtctgggcaggggccacagcaagtcggggcgggtcaaacgttcgagtacttgaaacgggagcactcgctgtcgaagccctaccagggtgaggcgcccaggccatgtttcctgagagactgggagttgcaggtgcacttcaaaatccatggacaaggaaagaagaatctgcatggggatggcttggcaatctggtacacaaaggatcggatgcagccagggcctgtgtttggaaacatggacaaatttgtggggctgggagtatttgtagacacctaccccaatgaggagaagcagcaagagcgggtattcccctacatctcagccatggtgaacaacggctccctcagctatgatcatgagcgggatgggcggcctacagagctgggaggctgcacagccattgtccgcaatcttcattacgacaccttcctggtgattcgctacgtcaagaggcatttgacgataatgatggatattgatggcaagcatgagtggagggactgcattgaagtgcccggagtccgcctgccccgcggctactacttcggcacctcctccatcactggggatctctcagataatcatgatgtcatttccttgaagttgtttgaactgacagtggagagaaccccagaagaggaaaagctccatcgagatgtgttcttgccctcagtggacaatatgaagctgcctgagatgacagctccactgccgcccctgagtggcctggccctcttcctcatcgtctttttctccctggtgttttctgtatttgccatagtcattggtatcatactctacaacaaatggcaggaacagagccgaaagcgcttctactgagccctcctgctgccaccacttttgtggactgtcacccatgagggtatgggaagggagcagggcattggcctgaggcatgcagcctggagagtgttcttgtctctagcagctggttggggactatattctgtcactggagttttgaatgcagggaccccgcattcccatggttgtgcatggggacatctaactctggtctgggaagccacccaccccagggcaatgctgctgtgatgtgcctttccctgcagtccttccatgtgggagcagaggtgtgaagagaatttacgtggttgtgatgccaaaatcacagaacagaatttcatagcccaggctgccgtgttgtttgactcagaaggcccttctacttcagttttgaatccacaaagaattaaaaactggtaacaccacaggctttctgaccatccattcgttgggttttgcatttgacccaaccctctgcctacctgaggagctttctttggaaaccaggatggaaacttcttccctgccttaccttcctttcactccattcattgtcctctctgtgtgcaacctgagctgggaaaggcatttggatgcctctctgttggggcctggggctgcagaacacacctgcgtttcactggccttcattaggtggccctagggagatggctttctgctttggatcactgttccctagcatgggtcttgggtctattggcatgtccatgggccttcccaatcaagtctcttcaaggccctcaagtgaaagttttggctaaaggttggtgtaaaaaatcaagagaagcctggaagacatcatggatgccatggattagctgtgcaactgaccagctccaggtttgatcaaaccaaaagcaacatttgtcatgtggtctgaccatgtggagatgtttctggacttgctagagcctgcttagctgcatgttttgtagttacgatttttggaatcccactttgagtgctgaaagtgtaaggaagctttcttcttacaccttgggcttggatattgcccagagaagaaatttggctttttttttcttaatggacaagagacagttgctgttctcatgttccaagtctgagagcaacagaccctcatcatctgtgcctggaagagttcactgtcattgagcagcacagcctgagtgctggcctctgtcaacccttattccactgccttatttgacgg

SEQ ID NO: 1029 - DNA, 920 bp, Homo sapiens
gcggccgccgcctcccaccgctcccgcgcccgctcccgcccccggcgcgtctcctccgggcccgcgccgcggcgggctcagtcctcagcggggcgcgtggcgagcggactcgactcggcaccgctgtgcaccatggcccgggccctgtgccgcctcccgcggcgcggcctctggctgctcctggcccatcacctcttcatgaccactgcctgccaggaggctaactacggtgccctcctccgggagctctgcctcacccagttccaggtagacatggaggccgtcggggagacgctgtggtgtgactggggcaggaccatcaggagctacagggagctggccgactgcacctggcacatggcggagaagctgggctgcttctggcccaatgcagaggtggacaggttcttcctggcagtgcatggccgctacttcaggagctgccccatctcaggcagggccgtgcgggacccgcccggcagcatcctctaccccttcatcgtggtccccatcacggtgaccctgctggtgacggcactggtggtctggcagagcaagcgcactgagggcattgtgtaggcggggccccaggctgcccgcgggtgcaccccaggcttgcagggtgaggccaggcaggcctgggtaggggcagcttctggagccttgggacagagcaggcccacaatgccccccttcttccagccaagaagagctcacaggagtccagagtagccgaggctctggtattaacctggaagcccccctggctggaggccaccgccaccctaggaagggggcagggacgtgaccttgacttacctctggaaagggtcccagcctagactgcttaccccatagccacatttgtggatgagtggtttgtgattaaaagggatgttcttgaacttggaaaaaaaaaa

SEQ ID NO: 1030 - DNA, 1662 bp, Homo sapiens
  misc_feature (1)...(1662): n = a,t,c or g
ttttttttttttatggtaagcaaaataaattgtatttttccatccttggggaggataaaggaactctttgcactgctataataaacagcccccaaatgccagtggtttaattcagtggagttcagacctcattcctatatcattgcagtgtggatgctcctggatgaaggctcttgtaggtaactctcctccagtcggtgattcagggacccagcctccttctgccttgcggctttgccttttaaaggtcctcagggtgctctccatgtatcttgccaatggggaacgagtgtggaggactcacaagcgggtctcacatcacgtcctccggggctaatacacatcccttctccccacactctgttggtcagaagtcactgcttggcgccctgctacctttccttctcctccaccacaggaggaggaggcacagcagtcccaaaatgacagttttgagcacagcgacagccaatgcaaccctgatggcagtgtccagacttaggtgccatgattctgagtgccctttgctttctgtgaccctgaggccggctatggtggttgtgctgctgggcctccaggtggtggtggttgtgacagcctgggtgatggtgagtttggtccccttgatggactgcaactgctgcctccctgatctccgggtgtccagctcgactcggcagaaatacacagactggtcctccttccgcaggtttgagatcctgaggaagccgctctcctgaccctctgtccagttcagaaagagccggttcacataatccttgtgaatggaaggcggccttgtgctgtagaaggactgcccgtggaagtggccccgtctccaggatattctcacgttgggaactatggctaactcccaggggtaatagaaggagaaggggatttccacagagccacccatggaggctgagaggtgttttggttgagtgaccccataaaggtagcttggaccagatcctgtggagccaccaggctgcagaaatgctggcggctgcagcaggagcagcaggggcagcagcaggggccgacccatggccttgttcttctccaggggacggggagaccagcagagctgtccaggcaggagaggggccctgtggaggggctgcctgagggcctgggtgatggtgaggtgggtccccttgatggactgccacgacagcctccctgatctgtatgtccagctggacttggcagaagtacacagactggtcctccttccgcaggttcgagatcctgaggaagcctcccttgttcttgctttccccttgagatcaggaatgaggcacagatgtctgctctcactgcctcccttcacggtactggagtcctagccagcgcgctatgcctggcttctgcctcccaggggtggagacttcctccccaatctcttcacccccaaagaagcacagccaaggcccatgtcagaggaactgtgttgctgacttagtcacagcaggaaacgactggaatggggtactgttgctcacacactcacacctgtgcccacacacacccacacatgcacacacacagaccacatctgcagcaggtgggcctggccaggcacctgtgggactcttanaattccgcgncnctgcgggactanacttaagggncgctgaaanggcgcctcngccacct

SEQ ID NO: 1031 - DNA, 905 bp, Homo sapiens
ttttttttttttaaagatcaacatatcattttattaattctgattccttttatcatgtgcttttttatacaaagcactttcaaatacattacattatcttaaatttataataggagtttctttcggattcagtttaaaaatgacaaatagcattcgttgtgcccaagttagaattacaccaaaattaccatgtgctggcacataccatcatcccactggtggctggaaaactgggttgcaggagtgtctgtcactgagatgggccaccaccccagtggccatatggtagagatgagggaaggatggactagaagcaagctgggtcttctgggtcgtctctactcctttttcacttcatcaccgttttccccactgagcttgaacacaggaatctgctgaccatccttgagctctaaaaagacctcgtcaaggtgccacctctgaaaggggccacctctggatgagtggacgtagagaaggccctctgatttggatccagagacaggaatcttcaacttggcatcaacaatgtccacgaagttttccctgtcgatgagcttgagataatggatgttgagaggagggcccagagcttcctgtgcctcgggatggctctgcagctgctccactgccaacttgtaatataaagccctggaatgaaacttttgaatgaggtaatacacaatggcaaagcccccggcatagaacacaccgtggaaaaggatccttgctcccagaggcattgaccgcctgcttcctgcatacttttgccacatcatagcacaactctcttgaaaatcatcaaaggcaagttgtcctgtgagcaacagaagcaccacgctacaaagagcatgacgagttcttccaggcttgggaaagcacgggtaaatgcccgcggtcctgcg

SEQ ID NO: 1032 - DNA, 2558 bp, Homo sapiens
ttttttttttttaaacgtttattacttcaagagtgaattatttttcaaagatgataaaactcatttctattccagtagaaaagggtcacaggtttgccccagggtccaggagcgcccggaaggcagggcccccaggcctcttcacctcagcctgggcacctataatctgagggaccctgtgagggggtgggggcagctcgggggcacagcctgcggccacttcggccagagagtggccggctcagtccataggatgatgtcagtttaggctggaggaaaagggcgccagacaacccgatgcagtgcctgtgaagacttcggggggatcaaagtccggccggggtgggcggagaccctcgggcagctgcacagggcatcttgtgctcactccattgttttccgaggcctgtgtaaaggcgctttgcctggcctggcaggtagaccaaggccaaagctcgtggccagggcctgggcactgagtccccactgaatttggcacaggaaggcggcactcccagcctggcccgtcctgcatggggagccaccacaccgggactgcagtgtttcaccttggaggggaggaagcctgggcccaacggctgaacgggacaggccaggctcacccgaggaaggggacgcaggacccacagcccctgtggtcaggcctgtgggccacgtggagagaaggttccagaacagtgcttgttgacgagcctctccctacaagtcccttcagcagcagctccatccctgagtgtctgcacaagcctgcacgcatgtgtgtatgtgtgccagggcgtgtgtgcaggtgtgcaacaggcacatggcagctgggaggctcaggctgtggggctggggggctgtccgctgggagagtccgggagaagcggggtgtaggggctggggggccggtcaggcccagcggccaggcctggctggctcacggtgtcctcaggaccctacagttttgcttcctgcagcacagagcccttgggagctgatgtcatcagggattcagaataggcctgaatggcctccttatcctttgagccctttttactactactccaaaataaatagcatttctcttggctccggatttggcagatgacagggaccagcagcaggacgcagcccagcgccaggaggacgtactgggcatagtgcatcaccttgggcatcaacaccagctgagtgtagaatgtgtgaagagtctccccctccatggccccgctctctgcaaaccagagcagcggcaggaccacaggctcaatcttcccagtttgtccaatgcctgcgacagatttcatgtagaggctcagctgcagtttcacagagcagttcatggggattcccgtgaccgggtggatgtccaggaacaaggagtgtgcctcctggttagggtgcaggccagtcaccgcttctgccagaaccgggtcggcgttgaggaagtgaggatgggagagaaacaagggggcactgaacctgcaggtgctgacgttctgaattccagactccaggcacgggcagaagccttcgttgggtgggtagatggacccgttggcaaacagggttttgggagccacgaagcgataggtggggatgccttcaaacacccctgactccttgtacattagcttcatggatcggcaggcctccgggctgtagaactccagcgaggactcaggagtcatgaagggcggccacatttgcccagaagttccattgatcatgttgcactgatcggaatgccagaagtcaaccttgctcagcccgttccacttgtccacgaggtggatcctgctgatgttctggacccccgtgaaccccgtgaagagcccagagtcggagttgttgagctcagcaaataatccgaacttgtccttgaaggggaacatgcctggaaagtacttgttgatgagattcacaagggggtccttgtagccccacatgatctcacccacagtgcggttcatgaaggcacgttcgccgagggtggtgaatgccaaggtcatgatgagcttcagggtcatgggcttattctccatcatcaccgccgcacccaagaccaggatgttgggcatgacgatgtagtcgctctccgagccgtgggacttggagggctggaactggaaggtgcggtactcgaggaaggacacggtgtcgttgttgttgaaggtgatgttgcttttgtgcctgaactccctgtacacgtagggcccgcgctcccgcacctgcggcttctcgcccttcaggatctcgctggggttcatgacgtcaaagaagtagacggagagatagaaggggatagggatctccttccacatgttgaaggacaggctactggggtcgatgcgcacgttcttaaggacctgctgcttgatgagcgacggcaccatcacgatcatgacagcgcccagcacagcgcacagtagccccgcgacgcccagcgccccggcagcccagcgcgctttggcggagcagcccatgtctgcgcgcctggggcccacccgcggctcgcagggctccgcgcctggcaggagacggggacggcgacg

SEQ ID NO: 1033 - DNA, 1148 bp, Homo sapiens
tctattccagtgtgctggaattcctgttctcgccctcaaatgggaacgctggcctgggactaaagcatagaccaccaggctgagtatcctgacctgagtcatccccagggatcaggagcctccagcagggaaccttccattatattcttcaagcaacttacagctgcaccgacagttgcgatgaaagttctaatctcttccctcctcctgttgctgccactaatgctgatgtccatggtctctagcagcctgaatccaggggtcgccagaggccacagggaccgaggccaggcttctaggagatggctccaggaaggcggccaagaatgtgagtgcaaagattggttcctgagagccccgagaagaaaattcatgacagtgtctgggctgccaaagaagcagtgcccctgtgatcatttcaagggcaatgtgaagaaaacaagacaccaaaggcaccacagaaagccaagcaagcattccagagcctgccagcaatttctcaaacaatgtcagctaagaagctttgctctgcctttgtaggagctctgagcgcccactcttccaattaaacattctcagccaagaagacagtgagcacacctaccagacactcttcttctcccacctcactctcccactgtacccacccctaaatcattccagtgctctcaaaaagcatgtttttcaagatcattttgtttgttgctctctctagtgtcttcttctctcgtcagtcttagcctgtgccctccccttacccaggcttaggcttaattacctgaaagattccaggaaactgtagcttcctagctagtgtcatttaaccttaaatgcaatcaggaaagtagcaaacagaagtcaataaatatttttaaatgtcacagatcaaaattgtttccttcaaatggggtctgccaattcacaaccagatgacccattttaccctattcactgcagactgaatccagattctacacatacttatcccccccaagaccctcactctgtctccattggcctacttgttcatctttcactcattcgacaaatctttttgaggtaagagcgaggtggggcaaaaaaaaaaaagcataccaatgaaccagacccggtcttattaaagataatataggtttaaaaaaaaaaaa

SEQ ID NO: 1034 - DNA, 810 bp, Homo sapiens
tttttttgcaggtcaaaattcttcctttaatgtgattcatgttattttaatgacttttaggtcaaactcagattcccagttacaggtgcccttggctagttttatctgtgtaacatttgaggctgcatatgtgatcatggtcttgggtttcatctgagatgttagaagccatgtctcttgaggtacttggctcgtgcaaggacatcattgcagaagtcacagctcaggtcctggctgcttcggacatagccagcacccccactgtaggcacagagtccacctctcaggtactggtcaggggtccaggttggaaacctcctctggagttctgtgattctagtagtcagaacttcagttgtctggaaaacctgagactcactaatccaggatgtgggagcttgagagccagggtcctgcaccatgctagtcctatcgcccatgttgaccagaattttgtcaccgggagacttcctggacaagacaccagcgatcacggcaggatccatgcagtacttttggccaatggtttgcatcatgggttgatatttcaggaggtatggcatgtctatttcagccagcctttcagaagcacgaactcctaaaccaaacgcaaaaggaatgatgcagcttgttgtgacttatgctgcaacaggagctcaaggggagagagaaagaacaatccaaggatctgagtaatggtcgaggactgacaatcccagattttggtcttaaatctttagtagtggccactccctgacctgaggttagggctctcctcctgtgagcttgagtcagcgaattccaccgcac

SEQ ID NO: 1035 - DNA, 1154 bp, Homo sapiens
ccctcttagagccatcgtacatttacaccttggcatttggtgtgtacctcagttttccagggcctgacagtcctggatgaacttatagggtccaaaccagaaaagcaagggctcagaccctggcaccaaggctgctccatgtaaagaatgctaccccgtgtggccagactcgggtaagccaccttttaactgcttcagtgtaatttattttcccacatcccagaaagctctggaaaaacacataaatgaatacatttattctctcacaggatactacactgttacccagtgtgaagggagcagccatgtggctcccaagctcccttagcaaaagggtggttctcagaactgctccattcacgagtcctgcaaccagaggcctgggctcaactcacacaaagttctgagcaatggccagcaccttggaatactcgccttcccgcttgcgcaggctggtggggatgggtgtcttaattcgtgtccccacagggttcccgttgtcctcaatgaggaccacgttgttggagtcaaatctgggggtcattcgggggccaggcatgcagtgccccacaatgagcgcctttttcttctgtcccttgatggccagtagtatctggtcgcccaccttgcccactccattcttcttatagacatggatgcagcgaggagcccgatggtatgggctgttccccagggcactgttgtccaccactcgtacccgcgtcatcttctgaatcgcactcagactcccagtggtgctgaaacagtgatggctcagcactctgcttacacaggtgaaggggccccagagcccagtaaagaaagccatgggatcccaagatagatccgctctcgccgcccgggaaaatcccgccgcgggccccaccagcctgcgcaacggggaaggcgagtattccaaggtgctggccattgctcagaactttgtgtgagttgagcccaggcctctggttgcaggactcgtgaatggagcagttctgagaaccacccttctgctaaggaagcttgggagccacatggctgctcccttcacactgggtaacagtgtagtatcctgtgagagaataaatgtattcatttatgtgtttttccagagctttctgggatgtgggaaaataaattacactgaagcagtt

SEQ ID NO: 1036 - DNA, 1990 bp, Homo sapiens
cccacgcgtgcgcactccttcgacctctgctgcagcccgtgccgccgccgcctcctgggaagagaggaagcgggagaggagcccacgtcgcctgtcacccaatatctccagccgcgcagtcccgaagagtgtaagatgttcgcctgcgccaagctcgcctgcaccccctctctgatccgagctggatccagagttgcatacagaccaatttctgcatcagtgttatctcgaccagaggctagtaggactggagagggctctacggtatttaatggggcccagaatggtgtgtctcagctaatccaaagggagtttcagaccagtgcaatcagcagagacattgatactgctgccaaatttattggtgcaggtgctgcaacagtaggagtggctggttctggtgctggtattggaacagtctttggcagccttatcattggttatgccagaaacccttcgctgaagcagcagctgttctcatatgctatcctgggatttgccttgtctgaagctatgggtctcttttgtttgatggttgctttcttgattttgtttgccatgtaacaaaataaagaatgccaccatcaaactaataataccctccgctgaaacagcaggtgtcctaataggcaatccagagactggactatggctgaaatatgaatgtacgttatttccaaagtcatttcattaaagatgaaaactttaaaaaaatactgcttgacatgttggcattcatattaattacggatgtaattctgtgtatcttactgggactccgaaaactgtagtattggggccatgggaatgtacgttatttccaaagtcatttcattaaagatgaaaactttaatttcttctgtgatttgtacttacactaagtttagattatcacaaagaagaacgtgcattcaggcagatgctgtcccattcagaggaagctacagcagttgctccactgatgaaaaatattccaatgtaatttttatgggaattcttttatatagtgttctgcatattgtaattcatagggcttttgtttattcatataaaggataaatatttgggtgttttgagcttctataaaatatgattaattaaaggtagttaatactcaagatggtcttgagtttttaaggtctaacatcagttagaatacttcaaatcagaatcaccttccaagactgacttgacaggtggttctaaaaataaatcacgtcagctttttaggaaatgaagccttaagctagggggtaatgtgacttttgtttttcagtaagtctcacattaagcaattgtgtgcctctaatgaatcttccatgtcttttcagaacagaaactagcagctagtttcttacttgaacaagactattaaaaaccaaatatcaaaaaactgaattggctagatttttacagccaaaaattgctgtaaggcagtgtgtatcactgttgctaacatgtttatagtgggagtcttggggatgatagctggttcaacagtattttgctgctaatactttatgttgcttcttggtcaaacttttcccattcaaaggaagaagatggtgctactatagacagtttttcccctagcaaatatattgtaccataatatctatcatccaagtttcagggttttttgaaagttgataattaggaaagtgacattttacttttcttagtgccctttgcctgtttgatttccattgagaaagagcagtcaccaaagttcctcaagtgtcggaagaccaccaccatcagaatcagggcttgtttaaaaaataaaaatccctaggttccagacctactgaattggactctttggacatgagactcagcaatctacatctttaaaaaggcttcccaggtggtttttgtgcatactgtttgagaggcactaagttatatatatatcctaccttctgtaaagggaaatgaggccccaaaaagctaaagaggtagagctgctacctcgttttcagttgattca

SEQ ID NO: 1037 - DNA, 2531 bp, Homo sapiens
  misc_feature (1)...(2531): n = a,t,c or g
ctccccagggccgagtcttccggagtcagcagagagcctggatggatcacaggaggataagcctcggggctcatgtgcggagcccacttttactgatacgggaatggtggctcacataaacaacagccggctcaaggccaagggcgtgggccagcacgacaacgcccagaactttggtaaccagagctttgaggagctgcgagcagcctgtctaagaaagggggagctcttcgaggaccccttattccctgctgaacccagctcactgggcttcaaggacctgggccccaactccaaaaatgtgcagaacatctcctggcagcggcccaaggatatcataaacaaccctctattcatcatggatgggatttctccaacagacatctgccaggggatcctcggggactgctggctgctggctgccatcggctcccttaccacctgccccaaactgctataccgcgtggtgcccagaggacagagcttcaagaaaaactatgctggcatcttccattttcagatttggcagtttggacagtgggtgaacgtggtggtagatgaccggctgcccacaaagaatgacaagctggtgtttgtgcactcaaccgaacgcagtgagttctggagtgccctgctggagaaggcgtatgccaagctgagtgggtcctatgaagcattgtcagggggcagtaccatggagggccttgaggacttcacaggaggcgtggcccagagcttccaactccagaggccccctcagaacctgctcaggctccttaggaaggccgtggagcgatcctccctcatgggttgctccattgaagtcaccagtgatagtgaactggaatccatgactgacaagatgctggtgagagggcacgcttactctgtgactggccttcaggatgtccactacagaggcaaaatggaaacactgattcgggtccggaatccctggggccggattgagtggaatggagcttggagtgacagtgccagggagtgggaagaggtggcctcagacatccagatgcagctgctgcacaagacggaggacggggagttctggatgtcctaccaagatttcctgaacaacttcacgctcctggagatctgcaacctcacgcctgatacactctctggggactacaagagctactggcacaccaccttctacgagggcagctggcgcacaggcagctccgcagggggctgcaggaaccaccctggcacgttctggaccaacccccagtttaagatctctcttcctgagggggatgacccagaggatgacgcagagggcaatgttgtggtctgcacctgcctggtggccctaatgcagaagaactggcggcatgcacggcagcagggagcccagctgcagaccattggctttgtcctctacgcggtcccaaaagagtttcagaacattcaggatgtccacttgaagaaggaattcttcacgaagtatcaggaccacggcttctcagagatcttcaccaactcacgggaggtgagcagccaactccggctgcctccgggggaatatatcattattccctccacctttgagccacacagagatgctgacttcctgcttcgggtcttcaccgagaagcacagcgagtcatgggaattggatgaagtcaactatgctgagcaactccaagaggaaaaggtctctgaggatgacatggaccaggacttcctacatttgtttaagatagtggcaggagagggcaaggagataggggtgtatgagctccagaggctgctcaacaggatggccatcaaattcaaaagcttcaagaccaagggctttggcctggatgcttgccgctgcatgatcaacctcatggataaagatggctctggcaagctggggcttctagagttcaagatcctgtggaaaaaactcaagaaatggatggacatcttcagagagtgtgaccaggaccattcaggcaccttgaactcctatgagatgcgcctggttattgagaaagcaggcatcaagctgaacaacaaggtaatgcaggtcctggtggccaggtatgcagatgatgacctgatcatagactttgacagcttcatcagctgtttcctgaggctaaagaccatgttcacattctttctaaccatggaccccaagaatactggccatatttgcttgagcctggaacaggtacttggagaagggtgggaaggaatctgcaggattgcacctgcctgcccctcaaccccacccccacccagctctgatgtccccgggccagcatcctgcccccgtctcttcccaccctgggatctgcttcctgtctccacagtggctgcagatgaccatgtggggatagaggcgctgtaggagcctggtcatctctaccagcagcagcagcagcgaggttctagcccaggagggtggggtgcttcttgtagccctcagctctccagtctctgctgatgaaatgggctccaagtggcagtgccccggtcccaggtgccgngttactgcagcagtgggaccttcctgc

SEQ ID NO: 1038 - DNA, 2812 bp, Homo sapiens
cacgcagcaggatggcaagggctccgcttggggtcctgctcctcttggggcttctcggcaggggtgtggggaagaacgaggaactgcgtctttatcaccatctcttcaacaactatgacccaggaagccggccagtgcgggagcctgaggatactgtcaccatcagcctcaaggtcaccctgacgaatctcatctcactgaatgaaaaagaggagactctcaccactagcgtctggattggaatcgattggcaggattaccgactcaactacagcaaggacgactttgggggtatagaaaccctgcgagtcccttcagaactcgtgtggctgccagagattgtgctggaaaacaatattgatggccagttcggagtggcctacgacgccaacgtgctcgtctacgagggcggctccgtgacgtggctgcctccggccatctaccgcagcgtctgcgcagtggaggtcacctacttccccttcgattggcagaactgttcgcttattttccgctctcagacgtacaatgccgaagaggtggagttcacttttgccgtagacaacgacggcaagaccatcaacaagatcgacatcgacacagaggcctatactgagaacggcgagtgggccatcgacttctgcccgggggtgatccgccgccaccacggtggcgccaccgacggcccaggggagactgacgtcatctactcgctcatcatccgccggaagccgctcttctacgtcattaacatcatcgtgccctgtgtgctcatctcgggcctggtgctgctcgcctacttcctgccggcgcaggccggcggccagaaatgcacggtctccatcaacgtcctgctcgcccagaccgtcttcttgttcctcattgcccagaaaatcccagagacttctctgagcgtgccgctcctgggcaggttccttattttcgtcatggtggtcgccacgctcattgtcatgaattgcgtcatcgtgctcaacgtgtcccagcggacgcccaccacccacgccatgtccccgcggctgcgccacgttctcctggagctgctgccgcgcctcctgggctccccgccgccgcccgaggccccccgggccgcctcgcccccaaggcgggcgtcgtcggtgggcttattgctccgcgcggaggagctgatactgaaaaagccacggagcgagctcgtgtttgaggggcagaggcaccggcaggggacctggacggctgccttctgccagagcctgggcgccgccgcccccgaggtccgctgctgtgtggatgccgtgaacttcgtggccgagagcacgagagatcaggaggccaccggcgaggaagtgtccgactgggtgcgcatggggaatgcccttgacaacatctgcttctgggccgctctggtgctcttcagcgtgggctccagcctcatcttcctcggggcctacttcaaccgagtgcctgatctcccctacgcgccgtgtatccagccttagctcgcaccgacttcaatttcccacccatctccagtaggaaattgattttgaaaaagtaggctgccgccaccacggcattatgatcccttccccctgctgatcaatctgcagtttgtgaacttcacaagaatggtgtgtgcccgttccctggcgtgtgtaggcctggccgcagtccaggggtcagcaggaggaaagggttcacataggctctcaggtgccagtcttccagaaagcaaggactgcccttcattcagccttgctgacctcccagcctttctaaggctcagccccacgggactctggtggctgccagcttgtgagctatctatctatattcatttcatagccaaacaggagacccctttgcaggacttgcacacagggaggctgtagccaggaaaccctcttcttccctggtctggctctgctggagcgggtgggaaccaaacaccttcagtgctggtggccctcaggcccacaggtttaaggctgaggctgccctgacccttccacagtcatttcttctaggttttcttggcccagcactgcccatcccaccccatgaggctcactcattgcagatcccagcccaccctgcccctttcttccccaccctggaggctctctctgcctagtctacagtactgacagaaagcaaggacatgcggcctgcatggtgggagctggttgaattgtctttattaacaaacaggatatccaaggccactacattgaggaggggggaggggggagggaggagaagggttacttgctgctcacactatatacagatgcaagcaaggggcgtggagagtgagggctccctgctccctccctccgccggggaagggcatgggctagaagaggagaggggggtcgggaatggggggaatgttttggctggcggggtcccccctccattccctggagtttgggggaaggggaatcattaaagtgctttcagaaaatgaagaaatggtccctgcccctggagtggctggtgaccccccaaaaatctagggcccagtgaccccccccagggtctgggtacattcaaggggggagccggctcccctgacgtgcaaataaaggggtccaggggccttgccagttcagcagcagtggggtaaggggttcaagccccaagcactctcctctcaaatggagaaaaggggggaggggctaggcccactcaattcctgggaaggggaagctgtgtccctccccagaagctggggacaggcacagttttgggaagaggacatgttggggaagaggatggtcacgtgatcacgaaagcatcaggggtcagaggtcac

SEQ ID NO: 1039 - DNA, 900 bp, Homo sapiens
cccgggagagagcggccaggtggaggaggagcgcggaggcgaccgcagcatctgcctgcccttctgccatccgagcgccctgactgcgccacactgcaggccatggagaatgagctgccagtcccacatacatctagcagtgcctgtgccaccagcagtaccagcggggccagtagcagcagtggctgcaacaacagcagcagtggtggaagtggccgccccaccgggccccagatttctgtgtacagtggtattccagaccggcagaccgtgcaggtgatccagcaggccctgcacagacagcccagcacggccgctcagtacctgcagcagatgtacgccgcccagcagcagcacctcatgctgcagaccgcggcgctccagcagcagcacctcagcagcgcccagctccagagcctggcagccgtacagcaggcaagcctggtatccaatagacaaggaagcacttcaggcagcaatgtgtctgcgcaggccccggcccagtcatcttcgatcaacctggcagcctccccagcagcagcccagctcctcaaccgggcccagagtgtgaactctgcagcagcctcaggcatcgctcagcaggctgtgctcttgggcaacacgtcttccccagccctgactgcaagccaagcacagatgtatctgagggcacagatgctcatcttcacgcccacggccaccgtcgctactgtgcagcctgagctcggcactggctcccccgcccggccccccacccccgcccaggtacagaacttgaccctccgaacacagcagacaccagcggcagcagcctcgggccccacccccactcagcctgtcctgcccagcttggccctgaaacccacgccgggcggtagccagcctctgcctaccccagca

SEQ ID NO: 1040 - DNA, 3592 bp, Homo sapiens
ctcaggctcataccacacggggggtgctagtgggctgctgtgtgtttacatgagtaatggagctgccgggggaggggagttgtaagcagagcgctgagcctcgcagctcgcattcggagggaagctgacatccacaccaagtcgagacttccagggatgtggccggggagcagtcacatgctgtagctttcatgagcacaggcatcagtcaggcagatgtttgtcgactggaatggcgccaaatcttaaaggcagaccacgcaaaaagaaaccatgcccacaaagaagagattcattcagtggtgttaaggattccaacaacaattccgatggcaaagccgttgccaaggtgaaatgtgaggccaggtcagccttgaccaagccgaagaataaccataactgtaaaaaagtctcaaatgaagaaaaaccaaaggttgccattggtgaagagtgcagggcagatgaacaagccttcttggtggcactttataaatacatgaaagaaaggaaaacgccgatagaacgaataccctatttaggttttaaacagattaacctttggactatgtttcaagctgctcaaaaactgggaggatatgaaacaataacagcccgccgtcagtggaaacatatttatgatgaattaggcggtaatcctgggagcaccagcgctgccacttgtacccgcagacattatgaaagattaatcctaccatatgaaagatttattaaaggagaagaagataagcccctgcctccaatcaaacctcggaaacaggagaacagttcacaggaaaatgagaacaaaacaaaagtatctggaaccaaacgcatcaaacatgaaatccctaaaagcaagaaagaaaaagaaaatgccccaaagccccaggatgcagcagaggtttcatcagagcaagaaaaagaacaagagactttaataagccagaaaagcatccctgagcctctcccagcagcagacatgaagaaaaaaatagaagggtatcaggaattttcagcgaagcccctggcatccagagtagacccagagaaggacaacgaaacagaccaaggttccaacagtgagaaggtggcagaggaggcgggagagaaggggcccacacctccactcccaagtgctcctctggccccagaaaaagattcagccttggtccctggggccagcaaacagccactcacctctcctagtgccctggtggactcaaaacaagaatccaaactgtgctgttttacagagagccctgaaagtgaaccccaagaagcatccttccccaggcttccccaccacacaggccaccgctggcaaaccagaatgagacggaggatgacaaactgcccgccatggcagattacattgccaactgcaccgtgaaggtggaccagctgggcagtgacgacatccacaatgcgctcaagcagaccccaaaggtccttgtggtccagtcgtttgacatgttcaaagacaaagacctgactgggcccatgaacgagaaccatggacttaattacacgcccctgctctactctaggggcaacccaggcatcatgtccccactggccaagaaaaagcttttgtcccaagtgagtggggccagcctctccagcagctacccttatggctccccaccccctttgatcagcaaaaagaaactgattgctagggatgacttgtgttccagtttgtcccagacccaccatggccaaagcactgaccatatggcggtcagccggccatcagtgattcagcacgtccagagtttcagaagcaagccctcggaagagagaaagaccatcaatgacatctttaagcatgagaaactgagtcgatcagatccccaccgctgcagcttctccaagcatcaccttaacccccttgctgactcctacgtcctgaagcaagaaattcaggagggcaaggataaactcttagagaaaagggccctcccccattcccacatgcctagcttcctggctgacttctactcgtcccctcatctccatagcctctacagacacaccgagcaccatcttcataatgaacagacatccaaatacccttccagggacatgtacagggaatcggaaaacagttcttttccttcccacagacaccaagaaaagctccatgtaaattatctcacgtccctgcacctgcaagacaaaaagtcggcggcagcagaagcccctacggatgatcagcctacagatctgagccttcccaagaacccgcacaaacctaccggcaagggcctgggcctggctcattccaccacagggccccaggagagcaaaggcatctcccagttccaggtcttaggcagccagagtcgagactgtcaccccaaagcctgtcgggtatcacccatgaccatgtcaggccctaaaaaataccctgaatcgctttcaagatcaggaaaacctcaccatgtgagactggagaatttcaggaagatggaaggcatggtccacccaatcctgcaccggaaaatgagcccgcagaacattggggcggcgcggccgatcaagcgcagcctggaggatttggaccttgtgattgcagggaaaaaggcccgggcagtgtctcccttagacccatccaaggaggtctctgggaaggagaaggcctctgagcaggagagtgaaggcagcaaagcagcgcacggtgggcattccgggggcggatcagaaggccacaagcttcccctctcctcccctatcttcccaggtctgtattccgggagcctgtgtaactcgggcctcaactccaggctcccggctgggtattctcattctctgcagtacttgaaaaaccagactgtgctttctccactcatgcagcccctggctttccactcgcttgtgatgcaaagaggaatttttacatcaccgacaaattctcagcagctgtacagacacttggctgcggctacacctgtaggaagttcatatggggaccttttgcataacagcatttaccctttagctgctataaatcctcaagctgcctttccatcttcccagctgtcatccgtgcaccccagtacaaaactgtaggctcagctctgcccagcagtccaaagcggcatggccaacagagcttcactccttacccaggagtgctggcttatagagttagaagtcagtatttcttctaatctgaggctatgatcagtcccagctgtaggggcccagaggggaggtgaacatgcctgatttttgtgggacaactgtagcccacaaactgactggctggtgagtcttgactcccttccaacacagatgcccaggcacctccagatcattcacttcgcacgtgggccttgtgaagggatttgtgaatatccaggaagaacttagaggaccccatctgagttcggatggtcaggaaacaatctgggcaaaaaagaggcaggcatttcaaaggaaggggcaaggaagactggcaaacagatggcaagggatgcccctctttttcataaaactctccaaggttcaatcaatgcaatgtatagtgaaacttcaatagatctttcattttgacactattaaacaatccagagaagtaaacactgtt

SEQ ID NO: 1041 - DNA, 1920 bp, Homo sapiens
gtcggaaaatccgcgagaccacgcgtccgggttgaggacaccttgactaacctccaagggcaactaaaggatcaagaaaggcccagcacagcagaagatcagctggatctagctcctgcaggagatgtgtacaaagacaatcccagtcctctggggatgtttcctcctgtggaatctctatgtctcatcctctcagaccatttaccctggaatcaaggcaaggattactcagagggcacttgactatggtgttcaagctggaatgaagatgattgagcaaatgctaaaagaaaagaaactcccagatttaagcggttctgagtctcttgaatttctaaaagttgattatgtaaactacaatttttcaaatataaaaatcagtgccttttcatttccaaatacctcattggcttttgtgcctggagtgggaatcaaagcgctaaccaaccatggcactgccaacatcagcacagactgggggttcgagtctccactttttgttctgtataactcctttgctgagcccatggagaaacccattttaaagaacttaaatgaaatgctctgtcccattattgcaagtgaagtcaaagcgctaaatgccaacctcagcacactggaggttttaaccaagattgacaactacactctgctggattactccctaatcagttctccagaaattactgagaactaccttgacctgaacttgaagggtgtattctacccactggaaaacctcaccgacccccccttctcaccagttccttttgtgctcccagaacgcagcaactccatgctctacattggaatcgccgagtatttctttaaatctgcgtcctttgctcatttcacagctggggttttcaatgtcactctctccaccgaagagatttccaaccattttgttcaaaactctcaaggccttggcaacgtgctctcccggattgcagagatctacatcttgtcccagcccttcatggtgaggatcatggccacagagcctcccataatcaatctacaaccaggcaatttcaccctggacatccctgcctccatcatgatgctcacccaacccaagaactccacagttgaaaccatcgtttccatggacttcgttgctagtaccagtgttggcctggttattttgggacaaagactggtctgctccttgtctctgaacagattccgccttgctttgccagagtccaatcgcagcaacattgaggtcttgaggtttgaaaatattctatcgtccattcttcactttggagtcctcccactggccaatgcaaaattgcagcaaggatttcctctgcccaatccacacaaattcttattcgtcaattcagatattgaagttcttgagggtttccttttgatttccaccgacctgaagtatgaaacatcctcaaagcagcagccaagtttccacgtatgggaaggtctgaacctgataagcagacagtggagggggaagtcagccccttgattgccggtttgcaattcaccccaggaagtaaatggtccttaatcctacaactactgtaaacccagaagggaaagacagtacacactggaattgtaaagcccttgtgaattgcttaggcagaaagttttctttcttaagccttcaggaacccagaataaggcagactctgttaaagggataaatagaggtgtctgaatgtgagtgtatgcatgctgcgtgtgtctgtgtttatgtttgtttgtttgtttggggcaagaaagattctaggacaagagctaggcatgtacttctgaccaggtgggtaagcaactctaagtctgtatttgtattggtcattctcagtggaaatcccttaggccctctagtggttttcccctacctgcatattggttttcatgttttatattcactgttactatcttctgtgg

SEQ ID NO: 1042 - DNA, 585 bp, Homo sapiens
aaaactgtagcttaaaaataaaaattagtaatataacttgtgtaaacctacacaaaagataaaagatatcttattgcaaaaatagggcaacattttgttttaaagaccaaatagtgaattgaatttaatgcatatctttaaatccttaatagtatctcaaatctggtttaaatctgtctctccttaacagaatagaaagtgaaacaaatccagaaatcttgttcgagtacatggtctgtgctagtaatcatatctaaagtggtaatgttaccatatgctgggtactgggctgagtaaatcacatattttaacttatttaaacactgcactgtattgcctgctagcgatgtcatttttttaaagttggatggtgaatacatgagttgttttttaaactcttttgggagcctaaaaaatttgaattttttttttttcccccccaaacggagtttcttttttttgccaggctggagggcagggacattatcttggctcactgcagcctttgattccctggttcgggcgattcttcgtgcctaaagcctcccgaggagctggggatatacagggcttcccaccaccacg

SEQ ID NO: 1043 - DNA, 577 bp, Homo sapiens
ggaaaaacttatttataagaatcctgttatataagaacatataggaaatatgttttttgaaatatatttagggctaggctccccttctgtcctcagtattctcttttgccactgcagcagctctgagtggtctccttgaagtccccctctatcaccgagggtgtcagcatgatgacagctctcaccagtaaatcctccacttttccatcttttgtagtctctccaccttcttttaatgggcttcaggagggaggtcataagaccaattcttggacacctcctttgcatgtcctgcttagctgggcctagaacctccctctgaaatgtgggagtagctggtgctcttgtcttgagacctcagtcaaaatagaccaaaagttctattttcacatcctgttacaaagagacaaaatggaagaggccaaacaaaattaaacatcaacagcaaggccaggtgtggtggctcacacttgcaattccagggcttttgggaggctgaggtgagagaagtgcttgagacttgcagttcaagaccagcctggataacatagtgagaccccatctcttaaaaaaaaaa

SEQ ID NO: 1044 - DNA, 1886 bp, Homo sapiens
cattcagagacagaaggtggatagacaaatctccaccttcagactggtaggctcctccagaagccatcagacaggaagatgtgaaaatccccagcactcatcccagaatcactaagtggcacctgtcctgggccaaagtcccaggacagacctcattgttcctctgtgggaatacctccccaggagggcatcctggatttcccccttgcaacccaggtcagaagtttcatcgtcaaggttgtttcatcttttttttcctgtctaacagctctgactaccacccaaccttgaggcacagtgaagacatcggtggccactccaataacagcaggtcacagctgctcttctggaggtgtcctacaggtgaaaagcccagcgacccagtcaggatttaagtttacctcaaaaatggaagattttaacatggagagtgacagctttgaagatttctggaaaggtgaagatcttagtaattacagttacagctctaccctgcccccttttctactagatgccgccccatgtgaaccagaatccctggaaatcaacaagtattttgtggtcattatctatgccctggtattcctgctgagcctgctgggaaactccctcgtgatgctggtcatcttatacagcagggtcggccgctccgtcactgatgtctacctgctgaacctagccttggccgacctactctttgccctgaccttgcccatctgggccgcctccaaggtgaatggctggatttttggcacattcctgtgcaaggtggtctcactcctgaaggaagtcaacttctatagtggcatcctgctactggcctgcatcagtgtggaccgttacctggccattgtccatgccacacgcacactgacccagaagcgctacttggtcaaattcatatgtctcagcatctggggtctgtccttgctcctggccctgcctgtcttacttttccgaaggaccgtctactcatccaatgttagcccagcctgctatgaggacatgggcaacaatacagcaaactggcggatgctgttacggatcctgccccagtcctttggcttcatcgtgccactgctgatcatgctgttctgctacggattcaccctgcgtacgctgtttaaggcccacatggggcagaagcaccgggccatgcgggtcatctttgctgtcgtcctcatcttcctgctttgctggctgccctacaacctggtcctgctggcagacaccctcatgaggacccaggtgatccaggagacctgtgagcgccgcaatcacatcgaccgggctctggatgccaccgagattctgggcatccttcacagctgcctcaaccccctcatctacgccttcattggccagaagtttcgccatggactcctcaagattctagctatacatggcttgatcagcaaggactccctgcccaaagacagcaggccttcctttgttggctcttcttcagggcacacttccactactctctaagacctcctgcctaagtgcagccccgtggggttcctcccttctcttcacagtcacattccaagcctcatgtccactggttcttcttggtctcagtgtcaatgcagcccccattgtggtcacaggaagtagaggaggccacgttcttactagtttcccttgcatggtttagaaagcttgccctggtgcctcaccccttgccataattactatgtcatttgctggagctctgcccatcctgcccctgagcccatggcactctatgttctaagaagtgaaaatctacactccagtgagacagctctgcatactcattaggatggctagtatcaaaagaaagaaaatcaggctggccaacggggtgaaaccctgtctctactaaaaatacaaaaaaaaaa

SEQ ID NO: 1045 - DNA, 3184 bp, Homo sapiens
tttcgtcttcaaggggacaaaaagagagctagaaaaaatagggggagggggtcatattgattcctgtgggagatgaaattcggatattaaacaactgacctaagtcgcttacagttcttcctcccacctttctattttgcctcttaatcagcccaggcgtcctttccctgagattaaaaaaaagagagaggggagcgttaacaattaaatgtaataagcaactccaaagatggggatgctgtcgaggtggtagttccgtgcaaaccttgctattaccgttgcaaatagacgcggagcccaaggaggtaaaatgcacacttgctgccccccagtaactttggaacaggaccttcacagaaaaatgcatagctggatgctgcagactctagcgtttgctgtaacatctctcgtcctttcgtgtgcagaaaccatcgattattatggggaaatctgtgacaatgcatgtccttgtgaggaaaaggacggcattttaactgtgagctgtgaaaaccgggggatcatcagtctctctgaaattagccctccccgtttcccaatctaccacctcttgttgtccggaaaccttttgaaccgtctctatcccaatgagtttgtcaattacactggggcttcaattttgcatctaggtagcaatgttatccaggacattgagaccggggctttccatgggctacggggtttgaggagattgcatctaaacaataataaactggaacttctgcgagatgataccttccttggcttggagaacctggagtacctacaggtcgattacaactacatcagcgtcattgaacccaatgcttttgggaaactgcatttgttgcaggtgcttatcctcaatgacaatcttttgtccagtttacccaacaatcttttccgttttgtgcccttaacgcacttggacctccgggggaaccggctgaaacttctgccctacgtggggctcttgcagcacatggataaagttgtggagctacagctggaggaaaacccttggaattgttcttgtgagctgatctctctaaaggattggttggacagcatctcctattcagccctggtgggggatgtagtttgtgagacccccttccgcttacacggaagggacttggacgaggtatccaagcaggaactttgcccaaggagacttatttctgactacgagatgaggccgcagacgcctttgagcaccacggggtatttacacaccaccccggcgtcagtgaattctgtggccacttcttcctctgctgtttacaaaccccctttgaagccccctaaggggactcgccaacccaacaagcccagggtgcgccccacctctcggcagccctctaaggacttgggctacagcaactatggccccagcatcgcctatcagaccaaatccccggtgcctttggagtgtcccaccgcgtgctcttgcaacctgcagatctctgatctgggcctcaacgtaaactgccaggagcgaaagatcgagagcatcgctgaactgcagcccaagccctacaatcccaagaaaatgtatctgacagagaactacatcgctgtcgtgcgcaggacagacctcctggaggccacggggctggacctcctgcacctggggaataaccgcatctcgatgatccaggaccgcgctttcggggatctcaccaacctgaggcgcctctacctgaatggcaacaggatcgagaggctgagcccggagttattctatggcctgcagagcctgcagtatctcttcctccagtacaatctcatccgcgagattcagtctggaacttttgacccggtcccaaacctccagctgctattcttgaataacaacctcctgcaggccatgccctcaggcgtcttctctggcttgaccctcctcaggctaaacctgaggagtaaccacttcacctccttgccagtgagtggagttttggaccagctgaagtcactcatccaaatcgacctgcatgacaatccttgggattgtacctgtgacattgtgggcatgaagctgtgggtggagcagctcaaagtgggcgtcctagtggacgaggtgatctgtaaggcgcccaaaaaattcgctgagaccgacatgcgctccattaagtcggagctgctgtgccctgactattcagatgtagtagtttccacgcccacaccctcctctatccaggtccctgcgaggaccagcgccgtgactcctgcggtccggttgaatagcaccggggcccccgcgagcttgggcgcaggcggaggggcgtcgtcggtgcccttgtctgtgttaattctcagcctcctgctggttttcatcatgtccgtcttcgtggccgccgggctcttcgtgctggtcatgaagcgcaggaagaagaaccagagcgaccacaccagcaccaacaactccgacgtgagctcctttaacatgcagtacagcgtgtacggcggcggcggcggcacgggcggccacccacacgcgcacgtgcatcaccgcgggcccgcgctgcccaaggtgaagacgcccgcgggccacgtgtatgaatacatcccccacccactgggccacatgtgcaaaaaccccatctaccgctcccgagagggcaactccgtagaggattacaaagacctgcacgagctcaaggtcacctacagcagcaaccaccacctgcagcagcagcagcagccgccgccgccaccgcagcagccacagcagcagcccccgccgcagctgcagctgcagcctggggaggaggagaggcgggaaagccaccacttgcggagccccgcctacagcgtcagcaccatcgagccccgggaggacctgctgtcgccggtgcaggacgccgaccgcttttacaggggcattttagaaccagacaaacactgctccaccacccccgccggcaatagcctcccggaatatcccaaattcccgtgcagccccgctgcttacactttctcccccaactatgacctgagacgcccccatcagtatttgcacccgggggcaggggacagcaggctacgggaaccggtgctctacagccccccgagtgctgtctttgtagaacccaaccggaacgaatatctggagttaaaagcaaaactaaacgttgagccggactacctcgaagtgctggaaaaacagaccacgtttagccagttc

SEQ ID NO: 1046 - DNA, 1088 bp, Homo sapiens
  misc_feature (1)...(1088): n = a,t,c or g
gtcgtgaggcgggccttcgggctgngctcgccgtcggctgccggggggttggcctgggtgtcattggctctgggaagcggcagcagaggcagggaccactcggggtctggtgtcggcacagccatggcgggcgcgttggtgcggaaagcggcggactatgtccgaagcaaggatttccgggactacctcatgagtacgcacttctggggcccagtagccaactggggtcttcccattgctgccatcaatgatatgaaaaagtctccagagattatcagtgggcggatgacatttgccctctgttgctattctttgacattcatgagatttgcctacaaggtacagcctcggaactggcttctgtttgcatgccacgcaacaaatgaagtagcccagctcatccagggagggcggcttatcaaacacgagatgactaaaacggcatctgcataacaatggaaaaggaagaacaaggtcttgaagggacagcattgccagctgctgctgagtcacagatttcattataaatagcctccctaaggaaaatacactgaatgctatttttactaaccattctatttttatagaaatagctgagagtttctaaaccaactctctgctgccttacaagtattaaatattttacttctttccataaagagtagctcaaaatatgcaattaatttaatactttctgatgatggttttatctgcagtaatatgtatatcatctattagaatttacttaatgaaaaactgaagagaacaaaatttgtaaccactagcacttaagtactcctgattcttaacattgtctttaatgaccacaagacaaccaacagctggccacgtacttaaaattttgtccccactgtttaaaaatgttacctgtgtatttccatgcagtgtatatattgagatgctgtaacttaatggcaataaatgatttaaatatttgttaaatgagtatgattnnnnnnnnnnnnnnnnnnnnnnnggggcgcccgctttaaaggatccaagtttacgtccgcggggaggcgaggaaatcttttttatagggcgcccaaatcaaatcccgggccggg

SEQ ID NO: 1047 - DNA, 1197 bp, Homo sapiens
ttttttttttccaaaacaaaagccaaatttattcagcagacattttaattatgaaatcctataaatcaggaccaccacaatttcagacactccgttgcgaagtgtacatcaatagctacatctggaggatgaacaagccattgaatcttttaaaaattggtttagctaccttaaagtttgggggtggcaccttacaaaagcgccgtcaagtttcatacagccagcggcttcttctctgggagagtcacattttaaaaccggtttcagacacaaaagaagggctggcacgggaggaggaaataaattgtgagggtgaggagccgccgaggccgaggcccatggctccatggagggccagaagagagcagaaaaacgtccagggtctctcatgcattcctatagacaccagaaagggtggaataagaaagctcagctgggaggacaagaaagagactcaagagatcgtttatgactgtttctgagaaagctcctggcatggccatgagtggccttccgggagtcctgtaaaaaggaaagcacagaaaacaggaaagaactctccctacacgtccctctctgcctgtttgtgtcctcgggagactccaagcggtggtaaagcaccaacagggctcttcttggagcaagagaaagaaaagactccggggtgagtaagctctcccaggaaccccacagcaaaccgtgaccttgaacacagatggcaaggtcaagtcatttacaagtccacattcaaatccaaatctcccacctgcaaaattcttcacctctctccagtcccttaattggagttcacatctcccaccttcaccagccaccgaatcggtgggaaaaaggggcaatgccaagccacccaccaccaaacttttacattcttctcccctctggaatttctttgcacagcaattgtagcaccacttactaagctcctccaccagaaaataagaaaatgtatgcgtgtcgttagttttcaagtattgttataaagccatcgcgattcctacccctgagccctccttaaacaatccaagctcacgacgcccccaagggctaagtgaggtacaagtcgatgcaagtagctgccatagttctcccagtttatcccaggtccttgggcttggatggcccgggaaattctcatgccccacggaagcaccctggcgctcgtgcgaattccgcaga

SEQ ID NO: 1048 - DNA, 5054 bp, Homo sapiens
tgcccgaagtgacgaaaccaagtttaagccaaccaacggccgccagcccaattggcagctctccatcgccaccagtcaatggtggcaacaatgccaaaagggtggcagtgccgaacggacaaccgccaagcgccgcccgctacatgcctcgggaggtgccgccgcgattccgttgccagcaggaccacaaagtgttactaaaacgtgggcagccccctccaccgtcctgcatgctccttgggggtggggcagggcctcctccctgcacagcacctggagcaaacccaaacaacgcacaagtgacaggagcgctgctgcagagtgagagtgggactgcgccagactcaacccttggaggtgctgctgcttcaaattatgcaaattccacttggggctcgggagcctcctccaacaacggcacctcccccaacccaattcacatctgggacaaggtgattgtagacgggtctgacatggaagagtggccttgtattgccagcaaagacactgaatcttcttccgaaaacaccaccgataacaacagtgcctcgaaccctggctctgagaagagcactctgccaggaagcaccactagtaacaaaggaaaagggagccagtgccagtctgcaagttctgggaacgaatgtaatcttggggtctggaaatctgaccctaaggctaaatctgttcaatcttccaactctactacagagaacaacaatggactaggaaattggaggaatgtgagtggtcaggatagaattggacctggctctggcttcagcaactttaacccaaatagcaacccatctgcctggccagcactggtccaagaaggaacttctaggaaaggggcattggaaacagataatagtaattccagtgcacaggttagcacagtaggtcagacatccagggaacagcagtcaaagatggaaaatgcgggtgttaattttgttgtctctggcagagaacaggctcaaattcataacactgatggaccaaaaaatggaaacactaactccttgaacttaagttcaccaaaccccatggagaataagggaatgccctttggaatgggcttggggaacacctccaggagcactgatgccccttcacaaagcactggagatcgaaagactgggagtgttggatcttggggtgcagctagggggccttctggaactgacacagtctctggacaaagcaattctggaaacaatgggaacaatggaaaagagagagaggactcctggaaaggagcttctgttcagaaatcaactgggtcaaaaaatgactcttgggacaacaataacaggtctacgggtgggtcctggaactttggcccccaggactctaatgacaacaaatggggtgaagggaacaaaatgacatctggggtctctcagggagaatggaaacagccgactgggtctgatgagttgaaaattggagaatggagtggtccaaaccaaccaaattctagcactggagcatgggacaatcaaaagggccaccccctccttgaaaaccaaggcaatgcccaggctccctgttggggaagatcttccagctccacaggaagtgaagttgaaggtcaaagcactggaagcaaccacaaagcaggaagtagtgacagtcataactctggccgtcggtcgtacaggcccacacatcctgattgtcaggctgtcttgcagactcttttgagccgaactgatttggaccccagggtgctctcaaacactggctggggccaaactcaaattaagcaggacacagtgtgggacattgaagaggtgccaaggcctgaggggaaatctgacaaaggaactgaggggtgggagagcgctgccacacagaccaagaactcagggggctggggagatgcacccagccaaagcaatcaaatgaagtctggatggggggagctctcagcctctacagagtggaaagaccccaagaacacaggaggctggaatgactacaagaacaacaactcttccaactggggaggaggacgacctgatgaaaagacaccttcctcttggaatgagaatcccagcaaggatcaggggtggggaggtggacgccagcccaatcaaggatggtcttctggaaagaatggttggggggaggaagtcgatcagacaaaaaacagcaattgggaaagttctgcaagtaaacctgtgtctgggtggggtgaaggagggcagaatgaaatcgggacttggggtaatggtggcaatgcaagcctagcttcaaaaggtgggtgggaggattgcaaaagatccccagcatggaatgagacgggccgacagcccaattcctggaataaacaacaccaacagcagcagcccccacagcagccgccgccaccacaaccagaggcttctggttcgtggggaggcccacccccaccacctccaggcaacgttcgaccttccaattccagctggagcagcgggccacagcctgcaacacctaaggatgaggaacccagtggttgggaagagccatccccacagtcaattagtcggaaaatggacattgatgatggcacttcagcatggggagaccctaacagttataactacaagaatgtgaatctgtgggataagaattcccaagggggcccagcacctcgagaaccaaacctgcccaccccaatgaccagtaaatcggcatcagattccaaatctatgcaagacggctggggggagagtgacgggccagtcacaggagctcgccatcccagctgggaagaggaggaggatggaggagtctggaacaccactggctctcagggcagtgcttcctcccacaactcagcaagctggggacaaggaggaaagaaacaaatgaagtgctcactcaaaggaggaaacaatgattcatggatgaatcctcttgccaaacagttttcaaatatgggattgctgagtcagactgaagataatccaagcagcaaaatggatttgtctgtaggaagcctttcagataaaaaatttgatgtggacaagcgagcgatgaatctcggggattttaatgatatcatgaggaaggatcgatctgggttccgtccacctaattccaaagacatgggaaccacagatagtgggccttattttgagaagggcggtagtcatggtttgtttggaaacagcacagcacaatcgagaggtctgcacacacccgtgcagccactaaattcttctcccagtctccgggcgcaagtgcctccccagtttatttccccccaggtttctgcctcaatgctcaagcagtttcccaacagtggcctgagtccaggtcttttcaatgtggggccccagttatctcctcaacaaattgccatgctgagccagcttccacaaattccccagtttcagttggcatgtcagcttctcttgcagcagcagcaacagcagcagttgttacagaaccagagaaagatttctcaagctgtacgccaacagcaagagcagcagctggctcgaatggtgagtgcactgcagcagcagcagcagcagcagcagaggcagccaggcatgaagcactcgccctctcatcctgttgggcccaagccgcatctggacaacatggtacccaacgcattgaatgtggggctcccagaccttcaaaccaaagggccaatacctggatatggttctggcttcagctctggcggcatggactatggcatggttggtgggaaggaggctggaaccgagtctcgctttaaacagtggacctccatgatggaggggctgccctctgtagccacacaggaagccaatatgcacaaaaatggcgctatagtggcccctggtaaaacccggggagggtcaccgtacaaccagtttgatatcatccctggtgacacactgggtggccatacgggtcctgctggtgatagctggttacctgccaaatctccaccaacaaataaaatcggaagtaaatccagcaatgccagttggcctccagaattccaaccaggagtgccatggaaaggtatccaaaacattgaccctgaatctgacccctatgtcaccccaggaagtgtgctggggggtacagccacatctcccattgtagatactgaccaccaactgctgcgggataacaccacagggtctaattcttccctcaacacctcgctgccttcacctggtgcctggccctacagtgcctctgacaactcctttaccaacgttcatagcacttcagcaaagttccctgattacaaatcaacatggtccccagatcccataggacacaaccccactcatctctccaacaagatgtggaaaaaccatatttcctccaggaacactacaccgctgccccgcccacctcctggtctgaccaaccccaaaccatcatctccctggagcagcacagcaccccgatcagtcagggggtgggggacacaggactcacggctcgcctcggcctctacctggagtgatggtggctcagttcgtcctagttactggctggttcttcacaatctcaccccacagattgatgggtcaaccttgagaacgatctgcatgcagcatggcccactgctgacattccatctgaatctaacccagggcactgccctgatccgatacagcaccaaacaggaggcggccaaggcccaaactgcactgcacatgtgtgtgttgggaaacactaccatccttgctgagtttgccactgatgatgaagtcagccgctttctggcacaagctcagccccctacacctgcagcaaccccaagtgcgccagctgcggggtggcagtcgctggagaccggccagaaccagtcagatcccgtgggacctgctctgaatctttttggtgggtccactgggctcgggcagtggagcagcagcgctggtggcagcagcggggccgatcttgctggcgcttcattgtgggggcccccaaactattcttctagcttatggggagtcccaacggtggaagatccccataggatgggcagccctgctcctttactacctggtgaccttctgggaggagggtcggattcaatc

SEQ ID NO: 1049 - DNA, 2460 bp, Homo sapiens
ctcgctgttgtcctccccgttcctcaagggattcctggctggctatgtggtggccaaactgagggcatcagcagtattgggctttgctgtgggcacctgcactggcatctatgcggctcaggcatatgctgtgcccaacgtggagaagacattaagggactatttgcagttgctacgcaaggggcccgactagctctaggtgccatggaagaggcaggatgagcagctcagccttcaggtggagacactttatctggattccccagctgtcatccatttgctatctccaactttcctgccaccttcatccttgcctcccttcctgcagattgtggacagtagttcctcagcctgcaccctggattccttcttccccttcctagctccatgggactcgccccaagactgtggcttcaaggaccaccagccccttactcttcaagccctgactgtggagttggcccgctggaccctgatgctactcctatccactgccatgtacggtgcccatgccccattgctggcactgtgccatgtggacggccgagtgcccttccggccctcctcagccgtgctgctgactgagctgaccaagctactgttatgcgccttctcccttctggtaggctggcaagcatggccccaggggcccccaccctggcgccaggctgctcccttcgcactatcagccctgctctatggcgctaacaacaacctggtgatctatcttcagcgttacatggaccccagcacctaccaggtgctgagtaatctcaagattggaagcacagctgtgctctactgcctctgcctccggcaccgcctctctgtgcgtcaggggttagcgctgctgctgctgatggctgcgggagcctgctatgcagcagggggccttcaagttcccgggaacacccttcccagtccccctccagcagctgctgccagccccatgcccctgcatatcactccgctaggcctgctgctcctcattctgtactgcctcatctcaggcttgtcgtcagtgtacacagagctgctcatgaagcgacagcggctgcccctggcacttcagaacctcttcctctacacttttggtgtgcttctgaatctaggtctgcatgctggcggcggctctggcccaggcctcctggaaggtttctcaggatgggcagcactcgtggtgctgagccaggcactaaatggactgctcatgtctgctgtcatgaagcatggcagcagcatcacacgcctctttgtggtgtcctgctcgctggtggtcaacgccgtgctctcagcagtcctgctacggctgcagctcacagccgccttcttcctggccacattgctcattggcctggccatgcgcctgtactatggcagccgctagtccctgacaacttccaccctgattccggaccctgtagattgggcgccaccaccagatccccctcccaggccttcctccctctcccatcagcagccctgtaacaagtgccttgtgagaaaagctggagaagtgagggcagccaggttattctctggaggttggtggatgaaggggtacccctaggagatgtgaagtgtgggtttggttaaggaaatgcttaccatcccccacccccaaccaagttcttccagactaaagaattaaggtaacatcaatacctaggcctgagaaataaccccatccttgttgggcagctccctgctttgtcctgcatgaacagagttgatgaaagtggggtgtgggcaacaagtggctttccttgcctactttagtcacccagcagagccactggagctggctagtccagcccagccatggtgcatgactcttccataagggatcctcacccttccactttcatgcaagaaggcccagttgccacagattatacaaccattacccaaaccactctgacagtctcctccagttccagcaatgcctagagacatgctccctgccctctccacagtgctgctccccacacctagcctttgttctggaaaccccagagagggctgggcttgactcatctcagggaatgtagcccctgggccctggcttaagccgacactcctgacctctctgttcaccctgagggctgtcttgaagcccgctacccactctgaggctcctaggaggtaccatgcttcccactctggggcctgcccctgcctagcagtctcccagctcccaacagcctggggaagctctgcacagagtgacctgagaccaggtacaggaaacctgtagctcaatcagtgtctctttaactgcataagcaataagatcttaataaagtcttctaggctgtagggtggttcctacaaccacagccatgattgtcttgtgtcttctgtctgcgcaactcccctcaaacaattttgttcctctggggtcctgagtatcttaattctgggataacttttagactaagaaaaaattgttttctccaa

SEQ ID NO: 1050 - DNA, 2966 bp, Homo sapiens
  misc_feature (1)...(2966): n = a,t,c or g
ggtgggtgagcagcatgggctttgaggagctgctggagcaggtgggcggctttgggcccttccaactgcggaatgtggcactgctggccctgccccgagtgctgctaccactgcacttcctcctgcccatcttcctggctgccgtgcctgcccaccgatgtgccctgccgggtgcccctgccaacttcagccatcaggatgtgtggctggaggcccatcttccccgggagcctgatggcacgctcagctcctgcctccgctttgcctatccccaggctctccccaacaccacgttgggggaagaaaggcagagccgtggggagctggaggatgaacctgccacagtgccctgctctcagggctgggagtacgaccactcagaattctcctctaccattgcaactgagtcccagtgggatctggtgtgtgagcagaaaggtctgaacagagctgcgtccactttcttcttcgccggtgtgctggtgggggctgtggcctttggatatctgtccgacaggtttgggcggcggcgtctgctgctggtagcctacgtgagtaccctggtgctgggcctggcatctgcagcctccgtcagctatgtaatgtttgccatcacccgcacccttactggctcagccctggctggttttaccatcatcgtgatgccactggagctggagtggctggatgtggagcaccgcaccgtggctggagtcctgagcagcaccttctggacagggggcgtgatgctgctggcactggttgggtacctgatacgggactggcgatggcttctgctagctgtcaccctgccttgtgccccaggcatcctcagcctctggtgggtgcctgagtctgcacgctggcttctgacccaaggccatgtgaaagaggcccacaggtacttgctccactgtgccaggctcaatgggcggccagtgtgtgaggacagcttcagccaggaggctgtgagcaaagtggccgccggggaacgggtggtccgaagaccttcatacctagacctgttccgcacaccacggctccgacacatctcactgtgctgcgtggtggtgtggttcggagtgaacttctcctattacggcctgagtctggatgtgtcggggctggggctgaacgtgtaccagacacagctgttgttcggggctgtggaactgccctccaagctgctggtctacttgtcggtgcgctacgcaggacgccgcctcacgcaagccgggacactgctgggcacggccctggcgttcggcactagactgctagtgtcctccgatatgaagtcctggagcactgtcctggcagtgatggggaaagctttttctgaagctgccttcaccactgcctacctgttcacttcagagttgtaccctacggtgctcagacagacagggatggggctgactgcactggtgggccggctggggggctctttggccccactggcggccttgctggatggagtgtggctgtcactgcccaagcttacttatggggggatcgccctgctggctgccggcaccgccctcctgctgccagagacgaggcaggcacagctgccagagaccatccaggacgtggagagaaagagtgccccaaccagtcttcaggaggaagagatgcccatgaagcaggtccagaactaagtgggagtggaggcaggccctccacagaagctctgcagcaggggctgggagagcagaagggcaggccctgcaactcaggctgggagtatcgaaccctctgcctagggccggagttgctgccagtacccgctccctctgctcatccatccttgattatttggcttctaggaacagttgacttcccagaatgcagtgggctgctgggcacccctctcacggttggggaggattctgtaaataaaggtgccccttgggttggggcagtggtgacgagctgtgggaagagccctggataggaagccactgagtctgccctgggctctgataaaaccttcaccattaacttgctgtgtgaaccttgggcatgtggctttcccttctctgggcctcagtctgttcatcctccccaaatggataaatgaaaacctcttgggaggcccttacaataggatctgttgccatgctcaaaatgaagttacctgaaataaggtgcttcctgcttcctcctagagatgggtgcctaaagaaaggacttagcatatgagacttctgggtacccaatggggctgggtgggcatgcttgtccacttgtgtggtgcttaggacttgccaatgcccaggcccaagggacaaaaagaacagagctttttgttctcatgggctgggccctgctacctccgagggcaccctgcagggcaattgcatgttcatccccaacccccacattccccatcctccaaacccactgggtctcatgcccaaaagaagaagttgaaggcatggggagccaacattttatttgaaggaagccacagaggcttgaaatttcaattaaaacacaaagttttatgagtaccttgaagctccagaatgtgctggggaaaggggttgtgatggccaggaggaggatacccttcaaaacgggctgttccctaaccagatagaaatgggaaagggaaaaaattggcagagaaagtctagactctctggcctaccatggagcctaggcccaggcccccaagatcccaccttccccaacccccatgggactggagatttttgtagcttccattggaccatgaggggcatgatgggaggcctgagttagggtgaccttttttgtgagcgtctcatttgaattttatcttcactggggtcatagatgtagcagcccacatcgccaatgttcacacctttggggacaaacaggtagccgtagcangggacgtggcagtaggggactccatcatgctcagcatgacttccagcagtcagggtcttgtggcaacgcttgcacctcagaca

SEQ ID NO: 1051 - DNA, 1726 bp, Homo sapiens
atctgcttacgccaagcttggcacgagggtttgtctgagccgcctcggaagacctccggctcttgtcaggctcttgtttggtaattcctgggaatttacctgggctcatgcttgaagaagcagagggaccatctcggctgattagacacgccccagacccaaccccaggggtcaggtgaacagccaggcggctaagtgaccagctttcttgtcctctcctttttggcagatacagatcacttggattcagtcgagtttgctttgctccgtgggaactgcaccagagctggaggttagcatcttgcaaggaggtagtaacatatccagtcgtgaaactgggaaagaccagagctcttgcatcagggaaacatgtcccgtcggaaacagacaaatccaaataaagttcactgggatcaagtatttgctgggctagaagagcaagcccgccaggcgatgatgaaaactgattttcctggagaccttggcagtcagcgacaagctatccaacaactaagagatcaggactccagtagcagtgagttctgcaccttctggtgacagtgagggtgatgaagaggagacgacacaagatgaagtctcttcccacacatcagaggaagatggaggggtggtcaaagtggagaaagagttagaaaatacagaacagcctgttggtgggaacgaagtggtagagcacgaggtcacagggaatttgaattctgaccccttgcttgaactctgccagtgtcccctctgccagctagactgcgggagccgggagcagttgattgctcacgtgtaccagcacactgcagcagtggtgagcgccaagagctacatgtgtcctgtctgtggccgggcccttagctccccggggtcattgggtcgccacctcttaatccactcggaggaccagcgatctaactgtgctgtgtgtggagcccggttcaccagccatgccacttttaacagtgagaaacttcctgaagtactaaatatggaatccctacccacagtccacaatgagggtccctccagtgctgaggggaaggatattgcctttagtcctccagtgtaccctgctggaattctgcttgtgtgcaacaactgtgctgcctaccgtaaactgctggaagcccagactcccagtgtacgcaagtgggctctacgtcgacagaatgagcctttggaagtacggctgcagcggctggaacgagagcgcacggccaagaagagccggcgggacaatgagacccccgaggagcgggaggtgaggcgcatgagggaccgtgaagccaagcgcttgcagcgcatgcaggagacagacgagcagcgggcacgccggctgcagcgggatcgggaggccatgaggctgaagcgggccaatgaaaccccggaaaagcggcaggcccggctcatccgagagcgagaggccaagcggctcaagaggaggctggagaaaatggacatgatgttgcgagctcagtttggccaggacccttctgccatggcagccttagcagctgaaatgaacttcttccagctgcctgtaagtggggtggagttggacagccagcttctgggcaagatggcctttgaagagcagaacagcagctctctgcactgaaccacaccctcctgcctgccctccttcccacctacctacccacccacccacacccacaggcacgaggaccagtgctgctgccacccacgaggccctgcc

SEQ ID NO: 1052 - DNA, 2207 bp, Homo sapiens
ttttttttttttcaaggaaatcaaatcttcaatgaatgaaaaactcagtgccatctggggccagggggtcaccggaccaggtggaaagtcagccagtatatgatgaggggctggaaggctgcagctcccagagtcaggtagagctggagacgctgccgggggacggggccccccatgctgtcggggcccagggctgctgtccgcaaagagcgcacaatgaagtacatgagcgccgatgaggtccaggccagcgccacgtagtagccatcgctgccgaacagcagccccgtgagcacactgaggatcattcccacgtatttgtagccactgtaggccagcaggtgaaaggtgctcaggtcactgcgcacggtggccaggtagaggcccaggagcagggccagcacctccatcaccacccacaccagcgctgtgcttgcacacaggcccagcacctccggggagaaccttttctgaatgcccagtgccatcccagccaggagcacgtaagtaatgaaggccatcgtggggatatagaggtcaggggcgttgaggtcttgccgggggggcagaggagcatcacgactgtactgcacttcccagttctggtgtgtgtaggggaagaccagcagccctagcttcttggccacgtaggctgtgtccacagcaaaaaaatacttgagtttgctcacagacacaaaacggtgcagctccttgtgcaccatgtccttcccatgggatgcgatggagctgccataggccatagccacattggccattgggtccccaagcaagtggttgacactgaaggccacgtctgctcctgtggctgggtatcccccgggctggctggaataaccaccgcttgtgtcatcgaagaggggagggggatccggggctgcccgggccctgtgcttggagccgtgggctccgtagcccgagtgataagccatggccgcgacgctcgctgtccccgagggcccgctgcgccgcctcgtgggtacgaatactaatgaggcagctgctccgcgcccagggtaccgaccgaggccacccggccgcgcgacacgtcccccaccccgccggtctcggccaccatgtccgtggcgtcatcccccgcgcctgccattggctcttcggcggcgccggctcgcccctcccctctcccaattggccactgacgagctctggcctgagcggattcggcagaaggcaacatccgggtgagggacaggcggagcgacttgcggtgcctgggattggatcacgggcttgccagttcacggtgggaacagccaatagaagagttaagaaagaaggtgggcgagaattatttgcgcgcctgcgcggtgaggcacttgacgcaccctgccacgactacaccagggagtcgagaggtaacctgcagccggagtcaggagcaaagcttccttggtgggacgtactccaggagggaacggggcggtcgagttccaaccaagccctgcccttcggggcgcctgtttctccctctctgggcttgttttcctcccccgtcacctacacttcacccaatcttggaacggagccccggcagacccggaggtggtggtgggaggccggacctatcagtgacagagctgccaagcaagccccaggatgctgactccacccgcctcccactcctcttctccgcgcgggtgctgtccgtcgtccggtgctgaaaatgtcctcccgcctcagccgccatcctgtagactcccgggggcctgcgtatgggaaagttttggggtctcgaaccacacgctcctagcgagcgcgtggccgcacgcacacatacacgcatactgcaaaactggggcccagaggatccgaagtctgagagattgggtggtataggtggggcaggatcctgccccgggcctgtcccatagactctcccgtagtccagcagatttgggggcagaggtgtgctgatttgcgtcctgaagctgcagcctaaactcctgagtcatcgccgggcctgtggtcttcttgaagtgaggcccctaagcctcacttgtagtcccgggggttcctttctctccacccaggttctgatcactcccaaccccgcggagacagtcttcaggggcctccctctcacagaccttcagccaccgctttctagagagcatgagcaggttctctgcgacctctctaattagctaccaggtatccagttacaccag

SEQ ID NO: 1053 - DNA, 2349 bp, Homo sapiens
gcggccgccgcgagtctggtatcctgagcttcgtgagttgagcgctgctgctccgcggtggagtcaccgcaccgctcccgggatcatggtgttctacttcaccagcagcagcgttaattcatctgcctacactatttacatgggaaaagataaatatgaaaatgaagatctgatcaagcatggctggcctgaagatatctggtttcatgtggacaaactctcttcggctcatgtataccttcgattacataagggagagaatatagaagacatcccaaaggaagtgctgatggactgtgcccaccttgtgaaggccaatagcattcaaggctgcaagatgaacaacgttaatgtggtatatacgccgtggtctaacctgaagaaaacagctgacatggatgtggggcagataggctttcacaggcagaaggatgtaaaaattgtgacagtggagaagaaagtaaatgagatcctgaaccgattagaaaagaccaaagtcgagcggttcccagacctagcagcagagaaagaatgcagagatcgtgaagagaggaatgagaaaaaagcccaaattcaggaaatgaaaaagagagaaaaagaagaaatgaagaagaagagggaaatggatgaacttaggagctattcatcactaatgaaagttgaaaatatgtcttcaaatcaggatggcaatgattcagatgaattcatgtaaaaggagaaaaggagaaaaggacctttgaaagatgtgaatgtagagacaattgcagaccttttggtttcatctgtgttctgaagtataaaatacaaccaaaattctaccttcatcctacccagaaattattgattttcaagttttaaaaaaattgtaccttttttgctgacagaaaaggatcagatatgtataaaatagttgaacttgacagcatataacttaaagtgaaaatgtttttgccagaacatgtcttggtaccttgtgaaagcaggctgcccttgttcttgagatagactttaaaatgaaccagctctgaaaagtacttctgctgctctggtctatccctgaaaacagatgtcttgaaacacttttcatattcttaaaataatcttcacttctgttaagaagaacatgttggtgggtaattatgcgaatgtttccctgtccctgatttctcgattaggcgtatgggttttgaaaaagagatttttcagaagattgtcagcttcagtattcacgttccatcgtgtcatctgggtctgttagtgtagtgaccctcagtgcagtctgtcccagcgtttatgtccttgcttcctctgagcagaggcctccatcttagtatcaacatatttaaagaaattgatggtgttcatcaagctggggcctgtggcagttgttgcctgagcaccaagtaacccaagccacctatgtgacaacttctgggcccaggagtaatttctcagcattgagggtaaaataggatggagtgctctgttgatcatttgggagatgtaggttacctgatttgtgccttaggatgcagcgtgaagcagaagtccatattgcaattatgattttagaaggaactaagcattttactcacacccacagcagcaagaatgacctcctgcagcagatattccacctgtaatagcactttggaactgtgggcaaaaccaaaaggctagtgtttccatttattccatgttggtgtatggggttgaactggaaaattccctgaggcaaaactcactggccaaattttgagagggtatagaaaatgactttagagatgagtggttttgtgtatgtgtctgatgatattcagtctgatgttccgcaattttaaaagttataataaaataccatttttttaatctggaaggacattgatatatgaattcttagaatttgctattaaaaagggtagcccccattccacaagctggttttgagggtgatcttgctctaaaaaacctcattcatcataggctcagtctgacaggttctgtacggggctatcatctttctcctcctctgctaaatgcctctttcttccagctgctcactgggtcaaagggatgtcctttctcagatgtattcttgatacatctcagatgtattcgtagctgtgctccttccatacttccaaggagtccggcttctacagaattcctctgtacctcacactgcaacacatgtagatagcgcttttgaaaaatacatatatttttactatagtatgagaggtcctggggctcaaactttaaacatttcctaactcagcttacactgagttaaaatgtccaggtctctgctgaattctcttgttgaattcatagctctccaacctcctc

SEQ ID NO: 1054 - DNA, 694 bp, Homo sapiens
tccctctctcctgcctgtgctcaaacacccacagagaactctggaaggagaagaaaaacatacctctctccttccccggcctttccccacacacactgaggttgagaagctgggaataaacagcgtccaacacttttaaatggcggtggcagctccagacaagggagaagggaaggactgagagaagaaattattagactttttagactggctgaacccagaacctttacattggttacaaaatcatgcctggaggtgaaaaattcaatagcattataccaagtgtttgggcaacggtgtagagacaatagtagagacaagctacagctttagacagtggtagagagaagctacaactttagcttgtagaaacagctgttgggtgttcagcagatgcagtctaggtgcatgcaaacccactgtgtgcagcatgccttcactctcacgacaagggagccagaccttgtgtctgcggctggctgaatattgcatggaatctgtggattcacagaggcttcttctcagctaagagggagtgtggctggatgcatttctctgtggctcattcaatttggggtatactcatactactgagtctctatgaaggagtgataagctgggtcttcaatttccaaatgtttaccaaactcctactatgtgccaagcactattcccactgctttgagagctaacg

SEQ ID NO: 1055 - DNA, 2196 bp, Homo sapiens
cggcaactgagaggaagcaaagggaaaaaaactccattaaaaagcccagctttcctccatgttagatgtgacttggaaaatgagaaagatttagcaaaattccaccgtgtcttttgccaggctagagacagggagagcagagtaaaaccctcaggctgctgaaatttctaggctgttaggaagcccctcgaattctgtgaaaatgagggtttcttaactcacactgagagcggaaaggggcagacccttttcataactccctcaagtgtgtgttacctttctttaccagcatggtaagcaacaggacatatcccagcctcggacatgtctgtatgatccaaggtacccaaagtcagacagagtaaactcaagcctggcactggctttctgccgcttcatgtgctttggaaaaagcaggagaagcaatagcagcaggagtccccagcagctggagccgcaagaatgaactgcaaagagggaactgacagcagctgcggctgcaggggcaacgacgagaagaagatgttgaagtgtgtggtggtgggggacggtgccgtggggaaaacctgcctgctgatgagctacgccaacgacgccttcccagaggaatacgtgcccactgtgtttgaccactatgcagttactgtgactgtgggaggcaagcaacacttgctcggactgtatgacaccgcgggacaggaggactacaaccagctgaggccactctcctaccccaacacggatgtgtttttgatctgcttctctgtcgtaaaccctgcctcttaccacaatgtccaggaggaatgggtccccgagctcaaggactgcatgcctcacgtgccttatgtcctcatagggacccagattgatctccgtgatgacccaaaaaccttggcccgtttgctgtatatgaaagagaaacctctcacttacgagcatggtgtgaagctcgcaaaagcgatcggagcacagtgctacttggaatgttcagctctgactcagaaaggtctcaaagcggtttttgatgaagcaatcctcaccattttccaccccaagaaaaagaagaaacgctgttctgagggtcacagctgctgttcaattatctgaggttgtctgggacctgcctccaccccatccagggatgagaatggcagccaatctctgtggccaagctccagccaaaaaggagggcacgaccagaaaggaactccctttgcacggaggcttgccccatcaccctctgagccctcccaacacagcacactagtcagcccactgccacgacctccctgccagccagaagcatccgtactgcacgctgtctgagaatgctgggcctggattgcagacagtgccgctgctgatcgcatcaaaaacaaagtcaaaggccatctcacattttacaaatccccagctcatgaacgtgaagctgataggaaatcaccccagggaacccgaaaaagaaacttgattcctctattgctggccttacttgatgtcttttataaaacttgggactacaatactaacctttttttctgaatctgctgttctacccatgtgtctcacattcatttgtattatttcaagaaatgtactaatttccagttcactcaggccttactaatccataccaaattagcctaaagacaaggcattttatattcatttctattttcagcatgtttctaccaaagctattagaaccaacacgtacctctgaatgcccgattataagaagacatgagaagactttaaaagttttggaaatttacagagccatgatttttgaacctaattgaaagaaaaccatctgaattgttgcaggtccacatttttgccaaagatacactctatagatgcttagtagtggcctgatttttttccatgtattgccacgacaaactaaaaatgaactgtgtttaagaatgtagtatttctgtttttcatccaagttgattgggggaagaatatggcaggatccatcttttacagtattttgtattcagtaaaggggacattcctgctcctcccttcccccattgcatgccctcttcctcccttgatttcactttctctcatgcccggatccttttattctccccagttataacccagttataaaagaaagatctgagcataaagatacgtgtttaaaaataactaaaagtaaaggaaagtgccttaaaaaaaaaa

SEQ ID NO: 1056 - DNA, 846 bp, Homo sapiens
aaccttccaaattgtatcagatattccgtgagatgtatgtgcgttttttcttcagactccattccatctgcttctcatccttctggttattgtgtcactctgtctgctgtttgaaactcttcttcaaacttatcttccccaactcttttatcatctacgagaaattggggctcaaaccactccgcatatcatttaagtgggatggttcgagctttctctggatacttagctacagatcagctcttgcttttatgggatagaatcctaggatacaactctctggaaattcttgctgtgctggcagctgccgtgtttggctttccgagcagtgaacctgatggaggggacatcactggctgcagctgaagcagttcttgctgacctttctactttaaaagttatgcctcttcttcagatttttctgtttgctactgtcacctgatcttcttcacagtcactggcaacacatctagtttttcattagaaacaaatcatgaactatgcaaactctgcataaaaccaaaatgaaactttgcatataagccaataaagatcatgttccctcttcagttaaacctaagtagtttctcactttttgaaacaataactctgcaccaaatattgcatcgcatgctgctgattttcaagagagaagcaataaacacaacttctgctaaattgagcattatatatataatattataatatatatataatcctgacttgtaaatggcatgtaataatatatgcaataagaactaaagatactgtaataaacttcaagaggtaatgtagcttcttggataattcttttatgtcagtttataaatttatctctagataatg

SEQ ID NO: 1057 - DNA, 1231 bp, Homo sapiens
cgcctgcaggaattcggcacgagcaggcccgtggcgccgacaggatgggcaagtgtcgtggacttcgtactgctaggaagctccgtagtcaccgacgagaccagaagtggcatgataaacagtataagaaagctcatttgggcacagccctaaaggccaacccttttggaggtgcttctcatgcaaaaggaatcgtgctggaaaaagtaggagttgaagccaaacagccaaattctgccattaggaagtgtgtaagggtccagctgatcaagaatggcaagaaaatcacagcctttgtacccaatgacggttgcttgaactttattgaggaaaatgatgaagttctggttgctggatttggtcgcaaaggtcatgctgttggtgatattcctggagtccgctttaaggttgtcaaagtagccaatgtttctcttttggccctatacaaaggcaagaaggaaagaccaagatcataaatattaatggtgaaaacactgtagtaataaattttcatatgccaaaaaatgtttgtatcttactgtcccctgttctcaccatgaagatcatgttcattaccaccaccacccccccttattttttttatcctaaaccagtaaacgcaggacctgtaccaattttaggaaacaataagacagggttgtttcaggattctctagagttaataacatttgtaacctggcacagtttccctcatcctgtggaataagaaaatgagatagatctggaataaatgtgcagtattgtagtattactttaagaactttaagggaacttcaaaaactcactgaaattctagtgagatactttcttttttattcttggtattttccatatcgggtgcaacacttcagttaccaaatttcattgcacatagattatcttaggtacccttggaaatgcacattcttgtatccatcttacaggggcccaagatgataaatagtaaactcaaaattgctccccactctgtttattatttaaaggtgtcaggatctgtgttgtaatgtgtctacattaatgtgtttaggagaatacaggcattggttcatttagttgatggaagtatatgccaggcagggaaataaggatctgtctgtttagtggataccgtgtatcctttaatagaccaggtaacagttcgtgttagtttagactattgttttgtactgtactttcttgggtggcagaggaaagaaaagtaaaacattaa

SEQ ID NO: 1058 - DNA, 1575 bp, Homo sapiens
tttcgtcccgcgcccggactttgccatcggcggggcagtcgcgggatgcgcccgggagccacagcctgaggccctcaggtctctgcaggtgtcgtggaggaacctagcacctgccatcctcttccccaatttgccacttccagcagctttagcccatgaggaggatgtgaccgggactgagtcaggagccctctggaagcatggagactgtggtgattgttgccataggtgtgctggccaccatctttctggcttcgtttgcagccttggtgctggtttgcaggcagcgctactgccggccgcgagacctgctgcagcgctatgattctaagcccattgtggacctcattggtgccatggagacccagtctgagccctctgagttagaactggacgatgtcgttatcaccaacccccacattgaggccattctggagaatgaagactggatcgaagatgcctcgggtctcatgtcccactgcattgccatcttgaagatttgtcacactctgacagagaagcttgttgccatgacaatgggctctggggccaagatgaagacttcagccagtgtcagcgacatcattgtggtggccaagcggatcagccccagggtggatgatgttgtgaagtcgatgtaccctccgttggaccccaaactcctggacgcacggacgactgccctgctcctgtctgtcagtcacctggtgctggtgacaaggaatgcctgccatctgacgggaggcctggactggattgaccagtctctgtcggctgctgaggagcatttggaagtccttcgagaagcagccctagcttctgagccagataaaggcctcccaggccctgaaggcttcctgcaggagcagtctgcaatttagtgcctacaggccagcagctagccatgaaggcccctgccgccatccctggatggctcagcttagccttctactttttcctatagagttagttgttctccacggctggagagttcagctgtgtgtgcatagtaaagcaggagatccccgtcagtttatgcctcttttgcagttgcaaactgtggctggtgagtggcagtctaatactacagttaggggagatgccattcactctctgcaagaggagtattgaaaactggtggactgtcagctttatttagctcacctagtgttttcaagaaaattgagccaccgtctaagaaatcaagaggtttcacattaaaattagaatttctggcctctctcgatcggtcagaatgtgtggcaattctgatctgcattttcagaagaggacaatcaattgaaactaagtaggggtttcttcttttggcaagacttgtactctctcacctggcctgtttcatttatttgtattatctgcctggtccctgaggcgtctgggtctctcctctcccttgcaggtttgggtttgaagctgaggaactacaaagttgatgatttcttttttatctttatgcctgcaattttacctagctaccactaggtggatagtaaatttatacttatgtttcaaaaaaaaatcatcaactttgtagttcctcagcttcagtcgacg

SEQ ID NO: 1059 - DNA, 968 bp, Homo sapiens
atcagcttaggtagaacagttctcggtgagggccagctacatacctggctaagcgctgcccactgcagaaaagctcatcacccgggacctgatctccaggactcagaagcacttggaggaaggcctattcacttagaagcagttaccagtgctgggcagtgtcctccaagtgccagaggagtgctgtggagaaaagaagtccatggaagccaggagatgggcaagattttgcctcttcaaggtgaatgcggcttcaaggggctatctttgtgctcctgccccacctggggcccatcctggtctggctgttcactcgtgatcacatgtctggttggtgtgagggcccgaggatgctgtcctggtgcccattctacaaagtcttattgcttgtacagacagccatctactctgtcgtgggctatgcctcctacctggtgtggaaggacctgggagggggcttggggtggcccctggccctgcctcttggcctctatgctgttcagctcaccatcagctggactgtcctggttctctttttcacagtccacaaccctggtctggccctgctgcacctgctgctgctgtatgggctggtggtgagcacagcactgatctggcatcccatcaacaaactggctgccctgttactgctgccctacctagcctggctcaccgtgacttcagccctcacctaccacctgtggagggacagcctttgtccagtgcaccagcctcagcccacggagaagagtgactgaggccctagggcatgggagaggagggacgcccagggtggggaggaagagtctgcaagcagggctgtggagttagggttcaccccaatgggaccaccctcctgggtcccctggagccgtttttccttagaaatcagagaaatgggaaagggggggaaagggatttcacacttaaataaaaaaataccaccagcaactctgaaaaaaaaaaaa

SEQ ID NO: 1060 - DNA, 381 bp, Homo sapiens
  misc_feature (1)...(381): n = a,t,c or g
tctcncgccagaatcctgatagtcaggatcaaagagaatggcaccggtgaacacagatgccacagataaagacatatccaagttcaaggtcacctccactttggtggtctccggaatagagtgcatcactggcatccttgggagtggcttcatcacggccatctatggggctgagtgggccaggggcaaaacactccccactggtgaccgcattatgttgatgctgagcttttccaggctcttgctacagatttggatgatgctggagaacattttcagtctgctattccgaattgtttataaccaaaactcagtgtatatcctcttcaaagtcatcactgtctttctgaaccattccaatctctggtttgctgcctggct

SEQ ID NO: 1061 - DNA, 1882 bp, Homo sapiens
ttttttttttttatggttatgacttttattaatcatatctgctgttattcccaaacttctcaatgttacatgaatactaacccttgttttatataaaatatgactaaagtaaatttacctacaggtgcctctctccttcattggtgattaaaatttcacgccagagactaaacttcattgaaactactgcaagcatgtgtatgatagacccatttagctaagtatctggcattgtggccagaaaaaaaaaaaaatcggttcctacaaaatctcttgggcaacacttaagccatggaagagcccacatgaatccaggtctactttcctttacaggtagattccagaacaacaacaaaaaatgtaagactacaagaaatgatttaatatgataaaactcccatttcaaaacccagttctaaaggatttactgactaatgctgattatttagtcatggaaaatgtctctcataaaagtgctcctaacaaaacatgatctacaataatttataaaatgtgaagggttgggatgtgcagactgattggtgcacgtcaggttgtttctcttaaataaggtataaaaaactatgatatcatagtcttttgactttattttctgagataaaaaagtataggcataggtgtttttaatagtcttcttgatgatatcctttagaataatctatcaaatggcttctttcatgtttcctgattatcagcattcatcagtgttactgtcagccttgattaagtggttgaaaatttcagagaagaataagcaacttctgtgaacctttccccaatccctgagaatcataatcattacagaaatattttatcctttcatcaaatatctctggaaagtagccgtgttcgttcattgttaatagggcaaggtgcagtgtcatagagggttaatccatgtaaattggcttccacccgtaaagaaattttctgaaaatcacgaatgtaagtcaggaaaaaaccaaagaaggaaaatgacatagaccattctgctgcagtagtgatcatgtgaagcacataacctttgtcctcggggttccaatggagtttctgttctaaatcagtcccaaaattgccactgtgcaaaactgatgagcaagtcagcatgctaagtgcacttactccacaccagataaccaacaacagtctgatccagaagacttgtttgccatggattttgggctgcatttggtaggaaaggatggtctgaacaaacatatataatgagcccataccaaaggtaagcacagctccacttacatgtgcagcaaaaagggttgttttctggaagtttgccacaatagaaagtcctaaacaactcagtattccaagtacaaggccagccttgtttaatttgatgataacgttctcttcaggactcagagcatgaacttgcttataacgaacataaatggtagcaatgcataaaactgccgcaatatttagcattgccccaaataagcatttttctggagctactgtaccagtgtcactgatataaggtaaagccgggtctatatggtggagtgttactgcagtaatgtatgaaaatatgaaagcagcagatgtccaaattacaagggctgaaggaaggaaactgaggccttgctgaaaccaccacatttctaacaggttttctgttttacaacttcacaaaatgttagtcttcagacctgctcatacctgcaccttttgtaaatccagaggaattaattagaccgctgattttctccggaagcgcgaagcactaggccgtttgaggatctccgctccgctttgcctgggaccaggaaaagacgcgagagacggaactcggcatcaggcactgcttggggcaggaggagagtaggggaaacttacc

SEQ ID NO: 1062 - DNA, 2455 bp, Homo sapiens
ggcggggcaccacccgcttccgtgcccgctcgagaatcccccgtatctggcgcgcagggaagttcccgaacgcgcgggcataaaagggcagccggcgcccgcgcgccacagctctgcagctcgtggcagcggcgcagcgctccagccatgtcgcgcggcctccagcttctgctcctgagctgcgcctacagcctggctcccgcgacgccggaggtgaaggtggcttgctccgaagatgtggacttgccctgcaccgccccctgggatccgcaggttccctacacggtctcctgggtcaagttattggagggtggtgaagagaggatggagacaccccaggaagaccacctcagaggacagcactatcatcagaaggggcaaaatggttctttcgacgcccccaatgaaaggccctattccctgaagatccgaaacactaccagctgcaactcggggacatacaggtgcactctgcaggacccggatgggcagagaaacctaagtggcaaggtgatcttgagagtgacaggatgccctgcacagcgtaaagaagagacttttaagaaatacagagcggagattgtcctgctgctggctctggttattttctacttaacactcatcattttcacttgtaagtttgcacggctacagagtatcttcccagatttttctaaagctggcatggaacgagcttttctcccagttacctccccaaataagcatttagggctagtgactcctcacaagacagaactggtatgagcaggatttctgcaggttcttcttcctgaagctgaggctcaggggtgtgcctgtctgttacactggaggagagaagaatgagcctacgctgaagatggcatcctgtgaagtccttcacctcactgaaaacatctggaaggggatcccaccccattttctgtgggcaggcctcgaaaaccatcacatgaccacatagcatgaggccactgctggcttctccatggccaccttttcagcgatgtatgcagctatctggtcaacctcctggacattttttcagtcatataaaagctatggtgagatgcagctggaaaagggtcttgggaaatatgaatgcccccagctggcccgtgacagactcctgaggacagctgtcctcttctgcatcttggggacatctctttgaattttctgtgttttgctgtaccagcccagatgttttacgtctgggagaaattgacagatcaagctgtgagacagtgggaaatatttagcaaataatttcctggtgtgaaggtcctgctattactaaggagtaatctgtgtacaaagaaataacaagtcgatgaactattccccagcagggtcttttcatctgggaaagacatccataaagaagcaataaagaagagtgccacatttatttttatatctatatgtacttgtcaaagaaggtttgtgtttttctgcttttgaaatctgtatctgtagtgagatagcattgtgaactgacaggcagcctggacatagagagggagaagaagtcagagagggtgacaagatagagagctatttaatggccggctggaaatgctgggctgacggtgcagtctgggtgctcgcccacttgtcccactatctgggtgcatgatcttgagcaagttccttctggtgtctgctttctccgttgtaaaccacaaggctgttgcatgggctaatgaagatcatatacgtgaaaattctttgaaaacatataaagcactatacagattcgaaactccattgagtcattatccttgcctatgcatgatggtgttttggaggatgagagggtgctatccatttctcatgttttcccattgtttgaaacaaagaaggttaccaagaagcctttcctgtagccttctgtaggaattcttttggggaagtgaggaagccaggtccacggtctgttcttgaagcagtagcctaacacactccaagatatggacaaacggtggacgcggctggcagaagggacttcacgaagtgttgcatggatgtttttagccatcgttggctttcccttatcaaacttgggcccttcccttcttggtttccaaaggcattcttattgcttgagttatatgttcactgttcccccctaatattagggagtaaaacggaataccaaggttgatttagtgtttttacctctgtccttggctttcatgttattaaacgtatgccatgtgaagaaagggtgtttttctgttttatattcaactccataagactttgggataggaaaaaatgagtaatggttactaggcttaatacctgggtgattacataatctgtacaacgaacccccatgatgtaagtttacctatgtaacaaacctgcacttatacccatgaacttaaaatgaaagttaaaaataaaaaacatatacaaataaaaaaatcccgactttgggatgagtgctagg

SEQ ID NO: 1063 - DNA, 1225 bp, Homo sapiens
agcttggagattgaccaagcagccaagaaacccaagaaaggcaaagagatggtggataaccagaaacaagtcaaatgtccggaagatcaagttggacaggtggactgcaacattttcaaagcaaaagaatcccgttgctgtcgtgatgtgaaaccagcaccagttctgctggccacgcgccttgtcggcatgcagcacagggtcccccagcagagcccacaggcctgcggctgtgctctgaacaccaaagactgcacgcgtggccgccaggtcccagaagaccttctctctggccaccaaagaacggtaagtggcattcagggaagaggacagctggtggcagaccacaaagacgcccaagtagaagacaaagccagcgaccatcagcgtggagcggatcccccaggatgcatagtccaggtcaaaaatgctctctgatgtgcccccatcgctcgcaggattcattgtccacagctatattccaaaggagtcctggggccaacacgggccgggccctacactgtgtcttgtctaaggaaatgaagtcagtgcagcggtccctgggattgtcacgtatccatcttcaatctaaaagaaagatcattcattttgtgttgactcgatagaaacaaggacacatcacttaccccaggaacgcaaacattatactacaaaatatttaattctgtaccttattcttaatgaacttacaaggatgcataaacataccaagggaacatccactgacagtataggaggaaagaaaatgaaacttaagcgttagagcggtccaccaccaatcagaaggccgaatcgttgctggcaggaacacacggtcctatgctcgtcctatgtgcaccccaccagcaagtctcccgccttcacagcagtcccaatcagtcacacaattcaggcatcgcacgatgaaacatgattaagtcattacactgggatacactttgttacagcactgaacttctgctgtttgattctacgtgacactcccaggatgtcacgaaaacctgtgctcccgggcttcaagggatttccctggtaaagggcccggaaggcttttcaacagaacaaggaaaggctgaacttcctccttggacctacggacctttgaaaagggaatataaattatcctttcttgtttcactctaaccatccctgcattcacttcatgctatactttcaatctttgaaaaattacactctctggacc

SEQ ID NO: 1064 - DNA, 3685 bp, Homo sapiens
ttttttttttttgcaaaatgaaacaagtttattttctccaataacttctgtaaattacaaagacaaaatactaaaaactacagcatataagcttttcaatatttaaccagagtactcgtaataaatatgcatccggaaacaagataaaaggctacacctcgtcaggcatcctacaaaaatgtctcaagttttatatactctgcagcatttctgtgcgggggcagaaggggctgttgtgtattttctgaagtgctgtgacaaaaggtcctttcacatttctttggagcatttttgaaattgcttaactataattaaacaacttaagaaaagtaacaccaagctttaaagccatttttgctttgctgtcattggtccttatccaatacagatcaacatatcatccagcacagccaagcacccactgaggccaagcagccttgtgggacatgggccctgtcagagcaggccctactttcagttaaatactttggagagtccaggattctgtctctctccctcaacaagattaatgccataagggaagttgcaagcgtgttagaaacatttttaacctgaaagtaaagtgaacagaaatattttttttccgagacctctgctatgcacccataatattacccatatcagggtttttagcttcaaagttgaaaaacagaattggtacctaacagtcccctcctagagatcatttatgggcgctggtagagtcagggcattcaaaacattcaacgggtaaaaggaggatttgctagattcagaaatgcgctacaattctgaagacaccatggctgaaagttctaggggtgttggtggcagctcatattaggtctggcatacataactaccttttgctatagctgaaaactttaaggaaaaagttatatttttaaaaagtctcaagcatggctacctaaaaagtattttgttaatataatctactgtaatttcacttatttaggagttcagatatgaaaacatctttatgagccaataaaaatattacagagaaaaaaatacttctacaaaagttgaggttaagaactatgaggcatttcttttggctgtaaacacacagtttactgtcccttgttgaaacacaaatgtttggatttcctgagcttcacagataacagcaggaggcaagtttgcatagaaaatttgcagtatgtcaacaatttacttaaaaaaagaacttttaaggacaacttgcttttgtttttaagtttcatattttagttaatagtgctcatcaaactgaatattgataagcagggtgatgagatatataaggcagatgggaagaaaacatggaattagagtttttaaatccacaggatatcatgatgaagggttttaagcagatacttcataactagtgccatactaatttagttagaaattaaatcatgttttggaattgaaagccaaaggcaaaaagagctctcctgtgctgaatggcactgcccgagtacaggaatggaaggagcattcactgcaggaggcctcagcacatcactcggtggtgataaagccactcagccagtcagggatggaggagggggcccccctgccagcatcaggaccagacctctgggcatggctgatcccagctctggaatctgaagggatgacagggactttcacctctgctggtttgaagtctctaagcagttctgaggcgggcagtcttctcctgggagaagtcctcagaaacctttggaaagggaagaagctacgctaggccacagtgcataccacgaatgagaacaatggcagcggctgccgacaactctggatctaacacaaagacagatgacaaggggcagtgtcctgccaaggaatccactttacttcttttgagactggtttttacacatggtaaggatttgcttcagtactttctggacatcttcatccatctggccctgcacagcatacagaagatgcattctgtaaactgatatgacctcctggtgttgtttcttgcattccgccagctggttctggagctgtttgacttgctgctgcagcgcctccagctgctgactctgccttttggatgagcttgttgagtaggagagctgggagaggctgttcaaggcctccttcaatttggtgacttccttcgacatctcatttatctttttatctttatcttcctccagttttgaagagctctcagagtatcttttcatttctgcaagttcttcctgagcttgctggaatttttgcagaagttcatttacttcttgctctttggatttcaagagagtctgaatattttccttttctcttttcacctgtgagacctcacttctaatctggacaacctctgaatggaccttctctttctctttcacagattcctttaatttcgatgccaacacactcacttcactctctaaggatgactggagtttttcataggaagaccgaggtaccattgcatcagtcatagcagctttctcttctaagagttgtttctccagctttgctacttccacttccttgcttgcaaggtgttccttaagattgcttattttttcttccatctcttttgctgcagtccgcagcgtggttatcacttgcaaatgttctgtgatagagacagagttctctttttgtgcatccaccagttgtttgagctgggtcaactcattcaacacttttgaatactgagacttcatttcagacagtgcatcttctgctttagccctggacacgtttgtcaattgcatcagtttctcatgctctgctttatggatatattcagctgtgacatcctctagagatttcctcttcctgtaatcctccagctcagcctgggcttctttgtacagctgtgacagctcgctcacctgtttattgagttcatctatcatcctattcatggcttctttcatgtcctcagcttcatcactggcttcctgtgtcatctgactttttagtgtgtcttttaattacatgatttcttcttgggcttcttgggatttctcaaacaaaaatgctttctccttattcatattctcaataacagagcaatatgaacttttcatttcctcgtactcttccacaggtggcttaatcactgtacctttctccctctctaccagtttttcctctaactctctcactttctctttatttctttcactttcttctaatgcattctgcagatcctgctttagcacatttatttcctcttccgtgaccctcagctcgtggaaatgtgaataattatccatgctttcaggtgagacaagaccgagtttcatctgcttctgcacactaaggacttctttcatagcctcctcgtatttgctctgagtttctttaagtttctggctgaggtcagagctgttctctgaaatctcagtgttgtttaagcataccagttctgcccttcgggattggagttcgacctgtagctgttttctctctgcttcagagctctctaatctcttctgtagatcttgcaaaatctcttgcagttgctgaattctgacatcattgtcagtagtggatttacctaaagaatgtattaagacagatggagatgatttggagtctgggggagaggtttcaccaggttttcccagggatgggcccaagtcagtttgggtggaatggtatgagtcaaagcttaggtctgcttccgcctccttgg

SEQ ID NO: 1065 - DNA, 937 bp, Homo sapiens
acgcagcagccaccgccgcgtccctctctccacgaggctgccggcttaggacccccagctccgacgtagggccctctcgcgcgccacctccatccgctgcccctctgcccacgggccgggctcagatgtcgccctctggtcgcctgtgtcttctcaccatcgttggcctgattctccccaccagaggacagacgttgaaagataccacgtccagttcttcagcagacgcaactatcatggacattcaggtcccgacacgagccccagatgcagtctacacagaactccagcccacctctccaaccccaacctggcctgctgatgaaacaccacaaccccagacccagacccagcaactggaaggaacggatgggcctctagtgacagatccagagacacacaagagcaccaaagcagctcatcccactgatgacaccacgacgctctctgagagaccatccccaagcacagacgtccagacagacccccagaccctcaagccatctggttttcatgaggatgaccccttcttctatgatgaacacaccctccggaaacgggggctgttggtcgcagctgtgctgttcatcacaggcatcatcatcctcaccagtggcaagtgcaggcagctgtcccggttatgccggaatcattgcaggtgagtccatcagaaacaggagctgacaacctgctgggcacccgaagaccaagccccctgccagctcaccgtgcccagcctcctgcatcccctcgaagagcctggccagagagggaagacacagatgatgaagctggagccagggctgccggtccgagtctcctacctcccccaaccctgcccgcccctgaaggctacctggcgccttgggggctgtccctcaagttatctcctctgctaagacaaaaagtaaagcactgtggtctttgaaaaaaaaaa

SEQ ID NO: 1066 - DNA, 3805 bp, Homo sapiens
ttttttttttttggaagagggacggattgtgaaactttattgataaagaattccgttccaaaggtgtattccagtcacatttaccctacataaaataccaacatcttcttattgcaaaaacagaaactccggccgttgtattgatgctgacttaagagaaatagaagcctctatataaggcaagagtccataccagaagaattccgaccaatatgaggatacctccaaaaaaaatcaacttcaataacctactttatatggtaaggaggacccaaaaaaggtcaggcttttgtgggaagttgatatgcagtttattgaacaaacagagtgtacagtaactaaacgaactgtgtatttccaaaggaattaagaccgcatatctggattcacacctaaaagcacatagaaaattaaaccaaagaagggcaagttttgtactaaaatcacttgggcccaggttattctataagaagattctcactggcatttgatagtaacttatcaccttctgtgcgagcttgggaaccagctgactcagtgaactgcttcctgtcttcagtgcgtgatgacacagatgtgtcaagcttaatagatcttatatgtaaatttaagaataagaagttttatacccaccctggttttattccaaagttactgctctgcaattttgggctccatccttaggaagatactggaaaagcaagagaacctttctcagctgcctgtgtgaagtgacgttgttctagaacggtgccctggggcctcatgcacgatttcacaagtatagctgcataatctgtggatgtcactgaatggaagaagaatcatcaatggtatatttaggttatagaaggttccactgagataagaaaaggttctacaatgcaggtagctgtcaagcctcctaaatatttaactcgttttagttaacatcacactgtgcattgagtgcaagattctttggttacaccatattaaccaccaggaggataactcctggtttgtaaaagacatcagtggttcttaacggaggggtgatatggccccaggagacatctgactatgtctggagagaatttttcacagctctagcgggggtgctactggcacctaatggatatggatggcaggaatgctgctgaacattctaccatgcacagggtggccccacaacaaacacctctcaggccactaatatgaatagtcccgaggttgaaatgtcctgaaaaaggttcagaaaacatgtctagacgtttgcaaagtcaaatgtatattatggaggctgcaaggcgccccttgcatctcacagctgagggaccccgtcacctctcaccatcagaggcccattcattcccgccttccattccaggcccagtgcctgctccttctcactgaagaactcaatagagatttgctgaatgaatgagggaaaaataagctagaagcatagtttaaagtcttccatcgactacattaaacagcaattttatgtggcctaaactttattctgaaccttagtggtgtcatagtctctgactatatagaacctcaaagttaaggctaacacgttcttaaagatggagtgcacatcttaaggggagtttgtctaaacacttctcgagtcattttagtgggacaaaccaaataaaatggtgctaaaggcaaacattcaatatacttcattttaaactaaaaaattaacatataaaatgccatgcacagcagacaccattcttttttttacatatttacaattttacatatttacttatcaatataatttctatctttacaattataaaattattccaaactgtggaagagtggtaccatttaattttcttgaacatacactttgtagcattcatttgtttaatcctttaaaaggcaattatttaccaaaaccacagtgaatgccagaggaagcacataggaaaatcatggagggaaaaaaagattgagacaaaatttgcacacaagccttaaatgaatctgtatcagtaactcaaataagtagtattttattattaactaaggttcccctgctaggaaaaacgaaacaatccccatatactgtacctttaaaaaatgctctgacatttataagcaatttagttacattctagatcccaatcagttgagtgtagtaagggctacctacaatttaggctcaaataaatactctccactaaattgtgatcatcctgcataaacttgaggttgcagtggtggaggaagtttatcattttcaacgttttcagagtcaatagctgctaacggttgattcggaggcttaatttccagtgggtatttctcaacgatgtcttgaacttctcttgcaattccatctgtccaatctatgaggtctttttccagtttcttggcttcattcatgatcctttcttgtcgttcattcaactgagacaagagatccaagttcttatacatttgcttgacgcctaagcaagcatcaggagaccaactctcagcttcttgcttcctgggagaggtctggccagacatgtagcgatcaaaatcctcctgacttagattcaaagactgggcgtctagcttctcaatgaaagccacagcacagcacagattggtgaaatagtagccatcctctccagtcatcagtcggcttggattgcagaagcgcgtgatatactggatattagactgaaggcgtggggggttgcccttcaaaacaatgtagatgagggtggggaggaagtcatccgctgacgccggctcattcttggtgatcttgatggcattgaagatgtgcttgctgcacttggtgatgcaggccagcttgtctcgaggcacacgcttggaatccatttcaatgatatctgtgatcgccttcaccaccatatcagacacttctgggatgtcttcattaacagggacacacagcatctgaggcgtaacccagcgcagggctctgattctcttttgaatggcaagatctttcttctcatcatcagtagtttctggacagaatacatatttatagagacgagtcatgatgtacttttcaatctgatccattatcttctcgactctttctggaggcactttcccacgagtttgcatcctttcggccacattgtggtagaaatcctgagcacactctgactgttcttcaatgcttagatcccttttgtaatgcattccttccaaaaacagcttggtctgtttatagatttcttggcctgtcttgtggaaggtcttgagaaattctatgaactccttagacactctatccgtttcaatgctggtttgccggtttatggaaggactgggagcttttgcttcctgaatttccttctttgatccgaccctggaagatgcactgaagaatttcttcactgtggtaaccttgcgggtcttctcgttggttttcttttcttcaaacttggagaatgtgagggattgggccccttggctgctctgactgctggcaaaggcctcttcttcctcccgctggagtcgctccgccagctcccagtcctcctgaatctgcttctgcctggctttgtggtactcttccctccagcacttggagcagaaaccctgccaggcagggttgccgtagtaaccacatcctttcttgcacaggagatccgattgatccacatgaattcctcggcgttcagacttaaggctcatcttcttcctgctaaccactcgcccgcgtctccgccggcgtccaaaccaccgctcgcccgcttcgcccgggtaggtctgggctccgcggccagctcccgcctcacacccaccctcctgctcgcccacgaaa

SEQ ID NO: 1067 - DNA, 1513 bp, Homo sapiens
cccacgcgtccggaaaaatgcagagaaacaggagtcttggctactcctttagaggcagactcagaccctcctgcctcacagctttatctttgtatttgccccttactttatcttgtgccttgagaaattgctggggagagaggtatgtccactgggcagctgtacaggatggaggatctagggcgtttccactcccagcagccaggttccctcaccccaagctcacccactgttggggagattatctacaataacaccagaaacacattggggtggattgggggtatccttatgggttcttttcagggaaccattgctggacaaggcacaggagccacctccatttctgagctctgcaagggacaagaactagagccatcaggggctgggctcactgtggccccaccccaagccgtcagcctccagggatctacaccctgccttggctgctacagctttttcactccactgccctaggggagttcagcaacctaatgatctctatctctgaacatctcttcatcccatgctccaagtccagcaacctgcaccctggaaccaggagtggaccctacccgagctgtctgtattaatccccatcccccaccaccaatcttaaaaagccctctgtccccctaccctaaaccccagttaggtacccatgctgggcaggtcagttaacaatttatgcacaggtactagttttattgtattaccgttccagggtagctttgaaaaaagtatctcaaaaaggcaacactgcgcctggctgatcccagcacttttcaaatgatgccgctcaaagccgtgacttggcctactttgaacagcaaacttgttgctgctgttgtcaacctgaaggcctctcaaatgccagcttcaagcagggtgtgaattggccagtgtcagatctcaggagtcctgtgttgagagtgtggctttcagctgcggggagctgcacttggtggggaaagccaggcaggtcaccctcacagccagataatgtggaggtcagaacccaaggaagggagtgagacctccactcccagtgggggacctggccacccatccttggggacctgagaaagcgtacttcaccttggggtgaaggctgggtggggccagagggaccagtgccctcctcagtgcttaggggcagagccacctgcagcaatggtatctgcatattagcccctctccaccttctttctcccgctgaatcatttccctcaaagcccaagagctgtcactgcttctttctccctgggaagaatgcgtggactctgcctggtgatagactgaagccagaacagtgccacaccctcgccttaattccttgctaggtgttctcagatttatgagacttcttagtcaaatatgagggaggttggatgtgggtggcttgtgcctgtaatcccagcattttgggaggccgaggtgggaggatcccttgaagccaggagtttgagacaagcctgggcaacaaagcaagaccctatctctaaaaaaaaaa

SEQ ID NO: 1068 - DNA, 1677 bp, Homo sapiens
tacggctgcgagaagacgacagaaggggagactgacgtgtgagctgcatcgcgggaggcgcatggcggggatggcgctggcgcgggcctggaagcagatgtcctggttctactaccagtacctgctggtcacggcgctctacatgctggagccctgggagcggacggtgttcaattccatgctggtttccattgtggggatggcactatacacaggatacgtcttcatgccccagcacatcatggcgatattgcactactttgaaatcgtacaatgaccaagatgcgaccaggatcagaggttccttggggaagacccaccctacgaagttggaatgagaccatcagatgtgataagaaactcttctagatgtcaacataaccaaccttataaagactaaaattcatgagtagaacaggaaaatcatcctgactcatgtgttgtgttctttatttttaattttcaaagaggctcttgtatagcagtttttgtctattttaacattgtagtcatttgtactttgatatcagtattttcttaacctttgtgactgtttcaatattacccccgtgaaagcttttcttaatgtaactttgagtacattttaattgccttctatttttaaaactcaaaatcattagttgggctttactgttcttgctattgtatggcatatacatctgcctggatatatttctactcttgaccaaagttttgtaaagaacaatataagatttcgggtaggggtatggggagggaagatattttattgagaactacttaacaaaagatttatctgtaagcttgaactcaggagtacagttttagctatctagactctaacagcttttgctttaaaattattaaagtgtttcttaatgaaaaagaaaagatcttgctaaagttaaaataaggaacatttcaccttttaaatatttaattcttatgtggacttatttccagaaaactttggtgataattcttgagacaaaaggtggttaagtagcattattatgtaatgcttatataccatagagtttttaatagaagagaaatccatttcctccgagggtcactattaacaatgtacttccttaaatttagtttaatgattgtaatgggtgctgcatttgcacattgcattaagttatgatgagacgaattgttgttaaaaattatagcaaaaagaaatgtaaacttggttaaaatcctttcactctttgtattgttttttttaaggtttttattccttaaatgtaaaatgactacctaattttttgatgtaaatacattaaattcaaagagaaaaaaaatcagctgatgtagcagtatatcttttccttgatggttaaatattgatctagtatttatattgctgaattattttctgtggaggaccagataagcagtaagtatgtcttatcctatatgttttgcaacataaaaatattgctaattgaaaagaattaggcaattatgtgtgttgctgggttgtttttttgtttttttttttttgagacggagcttgaccctgtcgcccagggatggagtgcaacagcatgatctcggttcactgcaacctccatctcctggggatccaagtgattctcctgcctcagcctcctgaatagctggggtttacagggcacctgccaccatgcccgggtaattttttgt

SEQ ID NO: 1069 - DNA, 1677 bp, Homo sapiens; identical to SEQ ID NO: 1068

SEQ ID NO: 1070 - DNA, 1776 bp, Homo sapiens
agcggccgcgcagcggacaccgtgcgtaccggcctgcggcgcccggccaccggggcggaccgcggaacccgaggccatgtcccatgaaaagagttttttggtgtctggggacaactatcctccccccaaccctggatatcggggggggccccagccacccatgcccccctatgctcagcctccctaccctggggccccttacccacagccccctttccagccctccccctacggtcagccagggtacccccatggccccagcccctacccccaagggggctacccacagggtccctacccccaagggggctacccacagggcccctacccacaagagggctacccacagggcccctacccccaagggggctacccccaggggccatatccccagagccccttcccccccaacccctatggacagccacaggtcttcccaggacaagaccctgactcaccccagcatggaaactaccaggaggagggtcccccatcctactatgacaaccaggacttccctgccaccaactgggatgacaagagcatccgacaggccttcatccgcaaggtgttcctagtgctgaccttgcagctgtcggtgaccctgtccacggtgtctgtgttcacttttgttgcggaggtgaagggctttgtccgggagaatgtctggacctactatgtctcctatgctgtcttcttcatctctctcatcgtcctcagctgttgtggggacttccggcgaaagcacccctggaaccttgttgcactgtcggtcctgaccgccagcctgtcgtacatggtggggatgatcgccagcttctacaacaccgaggcagtcatcatggccgtgggcatcaccacagccgtctgcttcaccgtcgtcatcttctccatgcagacccgctacgacttcacctcatgcatgggcgtgctcctggtgagcatggtggtgctcttcatcttcgccattctctgcatcttcatccggaaccgcatcctggagatcgtgtacgcctcactgggcgctctgctcttcacctgcttcctcgcagtggacacccagctgctgctggggaacaagcagctgtccctgagcccagaagagtatgtgtttgctgcgctgaacctgtacacagacatcatcaacatcttcctgtacatcctcaccatcattggccgcgccaaggagtagccgagctccagctcgctgtgcccgctcaggtggcacggctggcctggaccctgcccctggcacggcagtgccagctgtacttcccctctctcttgtccccaggcacagcctagggaaaaggatgcctctctccaaccctcctgtatgtacactgcagatacttccatttggacccgctgtggccacagcatggcccctttagtcctcccgcccccgccaaggggcaccaaggccacgtttccgtgccacctcctgtctactcattgttgcatgagccctgtctgccagcccaccccagggactgggggcagcaccaggtcccggggagagggattgagccaagaggtgagggtgcacgtcttccctcctgtcccagctccccagcctggcgtagagcacccctcccctcccccccacccccctggagtgctgccctctggggacatgcggagtgggggtcttatccctgtgctgagccctgagggcagagaggatggcatgtttcaggggagggggaagccttcctctcaatttgttgtcagtgaaattccaataaatgggatttgctctctgcaaaaaaaaaa

SEQ ID NO: 1071 - DNA, 358 bp, Homo sapiens
ggcacgaggcaacacgttataccatttacccaggctgtgtagaaagctgaaccttcgttggtttagtgcgagtacactttatgatgtgcagcatgatgacaagatgggtagcaacacattttttaaacggaatgattgccgctatgtgatgatttcatgcaaagctgacatggcatatgataatgtgcgccatcctttcatgatataatctattagaactgattatggaggaaacataccttaacataataaaagccgtatatgacagacccacagctagtatcatactgaatggtgaaaaactgaaagtctttcctgtaagatctggaacatgacaaggatgctcagtgtggccccg

SEQ ID NO: 1072 - DNA, 666 bp, Homo sapiens
  misc_feature (1)...(666): n = a,t,c or g
cggtggaattggcccaggatgacagctggtgaatggagtcagttttatccaagtatgaagatcagattactattttcactgactacctagaagaatatccagatacagatgagctggtatggatcttagggaagcagcatctccttaaaacagaaaaatctaagctgttgtctgatataagtgctcgtctatggtttacatacagaaggaaattttcaccaattggtggaacgggcccttcatcagatgctggttggggatgtatgctacgctgtggacagatgatgctggctcaagcccttatctgtagacacttgggaagggactggagctgggagaaacaaaaagaacaacccaaagaataccaacgcatcctacagtgcttcttagatagaaaagattgttgctactctatccatcaaatggcacaaatgggtgtaggagaagggaaatcaattggagaatgggttttgggaccaaatacagttggcacagggtgtttaaaaaaacctggcctttatttgacgaatgggaattcccttgggctggtttatgtttcaatgggataaccccagtgggtccattgnaagatttccaaaaaaattgtgccgtgtccttccccttgagtgctgacacagctgggttgacagggcctncccgattcct

SEQ ID NO: 1073 - DNA, 412 bp, Homo sapiens
aatctggtttacaccggctcctgccctgccttcactcttctttcctgattcatgactcctctgctttggactgaagcactgcaggagtttgtgaccaagaacttcaagagtcaagacagaaggaagccaagggagcagtgcaaaggatttctcagtatagggagacgtagacatagaggtgacctgtcccatctgcctgcaactcctgacagaacctctgagcctaaattgtggcctcagattatgacaagtctgcataactgcttagatcaaggagtcagtgatcatctcaggagggtaaagcagtagtcctgtgtgtcataccacattccagcctgcgaacctgcgaactagtcgatatttgccaacatagtcgataaagtcattgggtcctgatgagccccaggagggg

SEQ ID NO: 1074 - DNA, 435 bp, Homo sapiens
tgtgattccaatacactagacaactcagaagacactatttaacagcagtcttatctaaagaaataacacctccagggacgaagcatcagaacgcttcaattaactggggaaaatgagaagaattgtgaagtttcagaacgtattagaaggtccggaccatggaaagagatttcttttggggattatatttgccacacatttcagggagattgctgggctgatcgatccccacttcatgaagctgcagctcatgggcgcttactggcccttaaaactttaattgcacaaggtgtcaatgtgaacctttggacattaaccgggtgtcttctctccacgaggcatgcctttgaggtcccgtggcctgtgccaagccttattggaaaatggtgccacgtcatggagggacagttacgggccccccccttttaatggttg

SEQ ID NO: 1075 - DNA, 1590 bp, Homo sapiens
ttttttttttttaaagttatatcaataagcagctttttattgaaggactgaaagaattaaatagaaggcacagtagcactgtaaagctttctcagaacataataatctttttctatgtatgtgtggaacccagactttcttttttgttgttaaaaatgtcttctggacaatcagaaaatctttatttgtcatccttccctttggtcttttctgtaaaccattttctcgaaaactggccagaatcttgttctctctctttcgtctctcttcttgggttaaacggatgcaagggctctcttctcatcagcactgtagattctggttctcttttcgcagtccgcacagcctccattcggcgatgcctgcttaccactcattacataacctgagcattcaaatgatggcaatttctttaccttgtcaagccaatttcacctcttcgtgggatacgttttccagcttttacatattcagccatagctgcaccttcaccaggtaacagagcatggccatagttcaaaggtttatcatcttgagaggtaagtgtttttggagcctctgggccaattaaatctgatggttcttcagcctttgttcgatccttccagggattttccagaaactcttcttgggattctttagagcttgaatcactggactcttttctgctcttcttagacctctttttcttatatttcttcgatctgtgtttcttcttcttttcctttttcttggctttctttgctctccttttgttatcttcatcactggagtctgtttcagaatcagagtcactgtcgctatcttcagaatacttcttatgttttcttttcgatgattttttctttctccttttcttggacctttcttttgaacggctagacttcttctttttttcttcttctgaagtagaagctgaagtagtgcttttctttggctcttcatcctccactggtgtatgttcatcagaatctggttcaggattctttggagaaagtccccatacttcaggagctcccaattctccaattctctctctctcacttaatctcttctgccgcaggctctcctccctctccttgtcgaggaggctaggccaaggcttgtcgctcccgtaggggcgcgagtagctgccgtaatagactgacgaggaggcagaagcgaaggggatgccccggggcgcagagggccgctctctagaacgcgaccgcgagcgtgagcggtaggactggtttcgggagccttggctgaggccacccagctgatgggtgagtccattccggtccccggaccgagagcaagagtgcgagcgagagcggcggccccgcggggagcgggcagatttgctgggcttcggactcttcgacgaactgcgacgtcttccccccgagcccgaggcctccctatccgggctgcgtgagccggacaccggagccatggctactggggggccccagcagccgtgggacaagggggcgctctcgcgagcctaggaagatgtctgttgccttggttcccgggacctgccgctgcggaacagcccaaatctgaggaaaccttggacacagttctgggtacttctgcaaaacc

SEQ ID NO: 1076 - DNA, 870 bp, Homo sapiens
  misc_feature (1)...(870): n = a,t,c or g
cgttgctgtcggccggcaggaaatttaaactgaagccgcggccgaaaacgccaagagattgatgctgtagctgccctgagataaccaggactgtggaatcgggaagagctcatggagctcgcgaatgtaatacggaggcctctgaggaaggagtacggaggccgagaaggagccggcatttgatgagcgaaccgggaaagggagacgattgcctcgagctggagagttccatggctgagagtaggctccgggccccggacctaggagtttccaggtgtctaggaaaatgccagaagaactcaccaggtgccaggaagcatcccttttccggaaagtccttttacttggatctgcctgctggcaagaatctccagtttttgacgggggccattcagcaactgggtggggtaattgagggttttctgagcaaagaagtaagttacatcgtgtccagccgcagagaagtaaaggcagagagcagtgggaaaagccatagaggctgccctagccctagccccagtgaggtcagagtggaaacatcggccatggttgatccaaaaggcagccaccccaggccttcacggaaacccgttgactcggtgcctctaagcagagggaaggagctgctgcagaaggctatcagaaaccagaaatgatgatgcaccgtgcaacagctgtctcattgccgtctttatgtgtgaaaaaacaacagccaaaagaagccagagggaacatgtccagcagcagagtcaagaacacggaaagtggccagacttgaaaggcccccgtncctcaaaaatcgaagatgaaaagcaggaagtttcgtcctttccnatcatcagtttaaatccttttccctgaaatttcttt

SEQ ID NO: 1077 - DNA, 363 bp, Homo sapiens
cttgctcctctgcaacggactgaagactttgggcaaactttaactagttaactccatgatggacaggcttgccgttaagttacagccttaggaactgggcatttccagccaccacggcgaacacaaatcctatatataatgtaaccttgcttggctttgtagcccagtcggcatgctttatcgggctgggtggagcggggagccctgtggagagcagagagctgccactctgtgccagccctgtggagagcagggtactgccagcagcggaccctcagaagaaagtgcatgacatcagactgcttctttctccacagctcctggatgtacttgtaagcacctatcttggcctacctgatggct

SEQ ID NO: 1078 - DNA, 1035 bp, Homo sapiens
gcacgagccagaagccagccccctctgacagcttcctctttggccaagccctgcctctgtacagcctcgagtggacagccagaggctgcagctggagcccagagcccaagatggagccccagctggggcctgaggctgccgccctccgccctggctggctggccctgctgctgtgggtctcagccctgagctgttctttctccttgccagcttcttccctttcttctctggtgccccaagtcagaaccagctacaattttggaaggactttcctcggtcttgataaatgcaatgcctgcatcgggacatctatttgcaagaagttctttaaagaagaaataagatctgacaactggctggcttcccaccttggactgcctcccgattccttgctttcttatcctgcaaattactcagatgattccaaaatctggcgccctgtggagatctttagactggtcagcaaatatcaaaacgagatctcagacaggagaatctgtgcctctgcatcagccccaaagacctgcagcattgagcgtgtcctgcggaaaacagagaggttccagaaatggctgcaggccaagcgcctcacgccggacctggtgcagggcctggccagcccgctcctgcgctgcccttcgcagcgactcctggatcgcgtggtcaggcgctatgcagaggtggccgacgccggcagcatcttcatggaccacttcaccgaccgtgacaagctgcgcctgctctacacgctggctgtcaactcgcaccccatcctcctacagatcttccctggggctgagggatggccgctgcccaagtacctgggctcctgtggcagattcctcgtcagcaccagcaccagaccgctgcaggaattctatgatgcacccccagatcaggcagccgaccttgcctaccagctcctgggtgtcctggagtctttgaggagcaagatatttaggcaatagaattgatttgcagaaggagaatgtattgcggccgctctagaggatcaagagtcgtacgaagaatacg

SEQ ID NO: 1079 - DNA, 376 bp, Homo sapiens
ctgactcgtggggatcgggagcgaccctcctttgtttatttggggttgttctaggaggggggggtgttgcttgttcccgctgttccaacgaaaaataacctttgggtatgccgagtttgaaacttgatctggaagctgtgcgtaaccgaaaggaggcttgtaattcttgataactatgacttggctagtgaatagaagcaaacaaatacatctgtaatcgcatcattcaattcaaacctggacaggacaaatattttacactgggtttaccaacagggagtacacctttatgatgctatcccaaactaattgaatataataaaaatggacacctttcttttaaatatgtgaagaccttttctatggatgaatatgt

SEQ ID NO: 1080 - DNA, 1788 bp, Homo sapiens
ttttgaatcgcgctgccggaattcggcacgagcaagacctgacttatggagcacttgtaacctgagatatttcagttgaaggaagaaatagctcttctcctaagatggaatctgtggtttgggaatgtggttgatcaacttgatatgttggccaaatgtgccccatgtaataaaatgaaaagaagagacaagatgatgtcattttcccatattgtgaaaccaaaaacaaacgccttttgtgagaccaagctaacaaacctctgacggtgcgaagagtatttaactgtttgaagaatttaacagtaagatacagaagaagtaccttcgagctgagacctgcaggtgtataaatatctaaaatacatattgaataggcctgatcatctgaatctccttcagacccaggaaggatggctatgacttggattgtcttctctctttggcccttgactgtgttcatggggcatataggtgggcacagtttgttttcttgtgaacctattaccttgaggatgtgccaagatttgccttataatactaccttcatgcctaatcttctgaatcattatgaccaacagacagcagctttggcaatggagccattccaccctatggtgaatctggattgttctcgggatttccggccttttctttgtgcactctacgctcctatttgtatggaatatggacgtgtcacacttccctgtcgtaggctgtgtcagcgggcttacagtgagtgttcgaagctcatggagatgtttggtgttccttggcctgaagatatggaatgcagtaggttcccagattgtgatgagccatatcctcgacttgtggatctgaatttggctggagaaccaactgaaggagccccagtggcagtgcagagagactatggtttttggtgtccccgagagttaaaaattgatcctgatctgggttattcttttctgcatgtgcgtgattgttcacctccttgtccaaatatgtacttcagaagagaagaactgtcatttgctcgctatttcataggattgatttcaatcatttgcctctcggccacattgtttacttttgtaacctttttgattgatgtcacaagattccggtatcctgaaaggcccattaaatgttatgcagtctggcacatgatggtatccttaattttcttcaattggatttttgcttgaagatcgagtagcctgcaatgcaatccatccctgcacaatataaggcttccacagtgacacaaggatctcataataaagcctgtaccatgctttttatgatactctatttttttactatggctggcagtgtatggtgggtaattcttaccatcacatggtttttagcagctgtgccaaagtggggtagtgaagctattgagaagaaagcattgctgtttcacgccagtgcatggggcatccccggaactctaaccatcatccttttagcgatgaataaaattgaaggtgacaatattagtggcgtgtgttttgttggcctctacgatgttgatgcattgagatattttgttcttgctcccctctgcctgtatgtggtagttggggtttctctcctcttagctggcattatatccctaaacagagttcgaattgagattccattataaaaggagaaccaagataaattagtgaagtttatgatccggatcggcgttttcagcattctttatctcgtaccactcttggttgtaattggatgctacttttatgagcaagcttaccgtggcatctgggaaacaacgtggatacaagaacgctgcag

SEQ ID NO: 1081 - DNA, 420 bp, Homo sapiens
ggcacgagaggatcctgcactcttcctccctcagtaagtaaatgccagtccctaggaagagagaaccaaaatgtctaccggaccagatgtcaaggctacagtgggggacatttccagtgatggcaatttaaacgtggctcaagaggaatgctccaggaaagggatagtggatgaattcttcccgctgttgtcaaactaatgtatatggactcaaccacagggatatccccagagctcctatggaacactagcaaattttgtgtttttgttcagtccgacatgggctggccctcatcttgcagctctgtaatttttcaatttacacccaacaaatgaacttgagcattgccatcccagctatggtgaacaacacagccccacctagccagcccaatgcctccacagaacggccctccactg

SEQ ID NO: 1082 - DNA, 1079 bp, Homo sapiens
acgccaagcttggcacgaggaacagcccaagttgcaattttattcaacgcttgattggctttaaaaatagattccaggctgggcatggtggctcacacctgaaatcccagtgctttgggaggctgtggtgggaggattgcttgaagccaggagttccaggccagccttggcaacatggcaagaccctgtctgtacaaaaaaagaaaaaataaataacagctgggtgcaggggtccacacttgtaatcccagcactttgggaggcagaggcgggcagatcacctgacatcaggagttcaagagcagcttggccaacatcctgaaatcccgtctctaccaaaaatataaaatttagccttttggtactccaagcagcaccatggcggttgttaagaacaagtgccttatgaaaggtggcaaaaagggagttaagaagaaagtagttggtccattctctaagaaagatcagtatgatgtgaaagcacctgctatgttcaatataagaaatactggaaagacttggtcgccaggacccaaggaacccaaattgcatctgatggtctcaagggtcttctgtttgaagtgagtcttgctgacttgcagaatgatgaagttgcatttagaaaattcaagctgattactgaagatgttcaggacaaaaactgcctgactaacttctatggcatggatcttacctgtgacaaaatatgttccatggttgaaaaatgttcaacaatgattgaagctcatgttgatgtcaagactaccgatggttacttctttcatctgttttgtgttggttttactaaaaaacacaacaatcagatactgaagacctcttatgcttagcaccaacagtctgccaaatccagaagaagatgatggaaatcatgacctgagaggtgcagacaaatgacttgaaagaagtggtcaataaattgattccagacaacattggaaaagatacagaaaaggttttccaatttatcctctccatgatgtcttcattagaaaagtaaaaatgctggagaaccctgggtttgaaaggcatggagcttcgtggtggaggtagtagttctg

SEQ ID NO: 1083 - DNA, 385 bp, Homo sapiens
gttccccagtggtaagccgcaatctagctgacgtggccccaaccccacattccttcctgccctgcaatgtctgaagaaaccctacagagcaaattggcggctgcaaagaaaaagctgccttggggtgcggtgcaggggtccagagccatgtcggacctgttactgttactactggacctgactctgttactgctgctgatgctgctgggctttgccgggtactcagggcagttggctggggtggcagtgagtgccggctcaccccccatccctacaagttccatgtggagccctatggtgagactgggtggcttctcaccagagctgcagcatctcccccaaactctgctccatcgctgtccactaggataaccctgcatggttc

SEQ ID NO: 1084 - DNA, 357 bp, Homo sapiens
  misc_feature (1)...(357): n = a,t,c or g
acaaacaatccaaacagaaaataacaaaacatatgaagtgatttcaccaaagaggacatgccgatggcacataagcacgagaagacatccagcctctccagccattgagtcactgccaattaagggagatgcagactcagactgctgtgagctagcactacacacctattaacacagatacaatagaaaatagtgaaaataacaaatgctggtgaggatactgagaagctgggtctcattcatcactggtggggaggtaaaagggtacaaccgttctggaaaagagtttggcagaaaagaacgctgaacttaagggtttagatgtagattctttggtcactgagcatattcaagtgn

SEQ ID NO: 1085 - DNA, 413 bp, Homo sapiens
  misc_feature (1)...(413): n = a,t,c or g
ccatattctctttaacatatgggtcaactgggatattttatacaatgctggtgggagtgtaaacggctaatatcattttaggaaaacaatttgacaatctcctgcaaagtagaccatttatacatcttatgacacagcgattccaatctcagaatatacctaaaagaatgtcctccaaatgtcaccaagaaacatgtgcaagaatgtttattctagcaccattcacagccacaataaaagggaaacaactcacatgtccattggtagaagaaaggatagattatactgtggtatagtcacaaatattatataaaagtgaaaaggaacctgtaagttacaattacacacaacatgggtgaatcttaatatcttaatgtttgagattatactgtggtatagtcacaaatattatn

SEQ ID NO: 1086 - DNA, 1045 bp, Homo sapiens
  misc_feature (1)...(1045): n = a,t,c or g
agctgcagaatctccgggacgttccacgcgtacggacggagccgggctcaccaggtcgctgctgcgagggagtttttgtgctggggcctgggtggcggctggaggcctgagttgggctcgcggcgggggtcggcagggggccgggtggcggaatgatggaggaggaggaactggagttcgtggaggagctggaagccgtgctgcagctcacgcccgaggtgcagctggccatcgagcaggtgtttccaagccaggaccctctagatcgagcagatttcaatgctgttgagtatatcaataccctgttcccaaccgagcaatctctggcgaacatagacgaagtcgtgaacaaaattaggctgaaaataaggagactggatgacaatattcgaactgttgtaagaggtcagacgaacgtggggcaggatggacggcaagtaagtaactcattcctccatattacctatgctcccctggtttctcccggcaaccagatgaccaaaacgtcgatgtgccctcttgcagagcactttccgattgatccgtttcatacatggcaggacaagacagggcaggcgcccacagcagccacgtgctgtccctcagtgtcccttggaccaggaccgtgaactgtggcaccgctcacccgaggccagatgagaacactggggcttacttgtctttctccttcgtgtcgggcatctcttgtgccctcttttattttgtgggctgtggctaaatgaggttgctgcattcgtcagctgagttgttggggttttgatattttgtggctgtaaaagatagtaacctgacatagttaccatttcctcgtacctcgctttgccagcaggcaggtgactcaagattcattaaaaaattttacaagttggccgggcacagcgggcacatnggtcacgcctgtaatcccagctactcaggaggctgaggcatgagagtcacttgaacccaggagccagaggttgcagtgaggcgagattgcaccgctgcactccagcatggacgacaggggtgagactgtctcaaa

SEQ ID NO: 1087 - DNA, 430 bp, Homo sapiens
attttccttgctgtatctggttctatcataggaatatttcaaatttgatttacccatttgcacgttaagcatttgggtcattttcagttggtgttttcagaggtcatatgccattgtattctcatgcctgtgtcctgagagctccagcgtctctgagagaggtctgtgtgtgcattccacgtgtgtatacagacatatgtatgtctacaggtgtatgcatgtatgtgtgtgtattacatatgtatgtttgtctatagtgtatatggatgtgggttatgtacatgtgtgtgcatggatgtgtacatatgtgtgtgtgtgcaggagtttctcttgggtgcaaagcagccgtgagggtgtggggttgtaagttcacaggatgtggtgtgtccctgtggctcatgtcttcagcagtcactcattagtcactgtg

SEQ ID NO: 1088 - DNA, 408 bp, Homo sapiens
atgatgttgaaaatattttcttgtgcttattttccatcgatataacttctttgatgaagtatctgctcaagtcttttacccattttttacttaaactctgttttccttctgttgagttttgagaggtctttatatactctgaatactagtctttgtcagataagtgatttctcaacattttctccaagtctgtggggtgtatttttattctcttcacagtgtattttgcagagcatgggttttaaattttatgaatccaatttgtcatgttttttagtggatcaggcatttgacatcatatctaagaactttttgtctaacttcagttcatgagaattttcttctggtttcttttttaaagaatatgctttgaattctaacatttacgtgtaaaatccatttttagtt

SEQ ID NO: 1089 - DNA, 403 bp, Homo sapiens
cccacgcgttcgcggacgcgtgggcggtttcgtgggtagcccgccgggaggggtcagagatggcgctgacccccgagtccccgagcagcttccctgggctggccgccaccggcagctctgtgccggagccgcctggcggccccaacgcaaccctgaacagctcctgggacagcccgaccgagcccagctccctggaggacctggaggccacgggcaccattgggactctgctgtcagacatgggcgtggtgggcgtggaggacaacgcctacacgctggaggtcaacagccgctacatgcgtgcggtgggcataatgtagatacacttggcactgtgatgctgacccactgctgtacctgtcaacatccccttatcgtggacacctacggcaccaaggagtgg

SEQ ID NO: 1090 - DNA, 400 bp, Homo sapiens
ttcaaacattacaatcacactgacataaatgaaaaagtatgacaatacattttgttggtaaggctgtgggcaaataggcaatcatatattgctggcaggaatctaaattcatacaagccttctggagtaaaattcagcaatatttagcataaatatctatacacatacttttcgacccagcatttctttttctaggaggctaccctggaggcacacagagtgtatttctcacaggagtattggttagcagtgttttctacaatatgaaaatgctacacacaaggttacttattgcagcattgtttataatagtacaatactggaaacaatcaaaagaccactacatataagagtgtgtgtgcatttgtacaaaagaaacacaggcatgataaactaaaga

SEQ ID NO: 1091 - DNA, 456 bp, Homo sapiens
tgggcgcgggtttttgatacccctgagaacgctccgaccatgcttacggcaagcttggcccgaggcgcagctggctgggatggctggagtctataataccctcttcctgtttgcagctacctttctggacctaggggggagcattggaactccctagggggaaagagctcgtgcccactccccttgcccactcttgtgtccagcagatttaaaatctccaaggtcattgtggtgggggacctgtcggtggggaaaacttgcctcattaataggtaagggggtgctggagctgaactgggcagggtggggccaagcctagccaggtgggctggttccagatcacagcatttggtaccctctcagggtctgcaaagactcctttgataagaattacaaggcccccattggagcggacttcgagatggaacgatttgaggtgctgggcattccctttcg

SEQ ID NO: 1092 - DNA, 811 bp, Homo sapiens
gctcgactttttttttttttgagaatttaaaatcttatttattgttttgcaaacaataacttagacatttcttaatattttaaaaaccccaacacaaagtaataaatttggcttcttttccccacaaaaatgggaaatacctttcagtaaaggaaattttaaattatttttacacaccagttggttgttggaatttatagctctttaacatatgacatcagcaaaaataattagcattaactgattaatacataaaacaatttacaatcatatggtaagcaggaaacaaaaaccgaccagaaaacaccgttttatagtaattttcaaacagataaattattacagtatactttatccccaacatctctgagcccattaatagagtacttctatacatataaagatataataaaaggatacggtatttattgcaacagcaaattaaaggttgttaaaatatatgtaacttaaatacccccccaacattgatatagtggcttcttattccttaaacatagaaattccactcttcattgtagaaagataaagttctttcatcaaaaggcacattcttatcttcgaggatgattggcatcaaacaacgtgttgtcatcatcctcatcatcctgttctaaaggtgtcaattccatattttctatgttagtgtccaaaactccatatctcctagtctttcggtttcttcttctcatcctgaccgtcctgaccacgaagtacaccagcaccgcgccgctcaccaccatcaacacggtcagggcccgctgggtcatgggcttgtcgccagggttggggc

SEQ ID NO: 1093 - DNA, 3305 bp, Homo sapiens
gggctctcctgggcctgcagcagccagcacagagcttgatcctttcccggagttcagttatgggtgtgagaggtttgcaaggatttgtgggaagtacctgcccacatatatgtacagtagtaaatttcaaagaactggcagagcaccaccgaagcaagtatcctggatgtacccctaccattgtggttgatgccatgtgttgtctcagatattggtatactccagaatcttggatctgcggtggccagtggcgagaatacttttctgctttgcgagattttgttaaaacttttacggcagctgggatcaagttgatattcttctttgatggcatggtggagcaggataagagagatgaatgggtgaaacgaaggctcaagaacaacagggagatatccaggatttttcattacatcaagtcacacaaggagcagccaggcagaaatatgttcttcatcccctcagggctagctgtgtttacacgatttgctctaaagacactgggccaggaaactttgtgttccttgcaggaagcagattatgaggtagcttcctatggcctccagcataactgtcttgggattctgggggaagacactgattacctaatctatgacacttgtccctacttttcaattagcgagctctgcctagagagcctggacaccgtcatgctctgcagagagaagctctgtgagagtctgggcctctgtgtggccgaccttcctcttctggcctgcctccttggcaacgacataatcccagagggcatgtttgaaagctttaggtacaaatgcttatcgtcctacacctctgtaaaagagaactttgacaaaaaaggtaacatcatattagctgtgtcagaccatatatcgaaagttctttacttgtatcaaggtgagaaaaaattagaagagatattacctctgggaccaaacaaagctcttttttataaaggaatggcatcatatcttttaccaggacaaaaatctccatggtttttccaaaaacccaaaggtgtaataactttggacaaacaagtaatatccacgagttcagacgccgaatccagggaagaagttcccatgtgttcagatgctgaatccaggcaagaagttcccatgtgtacaggccctgaatccaggcgagaagttcccgtgtatacatattctgaacccaggcaagaagttcccacgtgttcagaccctgaacccaggcaagaagttcccacgtgtacaggccctgaatccaggcgagaagttcccatgtgttcagaccctgaacccaggcaagaagttcccatgtgtacaggccctgaacccaggcaagaagttcccatgtgtacaggccctgaagccaggcaagaagttcccatgtgtacagactctgaacccaggcaagaagttcccatgtgtacagactctgaacccaggcaagaagttcccatgtatacaggctctgaacccaggcaagaagttcccatgtatacaggccctgaatccaggcaagaagttcccatgtatacaggccctgaatccaggcaagaagttttaatacggacagaccctgaatctaggcaagaaattatgtgtacaggccatgaatccaaacaggaagttcccatatgtacagatcctatatccaagcaagaagactccatgtgtacacacgctgaaatcaatcaaaaattacctgtagcaacagattttgaatttaagctagaagctctcatgtgtacaaaccctgaaattaaacaagaagaccccacaaatgtggggcctgaagtaaagcaacaagtaaccatggtttcagacactgaaatcttaaaggttgctagaacacatcacgtccaagcagaaagctacctggtgtacaacatcatgagcagtggagagattgaatgcagcaacaccctagaagatgagcttgaccaggccttacccagccaggccttcatttaccgtcccattcgacagcgggtctactcactcttactggaggactgtcaagatgtcaccagcacctgcctagctgtcaaggagtggtttgtgtatcctgggaacccactgaggcacccggacctcgtcaggccgctgcagatgaccattccagggggaacgcctagtttgaaaatattatggctgaaccaagagccagaaatacaggttcggcgcttggacacactcctagcctgtttcaatctttcctcctcaagagaagagctgcaggctgtcgaaagcccatttcaagctttgtgctgcctcttgatctacctctttgtccaggtggacacgctttgcctggaggatttgcatgcgtttattgcgcaggccttgtgcctccaaggaaaatccacctcgcagcttgtaaatctacagcctgattacatcaaccccagagccgtgcagctgggctcccttctcgtccgcggcctcaccactctggttttagtcaacagcgcatgtggcttcccctggaagacgagtgatttcatgccctggaatgtatttgacgggaagctttttcatcagaagtacttgcaatctgaaaagggttatgctgtggaggttcttttagaacaaaatagatctcggctcaccaaattccacaacctgaaggcagtcgtctgcaaggcctgcatgaaggagaacagacgcatcactggccgagcccactggggctcacaccacgcagggaggtggggaagacagggctccagctaccacaggacgggctctgggtatagccgttccagtcagggacagccgtggagagaccagggaccaggaagcagacagtatgagcatgaccagtggagaaggtactagtcaacctccagaaagagtatggagagaaaaagaggcacacctggacgcagagccctgccagcgccctcctctgctgttgcagctgcaaggagaccatgcctgtgggagccaggcctcgcttgcatgaagaaggaacgatgcctttttcaatggtgtctccctcccattgtgcagaagagcttttgttggcttctctcccgagcttgtgcctgattctgtggcccaaaacaatcattgttaacatcttcatgtgtttcattctgatctttcattcatatatatgatgcctagctaatttcattttaaaataaatgggaatctgttgtattctgattttttattagcaacactagattatgaggggttatctcctgttattaaaaagtcagaaaacactatacagtagtcctcccttatctgcgggggagacatcccaagaccctcagtggatgcctgagactggatagtatggaatcc

SEQ ID NO: 1094 - DNA, 860 bp, Homo sapiens
tacggccagtgaatcgcgcggccatttaggtgacgctatctgtgacagcgggcgagagcttcgcccctcccccctgcgtgactagacctagcctaagctcgagaagcctgtcgagcgaaaacagatttcccgggtcgacgatttcgtctgtggccgagttgctgttgccgggtgatagttggagcggagacttagcataatggcagaacctgtttctccactgaagcactttgtgctggctaagaaggcgattactgcaatctttgaccagttactggagtttgttactgaaggatcacattttgttgaagcaacatataagaatccggaacttgatcgaatagccactgaagatgatctggtagaaatgcaaggatataaagacaagctttccatcattggtgaggtgctatctcggagacacatgaaggtggcattttttggcaggacaagcagtgggaagagctctgttatcaatgcaatgttgtgggataaagttctccctagtgggattggccatataaccaattgcttcctaagcgttgaaggaactgatggagataaagcctatcttatgacagaaggatcagatgaaaaaaagagtgtgaagacagttaatcaactggcccatgcccttcacatggacaaagatttgaaagctggctgtcttgtacgtgtgttttggccaaaagcaaaatgtgccctcttgagagatgacctggtgttagtagacggtccaggcacagatgtcactacagagctggatagctggattgataagttttgcacgaaatcgtcgacccgggaaatcacgaattctggatcagatacgtaacgcgtgtgcacgcactgcgtggttc

SEQ ID NO: 1095 - DNA, 537 bp, Homo sapiens
ctggtcttgaattcccgggtcgaggatttcgtcccaccggagggggcagggcgcactctccctttcgccctgaggccgctggcggcctgttggcttctccacaggcgcgctcgccgttcaagcgcgctttgtccccgccccagatcctggggggtgagcggtggagaaggggcgggcgcccgcgagccgtgaatcacctcctcctcttgctgcctcagcgccgccgccacctttccattcagtcgcccaacatggctggagcgcggcggagaataagaccacagcttgccaaagagaagattgaaggatgccatatttgtacatctgtcacaccaggagagcctcaggtctttctagggaaagataaggcttttacttttgactatgtatttgacattgactcccagcaagagcagatctacattcaatgtatagaaaaactaattgaaggttgctttgaaggatacaatgctacagtttttgcttatggacaaacctggagctggtaaaacatacacaatgggaacaggatttgat

SEQ ID NO: 1096 - DNA, 285 bp, Homo sapiens
ttttttttttttaatgtgtgcaaaagcccaaaggttcctaagcctggctgcaaagaagaatcaacagggacactttttaaaaacactcttatcagcctggggcaacacagtgagactccatctcttaaaaaaaaaattagctgggtatagtggtatgtgcctgtagtcccaggtactcaggaggctgaggcaggaggattgcctgagcccaggaggtggaaactgcagagagtcatgatcatgtccttacactccagcctggataacagagcgagaccctgtctc

SEQ ID NO: 1097 - DNA, 854 bp, Homo sapiens
ttttactttctggtacctttaatttgtggatgtgtctgcattttgctggcaaccaccctttacctcatctctgcaaagcagggaggaaaaaaaaattagtattgccattttgcagatgggagggcatgaattaatatgttgtatgatcacatgataaacagacctagaggttataatagtcccagttactgccccatttgtaaattgatccccatttttgccctaaggataactcataattttttcctgaacctgatttcattgatccctctattttaaaaatagggaaaaaacaatcgttttagctatatattaaaagagtaagaagcttgtacctattatgagaaagtcctacttactgttaatgaaaaaagtggtttgaaagattatactcgccgctggctcacgcctgtaatcccagcactttgggagtccaaggcaggcggatcgcgaggtcaggagatcgagaccatcctaacacactgaaaccccgtctctactaaaaataccaaaaaaaatttacccggtcgtgctggcggccgtctgtattcccatctattggggaggctgaggcaggacaatggcggaaaccccgcgtggcggaagttgcagtgagccaaaatggcgccactgcacttcaccctgggcgacagagctagacttcgtttcagaaaaccacaccaaagaatttctccccagaaaccagtgctccttgcctaattattgccaaaataattttaaaagcattttttcggaggctgagggggggttgtttaacctggaggggaaattcacgaccttaactccccatgcctcaacctggggaaaagggaaactgctcaatttttaaaaag

SEQ ID NO: 1098 - DNA, 670 bp, Homo sapiens
gaattcgccacgaggaaattttaattatatcttcaaagtaaaagtataatttatattattggagatttattattagtcagttgtttgaaagattcagcatgaaatgcatttgaaatgtaacagaaagagctttcccacgcagctgccaagatggcagaggggcagtcctggtgcttgatagctgagtaaaactcctgggctacctggaggctatcatgacccagcagagaaagtagtggtcatgtcctgtgaggacatcaacatttctggcagtttctacagaaacaagttaaagtatctagccttcctctgcaagcggacaagcaccaacccttcccaaggaccctaccatttatgggtccccagccacatcttttggcagaccacctgcggtaggctgccccacaagaccaagcaaggctaggctgccctagatcacctcaaggtgtttgatagaatccccctgccatatgacaagaaaaagcagatggcggtttctgccaccctcgaggttgtacgtccgaagccttgaagaaagtttgcctacctggggcactgggctcagaaggttgactggaaataccaggcaatgacagccaccatgggggagaagaggaaggtctattatcagaagatctgttaccagaagaaaaacagctcatgaggctat

SEQ ID NO: 1099 - DNA, 376 bp, Homo sapiens
  misc_feature (1)...(376): n = a,t,c or g
tagatattgattttcttccacttttggtcattatgaatagcattgattaacattgatgtgcatgaattctgtggacatgtttttatttttcttggggatatgcctagaaaggcaattactgaattatgtggtaaatgtaaatataaccttttgaggaattgctagactttttcagagtgagtgaataattttctattctcaccaacaatgtatgagggtttcaatgtctccacaaccttgcccacccttgtctttcacataaccaaaaaagntattttttattttaatttataaacacactccaacagacccaaaaaaggaaggtttccttccacatattggagggaaaagtgaataaattaaataataacttacn

SEQ ID NO: 1100 - DNA, 774 bp, Homo sapiens
aatatacccaccacgcgtccggtcttttttaattcataggtttctcctctagttccttttcttctcctgcttttgaatttaattttaaagaaaccagttatctttcctgagccatttcttactgtatagattttgatatttgaatccctgtggtagtctctcgtgttgttctgttcttgggatgtcattggcaatggctacatctcggtatggtttttttgtatttgtcctgttatgagtgatactgaatatctcatcatatatttaaaggccatttttatatctctcttggtacaatgttcatgtcttttactcatttttctattgaacgtttgatatatttcccttaacattttttgcaagctctttaaatgctagggagattagccctttgtttatgatataagttgcaaatattttctactggctttgactttgcttatcaggtttttgccatggaaagcttttaaaaaactttatttggctgggcgcggtggctcacgcctgtaatcccagcactttgggaggccgagatgggcggatcacgtggtcaggagattgaaaccatcctggctaacacggtgaaaccccgtctctacttaaaatacaaaaaattagccgggtgaggtggtgggcgcctgtagtcccaactgctcgtgaggctgaggcacgacaatggtgtgaacaccaaggggcagagcctgcagtgcgccgagatcgtgccactgcactccagcctgggtgacagagcgagactctgtctcaaaaaaaaaa

SEQ ID NO: 1101 - DNA, 1208 bp, Homo sapiens
cggacgcgtggaacaaaattagctgggtgtaccggcacatgtctgtaatcccagctactcaggaggctgaggcaggagaatcacttgaacctgggaggcagaggttgcaatgagctgagattgtgccactgcactccactgggcaacagggagagactccatctcaacaacaaaaacaacaacaacaacaaaaaggcaaaaacaaacccctggaaattaactggtaataaagagggggaaaggaactggttggaaactttccttaaaaaaaaaagtcaaaaccctgatttgccaacatgtagacctcagcttaatgtagacttgcagaaagccattaatttagggtagtattgatttatatttgactggtaattaagagcatacatgctgcttctttattatctgggtgacacaaattcatgtggcctgaggaagggtggaaatagtaggggggaaatgtttgtaagctttgaaaaagattttttttctgtctgcaagactgcattgaaagcactgtacctaatcaccaccacaccaccaccaccactcctaaaaaaagaaaaaaagagatgctttcacattcacctttccagagcaaattctctgtcactaagcctgcattgcactgaaggtatctttaactcctgcttctgtacaagaggctcatgaacacagctaaaattgagaccatgagcaaagtgcaccaaaccacacacgaggtttgtaaacacacgaggagtgccacatcatgctagatttcagtgagcgcaatggcaggcacacgagaagatgttggggtgggaagaaaatatcccaccttgctgtttagaaccactgtgcctgtgagcgctgagacggcagaagagaagccatcccacgcagcacttgcaaggcgatccgagcaccctgtcactcttgtaaactagaaagggcttcttttacttgtgtgaccttaccattcttgaaaataaaaagggagaagagaagggaactaaagtgcaagctaaaagagaaaagctccaagaagacaagcctaccttcaaaaaagaagaggtaaatatgattgaaaagtaatgatcgtaaagcaacagaaaaagcagtcagtgttccaagatatctcaggtctgatgatctcaaaattgtaacctcatatccagtgtatttcaagccatgactcacagtccactgaatagtgagatcagcttaga

SEQ ID NO: 1102 - DNA, 1241 bp, Homo sapiens
tatcgaccatttcgtgccattttgggcgcttcgctgatggtgtcggtgtttgcgtttcccgcctgagcgcaactagcggcgggtcgtgggcacctccaggtgaacgggatgggtctttggatgtacctccgtgccctgacgtttcaaccgcgtgacttaatgtcattttcctgataagaaaacaagctcagagagatgtggtgacttgctcaaatagtgacagaacttcctcggccatatggaggggtcatataatacccttgtgtcttcagtttgaggtacctcccataattttaaggggagagcttgtttcatatccatatcccactgtattcctgctaatctgctaatgcagtaaattggaggaaaactgttaccaggataacctgtaatgggcaaggagccacaaagaagaaaacatttcttttaatttttaaacttggtttgaaagaccagcatgttttggaaatttgatcttcactcatcatcccacatagacacacttctagaaagagaagatgtaacactgaaggagttaatggatgaggaagatgttttacaggaatgtaaagctcagaaccgcaaacttatagagtttctgttaaaagcagaatgtctcgaagatttagtctcattcatttatagaagaaccacctcaagacatggatgaaaagatcagatacaagtatccaaatatatcttgtgagttgctcacttctgatgtctcccagatgaatgatagactgggagaagatgaatccttgctaatgaaattatatagcttcctcctaaacgattcccctttgaatccactacttgccagtttcttcagcaaggtgctaagtattcttatcagcagaaaaccagaacagattgtggatttcttaaagaagaagcatgattttgtagaccttattataaagcacataggaacttctgctatcatggatttgttgctcaggctcctgacgtgtatcgaacctccacagcccaggcaagatgtgctgaattgttcaaagtccagagaaacctgtaacattctacttaaaatgtgatggatatttccaagtatgttaatctacattggggcttgaacaagagccactcattgctatgattacttctacaatgtgttttacagtggttaaatgaggagaaaattatccagaggcttgtggaaatagttcatccatcgcaagaagaagatgtaagttcacttgtgtgactgtaaacttgattag

SEQ ID NO: 1103 - DNA, 406 bp, Homo sapiens
  misc_feature (1)...(406): n = a,t,c or g
ttacaatttacagctaatacaaatggtgctgctatgagcattctcatacatgtttttggatgaatatatacccgcgtttcttacaggtatatacctagcagtggaattgcagggtcataagtgtgcttatgctcaattttagtagataatactaagacatttcccagaatttcccaacattgacacactcaccagaagtatttgcattccagctgctccagcatccctaccagcacttagtaatatctgtcattttaattataggaaatctgggggattttataatttcatacatttggaggtagagccattctcttagcccccaaaagcttacactacactttttgacattcaatgtcaggatgtgctctctataaacttggaagtcgtatacatgtaaaccctn

SEQ ID NO: 1104 - DNA, 393 bp, Homo sapiens
atacagctcctcacagagtttataggtcggcaagctttgctgacattaaataaaaatttacagtgaaaaagtaaaagtggctcttctcatctctgaacatcacaggtagaggagacataattgggcacctgaaatggctggactgtagggaactgctccagtttccccatcaagaggaataggcagacacacagcaccgaatccaataaactgaaggccggccactcctttggttacaactaactgattcactgaaactcctgttaaaactgactgtgggtgtggagccaacagcaaaggtgttgtggtggtcatgaaggtgataaactgcccaacaaaagcaaaccacctcctatatgcaaatcggcaccaccaagaactcccgtgccactg

SEQ ID NO: 1105 - DNA, 778 bp, Homo sapiens
attcataagagggttccctgtgatatgagcatccccagggcatttaaaatatgattcaatttttaaaaattctatttgtacccagctttcttcagaaacacaactttggttttaaacaaggtgcatctgtttccagaaaatgctttcccatggatctgtgtgtagaagggttgtattgcatctggagatcacactcagctcaagtcaagattctctttgaacgcaccaagcttaggagctaaactgtcttggctgtgtgcttgtgtttgatcctgttgggaatgaagctaattgtttaagaatttacatcctggtaaggctgttagcactttaaattgatttggtatttttaaaaacttatttaagatttacttatactgaggaacctggctttccctgaactaaaaagaagaaattgtatttccagattttacctggcttatcatctgcacaaaatctactctaggagcattcttttatgtaacaattgcagtgggttttacatattgtctttgtagcaatatgatgtgtttttttttaactattttttttttagagacagggcctggccctgctgcccaggctggagtgcagcctggctcactatagtgatcctagctcactatagacgacctgggcttgagcgatcctgctgcctcagcctctcaagtagctgggaccacaggcgtgtgccaccatgcccagcaaatttttaaatttttcaatgggtttcactgcatttcccaggctggttttgaactcctagactcaagggata

SEQ ID NO: 1106 - DNA, 1203 bp, Homo sapiens
ggaaggattgcttgaggccaggaggttgagattacagtgagctatgattgcaccactgcactctagcctggacaacaagcaagaccctgtctcttggcagggggagagggggaatactgagaccatttttaacctatcaagatgacaaaaattaaaaaatataacaatgtattctgttggtgagacaggatatagtcggctgactgatgaccctgcaaaaagatatgtccatgtcctaatctctggaaactgtgaatgttacttaatttggaaagagggtctttgcagatgaaattaaattaagaagtttgagatgagtagttcatcctggattgtctgggtgggttgggtcctaaatccagtgacaagcaaccttaaaagagacacaaggagactggcagacagaggaagaagaggcagcaatgtgaccccggaggtggaaatctcagtgatggggccaggaatgtcaaggaatggtcaaggaatggctacagccaccagaaaaagaggcaaagagaggcttctcccctagaatctctacgagcgctccagccctgctgatgtctagatttttggagttctggcctccagaatgtgagagagtaaactattgtttaaagctaccaagtttgtggtaacttgttagagcagccacaggaatgaatgtacagggaatcaggcagtctcatacactgatggtgggaaaacaaaccggcacaacccttatggtgggaaatttgacaacatgtacaaaaactacctacacatttcccttgtgacccagccattccactgttaggaatctgccctgaagatacaactccacctattaaaaaatacagccattagaatggatgatgtttaccgctacttgctgacaaagaaaaatgttcacttgtgttaaatgagaaagacaggtctcagaacagcaacaatgttctagccgattctgttttttaatactcagtatatgtagaggagattaaagggatttatcgtgagatgctcatagggggcaactgttatttcagatttcttttttaaaatttttaattgacaagtaataattgtatatatttgtacaacaattgtatgtattgtatgtacaattgtatattgatgtatatatttgtacaataattgtataatttatatggtaaaatgtgatatttgtatgcataaatacatgatggaatgatcaaa

SEQ ID NO: 1107 - DNA, 723 bp, Homo sapiens
tttgcttcttgcttcatttattttcatcaccatagtgttccattgtataaatatgcagtaatttatttatgctctctttagttggtcgacagtcttgtttccggtattacggatggtgctcctcggaacacgcttgtatgtgtctcctggtgcacgagagtgggcaggcctccatgtatttatctcactgaaatttctggagcataggttatatacacatgttcaactttcctaggaaaagtgacactgttccaaataatgtggatcacattatactcccaccagcatggatgaggctcatattgcttcctatccttgccaacatttgacattgtccaactttaaaatttttgccaatctgatgggcaagaaattctccctcaccgcagttttaatttgcaacctcccctgattactagtgagagagaggttttttgttgtttatgtgcccacaataccgaactctgagagaaggctcatgtcaactttgtcctcaccaagacactaaacagggctggcacatgagcggtgctcaaaaaaatataaattgcacgaatgaaggaaccagagctaggcttctagttcttgcgttatccttcagtgcactttattgtggcgtttctcccaggtttcctgggggtacaatatttacgtcattctcaccgcatttcaccggcaggcacaaaccttttaaaaaactctgacaatgccttatttcctttt

SEQ ID NO: 1108 - DNA, 3314 bp, Homo sapiens
cggtaacgacaacaaccaggcggcgacaaagagtccccggaagggggcggcggccgctgcccgccttaatcgactgaagaagaaggagtacgtgatggggctggagagtcgagtccggggtctggcagccgagaaccaggagctgcgggccgagaatcgggagctgggcaaacgcgtacaggcactgcaggaggagagtcgctacctacgggcagtcttagccaacgagactggactggctcgcttgctgagccggctgagcggcgtgggactgcggctgaccacctcgctcttcagagactcgcccgccggtgaccacgactacgctctgccggtgggaaagcagaagcaggacctgctggaagaggacgactcggcgggaggagtctgtctccatgtggacaaggataaggtgtcggtggagttctgctcggcgtgcgcccggaaggcggtccgtcttctcttaaaattttcttttttaggtgatttccttcctgccaggctccgttgtaggggttacagaacagtcgttcccgcctcacaacctgtggatacagctgttggggcagaagagacgggaccagctgctggccacatttcctgctttattttaaaaggtagtataagaaatgaggaaaaagaggtaatatcagggcttctgctgttttttatttttaacatgttcataattaaaaagtattttccagcagtccaaagatgtaagttatcttacacataaaatgttttattttgttatttggttatgaaaatggaatccttgttcttgcacaactgtaaatgttttgttgctagataatacgatttgagacctgaattggtctttggtttccagtgcatcacagcatattttgtaaaatcatctactactggcacttgagcatgaatggggtagtagcccaactcacaaattggagtgatgaaccctgctttataccttaagggcaggagcaagccccttcacaaatgcagctgcatggggtttttaagtgcctactgaattatatatatatatacatatatatatatatatataaaccaaaagtagttggaaagattatttgaaatgactaatttgtgctatctttatgaaatatgttaaatgtagcttttttgaaacagaagccttgaattgaaatttaactaatacttgaacattttgtatatatttctttgtatataattttgtgcagtaccaatgacaaaaatatggtgtcataataaaaccaggtttgttgatcttttagttatgggctcaaagaatttattcatctctaacatgatattggaaaataatggatgaaaataggaaaaatgattgttaatgctgactgtgggtcttaaaaggttctggaaagcagtaagttcatttttctaaaaactataacattctgttggagtattttcttccttacgtcaatacttttcctgcattatttgaaattgtgggctggggagaaacagtagtcaaagctttctgaattgagatactttgaaattccaagtgtagatttttagaatgtcattttataaatggcagtttttggaattacttgataagaacttttgaaaatggaaggattagtatggcctatttttaaagctgctttgttaggttccttatgttttattaactgtcttttctcagtttccatttcattttttttttttctagttttggtgacttagggattttgtcattttttacatcaacttcatggtcttgtttttacatggtaattgcatgtacttaggatctatctaataggggctttaaataaatttggtcatatttatgtgtaagcacattttactgtaaatgtttgggtttctgaatttaaacagatctgtttatttcagtatgtagtaaacaatatcttaaagtgtccgattcactacttgttaattaaaaaagttatgattaatgtgaaactgttgtcttactatttttagaaaattgtgttctggatgattagcacatggataaaggagatttctggaatataaaatggattgtttttgaaatttctaggtttggctctatttactgtaatggttgaaaacaatttagtatttgggtgacccttttgtttttcttctaaatgtgcctctggtaaaatacagaactagactaaagatgtagctttttaatatttgtcttttgatggtggcaggagttcatacattaattgaactaacacatcatattttgacctactatttctatcatattgacttactgtttctgcacttctttgaccagacttatcttaaaaagtccacttttgttaaaatgtagtcacacctctgatataatccaacaagaagtgttcaaaatattttaaatatttgtgcattttataatcactaaattaatctctctctcttctctttgaacagcttagcagtgtctgcaaaaacgaatcttttcctacaacctgttaactgactggactgttggtaacaaagtaattgtgagaaccatgtcggtcaaaaatttggcatctgctgaaaaaaatgaatgccattttcaagttcccaaattacttctatactgatttcactttccagaaatggagatatgaaaagattctctggaatccttgaaagacttaatagagatacatgagactaagttaatcttggaacaaaattatactttttttgtctttcatgggagtgatactcagttattgcatatctttacaaaattgtaacctttggagaattacagtatttcatcaagaaattagagtttttacataatcaagagcatattctatggaattaacatttagtggactagaattacataagcaggccatcagtgatcacaaggcatatgagtttgtatttatttcctggaacatgagagctaatttggagtacagacagacaccctgctgagtagaatataaaagttaatgtaaagttctgaactataaagagtagtccttttaaatagatgcattgatttgtatatctttgaaaaagttgattatgattaaatgtgtgggtagttaattacaatttagggtaacaaccaggatgtatggattcttgaggttttggcttcttgagctttctcttgagtacttgatactgttttctgaatattttgaggtttctaattaatggtatgctagtttctactgttttatataaaaatttatctagtgttgtataaggactttagtattgtggatgatgggagaggctttttgtggcatatggttgttttaattgaaatattttttcagtttattacaagtgtgaaaaaacactcaaaaaaaaaa

SEQ ID NO: 1109 - DNA, 1505 bp, Homo sapiens
atagacccccgtccggagcagagcaccaagatcgttctggcaggaacagccagtgggaggttccagctgagcgctccccagagcatcatcagcatcatgctattacaatcccaaaccatgggggtttctcacagctttacaccaaagggcatcactatccctcaaagagagaaacctggacacatgtaccaaaacgaagattacctgcagaacgggctgccaacagaaaccaccgttcttgggtttggcattactggatccctctcaattatctctggaaaacaatcaactaagccctttgacctgagcagcttgacctcaaatgcagtgagttctgttactgcaggagcaggcctcttcctccttgctgacagcatggtagccctgaggactgcctctcaacattgtggctcagaaatggattatctatcctcattgccttattcggagtactattatccaatatatgaaatcaaagattgtctcctgaccagtgtcagtttaacaggtgtcctagtggtgatgctcatcttcactgtgctggagctcttattagctgcatacagttctgtcttttggtggaaacagctctactccaacaaccctgggagttcattttcctcgacccagtcacaagatcatatccaacaggtcaaaaagagttcttcacggtcttggatataagtaactcttggcctcagaggaaggaaaagcaactcaacactcatggtcaagtgtgattagactttcctgaaatctctgccattttagatactgtgaaacaaactaaaaaaaaaaaagcttttgttttgtatttgtttactatgagtcgttatttaatttctcttgaaaataatttcctcaaagcccaagtcagtaaaatgttatcagccagtcttccaaaatggtcataaactttataaactgctttgggtaaactgagcagaaggtgatacacagaagggaaaatgtgcactcatgctagtgtgaatttggtaagtcgcgtgactctgcaggctgtttctgtattattttcacactcatattgcttaaatattacatattagggattgtaagaaaactttaattaaaaattaaagactatatataattaaactactctgccctggacactctctgagaaacagatctactgggccctttttcatgagccattaggtggaagacagcaaagagatcttctcaagtgcttaggattacctctcaacacacagcaagcatgtccctgcctcccatgaatcttaccatgtaaatccaaatctctgcaatcctgtggcaccaaccagtggtgctcattctattggttaaaaatggccttcttggctgggcgcggtggctcactcctgtaatcccagcactttggtaggccgaggtggacggatcacccgaggtcaggagttgagaccagccggccaacaaggtgaaaccctgtctttctaaaaatacaaaaaattagccaggcctggtgtgcgcacctgtagttc

SEQ ID NO: 1110 - DNA, 781 bp, Homo sapiens
ttttttttttatttttaagtgagacaaagtttattaagaaagcaaaggaataaaagaatggctattccataggcagaggagcctctaatttctaattctgattgtttttcttaattttctttctgatgatactctcgattttaccatacaatattggccatttaataaagaagttcagggacagacaataaaatataaagtagagcaatgtgtctgatctccagcactgtcaacattttgagaagaacagttttttttttttgctgtggggatgtttcctttatattgtaggatgtttagcagcctctcttgcctctaaaacatttctcccaccttgttcagcacagagctcagaagggctgagggacccaccacagagtcatctaaggagtccagagaagaacacacccgtagaaaggccaggccaaaggactgatgacgcgtgaagggtcgggagcaggtcaggcgaagtcgatcccataactctcctgaggctggagccaggaaatcaactcaaggaaaaaagagaaacaaaatcaggggggaatggaaatgcataaatgggagagacagaggaagaaaaggtcaatactaaggaaaagagctatagagagtaacctccaacaaaagaaggaggtcttcagtaaatgtccccttaggcttgggtgttcagggtatggtaatgccaagcaggccagtcagggccttctcatattcagtctcttgccttctcatcactcctctgtcacagttccacacgaaatcgtcgacccgggaattc

SEQ ID NO: 1111 - DNA, 351 bp, Homo sapiens
ttttttttttttatggagaacctgtctctacaaaaaattttattaaaatattagccagacatgggggcacatgcctgttgtctcaactactcaggaggctgaaataggaggatggcttgagcctgggagggggagggcgcagtgagccatgattgcgccattgcactccagcctgacagacaggaaactcctgaaatgcccctcgcacgtgcaagacgttttccgcggtggcggcgacagggcgcacagtgggaccgcagcacgagctcggagcacccccagagtcggggactcctgcccccgcccctgccggccggccttcccggggcctaggagaacagcaccgccggg

SEQ ID NO: 1112 - DNA, 910 bp, Homo sapiens
gcggccgcggctcccgagctcctcgggctctgggtcccggcgcccctccggccgcgagtcccacgcgccacccccgggcgccctcgacggtggatctagcggcggcgaggaggcgggtcccggccccggcgaaccccagtcccggcccccggccccgggcccagcttcggcatggatgtgaggttctaccccgcggcggccggggaccctgccagcctggacttcgcgcagtgcctggggtactacggctacagcaagtttggaaataataataactatatgaatatggctgaggcgaacaatgcgttcttcgctgccagtgagcagacattccacacaccaagccttggggacgaggaattcgaaattccaccaatcacgcctcctccagagtcagaccctgccctaggcatgccggatgtactgctaccctttcaagccctcagcgatccattgccttcccagggaagtgaattcacaccccagtttccccctcaaagcctggacctcccttccattacaatctcaagaaatctcgtggaacaagatggcgtgcttcatagcagtgggttgcatatggatcagagccacacacaagtgtcccagtaccggcaggatccctccctgatcatgcggtccatcgtccacatgacctgatgctgcgcgttctggggtcatgcctcctgcccagctcaccaccatcaaccagtctcagctcagcgcccagttggggttgaatttgggaggtgccagtatgcctcacacatctccttcacctccagcaagcaaatcagccactccctccccttccagctccatcaatgaagaggatgctgatgaagccaacagagccattggagagaaaagagctgctccagactctggcaagaagcccaagactccaaaaaaa

SEQ ID NO: 1113 - DNA, 3457 bp, Homo sapiens
ttttttttttttttttttcatcttccaaagtttttaattcattggtttctagtatattcacaaagttgtgcaaccatcattccacaatttcatcatcttccaaagaaagcccgtccctgttagctgtcatgcctcttctctcttcctccagtacctggcaaccaccaatgtgctttgtctctgatacacagatttgcctattctggacatttcacataaactcgtgattggcttctttcacttagcgtaatatttgtaggattcactcaggctgtggcatgcgtcagaatttccttcctttttatgggggccaaataatatttccattgtatgggacaggaacacacttcatggtcttaaatttcatctgtggggatgggacatttggggttggttgcctacccgtttggactttttgaggtaatgctgcctatggaacgcggggaccccagggtattgtgtggatggatgttttcaattctcttgggcatagacctgggaaggttatacttttattgatattaatagttctgatattggacatccctgctgtgtggtttcacctctcatggactctgacggctgctgtgccttctctgctcggcaggcggtgccctgaggcacaggtgggcgtctggggctggaactctcgctaggcgctacaacttcctctcctgccctgtggcagagccaagccccttgcagggctgttgccagcatgggatgagtctatgaaaacacgtggcacgcagtaggtccacagttaccactggcagcctggcaagcctggcagggcccggacggcagatgcgcttcggtgctgctgtgagtcttgtgttctgccttaggcagaaagtcctgggtttgtgttttgtgaatgaatgacgcatgagtgtgccaaatatcctttacgtgacagaagaggagagggctggcttgattgagtgtgggggggaagaacctggatcttgtaatgtaatttttgtttaaaaaaattagggaaaaaccccaaatatgaccatttcctgccattagcctgcagatgagcagctgactccccagtcccatccctccgcactgcttttccctgtcctgggtctgttctgttacatggagttcctgggggaagccctggggacggggcatctgcccagggctcactgctgttgaaagtgaataaagaacgtccggatttcctttgggtggacggtgatgatggggcctcctggtggcctcgagggagaggtggtgtcacctctgtggcggccaggccccgtcctccagctccagcggtgcagcatgctcaaatcccaggtccctgtgagcgagcgctcctccactgccaccacggaccccagcgcctgcagcacagcctgcagggagaggagcagagggagagtgagctgcaccaagttccagagctgagcagagaaccaagacagcagcagggcagacacaccacgaactcggtgtcctcaggagcccaggtcctcccctggtgcctgacacagctccctcatctgcttctcacagcacatctgcgaggacaggactggccgtgtactttacagatgaggacactgaagcgggaggtgcatgctttaccaggtggccgagctggaggagcagcccgggaggtgtggcattttgagctgcccaccccaccgcggagttctcctctccccacattgctcaggtggccccgtgcccagtccagggaggaagccagccacagttaccccatccccctttcccaataggccttgtcccagcctcccttacacctaggggaggcaggaggcccttaggggtctggaaaagtctgtggagcaggaggggtgggggtggctcttggagaagcttctgtgtgctgacggagggagagagccacgctagggcaaggcctttctggccactactgccgagccccaccctgccttgaaatttgctcatgagggaggcctgtgccatcttgtgaccgcaaacaagcagacggcaaaagacaaaagccagtctgccggcgatggcgggaagacgacagtgatcgggcccacggtgacagcgcttggggtccatcggacatgcctgttcggtgagaaaacactctgtcctctgttctaagcacatctgttaggtgttttgtgacttgcagccaaactcactgcgttcctaactcaatggtctttccaccccaccaccgtccacgttgggcagggagtcatggtgtccatcccaaccgtctccttgtctcagggccttggtgcttccatctgtgaaacgggggagcatcagatgaccaacttccaggtcccacgccggcctccttgcttcccagggcaggctggccctgtgctgggcactggtacccgccatggcctagacctgctctcaggcaggccagggaccgtgaggaaaggatcctccctggcgaggatcatgaaagaggaggtgggtggcccagtaagacatcatggcgaaaaggtactggggcttctctggattcccctgaagactcagatgtcgaaggaggcccaaggcagaaacacagagattcacagaaattctccatgagcaggaaatgaaatagaaagaatgcaaactgggaaagaaatgaggcggctcaggtcatgccttctggggagggagcgtgggcaggccaggtggcggaagcctcgcctgatagtagagctgagagggcaacatcagccaagaggggaacctggaaggggacgaggcctgggggccctgacactgcacgaggccccttagtgccagggcctctcagcaaccttctgggcaaagaactctcacctctccccattttacatggggggaaactgaggcccagaggcatggggtgccggagatgcccccgtagaggggcctgggtgtggaccctggattgtcctgaactcctaagtcaacctttccaaaagcaaactctatggggaatcctgttttgtttttggattaacacagatgttgtctgtgttttaaaagttttacccacagaataaataagaaagaaaatacaggcccactcacgccctgtaatcccagcacttcaggaggctaagacaggcagattgcttgaggccagacgttcgagaccagcctgagcaacacagcaagaccgtgtctctactaaaaataaaaaaactaggccaggcttggtggctcacgcctgtaatcccagcactttgcgaggccgaggcaggtggatcacctgaagtcaggggttcgtgaccagcctgaccaacatggagaaaccctgtctctactaaaagtacaaaaaaattagccgggcgtggtggcacatgcctgtaatcccagctactcgggaggctgaggcaggagaatcacttgaacctgggagatggaggttgcagccagctgagagcgcaccattgcactccagcctgggggacgagagcgaaactcggtctcaaaaaaaaaa

SEQ ID NO: 1114 - DNA, 377 bp, Homo sapiens
cccctgtggagtaattcggcatcaaatgaccctgtgcctcacctctgaggaaaccaaagctttttgtccctgctacactttgcccaatccgtgtgaaagactactttttggccgtacttgatcactgaagaatgaactggacacaggatgaaatcaacttcctctacaacagtggaccttttttatttatgagacagggttttgctctgttgcccaggctggagtgcagtgccgtgatcacagctcactgcatccttgacctcctgggctcaagcgatcctcctgccccaccctcctgagtacttgggattacaggacagcgctaccatgcctgcctaattatctatctttatgtacagaccgtcccacagcgtgtt

SEQ ID NO: 1115 - DNA, 981 bp, Homo sapiens
cgtagtcccgtgtggtggaattcggaacagggaagaaacctaaaggctgcaggctgccaggtgtgcttggagagcccccttcttccgccgggcctcgcaagcagcgtaggactgtggagaagggcggtgggcaaggagggaactcgagagcagcctccatgggcacacaggagggctggtgcctgctgctctgcctggctctatctggagcagcagaaaccaagccccacccagcagaggggcagtggcgggcagtggacgtggtcctagactgcttcctggcgaaggacggtgcgcaccgtggagctctcgccagcagtgaggacagggcaagggcctcccttgtgctgaagcaggtgccagtgctggacgatggctccctggaggacttcaccgatttccaagggggcacactggcccaagatgacccacctattatctttgaggcctcagtggacctggtccagattccccaggccgaggccttgctccatgctgactgcagtgggaaggaggtgacctgtgagatctcccgctactttctccagatgacagagaccactgttaagacagcagcttggttcatggccaacatgcaggtctctggagggggacctagcatctccttggtgatgaagactcccagggtcgccaagaatgaggcgctctggcacccgacgctgaacttgccactgagcccccaggggactgtgcgaactgcagtggagttccaggtgatgacacagacccaatccctgagcttcctgctggggtcctcagcctccttggactgtggcttctccatggcaccgggcttggacctcatcagtgtggagtggcgactgcagcacaagggcaggggacgaggggacctacatttgccagatcaccacctctctgtaccgagctcagcagatcatccagctcaacaaccaagccagtttaatggtaggaatttgtattttttgcctttgttcagaa

SEQ ID NO: 1116 - DNA, 414 bp, Homo sapiens
  misc_feature (1)...(414): n = a,t,c or g
tacttccccaagagcgagaaccagccccccaaggctcagccccctaatctgcatctcatgaacctgcagaacatgatggcggagcagactccctctcggcctcccaacctcccaggccagcagggcgtccagcgggggctcaacatgtccatgtgccaccctggacagatgtccttgctgggcaggacaggcgtgcccccacagcaggggatggtgccccatggcctgcaccagggggtcatgtcccctccacaaggcctcatgacccagcagaatttcatgctgatgaagcagcggggcgtggggggcgaggtctacagccagccgccccacatgctctccccgcagggctccctcatgggccccccgccccagcagaacctcatggtgtcccacccccttctgcagcgcagn

SEQ ID NO: 1117 - DNA, 939 bp, Homo sapiens
tcccggtccgacccacgcgtccgaaaaacccagcccagtttatggcttgtttttcagcaaccctgagatgcttgacagccctagagcctgtttggttagaaggccgtcttattctcaatatgcattttattacccaatctgctcccgacattaaataaatctccaaaaattggattctggccctgaaaccccacaacaggacttaattaacctcaccttcaaggtgcacaataataaagaagagttgcaattacttgcctctgctgcgagagaaatcccagccatatctccagcacacaagaacttcaaaacgcctaagccagagtggtcaggcattccttcaggtcctcctcccccaggatcttgcttcaagtgctagaaatctggccactgggccaaggaatgcctgcagcccaggattcctcctaggccgtgtcccatctgtgtgggaccccactggaaatcggactgtccaacttgcccgggagctgttcccagagcccctggaactctgccccaaggctctctgactgactccttcccagatcttctcagcttagtggctgaagactgatgctgcctgatggcctcggaagcctcctggaccatcacagacactttgggtaactcttacagtggagggtaagtccgtccccttcttaatacagaggctacccactccacattaccttcttttcaagggcctgtttcccttgcctccataactgttgtgggtattgacggccaggcttctaaacctcttaaaactccccaactctggtgccaacttggacaatattcttttatgcactactttttagttattcccacctgcccagttcccttattaggttgaggcattttaactaaattatctgctttcctgactattcctaggctacagccacacctcattgccgccctttcccccagttcaaa

SEQ ID NO: 1118 - DNA, 745 bp, Homo sapiens
  misc_feature (1)...(745): n = a,t,c or g
ggcgatttgaaaaattttctcccattctgcgagttgtctttttacttttttgataaagttcaatttattggttttttcttttgtttcttgggcttcgggtgttgtatccaagaaaccattaatttagtgttgctttaattcagtgttttgaagatttactcctatgtttccttctacgagttgtgtagttttagctctgaacttaggtatttgatctgttttgaattgatttttgtgtgttgtgtgaggtaggggtccaactttattttttcctcagggagtttcctaagcaatgggtgcttagcaaggcagtactgtgggcggggtgggagcggggcctctgcaggacagtggcctccctcccctcgttctgactcagccggaggaaggagcctcagtcccgcagcatccgaggttatgcagaggtacaggtggcttgttacctccactaccacctggcctgctgctcacttgctgggagggaggatgaagcggagtgctgggcaggggctgccaatgttggatgctcacttgctcccaaacaggtttngggtccacagtctcaatgcagaggagagtgggggatgaggaccttctctcatttaacccccacactagcccttctgaggccaggggtaactgttgccccttttataggtgaggattcagagagggttaagggatttgcactaattaacagttagcaggggggcagacccgggacagaagcattgttcccttcctt

SEQ ID NO: 1119 - DNA, 3309 bp, Homo sapiens
tgcatgtccccgcctcgcgcggcggcggcggcgggtgaggagcctgaggcggcggcgggggtggctccgcgcgcggtggtctcgggggcaaaataacatggcagccagacgaattacacaggagacttttgatgctgtattacaagaaaaagccaaacgatatcacatggatgccagtggtgaggctgtaagcgaaactcttcagtttaaagctcaagatctcttaagggcagtcccaagatccagagcagagatgtatgatgacgtccacagcgatggcagatactccctcagtggatctgtagctcactctagagatgccggaagagaaagcctgagaagtgacgtattttcagggccttccttcagatcaagcaacccttccatcagtgatgacagctactttcgcaaagaatgtggccgggatctggaattttctcactctaattctcgggaccaggtcattggccaccggaaattggggcatttccgttctcaggactggaaatttgcgctccgtggttcttgggaacaagactttggccatccagtttctcaagagtcctcttggtcacaggagtatagttttggtccctctgcagttttgggggactttggatcttccaggctgattgagaaagagtgtttggagaaggagagtcgggattatgacgtggaccatcctggggaggctgactctgtgttaggggcggcagtcaagtccaggccagaggtcgagctctaaacatcgttgaccaggaaggttccctcctaggaaagggggagactcagggcctgctcacagctaaggggggtgttgggaaacttgtcacattgagaaatgtgagcacaaaaaaaatacccaccgtgaatcgtattactcccaaaactcagggcactaaccaaatccagaaaaacactccaagtcctgatgtgaccctggggacaaacccagggacagaagatatccagttccccattcagaagatccctctggggctggatctgaagaatcttcggctccccagaagaaagatgagctttgacatcatagataagtctgatgttttttcaagatttgggatagaaataatcaaatgggcaggattccacaccataaaagatgatattaaattttcccaacttttccagactctctttgaacttgaaacagaaacctgtgctaaaatgcttgcctcattcaaatgttccttaaaaccagagcacagagatttttgcttttttactatcaaatttttaaagcactctgctttgaaaacacccagagttgataatgagtttttaaacatgcttttagacaaaggtgctgtgaagaccaaaaattgcttttttgaaatcataaagccttttgacaagtacataatgagacttcaagaccggcttctgaagagtgtcacacctttgcttatggcctgcaatgcctacgagctaagtgtcaagatgaagaccctcagtaaccccctggacttggctcttgccctagaaaccaccaactctctctgccggaagtctttggcccttttgggacagacattttccttggcctcttctttccggcaggagaaaatcttataagctgtcggcctgcaagatatagctccctcacctgctgcgtttccaaacttcgaagactccactttgtttgggcgagagtacatagaccacctgaaggcctggctagtcagcagcggatgtcccctccaggttaagaaagccgaaccagagccgatgcgagaggaggagaaaatgattcctcctacgaaacctgaaattcaggccaaggctccaagtagtctgagtgatgctgtcccccagcgagcagatcacagggtagtgggcaccatcgaccagcttgtgaaacgtgtcatcgaaggcagcctgtctcccaaagagagaactcttctcaaagaggaccctgcttactggtttttgtctgatgaaaatagtctggagtataaatattacaagctgaagttggcagaaatgcagcggatgagcgagaacttgcgaggagccgaccagaagccgacctcagcagactgtgcagtgagggccatgctgtactcccgggctgtccgcaacctcaagaagaaactccttcccgtggcagcggcgggggctcctccgtgctcaaggggctccgggggctggaaggcgaggagagccgaccaccgggacccagaccctcctattcctcagggcaccagggctgaaacaccacggccggcaggctccaggcctctcacaggcaaaaccatccctgccagacagaaatgatgctgccaaggactgcccgccagacccagttggaccttctcctcaggaccccagcttagaagcctcaggcccatcccccaagccagcaggagtggacatctctgaagcacctcagacctcttctccctgcccatctgctgacattgacatgaagacaatggagactgcagagaaactggctagatttgttgctcaggtgggaccagagatcgaacaattcagcatagaaaacagcaccgataaccctgacctgtggtttctacatgaccaaaatagttctgctttcaaattctatcgaaagaaagtgtttgaactatgtccatcaatttgtttcacgtcatctccgcacaaccttcacactggtggtggtgacaccacgggttctcaggagagccccgtggacctcatggaaggggaagcagagtttgaagacgagccccctccgcgggaggctgagctggagagcccagaggtgatgcctgaggaggaggacgaggacgatgaggatgggggagaggaggcccccgctcctggaggggcgggcaagtctgagggcagcacccctgccgacggccttcccggcgaggctgccgaggacgacctggctggagcacctgccttgtcacaggcctcctcaggtacctgcttccctcggaagaggatcagcagcaagtcattgaaggttggcatgattccagctcccaagagagtgtgtctcatccaggagccaaaaggtgagtgcccgcctgtcggcacagttgcctctagcacagttcttggttggtgggctgtgagagttagaagagacaggtggagacattttaatccaaaagagttttgtgcaccactccaaaatgtgagccgacactcatgtttcccagtggtctgaaggcattgctctaaggacatgtttccttgctaccctgtggcttctggcactctacttgctgctggacatttccctgattgcctggattcaggtcggggcatccccaactgtggaggggatgg

SEQ ID NO: 1120 - DNA, 1355 bp, Homo sapiens
gcctgctcgccgtccgctccgtcagcccttagacctgttgcccagcatccctgcagttcgcggtacagtctctagtagagcgcgtgtatagaggcagagaggagtgaagtccacagttcctctcctccaagagcctgccgaccatgcccgcgggcgtgcccatgtccacctacctgaaaatgttcgcagccagtctcctggccatgtgcgcaggggcagaagtggtgcacaggtactaccgaccggacctgacaatacctgaaattccaccaaagcgtggagaactcaaaacggagcttttgggactgaaagaaagaaaacacaaacctcaagtttctcaacaggaggaacttaaataactatgccaagaattctgtgaataatataagtcttaaatatgtatttcttaatttattgcatcaaactacttgtccttaagcacttagtctaatgctaactgcaagaggaggtgctcagtggatgtttagccgatacgttgaaatttaattacggtttgattgatatttcttgaaaaccgccaaagcacatatcatcaaaccatttcatgaatatggtttggaagatgtttagtcttgaatataatgcgaaatagaatatttgtaagtctactatatgggttgtctttatttcatataaattaagaaattatttaaaactatgaactagtttcattaattgaatttgctaagtggagttatttctcattgctaaactgttttttttcaaattctagatctctgctaactttagtaaatgaacactaaagtggtgagctttgataatgcattttgtggatacaaaaccatcgcctcatcactttctagaatgaaaggctgggggcattgctcaccttttgcgtgaagaaaagacctgtcccttagagccagtttttgcttaaggggaggacagaccgtcgtcacccagtggaccacgtgaatgaatggatgcagtgcatgctttagaagcactgcatacctccttttacaggtacagagtaagtggtctggctactgagggaaagagtcatgatttgaatccgagtcttctgtaagacaatgacttcatgaaggtgaaaaatcagttttatggttattaaagtaaaaatttaccttgggtaaaaatgccatctttatttcattaagtactggttctaagtgacttccaataagatacattttcttcctgttttgaagttgatccccattgtgaaaaatatacattgtagtggtcatggaaatgcgccatccatactccctaaggcaggcttgttgccctagcatcaagcatgccagcagctttcaatggtcagcttctagaaggattgcctcggctat

SEQ ID NO: 1121 - DNA, 523 bp, Homo sapiens
cggcacgagtgcttttatcctgctttcttttagatttttaggcttatttggctgtccctttattttttacttcttaatggctgcttaattcattaatttcagcatttcttcttttctcatataactacttaaagctgttgtttcctttaaaaaataataaaataaagtttcccctaatacctgctttaatggcatagcaaagttttgatacgtcatattttagtgtttggttctgaatattatctgatttatattataacttcttctttgacccatgagttctttacagggttgtttttatactttcaaatgcattatctttaaaggtatcttcttattactgatttctaatttaattgcattttaatgagaaaaagtagttctcatattactgattctttgaaatttattggtaaaggctgggtgggcatggtaactcatgcctgtaatcctggcactttgggaggctgaggcgggtggatagcttgagtcagagagttcgagaccagcctgggcaacatga

SEQ ID NO: 1122 - DNA, 505 bp, Homo sapiens
  misc_feature (1)...(505): n = a,t,c or g
acaaatctcagctcggtacccggngatctcccactgggtccctcccacacagtggggattatgggagctgtcattcacaatgagatttgggtggggacacagccaaaccataccatagcctacaccgtattcaagacagcgcatcccatcaccccaaagctcgcttgagccctgctgcagctaaacccctccccagtctccagcccctggaaaccacagatgcagctttttccctttagttctgcctttttgagaatgtgatatgtgtagaatcaaactgcaagcagccattttctggttggtttacaacgtggaccaactgaacaccttcgcctccagccccgcagtggatctgagattctccctcactgcaggctccgttctccgttcctctcatccctgagtggcagtctgctgggcggaggaaccttcttctgttcatctactcagcccctgaagggcattgggtggctacaggattttggggattatgaataaagcccac

SEQ ID NO: 1123 - DNA, 481 bp, Homo sapiens
  misc_feature (1)...(481): n = a,t,c or g
tcgggagccatggtggaccggagccctctgctcacctcggtcatcatcttctacctggccatcggggcggcgatcttcgaagtgctggaggagccacactggaaggaggccaagaaaaactactacacacagaagctgcatctgctcaaggagttcccgtgcctgggtcaggagggcctggacaagatcctagaggtggtatctgatgctgcaggacagggtgtggccatcacagggaaccagaccttcaacaactggaactggcccaatgcaatgatttttgcagcgaccgtcattaccaccattggatatggcaatgtggcttccaagacccccggcgggcgcctcttctgtggtttctatgggctcttcggggtgccgttctgtctgacatggatcaatgcccttggcaagtttttcggggaactgccatgaaataagggccttcctttctcanaaattgtcccttgatggcaagcct

SEQ ID NO: 1124 - DNA, 374 bp, Homo sapiens
ggggaccctccccctcgcttctcgttctactgccccaggagcccggcgggaccgggactcccgtccgtgccggagcgggcgccggcatgtggctgtgggaggaccagggcggcctcctgggccctttctccttcctgatgctaatgctgctgctggagacgcggaacccggtcaatgcctgcctcctaaccggcagcctgtttgttttactgggcgtattcagctttgagccggtgccctcttgcagggccctgcaggagctcaagccccgggaccgaatttctgccatcgcccaccgtggcgggaggcacgacccgcccgagaacacgctgggggccattcggaaggcagctaataatggagcaacaggcgtg

SEQ ID NO: 1125 - DNA, 1041 bp, Homo sapiens
atctttgtctccttctcttctctccccacaatccttgatgagttgttctcagacactgcttggcaaatctgaaccctagtcagtcttataagggctcctgtcctccttggaaggctttgttattgatacatgccaatgagaaaaaaacacattaacgagtagctgatggatactaagggagtattttactgaaaaaaatagaaaactacatttttacacgaaataaacttatgtctgcaatactcagccttaaattcacccctcacttcagaagaggtcccaggggcaggaataacacgcacagattgtttgttcacgacttccagccggtccaccagacctctggccaggtaatactgtacaaagtgcttccacgtgatttctcttccaggatctcgaaaatagaggtagaaaaatcccatgggcaacgcctgacccccaaaagggccagactgcgggaaatcctcgtcatcccaggggaagtccccccttctggcatccgcctccaccaggcaacgttatcctgcttccctcctctcctgcctccgtctcctccagactcagcattctctagttcaccagtctctttgggtggttttgaacacagccaccaggaaaataacgtcggtcttgcctgcagagtcagcttctgaacgtggatcccctggaagcactggaacaggaggccagatgagctttcctagcttcttctgcaatgcaacaccgcacattctcactggccataaccactggagcaagcagggtgaggtgtgagcttatcgccttaaataccccattagaaatatgattcaatagagtaaacaggagcaagctcactgcagaaatgcactgcaaatgtttatagctatagcctccaacagcaagaaaaaactcccccaaaaaacaaaaaacatggcttagaaactgaggcaatttatttagtaacttgaaatatcgcagcttcaaaaacaagactgtaagactaaaacataaaattgtgtaaaatttaaatactgaaatacactatgactcatctttggt

SEQ ID NO: 1126 - DNA, 427 bp, Homo sapiens
cccacgcgtccgcccacgcgtccgcgagatcttctctgtggcggagacagccaggttggcagctgacgggacagccggggtctattttgttgcgggttttcagcaaatccagggctggtctggaggcgcgaaaacttaaggcatacagaacgatggagtatatggcagaatccaccgaccgcagccctggacacatcttgtgctgtgagtgtggtgttccgataagtccaaatcactgccaatatttgtgaggtctgtttgctaatccatattggaaatctgccactgtatcttcaacatcgtatttacattaccacgataaagctttatcacctgtcctatcatctactagtggatctctttaacgatcaattacatctacttcccacgaataactataatcatactacctcattctcatactccc

SEQ ID NO: 1127 - DNA, 321 bp, Homo sapiens
ctgacgggacagctggggtctattttgttgcgggttttcagcaaatccagggctggtctgggggcgcgaaaacttaaggcatacagaacgatggagtatatggcagaatccaccgaccgcagccctggacacatcttgtgctgtgagtgtggtgttccgataagtccaaatcctgctcaatattagtgtggcctgtttgcgaagctcatttcacatctaccactgtattcctaaactattcattcatcccttctctaaaacatcttcatccgcttttataaccccctcacattatcttactttcttctctactatctctcg

SEQ ID NO: 1128 - DNA, 847 bp, Homo sapiens
ggcacgagccccgcgcctgcagcgtccgccggggcggcgcggcgggaggtggccgacaggctccgggcctcgcagcctcagcccccggcccagcgcgctttccgacggcggcgccgcgccgagccacccgcccgcccaaggtctctcgcgggcgggagaacggaaaactcccaacttcctgagttctaaagttcctgttgcttcagacaatggatgagcaatcacaaggaatgcaagggccacctgttcctcagttccaaccacagaaggccttacgaccggatatgggctataatacattagccaactttcgaatagaaaagaaaattggtcgcggacaattgtagtgaagtttatagagcagcctgtctcattggatggagtaccagtagctttaaaaaaagtgcagatatttgatttaatggatgccaaagcacgtgctgattgcatcaaagaaatagatcttcttaagcaactcaaccatccaaatgtaataaaatattatgcatcattcattgaagataatgaactaaacatagttttggaactagcagatgctggcgacctatccagaatgatcaagcattttaagaagcaaaagaggctaattcctgaaagaactgtttggaagtattttgttcagctttgcagtgcattggaacacatgcattctcgaagagtcatgcatagagatataaaaccagctaatgtgttcattacagccactggggtggtaaaacttggagatcttgggcttggccggtttttcagctcaaaaaccacagctgcacattctttagttggtacgccttattacatgtctccagagagaatacatgacaatggg

SEQ ID NO: 1129 - DNA, 375 bp, Homo sapiens
ggcacgagctggaagatccccagcgctgcggtctcggagagcagtcctaacggcgcggcgtacgctagtggcctcccttgtggagtccgcggccctccctgggccgggctggcactcttgccttccccgaccctcatggcgctgctccgacgcccgacggtgtccagtgatctggacaatattgacacacgagctacgacgacagataagagtcgttgcgactatcacgagagctagaatagaagatatgcgccactccgctaccgctcttacccgccccgacgctactaccgctcagatcccgaaactccccgtgactactgtctgcaatcgacgcgccaaccccggcataccgccgtcggttctgtaaacgcg

SEQ ID NO: 1130 - DNA, 1640 bp, Homo sapiens
cccacgcgtccgggagaagagcccggacctgcagcttggccagagcggagggggctcgggagaggagtggacgccgctggccaggatggtgctggagagcgtggcccgtatcgtgaaggtgcagctccctgcatatctgaagcggctcccagtccctgaaagcattaccgggttcgctaggctcacagtttcagaatggcttcggttattgcctttccttggtgtactcgcacttcttggctaccttgcagttcgtccattcctcccgaagaagaaacaacagaaggatagcttgattaatcttaaaatacaaaaggaaaatccgaaagtagtgaatgaaataaacattgaagatttgtgtcttactaaagcagcttattgtaggtgttggcgttctaaaacgtttcctgcctgcgatggttcacataataaacacaatgaattgacaggagataatgtgggtccactaatactgaagaagaaagaagtataataataataacaatattttctcattctttgtgtatagaaaattttaaaatggtggtcttaattattactactggttgaacaattatttcttccaatttattttcttcctgcactactgtttgtatttgatcctttgtctattcagtcacttaattagaaattaaattgtcaagcctcttattctgacttcaaagaattaatgtatcttccaacaataaaatcacttctgattttaatctaggaaaacctaaattgtggctatggatccaaagctgtttgtttctttgaatatcaatattttcaacaggatcttgtatttaaaattcccacctacattgttaaatatgttattttttcatatctcttttggttttgataatctgaagtgtttttttctcgttttggccttccaaactgcatttggttaggtgaattaagaaaaatattgccatcaagaattacttgtgttttcacagagatagactctttgctttatagagattgttgtgtatttaatatgaatatcccagctttagaaaagaagtaaactggatacaaaaagttccattgaggaacagttatttacagtataaaagatttgtttactttacaaaaggcttgtgtctgtgtgtgtgtgtgtgtgtgtgtgtgtattttaaactgactcagtgacagctggggtggaatggcaagaacacttacaaccaaactcatgggctgctgcaatttgaagatcaattggtaataaacataagacattaattcatattaaaatagttcagtgttcaaaattgtgtttatgtggatatttttctctttttaacactataaaccattaaaatacagtcatcccttgtatacgctagggactggttccagggccacacatataccaaaatctgcccatactcaagtcccacagaaagtcttgcagaacccatatgtagaaaagttggccctccagttgaccctccgtacacatgagtttcacatcccatgcacaaatgctgatctgtgtgacctcacctgcatttgattgaaaaaagtatgcgcgtaattgtacccacccagttcaaacccgtgtgtaagggtcaactgtacaaaaaagtttgtgaaataaacgtactggagaatctttaaaaaaaaaa

SEQ ID NO: 1131 - DNA, 605 bp, Homo sapiens
ctcgctgactcgcttcgcttccccgacgcgctgggttcccggagcgcagagcccagcgttagcgggtgggctccccgaggccccctgccctcgccgggctgctccagggtgtcgctcctctggctgctcccgaaggggcttctggccctgaggacggtggtgccaagcgaacttcatttttaaaaagaactggtggatgagaagagcgagcgagggcgagctatggaccctgtgagtcagctggcctctgcgggcaccttccgggtgctgaaggagccccttgccttcctgcgagccctggaattgctttttgcaatctttgcatttgcaacatgcggtggctattctggaggcctgcggctgagtgtggactgcgtcaacaagacagaaagtaacctcagcatcgacatagcgtttgcctacccattcaggttgcaccaggtgacgtttgaaggtgcccacctgcgagggaaaggaacggcacaagctggcattgattggcgactcctcgtcttcagcagagttcttcggcactgttgctggcttcgccttcctctactctttggctgccactggcgtttacattttcttccagaacaaatacg

SEQ ID NO: 1132 - DNA, 852 bp, Homo sapiens
ggcgggggccgggccggagcgggctccagagacatggggtcgaccgactccaagctgaacttccggaaggcggtgatccagctcaccaccaagacgcagcccgtggaagccaccgatgatgccttttgggaccagttctgggcagacacagccacctcggtgcaggatgtgtttgcactggtgccggcagcagagatccgggccgtgcgggaagagtcaccctccaacttggccaccctgtgctacaaggccgttgagaagctggtgcagggagctgagagtggctgccactcggagaaggagaagcagatcgtcctgaactgcagccggctgctcacccgcgtgctgccctacatctttgaggaccccgactggaggggcttcttctggtccacagtgcccggggcagggcgaggagggcagggagaagaggatgatgagcatgccaggcccctggccgagtccctgctcctggccattgctgacctgctcttctgcccggacttcacggttcagagccaccggaggagcactgtggactcggcagaggacgtccactccctggacagctgtgaatacatctgggaggctggtgtgggcttcgctcactccccccagcctaactacatccacgatatgaaccggatggagctgctgaaactgctgctgacatgcttctccgaggccatgtacctgcccccagctccggaaagttggcagcaccaacccattggttcagttcttttgtttcctcggagaacagacatgccctgcccctcttcacctccctcctcaacaccgtgtgtgcctatgaccctgtggaatacgggatcccctacaaccacctgtatt

SEQ ID NO: 1133 - DNA, 1578 bp, Homo sapiens
ggggaactatctcgtcatccatagccaagagacgaggaattcgaaacttcagttaacagcctccttggtgctttaagcattcagcttccttcaggctggtaatttatataatccctgaaacgggcttcaggtcaaacccttaagacatctgaagctgcaacctggcctttggtgttgaaataggaaggtttaaggagaatctaagcattttagacttttttttataaatagacttattttcctttgtaatgtattggccttttagtgagtaaggctgggcagagggtgcttacaaccttgactccctttctccctggacttgatctgctgtttcagaggctaggttgtttctgtgggtgccttatcagggctgggatacttctgattctggcttccttcctgccccaccctcccgaccccagtccccctgatcctgctagaggcatgtctccttgcgtgtctaaaggtccctcatcctgtttgttttaggaatcctggtctcaggacctcatggaagaagagggggagagagttacaggttggacatgatgcacactatggggccccagcgacgtgtctggttgagctcagggaatatggttcttagccagtttcttggtgatatccagtggcacttgtaatggcgtcttcattcagttcatgcagggcaaaggcttactgataaacttgagtctgccctcgtatgagggtgtatacctggcctccctctgaggctggtgactcctccctgctggggccccacaggtgaggcagaacagctagagggcctccccgcctgcccgccttggctggctagctcgcctctcctgtgcgtatgggaacacctagcacgtgctggatgggctgcctctgactcagaggcatggccggatttggcaactcaaaaccaccttgcctcagctgatcagagtttctgtggaattctgtttgttaaatcaaattagctggtctctgaattaagggggagacgaccttctctaggatgaacagggttcgccccagtcctcctgcctggagacagttgatgtgtcatgcagagctcttacttctccagcaacactcttcagtacataataagcttaactgataaacagaatatttagaaaggtgagacttgggcttaccattgggtttaaatcatagggacctagggcgagggttcagggcttctctggagcagatattgtcaagttcatggccttaggtagcatgtatctggtcttaactctgattgtagcaaaagttctgagaggagctgagccctgttgtggcccattaaagaacagggtcctcaggccctgcccgcttcctgtccactgccccctccccatccccagcccagccgagggaatcccgtgggttgcttacctacctataaggtggtttataagctgctgtcctggccactgcattcaaattccaatgtgtacttcatagtgtaaaaatttatattattgtgaggttttttgtcttttttttttttttttttttttttggtatattgctgtatctactttaacttccagaaataaacgttatataggaacaaaaaaaaaa

SEQ ID NO: 1134 - DNA, 4585 bp, Homo sapiens
cggcgcgcacactgctcgctgggccgcggctcccgggtgtcccaggcccggccggtgcgcagagcatggccggtgcgggcccgaagcggcgcgcgctatcggccccggtggccgaggagaaggaagaggcgcgggagaagataatggccgccaagcgcgcggacggcgcggcgccggcaggcgagggcgagggcgtgaccctgcaggggaacatcacgctactcaagggcgtggccgtcatcgtggtcgccatcatgggctcgggcatcttcgtgacgcccacgggcgtgctcaaggaggcaggctcgccggggctggcgctggtggtgtgggccgcgtgcggcgtcttctccatcgtgggcgcgctctgctacgcggagctgggcaccaccatctccaaatcgggcggcgactacgcctacatgctggacgtctacggctcgctgcccgccttcctcaagctctggatcgagctgctcatcatccggccttcatcgcagtacatcgtggccctggtcttcgccacctacctgctcaagccgctcttccccacctgcccggtgcccgaggaggcagccaagctcgtggcctgcctctgcgtgctgctgctcacggccgtgaactgctacagcgtgaaggccgccacccgggtccaggatgcctttgccgccgccaagctcctggccctggccctgatcatcctgctgggcttcgtccagatcgggaagggtgatgtgtccaatctagatcccaacttctcatttgaaggcaccaaactggatgtggggaacattgtgctggcattatacagcggcctctttgcctatggaggatggaattacttgaatttcgtcacagaggaaatgatcaacccctacagaaacctgcccctggccatcatcatctccctgcccatcgtgacgctggtgtacgtgctgaccaacctggcctacttcaccaccctgtccaccgagcagatgctgtcgtccgaggccgtggccgtggacttcgggaactatcacctgggcgtaatgtcctggatcatccccgtcttcgtgggcctgtcctgcttcggctccgtcaatgggtccctgttcacatcctccaggctcttcttcgtggggtcccgggaaggccacctgccctccatcctctccatgatccacccacagctcctcacccccgtgccgtccctcgtgttcacgtgtgtgatgacgctgttttacgccttctccaaggacatcttctccgtcatcaacttcttcagcttcttcaactggctctgcgtggccctggccatcatcggcatgatctggctgcgccacagaaagcctgagcttgagcggcccatcaaggtgaacctggccctgcctgtgttcttcatcctggcctgcctcttcctgatcgccgtctccttctggaagaccaccccgtggagtgtggcatcggacttcaccatcatcctcagcgggctgcccgtctacttcttcggggtctggtggaaaaacaagcccaagtgggctcctccagggcatctttctccacgaccgtcctgtgtcagaagctcatgcatggtggtcccccaaggagacataggccaggaggccgagtggctgccggagaagcatgcgcagaaggccaagttaaagtagatcacctcctctgaacccactccggttccccgcaacccacagctcagctgcccatcccagtccctcggccgtccctcccaggtccgggcagtggaaggcttgctgtgaaaactctggtaagaaatctcatccctcaactgagggccagggacccaggtgtgcctgtgctcctgcccaggagcagcttttggtctccttgggccctttttcccttccctcctttgtttacttatatatatattttttttaaacttaaattttgggtcaacttgacaccactaagatgattttttaaggagctgggggaaggcaggagccttcctttctcctgccccaagggcccagaccctgggcaaacagagctactgagacttggaacctcattgctaccacagacttgcactgaagccagacagctgcccagacacatgggcttgtgacattcgtgaaaaccaaccctgtgggcttatgtctctgccttagggtttgcagagtggaaactcagccgtagggtggcactgggagggggtgggggatctgggcaaggtgggtgattcctcccaggaggtgcttgaggccccgatggactcctgaccataatcctagccctgagacaccatcctgagccagggaacagccccagggttggggggtgccggcatctcccctagctcaccaggcctggcctctgggcagtgtggcctcttggctatttctgtgtccagttttggaggctgagttctggttcatgcagacaaagccctgtccttcagtcttctagaaacagagacaagaaaggcagacacaccgcggccaggcacccatgtgggcgcccaccctgggctccacacagcagtgtcccctgccccagaggtcgcagctaccctcagcctccaatgcattggcctctgtaccgcccggcagccccttctggccggtgctgggttcccactcccggcctaggcacctccccgctctccctgtcacgctcatgtcctgtcctggtcctgatgcccgttgtctaggagacagagccaagcactgctcacgtctctgccgcctgcgtttggaggcccctgggctctcacccagtccccacccgcctgcagagagggaactagggcaccccttgtttctgttgttcccgtgaatttttttcgctatgggaggcagccgaggcctggccaatgcggcccactttcctgagctgtcgctgcctccatggcagcagccagggacccccagaacaagaagacccccccgcaggatccctcctgagctcggggggctctgccttctcaggccccgggcttcccttctccccagccagtggtggagccaagtggtccagcgtcactccagtgctcagctgtggctggaggagctggcctgtggcacagccctgagtgtcccaagccgggagccaacgaagccggacacggcttcactgaccagcggctgctcaagccgcaagctctcagcaagtgcccagtggagcctgccgcccccacctgggcaccgggaccccctcaccatccagtgggcccggagaaacctgatgaacagtttggggactcaggaccagatgtccgtctctcttgcttgaggaatgaagacctttattcacccctgccccgttgcttcccgctgcacatggacagacttcacagcgtctgctcataggacctgcatccttcctggggaccgaattccactcgtccaagggacagcccacggtctggaggccgaggaccaccagcaggcaggtggactgactgtgttgggcaagacctcttccctctgggcctgttctcttggctgcaaataaggacagcagctggtgccccacctgcctggtgcattgctgtgtgaatccaggaggcagtggacatcgtaggcagccacggccccgggtccaggagaagtgctccctggaggcacgcaccactgcttcccactggggccggcggggcccacgcacgacgtcagcctcttaccttcccgcctcggctaggggtcctcgggatgccgttctgttccaacctcctgctctgggacgtggacatgcctcaaggatacagggagccggcggcctctcgacggcacgcacttgcctgttggctgctgcggctgtgggcgagcatgggggctgccagcgtctgttgtggaaagtagctgctagtgaaatggctggggccgctggggtccgtcttcacactgcgcaggtctcttctgggcgtctgagctggggtgggagctcctccgcagaaggttggtggggggtccagtctgtgatccttggtgctgtgtgccccactccagcctggggaccccacttcagaaggtaggggccgtgtcccgcggtgctgactgaggcctgcttccccctccccctcctgctgtgctggaattccacagggaccaggggccaccggcaggggacctgtcctcagaagactttgatttttcccgtccctttttctccacaactccacttgacaaaacggtccccagcggtttccacttgtgggcttcaggtgttttcaagcacaacccaccacaacaagcaagtgcattttcagtcgttgtgcttttttgttttgtgctaacgtcttactaatttaaagatgctgtcggcaccatgtttatttatttccagtggtcatgctcagccttgctgctctgcgtggcgcaggtgccatgcctgctccctgtctgtgtcccagccacgcagggccatccactgtgacgtcggccgaccaggctggacaccctctgccgagtaatgacgtgtgtggctgggaccttctttattctgtgttaatggctaacctgttacactgggctgggttgggtagggtgttctggcttttttgtggggtttttatttttaaagaaacactcaatcatcctaaaaaaaaataaaaaaaaaa

SEQ ID NO: 1135 - DNA, 412 bp, Homo sapiens
  misc_feature (1)...(412): n = a,t,c or g
cgccgggtgaggttggcaccccttttttcctgctcttagagggaccggttgccaccggcatacttctgtcgccctgtcgtctgtgttgtgactgctttggacgtgggagtcacctgaaagccaggaaatggacttggtggctttcgaggatgtggctgtgaacttcacccaggaggagtggtctttgctggatccttcccagaagaatctctacagagaagtgatgcaggaaaccttgaggaatctggcctccataggagaaaaatggaaagaccagaacattgaagatcagtacaaaaatcccaggaataatctaagaagtcttctgggagagagagtcgatgaaaatacagaagaaaatcattgtggagaaacttctagccagattccagatgacacactgaacaaaaan

SEQ ID NO: 1136 - DNA, 983 bp, Homo sapiens
gccgccgccgccgccgcagccgctaccgccgctgcagccgctttccgcggcctgggcctctcgccgtcagcatgccacacgccttcaagcccggggacttggtgttcgctaagatgaagggctaccctcactggcctgccaggatcgacgacatcgcggatggcgccgtgaagcccccacccaacaagtaccccatctttttctttggcacacacgaaacagccttcctgggacccaaggacctgttcccctacgacaaatgtaaagacaagtacgggaagcccaacaagaggaaaggcttcaatgaagggctgtgggagatccagaacaacccccacgccagctacagcgcccctccgccagtgagctcctccgacagcgaggcccccgaggccaaccccgccgacggcagtgacgctgacgaggacgatgagggaccggggggtcatggccgtcacagcggtaaccgccacagctgccagcgacaggatggagagcgactcagactcagacaagagtagcgacaacagtggcctgaagaggaagacgcctgcgctaaagatgtcggtctcgaaacgagcccgaaaggcctccagcgacctggatcaggccagcgtgtccccatccgaagaggagaactcggaaagctcatctgagtcggagaagaccagcgaccaggacttcacacctgagaagaaagcagcggtccgggcgccacggaggggccctctggggggacggaaaaaaaaggcgccgtcagcctccgactccgactccaaggccgattcggacggggccaagcctgagccggtggccatggcgcggtcggcgtcctcctcctcctcttcctcctcctcctccgactccgatgtgtctgtgaagaagcctccgaggggcaggaagccagcggagaagcctctcccgaagccgcgagggcggaaaccgaagcctgaacggcctccgtccagctccagcagtgacag

SEQ ID NO: 1137 - DNA, 274 bp, Homo sapiens
ttttttttttttgaaacagtctgtttcccaggctggagtgtagggatccagtcacagttaattgtaccctcaaccttccaggctcaaaaaatgctcccaccacagcctcccaggtagggagtacctggaactacaggggtgggctgccacacccgactaatttttttgtaaaaacggggtttcgctgttcccaggctggtctaaaactccggggctcaagggaacctcccgcctgggcctcccaaagggctgggattcctttttttatttctga

SEQ ID NO: 1138 - DNA, 1664 bp, Homo sapiens
cgctccctatggaagggctgggagcgttgtctgtgaaagtgtaaaccttatcggcctcagctttgatactggccatgcggctctcctgagactccgacagtccatttgccagcccttcattcttgttgagatgatcctttaaaaaatgcccaggtaaatctttgctggcccccttggagtcctctagtttccccagcttggcatccatttttgggcttcccgtctctttcccttctttgtcctttagctttcgcttctcctttttctttttgtctttgagtgacaccagagctgggttcacggtgatgggctctcccataattgtgggctttggttgaatgggttttaacggaggactctttggtgtagcctgaacaacagttgttgtgagggagggcagtccgggtattgtcccagtggtggtcgttgtaaaggttgcagtgggtatagcgattagctgcgggggagtgggggctggggcaggggcaatgggccgggcacttttcagtttagaagaggtttttgtccgttttgcagttgttagcttttttgcccttttctttatctcctaaatttttcttgtcaattaatccttctgcttccagtttaggcatctcagcagccaaactgccgtctgctgccgagcaactgtctaacgcagccgtcatgttggagattactggaaggttgttcagttcattgttaaggcccttctttttgccagaattcttcccagctttagcaccaataatggaacctgggccattgctcatcagctctctctttccctttggggtcccaggtgggtttccagcaccaggggatgccggtgccttcaactggtcataagcagatacacttgtgcttggctcactgcattcaagtgccacattactcaatccttcctcacagtccgagatcttgtcctcactgtcaggctcgaactccagcttgttttctgggtctaagtgtgcatgagcctggtggtacctcaggccgttaatgtgcttgtactttttgttgcagtttgggtggggacagtcgattaacactggagaagagcagccttggtccaaaaaagtagtctctggtttcccttgaggggtagtgggagtgcttctggaatttgtgcggacacgctttccaggcttattgtcctcagagctggagttcaggtccagctccattggaggcttgtttttccttttgttggtggaggaagggctggctttgatatcctcagcagcacaatttgggggtgtccttcgtccgctggcattgaggctgccccgcctccctttcccattggccccccctctgttcttattctgcagccctctggactctgtgaagctggcctcggagcccggggcagcagcagcagaccttgctctcttccctctgccccggccccctctcatctccaggtcacttgtcggtgactcacaaaacctgggaggggcccagtcgtgcttggtgcagtccagtagggttcccacgtacgttttgttcctccacgtgacattgaccactaggacaccttcttctgtttcatgccacacgatcccttccaaattcacactggtcccaggttcacagggcccaagacactctggctctgtcactactccaacttcacatgtattgacacccacagaacgagt

SEQ ID NO: 1139 - DNA, 443 bp, Homo sapiens
ggaattcatagaaacattagttggtcacaaatcacattagctttgcccgaagtttttccccacactcttctttagcatgctattatggggaaagtgaccactcctgggagcgggggtggtcggggcggtttggtggcggggaagcggctgtaacttctacgtgaccatggtacctgttgaaaacaccgagggccccagtctgctgaaccagaaggggacagccgtggagacggagggcagcggcagccggcatcctccctgggcgagaggctgcggcatgtttaccttcctgtcatctgtcactgctgctgtcagtggcctcctggtgggttatgaacttgggatcatctctggggctcttcttcagatcaaaaccttattagccctgagctgccatgagcaggaaatgggtgtgagctccctcgtcattggagccctccttg

SEQ ID NO: 1140 - DNA, 412 bp, Homo sapiens
cccgggtcgacgatttcgtgaggcgagggtggctgccgcctgaactttttagatctggggcggcgcggaatccgcatccgccgggagtgtgatgaagctaccctgcctcgctgctccgcttgccgccagctgacaccgcctgcacccagcccgcccgggaggggagacgccgcggggccgtgaccttggcggaggagggcacactgataattcttgtatcttgagtgtggaccaagttttgggtgacatggcccaggggaataattatgggcagaccagcaacggggtggccgatgaatcacccaacatgctggtgtacagaaaggtaagaatgtcttcagtttcttggaaaacgggaaacttccggctttctcgatttttttccccctctagatcagagtatgtatcaacg

SEQ ID NO: 1141 - DNA, 775 bp, Homo sapiens
tttcgtcgaagcagctgtcaagatgctggggtccctggtgttgaggagaaaagcactggcgccacggctactcctccggctgctcaggtccccaacgctccggggccatggaggtgcttccggccggaatgtgactactgggagtctcggggagccgcagtggctgagggtagccaccggggggcgccctggaacatcgccggccttgttctccggacgtggggcagccaccggggggcgccagggaggacgcttcgataccaaatgcctcgcggctgccacttggggacgccttcctggtcccgaagaaacactcccaggacaggacagctggaacggggtccccagcagggccggactgggcatgtgcgccctgggccgcagcgctggtggttcattgctacagcaagagtccgtccaacaaggatgcagccctgttggaagctgcccgtgcccaaaaatatgcaagaagtcagcagaaacagatgtgctttgcttcattctgctgcagtacaggagtacgggtatggaaactgacccttgctgacccctggaatcacctgttggctactgcgaagggctgccgggctgcgactttccccttttggcagggcatttgcagagcagcaatgttgggaatccactcttcccatcccccaggggatgccactaccatattccattgagctgccaggcattgattatttagttctttcaaatacatgtttttctaatagcaattaaacacccatcccaaaaatacagaaagtaattg

SEQ ID NO: 1142 - DNA, 466 bp, Homo sapiens
  misc_feature (1)...(466): n = a,t,c or g
ggggttgacctgaaaaccctcgaaatganangctttgnananacnanngnnntggaantnccgggtcgnnnnnntcgtccggccttatattcagggtcttacttctccaatgtcgatggaaatgttctcataagcctgggtccaagcatatggtgacatttatgtttctggttttttgtgggcttgtttttaccagagcaacagataatgttatttgctactttacttagaatggcacagggatgtgacttcgcattaggcaatgatttcttaaatataacaacaaaagcacaagcaaaaaagaaaaattagataaattggacttcatcaaaattaaaacctgctgtacgtcaatggacgctattgagaaaacagaacccctcacaaaatggacaaaagcatttgtaagtcatgtttcttataagagactcttattcggaatatgtaaagaatactcacgtcaata

SEQ ID NO: 1143 - DNA, 451 bp, Homo sapiens
  misc_feature (1)...(451): n = a,t,c or g
ntcgagatcctagaccagcgtggnggaattctggtagaactggaatcgttggcccgatctggagcccctggaggctgggtggtagaagtggagtctctggccccatccggatgatggaggtggaatctctggccccatccggatgatagaggtggaatctctggccccatctggagcccctggaggctggatggtagaagtgaaatctctggccccatctggagtccctggaggctggatggtggaggtttgctggggtaaccctaggcggtaggtgttgccacccaaggtgaagaggaactcacagcagcgctggcttagcagctctgtggggcataacccacttctttgcaaactctggtgctgggagatgatgaaatgagcacctggtacattaggtttgggacttaaagctgatacttccattcgggagcaggatgagtaagacctg

SEQ ID NO: 1144 - DNA, 401 bp, Homo sapiens
aagaaggttcctgggagactgtcagaaatgagtttttcactgaacttcaccctgccggcgaacacaacgtcctctcctgtcacaggactgtgggccctctcttggattagcggcgggcataccattgctggtggccacagccctgctggtggctttactatttactttgattcaccgaagaagaagcagcattgaggccatggaggaaagtgacagaccatgtgaaatttcagaaattgatgacaatcccaagatatctgagaatcctaggagatcacccacacatgagaagaatacgatgggagcacaagaggcccacatatatgtgaagactgtagcaggaagcgaggaacctgtgcatgaccgttaccgtcctactatagaaatggaaagaaggaggg

SEQ ID NO: 1145 - DNA, 479 bp, Homo sapiens
  misc_feature (1)...(479): n = a,t,c or g
gtctgacnaaaacttgaaactccncgcaatagccaccngcctgnaanncccgggnccacgatttcgtgctggaaggcggcgggcggccgcccgcgaggttttgattttacagttcccgccgccgaacttaacccgggggtggggcggcccgggagggggcggggcacgtgagcgatggagaccatctggatctaccagttccgcctcatcgagatcggggactccaccgtgggcaagtcctgcctcctgcaccgcttcacccagggccgcttccccgggctgcgctcccccgcctgcgaccccaccgtgggcgtggacttcttctcccgcctgctggagatcgagccgggcaagaggatcaagctactgctctgggacacggcgggacaggagcggttcatatcaataaccccgatcttattaccgcaacttagatggtggatttttagtattngacattactaaccgacgatcttttg

SEQ ID NO: 1146 - DNA, 814 bp, Homo sapiens
tcagcaccgacccaaacaagcaggaaacaggaaatgttcacgtttcagagaggctgcagcccggggcagcatcctgagcgcgcctctgccgaggcgagcggacatgcaggctccccgcgcagccctagtcttcgccctggtgatcgcgctcgttcccgtcggccggggtaattatgaggaattagaaaactcaggagatacaactgtggaatctgaaagaccaaataaagtgactattccaagcacatttgctgcagtgaccatcaaagaaacattaaatgcaagtataaattctaccaactttgctccggatgaaaatcagttagagtttatactgatggtgttaatcccattgattttattggtcctcttacttttatccgtggtattccttgcaacatactataaaagaaaaagaactaaacaagaaccttctagccaaggatctcagagtgctttacagacatatgaactgggaagtgaaaacgtgaaagtccctatttttgaggaagatacaccctctgttatggaaattgaaatggaagagcttgataaatggatgaacagcatgaatagaaatgccgactttgaatgtttacctaccttgaaggaagagaaggaatcaaatcacaacccaagatggagcctcactctgtcacccaggctggagtgcagtggtatgatctcagctcactgcagcctcaacctcccaggtaccagtgattctcctgcctcagcctcacgagtgctgggactacaggcatgcgtcaccacgcctggctaatttttgcatttttagtagagacagggtttc

SEQ ID NO: 1147 - DNA, 1255 bp, Homo sapiens
tctgaatccaggagcaggggttgcttgggcgggtggtggagtgtgggcaaatgtggctgaatcctgtggttgagccttgaacgggggaccgctgctgcccccagtgccgccgactgttccgaacgggaggtccgaggaaccccggaaagcggctgtggccccggccaccgcagtgaccgcgggagaattgtgtacataatgatgttcgtggcggcggttgtaggcgtccgtgaacttgctctcgtggcgccgggccttgaaggtcactgcagggtcctgactgaagaggtatgagggtgtgggctggcggctggagtagctggagtcctgtgagaaaggggtgcccaggcgcggtgtgagcggggtgcctgtccataggagttgggtgtgtccaggcggcagctggaataagctgtgtcctgggagaagggtgtcccaccgctattgggggtgacagaggaggagccggagccacagcctgcagacaggcctccatccttgaggcgcttcagggcatctgacagctgcagggtctcattcacgattggagagacagcgtccagctcgcccactgggagggtctggggggtgtatcggccagtgaccatacagttcatagaaccgcattcgggtttcccctttggtgtccagctccacgtggataatgttgcccatgacggaagtgctgtgcaagtgctgaacggcatccttggctccccggaccgtggcaaagaccaccttggcaatgcccaggtgcttcttggtcttggggttgtacaaaatttccacctcctccacctccccatacttcttgcacatgtccctcaggaagttttcacggatgttatcattcagcttggcaaatgtcacctgcttcggaggcacctggtccacgtaaaactcatcgatcttgaatttgggcaccgacagctccagcctccttgtttttggtccagatcccgacgacccggggatcttcgacaatttccaccgggcggttgctggacatcgccaggctgaaatgctgcccatcgtagcggtacagtttatgatgcccctttttcagagccgggtcaatcatcaacttgtaacttctccaatggtggttcctcctctcgcccgaagggccgggctgcggcgggggctgctggtggtggtggtggggggggtgactgttctccatgccgttaacccaaccctcctcctcttcctcctcctcctccttttcctcctcccctctccttcctcgacgaaa

SEQ ID NO: 1148 - DNA, 1232 bp, Homo sapiens
  misc_feature (1)...(1232): n = a,t,c or g
tcataggccatcacactcaggagcgtgtctctcttccatgcctccaaaaatggcaaagagagacatttgagtcaggcagcctgcatagaagatgactctgccgtgagattggatgtccacaatcatcttggggaccgtggtggaggtgaaaccgatgtcaggcaaggacaggttggagaggaagaagtacatgggggtggggaggtgggagtcagggctgacgtccaggatgatgatcaggttccccagcaccgtgaccaggcacatggacaggaacagcccagcaaggaccagctgccgttctggatccttatggaaatatatgaatatgctattgatgatgctgtcagaacaggcaaatttgagaagttgagaggggtcacagacaaaattagagatttccacattcttgatgatggtgaattgtaacacaatccaactgtgcagctgggagtctaaaagactgagaaaaaaaaaagacaacaaaactagaaaggcacagaaacacgggttcatgatggctgaatgatatagagggtgacagatggctacaaaccggtcataggccatcacactcaggagcatgtctctcttccgtgcctccaaaaatggcaaagagagacttctgagtcaggcagcctgcataggagatgactctgctgcgagactgggatgtccacaatcatctttggggaccgtggtggaagtgaaaccgnatgtcaggcaaggacaggttggagaagaagaagtacatgggggtgtggaggtgggagtcagggctgatggccaggatgatgagcaggttccccagcaccgtgaccaggcacatggacaggaacagcccagcaaggactggctgcagttctggatcccctgagacttctaggaggaggaatatagagacatctgttagattctgtgggtctgcataatttggacacctttgcctagaaacgagggttgaaaaatgggaaacaagtaaaccaacacctggcattgtgtctgcattttgaatagaagcaattcacaagtaatgttttcagatttcagagcaatccacactcagcaatattttgcagttctgacagactcaattgtcttctaatgctttcatcattgatttctgtgttattcacttcttgctgtacacacctgccttagagacactagattcaagaatgttccaagaaccagatcatcatacataacaaattcgtaactgctagaaaata

SEQ ID NO: 1149 - DNA, 699 bp, Homo sapiens
atggccagccaagaaaaagatatatttattggctgggggacaattcatctctttcgaaaaccacaaagatccttttttggcaagttgttacgggaatttagacttgtagcagctgaccgaagcatgggaagatacatgctctttggtgtaataaacttgatatgtactggcttcctgcttatgtggtgcagttctactaatagtatagctttaacatgcctatacttacctgaccatttttgatctttttagtttaatgacatgtttaataagttactgggtaacattgaggaaacctagccctgtctattcatttgggtttgaaagattagaagtcctggctgtatttgcctccacagtcttggcacagttgggagctctctttatattaaaagaaagtgcagaacgctttttggaacagcccgagatacacacgggaagattattagttggtacttttgtggctctttgtttcaacctgttcacgatgctttctattcggaataaaccttttgcttatgtctcagaagctgctagtacgagctggcttcaagagcatgttgcagatcttagtcgaagcttgtgtggaattattccgggacttagcagtatcttccttccccgaatgaatccatttgttttgattgatcttgctggagcatttgctctttgtattacatatatgctcattgaaattaa

SEQ ID NO: 1150 - DNA, 811 bp, Homo sapiens
gcacacagttacgtttctggcttggttagtgaccctaccttggctgtgggcactgaggtgggaagagtgccatgcggctctacagacagaagccacccctgaatgctgggctccagcctgctgtctgcctgagtgcatgactcgggagccctgtcacggcacacacgccatcctggcagcctgaggtggggacacaagtctttgaccccagcatcgtgcatctcaggcactagcacagcagccacctctgtttctagttccagggccaggctacatctcactgcctcttagggggaatgccctggtgtgtgagatcaaaaagaaaatgatttctgctgcctgccagtcttctcactgcccttgtttagccctctctaatgttaagagtcataatgagggtagtatgggttatcgggaaaagtgtctttatacattcactccttttaacctcacatggaacctgtgtggaaggtcctatttctccattttgtaggcaggaaattcagactcagagaagttatgtgaattagccacagttataaccttactggttagaacccagatacataactacactcagagaaagagaagccagtccctgggcttgggacaaggaccatgttgaggagcccagagtgaaaattaaagcagaagggctgggcacaatctcacaactgtaatcccaagcacaaagggaggctaagacaggaggaccgcaagagaccaggagttcgaggctgtagtgagccaagactgcaccactgcactccagctcgggtgacagaggtagacctgtctctcaaaaaaaaaa

SEQ ID NO: 1151 - DNA, 406 bp, Homo sapiens
tttcgtctcggggcctggggcgtggtcttttggctttcgtgcgctcgggatcaatctttttaggcgtaggtatatgtgcatatatatatgggtatatacacacatatatatatgttataaaattctaacttcgggggagtactttactttgatattccacttgcaaaacaaaaccactgattcctttctgcttgacaagattgagtcgctatcaaggagctgcccgtgctttggaaatggtccaaacccacgaggaactgccaaggagccccctcagacacaacagcgtgcggggtcaaagacagccgcccccccatgtcagtggtctaggatggccagtgaaggccccaacatcccatgtcctggggcgcgccatagtgacaagcagtttctgatttgcactata

SEQ ID NO: 1152 - DNA, 1139 bp, Homo sapiens
tgcccaggaatgagcagacgatgtgcttgtgaggttagaaggaagatgcagtcagctgtgacagatttctttcactatcattctcagtttctcacttaatttttccacggcagcctggggtgcgctgggagcagggagagataaaagtgagaactgggttggagaggagtgcttggacagtcactgcctcccatttcacctgtgcacaaactcctgatgtgagttgattcagtgaggaggggccagccaggtccccgtgggcatcatcctagcactttctctccccagtccctaggatgggtggctcacaatccagggagatgcctagggctgcttcttttctagatattccagtcagaggaggctccagcagaagggagtgtccagctgtggctgtggggtgcctgggcctcacatcttgtcctcgccttggtcaggacccagcacagattaggatgctgccttcagctcatccccagcacatattaccaatccgagtcatgctgccctgagggaaacattggtccccaggtccaaaagaataccactaaaggagagacaaccgggcaggcactgtggctcactcctgtattcccagcactttgggaggccgaggtgggcggatcacgaggtcgggagatcgggaccggcctggctggcacggtgaaaccccgtctctgctagaaatacaaaaaaaattatcccggtggggtggcgggcgcctgtggtccatatactttgggggctgaggccgaaaaatgggatggtcaccgccaggcggcccttcctgggaccacagagggggccttggacttcaacttgggggaaggaggagaatgtgtttacaagatttaggacggcggacggaggtaaaacgacggccggcggtgttatgagaggactaggtttctagcacgtagcgtcgcgggtaagattcttattatgtggcgacctcgctatgatctaccgggcgtacgtatgcatgaagcaacgaacgtagagtacctagcatcgaacctaggtacgtaacgacgcgaaccacgaatctagggatgctagcatccgtgcgtaggaacggatcgatcgttcctatctaccgcacgcatggtagtgaatgatgctacgctacggacggcaca

SEQ ID NO: 1153 - DNA, 439 bp, Homo sapiens
  misc_feature (1)...(439): n = a,t,c or g
cggaattcccgggtcgagcgctactgccgcgcggagcgcgtgtgtctgtgcgaggcctgtttcgtttaggagcaccgcggccacgagctggtgccgctggagcaggagcgcgcgcttcaggaggtgggctccgggggcacactcgggtgagccggggctggtgaccgaccgcgcgcgagcgggccgaggaccttggaccccccagtcttcccgggttgggtcttaatctcctcctctaacctgaggatctttgcggtcccttccagccttgacaaggtcatctgctggcggtgatggagatgggaagggaggaaggagggacgtgagaacaggacaaggacgcgaagagcgggcaggggacctgaagccgggccggggtctatgggggtgtangcgggagggagccgggttaggcccgcggggttccggtagcgtggct

SEQ ID NO: 1154 - DNA, 433 bp, Homo sapiens
agagagagagaaagaaatatagaggtggaaacccttgtccttggggatcctggatagaggatgccagtgattgagtcttgaggcggggctgcctataggatacctcccaaccatttcagctccagatgctgaacatccctatgccccctcccccagtagtctctgttggatcttacaggtagggagcagactgaggcttgttcaccagaacaggtgcaagccacattgttgccaagacctgtctgaagccggattctccccactgtcttcttcaaccccgcctcttactccttctgtgggactgctctcccctcctgtgaggctagatagatgccctgtatccagcccaatatggaacaccagcaccgagtccgggaccccgtgatcactctgcaagcgaccccctgacccctgagtttatcaagcccaccag

SEQ ID NO: 1155 - DNA, 397 bp, Homo sapiens
cccatgtgctcaagactggcgctaaaagttttgagcttctcaaaagtctacagccaccgtccagggagcatgtagctgctggctccggggacactttgcgttcgggctgggagcgtgctttccacgacggcgacacgcttccctggattggcagccacactgccttccgggtcactgccatggaggagccgcaatcagatcctagcgtcgagccccctctgagtcaggaaacattttcagacctatggaaactactttctgaaaacaacgttctggtaaggacaacggttgggctggggacctggaaggctggggggctggagggctgaggacctggtcctctgactgctcttttcacccatctacagtcccccttgccgtcccaagcaatggatga

SEQ ID NO: 1156 - DNA, 619 bp, Homo sapiens
tgaacaaagcaatgcatttatttgttgcaagtcattcacacgaatgacaaggggccaggcaggcctgagggatcactaacccatcttttgtccctccctttggaagcagcagggctgagggactcacccagcctgccatgagccagacttaacaccccccagaccctccttccgggaggacagctgctgttgttacacgttctggaagaggaaccaaatgcactctcacgtgctgtggcccagggcctttagagccctggctcggaaaataacctgggctgtgcgaccctggagcctcgcctgccctggctcacctgggtggtgctcccccagcccctgcagcccctccggcgggtgcacgcagacattgttcttggagtagatgatctctccatccaggacagagggggacccgctgccgctgccaccgggggtgagggtcaggaggtccgaggctttggaggaggccctgcgaaggaggcggcccagagacattgccgggcaagtgtttccatcctccgcatgcgtcggcccgggcagggctcgtcaagacctgcccgggtcccgctgcgggggccggattcgcaccggctccgagagccgccaccgtcgcctccgc

SEQ ID NO: 1157 - DNA, 667 bp, Homo sapiens
attcatacgtgtacatttctacttcagtttttattatccattacataacatacatgcttgattatttgcttcaaggaaatacacctttataagtaatactcaataactactgggtttgagaatgaaggtgtcagaacgaatgagattgtcctatgaaagaagaggcaggagccagggaggaggatcccacccggccggggctcagccaggaggcagggccattggggcagggtggcagtccaaggaaccgctctgggaaggtttgcaaaggtcggggtcccccctgccaggtgatcgaattatcgtggagtgtctggaaggcgggggaagttttgttgagttcaccaaataactcagaccaactggaaaccaagtggagtttctacaggaccaactagaatagggatcagctacatgggggcggggggaggggggcagggaacggtgtctgtcttcattgcagctctgtctgcagagccagcactgtgatacctcatagtaggtgctcagtgaatgtctgtgaagtgaattactatctagacaaggatgagactggtatgactctccaaagctttcccacctccaaaacctcggcttgtggggaatctccagtagggggcactgtggacacggttcgcatctgcctcccaaggctgggctccgcgtc

SEQ ID NO: 1158 - DNA, 430 bp, Homo sapiens
  misc_feature (1)...(430): n = a,t,c or g
caggagttgaagcaaggcccgaacccgttggcccccagtccctctgccccgtccacttcggcggggctcggggactgtaaccacagggtggacctcagcaaaaccttctcggtgtcctccgccttggccatgctccaggagagaaggtgcctctacgtggtcctcacggattcccgttgcttcctggtgtgcatgtgctttctgaccttcatccaggcgttaatggtctctgggtacctgagcagcgtaattaccaccattgaaaggcgctacagtctgaagagttccgagtcggggctgctggtcagctgctttgacatcgggaacctggtggtggtggtgttcgtcagctacttcngcggccggngtcggcggcccctgtggctgccgtgggtggactcttggatctggaagggggcgagatgattgg

SEQ ID NO: 1159 - DNA, 440 bp, Homo sapiens
tttcgtgcagaggagggtggcactcctaccatctagttgttttcaaagtgccaaggatcagttatcaatggccaatgtgccctcttctgctttgccctacataatgaaagggcaatcaggtcaatggcaatgggaatcagttaaaaaggaaacatgaatcgatgtgtcctgtgtcactcacacagaatactgtcagactgatggaggcaggtctccctcagaagcaggcagaaagggctgatgagctatttgaggcaggcttggtaatttacgtcaagcttgatgaacgagtactgaatgctctcatatagctctgtggggcttcaatggttcaaagaaagtgatttgtcacaccttaggctcttagagatttcttttcgctgattatttgttctaggacaaaatacatttctgtgtcaggtgagatcagcaaacaaagg

SEQ ID NO: 1160 - DNA, 430 bp, Homo sapiens
tttcgtggggcggccgcgggggcttagcgataggcttgaggaccttttccttgccgggttccgggtcggagagcggctccggacggcagctatgaagcggtacgtgcgcatcctgttactgggcgagggtgcggaacacgtcgctgatcctgtgcctggtgggcgaggagttccccgaggagaagccgatcacacggaccaggagctgcgggaggagatccacaaggcaaacgtggagcgtgtggtgcatgacgtctctcaggaggccaccattgagaagattcgtactaagtggatcccactggtgaatggggggaccacgcaggggcccagtgggcatcaagtcatacctgccgtcggggagatccatggaggccgagctccccatcatgagccagttgaccgagattgagacctgcgtggagtgttg

SEQ ID NO: 1161 - DNA, 390 bp, Homo sapiens
aattcccgggtcgacgatttcgtggcgcccggactctcggaggccgggaagctcctggggctggagttccctgagcgccagaggctggcagctgcggttggatttctccgatgtccggtgttatctccatgtctgcccctttcttcctggggaagatcatcgatgccatctataccaaccccactgtggactacagcgacaacctgacccgcctctgccttggcctcagtggcgtgtttctgtgtggtgctgccgccaatgccattcgtgtctacctcatgcaaacttcacgtcagcgcgttgtgaagaggctgagaacttcgttattctcctccattctggggcaggaggttgctttctctgacaaggctggcacaggggaattgatta

SEQ ID NO: 1162 - DNA, 897 bp, Homo sapiens
gcacgaggaaaatccgaagtgccgcggaaagtggaggtgagggccgcccgccctagaggtgcccgtccgagaggcagagctgacaaggaaggtttcgagcgttttgctggcaaagggatttcttacaacctccaggcatgcgtctttctgccctgctggccttggcatccaaggtcactctgcccccccattaccgctatgggatgagccccccaggctctgttgcagacaagaggaagaaccccccatggatcaggcggcgcccagtggttgtggaacccatctctgatgaagactggtatctgttctgtggggacacggtggagatcctagaaggcaaggatgccgggaagcagggcaaagtggttcaagttatccggcagcgaaactgggtggtcgtgggagggctgaacacacattaccgctacattggcaagaccatggattaccggggaaccatgatccctagtgaagcccccttgctccaccgccaggtcaaacttgtggatcctatggacaggaaacccactgagatcgagtggagatttactgaagcaggagagcgggtacgagtctccacacgatcagggagaattatccctaaacccgaatttcccagagctgatggcatcgtccctgaaacgtggattgatggccccaaagacacatcagtggaagatgctttagaaagaacctatgtgccctgtctaaagacactgcaggaggaggtgatggaggccatggggatcaaggagacccggaaatacaagaaggtctattggtattgagcctggggcagagcagctcctccccaacttctgtcccagccttgaaggctgaggcacttctttttcagatgccaataaagagcactttatgagtcacaaaaaaaaaaaa

SEQ ID NO: 1163 - DNA, 979 bp, Homo sapiens
aagacatggccctgccctcaaggaactaacacctcgctgctgatgcaaaccccctcccctccaccacacatgataaaacactgtctttagctatgaagggagtgtgaccaactttggggttgctggattgaaagttcatgagtgaaggtgacccaaagaaagtgatgcttagcttgagtcttaagattaagtacaagttcattaggcagatagaaggaaagaattccaagaggcaacagtgtgtgcaaagcctttaattagaatgtttgtattttttacatcatgcataacttcacatttgtgattaattagtaattatttcaatacttgtaagctcatctgcctcagatttaatcataatacatgaattaaattaatcaaattaaggaacagcaatttagaaagaaacacactttaaaaaatcaaaattctcaattcaggcagtctgtttctatcatttggtattctactcctttaaaaatttcatattgcccaacaaaaagtggttatttttactgtttttggagatgactgaacagatgaaggcatcagatgccttcatcagctggtattttgcctaagatctatttaagataaccttttcttatattttttacttaatattgggcataatcgtatcattcaagattaagtctgggttatttctttgataagaactgaatgtggccggagcgctagatgtcacgcctgtaatcccagcactttgggaggccgaggtgggtggatcacttgagatcaggagtttgagaccagcctggccaacatgatgaaaccctgactctactaaaaatacaaaaaaattatctggatgtggtgatgcgcatctgtaagcccagctactcgggaggctgaggcaggagaatggcgtgaacccgggaggggtgaggttgcagtgagccgagattgcgccactgcactccagcctgggcgacagagcgagactgtctcaaaaaaaaaa

SEQ ID NO: 1164 - DNA, 1176 bp, Homo sapiens
cctcctccttccccacctgtatgcggacggtctttcactctaataccagtgtgagctcgctgctgcacaggcctggccatgtcactcctcagctgacaatccatggagggtggagacaccaccgtgaccacacagccattgacgagtgggacttcaaccccagtaagtttctcatctacacctgcctgctgctcttctcggtgctgctgcccctccgcctggacggcatcatccaatggagctactgggccgtctttgcccccatatggctgtggaagcttctagtcgtcgcaggcgcctccgtgggcgcgggcgtttgggcccgcaaccctcgctaccgcaccgagggagaggcctgtgtggagttcaaagccatgctgatcgctgtgggcatccacctgctgctgctcatgttcgaagtcctggtctgcgacagggtggagaggggcacccacttctggctgctggtcttcatgcctctcttcttcgtgtcccccgtgtccgtggctgcctgcgtctggggctttcgacacgataggtcgctggagctggagatcctgtgctcggtcaacatcctgcagttcatcttcatcgccctaaagctggacaggattattcactggccgtggctggtggtgtttgtgcccctgtggatcctcatgtcgttcctttgcctggtcgtcctctattacatcgtctggtccctcctgttcctgcggtccctggatgtggttgccgagcagcggagaacacacgtgaccatggctatcagttggataacgattgtcgtgcctctgctcacttttgaggtcctgctggttcacagattggatggccacaatacattctcctacgtctccatatttgtccccctttggctttccttactaactttaatggccacaacatttaggcgaaaggggggcaatcattggtggtttgccattcgcagagacttcttcaggatcaactaccccagcccacgggaaaacccccacctccccctttgacagaccatcatggggaaaaggcgttgccactgcaaaacaaggacagaggctcatggccagcttccaggggatcccccaggctcctctgagcacgtccatgtctcgtgctgagattagatggaagatgccaacaggaccagcaaagggttcaggcccccgaatgaag

SEQ ID NO: 1165 - DNA, 993 bp, Homo sapiens
agatgttacaaggatatgtacacaaacggatctgcgctcctttacttgcccccatatacttgctttatatgtatgagaagtctcttctcttttgtgtcattacacagcgatgtgatcgaggagctagaccatgggtcctctttgtctgcccacagaatttgtctctagggaaacagacactttttgccttgacattgaagactcactcctattttttagaaagattgagggttgggagcactaatctgagatatttagttcataacgccgacaatgaaccaaaaagcatttggtgttggatatatcttgaatggtattgtatttatttttaaaaggctatacaagatctcttgtgaggatcaaatgacaagttgaacatgaaaactatttgaataattaacatgctactgaatatgataatgattccactttgaatttggaagtgacattttgttcattgattccctcattcattctttcaacaagcatctatgaggcagcgttaagcactttagcatgccttgtactgcacaccactaactgtgagatgtgtccattgggccgcctttactgagaagaccatgttctggcagagaacagacacgctctctttctttcccctcagacccagagagctctttctccccagtcccagagggtgtcaggctggctgacggccctgggcattgcaagggacgcgtggaagtgaagcaccagaaccagtggtataccgtgtgccagacaggctggagcctccgggccgcaaaggtggtgtgccggcagctgcgatgcggaagggctgtactgacctcaaaaacgctgcaccaagcatgcctatggccgaaaacccatctggctgagccagatggcatgctcaggaccagaacctacccttcacgattgcccttttcggcctttaggggaagacaccctgttccatgtagaatacacgtcggtccatgggagggaacgcctgtccgccaaagactagcc

SEQ ID NO: 1166 - DNA, 387 bp, Homo sapiens
attttaaaatgtgattttagcacagttagaggggttaggaatcttccccaggttatgccccttgtaagtattaagggttgagaatcaaatcccaatttgaattcagagcccttaccaagtgtcccaacctttaccagagtggtcatggtcaacacttgcttcctccctgttaggaaagctaacttcatcagtttttatagccgcctattttacgttggacccctccttctggtaaaaatttctttttttttttcttttttgagtcagagttttactgtcacccagggtggaatgcagtggtgcaatctcagctcacttagctcactgcaacctctgcctcccaggttcaagtgattctcctgcctcagcctttcaagtagcatcgaa

SEQ ID NO: 1167 - DNA, 1087 bp, Homo sapiens
ggttggggcattcggcacgagaattaaatcacgtacctaattttattaattttactaatactagctgaaaagttaataatatctatgtagaaattaattgtgtttagggtaccactgaattgtctatagagcagtattaaaattactcaaatgatcctagtattaaatttactcaaatgatccattgtgtatatgatattttaaaagatgtgatgcgtgttatttcctcagcatgggtatggggattaactgctctgtttcagtgcccagtggtctgagaatccagatatgtggatgtgcttgctggtgaagctggctgagctactgaaatcaaaagcacaaggaaattctgattttcctgactataagaaataactgagcaactaaatatgatccaggcctggggccacacactttggggtctaagatgggggaaagaattaggatcattaagagataaacctagggatattaaaatattaaagagttggagcaggcacagtggctcacatctggaatcccagcactttgggagaccaaggtggacagatcatttgagcccaagagttcaagaccaacctgggcaacatggcacaatgccgtctctacaaagaagaaccgggcctggtgctgcatggctgccgatccagctacttgggaggtgaagtgcaaaaacccccgtacctgggacgtcagggtgcattaagctgtgctgacgccctgcctttccccctgcagtccatcgcgtatcccccgtcctgtcgcgaccatatcccgggcgccgttcgctttcacacacccctcctccccggcctttgatcctgtacgcaccggctccctcgtccggccggaacggctttcatcccccattcgcaccccccgccccccgacttactgcgacccacggctacgcccgctatccatgcccttctctcccaccaccaccacggcccctccatccgacccagccgtcaactgcccttcttcccgacccccctccctggccccttcccttcccccctcctagctccctccccctcgtccggactgctcgacctcgtactcccctaccttcccgccccccacc

SEQ ID NO: 1168 - DNA, 651 bp, Homo sapiens
tttcgactagtcagtgctcgctgctggcctgcatggcgttaaacaaactcggcccgagagcggcagttttttccattgttagtaccaacgaaggatcgaccgcataatgtccataacgcgcatgaagatggcgtctgcgcgtccaccaagctcaccgaatagacattctagtggcgaaccaatcatacccgtggtggcaaccacgactaatccggcgagaattgattgctgactgccgaccagtacgcggctaaacagatcgcgtcccacttcatcggtgccaaaccagtgcgccgcagaaggcggcaaaaggcgggcggttaaatcaatggcgttgggatcatgcgtcgccagccacggtgaaaaatcatcatcaatagcattaatacaatgatgactgcgctggtcacggtgatcggactgcctttcagcatccataccagttttgcaccgttaaatcgcgtttgtttttgtgggcgtacggcggacgtttcctcgcttagcatcattcaccacctccacgtccgatacgcggatcaatccacaaatagagcaaatccaccaccaggttgaccagcacataagcaaatgaaaccacgacggcaaagcccatcactgccgggaagtcgagcgcctgtattgatgttacta

SEQ ID NO: 1169 - DNA, 410 bp, Homo sapiens
tttcgttttcaagccgggtctggcttggacttcccccgtaaggaaatggccgtgtagctccaagggacccaggcgccgtcgcttcggcggagcctgggctgaccacccatgacagcggggtaaacccaaacaattctgcgcgacgtatggaggccatggcgtccggcagtaactggctctccggggtgaatgtcgtgctggtgatggcctactggagcctggtgtttgtactgctatttatttttgcgaagaggcaaatcatgcgctttgcaatgaaatctctaaggggacctcatggacctgtgggacacaatgcccccaaggacttgaaagaggagattgatattctactctccagggttcacaatatcaagtatgagcccgcatctacttgcagatgatgatgctag

SEQ ID NO: 1170 - DNA, 1303 bp, Homo sapiens
tttcgtgtggcctccgaggttctggcggccggcagtggcgaccggcgcagggaatcgcgcagggttgcggctgaggtcagaccagcgagagacagagacccgcagacatttagtccagagactgtagcaaaggagggggacgaggggccagagccggaatttcgggggaggacttgggagcgcggcgaccagagtcgcttgctggcacttgcgagggcgaatgcaggggcttggccgagatgaccttggaccagagctcccttccggcctgcagagatgagcttggggcttagccgagtaaggagtgagcggcttttcagcctcagtgctgcggcagaggcggatggaggatgaactggagccgtccttacggcctcggacgcagattcagggcaggatcctgctcctgaccatctgcgctgccggcattggtgggacttttcagtttggctataacctctctatcatcaatgccccgaccttgcacattcaggaattcaccaatgagacatggcaggcgcgtactggagagccactgcccgatcacctagtcctgcttatgtggtccctcatcgtgtctctgtatcccctgggaggcctctttggagcactgcttgcaggtcccttggccatcacgctgggaaggaagaagtccctcctgggtgaataacatctttgtggtgtcagcagcaatcctgtttggattcagccgcaaagcaggctcctttgagatgatcatgctgggaagacttgcttcgtggggagtcaatgcaggtgtgagcatgaacatccagcccattgttacctgggggggagagcgcccctaaggagctccgaggagctgtggccatgagctcagccatctttacggctctggggatcgtgatgggacaggtggtcggactcagcactacggcagctacggggctccggggacttggcaggggagctggaggagctggaggaggagcgcgctgcctgccagggctgccgtgcccggcgcccatgggagctgttccagcatcgggccctgaggagacaggtgacaagcctcgtggttctgggcagtgccatggagctctgcgggaatgactcggtgtacgcctacgcctcctccgtgttccggaaggcaggagtgccggaagcgaagatccagtacgcgatcatcgggactgggagctgcgagctgctcacggcggttgttagtgtgagtctggagggtgcccttcctccaccagccctgtggggagggacccccaggtcctttgcattaaaccagtttacactccaaaaaaaaaaaaaa

SEQ ID NO: 1171 - DNA, 412 bp, Homo sapiens
tcgtggcccggcaagcgcccaggaggacgagcgagcccggacggcgcctctcgaacgagtgcgggcgcgaggcaggatgacgacctcaagcgcgctctttccaagcctgctgccatgctcttggagcacctccaacaagtacttggcggaatttcgggcgggaaagatgtccctgaaggggaccaccgagactccggataagcggaaagggctggcgtacatcagcagacggacgactcgcttattcacttctgctggaaggacaggacgtccggtaacgtggaagacgacttgatcatcttccctgacgactgtgagttcaagcggttgccgcagtgccccaacggcagggtctacgtgctgaagttcaaagcagggtccaagcgacttttcttctggatgcaggaaccca

SEQ ID NO: 1172 - DNA, 355 bp, Homo sapiens
tcgacacagccagaggtgaggctggaatgggagatcaactgaggcatcacctgcggctgaggcaccccatgtaccacacaaggaaacacaaagccgcaatgggcacacaatgcacacatggaggcaaagtcaggccagaccctcacgacatgctgacaactgtggtccataagatcaagctgttcgttctgtgccacagcctgctgcagctgtgcgcaatcatgatctctgactacctaaagagctccatctacacagtggagaagcgcttaggactcttcaggcctacttcggggctgctggcctccttcaacgaggtggggaacacagccttgattgtgcttgagagctattg

SEQ ID NO: 1173 - DNA, 656 bp, Homo sapiens
ggcacgagtttatgggtgacttagaaaccattaaatgagttattgtttcagtgcaataagttacatttgcaatattgctgcctatggaccattattaatcttagaaaatgaaataggtggtctaattacctgtctaattcttttcagattctggctgaataaaaatataaactaaatgatataaaatggtgtttcaaacattatgttaaaatcgaataggacaaatattttttaaattttcatatataaagtgattgctgacataaaaatatgtaagcaatccttgttaagatggtactataagattattcattggtcttccttcctctgctgtaaactcagttagagataaaacctaaccgttgcgcttgatggatttagagagaaggtctccttctgttgcccaggcacaatgcactggcacaatcaccggttaatgtaacactgaactcctaagctcaagggattcttccaccccaagcctcctgggaagctaggactataaacttgtgtcaccacagatggctaattttttaaaagaatttttgtagaaacagggtcttgctacattggccaagctggtctggaattcctggacttaaacaattctccagcctaagactttccaaaggctgagaatacggggggaacccccg

SEQ ID NO: 1174 - DNA, 374 bp, Homo sapiens
ggcacgagggccgggggtcggggccgcagaagtgccagacggggccggaaagcagccgagcggagttcaaatttgagagcgtttggaaattggaagacttggtggcgaacgagggtcaggacctgcatcctgcctcagagttatcgacgtatccggaatgtgggatcagaggctggtgaagttggccctgttgcagcttctgcgggccttctatggtattaaggtgaagggtgtccgtgtgcaccgcgattgtgggacttttgagtcatcatccactctgatccgggtgtcttaattcggtgttccctgtaatgcgctggcccattttggtgttactcacttttgatacattttagattttcttggcatgctgg

SEQ ID NO: 1175 - DNA, 397 bp, Homo sapiens
agtgggagcatctgtatattggtcctgaatggcctgacgtgtggacgtaccatcatgcgagctgacacgagagctctagggccgacagggacaagatggacactagagggtctacctatacagacgcagacccagtgaacaaatccggtggcacggccaaaatgaacaagtggtccaaaggcaaagttcgggacaagctcaataacttagtcttgtttgacacagctacctatgataaactctgtaaggaagttcccaactataaacttataaccctagctgtggtctctgagagactgaagatcccaggctccctggccagggcagcccttcatgagctccttagtagaggacttatctaactggttatacagcacatagctcaagtaatatacac

SEQ ID NO: 1176 - DNA, 299 bp, Homo sapiens
attagacctcacacatgtactctctctctctatctctctcacagtgactattctaggaacaacttttggcatggttatacctttacttgacgtcgtttatggagaaagaggctatgctcaaaatggagacttctaggatgctcagctggatgactactcattctcgtgctatagccatgcgcaagtgaatggagcacctaactcactgaccagagcttatgacgacccctaagtcaaaatctccggactggaatgccaaaaagttggggccctcgtggaggtaaagtgcctgaatttag

SEQ ID NO: 1177 - DNA, 422 bp, Homo sapiens
gtgcaacttccttcggtcgtcccgaatccgggttcattcgacaccagccgcctccaccatgccgccgaaggtcgaccccaacgagatcaaagtcgtatacctgaggtgcaccggaggtgaagtccgtgccacttctgccctggcccccaagatcggtcccctgggtctgtcttctataaaagttggcgttgactttgtctaggcaacaggtgattgtaatgtcttgattatttctgtgattctgactattcggatcttactctcccatatttttgttgtgcctccttttttttgttttgatcatttgattgctttctgggatcttcaatctcttattttcctacatgtcatcttttcgttatttattacattattgcttttctgcttcttctctatcttttaaaatctccgtcttatcgtat

SEQ ID NO: 1178 - DNA, 426 bp, Homo sapiens
accacgcgtacgcccacgcgtgcggctcaaggcatttgggaagtgcacaatgacatgcaccccctctggaggggcgcacctttgaagtcacctggaccaaggaaaggccctgccctgtaggctggccacttgcataggtaaactcccctctttgacttgtggccaagggttgtgctgagctggctagaaacggtcttaacctcactccggacacgaagggcagcctcaggccctcctgcctgcaggatcatgcccaccaccgtggacgacgtcctggaacacggaggggaggttcactttttacagaaacaaatgttatacctcttggctctgatctaggataccttcgcgcccatctacgtgggcatcgtattcctgggcttcacccctgaccaccgctgccggagccccggagtggccgagctg

SEQ ID NO: 1179 - DNA, 1655 bp, Homo sapiens
ctggtgctggcgttcacgtggaagactgcttatctgtatccagctgtttgcagagctcagggaggccagggggcttcagactccactgtactctgcattccaggattctctgttctctggctgtggtggcctgacacactcttcaccactgaccccacccccgcttgcacactatgccacaggaagggcaggggcttccatcacaatcactcagtattagttcccagctctgatagaattactcaccttgagtttccaagtcttgctgaaggtgcttgcgtaagtggcacatggatgttccctctgttcaaaggcatatgcacaacactatttttcaaaatttgcttttatttacacgtttgagtcaattacatgcatgttttatttttgaggagtgattagcaaaatgcattaaaattttaaaatagcaattaaatatacaaaaatatagcttacaaaaaactgcgaatgtttaaaaatattctgctgcagaatttttagtgtacaaagacgtctatgaaacctgaggttcagcatttcataaacctttttttgagggagttacacaatacctagtgaggaaacccgagggccaaactacaagacgaaaaagtgccccgttcctggcaatgatgtcagaagaccaagaggcgatagttaccagcaacactctaggaagaccagctgtcaccagaagggagttcctaacacttgccacacctgctcccccgaccgggggcctgggagggaagggcagatggagaggaacggtgtgcagtgggcgtgagatgcagatccaccaggcttgggactggcaaagggagctgagaagagagttcccccaaagcacaaacaagtctgctgacactggtggggcccttacagtcacagaagtaaggactggatggtaagccaaaggtgctgatgcttggtcaaaaagtggagtacatctttgcatcttgtaacaatttgggctctacagctgaattggcaaagtaaggtttactacacaagcccctctttttcttctgatatccccactcaaatggaagcacactccccagcacatggggatcccttattaatctttactaaagaaccgtgaaccagcattttccagttatcaactggatatttaggcatgaatctggacatgtccatctgcttaagaaatctgcttaagaaatctgtaacagctacaggaaaagacacacccagggccagagattctacaaatgccagaagagtggatgtgatagagaattttttctcaagttttgggttagggcaccagttgcaattttaatccaggggaggatctgggctgctgctgtagggggcaagtacaccagggaggtgggtgtggacagaggcactgggcagctgctgggaagcgaggcacaagtctgtgcccctactcccagggctgcctggaggaagcagctctaactttcatcagcggggacaaaaatgaacttaaactaaaaaaattattggccgggcgcaagtgctcacgcctgtaatcccagcactttgggaggtcaaagcaggtgcatcacgaggtcaggagatcgagaccatcctggctaacacggtgaaactccgtctgtactaaaaatacaaaaaattagccgagcgtggtggcgggcacctgt

SEQ ID NO: 1180 - DNA, 375 bp, Homo sapiens
tacccacctcagcctcccatgccctgggattacaagcatgagccactgcgcctggcctaaaattttcatctaaaacccatcccggatacaagaatccagcctcctccatccctctggcagaagaagagatcacttaccttctcaggtggccacagctccctcttgcgctgtatgacatcgtcctcaaaccactcggcctgattggaaacccagaacatagccacagggaaagtgaggtagattatcatccgaaatatctccagcttcacccccatctcgtttctcccggtcaacaaagccagttccgcccaaagccgaccctccagcaagacagaagctcactggtgttttgcacgctccattgctgaagctgat

SEQ ID NO: 1181 - DNA, 348 bp, Homo sapiens
ccctattgcagccagcctgcgaatgtacaacctgcaaccctacacggaggagaacctcatctgcacagcctttgccaccatggtggagaccgtgccgatcgcccgaaccatcctagaccgtctcactgggatcccacacggctactgctttgtagaatgagcagattgggccacagctgataagtgtgtgcatatctataatgggaaaccccttccaggagccacacctttacttagcttacagctgcaccagctggcacacctgggctcatagaaccatggagctggcagtgcccttagcggtcatccgtgcaaccccctcattttatacaggagaaaaagctgagg

SEQ ID NO: 1182 - DNA, 403 bp, Homo sapiens
cagtagacaaatgcagcagcaagtcaattgtattatcagaatattgtcctcattgcatgtgtagtttgagcacagatcccaaacctttcgggcaactttccatgatactaaaataaatgggcgcgggggatgagaaaatctccgcaatggggaaggcccgggtcgaccatagggagctgtacttgggcctgctctaccccacggaggactacaagttaactttccgggccaggcattgattcatgaagagggtgaggggtcccagacaaaccgactcgtagtttaggcggttcttgttagggggtgtgaactgggaaaagctcggcttgctgctgttcgctttctctctaaacaccaaaagtcggccttcctaaaaatttttcctcagtcccagcacggcccg

SEQ ID NO: 1183 - DNA, 610 bp, Homo sapiens
gagcctcgctctgttgcccagcctggagtgcagtggtgccatcttggctcactgcaacttctgcctcccgggttcaagcgattcttccacctcatcctttcgaggagctaggattacaggtgtgcaccactatgcccggctaatttttgtatttttggaagaaacgtggttttgctgtattggccaggctggtctcgaactcccgacctcaagtgatccgcccaccttggcctcccaaagtgctggcattgcaggctgagccacggtgcccagcctgaacaccctttcctggtaaaacactccaaaaccaggaaaagaaggaatgtacagcaacaaaataaaggccagtcatgcaaggcccatggctgaaagtctttcagtcattttaggtgaaagactgaaatctttgcctccaagatcaggaataagagaaggatgcccgatctcactacttctattcaacacaggatttgaagtcaggctggtcacagtggctcacacctgtaatcccagcacttttggaggtcgaggcaggtggattacatgaggctatgagtttgagaccaccctggccaacatggcaaaaccccatctctacttaaaaaaaaaa

SEQ ID NO: 1184 - DNA, 655 bp, Homo sapiens
taaactgtgagctatggtacatttattcctcatcatgccccattcctctcttctaaggatttctttagacaatctccttgatgtctttgctccaaaatcaagagagaaataataataactgggctgtcacaaaagaacatcaggactcccaagctgaatttccaacactacaatatcaaagataatcacaagacaactgcagactatatcattaagtcaagtgggacatccctgagaaagtcagcttctgatggtgtggttccagggatgctttccatattcgtccagtgaaaacaacctgtgcttggaaagagggtttcctttggggcaatcgaaatgttctttgttgacattcttggaattattccttctaaccctagagtttcctaactttcaggatttaagagcctcatgccaaagataccccttcaatatatctatgtaagagttaggactacctggagtttctgtctaccattagatgggagaaaacttatgttatcataatacagtaaataacttacttgaaaatataatatccttcctgaatattcaagaatgactttaccgccaggcatggtgattcacacctgtaatcctagcactttgggaggccgagccgggtggattgtctaagctcaagagtttgaaaccc

SEQ ID NO: 1185 - DNA, 566 bp, Homo sapiens
agaccgtgtggtggaattcctgataccgagctctggctgtcaatggtaggagagtgggagggggagaggaggcttgggaaagggaggatggacaacccttttcaacatgagtcctaggacagtgacgagggacctaggctgctgctgctcctgccccgaaaagaaaaagctccaatcataacgaccaggccatggctgggattgcctctgttgaaggtgccccatgtggcagggccaggcttctaggatggaccctgctaaggccaaggatagagaagccagcacctgctgcagcctggcctggtggtgggggtgggagtgctgggtcagggctctcaaactaagctcaggtcctgctggtcccctggcttgctgggtggcaaagaagaagtctttgagcctctctgggcctgtttacccctcagaaaaaggagctggattatatgttttttgagacagggtctcactctgtcacccaggctggagtgcagtggtgcaattttggctcactgcagcttcaaactcctgcttcagcctcctgagtagctgggactacagatgtgcgc

SEQ ID NO: 1186 - DNA, 452 bp, Homo sapiens
  misc_feature (1)...(452): n = a,t,c or g
caatgaatcactgcatgngcgnggcanngncagacacagcagagtccttactgtctgagcccattcatatgaagttcaaaaacaggccaaacgcatgtatagtggccaaagtcaaaacagggtgggtagaatagcagcttctttctggaaattaccatgaaagaactttctgggtgacggaaatatcctatatcttcatctgggtagtggttatagatacatttataggtaaaatactcttcaggctgtacatttttgtttttattgtgtatgacatatacctcagttacacacaaaaacccattatgtacctaccagaatggttaataaaatttaacagattgacaattctaagccttggcaaagaggtggataaacaggaattctcacacactgttggtaggaatctaaactagtgcaaccactttggaaaatagtctggcattaccaag

SEQ ID NO: 1187 - DNA, 473 bp, Homo sapiens
ggaattcgccagagctaggaacagctccaagatggtctcagccaacagttctgagccctgtctgggtcccctccccttcccagggactcaggaggaagctttggcccctcttcccagagagaaagagcccacagagccggaggcactgtcccagggctcctggggagcttctgggtggggagatgctgggttgggtgtcgatcactggtcactgtcgcccattctctgctttcggggagcaggggaatgtatacagtttgaaagacagggctcagctcccctgctggactgaggaagtcgaggcccagggagggagaactggggtctgtctcctccatctgtcaccctccttggtaaaatttgtgagggtcctggagccacttctcacccacgccacacctacctcggctgggccttggccactgcaacagggtctccattggcatgtgagcctgggccctgccagcaagggc

SEQ ID NO: 1188 - DNA, 397 bp, Homo sapiens
atctgcttagcttctaaatatatcatctttgatttaatcccagccctacaactttggaagagtgaagtattagttcagggatccagtgagagacactgaagtgctaaaagccagggctcgtgaactatggataaaaagaacagacatgggaacagcctggacatggcatcagagattcatatgacaggcccaatgtgccttattgagaacactactgggcgactgatggcgaatccagaagctctgaagatcctttctgccattacacagcctatggtggaggaggcaattgcgggcctctaccgcgcatgctgattctacctgacgaacaatctggctggaatgaaaaagggcttgtgtctgggctccacggagcaggctcacactataggaattg

SEQ ID NO: 1189 - DNA, 769 bp, Homo sapiens
ccggtccggaattcccgggaaagaaactccaacaccagcagccttaaagtatatttttagccagaccagttcagacatagctagaattctgcttctctaaaaataaaagattctgcctgtcaagaagataccagtgaaaattctcaccccatgccaacagggctggattgtgggagagacactaggtagtgtacgtcagagcaaatagggaacagttgaagtaaggagactggtgttgggggtcagccaagactttgtatctccatctagtcaacagatgtttattaagaccattccttgtactagaagctgggaatgcttaaaaagatatagcccttgttgtcactgtcttatcctgttgtctgtgtcgtcctgtgttgtcatagccccattatctgcataggagacagtctttagttctaaaatgggatattagaatggtttaaatctgacagttgcattccctgcaagctgcaattttaattagaatcctggtttagttgaaggaattcaagatttgattgttaaatcaaatgaatctaatgaaagcactttctgaactaatacacagtaatatggttgaggccacgtgcaatcccagcactttgggaggccgaggcgggcagatcacctgaggtcaggagatcgagaccatcctggctaacacgatgaaaccccatctctactaaaaatacaaaaaattagctgggcatggtggcgggcgcctgtggtcccagctacttgggaggctgaggcagaagaatggcgt

SEQ ID NO: 1190 - DNA, 1389 bp, Homo sapiens
tttcgtcgggcgcggggccgcgatggatttccagcagctggcggacgttgcggagaaatggtgctccaacacgcccttcgagctcatcgccaccgaggagaccgaacgcaggatggatttctacgccgaccccggcgtctccttctatgtgctgtgtccggacaacggctgcggcgacaattttcacgtgtggagtgagagcgaggactgcctgcctttcttgcagctagcacaggattacatctcctcctgcggcaagaagacgctccacgaagtcctggaaaaagtcttcaagtctttcagacctttactggggcttccggatgcagatgacgatgcgtttgaagagtacagtgctgacgtggaagaagaggagccagaggcggaccacccccagatgggggtcagccagcagtaaatctgggggctcccctgagaaggagagtgagccccacagtaacctaggtggggtcactgcccctcctgggttagcattttgcattagcacttcgaaataggacatctggctcccagcatccaaattaaaatgaaatacctttttaacgaccacaaaatatctgtgatgagctttgctcagaagtgacctgaatttcactcccgctttcagtggggtttctatggagttgtcttggtagcctttgccattttgaatttagagtccattttgtggctgactattctcttaagtttatgttggagaattaacattcgctgactcgaatgtagagaactctgaatgtattaaggataggttttgaagtcctcacaggtgaccttactgagggaaagcatggcagagaagaaatgcagtctgcactttttatgtactttttaagtgtccgtaagtgaaaggttttgcttataaagcatgaattttaatatctagtcattaaactgcacaagtgcaaatacaagggcaggaaaggataatcacttagctttggactaagagggtaagagaggcccagaagcctttaagtgttttgccattactgagttacctgggtatgtagcgactggttcgtggttaggtgtaaatgttacttgcttgttcgactgtttcaaaacatgctaattccaaagccacttttgaagtctatagtggaaaatatagatggggtgaaagatataatgtattgatttttaaagctgtttataagccgtcccacgtataaaatgaaacattttaccttctctctttctaatgagatggccgcttgttaaatcatgaaaacatccagaattcaagtgccgcttaaactttgaagccatagataaatttgttagaaaagtaagccaggattaaaagtttttaaaaatatggtagaatccttctttactttttaagtcttttatttaaaaaaaaaa

SEQ ID NO: 1191 - DNA, 411 bp, Homo sapiens
ctggccgacgctttatgtctttccgccgccgccaccggagcggtgcgtcccggggctcgagcgcagccgagtacccgccgaaggctgtccccatcagtgcgtgtctgctgccgggcagcggcagcatccaacctgctttattcctcctgcctgcagcgccacagcgagcgagcgagcgaggagggggagagagggagtctgtctgcaaagtgctgctccctggtgctcagaggcggctgctccagctccaactctcattcatttcgccggataacatgagagatcatggccgccttcgtgcttctcagctatgaacagagaccgctgaagcgcccccggctcgggccgcccgacgtctacccaccggaccccaagcagaaggaggaagaacttactgctgtgaatgtaaag

SEQ ID NO: 1192 - DNA, 406 bp, Homo sapiens
ttttttttttttgtgttcaggtttctatttattttaaaagtgacttacgtatttttctcacaaggggggatgattgtagaggagtttagagcctgcatcgtggttccaagttagcatcaccgttcctggtccttccatctttctgcttagtcatatttaacttgtgtttatttcttcatgatcagaatatgtgtctttctcaactatcatatgtatgttcatcatgacatatgtgctcatgaactcggccaggaactctcgcgccatcttcctctcatcttcctcgcatcatatttcctggatctttgctatcacggaccaggagaccattttggagccacgggtggacctgatacagtggcccgagctcatggacagaaaggagactcaagtctgccctcgtgcc

SEQ ID NO: 1193 - DNA, 432 bp, Homo sapiens
catttctgttgggtataaacctaggagtaaaattattttgtcacaggggtatacatatgttcagctttagttgacattgacaaatgttttgccaaagaattgcaccaatttacactcccaccacccatgtttgagagtttccattgctccagatctttgccaacgttttcattgtgatttagctatctaagcaaagtgttttagatgcctattagaccttcaagctgagatatcaagactgttggatatgcaagtctggggtatgaggaagaggtcttaaaaaaaagaaatcagaaagatgaagatccatgtgtgaggtaggcagcatgtgaggtagtaagataatcagcagagtgtggtaccccagaagctgaatgaaaaaaagtgattcaggtaaaacacttctgagaggtttaataagatgaagagaga

SEQ ID NO: 1194 - DNA, 433 bp, Homo sapiens
cattttgccagcgcccgccattgaagtgttgttgccagtggaccaggaacaccttagccactccagcgcagcaagtgcttaactttgaggtgcctaagagcaaagccatgggcctggtctcagtcccccagggcatgcagttcagcgctgctgaaatcatccagaagcagagccagttcactgaacgtgcagtgtatactgcagtcaaaccctcaagggcatcaaagaatataaaaacaaaaagcctcatccaaaggacagcaatttcgaagatgaaaggaacatcctttcatgttaaaaaccctcaacaaactaagaattgaaggaacatagctcaaaataagaagagccatctatgacaaccccacagccaacatcatagtggaggggcaaaagctagaagcattccccttgagaactggaacgagacaag

SEQ ID NO: 1195 - DNA, 1229 bp, Homo sapiens
ttttttttttttatgaaaaatccaaagtttattgcaaattgtattttgcttcccttcgttcttcatttttacaggatttattgatatccatgattttttcacagatgtacttgttgactttggagagtctctgtgcaatttcagtttcatccacagtttcttgtgctattctgtcatacaaacactctctgacgatgcttagtttgtgaggcgagaggggtggtttagggactgcatctttctttttttttgtggcgacgcctgtgacgcttctgtttttcagaacatctgttccccaaatcataactgccaagttcttcgtgtacttggaatctccttgggttacttgtagctggtgccatttctcctcatcaacccaaatcccgcttcccagatggaccttgccattgtctaggatatacttgtccatgacaggcgcaggagcggggtaataggacgacgtatttgcttcctcactgaaagtgctccgtaactccggctcgggctcgagacattctgactttactttttccagatcaatggcgggaccgctgccaagcctcaggagcagcacgtcctggagcctccggttaaggtcacggagctccttcatttcagacacaagtgccccgtactccttgagcttcttggcctgttgtaccagctgcctccgagtccgctccagctcctgctggaggtggcgcatctcttcctgttgctgctggtagttgcgcagcagctcctcatacagagcccggggcaccacagcatcttctagactgtccatgtcctctgtgcctggcgaggcctccacgaagacctcttccggacacgtgctatggcccaggctcaggccgttctgcttctctagccgagccaccactgcctcgatgctcttgtgcgccacttcgctcggcttccgcccctcaggtctcttgatgtgtctaagctgtaaatcttcttccccataatctttaacctctccatcttcttctacatgattaagagaaagcttggggatttttattttcttctgcatcacactgttttcaaggtcagatttgtcttctgccagcgccaggatctgggccttgtggagcaacagcgcgccccagtcgcggggggcgcgcggggggctctcgggcccggcgcccaattcctccgggccccggtacacggcgtacaccttctggttgtcaaaatccagccgcgagcgggggctgaagtcg

SEQ ID NO: 1196 - DNA, 468 bp, Homo sapiens
  misc_feature (1)...(468): n = a,t,c or g
cccctaggtngtctgtgcagangcncnacngnnncggaanncccggnacgacgaggtcgtcgcgggggcggcgacggaggcgagagccgttttttccgtangaagccaaccttccctgcttctccggggccctcgccccctcctccccacaaaatcagggatggaggcgcctccccggcaccctcttagcagccctccccaggaaaagagtcccccctgagctcctaacgctccccaacagctacccctgccccccacgccatggggcccggtgccccttttgcccggggggggcggccactgccgcttctgggtgcgatggcggaacgggtggctccggggtgggacttgcacaccccctatttgccgcggacaaactctcggaggacaccacacctgtaatgagaaccgcacgcagggtacatcggggcactgtttccaatgagcgggggctggccagggggccag

SEQ ID NO: 1197 - DNA, 449 bp, Homo sapiens
  misc_feature (1)...(449): n = a,t,c or g
agcctaacggactgaccctccnnnnnnnnaanaaccggccagcttgctttcgggctccttaangctttttctttcgttagttactgcatactcgcagaaactattttgacggcgtggtgaaaggctcaatatagggggggagtactgcgcacagagcttcatgtttttaaatttttttcatatacttgttgatgagttatttagtattcattgggggagaaaaagccgtaccggaccctttctctttaactcatgtatgtctatatggtgggaaaattgcctggctaaattgcctggctttcagggttgttctttccttctaaccaggcaaatctttgttttttatgctataagctgacagcagattccaggtacagagggcacgctatgaggcacctaactggaaatacaagtatggctattagattcctgtggacatgctgtgtaan

SEQ ID NO: 1198 - DNA, 381 bp, Homo sapiens
agaatagctactctttctcttcttttgttccctctctttcagtctatatgtgtctctaaaggggaagtgagtctcttataggtggcatatatttggttcttgttttactatccattcagccactctgtgtcttttgtttcactgatttggtccactgatatttaaagtaactattgataggcattttgtagttttcttgttcttttatttctctcttgctgtgcatgatttgattactttgattattttctgtagtggtatactttgattctttgctgtgcctttgtattaattcttttttaaacatgtggtaaaattctcatttgtgtatctgttacatgttttgtctttgtgtttatcatgaggcttacataaaacatt

SEQ ID NO: 1199 - DNA, 2062 bp, Homo sapiens
  misc_feature (1)...(2062): n = a,t,c or g
tgtttgttactaccgttcattaaactgccaaccacaggaaacagcctggcaaagattcaaactgtaggcaaaaaccggcagagactgaatagagtcctcatgggcccaaggagcatccagaaaaggcacttcaaagaggtaggaaggcagagcatcaggagggaacagggtgcccaggcatctgtggagaacactgccgaagtaaaaaaggctcggaagtccagccccaagggagctgaaacagcctcacacacagcaggggcctgagaagttagcgggaaacgccgtctacaccaagccttcgttcacccaagagcataaggcagcagtctctgtgctgaaacccttctccaagggcgcgccttctacctccagccctgcaaaagccctaccacaggtgagagacagatggaaagacttaacccacgctatttccattttagaaagtgcaaaggctagagttacaaatacgaagacgtctaaaccaatcgtacatgccagaaaaaaataccgctttcacaaaactcgctcccacgtgacccacagaacaaccaaagtcaaaaagagtccaaaggtcagaaagaaaagttatctgagtagactgatgctcgcaaacaggcttccattctctgcagcgaagagcctcataaattccccttcacaaggggctttttcatccttaggagacctgagtcctcaagaaaacccttttctggaagtatctgctccttcagaacattttatagaaaagaataatacaaaacacacaactgcaagaaatgcctttgaagaaaatgattttatggaaaacactaacatgccagaaggaaccatctctgaaaacacaaactacaatcatcctcatgaggcagattccgctgggactgcattcaacttagggccaactgttaaacaaactgagacaaaatgggaatacaacaacgtgggcactgacctgtcccccgagcccaaaagcttcaattacccattgctctcgtccccaggtgatcagtttgaaattcagctaacccagcagctgcagtccgttatccccaacaacaatgtgagaaggctcattgctcatgttatccggaccttgaagatggactgctctggggcccatgtgcaagtgacctgtgccaagctcatctccaggacaggccacctgatgaagcttctcagtgggcagcaggaagtaaaggcatccaaggcagaatgggatacggaccaatggaagattgagaactacattaatgagagcacagaagcccagagtgaacagaaagagaagtcgcttgagctcacaaaagaagttccaggatatggctatactgacaaactcatcttggcattaattgtgactgaaatactaacgattttgattatacttttctgcctcattgtgatgtgttgtcaccgaaggtcattacaagaagatgaagaaggattctcaaggggcattttcaggtttctgccacggaggagatgctcttcgcgaagggagagtcaggatggacttttttcattcagacggccgctctggcttaaagatatgtacaaacctctcagtgccacaagaataaataatcatgcatggaagctgcacaagaagtcatctaatgaggacaagatcctcaacagggaccctggggacagcgaagccccaacggaggaggaggagagtgaagccctgccataggaggagaacacagcccacctcaggcctcctgcaaaaatacatagaataaacaacaacagttactaaatgaaaaaaaaaaaaaagggggggccgttttaaagaatccaagttaacgaacgcgggctggcagaggaatagcttttttatagggcccccaaaatcaattccctgggcggcggtttaacaacggggggacgggaaaaacccgggggtaacccacttaaatcgccctgtgggaaccccnnngnnnnnnnnnnnnnngntttttntngggnttggggtttgggtgttttgttgtttggggtgggtttttntgtgggttgtgttgtgtgtntggggttggggtgttgtggtgtttntttt

SEQ ID NO: 1200 - DNA, 480 bp, Homo sapiens
gatttgccttactataactcttagaaaaaaggcttacaacttttgaaggtttagcatgatgtcagatgtccatttgtcatatatggcctttattggcttgaggtatgtatgttctatatgtaatttgttttgagattttgtcataaagtaatgttgaattttctaaaattctttttctgcattcacttaaaagttataattggttctgagatccttcatctttctcagaatctaggaggatgcatctgtacctataggaggacacaaaggcatcatatgttacattctcgtgacatataatgtctactgcttataatgtctactgtgagtttctgactccccaaatgaaattgaggcccagaaactttcaactgctttgttcgttgaataatgccaagtgtctggaaatgtgactattcagattaaatgcttaatgtgtgtgtgttgactaaataaatctcaaccagaaccttctcagat

SEQ ID NO: 1201 - DNA, 590 bp, Homo sapiens
gcggccgcatcgccttgcccagccggcagtcggtcaacgcgctctccatgtactcgtgcaccagctctgcctccacctcatcgcagtggaagaagtggacatccggcttgctctgctccgagtcctggcacacgagcagcagcacagacgggtagcgcagctggttgaggaccgtctggctgcgctgcaccgtgggcagcgggaagtcttccagctcctcctgtgactcgatgtccagcagccgcagcgactggtcgttcacctgcagcagcatctcctgggtccagatcttctccttggagctcagctgcaccagcttccggatggcgtcgtccacagacgtgatggcttcgctcttgtccatgatgaatgtggccaggtgctggacgtggtactgcgaggtctcgtgcatgatgacgttggagttggaatacttcttcctctgctctgaaccgggagacaccagtcactcccccgacgggcaggacccacagcctcccgtccagttgggactggacccacaagggaaggtggagtcaagcggagggaggctgctccgtggacctcttgggaattccaccacactggag

SEQ ID NO: 1202 - DNA, 428 bp, Homo sapiens
gaaaaggtatgcagggagcagaagagtggaggggtggctcggggtttggagacttgcccgtcaattcccacaacagagacttgggaggactgggtgggtcctgaaaaattaggtaaagcagagtaggttgcccggtattaaataagaaaaaatactggcctacctgccaccatcagggttacccttgtcttagatgaagcaatggtagttgccggggcgtccattccagggccccatcagtcttcagtggcaaggccagtgagatccgagtaggaggttttggccagctcaggaagggatgggagtggtccttgtgggggccgctcacagtccaacttccagtggggtcctctgcagagggggcatggcctgatgggcttacctgggtttgggcattgtctagaccagtggccctcattgccatactt

SEQ ID NO: 1203 - DNA, 738 bp, Homo sapiens
  misc_feature (1)...(738): n = a,t,c or g
ggcactccttgatgagccgcacaatttcctggacagaacttccatatccttgtgcaagtgcatattcttggtgagctgctccctccnagcatgttatgcagcttcttgttcatctcccgaaggttctcgttcccctggcttcactaggtctctcaggacgctgcccagcccgctgcggtgtgtgtggcctgctgccacagacacatctgcaagggcccaggctgaaaaccaccccctcggcagagccagaggagagccaggcagagccagaggagaaaagagggagacgaataccaggggagaaggcagcaggaaaagccatgtcatgtaggacagaggctttgacatacaaaacctagctctgtcactcactagctctatggccccgagaaatgaggataactaacttgtggaactggaaagatgcacatgactgtatgtgaagcacagagcacacagaaagtcctcagcacatgttggtcagtatgattctgattaaaaaaaaaaaatctgtgaaggagaaagtttgaaagaaagcaaaagcaatgaagatacagagaaggaaaacaatatagacagcgagacaagatgaaggagtggggtgaaaaagagaaacggagaagagagaagggagagagagaggagaggaagatgaggcacagggagaggaaaggagaaagtggacagagagacacaatggagaattggagagtggagagattgacagagaaagagaga

SEQ ID NO: 1204 - DNA, 415 bp, Homo sapiens
cccgggtcgacccacgcgtccggttttaggaaacactgcaactctaaagaatttgacttattaactggactttctcctctaagaggacaaacggctccgcctagtggatggggacagccgctgtgccgggagagtatagatctatcacgacggcttctggggcaccatctgtgatgacggctgggacctgagcgatgcccacgtggtgtgtcaaaagctgggctgtggagtggccttcaatgccacggtctctgctcactttggggaggggtcagggcccatctggctggatgacctgaactgcacaggaacggagtcccacttgtggcagtgcccttcccgcggctgggggcagcacgactgcaggcacaaggaggacgcaggggtcatctgctcagaattcacagccttgagg

SEQ ID NO: 1205 - DNA, 424 bp, Homo sapiens
tttcgtggtagggcgactggggctcacctcttcaccgttttaggacccggggtagggttttgagcccgtgggagctgccccactcggcctcgtactgccaacggtcggatgggggagacgaaagacgcaccgcaaatgttggtgaccttcaaggatgtggctgtgacctttttccgggaggagtggagacagcttgtgctggtccataggaccctgtaccgataggggatgctggaaacctgcgggcttttggatactctaaggcataacgttccccaaccagatgtggtccacctcctatatcatgggacccagctgttgatagtgaagagagaggtgtcacattctccctgcgccggtgacatgagagaactctttaccagagaggccacacttaccccgcacccttataataacggggcgt

SEQ ID NO: 1206 - DNA, 476 bp, Homo sapiens
ccaagatagatcaactctccctaaaggctgacagtgaactcttggggccgttttattctctgaggttagcaaggagtcatctactagccattcaggaggccagctgggaagacaaaataggcaccccaaactcagcaacttcataacaccttcctctccccgcctgaagccttaaactgcatcaagtcaaagaaacctggggcaaatccttaacatgtttttgactgcagtaaatccacagccactctctactccgagctggcagattgagaccaagtattcaacgaaagtgctcactggaaattggatggaagagaggagaaaggggctaccttacaaacacctgatcacccaccaccaggagcccccacatcgctacctgatcagcacctatgacgaccattacaaccggcatggttacaacccggggctgcctccactccgcacttggaatggacagaagttgctgtggctgc

SEQ ID NO: 1207 - DNA, 412 bp, Homo sapiens
actgaggagctcgcctgctgccctcttgcgcgcgctatgcattaccacggtcacaggcaccgccttggcactacggtccagagtggctacaacaaaccctgatgggtgccgcaatgtcctgagacccaagtactacagactttgtgataaagctgaatcttggggcatcgccctagaaacggtgcccacaggtgtggcagtgacctcatgggccatcatgctaactgttctgacactggtctgcaaagggcaggactacaacaggcgacaaaagctgcctactcatattctctgcctcctgtgagagaagggcatctttggcctcaccttcgccttcatcatcggactggacgggagcacagggcccacacgcttcttcctctttgggatcctcttttccatctgcttctcg

SEQ ID NO: 1208 - DNA, 1173 bp, Homo sapiens
cccacgcgtccgcccacgcgtccgcaaacttctgagctcaagcaatccacctgcctctgcctcccaaagggctagggttacaggcatgagctaccatgcccggccaataatttttaatttatgtatcggttctttctttctttctttctttttttaatttaagaaagctgctgtaagtagattggctctggaagctctgaatttaggttgcctatgttcctaacacaggtccaattctcactagctaagcttaggcttagctattatttaaagtctccaaacctcagtttccttaactgtaaagtgggaataataataaacctcacctcaaggtcattgtgaggtaaaatgaaataatccatgcgaagggcttagctcagtcaggcttcaagataaatgtgaactgtaattactctatctacctgaattgaatgagttccaacatgaattctggagtcaccacagaagctgctacaacaccaatattaataaattagttttcttttacaatcggccaaaatgtattttcttagattaaaattctttaagttcccaatgacgatgatgaggaggataatacatctagcactttgagcagcacacagttctcgtaactagaaggtaggtattacagttaacttcatttcagatgaagagactgaggggtaggcacattaagggatttgcccaaggatgtacaggtggcagctataggaggcagggtctgaaccaccttagtctgactccagtgccggtgttgttgattattatgctattccatctaacatggtgtgatttgtaatttcatggactcaggtaaatccagggttaaattaacttcggaaaatcacaagcacaattcctaacagaaagaatttgttacttgggtgggctggagtaagatgctcattcaacgtgttctcagagttagaaaaaggcccccgcttggtcaaaaactggactgataggggcaacagtcatgcttaaataaggacagttatttttccctgaaagatacattgaaaagccagtatcctcaattttctttcttattttggcagtacagagactgcattatttgttgctattcttaaacattaagtgtacatagcccaaagagtataatttcccaatctgcagagggacagtagttgcatatataacccggttatt

SEQ ID NO: 1209 - DNA, 558 bp, Homo sapiens
aatcctatccaagtatgcagtacgctcttgggtcgtctcatgagacccaggggcatgttggaaagaactgagagaaagagcaacaaagcggcgagtggtgtgagagggcagcacgcgctgtggggcccttccagagaaatgtactgaaaaagtctacgcaatgtctgggatttgctaaacaatacctggaaagcagacaggtttttttgccattcctccaggacatccaccataaggaaaggagaccctggaccaacattctctaagatgtcgatatggaccagtggccggacctcttcatcttatagacatgatgaaaagagaaatatttaccagagaatcagggaccatgacctcctggacaaaaggaaaacagtcacagcactgaaggcaggagaggaccgagctattctactgggactggctatgatggtgtgctccatcatgatgtaatttctgctgggaatcacactcctgcgctcatacatgcagagcgtgtggacccgagagtctcaatgcaccttgctgaatgcgtccatcacggaaacatttaactgc

SEQ ID NO: 1210 - DNA, 383 bp, Homo sapiens
tcttggcagacagttcacctgagtctttccctacgtgtgagttctttggagaccactatcatcaggagtctgctgtttcctgcctctgacaagtgttcagttccgccagaagccagttaaaatcatcttgatgggcaatccagttggcttcattattgattgtagcttgaagtcccaggtcgttatttttaacttgaactttaatatcatctgggcctccttgctcctgaacccctaaaccccttcctttagaccattccatcttctctagtatcctctggccaaatttagaatcagcattactccaggcagtgttttgagtattcacagcccacttctgcttctgctgctgctcagccagcatcaacatgtcatggagactg

SEQ ID NO: 1211 - DNA, 610 bp, Homo sapiens
ctcagagcctacaggcccagaacaatccatgccagctgatcaacctagtaactaccacagtgactacaagagctagcatttattgagtgcttcctgtgtaccaggcatgtgctggatacgtttacctgcactatctcattcattctcagtgcagagttctgaagttcaccctcttctcaagcaatttctgcctcagagcctcctgctaaacggacacacttaaacgctgaatttgatggaaggcaggttcaccttgcacttggcttttaaagggctccttaccactgcaactcaattccatgactggatggataacagaagcacccgggaggagggcagcttggcaggagcccacaggaagattcaaggtttcataacaaagcatcttctggtgtgtcaagagtaagactaggccgggcgtggtggctcacgcctgtaatcccaacactttgggaggccaaggcgggtggatcacctgaggtcagcagttcaagaccagcctggccaacatggtgaaaccccctctctactaaaaatacaaaaaattaactgagtgtggggcaggcgcctataatccagctactcagaggctgaggcaggagaatccttg

SEQ ID NO: 1212 - DNA, 402 bp, Homo sapiens
atgattctacaggtcagcagagctgacctcaaaaacacaagctttggggtcatcagataacattttggtttctcagaagcatcaggtgcagttactagtgttgagtatggctggtgctttcacaccatacccacctttcttaagaaaaggaacaactgcttattcgtgccttccttttccacctcccttttataattctcttgttcttgtcatggccaggcagagactaaggttttgtgcttgaaatagctgcgtgatcttttctatcttttggtagtcaccatcaacaggaaattgctagcctaagtaagttgcagcaaatggtcaaagagtattttttagtggggtaaaactcgtttctcgacaaatattcagaatttggataatttgtagtggttgaat

SEQ ID NO: 1213 - DNA, 356 bp, Homo sapiens
cgcggaactgtcgcttgcttcaacagcgtgtggacggaacacatccggtgactctcttccagactacgaccgtgctccgatttcctctccgcttgcaacctccgggaccatcttgtcggccatatcctgcttgtgggacctgccaacgccggttttgagggtagggctttcttgccaaccaagcatgagctcccagataccccggatgtattccaccgacgtggaggctgccgtcaacagcctggaggatttgtacctgcaggcctactacgcctacctctgtgtgggcttatatttccaccgggatgatatggctttggaaggcgtgagccgctttttatgagaacttgccgagc

SEQ ID NO: 1214 - DNA, 912 bp, Homo sapiens
cattccccgagctgccaggagtgttagcagctgacagatcctggctgggtatttctctccaacaaagggagctgcctccttcacatctaatgactgtaatgacctggcccccttgctttgattttgggcaacgctgaagggctataccagcttaaatccccctgggatcagttgaatattctgttgcagatgttcagcttcctccactgccaaatcctgcttccttccttacacgtgctcttcctgagagcactccccgctaaatctcccacacatcatctcagcttcagaatcttttccctagggatcctgacctgagacactcctcaaggcactgggaagttactgcagggttttaagatggggagtaacctgctgagagttgcatcttatgaagaagatgagtggcagcagcaaagggtcaactgaagtggggggcagggaggatactactgtcatcatcgagggagaaaaggatgtggcttggactagacagatagggtggagaccaagagaattaaggagtatcgcagtgcgtcatcatgagagtcatttaaattcttagcttcagtttttccaattgtaacatcgaaatgatgatgcctgtatctgttaggatactttcttatctattcattttaacaatatattgagcacaattaaagagatattcagagtcaggtctatctgaagaccatgcgatttccattattctttgctacctccaaagctgtcttagccctggcttactttctctgggatgctgggtccatagtctttatcaaggtgggttagagccaagctatgagtcccttataatcaggagaattgcttaaacccacgaggcggtggttgcagtgagccaagatcacactactgcactccagcctgggcaacagagaaagactctat

SEQ ID NO: 1215 - DNA, 429 bp, Homo sapiens
aatttgtctattttggcttttgttgcctgtgccttttatgtcttatccaagaaaccattgccaaatccaatgtcatgaagcttttctccaaagttttcttctgtagatgtcatctcgatctaacccctaacagcagttttcaattgtccactagttatatctcaataatatctagcttttcccacccccattctgcccctaccataacatgaatgttgaaaacctggcaattttgctgtcagctcagagtatagatagggtgctctctgatgaagggctaagacaagctggactaaggtcagaaatctggatggccttgatcttattaaccctgatcatgccgaaagcgtcctgggaatagcaaaaaaggccaaacctgttggaaacaagtgggtccttgctcaaaaaacttgggttacaccccactcc

SEQ ID NO: 1216 - DNA, 799 bp, Homo sapiens
  misc_feature (1)...(799): n = a,t,c or g
gggaggcggggaggaagaagacagtgtcactaccaaataacctacttggctgagccaccacgcccggccaagcctatgtcgcttttaagatgaatccaaaaagactgtgtgctactaggctacagaaagcagcattaagtctgatatacatcaatccatgttcaagcagattcctctctgtctctggaaggtggttaatttttctggtcctgatattggatattgtcacattttccttgatagtgtcatccggtgaatgatttttcatcttgaaccttatactcctcctctctcggcagctggtgcttccctgttcttcctcagccatgctggggctcactgcagcctcctctgctcaactcgcctgggtgcagccatcttcaagaaaacattattaaagcaatattattagtatgcagcaaggtgccttctttctgctaaatcagtttgtaaagtggtcctcacaaatgcacacattctttgttatgacagcagggcttcgtgtttctgatgcaagactaataagacttggaagtagggaggtaaactgggtggcccaggaaagcaggggttaggggagttgatagaagatatgagaaatgaacctaaggggtgatcaaagagcagccaaagaaaaaaaaaaaaaagaacttttaataaggcgcccgaagcttaatccctttaaggggggggaaatttacgtgggcccggggcgcgggtttaacaccccgcggcgggggaaacccttggcggtccccactaaaacggcctttggagaaaccncgccccccgcgtctcc

SEQ ID NO: 1217 - DNA, 2432 bp, Homo sapiens
taaaaaatgaaaaaaatcaaatggttgatatcataaaaacaactggtctctaaatttaagattgagacaagaatagaaatcaggagaaatgaggaatctttaatttcaactgactgaatgctcacaggactcaaaccagttggtgcattcaactgagaaaaagaacaaatgagaacatgcagaaaacactggaaataaattatctaaaattatgtctaaaaattgaagcataattaggaattccagaatgatttaagatctctacaactcctctctacttttttagtccattatcttttacagaaccaatgttcaaatacatttttaggaatgtatttagtaggatataagaggacttcttgtgctgaaaatgaagaaaaaaattgacccaacattagttttttaatcgcatctactgaatgattccctaagattagaaaaaattgccttagcaatcaacaaatgcaagccaagaaattaagcactaatctacagtaaaaggtgctacacaagagatatttattaatgttctgttgtatttacagttttaacatagcaaaccaagatgaattaccacttgggcagaaagcacatcattctacattataacccactggtttctgctaacacattgtaaaagcaagtagtacagtatgttagggatcatctcaaaagttccaagctacttctttctttgctcctaagtacctaatcctctccttactcccagactttggcctaatcaccaggagacaaaaggaaaataaggggggtgggggtgggggtgggggtgaagaacgctaattatagaaagagtgtcaagaattacattttagtaattaagcttcatttgtatcctagtgctttctgttttatacagtgacaacacctttagaatcccttaggtacaataaggtaccgcagaattgtgaatacaggctataaaaaattaatgcttattatttaccaattaaagacttatttttgaccacaccttaaatgtatttttgcactatgattttgcttccaggtgttcatacagaattgaataaatttctagattaacttgaacagcaaatatggattatgtgcaaaaacacagtcataacaaaagtttaacttttgagaaaacccctttaaaatggccagcattatacatatcttacaatatttaattccaagttcattttgagatggaggatgaataaagcaagactgccccctaccgactacagggacatggctcatgctacttaaaatgactacaaacaatatataaggcattattaatacatcacagacttgattgcaagagctttttcaaacattaaccactaatgattcaatgattacagaattctgcattaactattaaaattttacacctaggaacaaatagagagaaatgatcttttcaacagtactttatttttttaaagcaggtgattattcctctgtgttctgcatcttgattcacttcctgcaggtgttctcttgcttcttgagagagaattcataaatgcaggaaggcctttgccagaaaacatctttaataaataaagagaactctggtcctggggagatttgagaaagtttctggcatcttccgaacttttgcataattgataaatcctctgagaaacaggagaaagcctaaaacaaggaacacccaccagagccagtactgaccatcaaaatatccagggaaataggtggaaaacctgacaatcaggatccatttaattagagagagaccaaatcctgaaatggccccataccttcctgcagctgaagtggtcaggcaaaaagacaggaaaaacccaatccagttaaagaggaatgccatgaaaaaagttaacatgaaaatcccatcatttcctatcctcagctggtcagcatcatcaaaatcatcccgacccacaaaatcctcatctctcccaggaaccaaagggatagtagcttcagccttggtcctctccgcttcatcataactgggcagtgttgtagctacattgtaagatgggggctttggaaacccagactcatccttgtagtcaaaatatgctgcgctctctgcagaaatgctgctgtaaggtggaggagcatcacctgcagcctgttcaggttctccagactcttcttcattctgcaactgctggtaccggctgccgcaggccggctcgaccgccgccagcgccgccaacgccaacgccatggcgcagccggcagtcagggaagcagagcgagcgagcgagctagctgaaggggcgcggccgctacggcttgggagcgctgggaggccgagggggacgcgccttgggtgggtctcgatggccgccgccgctcccgggcgagacgctcttctcaggctgtaagcaccgccgccgccgccgaggctccgacgcggcccctggggaagaggcggggactac

SEQ ID NO: 1218 - DNA, 405 bp, Homo sapiens
cccacgcgtccgcccgagctctactgtctcccaacttatcgcccaacaacaaaatggccataagtggaggccctgtgctaggatttttcatcatagctgtgctgatgagcgctcaggaaccatgggctatcaaagaagaacatgtgatcatccaggccgagttctatctgaatcctgaccaatcaggcgagtttatgttagactttgaaggggaagacactttccatggggatatggcaaaaaaggagacggtctggcggcttgaataattggctcgattagacaactttgaggctcaacgtgcattggccaacatagctgcggaccaagccgccctggaaatcatggacatgggctccgactatactctgatccccaatgtacctccaaaggtaactgtgctcg

SEQ ID NO: 1219 - DNA, 284 bp, Homo sapiens
ctcctgactggacagagaagagaaaaatgcaggacactggctcaatactgcctttgcattggtttggctttggctacgcagcactggttgcttatggtgggatcattggctatgtaaaagcaggcagcgtgccgtccctggctgcagggctgctctttggcagtctatccggcctgggtgcttaccaactgtctcaggatccaaggaacgtttgggttttcctagctacatctgggaccttggctggcattatgggaatgaggttctaccactctggaaaatta

SEQ ID NO: 1220 - DNA, 699 bp, Homo sapiens
ggcttactcactatagggctcgagcggccgcccgggcaggtgcagaacagaacactttctcatgtccagggtcagattacaagagcactcaagactttactgacgaaaactcaggaaatcctctatcacaaagaggtttggcaactaaactaagacattaaaaggaaaataccagatgccactctgcaggctgcaataactactacttactggatacattcaaaccctccagaatcaacagttatcaggtaaccaacaagaaatgcaagccgtcgacaatctcacctctgcgcctgggaacaccagtctgtgcaccagagactacaaaatcacccaggtcctcttcccactgctctacactgtcctgttttttgttggacttatcacaaatggcctggcgatgaggattttctttcaaatccggagtaaatcaaactttattatttttcttaagaacacagtcatttctgatcttctcatgattctgacttttccattcaaaattcttagtgatgccaaactgggaacaggaccactgagaacttttgtgtgtcaagttacctccgtcatattttatttcacaatgtatatcagtatttcattcctgggactgataactatcgatcgctaccagaagaccaccaggccatttaaaacatccaaccccaaaaatctcttgggggctaagattctcaagcc

SEQ ID NO: 1221 - DNA, 562 bp, Homo sapiens
ggcacgagagcagacattgcaggcctgaagaaaggtggtcacaagaggggtggaacattcctgcaaatggtttcaatatatgcagatgtctcgatataggaatgaaattacgtctttggaacaacttaaataagtcaaatatacttggagctttaaaaattaaaaggagagagattcgagcaccttttctgctgccatgacaaccatgcaaggaatggaacaggccatgccaggggctggccctggtgtgccccagctgggaaacatggctgtcatacattcacatctgtggaaaggattgcaagagaagttcttgaagggagaacccaaagtccttggggttgtgcagattctgactgccctgatgagccttagcatgggaataacaatgatgtgtatggcatctaatacttatggaagtaaccctatttccgtgtatatcgggtacacaatttgggggtcagtaatgtttattatttcaggatccttgtcaattgcagcaggaattagaactacaaaaggcctggtccgaggtagtctaggaatgaatatcaccagctct

SEQ ID NO: 1222 - DNA, 412 bp, Homo sapiens
ttgacgttagtcgcagtcttcgctgctaacgttttgttatgagttgctaaaatggtgaaatgctgctccgccattggatgtgcttctcgctgcttgccaaattcgaagttaaaaggactgacatttcacgtattccccacagatgaaaacatcaaaaggaaatgggtattagcaatgaaaagacttgatgtgaatgcagccggcatttgggagcctaaaaaaggagatgtgttgtgttcgaggcactttaagaagacagattttgacagaagtgctccaaatattaaactgaaacctggagtcataccttctatctttgattctccatatcacctacaggggaaaagagaaaaacttcattgtagaaaaaacttcaccctcaaaaccgttccagccactaactacaatcacc

SEQ ID NO: 1223 - DNA, 564 bp, Homo sapiens
ttaccactggcagagcaaatatgactcagaaaccggctcctcagggttgtaacattagatgatacaggcttgggtcgttacacatgacaccagtgcctttgtttcattgggctgggctctctggaaggtgtgctgctgcctgagctgctggaaaagcactgacaggtgtttgctagaaaagcactcctggagcttgccaccagcttggacttctagggactttcctctcagccaggaaggattttgatattcatcagaaatacctccagaagattcaaggagctgtagaggtgaagtaagcctgtgaaggaccagcatgggaatcctatactctgagcccatctgccaagcagcctatcagaatgactttggacaagtgtggcggtgggtgaaagaagacagcagctatgccaacgttcaagatggctttaatggagacacgcccctgatctgtgcttgcaggcgagggcatgtgagaatcgtttccttccttttaaagaaggaatgcttatgtcaacctcaaaaaccagaaagagagaacctgcttgcattatgctgtgaaaa

SEQ ID NO: 1224 - DNA, 632 bp, Homo sapiens
cggacgcgtgggcgagcggcggggagctagggagtttatttgatcaccacgtccagagggcggtatgcgacacacgggccaaatatcgagagggacgacggcctcgtgctgtgaaggtatatacaatcaatttggaatctcagtacttattaatacaaggagttcctgctgtgggagtcatgaaggaattagttgagcgattcgctttatatggtgcaattgaacagtacaatgctctagatgaatacccagcagaagactttactgaagtttatcttattaaatttatgaacttacaaagtgcaaggacagccaagagaaaaatggatgaacagagtttcttcggtggattgcttcatgtgtgctatgctccagaatttgaaacagttgaagaaactagaaaaaaactacaaatgcggaaggcatatgtagtaaaaactactgaaaataaagaccattacgtgacaaagaagaaattggttacagagcataaagacacagaggattttagacaagacttccactcagagatgtctggattttgtaaagctgctttgaacacttctgcagggaactcaaatccttatcttccgtattcctgtgaattgcctttatgttatttctcctcaaaa

SEQ ID NO: 1225 - DNA, 421 bp, Homo sapiens
cgctcaggctgtgttctcaggatgaccgagtgggagacaggagcaccagcggtggcagagaccccagacatcaagctctttgggaagtggagcaccgatgatgtgcatatcaatgacatttccctgcaggattacattgcaggtgtgagattaatacttttatagtcctgttatgttaatttggtattattttgttatactatttaacgtgcttctattttttgattgtatttgttataggtttattttttgttttatgtgtggtgtattatagttttattgtgatataatagattgtatttattggttctggtgtgttatgctatgtttattaactttatgtaatattgatctttttttatgtatttaagtgttgtttatcttgattttttttggtagttggtgtgttcttatttctcag

SEQ ID NO: 1226 - DNA, 492 bp, Homo sapiens
ctccgcttgaggagaagcgccaagtgcgcatggggacgctatagcaattcgtttgctgtccttcctctccttcgaagatgacaaggcctaccatcgtttcttcctgcctttgggccgtcaggcagttggttgggacccgctccaaccctcggttcttcctgcaatacagtggatacaatttgtcatggctactctgagataagaccacttttttatctgagcttctgtgacctgctcctgggactttgctggctcacggagacacttctctatggagcttcagtagcaaataaggacatcatctgctataacctacaagcagttggacagatattctacatttcctcatttctctacaccgtcaattacatctggtatttgtacacagagctgaggatgaaacacacccagagtggacagagcacatctccactggtgatagattatacttgtcgagtttgtcaaatggcctttgttttctcaagcctgata

SEQ ID NO: 1227 - DNA, 416 bp, Homo sapiens
caggaaagtggaaaagaactcaggtccccctacttggtgaagagtgcgcagacatggacctcgccagaaaagaatttctgcgtggaaatggcttagctgctgggaaaatgaacatcagtattgatttagacacaaactatgctgagctggttctaaatgtgggaagagtcactcttggagagaacaatagaaaaaaaatgaaggattgtcaactgagaaaacagcagaatgaaaatgtctcacgagctgtgtgtgctctgctgaattctggagggggagtgatcaaggctgaagttgagaataaaggctatagttataaaaaagatggaatagggctagatttggaaaattcttttagtaacatgctgccatttgttcctaatttcctggacttcatgcagaatggtaactacttt

SEQ ID NO: 1228 - DNA, 411 bp, Homo sapiens
  misc_feature (1)...(411): n = a,t,c or g
cacagcaacaagcatccctttacataaagtaccatagaaagtgctgtggccctagagagatggataaaacaaagcatctgctctcccgggataaaaagaagaaaggccattttgtgaagagatgaagactgagcggttgtggccgccttgccgaccttgagcagcagttggcttctccacatagtacccgggaataggagtctcagaatcgaatctcttctgcctgctcacttctgtgagatttttttgatcttcagctacatttttggctttgtgagaagcctcatcatccaacacagtggccagcaacgttgccgacaagacggatcctcactccatgaactcccgtgtgttcattgggaatctcaacactcttgtgctccagaaatctgatgtggaggcagtcttttn

SEQ ID NO: 1229 - DNA, 1589 bp, Homo sapiens
cgttgctgtcgcctgtgacacgtagcaacggggctggttcagggtctgaaacagagtttgggggttgtttgggattagtgaagctactgcctttgccgccagcgcagcctcagagtttgattatttgcaatgtcaggctttgaaaacttaaacacggatttctaccagacaagttacagcatcgatgatcagtcacagcagtcctatgattatggaggaagtggaggaccctatagcaaacagtatgctggctatgactattcgcagcaaggcagatttgtccctccagacatgatgcagccacaacagccatacaccgggcagatttaccagccaactcaggcatatactccagcttcacctcagcctttctatggaaacaactttgaggatgagccacctttattagaagagttaggtatcaattttgaccacatctggcaaaaaacactaacagtattacatccgttaaaagtagcagatggcagcatcatgaatgaaactgatttggcaggtccaatggttttttgccttgcttttggagccacattgctactggctggcaaaatccagtttggctatgtatacgggatcagtgcaattggatgtctaggaatgttttgtttattaaacttaatgagtatgacaggtgtttcatttggttgtgtggcaagtgtccttggatattgtcttctgcccatgatcctactttccagctttgcagtgatattttctttgcaaggaatggtaggaatcattctcactgctgggattattggatggtgtagtttttctgcttccaaaatatttatttctgcattagccatggaaggacagcaacttttagtagcatatccttgcgctttgttatatggagtctttgccctgatttccgtcttttgaaaatttatctgggatgtggacatcagtgggccagatgtacaaaaaggaccttgaactcttaaattggaccagcaaactgctgcagcgcaactctcatgcagatttacatttgactgttggagcaatgaaagtaaacgtgtatctcttgttcatttttatagaacttttgcatactatattggatttacctgcggtgtgactagctttaaatgtttgtgtttatacagataagaaatgctatttctttctggttcctgcagccattgaaaaacctttttccttgcaaattataatgtttttgatagatttttatcaactgtgggaaaccaaacacaaagctgataacctttcttaaaaacgacccagtcacagtaaagaagacacaagacggccgggcgtggtagctcacgcctgtaatcccagcactttgggaggccgaggcgggcggatcacaagggcaggagatcgagaccatcctggttaacacggtgaaaccccgactctactaaaactacaaaaaaaattagctgggcgtggtggcgggcgcctgtagtcccagctactcaggaggctgaggcaggagaaaagtgtgaacccaggaggcggagcttgcagtgagccgagatcacaccactgcactccatccagcctgggtgacagggtgagactctgtctcaaaaaaaaaa

SEQ ID NO: 1230 - DNA, 381 bp, Homo sapiens
aaaatcctgaacatttgtcttgaacatgaacactccaaaagaagaattccaggactggcccatagtcagaatagcagctcatttaccagacctcattgtctatggacatttctccccagagcgaccctttatggattattttgacggagtcctgatgtttgttgatatttcaggcaagtgcaaaagggatgtttgtttaatgtggatgagcaacaggctcgcgtgggaattcacatgcagagcttgattgcagagtagggaggccattctggagcccttgggctgtcacagcagatgtgctccactgagaacacaagagggaggaaatagcttgtggccctggctctctctcatcctcccttactcaggactgccagtcat

SEQ ID NO: 1231 - DNA, 1100 bp, Homo sapiens
ggccctgccctgaaggctggtcacttgcagaggtaaactcccctctttgacttctggccagggtttgtgctgagctggctgcagccgctctcagcctcgctccgggcacgtcgggcagcctcgggccctcctgcctgcaggatcatgcccaccaccgtggacgatgtcctggagcatggaggggagtttcactttttccagaagcaaatgtttttcctcttggctctgctctcggctaccttcgcgcccatctacgtgggcatcgtcttcctgggcttcacccctgaccaccgctgccggagccccggagtggccgagctgagtctgcgctgcggctggagtcctgcagaggaactgaactacacggtgccgggcccaggacctgcgggcgaagcctccccaagacagtgtaggcgctacgaggtggactggaaccagagcacctttgactgcgtggaccccctggccagcctggacaccaacaggagccgcctgccactgggcccctgccgggacggctgggtgtacgagacgcctggctcgtccatcgtcaccgagtttaacctggtatgtgccaactcctggatgttggacctattccagtcatcagtgaatgtaggattctttattggctctatgagtatcggctacatagcagacaggtttggccgtaagctctgcctcctaactacagtcctcataaatgctgcagctggagttctcatggccatttccccaacctatacgtggatgttaatttttcgcttaatccaaggactggtcagcaaagcaggctggttaataggctacatcctgattacagaatttgttgggcggagatatcggagaacagtggggattttttaccaagttgcctatacagttgggctcctggtgctagctggggtggcttacgcacttcctcactggaggtggttgcagttcacagttgctctgcccaacttcttcttcttgctctattactggtgcatacctgagtctcccaggtggctgatctcccagaataagaatgctgaagccatgagaatcattaagcacatcgcaaagaaaaatggaaaatctctacccgcctcccttca

SEQ ID NO: 1232 - DNA, 517 bp, Homo sapiens
  misc_feature (1)...(517): n = a,t,c or g
tagttgaaaccataaggacactcgttgtatcagtcgtacaacacgctgacgtaacacatataccaaatgtctaaaggccggggnnnnnnnnatttgaaaccttggttagaccccctgaaanccgcgncgacccacgcgnccgggaggactgcagggccagnccccagggccaggcatgcaggggccccctcccatcacgcccacctcctggagcctgcccccgtggagggcctacgtggctgccgccgtgctctgctacatcaacctcctgaattacatgaactggttcatcattgcaggagtgctgctggatatacaggaggttttccagatcagtgacaaccatgctggtttgcttcaaactgtcttcgttagctgcctgctgctgtctgcacctgtgtttggctacctgggcgaccgacatagccgcaaggctaccatgagcttcggtatcttgctgtggtcaggagctggcctctctagctccttcatctccccccggtattcttggctcttt

SEQ ID NO: 1233 - DNA, 419 bp, Homo sapiens
ggcacgaggctctccctgtgctaactgcctgcaccttggacagagcgggtgcgcaaatcagaaggattagttgggacctgccttggcgaccccatggcatcccccagaaccgtaactattgtggccctctcagtggccctgggactcttctttgttttcatggggactatcaagctgacccccaggctcagcaaggatgcctacagtgagatgaaacgtgcttacaagagctatgttcgagccctccctctgctgaagaaaatggggatcaattccattctcctccgaaaaagcattggtgcccttgaagtggcctgtggcatcgtcatgacccttgtgcctgggcgtcccaaagatgtggccaacttcttcctactgttgctggtgttggctgtgctcttcttccaccagctggtcgg

SEQ ID NO: 1234 - DNA, 456 bp, Homo sapiens
aaaggaaagtggaagttggattctgaaagatcgaggtgcccataggaattttatggtcgtcggattttgaagacttgaactagactgggggttctccttgcatttcttgcctgttgcctatctttgtcctctctcttccggcttcgagatgaatgtgcagccctgttctaggtgtgggtatggggtttatcctgccgagaagatcagctgtatagatcagatatggcataaagcctgttttcactgtgaagtttgcaagatgatgctgtctgttaataactttgtgagtcaccagaaaaagccgtactgtcacgcccataaccctaagaacaacactttcaccagtgtctatcacactccattaaatctaaatgtgaggacatttccagaggccatcagtgggatccatgaccaagaagatggtgaacagtgtaaatcagtttttcattgggacat

SEQ ID NO: 1235 - DNA, 835 bp, Homo sapiens
cgttgctgtcgggaggctgctgcggcgccggggctccgtggcctggattgaatccgatcgggagccatgagcgtggacaaagctgagctatgcgggtctctgctcacctggttacagacgttccacgttccgtctccctgtgccagccctcaggacctgagcagcggccttgccgtagcctatgtgctgaaccagatagacccctcctggttcaacgaggcatggctccagggcatctcggaagatccaggtcccaactggaagctgaaggtgacaagtggactcctgattagaggacagactggtgaagagatgaccagggacgggccagctaggcacatgtcctgggtgatgggcaggaagagggacagatgtctggtgatcaaccatttgttcatccattcatctatggagtactcaccctgtgccaggcctgggcattcagcaaggaataacacagacaaaaacctgccccacacagccatcattctagtgacaagcaacacatacacaaccataaaaattaacttccaggctgggcgcagtggctcatgcctgtaatcccaacactttgagaggctaaagtgggtggatcacctggggccaggagttcaagaccagcctggccaacaagttgaaaccccatctctactaaaaatacaaaaattagctgggtggggtggtgtgcacctgtaatcccagttacttgggaggctgagacatgagaatcacttgaacctgggaggtggaggatgcagtgagctgagattgagccattgcactccagcctgggcaacagagcgagactcttgtctcaagaagaagaaaaaaaaaa

SEQ ID NO: 1236 - DNA, 608 bp, Homo sapiens
gtcggtacactgaggacctagggagtcgacccacgcgtccgaaagattgcacctagtttcttttgtatccattcagagatgttctatgcaattgcactcaagatattctgttactgcagcaccaatggatgaggatagggaatgactgagccataagatgaaaggattctggaaatatatagctaaaatagaaatatttgaaaagaggaaaacctgaagatcagtaatctaaattaacagcaaaatataatcaaagaaaacaaaagaagaaaaataataaagatctcaactgagatcctcccattgtcagattttgacctaggaccatcttggaaagggattcttctgtgattcagaggtgaagcccttacagtgaggtttcttactaagcgattcattggagaatatgcttctaattttgaatctatctataagaagcacttgtgtttggaaaggaaacaactaaatctagaaatatatgacccttgttctcaaacacagaaagcaaaattctccctcacaagtgagcttcactgggcagatgggtttgttattgtgtatgacatcagtgataggtcttcatttgcttttgcaaaagcgctgatcta

SEQ ID NO: 1237 - DNA, 532 bp, Homo sapiens
  misc_feature (1)...(532): n = a,t,c or g
aataatccttttcatcctatagtttccctgccctaaccctgtagtcaggcatatccccaaggagcccagcttttttccaatggagaatgacaattcataattaccaggcttcgtgcttgcctggagtgctgatgcccctataggccacttaaatgccaaagcactgcactgaagcattgtggctccaagcnnnnnnnnnnnnnnnnnnnnnnnnnnnnnnnnnnnnnnnnnnnnnnnnnnnnnnnnnnttacctccagattttaaaatattttagcaatcatctattttcccttccccaggctttttctcctccgtgacagccagagtaatccaaaggcatttgcactcacactgtgtcatcaccagaaaattaaaaatttccagatcttacctgtaagtattgatgctctcacaccaccccttgtggtttgttttctggtttcattcttaacgcacttttcaagatataaaccgacaagaccggtatgtatcacacagtttcaaggctgcagttaagacactctcaagaat

SEQ ID NO: 1238 - DNA, 967 bp, Homo sapiens
ttttgtggtccttagtcagtgtggtggaattcctaggttcagacgttagtgaagtgaatactcaccgacggtatcggaatgtgccatttggaccggtcggcagcagctacggttgccggtcccgcactgaaaaacgacagtggtgacgggtgagctcccagaagcagaagaatgacaggcaacacctgaagccacgcagccgccgccatcttcacagccgtggagtgcctaccgaaagcatttcaccctcttccggactcattgcgtacacgccctcaccgccgcccagtttcggttcctaacaaaagcacgttcctcatcagccacccataatcaagacaaatttgccaaataaatcattgtagaaacgctagtttgggcctgaaaaattccaggagcaagagtcaagatttgtcactccatgagaatctggaggggactcccttcccagaaacttgacgatgaagtactggttgtaattttagaaagacacccaatcggcttttttaaaagatcgcccagggcccttgtcctgagagctgggagctggtcggagtgacagagaagccatggaagcagcagtgaaagaggaaataagtgttgaagatgaagctgtagataaaaacattttcagagactgtaacaagatcgcattttacaggcgtcagaaacagtggctttccaagaagtccacctatcgggcattattggattcagtcacaacagatgaagacagcaccaggttccaaatcatcaatgaagcaagtaaggttcctctcctggctgaaatttatggtatagaaggaaacattttcaggcttaaaattaatgaagagactcctctaaaacccagatttgaagttccggatgtcctcacaagcaagccaagcactgtaaggctgatttcatgctctggggacacaggcagtctgatattggcagatggaaaaggagacctgaagtgcca

SEQ ID NO: 1239 - DNA, 540 bp, Homo sapiens
tgagtccctagtccgtgtggtggaattcagacgctgggccggcgggcggtggccgtgcagagctccgcagacgtctgtgccacccagagccggcgggccgctaggtccccggagaccctgctatggtgcgtgcgggcgccgtgggggctcatctccccgcgtccggcttggatatcttcggggacctgaagaagatgaacaagcgccagctctattaccaggttttaaacttcgccatgatcgtgtcttctgcactcatgatatggaaaggcttgatcgtgctcacaggcagtgagagccccatcgtggtggtgctgagtggcagtatggagccggcctttcacagaggagacctcctgttcctcacaaatttccgggaagacccaatcagagctggtgaaatagttgtttttaaagttgaaggacgagacattccaatagttcacagagtaatcaaagttcatgaaaaagataatggagacatcaaatttctgactaaaggagataataatgaaggtgatgatcgaggctcgtacaaag

SEQ ID NO: 1240 - DNA, 396 bp, Homo sapiens
agacagacggacgggaccccctgccttgcgcagccaggcgtcgaggaggcggcggcgagtgctgcggtgctggctgggtggccgagtggtccccgcagcctctggacccagccatgctgctctggatgcagggcttcgtgctggaggcggtggcctgccaggataacgatgactacttacgctacgggatcctcttcgaagacctggattgcaatggggacggcgtggtggacatcattgagctccaggaggggctgagaaactggagctccgcgtttgaccccaactccgaggagcatggatagtgatggatcaatgacagtagactgggatgaatggaagtactactttttactgcatcctgcaacaaatatcactgaaatgattcatttctgg

SEQ ID NO: 1241 - DNA, 1380 bp, Homo sapiens
  misc_feature (1)...(1380): n = a,t,c or g
caaaacaaaaaacaatatttccatacctttcctctaatcccaaggaaacctaaagaacttgattaaaaagccgtggccaagagttcgaagtgaaagtcagccctttagctattatttattgctttattagagcagagggaagtgacactcattgccttcacagagctctgcagaaatatatgcacagagtggtcaatgaccaacatctgagtaagtcttccaaattatcacattaaaataacctttcaaatttgagtgcctctcctttgcaaacaactgcaacctcataatgaataattttatatattatcaaaaagaaccagaagcccaggtgcttttttccccaaaatccacttactaaggacttgagtgaaaatccactctaagcagatcactgttactatttccctttcaaaacagttggaaatcctaaggtacgggtactaagaagatagcaatatccttcttaagctggtaagaatctagccccacagggacaatttggcaatcctgtttctggaagccaggactccagagatttgtcttagtgatggacagatactcctctaaccttaaggcatgagggctgtcaaaacaaggctctgaatagtgccttcctgctcatcaatgtcatcacaatgaaggagagaacaggttttcgttttcctgaagagtggtcagtaggagtgcagtggtttggcatagatcggctccagaacataatggattaaaaccaagaagaggcctccaaggaagatggcactaaggaaagccagcaggacatagcggccaatgaaaaagtcatccacaatcttaacttccacttctggggctgggaattcaccagctcgcgggaaaagcaacagaactgatgtgatgatcacagcaccgaagaataaaaaaatgacagagaacctcgccgccccggaggctctggacagcagcacacacagcagcagcactgccacccagagcagggctaagatgaacacgcccgcaccgactccgagcacagtgccagccatcccgcggggaggcagcggcggccccccgccctgcgcgccgcacgatcgagtgtcctctgtgctccagtgcgacacacaggcaatggatcacaagacagaaagttcccactctgttgtcgagttcttattcaagaggacgaaaactcccagtccctttcatccagctgtcagagaaaataggaataaatggnctgatccctgcacaggtaactatctaagacaaatgtggattcctcagagggtaatgtggcctaagtgctgctgctggagggagatatctcacccatcccccgattctcacactgactcaagccctctgcccccttcaaaaggatccactctcccccaggctcta

SEQ ID NO: 1242 - DNA, 590 bp, Homo sapiens
ttacgatttcgtgtggcccagccacagagccacctgcctcgctgctcagcagtgcctcctcagatgacttctgtaaggagaagaccgaggatcgctactcactgggcagcagcttggacagtggtatgaggaccccactctgccgcatctgcttccaggggccagaacagggggagctgctgagcccatgccgctgtgatggctcggtcaagtgcacacaccagccttgcctcatcaagtggatcagcgagcggggctgctggagctgcgagctgtgctactacaagtaccacgtcatcgccataagcacaaaaaatcctctgcagtggcaggccatctctctgacggtcattgagaaggttcaggttgcagccgccatcctgggctccctcttcctcatcgccagtatttcttggctcatctggtcaactttcagcccctcggcaagatggcagcgccaagaccttctcttccagatctgctacgggatgtatggcttcatggacgtgatgattgtggctgttgactctgaagatatggtccaagcagctaaggaggtggggaagcgctggtcagacatcccaccctag

SEQ ID NO: 1243 - DNA, 411 bp, Homo sapiens
tttcgtcggggagcgctcttggggctcctcctgccacagccggggcggctggaactctctccctttctccctccatccttgcacttcccctgctcggccccgccgtcaggccgggccccccttccctgccgtcatcaggttccccttctcccttcttggcactttcctttcgaaccatccttctggacaaactttgatggagaatttcacaccacgctggaaaaatgccggttatgaaaggattactggcgccgcaaaacacctttctggacaccatcgccacccgttttgacggaacacatagcaacttcatccttgccaatgcccaggtggctaagggtttccccatagtctactgttccgatggcttctgcgagcttgctggatttgcccgaactgaagtcatgcagc

SEQ ID NO: 1244 - DNA, 650 bp, Homo sapiens
cccacgcgtccggcagctgtcttttccggcccccgtgcactctccgcccgaggcggagccccccggctcgcggggatcgcccccgagcgctgcgtcctgcgggtgggtcacctaacccatttgtggcttcctctacctgtgctcagccatggccagcgagagctcacctctgctggcctaccggctcctgggggaggagggggttgccctccctgccaatggggccgggggtcctggaggggcgtctgcccggaagctgtccaccttcctgggtgtggtggtgcccactgtcctgtccatgttcagcatagttgtttttctgaggattgggttcgtggtgggtcatgctgggctactgcaggccctggccatgctgctggttgcctacttcatcctggcactcaccgtcctctctgtctgtgccatcgccaccaatggagccgtgcaggggggcggagcctactgtatcctccaacatcgatggactggggtctggcctgttctgcctgctagggaggtcatgatcagccgcacactggggcccgaggtcgggggcagcattgggctcatgttctacctggctaacgtctgtggctgtgccgtctccctcctggggctggtggagtctgtgcttgatgtcttcggggccg

SEQ ID NO: 1245 - DNA, 1620 bp, Homo sapiens
gcgcctcgccgggtctccgcttatcacacctcaggtgcggtgggcttcgggtggggggcctgcagctagctgatggcaagggaggaatagcaggggtggggattgtggtgtgcgagaggtcccgcggacggggggctcgggggtctcttcagacgagattcccttcaggcttgggccgggtcccttcgcacggagatcccaatgaacgcgggcccctggaggccggtggttggggcttctccgcgtcggggatggggccggtaccctagcccgtttccagcgcctcagtcgggtccccatgccctcagaggtggcccggggcaagcgcgccgccctcttcttcgctgcggtggccatcgtgctggggctaccgctctggtggaagaccacggagacctaccgggccatcgttgccttactcccagatcagtggcctgaatgcccttcagctccgcctcatggtgcctgtcactgtcgtgtttacgcgggagtcagtgcccctggacgaccaggagaagctgcccttcacccgttgtgcatgaaagagagattcctcctgaaatacaaaatgaaaatccaaatgccgtttcccagaaggcctatcggagggctttggacccatgaggaaggaggccctgtcatcgggcagtgtgcaagaggcagaagccatgttagatgagcctcaggaacaagcggagggctccctgactgtgtacgtgatatctgaacactcctcacttcttccccaggacatgatgagctacattgggcccaagaggacagcagtggtgcgggggataatgcaccgggaggcctttaacatcattggccgccgcatagtccaggtggcccaggccatgtctttgactgaggatgtgcttgctgctgctctggctgaccaccttccagaggacaagtggagcgctgagaagaggcggcctctcaagtccagcttgggctatgagatcaccttcagtttactcaacccagaccccaagtcccatgatgtctactgggacattgagggggctgtccggcgctatgtgcaacctttcctgaatgccctcggtgccgctggcaacttctctgtggactctcagattctttactatgcaatgttgggggtgaatccccgctttgactcagcttcctccagctactatttggacatgcacagcctcccccatgtcatcaacccagtggagtcccggctgggatccagtgctgcctccttgtaccctgtgctcaactttctactctacgtgcctgagcttgcacactcaccgctgtacattcaggacaaggatggcgctccagtggccaccaatgccttccatagtccccgctggggtggcattatggtatataatgttgactccaaaacctataatgcctcagtgctgccagtgagagtcgaggtggacatggtgcgagtgatggaggtgttcctggcacagttgcggttgctctttgggattgctcagccccagctgcctccaaaatgcctgctttcagggcctacgagtgaagggctaatgacctgggagctagaccggctgctctgggctcggtcagtggagaacctggccacagccaccaccacccttacctccctggcgc

SEQ ID NO: 1246 - DNA, 464 bp, Homo sapiens
  misc_feature (1)...(464): n = a,t,c or g
agagtatgcccgnnttttgaactccgatgatcgtcgcaagagcaccggnctggaatcccggtcgacgatttcgtgggcggtgaggcctggtccacgtgcgttccttcctgtgacccccgcagcttggcgcccagcgggtacgtgagccaaggcacccggatgtccgcgcccctctccgagtgaccagtcccggcctccggtcccgcagtgcccgcagcctcgggcggcgtccacgcattgccatggtgactgtgggcaactactgcgaggccgaagggcccgtgggtccggcctggatgcaggatggcctgagtccctgcttcttcttcacgctcgtgccctcgacgcggatggctctggggactctggccttggtgctggctcttccctgcaaacgccgggagcggcccgctggtgctgattcgctgtcttggggggccggccctcgcatctcttcctacgtg

SEQ ID NO: 1247 - DNA, 398 bp, Homo sapiens
tttcgtacgtaacaagaagatgacccgaagttgctccgcagtgggctgcagcacccgtgacaccgtgctcagccgggagcgcggcctctccttccaccaatttccaactgataccatacagcgctcaaaatggatcagggctgttaatcgtgtggaccccagaagcaaaaagatttggattccaggaccaggtgctatactgtgttccaaacattttcaagaaagtgactttgagtcatatggcataagaagaaagctgaaaaaaggagctgtgccttctgtttctctatacaaggtatttaaatattcctcaaggtgtacatcttaaaggtaaagcaagacaaaaaatcctaaaacaacctcttccagacaattctcaagaagttgctactgaggac

SEQ ID NO: 1248 - DNA, 483 bp, Homo sapiens
  misc_feature (1)...(483): n = a,t,c or g
tgggtgtngnttttgaacccattgaagccgtacgcctgcggcaccggtccgnnnnnccgggtcgacgatttcgtctactccaaaggaggcaaggacgcaggaggggccgacgtttccctggcgtgccgcagacagagcattccagaggagttccgagggatcactgtggtggagctgatcaagaaagaaggcagcacgctgggcctgactatctcaggtggcaccgacaaggatggaaagcccagggtctccaacctgagacctgggggacttgcagccaggagtgatctgctgaacattggtgactatattcggtctgtgaacgggatccacctgaccaggctccgccacgatgagatcatcaccctgctcaagaatgtgggcgagcgcgtggtgctggaggtggagtatgagctgcccccgcccggtgggtgcccttggacggngaactttctccactgcctcggttgcgggtggacacgg

SEQ ID NO: 1249 - DNA, 1265 bp, Homo sapiens
cctgccgcctccgcggcccagtcggcaccggcgaggccgtgctggaacccgggcctcagccgcagccgcagcggggccgacagtaagtgcggtgcgggctccggtgcgcgggcaggactcaggggcagggacgccccaggggcgactggccgggcggggtgcccacctctcgcgcgtgggcgcctccgggagtggtgtggccgccggtcccgccgcccgccacgctccgaggcgtcgctgtgcggacgcgggggaggcggtgggagcgagctgcgggcgctgcgcggtggccctgctgtctggcgtgtgcacgctagtgtccacacacgtgtgcgtgggctctgggtgccctggcgcggccggcacgcccatgggggccggggatgccggggcgtctgcggagagtgcagtgacgacagctccccaggagccccccgcccggcccctccaggcgggcagtggagctggcccggcgcctgggcgcgccatgcgcagcaccacgctcctggccctgctggcgctggtcttgctttacttggtgtctggtgccctggtgttccgggccctggagcagccccacgagcagcaggcccagagggagctgggggaggtccgagagaagttcctgagggcccatccgtgtgtgagcgaccaggagctgggcctcctcatcaaggaggtggctgatgccctgggagggggtgcggacccagaaaccaactcgaccagcaacagcagccactcagcctgggacctgggcagcgccttctttttctcagggaccatcatcaccaccatcggtgggggaggggattggcatgtggggggcggcaaggagcttcctcatgggggaaggtgcagggagacggaggggtcccaggtggcccctagacttcctgcatcgcccctctgcccaggctatggcaatgtggccctgcgcacagatgccgggcgcctcttctgcatcttttatgcgctggtggggattccgctgtttgggatcctactggcaggggtcggggaccggctgggctcctccctgcgccatggcatcggtcacattgaagccatcttcttgaagtggcacgtgccaccggagctagtaagagtgctgtcggcgatgcttttcctgctgatcggctgcctgctctttgtcctcacgcccacgttcgtgttctgctatatggaggactggagcaagctggaggccatctactttgtcatagtgacgcttaccaccgtgggctttggcgactatgtggccg

SEQ ID NO: 1250 - DNA, 652 bp, Homo sapiens
tttcgtagttcctagtccgtgcggtggaattcccggccgcgctccgaacggcgcctcccgccccaccatgggcaacagcgcgagccgcaacgacttcgagtgggtctacaccgaccagccgcacacgcagcggcgcaaggagatactggccaagtacccggccatcaaggccctgatgcggccagacccgcgcctcaagtgggcggtgctggtgctggtgctggtgcagatgctggcctgctggctggtgcgcgggctggcctggcgctggctgctgttctgggcctacgcctttggtggctgcgtgaaccactcgctgacgctggccatccacgacatctcgcacaacgcggccttcggcacgggccgtgcggcacgcaaccgctggctggccgtgttcgccaacctgcccgagggtgtgccctacgccgcctccttcaagaagtaccacgtggaccaccaccgctacctgggcggcgacgggctggacgtggacgtgcccacgcgtctggagggctggttcttctgcacgcccgcccgcaagctgctctggctggtgctgcagcccttcttctactcactacggccgctctgcgtccaccccaaggccgtgacccgcatggaggtgctcaacacgctggtgcagctggcg

SEQ ID NO: 1251 - DNA, 1438 bp, Homo sapiens
gagctcaggaggtcaaggctgcagtgagctatgattatacctctgcactccagtctgggtgacagagcgaggctttgtctgcggtcccagttacttggaaggctgagacaggaggattgcttgagtccgggtggttgaggatgcaatgacctgtgatcatgccactgcacttcagtccgggtgacatagtaagaccctcgtgctgcgtgtcgtccagtcccaagctccggaggaatgcccactcccggctggagtcctaccggccagacacggacctgagccgcgaggacacgggctgcaacctgcagcacatcagcgaccgggagaacatagacgatttgaacatggaattcaatccttcagatcatcctcgggccagcacaatattcctcagtaaatctcagacggacgtgagagaaaaacgcaagagtctcttcattaaccatcatcctccaggacaaatagcaaggaaatacagttcctgctccaccattttcctagatgatagcacagtcagtcaaccaaacctcaagtatacaattaaatgtgtcgctcttgcaatatattatcacatcaaaaacagggacccagatggaaggatgctcttagatatttttgatgaaaatcttcaccctctttcgaaatccgaagtgccaccagattatgacaaacacaacccagagcagaagcagatttaccggttcgttcggacactgttcagtgctgctcagctgacggctgaatgtgccatcgtcaccctggtgtaccttgaaagacttttaacatacgcagagatagatatctgtccggccaactggaagcggattgttttaggggcgatcctgctggcctccaaggtgtgggatgaccaggctgtatggaatgtggattactgccagatcctgaaagacatcacggtggaggacatgaacgagctagagcgacagtttcttgaattgctgcagttcaacatcaatgttccttccagtgtctatgccaagtattattttgatcttcgttctctggcagaagcgaacaacctgagctttcccttggagcccctgagcagggagagggctcacaagcttgaggccatctctcgcctctgcgaggacaagtacaaggacctaagaagatccgcgaggaagcgctcagccagtgcagacaacctgactctgccccggtggtccccagccatcatctcttaactacggaggcccgccggaggccacaccatcccttagtttctcctttagtttgagaaaagacagacttggggtgggtttgtttttgttttttctttccttttctttttttacgcatagctccgtcaagctgcctggatgagcgcccatgcagcaaggcttggaggaagcgtcagtgccctggagatcccagctcgctctccccactgtcagcaacagcacttccttcgtgg

SEQ ID NO: 1252 - DNA, 449 bp, Homo sapiens
tttgaaagcgtcctgatagccgtccgcctgcacagtaccgggcgggacccacgcgtccgcggacgcgtgggtgtgaacttctctactggaaagcaacaaaggcagtcggcataaaaatgggttctctcagcacagctaacgttgaattttgccttgatgtgttcaaagagctgaacagtaacaacataggagataacatcttcttttcttcgctgagtctgctttatgctctaagcatggtcctccttggtgccaggggagagactgaagagcaattggagaaggtatggaattcctcagaggtttgttcagaacccagaagtctttcatgctcccgctctgggtcagcaaaattaattctatctttataccaataaaattgccatcttgagagagaaaaaacacattgaataaatcatatttcttataaattgataatggtttgattc

SEQ ID NO: 1253 - DNA, 388 bp, Homo sapiens
  misc_feature (1)...(388): n = a,t,c or g
aaaagaagtcttctgggaatctccacactttgaagacacagtgagttagcaccaccaccaggaattggcctttcagctctgtgcctgtctccagtcaggctggaataagtctcctcatatttgcaagctcggccctcccctggaatctaaagcctcctcagccttctgagtcagcctgaaaggaacaggccgaactgctgtatgggctctactgccagtgtgacctcaccctctccagtcacccctcctcagttccagctatgagttcctgcaacttcacacatgccacctttgtgcttattggtatcccaggattagagaaagcccatttctgggttggcttccccctcctttccatgtatgtagcggcaatgtttggaaactgcan

SEQ ID NO: 1254 - DNA, 695 bp, Homo sapiens
gactgaagtaccaactaagtcatctcctttcaaattatcaccgacaccatcatggattcaagcaccgcacacagtccggtgtttctggtatttcctccagaaatcactgcttcagaatatgagtccacagaactttcagccacgaccttttcaactcaaagccccttgcaaaaattatttgctagaaaaatgaaaatcttagggactatccagatcctgtttggaattatgaccttttcttttggagttatcttccttttcactttgttaaaaccatatccaaggtttccctttatatttctttcaggatatccattctggggctctgttttgttcattaattctggagccttcctaattgcagtgaaaagaaaaaccacagaaactctgataatattgagccgaataatgaattttcttagtgccctgggagcaatagctggaatcattctcctcacatttgagtttcatcctagatcaaaactacatttgtgattattctcaccaaaatagtcagtgtaaggctgttactgtcctgatcttgggaatttagaatacattgatgactttcagcatatattgaattattcatattctctgcctttactcaattttggggtgccactcagaggattgtgattgtgaacaatgttgttgactagcactgtgagaataaagatgtgttaaaatataaa

SEQ ID NO: 1255 - DNA, 386 bp, Homo sapiens
acgcagagcgagccaccggtcattgacttagataaccagcaaaattaaaaaagaagaaaaaaaacttgtagcgaccaggcagagagcaacgcgattgctttcaagcgcccccactcgggctcggcgggcgccagacagacatgatgcaccatcctctgacgggggccacctgcgtggggctccccaacgtgggcatgtgcccccagctttcgggggccttgacttttatgtacttacagcagggtaatcaggaagcaaccgttgcccctgacacaatggctcaaccttacgcttcggcccagtttgctcccccgcagaacggtatccccggggaatacacggcccctcatccccaccccgcgccagagtacacaggccagaccacg

SEQ ID NO: 1256 - DNA, 407 bp, Homo sapiens
ctccagtcccatgccgggaggtctgggtgttggctggtccattccaggacagctacatctttggcagacctggtgctgacagaaccagctctgatcaggaggacctgcaggtttgttacataggccagtacttcctaaaatgggactctcaggacttctgccaatcctggtaccattcatccttttgggggacatccaggaacctgggcacgctgaaggcatccttggcaagccgtgtcccaaaatcaaagtggaatgcgaagtggaagaaatagaccagtgtaccaaacccagagattgcccagaaaacatgaagtgttgcccgttcagccgtggaaagaaatgtttagacttcagaaaggtcagccttactttataccataaggaggagcttgaataacctccag

SEQ ID NO: 1257 - DNA, 459 bp, Homo sapiens
  misc_feature (1)...(459): n = a,t,c or g
aggtgnccggncttgaannctaccgatactctcgtaannncccggaatttactactccttgaccgctgacctcactccccgccctgccatgtacatcctctgtgtaccctgggaacttgtatgtagttaattgtatctggacctgcacccccagcttctttcttggcttcatttaatctctctcttggcttccttgccttcagggatctccttcaaggcagggccatttctggtttcctccagctcccagggctccttcctgcaacagaaaatgttcctgccttcacagagcttacattttagtaagtggattgggaggttgcggccaagtgtatagtgaggtgacgcttanggaaagcttaagctgctctgagaacacctgaaaagtacacccaaccggcttggtgtggtggctcacacctgtaatcccagcactttgggaggccgaggcgggtggat

SEQ ID NO: 1258 - DNA, 1974 bp, Homo sapiens
atgccgccgtggggcgccgccctcgcgctcatcttggccgtgctcgcccttctcggcctgctcggcccgcggctccggggaccctgggggcgcgccgtcggagagaggaccctgccgggggcccaagaccgtagacgacggggaggaggcggacggcggaggcccggcggaccagttcagcgacgggcgcgagccactgccgggagggtgcagccttgtttgcaagccgtcggccctggcccagtgcctgctgcgcgccctgcggcgctcagaggcgctggaggccggcccgcgctcctggttctccgggccccacctgcagaccctctgccacttcgtcctgcccgtagcgcctgggcctgagctggcccgggagtacctgcagttggcggacgatgggctagtggccctggactgggtggtaggaccttgtgttcggggccgccggatcaccagcgccgggggccttcctgcggtgcttctggtgatccccaatgcgtggggtcgcctcacccgcaacgtgctcggcctttgcttgctcgccctggagcgcggctactacccggtcatcttccatcgccgcggccaccacggttgcccactggtcagcccccggctgcagcctttcggggacccgtccgacctcaaggaggcggtcacatacatccgcttccgacacccggcgggcggccttgtttcgcggtgagcgaaggctcgggctcggcgctgctcctgtcctacctgggcgagtgcggctcctccagctacgtgacaggcgccgcctgcatctcgcccgtgctgcgctgccgagagtggttcgaggccggcctgccctggccctacgagcggggctttctgctccaccagaagatcgccctcagcaggtatgccacagccctggaggacactgtggacaccagcagactgttcaggagccgttcccttcgagagtttgaggaggctctcttctgccacaccaaaagcttccccatcagctgggatgcctactgggaccgcaacgacccgctccgggatgtcgatgaggcagccgtgcctgtgctgtgtatctgcagtgctgacgaccccgtgtgtggacccccagaccacactctgacaactgaactcttccacagcaacccctacttcttcctcctgctcagtcgccacggaggccactgtggcttcctgcgccaggagcccttgccagcctggagccatgaggtcatcttggagtccttccgggccttgactgagttcttccgaacggaggagaggattaaagggctgagcaggcacagagcttccttccttgggggccgtcgtcgtgggggagccttgcagaggcgggaagtctcttcctcttccaacctggaggagatctttaactggaagcgatcatacacaaggttgatggcagcggcagctggggctgcagcggcgccgggctctagagagccgcaggatcggccagagtgcggagctggacacccgggtcccagatactacagacacccggagaggtggctccttcgccctgaagccttcctcggccccctacgcactcgggccccttccgcagaggattcgcagcgtgagcgccccgcagcccgctcaggaccagagatgcgagttcggtatcctgtggtggctgcagtcttggccccatacctggctttaagccaagatccaatggtcaagtcttctgcttctggacagggtgcctctgggagctacaaccacgtccgtgaagagatgctcatcaaggctggcggtgctatgagcagacgtgtggttcggcaaagcaagttccgccatgtgtttgggcaggcagcaaaggccgaccaggcctacgaggacatccgtgtgtccaaggtcacatgggacagctccttctgtgccgtcaaccccaaattcctggccattattgtggaggctggaggcgggggtgccttcatcgtcctgcctctggccaag

SEQ ID NO: 1259 - DNA, 935 bp, Homo sapiens
tcccaatcaacaagctatttaaaagcctacaaaaaaatttaaaagcccctgtttaattaaatatcccttcgtaagtacccaccttttgggtgtgggcccctttaccttacatcaaatcccccaagaaaagagcagaacttttttgtctgggaagggttttctgaaggagttataatggaataggcaggaaggagaactttagtttctgtatagcgctttttatattataggaatttacgaacagtagaaaactgtttgaggtacaggcaggggtttagataaatatgtgaagattgggtcttctttaggtaagcagaggtgcagaaagattaactctctcctgtacacctctcaagtgctgaaaagcatgtatactatatggaagttctagaattttagtacaatcaggttgctccgggtctggagggacaggagattctgtgtctatataatcttcaggactgatgtctttgctctccaaagttatgtatgtgccatcatatagatccaggtcccctaagggcaccttggctttgatgcagtctgggtcttctttattatgtctctgttccagtcctgtgtctctgtcctcattctcttctatgtgaattttttgagcaactaattgtttctctaattctttgaggtagttaactgttgcttcttgtctcattaatatgactaggtcatgaggatgcttcaagttcattggtgaatccacctgctgctggattttcccgtcctccgtgacgacccagtgcgtggtggcgaaggcccctcgtgccgccacactcagcaaggcggaaaggctgaggagccagcctgggccggagcaaggcggcagctcgtaccggccacgaacccctactgccgccgccatcttgcccccccggccgggccgctcacaccggaagcggaagctagtctccacgaaa

SEQ ID NO: 1260 - DNA, 1082 bp, Homo sapiens
tttcgtgcaatgagctgttcaaatgtggagactacgggggcgccctggcggcctacactcaggccctgggtctggacgcgacgccccaggaccaggccgttctgcaccggaaccgggccgcctgccacctcaagctggaagattacgacaaagcagaaacagaggcatccaaaggtaggggaatggtgggccctggtgtggagctgtagggcttctgtggtgggcaaggactctgggaccgctgcaccgtcacattctcctcctttggccccagagacacatctgccttctttctttcccactgcctcgggcctttctttttctgcagctaccctcaccttttctgaggctgaagcaccgagccccacattcgtcccccccaccttcttctggcctttcctcgagatctttccctactgctcttgcctggagacagtggcctcatgggtgctgacagcgctcctgtttgtgctcagccattgaaaaggatggtggggatgtcaaagcactctaccggcggagccaagccctagagaagctgggccgcctggaccaggctgtccttgacctgcagagatgtgtgagcttggagcccaagaacaaagttttccaggaggccttgcggaacatcgggggccagattcaggagaaggtgcgatacatgtcctcgacggatgccaaagtggaacagatgtttcagatactgttggacccagaagagaagggcactgagaaaaagcaaaaggcttctcagaacctggtggtgctggccagggaggatgctggagcggagaagatcttccggagtaatggggttcagctcttgcaacgtttactggacatgggagagactgacctcatgctggcggctctgcgtacgctggttggcatttgctctgagcatcagtcacggacagtggcaaccctgagcatactgggaactcggcgagtagtctccatcctgggcgtggaaagccaggctgtgtccctggctgcctgccacctgctgcaggttatgtttgatgccctcaaggaaggtgtcaaaaaaggcttccgaggcaaagaaggtgccatcattgtgg

SEQ ID NO: 1261 - DNA, 438 bp, Homo sapiens
ggatttcgtggcgcggaggccccgggcgcggcgcaggctccaaagaagaagaaaccaaggcccacagagggaggcccaggagcagggagcgggcgagggaaggatccgtacaggggcccaacactactccaccaaccgaagcccccaaaagatgagttcctgtccagtctggagagctatgagatcgccttccccacccgcgtggaccacaacggggcactgctggccttctcgccacctcctccccagaggcagcgccgcggcacgggggccacagccgagtcccgcctcttctacaaagaggcctcgcccagcacccacttcctgctgaacctgacccgcagctcccgtctactggcagggcacgtctccgtggagtactggacacgggagggcctggcctggcagagggcggaccggccccactgcctctacgct

SEQ ID NO: 1262 - DNA, 435 bp, Homo sapiens
  misc_feature (1)...(435): n = a,t,c or g
tttcgtgagagatgctgctgcggaagtcctcggtggagtgtgagaaggcagccagtgttggcctggaagacctctagaacctgagaagaggcagcgatcctggggcagagtccagggcagctcaaggctcctccacacacacacccgctgaaccctgagcaccctgagctgctgagatggggcgggccggggctgccgccgtgatcccgggcctggccctgctctgggcagtggggctggggagnnncnnccccanncccccacgccttccgttttgcttacaagagctccaaggccggcatgcgctccatacttttagcctggagcgaacctgctcgtaccaagactttttgtgggcagacgagggccgcctccttcatgtgggagcacaagaccttgctacctggcacactctgtccccgttaggcttgtggg

SEQ ID NO: 1263 - DNA, 488 bp, Homo sapiens
  misc_feature (1)...(488): n = a,t,c or g
ctagatccccctcngntttagaacccgntcggaatgcccggcccgacgatttnntanngccaagcggaaaagacgggcctcttcctccgactcccgagcgcgagtccctcattttgggttctcagcgaacggcggcagcggcggcggctggaacaatcactcggccaagggcgacagccaactgctgtgagtgcacggggagaggcccaggcagcggcggcggcggcggctctcgggttgcggtgaagaatgtcagccactagcgtggatcaaagacctaaagggcaaggaaataaagtttcagtacaaaacggttcgattcatcaaaaagatggctgtaatgatgatgattttgagccctacttaaggagcccagacaatcaaagtaacagctatccaccaatgtcagatccatacatgcctagntactatgctccatccattggatttccatattctcttggggaagcagcgtggtcacagctggn

SEQ ID NO: 1264 - DNA, 352 bp, Homo sapiens
ccggacagccctgctccctgcagccaggtgtaggttctggagccactggggccaaagtgagagtccatcggtcttacagcgcttgggccacggcggcggccctgggagcataggtggagcgaccccattacgctaaagatgaaaggctgggggtggctggccctgcttctgggggccctgctgggaaccgcctgggctcggaggagccaggatcttcactgtggagcatgcaaggctgtgcgtcgacgcgtccgtcaattcaacatctatgattactaaaaatggagaaggggtgtttgttactcctattgtagggccggcaccatatcacaatggctgatttatagattgt

SEQ ID NO: 1265 - DNA, 542 bp, Homo sapiens
tttcgtggcttctgaggtctccaaaatgcctgtcccagcctcctggccccatcctcctggtcctttcctgcttctgactctactgctgggacttacagaagtggcaggtgaggaggagctacagatgattcagcctgagaagctcctgttggtcacagttggaaagacagccactctgcactgcactgtgacctccctgcttcccgtgggacccgtcctgtggttcagaggagttggaccaggccgagaattaatctacaatcaaaaagaaggccacttccccagggtaacaacagtttcagacctcacaaagagaaacaacatggacttttccatccgcatcagtagcatcaccccagcagatgtcggcacatactactgtgtgaagttccggaaagggagccccgaccacgtggagtttaagtctggagcaggcaccgagctgtctgtgcgtggtgagtacagcgtgggcttccttagtcaggtgtggtggtggctgagcagccaccctttcatgaactgatgtcaccccttctccagat

SEQ ID NO: 1266 - DNA, 457 bp, Homo sapiens
tttagttttacctagttttatttgtctatttgagtattgtccttgaatttaaaatttttttcagccccaactgatacacacacatatacatacataatacatgtgtgtgtgtgtagcttacagagtgtttataggaaactgattttgtatactttggctactttgttgtaagttctagttttttttcttttattattaaactagtgcacgacatcaatgctatatgattggtgtttcgttgacctaaaaataatgcatgccatcttcttttcacagctgtgtgccaaccacgatgcaaacatggtgaatgtatcgggccaaacaagtgcaagtgtcatcctggttatgctggaaaaacctgtaatcaaggtaggaaaacagtctgacataaatacacaatcgaagacacctctatcactcccaaattaaaaatattcttatctcaaactactttcca

SEQ ID NO: 1267 - DNA, 1029 bp, Homo sapiens
tttcgtgccgcttccggggtcgggcgcctggatagctgccggctccggcttccacttggtcggttgcgcgggagactatggcgtcctcctcggtcccaccagccacggtatcggcggcgacagcaggccccggcccaggtttcggcttcgcctccaagaccaagaagaagcatttcgtgcagcagaaggtgaaggtgttccgggcggccgacccgctggtgggtgtgttcctgtggggcgtagcccactcgatcaatgagctcagccaggtgcctcccccggtgatgctgctgccagatgactttaaggccagctccaagatcaaggtcaacaatcaccttttccacagggaaaatctgcccagtcatttcaagttcaaggagtattgtccccaggtcttcaggaacctccgtgatcgatttggcattgatgaccaagattacttggtgtcccttacccgaaacccccccagcgaaagtgaaggcagtgatggtcgcttccttatctcctacgatcggactctggtcatcaaagaagtatccagtgaggacattgctgacatgcatagcaacctctccaactatcaccaggtcaggcctctctctagccccattctttccctctcctccctactcacatatagctcagctattgtcagtaatagatgccaactggggagaaaactcattggaagagagaatccataatcatatcccgccctaaatgggtgagggaagctattctgtctgataagatttacaggctgggggcagtggctcacacctcggcctccccaagtgctgggattacaggcgtgagctagcatgcctggccagggattaaaatattcaaacatgttgtgtgtacccagatatgctgttaatttaggaaaaacagtacaatttctatgaagtggttgtgactattttctgtagtcaatacagttgggatatctgatctatttctctgtctactttggaaatgattgcataataaataaaattttactgtttttttaaaaacaaaata

SEQ ID NO: 1268 - DNA, 403 bp, Homo sapiens
aggtgaaggttatgaattatttgtcccatctaatggtgttccagcagtctgccacatggtgggaaggaggccccacagagctgtgctgtctccttcccaggatgagctggagcacagcctgggggagagtgcggcccagggggcagctggagtggtgctctgggtgagctgggaaaatacaagaaccaaggtgagcttaggcctggcatgagggtgggggtgggggaggggtggggccattaagctgacggggtagaccctgacttaccctttctacctgcaaagtcctggctgaccagcaggtgagtgcctcagtgccctgggtgggtccatacatggccatggtgtccctgacgctatcctcccttcccacatagaaatcatgtcaggccatcaaggagta

SEQ ID NO: 1269 - DNA, 1107 bp, Homo sapiens
tttcgtccggtgttcgcggaggagtcgaggcacggagaggcttcgggggagggacggaaagaagggtggcccgccaggcgggcggggtccatggattcggggtgagggccgtccgcggcctcgctttcgcctcctccgagccgggccggcgatggccgcagctgtgaggcgagcagaagaatagaaggaaggtgataggatgtgatgatagaatttgtgatagccaagcaacaacttttcctaattcggcatgttaaaaaataagggtcactcatctaagaaagataacttggcagtcaatgcagttgctttacaagatcacattttacatgatcttcaacttcgaaatctttcagttgcagatcattctaagacacaagtacaaaagaaagagaacaaatctctaaaaagagatacaaaggcaataatagatactggacttaaaaaaactacacagtgccccaaactagaagactcagaaaaagaatatgttcttgatcccaaaccgccgccgttgactttggcacagaagttgggcctcattgggcctccaccacctccactgtcatcagatgaatgggagaaggtgaaacagcgctctctcctgcaaggggactccgtgcaaccatgccccatctgtaaagaagaattcgagcttcgtcctcaggtgtttagcatacgagggtgagctagagagctcctgggctgtttcctagggacgaggcccagagctggagcctaagattccaagcttcctttttccagtttcatcctcctgtgtgagcctcacacacttccattttgttttccattaattaaagtgtgtgaagagctaaacaccctcattaaatagttttgtttgtttactaactggtattctcaagtactaaagtttgtacaaaaggaatgtttctgttcaacaggccccatgcggctgtgcagacaactggggggcttcccaggagcagctgtgtcccagcgcgggaaggatgaaagcagagggactcttaagtggttttgtgatttgagtcagaaacgaaaaaaaaacctgtgcttgaatgtctccaaagaatttgtgagagaatctttaagaaaagtaaaatcttt

SEQ ID NO: 1270 - DNA, 588 bp, Homo sapiens
acgggtcgacgatttcgtccgccccctccccccaggcctgatgagcaggtctcgagcctccatccatcgggggagcatccccgcgatgtcctatgcccccttcagagatgtacggggaccctctacgcaccgaacccaatacgttcattccccgtatgatcgtcctggttggaaccctcggttctgcatcatctcggggaaccagctgctcatgctggatgaggatgagatacaccccctactgatccgggaccggaggagcgagtccagtcgcaacaaactgctgagacgcacagtctccgtgccggtggaggggcggccccacggcgagcatgaataccacttgggtcgctcgaggaggaagagtgtcccaggggggaagcagtacagcatggagggtgcccctgctgcgcccttccggccctcgcaaggcttcctgagccgacggctaaaaagctccatcaaacgaacgaagtcacaacccaaacttgaccggaccagcagctttcgccagatcctgcctcgcttccgaagtgctgaccatgaccggtacaggggctggagcatgtgggatgagattgatgtaat

SEQ ID NO: 1271 - DNA, 407 bp, Homo sapiens
tttcgtagggtctgagacggtgggagcggttgtgtgattatggaggtaggaacctgatagctaagaaggctggcgagagaacgcggccgaccgggttgaagcagggacgggaagccgggcggagaggcgactgacgggagaggagagagagcggggtttggggagtgttgtcagaatgtcagggtcaaaagccatcgctccaagctgactccctgctccccctaacttatccccgcgactttcttttggtttccagtttcccggaggaaatgacaattacctgacgatcacagggccttcgcaccccttcctgtcaggggccgaggtgagccagagctgccgacgccgcgggggtagggcctgaggcagcggtggggtagggtagtggggaggagagcacggactcc

SEQ ID NO: 1272 - DNA, 388 bp, Homo sapiens
  misc_feature (1)...(388): n = a,t,c or g
aaacnaagcgctgtcacgatttcgtggaaatggcgctccgtcatggggatacagacgagccccgccctgctggcctccctgggggcggggctggtcactctgctcgggctggctgtgggctcctacttggttcggaggtcccgccggcctcaagtcactctcctggaccccaatgaaaaggacctgctacgactgatagacaagacgctctctgcacggtccccatgcaaacatatctacctctccacccgaattgatggcagcctgagcatcaggccatacactcctgtcaccagtgatgaggatcaaggctatgtggatattgacatcaaggtctacctgaagggtgtgcaccccacatttcctgagggagggaagatgtctcact

SEQ ID NO: 1273 - DNA, 1339 bp, Homo sapiens
atggcggcgcgcaccctgggccgcggcgtcgggaggctgctgggcagcctgcgagggctctcggggcagcccgcgcggccgccgtgcggggtgagcgcgccgcgcagggcggcctcgggaccctcgggcagcgctcccgcagttgcagcagcagcagcacagccaggctcgtatcccgcgctgagtgcacaggcagcccgggagccggccgccttctgggggcctctggcgcgggacactctcgtgtgggacacaccctaccacaccgtctgggactgcgacttcagcactggcaagatcggctggttcctgggaggccagttaaatgtctctgtcaactgcttggaccagcatgttcggaagtcccccgagagcgttgctttgatctgggagcgcgatgagcctggaacggaagtgaggatcacctacagggaactactggagaccacgtgccgcctggccaacacgctgaagaggcatggagtccaccgtggggaccgtgttgccatctacatgcccgtgtccccattggctgtggcagcaatgctggcctgtgccaggatcggagctgtccacacagtcatctttgctggcttcagtgcagagtccttggctgggaggatcaatgatgccaagtgcaaggtggttatcaccttcaaccaaggactccggggtgggcgcgtggtggagctgaagaaaatagtggatgaggctgtgaagcactgccccaccgtgcagcatgtcctggtggctcacaggacagacaacaaggtccacatgggggatctggacgtcccgctggagcaggaaatggccaaggaggaccctgtttgcgccccagagagcatgggcagtgaggacatgctcttcatgctgtacacctcagggagcaccggaatgcccaagggcatcgtccatacccaggcaggctacctgctctatgccgccctgactcacaagcttgtgtttgaccaccagccaggtgacatctttggctgtgtggccgacatcggttggattacaggacacagctacgtggtgtatgggcctctctgcaatggtgccaccagcgtcctttttgagagcaccccagtttatcccaatgctggtcggtactgggagacagtagagaggttgaagatcaatcagttctatggcgccccaacggctgtccggctgttgctgaaatacggtgatgcctgggtgaagaagtatgatcgctcctccctgcggaccctggggtcagtgggagagcccatcaactgtgaggcctgggagtggcttcacagggtggtgggggacagcaggtgcacgctggtggacacctggtggcagacag

SEQ ID NO: 1274 - DNA, 3750 bp, Homo sapiens
tttcgtcctcaggggaccccgcgcagtccagcttctcacgttctcactatgtctgctccagacgaagggagacgggatccccccaaaccgaagggcaagaccctgggcagcttctttgggtccctgcctggcttcagctctgcccggaacctggtggccaacgcacatagctcggcgagagcccggccggccgctgaccccacaggagcgcctgctgccgaggctgcccaaccacaggctcaggtggctgcccacccagagcagacggccccatggacggagaaggagctgcaaccttcggaaaagatggtgtccggggccaaagacctggtgtgttccaagatgtccagggccaaggatgccgtgtcctccggggtggccagcgtggtggacgtggctaagggagtggtccagggaggcctggacaccactcggtctgcacttacgggcaccaaggaggtggtgtccagcggggtcacaggggccatggacatggctaagggggccgtccaagggggtctggacacctcgaaggctgtcctcaccggcaccaaggacacggtgtccactgggctcacgggggcagtgaatgtggccaaagggaccgtacaggccggtgtggacaccaccaagactgtgctgaccggcaccaaagacacagtgactactggggtcatgggggcagtgaacttggccaaagggactgtccagactggcgtggaaacctccaaggctgtgctgaccggcaccaaagatgctgtgtccactgggctcacaggggcagtgaatgtggccagaggaagcattcagaccggtgtggacaccagtaagactgtcctaacaggtaccaaggacaccgtctgtagtggggtgactggtgccatgaatgtggccaaaggaaccatccagaccggcgtggacaccagtaagactgtcctaacaggtaccaaggacaccgtctgtagtggggtgactggtgccatgaatgtggccaaaggaaccatccagaccggcgtggacaccagtaagactgtcctaacaggtaccaaggacaccgtctgtagtggggtgactggtgccatgaatgtggccaaaggaaccatccagaccggcgtggacaccaccaagactgtcctaactggcaccaagaacactgtctgcagtggggtgaccggtgccgtgaacttggccaaagaggccatccaggggggcctggataccaccaagtctatggtcatgggtacgaaagacacgatgtccactgggctcacaggggcagcgaatgtggccaagggggccatgcaaactgggctgaacacaacccaaaatatcgcaacaggtacaaaggacaccgtctgcagtggggtgactggtgccatgaatttggccagaggaaccatccagacaggcgtggacaccaccaagatcgttctaactggtaccaaggacactgtctgcagtggggtcaccggtgctgcgaatgtggccaaaggggccgtccagggcggcctggacactacaaagtctgtcctgactggcactaaagatgctgtgtccactgggctcacaggggctgtgaacgtggccaaagggaccgtccagaccggcgtagacaccaccaagactgtcctaaccggcaccaaggacaccgtctgcagtggggtgaccagtgctgtgaacgtggccaaaggggccgtccaggggggcctggacaccaccaagtctgtggtcataggtacaaaagacacgatgtccactgggctcacgggggcagcgaatgtggccaagggggctgtccagacaggtgtagacacagccaagaccgtgctgaccggcaccaaggacacagtgactactgggctcgtgggggcagtgaatgtcgccaaagggaccgtccagacaggcatggacaccaccaaaactgtcctaaccggtaccaaggacaccatctacagtggggtcaccagtgccgtgaacgtggccaagggggctgtgcaaactgggctgaaaacgacccaaaatatcgcgacaggtacaaagaacacctttggcagtggggtgaccagtgctgtgaatgtggccaaaggggctgcccagacaggtgtagacacggccaagaccgtgctgaccggcaccaaggacacagtcactactgggctcatgggggcagtgaatgtcgccaaagggactgtccagaccagtgtggacaccaccaagactgtcctaactggtaccaaggacaccgtctgcagtggggtgaccggtgctgcgaatgtggccaaaggggccatccaagggggcctggacactacaaagtctgtcctgactggcactaaagatgctgtgtccactgggctcacaggggctgtgaagttggccaaagggactgtccagaccggcatggacaccaccaagactgtgttaactggtaccaaggatgctgtgtgcagtggggtgaccggtgctgcgaatgtggccaagggggccgtccagatgggtgtagacacggccaagaccgtgctgaccggtaccaaggacactgtctgcagtggggtcaccggtgctgcgaacgtggccaagggtgctgtgcaaactgggctgaaaacgacccaaaatatcgcaacaggtacaaagaacacccttggcagtggggtgaccggtgctgcgaaagtggccaaaggggccgtccaggggggcctggacactacaaagtctgtcctgactggcactaaagatgccgtgtccactgggctcacaggggctgtgaacttggccaaagggactgtccagaccggcgtggacaccagcaagactgtcctgaccggtaccaaggacaccgtctgcagtggagtcactggtgccgtaaatgtggccaaagggaccgtccagacaggtgtggacacagccaagacggtgctgagtggcgctaaggatgcagtgactactggagtcacgggggcagtgaatgtggccaaaggaaccgtgcagaccggcgtggacgcctccaaggctgtgcttatgggtaccaaggacactgtcttcagtggggttaccggtgccatgagcatggccaaaggggccgtccaggggggcctggacaccaccaagacagtgctgaccggaaccaaagacgcagtgtccgctgggctcatggggtcagggaacgtggcgacaggggccacccacactggcctcagcaccttccagaactggttacctagtacccccgccacctcctggggtggactcaccagttccaggaccacagacaatggtggggagcagactgccctgagcccccaagaggccccgttctctggcatctccacgcccccggatgtgctcagtgtaggcccggagcctgcctgggaagccgcagccactaccaagggccttgcgactgacgtggcgacgttcacccaaggggccgccccaggcagggaggacacggggcttttggccaccacacacggccccgaagaagccccacgcttggcaatgctgcagaatgagttggaggggctgggggacatcttccaccccatgaatgcggaggagcaagctcagctggctgcctcccagcctgggccaaaggtgctgtcggcggaacaggggagctacttcgttcgtttaggtgacctgggtcccagcttccgccagcgggcatttgaacacgcggtgagccacctgcagcacggccagttccaagccagggacactctggcccagctccaggactgcttcaggctg

SEQ ID NO: 1275 - DNA, 415 bp, Homo sapiens
cgtccgactagatcttgattcaatagaaaaatgcagcaaacttttaataacagactctctacatgactaagggaacttatctatggatagtagtaacatttttctaccatttgtccgtaataaaccatacttgctcgtaagaaagagaaaacatgtccttgtaaaaaagaaataggaaggaattcccgatctggcatgtattccagaaaggccatgtacaagaggaagtactcagccgctaacaccaaggttgaaaagaaaaagaaggagaaggttctcgcacctgttacaaaaccagttggtggtgacaagaacggcggtacccgggtggttaaacttcccacaatgcctagatattatcctactgaagatgtgcctcgaaagctgttgagccacggcaaaaaacccttcagtc

SEQ ID NO: 1276 - DNA, 595 bp, Homo sapiens
ggggcggttccttgcgcttcagtcccccccgggtcccctcctgctcccgggttttctgccccgttcccccgggtggctgtgggctcccgagccccatgtcggccagccggccccagagccccacgaccccatggtgtctcccaagaaggtacatgaagcacaagcgcgacgatgggcccgagaagcaggaggacgaggcggtggacgtgacgccggtgatgacctgcgtgtttgtggtgatgtgctgctccatgctggtgctgctctactatttctacgacctcctcgtgtacgtggtcatcgggatcttctgcctggcctccgccaccggcctctacagctgcctggcgccctgtgtgcggcggctgcccttcggcaagtgcaggatccccaacaacagcctgccctacttccacaagcgcccgcaggcccgtatgctgctcctggcgctcttctgcgtggccgtcagcgtggtgtggggcgtcttccgcaacgaggaccagtaagtgctgcttcccccgggccccggcgggcagcggagtcctcgggcgcaccaaggctcctggggccctgactccctgccctccctggaggc

SEQ ID NO: 1277 - DNA, 869 bp, Homo sapiens
atctcagagtggcggaattcgccgggaccagccgctcggggccgggctgatacagccgcttcaccgtgcccctgcccgcgaccatggcctcctccgaggtggcgcggcacctgctctttcagtctcacatggcaacgaaaacaacttgtatgtcttcacaaggatcagatgatgaacagataaaaagagaaaacattcgttcgttgactatgtctggccatgttggttttgagagtttgcctgatcagctggtgaacagatccattcagcaaggtttctgctttaatattctctgtgtgggggaaactggaattggaaaatcaacactgattgacacattgtttaatactaattttgaagactatgaatcctcacatttttgcccaaatgttaaacttaaagctcagacatatgaactccaggaaagtaatgttcaattgaaattgaccattgtgaatacagtgggatttggtgaccaaataaataaagaagagaggcagcttggcagaagccagtctactgaaaatcctcagaagtacaggtctgagcagcatcctgttgagcctaagaaatgtaccagcttctggaagggggccctgggcaagtgggctggaatagagtcgagtggccagtctgcacagcagccttacctccccattaactcacctccccatcgactggctgatgttgctgatgtccacctcttcagttcagttctgtctggggcatttggatgttatcatctagatgttactgtcaatgagttcaagaaacaacaaaatagggacgaacaggaaggttatagcaagggagaccaagagcagggttcctggaagcatggtgcagacccacttcgtggaggagagatg

SEQ ID NO: 1278 - DNA, 458 bp, Homo sapiens
  misc_feature (1)...(458): n = a,t,c or g
cgcgggcgttcgatgtgagaaggaaaaagagcctcagaccctgctgcccaagggacttccatgctggctgtctgactgtgagtggccccagcaccgtgatgggcgccgtgggggaatccctgagtgttcagtgtcggtatgaagagaaatacaagacgtttaacaaatactggtgcagacaaccatgcttgccaatttggcatgaaatggtggagaccggagggtctgagggagtggtgaggagtgaccaagtgatcatcacggaccatcctggagacctcaccttcaccgtgaccttggagaacctcacggcagacgatgcaggaaaataccgatgtgggattgcaacaatactgcaggaagatggcctgtctggtttcctgcccgatcccttcttccaggttcaagtgctggtctcatcggcctccagtactgagaactctgtgaagacacctgcn

SEQ ID NO: 1279 - DNA, 435 bp, Homo sapiens
tttcctggcctcgtggcaggcagcagcagcagtgaatgtggctacagaattgctaatggagtgggccatgccatgggaactgttttgggggtgttcctggctcgactgaagcttaaaaatgaactggtgactttagcagagaagtgagaccctgcagctgagggagcatcatggcagtgtttctggaggccaaggatgcccattcggtcctgaaacgattccctcgtgccaatgagttcctggaggagctgcgccagggcaccatcgagcgagagtgcatggaggagatctgcagctacgaggaggtcaaggaagtgtttgagaacaaagagaaaacgatggagttctggaaagggtacccaaatgcagtctactctgtccgagacccctcgcagagctcagatgccatgtatgtggtggtaccccttctggggg

SEQ ID NO: 1280 - DNA, 517 bp, Homo sapiens
gcgggcgacatggcacaacgcggggaaggagcgtgaggcagtacagctgatggcgggggccgagaagcgagtcaaggcctcccactccttcctccgagggctgtttggaggaaacacaagaatagaagaggcttgtgaaatgtataccagagctgcaaatatgttcaagatggctaaaaattggagtgctgcaggaaacgcattttgtcaggcagccaagctccacatgcagcttcagagcaaacatgactctgctaccagctttgtggatgctggaaatgcttacaaaaaggcagatccccaaggtaagacagccaggcatgtagcatgctatctctgtgtgtaactaaccagtcagtacttccctcaacgttaaggtcagtgttggtgtgctttcaagtcctggtaaaaaggaatttttgtattttggaataatagagaattttgataaccttagggatttttcttttttaatcatttggggggctttatgaggagaaattatgttaaatttata

SEQ ID NO: 1281 - DNA, 841 bp, Homo sapiens
cggacgcgtgggctacaaggctgatttctcccatccctgcaatgctgaaagtctgtgcccttctaagcaaattctagtttccctgacaattaccctaatggaatgcctggatgtatgaatattgattccgatgacagtacttttacagatggacctgagatatttctgctggttcttcactgacaacacacaacatatggatgatcataactttcccatataccccactagggcaaaaccagaaactgagaaagctagatggaagaataatgatgtggaaggggagttctccactaggaaggatccgatgagtagatagacacaaggacaaagagggcctaactttgggctgtggaagcggagttgcactcataggagccatagtgagtcattgcatcagaaccactaagcatcagtcatgaagagcaaacgggcttgctgttacaggagctaaaccctgaacccttccatcgtggttacagagagcttctgggggacagcatgagacagcttatcacttccccaatattatgaggaaacccaaaggcccagatgccacttgggaaaggagaaccaagaaggaaggacttcagaaaaggaagaaaccatgaaacattaagtaatttacaaactagactcttctttattctcttattttatttatttctttatttttgagacagagtctcactttctgcccttgatgaaatggactggcccaatcatggctcactgcagcctcaaaatcctggcctcaagaaattctgcagactcagccttcctaagtgctggggatacaagcttgagccacagcacctgacctagactgttttaaactaga

SEQ ID NO: 1282 - DNA, 1640 bp, Homo sapiens
gtagtgcatcaataattattcggggtgataagcgagcatcaggagaagttgggatagctccgtcatctaggcacatcctcattggggaaccctcagcaaaatataatggtaccgctattatcagccttgttcgaggcccagggattttgggggaggtcacagtgttctggaggatattccctccttccgtgggggaatttgctgaaacatcaggaaaactgacaatgcgagacgaacagtctgcagtcattgtagtaatacaggctttgaacgatgacattcccgaggaaaaaagcttctatgagtttcagctcactgcagtcagtgagggaggagttctgagtgaatccagcagcactgccaacatcacggtggtggccagcgactctccctatggccgatttgccttttcacatgagcaacttcgagtgtcagaagcacagagggttaacatcacaatcatccgttccagtggagattttggccatgtgcgactctggtacaagacgatgagcgggacagcggaagcaggcttggattttgttcctgcagcaggggagctcctctttgaagcaggggagatgaggaaaagtctgcatgttgaaatccttgatgatgactatcctgaaggcccagaggaattttctctaacaattacaaaggtggaactccagggaagagggtatgattttaccattcaagaaaatggacttcagatagatcaacctcctgaaataggaaacatctccattgttcgcatcataataatgaaaaatgataacgcagaaggcatcattgaatttgacccaaagtatactgccttcgaagtggaggaagatgttgggctgatcatgatcccagtggtgaggctacatggaacttatggctatgtgacagctgatttcatctctcagagctcctctgccagtcccggaggtgttgattacattttgcatggcagtacagtcacctttcagcatgggcaaaacttaagttttataaatatctccatcattgatgacaatgaaagtgaatttgaggagcccattgaaattctactcactggagctactggaggagcggtccttgggcgccacctagtgagcagaatcataatagctaagagtgactctccctttggagttataaggtttctcaatcaaagcaaaatttctattgctaatcccaattccacaatgattttatcactggtgctggagcggactggaggactcttgggagagattcaggtgaactgggagacagtaggacccaactctcaagaagccttactgccacagaatagagacattgcagacccagtgagcgggttgttctattttggagaaggagaaggaggagtgagaaccataattctgacaatctatcctcatgaagaaattgaagttgaagagacattcattattaaacttcatcttgtgaaaggagaagctaaattagactccagagctaaagatgttacattaaccatacaagagtttggtgacccaaatggagttgttcagtttgctcctgaaactttgtctaagaagacttattcagagcctctggctctggaagggcccctgctcattaccttctttgtcagaagagtcaagggcacctttggagagattatg

SEQ ID NO: 1283 - DNA, 517 bp, Homo sapiens
  misc_feature (1)...(517): n = a,t,c or g
cccacgcgtccggctcggcctctccccggcacgttctcagctgctcctgtttcaaacccagcgagggagccgcgagcgaggctcaccgtccccggcgtgcaggatccggggctgctgagcgctcgctcccgcgtgtccggcgcttggagtccccgcggcaggagaggagtcgggacactagagctccaggggcgcctgtgggctccagggcctccggcttccccagtccccttcagctaaagccccagagacgtgctcagccccaggacctctgcggaacaagatccggattgagaagccactgcaactaccgaaatgggcagcaaaaccttgccggcgccggtgcctatccacccttccctgcagctcaccaactactccttccttcaggcagtgaacggcctgcccacagtgccttcggaccatctgcccaacctgtatggtttcagcgcgttgcacgctgtgcacctgcatcagtggacgctgggctacccggccatgcacttgcngcgctctt

SEQ ID NO: 1284 - DNA, 569 bp, Homo sapiens
tttcgtgtctccctcccgcgcgatggcctcggcgctgatctatgtctccaagttcaagtccttcgtgatcttggtcgtcaccccgctcctgctgctgccactcgtcattctgatgcccgccaagtttgtcaggtgtgcctacgtcatcatcctcatggccatttactggtgcacagaagtcatccctctggctgtcacctctctcatgcctgtcttgcttttcccactcttccagattctggactccaggcaggtgtgtgtccagtacatgaaggacaccaacatgctgttcctgggcggcctcatcgtggccgtggctgtggagcgctggaacctgcacaagaggatcgccctgcgcacgctcctctgggtgggggccaagcctgcacggctgatgctgggctttatgggcgtcacagccctcctgtccatgtggatcagtaacacggcaaccacggccatgatggtgcccatcgtggaggccatattgcagcagatggaagccacaagcgcagccaccgaggccggcctggagctggtggacaagggcaaggccaaggagctgccag

SEQ ID NO: 1285 - DNA, 728 bp, Homo sapiens
cccttgtgcctgcagggtcgacaggcagggtcagtgtatgaggctttttgggtgggttttgggacaaactaggggatgcatggccctctctaggggtcatccaataccccagctctgaccagttgttcccctgctagcccagttggcctctgattttaggagaagccagaagtccagatttttctgtgagctctccttagttgtccacattggaagcaaacttttaaatgctgtgtatgcgtggcccaagcaaaacacatctggaggccagattgaatccacaggctgaaagcagtcaaccaggcctgatgtcatgaccctgtatcctctccactggcaggaagagatgtcaggagaaagtgtggtgagctcagcggtgccagcggctgctacccgcaccacttccttcaagggcacgagccccagctccaaatacgtgaagctgaatgtgggtggagccctctactataccaccatgcagacgctgaccaagcaggacaccatgctgaaggccatgttcagcgggcgcatggaagtgctcaccgacagtgaaggctggatcctcattgaccgctgtgggaagcactttggtacgatactcaactaccttcgagacggggcggtgcctttacccgagagccgccgggagatcgaggagctgctagcagaagccaagtactacctagtccaaggcctggtggaagagtgccaggcggccctacaagtac

SEQ ID NO: 1286 - DNA, 574 bp, Homo sapiens
cggccgcggggccgaggagcctgggccgggccgggcggggactactccggagtcaggaggcagcagcggcggaggacgaggatctctggcagtcagcgcggctcggacgccgccggcaccatgggctgctgcaccggacgctgctcgctcatctgcctctgcgcgctgcagttggtctcagcattagagaggcagatctttgacttccttggtttccagtgggcgcctattcttggaaattttctacacataatagttgtcatattgggtttgtttgggaccattcagtacagacctcgatacataatggtgtatacagtgtggactgccctctgggtcacctggaatgtgttcattatctgcttttatttggaagtaggtggactctcaaaggacaccgatctaatgacattcaatatctctgtacatcggtcatggtggagagaacatgggcctggttgtgtcagaagagtgctgcctccctcagcccatggcatgatggacgattacacgtacgtctctgtcacaggctgcatcgttgacttccagtacctggaggtcatccacagtgctg

SEQ ID NO: 1287 - DNA, 614 bp, Homo sapiens
cggctggtggctggtgcaccggcctgcgccatggccaggcctttttctctagtcaggaccgtccggatggggccttagggccccgccccgtctagcctggcccggcctgcgcgagccccgcaagctctgcaggctggctagcgggcagaccccagccccacgtcctgctacccacctacgaaggatccggggatgggcagcgccacccggcccgctccagagtcagcatgggtctccgtgaggccgggtgacgctccagaatgggagacaagccaatttgggagcagattggatccagcttcattcaacattactaccagttatttgataatgatagaacccaactaggcgcaatttacgtaagtttccagctctagggccagaatggaccctaggggatcaatttggatgttgggccagtgtgtccagttcacaagttctggcagccctatctggactggctacacctctgtatctgaacttttgtccacgggacaggggtctgacgcttggcccaagtaattacctggtctatacttttccttttgtcaacttccacaagggtgagaatcctgctgttctgggcttgccattccatgtggccagcatttgtc

SEQ ID NO: 1288 - DNA, 478 bp, Homo sapiens
atggaggaagaagatgagtctcgagggaagacagaggagtcgggggaggatcggggcgatggtccgccagacagagaccccacgctttctccttctgcctttatcctgcgagccatccagcaggctgtgggaagctccctgcagggggacctgcccaatgataaagatggctctcggtgtcatggccttcgatggcggcgctgccggagtccacggtcagagccccgttcccaggaatcagggggcactgacacggctactgtgttggacatggccacggacagcttcctcgcagggctggtgagtgtcctggatcccccggatacctgggttcccagccgcctggacctgcggcctggcgaaagtgaggacatgctggagctggtggctgaggtccgaatcggggacagagatcccatccctctgcctgtgcccagcctgctgccccgtctcagggcctggaggacgggcaaaacgg

SEQ ID NO: 1289 - DNA, 438 bp, Homo sapiens
  misc_feature (1)...(438): n = a,t,c or g
taccggtccggaattnnnagtcgacgatttcgtggcggcgatctgtcgccgggcccccttctccttctcactcctcaccctccagggtagcggctaccggagcgctgcagggggctgcgcctgcctgctccgccccagacctgtcggcgaaaggtagtttatgccaacgtgacttcattcatacagatgaaccaaggatcgggatagcagtataaaattagaatcaagacagctgactgctcagcaggatgccatcaactaacagagcaggcagcctgaaggaccctgaaattgcagagctcttcttcaaagaagatccagagaagctcttcacagatctcagagaaattggccatggaagctttggagcagcgtattttgcacgagatgtgcgtaccaatgaagtggtggccatcaagaaaatgtcttatagtggaa

SEQ ID NO: 1290 - DNA, 982 bp, Homo sapiens
  misc_feature (1)...(982): n = a,t,c or g
tttcgtcacacacgcacacgcaccctgccactgcagccgccatggatatcagctaacaacacacacccaggcgcgcgcgcgcgttcccactcgcaccacgcaggagtggcccccggcatccctaccctccttccccacccccaccacacccgctcaccagctcggctactgctcgctccggctgccgccgccgccgccgccgacgccaccaccactgcttcctctgctgcggggccacagccttgagtgtcattcaagggacagcacaacctcatccaagctctcctacctctgcccagccgtgcctctcatcctccccattcctcgtccacactccatccaaagaagagggaaagcaccgaatagaggggggcgaaggcaaagtctgctgttcttccccctgggcccccttgctcctccatcctcattctctcaccaccagcccccctaaccccaaggagcccaggaactgaggcgactcgccccactgccatgtccaaaagcttgaaaaagaaaagccactggactagcaaagtccatgagagtgtcattggcaggaacccggagggccagctgggctttgaactgaaggggggcgccgagaatggacagttcccctacctgggggaggtgaagcccggcaaggtggcctatgagagcggcagcaaattggtgtcggaggagctgctgctggaggtgaacgagacccccgtggcggggctcaccatcagggacgtgctggccgtgatcaaacactgcaaggaccccctccggctcaagtgtgtcaagcaaggtgagagcagcggcttgctcagtgttttgccgggcggtgggaccgctcggggcgcagggcaatgaaagggtggccgcgcatgttgaagggggtgtgttgcgcgatgatggggtgggggccagagagcacccgcagtgcaagtgagtttcgccggggattcgacgaaatcgtnncccgggaattccggac

SEQ ID NO: 1291 - DNA, 591 bp, Homo sapiens
aatttcgtcccgcgggaagctcggagcactcaggacgccgcgcgcccttccccgccctccctgaccagggagcagctcgctccaggcgcccagccgaggcccccagcccagtgggagcaagtcatagagaacaattcgagagacagagagacggagcgcgctttcctgctcagtcctgaaaagtgagccgctcccgggtttgcaacctcaagcttcgcagcagcggcggcggcggctgccgggaaggaggcaggtgcaggtgcaggagggaggcggctctgggctccgcgcctgggtcttggccatggcctcggtcctggggagcggcagagggtctggagggctgagcagtcaactcaaatgcaagtccaagaggaggaggaggcggaggtccaagcggaaagataaagtaagcatattgtcaaccttcctcgctcctttcaagcacctgagtcctggcatcacaaacacggaggatgacgacaccctcagtaccagcagcgcggaggtgaaggagaaccgcaacgtgggcaacctggccgcgcggccaccgccctccggggaccgggcccggggcggcgcgacccggcg

SEQ ID NO: 1292 - DNA, 749 bp, Homo sapiens
caacgtcgacgatttcgtgcggggctgtggggagggcacggactgacagacggactccggcggaatggggggtgtggctgctccgccagggtccccagggtgggagagcggctccgcggccaccgatgcccggaccccctctgtcttctgctagacatgctcttcctctcgtttcatgcaggctcttgggaaagctggtgctgctgctgcctgattcccgccgacagaccttgggaccggggccaacactggcagctggagatggcggacacgagatccgtgcacgagactaggtttgaggcggccgtgaaggtgatccagagtttgccgaagaatggttcattccagccaacaaatgaaatgatgcttaaattttatagcttctataagcaggcaactgaaggaccctgtaaactttcaaggcctggattttgggatcctattggaagatataaatgggatgcttggagttcactgggtgatatgaccaaagaggaagccatgattgcatatgttgaagaaatgaaaaagattattgaaactatgccaatgactgagaaagttgaagaattgctgcgtgtcataggtccattttatgaaattgtcgaggacaaaaagagtggcaggagttctgatataacctcagatcttggtaatgttctcacttctactccaaacgccaaaaccgttaatggtaaagctgaaagcagtgacagtggagccgagtctgaggaagaagaggcgtgtgt

SEQ ID NO: 1293 - DNA, 989 bp, Homo sapiens
cccactgatgtccctagtccgtgtggtggaattcgtggcagccagcagtgcccagaagaccccctcccgcctggaaaactactacatggtatgcaaggcagatgagaaatttaatcagctggtccattttcttcgcaatcataagcaggagaaacacctggtcttcttcaggtactcctctggtctctgtggtagaggcatcagggattcagccagaatgtgcagcacctgtgcctgtgtggaatactatgggaaggctctggaagtgctggtgaagggcgtgaagattatgtgcattcacggaaagatgaaatataaacgcaataagatcttcatggagttccgcaaattgcaaagtgggattttagtgtgcactgatgtgatggcccggggaattgatattcctgaagtcaactgggttttgcagtatgaccctcccagcaatgcaagtgccttcgtgcatcgctgcggtcgcacagctcgcattggccacgggggcagcgctctggtgttcctcctgcccatggaagagtcatacatcaatttccttgcaattaaccaaaaatgccccctgcaggagatgaagccccagagaaacacagcggaccttctgccaaaactcaagtccatggccctggctgacagagctgtgtttgaaaagggcatgaaagcttttgtgtcatatgtccaagcttatgcaaagcatgaatgcaacctgattttcagattaaaggatcttgattttgccagccttgctcgaggttttgccctgctgaggatgcccaagatgccagaattgagagggaagcagtttccagattttgtgcccgtggacgttaataccgacacgattccatttaaagataaaatcagagaaaagcagaggcagaaactcctggagcaacaaagaagagagaaaacagaaaatgaagggagaagaaaattcataaaaaataaagcttggtcaaagcagaaggccaaaaaaaaaa

SEQ ID NO: 1294 - DNA, 1042 bp, Homo sapiens
tacaactttgccagcactacagcctaagcttccagagtggacacggagaagggcatcagaaaaccattctggtgaggtccacacccataagtcaccatgtacaaggactgcatcgagtccactggagactattttcttctctgtgacgccgaggggccatggggcatcattctggagtccctggccatacttggcatcgtggtcacaattctgctactcttagcatttctcttcctcatgcgaaagatccaagactgcagccagtggaatgtcctccccacccagctcctcttcctcctgagtgtcctggggctcttcggactcgcttttgccttcatcatcgagctcaatcaacaaactgcccccgtacgctactttctctttggggttctctttgctctctgtttctcatgcctcttagctcatgcctccaatctagtgaagctggttcggggttgtgtctccttctcctggacgacaattctgtgcattgctattggttgcagtctgttgcaaatcattattgccactgagtatgtgactctcatcatgaccagaggtatgatgtttgtgaatatgacaccctgccagctcaatgtggactttgttgtactcctggtctatgtcctcttcctgatggccctcacattcttcgtctccaaagccaccttctgtggcccgtgtgagaactggaagcagcatggaaggctcatctttatcactgtgctcttctccatcatcatctgggtggtgtggatctccatgctcctgagaggcaacccgcagttccagcgacagccccagtgggacgacccggtcgtctgcattgctctggtcaccaacgcatgggttttcctgctgctgtacatcgtccctgagctctgcattctctacagatcgtgtagacaggagtgccctttacaaggcaatgcctgccccgtcacagcctaccaacacagcttccaagtggagaaccaggagctctccagagataaatggaaggtcttactcaactcggacttcctatcacacagtggtgcag

SEQ ID NO: 1295 - DNA, 518 bp, Homo sapiens
ccgggaatttatttttggggccccctaaaaaaaaaattaccttgcccccccccgggagtaaaaattggttcttttaaaagggccccccctttttttttttttgttggatggaaaatgttttattggagttcctgaggcaggaaagagttatggtaggttgagaatcagcgctcacgctagccccctcttccagtggaggtcatggtcactgggcatcaggagttgcgctcctcagtcctttcagcttaggaaaggcatcccagttgaggaaaggaagtttccttttgatagactcaaagagggcgtgccagttcaggaactcatcagccttaaacgcagatcgcaatttgtcgatgttcaggaacggggtgttaaaggcctcgggtcgtgacgcataattctcaatggtgctttcttcctcaggaccacccagggtggctccctgggcagagtggagcaccaggagggagaggagctccacggcaggaaggaccgggatcttcatggcgtcaagtttg

SEQ ID NO: 1296 - DNA, 551 bp, Homo sapiens
cagagtggagcctggacccattcatgggcatcatgagtggacaagtgggtgacctgagcccatcgcaggagaagtcgctggcccagttccgggagaacatccaagatgtgctatctgcgctgcccaatcctgatgactacttcctcctgcgctggctccaagctcggagctttgacctgcagaaatcagaggacatgctgaggaagcatatggagttccggaagcaacaagacctggccaacatccttgcctggcagcccccagaggtggtcaggctgtacaacgctaacggcatatgcggccacgacggtgagggcagccctgtctggtaccacattgtgggaagccaggaccccaaaggcctcttgctctcagcctccaaacaggagttgctcagggacagcttccggagctgcgagctgctcctgcgggagtgtgagctgcagagtcagaagctggggaagagggtggagaaaatcatagctatttttggtctcgaagggctgggcctgagggatctgtggaagccaggaatagagcttctccaggag

SEQ ID NO: 1297 - DNA, 410 bp, Homo sapiens
  misc_feature (1)...(410): n = a,t,c or g
acttcactctcttgaaaacccacccagatcctccccgttctgacaccatggtcagctcctgttgtggctccgtgtgctctgaccagggctgcggccaagacctctgtcaggagacctgctgccgccccagctgctgtgagaccacctgctgcaggaccacctgctgccgccccagctgttgtgtatccagctgctgcaggccccagtgctgccagtctgtgtgctgccaacccacttgttcccgccccagctgctgtcagaccacctgttgcaggaccacctgctaccgccccagctgttgtgtgtccagctgctgcaggccccagtgctgccagcctgtgtgctgccaacccacctgctgtcgccccagctgctgtgagacgacctgctgccaccctangtgctgcatc

SEQ ID NO: 1298 - DNA, 453 bp, Homo sapiens
ttttcgacgatttcgtgttgagctgtcctgggctgggtgccttgctctttgactgagactggagacagacggcaacagccacaggcagactgaggtggcaataggaaatctgccgagatgttcagtcaggtgcccaggaccccagcctcaggctgctactacctaaattccatgacacctgagggccaggagatgtacttgcgatttgatcagactacaagacgctctccttacaggatgagccggattctagcacgccatcagctagtgactaaaattcaacaagaaattgaggcaaaagaagcatgtgactggctccgtgctgccgggttcccgcaatacgctcagttatatgaggattcacaatttcccatcaacattgtggctgtcaagaatgatcatgattttcttgaaaaggaccttggagaacctctttgcagacgactaaatacg

SEQ ID NO: 1299 - DNA, 393 bp, Homo sapiens
cccaggttctcggagcttgtggacggcagaggaagagtgagcgccaggttcggtggctcacccagcaaagcagccaccgtgagatcacaacccacagcctcggcgcagctcgagaacatggaggaagcccccaagcgggtcagcctggccctccagctccctgaacacggcagcaaggacatcggaaacgtccctggcaactgttcagaaaacccctgtcagaacggaggcacttgtgtgccgggcgcagacgcccacagctgtgactgcgggccagggttcaaaggcagacgctgcgagctcgcctgtataaaggtgtcccgcccctgcacaaggctgttctccgagacaaaggcctttccagtctgggagggaggcgtctgtcaccacgtg

SEQ ID NO: 1300 - DNA, 391 bp, Homo sapiens
gaaggttattttatacttcgtatctccaattcttttgcaatcaatcttttggaaggaacagcagttgattgtgaatttagttttgaaccatcattaggcaaagatagcttctctagagagaatcatgcctgctaattacacgtgtaccaggccagatggagacaatacagattttcgatactttatttatgctgtgacatacactggcattcttgggccaggtctcatagggaatatattagccctgtgggtattctatgggtatatgaaagaaacaaaacgagctgtgatatttatgataaacttagccattgctgacttactacaagttctttccttgccactgaggatcttctactacttgaaacatgactggccatttgtgcctgtt

SEQ ID NO: 1301 - DNA, 7545 bp, Homo sapiens
  misc_feature (1)...(7545): n = a,t,c or g
cctggcataagggttggaattacaagtcagacagggctgagcagcaatcttcaagaaaattgctctaaattggccttcattagctctcacggcactgaaaaacaactccaatgcatgcctatggaagggagaggcagagcctctagctccatttcagacctgcaaggaaagggctttgagaagggaactggggagaagcacgttccaggtgtgggttcagctcggcactcgccacaggcctccgcaggtggctctccttggcagcgaggcaaggcgcaaacccgctggcttgggaagcctgaccctggcaggaagcgacgccggggttctccgcaagaagaaggcggcctccgggtgtcggccgcagccaggctactgtgctccggggcaaaccgctgcaaagtcctagtgaggcagaactcgacccccaacactcagcagcctgccgtccacccatccacacccccgtctcgccccctgccccaagctggcagatgccttgtcgcccctctaagaccgcacccggattgggtggctgcaaagacgctcgccaaagcgctcagagccccagggaagccgtggcgcctggcagctccctctcctctgggagatctgggggcgccagggctgccggggcctagcacagcgccgagaaccctcagcgtcgaggagccgggtgtcgagtgcaatcagctctgtctctatgcggatgtcacagatccagtgctctgcttgggacagaaggacccgggtgttgaaggcaagcattgtgaaaaggaaaaaatttcttcttcaaaggagctgaagcatgttcatgcaaaaagtgaaccaagtaaacctgcccggagactttcagagtctttgcatgtagttgacgaaaacaaaaatgaatccaaaatagaaagagaacataaaagacggacatctacccctgttatcatggagggggtacaggaagagactgacacaagagatgtaaaaaggcaagtagaacgctcagaaatttgcaccgaagagccccagaaacagaaaagcacacttaaaaacgaaaagcatctaaagaaagatgattctgaaacaccacatttgaaaagcctacttaagaaagaggtgaaatcctccaaggagaagcctgaaagagagaaaactccatcggaagacaaattgtctgtgaaacataaatataaaggtgattgtatgcataaaacaggtgatgagactgagcttcactcttctgagaaaggtttaaaagtagaggaaaatattcaaaagcaaagtcaacaaacaaagctttcttcagatgataaaaccgaacgaaaaagtaaacataggaatgaaaggaaattatcagtattaggcaaagatggaaagccagtttctgaatatattataaaaacagatgagaatgttcgtaaagaaaacaacaaaaaagagagacgcttgtcagctgaaaaaactaaggcagagcacaaatcaagaaggtcaagtgattctaaaattcagaaagattctctgggttccaagcaacatggtatcacattacagagaagaagtgaaagttattcggaagataagtgtgatatggactccactaacatggatagtaatttgaaaccagaagaggttgttcacaaggagaaacgacgaacaaagagcttgttagaagagaaacttgtgttgaagtctaaatcaaaaactcaaggcaaacaggtaaaagttgtagaaacagaattacaagaaggtgccacaaaacaggcaaccactccaaaaccagacaaggagaagaacacagaagaaaatgactcagaaaaacagcgtaagtctaaagttgaagacaaaccttttgaagaaactggtgttgaacctgtattagagactgcttcttcttcagcacatagtacacagaaggattctagtcatagagccaagttaccattagcaaaggagaaatataagagtgataaagactccacttccaccaggcttgagagaaagttgtcagatggccacaaaagcagaagcttaaagcatagtagtaaagacataaaaaagaaggacgaaaataaatcagatgacaaggatggtaaagaagttgacagtagtcatgaaaaggccagaggtaatagttcactcatggaaaagaaattaagtagaaggttgtgcgaaaatcggagaggaagcttgtcacaagaaatggccaaaggagaagaaaaattagcagcaaacactttgagcactcccagcggttcctcccttcagagaccaaaaaagagtggtgatatgacattgatccctgaacaagagccaatggaaattgattctgagccaggtgttgaaaatgtgtttgaagtatctaaaacccaagacaaccgcaataataattctcaccaagacattgactctgaaaatatgaaacaaaaaacttctgccactgttcaaaaggatgaattgagaacttgcacagcagattcaaaagcaacagctccagcttataagccaggccgtggaacaggagttaatagtaattctgaaaagcatgccgatcatagaagcaccttgaccaagaaaatgcatatacaaagtgctgtgtccaaaatgaaccctggggagaaagaacccattcatagaggaactactgaagtgaatatagattctgaaactgttcatagaatgttactgagtgccccatcagaaaatgatagggtacagaagaatttgaaaaacacagctgctgaagaacatgttgctcaaggagatgccactcttgaacattccacaaatttagactcctcaccatccttaagttcagtgactgttgtgcctctgagggaatcgtatgatccagatgtaattcctctgtttgacaaaagaactgttttggaaggtagcacagccagcacctcccctgcggatcactctgctctccctaaccaaagtctgactgttagggaatcagaagtccttaagacaagtgacagcaaagaaggtggtgaaggtttcacagtagatacaccagcaaaagcaagcatcactagcaaaagacacattccagaagctcaccaggctactttattggatggtaaacaaggaaaggtaatcatgcctcttggaagtaagttaacgggcgtgattgtggaaaatgagaatattaccaaagaaggtggcttagtggacatggccaagaaagaaaatgacttaaatgcagagcccaatttaaagcagacaattaaagcaacagtagagaatggcaagaaggatggcattgctgttgatcatgttgtaggcctgaatacagaaaaatatgctgaaactgtcaaacttaagcataaaagaagcccaggtaaagtaaaagacatatcaattgatgttgaaagaaggaatgaaaacagtgaggtagacaccagtgctggaagtggctctgcaccctctgttttacaccaaaggaacggacaaactgaggatgtggcaactgggcctaggagagcagaaaagacttctgttgccactagtactgaagggaaggacaaagatgtcaccttaagtccagtgaaggctgggcctgccacaaccacttcttcagaaacaagacaaagtgaggtggctttgccttgcaccagcattgaggcagatgaaggcctcataataggaacacattccagaaataatcctcttcatgttggtgcagaagccagtgaatgcactgtttttgctgcagctgaagaaggtggggctgttgtcacagagggatttgctgaaagtgaaaccttcctcacaagcactaaggaaggggaaagtggggagtgtgctgtggctgaatctgaggacagagcagcagacctactggctgtgcatgcagttaaaatcgaagccaatgtaaatagcgttgtgacagaggaaaaggatgatgctgtaaccagtgcaggctctgaagaaaaatgtgatggttctttaagtagagactcagaaatagttgaaggaactattacttttattagtgaagttgaaagtgatggagcagttacaagtgctggaacagagataagagcaggatctataagcagtgaagaggtggatggctcccagggaaatatgatgagaatgggtcccaaaaaagaaacagagggcactgtgacatgtacaggagcagaaggcagaagtgataactttgtgatctgctcagtaactggagcagggccccgggaggaacgcatggttacaggtgcaggtgttgtcctgggagataatgatgcaccaccaggaacaagtgccagccaagaaggagatggttctgtgaatgatggtacagaaggtgagagtgcagtcaccagcacggggataacagaagatggagaggggccagcaagttgcacaggttcagaagatagcagcgaaggctttgctataagttctgaatcggaagaaaatggagagagtgcaatggacagcacagtggccaaagaaggcactaatgtaccattagttgctgctggtccttgtgatgatgaaggcattgtgactagcacaggcgcaaaagaggaagacgaggaaggggaggatgttgtgactagtactggaagaggaaatgaaattgggcatgcttcaacttgtacagggttaggagaagaaagtgaaggggtcttgatttgtgaaagtgcagaaggggacagtcagattggtactgtggtagagcatgtggaagctgaggctggagctgccatcatgaatgcaaatgaaaataatgttgacagcatgagtggcacagagaaaggaagtaaagacacagatatctgctccagtgcaaaagggattgtagaaagcagtgtgaccagtgcagtctcaggaaaggatgaagtgacaccagttccaggaggttgtgagggtcctatgactagtgctgcatctgatcaaagtgacagtcagctcgaaaaagttgaagataccactatttccactggcctggtcgggggtagttacgatgttcttgtatctggtgaagtcccagaatgtgaagttgctcacacatcaccaagtgaaaaagaagatgaggacatcatcacctctgtagaaaatgaagagtgtgatggtctcatggcaactacagccagtggtgatattaccaaccagaatagcttagcagggggtaaaaatcaaggcaaagttttgattatttccaccagtaccacaaatgattacacccctcaggtaagcgcaattacagatgtggaaggaggtctctcagatgctctgagaactgaagaaaatatggaaggtaccagagtaaccacagaagaatttgaggcccccatgcccagtgcagtctcaggagatgacagccaactcactgccagcagaagtgaagagaaagatgagtgtgccatgatttccacaagcataggggaagaattcgaattgcctatctccagtgcaacaaccatcaagtgtgctgaaagtcttcagccggttgctgcagcagtggaagaaagggctacaggtccagtcttgataagcaccgccgactttgaggggcctatgcccagtgcgcccccagaagctgaaagtcctcttgcctcaaccagcaaggaggagaaggatgaatgtgctctcatttccactagcatagcagaagaatgtgaggcttctgtttccggtgtagttgttgaaagtgaaaatgagcgagctggcacagtcatggaagaaaaagacgggagtggcatcatctctacgagctcggtggaagactgtgagggcccagtgtccagtgctgtccctcaagaggaaggcgacccctcagtcacaccagcggaagagatgggtgacaccgccatgatttccacaagcacctctgaagggtgtgaagcagtcatgattggtgctgtcctccaggatgaagatcggctcaccatcacaagagtagaagacttgagcgatgctgccatcatctccaccagcacagcagaatgtatgccaatttccgccagcattgacagacatgaagagaatcagctgactgcagacaacccagaagggaacggtgacctgtcagccacagaagtgagcaagcacaaggtccccatgcccagcctaattgctgagaataactgtcggtgtcctgggccagtcaggggaggcaaagaaccgggtcccgtgttggcagtgagcaccgaggaggggcacaacgggccatcagtccacaagccctctgcagggcaaggccatccaagtgctgtttgtgcggaaaaagaagagaagcatggcaaggagtgccccgaaataggaccatttgcaggaagaggacagaaagagagcactttacacctcataaatgcagaagagaagaatgtattgttgaactcccttcagaaagaagataagagcccagagacagggacagcagggggcagtagcacagcaagttattcagcaggaaggggcttagaggggaatgctaactcacctgcccacctgagaggaccagaacagacgtctgggcagacggctaaggattcctctgtcagcagcattcgctatttggcagcagtaaacaccggtgctataaaagctgatgacatgccacctgttcaagggaccgtggctgagcattcctttcttcctgctgagcagcaggggtctgaagacaacttgaaaaccagtaccaccaaatgtattactggccaagaatcaaaaattgctccttcccacacaatgatccctccagctacttacagtgtagctctgttggctcctaaatgtgagcaggacttgactataaagaatgattatagtggcaaatggactgatcaagcatctgctgagaaaacaggagatgataacagcacaaggaaatcattccctgaggaaggagacataatggttactgtgtcttctgaagaaaatgtgtgtgacataggcaatgaagagtctccattgaatgttttgggaggattgaaactgaaagccaacttgaaaatggaggcttatgtgccttcagaggaagagaaaaatggtgaaattctggcaccaccagaaagtctgtgtgggggaaagccaagtggaatagctgaactccagagggagcctttgttggtgaatgaatcactaaatgttgaaaattcaggcttcagaacaaatgaagaaattcatagcgaatcttataacaaaggagagatatccagtggtagaaaagacaacgcagaagccataagcggtcacagtgttgaagcagatcctaaagaggttgaagaggaagaaaggcatatgcctaaaagaaaaagaaagcagcattatctctcttcagaagatgaaccagatgataatccagatgtcctggattccagaatagaaacagcacaaaggcagtgtcctgaaacggagccacatgncacaaaggaagagaactccagagatttggaagaattacctaaaaccagttctgagacaaatagcactacctcaagggtcatggaagaaaaagatgaatatagcagcagtgaaactactggtgaaaagccagagcagaacgatgatgacaccataaaatctcaggag

SEQ ID NO: 1302 - DNA, 842 bp, Homo sapiens
actagttctagatccgtcactcgccgaggttccttgggtcatggtgccagcctgactgagaagaggacgctcccgggagacgaatgaggaaccacctcctcctactgttcaagtacaggggcctggtccgcaaagggaagaaaagcaaaagacgaaaatggctaaattcgtgatccgcccagccactgccgccgactgcagtgacatactgcggctgatcaaggtagcggagagccagagctcctcccggggcgtggggtggaggtggctccgtttcccagggtggggtgattcacgtcttgaggtctcggccggtgtgagagcccagcctgttcccctttctgcgcccatccccggctcggccgccaccccgcccgcccgccccattcccttcccctgagctggccgggccggagcctcattttgttttctacttttttctctcctatgtgcatccccccaaggagctggctaaatatgaatacatggaagaacaagtaatcttaactgaaaaaggtaattcaacagtggcgggacgggggacaagcgttcggtgcctgtcaccttcgccaaggccattaccgcccctgctcccccttcttgcagatctgctagaagatggttttggagagcaccccttttaccactgcctggttgcagaagtgccgaaagagcactggactccggaaggtaacccctcgccctttccagaagccagagagaccaagtgttatgtaagaagtagtgtcggctgtgtagaaccactgactacacaggccgaagttactgagaacttggacagaaaaaatagccagcaagtgttcaaactactgaaaaaaaaa

SEQ ID NO: 1303 - DNA, 429 bp, Homo sapiens
tttcgtagtactagcagcagtggttcctaaatgaaatgggctatttctgcttcattactttattattctgagttaaataaacatgggacataagaggatgatctctgctttccagggactgatgtggaaatggtaaactcagtcttcagtccactccatgcacatgtatggagactactgagggaaacaagaaggacagcgataaaacatgatcctcctgaagaagagacggctgcttatcaattcattgggtgaaggtacaataaatggcttactggatgaattattggagacaaatgtgctgagccaggaagacacagagatagtaaaatgtgaaaatgttacagttatcgataaggcccgagatttgcttgactctgttattcggaaaggggcacgggcatgtgaaatttgcatcacatacatttg

SEQ ID NO: 1304 - DNA, 1557 bp, Homo sapiens
cccgggtcgagccacgcgtccgcggacgcgtgggggcgccgattccaaagactgtggggcggatcaagctagactgctctctacggcccagctgcccactggaggtcgctgctgcacccaaactttgcaaggaattcggtccagaggattacggcgaagaggacatagtggattttcttcgacggcttgtggagagtgatccccagggcctgcaccggatccatgtggatgggagcagcgggcggctgcagctgtggcaccatgattacctcctgggccacttggatgatgaagggaaatcaactggacagagtgacaggggcaagggggctgagggactgggcacctactgtggtctccgcaagtccttcctgtatcctccccaagagtctgagccctgccctcaaagcccctctgcctctgccaccttccccagtgtctcagacagcctgcttcaggtggccatgccccagaagctcctggtgacagaagaggaagccaatcgcctggctgaggagctggtggctgaggaggagcgcatgaaacagaaagcagagaaaaagcgactcaagaagaagcgtcaaaaggaacggaagcgacaggagcgtttggagcagtactgtggggagcccaaggccagcactacctcagatggagatgagagccccccatccagccctggaaacccagttcagggacagtgtggtgaagaagaggactcactggatctatctagcacttttgtgtctctggctttgcgcaaggttggggattggcccctcagtgcccgcagagagaagggactgaaccaggagccccaaggcaggggtctggccctccagaagatgggtcaagaggaagagagccctccaagagaggagaggccccagcagagtccaaaggtacagtgttacctgtttaaacaaaggagaaggatttggggaggctgagacctcaagacctgcttgactttgcaccctatccccaggcatctccgggactgctggcagctgccttacaacagagccaggaactgagttgggtaccagctttgctcaaaatggtttctaccatgaggccgtggtcctcttcacccaggccttgaagctcaacccccaggaccaccggttatttggaaatcgttccttctgccatgagcggttgggtcagccagcgtgggccctggctgatgcccaggtggcccttaccctacggcctggctggccccggggcctcttccgcctgggcaaggccttgatgggactacagcgcttcagagaggcagctgctgtgtttcaggaaactctgagaggtgggtcccagcctgacgcagcccgagagctccgctcttgccttctccacctcacactgcagggtcagcgaggaggaatctgtgcaccacctctgtcacctggggccctccagccacttccccatgctgagctggcaccctcaggcctaccttccctcaggtgccctcgaagcactgctttgaggtcccctggcctgtctccactcttgcattaaccataatgtcaccgaagccacccctgtatt

SEQ ID NO: 1305 - DNA, 507 bp, Homo sapiens
gaccgacttgctgggtcgacgatttcgtgttgacggcgctgcgatggctgcctgcgagggcaggagaagcggagctctcggttcctctcagtcggacttcctgacgccgccagtgggcggggccccttgggccgtcgccaccactgtagtcatgtacccaccgccgccgccgccgcctcatcgggacttcatctcggtgacgctgagctttggcgagagctatgacaacagcaagagttggcggcggcgctcgtgctggaggaaatggaagcaactgtcgagattgcagcggaatatgattctcttcctccttgcctttctgcttttctgtggactcctcttctacatcaacttggctgaccattggaaaggtatcagaaacacgtgtacttgaaaacgatatctgtgttgagggttgattgggcagaagcaatcttgcattctaccttatacagctccaggaggcatatatggcaacgaattggcaagaaatcaagataaagagag

SEQ ID NO: 1306 - DNA, 470 bp, Homo sapiens
attcccgggtcgacgatttcgttggaagggccgctgagcaaatggactaacgtgatgaagggctggcagtaccgttggttcgtgctggactacaatgcaggactgctctcctactacacgtccaaggacaaaatgatgagaggctctcgcagaggatgtgttagactcagaggagctgtgattggtatagacgatgaggacgacagcaccttcacaataactgttgatcagaaaaccttccatttccaggcccgtgatgctgatgagcgagagaagtggatccatgccttagaagaaacaattcttcgacatactctccagcttcaagtaagggtctttacatggtttccagatagttcattagttggtgctttctttttttggctggtttctgggtttttttttaaataactgtggtatgatgtaataggaacttataatttctgagttgcttatttttcctttacagg

SEQ ID NO: 1307 - DNA, 455 bp, Homo sapiens
tttcgtccgcatcctccgcatccacatccgcatcgtcgtcctccccgaccgcgtcctgcagcagctgccagtggagccgcctgacaaggactgccatccaccatggtgaagctgggctgcagcttctctgggaagccaggtaaagaccctggggaccaggatggggctgccatggacagtgtgcctctgatcagccccttggacatcagccagctccagccgccactccctgaccaggtggtcatcaagacacagacagaataccagctgtcctccccagaccagcagaactatacaaagagtaggtaagcgtaggtggagtggcatggacaggtaaaatgaggaaagtgtttcccagaatgggaaatcttgtaaacccttaaaaaatgtgggtttattcagtcaaatgttggctcttaattgcagactttgaaaagcagtagatacaatggaag

SEQ ID NO: 1308 - DNA, 453 bp, Homo sapiens
cgagtgcggtggaattcgacagcccggacccggccctccgcccgctctcgcctcggcgcccgcagccacgatgaaccgggtcggcggcagcccgtcggccgccgccaactacctgctctgtaccaactgccggaaagtgctgcggaaggataaaagaatcagagtgtctcaacccttgacaagaggaccaagtgcctttattccagagaaggaagttgtccaagcaaacacagtggatgaacgtactaactttcttgtggaagaatactctacatccggtcgtctggacaacatcacacaggtcatgagtttacacactcagtacctggagtctttcttgcggagccagttttacatgttgcgcatggatggtccccttcctctaccatacaggcactatattgcaataatggctgcagctagacatcagtgttcttacttaataaacatgcg

SEQ ID NO: 1309 - DNA, 421 bp, Homo sapiens
  misc_feature (1)...(421): n = a,t,c or g
gaaggtgccagcttgggatttcgagcctgggtagtgcctgctaacggggttggccggagcagcagagcaccgggaggcccagggatgtggcgaggcagccgcggtgtcagaaagaggaaggcaggaggctgaggccgagggccctggaatctcgcacattccagggttcagaaagatcacggtggggtccacctctggagtccacaaaagaaaacgtacaatgtggccacaggcctgcttttccaaactcgtcatggttaccatttcatgaacggcttcaagtccagaatggtgagtgcccgtggcaagtgagtatccagatgtcacggaaacacctctgtggaggctcaatcttacattggtggtgggttctgacagccgcacactgcttccgaagaaccctattagacatggccgtggn

SEQ ID NO: 1310 - DNA, 442 bp, Homo sapiens
cattgagtacactgccgaaccgcgccggaagtcccgggtcgagaaatgactctacgcaaggaccttcatagtgtgacacagttacctgtcagttatgtgacagggttttggcccttgtgggcctcagttttgtaaaatgataagccagaactagcatattgatcttctaaggattccaagcttactcagcctcttggactttgtatagttaaatagtaagtcctttgcatttgtcactctaggctttccagctttttaatgcgaaatgcgagtcggctttcctttccaagaggaatcctctgcagagaaactggactgtcctctacagaaggaagcacaaaaagggacagtcggcagaaattcaaaagaaaagaacccgccgagcattcaaattccagagggccattactggtgcatctcttgctgatataatggccaagag

SEQ ID NO: 1311 - DNA, 912 bp, Homo sapiens
ttttttttttttcaacttcagcattcaattttattatagtaccatctccctcaacaaacaagatcagcagccagtgtgggatggtgctcaatggggctccacttcccactagagtgtaagctgcttccacgcatgctactgcgtgctccgagccatcgcagcggagtctcttctcacccagctttgatggtggggcgactcccgtgtctgcagctgtggtccaaagggtgtctgtgctggatacagaagttgccgtgacattgggcacataccatctgcagcatctctttcttcttgcagccctcttttgagcaacggtatgtaaaaatcttctctttcttcttcccagggtgagagtcacagtctctgtcaatgtgatcaccaaccaccacgtctggtatctggcccttttttactgggatgggggtattacagagtgggcatactgggacgtgaacatccttctggaatgcaaacggacacttatgtgcagcgtatggaaaatgatctttacagaaatcttgtttacatgcatcacattttactggaagaaaatctagctgcttgcaagtcttttctgaacaatgcttccccaaatcaggaaactccattatgagaacagtgctcaaaacgcagatggcggagttaagtgtcacctggctctcgtcggggacccaggcagctgaggtgagcagcagatggaagagacgtaaactcaggtgtcctcctccgtagtcggctccgggtagctaagcagaaagaacctcgacactggcaccgagacgccgtcggaggcacacccacacccacaccggaacgcaacatctcgctgcccgcggcctacggggatttatccgcagcccccggatctgagagccgtctgggccttgggggaattccaccgcactgaac

SEQ ID NO: 1312 - DNA, 669 bp, Homo sapiens
tttctaccagcagtgatgaagggagccccagtgccagtacaccaatgatcaataaaactggctttaaattttcagctgagaagcctgtgattgaagttcccagcatgacaatcctggataaaaaggatggagagcaggccaaagccctgtttgagaaagtgaggaagttccgtgcccatgtggaagatagtgacttgatctataaactctatgtggtccaaacagttatcaaaacagccaagttcatttttattctctgctatacagcgaactttgtcaacgcaatcagctttgaacacgtctgcaagcccaaagttgagcatctgattggttatgaggtatttgagtgcacccacaatatggcttacatgttgaaaaagcttctcatcagttacatatccattatttgtgtttatggctttatctgcctctacactctcttctggttattcaggatacctttgaaggaatattctttcgaaaaagtcagagaagagagcagttttagtgacattccagatgtcaaaaacgattttgcgttccttcttcacatggtagaccagtatgaccagctatattccaagcgttttggtgtgttcttgtcagaagttagtgaaaataaacttagggaaattagtttgaaccatgagtggacatttgaaaaactca

SEQ ID NO: 1313 - DNA, 1898 bp, Homo sapiens
tttttttttttttaaaatgaaaatagcaactttaattaaagggctcatcccactgattctaagaccagggcatggcaagagaggagccaatttaaggagatctctatctcaggatcctgcaaggcctgacactgtacttgccaaaccctgaaagtcagcacttcctttaagaacgtgccctaggtgcctcctttgccaatccctacttcaacctcaggatcccactggcaggtggcagccaccaactatgcacccaaggactctatgtgaatcccaaactgaatgctgagggttcacttacttgtggtactggtttaataggtttttccatcaagcctccaatataaacagtgttgggaagcaggggccgggcaaaatcaaaggcacaatcagagttaacaaaccacaactctgctttcagtagaagatgagacaaaactggcctagagccttctgggaaatgctccttgatggtgttgtcaaatgtagactgcatgtcccattggctcctggagaaactaaagaacatcagaaaattcttcactcggccccagaagtccatgtgatcagtcagcaaggaagggaatactggaacataagacaaggggcttggtagcccaaaatccaaagagccgaatgtggtgggaagaatggccacaaatggtttcacaagcttctcagcaatcaggaaagaacagaaatcaaatgcttcaacaaataccagatcatagttctcattctttaaggaatccattatatcctttctgcttagcaaataactacattgagtcccaaatatttccattagctttacaagggcttcagattcttttctgccatccaatgctgtttctatgtagctatcaaaatgcttcttaattcttttttgatgatcttcaggtgaaaaccacctgataacttggtatgatttttcctcctctttaatatctgggatcaaaaactttccactctgatgaagcatagtcacattatgaccatgctcttgaagaatctgagacacccggtccaacagtaggtaatggcttccacccagtgtagatattgtcaggattttggcagcctctgagagcaggaccccagaaagaaggaaggccactagaagcagcacccgctgcccaaccatgctcacttccacagaagcagcggatctcagcctgggctgcgcgccctgcgccgggctaaggactctgtgcgcgcctcagtactccaaaggcactggctgtgggcctaggaagaggaaatctggaaacctacagtctccatgcctgctcagccaagaaggagctcactgtgggcaccagagacagggacccaatgtggagacctgtgagcctgtgtccggccctgaactctcaagcacagggcaggcttcctgagcattgaagagaatatgtgggagaacaaaacagaaactgaaagaatatgcaaggtgtctttcttggatgttattccatgatagatagtaggggcaggagtgagagaggctgactaggtctggacatggaggctggaagagtcagggtgtgattcggagaggcgcatgagaaggaaggtggattttaaggctggaaatctgagggtcagtggtccaagtcactcagagacagaatcacagcatagcccttgctgatggcaaacaaaggaggacaagaggactggaaagaattctgctagcaggcaggagctagtaaggatgaatttgtagcaaaattagcaagtggaaaggatgatttttggccatttttcctgttcttcaagaaaacaggagataactagaaggactagagaatggggctgccagaactagtgggaagctccctagaaatggtgacatcgcccaccaaacagaccccgccaaggctgcacctggccttatg

SEQ ID NO: 1314 - DNA, 1890 bp, Homo sapiens
  misc_feature (1)...(1890): n = a,t,c or g
tggattttgtgtcttccttactccagggttaaataaattgtgttttcctctgacatgtttccaagtttattttgtaaaaggcaactgccaagttgtctcaatacattttctttttttttttgagatagggttcttactttgtcacccagactggtcttgaactcctgggctcaagcgatctgcccgcctaggtctcccaaggtgctgtcattacaggactgattcactgtgcctggcctcaatactgtttattgcataatttatctcttcttagttggtttggatgccacttttataaaatctgaattcctagtacatttggatccatttctagactttctttttttgctgtttaaactaatatactgatgggtatgtttttaagaaataaaatggctacacatagcattaaggagtgttagtataaagagaacttaaatttcttcaaggtcctctgtgacccgggtgctttttacatgtattaactcacttaactattattctcactaattcagtttgtaactggaatttgtagaatgtgcagttggctaaattttcttcaacattggtttttttttttagctgtgatgcagatccatccgccctagcaaaatatgttctggctttggtaaagaaagacaaaagtgaaaaagagttaaaggcattatgtattgatcagctggatgtatttcttcagaaagagacacagatatttgtggaaaaactttttgatgctgtgaatacaaagagttacctacctcctccagagcagccatcatcaggaagcctgaaggtagaattttttccaccccaagaaaaagatataaagaaggaagagatcactaaggaggaagagcgagagaagaagttttctagaaggctaaatcacagtcctccccagtcaagctcccgatacagggaaaatagaagccgtgatgagaggaaaaaagatgatcgttctcgcaaaagagattatgatcgaaaccctcctcgaagagattcatacagagaccggtacaatagaagacgagggcggagtcgcagttatagcaggagtcgaagtcgaagttggagtaaagagaggcttcgtgagagggacagagatagaagcaggactagaagcagaagcagaacacgaagcagggaaagggatctggtaaaacctaaatatgacctggatagaacagatccattagaaaataattatactccagtctcttcggtacctagtatttcatctggccactaccctgtacctactttgagcagcactattacagtaattgctcctactcatcatggaaacaacactaccgaaagttggtctgaatttcatgaagaccaagtggaccataactcttacgtaagaccacccatgccaaagaaacggtgtagagactatgatgaaaagggtttttgtatgagaggagacatgtgtccttttgatcatggaagtgatccagtagttgtagaagatgtgaatcttcctggtatgcagcctttcccagcacagcctcctgttgttgaaggaccacctcctcntggactccccccacctccaccaattcttacacccccacctgtgaatctcaggcccccagtgccaccgccaggtccattgccacccagtctcccacctgttacaggaccaccacctccacttcctcctttgcagccatctggcatggatgctcctccaaactctgcaaccagttctgttcctactgtagtaacaactggcattcatcaccagcctcctcctgctccaccctctctttttactgcagatacatatgacacagatggctacaatcctgaagccccaagcataacaaacacttccagacctatgtatagacacagagtgcatcctcgtgccaagcttggcgt

SEQ ID NO: 1315 - DNA, 1587 bp, Homo sapiens
tcagctttggataagtcctccagcaagtactttgttgaaagcgagaaaggcagctgcataactctccagtccacagagctgacaaatcactgtgtcatcaaagaagagggaatcatgggaaatagcctgtggttcaccctctgctgattccaatttcacattccattccacattgatgaataataataatgatgtacttttagctttgtcagaaatcctatttttgatgtcccctctctcatacttagttaaccattttgaattccacttagtaagaaaagtttccattttctttttcttcgggggacttagatatgatctgcactcttctgactgtacctttgctttcacgagggctctttcccggaatgatatgtccatacaactattgttgttgttcttacttttagctcttttcttagaagcccacttgtacccaggtttgatcacaccccctactctcctgccccgagaaagtttcagccaaacttcgggcggcggctgaggcggcggccgaggagcggcggactcggggcgcggggagtcgaggcatttgcgctgggcttcggagcgtagcgccagggcctgagcctttgaagcaggaggaggggaggagagagtggggctcctctatcgggaccccctccccatgtggatctgcccaggcggcggcggcggcggcggcggaggaggcgaccgagaagatacccgccctgcgccccgctctgctgtgggcgctgctggcgctctggctgtgctgcgcgacccccgcgcatgcattgcagtgtcgagatggctatgaaccctgtgtaaatgaaggaatgtgtgttacctaccacaatggcacaggatactgcaaatgtccagaaggcttcttgggggaatattgtcaacatcgagacccctgtgagaagaaccgctgccagaatggtgggacttgtgtggcccaggccatgctggggaaagccacgtgccgatgtgcctcagggtttacaggagaggactgccagtactcgacatctcatccatgctttgtgtctcgaccttgcctgaatggcggcacatgccatatgctcagccgggatacctatgagtgcacctgtcaagtcgggtttacaggtaggaacccaaagtgtcctggtggcaatcttaactaccagtttaatggaatcattgttgtgtattctggtggcagtgttcctccctctggaactaagacctctaagccagcagaacataatgccatgggaacaggaagcaaaaattttgctagtggaacactatgggtgatggtgagtggtgccacttccacttccacttccaccctttgattcctggacccgtgaatcctgtctatgggagaaacagtaccatatattggacactgattcagagcatacacagccttctggagaactttgccccaggcctgcaaagtattgtcacctagttggcattgtaatcgtgacttcaaaaggccattcaaaagctgcttcaggatgatagggatcatggtaagaccagtaaattccatgagcatgagcccactgtcacacttctttagccataaagtgagtggcttggccg

SEQ ID NO: 1316 - DNA, 572 bp, Homo sapiens
ggcacgagaacccgagtgacacgttgaatttgccataatcaaggaaaccttttccgggtggggatctctgaaattactcagtgagcaaccctaattaacctgattttttgctgataatcactctcaatggaatcaaatcacaaatccggggatggattgagcggcactcagaaggaagcagccctccgcgcactggtccagcgcacaggatatagcttggtccaggaaaatggacaaagaaaatatggtggccctccacctggttgggatgctgcaccccctgaaaggggctgtgaaatttttattggaaaacttccccgagacctttttgaggatgagcttataccattatgtgaaaaaatcggtaaaatttatgaaatgagaatgatgatggattttaatggcaacaatagaggatatgcatttgtaacattttcaaataaagtggaagccaagaatgcaatcaagcaacttaataattatgaaattagaaatgggcgcctcttaggggtttgtgccagtgtggacaactgccgattatttgttgggggcatcccaaaaaccaaaaagag

SEQ ID NO: 1317 - DNA, 1956 bp, Homo sapiens
aaactccgaacacatccaaacatcagaaggaacaaactccagacacaccgcctttaagaactgttacgctcaccgcgagggtccacggcttcattctccaagtcagaccaagaacccaccaattccggacacaaaaggcgtagcgtgcctcctgtgattgttgaagagctgtggtgtgctgctgagtggcgtgtgtattccatgtgaggggaagggtccaacagtcctggtcattcagactgcagttccccaggacagacccacgaagtcaagcatgcggagtgcagccaagccctggaacccagccatcagagcagggggccacggcccagaccgggtgcggcctctgcctgcagcctcttccggcatgaagagttctaagtcttcaacttccttggcttttgagtcccgactcagcaggctcaagagggccagcagtgaggacacgctcaacaagccaggaagtaccgctgcatcgggggtggttcgcctgaagaagaccgccactgccggagccatctcggagctcacggagagccgcctgaggagcggcacaggggcctttacaacaactaaacggacaggcattccagccccacgggaattttcagtaactgtctcaagagagaggtctgtgccacgtggtccctccaaccccaggaaatcagtgtccagtccaacttcctccaacactcccactcctacgaaacacctgaggaccccttccacaaagcccaagcaagagaatgaaggtggagaaaaggctgcgcttgagtcccaagttcgggaacttttggcagaagccaaagcaaaagatagtgaaattaacaggcttcgaagtgaactaaagaaatacaaagagaaaaggactctgaacgctgaggggactgatgctttgggcccaaatgtcgatggaacatcagtctccccaggtgacacggaacctatgataagagctcttgaggagaagaacaagaactttcagaaagagctttccgatctagaggaagaaaaccgggtcctgaaggagaaactgatctatcttgagcactccccaaattcagaaggggcagcaagtcacactggcgacagcagctgcccaacatccataactcaagagtcaagcttcggaagcccaactggaaatcagttgtccagtgacattgatgagtataaaaaaaacatacatggaaatgcattacggacatcaggctcctcaagtagcgatgttaccaaagcttctttgtcgccagatgcttccgactttgagcacattacagcagagacaccctcaaggcccctgtcctccaccagtaacccctttaagagttcaaagtgttctactgctgggagttccccaaacagcgtaagtgaattgtccctggcttccctcacagagaagatacaaaagatggaagaaaaccaccatagcactgcagaagaactacaggctactctacaagaattatcagaccagcaacaaatggtacaggaattgacagctgaaaatgagaagctggtggatgaaaagacgattttagagacatcctttcatcagcatcgagagagggcagagcagctaagtcaagaaaatgagaagctgatgaatcttttacaagagcgagtaaagaatgaagagcccaccactcaggaaggaaaaattattgaactggagcagaagtgcacaggtattcttgaacagggccgctttgaaagagagaagctactcaacattcagcagcagttgacctgtagcttgcggaaggttgaggaagaaaaccaaggagctttagaaatgattaaacgtctgaaggaagaaaatgaaaaactgaatgagtttctagaactggaacggcataataataacatgatggccaaaactttggaagagtgtagagttaccttggaagggctaaaaatggagaatggatctttgaagtctcatttgcagggtga

SEQ ID NO: 1318 - DNA, 879 bp, Homo sapiens
tttcgtctgaagcacagacaccacttccccaatctacaggagccattttaacagctaaaacttgtcggattgctttttattttcaagctcaaaagacgatagagaaagaatacttgaaggccaagaagcttgagagaagaaaaatttcagaaaaattgtctcaatttgactagaatatcaatgaaccaggaaaactgaagcaccttccctaaagaaaacttgggtatacaattactccacagacagagctgagggttttttacccaaatcagtcactggattttgctgcctgatacgtgaatcttcttggaatttttctcatgtggatctaaggggaatgctttattatggctgctgttgtccaacagaacgacctagtatttgaatttgctagtaacgtcatggaggatgaacgacagcttggtgatccagctatttttcctgccgtaattgtggaacatgttcctggtgctgatattctcaatagttatgccggtctagcctgtgtggaagagcccaatgacatgattactgagagttcactggatgttgctgaagaagaaatcatagacgatgatgatgatgacatcacccttacagttgaagcttcttgtcatgacggggatgaaacaattgaaactattgaggctgctgaggcactcctcaatatggattcccctggccctatgctggatgaaaaacgaataaataataatatatttagttcacctgaagatgacatggttgttgccccagtcacccatgtgtccgtcacattagatgggattcctgaagtgatggaaacacagcaggtgcaagaaaaatatgcagactcaccgggagcctcatcaccagaacagcctaagaggaaaaaaaaaa

SEQ ID NO: 1319 - DNA, 654 bp, Homo sapiens
  misc_feature (1)...(654): n = a,t,c or g
gggggcgtgggtgaaacgccgcgggcgttctcaacattctgaggttaagcggccaggattgtttattcattacaatgccttgccatcaaatattttaaatacctattcttaggctgcacatgctaacatatccaaataagatcgataacgataattaatttcattatcatggaagttcgtatgtctggttctgttgccgtgacacgcgccattgccgtgcccggattgctgttattactgattatcgcgacggcattaagcctgctcattggggcaaaatcactccccgcttccgtagtgctggaggccttctccggcacctgccagagcgccgactgcaccatcgtgctcgacgcgcggctgccgcgtacccttgccggtttactggcaggcggcgcgcttggccttgccggggcgttaatgcaaaccctcacccgaaacccacttgccgaccccggcttgcttggcgtgaacgccggagccagctttgccattgtgctgggtgcggcgctgtttggttactcttccgcgcaggaacaactggcgatggccttcgccggggcgctggtggcctcattgattgttgcctttaccggcagtcagggcggcgggcagttaagtccggtgcgtttaaccctggcgggcgtggcnctg

SEQ ID NO: 1320 - DNA, 452 bp, Homo sapiens
tttcgtcggatttcgagttgatctgaataatgcgcccctgaatcccgtcgcggatcatcaaacgcgaaaattcacgcgcacacaggaaataacccaccagattcacctgtagcgaacggtcaaaatcgccgagctggaagtcgctgataaaggctgcttttgctattccggcgctgtagaccagcaaatccacgcgaccaaagatttcatctaccccacgagagagcgccagaacgctttgctcgctagtggcgtcagcaccaaaaccgtacgccatactttcaccatattcggcgttaatttcttgtgccacatttgcggctttgtcgctctgaatatcgacaaccgcgacgcgatacccctcggcagccagaccgtggcacaggaacgcgcctaaggtttgcccaccaccgatgacaacggcaacctgattcattttttactccttaaca

SEQ ID NO: 1321 - DNA, 453 bp, Homo sapiens
cggcaccgaaccgcaggtccaggatcgacgatttcgtcgcggaccgactcagcttcggcacctgccgcccgagcaatgccatgcgagtacacctatgcgaaactgacaagtgattgctcgaggccttcactgcaatggtacacccgagctcaaagcaagatgagaaggcccagattgttattaaaagacatcctcaaatgtacattgcttgtgtttggagtgaggatcctttatatcctcaagctaaattatactactgaagaatgtgacatgaaaaacatgcattatgtggaccctgaccatgtaaagagagctcagaaatatgctcagcaagtcttgcagaaggaaagtcctcccaagtttgccaagacatcaatggcgctgttatttgagcacaggtatagcgtggacttactcccttttgtgcagaaggcccccacagacagtgaagct

SEQ ID NO: 1322 - DNA, 423 bp, Homo sapiens
tttcgtgaggattttttaatttgagagccctcaaatgggccagtggtctattcagcattgggaaatgaagatgatgagatcctgctactcggaaaagatatcataggaacgttcgcggcatcagagagaaagatgagagctcaccaggtgctcaccttcctcctgctcttcgtgatcacctcgggggcctctgaaaacgccagcacatcccgaggctgtgggctggacctcctccctcagaacgtgtacctgtgcgacctggacgccatctggggcattgtggtggaggcggtggccggggcgggcgccctgatcacactgctcctgatgctcatcctcctggggcggctgcccttcatcaaggagaaggagaagaagagccctgcggtcctccactttttgttcctcctcgggaccctgggc

SEQ ID NO: 1323 - DNA, 426 bp, Homo sapiens
tttcgtgaggagtttttaatttgagagccctcaaatgggccagtggtctagtcatcattgggaaatgaagatgatgagatcctgtctctcgcaaaagatatcacaggaatgttcgtggcatcacacagaaagatgagagctcaccaggtgctcaccttcctcctgctcttcgtgatcacctcggtggcctctgaaaacgccagcacatcccgaggctgtgggctggacctcctccctcagtacgtgtccctgtgcgacctggacgccatctggggcattgtggtggaggcggcggccggcgccggcgccctgatcacactgctcctgatgctcatcctcctggtgcggctgcccttcttcaaggagaaggagaagaagagccctgtgggcctccactttctgttcctcctggggaccctgggcccg

SEQ ID NO: 1324 - DNA, 1787 bp, Homo sapiens
gaacgtttgtgcttcccgtgcatgcagtcaaagatctattcctacatgagcccgaacaaatgctctggaatgcgtttcccccttcaggaagagaactcagttacacatcacgaagtcaaatgccaggggaaaccattagccggaatctacaggaaacgagaagagaaaagaaatgctgggaacgcagtacggagcgccatgaagtccgaggaacagaagatcaaagacgccaggaaaggtcccctggtaccttttccaaaccaaaaatctgaagcagcagaacctccaaaaactccaccctcatcttgtgattccaccaatgcagccatcgccaagcaagccctgaaaaagcccatcaagggcaaacaggccccccgaaaaaaagctcaaggaaaaacgcaacagaatcgcaaacttacggatttctaccctgtccgaaggagctccaggaagagcaaagccgagctgcagtctgaagaaaggaaaagaatagatgaattgattgaaagtgggaaggaagaaggaatgaagattgacctcatcgatggcaaaggcaggggtgtgattgccaccaagcagttctcccggggtgactttgtggtggaataccacggggacctcatcgagatcaccgacgccaagaaacgggaggctctgtacgcacaggacccttccacgggctgctacatgtactattttcagtatctgagcaaaacctactgcgtggatgcaactagagagacaaatcgcctaggaagactgatcaatcacagcaaatgtgggaactgccaaaccaaactgcacgacatcgacggcgtacctcacctcatcctcatcgcctcccgagacatcgcggctggggaggagctcctgtatgactatggggaccgcagcaaggcttccattgaagcccacccgtggctgaagcattaaccggtgggccccgtgccctccccgccccactttcccttcttcaaaggacaaagtgccctcaaagggaattgaatttttttttttacacacttaatcttagcggattacttcagatgtttttaaaaagtatattaagatgccttttcactgtagtatttaaatatctgttacaggtttccaaggtggacttgaacagatggccttatattaccaaaacttttatattctagttgtttttgtactttttttgcatacaagccgaacgtttgtgcttcccgtgcatgcagtcaaagactcagcacaggttttagaggaaatagtcaaacatgaactaggaagccaggtgagtctcctttctccagtggaagagccgggaccttccccctgcacccccgacatccagggacggggtgtgaggaagacgctgcctcccaatggcctggacgggatgtttccaagctcttgttcccctaacgtctcaacaggcgctcactgaagtgtatgaatattttttaaaaaggtttttgcagtaagctagtcttcccctctgctttctcgaaagcttactgagccctgggccccaagcacgggccgggcatagatttcctcttccacaagctgccgcttttctgggcaccttgaagcatcagggcgtgaaatcaaactagatgtgggcagggagagggttgcttacctgccctgctggggcagggtttcctgaaactgggttaattctttatagaaatgtgaacactgaatttattttaaaaaataataataaaaatttaaaaaaattaaaaataaaaaaaaccacagaaaacaactttacatgtatataggtcttgaagtgaaaa

SEQ ID NO: 1325 - DNA, 1105 bp, Homo sapiens
atcccgggtcgacgatttcgtgttccgaactcaaaggaacccagtgccgggccacagccgggtcacgtggccggcggccccccatgacgtgctggctgcggggcgtcacggcgacgttcgggcgacctgccgagtggccaggctacctcagtcacctgtgtggtcgcagtgctgccatggacctgggacccatgcgcaagagttaccgcggggaccgagaggcatttgaggagactcatctgacctcccttgacccagtgaaacagtttgctgcctggtttgaggaggctgttcagtgtcctgacataggggaagccaatgccatgtgtctggctacctgcaccagagatggaaaaccctctgctcgcatgttgctgctgaagggcttcgggaaagatggcttccgcttcttcactaacttcgagagtcgaaaaggaaaagagctggactctaatccctttgcttcccttgtcttctactgggagccacttaaccgtcaggtgcgtgtggaaggccctgtgaagaaactgcctgaggaggaggctgagtgctacttccactcccgccccaagagcagccagattggggctgtggtcagccaccagagttctgtgatccctgatcgggagtatctgagaaagaaaaatgaggaactggaacagctctaccaggatcaagaggtgcccaagccaaaatcctggggtggctatgtcctgtaccctcaggtgatggagttctggcaaggtcaaaccaaccgcctgcatgaccggatagtctttcggcggggcctacccacaggagattcccctttggggcccatgacccaccgcggggaggaagactggctctatgagagacttgcaccttaactctgggacctgctggcccagagtggagctagggctaggtgtcaagagagggtgtgggattgggacccaggcccttctttctaaactcaacccatttccctccctaccccttatcttcaggactcttcagagctaatcctctaagttctctgtactcagttggttctcagttagctggtcaagtggagtgtaatggtggcgtagagaatcacaaatggaaaataattccataatta

SEQ ID NO: 1326 - DNA, 1646 bp, Homo sapiens
ggcacgagccgcggcgcattgtgggatctgtcggcttgtcaggtggtggaggaaaaggcgctccgtcatggggatccagacgagccccgtcctgctggcctccctgggggtggggctggtcactctgctcggcctggctgtgggctcctacttggttcggaggtcccgccggcctcaggtcactctcctggaccccaatgaaaagtacctgctacgactgctagacaagacgactgtgagccacaacaccaagaggttccgctttgccctgcccaccgcccaccacactctggggctgcctgtgggcaaacatatctacctctccacccgaattgatggcagcctggtcatcaggccatacactcctgtcaccagtgatgaggatcaaggctatgtggatcttgtcatcaaggtctacctgaagggtgtgcaccccaaatttcctgagggagggaagatgtctcagtacctggatagcctgaaggttggggatgtggtggagtttcgggggccaagcgggttgctcacttacactggaaaagggcattttaacattcagcccaacaagaaatctccaccagaaccccgagtggcgaagaaactgggaatgattgccggcgggacaggaatcaccccaatgctacagctgatccgggccatcctgaaagtccctgaagatccaacccagtgctttctgctttttgccaaccagacagaaaaggatatcatcttgcgggaggacttagaggaactgcaggcccgctatcccaatcgctttaagctctggttcactctggatcatcccccaaaagattgggcctacagcaagggctttgtgactgccgacatgatccgggaacacctgcccgctccaggggatgatgtgctggtactgctttgtgggccacccccaatggtgcagctggcctgccatcccaacttggacaaactgggctactcacaaaagatgcgattcacctactgagcatcctccagcttccctggtgctgttcgctgcagttgttccccatcagtactcaagcactataagccttagattcctttcctcagagtttcaggttttttcagttacatctagagctgaaatctggatagtacctgcaggaacaatattcctgtagccatggaagagggccaaggctcagtcactccttggatggcctcctaaatctccccgtggcaacaggtccaggagaggcccatggagcagtctcttccatggagtaagaaggaagggagcatgtacgcttggtccaagattggctagttccttgatagcatcttactctcaccttctttgtgtctgtgatgaaaggaacagtctgtgcaatgggttttacttaaacttcactgttcaacctatgagcaaatctgtatgtgtgagtataagttgagcatagcatacttccagaggtggtcttatggagatggcaagaaaggaggaaatgatttcttcagatctcaaaggagtctgaaatatcatatttctgtgtgtgtctctctcagcccctgcccaggctagagggaaacagctactgataatcgaaaactgctgtttgtggcaggaacccctggctgtgcaaataaatggggctgaggcccctgtgtgattttgaaaaaaaaaa

SEQ ID NO: 1327 - DNA, 1523 bp, Homo sapiens
ctgcagtccgccggcgagggagttacgcacgtcctgattctcctggagtctccagcccgcccagtggccgcagtcacccaggtccagaggcggcggtatcacaggctctccgacatgtctatgctggctgaacgtcggcggaagcagaagtgggctgtggatcctcagaacactgcctggagtaatgacgattccaagtttggccagcggatgctagagaagatggggtggtctaaaggaaagggtttaggggctcaggagcaaggagccacagatcatattaaagttcaagtgaaaaataaccacctgggactcggagctaccatcaataatgaagacaactggattgcccatcaggatgattttaaccagcttctggccgaactgaacacttgccatgggcaggaaaccacagattcctcggacaagaaggaaaagaaatcttttagccttgaggaaaagtccaaaatctccaaaaaccgtgttcactatatgaaattcacaaaagggaaggatctgtcatctcggagcaaaacagatcttgactgcatttttgggaaaagacagagtaagaagactcccgagggcgatgccagtccctccactccagaggagaacgaaaccacgacaaccagcgccttcaccatccaggagtactttgccaagcggatggcagcactgaagaacaagccccaggttccagttccagggtctgacatttctgagacgcaggtggaacgtaaaagggggaagaaaagaaataaagaggccacaggtaaagatgtggaaagttacctccagcctaaggccaagaggcacacggagggaaagcccgagagggccgaggcccaggagcgagtggccaagaagaagagcgcgccagcagaagagcagctcagaggcccctgctgggaccagagttccaaggcctctgctcaggatgcaggggaccatgtgcagcccgcctgagggccgggacttcaccctgaagcccaaaaagaggagagggaagaaaaagctgcaaaaacccagtagagatagcagaggaccgctacactagaagaaaccgctagttgaaaaaagaaggaagaagaaagattccaaaatgaatcctttcccagccggggcctttcccgaccacttcagctgtcagggcactgcgggggcagacacctctggcctgaagtcacagcagagttcaccccagagcgcctgggcgcatcttgtggcatgcccatgggctgccgagtcctgccctctcgccacatttcccccaagttacattcccaggaggacctttttaatgttctcaatcgtggctctcagacacaaataaatttttttgtaaactctgagcccttcagcaagagagtttaattataatcattacaaatacatgcattcatgtaagtgtgcacacgtgtgtgtgcatgtgcgcatctgtgtgtgtgtgtgtgtgtcactatctccgtttgctctcggttcccttcaataacaatgaatggtgctttcttctgaaagac

SEQ ID NO: 1328 - DNA, 741 bp, Homo sapiens
ggcacgagagactcggcgggcgctgttgagggagtcgggccgcgactgtggtcgtttttataccttcccgcgcggacgccggcgctgccaacggaagggcgggtagggcgagacggagtttcgtcatgttggccaggcccatttgagatctttgaagatatcctcaacgtgaggctctgctgccatgaaggtgaagattaagtgctggaacggcgtggccacttggctctgggtggccaacgatgagaactgtggcatctgcaggatggcatttaacggatgctgccctgactgcaaggtgcccggcgacgactgcccgctggtgtggggccagtgctcccactgcttccacatgcattgcatcctcaagtggctgcacgcacagcaggtgcagcagcactgccccatgtgccgccaggaatggaagttcaaggagtgaggcccgacctggctctcgctggaggggcatcctgagactccttcctcatgctggcgccgatggctgctggggacagcgcccctgagctgcaacaaggtggaaacaagggctggagctgcgtttgttttgccatcactatgtttgacactttttatccaataagtgaaaactcattaaactactcaaatcttgctggaggcctctgggtgcctgtgttctcagcatatagatgtggtctcggtgtgttttgatatgaaaactctcatgaataaacatctccgtgaaacgccaaaaaaaaaaaa

SEQ ID NO: 1329 - DNA, 965 bp, Homo sapiens
atcaaatggaaccaggaaatgatacacaaatttcagaatttcttcttctgggattttcacaagaacctggactgcaacccttcctctttgggctgttcctgtccatgtacctggtcactgtgctcgggaacctgctcatcatcctggccacaatctcagactcccacctccacacccccatgtacttcttcctctccaacctgtcctttgctgacatttgtgttacttccaccaccattccaaaaatgctgatgaacatccagacacagaacaaagtcatcacctacatagcctgcctcatgcagatgtattttttcatactctttgctggatttgaaaacttcctcctgtccgtgatggcctatgaccggtttgtggccatctgtcaccccctgcactacatggtcattatgaaccctcacctctgtggactgctggttctagcatcctggaccatgagtgctctgtattccttgctacaaatcttaatggtagtacggctgtccttctgcacagccttagaaatcccccactttttctgtgaacttaatcaggtcatccaacttgcttgttctgatagctttcttaatcacatggtgatatattttacagttgcgctgctgggtggaggtcccctgactgggatcctttactcttactctaagataatttcttccatacatgcaatctcatcagctcaggggaagtacaaggcattttccacctgtgcatctcacctctcagttgtctccttattttatggtgcaatcctaggggtgtaccttagttctgctgccacccgcaactcacactcaagtgcaacagcctcagtgatgtacactgtggtcacccccatgctgaacccctttatctatagtctgaggaataaagacataaagagggctctgggaatacatttgttgtggggaacaatgaaagggcaatttttcaagaagtgcccatga

SEQ ID NO: 1330 - DNA, 7445 bp, Homo sapiens
ttttttcccacagcaactgccaatgaaggatgaatcccctttttaaaaagttgttgttgttgttgtttatttgatttcccaccacctccattagaccaagtgcaggaggaggaatgtgaagtagaaagggtgactgaacatgggacaccaaagccctttcgaaagtttgacagtgtagcttttggagaaagtcaaagtgaggatgaacaatttgaaaatgacttagagacagacccacccaactggcagcagcttgttagtcgagaagtgttactgggactaaaaccttgtgaaatcaaaagacaggaagtgattaatgaattgttctacactgaaagagctcatgttcgaacactgaaggttcttgatcaagtgttctatcagcgagtatccagagaaggaattctgtcaccctcagagctacggaaaattttttcaaacttggaagatattcttcaacttcatattggattgaatgaacaaatgaaggctgttcgaaagagaaatgagacctctgttatcgatcagattggggaagatttgctgacatggttcagcggaccaggagaggagaaattgaaacatgctgctgctaccttttgcagtaaccaacctttcgccctggaaatgatcaaatctcgtcagaaaaaggattctcgatttcagacttttgtgcaagatgctgaaagtaatccactgtgtcgtcgtcttcaactgaaggatattattcccactcaaatgcaaaggcttactaagtacccacttctgttggataatattgccacatacacagaatggccaacagaaagggagaaggtgaagaaagctgcagatcactgtcgtcagatcttaaattatgtaaatcaggctgtcaaggaggcagaaaacaagcagcgcctagaagattatcagcgtcgccttgatacctccagcctgaagttgtcagagtacccaaatgttgaagagctcaggaatttggatttaacaaaaaggaagatgattcatgaagggccattggtttggaaggtgaatagagataaaactattgatttatacacgttgctgctggaagacattcttgtattgttacaaaagcaggatgatagactggttttaaggtgtcatagtaagattctggcatctacagctgatagcaaacacacgtttagccctgtcattaagttgagtacagtgttggttcgacaagtggcaacagataacaaagctttattcgtcatttccatgtcagacaatggcgctcagatttatgaactggtggcacagacagtttctgaaaagactgtctggcaggacctaatctgtcggatggctgcatcagtgaaggagcaatccacaaagccaattccattaccacagtcaacacctggcgaaggagataatgatgaagaagatccttcaaaattaaaagaggagcagcatggcatttcagtcactggtttgcagagtccagacagagatttgggattagaatctaccttaatatcgtcaaaacctcagtctcattcactgagtacctctgggaaatcagaggtacgtgatctgtttgtggctgagagacagtttgcaaaggaacaacatacagatgggacactaaaggaagttggagaagattatcaaatcgcaatcccagattcacacctgcctgtctcagaagaacggtgggcattggatgcactaagaaatttgggtttgttgaagcagttgctggtgcaacagctaggtttgactgagaagagcgttcaggaagactggcaacatttcccaagatacagaacagcctctcaggggccgcagacagacagtgtcatccagaactctgaaaatattaaggcctatcattctggtgaaggacatatgccctttagaactggaactggtgacattgcaacttgttacagtccacggacttcaactgaatcttttgctccacgggattcagtgggactggcaccccaggatagccaggcaagtaacattttagtaatggaccacatgattatgaccccagagatgcctaccatggagccagaagggggtcttgatgacagtggagagcacttttttgatgcccgtgaagcacatagtgatgagaatccatcagaaggtgatggagcagttaacaaggaagagaaggatgttaatttacgcatctcaggaaactatttgatccttgatggctatgacccagtgcaggagagttccacagatgaggaggttgcttcctcacttaccctgcagcccatgacaggcatccctgctgtggaatccacccaccagcagcaacattctcctcagaatactcactccgatggggcaatttcaccattcacccccgaatttctggtccagcagcgctggggagctatggagtattcctgttttgagatccagagtccctcctcttgtgcagattcacagagccagatcatggagtacattcataagatagaggctgaccttgaacacttaaagaaggtggaggaaagttacaccattctttgccaaaggctggctggatcagccctcacagacaagcactcagataaaagttagagccgcatgtcctggaggtgactgcaggttgttggatttggagtatcggccgtgtctcaccacatcctggctccagtgtggatgcagagagagtgtgacagaggatctgcctgtgaaccacctgggattagtcaagtcccaaggtgcccagagtgggactagttcttcacagtgtggcagctgcactaatctgtttgtgagggaatatccattccctcactctactctcctcactatcggaaattcattttgattcagaataaaaaccaaatgtatagagctttgggtgtaggatatgaaattgtacttagatttaagaaaaagagaaaatcagatggatttatttgacttcattccgtatttgaaagcacattttaatttttatttgccttgttttgttttaattgagtagtgagagttttagacctttgtctttagtacacccaaggatcaactgctcctgaagcaaagaggtcaggatggagtatgcagaagttgggtagagaggttaagaagaggaggaagtgagacggggaagggaggagcaccttgcttcactatacagtattccaagctctctgctgtccagtaggctgcttctctgagggtcacctcaaaggtatgctatgccgtgtggctcttatgtgcccaggtggtgtggtcagagagtggatgggcttcctcccgccctgaggcaagcacctcttctctgtagctgggatcaaccacaattaataggaatcctcaacatactaaatagcaggcacttgaaaatgggtgtgttttcttccattgtcgtcttttctattgagggttgggatttgggtgggagaggaaagcaaattttattttcttgactataaatttgttattcttggtatcatttcatttttataattatacattagacattggcacttgtgtaaaactgtccctgcagattgagcaggaagtaaaaacaaatggaaatgcttcggatagtggcaggggtgggggttgctaaggaaagggtgggatgggagtgggtaaagagtttgggaaggttatctaactgaatcactactgagttgaatcatggctatcattagccacaggtactgctgattataaggccagtaaaattttagtacctggaggtttgactctaatttttgcactgatggtgccaaagggccctgagtcaaaaggatagccaagggtggagtggaaaaagatatggtgaaggcagaactgctcacaccagctccagaagcacgtcctctgacttcactgccgcagctctttccacacggggccgtgattgaccctaaaaattgcagaccagcacatacactggacactgcaggcaaggtgttggtaactgcctgctctaggatgaatagtagcgttagcagcaccctacagagggtaagtttcagaattgtaatttgagaactccttcaattatattgactttctttggttttccttgtgcattaaggtatatattttttgaagtaattttggccaactaaaaatgaagtctgtaaattctgttaataaacaaggagttcatccgttgctcacatctttcattggtgccctctgaactctgtgggttgctaggatgtaattttaatgcttccctgcagtccaaagatgattttttcaccacaaatggtaagggatgcccacctacttttataaacaccactgcaacttaacaagtttatttatctatgtccagatttctgtttctgtcctaaattgatctgtgtttttaggtggatcaacttggatctttagacctcatctataaattgaaattatatttttaagtcataagccaagtacaatctaactcagaatgggattaaaaattttagaagcagaagctaatatataaatgaagtttgggatttggaactttctgtatctcttaggaggaacaagtaaaaaccaaatggttacattgtgctgctagaaataatgtcattctcaattaaaagggttacacctgtagccacttgacactaacaccatcgagggcaattaatcaggagaaaagtaaatataaaaactttgctcttaacgtcacacactacagggtaattatgtaattctctagcactcaattaagaagcttgtaggttagcaaaatttcagtttctctagttcagccagtgtcttgtccttagtaattatttgctttccctgcagatcaatttctccttggaactctaacaggactaactggaaaaatactttgaccatagctctagtacttccaaataaattcatatctagattttcaaacaaagccccaagatgaagtctaattctgaaaatatctcacaatttttgaatgttctttttatcttaccgacctaacttctcttttccctcccaacttggcctcccacacgttccatttcattttggccattatagtcacatccgtttgactttggttgtgacatcttcctttcaggatgatggaattagatgcagtctgtctttgagtgagactggtcaccatcagaggagttttttctaagtgacgtgactagaagttgaaatctacttccctgctaaagggcacaggggtggtgtacaaagaaagctaccttcccagagcaagcaggctgcattttagctatggaagtgacctgctgtgacactgtgctctcttctgtgggcttaatggttcctttgctatgaagtggcaaattacatgtagagtgtctccttccttttcagagaacagttaatcaaggcaaatcagcaagcccccaaagtgctgtaatttaacatcatgattaccaccttcgaagctatatattttgcatactttaaaatcacctaacttggactgcttgaattacattggcttttagaaccgaaattgtaactatgtattgtatttcatgggaggtatattttatgagctttttggctttcttttttcccacagcaactgccaatgaaggatgaatcccctttttaaaaagttgttgttgttgttgtttatttgattttgagttaggagggataatagagaagtccatttaaaaattatttttagaagctaaagaaagtaattatgcttcctgtgaattgtcttttactggcatctttgttttcctctttgatgttagtaaatttggtgtaatacgtggggcttccatatttcaaagtggaagctttcttctctgaagtcgatatatggttttgaattactagagctttggtcagtatttccttccctatatgtcacagagggcaccactgagaactgcgtgcataggacctcaaaatacaaaattagcagggcctcacagtcagcttcctcatggctagtttttcccccttatattacaatttttgttttataagtcatttttttcctgatatttccaccacttttcagagtcatctacaaaatttttctttcctcaagaaaagagttccttttgccttattccttatgccttccccactggtattgagggttttgataataaattggtaggaaaaaaaagtacctcctagaaggaagccttccccaccatttccaggtgccaactgctaagcagatatattccaaaaatggtaactgtcatgtgcacactgttggttatttttaataagcctcttcctactagaacattttattttccttgttcaccatacaatcatgtactctttaacagaaattgcttttaaaaaatatctggaactatctttaaaaaaactttattaataatcatgtatttttactgatcacattttgaaatgcctaaaagactttattgttctaattatccagatgtacctttgtaaaatagctcttttatgaattagctgataaggctgtatgtttctggaacaaaatattggtcatctaaaaactttctgttttctggggtctgggaaaatagaaaataagatttcaaatattaaataagcttaaaggaaccaagcatgtgactttttatttgtattctggttgatttgtcttgtccaagttatattagaaaagttgaggagtcgaggagcctgtaattaattttcctgtcagtgactgtcagacatcttcctgcttattagagcatccctagcaacaaggctaaaccttcatgacagtgctggcaggtgggcttgccctaggcatgtggggcaggtttgttgtttttttaatagctttattgaggatatttcacatatcatataattcatccatttaaagtgtataatcagatgggttttggtatattattgatttttaattgtggtgaaatatatatataacaaaatttgctattgtaactatttttaagtataaagttcagtgaggtaggccagcttttatgacgcacctgaagataactttggttttaatcctaccctaaatgaagcatatgcctctatttttcctgtccccagtgctgggcttcttcacataccaacatttctgtgcttttaccaacagcattttagctcagaaggctcgcttactttgggcatttgctgtattttggttttgaaatacttgtaatttgacttattcttgggataatattttagttttcagtcattcaagggcacatttggctgacggagctaataagcgtaataaaatgcttagtagtttataccatcttttagttaaacattttaaagattaagactattcaaatgtactttgcggaaattaacctgtttgtatgcctggctttgtttacaaacatatatctatatctatatatatagatacagatacagatacatatctggtggaacaaagaaatacctgtaccattcccacttgctctttgatagccacctcctaggaatggagacaataaaactctgtatttgcatgtgaaaaa

SEQ ID NO: 1331 - DNA, 2208 bp, Homo sapiens
gcggtggaattcgcggagggagcgctgaccatggctccctggcctgaattgggagatgcccagcccaaccccgataagtacctcgaaggggccgcaggtcagcagcccactgcccctgataaaagcaaagagaccaacaaaacagataacactgaggcacctgtaaccaagattgaacttctgccgtcctactccacggctacactgatagatgagcccactgaggtggatgacccctggaacctacccactcttcaggactcggggatcaagtggtcagagagagacaccaaagggaagattctctgtttcttccaagggattgggagattgattttacttctcggatttctctactttttcgtgtgctccctggatattcttagtagcgccttccagctggttggaggaaaaatggcaggacagttcttcagcaacagctctattatgtccaaccctttgttggggctggtgatcggggtgctggtgaccgtcttggtgcagagctccagcacctcaacgtccatcgttgtcagcatggtgtcctcttcattgctcactgttcgggctgccatccccattatcatgggggccaacattggaacgtcaatcaccaacactattgttgcgctcatgcaggtgggagatcggagtgagttcagaagagcttttgcaggagccactgtccatgacttcttcaactggctgtccgtgttggtgctcttgcccgtggaggtggccacccattacctcgagatcataacccagcttatagtggagagcttccacttcaagaatggagaagatgccccagatcttctgaaagtcatcactaagcccttcacaaagctcattgtccagctggataaaaaagttatcagccaaattgcaatgaacgatgaaaaagcgaaaaacaagagtcttgtcaagatttggtgcaaaacttttaccaacaagacccagattaacgtcactgttccctcgactgctaactgcacctccccttccctctgttggacggatggcatccaaaactggaccatgaagaatgtgacctacaaggagaacatcgccaaatgccagcatatctttgtgaatttccacctcccggatcttgctgtgggcaccatcttgctcatactctccctgctggtcctctgtggttgcctgatcatgattgtcaagatcctgggctctgtgctcaaggggcaggtcgccactgtcatcaagaagaccatcaacactgatttcccctttccctttgcatggttgactggctacctggccatcctcgtcggggcaggcatgaccttcatcgtacagagcagctctgtgttcacgtcggccttgacccccctgattggaatcggcgtgataaccattgagagggcttatccactcacgctgggctccaacatcggcaccaccaccaccgccatcctggccgccttagccagccctggcaatgcattgaggagttcactccagatcgccctgtgccactttttcttcaacatctccggcatcttgctgtggtacccgatcccgttcactcgcctgcccatccgcatggccaaggggctgggcaacatctctgccaagtatcgctggttcgccgtcttctacctgatcatcttcttcttcctgatcccgctgacggtgtttggcctctcgctggccggctggcgggtgctggttggtgtcggggttcccgtcgtcttcatcatcatcctggtactgtgcctccgactcctgcagtctcgctgcccacgcgtcctgccgaagaaactccagaactggaacttcctgccgctgtggatgcgctcgctgaagccctgggatgccgtcgtctccaagttcaccggctgcttccagatgcgctgctgctgctgctgccgcgtgtgctgccgcgcgtgctgcttgctgtgtggctgccccaagtgctgccgctgcagcaagtgctgcgaggacttggaggaggcgcaggaggggcaggatgtccctgtcaaggctcctgagacctttgataacataaccattagcagagaggctcagggtgaggtccctgcctcggactcaaagaccgaatgcacggccttgtaggggacgccccagattgtcagggatggggggatggtccttgagttttgcatgctctcctccctcccacttctgcaccctttcaccacctcgacccgggaattccgg

SEQ ID NO: 1332 - DNA, 1681 bp, Homo sapiens
tacttcccggatgagaagggcggccgtgaagccagcagggaagccagccccacaggcaagggccccccagcctcctcacagctccccatagcctggacctgccggccctccctccaggaccgaggggctcccaagggaaactcaggcgtgtgctggtcccaatgtcagtgaaacccagctgggggcctggcccctcggagggggtcaccgcagtgcctaccagtgaccttggagagatccacaactggaccgagctgcttgacctcttcaaccacactttgtctgagtgccacgtggagctcagccagagcaccaagcgcgtggtcctctttgccctctacctggccatgtttgtggttgggctggtggagaacctcctggtgatatgcgtcaactggcgcggctcaggccgggcagggctgatgaacctctacatcctcaacatggccatcgcggacctgggcattgtcctgtctctgcccgtgtggatgctggaggtcacgctggactacacctggctctggggcagcttctcctgccgcttcactcactacttctactttgtcaacatgtatagcagcatcttcttcctggtgtgcctcagtgtcgaccgctatgtcaccctcaccagcgcctccccctcctggcagcgttaccagcaccgagtgcggcgggccatgtgtgcaggcatctgggtcctctcggccatcatcccgctgcctgaggtggtccacatccagctggtggagggccctgagcccatgtgcctcttcatggcaccttttgaaacgtacagcacctgggccctggcggtggccctgtccaccaccatcctgggcttcctgctgcccttccctctcatcacagtcttcaatgtgctgacagcctgccggctgcggcagccaggacaacccaagagccggcgccactgcctgctgctgtgcgcctacgtggccgtctttgtcatgtgctggctgccctatcatgtgaccctgctgctgctcacactgcatgggacccacatctccctccactgccacctggtccacctgctctacttcttctatgatgtcattgactgcttctccatgctgcactgtgtcatcaaccccatcctttacaactttctcagcccacacttccggggccggctcctgaatgctgtagtccattaccttcctaaggaccagaccaaggcgggcacatgcgcctcctcttcctcctgttccacccagcattccatcatcatcaccaagggtgatagccagcctgctgcagcagccccccaccctgagccaagcctgagctttcaggcacaccatttgcttccaaatacttcccccatctctcccactcagcctcttacacccagctgaggtagaggccagactcctccaacagtgaaggaaaaggcacagatcaccttagaggccacgctcccaagattagttatcaccctggcagtatgaatacttccctaaggcctcccatccatggaggggaagagtgggaaccagctgttacactcagcatttactgagcactgatgggagccctgcctgggccatgtgctgtggggccaaatggacatcactccctaacttcttgaggtctgtctcctctgtggattcacgcatgtatcaacctcattaaactatgccaaacttttaaaaaaaaaaaa

SEQ ID NO: 1333 - DNA, 2710 bp, Homo sapiens
  misc_feature (1)...(2710): n = a,t,c or g
cgcagcgggtgcgggcgccgacgggcgagagccagcgagcgagcgagcgagccgagccgagcctcccgccgtcgccatgggccagaacgacctgatgggcacggccgaggacttcgccgaccagttcctccgtgtcacaaagcagtacctgccccacgtggcgcgcctctgtctgatcagcaccttcctggaggacggcatccgtatgtggttccagtggagcgagcagcgcgactacatcgacaccacctggaactgcggctacctgctggcctcgtccttcgtcttcctcaacttgctgggacagctgactggctgcgtcctggtgttgagcaggaacttcgtgcagtacgcctgcttcgggctctttggaatcatagctctgcagacgattgcctacagcattttatgggacttgaagtttttgatgaggaacctggccctgggaggaggcctgttgctgctcctagcagaatcccgttctgaagggaagagcatgtttgcgggcgtccccaccatgcgtgagagctcccccaaacagtacatgcagctcggaggcagggtcttgctggttctgatgttcatgaccctccttcactttgacgccagcttcttttctattgtccagaacatcgtgggcacagctctgatgattttagtggccattggttttaaaaccaagctggctgctttgactcttgttgtgtggctctttgccatcaacgtatatttcaacgccttctggaccattccagtctacaagcccatgcatgacttcctgaaatacgacttcttccagaccatgtcggtgattgggggcttgctcctggtggtggccctgggccctgggggtgtctccatggatgagaagaagaaggagtggtaacagtcacagatccctacctgcctggctaagacccgtggccgtcaaggactggttcggggtggattcaacaaaactgccagcttttatgtatcctcttcccttcccctcccttggtaaaggcacagatgttttgagaactttatttgcagagacacctgagaatcgatggctcagtctgctctggagccacagtctggcgtctgacccttcagtgcaggccagcctggcagctggaagcctcccccacgccgaggctttggagtgaacagcccgcttggctgtggcatctcagtcctatttttgagtttttttgtgggggtacaggagggggccttcaagctgtactgtgagcagacgcattggtattatcattcaaagcagtctccctcttatttgtaagtttacatttttagcggaaactactaaattattttgggtggttcagccaaacctcaaaacagttaatctccctggtttaaaatcacaccagtggctttgatgttgtttctgccccgcattgtattttataggaatactgaaaacatttagggacacccaaagaatgatgcagtattaaaggggtggtagaagctgctgtttatgataaaagtcatcggtcagaaaatcagcttggattggtgccaagtgttttattgggtaacaccctgggagttttagtagcttgaggcaaggtggaggggcaagaagtccttggggaagctgctggtctgggtgctgctggcctccaagctggcagtgggaagggctagtgagaccacacaggggtagccccagcagcagcaccctgcaagccagcctggccagctgctcagaccagcttgcagagccgcagccgctgtgggcagggggtgtggcaggagctcccagcactggagacccacggactcaacccagttacctcacatggggccttttctgagcaaggtctcgaaagcgcaggccgccctggctgagcagcaccgccctttcccagctgcactcgccctgtggacagccccgacacaccactttcctgaggctgtcgctcactcagattgtccgtttgctatgccgaatgcagccaaaattcctttttacaatttgtgatgccttaccgatttgatcttaatcctgtatttaaagttttctaacactgccttatactgtgtttctctttttgggggagcttaactgcttgttgctccctgtcgtctgcaccatagtaaatgccacaagggtagtcgaacacctctctggcccctagacctatctggggacaggctggctcagcctgtctccagggctgctgcggcccagccccgagcctgcctccctcttggcctctcatccattggctctgcagggcaggggtgaggcaggtttctgctcataagtgcttttggaagtcacctacctttttaacacagccgaactagtcccaacgcgtttgcaaatattcccctggtagcctacttccttacccccgaatattggtaagatcgagcaatggcttcaggacatgggttctcttctcctgtgatcattcaagtgctcactgcatgaagactggcttatctcagtgtttcaacctcaccagggctgtctcttggtccacacctcgctccctgttagtgccgtatgacagcccccatcaaatgaccttggccaagtcacggtttctctgtggtcaaggttggttggctgattggtggaaagtagggtggaccaaaggaggccacgtgagcagtcagcaccagttctgcancagagcgcctccgtcctagtgggtgtcctgtttctcctggccctgggtggntaaggctg

SEQ ID NO: 1334 - DNA, 2395 bp, Homo sapiens
tttcgtgtcaccagcacttacggcactgaaaactcgctgctgccccaacctggcttgacaggcttggtctctgcaagtggctctcagccccttcttctttcctgcctcaccttccaattcgtttgccgccgccgtcccgcagctgctgtttccggagttgccccttccccatgttccggggcaggagtccgcaaagcgaagatccgcccgccggttcctcatcatgtccgaactgactaaagagctgatggagctggtgtggggcaccaagagcagccccggtctctcggacaccattttctgccgctggacgcaagggtttgtgtttagtgaatcagagggatctgcattagaacagtttgaaggtggcccctgtgctgttattgcacctgttcaggcatttcttttgaagaagctcctgttttcttcggagaagtcttcttggcgggattgttcacaggaagagcagaaggaactcctttgtcataccttgtgtgatattttagaaagtgcttgttgtgaccactctggatcatactgcttggtttcatggttaagaggaaagacaactgaggaaactgctagtatttctgggagtcctgcagagtctagttgccaagtggaacattcttctgccttggctgtcgaagagcttggctttgagcgatttcatgcattaattcaaaaaagatcgttcagaagtttaccagaattaaaagatgctgtcttggaccagtattcaatgtggggaaataaatttggagtattgctttttctgtattctgtattactgacaaagggcattgaaaacataaaaaacgaaattgaagatgcaagtgaacccttgatagatcctgtatatggacatggcagccaaagtttaattaatctcctgctgacgggacatgctgtttctaatgtatgggatggtgatagagagtgctcaggaatgaaacttcttggtatacatgaacaagcagcagtaggatttttaacactaatggaagctttaagatactgtaaggttggttcttacttgaaaatctccaaaattccctatttggattgtttggcaagtgagactcacctcaccgtattttttgccaaggatatggctttagttgcccctgaagctccttcagaacaagccagaagagtttttcaaacctacgacccagaagataatggattcatacccgattcacttctggaagatgtgatgaaagcattggaccttgtttcagatcctgaatatataaatctcatgaagaataaattagatccagaaggattaggaatcatattattgggcccatttcttcaagaattttttcctgatcagggctccagtggtccagaatcttttactgtctaccactacaatggattgaagcagtcaaattataatgaaaaggtcatgtacgtagaagggactgcagttgtgatgggttttgaagatcccatgctacagacagatgacactcctattaaacgctgtctgcaaaccaaatggccatacattgagttactctggaccacagatcgctctccttcactaaattaatttgtctaagtatttataaggaagatcttaataacagatgttgaaagaaggagtcaagactggcaattggctggattaagctaaacactggtatcactgattaactgtaaataacaattaaaaacacattttcagtgtttatgatatgtttaaattatttgtcctaaagctttatgttaaagattatcctattttaccccttcgtgtgaaatttactagcaaaattaagctttcatcaaagttcatcacttttgcattcagatacttggtcatttacttaccaaattacaaacgcaatactacagcatttgtatattaagtatcacagttactattgataaactacttttgggttttatttcattgaggcactttttttattgtttgaatgattccggcttgtaatatatcagcctctacaatgaaatgcagaagagttcatttttctaagatctgtttttcattagaaatattgacaaataacacattgtcaacctggatcctttgacaatttacttaactctggcatgttcacaaaaagtagaaactctaagagaccattaccatttattcacagatgtataggggatgtattctaaaaactgacagaaaagagaatctgatagtcaacactgttaacttttactgtgtaattgccaaatacactttttccaaatttgtcccaacagccctgtaagccagctttcttctatatttataaacacgataaatgcatgagaagatctgttattacattagtatattacgttatttattatgatcctagttgatggcctaaataaacacctttttctttaaaaaaaaaaaaac

SEQ ID NO: 1335 - DNA, 4732 bp, Homo sapiens
gaaaagccaacgctccacgcccattttcgtcagggaatatgtacccatcggctttagataaataaggaaacagggggctgaaccagaactaagagaagattgggcagagagaaggcaatggcgagtccacctaggggctggggctgcggagagctgctgctgcccttcatgctcctggggacgctgtgcgagccaggatccgggcagatccgctactcgatgccggaggagctggacaaaggctccttcgtcggcaacatagccaaggaccttgggctggagccccaggagctggcggagcgcggagtccgcatcgtctccagaggtaggacgcagctttttgccctgaacccgcgaagcggcagcttggtcaccgcgggcaggatagaccgggaggagctctgcgctcagagcccactgtgtgtggtgaactttaacatcttggttgagaacaaaatgaaaatttatggagtagaagtagaaataatcgatattaatgataacttcccgcgtttccgggatgaagagttaaaagtaaaagttaatgaaaatgcggctgcagggacacggttagtgcttcccttcgcgcgggatgcggatgtgggtgtgaactctctccggagttaccagctcagctccaatctgcacttctctctggatgtggtaagcggaactgatggacaaaagtatccggagctggtgttggaacagcccctagaccgcgagaaagagactgttcacgacctcctcctcacagctttagatggcggagacccggtactctccggcaccacgcacatccgtgttacggtcctcgacgcaaacgacaatgcgcccctgttcaccccatccgagtacagcgtgagtgttccagagaacatacctgtgggcactcggctgctcatgctaaccgccacggatccagatgagggaataaacgggaaattgacctactcttttcgcaatgaagaagaaaaaatttcggagactttccaacttgattccaacctgggggaaatctcaactctacaatcactggactatgaagaatccagattctacctcatggaagtggtagctcaggatggaggcgctcttgttgccagcgctaaggtggtggtcacagtacaggacgtgaatgacaatgcccccgaagtgatcctcacctctctgaccagttcgatctctgaagactgtcttcccggaactgtaatcgcgctgtttagcgtacatgatggtgattctggagaaaatggtgagattgcatgctctattcctaggaatttgccttttaaattggagaagtcagttgataattactatcacctattaacaactagggacctggacagagaagagacttcagattataatatcactttaaccgtcatggaccatggaaccccgcccctctctacagaaagccacatccccttgaaagtagcagacgttaatgacaacccacccaatttccctcaagcctcctactccacctctgtcacagaaaacaatcccagaggtgtctctatcttctctgtgacagcccatgaccccgacagcggcgacaacgctcgagtcacctactccctggctgaagacacatttcagggggcgcccttgtcctcctatgtatccattaactctgacaccggtgtcctgtatgctctgagatccttcgactatgagcagttgagagacctacagttgtgggtgacagccagcgacagtgggaaccctccacttagcagcaacgtgtcgctgagcctgtttgtgctggaccagaacgacaatacgcctgagatcctgtaccccgccctccccacagacggttccacgggcgtggagctggcgcctcgctccgcagaacctggctacctggtgaccaaggtggtagcggtggacaaagattcaggccagaacgcctggctgtcctaccgcctgcttaaggccagcgagccaggactctttgcggttgggctgcacacgggcgaggtgcgcacagcgcgagccctgctggacagagacgcgctcaagcagagcctcgtggtggccgtcgaagaccatggccagccccctctgtcagccaccttcacggtcaccgttgccgtggccgacaggatccctgacatcctggctgacctaggcagtatcaagacccccattgaccctgaggatctggacctcacactctatcttgtggtggcagtggctgcagtctcctgcgtcttcctggccttcgtcatcgtgctgctggtgctcagactgaggcgctggcacaagtcacgcctgcttcaggctgaaggcagcaggttggcgggtgtgcccgcctcgcactttgtgggcgtggatggggttcgggctttcctgcagacctattcccacgaggtctccctcaccgcggactcgaggaagagtcacctgatctttccccagcccaactacgcagacacgctccttagtgaagagagctgtgagaaaagcgagcctcttctgatgtctgataaggtagatgcaaacaaagaagaacggcgagttcagcaagccccgcccaacacggactggcgtttctctcaggcccagagacccggcaccagcggctcccaaaatggcgatgacaccggcacctggcccaacaaccagtttgacacagagatgctgcaagccatgatcttggcgtccgccagtgaagctgctgatgggagctccaccctgggagggggtgccggcaccatgggattgagcgcccgctacggaccccagttcaccctgcagcacgtgctgcagggtgaactggggtccgactaccgccagaatgtctacatcccaggcagcaatgccacactgaccaacgcagctggcaagcgggatggcaaggccccagcaggtggcaatggcaacaagaagaagtcgggcaagaaggagaagaagtaacatggaggccaggccaagagccacagggcggcctctccccaaccagcccagcttctccttacctgcacccaggcctcagagtttcagggctaacccccagaatactggtaggggccaaggccatgctccccttgggaaacagaaacaagtgcccagtcagcacctaccccttcccccccagggggttgaatatgcaaaagcagttccgctgggaacccccatccaatcaactgctgtacccatgggggtagtggggttactgtagacaccaagaaccatttgccacaccccgtttagttacagctgaactcctccatcttccaaatcaatcaggcccatccatcccatgcctccctcctccccaccccactccaacagttcctctttcccgagtaaggtggttggggtgttgaagtaccaagtaacctacaagcctcctagttctgaaaagttggaagggcatcatgacctcttggcctctcctttgattctcaatcttcccccaaagcatggtttggtgccagccccttcacctccttccagagcccaagatcaatgctcaagttttggaggacatgatcaccatccccatggtactgatgcttgctggatttagggagggcattttgctaccaagcctcttcccaacgccctggggaccagtcttctgttttgtttttcattgtttgacgtttccactgcatgccttgacttcccccacctcctcctcaaacaagagactccactgcatgttccaagacagtatggggtggtaagataaggaagggaagtgtgtggatgtggatggtgggggcatggacaaagcttgacacatcaagttatcaaggccttggaggaggctctgtatgtcctcaggggactgacaacatcctccagattccagccataaaccaataactaggctggacccttcccactacataatagggctcagcccaggcagccagctttgggctgagctaacaggaccaatggattaaactggcatttcagtccaaggaagctcgaagcaggtttaaggaccaaggtccccttgagaggtcagaggggcctctgtgggtgctgggtactccagaggtgccactggtggaagggtcagcggagccccagcaggaagggtgggccagccaggccattcttagtccctgggttggggaggcagggagctagggcagggaccaaatgaacagaaagtctcagcccaggatggggcttcttcaacagggcccctgccctcctgaagcctcagtccttcaccttgccaggtgccgtttctcttccgtgaaggccactgcccaggtccccagtgcgccccctagtggccatagcctggttaaagttccccagtgcctccttgtgcatagaccttcttctcccacccccttctgcccctgggtccccggccatccagcggggctgccagagaaccccagacctgcccttacagtagtgtagcgccccctccctctttcggctggtgtagaatagccagtagtgtagtgcggtgtgcttttacgtgatggcgggtgggcagcgggcggcgggctccgcgcagccgtctgtccttgatctgcccgcggcggcccgtgttgtgttttgtgctgtgtccacgcggctaaggcgaccccctcccccgtactgacttctcctataagcgcttctcttcgcatagtcacgtagctcccaccccaccctcttcctgtgtctcacgcaagttttatactctaatatttatatggctttttttcttcgacaaaaaaataataaaacgtttcttctg

SEQ ID NO: 1336 - DNA, 1904 bp, Homo sapiens
cggccgcgtcgacggcagccatctttctcttgccgcgtgctggtgttggaggaccctccctgcttcagatttaccaacagcatgaatcaagaaaagttagccaaacttcaggctcaggtccggatagggggcaagggtacagctcgcagaaagaagaaggtggtacatagaacagccacagctgatgacaaaaagcttcagagttctctaaaaaaactggctgtgaataatatagctggtattgaagaggtgaacatgattaaagatgatgggacagttattcatttcaacaatcccaaagtccaagcttccctttctgctaatacctttgcaattactggtcatgcagaagccaaaccaatcacagaaatgcttcctggaatattaagtcagcttggtgctgacagtttaacaagccttaggaagttagctgaacagttcccacggcaagtcttggacagtaaagcaccaaaaccagaagacattgatgaggaagatgatgatgttccagatcttgtagaaaattttgatgaggcatcaaagaatgaagctaactaaaagtttggtttttggaagctggcatggactagatttaacaaatcagctatgtggttccaaagttttacagacatggagaacatcacctgttactagttcagtaatataaatattttgtatattaataatgctgtttgttcagcatttttcggtcatttgattttgcattttgcacttcctcccaggatatttttttggtcaaaatatgaagtattggtgcagtttgagggtgttttggtttttgattcctggtttttttgttttttgtttggggtatttttggtgtatgtatgtttatgtatgtgtgtgggtatgtgtgtatacagtggagagcaaattggaaaacagttctatttatcctcctccctccccagtagaaataaaaaaaatctttacatttgttacttttcttttccccccgtaagacacagaattaatggaaagtgagtatcttggatttcaaatctgaagagatttttaccattagtggtttgattttaatttgcttggttaactatcatatttttcatacacttctctggatttaaaatatcttgaggtattttgccactggcttcatgctggagtaatgggtaacatatctttggtatggttgccttagattaacttacctagtcagacccagaagaacttcttttactagcttgcttcctaaatgccttttttcctctccttttggtctccaaatggcctggtcagcttttggtaatattcttcctcatcttccacctagcttgagaaggatgttctccatatagagtttagcgagtgcctaatccctccttttgtaagattttgttccctcagcttgaggaacaacttcatcttcaactttttatttctccctgatgttacagtttggtagatttcaaactggaatagctagcatgtgcttgctaaataattttatgccagccttatcctgtatcctagctgttcttaacagcaggtacaaaaatgcctgtttttcagcaaggttgaaattgggaatgtccttttgaatcagaagaaaataggccatagactcatctcccagcacaaatgggcattctatgaaatggtactggccctaggaggatttcctcaaccactctcctactcttggccttgaacctacctctgggttggatcttactattgtagctgctcactataccctcctgcatgcttagaataatgctttgaggggagcactggtaaaacacagtatttatttttttacctcctttaagaggacttggaggtaagttgcattcattcactcaagtttccctcttgctgtctaatagaagcttactttttgctatatcagcatttgttacagc

SEQ ID NO: 1337 - DNA, 1404 bp, Homo sapiens
attcccgggtcgacgatttcgtggagcccggccgctgctcgcgggctgagtgtctgtcgctgctgccgcctccacccagcctccgccatggacctcttcggggacctgccggagcccgagcgctcgccgcgcccggctgccgggaaagaagctcagaaaggacccctgctctttgatgacctccctccggccagcagtactgactcaggatcagggggacctttgctttttgatgatctcccacccgctagcagtggcgattcaggttctcttgccacatcaatatcccagatggtaaagactgaagggaaaggagcaaagagaaaaacctccgaggaagagaagaatggcagtgaagagcttgtggaaaagaaagtttgtaaagcctcttcggtgatctttggtctgaagggctatgtggctgagcggaagggtgagagggaggagatgcaggatgcccacgtcatcctgaacgacatcaccgaggagtgtaggcccccatcgtccctcattactcgggtttcatattttgctgtttttgatggacatggaggaattcgagcctcaaaatttgctgcacagaatttgcatcaaaacttaatcagaaaatttcctaaaggagatgtaatcagtgtagagaaaaccgtgaagagatgccttttggacactttcaagcatactgatgaagagttccttaaacaagcttccagccagaagcctgcctggaaagatgggtccactgccacgtgtgttctggctgtagacaacattctttatattgccaacctcggagatagtcgggcaatcttgtgtcgttataatgaggagagtcaaaaacatgcagccttaagcctcagcaaagagcataatccaactcagtatgaagagcggatgaggatacagaaggctggaggaaacgtcagggatgggcgtgttttgggcgtgctagaggtgtcacgctccattggggacgggcagtacaagcgctgcggtgtcacctctgtgcccgacatcagacgctgccagctgacccccaatgacaggttcattttgttggcctgtgatgggctcttcaaggtctttaccccagaagaagccgtgaacttcatcttgtcctgtctcgaggatgaaaagatccagacccgggaagggaagtccgcagccgacgcccgctacgaagcagcctgcaacaggctggccaacaaggcggtgcagcggggctcggccgacaacgtcactgtgatggtggtgcggatagggcactgaggggtggcgcgcggccaggagcacgcatggtattgacttaaaaggttcattttgtgtgtgtgcacattgtgtgttttgtgtactcctgtgggactcccatggttgtaaataaaggtttctctttttaaaaaaaaaaaa

SEQ ID NO: 1338 - DNA, 719 bp, Homo sapiens
cggggccttcgcagagcatggcggcgggcgagcttgagggtggcaaacccctgagcgggctgctgaatgcgctggcccaggacactttccacgggtaccccggcatcacagaggagctgctacggagccagctatatccagaggtgccacccgaggagttccgcccctttctggcaaagatgagggggattcttaagtctattgcgtctgcagacatggatttcaaccagctggaggcattcttgactgctcaaaccaaaaagcaaggtgggatcacatctgaccaagctgctgtcatttccaaattctggaagagccacaagacaaaaatccgtgagagcctcatgaaccagagccgctggaatagcgggcttcggggcctgagctggagagttgatggcaagtctcagtcaaggcactcagctcaaatacacacacctgttgccattatagagctggaattaggcaaatatggacaggaatctgaatttctgtgtttggaatttgatgaggtcaaagtcaaccaaattctgaagacgctgtcagaggtagaagaaagtatcagcacactgatcagccagcctaactgaagatgatgtatgaaggagttggagttgttgaaaccaaggtgtccatgatccctccccactgaccttttctaagaaaattcttgtgcccgcattggtattaaatcctcgcattcagtcaaaaaaaaaaaa

SEQ ID NO: 1339 - DNA, 1085 bp, Homo sapiens
tctgacgaggtcttacggaagttcccgaaacttccggtggccggcttagttaggagctatggctaaacatcatcctgatttgatcttttgccgcaagcaggctggtgttgccatcggaagactgtgtgaaaaatgtgatggcaagtgtgtgatttgtgactcctatgtgcgtccctgcactctggtgcgcatatgtgatgagtgtaactatggatcttaccaggggcgctgtgtgatctgtggaggacctggggtctctgatgcctattattgtaaggagtgcaccatccaggagaaggacagagatggctgcccaaagattgtcaatctggggagctctaagacagacctcttctatgaacgcaaaaaatacggcttcaagaagaggtgattggtgggtggccccttcctccccccaacatcagtctgctgcagctgccagaaaacatgcctactactaccagcagaaagggagcagagcccagagcatcaccaggagtgcctgctagtgtactggcagcttgccaccccctcctctcccttcacccagacacgtggtagggatggaaaaggattcttcacagagcactctggcacaccatatcggagaaaacttgatagattagttaatggtttttcttgaattcgagaagcatagatctgttctccatattggtatgttctccctcaaccaagatcttctaaaaagaaataatattttagtcttctgcttgaggaactgactgtgaagcgacgcccagtgaaaaacatgttcttgcagcagctctggtggcagctgtccttgaggaacctttggtgtgtggtgggaagctatcagaacaagaaatgtaggcatttcccgtttttttggggggggggggggggggggccagggctctgccctcttgaaaggcatttacttgtttaacacttgtccagctacagtggggtacagtagctggctattcacaggcatcatcatagcccactagtctcatattattttccttttgagaaattggaaactctttctgttgctattatattaataaagttggtgtttattttctggtaaaaaaaaaaaa

SEQ ID NO: 1340 - DNA, 5271 bp, Homo sapiens
agatcttggaacgagacgacctgctctctctcccagaacgtgtctctgctgcaaggcaccgggccctttcgctctgcagaactgcacttgcaagaccattatcaactcctaatcccagctcagaaagggagcctctgcgactcattcatcgccctccaggactgactgcattgcacagatgatggatatttacgtatgtttgaaacgaccatcctggatggtggacaataaaagaatgaggactgcttcaaatttccagtggctgttatcaacatttattcttctatatctaatgaatcaagtaaatagccagaaaaagggggctcctcatgatttgaagtgtgtaactaacaatttgcaagtgtggaactgttcttggaaagcaccctctggaacaggccgtggtactgattatgaagtttgcattgaaaacaggtcccgttcttgttatcagttggagaaaaccagtattaaaattccagctctttcacatggtgattatgaaataacaataaattctctacatgattttggaagttctacaagtaaattcacactaaatgaacaaaacgtttccttaattccagatactccagagatcttgaatttgtctgctgatttctcaacctctacattatacctaaagtggaacgacaggggttcagtttttccacaccgctcaaatgttatctgggaaattaaagttctacgtaaagagagtatggagctcgtaaaattagtgacccacaacacaactctgaatggcaaagatacacttcatcactggagttgggcctcagatatgcccttggaatgtgccattcattttgtggaaattagatgctacattgacaatcttcatttttctggtctcgaagagtggagtgactggagccctgtgaagaacatttcttggatacctgattctcagactaaggtttttcctcaagataaagtgatacttgtaggctcagacataacattttgttgtgtgagtcaagaaaaagtgttatcagcactgattggccatacaaactgccccttgatccatcttgatggggaaaatgttgcaatcaagattcgtaatatttctgtttctgcaagtagtggaacaaatgtagtttttacaaccgaagataacatatttggaaccgttatttttgctggatatccaccagatactcctcaacaactgaattgtgagacacatgatttaaaagaaattatatgtagttggaatccaggaagggtgacagcgttggtgggcccacgtgctacaagctacactttagttgaaagtttttcaggaaaatatgttagacttaaaagagctgaagcacctacaaacgaaagctatcaattattatttcaaatgcttccaaatcaagaaatatataattttactttgaatgctcacaatccgctgggtcgatcacaatcaacaattttagttaatataactgaaaaagtttatccccatactcctacttcattcaaagtgaaggatattaattcaacagctgttaaactttcttggcatttaccaggcaactttgcaaagattaattttttatgtgaaattgaaattaagaaatctaattcagtacaagagcagcggaatgtcacaatcaaaggagtagaaaattcaagttatcttgttgctctggacaagttaaatccatacactctatatacttttcggattcgttgttctactgaaactttctggaaatggagcaaatggagcaataaaaaacaacatttaacaacagaagccagtccttcaaaggggcctgatacttggagagagtggagttctgatggaaaaaatttaataatctattggaagcctttacccattaatgaagctaatggaaaaatactttcctacaatgtatcgtgttcatcagatgaggaaacacagtccctttctgaaatccctgatcctcagcacaaagcagagatacgacttgataagaatgactacatcatcagcgtagtggctaaaaattctgtgggctcatcaccaccttccaaaatagcgagtatggaaattccaaatgatgatctcaaaatagaacaagttgttgggatgggaaaggggattctcctcacctggcattacgaccccaacatgacttgcgactacgtcattaagtggtgtaactcgtctcggtcggaaccatgccttatggactggagaaaagttccctcaaacagcactgaaactgtaatagaatctgatgagtttcgaccaggtataagatataattttttcctgtatggatgcagaaatcaaggatatcaattattacgctccatgattggatatatagaagaattggctcccattgttgcaccaaattttactgttgaggatacttctgcagattcgatattagtaaaatgggaagacattcctgtggaagaacttagaggctttttaagaggatatttgttttactttggaaaaggagaaagagacacatctaagatgagggttttagaatcaggtcgttctgacataaaagttaagaatattactgacatatcccagaagacactgagaattgctgatcttcaaggtaaaacaagttaccacctggtcttgcgagcctatacagatggtggagtgggcccggagaagagtatgtatgtggtgacaaaggaaaattctgtgggattaattattgccattctcatcccagtggcagtggctgtcattgttggagtggtgacaagtatcctttgctatcggaaacgagaatggattaaagaaaccttctaccctgatattccaaatccagaaaactgtaaagcattacagtttcaaaagagtgtctgtgagggaagcagtgctcttaaaacattggaaatgaatccttgtaccccaaataatgttgaggttctggaaactcgatcagcatttcctaaaatagaagatacagaaatagtttccccagtagctgagcgtcctgaaaatcgctctgatgcaaagcctgaaaaccatgtggttgagtcctattgtccacccatcattgaggaagaaataccaaacccagccgcagatgaaactggagggactgcacaggttatttacattgatgttcagtcgatgtatcagcctcaagcaaaaccagaagaagaacaagaaaatgaccctgtaggaggggcaggctataagccacagatgcacctccccattaattctactgtggaagatatagctgcagaagaggacttagataaaactgcgggttacagacctcaggccaatgtaaatacatggaatttagtgtctccagactctcctagatccatagacagcaacagtgagattgtctcatttggaagtccatgctccattaattcccgacaatttttgattcctcctaaagatgaagactctcctaaatctaatggaggagggtggtcctttacaaacttttttcagaacaaaccaaacgattaacagtgtcaccgtgtcacttcagtcagccatctcaataagctcttactgctagtgttgctacatcagcactgggcattcttggagggatcctgtgaagtattgttaggaggtgaacttcactacatgttaagttacactgaaagtgttcatgtgcttttaatgtagtctaaaagccaaagtatagtgactcagaatcctcaatccacaaaactcaagattgggagctctttgtgatcaagccaaagaattctcatgtactctaccttcaagaagcatttcaaggctaatacctacttgtacgtacatgtaaaacaaatcccgccacaactgttttctgttctgttgtttgtggttttctcatatgtatacttggtggaattgtaagtggatttgcaggccagggagaaaatgtccaagtaacaggtgaagtttatttgcctgacgtttactcctttctagatgaaaaccaagcacagattttaaaacttctaagattattctcctctatccacagcattcacaaaaattaatataatttttaatgtagtgacagcgatttagtgttttgtttgataaagtatgcttatttctgtgcctactgtataatggttatcaaacagttgtctcaggggtacaaactttgaaaacaagtgtgacactgaccagcccaaatcataatcatgttttcttgctgtgataggttttgcttgccttttcattattttttagcttttatgcttgcttccattatttcagttggttgccctaatatttaaaatttacacttctaagactagagacccacattttttaaaaatcattttattttgtgatacagtgacagctttatatgagcaaattcaatattattcataagcatgtaattccagtgacttactatgtgagatgactactaagcaatatctagcagcgttagctgtccatatagttctgattggatttcgttcctcctgaggagaccatgccattgagcttggctacccgggcagtggtgatctttgacaccttctggtggatgttcctcccactcatgagtcttttcatcatgccacattatctgatccagtcctcacatttttaaatataaaactaaagagagaatgcttcttacaggaacagttacccaaggggctgtttcttagtaactgtcataaactgatctgaatccatgggcatacctgtgttgcaggtgcagcaattgcttggtgagctgtgcagaattgattgccttcagcacagcatcctctgcccacccttgtttctcataagcgatgtctggagtgattgtggttcttggaaaagcagaaggaaaaactaaaaagtgtatcttgtattttccctgccctcaggttgcctatgtattttaccttttcatatttaaggcaaaagtacttgaaaattttaagtgtccgaataagatatgtcttttttgtttgttttttttggttggttgtttgttttttatcatctgagattctgtaatgtatttgcaaataatggatcaattaattttttttgaagctcatattgtaccctttttaaaaaccatgttgtggaaaaaagcccagagtgaccaagtgacaaaatcctatttaggttctctgtgtatgaatcctgattttaactgctaggattcagctaaatttctgagctttatgatctgtggaaatttggaatgaaatgcaattcattttgtacatacatagtatattaaaactatataatagttcatagaaatgttcagtaatgaaaaaatatatccaatcagagccatcccg

SEQ ID NO: 1341 - DNA, 6332 bp, Homo sapiens
atgctgcctccaaagcacttgtctgccaccaaacctaagaagtcctgggccccaaatctgtatgagctagacagtgacttgactaaggagccggatgtcatcataggagaaggtccaactgactctgagttttttcatcagaggtttcggaacctaatctatgtggaatttgttgggcctcggaagaccctgatcaaactccgaaacctctgcctcgattggttgcagccggagacccgcaccaaggaggagatcatcgagctcttggtccttgagcagtacctgaccatcatccctgaaaagctcaagccttgggtgcgagcaaaaaagccggagaactgtgagaagctcgtcactctgctggagaattacaaggagatgtaccaaccagaaggtgagagtctccacggggtgttggtggtcagtgcaggcctcaggtgtcccctggggctctcagcctccacacttctgacatggtctggactggataactctctgtcctgggcagcggtggggatgtcctgtgtactgtgggatattgagctgcatcatgattttctgggtgtggccaccaaaagtgtctccacacatgcccagggagatgcggctcagggattggggggaactattgtgagaatgtgggccagagatagtaacttggcgaccggtgtcctcttagacgacaacaacagtgacgtgaccagcgacgacgacatgacccggaacagaagagagtcctcaccacctcactcagtccattctttcagtggtgaccgggactgggaccggaggggcagaagcagagacacggagccacgagaccgctggtcccacaccaggaacccaagaagcaggatgcctccgcgggatctttcccttcctgtggtggcgaaaacaagctttgaaatggacagagaggacgacagggactccagggcttatgagtcccgatctcaggatgctgaatcataccaaaatgtggtggacctcgctgaggacaggaaacctcacaacacaatccaggacaacatggaaaactacaggaagctgctctccctcggagtgcagcttgctgaagacgatggccactcccacatgacgcagggccactcatcaagatccaagagaagtgcctacccaagcaccagtcgaggtctaaaaactatgcctgaagccaaaaaatcaacccaccggcgggggatttgtgaagatgaatcttcccacggagtgataatggaaaaattcatcaaggatgtgtcacgcagttccaaatcgggaagagcaagggagtcaagcgaccggtcacagagattccccagaatgtcagatgataactggaaggacatttcattgaacaagagggagtcagtgatccagcagcgggtttatgaagggaatgcatttaggggaggctttaggtttaattcaacccttgtttccagaaagagagttcttgaaagaaagaggcgctatcattttgacacagatgggaagggctcgattcacgatcaaaaaggctgtcccaggaagaagccctttgaatgtggtagtgagatgagaaaagccatgagcgtgagcagcctgagcagcctcagctccccctcctttaccgagtcacagccaattgattttggggcaatgccatatgtatgtgatgagtgtgggaggtcgttcagtgtcatctcagaatttgttgagcaccagatcatgcatactagagagaacctctatgagtatggtgagtcctttatccacagtgtggctgtcagtgaagttcagaaaagtcaggttggagggaaacgttttgaatgtaaggactgtggagagaccttcaataagagtgccgccttggctgaacatcggaagattcatgctagaggttatcttgtggaatgtaagaatcaggaatgtgaggaagccttcatgcctagccccacctttagtgagcttcagaaaatatatggcaaagacaaattctacgagtgcagggtgtgcaaggaaaccttccttcatagttctgccctgattgagcaccagaaaatccactttggggatgacaaagataatgagcgtgaacatgaacgtgaacgtgaacgtgagcgcggggaaacctttaggcccagcccagcccttaatgagtttcagaaaatgtatggtaaagagaaaatgtacgaatgtaaggtgtgtggggagactttccttcatagctcatccctgaaagaacatcagaaaatccatactagagggaacccatttgaaaacaagggtaaagtgtgtgaggaaacctttattcctggtcagtcccttaaaaggcgtcagaaaacttacaataaggagaagctctgtgactttacagatggccgggatgccttcatgcaaagctcagagctcagtgagcatcagaaaattcattctcgaaagaacctctttgaaggcagagggtatgagaaatctgtcattcatagtgggccattcactgaatctcagaagagtcatactataacaagacctcttgaaagtgatgaggacgaaaaggcgttcaccattagctctaacccctatgaaaaccagaagattcccactaaggaaaatgtctatgaggcaaaatcatatgagaggtctgttattcatagcttagcctctgtggaagctcagaaaagtcacagtgtagcagggcccagtaaaccaaaagtaatggcagagtctaccattcagagcttcgatgctatcaaccatcagagagttcgtgctggagggaacacctctgaaggaagggaatacagtaggtctgttatccatagcttagtggcttccaaacctccaagaagtcacaatggaaatgaattggtggaatctaatgagaagggagaatcctccatttatatctcagaccttaatgataagcgacagaagattcctgccagagagaacccttgtgaagggggcagtaagaatcgcaactatgaagactctgtcatacagagtgtattccgtgccaaacctcagaaaagtgttcctggagagggatctggtgagtttaagaaggatggcgaattctctgttcccagctcaaatgtccgtgaataccagaaggctcgtgctaaaaagaaatacattgagcataggagcaatgagacctctgtaattcactctctgccttttggtgaacaaacatttcgccctcgagggatgctctatgaatgtcaggagtgtggggagtgctttgctcatagctctgacctcactgagcaccagaagattcatgatagggagaagccctctggaagcagaaactatgaatggtctgtcattcgcagcttggcccctactgaccctcaaacaagttacgcccaagagcagtatgctaaagagcaagcgcggaacaaatgtaaggacttcagacaattttttgctaccagcgaagacctcaacacaaaccagaaaatctatgaccaagagaagtctcatggcgaggagtctcaaggcgagaatactgatggggaggagacccacagcgaggagacccatggtcaggagacaattgaagaccctgtcattcaaggctcagacatggaagaccctcagaaggatgaccctgatgacaaaatctatgaatgtgaggactgtggcctgggctttgtggatctcacagacctcacagaccatcagaaagtccacagcaggaagtgcctggttgacagtcgggagtacacacattctgtaattcacacccattccatcagcgagtatcagagagattacactggagagcagctgtatgaatgtccaaagtgtggggaatcttttattcatagctcattccttttcgagcatcagagaatccatgaacaagaccagttgtattccatgaaggggtgtgatgatggttttattgccctcttgcccatgaagccacggaggaatcgtgctgcagagaggaatcctgctcttgctgggtcggccattcgatgccttttgtgtggacaaggcttcattcatagctctgcccttaatgagcatatgagacttcatagggaagatgatttactggagcagagccagatggctgaggaagctatcattccaggcttagccctcactgagtttcagagaagtcagaccgaagagagactctttgaatgtgcagtctgtggagaatctttcgtcaacccagcagaacttgcagatcacgtaactgttcataagaatgagccctatgagtacgggtcctcctatactcacacctcatttcttactgagcccctcaaaggagctataccattctatgaatgcaaggattgtggtaagtcctttattcatagcacagtcctcactaaacataaggagcttcatctggaagaagaagaagaagatgaagcagcagcagctgcagcagcagcagcccaggaagttgaagccaatgtccatgttccacaagtagttctgaggattcagggcttaaacgtagaggctgctgagccagaagtggaggctgccgagccagaagtggaggctgctgagccagaagtggaggctgctgagccaaacggagaggctgaagggccagatggagaggctgcagagcccattggagaggctggacagccaaatggagaggccgagcagccaaatggggatgctgatgagccagatggtgcaggtattgaagacccagaagaaagagctgaagagccagagggaaaagctgaagagccagagggagatgccgacgagcctgacggtgtgggaattgaagacccagaagaaggtgaagatcaagagattcaggtagaagaaccatactatgactgccatgaatgcacagaaaccttcacttccagcacagcattcagtgaacacctgaaaactcatgccagcatgatcatatttgagcctgcaaatgcctttggggagtgctcaggctacatcgaacgtgccagcaccagcacaggtggtgccaatcaagctgatgagaagtacttcaaatgtgacgtctgtgggcagctcttcaatgaccacctgtccctcgccagacaccagaatacccacactggctgagggcatggggtaaaggttagaaaaccttcacctaggacttgacccttaccaaaccacagagaatccaaaccaatccatgataatgtcagtaggagacttaaccttagtgtgttacacacctgacttaacatctctaaactcagattgaaaagagaccgaatgtgcagattccacagtcttaagctttccccttcagatgtcagtgtctgcatgtgggaaagccatagcacacatcttacctttccaagtaatcagattgagaaaaccctatgagtattccagactacagagtttgcccaaatcaactgtaaatgacacttgtgtaacgtatatatagtgtttcatgaggtgtatataaaatagcaaattatgacagaacagtgatcacatatatttggatttatatgatatacagttacagtttactctgcagaggtaccttacctggtattctttgaattttttttttttttggggggggaaaagagcaccaaatttgattatatttttaagggcctaaaatcctgaaaaaaatttattgggcattatttgaaccctgccaatatctttttgagaaatggtttggtttcttacccttaaaaagtcttgtgaagctgtaggcatgaaaaaaaacagggcttttactccttactgtttgaaaagataagtactttagtttttttttgcagccatttcatctgcgccaacactttgggaacctaatactggtgtaaggctttacaatatacggattgggctttttgtgacccagattgaatgggtgccacatggtaaggttggttgaagtggttctcatgcaaaaatattacacatttgtgttctgggtttttttttttttttttaacccaactcaatatgtgtttggatgatagtgaattgataaaaccccggaagcttttcccctgtaaatcttaccatcttttgccttttaaagaatgggttacaaccatcactagatcacagtagtgcctaatgaaggttgagaaccgtaggagaggctctcatgctgtaaataatgttgcaggctaataacctttcatcacttcctttgtgcgcttcctgccttaagtgacaagtagcaacatggcttgggtcccctgtgcagcatcagcttatgctgccacaagtcagtttgcaccctaggtgcccaggagctagtatccttagatctttctatcgctaacttaattctcttcgttatttatcctgacccctcctaactcccatgtcctaaccttgcattaaaaaaaaaa

SEQ ID NO: 1342 - DNA, 2117 bp, Homo sapiens
cggccgcccgcgatccagctccgacaacaggaattttctccgagagcgggccgggctcagttcagctgctgtccagacccggatcggcaacagtgccgcctccagacgttctcctgccgctcgcccgcccgtcccagcgcccccagccctcccgcgagggcgccccgggacggaaggatccaccagtctgtcggcgcccgccgttctcgtggtcgccgtcgccgtcgtcgtggtggtagtctccgccgtcgcctgggccatggccaattacatccacgtccctcccggctccccggaggtgcccaagctgaacgtcaccgttcaggatcaggaggagcatcgctgccgggagggggccctgagcctcctgcaacacctgcggcctcactgggacccccaggaggtgaccctgcagctcttcacagatggaatcacaaataaacttattggctgttacgtgggaaacaccatggaggatgtagtcctggtgagaatttatggcaataagactgagttattagtcgatcgagatgaggaagtaaagagttttcgagtgttgcaggctcatgggtgtgcaccacaactctactgtaccttcaataatggactatgctatgaatttatacaaggagaagcactggatccaaagcatgtctgcaacccagccattttcaggctaatagctcgtcagcttgctaaaatccatgctattcatgcacacaatggctggatccccaaatctaatctttggctaaagatgggaaagtatttctctctcattcccacaggatttgcagatgaagacattaataaaaggttcctaagtgatatcccaagctctcagattctccaggaagagatgacttggatgaaggagattctttccaacctgggctcacctgttgtgctttgccataatgacctattgtgtaagaatataatctacaatgagaaacaaggtgatgtacagttcattgattatgaatattctggatacaactacctggcatatgatattggaaatcatttcaatgaatttgcaggtgtgagtgatgtagactatagtctgtatccagatagagaactacagagtcagtggctgcgtgcttaccttgaagcctacaaagaatttaagggctttgggactgaagttactgaaaaggaggtagaaatactcttcattcaagtcaatcagtttgcattggcttctcatttcttttggggattgtgggctttgattcaagccaaatactccactattgagtttgatttccttgggtatgcaattgttcgttttaaccagtactttaaaatgaagcctgaggttactgcattaaaagtgcctgagtaaagaagagatttaattattctccagtagctgagcaatgcttgtgaatcttttcttaagaaatcccaaaaagccaatattagttaaaattctgttgtttaatttggttatcttgctttataaattatgcctctaaacaatcaaatctatttttgaaatagactgaatgatgtcaagaaatatacctactgctatccgtatgtggtggattagaaatgtgttaaatctgcaaaaggtataaagatgtcagtttaatttctttgataatttaacctatgttgtatgtgaattatttattataaacttagcacgattctgtgactgtttttctctgtttcacgttcgttgagtgtaagcaatgaaaatgtcccaaataagttttttaagttttactttaataagattaatttcagtaaacattctagttgttcagtgtaacctttttatcttgatgcattgtaagtaaaatgaatcatttactcttgaaatgccagtcattgactgatgtagataatttaggattttcatataaaaataggctgtttaggaaggtgaaatacattcactgtctctgttggtggtacatcttgttgaattcaatattagaaagtatttctttttggggtaatataacttagaattaaatccctgtttctctatgtagtctggcagtataaatataaatatttaccatataatcttggaataagtattagttaatgttaccaaaatctgtattaaataatgttttcaaatgctaaaaaaaaaa

SEQ ID NO: 1343 - DNA, 969 bp, Homo sapiens
gcggccgctccaacatgttaccattctgatgttggagccggttagcgaaccccaagagtgcagagtgtggagcgtggagcgccgggactgtgcacgcttgaccggaagcccagaccagtgcggtcctagccagagagaaaggacatttgccaacaatgagacacgaagcgcccatgcagatggcctctgcccaagatgccaggtacggccagaaagactcctctgatcagaactttgactacatgttcaaattactcatcatcggcaatagcagtgtggggaaaacatcttttctattccgttatgcagatgactcctttacatctgcattcgtcagcacagttgggatcgatttcaaagtaaaaactgtattcaaaaatgaaaagagaatcaagcttcagatttgggacacagcaggccaggaaagatacaggactatcaccacagcctattatcgtggagccatgggctttattttaatgtatgacattacaaatgaagaatccttcaatgcagtacaagattggtcaactcaaatcaaaacatactcttgggacaatgcccaagttattctggttgggaacaagtgtgacatggaagacgagcgggtcatctcaactgagcgaggtcaacatttaggagaacagcttgggtttgagttttttgaaacaagtgccaaggacaacattaatgtcaagcagacatttgagcgccttgtggatatcatctgcgacaaaatgtcagagagtttggagactgatcctgccatcactgctgcaaagcagaacacgagactcaaggaaactcctcctccaccgcagcccaactgtgcctgttagtgtccccgtgcacacaggcagctccagggggctctggttgccaacaaacagcatttgtaaatggtctattagccttcatttatactgcctaacaattatttgaaggaataaattgatgtcaatggctcgt

SEQ ID NO: 1344 - DNA, 5365 bp, Homo sapiens
tgatcgaccgccctggaattcccgggtcgacgatttcgtcacgaacctaattcatctctccagcaaaggacacatctctccagcaaaggacacctctctccagcaaaggacacctgcagagatgtccccagtccttcacttctatgttcgtccctctggccatgagggggcagcctctggacacactcggaggaaactgcaagggaaactgccagagctgcagggcgtcgagactgaactgtgctacaacgtgaactggacagctgaggccctccccagtgctgaggagacaaagaagctgatgtggctgtttggttgccccttactgctggatgatgttgctcgggagtcctggctccttcctggctccaatgacctgctgctggaggtcgggcccaggctgaacttctccaccccaacatccaccaacatcgtgtcagtgtgccgcgccactgggctggggcctgtggatcgtgtggagaccacccggcgctaccggctctcgtttgcccaccccccgtcagctgaggtggaagccattgctctggctaccctgcacgaccggatgacagagcagcacttcccccatcccatccagagtttctcccctgagagcatgccggaacccctcaatggccctatcaatatactgggtgagggccggcttgcgctggagaaggccaaccaggagcttggtctggctttagactcttgggacctagacttctacaccaagcgcttccaggagctacagcggaacccgagcactgtggaggcctttgacttggcgcagtccaatagcgagcacagccgacactggttcttcaagggccagctccacgtggatgggcagaagctggtgcactcactgtttgagtccatcatgagcacccaggaatcctcgaaccccaacaacgtcctcaaattctgtgataacagcagtgcaatccagggaaaggaagtccgattcctacggcctgaggaccccacacggccaagccgcttccagcaacagcaagggctgagacatgttgtcttcacagcagagactcacaactttcccacaggagtatgcccctttagtggtgcaaccactggcacagggggccggattcgagatgtccagtgcacaggccgcggggcccacgtggtggctggcactgccggctattgctttggaaatctgcatattccaggttacaatctgccctgggaggatctaagcttccagtatcctgggaattttgcccggcccctggaggttgccattgaagccagtaatggagcttctgactatggcaacaagtttggggaaccagtgctggctggcttcgcccgctccttgggcctccagctcccagacggccagcggcgtgagtggatcaagcccatcatgtttagtgggggcattgggtccatggaagctgaccacataagcaaggaggccccagagccaggcatggaagttgtaaaggttggaggtcccgtctacaggattggagttggaggtggagctgcttcatctgtgcaggtgcagggagataacaccagtgacctggactttggggctgtgcagcgaggagacccggagatggaacagaagatgaaccgtgtgatcagggcttgtgtggaggcccccaagggaaaccccatctgcagccttcatgatcagggcgctggtggcaatggcaatgtcctaaaagagctgagtgacccagctggagccatcatttacaccagccgcttccagcttggggacccaaccctgaatgccctggaaatctggggggctgagtaccaggaatcaaatgctcttctgctgaggtcccccaaccgggacttcctgactcatgtcagtgcccgtgaacgttgcccggcttgcttcgtgggcaccatcactggagaccggagaatagtgctggtggacgatcgggagtgtcctgtcagaagaaatggccagggggatgcccccccgacacccccgccaacccctgtggacctggagctcgaatgggtgctgggcaagatgcctcggaaggagttcttcctgcagaggaagccccccatgctgcagcctctggccttgcccccagggctgagcgtgcaccaggctctggagagggttctgaggctgcccgccgtggccagcaagcgctacctcaccaataaggtggaccgctccgtgggaggcctggtggcccagcagcagtgcgtggggcccctgcaaactcctctggcagatgtagcggttgtggcactgagccatgaggagctcataggggctgccacagccttgggagaacagccagtcaagagcctgctggacccaaaagtcgccgcccggctggccgtggccgaagccctcaccaacctggtgtttgctctggtcactgacctccgggatgtgaagtgtagcgggaactggatgtgggcagccaagctcccaggggagggcgcagctttggcggatgcctgtgaggctatggtggcagtgatggcagccctgggtgtggcagtggatggtggcaaggactccctcagcatggctgctcgggttggcactgagaccgtgcgggctcctgggtcactggtcatctcagcctatgccgtctgcccagacatcacagccactgtgaccccagacctcaagcatcctgaagggagaggccatctgctctatgtggctctgagccctgggcagcaccggctcgggggcacagctctggcccagtgcttctcccagcttggggaacaccctccagacctggaccttcctgagaacttggtgcgggccttcagcatcactcaggggctgctgaaagaccgcctcctctgctcaggccacgatgtcagtgacggaggcctcgtcacatgcctgctggagatggcctttgctggaaattgcgggctacaggtggatgtgcctgtccccagggttgatgtcctgtctgtgctgttcgctgaggagccaggcctcgtgctggaggtgcaggagccagacctggcccaggtgctgaagcgttaccgggatgctggcctccattgcctggagctgggccacacaggcgaggccgggccccacgccatggtccgggtgtcagtgaacggggctgtggttctggaggagcctgttggggagctgcgagccctctgggaggagacgagtttccagctggaccggctacaggcagagcctcgctgtgtggcagaggaggaacggggcctgagggagcggatggggcccagctattgcctgccccccacctttcccaaagcctccgtgccccgtgagcctggtggtcccagcccccgagtcgccatcttgcgagaggagggcagtaatggagaccgggagatggccgatgccttccacttagctgggtttgaggtatgggacgtgaccatgcaggacctctgctctggggcaattgggctggacactttccgtggcgtggccttcgtgggcggcttcagctatgcagatgtcctgggctctgccaaagggtgggcagctgctgtgacctttcatcccagggctggggctgagctgaggcgcttccggaagcggccagacaccttcagcctgggcgtgtgtaatggctgtcaactgctggctctgctcggctgggtgggaggcgaccccaatgaggatgctgcagagatgggccctgactcccagccagcccggccaggccttctgctacgccacaacctgtctgggcgctacgagtctcgctgggccagcgtgcgtgtggggcctgggccagccctgatgctgcgagggatggagggcgccgtgctgcccgtgtggagtgcgcacggggaaggttacgtagcattttcttctccggaactccaagctcagattgaggccaggggcttggctccactgcactgggctgatgatgacgggaaccccacagagcagtaccctctgaatcccaatgggtccccagggggcgtggctggcatctgctcctgtgatggccgccacctggctgtcatgcctcaccctgagcgggccgttaggccttggcagtgggcatggcgaccccctccatttgatactctgaccacctccccctggctccagctctttatcaatgcccgaaactggaccctggaagggagctgctgactggccacaggggctcacctgggccccatggcttttcacctaagtgggtcctgccccctcccccatgaccttcaggagcaccccatattatttccaaaaatatcttggacagacaaggaccaaaatgccaaaatctcagcggactcgataatctgcctgctgatgttccttctgtggctgtgtctattttcagttctgctctaacatggcatgccctttctcagcccaggaaacagcatgtggttcagagaaaagagcgacaaggaaaagttaggactcctgaggtccgaacaggggcttctgttgcccacttcacaacacccagtgatcaccggtgtgcaattgcctccttggctctgagggatgttttgcgctcccttttctcatcattggggttagcgggtgcagacaaattcagcaatagtatgcagatcagcccctcaccacctcattgttctcatctggaactgaaactttctggatttctcttgaagtgctacactgcactgaatgtaaggaattgttgcttgtggaagtttctcagcgtttctggctgtcttagggctggcctcagaacccagcattcctgttatttgcttctaaattagcagctctctttttttttttttttttgaggcagtctcactctgtcacccaggctggagtgcagtggcgtgatctcggcccactgcaacctctgcctcctgggttcaagcaattttcctgcctcagcctcccgagtagctgggagtacaggcacacaccaccacacccagctaatttttgtatttttagtagagatagggtttcaccatgtctcccaggctggtctcaaactcctaacctcaagtgattcgcctgcctcggcctcccaaagtgctgggattacaggtgggagccactacagctggcccagcagctctgtttctgatagaggtggttggggctctcatccctagatcctaaccctttagtatgctggaattctactcttcacttactgcattgactgttgttgattagttattattgcaaagcactgtcaccggcctcagggagtttatgtgtaatagaattaaaaataatagctgtgtataacacttagctcaagccacgcatgtgtgaggcatttggtatgtatctgaattaattctcactaaaattcagcaaaggacttgatagcctctccccgccttttcaataaaggatgaatgaagaaaaaaaaaa

SEQ ID NO: 1345 - DNA, 1187 bp, Homo sapiens
gcacgagcgcaaatagggtcactgggccgcttggcggtgtcgttgcggtaccaggtccgcgtgaggggttcgggggttctgggcaggcacaatggcgtctcgagcaggcccgcgagcggccggcaccgacggcagcgactttcagcaccgggagcgcgtcgccatgcactaccagatgagtgtgaccctcaagtatgaaatcaagaagctgatctacgtacatctggtcatatggctgctgctggttgctaagatgagcgtgggacacctgaggctcttgtcacatgatcaggtggccatgccctatcagtgggaatacccgtatttgctgagcattttgccctctctcttgggccttctctcctttccccgcaacaacattagctacctggtgctctccatgatcagcatgggactcttttccatcgctccactcatttatggcagcatggagatgttccctgctgcacagcagctctaccgccatggcaaggcctaccgtttcctctttggtttttctgccgtttccatcatgtacctggtgttggtgttggcagtgcaagtgcatgcctggcagttgtactacagcaagaagctcctagactcttggttcaccagcacacaggagaagaagcataaatgaagcctctttggggtgaagcctggacatcccatcgaatgaaaggacactagtacagcggttccaaaatcccttctggtgattttagcagctgtgatgttggtacctggtgcagaccaggccaaagttctggaaagctccttttgccatctgctgaggtggcaaaactataatttattcctggttggctagaactgggtgaccgacagctatgaaacaaatttcagctgtttgaagttgaactttgaggtttttctttaagaatgagcttcgtccttgcctctactcggtcattctccccatttccatccattaccccttagccattgagactaaaggaaatagggaataaatcaaattacttcatctctaggtcacgggtcaggaaacatttgggcagctgctcccttggcagctgtggtctcctctgcaaagcattttaattaaaaacctcaataaagatggccctgcccacactgtgccttgtgtttggggcttgatagagtgtgaaaggtgtgttgcttgaaaggtgtggccttagacacta

SEQ ID NO: 1346 - DNA, 2041 bp, Homo sapiens
  misc_feature (1)...(2041): n = a,t,c or g
gacgatttcgtgcggtgcgggcctcagtctgcggccatgggggcgtccgcgcggctgctgcgagcggtgatcatgggggccccgggctcgggcaagggcaccgtgtcgtcgcgcatcactacacacttcgagctgaagcacctctccagcggggacctgctccgggacaacatgctgcggggcacagaaattggcgtgttagccaaggctttcattgaccaagggaaactcatcccagatgatgtcatgactcggctggcccttcatgagctgaaaaatctcacccagtatagctggctgttggatggttttccaaggacacttccacaggcagaagccctagatagagcttatcagatcgacacagtgattaacctgaatgtgccctttgaggtcattaaacaacgccttactgctcgctggattcatcccgccagtggccgagtctataacattgaattcaaccctcccaaaactgtgggcattgatgacctgactggggagcctctcattcagcgtgaggatgataaaccagagacggttatcaagagactaaaggcttatgaagaccaaacaaagccagtcctggaatattaccagaaaaaaggggtgctggaaacattctccggaacagaaaccaacaagatttggccctatgtatatgctttcctacaaactaaagttccacaaagaagccagaaagcttcagttactccatgaggagaaatgtgtgtaactattaatagtaagatgggcaaacctcctagtccttgcatttagaagctgcttttcctaagacttctagtatgtatgaattctttgaaaattatattacttttatttctactgattttattttggatactaaggatgtgccaaatgattcggatactaagatgcatcgtttgaaatcatctagtgtgttgtatgcagttatcctcaaaaacatcagcgatgtctgaacctttaaaacatctgttagagcaaaattaaaagagcatttggtagtaatctaactttttgttcagttaataagtggttgataaagtttccatatttttctggaaaagttaaaaaaagttacatgtcatttggagaaaatacgtaatcagaaatttgtgcatagattgatgccaaaaaagacatttccagcattgtggaacatggtgagacactatataaaattccagaaagaaagcaactggatttacagatttattgtgagacacaaattcactgctgcctttacactaagaaatgtatatgttaaccatatatgctgtatttattttgtcgttaagcatactttcagtttactcagaattttcaatttgctataaagatgtatcaattagcatatagaaaaatattactttaagatgacttgtttcctttgaaaatacctgtgtactgagggttatgatttgtgtcaaaaattgacataagtgcttttacaagcaccaaagttgaatgaattttcaacaaaatgtaattaaagtctatgttttcagttatgactcaggttaagaaatgtgttttaggatctacttgctggtttttctttttgatccaaatgtgtgatctgccctgataaataacaagttatagtaccatctcccccgccaataaaaaagagaagaaaaaagagaaacccgtggcactatgtaaataaagtaagcatactttgttgttagtaaatagatgaggcatgcctgggaaatgctcccttggcataaatagcaatcaattataattagtaaacaggtgtaccaataaaaagaatttacatgataggttaacaaggaccaggaaagtgagtttcctgaaggagttctttgttcctgatcaaagaaattgatacctgttagcattcactgccaccatattttaaggagaaagaactctattggtgtcgtctgagcagccatttaaaaattggaatctaaaggatggttgctgatgtactgtgtggtctggtagaagtggggaaatatgagagatggaggaaaaacttgattatgtnttccatggnatatttact

SEQ ID NO: 1347 - DNA, 3044 bp, Homo sapiens
aagccattacaaaggttgcttaacttctaattatttgatcactgaggaaaatccagaaagctacacaacactgaaggggtgaaataaaagtccagcgatccagcgaaagaaaagagaagtgacagaaacaactttacctggactgaagataaaagcacagacaagagaacaatgccctggacatggctccagagatccacatgacaggcccaatgtgcctcattgagaacactaatggggaactggtggcgaatccagaagctctgaaaatcctgtctgccattacacagcctgtggtggtggtggcaattgtgggcctctaccgcacaggaaaatcctacctgatgaacaagctagctgggaagaataagggcttctctctgggctccacagtgaaatctcacaccaaaggaatctggatgtggtgtgtgcctcaccccaaaaagccagaacacaccttagtcctgcttgacactgagggcctgggagatgtaaagaagggtgacaaccagaatgactcctggatcttcaccctggccgtcctcctgagcagcactctcgtgtacaatagcatgggaaccatcaaccagcaggctatggaccaactgtactatgtgacagagctgacacatcgaatccgatcaaaatcctcacctgatgagaatgagaatgaggattcagctgactttgtgagcttcttcccagattttgtgtggacactgagagatttctccctggacttggaagcagatggacaacccctcacaccagatgagtacctggagtattccctgaagctaacgcaaggtaccagtcaaaaagataaaaattttaatctgccccgactctgtatccggaagttcttcccaaagaaaaaatgttttgtcttcgatctgcccattcaccgcaggaagcttgcccagcttgagaaactacaagatgaagagctggaccctgaatttgtgcaacaagtagcagacttctgttcctacatctttagcaattccaaaactaaaactctttcaggaggcatcaaggtcaatgggcctcgtctagagagcctagtgctgacctatatcaatgctatcagcagaggggatctgccctgcatggagaacgcagtcctggccttggcccagatagagaactcagccgcagtgcaaaaggctattgcccactatgaccagcagatgggccagaaggtgcagctgcccgcagaaaccctccaggagctgctggacctgcacagggttagtgagagggaggccactgaagtctatatgaagaactctttcaaggatgtggaccatctgtttcaaaagaaattagcggcccagctagacaaaaagcgggatgacttttgtaaacagaatcaagaagcatcatcagatcgttgctcagctttacttcaggtcattttcagtcctctagaagaagaagtgaaggcgggaatttattcgaaaccagggggctattgtctctttattcagaagctacaagacctggagaaaaagtactatgaggaaccaaggaaggggatacaggctgaagagattctgcagacatacttgaaatccaaggagtctgtgaccgatgcaattctacagacagaccagattctcacagaaaaggaaaaggagattgaagtggaatgtgtaaaagctgaatctgcacaggcttcagcaaaaatggtggaggaaatgcaaataaagtatcagcagatgatggaagagaaagagaagagttatcaagaacatgtgaaacaattgactgagaagatggagagggagagggcccagttgctggaagagcaagagaagaccctcactagtaaacttcaggaacaggcccgagtactaaaggagagatgccaaggtgaaagtacccaacttcaaaatgagatacaaaagctacagaagaccctgaaaaaaaaaaccaagagatatatgtcgcataagctaaagatctaaacaacagagcttttctgtcatcctaacccaaggcataactgaaacaattttagaatttggaacaagtgtcactatatttgataataattagatcttgcatcataacactaaaagtttacaagaacatgcagttcaatgatcaaaatcatgttttttccttaaaaagattgtaaattgtgcaacaaagatgcatttacctctgtaccaacagaggagggatcatgagttgccgccactcagaagtttattcttccagacgaccagtggatactgaggaaagtcttaggtaaaaatcttgggacatatttgggcactggtttggccaagtgtacaatgggtcccaatatcagaaacaaccatccctacgcttcctaggggaaggacagtgtacagttcttccattattatccagggctacaaggtctatgagcaataatgtgatttctggacattgcccatgggataattctcactgttggatctcaggctaaagcaaaccatcttttacagagatctagaatcctatattttccataggaagttaaagaaatcattagcaagagtaggaattgaatcataaacaaattggctaatgaagaaatcttttctttcttgttcaattcatctagattataaccttaatgtgacacctgagacctttaggacagttgaccctgaattaaatagtcacatgggtaacaattatggcactgtgtaattttaggtaatgtattaacatggcaatggatggcactttaactgaggataggggactatgttagggaaaattggaactaattttaattatttggattgttttaatccctaaaggccttaggttaggtcttttcctggattcttaaagggtcatacttgaaatcctgcccaattttcccccaaaggggaatttggggatttttttgactttcttttgagcaataaaataattgtcttgccattacttagtatatgtagacttcatcccaattgtcaaacatcctaggtaagtggttgacatttcttacagcaattacagattatttttgaactagaaataaactaaactagaaataa

SEQ ID NO: 1348 - DNA, 1110 bp, Homo sapiens
gtgaacacaacttccggccccactgagcggtgtcctgagccgattacagctaggtagtggagcgccgctgcttacctgggtgcaggagacagccggagtcgctgggggagctccgcgccgccggacgcccgtgaccatgtggaggctgctggctcgcgctagtgcgccgctcctgcgggtgcccttgtcagattcctgggcactcctccccgccagtgctggcgtaaagacactgctcccagtaccaagttttgaagatgtttccattcctgaaaaacccaagcttagatttattgaaagggcaccacttgtgccaaaagtaagaagagaacctaaaaatttaagtgacatacggggaccttccactgaagctacggagtttacagaaggcaattttgcaatcttggcattgggtggtggctacctgcattggggccactttgaaatgatgcgcctgacaatcaaccgctctatggaccccaagaacatgtttgccatatggcgagtaccagcccctttcaagcccatcactcgcaaaagtgttgggcatcgcatggggggaggcaaaggtgctattgaccactacgtgacacctgtgaaggctggccgccttgttgtagagatgggtgggcgttgtgaatttgaagaagtgcaaggtttccttgaccaggttgcccacaagttgcccttcgcagcaaaggctgtgagccgcgggactctagagaagatgcgaaaagatcaagaggaaagagaacgtaacaaccagaacccctggacatttgagcgaatagccactgccaacatgctgggcatacggaaagtactgagcccatatgacttgacccacaaggggaaatactggggcaagttctacatgcccaaacgtgtgtagtgagtgtaggagataactgtatataggctactgaaagaaggattctgcatttctattcccctcagcctacccactgaagtctttgggtagctcttaagccataactaaggagcagcatttgagtagatttctgaaaaacaatgttatttgttgatttaaaaagaaaactgtatttttattaaataaaatttaaacatcacttcaggaaaaaaaaaaaa

SEQ ID NO: 1349 - DNA, 1184 bp, Homo sapiens
aagggcccccgcttgtgtgcccttcgccctgccggagccgggaaaatggaggctgtgattgagaaggaattgcagcgcgctcggaggcctcttccagaccatcatcagcgacatgaaggggagctatccagtttgggaagatttcataaacaaagcaggaaagctgcagtcccagcttcggacaacagtagtagcagcagctgccttcttggacgcctttcagaaagtggctgacatggccaccaacacacgtggtgggaccagggagattggatctgctctcaccaggatgtgcatgaggcacagaagcattgaagccaagctgaggcagttttcgagcgctttaattgattgtctgataaacccacttcaagaacagatggaagaatggaagaaagtggccaaccagctggataaagaccacgcaaaagaatataagaaagcccgccaagagataaaaaagaagtcctcggatacgctgaaactgcagaagaaagcaaaaaaagggagaggtgatatccagcctcagttggacagtgctctccaagatgtcaatgataagtatctcttattggaagaaacagaaaagcaggctgtccggaaggctttgattgaagaacgtggccgattctgtaccttcatctctatgctgcggccagtgattgaagaagaaatctcaatgctaggggaaataacccaccttcagaccatctcggaagatctaaaaagcctgaccatggaccctcacaaactgccctcctcaagtgaacaggtgattctggacttgaaaggttctgattacagctggtcgtatcagacgccaccctcttcccccagcaccaccatgtccagaaagtccagtgtctgcagcagcctgaacagtgtcaacagcagtgactcccggtccagcggctcccactcgcattcccccagctcacattaccgctaccgcagctccaacctggcccagcaggctcctgtgaggctgtccagcgtgtcctcccatgactcaggattcatatcccaggatgccttccagtccaagtcaccatcccccatgccgccagaggcccccaaccagcgccgcaaagagaagcgagaaccggaccccaacgggggaggacccactaccgccagcggcccacctgcagcagctgaggaggctcagagaccacggagcatga

SEQ ID NO: 1350 - DNA, 1828 bp, Homo sapiens
ttttttttttttcgttccatgttttttatttgtgcactgggaaagaagtcttccctcccatcacatgagccacgtggtgagtcctctggaggcttgaagattatccccctccctgggagtcttgggccatggagggtgggggcggtgaacggaaggggattttgtctctgccctcagcctggtgccctctccttccaggaatgtcccagcggaattgtcaatgaggagaacttcaagcagatttactcccagttctttcctcaaggaggtgaggggacaagggccaaggggaagcagttgtccttctctaggctgagggagggagggattccggaggagttgggaatgccaaggtgatggggggtatggggagctccttagagggaggaagtcctctcctgtgtggaagccaacttctccacactcaccctgcagactccagcacctatgccacttttctcttcaatgcctttgacaccaaccatgatggctcggtcagttttgaggtgagctgggcgaggtgggccagggaagcctgtttcctggagttcagggccaggatctccaggccaaacccagagaaggagttgggtgaagagtacccgaggacacagctccctcctgcctccttcccaggactttgtggctggtttgtccgtgattcttcggggaactgtagatgacaggcttaattgggccttcaacctgtatgaccttaacaaggacggctgcatcaccaaggaggaaatgcttgacatcatgaagtccatctatgacatgatgggcaagtacacgtaccctgcactccgggaggaggccccaagggaacacgtggagagcttcttccagaagatggacagaaacaaggatggtgtggtgaccattgaggaattcattgagtcttgtcaaaaggatgagaacatcatgaggtccatgcagctctttgacaatgtcatctagcccccaggagagggggtcagtgtttcctggggggaccatgctctaaccctagtccaggcggacctcacccttctcttcccaggtctatcctcatcctacgcctccctgggggctggagggatccaagagcttggggattcagtagtccagatctctggagctgaaggggccagagagtgggcagagtgcatctcggggggtgttcccaactcccaccagctctcacccccttcctgcctgacacccagtgttgagagtgcccctcctgtaggaattgagcggttccccacctcctacccctactctagaaacacactagacagatgtctcctgctatggtgcttcccccatccctgacctcataaacatttcccctaagactcccctctcagagagaatgctccattcttggcactggctggcttctcagaccagccattgagagccctgtgggagggggacaagaatgtatagggagaaatcttgggcctgagtcaatggataggtcctaggaggtggctggggttgagaatagaagggcctggacagattatgattgctcaggcataccaggttatagctccaagttccacaggtctgctaccacaggccatcaaaatataagtttccaggctttgcagaagaccttgtctccttagaaatgccccagaaattttccacaccctcctcggtatccatggagagcctggggccagaatatctgggctcatctctggcattgcttcctctcctttcctttcctgcatgtgttggtggtggttgtggtgggggaatgtggatgggggatgtcctgggctgatgcctgccaaaatttcatcccaccctccttgcttatcgtccctgtttt

SEQ ID NO: 1351 - protein, 112 aa, Homo sapiens
  misc_feature (1)...(112): Xaa = any amino acid or nothing
TPSLIHQAPTPCPAGLWGPPNGHYHGSXPGCHWPQAPHRAXXXGLLPPRWLGHGLPGGPAAPWAASQWVDGVAGRLPGPAWSWHASGAAPAQPGPLXLLVPGSSGLPDPRDP

SEQ ID NO: 1352 - protein, 89 aa, Homo sapiens
  misc_feature (1)...(89): Xaa = any amino acid or nothing
IRNSSIRPMKERETKLSAKHMITCSASYDIRGLQIETTYHHTPIRMAKIQKTGHHQCXXECGATGTLIHGWWGCKVVEPLGKTVWQIPK

SEQ ID NO: 1353 - protein, 103 aa, Homo sapiens
  misc_feature (1)...(103): Xaa = any amino acid or nothing
HASAHASVVLKDNSELEQQLGATGAYRARALELEAEVAEMRQMLQLEHPFVNGADKLRPDSMYVHLNELXQSLVENMLLTVVDTHRTPIXRSCNYTLALILFL

SEQ ID NO: 1354 - protein, 97 aa, Homo sapiens
  misc_feature (1)...(97): Xaa = any amino acid or nothing
TASALFSCPDGGSLAGFAGRRASFHLECLKRQKDRGGDISQKTVLPLHLVHHQVAHTFGQATVTCQQARQSPGXRTNPEALQWVLPVSDGWHVLPLP

SEQ ID NO: 1355 - protein, 245 aa, Homo sapiens
  misc_feature (1)...(245): Xaa = any amino acid or nothing
ENCRVASNLPGVFFSEDTAQSGSYMRISAHPPNAGGEVSNGPKRKLTLMLNFSLPSSGLNAGAFYALSTLLNRMVIWHYPGEEVNAGRIGLTIVIAGMLGAVISGIWLDRSKTYKETTLVVYIMDTGGAWWCYTFYLGTGDTCGXCFITAGTMGFFMTGYLPLGFEFAVELSYPESEGISSGLLNISAQVFGIIFTISQGQIIDNYGTKPGNIFLCVFLTLGAALTAFIKADLRRQKANKETLEN

SEQ ID NO: 1356 - protein, 93 aa, Homo sapiens
  misc_feature (1)...(93): Xaa = any amino acid or nothing
EWFSYMLGSNMSVYHSPXSLEPLCKVLSESXAYLRVPFIRILLNARXIRKAYKRMSLEIKLLIREXCLFQEMGLSLQWLYSARGDFFRATSRL

SEQ ID NO: 1357 - protein, 290 aa, Homo sapiens
  misc_feature (1)...(290): Xaa = any amino acid or nothing
TLSSACLIGDAWKELTIVAGAVSNQLLVWYPATALADNKPVAPDRRISGHVGIIFSMSYLESKGLLATASEDRSVRIWKGGDLRVPGGRVQNIGHCFGHSARVWQVKLLENYLISAGEDCVCLVWSHEGEILQAFRGHQGRGIRAIAAHERQAWVITGGDDSGIRLWHLVGRGYRGLGDLGSLLQVPXXARYTQGCDSGWLLATAGSDXYRGPVSLXRRGQVLGAAARGXTFPVLLPAGGSSWSRGLRIVCYGQWGRSCQGCPHQHSNCCCGPDPVSWEGAQLELGPAWL

SEQ ID NO: 1358 - protein, 115 aa, Homo sapiens
  misc_feature (1)...(115): Xaa = any amino acid or nothing
FSSLLSGRISTLRDETGAILIDGDPAACAPIIKFLLTEELHLRGVSIYVLRHEAQIYGITPLVCALLICRRLXSDSCMRAALNDRGLYQVLILDGLVQCLGFVDSDSRKMVSTLT

SEQ ID NO: 1359 - protein, 46 aa, Homo sapiens
QAWAIFKGKYKEGDTGGPAVWKTRLRCALNKSSEFNEGPERERMDV

SEQ ID NO: 1360 - protein, 415 aa, Homo sapiens
  misc_feature (1)...(415): Xaa = any amino acid or nothing
KGCRTQEKVDRTEVIRTCINPVYSKLFTVDFYFEEVQRLRFEVHDISSNHNGLKEADFLGGMECTLGQIVSQRKLSKSLLKHGNTAGKSSITVIAEELSGNDDYVELAFNARKLDDKDFFSKSDPFLEIFRMNDDATQQLVHRTEVVMNNLSPAWKSFKVSVNSLCSGDPDRRLKCIVWDWDSNGKHDFIGEFTSTFKEMRGAMEGKQVQWECINPKYKAKKKNYKNSGTVILNLCKIHKMHSFLDYIMGGCQIQFTVAIDFTASNGDPRNSCSLHYIHPYQPNEYLKALVAVGEICQDYDSDKMFPAFGFGARIPPEYTDSHDFAINFNEDNPECAGIQGVVEAYQSCFPKAPTFTGPTNICPHSSRKVAKFRRSEGNXHQGRAFAIIFILVDPGQVGVYSQDMGPDNPGGHFV

SEQ ID NO: 1361 - protein, 202 aa, Homo sapiens
  misc_feature (1)...(202): Xaa = any amino acid or nothing
ACARKQLLGRTVFIWFVGQLLGGELKGYSKTNTTSSRPASSRGTLSSSSSSSSSLTKDALPSSLKSDSTTITSGLVFPFRSLCVNPAKSSVSESVSSIKILLSSSVKYLEXKRTSCCFPDSSESKLSQLSSDERVSMGTSSRKPTNSSSSLGALKMSATSXGSGSESPTPFFLTGLQSPPSTRPREPGLTTARNSTTLTRDC

SEQ ID NO: 1362 - protein, 135 aa, Homo sapiens
  misc_feature (1)...(135): Xaa = any amino acid or nothing
LIPSEPALDSLVDPRVRSRKQPFVIYPVYDTAIDTKIHFSLLDGNVGEPDMSAGFCPNHKAAMVLFLDRVYGIEVQDFLLHLLEGGFLPDLRAAASLDTAEIGAMDFLLSXLFTLCLMMFFFIYPFINLLTMNVY

SEQ ID NO: 1363 - protein, 144 aa, Homo sapiens
  misc_feature (1)...(144): Xaa = any amino acid or nothing
WTFHRHLSPAPLIVCDQGTCVVSYYPQNIVQMPDTQMEQGLNHLFLDGNAXPHSVECYCPSTFEIAIKITSFVLYFHRYRAPEVLLRSSVYSSPIDVWAVGSIMAELYMLRPLFPGTSEVDEIFKICQVLGTPKKVSTLVPKLL

SEQ ID NO: 1364 - protein, 124 aa, Homo sapiens
  misc_feature (1)...(124): Xaa = any amino acid or nothing
YLLTXIGNLMMLLVINADSCLRTXMXFFLGHFFFLDICYSSVTAQDAAEFPVSXKPILVWGYITXSFFFIFSWGTNGCLLSAITYACYAAICHPLLSTMVMNRPLCTATVNATNKMGFLNSQVN

SEQ ID NO: 1365 - protein, 119 aa, Homo sapiens
  misc_feature (1)...(119): Xaa = any amino acid or nothing
THAKFLNKKFNIPKLVILPKLVYIVKAIPTKMAIEFLLECDQNITKLICENTXKNIAKNIXKRRVTFTPIETXHPVKQMIKWQXLTAWLRNRGYKKIKQTPNSETAPSVCRNLVFDKCG

SEQ ID NO: 1366 - protein, 126 aa, Homo sapiens
FCIFRTTEEDRGGDDCVVSVWTKQRNNSCVKSKDVFSKPVNIFWALEESVLGVKARQPKPFFAAGNTFEMTCKVSSKNIKSPRYSVLIMAEKPVGDLSSPNETKYIISLDQDSVVKLENWTDASRV

SEQ ID NO: 1367 - protein, 47 aa, Homo sapiens
  misc_feature (1)...(47): Xaa = any amino acid or nothing
RKRTNNPIKLDKKFEHFKNEDIXITSKHTKMWVSSLAMKEMLTKTTM

SEQ ID NO: 1368 - protein, 301 aa, Homo sapiens
  misc_feature (1)...(301): Xaa = any amino acid or nothing
LVVGITGTRHHARVIFIFLVETGFPHVGQAGLELLTSGDPPALASQSAGITGMSHCARPKGHFGIHLKXMFYTMSQKMPXPTINLILLLIIPGNLNIFKPNMGWLGPKTAFVXKDEVLSGIPFAKGRCRWKXDYXCLQEVTDPIMEKGKKKKRTASFFKGQPHQSTNALLRRCVRXRYHLSTVETAGLPXKNTGHIPGQPFLFKLVFKCXNVICIXXQYKWXQNIGVKNKSFCPHXSSSPSLXFIGHHSRNFCSFKTEPHSVVQAGGQWRNLSSLQAPPPGLMPLSRISLMSSWDYRRPPQ

SEQ ID NO: 1369 - protein, 148 aa, Homo sapiens
  misc_feature (1)...(148): Xaa = any amino acid or nothing
NSPSRWAKIQMFEHTFCGXGCGERNVHIHCSWICRLRPLLWRAVREYLSKLKNAELSFDPGVSLLRIYAIDMPTSIXDEKEALLFAFLAFHEXHCKSRIWAVIQCIHLWDWLRKLXCFHRMKFYAAVXNKPRHLLSHIWKDVQNILLK

SEQ ID NO: 1370 - protein, 446 aa, Homo sapiens
  misc_feature (1)...(446): Xaa = any amino acid or nothing
FFFCGKEVPLFEQNKHPGPRATTSPGAHARALLSAGEFTAGVGLSPXAIHSFVWLCTFIQHGAGGPCHQPGGSPGPWMHTTQAGHLWEGAYPGGSSTWHQVPGQLGGSWGPRERSLLGSFIKCSPCPHPPGFRLWMSPNQKPPTENPGVMGRVWRLMPGESPLIWEAEGKEDHLSPEGQGHSEPVAPLHSSLGNTVKPXPKNQKPKQNRSRHGQGFMAGQGQSRPAARXPPCPALTPASHSAGTWPPRICRTVPGGPCPSPSGFRSCRRXGFSAXTRSWPDAEPPSTPDTAPRCCTQSDTSSQGPQXSXWRRCRALPGRLCSAPAAGLRRARPRLSESRRGNSPPASPAAASARCPSWGPSCPARPPSRPAAGTEPAAPSRCTAWLRGEREPGPRPPGRRPRSGRGPVSFAPEVLSLPAVRQTKSWRWRNEEEITRPWALVRSRGG

SEQ ID NO: 1371 - protein, 263 aa, Homo sapiens
  misc_feature (1)...(263): Xaa = any amino acid or nothing
GSQVLPPPPSQDSATLPQDAXGPRAAPGQPVCEXGLQGAGVRRLRGEVLCQPQPXGALXEQCLPHLSFSPRQGAAPDTEPSAWGPAPTGATGPGLPLRHVRLFSAGAPRGAATPCPPALLHGPAWPPARPMFRGHPPVRPLGPWGKVAAGPRALCLAGVPAVQGECATKPSGXGLXPAHLRGPPGPEVLQWHWQLSAGRDPVPAEDPPLXEGPLGPGGPAAAQAEPGADPEPEDKDQAAESRPAGAMSLSAQGSGPVGGQGLR

SEQ ID NO: 1372 - protein, 169 aa, Homo sapiens
  misc_feature (1)...(169): Xaa = any amino acid or nothing
PHLENPHPEHSFPGAPLTXSTLSWSILSPREPSPGAPCYPGHPHLENPHLEHLLTWRTVTWSTLLPGAPCYPEHPHLEHPLTWSTPHLEHPSPGEPLSCRTPTRSILHRDHPLPXCLSTEESPIXGWGSLPAPPSTPLVLDVAPPGPQPASSCPGRDSCYSVPGTVVSP

SEQ ID NO: 1373 - protein, 132 aa, Homo sapiens
  misc_feature (1)...(132): Xaa = any amino acid or nothing
CIVSSCQGTRKPCHLEDANKINKQSPTLEKIESLQESLXVKQXLIVAEKYVQILHPRKKYFQRPLNNEKRKMKKRKEEKKKCRERMQRRSKWRREEKKEXRREEEERKKEKEDRKERRKETSPRGSRRLLRD

SEQ ID NO: 1374 - protein, 61 aa, Homo sapiens
GRALDTAAGSPVQTAHGLPSDALAPLDDSMPWEGRTTAQWSLHRKRHLARTLLVSRVRGPQ

SEQ ID NO: 1375 - protein, 82 aa, Homo sapiens
  misc_feature (1)...(82): Xaa = any amino acid or nothing
YLITTILETGYLWKNRHSDQXKRTENPERDQHKYPKVDFCKSNSMKNRLCNKWHWTNWIFTDKKINLNLKPHTKLTPNIKKN

SEQ ID NO: 1376 - protein, 73 aa, Homo sapiens
  misc_feature (1)...(73): Xaa = any amino acid or nothing
EVKNTNPFIFSGTNLTIWIRSIXRKSDEINQRTKXMEKYSISLDRRLNTVKMSFLPNLIYKFNTISIKIPANF

SEQ ID NO: 1377 - protein, 92 aa, Homo sapiens
  misc_feature (1)...(92): Xaa = any amino acid or nothing
KSKATGYMVNIXKLIVFLYANDEQLEIEMNKIVPFNGSKNKIAFTNLTKYQNIQNRHAENYKILVNKIEDLNKWRNVLLSWIGRRNIINTMT

SEQ ID NO: 1378 - protein, 138 aa, Homo sapiens
  misc_feature (1)...(138): Xaa = any amino acid or nothing
TICTNKFNNLDEIKFLERHKLSKLTQEEVENLITLKTSRETELVINKXVIPHKEKPGPDSFTGEFYQTFKEELIIILHKLFQTIKYGRILPNSVYETSITLKPKPEKDLKENYRPLPLSNIDAKLNKTLANRIXXHIR

SEQ ID NO: 1379 - protein, 90 aa, Homo sapiens
  misc_feature (1)...(90): Xaa = any amino acid or nothing
IYSKMCMERQRLNNXILKKNKVRGIAVPDVKVYYKPTVIKTSWILXKDSHIVEWNRLENLEIDPNIKRLILDKGAEATEWRKDSFFRQWQ

SEQ ID NO: 1380 - protein, 75 aa, Homo sapiens
  misc_feature (1)...(75): Xaa = any amino acid or nothing
FFFETESHSVTQAGVQWCNPGFKRFSCFGLSSSWDYRYAPPRPANFXFLVETGFYYVAQAGLKLLSPGDLPALAS

SEQ ID NO: 1381 - protein, 129 aa, Homo sapiens
  misc_feature (1)...(129): Xaa = any amino acid or nothing
QLMFDKGVKNIHWGWTPPFTKXYWKNWISICRRMNLNPYLSRYIKINSRKDLTVRPEPIKLVEENTGKTIQDTGLGKXFIAKTSKAQSTKTNKXKRQTRYIKLKKKSTASKENNRVKRQPLEXEKIFAN

SEQ ID NO: 1382 - protein, 116 aa, Homo sapiens
  misc_feature (1)...(116): Xaa = any amino acid or nothing
VKPYEIAVFLVKPIEYKXHLLSDPAIPLSGIXLKEIKAYTRRICTPMFAAPVSVIARNXKQSKCQKQXYVHRMEYYTTIKRSEILICTTTWVDFRNTILRETDRIHKTTYDVISLI

SEQ ID NO: 1383 - protein, 606 aa, Homo sapiens
  misc_feature (1)...(606): Xaa = any amino acid or nothing
KSACSFICSEEQPASPSPLKPGTYASETRPRDPHAAGPRRDSSEAETRRPRGADGSGTVVKGTPGSPAPPCSWGHGGETEGAGXCPAAPGTDLRAPGGSAGSXGLPSAGGSRGRKGWRAAGRQPSTRXGRPGRHGGRGEXAGHPEPRQSALQSAGLASSPEPMGAALAEDGSGDSRGAGPRPQEXPPSVLSRSGSXGXGXAASGTASSPRSHSSRLGPPSAGFHGLRCGQPPFAAAPPGPWPGTGRPAGGAGSPPAAAGTAPPATRGAQSRRQNRTAGRNASPQTAAGAGSPVQWALSRATGXTGETGSWCAGGTHQATHLTAAWVCPPTWSVRPGGSGPAAGLGRXGRHPAQSPPLPVPRGXPAWPQEAPSPSPASSEVALSSGSCWPDQAPGPARGSPPAPLAPAWPAAGRGRQRXGRQSAHPPPRRXSTAVSLSGTSXWRRSPXAGTRTQQCXSPWLVPACSSRPLXRGTRRPSTQQSPQTTGTPGRSAGPGHPRSXGGRSPAGTGHLGAQTVASPHXGHWPTALSCLWASASPPGPEAPPQTGACIGTNCRYRAASARRSSVAPACAXGWQXAGSPPAVLRGPPXRVRERGALTHRPRAPDE

SEQ ID NO: 1384 - protein, 140 aa, Homo sapiens
  misc_feature (1)...(140): Xaa = any amino acid or nothing
APGASVGRAQAAEGXRGGPTGRPPSALGVSEAGRAGRAGEGRPVPPAYPLCKSAQTSGPPKARLSPPLASCGGRGPPGGAACATCAPPAGPARSSRCRRRSPPEXGPRXPSRPARPSPGSAASRRQKLTPCRCQFRGLCA

SEQ ID NO: 1385 - protein, 107 aa, Homo sapiens
  misc_feature (1)...(107): Xaa = any amino acid or nothing
PTPYPGEXQAAFLLRGPGLRPPADPSLRHRNLTELVVAVTDENIVGLFAALLAERRVLLTASKLSTLTSCDHAFCALLYPMRWEHVLIPTLPPHLLDYCXCPPLPRT

SEQ ID NO: 1386 - protein, 542 aa, Homo sapiens
  misc_feature (1)...(542): Xaa = any amino acid or nothing
FFFSFVCHLYCVSPTPGPHGRLATWLPGLLAFLGLAAGGQTLCPAGELPGHARAQASGAPGSVLIAVPGRRRVHTCGPGPAAPSTRGECPPPALGHTRPARPRPVPFAPAVPQEPGGQGHGAAPPATGHSAPRGCPPARAAPTGSATPAPPPAACAAFHSAWSVPPAGRQQGXRVPAPAFRRTTPGTPGQHLLDRPGAPPAQGSGPAPAPPPRLAGPAGPAAPPPGPPAASWHSSLSKSSSSLGWSPPLPVGPGSLQXTPPPQGPHLSGSCGGTSSWRGQRAAVARRLRSWNACGLSRVAGRSSASYPGREGRPSQSQXPAGPPGMRGCCLRGWXPSSSGSDGPGPHPASTWLRAGKTGPSPPACGCAXLPPPSVSAAPQSPRTRCPRGCAAAAGLCVLAAAGASHGAGLPGVRVHTQRVHIHXGAGGCQTPRPRLRSLPVLGLPAPRCPVSAHPWHRRSGSSCHAARLVPRHPAPGCPXXTGXPLITGFPEPXAXGLPNHQAVGLEASGALQAGHRDELPTMVQLLDHSPDYPLKGRPHAP

SEQ ID NO: 1387 - protein, 276 aa, Homo sapiens
  misc_feature (1)...(276): Xaa = any amino acid or nothing
FRLPLAAGARGAAEPRVAVSMAPDPSAKIHWEASPEMQSKCHQKGKNNQTECFNHVRFLQRLNSTHLYACGTHAFQPLCAAIDAEAFTLPTSFEEGKEKCPYDPARGFTGLIIDGGLYTATRYEFRSIPDIRRSRHPHSLRTEETPMHWLNGXEDEAQDDGGXGTISSFLLPWPADHPTPKSPGEPVHSIPVCCQVRGQPQSGGKESPACLKSLSNCLTHDAEFVFSVLVRESKASAVGDDDKVYYFFTERATEKESGSFTQSRSSHRVARGIPPL

SEQ ID NO: 1388 - protein, 142 aa, Homo sapiens
  misc_feature (1)...(142): Xaa = any amino acid or nothing
FRAMVSSTLKLGISILNGGNAEVQQGNRGKGTSEEGKEGXEVPVXLPVSPPLPRPLQKMLDYLKDKKEVGFFQSIQALMQTCGEKVMADDEFTQDLFRFLQLLCEGHNNDFQNYLRTQTGNTTTINIIICTVDYLLRLQESI

SEQ ID NO: 1389 - protein, 343 aa, Homo sapiens
  misc_feature (1)...(343): Xaa = any amino acid or nothing
TLDLTGPLLLGGVPNVPKDFRGRNRQFGGCMRNLSVDGKNVDMAGFIANNGTREGCAARRNFCDGRRRQNGGTCVNRWNMYLCECPLRFGGKNCEQGEWPASSIPPVTAAWEALLLDVPGTTVRGLHIQVRQPLVVYAAFTVDSHRPLQETVLRRAPAPASGVPSPSGVGWDRXAGPAEPSPSTPATVIISVPWYLGLMFRTRKEDSVLMEATSGGPTSFRLQVTGAPCHQGTCXVGARGRDPMLSGLRVTDGEWHHLLIELKNVKEDSEMKHLVTMTLDYGMDQVSWHLHLLWGXTLPPAQGKTGASEDKVSVRRGFRGCMQVRGGCGGRGEACPSQAAPRL

SEQ ID NO: 1390 - protein, 110 aa, Homo sapiens
  misc_feature (1)...(110): Xaa = any amino acid or nothing
IHKIIIHKEDLNKWKYILCSGMERLSTVMIPVVPQIIYKFNAXQVILKFTWXEXGAKITILRKNKLRGLVLVPLSTCXVKYLLDKVLPHIKTYYEARVNKSVVLVQVTIM

SEQ ID NO: 1391 - protein, 63 aa, Homo sapiens
  misc_feature (1)...(63): Xaa = any amino acid or nothing
SMLKERKVFQFPSCLFFQYITWLGPPYHVLFDSSVTNFSIGAKXDILQSVMNCLYAKRIPCVT

SEQ ID NO: 1392 - protein, 138 aa, Homo sapiens
  misc_feature (1)...(138): Xaa = any amino acid or nothing
GSTHASGYDKTPDFILQVPVAVEGHIIHWIESKASFGDECSHHAYLHDQFWSYWNSLKHRTWQGIGTVASNLSQLXTLNAPFPELLLFRSLARTGFVLTXRFGPGLVIYWYGFIQELDCNRERGILLKACFPTNIVTL

SEQ ID NO: 1393 - protein, 89 aa, Homo sapiens
  misc_feature (1)...(89): Xaa = any amino acid or nothing
PALSPAPVPQKKGSPLPLDPCLGPSSWLLSVGLGWPRLXPRRGPGDPGSLPATPPLLTPPHTLLPQRPMLPPSHAGLARPPPPEPISVP

SEQ ID NO: 1394 - protein, 150 aa, Homo sapiens
  misc_feature (1)...(150): Xaa = any amino acid or nothing
LPQYCFFPRLSPKSKLVKHSALXXPSALKPPTKSPRCIPRTSLYFTICCPPALQLSPIEDPPAIYRSPPTHMLRSASQPLNQAPTLVKGHPPSRFLQGQVSCPPQPTLPREKPLPLHLRPPPRPAQPPLPRPLTFSTRRNVDPEIPERFR

SEQ ID NO: 1395 - protein, 73 aa, Homo sapiens
  misc_feature (1)...(73): Xaa = any amino acid or nothing
GVYPPTVFDNYSVQTSVDGQIVSLNTWDTAGQEEYDRLRTLSXPQTSIFVICFSIGNLEFPIYGTWLSMSMGK

SEQ ID NO: 1396 - protein, 122 aa, Homo sapiens
  misc_feature (1)...(122): Xaa = any amino acid or nothing
TTKKTLISNNVSSRSLPILPELKAFSLAFNDPLEIQKYMRTDQXCVTHDISLYIVTKLALIFLIPRVFLFHQLNITXXCLHFFTMTTFIAIPFSFLFLGRDKSLAMLPRLVSNSWPQVILPP

SEQ ID NO: 1397 - protein, 53 aa, Homo sapiens
  misc_feature (1)...(53): Xaa = any amino acid or nothing
QLQNLASRGCLXSQLLRRLRRENRLNPGGGGCSEIAPCTPAWVTQRDFFRKKK

SEQ ID NO: 1398 - protein, 31 aa, Homo sapiens
  misc_feature (1)...(31): Xaa = any amino acid or nothing
HFTPDRIAIVKNTRDSHCWRGCXEEGAPARC

SEQ ID NO: 1399 - protein, 155 aa, Homo sapiens
  misc_feature (1)...(155): Xaa = any amino acid or nothing
PRKRESWWGERLPPRGFPPAAEDAPAPGWKGRKHASRTARAHVFHPIRQSIRSPVRGRPGDPRAAHTRSAGTRLQCKASRGGXGKGPAPTRXEGGPGSAPAPLPASSGCSLFPDSSPWTPPPPAPGAAAAQPXXTPRCPAALRAGAHIGRVGRPY

SEQ ID NO: 1400 - protein, 126 aa, Homo sapiens
  misc_feature (1)...(126): Xaa = any amino acid or nothing
EKCIQALDVFVFCYIDHSSHCLMSCDXEDQALNFMPLEMEPKMSKLAFGCQRSSTSDDDSGCALEEYAWVPPGLRPEQIQLYFACLPEEKVPYVNSPGEKHRIKQLLYQLPPHDNEVRYCQSLSEE

SEQ ID NO: 1401 - protein, 635 aa, Homo sapiens
  misc_feature (1)...(635): Xaa = any amino acid or nothing
IRIRHEAARSCLGCAAGHVPAPGLRLLPTVRGPPGRRGPAAPGCVCYXSGESTFVSHVPQRMAWPGSAPPRGFHPLQSQTSPSDTVSSPQLSKEEDGPGWEHPLSSSLXSLGQAGGNHXQPEELAGWEPRGPPSLAPSSPTTMWTALVLIWIFSLSLSESHAASNDPRNFVPNKMWKGLVKRNASVETVDNKTSEDVTMAAASPVTLTKGTSAAHLNSMEVTTEDTSRTDVSEPATSGVAADGVTSIAPTAVASSTTAASITTAASSMTVASSAPTTAASSTTVASIAPTTAASSMTAASSTPMTLALPAPTSTSTGRTPSTTATGHPSLSTALAQVPKSSALPRTATLATLATRAQTVATTANTSSPMSTRPSPSKHMPSDTAASPVPPMRPQAQGPISQVSVDQPVVNTTNKSTPMPSNTTPEPAPTPTVVTTTKAQAREPTASPVPVPHTSPIPEMEAMSPTTQPSPMPYTQRAAGPGTSQAPEQVETEATPGTDSTGPTPRSSGGTKMPATDSCQPSTQGQYMVDHHXAPHPGRGRQNSPSGGAVTRGDPFHHSLGFVCPAGLXELQEEGLHPGGLLNQRDVCGLRNVRGAGAWREAWPLPRPFLLPLRPNQVLPNSFGAIEEICQMLKHI

SEQ ID NO: 1402 - protein, 154 aa, Homo sapiens
  misc_feature (1)...(154): Xaa = any amino acid or nothing
ESGEFLVSFTLKKPTNVFHHINGMKFFNKLIFXSHTDIAFYKIQHPFMLKALTKWAXEGTXPDRRYLHXSLRLNGEQLKTFPLRSGMRXGCAILPLVLNAMLSIVPAVVPAGKTRHEKEITCPLIGQEEKXFSXFVGDMNTCVENKKESKKLLE

SEQ ID NO: 1403 - protein, 209 aa, Homo sapiens
  misc_feature (1)...(209): Xaa = any amino acid or nothing
PEVIQQSAYDSKADIWSLGITAIELAKGEPPNSDMHPMRVLFLIPKNNPPTHCWRRLLESFKEVXLMLAXTKDPSIRPTAKELLKHKFIVKNSKKTSYLTELIDRFKRWKAEGHSDDESDSEGSDSESTSRENNTHPEWSFTTVRKKPDPKKVQNGAEQDLVQTLSCLSMIITPAFAELKQQDENNASRNQAIEELEKSIAVAEAAGPG

SEQ ID NO: 1404 - protein, 74 aa, Homo sapiens
  misc_feature (1)...(74): Xaa = any amino acid or nothing
ISIDAXKAFDKIQHCFMITTLKKLGIDGKYLNTIKAIDDRHTVSTILNVEKLKAFLXRSGTRQRFPISGSGARI

SEQ ID NO: 1405 - protein, 121 aa, Homo sapiens
HASVDGDEGSDDVYYYYTPAILRELQALNTAEAAEHRPEEDRMLSEDPWRPAHMIKGYMPLHNIPHTEVIDVTGLNQSHLYQHLNKGTPMKTQKRAALYTWHVLEQLEILRQINQQSHGPG

SEQ ID NO: 1406 - protein, 140 aa, Homo sapiens
SVLTLQTRSPSKPLSRKLMDWEVVSRNSISEDRLETQSRASRSPPVTPNQSQETPVDGKPLALPPNQSQKNIRYHIHYLHLQYYLDRHISATLPIPSSSGIPTPIAVITDALTDLVELILGQPCSEESGRAPGTLFLLAL

SEQ ID NO: 1407 - protein, 139 aa, Homo sapiens
GAYAFETNGFPIMLVLTTDKIEGDVGIAGLYDMHISLPMAFLLRTLVRCTSYIIPVTHVLSTPVTCLRRREKDGVIVDVLSDTASNHNGFPVEEHADDTHPARLQGPTLRSQPMGPLKHKAFEERANLGLVQRRLRLED

SEQ ID NO: 1408 - protein, 54 aa, Homo sapiens
  misc_feature (1)...(54): Xaa = any amino acid or nothing
LKHRDTPVVGANNRALSCTPLTSLTLCALCPLPCLGCPTXATCRLYQTTVAVVF

SEQ ID NO: 1409 - protein, 141 aa, Homo sapiens
KAFSFTTSLIGHQRMHTGERPYKCKECGKTFKGSSSLNNHQRIHTGEKPYKCNECGRAFSQCSSLIQHHRIHTGEKPYECTQCGKAFTSISRLSRHHRIHTGEKPFHCNECGKVFSYHSALIIHQRIHTGEKPYACKDVGK

SEQ ID NO: 1410 - protein, 72 aa, Homo sapiens
GGPPGPFLAHTHAGLQAPGPLLAPAGDEGDLLLLAVQQSCLADHLLTASWGGKDPIPTKALGEGQEGLPLTV

SEQ ID NO: 1411 - protein, 127 aa, Homo sapiens
RHSRAHLCQPFHLVMRDLLQLGQDIPQGCHYLEENHLIHRDIAARNCLLSCAAPTRAATIGDFGMARYIYRTRYYQLGDRALLPRKWMPPEALLEGIFTYNTDSWTFGVLLWEIFSLGYMPYPGRTN

SEQ ID NO: 1412 - protein, 286 aa, Homo sapiens
VVEFLWSRRPSGSSDPRPRRPASKCQMMEERANLMHMMKLSIKVLLQSALSLGRSLDADHAPLQQFFVVMEHCLKHGLKVKKSFIGQNKSFFGPLELVEKLCPEASDIATSVRNLPELKTAVGRGRAWLYLALMQKKLADYLKVLIDNKHLLSEFYEPEALMMEEEGMVIVGLLVGLNVLDANLCLKGEDLDSQVGVIDFSLYLKDVQDLDGGKEHERITDVLDQKNYVEELNRHLSCTVGDLQTKIDGLEKTNSKLQERVSAATDRICSLQEEQQQLREQNELIR

SEQ ID NO: 1413 - protein, 205 aa, Homo sapiens
SSFAKHKRIHTGEKPFICLECGKAFTSSTTLTKHRRIHTGEKPYTCEECGKAFRQSAILYVHRRIHTGEKPYTCGECGKTFRQSANLYAHKKIHTGEKPYTCGDCGKTFRQSANLYAHKKIHTGEKPYKCKECGKAFKSYYSILKHKRTHTRGMSYEGDECQRSLNRSSILSNHKIIHNEEKPLKCEKCEKAFNHTSICCRHKKN

SEQ ID NO: 1414 - protein, 312 aa, Homo sapiens
KKQDLSSSLTDDSKNAQAPLALTESHLATLASSSQSPEAIKQLLDSGLPSLLVRSLASFCFSHISSSESIAQSIDISQDKLRRHHVPQQCNKMPITADLVAPILRFLTEVGNSHIMKDWLGGSEVNPLWTALLFLLCHSGSTSGSHNLGAQQDQCKISFSFFSWLTTGLTTQQRTAIENATVAFFLQCISCHPNNQKLMAQVLCELFQTSPQRGNLPTSGNISGFIRRLFLQLMLEDEKVTMFLQSPCPLYKGRINATSHVIQHPMYGAGHKFRTLHLPVSTTLSDVLDRVSDTPSITAKLISKQKDDKKKK

SEQ ID NO: 1415 - protein, 74 aa, Homo sapiens
PRAFEFVHTEMIVGRVQNIHLFTLQVLEDRALFTMSVGSSLWSTYLIHVMALPDRELLKPNASVALHKLSNALV

SEQ ID NO: 1416 - protein, 163 aa, Homo sapiens
HETCSVTHIVSFSLPFLNPSHPASTPGHTENEQPSLVWFDRGKFYLTFEGSSRGPSPLTMGAQDTLPVAAAFTETVNAYFKGADPSKCIVKITGEMVLSFPAGITRHFANNPSPAALTFRVINFSRLEHVLPNPQLLCCDNTQNDANTKEFWVNMPNLMTHLK

SEQ ID NO: 1417 - protein, 100 aa, Homo sapiens
LKLTSLGFIIGVSVVGNLLISILLVKDKTLHRAPYYFLLDLCCSDILRSAICFPFVFNSVKNGSTWTYGTLTCKVIAFLGVLSCFHTAFMLFCISVTRYL

SEQ ID NO: 1418 - protein, 442 aa, Homo sapiens
MGKISATGINMGTKCSWALVWHLESYDPKHYEREGMQDWKTASGQSEEATQQSSQKPQPHYTTYQSSSFLKYSSESHLLAWRENSSEGSFQFPGRSRARPPRTRQQRRGAAAGPGRGAVRLGHPQSAAQPQLRAAARIPESPAAFPAQPRPGSARNSDASGPASLSRTLGRASSPRPPQAPDVTAPSPAALAPRAARGGSRAAALAGAEAEEPLRTLAPRPTRAAAPPPPPPPPPLPPGAPPPPVRCVSRRARAPPWRPAATGPPPRPVAPSRKLGSARAPAPALQIRKGTSSGLPGRGGGSGPGNNLSSVAGNWRGSSFAVERPGMAKYQGEVQSLKLDDDSVIEGVSDQVLVAVVVSFALIATLVYALFRNVHQNIHPENQELVRVLREQLQTEQDAPAATRQQFYTDMYCPICLHQASFPVETNCGHLFCGSLTPNSIW

SEQ ID NO: 1419 - protein, 156 aa, Homo sapiens
FDTARLHEFGTSITQIFAVDNREDLQKWMEAFWQHFFDLSQWKHCCEELMKIEIMSPRKPPLFLTKEATSVYHDMSIDSPMKLESLTDIIQKKIEETNGQFLIGQREESLPSSCGPHSLMVTIKWSSRKRYSYPASEPLHDEKGKKRQAPLPPSDK

SEQ ID NO: 1420 - protein, 225 aa, Homo sapiens
ALRRLHYVRATKVFLSFRRPFWREEHIEGGHSNTDRPSRMIFYPPPREGALLLASYTWSDAAAAFAGLSREEALRLALDDVAALHGPVVRQLWDGTGVVKRWAEDQHSQGGFVVQPPALWQTEKDDWTVPYGRIYFAGEHTAYPHGWVETAVKSALRAAIKINSRKGPASDTASPEGHASDMEGQGHVHGVASSPSHDLAKEEGSHPPVQGQLSLQNTTHTRTSH

SEQ ID NO: 1421 - protein, 127 aa, Homo sapiens
QKQTLQNGYLDSSMDILYLGSLPPELQVSSDEPPGPPEQAGLSQFHLEPETQNPETTEEIQSSLQQEAAAQLPQLPEVVELSSTKAEAPALPSQSLEGVHSSTEQKAPAQQLPAFEEILAPLLIHHE

SEQ ID NO: 1422 - protein, 301 aa, Homo sapiens
HAQYVGPYRLEKTLGKGQTGLVKLGVHCITGQKVAIKIVNREKLSESVLMKVEREIAILRLIEHPHVLKLHGVYENKKYFPPDELTSGPSMLAQVSPHGKLSARRSWDLLSGFPRYLVLEHVSGGELFDYLVKKGRLTPKEARKFFRQIVSALDFCHSYSICHRDLKPENLLLDEKNNIRIADFGMASLQVGDSLLETSCGSPHYACPEVIKGEKYDGRRADMWSCGVILFALLVGALPFDDDNLRQLLEKVKRGVFHMPHFIPPDCQSLLRGMIEVEPEKRLSLEQIQKHPWYLGGNFIS

SEQ ID NO: 1423 - protein, 267 aa, Homo sapiens
LRNALDVLHREVPRVLVNLVDFLNPTIMRQVFLGNPDKCPVQQAMLEPLGSKTETLDLRAEMPITCPTQNEPFLRTPRNSNYTYPIKPAIENWGSDFLCTEWKASNSVPTSVHQLRPADIKVVAALGDSLTTAVGARPNNSSDLPTSWRGLSWSIGGDGNLETHTTLPNILKKFNPYLLGFSTSTWEGTAGLNVAAEGARARDMPAQAWDLVERMKNSPDINLEKDWKLVTLFIGGNDLCHYCENPEAHLATEYVQHIQQALDILSE

SEQ ID NO: 1424 - protein, 140 aa, Homo sapiens
FREPCLLVPGDHQPLREASWLALPPIGLWGTDSPLCCVEVAIPCNKGAHSVGLKGWLLAQGVLGMRDTIPQEHPWESTPDLCFCRDPEEIEVEEQPAADAAVAKGEFQGEQIAPVPAIIAAHPEAADPAPVHTTAHPKGA

SEQ ID NO: 1425 - protein, 137 aa, Homo sapiens
PFPHQHPQEPKGSCWPQSALRGQCPGPVLGVTTTSDLCSLQVPVSSHRNPLLDLAAYDQEGRRFDNFSSLSIQWESTRPVLASIEPELPMQLVSQDDESGQKKLHGLQAILVHEASGTTAITATATGYQESHLSSAR

SEQ ID NO: 1426 - protein, 124 aa, Homo sapiens
PIISAPAQDDPILLSFIHCLHANLLCVWRRDVKPDCKEIWIFWWGDEPNLVVQYIMNCMLWKKDSGKMAFPMNVGRCFFKEIHNLLERCLMDKNFVLIGKWFVRPYYKDEKPVNKSEHLSCAFT

SEQ ID NO: 1427 - protein, 59 aa, Homo sapiens
RFPQGLEDVSTYPVLIEELLSRGWSEEELQGVLRGNLLRVFRQVEKVQEENKWQSPLED

SEQ ID NO: 1428 - protein, 430 aa, Homo sapiens
MAESASPPSSSAAAPAAEPGVTTEQPGPRSPPSSPPGLEEPLDGADPHVPHPDLAPIAFFCLRQTTSPRNWCIKMVCNPWFECVSMLVILLNCVTLGMYQPCDDMDCLSDRCKILQVFDDFIFIFFAMEMVLKMVALGIFGKKCYLGDTWNRLDFFIVMAGMVEYSLDLQNINLSAIRTVRVLRPLKAINRVPSMRILVNLLLDTLPMLGNVLLLCFFVFFIFGIIGVQLWAGLLRNRCFLEENFTIQGDVALPPYYQPEEDDEMPFICSLSGDNGIMGCHEIPPLKEQGRECCLSKDDVYDFGAERQDLNASGLCVNWNRYYNVCRTGSANPHKGAINFDNIGYAWIVIFQVITLEGWVEIMYYVMDAHSFYNFIYFILLIIVSVREPGLLGGSFSTAQSPKCQGDSFPGVAAESLLLRGWVLWLPGGG

SEQ ID NO: 1429 - protein, 135 aa, Homo sapiens
PNDFFKDMFPDLPGGPLGPIKAENDYGAYLNFLSATHLGGLFPPWPLVEERKLKPKASQQCPICHKVIMGAGKLPRHMRTHTGEKPYMCTICEVRFTRQDKLKIHMRKHTGERPYLCIHCNAKFVHNYDLKNHMR

SEQ ID NO: 1430 - protein, 58 aa, Homo sapiens
EMNELSQQLSQQGGRGASQCPSPPAPTLPNPTPLCQLQLQRVNTGLPTPPCHPGAGAA

SEQ ID NO: 1431 - protein, 110 aa, Homo sapiens
  misc_feature (1)...(110): Xaa = any amino acid or nothing
KTVLDVGAGTGILSIFCAQAGARRVYAVEASAIWQQAREVVRFNGLEDRVHVLPGPVETVELPEQVDAIVSEWMGYGLLHESMLSSVLHARTKVVKDGGFFLPXSSELFM

SEQ ID NO: 1432 - protein, 238 aa, Homo sapiens
DFVDAARNLPLESTKSPAEPSKSVPSLEDPRASSQGLPSQGPVQNQGRRGEQRPKKFTVIQHTSSFEKSDSLEQPSGLEGEDKPLAQFPSPPPAPHGRSAHSLQPKLVRQPNIQVPEILVTEEPDRPDTEPEPPPKEPEKTEEFQWPQGSQTLAQFPVEKLPPKKKRLGLAKMAQSSGESSFESSVPLFRSPSQESNVSLSGSSRSALFERDDHGKAEAPSPSFDMGPKPLGTHMLTV

SEQ ID NO: 1433 - protein, 96 aa, Homo sapiens
ESPGLSKVLRTGAFAYPFLFDNLPLFYRLGLCWGRGHGCGQEALSTSHGYHLFCALLTGFLFASHLPERLAPGRFDYIGHSHQLFHICAVLGTHFQ

SEQ ID NO: 1434 - protein, 144 aa, Homo sapiens
  misc_feature (1)...(144): Xaa = any amino acid or nothing
LGDVGFWVERTPVHEAAQRGESLQLQQLIESGACVNQVTVDSITPLHAASLQGQARCVQLLLAAGAQVDARNIDGSTPLCECLRLGQHRVCEALAVLRGQGQPSPVHSVPPARGLHXREFRMCXGFLFDVGXNLEAHEFHFGEP

SEQ ID NO: 1435 - protein, 114 aa, Homo sapiens
  misc_feature (1)...(114): Xaa = any amino acid or nothing
KRSEEASAPPFPLGGTGAAPTRASLPEQILLPRSCLEARKSQPDEKLLSALHNSRTWNXEPRRSQHRLVSPEVHPGRRGSSPGVAECKLTSAYFRTGRSPCPSLPGTTRTNSLL

SEQ ID NO: 1436 - protein, 135 aa, Homo sapiens
LPSHTCGNPGRLPNGIQQGSTFNLGDKVRYSCNLGFFLEGHAVLTCHAGSENSATWDFPLPSCRADDACGGTLRGAEWHHLQPPLPLGATKNNADCTWTILAELGDTIALVFIDFQLEDGYDFLEVTGTEGSSLW

SEQ ID NO: 1437 - protein, 246 aa, Homo sapiens
GTARFGPMVGFGANRRAGRLPSLVLGVLLVVIVVLAFNYWSISSRHVLLQEEVAELQGQVQRTEVARGRLEKRNSDLFAVVGHAQETDRPEGGRLRPPQQPAAGQRGPREEMEDDKVKLQNNISYQMADIHHLKEQLAELRQEFLRQEDQLQDYRKNNTYLVKRLEYESFQCGQQMKELRAQHEENIKKLADQFLEEQKQETQKIQSNDGKELDINNQVVPKNIPKVAENVADKNEEPSSNHIPHG

SEQ ID NO: 1438 - protein, 177 aa, Homo sapiens
PEFGTTISCGYLMATDVSRRPSVHKAVEIEQERVKSAGAWIIHPYSDFRFYWDLIMLLLMVGNLIVLPVGITFFKEENSPPWIVFNVLSDTFFLLDLVLNFRTGIVVEEGAEILLAPRAIRTRYLRTWFLVDLISSIPVDYIFLVVELEPRLDAEVYKTARALRIVRFTKILSLLRL

SEQ ID NO: 1439 - protein, 247 aa, Homo sapiens
MGFDEVFMINLRRRQDRRERMLRALQAQEIECRLVEAVDGKVGMLTRSNAAPGRHLAMLETLVVVAPRFVDADNLILNPDTLSLLIAENKTVVAPMLDSRAAYSNFWCGMTSQGYYKRTPAYIPIRKRDRRGCFAVPMVHSTFLIDLRKAASRNLAFYPPHPDYTWSFDDIIVFAFSCKQAEVQMYVCNKEEYGFLPVPLRAHSTLQDEAESFMHVQLEVMVPSSPSSAQSMAVVSADHIGLVISYL

SEQ ID NO: 1440 - protein, 117 aa, Homo sapiens
NKTSFIFYLKNIVVADLIMTLTFPFRIVHDAGFGPWDFKFILCRYTSVLFYANMDTSIVVLGLITYDRYWKVVRHLWDSWMTGISFTRVYLLGLGARLVWFGKLILAKGGHGGISWL

SEQ ID NO: 1441 - protein, 643 aa, Homo sapiens
LGSSDVRAPQRSELGAESPSRMVASQAYNLTSALTPILTRSRVLNEEPLTLAGFSRAPANLSDVVQLIFLVDSNPFPFGYISNYTVSTKVASMAFQTQAGAQIPIERLASERAITVKVPNNSDWAARGHRSSANSVVQPQAFVGAVVTLDSSNPAAVLHLQLNYTLLDGRYLSEEPEPYLAVYLHSEPRPNEHNCSASRRIRPESLQGADHRPYTFFISPGTRDPVGSYRLNLSSHFRWSALEVSVGLYTSLCQYFSEEDVVWRTEGLLPLEETSPRQAVCLTRHLTAFGTSLFVPPSHIRFVFPEPTADVNYIVMLTCAVCLVTYMVMAAILHKLDQLDASRGRAIPFCGQRGRFKYEILVKTGWGRGSGTTAHVGIMLYGVDSRSGHRHLDGDRAFHRNSLDIFQIATPHSLGSMWKIRVWHDNKGLSPAWFLQHIIVRDLQTARSTFFLVNDWLSVETEANGGLVEKEVLAASKASFRVPTPSAALLRFRRLLVAELQRGFFDKHIWLSIWDRPPRSCFTRIQRATCCVLLICLFLGANAVWYGAVGDSAYSTGRVSRLNPLSVDTVAVGLVSSVVVYPVYLAILFLFRMSRSKVGWGWGPGSTGNGAWASAPCPEPPLSSAAARGKGVHQRLLGKGQHT

SEQ ID NO: 1442 - protein, 186 aa, Homo sapiens
VFDEENILNELNDPLREEIVNFNCRKLVATMPLFANADPNFVTAMLSKLRFEVFQPGDYIIREGAVGKKMYFIQHGVAGVITKSSKEMKLTDGSYFGEICLLTKGRRTASVRADTYCRLYSLSVDNFNEVLEEYPMMRRAFETVAIDRLDRIGKKNSILLQKFQKDLNTGVFNNQENEILKQIVKH

SEQ ID NO: 1443 - protein, 240 aa, Homo sapiens
TVPPPPGGPSPAPLHPKRSPTSTGEAELKEERLPGRKASCSTAGSGSRGLPPSSPMVSSAHNPNKAEIPERRKDSTSTPNNLPPSMMTRRNTYVCTERPGAERPSLLPNGKENSSGTPRVPPASPSSHSLAPPSGERSRLARGSTIRSTFHGGQVRDRRAGGGGGGGVQNGPPASPTLAHEAAPLPAGRPRPTTNLFTKLTSKLTRRVADEPERIGGPEVTRRPRQEDHLSPGGRGCSEL

SEQ ID NO: 1444 - protein, 128 aa, Homo sapiens
KFSQWGLTKPKLSNASPWISLVKKLMKKWSVTQNLTFREQLEAGIRYFDLRVSSKPGDADQEIYFIHGLFGIKVWDGLMEIDSFLTQHPQEIIFLDFNHFYAMDETHHKCLVLRIQEAFGNKLCPACR

SEQ ID NO: 1445 - protein, 182 aa, Homo sapiens
GPRDNPGEDPRFEIVEHFGIAWFTFELVARFAVAPDFLKFFKNALNLIDLMSIVPFYITLVVNLVVESTPTLANLGRVAQVLRLMRIFRILKLARHSTGLRSLGATLKYSYKEVGLLLLYLSVGISIFSVVAYTIEKEENEGLATIPACWWWATVSMTTVGYGDVVPGTTAGKLTASACILA

SEQ ID NO: 1446 - protein, 486 aa, Homo sapiens
QLLPPSNRENAGLLVGRCLCSAALRPVGDLITSSGQVAVRNAPQAGSAKAGKGKFQDNFEFIQYFKKFFDANCNEKDYNPVAAGQGQETEVAPSIVAPVLNKPNQCPEGYICVKAGRNPNYGYTSFDTFSWAFLSLFRLMTQDYWENLYQLTLRAAETTYMIFLVLVILLGSLYLVTLILAVVAMAYEEQNQATLEEAEQKEAEFQQMLEQLKKQQEAAQQAATATASEHSREPSAAGRLSDSSSEASKLSSKSAKERRNRRKKRKQKEQSGGEEKDEDEFQKSESEDSIRRKGFRFSIEGNRLTYEKRYSSPHQSLLSIRGSLFSPRRNSRTSLFSFRGRAKDVGSENDFADDEHSTFEDNESRRDSLFVPRRHGERRNSNLSQTSRSSRMLAVFPANGKMHSTVDCNGVVSLVGGPSVPTSPVGQLLPEVIIDKPATDDNGTTTETEMRKRRSSSFHVSMDFLEDPSQRQRAMSIASILTNTVE

SEQ ID NO: 1447 - protein, 684 aa, Homo sapiens
IQTQLPTKSSQQLRKGGNCVRCKMQMNFIAEEVLLKYRITFYNNNKGPNMLYIEIKAFVHFMINRYLSYGSGPKRFPLVDVLQYALEFASSKPVCTSPVDDIDASSPPSGSIPSQTLPSTTEQQGALSSELPSTSPSSVAAISSRSVIHKPFTQSRIPPDLPMHPAPRHITEEELSVLESCLHRWRTEIENDTRDLQESISRIHRTIELMYSDKSMIQVPYRLHAVLVHEGQANAGHYWAYIFDHRESRWMKYNDIAVTKSSWEELVRDSFGGYRNASAYCLMYINDKAQFLIQEDLIKTGQPLVGIETLPPDLRDFVEEDNQRFEKELEEWDAQLAQKALQEKLLASQKLRESETSVTTAQAAGDPKYLEQPSRSDFSKHLKEETIQIITKASHEHEDKSPETVLQSAIKLEYARLVKLAQEDTPPETDYRLHHVVVYFIQNQAPKKIIEKTLLEQFGDRNLSFDERCHNIMKVAQAKLEMIKPEEVNLEEYEEWHQDYRKFRETTMYLIIGLENFQRESYIDSLLFLICAYQNNKELLSKGLYRGHDEELISHYRRECLLKLNEQAAELFESGEDREVNNGLIIMNEFIVPFLPLLLVDEMEEKDILAVEDMRNRWCSYLGQEMEPHLQEKLTDFLPKLLDCSMEIKSFHEPPKLPSYSTHELCERFARIMLSLSRTPADGR

SEQ ID NO: 1448 - protein, 112 aa, Homo sapiens
SGPSSRAIYLHRKEYSQNLTSEPTLLQHRVEHLMTCKQGSQRVQGPEDALQKLFEMDAHGRVWSQDLILQVRDGWLQLLDIETKEELDSYRLDSIQAMNVALNTCSYNSILS

SEQ ID NO: 1449 - protein, 552 aa, Homo sapiens
CGYFCHTTCAPQAPPCPVPPDLLRTALGVHPETGTGTAYEGFLSVPRPSGVRRGWQRVFAALSDSRLLLFDAPDLRLSPPSGALLQVLDLRDPQFSATPVLASDVIHAQSRDLPRIFRVTTSQLAVPPTTCTVLLLAESEGERERWLQVLGELQRLLLDARPRPRPVYTLKEAYDNGLPLLPHTLCAAILDQDRLALGTEEGLFVIHLRSNDIFQVGECRRVQQLTLSPSAGLLVVLCGRGPSVRLFALAELENIEVEVPKIPESRGCQVLAAGSILQARTPVLCVAVKRQVLCYQLGPGPGPWQRRIRELQAPATVQSLGLLGDRLCVGAAGGFALYPLLNEAAPLALGAGLVPEELPPSRGGLGEALGAVELSLSEFLLLFTTAGIYVDGAGRKSRGHELLWPAAPMGWGYAAPYLTVFSENSIDVFDVRRAEWVQTVPLKKVRPLNPEGSLFLYGTEKVRLTYLRNQLAEKDEFDIPDLTDNSRRQLFRTKSKRRFFFRVSEEQQKQQRREMLKDPFVRSKLISPPTNFNHLVHVGPANGRPGARDKSP

SEQ ID NO: 1450 - protein, 241 aa, Homo sapiens
SLCVPGPVDTGTFAVMSVMVGSVTESLAPQALNDSMINETARDAARVQVASTLSVLVGLFQVGLGLIHFGFVVTYLSEPLVRGYTTAAAVQVFVSQLKYVFGLHLSSHSGPLSLIYTVLEVCWKLPQSKVGTVVTAAVAGVVLVVVKLLNDKLQQQLPMPIPGELLTLIGATGISYGMGLKHRFEAGPPVAPNTQLFSKLVGSAFTIAVVGFAIAISLGKIFALRHGYRVDSNQVWVMRDV

SEQ ID NO: 1451 - protein, 75 aa, Homo sapiens
DWPDLFTYPLIGSPKCFQSARPERMYRRTVRSSHGNHALQEVLPRSGHGTEFTKQKHLEAADHGHPPARMSIFSR

SEQ ID NO: 1452 - protein, 179 aa, Homo sapiens
AHLLMLNLALTDLLYLTSLPFLIHYYASGENWIFGDFMCKFIRFSFHFNLYSSILFLTCFSIFRYCVIIHPMSCFSIHKTRCAVVACAVVWIISLVAVIPMTFLITSTNRTNRSACLDLTSSDELNTIKWYNLILTALLCLPLVIVTLCYTTIIHTLTHGHANDSCLKQKARRLTILLL

SEQ ID NO: 1453 - protein, 136 aa, Homo sapiens
CHSTESSSDFILPGDYLLGGLCPLHSGCLQVCSFNEHGYHLFQAMRLAVEEINNSTALLPNITLGYQLYDVCSDSANVYATLRVLSLPGQHHIELQGDLLHYSPTVLAVIGPDSTNRAATTAALLSPFLVPMLLEQ

SEQ ID NO: 1454 - protein, 143 aa, Homo sapiens
NSRVEDRSNMSLWTQNITVCPVRNVTRDGGFGPWSPWQPCEHLDGDNSGSCLCRARSCDSPRPRCGGLDCLGPAIHIANCSRNGAWTPWSSWALCSTSCGIGFQVRQRSCSNPAPRHGGRICVGKSREERFCNENTPCPVPIF

SEQ ID NO: 1455 - protein, 131 aa, Homo sapiens
GLGLLYLIFAAVEGVMRVIGGSNHLAVVLDDIILAVIDSIFVWFIFISLAQTMKTLRLRKNTVKFSLYRHFKNTLIFAVLASIVFMGWTTKTFRIAKCQSDWMERWVDDAFWSFLFSLILIVIMFLWRPSA

SEQ ID NO: 1456 - protein, 144 aa, Homo sapiens
EDGHGGWSSRCLVDHAEEGHREPWKRLCIWQRGGHEIRFAFYFPGHPLLSPQICLAPETPPRGCPPVSSLHFISLQRLPRDCQELFQVGERQSGLFEIQPQGSPPFLVNCKMTSGTFWTCRTDSRVFQNANPSNAAHSEDQPTP

SEQ ID NO: 1457 - protein, 54 aa, Homo sapiens
FFFVTRSHSVAQAECSGVFTAHRSLDLVGSSNYPALSLQSSWDHRHTWLIFAFL

SEQ ID NO: 1458 - protein, 209 aa, Homo sapiens
RVAISLLCAAIFISFMVQSAGKRWPTGVMLMVVVLFAFLYSWPIQALLPTYLKTDLAYNPHTVANVLSFSGFGAAVGCCVGGFLGDWLGTRKAYVCSLLASQLLIIPVFAIGGANVWVLGLLLFFQQMLGQGIAGILPKLIGGYFDTDQRAAGLGFTYNVGALGGALAPIIGALIAQRLDLGTALASLSFSLTFVVILRNRRPGKSLVR

SEQ ID NO: 1459 - protein, 124 aa, Homo sapiens
VLVALPDTVTSETVVTEVLGHRVTLPCLYSSWSHNSNSMCWGKDQCPYSGCKEALIRTDGMRVTSRKSAKYRLQGTIPRGDVSLTILNPSESDSGVYCCRIEVPGWFNDVKINVRLNLQRASTT

SEQ ID NO: 1460 - protein, 116 aa, Homo sapiens
  misc_feature (1)...(116): Xaa = any amino acid or nothing
HEDLSSLLTRGSGNQERERQLKKLISLRDWMLAELAFPVGVLATCAXSLLSCXYCVILFPCSCFFFHSPDALFSLLLLSCYFPSYCFFYYLFFSSSPLCLLLASSPFPLFILLASL

SEQ ID NO: 1461 - protein, 114 aa, Homo sapiens
  misc_feature (1)...(114): Xaa = any amino acid or nothing
FTSTMTKPFEKESEQPAXATLAFGAQTSTTADQCALKPDLSYLNNSSSSSSTPATSAGGGIFGSSTSSSNPPVATFVFGQSSDPVSSYGFVNTAESSTSDSLLFSQDSKLATTS

SEQ ID NO: 1462 - protein, 109 aa, Homo sapiens
  misc_feature (1)...(109): Xaa = any amino acid or nothing
TTSWTTSCTRSCTXSGASSGPGWTPRTTWWRSRRSSQRTCSRACSGAWSRTWXRSSXTSSSSCSTSCSSSSSRSCGRPGGPLGARGVHITSCLNSCMSSSTTSSTTSTF

SEQ ID NO: 1463 - protein, 96 aa, Homo sapiens
  misc_feature (1)...(96): Xaa = any amino acid or nothing
HEDIMTHYDRLVDEXALNAGKQRYEKMISGMYLGEIVRNILIDFTKKGFLLRGQISEMLKTRGIFLTFLLSNFLIVCVLLFYVSFYLFQSCINFVL

SEQ ID NO: 1464 - protein, 132 aa, Homo sapiens
  misc_feature (1)...(132): Xaa = any amino acid or nothing
KQQAVPEPHSSTTTPQEQEQNWYGQDLLNLQQRTKVHLPGHKTGPAVAKDTPEPVKKEFTVPATSQGPXSPFSEEPPLPPSNEEVPPTLPPXEPQSEDPXKNAXLKQMHAATTHWQQHQQHQVGCQYHGIMQ

SEQ ID NO: 1465 - protein, 96 aa, Homo sapiens
  misc_feature (1)...(96): Xaa = any amino acid or nothing
AGSYPSMVWSCHWGVTQKRRALXVYSFEEGGRRKCGQYWPLEKDSRIRFGFLTVSNLGVENMNHYKKSTLEILNPEVNPGFFFLTLWKQGENNYCN

SEQ ID NO: 1466 - protein, 110 aa, Homo sapiens
  misc_feature (1)...(110): Xaa = any amino acid or nothing
LPPQRPAXTDSYSTCNVSSGFLAGQSHNIHLQYWTKYQVWEWLQHFLDTNQLDANCIPFQEFDINGEHLCSMSLQEFTRAAGTAGQLLYSNLQHLKWNGDSLFLCLSLPC

SEQ ID NO: 1467 - protein, 127 aa, Homo sapiens
  misc_feature (1)...(127): Xaa = any amino acid or nothing
GTSGGPKRVLVTERFPWQNPLPVNRGQAQRVLGPSNSFQRVPLQAQKLVSSHKPGQNQKHKQLQATSVPHPVCMPLNNTQKSKQPLPSAPENNPEEELASDPNNEESLXRPWALEDFEIGRPLGKGK

SEQ ID NO: 1468 - protein, 127 aa, Homo sapiens
  misc_feature (1)...(127): Xaa = any amino acid or nothing
TYLWLXGNPPFYEKNDGGLFELILRAKDEFNSPYWDDMSDSAKHFIRPLTGRDPXKPFPCDQPLQHPWIEGHTCLDNNIHQAASEPINNNFAESKRNLAFLATGVVRHMRKLFMGANLEGPGPTVSH

SEQ ID NO: 1469 - protein, 132 aa, Homo sapiens
  misc_feature (1)...(132): Xaa = any amino acid or nothing
GTTSKHHXLARSLIRGPFDHDLKPNAATRDQLNIIVSYPPTKQLTYEEQDLGWKFRYYLTNQEKALTKFLKWVNWDLPQEAKQALELLGKWKPMDVKDSLELLSSHYTNPTVRRYAVARLRQADDEDLLMYL

SEQ ID NO: 1470 - protein, 331 aa, Homo sapiens
  misc_feature (1)...(331): Xaa = any amino acid or nothing
MGESPAVXGYFVLAGMNSAGLSFGGGAGKYLAEWMVHGYPSENVWELDLKRFGALQSSRTFLRHRVMEVMPLMYDLKVPHWDFQTGRQLRTSPLYDRLDAQGARWMEKHGFERPKYFVPPDKDLLALEQSKTFYKPDWFDIVESEVKCCKEAVCVIDMSSFTEFEITSTGDQALEVLQYLFSNDLDVPVGHIVHTGMLNEGGGYENDCSIARLNKRSFFMISPTDQQVHCWAWLKKHMPKDSNLLLEDVTWKYTALNLIGPRAVDVLSELSYAPMTPDHFPSLFCKEMSVGYANGIRVMSMTHTGEPGFMLYIPIEYRWGFTMLSTLVSNS

SEQ ID NO: 1471 - protein, 101 aa, Homo sapiens
  misc_feature (1)...(101): Xaa = any amino acid or nothing
AQFLLVGWDHILXLIVLXTNLTELGRTTCDQNWPNSPDVLNHGCFYMQCLSKDCTIGYVSREMLVAHTHTVEEHTGTHLQYVSWPDHSVPDDSSDFVEFEN

SEQ ID NO: 1472 - protein, 69 aa, Homo sapiens
  misc_feature (1)...(69): Xaa = any amino acid or nothing
LGLFSFVWTEVLEEPKDFSCETEDFKTLHCTWDPGTDTALGWSKQPSQSYTLFESXVGSGYIIDNFFLA

SEQ ID NO: 1473 - protein, 99 aa, Homo sapiens
  misc_feature (1)...(99): Xaa = any amino acid or nothing
DARTTWKPRNGSSGIWPGDGAKXPPAVEQAERGHVEMIEKLTFLNLHTSEKDKGGNTALHLAAKHGHSPAVQVLLAQWQDINEMNEKQQTPLHVAADRG

SEQ ID NO: 1474 - protein, 485 aa, Homo sapiens
  misc_feature (1)...(485): Xaa = any amino acid or nothing
MTFDDDDKNTYGVALVWKKFQTQSLRLSDLHRKSHLWRGIVSITLIEGRDLKAMDSNGLSDPYVKFRLGHQKYKSKIMPKTLNPQWREQFDFHLYEERGGVIDITAWDKDAGKRDDFIGRCQVDLSALSREQTHKLELQLEEGEGHLVLLVTLTASATVSISDLSVNSLEDQKEREEILKRYSPLRIFHNLKDVGFLQVKVIRAEGLMAADVTGKSDPFCVVELNNDRLLTHTVYKNLNPEWNKVFTLXVALVWKKFQTQSLRLSDLHRKSHLWRGIVSITLIEGRDLKAMDSNGLSDPYVKFRLGHQKYKSKIMPKTLNPQWREQFDFHLYEERGGVIDITAWDKDAGKRDDFIGRCQVDLSALSREQTHKLELQLEEGEGHLVLLVTLTASATVSISDLSVNSLEDQKEREEILKRYSPLRIFHNLKDVGFLQVKVIRAEGLMAADVTGKSDPFCVVELNNDRLLTHTVYKNLNPEWNKVFTL

SEQ ID NO: 1475 - protein, 151 aa, Homo sapiens
  misc_feature (1)...(151): Xaa = any amino acid or nothing
GGPAPNSRYAEPXKNSLAMTXAHADCENYVACGGLDNICSIYNLKTREGNVRVSRELPGHTGYLSCCRFLDDSQIVTSSGDTTCALWDIETAQQTTTFTGHSGDVMSLSLSPDMRTFVSGACDASSKLWDIRDGMCRQSFTGHVSDINAVS

SEQ ID NO: 1476 - protein, 58 aa, Homo sapiens
  misc_feature (1)...(58): Xaa = any amino acid or nothing
KSEKSCVSSLAHFGTSCQRDYDAMVKLVETLEMLPTCDLADQHNIKFHYAFALNRXER

SEQ ID NO: 1477 - protein, 165 aa, Homo sapiens
  misc_feature (1)...(165): Xaa = any amino acid or nothing
TESPLLVRPYLPYITKSELHAIMTAGFSTIAGSVLGAYISFGVPSSHLLTASVMSAPASLAAAKLFWPETEKPKITLKNAMKMESGDSGNLLXAATQGASSSISLVANIAVNLIAFLALLSFMNSALAWVGNMFDYPQLSFELICSYIFMPFSFMMGVEWPDSFM

SEQ ID NO: 1478 - protein, 67 aa, Homo sapiens
CCMNSKAQESVFKNVLCNPPALSEMPDVKAEDEVDFRASSISEEVAVGSIAATLKMKQGPMTQAINR

SEQ ID NO: 1479 - protein, 131 aa, Homo sapiens
  misc_feature (1)...(131): Xaa = any amino acid or nothing
PTRGALRYWIFGRFLCNIWAAVDVRCCTATIMGLCIISIDRYVGVSYPLRYPTIVTQRRGLMALLCVWALSLVIYIGPLLGWRHPAPEDETICQINEEPGYVLFSTPGSFYLPLAIMLVMNXRVYRVAKTE

SEQ ID NO: 1480 - protein, 154 aa, Homo sapiens
  misc_feature (1)...(154): Xaa = any amino acid or nothing
DPRVRTKIVNRKTTIYEIQDKTGSMAVVGKGECHNIPCEKGDKLRLFCFRLRKRENMSKLMSEMHSFIQIQKNTNQRSHDSRSMALPQEQSQHPKPSEASTTLPESHLKTPQMPPTTPSSSSFTKVTKDKDIKXLLFNLYSSVEILPEVLHLKT

SEQ ID NO: 1481 - protein, 201 aa, Homo sapiens
  misc_feature (1)...(201): Xaa = any amino acid or nothing
LAEGGDVFDCVLNGGPLPESRAKALFRQMVEAIRYCHGCGVAHRDLKCENALLQGFNLKLTDFGFAKVLPKSHRELSQTFCGSTAYAAPEVLQGIPHDSKKGDVWSMGVVLYVMLCASLPFDDTDIPKMLWQQQKGVSFPTHLSISADCQDLLKRLLEPDMILRPSIEEVSWHPWLASTXXKQWQVLSNKVGGESKPKKKK

SEQ ID NO: 1482 - protein, 67 aa, Homo sapiens
  misc_feature (1)...(67): Xaa = any amino acid or nothing
LVAKSLLYCGCLFFLLQLAKNVGNNSFNDIMEANLTSPSPKPTPSSDMXVFLIYXTYFGAWHVVDAQ

SEQ ID NO: 1483 - protein, 134 aa, Homo sapiens
  misc_feature (1)...(134): Xaa = any amino acid or nothing
RKHIKLLIQKLSDVPXECQNNQLXKLTEICEKEKKEFKKKMDDQRPEKITEAXSKDKSPMEEEKTEMIRSYIQEVGRYIKRLEEAQSKRLEKLREKHKEIRQPILDEKPKGEGSSSFLSETCHEDTSWFPNFTP

SEQ ID NO: 1484 - protein, 270 aa, Homo sapiens
  misc_feature (1)...(270): Xaa = any amino acid or nothing
PGSTHASARITIYXLXIILSNATEVDNNFSKPPPFFPAGAPPASSSSSSSSSSPPTVSTAPPLIPPPGFPPPPGAPPPSLIPTIESGHSSGYDSRSARAFPYGNVAFPHLPGSAPSWPSLVDTSKQWDYYARSSSSSSSSSSSSSSSPRDRDRERXRTRERERERDHSPTPSVFNSDEERYRYREYAERGYERHRASREKEERHRERRHREKEETRHKSSRSNSRRRHESEEGDSHRRHKHKKSKRSKEGKEAGSEPAPEQESTEATPAE

SEQ ID NO: 1485 - protein, 139 aa, Homo sapiens
  misc_feature (1)...(139): Xaa = any amino acid or nothing
PTRPVNSSQAFALVYYTLGALGGNLIAHMGLGYRYWAGIGVLQSCESALTHYRLVANHVASDISLTGGSVVQRIRLPDEVENPGMNSGMLQEDLIQYYQFLAEKGDVQAQVGLGQLHLHGGRGVXQNHQRAFDYFNLAA

SEQ ID NO: 1486 - protein, 171 aa, Homo sapiens
  misc_feature (1)...(171): Xaa = any amino acid or nothing
ANTSLSSAAVSAVSPPPCRTSTATTLPPPMPSFFCVFPSPSMSPSPSEFLSCIASVSRVHSLSSSSSGSSSTASSLNFSAIMGSSSATASWVLSTASTPPCPSALPSSPAQESXSLAASSSAWPVAGISPSGACTFPAGSASGAAKAPSPSWRCPSFRALFSLLDSSSLSL

SEQ ID NO: 1487 - protein, 999 aa, Homo sapiens
  misc_feature (1)...(999): Xaa = any amino acid or nothing
AHRDEIQRKFDALRNSCTVITDLEEQLNQLTEDNAELNNQNFYLSKQLDEASGANDEIVQLRSEVDHLRREITEREMQLTSQKQTMEALKTTCTMLEEQVMDLEALNDELLEKERQWEAWRSVLGDEKSQFECRVRELQRMLDTEKQSRARADQRITESRQVVELAVKEHKAEILALQQALKEQKLKAESLSDKLNDLEKKHAMLEMNARSLQQKLETERELKQRLLEEQAKLQQQMDLQKNHIFRLTQGLQEALDRADLLKTERSDLEYQLENIQVLYSHEKVKMEGTISQQTKLIDFLQAKMDQPAKKKKVPLQYNELKLALEKEKARCAELEEALQKTRIELRSAREEAAHRKATDHPHPSTPATARQQIAMSAIVRSPEHQPSAMSLLAPPSSRRKESSTPEEFSRRLKERMHHNIPHRFNVGLNMRATKCAVCLDTVHFGRQASKCLECQVMCHPKCSTCLPATCGLPAEYVTHFTEAFCRDKMNSPGLQTKEPSSSLHLEGWMKVPRNNKRGQQGWDRKYIVLEGSKVLIYDNEAREAGQRPVEEFELCLPDGDVSIHGAVGASELANTAKADVPYILKMESHPHTTCWPGRTLYLLAPSFPDKQRWVTALESVVAGGRVSREKAEADAKLLGNSLLKLEGDDRLDMNCTLPFSDQVVLVGTEEGLYALNVLKNSLTHVPGIGAVFQIYIIKDLEKLLMIAGEERALCLVDVKKVKQSLAQSHLPAQPDISPNIFEAVKGCHLFGAGKIENGLCICAAMPSKVVILRYNENLSKYCIRKEIETSEPCSCIHFTNYSILIGTNKFYEIDMKQYTLEEFLDKNDHSLAPAVFAASSNSFPVSIVQVNSAGQREEYLLCFHEFGVFVDSYGRRSRTDDLKWSRLPLAFAYREPYLFVTHFNSLEVIEIQARSSAGTPARAYLDIPNPRYLGPAISSGAIYLASSYQDKLRVICCKGNLVKESGTEHHRGPSTSRRXPASPLPQYQGQRAFLQGRRK

SEQ ID NO: 1488 - protein, 175 aa, Homo sapiens
  misc_feature (1)...(175): Xaa = any amino acid or nothing
GRPQGPAPGAGSPPESGPGLWAALGCSLVWVPLCCLGGAAGRLXARSGKSGLRRRRAHAGPPPGGPCNSCPXCSAPESGGRGPLPGPGTGGVCSCWTRGCQTTARTAAAAAAPGPAGRRPPGGAPQNGSCAASASQEAAAPPPMCPPGRRWAVASPPETRCPAAPGTRCRRLEAA

SEQ ID NO: 1489 - protein, 124 aa, Homo sapiens
  misc_feature (1)...(124): Xaa = any amino acid or nothing
LPSMSNCTSCFRLQSRTESXIRQAGHLLGRNEFIETKALGCAWFSLCYYLVLYFESSHKVDFVFIVXCFSTPPGAQMTIMSQACAERCNIMRLVDRRWAGIAKGVGTQKIIGRVHLGEQKALGL

SEQ ID NO: 1490 - protein, 124 aa, Homo sapiens
  misc_feature (1)...(124): Xaa = any amino acid or nothing
ERTNKFIKELIMDGKNLIAATKSLSVAQRKFAHSLRDFKFEFIGDAVTDDERCIDASLREFSNFLKNLEEQREIMVSXEGCKLISQLSRGKKIWIWKLVLVEVVKHLSLGTVVHCNGKMRFPEP

SEQ ID NO: 1491 - protein, 120 aa, Homo sapiens
  misc_feature (1)...(120): Xaa = any amino acid or nothing
LITNKVFVARELSCLDVHLDSTGSTAVVADQDKLELELVLKGSYEDTQTSFLGTASAFRFHYMAALXTELSGRLRSSKSNGWNGDNSTGYLTVPLRPLTIVKEVTMDVPAPNVRGLNWMG

SEQ ID NO: 1492 - protein, 135 aa, Homo sapiens
  misc_feature (1)...(135): Xaa = any amino acid or nothing
NNPSTLPRGSXPMSPRTTMGRRRQRRREHKSSLSLASSTVGPGGQIVHTETTEVVLCGDPLSGFGLQLQGGIFATETLSSPPLVCFIEPDSPAERCGLLQVGDRVLSINGIATEDGTMEEANQLLRDAALAHKVV

SEQ ID NO: 1493 - protein, 149 aa, Homo sapiens
  misc_feature (1)...(149): Xaa = any amino acid or nothing
QMLRNGGDQNTVPDYHFADRIRELLXPTEDQKNCIPXDTYLRPSALGNIVEEVTHPCSPGPCPANELCEVNRKGCTSGDPCLPYFCVQGCKLGQASDFIARQGTLIQVPSSAGEVECYKICSCGQSGLLENCMEMHCMDLPTDTSALVR

SEQ ID NO: 1494 - protein, 134 aa, Homo sapiens
  misc_feature (1)...(134): Xaa = any amino acid or nothing
PGRRFRPRLSQAGTDSGSXVFPDSFPSAPAEPLPYFLQEPQDAYIVKNKPVELRCRAFPATQIYFKCNGEWVSQNDHVTQEGLDEATGLRVREVHIEVSRQQVEELFGLEDYWCQCVAWSSAGTTKSRRAYVRI

SEQ ID NO: 1495 - protein, 141 aa, Homo sapiens
  misc_feature (1)...(141): Xaa = any amino acid or nothing
XVEEKHADTWRSXCLSDFFFHAAKXLCXEXNCGDAISLSVGDHFGKGNGLTWAEKFQCEGSETHLALCPIVQHPEDTCIHSREVGVVCSRYTDVRLVNGKSQCDGQVEINVLGHWGSLCDTHWDPEDARVLCRQLNCGTAL

SEQ ID NO: 1496 - protein, 80 aa, Homo sapiens
  misc_feature (1)...(80): Xaa = any amino acid or nothing
QHEGGDLRRRQLGEIQLTVRYVCLRAASACXSMAAETXHHVPASGADPYVRVYLLPERKWACRKKTSVKRKTLEPLFDET

SEQ ID NO: 1497 - protein, 124 aa, Homo sapiens
  misc_feature (1)...(124): Xaa = any amino acid or nothing
ERLVLTSEHCLVLTLFWPSWTYHTLLLSRQHVRRLPKLTHAEHDHLASIMNKLLTNYDNLFETSVTYSMGXHGAPTGSEAGANWNHXXLHAHYYPPLLRSDTVRKFMVGSQMLAQAQRDLTPEQ

SEQ ID NO: 1498 - protein, 187 aa, Homo sapiens
  misc_feature (1)...(187): Xaa = any amino acid or nothing
LLSALDDKGGTQPSASFSNAPTIVCVTACPAGIAHTYMAAEYLEKAGRKLGVNVYVEKQGANGIEGRLTADQLNSATACIFAAEVAIKESERFNGIPALSVPVAEPIRHAEALMQQALTLKRSDETRTVQQDTQPVKSVKTELKQALLSGISFAVPLIVAGGTQVAXAVXRQGISSLHDVQVRTWNS

SEQ ID NO: 1499 - protein, 195 aa, Homo sapiens
  misc_feature (1)...(195): Xaa = any amino acid or nothing
GLNSENALSNEAMERGWQCLRLFAERLQDIPPSQIRVVATATLRLAVNAGDFIAKAQEILGCPVQVISGEEEARLIYQGVAHTTGGADQRLVVDIGGASTELVTGTGAQTTXLFSLSMGCVTWLERYFADRNLGQENFDAAQKAAREVLRPVADELRYHSWKEVRGASVTVQALQEIMMAQGMDERITMEIWPVD

SEQ ID NO: 1500 - protein, 249 aa, Homo sapiens
GRVDFFHTDYRPLIRDSNNYVLDEQTQQAPHLMPPPFLVDVDGNPHPTKYQRLVPGRENSADEHLIPQLGYVATSDGEVIEQIISLQTNDNDERSPESSILDGMIRQLQQQQDQRMGADQDTIPRGLSNGEETPRRGFRRLSLDIQSPPNIGLRRSGQVEGVRQMHQNAPRSQIATERDLQAWKRRVVVPEVPLGIFRKLEDFRLEKGEEERNLYIIGRKRKTLQLSHKSDSVGLVSQSRPRTCRRKYP

SEQ ID NO: 1501 - protein, 214 aa, Homo sapiens
GKTIQIQTTMQNKYKTVQKQYKTIPKNKKAMEMQIKKQFQDTCKVQTKQYKALKNHQLEVTPKNEHKTILKTLKDEQTRKLAILAEQYEQSINEMMASQALRLDEAQEAECQALRLQLQQEMELLNAYQSKIKMQTEAQHERELQKLEQRVSLRRAHLEQKIEEELAALQKERSERIKNLLERQEREIETFDMESLRMGFGNLVTLDFPKEDYR

SEQ ID NO: 1502 - protein, 125 aa, Homo sapiens
LVRLLDTQRDGLQNYEALLGLTNLSGRSDKLRQKIFKERALPDIENYMFENHDQLRQAATECMCNMVLHKEVQERFLADGNDRLKLVVLLCGEDDDKVQNAAAGALAMLTAAHKKLCLKMTQVTT

SEQ ID NO: 1503 - protein, 79 aa, Homo sapiens
AYQSLRLEYLQIPPVSRAYTTACVLTSAAVQLELITPFQLYFIPELIFKHFQIWRLITNFLFFVPFGFNFLLYMIFLYT

SEQ ID NO: 1504 - protein, 117 aa, Homo sapiens
EMVEGGEGKMCINTEWGGFGDNGCIDDIRTRYDTEVDEGSLNPGKQRYEKMTSGMYLGEIVRQILIDLTKQGLLFRGQISERLRTRGIFETKFLSQIESDRLALLQVRRILQQLGLD

SEQ ID NO: 1505 - protein, 122 aa, Homo sapiens
TEIAKIKMEAKKKYEKELTMFQNDFEKACQAKSEALVLREKSTLERIHKHQEIETKEIYAQRQLLLKDMDLLRGREAELKQRVEAFESYQLELKDDYIIRTYRLIEDDRINIQISGHWQESP

SEQ ID NO: 1506 - protein, 90 aa, Homo sapiens
VTRKLPIFIVDAFTARAFRGSPAADCLLENELDEDMHQKIAREMNLSETAFIRKLHPTDNFAQRSCFGLIWFTPTTDLQILTSSILPSIL

SEQ ID NO: 1507 - protein, 93 aa, Homo sapiens
ESKVNNEKFRTKSPKPAESPQSATKQLDQPTAAYEYYDAGNHWCKDCNTICGTMFDFFTHMHNKKHTQGQFQKSSDFQKEELQQTFLPPERQG

SEQ ID NO: 1508 - protein, 141 aa, Homo sapiens
TTHRLNVTAEPPCTSMPIYWMPDVPHRCTTANTCPVDLTDYCAQNGFYCLVYGFLPYGSLEDRLHCQTQACPPLSWPQRLDILLGTARAIQFLHQDSPSLIHGDIKSSNVLLDERLTPKLGDFGLARFSRFAGSSPIQSSM

SEQ ID NO: 1509 - protein, 132 aa, Homo sapiens
HTSTARLLLHRGAGKEAVTSDGYTALHLAARNGHLATVKLLVEEKADVLARGPLNQTALHLAAAHGHSEVVEELVSADVIDLFDEQGLSALHLAAQGRHAQTVETLLRHGAHINLQSLKFQGGHGPAATLLR

SEQ ID NO: 1510 - protein, 138 aa, Homo sapiens
KFLKDLEKQYNKEEPHLSEIGSCFLQNQEGFAIYSEYCNNHPGACLELANLMKQGKYRHFFEACRLLQQMIDIAIDGFLLTPVQKICKYPLQLAELLKYTTQEHGDYSNIKAAYEAMKNVACLINERKRKLESIDKIA

SEQ ID NO: 1511 - protein, 255 aa, Homo sapiens
RETGSVSLSPSGLEGAESYAVSPILYSSPDVKELWLETLQGQRHSHTGVKSTPGQSAAILMKLRSSHNASKTLNANNMETLIECQSEGDIKEHPLLASCESEDSICQLIEVKKRKKVLSWPFLMRRLSPASDFSGALETDLKASLFDQPLSIICGDSDTLPRPIQDILTILCLKGPSTEGIFRRAANEKARKELKEELNSGDAVDLERLPVHLLAVVFKDFLRSIPRKLLSSDLFEEWMGALEMQDEEDRIEALK

SEQ ID NO: 1512 - protein, 120 aa, Homo sapiens
LLNSGLFSAPDGSNLEMRLTRGGNMCSGRIEIKFQGRWGTVCDDNFNIDHASVICRQLECGSAVSFSGSSNFGEGSGPIWFDDLICNGNESALWNCKHQGWGKHNCDHAEDAGVICSSKD

SEQ ID NO: 1513 - protein, 77 aa, Homo sapiens
AVDLSIDESSLTGETTPCSKVTAPQPAATNGDLASRSNIAFMGTLVRCGKAKGVVIGTGENSEFGDIINLSTFVVHS

SEQ ID NO: 1514 - protein, 104 aa, Homo sapiens
SLLCLFPGTSTVVCKPIVIETQLYVIVAQLFGGSHIYKRDSFANKFIKIQAIEILKIRKPNDIETFKIENNWYFVVADSSKAGFTTIYKWERETGFYSHQSFTR

SEQ ID NO: 1515 - protein, 134 aa, Homo sapiens
EDPEELGHFYDYPMALFSTFELFLTIIDGPANYNVDLPFMYSITYAAFAIIATLLMLNLLIAMMGDTHWRVAHERDELWRAQIVATTVMLERKLPRCLWPRSGICGREYGLGDRWILRVEDRQDLNRQRIQRYA

SEQ ID NO: 1516 - protein, 308 aa, Homo sapiens
CCQREGLGLKAVVQILLSHGRNGLPGEPASSQGLSAASSTPVFHLALQIDSAPDNIDWVEMLFNKNMVTERLQNVMVLEQCFSDSSSLYRFLTYSYLLAFNVWLLLAPVTLCYDWQVGSIPLVETIWDMRNLATIFLAVVMALLSLHCLAAFKRLEHKEVLVGLLFLVFPFIPASNLFFRVGFVVAERVLYMPSMGYCILFVHGLSKLCTWLNRCGATTLIVSTVLLLLLFSWKTVKQNEIWLSRESLFRSGVQTLPHNAKVHYNYANFLKDQGRNKEAIYHYRTALNNNKAWDYLCWRFRKTLTDLP

SEQ ID NO: 1517 - protein, 208 aa, Homo sapiens
AAASAASSLTVTLGRLASACSHSILRPSGPGAASLWSASRRFNSQSTSYLPGYVPKTSLSSPPWPEVVLPDPVEETRHHAEVVKKVNEMIVTGQYGRLFAVVHFASRQWKVTSEDLILIGNELDLACGERIRLEKVLLVGADNFTLLGKPLLGKDLVRVEATVIEKTESWPRIIMRFRKRKNFKKKRIVTTPQTVLRINSIEIAPCLL

SEQ ID NO: 1518 - protein, 121 aa, Homo sapiens
HLQVAARVFMPLQAVDSAPKPLKGQAQAPQRLQGAARVFMPLQAQVKAKASKPLQMQIKAPPRLRRAARVLMPLQAQVRAPRLLQVQSQVSKKQQAQTQTSEPQDLDQVPEEFQGQDQVLR

SEQ ID NO: 1519 - protein, 315 aa, Homo sapiens
QNLEDREVLNGVQTELLTSPRTKDTLSDMTRTVEISGEGGPLGIHVVPFFSSLSGRILGLFIRGIEDNSRSKREGLFHENECIVKINNVDLVDKTFAQAQDVFRQAMKSPSVLLHVLPPQNREQYEKSVIGSLNIFGNNDGVLKTKVPPPVHGKSGLKTANLTGTDSPETDASASLQQNKSPRVPRLGGKPSSPSLSPLMGFGSNKNAKKIKIDLKKGPEGLGFTVVTRDSSIHGPGPIFVKNILPKGAAIKDGRLQSGDRILEVNGRDVTGRTQEELVAMLRSTKQGETASLVIARQEGHFLPRELVMFRSQSH

SEQ ID NO: 1520 - protein, 121 aa, Homo sapiens
PVATHLTKILNSDEHAVVISSAKTLCETVKDFVAKVEKTYDKTLENAVVADAVASKCSVLNEKLEQLLQALHTDSQAAPVLPGLSPLIVEEDAVESSSEESLGESKEQLGDDVTKPSSQKA

SEQ ID NO: 1521 - protein, 179 aa, Homo sapiens
IPSRPWLGRITGLDPAGPLFNGKPHQDRLDPSDAQFVDVIHSDTDALGYKEPLGNIDFYPNGGLDQPGCPKTILGGFQYFKCDHQRSVYLYLSSLRESCTITAYPCDSYQDYRNGKCVSCGTSQKESCPLLGYYADNWKDHLRGKDPPMTKAFFDTAEESPFCMYHYFVDIITWNKNVR

SEQ ID NO: 1522 - protein, 119 aa, Homo sapiens
LIQHKSAVEYAQSHLSLVSMCKESHKCSEPKMEWKVKIRSDGTRYITKRPVRDRILKERALKIKEERSGLTTDDDTMSEMKMGRYWSKEERKQHLVRGKEQRRRREFMMRIRLKCLKES

SEQ ID NO: 1523 - protein, 129 aa, Homo sapiens
GTRILSMQIPFVGFQPIRTSEHMAAAGVFALLQAYAFLQYLRDRLTKQEFQTLFFLGVSLAAGAVFLSVIYLTYTGYIAPWSGRFYSLWDTGYAKIHIPIIASVSEHQPTTWVSFFFDLHILGCTFPAG

SEQ ID NO: 1524 - protein, 123 aa, Homo sapiens
LLMGPKAKKSGSKKKKVTKAERLKLLQEEEERRLKEEEEARLKYEKEEMERLEIQRIEKEKWHRLEAKDLERRNEELEELYLLERCFPEAEKLKQETKLLSQWKHYIQCDGSPDPSVAQEMNT

SEQ ID NO: 1525 - protein, 116 aa, Homo sapiens
AALTWSQPQEFWPMEMQPIVTDMVTVHWVAESSTVGWLCALFRVTHVGVGATGHGVVCGRRVLCGLPLPSPAPMPIMSLPEGESRKEREVQRLQFPYLEPGHELPATTLLAFLAAV

SEQ ID NO: 1526 - protein, 195 aa, Homo sapiens
EGSVNFKFGVLFAKDGQLTDDEMFSNEIGSEPFQKFLNLLGDTITLKGWTGYRGGLDTKNDTTGIHSVYTVYQGHEIMFHVSTMLPYSKENKQQVERKRHIGNDIVTIVFQEGEESSPAFKPSMIRSHFTHIFALVRYNQQNDNYRLKIFSEESVPLFGPPLPTPPVFTDHQEFRDFLLVKLINGEKATLETPCI

SEQ ID NO: 1527 - protein, 128 aa, Homo sapiens
GKGQVSLEGRPHRGPLCLGSWWPGSRVPGCCDGAWLAWACWVFGNDFPSPASAACSALLGCSVSTACLCVPLCSGSPLAPFRRTAALQEGLRRAVSVPLTLAETVASLWPALQELARCGNLACRSDLQ

SEQ ID NO: 1528 - protein, 136 aa, Homo sapiens
ALQSTLGAVWLGLLLNSLWKVAESKDQVFQPSTAASSEGAVVEIFCNHSVSNAYNFFWYLHFPGCAPRLLVKGSKPSQQGRYNMTYERFSSSLLILQVREADAAVYYCAVEVPNTDKLIFGTGTRLQVFPNIQNPD

SEQ ID NO: 1529 - protein, 104 aa, Homo sapiens
PTRSSTRPPSLFVHASAKGGEKEEGDDGHYLMRTESHTGLKKGGNANLVFMLKRNTEPKKGSYHFDLERLRAAHILFEREQEHLAPGGISMPLPPPLPLPACLG

SEQ ID NO: 1530 - protein, 120 aa, Homo sapiens
TSIKRAIETTDVTRSFGWDSSEAWQQHDVQELCRVMFDALEQKWKQTEQADLINELYQGKLKDYVRSLECGYEGWRIDTYLDIPLVIRPYGSSQAFASVVCTFHLTACVSLHRIHNSTVV

SEQ ID NO: 1531 - protein, 128 aa, Homo sapiens
YGLGAHFGRLFIQAGINENDFYDGAWCAGRNDLQQWIEVDARRLTRFTGVITQGRNSLWLSDWVTSYKVMVSNDSHTWVTGKNGSGDMIFEGNSEKEIPVLNELPVPMVARYIRINPQSWFDNGSICI

SEQ ID NO: 1532 - protein, 164 aa, Homo sapiens
RTKTDVYILNLAVADLLLLFTLPFWAVNAVHGWVLGKIMCKITSALYTLNFVSGMQFLACISIDRYVAVTKVPSQSGVGKPCWIICFCVWMAAILLSIPQLVFYTVNDNARCIPIFPRYLGTSMKALIQMLEICIGFVVPFLIMGVCYFITARTLMKMPNIKIS

SEQ ID NO: 1533 - protein, 185 aa, Homo sapiens
RQAWHEAFKVRKEILTVICCLLAFCIGLIFVQRSGNYFVTMFDDYSATLPLLIVVILENIAVCFVYGIDKFMEDLKDMLGFAPSRYYYYMWKYISPLMLLSLLIASVVNMGLSPPGYNAWIEDKASEEFLSYPTWGLAVCASLDVFAILPVPVAFIGRRFSLIDDGAGPFCSAAYTTTGCRTPYL

SEQ ID NO: 1534 - protein, 178 aa, Homo sapiens
HELTVAAADRGQPPQSSVVPVTVTVLDVNDNPPVFTRASYRVTVPEDTPVGAELLHVEASDADPGPHGLVRFTVSSGDPSGLFELDESSGTLRLAHALDCETQARHQLVVQAADPAGAHFALAPVTIEVQDVNDHGPAFPLNLLSTSVAENQPPGTLVTTLHAIDGDAGAFGRLRYHL

SEQ ID NO: 1535 - protein, 223 aa, Homo sapiens
LDKLLDRMENYNIFNEYILKQVAATYIKLGWPKNNFNGSLVQASYQHEELRREVIMLACSFGNKHCHQQASTLISDWISSNRNRIPLNVRDIVYCTGVSLLDEDVWEFIWMKFHSTTAVSEKKILLEALTCSDDRNLLNRLLNLSLNSEVVLDQDAIDVIIHVARNPHGRDLAWKFFRDKWKILNTRIRQKTLEFDFAEPLILAFPIILYTAIDNPPLVREHE

SEQ ID NO: 1536 - protein, 133 aa, Homo sapiens
GPMCDKHSAFAEKFHAGFIDYIVHPLWETWAHLALPDAQDILYTLEDNRNWVDSMIPQSPSPPLDEQNRDWQGLLENLHVELTLDEEDSEGPEKEGEGQTYFTSSKTLCGIVPQNTDSLGETGIHICAHDKSP

SEQ ID NO: 1537 - protein, 71 aa, Homo sapiens
FNCFRVASDSFLENSSLLIMILPLRNATQEFIIRPGAVAYTCNPSTLGGWGGWITRSGVRDQPGQHGGTPS

SEQ ID NO: 1538 - protein, 160 aa, Homo sapiens
AHLGGAWLTQRSLGSWAAPGPARAAKEVVACIPQNQKMNIWRMKTSKHLQLLSFVLGAVSPAVVVPYMMVLQENGYGVEEGIPTLLMAASSMDDILAITGFNTCLSIVFSSGCARSSGSRNSKSLRTPLGTICEGCDDSSIFSHLDHSSKWSSTYGHSGA

SEQ ID NO: 1539 - protein, 137 aa, Homo sapiens
EFLSSNQITQLPNTTFRPMPNLRSVDLSYNKLQALAPDLFHGLRKLTTLHMRANAIQFVPVRIFQDCRSLKFLDIGYNQLKSLARNSFAGLFKLTELHLEHNDLVKVNFAHFPRLISLHSLCLRRNKVAIVVSSLDW

SEQ ID NO: 1540 - protein, 112 aa, Homo sapiens
  misc_feature (1)...(112): Xaa = any amino acid or nothing
MRLNQNTLLLESFGXXRPYTSEHAPTYHQWMKADELLRWTTSEPLTLEHEYAMQRTWLEDAYECTFIVLDAEKRHAQPGATEESCMVGDVNLFLTDLEDLTLGEIEVLIAEP

SEQ ID NO: 1541 - protein, 156 aa, Homo sapiens
CLDRAAGIRHERNVIYINETHTRHRGWLARRLSYVLFIQERDVHKGMFATNVTENVLNSSRVQEAIAEVAAELNPDGSAQQQSKAVNKVKKKAKRILQEMVATVSPAMIRLTGWVLLKLFNSFFWNIQIHKGQLEMVKAATETNLPLLFLPVHRSH

SEQ ID NO: 1542 - protein, 44 aa, Homo sapiens
  misc_feature (1)...(44): Xaa = any amino acid or nothing
PSKXGGIRLLLTGTQLYGRFGSAIAPLGDLDRDGYNGEGREEPY

SEQ ID NO: 1543 - protein, 127 aa, Homo sapiens
EYFPNSIWRSLFSTMDLGDIGFYTYRILQALSYTHSKGIMHRDVKPLNILCNSPRNKVILADWGLAEFYHPMRKYSVHVATRYYKSPEILLDYEYYDYSLDIWAVGVILLELLTLKLHVFEGGDNEQ

SEQ ID NO: 1544 - protein, 101 aa, Homo sapiens
RKGVGKMPTSEGRPGQERSDWVTSYKVMGSNDSHTWVTVKNGSGDMIFEGNSEKEIPVLNELPVPMGARYIRINPQSWFDNGSICMRMEILGCPLPDPNNY

SEQ ID NO: 1545 - protein, 224 aa, Homo sapiens
MGVASDWTKRIEYQPGSGSMPLFPSIHLETCDGAVSSLQIVTELQTNYIGKGCDRETYSEKSLQKLCGASSGIIDLLPSPSAATNWTAGLLVDSSEMIFKFDGRQGAKIPDGIVPKNLTDQFTITMWMKHGPSPGVRAEKETILCYSDKTEMNRHHYALYVHNCRLVFLLRKDFDQADTFRPAEFHWKLDQQALAKVDGQPGKSITRQLQEMPVTIQGISLKPS

SEQ ID NO: 1546 - protein, 132 aa, Homo sapiens
FRGTPVSGLTNRDTLAVIRHFREPIRLKTVKPGKVINKDLRHYLSLQFQKGSIDHKLQQVIRDNLYLRTIPCTTRAPRDGEVPGVDYNFISVEQFKALEESGALLESGTYDGNFYGTPKPPAEPSPFQPDPV

SEQ ID NO: 1547 - protein, 184 aa, Homo sapiens
QLAIEIGVRALLFGVFVFTEFLDPFQRVIQPEEIWLYKNPLGQSDNIPTRLMFAISFLTPLAVICVVKIIRRTDKTEIKEAFLAVSLALALNGVCTNTIKLIVGRPRPDFFYRCFPDGVMNSEMHCTGDPDLVSEGRKSFPSIHSSFAFSGLGFTTFYLAGKLHCFTESGRGKSWRLCAAILPL

SEQ ID NO: 1548 - protein, 134 aa, Homo sapiens
TCTTVVVIPRMLVDFLSESKTISLPECATQMFFFLGFASNNCFIMAAMSYDRYTAIHNPLQYHTLMTRKICLQMMMASWMVGFLFSLCIIVTVFNLSLCDLNTIQHYFCDISPVVSLACNYTFYHEMAIFVLSA

SEQ ID NO: 1549 - protein, 125 aa, Homo sapiens
  misc_feature (1)...(125): Xaa = any amino acid or nothing
LTQMFFIHALSAIESTILLAMAFDRYVAICHPLRHAAVLNNTVTAQIGIVAVVRGSLFFFPLPLLIKRLAFCHSNVLSHSYCVHQDVMKLAYADTLPNVVYGLTAILLVMGXDRMFISLSYFLII

SEQ ID NO: 1550 - protein, 136 aa, Homo sapiens
PRVRPQQRKMSFFFKTELGEKLVTKFLFETDFSDDPMLPSPDQLKKKAPFTNKKLKAHQTPVDILKQKAHQLASMQVQAYNGGNANPRPANNEEEEDEEDEYDYDYESLSDDNILEDRPENKSCHDQLQFEYKEEM

SEQ ID NO: 1551 - protein, 170 aa, Homo sapiens
ISWEAQIAEIIQWVSDEKDARGYLQALASKMTEELEALRSSSLGSRTLDPLWKVRRSQKLDMSARLELQSALEAEIRAKQLVQEELRKVKDANLTLESKLKDSEAKNRELLEEMEILKKKMEEKFRADTGKLMLCDSALFEYKYFSNECFYFLFDLIVTLEAPTEFQIQY

SEQ ID NO: 1552 - protein, 334 aa, Homo sapiens
PSSYSSDELSPGEPLTSPPWAPLGAPERPEHLLNRVLERLAGGATRDSAASDILLDDIVLTHSLFLPTEKFLQELHQYFVRAGGMEGPEGLGRKQACLAMLLHFLDTYQGLLQEEEGAGHIIKDLYLLIMKDESLYQGLREDTLRLHQLVETVELKIPEENQPPSKQVKPLFRHFRRIDSCLQTRVAFRGSDEIFCRVYMPDHSYVTIRSRLSASVQDILGSVTEKLQYSEEPAGREDSLILVAVSSSGEKVLLQPTEDCVFTALGINSHLFACTRDSYEALVPLPEEIQVSPGDTEIHRVEPEDVANHLTAFHWELFRCVHELEFVDYVFHGE

SEQ ID NO: 1553 - protein, 134 aa, Homo sapiens
NNLNCAEPLFEQNNSLNVNFNTQKKTVWLIHGYRPVGSIPLWLQNFVRILLNEEDMNVIVVDWSRGATTFIYNRAVKNTRKVAVSLSVHIKNLLKHGASLDNFHFIGGSLGAHISGFVGKIFHGQLGRITGLDP

SEQ ID NO: 1554 - protein, 65 aa, Homo sapiens
SPSLLPQCLMSLSDLSLSPAPPSHLSPRCPSPQAGSRLGAMRRCAREMDATPMPPAPSCPSERVT

SEQ ID NO: 1555 - protein, 67 aa, Homo sapiens
AAVALRDISWQQPYPMDFYAGSSLGPWTVNHGQDRRPHAPGRPARGKVQEGSARPPSAVACEDCSCR

SEQ ID NO: 1556 - protein, 121 aa, Homo sapiens
DLSPDSREDHPQGHRRLLPKRPVRGSLMPGHTHHPCPVSSTTNDTPDQIWVSVGSLRMGTGGMGANASTSPRCWDLSSGNKKWIIQVPILASIVESRGGLLATGVGGMCACVPRNQPLTGT

SEQ ID NO: 1557 - protein, 43 aa, Homo sapiens
LWTLYRHKQQVQHNHSNRLSCRPSQEDRATHTIMVLDKENTLS

SEQ ID NO: 1558 - protein, 143 aa, Homo sapiens
  misc_feature (1)...(143): Xaa = any amino acid or nothing
VQGTGXXFIAFTEAMTHFPASPVWAGMFFLMLINLGLGSMIGTMAGITTPIIDTFKVPKEMFTGGCCVFAFLVGLLFVQRSGNYFVTMFDDYSATLPLTLIVILENIAVAWIYGTKKFMQELTEMLGFRPYRFYFYMWKFVSP

SEQ ID NO: 1559 - protein, 291 aa, Homo sapiens
EKERLLDEWFTLDEVPKGKLHLRLEWLTLMPNASNLDKVLTDIKADKDQANDGLSSALLILYLDSARNLPIRYKTNEPVWEENFTFFIHNPKRQDLEVEVRDEQHQCPLGNLKVPLSQLLTSEDMTVSQRFQLGNSGPNSTIKMKIALRVLHLEKRERPPDHQHSAQVKRPSVSKEGRKTSIKSHMSGSPGPGGSNTAPSTPVIGGSDKPGMEEKAQPPEAGPQGLHDLGRSSSSLLASPGHISVKEPTPSIASDISLPIATQELRQRLRQLENGTTLGQSPLGQIQLTIP

SEQ ID NO: 1560 - protein, 140 aa, Homo sapiens
REFAASDLEPFTPTDQPISPEAITQPSCIKRQRAAGNPGSLAATIDHKPCSAPLEPKIQASRNQRWGAVRAAESLTDIAEPASPQVHETPIDASQTQKVEPASKSRFTPELQAKVSHSRERALSTMDATPHHAQPQRGEG

SEQ ID NO: 1561 - protein, 254 aa, Homo sapiens
RRYSQKLIQHTACQLLRTYPAATRIDSSNPNPLMFWLHGIQLVALNYQTDDLPLHLNAAMFEANGGCGYVLKPPVLWDKNCPMYQKFSPLERDLDSMDPAVYSLTIVSGQNVCPSNSMGSPCIEVDVLGMPLDSCHFRTKPIHRNTLNPMWNEQFLFHVHFEDLVFLRFAVVENNSSAVTAQRIIPLKALKRGYRHLQLRNLHNEVLEISSLFINSRRMEENSSGNTMSASSMFNTEERKCLQTHRVTVHGVPG

SEQ ID NO: 1562 - protein, 137 aa, Homo sapiens
GIRGTTGHLGCPINDDPSLTLTVSWVMEDKPIYIGNGTKKEDDSLTIFAVAKRDHVSDTCGACTDLDHNLDKGYLTVLGEQATPTNRLGALPKGRANRTRDLELTYLAERIVRLTWIPGDANNRPITDYDCQIEEHQ

SEQ ID NO: 1563 - protein, 431 aa, Homo sapiens
MSSIGCLWVSRSSQIDGLTAEKSGPEKPHGTWLMPELHPKEQILELLVLEQFLSILPEELQIWVQQHNPESGEESVTLLEDLEREFDDPGQQVPASPQGPAVPWKDLTCLRASQESTDIHLQPLKTQLKSWKPCLSPKSDCENSETATKEGISEEKSQGLPQEPSFRGISEHESNLVWKQGSATGEKLRSPSQGGSFSQVIFTNKSLGKRDLYDEAERCLILTTDSIMCQKVPPEERPYRCDVCGHSFKQHSSLTQHQRIHTGEKPYKCNQCGKAFSLRSYLIIHQRIHSGEKAYECSECGKAFNQSSALIRHRKIHTGEKACKCNECGKAFSQSSYLIIHQRIHTGEKPYECNECGKTFSQSSKLIRHQRIHTGERPYECNECGKAFRQSSELITHQRIHSGEKPYECSECGKAFSLSSNLIRHQRIHSG

SEQ ID NO: 1564 - protein, 205 aa, Homo sapiens
GIPGSTISSSRNIFLEDDLAWQSLIHPDSSNTPLSTRLVSVQEDAGKSPARNRSASITNLSLDRSGSPMVPSYETSVSPQANRTYVRTETTEDERKILLDSVQLKDLWKKICHHSSGMEFQDHRYWLRTHPNCIVGKELVNWLIRNGHIATRAQAIAIGQAMVDGRWLDCVSHHDQLFRDEYALYRPLQVLFSVYCQLECSKLIL

SEQ ID NO: 1565 - protein, 976 aa, Homo sapiens
GPGVRSSQDGMADVFVHLRTAWPRCSFISGQHGPGRHGRRVCSSQDSMADVFVHLRTAWPTCSLISGQHGPGESVSYEDDDIPAPASLLHVNAAAPALTNPTAPVLCTAPNNTAQKEKVPSGMRQRPAGVRISSRTPDLTCAVSTHSTVPGVRISSCTPDLTCAVSIHSTVPSVCISSCTPDLTCAVSTHSTVPGVRISSCTPDLTCAVSTHSTVPGVRISSRTPDLTCAVSIHATVPGVRISSCTPDLTCAVSIHATVPGVRISSCTPDLTCAVSTHSTVPGVRISSRTPDLTCAVSIHSTVPGVRISSCTPDLTCAVSIHATVPGVRISSCTPDLTCAVSTHSTVPGVRISSRTPDLTCAVSIHATVPGVRISSRTPDLTCAVSIHATVPGVRISSCTPDLTCAVSIHATVPGVRISSCTPDLTCAVSIHATVPGVRISSRTPDLTCAVSIHATVPGVRISSCTPDLTCAVSTHSTVPGVRISSRTPDLTCAVSIHATVPGVRISSCTPDLTCAVSTHSTVPGVRISSRTPDLTCAVSIHATVPGVHISSCTPDLTCAVSTHSTVPGVRISSRTPDLTCAVSIHSTVPGVCISSRTPDLTCAVSIHSTVPSVHISSCTPDLTCAVSIHSTVPGVRISSRTPDLTCAVSTHSTVPGVHISSCTTDLTCAVSIHATVPGVHISSCTPDLTCAVSTHTTVPGVRISSRTPDLTCAVSIHSTVPGVRISSCTPDLTCAVSTHSTVPGVRISSRTPDLTCAVSTHLTVPGVRISSRTPDLTCAVSIHATVPGVHISSCTPDLTCAVSIHATVPGVRISSRTPDLTCAVSIHATVPGVHISSCTPDLTCAVSTHSTVPGVRISSRTPDLTCAVSIHSTVPGVHISSCTPDLTCAVSTHSTVPGVHISSCTPDLTCAVSTHSTVPGVHISSRTPDLTCAVSIHATVPSVHISSCTPDLTCAVSIHSTVPGLLTSVSQTSTG

SEQ ID NO: 1566 - protein, 138 aa, Homo sapiens
FRTKSYRKGSYRCIVSEWIAEQGNWQEIQEKAVEVATVVIQPTVLRAAVPKNVSVAEGKELDLTCNITTDRADDVRPEVTWSFSRMPDSTLPGSRVLARLDRDFLVHSSPHVALSHVDARSYHLLVRDVSKENSGYYY

SEQ ID NO: 1567 - protein, 153 aa, Homo sapiens
  misc_feature (1)...(153): Xaa = any amino acid or nothing
CRTLCEGPQRFEEYEYLGYKAGLYEAIADHYMQVLVCQHECVRELATRPGRLSPIENFLPLHYDYLQFAYYRVGEYVKALECAKAYLLCHPDDEDVLDNVDYYESLLDDSIDPASIEAREDLTMFVKRHKLESELIKSAAEGLGXSYTEPNYW

SEQ ID NO: 1568 - protein, 81 aa, Homo sapiens
AFSSPHPSPAPQFPECGFYGLYDKILLFKHDPTSANLLQLVRSSGDIQEGDLVEVVLSASATFEDLQIRPHALTVHSYRAP

SEQ ID NO: 1569 - protein, 142 aa, Homo sapiens
SSRLVLLAGAAALASGSQGDREPVYRDCVLQCEEQNCSGGALNHFRSRQPIYMSLAGWTCRDDCKYECMWVTVGLYLQEGHKVPQFHGKWPFSRFLFFQEPASAVASFLNGLASLVMLCRYRTFVPASSPMYHTCVAFAWVS

SEQ ID NO: 1570 - protein, 432 aa, Homo sapiens
MDGEAVRFCTDNQCVSLHPQEVDSVAMAPAAPKIPRLVQATPAFMAVTLVFSLVTLFVVDHHHFGREAEMRELIQTFKGHMENSSAWVVEIQMLKCRVDNVNSQLQVLGDHLGNTNADIQMVKGVLKDATTLSLQTQMLRSSLEGTNAEIQRLKEDLEKADALTFQTLNFLKSSLENTSIELHVLSRGLENANSEIQMLNASLETANTQAQLANSSLKNANAEIYVLRGHLDSVNDLRTQNQVLRNSLEGANAEIQGLKENLQNTNALNSQTQAFIKSSFDNTSAEIQFLRGHLERAGDEIHVLKRDLKMVTAQTQKANGRLDQTDTQIQVFKSEMENVNTLNAQIQVLNGHMKNASREIQTLKQGMKNASALTSQTQMLDSNLQKASAEIQRLRGDLENTKALTMEIQQEQSRLKTLHVVITSQEQLQRTQ

SEQ ID NO: 1571 - protein, 166 aa, Homo sapiens
RVRLNNDGLSPLMMAAKTGKIGIFQHIIRREVTDEDTRHLSRKFKDWAYGPVYSSLYDLSSLDTCGEEASVLEILVYNSKIENRHEMLAVEPINELLRDKWRKFGAVSFYINVVSYLCAMVIFTLTAYYQPLEGTPPYPYRTTVDYLRLAGEVITLFTGVLFFFTN

SEQ ID NO: 1572 - protein, 131 aa, Homo sapiens
DAHCQRKLAMQEFMEINERLTELHTQKQKLARHVRDKEEEVDLVMQKVESLRQELRRTERAKKELEVHTEALAAEASKDRKLREQSEHYSKQLENELEGLKQKQISYSPGVCSIEHQQEITKLKTDLEKKS

SEQ ID NO: 1573 - protein, 137 aa, Homo sapiens
NDPAIISNFSAAVVHTIVNETLESMTSLEVTKMVDERTDYLTKSLKEKTPPFSHCDQAVLQCSEASSNKDMFADRLSKSIIKHSIDKSKSVIPNIDKNAVYKESLPVSGEESQLTPEKSPKFPDSQNQLTHCSLSAA

SEQ ID NO: 1574 - protein, 133 aa, Homo sapiens
GASLCFISTAFTVLTFLIDSCRFSYPERPIIFLSMCYNIYSIAYIVRLTVGRERISCDFEEAAEPVLIQEGLKNTGCAIIFLLMYFFGMASSIWWVILTLTWFLAAGLKWGHEAIEMHSSYFHIAAWAIPAVK

SEQ ID NO: 1575 - protein, 241 aa, Homo sapiens
MSARKERREKGEEEGEGEKDGDEDEKEEEKEGLGEEEEKEAGKKKKKQEEKEKEKGAVYSRVARICKNDMGGSQRVLEKHWTSFLKARLNCSVPGDSFFYFDVLQSITDIIQINGIPTVVGVFTTQLNSIPGSAVCAFSMDDIEKVFKGRFKEQKTPDSVWTAVPEDKVPKPRPGCCAKHGLAEAYKTSIDFPDETLSFIKSHPLMDSAVPPIADEPWFTKTRVRYRLTAISVDHSAGPYH

SEQ ID NO: 1576 - protein, 148 aa, Homo sapiens
EGVLFVYGNYVGDVMNFEMAAEMAQEVAIPTRTVLTTDDISSSPIEDRDGRRGVAGNFFIFKVAGAACDRGMSLEACEAVTRKANRRTYTMGVALEPCSLPQTRRHNFEIGAEEMEIGMGIHGERGVIREKMMPADAIVDHIMDRIFS

SEQ ID NO: 1577 - protein, 397 aa, Homo sapiens
VLSDLCLFYYRDEKEEGILGSILLPSFQIALLTSEDHINRKYAFKAAHPNMRTYYFCTDTGKEMELWMKAMLDAALVQTEPVKRVDKITSENAPTKETNNIPNHRVLIKPEIQNNQKNKEMSKIEEKKALEAEKYGFQKDGQDRPLTKINSVKLNSLPSEYESGSACPAQTVHYRPINLSSSENKIVNVSLADLRGGNRPNTGPLYTEADRVIQRTNSMQQLEQWIKIQKGRGHEEETRGVISYQTLPRNMPSHRAQIMARYPEGYRTLPRNSKTRPESICSVTPSTHDKTLGPGAEEKRRSMRDDTMWQLYEWQQRQFYNKQSTLPRHSTLSSPKTMVNISDQTMHSIPTSPSHGSIAAYQGYSPQRTYRSEVSSPIQRGDVTIDRRHRAHHPKVK

SEQ ID NO: 1578 - protein, 108 aa, Homo sapiens
LPFLGLGSVLPQGMVMASPEMNPTICSVFEAHIVLLFHATTFRRGFQVTVLVGNVRQTAVVEKIHAKVRGTWPFISPEVRKEGGLPQTGRELLDPTMGIKPHLWWVAA

SEQ ID NO: 1579 - protein, 149 aa, Homo sapiens
DDKNAQGIKRHVKPTSGNAFTICKYPCGKSRECVAPNICKCKPGYIGSNCQTALCDPDCKNHGKCIKPNICQCLPGHGGATCDEEHCNPPCQHGGTCLAGNLCTCPYGFVGPRCETMVCNRHCENGGQCLTPDICQCKPGWYGPTCSTA

SEQ ID NO: 1580 - protein, 45 aa, Homo sapiens
AVTFSVVFAYVADITQEHERSMAYGLVCMFILYLLYLLRNAFFLR

SEQ ID NO: 1581 - protein, 61 aa, Homo sapiens
SGPYTDFTPWPTEEQKLLEQALKTYPVNPPERWEKIAEAVPGRTKKACIKRYKVADLRISK

SEQ ID NO: 1582 - protein, 130 aa, Homo sapiens
STVTGQPRRLLDTAGHQQPFLELKIRANEPGAGRARRRTPTCEPATPLCCRRDHYVNFQELGWRDWILLPEGYQLNYCSGQCPTHLAGSPGIAASFHSAVFSLLKANNPWPGRTSWCVPTARRPLSLLYL

SEQ ID NO: 1583 - protein, 73 aa, Homo sapiens
LLFSDEIIMAAPLRIADVTSGLIGGEDGRVYVYNGKETTLGDMTGKCKSWITPCPEEKVNVLQNSIPYWERIT

SEQ ID NO: 1584 - protein, 52 aa, Homo sapiens
PLTLCLPENNKPPQADAVPDKELTLPVDSTTLDGSKSSDDQKIISYLWEKTQ

SEQ ID NO: 1585 - protein, 298 aa, Homo sapiens
DVLEVYGTGVASTRHEMGTLDKHKELEDLVAKFLNVEAAMVFGMGFATNSMNIPALVGKGCLILRDEVNHTSLVLGARLLGATIGIFKHNYAQSLEKLLRDAVIYGQPRTRRAWKKILILVEGVYSMEGSIVHLPQIIALKKKYKAYLYIDEAHSIGAVGPTGRGVTEFFGLDPHEVDVLMGTFTKSFGASGGYIAGRKARILSPPACLVPNTGSHSLHRLTRDLQMNEAMVALVTDRLQGWNSGEGNWDRADKFGDLVDYLRVHSHSAVYASSMSPPIAEQIIRSLKLIMGLDGTTQ

SEQ ID NO: 1586 - protein, 130 aa, Homo sapiens
NTSSFPAQPSSPARPSLPHLSQHPSNPLLPLASADHPQCGRFLPLHEPEPLCPSPSLSYPTLVSSWSSPFSSHHGCPPGLYPFPTSPKTIQPPGLAQLKMLCIPPGRQQLRGAQSMPGHGALSPLLLPPA

SEQ ID NO: 1587 - protein, 132 aa, Homo sapiens
DLVCKISGFGRGPRDRSEAVYTTMSGRSPALWAAPETLQFGHFSSASDVWSFGIIMWEVMAFGERPYWDMSGQDVIKAVEDGFRLPPPRNCPNLMHRLMLDCWQKDPGERPRFSQIHSILSKMVQDPEPPNV

SEQ ID NO: 1588 - protein, 368 aa, Homo sapiens
WSPCSLTCGVGLQTRDVFCSHLLSREMNETVILADELCRQPKPSTVQACNRFNCPPAWYPAQWQPCSRTCGGGVQKREVLCKQRMADGSFLELPETFCSASKPACQQACKKDDCPSEWLLSDWTECSTSCGEGTQTRSAICRKMLKTGLSTVVNSTLCPPLPFSSSIRPCMLATCARPGRPSTKHSPHIAAARKVYIQTRRQRKLHFVGGGFAYLLPKTAVVLRCPARRVRKPLITWEKDGQHLISSTHVTVAPFGYLKIHRLKPSDAGVYTCSAGPAREHFVIKLIGGNRKLVARPLSPRSEEEVLAGRKGGPKEALQTHKHQNGIFSNGSKAEKRGLAANPGSRYDDLVSRLLEQGAPCSSSKKKN

SEQ ID NO: 1589 - protein, 226 aa, Homo sapiens
MKPDNILLDEHGHVHITDFNIAAMLPRETQITTMAGTKPYMAPEMFSSRKGAGYSFAVDWWSLGVTAYELLRGRRPYHIRSSTSSKEIVHTFETTVVTYPSAWSQEMVSLLKKLLEPNPDQRFSQLSDVQNFPYMNDINWDAVFQKRLIPGFIPNKGRLNCDPTFELEEMILESKPLHKKKKRLAKKEKDMRKCDSSQTCLLQEHLDSVQKEFIIINREKVNRDCI

SEQ ID NO: 1590 - protein, 128 aa, Homo sapiens
ELLDPTTPMRTKCIELLYAALTSSSTDQPKADLWQNFAREIEEHVFTLYSKNIKKYKTCIRSKVANLKNPRNSHLQQNLLSGTTSPREFAEMTVMEMANKELKQLRASYTESCIQEHYLPQVIDGTLY

SEQ ID NO: 1591 - protein, 129 aa, Homo sapiens
IRLTILRCVFMRLATICVLVFTLGSKITSCDDDTCDLCGYNQKLYPCWETQVGQEMYKLMIFDFIIILAVTLFVDFPRKLLVTYCSSCKLIQCWGQQEFAIPDNVLGIVYGQTICWIGAFFSPLLPAMY

SEQ ID NO: 1592 - protein, 135 aa, Homo sapiens
YFKNTTLLLVGVICVAAAVEKWNLHKRIALRMVLMAGAKPGMLLLCFMCCTTLLSMWLSNTSTTAMVMPIVEAVLQELVSAEDEQLVAGNSNTEEAEPISLDVKNSQPSVELIFVNEDILDFLMKSPLMISQACI

SEQ ID NO: 1593 - protein, 136 aa, Homo sapiens
CLAMIKGIQSSGKIIYFSSLFPYVVLICFLIRAFLLNGSIDGIRHMFTPKLEIMLEPKVWREAATQVFFALGLGFGGVIAFSSYNKRDNNCHFDAVLVSFINFFTSVLATLVVFAVLGFKANVINEKCITQNSETV

SEQ ID NO: 1594 - protein, 423 aa, Homo sapiens
MTTTLIGLLKTARLLRLVRVARKLDRYSEYGAAVLMLLMCIFALIAHWLACIWYAIGNVERPYLTDKIGWLDSLGQQIGKRYNDSDSSSGPSIKDKYVTALYFTFSSLTSVGFGNVSPNTNSEKIFSICVMLIGSLMYASIFGNVSAIIQRLYSGTARYHMQMLRVKEFIRFHQIPNPLRQRLEEYFQHAWTYTNGIDMNMVTNGTCSSCTSDDGHFILVSNHHQGGLIYSWNDAASMQRPFNHIKSSLLGSTSDSNLNKYSTINKIPQLTLNFSEVKTEKKNSSPPSSDKTIIAPKVKDRTHNVTEKVTQVLSLGADVLPEYKLQAPRINKFTILHYSPFKAVWDWLILLLVIYTAIFTPYSAAFLLNDREEQKRRECGYSCSPLNVVDLIVDIMFIIDILINFRTTYVNQNEEVVSDPASV

SEQ ID NO: 1595 - protein, 127 aa, Homo sapiens
NLTWWPLFRDVSFYIVDLIMLIIFFLDNVIMWWESLLLLTAYFCYVVFMKFNVQVEKWVKQMINRNKVVKVTAPEAQAKPSAARDKDEPTLPAKPRLQRGGSSASLHNSLMRNSIFQNKIHTLDPHV

SEQ ID NO: 1596 - protein, 102 aa, Homo sapiens
VLVLQMNYYQMLIIYYVLFFKVNEFLAFEGPILLDMRIKHLIKTNQLSQATALAKLCSDHPEIGIKGSFKQTYLVCLCTSSPNGKLIEEVSMFSFISNYFLS

SEQ ID NO: 1597 - protein, 87 aa, Homo sapiens
DAWVKNDIIFNQTERKQKISENLKHLASVRVVQKNLVFVVGLSQRLADPEVSPLVFFVILIFFVSLSYLEIIFDPAQLCDSSEHIIS

SEQ ID NO: 1598 - protein, 134 aa, Homo sapiens
DFTTLAAMMRTLFSLFGDVRSDVHRFSVTLFGAAIKSVKNPDKKSIENQVLDSLVPLLLYSQDENDAVAEESRQVLTICAQFLKWKLPREVYSKDPWHIKPTEAGTICRFFEKKCKGKINILEQTLMYSKNPKL

SEQ ID NO: 1599 - protein, 146 aa, Homo sapiens
FRRRRRRRERDCAAQGARRHCRHLAECKLVSFPIGIYKVLRNVSGQIHLITLANNELKSLTSKFMTTFSQLRELHLEGNFLHRLPSEVSALQHLKAIDLSRNQFQDFPEQLTALPALETINLEENEIVDVPVEKLAAMPALRSINL

SEQ ID NO: 1600 - protein, 145 aa, Homo sapiens
LLPGSLGVPILHSQPWDPSPQCPHRAPSTPRRLPPLGALSQALTFLSRAAKNHSQDPGKGTKPFPAAPAAPPPRSSLPAPLPMGLKDKGPQPAPPTIFNSPWHPATLPGALGPQLSQAAPSPIPPPCLMGISSCPDLKLTKSSTP

SEQ ID NO: 1601 - protein, 134 aa, Homo sapiens
FVFDLKLRVPGFAALLIHGASSVPGPETVRLRQKRKKKAPDHSSGRKEELVTTHTVDKLETKKPVGRVLCGLSGELLHSLLLPRRKTEKRALGSHRKAGFPEHPVAPEPLSNSCQISKEGREQVLSEIGAGDCL

SEQ ID NO: 1602 - protein, 140 aa, Homo sapiens
PQKSHSGAYQCFATRKAQTAQDFAIIALEDGTPRIVSSFSEKVVNPGEQFSLMCAAKGAPPPTVTWALDDEPIVRDGSHRTNQYTMSDGTTISHMNVTGPQIRDGGVYRCTARNLVGSAEYQARINVRGPPSIRAMRNIT

SEQ ID NO: 1603 - protein, 112 aa, Homo sapiens
ACCQWRRTLIPAKSTTVSCTISTPHHPFRGSYSFDDHITDSEALSRSSHVFTSHPRMLKRQPAIELPLGGEYSSDVPRPLSTQLSSSLLGYFSTLMTGAAFTNNIASSTIIL

SEQ ID NO: 1604 - protein, 46 aa, Homo sapiens
GQIHSQDDPPFIDQLGFGVAPGFQTFVACQEQRVRGPWEAGPGVGY

SEQ ID NO: 1605 - protein, 280 aa, Homo sapiens
LQNREDSSEGIRKKLVEAEELEEKHREAQVSAQHLEVHLKQKEQHYEEKIKVLDNQIKKDLADKETLENMMQRHEEEAHEKGKILSEQKAMINAMDSKIRSLEQRIVELSEANKLAANSSLFTQRNMKAQEEMISELRQQKFYLETQAGKLEAQNRKLEEQLEKISHQDHSDKNRLLELETRLREVSLEHEEQKLELKRQLTELQLSLQERESQLTALQAARAALESQLRQAKTELEETTAEAEEEIQALTVGLGSNIFRLLKASARMSVELALSILAHP

SEQ ID NO: 1606 - protein, 134 aa, Homo sapiens
FVGGPGADPPVAVMWDPRAARMDLTAYAELLKESGNQVLKNGNFSLAIRKYDEAIQILLQLYQWGVPPRDLAVLLCNKSNAFFSLGKWNEAFVAAKECLQWDPTYVKGYYRAGYSLLRLHQPYEAARMFFEGLR

SEQ ID NO: 1607 - protein, 132 aa, Homo sapiens
FVESASSRPPGCFSGDGRFWLVSEGSRRGWDFNPSFSFLDPRYSVGGDENIGTVTTLANILREFNPSLKGFSVGTGKETSPNAFLNQAVAGGRAEDLPVQARRLVDLMKNDTRIHFQEDWKIITLFIGGNDL

SEQ ID NO: 1608 - protein, 365 aa, Homo sapiens
SVGARQGEARDRIRRFFPKGDLEVLQAQVERIMTRKELLTVYSSEDGSEEFETIVLKALVKACGSSEASAYLDELRLAVAWNRVDIAQSELFRGDIQWRSFHLEASLMDALLNDRPEFVRLLISHGLSLGHFLTPMRLAQLYSAAPSNSLIRNLLDQASHSAGTKAPALKGGAAELRPPDVGHVLRMLLGKMCAPRYPSGGAWDPHPGQGFGESMYLLSDKATSPLSLDAGLGQAPWSDLLLWALLLNRAQMAMYFWEMGSNAVSSALGACLLLRVMARLEPDAEEAARRKDLAFKFEGMGVDLFGECYRSSEVRAARLLLRRCPLWGDATCLQLAMQADARAFFAQDGVQSLPTQKWWGDMARR

SEQ ID NO: 1609 - protein, 134 aa, Homo sapiens
VYLGAGPGLFFSNEGAKEGEKANIPKLMLPRGGFSQREMVTGERSPSPEEEEEEEEEGFGERASCRRGLFRVRLTRVGLAAPSKASRGQEGDAAPKSPVREKSPKFRFPRVSLSPKARSGSGDQEEGGLRVRLP

SEQ ID NO: 1610 - protein, 159 aa, Homo sapiens
LLGGDLRYHLQQNVHFTEGTVKLYICELALALEYLQRYHIIHRDIKPDNILLDEHGHVHITDFNIATVVKGAERASSMAGTKPYMAPEVFQVYMDRGPGYSYPVDWWSLGITAYELLRGWRPYEIHSVTPIDEILNMFKVERVHYSSTWCKGMVALLRK

SEQ ID NO: 1611 - protein, 181 aa, Homo sapiens
LTITDFILVLYRYYRSPLVQIYEIEQHKIETWREIYLQGCFKPLVSISPNDSLFEAVYTLIKNRIHRLPVLDPVSGNVLHILTHKRLLKFLHIFGSLLPRPSFLYRTIQDLGIGTFRDLAVVLETAPILTALDIFVDRRVSALAVVNECGTHPQDERLGLGWGLGEPGSEERLFPAAITSR

SEQ ID NO: 1612 - protein, 142 aa, Homo sapiens
GPEFPGSAKLVFLDLSYNNLTQLGAGAFRSAGRLVKLSLANNNLVGVHEDAFETLESLQVLELNDNNLRSLSVAALAALPALRSLRLDGNPWLCDCDFAHLFSWIQENASKLPKGLDEIQCSLPMESRRISLRACRRPASRV

SEQ ID NO: 1613 - protein, 114 aa, Homo sapiens
PARISGVDPPVRKATKGGENCSFEDNKNWQFLWGLNGNFNFFKEPWGGRNNHAKGFRTTWARSSSQNNRTFQNNRNFLRLQRDSQKKGQFARLISPLVNLPQSPGGLEFQYQAT

SEQ ID NO: 1614 - protein, 81 aa, Homo sapiens
RAMLKCLREGQPPPSYNWTRLDGPLPSGVRVDGDTLGFPPLTTEHSGIYVRHDTNEFSSRDSHDTVDVLDPPEDSGKQVDL

SEQ ID NO: 1615 - protein, 129 aa, Homo sapiens
AAGDAPLRSLEQANRTRFPFFSDVKGDHRLVLAAVETTVLVLIFAVSLLGNVCALVLVARRRRRGATACLVLNLFCADLLFISAIPLVLAVRWTEAWLLGPVACHLLFYVMTLSGSVTILTLAAVSLER

SEQ ID NO: 1616 - protein, 64 aa, Homo sapiens
AFREVGGYWGLLCEHLYAIPSKTSEGNWTAKLQGYLPLQDAFHIFQDPLTGDLPWPELILGLPV

SEQ ID NO: 1617 - protein, 93 aa, Homo sapiens
ASRLEKQNSTPESDYDNTPNDMEPDGMGYMHRTSVPGEGLPRARDLAGLGQQKQFTTHTPFLYFQTHKGLKDSSIRSEVTCLGISQCWRKGFF

SEQ ID NO: 1618 - protein, 135 aa, Homo sapiens
IACTFCGQDEWSPERSTRCFRRRSRFLAWGEPAVLLLLLLLSLALGLVLAALGLFVHHRDSPLVQASGGPLACFGLVCLGLVCLSVLLFPGQPSPARCLAQQPLSHLPLTGCLSTLFLQAAEIFVESELPLSWAE

SEQ ID NO: 1619 - protein, 79 aa, Homo sapiens
TRPAEKIQYLVLFFVMSHPSQAYDKLSLSDHLLIAVLNLLRREVSEHGRHLQQYFNLFVMYANLSKNLSFSEFCFDVSY

SEQ ID NO: 1620 - protein, 162 aa, Homo sapiens
ELQSQQACTHTKETEQLRSQLQTLKQQHQQAVEQIAKAEETHSSLSQELQARLQTVTREKEELLQLSIERGKVLQNKQAEICQLEEKLEIANEDRKHALERFEQEAVAVDSNLRVRELQRKVDGIQKAYDELRLQSEAFKKHSLDLLSKERELNGKLRHLSP

SEQ ID NO: 1621 - protein, 189 aa, Homo sapiens
KEKRVTVQLPTESIQKNQEDKLKMVPRKQREFSGSDRGKLPGSEEKNQGPSMIGRKEERLITERKHEHLKNKSAPKVVKQKVIDAHLDSQTQNFQQTQIQTAESKAEHKKLPQPYNSLQEEKCLEVKGIQEKQVFSNTKDSKQEITQNKSFFSSVKESQRDDGKGALNIVEFLRKREELHQILSTVKQP

SEQ ID NO: 1622 - protein, 172 aa, Homo sapiens
  misc_feature (1)...(172): Xaa = any amino acid or nothing
KCMQGKYAGAMESEPCVCTEADFDCDYGYERHSNGQCLPAFWFNPSSLSKDCSLGQSYLNSTGYRKVVSNNCTDGVREQYTAKPQKCPGKAPRGLRIVTADGKLTAEQGHNVTLMVQLEEGDVQRTLIQVDFGDGIAVSYVNLSSMEDGIXHVYQNXGIXRXTVQVDNSLGS

SEQ ID NO: 1623 - protein, 108 aa, Homo sapiens
HPSRSNVGPRQLTVWNTSNLSHDNRRKYIFSDEEGQNQLGIRIHQDIPLPPRRRELPALRTTNGKADSLNVSRNSVMQELSELEKQIQVIRQELQLAVSRKTELEEYH

SEQ ID NO: 1624 - protein, 51 aa, Homo sapiens
ILWLYFETGTWVYPVFAKLSLLGLAALFSLREIFIARNGVVGETLTHCKRV

SEQ ID NO: 1625 - protein, 38 aa, Homo sapiens
GSLATCQLSEPLLWFILRVLDTSDALKAFHDMGKIIFQ

SEQ ID NO: 1626 - protein, 75 aa, Homo sapiens
AGRSLHGAGDRAWVGISPTDWSPKVVELCKKYQQQTVVAIDLAGDETIPGSSLLPGHVQAYQVGPVRRNGEAGPG

SEQ ID NO: 1627 - protein, 136 aa, Homo sapiens
  misc_feature (1)...(136): Xaa = any amino acid or nothing
VLQERLDNFQRKCIQLASSTEGKVDKLLMRNLFISYLHTPKHKQHEVLQAMGSILGITGEEMEPLFQEEHGTATRWMTGWLEGGSKSVPKTPLGLNQQPALNGSFSELFVKFLKTESLSSTLPTXLPPHNSPGKIK

SEQ ID NO: 1628 - protein, 73 aa, Homo sapiens
GLSGPSCSCPHSPLPTIISRAQLETALKWRNYEVKLRLLLHLEELQMEHDIRHYDLESVPMTWDPVDQNPRLV

SEQ ID NO: 1629 - protein, 114 aa, Homo sapiens
  misc_feature (1)...(114): Xaa = any amino acid or nothing
PLIPANLPAHSNPLQPLPSLPHPFLPATHKFPTTPPTFSSVPPPLPSLSSILHHSPLHSELNPHLQSCRLPSRPSVSRELPPQSGPASSVPLAPTPLPDSVPSQRHPTXPPPAS

SEQ ID NO: 1630 - protein, 76 aa, Homo sapiens
PSMVWSYHWGVKQKRLALCVFSFEEGGRRKCGQYWPLEKDSRIRFGFLTVTNLTGAVGEPGVAFQCDGQRRREPTC

SEQ ID NO: 1631 - protein, 99 aa, Homo sapiens
KMGTAVWVPKEKEKRDKASQEGGDVLGARQDCTPSLKSLVATGNLLDLEETAKAPLSTVSANTTNMDEVPRPQALSGSSVVWVSGCVASRSVILSLTSG

SEQ ID NO: 1632 - protein, 104 aa, Homo sapiens
  misc_feature (1)...(104): Xaa = any amino acid or nothing
KLPXDKYELEPSPLTQYILERKSPHTCWQVFVTSSGKYNELGYPFGYLKASTTLTCVNLFVMPYNYPVLLPLLDDLFKVHKLKPNLKWRQAFDSYLKTLPPYYL

SEQ ID NO: 1633 - protein, 105 aa, Homo sapiens
VSPALSLTPTIFSYSPSPGLSPFTSSSCFSFNPEEMKHYLHSQACSVFNYHLSPRTFPRYPGLMVPPLQCQMHPEESTQFSIKLQPPPVGRKNRERVESSEESAP

SEQ ID NO: 1634 - protein, 127 aa, Homo sapiens
KTLPRTLLDILADGTILKVGVGCSEDASKLLQDYGLVVRGCLDLRYLAMRQRNNLLCNGLSLKSLAETVLNFPLDKSLLLRCSNWDAETLTEDQVIYAARDAQISVALFLHLLGYPFSRNSPGEKKR

SEQ ID NO: 1635 - protein, 83 aa, Homo sapiens
PIRPYYSYSGLDRDCSWLPLAKAWLPDVMILVCDRVSEDGINRQQAQEWCIKHGFELVELSPEELPEEDGKCLCVRRKYGTYI

SEQ ID NO: 1636 - protein, 27 aa, Homo sapiens
TAEDVLTVAYEHGVNLFDTAEVYAAGK

SEQ ID NO: 1637 - protein, 142 aa, Homo sapiens
FVAEVRREWAKYMEVHEKASFTNSELHRAMNLHVGNLRLLSGPLDQVRAALPTPALSPKDKAVLQNLKRILAKVQEMRDQRVSLEQQLRELIQKDDITGSLVTTDHSQMKKLFEEQLKKYDQLKVYLEQNLAAQDRVLCALT

SEQ ID NO: 1638 - protein, 156 aa, Homo sapiens
FVNLGILTCIECSGIHREMGAHISRIQSLELDKLGTSELLPAKNVGNNSFNDIMEANLPSPSPKPTPSSDMTVRKEYITAKYVDHRFSRKTCSTSSAKLNELLEAIKSRDLLALIQVYAEGVELMEPLLEPGQELAETALHLAVRTADQTSLHLVE

SEQ ID NO: 1639 - protein, 151 aa, Homo sapiens
FVASGGPATARMSDSQFFCVAEERSGHCAVVDGNFLYVWGGYVSIEDNEVYLPNDEIWTYDIDSGLWRMHLMEGELPASMSGSCGACINGKLYIFGGYDDKGYSNRLYFVNLRTRDETYIWEKITDFEGQPPTPRDKLSCWVYKDRLIYFG

SEQ ID NO: 1640 - protein, 126 aa, Homo sapiens
FRQGQLYKVFLHGSQGQVYHSQQVGPPGSAISPDLLLDSSGSHLYVLTAHQVDRIPVAACPQFPDCASCLQAQDPLCGWCVLQGRCTRKGQCGRAGQLNQWLWSYEEDSHCLHIQSLLPGHHPRQE

SEQ ID NO: 1641 - protein, 128 aa, Homo sapiens
FRYMPNNRQQLLRKRHIGNDIVTIVFQEPGALPFTPKSIRSHFQHVFVIVKVHNPCTENVCYSVGVSRSKDVPPFGPPIPKGVTFPKSAVFRDFLLAKVINAENAAHKSEKFRAMATRTRQEYLKDLA

SEQ ID NO: 1642 - protein, 61 aa, Homo sapiens
RPTRPPPATTQSPESTMDTSLKKEKSAILDLYIPPPPAVPYSPRYVAVHCHGMLVSCWCHL

SEQ ID NO: 1643 - protein, 142 aa, Homo sapiens
REKEEEVEEEEDKVVKETEKEAEQEKEEDSLGAGTHPDAAIPSGERTCGSEGSRSVLDLVNYFLSPEKLTAENRYYCESCASLQDAEKVVELSQGPCYLILTLLRFSFDLRTMRRRKILDDVSIPLLLRLPLAGGRGQAYDL

SEQ ID NO: 1644 - protein, 45 aa, Homo sapiens
QLCCFCFRQTTLIVYILSFIGMVIFTFTLDLRYIIIVFVTGGVLG

SEQ ID NO: 1645 - protein, 105 aa, Homo sapiens
LASSQHGILNNLSLLFSICKTCIRTMDHHCPRANNCVGEQNHRFFCALHCKSKHFCIEFTLNTNFFNCFLPGAEKSTIDAPFSLQPFLQDSKYNTALSLSESISQ

SEQ ID NO: 1646 - protein, 51 aa, Homo sapiens
SQYSHSLDYHLLQVTKNPFTLGDSSNPGQTERLQEFSQKMDQVRGHWPVST

SEQ ID NO: 1647 - protein, 139 aa, Homo sapiens
  misc_feature (1)...(139): Xaa = any amino acid or nothing
SPXTLXLDTFILLGIQDNILVLILATPPFMAGGKLYSTMGRFLRDRKNPACREMAVVLLANLAQGDSLAARAIAVQKGSIGHLLGFLEDSLAATQIQQSQASLLHMHNPPFEPTSVDMMRRACRALLALAKVDDNHSEF

SEQ ID NO: 1648 - protein, 45 aa, Homo sapiens
FWIYFPSFFMTGYLPLGFEFAVEITYPESEGTSSGLLNASAQVNL

SEQ ID NO: 1649 - protein, 164 aa, Homo sapiens
KIKAKNLTNYDLCSIFLGTSTLLVWVGVIRYLGYFQAYNVLILTMQASLPKVLRFCACAGMIYLGYTFCGWIVLGPYHDKFENLNTVAECLFSLVNGDDMFATFAQIQQKSILVWLFSRLYLYSFISLFIYMILSLFIALITDSYDTIKKFQQNGFPETDLQEF

SEQ ID NO: 1650 - protein, 148 aa, Homo sapiens
PVWWNSLNGASEVTFSVHVKDGGSFPKTDSTTVTVRFVNKADFPKVRAKEQTFMFPENQPVSSLVTTITGSSLRGEPMSYYIASGNLGNTFQIDQLTGQVSISQPLDFEKIQKYVVWIEARDGGVPPFSSYEKLDITVLDVNDNAPIF

SEQ ID NO: 1651 - protein, 90 aa, Homo sapiens
THFICLPLGYCFPLLDKDLQLPSGFNCNFDFLEEPCGWMYDHAKWLRTTWASSSSPNDRTFPGKPAVSEDMKELRPACSTYFNPRFPYKL

SEQ ID NO: 1652 - protein, 137 aa, Homo sapiens
GPQMLCKKIYFIWVTRSQCQFEWLADIMQEVEENDHQDLVSVHIYVTQLAEKFDLRTTMLYICERHFQKVLNRSLFTGLRSITHFGRPPFEPFFNSLQEVHPQVRKIGVFSCGPPGMTKNVEKACQLVNRQDRAHFM

SEQ ID NO: 1653 - protein, 54 aa, Homo sapiens
KLNRWLCFFYSWSFGILLYEMVTLGAPPYPEVPPTSILEHLQRRKIMKRPSSCS

SEQ ID NO: 1654 - protein, 58 aa, Homo sapiens
PGVPSQALRKAESLKKCLSVMEAKVKAQTAPNKDVQREIADLGEVGAASLPPSSGPGA

SEQ ID NO: 1655 - protein, 101 aa, Homo sapiens
GMGYLHAKGILHKDLKSKNVFYDNGKVVITDFGLFSISGVLQAGRREDKLRIQNGWLCHLAPEIIRQLSPDTEEDKLPFSKHSDVFALGTIWYELHAREWP

SEQ ID NO: 1656 - protein, 109 aa, Homo sapiens
VRWNSCVNCSCAFGNGASLSTSLGESSGCLWEIGKWLSCSLLSFPSPLAVLIITFCIVTVLGREALTKGALWAVFLLAGSALLCAEVTGVIWRQPESKTKLSFKVSSSA

SEQ ID NO: 1657 - protein, 136 aa, Homo sapiens
NYLCIAKNSAGSAMGKTRLVVQVPPVIENGLPDLSTTEGSHAFLPCKARGSPEPNITWDKDGQPVSGAEGKFTIQPSGELLVKNLEGQDAGTYTCTAENAVGRARRRVHLTILVLPVFTTLPGDRSLRLGDRLWLR

SEQ ID NO: 1658 - protein, 135 aa, Homo sapiens
PTRPPRVRFDNEFDAESQRKRTTSVSKMERMDSSLPEEEEDEDKEAINGSGNAENRERHSESSDWMKTVPSYNQTNSSMDFRNYMMRDETLEPLPKNWEMAYTDTGMIYFIDHNTKTTTWLDPRLCKKAKAPEDC

SEQ ID NO: 1659 - protein, 59 aa, Homo sapiens
QDFLTLTLTEPTGLLYVGAREALFAFSMEALELQGAVRGGAVGGSRACQRARPRGAVLG

SEQ ID NO: 1660 - protein, 139 aa, Homo sapiens
QDMMERAIIDTFVGHDVVEPGSYVQMFPYPCYTRDDFLFVIEHMMPLCMVISWVYSVAMTIQHIVAEKEHRLKEVMKTMGLNNAVHWVAWFITGFVQLSISVTALTAILKYGQVLMHSHVVIIWLFLAVYAVATIMFCF

SEQ ID NO: 1661 - protein, 154 aa, Homo sapiens
MKPQMPGLGAPNGYGPGRGRAGVPGGPERRPWVPHLLPFSSPGYLGVMKAQKPGAGEGMKPQKPGLRGTLKPQKSGHGHENGPWPGPCNARVAPMLLPRLPTPGVPSDKEGGWGLKSQPPSAVQNGKLPGHQPPNGYGPGAEPGFNGGLEPQKI

SEQ ID NO: 1662 - protein, 134 aa, Homo sapiens
WLAQEWSPCTVTCGQGLRYRVVLCIDHRGMHTGGCSPKTKPHIKEECIVPTPCYKPKEKLPVEAKLPWFKQAQELEEGAAVSEEPSFIPEAWSACTVTCGVGTQVRIVRCQVLLSFSQSVADLPIDECEGPKPA

SEQ ID NO: 1663 - protein, 143 aa, Homo sapiens
VVADNCRQGYLDALRFLERRGLTKEPVLWTLVSKEPPAPADGNWDAGCDQRRKGGLSLNWKVPHVQVKDVPNFEQLSPELEAALKKACTRDPSRWARFWHSGPGQVLTYLLLPCTLPFEYIYFRSRRLVVWLPDVPADLWWMQ

SEQ ID NO: 1664 - protein, 130 aa, Homo sapiens
  misc_feature (1)...(130): Xaa = any amino acid or nothing
LDXSHNALQRLRPGWLAPLFQLRALHLDHNELDALGRGVFVNASGLRLLDLSSNTLRALGRHDLDGLGALEKLLLFNNRLVHLDEHAFHGLRALSHLYLGCNELASFSFDHLHGLSATHLLTLDLSSNRM

SEQ ID NO: 1665 - protein, 175 aa, Homo sapiens
ITVSTHASGSPFGLEPQSGWLWVRAALDREAQELYILKVMAVSGSKAELGQQTGTATVRVSILNQNEHSPRLSEDPTFLAVAENQPPGTSVGRVFATDRDSGPNGRLTYSLQQLSEDSKAFRIHPQTGEVTTLQTLDREQQSSYQLLVQVQDGGSPPRSTTGTVHVAVLDLNDNT

SEQ ID NO: 1666 - protein, 133 aa, Homo sapiens
ELVVELVSAGKSGPERNTYEVQVVTGNVPKAGTDANVYLTIYGEEYGDTGERPLKKSDKSNKFEQGQTDTFTIYAIDLGALTKIRIRHDNTGNRAGWFLDRIDITDMNNEITYYFPCQRWLAVEEDDGQLSRE

SEQ ID NO: 1667 - protein, 146 aa, Homo sapiens
VLNCQGRPTRPVRINGDGQEVLYLAESDNVRLGCPYVLDPDDYGPNGLDIEWMQVNSNPAHHRENVFLSYQDKRINHGSLPHLQHRVRFAASDPSQYDASINLMNLQVSDTATYECRVKKTTMATRKVIVTVQARPAVPMCWTEGQ

SEQ ID NO: 1668 - protein, 98 aa, Homo sapiens
LPEKEFPIIRKSSSLKVTKCLFTEQPKPIIILRFAENYDARLLRIDIANTLREQVQELFNKTYGKQRRTPGEGHVAAVDREVAGFPVPAEGISGETIH

SEQ ID NO: 1669 - protein, 110 aa, Homo sapiens
GFFAYTYGRLVVVEDLHSGAQQHWSGHSAEISTLALSHSAQVLASASGRSSTTAHCQIRVWDVSGGLCQHLIFPHSTTVLALAFSPDDRLLVTLGDHDGRTLALWGTGHL

SEQ ID NO: 1670 - protein, 124 aa, Homo sapiens
IDESTGLIITVNYLDYETKTSYMMNVSATDQAPPFNQGFCSVYITLLNELDEAVQFSNASYEAAILENLALGTEIVRVQAYSIDNLNQITYRFDAYTSTQAKALFKIDAITVRGWGQGAPFFPI

SEQ ID NO: 1671 - protein, 126 aa, Homo sapiens
  misc_feature (1)...(126): Xaa = any amino acid or nothing
RIPRGKACXTVLGRSTGELEGFASSRLPPQPCGWGQSSDLLSRIDLDELMKKDEPPLDFPDTLEGFEYAFNEKGQLRHIKTGEPFVFNYREHLHRWNQKRYEALGEIITKYVYELLEKDCNSKKVS

SEQ ID NO: 1672 - protein, 85 aa, Homo sapiens
ERVRNSLFPGRGDSQCACCPSSPVWVFLETGFLFPWLFLQVEVIKKAYMQGEVEFEDGENGKDGAASPRNVGHNIYILAHQLARH

SEQ ID NO: 1673 - protein, 75 aa, Homo sapiens
KELLFYHLIVNNINFFNTRYAKIHIPIIASVSEHQPTTWVSFFFDLHILVCTFPAGLWFCIKNINDERVFGKRGF

SEQ ID NO: 1674 - protein, 91 aa, Homo sapiens
LCYFSARYHQRKIFGILYIFTLSAINRKEPNLFIYLFIFFEMESHSVTHAGVQRHNLNSLQPLPPGFKRFSCLCFLSSWNYRGAPPGPANF

SEQ ID NO: 1675 - protein, 51 aa, Homo sapiens
NDFLPLYFGWVLTKKSSETLRKAGQVFLEELGNHKAFKKELRQCRWQVGAL

SEQ ID NO: 1676 - protein, 45 aa, Homo sapiens
KMVRGSKKLISFFPGGPYGILAGRDPSKGLATFCLNKEALKDEFE

SEQ ID NO: 1677 - protein, 128 aa, Homo sapiens
LTLEFLLLPAASELAHGKRLACCIVDHKLPECGFYGLYDKILLFKHDPTSANLLQLVRSSGDIQEGDLVEVVLSASATFEDFQIRPHALTVHSYRAPAFCDHCGEMLFGLVRQGLKCDGCGLNYHKRC

SEQ ID NO: 1678 - protein, 185 aa, Homo sapiens
ITRPTISCQRPGPGLAAGMLPYTVNFKVSARTLTGALNAHNKAAVDWGWQGLIAYGCHSLVVVIDSITAQTLQVLEKHKADVVKVKWARENYHHNIGSPYCLRLASADVNGKIIVWDVAAGVAQCEIQEHAKPIQDVQWLWNQDASRDLLLAIHPPNYIVLWNADTGTKLWKKSYADNILSFSFD

SEQ ID NO: 1679 - protein, 217 aa, Homo sapiens
SVNLPPSLWPWEEAMDSTKSEPLKGSPEAEDGNIEYKKLVNPSQYRFEHLVTQMKWRLQEGRGEAVYQIGVEDNGLLVGLAEEEMRASLKTLHRMAEKVGADITVLREREVDYDSDMPRKITEVLVRKVPDNQQFLDLRVAVLGNVDSGKSTLLGVLTQGELDNGRGRARLNLFRHLHEIQSGRTSSISFEILGFNSKGEVHGINGTQWGQTLRMGW

SEQ ID NO: 1680 - protein, 131 aa, Homo sapiens
LCSTLLLLTIPSWVLSQITLKESGPTLMKPTETLTLTCTFSGFSLNTSGVGVAWIRQPPGKALEWLALIYWDDDKRYSPSLNDRLTIAKDTSRNQVVLTMTNMGPVDTATYYCAQFARGARGSNWFDPWGQ

SEQ ID NO: 1681 - protein, 501 aa, Homo sapiens
AGIRHEAPPTTSNRHRRQIDRGVTHLNISGLKMPRGIAIDWVAGNVYWTDSGRDVIEVAQMKGENRKTLISGMIDEPHAIVVDPLRGTMYWSDWGNHPKIETAAMDGTLRETLVQDNIQWPTGLAVDYHNERLYWADAKLSVIGSIRLNGTDPIVAADSKRGLSHPFSIDVFEDYIYGVTYINNRVFKIHKFGHSPLVNLTGGLSHASDVVLYHQHKQPEVTNPCDRKKCEWLCLLSPSGPVCTCPNGKRLDNGTCVPVPSPTPPPDAPRPGTCNLQCFNGGSCFLNARRQPKCRCQPRYTGDKCELDQCWEHCRNGGTCAASPSGMPTCRCPTGFTGPKCTQQVCAGYCANNSTCTVNQGNQPQCRCLPGFLGDRCQYRQCSGYCENFGTCQMAADGSRQCRCTAYFEGSRCEVNKCSRCLEGACVVNKQSGDVTCNCTDGRVAPSCLTCVGHCSNGGSCTMNSKMMPECQCPPHMTGPRCEEHVFSQQQPGHIASILIP

SEQ ID NO: 1682 - protein, 316 aa, Homo sapiens
TTTISNFHTQVNRTYCCGTYRAGPMRQISLVGAVDEEVGDYFPEFLDMLEESPFLKMTLPWGTLSSLRLQCRSQSDDGPIMWVRPGEQMIPTADMPKSPFKRRRSMNEIKNLQYLPRTSEPREVLFEDRTRAHADHVGQGFDWQSTAAVGVLKAVQFGEWSDQPRITKDVICFHAEDFTDVVQRLQLDLHEPPVSQCVQWVDEAKLNQMRREGIRYARIQLCDNDIYFIPRNVIHQFKTVSAVCSLAWHIRLKQYHPVVEATQNTESNSNMDCGLTGKRELEVDSQCVRIKTESEEACTEIQLLTTASSSFPPASE

SEQ ID NO: 1683 - protein, 110 aa, Homo sapiens
SACSTGPELPGRATRSLTRPANQKGCDGDRLYYDGCAMIAMNGSVFAQGSQFSLDDVEVLTATLDLEDVRSYRAEISSRNLAVSAPVDTCVGCSSKTWKVAPFVRAWWRP

SEQ ID NO: 1684 - protein, 80 aa, Homo sapiens
VITDLEEQLNQLTEDNAELNNQNFYLSKQLDEASGANDEIVQLRSEVDHLRREITEREMQLTSQKQVRRVNKVVRSLEDF

SEQ ID NO: 1685 - protein, 281 aa, Homo sapiens
WDAWGDWSDCSRTCGGGASYSLRRCLTGRNCEGQNIRYKTCSNHDCPPDAEDFRAQQCSAYNDVQYQGHYYEWLPRYNDPAAPCALKCHAQGQNLVVELAPKVLDGTRCNTDSLDMCISGICQAVGCDRQLGSNAKEDNCGVCAGDGSTCRLVRGQSKSHVSPEKREENVIAVPLGSRSVRITVKGPAHLFIESKTLQGSKGEHSFNSPGVFVVENTTVEFQRGSERQTFKIPGPLMADFIFKTRYTAAKDSVVQFFFYQPISHQWRQTDFFPCTVTCGGG

SEQ ID NO: 1686 - protein, 98 aa, Homo sapiens
VVGKQEAGAHSDSCCLLHTPPRLTPAHSRKALRNSRIVSQKDDVHVCIMCLRAIMNYQVSRGAWDWRLGSPACPHWGLHKLPRLWDPLSLYPVLCWGT

SEQ ID NO: 1687 - protein, 236 aa, Homo sapiens
ILTSLVELTRFETLTPRFSATVPPCWVEVQQEQQQRRHPQHLHQQHHGDAAQHTRTWKLQTDSNSWDEHVFELVLPKACMVGHVDFKFVLNSNITNIPQIQVTLLKNKAPGLGKVNGLRLCPFLEDHKEDILCGPVWLASGLDLSGHAGMLTLTSPKLVKGMAGGKYRSFLIHVKAVNERGTEEICNGGMRPVVRLPSLKHQSNKGYSLASLLAKVAAGKEKSSNVKNENTSGTRK

SEQ ID NO: 1688 - protein, 100 aa, Homo sapiens
KAFYNYHVLELLQMLVTGGVSSQLEQHLDKDKVYGVADSCTSLLSGRNRCKLGLLSLHETILSDVNPRNTFGQLFCGSLDLFGILCVGLYRIIDEEELNP

SEQ ID NO: 1689 - protein, 42 aa, Homo sapiens
CFLCLSGDFMVMTIFFNVSRRFGYVAFQNYVPSSVTTMLSWV

SEQ ID NO: 1690 - protein, 415 aa, Homo sapiens
DLWQFTPLHEAASKNRVEVCSLLLSYGADPTLLNCHNKSAIDLAPTPQLKERLAYEFKGHSLLQAAREADVTRIKKHLSLEMVNFKHPQTHETALHCAAASPYPKRKQICELLLRKGANINEKTKEFLTPLHVASEKAHNDVVEVVVKHEAKVNALDNLGQTSLHRAAYCGHLQTCRLLLSYGCDPNIISLQGFTALQMGNENVQQLLQEGISLGNSEADRQLLEAAKAGDVETVKKLCTVQSVNCRDIEGRQSTPLHFAAGYNRVSVVEYLLQHGADVHAKDKGGLVPLHNACSYGHYEVAELLVKHGAVVNVADLWKFTPLHEAAAKGKYEICKLLLQHGADPTKKNRDGNTPLDLVKDGDTDIQDLLRGDAALLDAAKKGCLARVKKLSSPDNVNCRDTQGRHSTPLHLAGK

SEQ ID NO: 1691 - protein, 182 aa, Homo sapiens
GVLIPSFQNQLFADILAGIESVTSEHNYQTLIANYNYDRDSEEESVINLLSYNIDGIILSEKYHTIRTVKFLRSATIPVVELMDVQGERLDMEVGFDNRQAAFDMVCTMLEKRVRHKILYLGSKDDTRDEQRYQGYCDAMMLHNLSPLRMNPRAISSIHLRMQLMRDALSANPDLDGVFCTN

SEQ ID NO: 1692 - protein, 153 aa, Homo sapiens
RINRCRKPSDADILVPGDTISLIGTTSLRIDYNEIDDNRVTAEEVDILLREGEKLAPVMAKTRILRAYSGVRPLVASDDDPSGRNVSRGIVLLDHAERDGLDGFITITGGKLMTYRLMAEWATDAVCRKLGNTRPCTTADLALPGSQEPAKVP

SEQ ID NO: 1693 - protein, 83 aa, Homo sapiens
LLIYLAIFAPVAMSALAGVKSVQQVRIRAAQSLGASRAQVLWFVILPGALPEILTGLRIGLGVGWSTLVAAELIAATRGLGFM

SEQ ID NO: 1694 - protein, 45 aa, Homo sapiens
LYFDAYLQSLQVAAISTFCCLLIGYPLAWAVAHSKPSTRNILLLL

SEQ ID NO: 1695 - protein, 155 aa, Homo sapiens
LKIRGQRIELGEIDRVMQALPDVEQAVTHACVINQAAATGGDARQLVGYLVSQSGLPLDTSALQAQLRETLPPHMVPVVLLQLPQLPLIANGKLDRKALPLPELKAQAPGRAPKAGSETIIAAAFSSLLGCDVQDADADFFALGGHSLLAMKLAT

SEQ ID NO: 1696 - protein, 134 aa, Homo sapiens
QNITSKDLDVRLDPQTVPIELEQLVLSFNHMIERIEDVFTRQSNFSADIAHEIRTPITNLITQTEIALSQSRSQKELEDVLYSNLEELTRMAKMVSDMLFLAQADNNQLIPEKKMLNLAHEVGKVFDQFEALPE

SEQ ID NO: 1697 - protein, 112 aa, Homo sapiens
NELTFKEAEISKLYTKVHPAYRTLLEKRQALEDEKAKLNGRVTAMPKTQQEIVRLTRDVESGQQVYMQLLNKEQELKITEASTVGDVRIVDPAITQPGVLKPKKGLIILGAI

SEQ ID NO: 1698 - protein, 238 aa, Homo sapiens
TQAMVWQQKACAEDDPQLSGRHWLHAATLYNIAAYPHLKGDDLAEQAQALSNRAYEEAAQRLPGTMRQMEFTVPGGAPITGFLHMPKGDGPFPTVLMCGGLDAMQTDYYSLYERYFAPRGIAMLTIDMPSVGFSSKWKLTQDSSLLHQHVLKALPNVPWVDHTRVAAFGFRFGANVAVRLAYLESPRLKAVACLGPVVHTLLSGLKCQQQVPEMYLDVLASRLGMHDASTKSSTRENH

SEQ ID NO: 1699 - protein, 82 aa, Homo sapiens
RIRSSDPEITLAGTPLHAAYLIGMTLICAGFSVGFGVAMSQALGPFSLRAGVASSTLGIAQVCGSSLWIWLAAVVGIGAWNM

SEQ ID NO: 1700 - protein, 140 aa, Homo sapiens
EAPEATPQPSQPGPSSPISLSAEEENAEGEVSRANTPDSDITEKTEDSSVPETPDNERKASISYFKNQRGIQYIDLSSDSEDVVSPNCSNTVQEKTFNKDTVIIVSEPSEDEESQGLPTMARRNDDISELEDLSGMEDLK

SEQ ID NO: 1701 - protein, 134 aa, Homo sapiens
IKKNHIIGYQLLHRRALFEKRTRLSDYALIFGMFGIVVMVIETELSWGAYYKAPLYSLALKCLISLFTIILLGLTIVYHAREIQLFMANYGADDWRSALTYEPIFLILLEALRGVIHATPCRVSLSLWDGLDLP

SEQ ID NO: 1702 - protein, 113 aa, Homo sapiens
AQLAEVCPPQTLLTTNTSSISITAIAAEIKNPERVAGLHFFNPAPVMKLVEVVSGLATAAEVVEQLCELTLSWGKQPVRCHSTPGFIVNRVARPYYSEAWRALEEQVAAPEVI

SEQ ID NO: 1703 - protein, 62 aa, Homo sapiens
HFSLFRIAFAVFLTYMTVGLPLPVIPLFVHHELGYGNTMVGIAVGIQFLATVLTRGYAGRLA

SEQ ID NO: 1704 - protein, 47 aa, Homo sapiens
WQLFHLNGTFLNIGETDTESCVNGWVYDRSSFPFSNMTEVRGLVFLS

SEQ ID NO: 1705 - protein, 246 aa, Homo sapiens
  misc_feature (1)...(246): Xaa = any amino acid or nothing
VINLVYLISSPRPELKPVDKESEVVMKFPDGFEKFSPPILQLDEVDFYYDPKHVIFSRLSVSADLESRICVVGENGAGKSTMLKLLLGDLAPVRGIRHAHRNLKIGYFSQHHVGAAGTXTFSACGNLLGTQVFLGRPEEEYRHQLGFGMGISGELGHASSLPACLGGQKEAEVAFCSDGLLPCPNFLILDEPTNHLGHGRAIEALGPCLQTISGVGVILVSHEXSALSRLVCRELWVCXGRSTSPF

SEQ ID NO: 1706 - protein, 110 aa, Homo sapiens
RGGRDWGEHNQRLEEHQARAWQGAMDAGAASREHARWQGTGLAPGTRVAVAPTCVQGLPQERSVCRPFFSSRWREGPVWALGAGAHGKPRWSGGVRCVVRGGRWFTPAPH

SEQ ID NO: 1707 - protein, 340 aa, Homo sapiens
MLEAPGPSDGCELSNPSASRVSCAGQMLEVQPGLYFGGAAAVAEPDHLREAGITAVLTVDSEEPSFKAGPGVEDLWRLFVPALDKPETDLLSHLDRCVAFIGQARAEGRAVLVHCHAGVSRSVAIITAFLMKTDQLPFEKAYEKLQILKPEAKMNEGFEWQLKLYQAMGYEVDTSSAIYKQYRLQKVTEKYPELQNLPQELFAVDPTTVSQGLKDEVLYKCRKCRRSLFRSSSILDHREGSGPIAFAHKRMTPSSMLTTGRQAQCTSYFIEPVQWMESALLGVMDGQLLCPKCSAKLGSFNWYGEQCSCGRWITPAFQIHKNRVDEMKILPVLGSQTGKI

SEQ ID NO: 1708 - protein, 225 aa, Homo sapiens
  misc_feature (1)...(225): Xaa = any amino acid or nothing
EVETLGPRTPGPEAQSPTPGSCPGWQEPSPGPTPPPXLSGPGPQGAPVLGKLLPDPEETPAGKTPLGKHFWWGLPVTSANFSPGAAAXFGGALSPPGGDLGHMLLQGPPSPFRLQQQXQTPPGSHSPPTANREINPGPAAAADTRSCWGHKRSWRGWRGLAPWRLGFGSPGIPXPAPAGIPGRPTWEGGKGAGGKPSETLTRSPPVWRGKRGSANGFLSWVQILQ

SEQ ID NO: 1709 - protein, 87 aa, Homo sapiens
  misc_feature (1)...(87): Xaa = any amino acid or nothing
HEHLLLLLLCVFLVKSQGVNDNEEGFFSARGHRPLDKKREDAPNLRPALADITVCDYRAQIAXAASTPKRAASIAHNAVSCRXAQIA

SEQ ID NO: 1710 - protein, 95 aa, Homo sapiens
  misc_feature (1)...(95): Xaa = any amino acid or nothing
REPPRPALLFFXDRVSLCCPGWNAVVQSQLTAAPTSQVQSDSPTFPSSWDYRHVPEYPANFLXRQGFPMLPRLVSNSWAQTVHPPRPPKVLDLQA

SEQ ID NO: 1711 - protein, 467 aa, Homo sapiens
  misc_feature (1)...(467): Xaa = any amino acid or nothing
PVPAPRVSPSARGAPGRPRLPGVRGPRHSWAADXRGSRMPPRAPAPSPTGPAPGGKKVRGRVPEDPDAYEPRCSALXVXPTHVTSPQFCDPXNGQIRSYFTVLLRGLNETMLVKPLCRREPPEAGPGRQSTPAVTRDHRQHEDPRGAGRQWDADPRPSAPPAEVATGSRPGRHMWMRLCLAAQQAPGLPHRTSIRPGWRRLTEPEAWARRHRRPWGQRGAVRPPPQGAAPPPSHQGRRTNTDPSATPRLTVMSRCLAPDLKAPASGPRGWRRGMPQSSGALLWTPPPTPRGSHSPRPREAPLRAIHPAGPSKSRAGASGRLPEVIYGWVTLFTPPEAGTFLIPSPTXMSPALVIQPPVPPTQMGLRISGLPRQGXPSGAPWXLPGLAQLAFQCHLPHDEVGPPRNQSPLGNDTLSSGLPMGPRRQVWPLARVGGHSSPREPQVLKKPLWGQTDIAGVGSASLYPDNL

SEQ ID NO: 1712 - protein, 332 aa, Homo sapiens
  misc_feature (1)...(332): Xaa = any amino acid or nothing
RVGMVLGTREVGDSTPPPSPPLYPFTGNEFVQHNTWQLSRVYPSDLRTDSSNYNPQELWNAGCQMVXGGSRDWEEGVEEQQVGNKFSSDGRVGECSRKLLGXEMLSVDITSRYRAPSTYLLNSLKEGLEGLHGESCSSFLLGPSVAMNMQTAGLEMDICDGHFRQNGGCGYVLKPDFLRDIQSSFHPEKPISPFKAQTLLNQVISVQQLPKVDKTKEGSIVDPLVKVQIFGVRLDTARQETNYVENNGFNPYWGQTLCFRVLGPDFPMLRFGKMDYDWKSRNDLLGKTPCPGTCMQQGYRHIHLLSKDGISLRPASIFVYICIQEGLEGDES

SEQ ID NO: 1713 - protein, 63 aa, Homo sapiens
  misc_feature (1)...(63): Xaa = any amino acid or nothing
MFAGSYGKSMFSFSKKVLNCLPKWRYHFVIAPAMNESPLAPHLHQHLVFSVFQVLTILIGVXX

SEQ ID NO: 1714 - protein, 120 aa, Homo sapiens
  misc_feature (1)...(120): Xaa = any amino acid or nothing
SAFKTLQLPAFSLYFDLGSLKLLILRIHTSIVKNHKVESPRTMSPGXDPQSFLQIPQPRPPQLRVGLTSGLIQHFHSPSSCQFPLLRGPPFPRQPPLGISGASLCPVLSPPRXPLQPSSL

SEQ ID NO: 1715 - protein, 96 aa, Homo sapiens
  misc_feature (1)...(96): Xaa = any amino acid or nothing
LLPYPSLFVFLRQCHFVTRLECNGVVSAHCNLHLPGSSDSPASASXVAGTTGVCHHTRLIFVFLVXTGFHYVAQAGLELLTAXSPPQLPKVVGLQA

SEQ ID NO: 1716 - protein, 81 aa, Homo sapiens
VGEKLHDIRFGNDFDMTPKAQATKEKIDKLNFIKIKKLCIEGYYNREPQNGRKIFANYVSDKGLMATIYEELLKLSNKLIQ

SEQ ID NO: 1717 - protein, 789 aa, Homo sapiens
  misc_feature (1)...(789): Xaa = any amino acid or nothing
QKLKQNQPKRAHVEDGGSRSKQGNEQSKKTPIEKSDFAAATHPRAFYLSKPDETPNAWMSDSGTGLTYWKLEEKDMHHSLPETLEKTFISLSSTDVSPNQVLTLDPTLHMKPKQQISGIQPHGLPNALDDRISFSPDSVLEPSMSSPSDIDSFSQASNVTSQLPGFPKYPSHTKASPVDSWKNQTFQNESRTSSTFPSVYTITSNDISVNTVDEENTVMVASASVSQSQLPGTANSVPECISLTSLEDPVILSKIRQNLKEKHARHIADLRAYYESEINSLKQKLEAKEISGVEDWKITNQILVDRCGQLDSALHEATSRVRTLENKNNLLEIEVNDLRERFSAASSASKILQERIEEMRTSSKEKDNTIIRLKSRLQDLEEAFENAYKLSDDKEAQLKQENKMFQDLLGEYESLGKEHRRVKDALNTTENKLLDAYTQISDLKRMISKLEAQVKQVEHENMLSLRHNSRIHVRPSRANTLATSDVSRRKWLIPGAEYSIFTGQPLDTQDSNVDNQLEETCSLGHRSPLEKDSSPGSSSTSLLIKKQRETSDTPIMRALKELDEGKIFKNWGTQTEKEDTSNSLLXINPRQTETSVNASRSPEKCAQQRQKRLNSASQRSSSLPPSNRKSSTPTKREIMLTPVTVAYSPKRSPKENLSPGFSHLLSKNESSPIREKTYSEKATDNHVNHSSCPEPVPNGVKKVSVRTAWEKNKSVSYEQCKPVSVTPQGNDFEYTAKIRTLAETERFFDELTKEKDQIEAALSRMPSPGGRITLQTRLNQVKCLSLNLL

SEQ ID NO: 1718 - protein, 782 aa, Homo sapiens
EFKSGGCGAGLVAAGAVLVLYPASRAGERTRVPGSPAPSSLPLHSPGACGTEVDMDPQRSPLLEVKGNIELKRPLIKAPSQLPLSGSRLKRRPDQMEDGLEPEKKRTRGLGATTKITTSHPRVPSLTTVPQTQGQTTAQKVSKKTGPRCSTAIATGLKNQKPVPAVPVQKSGTSGVPPMAGGKKPSKRPAWDLKGQLCDLNAELKRCRERTQTLDQENQQLQDQLRDAQQQVKALGTERTTLEGHLAKVQAQAEQGQQELKNLRACVLELEERLSTQEGLVQELQKKQVELQEERRGLMSQLEEKERRLQTSEAALSSSQAEVASLRQETVAQAALLTEREERLHGLEMERRRLHNQLQELKGNIRVFCRVRPVLPGEPTPPPGLLLFPSGPGGPSDPPTRLSLSRSDERRGTLSGAPAPPTRHDFSFDRVFPPGSGQDEVFEEIAMLVQSALDGYPVCIFAYGQTGSGKTFTMEGGPGGDPQLEGLIPRALRHLFSVAQELSGQGWTYSFVASYVEIYNETVRDLLATGTRKGQGGECEIRRAGPGSEELTVTNARYVPVSCEKEVDALLHLARQNRAVARTAQNERSSRSHSVFQLQISGEHSSRGLQCGAPLSLVDLAGSERLDPGLALGPGERERLRETQAINSSLSTLGLVIMALSNKESHVPYRNSKLTYLLQNSLGGSAKMLMFVNISPLEENVSESLNSLRFASKVEPSVLFGTAQSNRKWKTDPDLCVCVCVCVCVCVCVCVCVPMSMYRVRGGRVAGGCFIGWRAPCPRAIK

SEQ ID NO: 1719 - protein, 119 aa, Homo sapiens
  misc_feature (1)...(119): Xaa = any amino acid or nothing
GYTSQGRWIDIERGPLTANTESLHENNFNALPGYIRKIEXIXIYKKNXINFGGVGLLNIVKISILSKIYRFDAIPVKILTRFFINLDKLILKFVLKTKIAKNRIKTFYIMRRKKLGDSS

SEQ ID NO: 1720 - protein, 117 aa, Homo sapiens
  misc_feature (1)...(117): Xaa = any amino acid or nothing
GASISPSAVIDGVEGLKPMQEQEAQEAGPCLDXHMAPEQWVAPRRLLFRLIFSVLHALIIAAAAQSSAEEDEDPRNXGQSSEDQAPNQNGLIVIVHRVHVPLGAAATVPVHRSHFPR

SEQ ID NO: 1721 - protein, 87 aa, Homo sapiens
  misc_feature (1)...(87): Xaa = any amino acid or nothing
GNGGCGLSQIPPSHLGAFSRGSLLSRGDPRGPPPHPVIFFVFVVEQGFTVLARMVSISXPCDPPALASQSAGITGVSHLARPQNLYF

SEQ ID NO: 1722 - protein, 102 aa, Homo sapiens
  misc_feature (1)...(102): Xaa = any amino acid or nothing
RVLHHDNVPAHSSPQKREISQEFQLEIRHLPXSPDLAPSGCFLFLNLKNIFKGTHFSLVDNVKKTVSTWLHSQNAQFYKDRLNGWYHCLQKCLQHYXAYVEK

SEQ ID NO: 1723 - protein, 4563 aa, Homo sapiens
RREVAGPEGKGLLLASAHTMLTPPLLLLLPLLSALVAAAIDAPKTCSPKQFACRDQITCISKGWRCDGERDCPDGSDEAPEICPQSKAQRCQPNEHNCLGTELCVPMSRLCNGVQDCMDGSDEGPHCRELQGNCSRLGCQHHCVPTLDGPTCYCNSSFQLQADGKTCKDFDECSVYGTCSQLCTNTDGSFICGCVEGYLLQPDNRSCKAKNEPVDRPPVLLIANSQNILATYLSGAQVSTITPTSTRQTTAMDFSYANETVCWVHVGDSAAQTQLKCARMPGLKGFVDEHTINISLSLHHVEQMAIDWLTGNFYFVDDIDDRIFVCNRNGDTCVTLLDLELYNPKGIALDPAMGKVFFTDYGQIPKVERCDMDGQNRTKLVDSKIVFPHGITLDLVSRLVYWADAYLDYIEVVDYEGKGRQTIIQGILIEHLYGLTVFENYLYATNSDNANAQQKTSVIRVNRFNSTEYQVVTRVDKGGALHIYHQRRQPRVRSHACENDQYGKPGGCSDICLLANSHKARTCRCRSGFSLGSDGKSCKKPEHELFLVYGKGRPGIIRGMDMGAKVPDEHMIPIENLMNPRALDFHAETGFIYFADTTSYLIGRQKIDGTERETILKDGIHNVEGVAVDWMGDNLYWTDDGPKKTISVARLEKAAQTRKTLIEGKMTHPRAIVVDPLNGWMYWTDWEEDPKDSRRGRLERAWMDGSHRDIFVTSKTVLWPNGLSLDIPAGRLYWVDAFYDRIETILLNGTDRKIVYEGPELNHAFGLCHHGNYLFWTEYRSGSVYRLERGVGGAPPTVTLLRSERPPIFEIRMYDAQHQQVGSNKCRVNNAGCSSLCLATPGSRQCACAEDQVLDADGVTCLANPSYVPPPQCQPGEFACANSRCIQERWKCDGDNDCLDNSDEAPALCHQHTCPSDRFKCENNRCIPNRWLCDGDNDCGNSEDESNATCSARTCPPNQFSCASGRCIPISWTCDLDDDCGDRSDESASCAYPTCFPLTQFTCNNGRCININWRCDNDNDCGDNSDEAGCSHSCSSTQFKCNSGRCIPEHWTCDGDNDCGDYSDETHANCTNQATRPPGGCHTDEFQCRLDGLCIPLRWRCDGDTDCMDSSDEKSCEGVTHVCDPSVKFGCKDSARCISKAWVCDGDNDCEDNSDEENCESLACRPPSHPCANNTSVCLPPDKLCDGNDDCGDGSDEGELCDQCSLNNGGCSHNCSVAPGEGIVCSCPLGMELGPDNHTCQIQSYCAKHLKCSQKCDQNKFSVKCSCYEGWVLEPDGESCRSLDPFKPFIIFSNRHEIRRIDLHKGDYSVLVPGLRNTIALDFHLSQSALYWTDVVEDKIYRGKLLDNGALTSFEVVIQYGLATPEGLAVDWIAGNIYWVESNLDQIEVAKLDGTLRTTLLAGDIEHPRAIALDPRDGILFWTDWDASLPRIEAASMSGAGRRTVHRETGSGGWPNGLTVDYLEKRILWIDARSDAIYSARYDGSGHMEVLRGHEFLSHPFAVTLYGGEVYWTDWRTNTLAKANKWTGHNVTVVQRTNTQPFDLQVYHPSRQPMAPNPCEANGGQGPCSHLCLINYNRTVSCACPHLMKLHKDNTTCYEFKKFLLYARQMEIRGVDLDAPYYNYIISFTVPDIDNVTVLDYDAREQRVYWSDVRTQAIKRAFINGTGVETVVSADLPNAHGLAVDWVSRNLFWTSYDTNKKQINVARLDGSFKNAVVQGLEQPHGLVVHPLRGKLYWTDGDNISMANMDGSNRTLLFSGQKGPVGLAIDFPESKLYWISSGNHTINRCNLDGSGLEVIDAMRSQLGKATALAIMGDKLWWADQVSEKMGTCSKADGSGSVVLRNSTTLVMHMKVYDESIQLDHKGTNPCSVNNGDCSQLCLPTSETTRSCMCTAGYSLRSGQQACEGVGSFLLYSVHEGIRGIPLDPNDKSDALVPVSGTSLAVGIDFHAENDTIYWVDMGLSTISRAKRDQTWREDVVTNGIGRVEGIAVDWIAGNIYWTDQGFDVIEVARLNGSFRYVVISQGLDKPRAITVHPEKGYLFWTEWGQYPRIERSRLDGTERVVLVNVSISWPNGISVDYQDGKLYWCDARTDKIERIDLETGENREVVLSSNNMDMFSVSVFEDFIYWSDRTHANGSIKRGSKDNATDSVPLRTGIGVQLKDIKVFNRDRQKGTNVCAVANGGCQQLCLYRGRGQRACACAHGMLAEDGASCREYAGYLLYSERTILKSIHLSDERNLNAPVQPFEDPEHMKNVIALAFDYRAGTSPGTPNRIFFSDIHFGNIQQINDDGSRRITIVENVGSVEGLAYHRGWDTLYWTSYTTSTITRHTVDQTRPGAFERETVITMSGDDHPRAFVLDECQNLMFWTNWNEQHPSIMRAALSGANVLTLIEKDIRTPNGLAIDHRAEKLYFSDATLDKIERCEYDGSHRYVILKSEPVHPFGLAVYGEHIFWTDWVRRAVQRANKHVGSNMKLLRVDIPQQPMGIIAVANDTNSCELSPCRINNGGCQDLCLLTHQGHVNCSCRGGRILQDDLTCRAVNSSCRAQDEFECANGECINFSLTCDGVPHCKDKSDEKPSYCNSRRCKKTFRQCSNGRCVSNMLWCNGADDCGDGSDEIPCNKTACGVGEFRCRDGTCIGNSSRCNQFVDCEDASDEMNCSATDCSSYFRLGVKGVLFQPCERTSLCYAPSWVCDGANDCGDYSDERDCPGVKRPRCPLNYFACPSGRCIPMSWTCDKEDDCEHGEDETHCNKFCSEAQFECQNHRCISKQWLCDGSDDCGDGSDEAAHCEGKTCGPSSFSCPGTHVCVPERWLCDGDKDCADGADESIAAGCLYNSTCDDREFMCQNRQCIPKHFVCDHDRDCADGSDESPECEYPTCGPSEFRCANGRCLSSRQWECDGENDCHDQSDEAPKNPHCTSPEHKCNASSQFLCSSGRCVAEALLCNGQDDCGDSSDERGCHINECLSRKLSGCSQDCEDLKIGFKCRCRPGFRLKDDGRTCADVDECSTTFPCSQRCINTHGSYKCLCVEGYAPRGGDPHSCKAVTDEEPFLIFANRYYLRKLNLDGSNYTLLKQGLNNAVALDFDYREQMIYWTDVTTQGSMIRRMHLNGSNVQVLHRTGLSNPDGLAVDWVGGNLYWCDKGRDTIEVSKLNGAYRTVLVSSGLREPRALVVDVQNGYLYWTDWGDHSLIGRIGMDGSSRSVIVDTKITWPNGLTLDYVTERIYWADAREDYIEFASLDGSNRHVVLSQDIPHIFALTLFEDYVYWTDWETKSINRAHKTTGTNKTLLISTLHRPMDLHVFHALRQPDVPNHPCKVNNGGCSNLCLLSPGGGHKCACPTNFYLGSDGRTCVSNCTASQFVCKNDKCIPFWWKCDTEDDCGDHSDEPPDCPEFKCRPGQFQCSTGICTNPAFICDGDNDCQDNSDEANCDIHVCLPSQFKCTNTNRCIPGIFRCNGQDNCGDGEDERDCPEVTCAPNQFQCSITKRCIPRVWVCDRDNDCVDGSDEPANCTQMTCGVDEFRCKDSGRCIPARWKCDGEDDCGDGSDEPKEECDERTCEPYQFRCKNNRCVPGRWQCDYDNDCGDNSDEESCTPRPCSESEFSCANGRCIAGRWKCDGDHDCADGSDEKDCTPRCDMDQFQCKSGHCIPLRWRCDADADCMDGSDEEACGTGVRTCPLDEFQCNNTLCKPLAWKCDGEDDCGDNSDENPEECARFVCPPNRPFRCKNDRVCLWIGRQCDGTDNCGDGTDEEDCEPPTAHTTHCKDKKEFLCRNQRCLSSSLRCNMFDDCGDGSDEEDCSIDPKLTSCATNASICGDEARCVRTEKAAYCACRSGFHTVPGQPGCQDINECLRFGTCSQLCNNTKGGHLCSCARNFMKTHNTCKAEGSEYQVLYIADDNEIRSLFPGHPHSAYEQAFQGDESVRIDAMDVHVKAGRVYWTNWHTGTISYRSLPPAAPPTTSNRHRRQIDRGVTHLNISGLKMPRGIAIDWVAGNVYWTDSGRDVIEVAQMKGENRKTLISGMIDEPHAIVVDPLRGTMYWSDWGNHPKIETAAMDGTLRETLVQDNIQWPTGLAVDYHNERLYWADAKLSVIGSIRLNGTDPIVAADSKRGLSHPFSIDVFEDYIYGVTYINNRVFKIHKFGHSPLVNLTGGLSHASDVVLYHQHKQPEVTNPCDRKKCEWLCLLSPSGPVCTCPNGKRLDNGTCVPVPSPTPPPDAPRPGTCNLQCFNGGSCFLNARRQPKCRCQPRYTGDKCELDQCWEHCRNGGTCAASPSGMPTCRCPTGFTGPKCTQQVCAGYCANNSTCTVNQGNQPQCRCLPGFLGDRCQYRQCSGYCENFGTCQMAADGSRQCRCTAYFEGSRCEVNKCSRCLEGACVVNKQSGDVTCNCTDGRVAPSCLTCVGHCSNGGSCTMNSKMMPECQCPPHMTGPRCEEHVFSQQQPGHIASILIPLLLLLLLVLVAGVVFWYKRRVQGAKGFQHQRMTNGAMNVEIGNPTYKMYEGGEPDDVGGLLDADFALDPDKPTNFTNPVYATLYMGGHGSRHSLASTDEKRELLGRGPEDEIGDPLA

SEQ ID NO: 1724 - protein, 540 aa, Homo sapiens
  misc_feature (1)...(540): Xaa = any amino acid or nothing
CLELASAGKIPEESKALSLLAPAPTMTSLMPGAGLLPIPTPNPLTTLGVSLSSLGAIPAAALDPNIATLGEIPQPPLMGNVDPSKIDEIRRTVYVGNLNSQTTTADQLLEFFKQVGEVKFVRMAGDETQPTRFAFVEFADQNSVPRALAFNGVMFGDRPLKINHSNNAIVKPPEMTPQAAAKELEEVMKRVREAQSFISAAIEPGWLHSTSLCNDFLGCFXRRRMYREXAPCTICGTFHLCLIINWDLXLFXAYTAKXFFPPRVWKEQXKKRRRSRSHTRSKSRSSSKSHSRRKRSQSKHRSRSHNRSRSRQKDRRRSKSPHKKRSKSRERRKSRSRSHSRDKRKDTREKIKEKERVKEKDREKEREREKEREKEKERGKNKDRDKEREKDREKDKEKDREREREKEHEKDRDKEKEKEQDKEKEREKDRSKEIDEKRKKDKKSRTPPRSYNASRRSRSSSRERRRRRSRSSSRSPRTSKTIKRKSSRSPSPRSRNKKDKKREKERDHISERRERERSTSMRKSSNDRDGKEKLEKNSTS

SEQ ID NO: 1725 - protein, 103 aa, Homo sapiens
  misc_feature (1)...(103): Xaa = any amino acid or nothing
AHSSHQTRAILQEFQWDIIRHPPLSPNLALSGFFPNLKKSLRGTHFSSVKKTTLTWLNSQDPWFFFYPXSPDLQIPSSFRNGLNDWYHHSQKCPDLDGAYVKK

SEQ ID NO: 1726 - protein, 95 aa, Homo sapiens
  misc_feature (1)...(95): Xaa = any amino acid or nothing
GVXWCDLGSPQPPPPGFKQFCLGRSSSWDYRHVPPHPANFVFLLETGFLHAGQAGLGDPPASASQSAGITGVSHTWPKNHLIFYACLVIRSKRIK

SEQ ID NO: 1727 - protein, 337 aa, Homo sapiens
  misc_feature (1)...(337): Xaa = any amino acid or nothing
KTGYTSRGSPLSPQSSIDSELSTSELEDDSISMGYKLQDLTDVQIMARLQEESLRQDYASTSASVSRHSSSVSLSSGKKGTCSDQEYDQYSLEDEEEFDHLPPPQPRLPRCSPFQRGIPHSQTFSSIRECRRSPSSQYFPSNNYQQQQYYSPQAQTPDQQPNRTNGDKPPKKYAXPSPDAKYNCHXXQHSSPVTVRNSQSFDSSLHGAGNGISRIQSCIPSPGQLQHRVHSVGHFPVSIRQPLKATAYVSPTVQGSSNMPLSNGLQLYSNTGIPTPNKAAASGIMGRSALPRPSLAINGSNLPRSKIAQPVRSFLQPPKPLSSLSTLRDGNWRDGCY

SEQ ID NO: 1728 - protein, 558 aa, Homo sapiens
  misc_feature (1)...(558): Xaa = any amino acid or nothing
VPGVTESRPSVLRGDHLFALLSSETHQEDPITYKGFVHKVELDRVKLSFSMSLLSRFVGWGXPFKVNFYTFNRQPLRVQHRALELTGRWLLWPMLFPVAPRDVPLLPSDVKLKLYDRSLESNPEQLQAMRHIVTGTTRPAPYIIFGPPGTGKTVTLVEAIKQVVKHLPKAHILACAPSNSGADLLCQRLRVHLPSSIYRLLAPSRDIRMVPEDIKPCCNWDAKKGEYVFPAKKKLQEYRVLITTLITAGRLVSAQFPIDHFTHIFIDEAGHCMEPESLVAIAGLMEVKETGDPGGQLVLAGDPRQLGPVLRSPLTQKHGLGYSLLERLLTYNSLYKKGPDGYDPQFITKLLRNYRSHPTILDIPNQLYYEGELQACADVVDRERFCRWAGLPRQGFPIIFHGVMGKDEREGNSPSFFNPEEAATVTSYLKLLLAPSSKKGKARLSPRSVGVISPYRKQVEKIRYCITKLDRELRGLDDIKDLKVTCCSTVTPCLPCAPTCPLPETSSSFHSSPRPRPTPAALNRARALPEPLTPGDSNLRVWDGIRKPACLTNTSCHS

SEQ ID NO: 1729 - protein, 101 aa, Homo sapiens
  misc_feature (1)...(101): Xaa = any amino acid or nothing
PKAAPSVXLWFPPFLXGSFKPTKGHTXCVXIKXLSTREAXDSXPGRQIAXXRQGGKVETTTALXKQSNNKGTRASSYXEPDAXEQWKFPHKKLQLPGXTHE

SEQ ID NO: 1730 - protein, 107 aa, Homo sapiens
  misc_feature (1)...(107): Xaa = any amino acid or nothing
GGTGHPHPARPPLSGVGGCQCSHSKPWTAGSPEQRDHPAPHKQIEAGQGLPGPQAWGGXKGPAXLLPGPGGGPGPVASLEARAQASSGVTPNGGGRTYPYPTFSSGE

SEQ ID NO: 1731 - protein, 280 aa, Homo sapiens
  misc_feature (1)...(280): Xaa = any amino acid or nothing
GTRPGHLPAPSDGFCVHLXSIPSWGSFXGESLEMQLITSLGLQEFDIARNVLELIYAQTLVWIGIFFCPLLPFIQMIMLFIMFYSKNISLMMNFQPPSKAWRASQMMTFFIFLLFFPSFTGVLCTLAITIWRLKPSADCGPFRGLPLFIHSIYSWIDTLSTRPGYLWVVWIYRNLIGSVHFFFILTLIVLIITYLYWQITEGRKIMIRLLHEQIINEGKDKMFLIEKLIKLQDMEKKANPSSLVLERREVEQQGFLHLGEHDGSLDLRSRRSVQEGNPRA

SEQ ID NO: 1732 - protein, 72 aa, Homo sapiens
LLMIKVSSTCFSCHLHHHHHHHHRHHQGHNSLFFSLKSSSNSSTLPVYLSYNIILVFSKCLVFDFLFSNACL

SEQ ID NO: 1733 - protein, 399 aa, Homo sapiens
  misc_feature (1)...(399): Xaa = any amino acid or nothing
KGAPSFVRLYQYPNFAGPHAALANKSFFKADKVTMLWNKKATAVLVIASTDVDKTGASYYGEQTLHYIATNGESAVVQLPKNGPIYDVVWNSSSTEFCAVYGFMPAKATIFNLKCDPVFDFGTGPRNAAYYSPHGHILVLAGFGNLILQIXADIMKVWNVKNYKLISKPVASDSTYFAWCPDGEHILTATCAPRLRVNNGYKIWHYTGSILHKYDVPSNAELWQVSWQPFLDGIFPAKTITYQAVPSEVPNEEPKVATAYRPPALRNKPITNSKLHEEEPPQNMKPQSGNDKPLSKTALKNQRKHEAKKAAKQEARSDKSPDLAPTPAPQSTPRNTVSQSISGDPEIDKKIKNLKKKLKAIEQLKEQAATGKQLEKNQLEKIQKETALLQELEDLELGI

SEQ ID NO: 1734 - protein, 224 aa, Homo sapiens
IRSPAARSPGLETPTCLLFVIAAIAAVFVDSAIPRLTQHRPQDGSFPYTILDPPLYLPGQCAPPQPLSQCARRVHGEKLRRPTFGPRHRGAGTAKMSASLVRATVRAVSKRKLQPTRAALTLTPSAVNKIKQLLKDKPEHVGVKVGVRTRGCNGLSYTLEYTKTKGDSDEEVIQDGVRVFIEKKAQLTLLGTEMDYVEDKLSSEFVFNNPNIKGTCGCGESFNI

SEQ ID NO: 1735 - protein, 842 aa, Homo sapiens
VAMGTPRAQHPPPPQLLFLILLSCPWIQGLPLKEEEILPEPGSETPTVASEALAELLHGALLRRGPEMGYLPGPPLGPEGGEEETTTTIITTTTVTTTVTSPVLCNNNISEGEGYVESPDLGSPVSRTLGLLDCTYSIHVYPGYGIEIQVQTLNLSQEEELLVLAGGGSPGLAPRLLANSSMLGEGQVLRSPTNRLLLHFQSPRVPRGGGFRIHYQAYLLSCGFPPRPAHGDVSVTDLHPGGTATFHCDSGYQLQGEETLICLNGTRPSWNGETPSCMASCGGTIHNATLGRIVSPEPGGAVGPNLTCRWVIEAAEGRRLHLHFERVSLDEDNDRLMVRSGGSPLSPVIYDSDMDDVPERGLISDAQSLYVELLSETPANPLLLSLRFEAFEEDRCFAPFLAHGNVTTTDPEYRPGALATFSCLPGYALEPPGPPNAIECVDPTEPHWNDTEPACKAMCGGELSEPAGVVLSPDWPQSYSPGQDCVWGVHVQEEKRILLQVEILNVREGDMLTLFDGDGPSARVLAQLRGPQPRRRLLSSGPDLTLQFQAPPGPPNPGLGQGFVLHFKEVPRNDTCPELPPPEWGWRTASHGDLIRGTVLTYQCEPGYELLGSDILTCQWDLSWSAAPPACQKIMTCADPGEIANGHRTASDAGFPVGSHVQYRCLPGYSLEGAAMLTCYSRDTGTPKWSDRVPKCALKYEPCLNPGVPENGYQTLYKHHYQAGESLRFFCYEGFELIGEVTITCVPGHPSQWTSQPPLCKVTQTTDPSRQLEGGNLALAILLPLGLVIVLGSGVYIYYTKLQGKSLFGFSGSHSYSPITVESDFSNPLYEAGDTREYEVSI

SEQ ID NO: 1736 - protein, 581 aa, Homo sapiens
GTSTVTMATKKHFSIILNLLGMLLKKDNQDTRKLLMTWALEVAVVMKKSETYAPLFCLPSFHKFCKGLLADTLVEDVNICLQACSSLHALSSSLPDDLLQRCVDVCRVQLVHRGTCIRQAFGKLLKSIPLGVFLSNNNHTEIQEISLALRSHMSKAPSNTFHPQDFSDVISFILYGNSHRTGKDNWLERLFYSCQRLDKRDQSTIPRNLLKTDAVLWQWAIWEAAQFTVLSKLRTPLGRAQDTFQTIEGIIRSLAGHTLNPDQDVSQWTTADNDEGHGNNQLRLVLLLQYLENLEKLMYNAYEGCANALTSPPKVIRTFLYTNRQTCQDWLTRIRLSIMRVGLLAGQPAVTVRHGFDLLTEMKTTSLSQGNELEVSIMMVVEALCELHCPEAIQGIAVWSSSIVGKHLLWINSVAQQAEGRFEKASVEYQEHLCAMTGVDCCISSFDKSVLTLASAGCKSASLKHCLNGESRKSVLSKPTDSSPEVINYLGNKACECYISTADWAAVQEWQNAIHDLKKSTSSTSLNLKADFNYIKSLSSFESGKFVECTEQLELLPGENINLLAGGSKEKIDMKKLLRNM

SEQ ID NO: 1737 - protein, 100 aa, Homo sapiens
  misc_feature (1)...(100): Xaa = any amino acid or nothing
MDIFLYNCKYQVQTEIXNSIQHIMASKKLSRFLKYVHNLXAENYKTLMKXINEDLNKQRDVPYSXTARLNKMSIPTKTIFRFKAIYIKIPATYFIETNMQ

SEQ ID NO: 1738 - protein, 86 aa, Homo sapiens
  misc_feature (1)...(86): Xaa = any amino acid or nothing
PQWLGLQVYALPPANFVFFVEMRSTILAQTGFELLDSSDLPASASKSAGITCMSHHARTLSLKXWPFCLSATQEKFCXPASEGVAW

SEQ ID NO: 1739 - protein, 111 aa, Homo sapiens
  misc_feature (1)...(111): Xaa = any amino acid or nothing
LDGYHTPIYMLNRIIRLPAALXIISDQTGHALTILTRLETQMINADYQNKLTLDYLLTTDREVYEPFNLTNYCLHIHNQRLGAYDLGXVXQKLAHVPVQVXHGFDPEAMFR

SEQ ID NO: 1740 - protein, 123 aa, Homo sapiens
  misc_feature (1)...(123): Xaa = any amino acid or nothing
GRCHDQNKGKSDGPDAQAEACGGESTYQELLVNQNPIGQPLACRRLTRKIYEGIKKAVKPNHSPRGVKKVHKFVNKGEKGIMVLAGDTLGIGVYCLLPCMCXDRKLTYAHIPSTTDLGAGAGY

SEQ ID NO: 1741 - protein, 133 aa, Homo sapiens
  misc_feature (1)...(133): Xaa = any amino acid or nothing
FFQEMLDIMKAISDMMGKCTYPVLKEDAPRQHVETFFQEELTRSQEGMKLGENFLMFAMPPDDSKESKGKXFFQEMLDIMKAISDMMGKCTYPVLKEDAPRQHVETFFQVGINQKSRGHEVRRKFPDVCHAPR

SEQ ID NO: 1742 - protein, 126 aa, Homo sapiens
  misc_feature (1)...(126): Xaa = any amino acid or nothing
FFFGDGVSPCRQAGVXWHDLDSLQNLPPGFKRFSYLSLPSSWDYRHVLPRQANFCIFMXRRGFTMLARMVSISXPRDLPALASQSAGITGVSHHAPPQMDFTFALLCFALKGCLPRQKEGGTLNLI

SEQ ID NO: 1743 - protein, 127 aa, Homo sapiens
  misc_feature (1)...(127): Xaa = any amino acid or nothing
RNRSVVPEFVLLGLSAGPQTQTLLFVLFVVICLLTVMGNLLLLVVINADSCLHTPMYFFLGQLSFLDLCHSSVTAPKLLENLLSEKKTISVEGCMAXVFFVFATGGTESSLLAVMAYDRYVAIRTRG

SEQ ID NO: 1744 - protein, 160 aa, Homo sapiens
CTKCKADCDTCFNKNFCTKCKSGFYLHLGKCLDNCPEGLEANNHTMECVSIVHCEVSEWNPWSPCTKKGKTCGFKRGTETRVREIIQHPSAKGNLCPPTNETRKCTVQRKKCQKGERGKKGRERKRKKPNKGESKEAIPDSKSLESSKEIPEQRENKQQQ

SEQ ID NO: 1745 - protein, 113 aa, Homo sapiens
RVLYVPSMGFCILVAHGWQKISTKSVFKKLSWICLSMVILTHSLKTFHRNWDWESEYTLFMSALKVNKNNAKLWNNVGHALENEKNFERALKYFLQATHVQPDDIGAHMNVGR

SEQ ID NO: 1746 - protein, 57 aa, Homo sapiens
GFRAVVMTVKTEAAKGTLTYSRMRGMVAILIAFMKQRRMGLNDFIQKIANNSYACKQ

SEQ ID NO: 1747 - protein, 130 aa, Homo sapiens
  misc_feature (1)...(130): Xaa = any amino acid or nothing
AEPACGASSCTPPSLRSSSSQSVGPLRPGRPLWSEACAFLXAAAPQGPASPCCGLPSGFPRVWAQCCPPGGALRFPEGLGSVLSPRRCPQVSRGSGLSAVPQEVPSGFLGPGLRACPQEAPSRFLRAGLT

SEQ ID NO: 1748 - protein, 285 aa, Homo sapiens
  misc_feature (1)...(285): Xaa = any amino acid or nothing
KQRRWQNIQRKGPKRYIVIAGNSQSHQPMIFSMLRKLPKVTCRDVLPEIRAICIEEIGCWMQSYSTSFLTDSYLKYIGWTLHDKHREVRVKCVKALKGLYGNRDLTARLELFTGRFKDWMVSMIVDREYSVAVEAVRLLILILKNMEGVLMDVDCESVYPIVXASNXGLASAVGEFLYWKLFYPECEIRTMGGREQRQSPGAQRTFFQLLLSFFVESKSHSVTQAGVQWQFSAHRDLCLPGSSNSHVSASRVAGIAGAHRHTWLIYVFFSWRQGFAVLAGLVSNS

SEQ ID NO: 1749 - protein, 618 aa, Homo sapiens
  misc_feature (1)...(618): Xaa = any amino acid or nothing
LRSYGCKAPSRISHLHKFLFLLLPSLLMGYSESPPPITDSWAPFISLTHHVLSQSQSPLSSNCWICLSTHTQXFTALPADLLTWTQSNVSLHISYLAIPFLADSFLKPVLXPGNSAKHLSFKLSSLSMVSGRAVALLHLIASGLTSIQTNTASSKPPIWGYLSTQTSFISPPPLCLSRTYPNPAHATMVGQVPQSLCGLIFTLRTPCRPSILHPNYKIISTSAWQKVLCFSGSPTIHTSLHLTTGSSFLSFHPIPGFPAANSALYVSSLKGPPGKNVTIPSPVTGTXQPPHRGSNRLTVDKDNFFLSPKPNSLHQLPSQTPYQALTGAALAGSYPIWENENTLSWLPTFTYNFCLSTPSLFFLCDTNXYLCLPANWSGTCTLVFQAPTINILPPNQTILISVEASISSSPIRNKWALHLITLLTGLGITAALGTGIAGITTSITSYQTLFTTLSNTVEDMHTSITSLQRQLDFLVGVILQNWRVLDLLTTEKGGTCIYLQEECCFCVNESGIVHIAVRRLHDRAAELXHQVADSWWQGSSLLRWIPWVAPFLGPLIFLFLLLMIGPCIFNLVSRFISQRLNCFIQASMQKHIDNIFHLCHVXYQSLRGNHSEAPEPRP

SEQ ID NO: 1750 - protein, 150 aa, Homo sapiens
THWRHSSGVPGSTTARRRRRELEIATSDNQEYYNRLCQEVTNRERNDQKMLADLDDLNRTKKYLEERLIELLRDKDALWQKSDALEFQQKLSAEERWLGDTEANHCLDCKREFSWMVRRHHCRICGRIFCYYCCNNYVLSKHGGKKERCC

SEQ ID NO: 1751 - protein, 208 aa, Homo sapiens
  misc_feature (1)...(208): Xaa = any amino acid or nothing
MAPQHSSLDDKVPQQASTVCFEFQDILQHSQCTEHKDSLWGPGARSQPFGAHNTRLSPDSCPEKIVLRALKDSRAGMPEQDKDPGVQENPDDQRRVPQGTGDAPSAFRPLWDNGGLSPFVSRPGPLERDLHAQRSEVTYNQRSQSSWMSSFPKRNAFVSPYSSMGQAQPGLPKTNPIGESCCWEGLSLSTQILGXQKPSKYIPSLCKR

SEQ ID NO: 1752 - protein, 499 aa, Homo sapiens
  misc_feature (1)...(499): Xaa = any amino acid or nothing
MELPSGPGPERLFDSHRLPGDCFLLLVLLLYAPVGFCLLVLRLFLGIHVFLVSCALPDSVLRRFVVRTMCAVLGLVARQEDSGLRDHSVRVLISNHVTPFDHNIVNLLTTCSTVSESEAESATGRFPGAQLKAPLSPLAFRMEDTEALPLTPILYPTCQFFFFIFLNIFLLAFSSPGSQPLLNSPPSFVCWSRGFMEMNGRGELVESLKRFCASTRLPPTPLLLFPEEEATNGREGLLRFSSWPFSIQDVVQPLTLQVQRTLVSVTVSDASWVSELLWSLFVPFTVYQVRWLRPVHRQLGEANEEFALRVQQLVAKELGQTGTRLTPADKAEHMKRQRHPRLRPQSAQSSFPPSPWVLSSSDVQTGQTLGFREFKESFCPHVAIGVFIPERPWPKTGCCKTLTIHLILLXGGPVSFSCPEDIHPRGTXVPTQQASGLPSFPSYGPARGGVLXHPSAQQPLTFAKSSWARAGRALQERKQALYEYARRRFTERRAPGGLD

SEQ ID NO: 1753 - protein, 134 aa, Homo sapiens
DPSPSLLAVALGLRAGERTRSGPGSSSPSGGISGGASAGLASSPECACGRSHFTCAVSALGECTCIPAQWQCDGDNDCGDHSDEDGCILPTCSPLDFHCDNGKCIRRSWVCDSDNDCEDDSDEQDCPPRECEED

SEQ ID NO: 1754 - protein, 136 aa, Homo sapiens
  misc_feature (1)...(136): Xaa = any amino acid or nothing
PRHGWGRRVLGRDRPRLQKVKKSVKAIYIPGQDHVQNEEIYARVLDKFGSNFLSRDNADLGTAFVKFSTLTKXLSALLKNLLQGLSRNVIFTLDSLLKGDLKGVKGDLKKPFDKAWKDYETKFAKIEKEKREREWR

SEQ ID NO: 1755 - protein, 148 aa, Homo sapiens
AAVPVENPWDDPRVRPRVRIFTWEDCIAGQAKVLCNDSYGVTIDWSPKGAFIRLTSQSVGNGHPASKENDQMVDTIKNTTKVPIIWTYGDMVEPRPQMIRPAVGAKHKELWKILMALKKIKIWEGKYTKPSQYNPNYMLELAHNDSVW

SEQ ID NO: 1756 - protein, 141 aa, Homo sapiens
  misc_feature (1)...(141): Xaa = any amino acid or nothing
LSMLSTISTEHRLSVLWPIWYCCHCPTHLSAVMCVLLWALSLLQSILEWMFCSFLFSDVDSDNWCQILDFLTAVWLIFLILVLCGFTLVLLVRIICGSQKMPLTRLYVTILLTGLVFLFCSLPLSIQXFLLYWIEKDLDDL

SEQ ID NO: 1757 - protein, 542 aa, Homo sapiens
SGDLSPAELMMLTIGDVIKQLIEAHEQGKDIDLNKVKTKTAAKYGLSAQPRLVDIIAAVPPQYRKVLMPKLKAKPIRTASGIAVVAVMCKPHRCPHISFTGNICVYCPGGPDSDFEYSTQSYTGYEPTSMRAIRARYDPFLQTRHRIEQLKQLGHSVDKVEFIVMGGTFMALPEEYRDYFIRNLHDALSGHTSNNIYEAVKYSERSLTKCIGITIETRPDYCMKRHLSDMLTYGCTRLEIGVQSVYEDVARDTNRGHTVKAVCESFHLAKDSGFKVVAHMMPDLPNVGLERDIEQFTEFFENPAFRPDGLKLYPTLVIRGTGLYELWKSGRYKSYSPSDLVELVARILALVPPWTRVYRVQRDIPMPLVSSGVEHGNLRELALARMKDLGIQCRDVRTREVGIQEIHHKVRPYQVELVRRDYVANGGWETFLSYEDPDQDILIGLLRLRKCSEETFRFELGGGVSIVRELHVYGSVVPVSSRDPTKFQHQGFGMLLMEEAERIAREEHGSGKIAVISGVGTRNYYRKIGYRLQGPYMVKMLK

SEQ ID NO: 1758 - protein, 155 aa, Homo sapiens
  misc_feature (1)...(155): Xaa = any amino acid or nothing
AIASPRAAGIRHELTSTMAAGKNKRLTKGGKKGAKKKAVDNIINIGKTLVTRTQRTKIASDGLKGRVFEESLADLQNDTDGYLLRVIXVAFTTERTNQIREVFNKLIPDSIGKDIEKACQSIYPLHDDFARKVKMLKKPKFELRKLMELHGEGSS

SEQ ID NO: 1759 - protein, 415 aa, Homo sapiens
PRWRNSARDEILLSFPQNYYIQWLNGSLIHGLWNLASLFSNLCLFVLMPFAFFFLESEGFAGLKKGIRARILETLGMLLLLALLILGIVWVASALIDNDAASMESLYDLWEFYLPYLYSCISLMGCLLLLLCTPVGLSRMFTVMGQLLVKPTILEDLDEQIYIITLEEEALQRPTKWAVFIRWKYNIMELEQELENVKTLKTKLERRKKASAWERNLVYPAVMVLLLIETSISVLLVACNILCLLVDETAMPKGTRGPGIGNASLSTFGFVGAALEIILIFYLMVSSVVGFYSLRFFGNFTPKKDDTTMTKIIGNCVSILVLSSALPVMSRTLGITRFDLLGDFGRFNWLGNFYIVLSYNLLFAIVTTLCLVRKFTSAVREELFKALGLHKLHLPNTSRDSETAKPSVNGHQKAL

SEQ ID NO: 1760 - protein, 435 aa, Homo sapiens
  misc_feature (1)...(435): Xaa = any amino acid or nothing
GSHRFSLASPLDPEVGPYCDTPTMRTLFNLLWLALACSPVHTTLSKSDAKKAASKTLLEKSQFSDKPVQDRGLVVTDLKAESVVLEHRSYCSAKARDRHFAGDVLGYVTPWNSHGYDVTKVFGSKFTQISPVWLQLKRRGREMFEVTGLHDVDQGWMRAVRKHAKGLPXCLGSCLRTGLTMISGYVLDSEDEIEELSKTVVQVAKNQHFDGFVVEVWNQLLSQKRVGLIHMLTHLAEALHQARLLALLVIPPAITPGTDQLGMFTHKEFEQLAPVLDGFSLMTYDYSTAHQPGPNAPLSWVRACVQVLDPKSKWRSKILLGLNFYGMDYATSKDAREPVVGARYIQTLKDHRPRMVWDSQVSEHFFEYKKSRSGRHVVFYPTLKSLQVRLELARELGVGVSIWELGQGLDYFYDLLXVGIAASAVDVFFSKPWSE

SEQ ID NO: 1761 - protein, 875 aa, Homo sapiens
VATRKLAKGFTQFAKMTEGTKKTSKKFKFFKFKGFGSFSNLPRSFTLRRSSASISRQSHLEPDTFEATQDDMVTVPKSPPAYARSSDMYSHMGTMPRPSIKKAQNSQAARQAQEAGPKPNLVPGGVPDPPGLEAAKEVMVKATGPLEDTPAMEPNPSAVEVDPIRKPEVPTGDVEEERPPRDVHSERAAGEPEAGSDYVKFSKEKYILDSSPEKLHKELEEELKLSSTDLRSHAWYHGRIPREVSETLVQRNGDFLIRDSLTSLGDYVLTCRWRNQALHFKINKVVVKAGESYTHIQYLFEQESFDHVPALVRYHVGSRKAVSEQSGAIIYCPVNRTFPLRYLEASYGLGQGSSKPASPVSPSGPKGSHMKRRSVTMTDGLTADKVTRSDGCPTSTSLPRPRDSIRSCALSMDQIPDLHSPMSPISESPSSPAYSTVTRVHAAPAAPSATALPASPVARRSSEPQLCPGSAPKTHGESDKGPHTSPSHTLGKASPSPSLSSYSDPDSGHYCQLQPPVRGSREWAATETSSQQARSYGERLKELSENGAPEGDWGKTFTVPIVEVTSSFNPATFQSLLIPRDNRPLEVGLLRKVKELLAEVDARTLARHVTKVDCLVARILGVTKEMQTLMGVRWGMELLTLPHGRKLRLDLLERFHTMSIMLAVDILGCTGSAEERAALLHKTIQLAAELRGTMGNMFSFAAVMGALDMAQISRLEQTWVTLRQRHTEGAILYEKKLKPFLKSLNEGKEGPPLSNTTFPHVLPLITLLECDSAPPEGPEPWGSTEHGVEVVLAHLEAARTVAHHGGLYHTNAEVKLQGFQARPELLEVFSTEFQMRLLWGSQGASSSQARRYEKFDKVLTALSHKLEPAVRSSEL

SEQ ID NO: 1762 - protein, 299 aa, Homo sapiens
  misc_feature (1)...(299): Xaa = any amino acid or nothing
IDRAAECRTKPLPMAVSIRGNADSIVACLVLMVLYLIKKRLVACAAVFYGFAVHMKIYPETYILPITLHLLPDRDNDKSLRQFRYTFQACLXELLKRLCNRTALMFVAVAGLTFFALSFGFYYEYGWEFLEHTYFYHLTRRDIRHNFSPYFYMLYLTAESKWSFSLGIAAFLPQLILLSAVSFAYYRDLVFCWFLHTSIFVTFNKVCTSQYFLWYLCLLPLVMPLVRMPWKRAVVLLMLWFIGQAMWLAPAYVLEFQGKNTFLFIWLAGLFFLLINCSILIQIISHYKEEPLTERIKYD

SEQ ID NO: 1763 - protein, 157 aa, Homo sapiens
  misc_feature (1)...(157): Xaa = any amino acid or nothing
PIPVRWNSLEGRLLRGYEQHANDGKDYISRNXDLRSWTAADMAAQITKRKWEAEEFAEQIKAYLEGTCVERLRTHLENGKETLQLTEQSSQPTIPIVGIVAGLVLLGAVVTGAVVSAVMCRKKNSGHFLPTDRVSYSEAASSDHAQGSDVSLTACKV

SEQ ID NO: 1764 - protein, 345 aa, Homo sapiens
HQILELKKKILKTYNPDYDEDLVQEASSEDVLGVHMVDKDTERDIEMKRQLRRLRELHLYSTWKKYQEAMKTSLGVPQRERDEGSLGKPLCPPEILSETLPGSVKKRVCFPSEDHLEEFIAEHLPEASNQSLLTVAHADAGTQTNGDLEDLEEHGPGQTVSEEATEVHMMEGDPDTLAELLIRDVLQELSSYNGEEEDPEEVKTSLGVPQRGDLEDLEEHVPGQTVSEEATGVHMMQVDPATLAKSDLEDLEEHVPEQTVSEEATGVHMMQVDPATLAKQLEDSTITGSHQQMSASPSSAPAEEATEKTKVEEEVKTRKPKKKTRKPSKKSRWNVLKCWDIFNIF

SEQ ID NO: 1765 - protein, 39 aa, Homo sapiens
  misc_feature (1)...(39): Xaa = any amino acid or nothing
IPWSWVGRLSVRKMSILFXLTYNYNAILNKTPPSFSPSL

SEQ ID NO: 1766 - protein, 203 aa, Homo sapiens
  misc_feature (1)...(203): Xaa = any amino acid or nothing
RQEKMGLGEIGASGVLRSMLKERKKQNMKGNGNVTLTPLLPAVQCGCHLQPAGRSPLPSSHSAPGLCSPLHPLQPQQEASTCPSGTLQGREKAAPGQGRPLCSLWAGGAGAPGERGAEGRGPSDQAPDPKSGPWLFPPGLGAPAEVRLHNVPHNLRRPPLPXARGKXPPNSGCPWSEGRAKQPLSCGPKPQCSLPSQVPGDTH

SEQ ID NO: 1767 - protein, 686 aa, Homo sapiens
  misc_feature (1)...(686): Xaa = any amino acid or nothing
EAQDPRACGPDAGGRFAARDAPGNSLRPPPSSPPGWPGQLRLLPRVPGSELRCGKPERGRLPASPPGKIRGWPPGISKRPGLGGRSFPPGFAPRTWRPEARGPSVQSLPPIFSPQSAQTTARXRPGAPKNAGRCGGARGPRLSLGPPPGPPPAPALPARASAGAGAAAAALAVGGVRGAGGARGTGGYGHCSGRPTGRTGPGPQGPGPPMPARPRXASSTRGSRRGPGSRPARAAAAPRAGDHGRRPVRVHLRQHTAVXEPRLGDATAPPGGAAGPGAPAPRGPGWDCALLPSPGPRSPRAVGCAEPEIWDPSPRRGTSPVPSVRSLRSEPANPRLGLPALLNSYPLKGPGLPPPWGPRTQTGHVIITVQPSGSCIEHSKSLDRGPWGAPPWGPSSSGLCSPKLATAGPPQSWGLCQIGRRRGLGGPGLKRGETGLLXGCSMDHANRTKGPGVPTSNRCFSHIPGGDGCSDHSSCEGHPDLHAGREMPAAPGLSELERVRFTVGCGGLASGISSASVSGLSPNRAGGPGQGDWEMYPVSWQTQESGGQGSPKTGRXVGMLQAGAGSLQGGTGDGVWGLWEDGPRGXDSPLPSGTGTEPXTPTTSIPFFPQPSGVYPSRATLLPMPSYXALGPSANKSEKPLLSFLYRGLCCRISLQLAKGIGQLSEIPLLNVETAFWSMWVTYFRK

SEQ ID NO: 1768 - protein, 606 aa, Homo sapiens
  misc_feature (1)...(606): Xaa = any amino acid or nothing
EEEEEEEDEDDDDNNEEEEFECYPPGMKVQVRYGRGKNQKMYEASIKDSDVEGGEVLYLVHYCGWNVRYDEWIKADKIVRPADKNVPKIKHRKKIKNKLDKEKDKDEKYSPKNCKPPALGPNPPFQTNPISWKWYPKLDLTDAKNSDTAHIKSIEITSILNGLQASESSAEDSEQEDERGAQDMDNNGKEESKIDHLTNNRNDLISKEEQNSSSLLEENKVHADLVISKPVSKSPERLRKDIEVLSEDTDYEEDEVTKKRKDVKKDTTDKSSKPQIKRGKRRYCNTEECLKTGSPGKKEEKAKNKESLCMENSSNSSSDEDEEETKAKMTPTKKYNGLEEKRKSLRTTGFYSGFSEVAEKRIKLLNNSDERLQNSRAKDRKDVWSSIQGQWPKKTLKELFSDSDTEAAASPPHPAPEEGVAEESLQTVAEEESCSPSVELEKPPPVNVDSKPIEEKTVEVNDRKAEFPSSGSNFSAXIPLPYLHLNRLHQSLXQKGSRQQSSVTVSEPLAPNQEEVRSIKSETDSTIEVDSVAGELQDLQSEREXLASRFXCQCELKQXXSARTRTSXKSLYRSEKSERCSGRRKFIKKAEKKPXSNSGKQQKEGK

SEQ ID NO: 1769 - protein, 86 aa, Homo sapiens
QRECLSIHIGQAGIQIGDACWELYCLEHGIQPNGVVLDTQQDQLENAKMEHTNASFDTFFCETRAGKHVPRALFVDLEPTVIDGIR

SEQ ID NO: 1770 - protein, 108 aa, Homo sapiens
  misc_feature (1)...(108): Xaa = any amino acid or nothing
RRLSFFFXIWSSVLVTQARVQWRDLGSPQPLPPGFKRFSCLSLPSSWDYRHPSPRPVNFHVFLVVMGFHHVGQAGLELLTSGDLPALASQSARITGVNHCAQPRGHFH

SEQ ID NO: 1771 - protein, 324 aa, Homo sapiens
ADSNLIESCWQELGLGPWGGDWRVEQVGASASLRFPREVCSIRFLFTAVSLLSLFLSAFWLGLLYLVSPLENEPKEMLTLSEYHERVRSQGQQLQQLQAELDKLHKEVSTVRAANSERVAKLVFQRLNEDFVRKPDYALSSVGASIDLQKTSHDYADRNTAYFWNRFSFWNYARPPTVILEPHVFPGNCWAFEGDQGQVVIQLPGRVQLSDITLQHPPPSVEHTGGANSAPRDFAVFFLLSFFTHQGLQVYDETEVSLGKFTFDVEKSEIQTFHLQNDPPAAFPKVKIQILSNWGHPRFTCLYRVRAHGVRTSEGAEGSAQGPH

SEQ ID NO: 1772 - protein, 141 aa, Homo sapiens
  misc_feature (1)...(141): Xaa = any amino acid or nothing
EFDAQPSIGALVVFKRPXATTGSDPGPKRGMNYLVSCSMRSPESGKGEPGTARDYTPMGRPPPPVPSVSPGPLPGSLAIAPHSPEPHPWEQQPPRGQARSPPGGWLGSATRVRRPHNHPRGHHSPVDTAGAPASPGPDVCE

SEQ ID NO: 1773 - protein, 205 aa, Homo sapiens
DAQRAIYSSVGPAVSLRQRQQDGAVKESGRRGGVRSFSRAAAAMAPIKVGDAIPAVEVFEGEPGNKVNLAELFKGKKGVLFGVPGAFTPGCSKTHLPGFVEQAEALKAKGVQVVACLSVNDAFVTGEWGRAHKAEGKVRLLADPTGAFGKETDLLLDDSLVSIFGNRRLKRFSMVVQDGIVKALNVEPDGTGLTCSLAPNIISQL

SEQ ID NO: 1774 - protein, 2560 aa, Homo sapiens
  misc_feature (1)...(2560): Xaa = any amino acid or nothing
RQVTRVGTRVLGSTTAAVFLSVEDDNDNAPQFSEKRYVVQVREDVTPGAPVLRVTASDRDKGSNAVVHYSIMSGNARGQFYLDAQTGALDVVSPLDYETTKEYTLRVRAQDGGRPPLSNVSGLVTVQVLDINDNAPIFVSTPFQATVLESVPLGYLVLHVQAIDADAGDNARLEYRLAGVGHDFPFTINNGTGWISVAAELDREEVDFYSFGVEARDHGTPALTASASVSVTALDVNDNNPTFTQPEYTVRLNEDAAVGTSVVTVSAVDRDAHSVITYQITSGNTRNRFSITSQSGGGLVSLALPLDYKLERQYVLAVTASDGTRQDTAQIVVNVTDANTHRPVFQSSHYTVNVNEDRPAGTTVVLISATDEDTGENARITYFMEDSIPQFRIDADTGAVTTQAELDYEDQVSYTLAITARDNGIPQKSDTTYLEILVNDVNDNAPQFLRDSYQGSVYEDVPPFTSVLQISATDRDSGLNGRVFYTFQGGDDGDGDFIVESTSGIVRTLRRLDRENVAQYVLRAYAVDKGMPPARTPMEVTVTVLDVNDNPPVFEQDEFDVFVEENSPIGLAVARVTATDPDEGTNAQIMYQIVEGNIPEVFQLDIFSGELTALVDLDYEDRPEYVLVIQATSAPLVSRATVHVRLLDRNDNPPVLGNFEILFNNYVTNRSSSFPGGAIGRVPAHDPDISDSLTYSFERGNELSLVLLNASTGELKLSRALDNNRPLEAIMSVLVSDGVHSVTAQCALRVTIITDEMLTHSITLRLEDMSPERFLSPLLGLFIQAVAATLATPPDHVVVFNVQRDTDAPGGHILNVSLSVGQPPGPGGGPPFLPSEDLQERLYLNRSLLTAISAQRVLPFDDNICLREPCENYMRCVSVLRFDSSAPFIASSSVLFRPIHPVGGLRCRCPPGFTGDYCETEVDLCYSRPCGPHGRCRSREGGYTCLCRDGYTGEHCEVSARSGRCTPGVCKNGGTCVNLLVGGFKCDCPSGDFEKPYCQVTTRSFPAHSFITFRGLRQRFHFTLALSFATKERDGLLLYNGRFNEKHDFVALEVIQEQVQLTFSAGESTTTVSPFVPGGVSDGQWHTVQLKYYNKPLLGQTGLPQGPSEQKVAVVTVDGCDTGVALRFGSVLGNYSCAAQGTQGGSKKSLDLTGPLLLGGVPDLPESFPVRMRQFVGCMRNLQVDSRHIDMADFIANNGTVPGCPAKKNVCDSKTCHNGGTCVNQWDAFSCECPLGFGGKSCAQEMANPQHFLGSSLVAWHGLSLPISQPWYLSLMFRTRQADGVLLQAITRGRSTITLQLREGHVMLSVEGTGLQASSLRLEPGRANDGDWHHAQLALGAIGGPGHAILSFDYGQQRAEGNLGPRLHGLHLSNITVGGIPGPAGGVARGFRGCLQGVRVSDTPEGVNSLDPSHGESINVEQGCSLPDPCDSNPCPANSYCSNDWDSYSCSCDPGYYGDNCTNVCDLNPCEHQSVCTRKPSAPHGYTCECPPNYLGPYCETRIDQPCPRGWWGHPTCGPCNCDVSKGFDPDCNKTSGECHCKENHYRPPGSPTCLLCDCYPTGSLSRVCDPEDGQCPCKPGVIGRQCDRCDNPFAEVTTNGCEVNYDSCPRAIEAGIWWPRTRFGLPAAAPCPKGSFGTAVRHCDEHRGWLPPNLFNCTSITFSELKGFAERLQRNESGLDSGRSQQLALLLRNATQHTAGYFGSDVKVAYQLATRLLAHESTQRGFGLSATQDVHFTENLLRVGSALLDTANKRHWELIQQTEGGTAWLLQHYEAYASALAQNMRHTYLSPFTIVTPNIVISVVRLDKGNFAGAKLPRYEALRGEQPPDLETTVILPESVFRETPPVVRPAGPGEAQEPEELARRQRRHPELSQGEAVASVIIYRTLAGLLPHNYDPDKRSLRVPKRPIINTPVVSISVHDDEELLPRALDKPVTVQFRLLETEERTKPICVFWNHSILVSGTGGWSARGCEVVFRNESHVSCQCNHMTSFAVLMDVSRRENGEILPLKTLTYVALGVTLAALLLTFFFLTLLRILRSNQHGIRRNLTAALGLAQLVFLLGINQADLPFACTVIAILLHFLYLCTFSWALLEALHLYRALTEVRDVNTGPMRFYYMLGWGVPAFITGLAVGLDPEGYGNPDFCWLSIYDTLIWSFAGPVAFAVSMSVFLYILAARASCAAQRQGFEKKGPVSGLQPSFAVLLLLSATWLLALLSVNSDTLLFHYLFATCNCIQGPFIFLSYVVLSKEVRKALKLACSRKPSPDPALTTKSTLTSSYNCPSPYADGRLYQPYGDSAGSLHSTSRSGKSQPSYIPFLLREESALNPGQGPPGLGGIPGRLCFLGRFKDQQHDSXTRDFDSDLSLEDDQSGSYASTHSSDSEEEEEEEEEEAAFPGEQGWDSLLGPGAERLPLHSTPKDGGPGPGKAPWPGDFGTTAKESSGNGAPEERLRENGDALSREGSLGPLPGSSAQPHKGILKKKCLPTISEKSSLLRLPLEQCTGSSRGSSASEGSRGGPPSRPPPRQSLQEQLNGVMPIAMSIKAGTVDEDSSGSEFLFFNFLH

SEQ ID NO: 1775 - protein, 420 aa, Homo sapiens
  misc_feature (1)...(420): Xaa = any amino acid or nothing
GEPAVQSCDCGCTQRSCPWLLVAPGLLSSSSSRAASVREAEDAPLQPASIHPVSQGSRGPEGSLGSAECLPGDPLGARRATRAHSPVPGPPPSLPAAGTAVKRGLQPGXGAGATSTPGTGAATGGLCGPAWAAPSAVGPCCCCPSISTTPSQMRSARPSLGCLPSWASPGTEHPPGPQGPGPSXDLCSVXKREFQRGPWAGMVILHRISAADPARAPGPDSNLQSALQQPATGCSEPAAVYSPPIGLWGAXXPEYGXPQHSLPGXTAPADRXPAGIKDRVYSNSIYELLENGQRAGTCVLEYATPLQTLFAMSQYSQAGFSREDRLEQAKLFCRTLEDILADAPESQNNCRLIAYQEPADDSSFSLSQEVLRHLRQEEKEEVTVGSLKTSAVPSTSTMSQEPELLISGMEKPLPLRTDFS

SEQ ID NO: 1776 - protein, 431 aa, Homo sapiens
  misc_feature (1)...(431): Xaa = any amino acid or nothing
AIWWLSWLQHDLLPTPTQVAIDFTASNGDPRSSQSLHCLSPRQPNHYLQALRAVGGICQDYDSVGESGAGGNRQGGLAQRIPQLFLLPSDKRFPAFGFGARIPPNFEVGXMRGKEGDGGRVSQAEKAGPHCSRLALTGSHDFAINFDPENPECEGKRGDFHLPRLPADTLHTGAQTPLPRAQLPVPSTHPRPVFIEISGVIASYRRCLPQIQLYGPTNVAPIINRVAEPAQREQSTGQATKYSVLLVLTDGVVSDMAETRTAIVRASRLPMSIIIVGVGNADFSDMRLLDGDDGPLRCPRGVPAARDIVQFVPFRDFKDVSPPGPFRLKDSSASHPPKSDLRLPPFDVLLRTREPSWPPXSPTSPSDDPASPTLPLTPNHITVPTLAAPSALAKCVLAEVPRQVVEYYASQGISPGAPRPCTLATTPSPSP

SEQ ID NO: 1777 - protein, 3223 aa, Homo sapiens
GCQSCWPAWPRLRRRGPASAGARLGRKAPWGLPGRVQDGRPLRFCFYLRPRAPFIAPVLSGAASRPEASGDCRAGRETAMATLEKLMKAFESLKSFQQQQQQQQQQQQQQQQQQQQQQQPPPPPPPPPPPQLPQPPPQAQPLLPQPQPPPPPPPPPPGPAVAEEPLHRPKKELSATKKDRVNHCLTICENIVAQSVRNSPEFQKLLGIAMELFLLCSDDAESDVRMVADECLNKVIKALMDSNLPRLQLELYKEIKKNGAPRSLRAALWRFAELAHLVRPQKCRPYLVNLLPCLTRTSKRPEESVQETLAAAVPKIMASFGNFANDNEIKVLLKAFIANLKSSSPTIRRTAAGSAVSICQHSRRTQYFYSWLLNVLLGLLVPVEDEHSTLLILGVLLTLRYLVPLLQQQVKDTSLKGSFGVTRKEMEVSPSAEQLVQVYELTLHHTQHQDHNVVTGALELLQQLFRTPPPELLQTLTAVGGIGQLTAAKEESGGRSRSGSIVELIAGGGSSCSPVLSRKQKGKVLLGEEEALEDDSESRSDVSSSALTASVKDEISGELAASSGVSTPGSAGHDIITEQPRSQHTLQADSVDLASCDLTSSATDGDEEDILSHSSSQVSAVPSDPAMDLNDGTQASSPISDSSQTTTEGPDSAVTPSDSSEIVLDGTDNQYLGLQIGQPQDEDEEATGILPDEASEAFRNSSMALQQAHLLKNMSHCRQPSDSSVDKFVLRDEATEPGDQENKPCRIKGDIGQSTDDDSAPLVHCVRLLSASFLLTGGKNVLVPDRDVRVSVKALALSCVGAAVALHPESFFSKLYKVPLDTTEYPEEQYVSDILNYIDHGDPQVRGATAILCGTLICSILSRSRFHVGDWMGTIRTLTGNTFSLADCIPLLRKTLKDESSVTCKLACTAVRNCVMSLCSSSYSELGLQLIIDVLTLRNSSYWLVRTELLETLAEIDFRLVSFLEAKAENLHRGAHHYTGLLKLQERVLNNVVIHLLGDEDPRVRHVAAASLIRLVPKLFYKCDQGQADPVVAVARDQSSVYLKLLMHETQPPSHFSVSTITRIYRGYNLLPSITDVTMENNLSRVIAAVSHELITSTTRALTFGCCEALCLLSTAFPVCIWSLGWHCGVPPLSASDESRKSCTVGMATMILTLLSSAWFPLDLSAHQDALILAGNLLAASAPKSLRSSWASEEEANPAATKQEEVWPALGDRALVPMVEQLFSHLLKVINICAHVLDDVAPGPAIKAALPSLTNPPSLSPIRRKGKEKEPGEQASVPLSPKKGSEASAASRQSDTSGPVTTSKSSSLGSFYHLPSYLKLHDVLKATHANYKVTLDLQNSTEKFGGFLRSALDVLSQILELATLQDIGKCVEEILGYLKSCFSREPMMATVCVQQLLKTLFGTNLASQFDGLSSNPSKSQGRAQRLGSSSVRPGLYHYCFMAPYTHFTQALADASLRNMVQAEQENDTSGWFDVLQKVSTQLKTNLTSVTKNRADKNAIHNHIRLFEPLVIKALKQYTTTTCVQLQKQVLDLLAQLVQLRVNYCLLDSDQVFIGFVLKQFEYIEVGQFRESEAIIPNIFFFLVLLSYERYHSKQIIGIPKIIQLCDGIMASGRKAVTHAIPALQPIVHDLFVLRGTNKADAGKELETQKEVVVSMLLRLIQYHQVLEMFILVLQQCHKENEDKWKRLSRQIADIILPMLAKQQMHIDSHEALGVLNTLFEILAPSSLRPVDMLLRSMFVTPNTMASVSTVQLWISGILAILRVLISQSTEDIVLSRIQELSFSPYLISCTVINRLRDGDSTSTLEEHSEGKQIKNLPEETFSRFLLQLVGILLEDIVTKQLKVEMSEQQHTFYCQELGTLLMCLIHIFKSGMFRRITAAATRLFRSDGCGGSFYTLDSLNLRARSMITTHPALVLLWCQILLLVNHTDYRWWAEVQQTPKRHSLSSTKLLSPQMSGEEEDSDLAAKLGMCNREIVRRGALILFCDYVCQNLHDSEHLTWLIVNHIQDLISLSHEPPVQDFISAVHRNSAASGLFIQAIQSRCENLSTPTMLKKTLQCLEGIHLSQSGAVLTLYVDRLLCTPFRVLARMVDILACRRVEMLLAANLQSSMAQLPMEELNRIQEYLQSSGLAQRHQRLYSLLDRFRLSTMQDSLSPSPPVSSHPLDGDGHVSLETVSPDKDWYVHLVKSQCWTRSDSALLEGAELVNRIPAEDMNAFMMNSEFNLSLLAPCLSLGMSEISGGQKSALFEAAREVTLARVSGTVQQLPAVHHVFQPELPAEPAAYWSKLNDLFGDAALYQSLPTLARALAQYLVVVSKLPSHLHLPPEKEKDIVKFVVATLEALSWHLIHEQIPLSLDLQAGLDCCCLALQLPGLWSVVSSTEFVTHACSLIYCVHFILEAVAVQPGEQLLSPERRTNTPKAISEEEEEVDPNTQNPKYITAACEMVAEMVESLQSVLALGHKRNSGVPAFLTPLLRNIIISLARLPLVNSYTRVPPLVWKLGWSPKPGGDFGTAFPEIPVEFLQEKEVFKEFIYRINTLGWTSRTQFEETWATLLGVLVTQPLVMEQEESPPEEDTERTQINVLAVQAITSLVLSAMTVPVAGNPAVSCLEQQPRNKPLKALDTRFGRKLSIIRGIVEQEIQAMVSKRENIATHHLYQAWDPVPSLSPATTGALISHEKLLLQINPERELGSMSYKLGQVSIHSVWLGNSITPLREEEWDEEEEEEADAPAPSSPPTSPVNSRKHRAGVDIHSCSQFLLELYSRWILPSSSARRTPAILISEVVRSLLVVSDLFTERNQFELMYVTLTELRRVHPSEDEILAQYLVPATCKAAAVLGMDKAVAEPVSRLLESTLRSSHLPSRVGALHGILYVLECDLLDDTAKQLIPVISDYLLSNLKGIAHCVNIHSQQHVLVMCATAFYLIENYPLDVGPEFSASIIQMCGVMLSGSEESTPSIIYHCALRGLERLLLSEQLSRLDAESLVKLSVDRVNVHSPHRAMAALGLMLTCMYTGKEKVSPGRTSDPNPAAPDSESVIVAMERVSVLFDRIRKGFPCEARVVARILPQFLDDFFPPQDIMNKVIGEFLSNQQPYPQFMATVVYKVFQTLHSTGQSSMVRDWVMLSLSNFTQRAPVAMATWSLSCFFVSASTSPWVAAILPHVISRMGKLEQVDVNLFCLVATDFYRHQIEEELDRRAFQSVLEVVAAPGSPYHRLLTCLRNVHKVTTC

SEQ ID NO: 1778 - protein, 142 aa, Homo sapiens
NSRPSPSAALVEVLLRSGSTFPHTVSGGWAAWGPWSSCSRDCELGFRVRKRTCTNPEPRNGGLPCVGDAAEYQDCNPQACPVRGAWSCWTSWSPCSASCGGGHYQRTRSCTSPAPSPGEDICLGLHTEEALCATQACPEGWS

SEQ ID NO: 1779 - protein, 194 aa, Homo sapiens
  misc_feature (1)...(194): Xaa = any amino acid or nothing
DALDRRYLERCHPAAGGWVGEGEXALCQKTRFSGVLEPPLPSLKDGGRFPAWTXRSCSKSLRAAFTSQFFPSRRSRASPGSAPGNGQNLTEQHPCPGSCDPQVLSASWMXVEHRSKFRPPPXNSTIPPESRSXQGGTVQTGQHSSGREAGSWRARGRNAGRRXKGGGKIGTKQGAVRARKECRGEMASGETDSE

SEQ ID NO: 1780 - protein, 843 aa, Homo sapiens
FRMRIFLHCPWNQQMWKIWNLLETSLESCKAHLSIQKLLKERQQLPVFKHRDSIVETLKRHRVVVVAGETGSGKSTQVPHFLLEDLLLNEWEASKCNIVCTQPRRISAVSLANRVCDELGCENGPGGRNSLCGYQIRMESRACESTRLLYCTTGVLLRKLQEDGLLSNVSHMFIVDEVHERSVQSDFLLIILKEILQKRSDLHLILMSATVDSEKFSTYFTHCPILRISGRSYPVEVFHLEDIIEETGFVLEKDSEYCQKFLEEEEEVTINVTSKAGGIKKYQEYIPVQTGAHADLNPFYQKYSSRTQHAILYMNPHKINLDLILELLAYLDKSPQFRNIEGAVLIFLPGLAHIQQLYDLLSNDRRFYSERYKVIALHSILSTQDQAAAFTLPPPGVRKIVLATNIAETGITIPDVVFVIDTGRTKENKYHESSQMSSLVETFVSKASALQRQGRAGRVRDGFCFRMYTRERFEGFMDYSVPEILRVPLEELCLHIMKCNLGSPEDFLSKALDPPQLQVISNAMNLLRKIGACELNEPKLTPLGQHLAALPVNVKIGKMLIFGAIFGCLDPVATLAAVMTEKSPFTTPIGRKDEADLAKSALAMADSDHLTIYNAYLGWKKARQEGGYRSEITYCRRNFLNRTSLLTLEDVKQELIKLVKAAGFSSSTTSTSWEGNRASQTLSFQEIALLKAVLVAGLYDNVGKIIYTKSVDVTEKLACIVETAQGKAQVHPSSVNRDLQTHGWLLYQEKIRYARVYLRETTLITPFPVLLFGGDIEVQHRERLLSIDGWIYFQAPVKIAVIFKQLRVLIDSVLRKKLENPKMSLENDKILQIITELIKTENN

SEQ ID NO: 1781 - protein, 146 aa, Homo sapiens
  misc_feature (1)...(146): Xaa = any amino acid or nothing
FRPAPGHVQPXGGSSAAAGGGLLSHPRPCQQPCPPAPAPSRPRSLGSLGQRVPAALATAAQELPATLGGDGGKPALTAGEAALPGLHRSGVPAAAARCXPCTSRPTXSTLSPTQAAWWCRPSRRQQRGEASTGGASGRRCGSCFQV

SEQ ID NO: 1782 - protein, 132 aa, Homo sapiens
  misc_feature (1)...(132): Xaa = any amino acid or nothing
QLRRLTLPNFKTYYSSXIIEIAWHXXKNMQIDQWFRRESPEIDLCKYSXLSFDKEAKAIKWKECSLFNKWCYKNWMLHVQKKRIXVQTLHPSQKLKSKWIKDLNVECRITKLLDQEYPGDLGYSRALNSGSR

SEQ ID NO: 1783 - protein, 441 aa, Homo sapiens
CLAPCSPQPEKNGMQPLLLLLPPLLYQQLLHSSLGAPGESTLLVRTSKLLVGLGLQLLVWLLLQTRSLLALQLHLTSSAPLLAAPTAVCSCSRCSAPRSRCVARPAARTGLPTPAPASSPAPAASPAPAASPAPAESTAPQPLILLPKPPPAPGAPPPRPGAPPPRPAASPSPAASPAPPAASPVLTASPPLPAASPSPAASPAPPAASPVLTASPPLPAASPSPAASPAPPAASPVLTASPPLPAASPALAASPVHTASPPVHVASPPVHTASPPVHVASPPVHTASPPVHVASPPVHTASPHVHVASPPVHVASPPVHVASPPVHTASPPVHVASPPVHTASPHVHVASPPVHTASPPVHVASPPVHVASPPVHVAYPPVHVASPPVHVASPPVHVASPPVSCSGDSTSDCFPPQPGAVFPHSLAPSLGGWSHLVAALP

SEQ ID NO: 1784 - protein, 148 aa, Homo sapiens
  misc_feature (1)...(148): Xaa = any amino acid or nothing
GGVNRPRSETEQVKTPVLISSWDYRHPPPRPASFFVFLVXTGFTALARMVLISWPCDLPTSASQSAGITGVRHHARLLYFEQESHSVTQAGWVQWHNLGSLQPLSLEDRLSPGVLGCSALCRSGVRTKFGINMVTSRERGTTRLPKEG

SEQ ID NO: 1785 - protein, 1053 aa, Homo sapiens
MSLVRAALEALDELDLFGVKGGPQSVIHVLADEVQHCQSILNSLLPRASTSKEVDASLLSVVSFPAFAVEDSQLVELTKQEIITKLQGRYGCCRFLRDGYKTPKEDPNRLYYENPAELKLFENIECEWPLFWTYFILDGVFSGNAEQVQEYKEALEAVLIKGKNGVPLLPELYSVPPDRVDEEYQNPHTVDRVPMGKLPHMWGQSLYILGSLMAEGFLAPGEIDPLNRRFSTVPKPDVVVQVYPSLPHGCSSKSPSHQCTIISIRTTRKITAPVSILAETEEIKTILKDKGIYVETIAEVYPIRVQPARILSHIYSSLEIFLPFLNSVSGCNNRMKLSGRPYRHMGVLGTSKLYDIRKTIFTFTPQFIDQQQFYLALDNKMIVEMLRTDLSYLCSRWRMTGQPTITFPISHSMLDEDGTSLNSSILAALRKMQDGYFGGARVQTGKLSEFLTTSCCTHLSFMDPGPEGKLYSEDYDDNYDYLESGNWMNDYDSTSHARCGDEVARYLDHLLAHTAPHPKLAPTSQKGGLDRFQAAVQTTCDLMSLVTKAKELHVQNVHMYLPTKLFQASRPSFNLLDSPHPRQENQVPSVRVEIHLPRDQSGEVDFKALVLQLKETSSLQEQADILYMLYTMKGPDWNTELYNERSATVRELLTELYGKVGEIRHWGLIRYISGILRKKVEALDEACTDLLSHQKHLTVGLPPEPREKTISAPLPYEALTQLIDEASEGDMSISILTQEIMVYLAMYMRTQPGLFAEMFRLRIGLIIQVMATELAHSLRCSAEEATEGLMNLSPSAMKNLLHHILSGKEFGVERSVRPTDSNVSPAISIHEIGAVGATKTERTGIMQLKSEIKQSPGTSMTPSSGSFPSAYDQQSSKDSRQGQWQRRRRLDGALNRVPVGFYQKVWKVLQKCHGLSVEGFVLPSSTTREMTPGEIKFSVHVESVLNRVPQPEYRQLLVEAILVLTMLADIEIHSIGSIIAVEKIVHIANDLFLQEQKTLGADDTMLAKDPASGICTLLYDSAPSGRFGTMTYLSKAAATYVQEFLPHSICAMQ

SEQ ID NO: 1786 - protein, 107 aa, Homo sapiens
  misc_feature (1)...(107): Xaa = any amino acid or nothing
CPXLTWELLEVKKAEVLQDSLDGRYSTPSSCLEQPDSCRPYGRSFYALEEKHVIFSLDVGETDNKGKGKTIRGIXTFKGRKGGTYQREHDANPLAPXSARSCWMRKG

SEQ ID NO: 1787 - protein, 739 aa, Homo sapiens
AVRAEPGLEELSSGLRAHSPSATTVCEPEAQGSASGCRYAAHPHWGLGGAAAAGGSWEPQPPRPVCEPAGRGKPHPPAAPRSPLLPGSRRRPHAAQPGARARTSPPPASARNMAARPAATLAWSLLLLSSALLREGCRARFVAERDSEDDGEEPVVFPESPLQSPTVLVAVLARNAAHTLPHFLGCLERLDYPKSRMAIWAATDHNVDNTTEIFREWLKNVQRLYHYVEWRPMDEPESYPDEIGPKHWPTSRFAHVMKLRQAALRTAREKWSDYILFIDVDNFLTNPQTLNLLIAENKTIVAPMLESRGLYSNFWCGITPKGFYKRTPDYVQIREWKRTGCFPVPMVHSTFLIDLRKEASDKLTFYPPHQDYTWTFDDIIVFAFSSRQAGIQMYLCNREHYGYLPIPLKPHQTLQEDIENLIHVQIEAMIDRPPMEPSQYVSVVPKYPDKMGFDEIFMINLKRRKGQGGDRWLRTLYEQEIEVKIVEAVDGKALNTSQLKALNIEMLPGYRDPYSSRPLTRGEIGCFLSHYSVWKEVIDRELEKTLVIEDDVRFEHQFKKKLMKLMDNIDQAQLDWELIYIGRKRMQVKEPEKAVPNVANLVEADYSYWTLGYVISLEGAQKLVGANPFGKMLPVDEFLPVMYNKHPVAEYKEYYESRDLKAFSAEPLLIYPTHYTGQPGYLSDTETSTIWDNETVATDWDRTHAWKSRKQSRIYSNAKNTEALPPPTSLDTVPSRDEL

SEQ ID NO: 1788 - protein, 133 aa, Homo sapiens
  misc_feature (1)...(133): Xaa = any amino acid or nothing
IFFNSSSLFCRVFCLFLRWSFTLVAQARVQXCNLSSLQPLPPGFKXFSCLSPPRSXDYRRPPPRPANFLYFXXRQGFTVLGQAGLELLTSGDPPTSASQSAGITGVSHRAWPVHAISTHISLVKTRPSLTTLG

SEQ ID NO: 1789 - protein, 462 aa, Homo sapiens
LLQPAMRKSPGLSDCLWAWILLLSTLTGRSYGQPSLQDELKDNTTVFTRILDRLLDGYDNRLRPGLGERVTEVKTDIFVTSFGPVSDHDMEYTIDVFFRQSWKDERLKFKGPMTVLRLNNLMASKIWTPDTFFHNGKKSVAHNMTMPNKLLRITEDGTLLYTMRLTVRAECPMAFGRDFPMDAHACPLKFGSYAYTRAEVVYEWTREPARSVVVAEDGSRLNQYDLLGQTVDSGIVQSSTGEYVVMTTHFHLKRKIGYFVIQTYLPCIMTVILSQVSFWLNRESVPARTVFGVTTVLTMTTLSISARNSLPKVAYATAMDWFIAVCYAFVFSALIEFATVNYFTKRGYAWDGKSVVPEKPKKVKDPLIKKNNTYAPTATSYTPNLARGDPGLATIAKSATIEPKEVKPETKPPEPKKTFNSVSKIDRLSRIAFPLLFGIFNLVYWATYLNREPQLKAPTPHQ

SEQ ID NO: 1790 - protein, 116 aa, Homo sapiens
  misc_feature (1)...(116): Xaa = any amino acid or nothing
STSSCFPAAAAAIMREIVHLQAGQCGNQIGAKFWEVISDEHGIDPTGTYHGDSDLQLERINVYYNEATGEAPVPSPTALRGPRGPCLGXRPPVPAGGKYVPRAVLVDMEPGTMDSV

SEQ ID NO: 1791 - protein, 582 aa, Homo sapiens
FVAVAGAVSGEPLVHWCTQQLRKTFGLDVSEEIIQYVLSIESAEEIREYVTDLLQGNEGKKGQFIEELITKWQKNDQELISDPLQQCFKKDEILDGQKSGDHLKRGRKKGRNRQEVPAFTEPDTTAEVKTPFDLAKAQENSNSVKKKTKFVNLYTREGQDRLAVLLPGRHPCDCLGQKHKLINNCLICGRIVCEQEGSGPCLFCGTLVCTHEEQDILRGDSNKSQKLLKKLMSGVENSGKVDISTKDLLPHQELRIKSGLEKAIKHKDKLLEFDRTSIRRTQVIDDESDYFASDSNQWLSKLERETLQKREEELRELRHASRLSKKVTIDFAGRKILEEENSLAEYHSRLDETIQAIANGTLNQPLTKLDRSSEEPLGVLVNPNMYQSPPQWVDHTGAASQKKAFRSSGFGLEFNSFQHQLRIQDQEFQEGFDGGWCLSVHQPWASLLVRGIKRVEGRSWYTPHRGRLWIAATAKKPSPQEVSELQATYRLLRGKDVEFPNDYPSGCLLGCVDLIDCLSQKQFKEQFPDISQESDSPFVFICKNPQEMVVKFPIKGNPKIWKLDSKIHQGAKKGLMKQNKAV

SEQ ID NO: 1792 - protein, 670 aa, Homo sapiens
  misc_feature (1)...(670): Xaa = any amino acid or nothing
MPRSHTGERLCEGKEGSQCAENFSPNLSVTKKTAGVKPYECTICGKAFMRLSSLTRHMRSHTAIRAIEKPYKCKECGRAFSLSQILSKHERSHTGEKPYKCKQCGKTFIYHQPFQRHERTHIGEKPYECKQCGKALSCSSSLRVHERIHTGEKPYECKQCGKAFSCSSSIRVHERTHTGEKPYACKECGKAFISTTSVLTHMITHNGDRPYKCKECGKAFIFPSFLRVHERIHTGEKPYKCKQCGKAFRWSTSIQIHERIHTGEKPYKCKECGKSFSARPAFRVHVRVHTGEKPYKCKECGKAFSRISYFRIHERTHTGEKPYECKKCGKTFNYPLDLKIHKRNHTGEKPYECKECAKTFISLENFRRHMITHTGDGPYKCRDCGKVFIFPSALRTHERTHTGEKPYECKQCGKAFSCSSYIRIHKRTHTGEKPYECKECGKAFIYPTSFQGHMRMHTGEKPYKCKECGKAFSLHSSFRRHTRIHNYEKPLECXQCGKAFSVSTSLKKPMRNAQSDRKLYKCEKXEKVFNSNRCFQSCENSHXREKSCQCKXYRKRDTRXFMYSQVPHNHVSVSNGPYRCGSPIRLYNTXNISINRNLVAVVTPXCSTLFKCLWCWCKRAALSVVXIVQDSGRGRWLTPVIPALWEAKAGGSRGQEIKTILANTVKPHLY

SEQ ID NO: 1793 - protein, 58 aa, Homo sapiens
  misc_feature (1)...(58): Xaa = any amino acid or nothing
DFYERKFEQFIEGHKQIVNKWRDLLCSWKRKLSIIKKSVLQNNLXFSAASMRFQKVFF

SEQ ID NO: 1794 - protein, 475 aa, Homo sapiens
HLFFSLFLAAMAMTGSTPCSSMSNHTKERVTMTKVTLENFYSNLIAQHEEREMRQKKLEKVMEEEGLKDEEKRLRRSAHARKETEFLRLKRTRLGLEDFESLKVIGRGAFGEVRLVQKKDTGHVYAMKILRKADMLEKEQVGHIRAERDILVEADSLWVVKMFYSFQDKLNLYLIMEFLPGGDMMTLLMKKDTLTEEETQFYIAETVLAIDSIHQLGFIHRDIKPDNLLLDSKGHVKLSDFGLCTGLKKAHRTEFYRNLNHSLPSDFTFQNMNSKRKAETWKRNRRQLAFSTVGTPDYIAPEVFMQTGYNKLCDWWSLGVIMYEMLIGYPPFCSETPQETYKKVMNWKETLTFPPEVPISEKAKDLILRFCCEWEHRIGAPGVEEIKSNSFFEGVDWEHIRERPAAISIEIKSIDDTSNFDEFPESDILKPTVATSNHPETDYKNKDWVFINYTYKRFEGLTARGAIPSYMKAAK

SEQ ID NO: 1795 - protein, 2055 aa, Homo sapiens
RTRGIEKRFAYSFLQQLIRYVDEAHQYILEFDGGSRGKGEHFPYEQEIKFFAKVVLPLIDQYFKNHRLYFLSAASRPLCSGGHASNKEKEMVTSLFCKLGVLVRHRISLFGNDATSIVNCLHILGQTLDARTVMKTGLESVKSALRAFLDNAAEDLEKTMENLKQGQFTHTRNQPKGVTQIINYTTVALLPMLSSLFEHIGQHQFGEDLILEDVQVSCYRILTSLYALGTSKSIYVERQRSALGECLAAFAGAFPVAFLETHLDKHNIYSIYNTKSSRERAALSLPTNVEDVCPNIPSLEKLMEEIVELAESGIRYTQMPHVMEVILPMLCSYMSRWWEHGPENNPERAEMCCTALNSEHMNTLLGNILKIIYNNLGIDEGAWMKRLAVFSQPIINKVKPQLLKTHFLPLMEKLKKKAATVVSEEDHLKAEARGDMSEAELLILDEFTTLARDLYAFYPLLIRFGDYNRAKWLKEPNPEAEELFRMVAEVFIYWSKSHNFKREEQNFVVQNEINNMSFLITDTKSKMSKAAVSDQERKKMKRKGDRYSMQTSLIVAALKRLLPIGLNICAPGDQELIALAKNRFSLKDTEDEVRDIIRSNIHLQGKLEDPAIRWQMALYKDLPNRTDDTSDPEKTVERVLDIANVLFHLEQKSKRVGRRHYCLVEHPQRSKKAVWHKLLSKQRKRAVVACFRMAPLYNLPRHRAVNLFLQGYEKSWIETEEHYFEDKLIEDLAKPGAEPPEEDEGTKRVDPLHQLILLFSRTALTEKCKLEEDFLYMAYADIMAKSCHDEEDDDGEEEVKSFEEKEMEKQKLLYQQARLHDRGAAEMVLQTISASKGETGPMVAATLKLGIAILNGGNSTVQQKMLDYLKEKKDVGFFQSLAGLMQSCSVLDLNAFERQNKAEGLGMVTEEGSGEKVLQDDEFTCDLFRFLQLLCEGHNSDFQNYLRTQTGNNTTVNIIISTVDYLLRVQESISDFYWYYSGKDVIDEQGQRNFSKAIQVAKQVFNTLTEYIQGPCTGNQQSLAHSRLWDAVVGFLHVFAHMQMKLSQDSSQIELLKELMDLQKDMVVMLLSMLEGNVVNGTIGKQMVDMLVESSNNVEMILKFFDMFLKLKDLTSSDTFKEYDPDGKGVIFKRDFHKAMESHKHYTQSETEFLLSCAETDENETLDYEEFVKRFHEPAKDIGFNVAVLLTNLSEHMPNDTRLQTFLELAESVLNYFQPFLGRIEIMGSAKRIERVYFEISESSRTQWEKPQVKESKRQFIFDVVNEGGEKEKMELFVNFCEDTIFEMQLAAQISESDLNERSANKEESEKERPEEQGPRMAFFSILTVRSALFALRYNILTLMRMLSLKSLKKQMKKVKKMTVKDMVTAFFSSYWSIFMTLLHFVASVFRGFFRIICSLLLGGSLVEGAKKIKVAELLANMPDPTQDEVRGDGEEGERKPLEAALPSEDLTDLKELTEESDLLSDIFGLDLKREGGQYKLIPHNPNAGLSDLMSNPVPMPEVQEKFQEQKAKEEEKEEKEETKSEPEKAEGEDGEKEEKAKEDKGKQKLRQLHTHRYGEPEVPESAFWKKIIAYQQKLLNYFARNFYNMRMLALFVAFAINFILLFYKVSTSSVVEGKELPTRSSSENAKVTSLDSSSHRIIAVHYVLEESSGYMEPTVRILPILHTVISFFCIIGYYCLKVPLVIFKREKEVARKLEFDGLYITEQPSEDDIKGQWDRLVINTQSFPNNYWDKFVKRKVMDKYGEFYGRDRISELLGMDKAALDFSDAREKKKPKKDSSLSAVLNSIDVKYQMWKLGVVFTDNSFLYLAWYMTMSVLGHYNNFFFAAHLLDIAMGFKTLRTILSSVTHNGKQLVLTVGLLAVVVYLYTVVAFNFFRKFYNKSEDGDTPDMKCDDMLTCYMFHMYVGVRAGGGIGDEIEDPAGDEYEIYRIIFDITFFFFVIVILLAIIQGLIIDAFGELRDQQEQVKEDMETKCFICGIGNDYFDTVPHGFETHTLQEHNLANYLFFLMYLINKDETEHTGQESYVWKMYQERCWEFFPAGDCFRKQYEDQLN

SEQ ID NO: 1796 - protein, 119 aa, Homo sapiens
  misc_feature (1)...(119): Xaa = any amino acid or nothing
AGLELLNSDDPPALASQSAGITGVTRTPSLFFXDTVLLCCSGWSAVAPSRLTAALFSXAQAVCLSLPRSWDYRRWPPHPANFCIFCRDESLAMLPRLVSNSWTQAILLPRPPKMLGLQV

SEQ ID NO: 1797 - protein, 177 aa, Homo sapiens
  misc_feature (1)...(177): Xaa = any amino acid or nothing
LFVGGGPICPEGASGFAPGPAPAPRVGVDAEVGRXVXGAAASQGAGSLRPRPTGPGHPGAWLQVWGAAAVCAGPAMXAVRAKRGPRAGXEPNSPWRSGVLAARAVGAGPWPXPXPGCSXARGPSSRSAPGLASGPAAPLLQGVHSSAGPLLCYINGTLALGLKPXXAWGWGEWRPKG

SEQ ID NO: 1798 - protein, 851 aa, Homo sapiens
FRRKGGGGPKDFGAGLKYNSRHEKVNGLEEGVEFLPVNNVKKVEKHGPGRWVVLAAVLIGLLLVLLGIGFLVWHLQYRDVRVQKVFNGYMRITNENFVDAYENSNSTEFVSLASKVKDALKLLYSGVPFLGPYHKESAVTAFSEGSVIAYYWSEFSIPQHLVEEAERVMAEERVVMLPPRARSLKSFVVTSVVAFPTDSKTVQRTQDNSCSFGLHARGVELMRFTTPGFPDSPYPAHARCQWALRGDADSVLSLTFRSFDLASCDERGRHLVTVYNTLSPMEPHALVQLCGTYPPSYNLTFHSSQNVLLITLITNTERRHPGFEATFFQLPRMSSCGGRLRKAQGTFNSPYYPGHYPPNIDCTWNIEVPNNQHVKVRFKFFYLLEPGVPAGTCPKDYVEINGEKYCGERSQFVVTSNSNKITVRFHSDQSYTDTGFLAEYLSYDSSDPCPGQFTCRTGRCIRKELRCDGWADCTDHSDELNCSCDAGHQFTCKNKFCKPLFWVCDSLNDCGDNSDEQGCSCPAQTFRCSNGKCLSKSQQCNGKDDCGDGSDEASCPKVNVVTCTKHTYRCLNGLCLSKGNPECDGKEDCSDGSDEKDCDCGLRSFTRQARVVGGTDADEGEWPWQVSLHALGQGHICGASLISPNWLVSAAHCYIDDRGFRYSDPTQWTAFLGLHDQSQRSAPGVQERRLKRIISHPFFNDFTFDYDIALLELEKPAEYSSMVRPICLPDASHVFPAGKAIWVTGWGHTQYGGTGALILQKGEIRVINQTTCENLLPQQITPRMMCVGFLSGGVDSCQGDSGGPLSSVEADGRIFQAGVVSWGDGCAQRNKPGVYTRLPLFRDWIKENTGV

SEQ ID NO: 1799 - protein, 204 aa, Homo sapiens
FVSGSPWRMDGSTERLEARRPAGRLPWSSRQEMTRRPSLMAGRQHGWSAQQSATVANPVPGANPDLLPHFLGEPEDVYIVKNKPVLLVCKAVPATQIFFKCNGEWVRQVDHVIERSTDGSSGLPTMEVRINVSRQQVEKVFGLEEYWCQCVAWSSSGTTKSQKAYIRIAYLRKNFEQEPLAKEVSLEQGIVLPCRPPEGIPPAE

SEQ ID NO: 1800 - protein, 892 aa, Homo sapiens
MEPSLGQGMDLTCPFGVSPACGAQASWSIFGADAAEVPGTRGHSQQEAAMPHIPEDEEPPGEPQAAQSPAGQQGPPTAGVSCSPTPTIVLTGDATSPEGETDKNLANRVHSPHKRLSHRHLKVSTASLTSVDPAGHIIDLVNDQLPDISISEEDKKKNLALLEEAKLVSERFLTRRGRKSRSSPGDSPSAVSPNLSPSASPTSSRSNSLTVPTPPEGDEADVSSPHPGEPNVPKGLADRKQNDQRKVSQGRLAPRPPPVEKSKEIAIEQKENFDPLQYPETTPKGLAPVTNSSGKMALNSPQPGPVESELGKQLLKTGWEGSPLPRSPTQDAAGVGPPASQGRGPAGEPMGPEAGSKAELPPTVSRPPLLRGLSWDSGPEEPGPRLQKVLAKLPLAEEEKRFAGKAGGKLAKAPGLKDFQIQVQPVRMQKLTKLREEHILMRNQNLVGLKLPDLSEAAEQEKGLPSELSPAIEEEESKSGLDVMPNISDVLLRKLRVHRSLPGSAPPLTEKEVENVFVQLSSAFRNDSYTLESRINQAERERNLTEENTEKELENFKASITSSASLWHHCEHRETYQKLLEDIAVLHRLAARLSSRAEVVGAVRQEKRMSKATEVMMQYVENLKRTYEKDHAELMEFKKLANQNSSRSCGPSEDGVLRTARSMSLTLGKNMPRRRVSVAVVPKFNALNLPGQTPSSSSIPSLPALSESPNGKGSLPVTSALPALLENGKTNGDPDCEASAPALTLSCLEELSQETKARMEEEAYSKGFQEGLKKTKELQDLKEEEEEQKSESPEEPEEVEETEEEEKDPRSSKLEELVHFLQVMYPKLCQHWQVIWMMAAVMLVLTVVLGLYNSYNSCAEQADGPLGRSTCSAAQKDSWWSSGLQHEQPTEQ

SEQ ID NO: 1801 - protein, 101 aa, Homo sapiens
QLIQHQTVHTGRKLYECKECGKAFNQGSTLIRHQRIHTGEKPYECKVCGKAFRVSSQLKQHQRIHTGERPYQCKELKGRGAEMLAVLAVKEQNRTPVNYGK

SEQ ID NO: 1802 - protein, 175 aa, Homo sapiens
  misc_feature (1)...(175): Xaa = any amino acid or nothing
MTCLHSAKAFHYXSSCSFSCEEGFALIGPEVVQCTALGVWTAPAPVCIAVQCQHLEALNEGTMGXDYPFTAFAYGSSCKYECHTVYRVRGLDMLHSRGCYLWNGHFTTXEAISCEPLERPCHXSVXCSFSCEEGFALIGPEVVQCTALGVWTAPAPVCIAVQCQHLEALNEGTMG

SEQ ID NO: 1803 - protein, 172 aa, Homo sapiens
IQAKGLGIWHVPNKSPMQHWRKGSLLRYRTDTGFLQTLGHNLLGIYQKYPVKYGEGKCWTDNGPVIPVVYDFGDAQKTASYYSPYGQREFTAGFVQFRVFNNERAANALCAGMRVTGCNTEHHCIGGGGYFPEASPQQCGDFSGFDWSGYGTHVGYSSSREITEAAVLLFYR

SEQ ID NO: 1804 - protein, 120 aa, Homo sapiens
TQVHPAMLGLDELGRSGCGHCTQADLRFGDAAGRDPGQDNDRNTAEPAFPPPPRVMAAAAALRAPAQSSVTFEDVAVNFSLEEWSLLNEAQGCLYHDVMLETLTLISSLGKVLILNCDLS

SEQ ID NO: 1805 - protein, 137 aa, Homo sapiens
AAAGRGASGALTGEGGGEQGRRVGLGSRAHSLLLGPTFNSCQVSSQPPRVAGLGLPLKHEPSRPQPPSPRGPRTVRAGVPGAHPQDTPCPEFVRPRKVPLVGEAPGLPPEERSRGWRRDTPGLQESRVRAPSYDDIT

SEQ ID NO: 1806 - protein, 130 aa, Homo sapiens
  misc_feature (1)...(130): Xaa = any amino acid or nothing
QIVSFNSYLTLYTKNNLKSMKDLNVNTEMIKLLELKNIHNLGXAKFFLNXIQKALIKRKILIHWPLIKIKSFCSLSDTIKKMKRQTIVWEQTFIIHISVKELVSRIYEAFLQFNKTVNRPVFDIKKEQKF

SEQ ID NO: 1807 - protein, 648 aa, Homo sapiens
SEAKLGGPTGMDLWQLLLTLALAGSSDAFSGSEATAAILSRAPWSLQSVNPGLKTNSSKEPKFTKCRSPERETFSCHWTDEVHHGTKNLGPIQLFYTRRNTQEWTQEWKECPDYVSAGENSCYFNSSFTSIWIPYCIKLTSNGGTVDEKCFSVDEIVQPDPPIALNWTLLNVSLTGIHADIQVRWEAPRNADIQKGWMVLEYELQYKEVNETKWKMMDPILTTSVPVYSLKVDKEYEVRVRSKQRNSGNYGEFSEVLYVTLPQMSQFTCEEDFYFPWLLIIIFGIFGLTVMLFVFLFSKQQRIKMLILPPVPVPKIKGIDPDLLKEGKLEEVNTILAIHDSYKPEFHSDDSWVEFIELDIDEPDEKTEESDTDRLLSSDHEKLHINLGVKDGDSGRTSCCEPDILETDFNAHDIHEGTSEVAQPQRLKGEADLLCLDQKNQNNSPYHDACPATQQPSVIQAEKNKPQPLPTEGAESTHQAAHIQLSNPSSLSNIDFYAQVSDITPAGSVVLSPGQKNKAGMSQCDMHPEMVSLCQENFLMDNAYFCEADAKKCIPVAPHIKVESHIQPSLNQEDIYITTESLTTAAGSPGTGEHVPGSEMPVPDYTSIHIVQSPQGLILNATALPLPDKEFLSSCGYVSTDQLNKIMP

SEQ ID NO: 1808 - protein, 103 aa, Homo sapiens
TRAPASGRSGAGLALSANAPDSGGHPGATEGPAGSLAHASGSARGTWRVRGRGSHGWERTVGAGGCANPVPALHSCASAPRGTGRVSALGPKTGSSPLSSPKG

SEQ ID NO: 1809 - protein, 254 aa, Homo sapiens
LGKYNTSMALFDFVLHNSTGEIRYITEDDVIQSQNALGKYNTSMALFESNSFEKTILESPYYVDLNQTLFVQVSLHTSDPNLVVFLDTCRASPTSDFASPTYDLIKSGCSRDETCKVYPLFGHYGRFQFNAFKFLRSMSSVYLQCKVLICDSSDHQSRCNQGCVSRSKRDISSYKWKTDSIIGPIRLKRDRSANGNSGFQHETHAEETPNQPFNSVHLFSFMVLALNVVTVATITVRHFVNQRADYQYQKLQNY

SEQ ID NO: 1810 - protein, 97 aa, Homo sapiens
  misc_feature (1)...(97): Xaa = any amino acid or nothing
LGILMSPQVEAGEIXALLTPPPGCMQFSPLTLPKXWVSPGLTPPPPEVPSVFLVEPGLPHAGQAGLDLLTSGDPPASTSQSARTTDVSHRAQPLAIS

SEQ ID NO: 1811 - protein, 124 aa, Homo sapiens
  misc_feature (1)...(124): Xaa = any amino acid or nothing
IGVLAFETGSCSVTRLYCIGIIMPHCSLDLAGSTSAFRIAGTTSVHHHPQLTFFFFWIETGSHCVVQTGLXLLALSNPPALASQIAGISGMSHRAWPGLVLYSLEFSLLCASQSLIMLFTCYNE

SEQ ID NO: 1812 - protein, 95 aa, Homo sapiens
  misc_feature (1)...(95): Xaa = any amino acid or nothing
VKPVNGESKRDXGADTQTCEGEADEQLQTNCYYDSTKSFFYISCGXKRKPTWAENRRLNAKMFGIPLHSNSDPWGYEEREVIGFHRSRVSRGHGS

SEQ ID NO: 1813 - protein, 169 aa, Homo sapiens
  misc_feature (1)...(169): Xaa = any amino acid or nothing
QRNPFSAGHPQRPPTSGSQSELLAQPRLRPGRKSSFSRDQDVWXSQAVPKRQXQRNPFSAGHPQRPPTSGSQSELLAQPRLRPGRKSSFSRDQDVWPGQKPRPSQQQHQMCASPTLGQRSPFALEPVPAYHGGRDPFASARPSPVGIPKPRAAPAGGGWRRIRPKSSTK

SEQ ID NO: 1814 - protein, 641 aa, Homo sapiens
  misc_feature (1)...(641): Xaa = any amino acid or nothing
PVIQRCSQPYGFSLLISFFLKCVSETSQQPPSRKVFQLLPSFPTLTRSKSHESQLGNRIDDVSSMRFDLSHGSPQMVRRDIGLSVTHRFSTKSWLSQVCHVCQKSMIFGVKCKHCRLKCHNKCTKEAPACRISFLPLTRLRRTESVPSDINNPVDRAAEPHFGTLPKALTKKEHPPAMNHLDSSSNPSSTTFSTPSSPAPFPTSSNPSSATTPPNPSPGQRDSRFNFPSCAYFIHHRQQFIFPDISAFAHAAPLPEAADGTRLDDQPKADVLEAHEAEAEEPEAGKSEAEDDEDEVDDLPSSRRPWRGPISRKASQTSVYLQEWDIPFEQVELGEPIGQGRWGRVHRGRWHGEVAIRLLEMDGHNQDHLKLFKKEVMNYRQTRHENVVLFMGACMNPPHLAIITSFCKGRTLHSFVRDPKTSLDINKTRQIAQEIIKGMGYLHAKGIVHKDLKSRNVFYDNGKVVITDFGLFGISGVVPEGRRENQLKLSHDWLCYLAPEIVREMTPGKDEDQLPFSKAADVYAFGTVWYELQARDWPLKNQAAEASIWQIGSGEGMKRVLTSVSLGKEVSENLSACWAFDLQERPSFSLLMDMLEKLPKLNRRLSHPGHFXKSADINSSKVVPRFERFGLGVLESSNPKM

SEQ ID NO: 1815 - protein, 265 aa, Homo sapiens
  misc_feature (1)...(265): Xaa = any amino acid or nothing
IPSPAWWNSTWADTFSLLLALAVALYLGYYWACVLQTHRAFCASNTEDLETVVNHIKHRYPQAPLLAVGISFGGILVLNHLAQARQAAGLVAALTLSACWDSFETTRSLETPLNSLLFNQPLTAGLCQLVERLSYEXDLQARTIRQFDERYTSVAFGYQDCVTYYKAASPRTKIDAIRIPVLYLSAADDPFSTVCALPKQAAQHSPYVALLITARGGHIGFLEGLLPWQHWYMSRLLHQYAKAIFQDPEGLPDLRALLPSEDRNS

SEQ ID NO: 1816 - protein, 101 aa, Homo sapiens
  misc_feature (1)...(101): Xaa = any amino acid or nothing
SSQYIVQSKTKIFLXAAREKQRHTCRRFSIRLSANISSQTGEARGQWPSVFKVLKEKKLSTKKSFGQKXGRRKTFPDKQKLREFDTTRPTIQEMLTGVLQG

SEQ ID NO: 1817 - protein, 542 aa, Homo sapiens
  misc_feature (1)...(542): Xaa = any amino acid or nothing
ELPTPLIAAHQLYNYVADHASSYHMKPLRMARPGGPEHNEYALVSAWHSSGSYLDSEGLRHQDDFDVSLLVCHCAAPFEEQGEAERHVLRLQFFVVLTSQRELFPRLTADMRRFRKPPRLPPEPEAPGSSAGSPGEASGLILAPGPAPLFPPLAAEVGMARARLAQLVRLAGGHCRRDTLWKRLFLLEPPGPDRLRLGGRLALAELEELLEAVHAKSIGDIDPQLDCFLSMTVSWYQSLIKVLLSRFPQSCRHFQSPDLGTQYLVVLNQKFTDCFVLVFLDSHLGKTSLTVVFREPFPVQPQDSESPPAQLVSTYHHLESVINTACFTLWTRLLXGSGLDHXMSLFLESWAYQIACQRQDXPALLGPRASQTLSDTKGFVTMSXGSAAPAWQQEPPSPNTHSHXPIQDSRESGQPRGPLGPFWGTPFGPPGRVSGVHTGWQTPPRAPLPESCPLPLTTVSHLCPLSLRVFTSHLDITAGHSHRDDTWVPIPALPLKHLRPPSSPFALGPWVSHPLMRWVQKLSHLHSNPGTGFSMGGKQQRN

SEQ ID NO: 1818 - protein, 152 aa, Homo sapiens
  misc_feature (1)...(152): Xaa = any amino acid or nothing
QTCRKDKRAIYPHFQNEXMNEIKAIXSGTGGIQCFHSQNDSAFFFFLFLLETEFCSAATVQWHDFLSMQPPPPGFKQFTCLSLLSSWNYRRPPPFPGNFXFLVKTGFPHVGQTGFELLTSSDLAPLASQNGGITGMSPCAWPFFFFFFFGLC

SEQ ID NO: 1819 - protein, 1475 aa, Homo sapiens
  misc_feature (1)...(1475): Xaa = any amino acid or nothing
MAYSWQTDPNPNESHEKQYEHQEFLFVNQPHSSSQVSLGFDQIVDEISGKIPHYESEIDENTFFVPTAPKWDSTGHSLNEAHQISLNEFTSKSRELSWHQVSKAPAIGFSPSVLPKPQNTNKECSWGSPIGKHHGADDSRFSILAPSFTSLDKINLEKELENENHNYHIGFESSIPPTNSSFSSDFMPKEENKRSGHVNIVEPSLMLLKGSLQPGMWESTWQKNIESIGCSIQLVEVPQSSNTSLASFCNKVKKIRERYHAADVNFNSGKIWSTTTAFPYQLFSKTKFNIHIFIDNSTQPLHFMPCANYLVKDLIAEILHFCTNDQLLPKDHILSVWGSEEFLQNDHCLGSHKMFQKDKSVIQLHLQKSREAPGKLSRKHEEDHSQFYLNQLLEFMHIWKVSRQCLLTLIRKYDFHLKYLLKTQENVYNIIEEVKKICSVLGCVETKQITDAVNELSLILQRKGENFYQSSETSAKGLIEKVTTELSTSIYQLINVYCNSFYADFQPVNVPRCTSYLNPGLPSHLSFTVYAAHNIPETWVHRINFPLEIKSLPRESMLTVKLFGIACATNNANLLAWTCLPLFPKEKSILGSMLFSMTLQSEPPVEMITPGVWDVSQPSPVTLQIDFPATGWEYMKPDSEENRSNLEEPLKECIKHIARLSQKQTPLLLSEEKKRYLWFYRFYCNNENCSLPLVLGSAPGWDERTVSEMHTILRRWTFSQPLEALGLLTSSFPDQEIRKVAVQQLDNLLNDELLEYLPQLVQAVKFEWNLESPLVQLLLHRSLQSIQVAHRLYWLLKNAENEAYFKSWYQKLLAALQFCAGKALNDEFSKEQKLIKILGDIGERVKSASDHQRQEVLKKEIGRLEEFFQDVNTCHLPLNPALCIKGIDHDACSYFTSNALPLKITFINANLMGKNISIIFKAGDDLRQDMLVLQLIQVMDNIWLQEGLDMQMIIYRCLSTGKDQRLVQMVPDAVTLAKIHRHSGLIGPLKENTIKKWFSQHNHLKADYEKALRNFFYSCAGWCVVTFILGVCDRHNDNIMLTKSGHMFHIDFGKFLGHAQTFGGIKRDRAPFIFTSEMEYFITEGGKNPQHFQDFVELCCRAYNIIRKHSQLLLNLLEMMLYAGLPELSGIQDLKYVYNNLRPQDTDLEATSHFTKKIKESLECFPVKLNNLIHTLAQMSAISPAKSTSQTFPQESCLLSTTRSIERATILGFSKKSSNLYLIQVTHSNNETSLTEKSFEQFSKLHSQLQKQFASLTLPEFPHWWHLPFTNSDHRRFRDLNHYMEQILNVSHEVTNSDCVLSFFLSEAGQQTVEESSPVYLGEKFPDKKPKVQLVISYEDVKLTILVKHMKNIHLPDGSAPSAHVEFYLLPYPSEVRRRKTKSVPKCTDPTYNEIVVYDEVTELQGHVLMLIVKSKTVFVGAINIRLCSVPLDKEKWYPLGNSIIXPLLLFSSFGMKSLEKDEFVGGMLLSNPIW

SEQ ID NO: 1820 - protein, 119 aa, Homo sapiens
  misc_feature (1)...(119): Xaa = any amino acid or nothing
SHGSISILNLHQGCVFLPSLPAQGLRCYRCLAVLEGASCSVVSCPFLDGVCVSQKVSVCWQXCPWGARAEGRLSAVVDSQISCCKGDLCNAVVLAAGSPWALCVQLLLSLGSVFLWALL

SEQ ID NO: 1821 - protein, 132 aa, Homo sapiens
  misc_feature (1)...(132): Xaa = any amino acid or nothing
LRQSLNSVPQAGVQWRDSSLQAPPPRFTPLSCLSLPSSWDYRRLPPCLANFLYFXXRRGFTMLARMVLISXPRDPPASASQSTEITGGSHRAQHPTDSRDHSERSVKKSHEVISELRMKVIKCKVAFSKNPI

SEQ ID NO: 1822 - protein, 63 aa, Homo sapiens
  misc_feature (1)...(63): Xaa = any amino acid or nothing
GFIETXNFCVSKDTSKKLSRLPTKWKNVFANXISDKGLVSRICQELLRHLDAEQVSSTAGLSL

SEQ ID NO: 1823 - protein, 166 aa, Homo sapiens
THASGGARSGAGWAGRGVRAGTEAGRGGIFLTLSILRTRDLPSGAMSEGVDLIDIYADEEFNQDPEFNNTDQIDLYDDVLTATSQPSDDRSSSTEPPPPVRQEPSPKPNNKTPAILYTYSGLRNRRAAVYVGSFSWWTTDQQLIQVIRSIGVYDVGEVKFAENRAK

SEQ ID NO: 1824 - protein, 1753 aa, Homo sapiens
  misc_feature (1)...(1753): Xaa = any amino acid or nothing
RPLFAREGGIYAVLVCMQEYKTSVLVQQAGLAALKMLAVASSSEIPTFVTGRDSIHSLFDAQMTREIFASIDSATRPGSESLLLTVPAAVILMLNTEGCSSAARNGLLLLNLLLCNHHTLGDQIITQELRDTLFRHSGIAPRTEPMPTTRTILMMLLNRYSEPPGSPERAALETPIIQGQDGSPELLIRSLVGGPSAELLLDLERVLCREGSPGGAVRPLLKRLQQETQPFLLLLRTLDAPGPNKTLLLSVLRVITRLLDFPEAMVLPWHEVLEPCLNCLSGPSSDSEIVQELTCFLHRLASMHKDYAVVLCCLGAKEILSKVLDKHSAQLLLGCELRDLVTECEKYAQLYSNLTSSILAGCIQMVLGQIEDHRRTHQPINIPFFDVFLRHLCQGSSVEVKEDKCWEKVEVSSNPHRASKLTDHNPKTYWESNGSTGSHYITLHMHRGVLVRQLTLLVASEDSSYMPARVVVFGGDSTSCIGTELNTVNVMPSASRVILLENLNRFWPIIQIRIKRCQQGGIDTRVRGVEVLGPKPTFWPLFREQLCRRTCLFYTIRAQAWSRDIAEDHRRLLQLCPRLNRVLRHEQNFADRFLPDDEAAQALGKTCWEALVSPLVQNITSPDAEGVSALGWLLDQYLEQRETSRNPLSRAASFASRVRRLCHLLVHVEPPPGPSPEPSTRPFSKNSKGRDRSPAPSPVLPSSSLRNITQCWLSVVQEQVSRFLAAAWRAPDFVPRYCKLYEHLQRAGSELFGPRAAFMLALRSGFSGALLQQSFLTAAHMSEQFARYIDQQIQGGLIGGAPGVEMLGQLQRHLEPIMVLSGLELATTFEHFYQHYMADRLLSFGSSWLEGAVLEQIGLCFPNRLPQLMLQSLSTSEELQRQFHLFQLQRLDKLFLEQEDEEEKRLXEEEEEEEEEEAEKELFIEDPSPAISILVLSPRCWPVSPLCYLYHPRKCLPTEFCDALDRFSSFYSQSQNHPVLDMGPHRRLQWTWLGRAELQFGKQILHVSTVQMWLLLKFNQTEEVSVETLLKDSDLSPELLLQALVPLTSGNGPLTLHEGQDFPHGGVLRLHEPGPQRSGEALWLIPPQAYLNVEKDEGRTLEQKRNLLSCLLVRILKAHGEKGLHIDQLVCLVLEAWQKGPNPPGTLGHTVAGGVACTSTDVLSCILHLLGQGYVKRRDDRPQILMYAAPEPMGPCRGQADVPFCGSQSETSKPSPEAVATLASLQLPAGRTMSPQEVEGLMKQTVRQVQETLNLEPDVAQHLLAHSHWGAEQLLQSYSEDPEPLLLAAGLCVHQAQAVPVRPDHCPVCVSPLGCDDDLPSLCCMHYCCKSCWNEYLTTRIEQNLVLNCTCPIADCPAQPTGAFIRAIVSSPEVISKYEKALLRGYVESCSNLTWCTNPQGCDRILCRQGLGCGTTCSKCGWASCFNCSFPEAHYPASCGHMSQWVDDGGYYDGMSVEAQSKHLAKLISKRCPSCQAPIEKNEGCLHMTCAKCNHGFCWRCLKSWKPNHKDYYNCSAMVSKAARQEKRFQDYNERCTFHHQAREFAVNLRNRVSAIHEVPPPRSFTFLNDACQGLEQARKVLAYACVYSFYSQDAEYMDVVEQQTENLELHTNALQILLEETLLRCRDLASSLRLLRADCLSTGMELLRRIQERLLAILQHSAQDFRVGLQSPSVEAWEAKGPNMPGSQPQASSGPEAEEEEEDDEDDVPEWQQDEFDEELDNDSFSYDESENLDQETFFFGDEEEDEDEAYD

SEQ ID NO: 1825 - protein, 333 aa, Homo sapiens
  misc_feature (1)...(333): Xaa = any amino acid or nothing
GTSRNQHSPKTHAXRSSWPQPPPLFLPPLQPQATGRRRRRTRTQQRTAALLTDGTTKTGAAWSRRPSLCWPSRTTGAPGAKXAVLVRSATPTTNPPNPQSPTGAAGKLRAPGNRAGSEPSSQEPPPDGTRRPASITGVAQSPATRATPSLPCLHVPAPSRGQTLGVRTTGRASRLTVDRSRLSWPGRSARSGGGRWRPNAPRGRWPRAPXSWEPGSWTEPWRWPFPAAESPPHRCIYCTNHVSPAGPARPSHVYIIRATINSISHPLCRAQSSPWEAAGVWRRPAQPAPTSDVNINLLRKPRVKRHDLIYQFLGNTLWEEGRQRPPETLQPAR

SEQ ID NO: 1826 - protein, 126 aa, Homo sapiens
  misc_feature (1)...(126): Xaa = any amino acid or nothing
FFFGNGVSPCPQAGVXWHDLDSLQNLPPGFKRFSYLSLPSSWDYRHVPPRQANFCIFMXRRGFTMLARMVSISXPRDLPALASQSAGITGVSHHAPPQMDFTFALLCFAPKGCLPRQKEGGTLNLI

SEQ ID NO: 1827 - protein, 90 aa, Homo sapiens
  misc_feature (1)...(90): Xaa = any amino acid or nothing
GVISAHCNLRLCHLPGSSNSPASASQVAGTIGARTTPSXIFVFLVETGFHHVSQDGLDLLNFVIRPRRPLKVLGLQACTRARLPSPLKEL

SEQ ID NO: 1828 - protein, 324 aa, Homo sapiens
  misc_feature (1)...(324): Xaa = any amino acid or nothing
HLLSFHLWSASLDCLEQLSQERHVKGMLLGPPPVNESTKPSPSPWKLTPPMCSIPPVFPPKSGSPTTSWSPSGHSKLEVERAQTGPFCLHIYCPXPGVTDNTTSLLHYIPFPRLSGLVCFPAHXFPSYWTGHSFASQAWLRQVPEVSKHLQCPSAESLLTMEYHQPEDPAPGKAGTAEAVIPENHEVLAGPDEHPQDTDARDADGEAREREPRRPSFAAXPVWGQPESPLPEASSAPPGPTLGTLPEVETIRACSMPQELPXSPRTRQPEPDFYCVKWIPWKGEQTPIITQSTNGPLPSPCHHEHPLSSVEGEAPPAEGSDHIG

SEQ ID NO: 1829 - protein, 717 aa, Homo sapiens
  misc_feature (1)...(717): Xaa = any amino acid or nothing
YSPIRLLEVCVPLPKIFIKRQAPLKVSLLQDLKDFFQKVSQVYVAIDERLASLKTDTFSKTREEKMEDIFAQKEMEEGEFKNWIEKMQARLMSSSVDTPQQLQSVFESLIAKKQSLCEVLQAWNNRLQDLFQQEKGRKRPSVPPSPGRLRQGEESKISAMDASPRNISPGLQNGEKEDRFLTTLSSQSSTSSTHLQLPTPPEVMSEQSVGGPPELDTASSSEDVFDGHLLGSTDSQVKEKSTMKAIFANLLPGNSYNPIPFPFDPDKHYLMYEHERVPIAVCEKEPSSIIAFALSCKEYRNALEELSKATQWNSAEEGLPTNSTSDSRPKSSSPIRLPEMSGGQTNRTTETEPQPTKKASGMLSFFRGTAGKSPDLSSQKRETLRGADSAYYQVGQTGKEGTENQGVEPQDEVDGGDTQKKQLINPHVELQFSDANAKFYCRLYYAGEFHKMREVILDSSEEDFIRSLSHSSPWQARGGKSGAAFYATEDDRFILKQMPRLEVQSFLDFAPHYFNYITNAVQQKRPTALAKILGVYRIGYKNSQNNTEKKLDLLVMENLFYGRKMAQVFDLKGSLRNRNVKTDTGKESCDVVLLDENLLKMVRDNPLYIRSHSKAVLRTSIHSDSHFLSSHLIIDYSLLVGRDDTSNELVVGIIDYIRTFTWDKKLEMVVKSTGILGGQGXMPTVVSPELYRTRFCEAMDNYFLMVPDHCTGLGLNC

SEQ ID NO: 1830 - protein, 82 aa, Homo sapiens
  misc_feature (1)...(82): Xaa = any amino acid or nothing
QGCGSAGTLIHYXXECKMVQLLWKTVXQFLIKLNIKDPAITLDVYPNEVKNYVRTKTYTQMFIANFIMAKSWKQPTHPSVRT

SEQ ID NO: 1831 - protein, 110 aa, Homo sapiens
  misc_feature (1)...(110): Xaa = any amino acid or nothing
EAAIRQPEPNILDVNQIFKDLAMIIHDQGDLIDSIEANAESSEVLVERAPGQLQRPAYYQKKSRKKMCLVVLVQTAIILICERIMXVVYTTKWSPPIVLPVSCFQGQKFN

SEQ ID NO: 1832 - protein, 123 aa, Homo sapiens
  misc_feature (1)...(123): Xaa = any amino acid or nothing
TGGRQGKNDHTSITEKPSRDFNRHLITQNIXMPNQDMKSSSNSLIIRKVQIKPTILYHHIFTRKAKMKTTDKTKYRXGFKAITTLIHCSQDCKLQXSLXENHFMIFPKAEQHITYDTTIPFLR

SEQ ID NO: 1833 - protein, 142 aa, Homo sapiens
  misc_feature (1)...(142): Xaa = any amino acid or nothing
LMKDLSPYVMETHYILNRLNERRSMWRHIIGKLPNTKDQEKILKAIRGRREVIQGSRQQYRRPAAFSAAEKARRLWCSVFNIERRNLCEYPTKLSFNIKGEMTFSDKTEFTTNRPSLKMLLKDRIQEEGKMFXKEKCFKRKE

SEQ ID NO: 1834 - protein, 241 aa, Homo sapiens
  misc_feature (1)...(241): Xaa = any amino acid or nothing
FFFFETESRSVAQAGVQWCNLGSLQALPPGFSHSPASASRVAGTTGTRHXARLIFYIFSRDGVSPCXPGWSXSPDLVIRPPRLPKCWDYRREPPRPAXFFVFLVEQGFTMLARMVSISXPQCDLPASVSQNAGITGVSHCAWPCLHFCFFGFFFEMESCSVAQAEVQWHDLRSLQAPPPGFTPFSCLSLPGSWDYRRPPPRPANFCIFSRDGVSPCXPGWSRSPDLVIRPPRPPKVLGLQA

SEQ ID NO: 1835 - protein, 79 aa, Homo sapiens
  misc_feature (1)...(79): Xaa = any amino acid or nothing
FFFFEMECLTVSQAGVQWYNLHSLQPLPPGFKQFSCLSLPSSWDXRVPTSRPAKFCVIFXDGVSHCQPGWSAVVQPPLH

SEQ ID NO: 1836 - protein, 92 aa, Homo sapiens
  misc_feature (1)...(92): Xaa = any amino acid or nothing
RYDXSSQSENIPQKEFLLKYPXCTATLGMRNMSIMKKKSIFSAEFYKVSLPSLLLHLLAIEWGFHIEIQLTIHQHFLNYELESDFVHIVEYM

SEQ ID NO: 1837 - protein, 150 aa, Homo sapiens
  misc_feature (1)...(150): Xaa = any amino acid or nothing
FDPDWTRAAGIRHEKKPKALAYRRENSPGDLPPPPLPPPEEEASWALGAEGSRQHVLPGAGAQWGEESGPGRAPGSPAGAPPRXRGLAPNSRPSFLSRGQGTSTCSTAGSNSSRGSSSSRGSRGPGRSRSRSQSRSQSQRPGQKRREEPR

SEQ ID NO: 1838 - protein, 260 aa, Homo sapiens
  misc_feature (1)...(260): Xaa = any amino acid or nothing
FRACLLELIPYAPTLSWTACPPAMAGPRGLLPLCLLAFCLAGFSFVRGQVLFKGCDVKTTFVTHVPCTSCAAIKKQTCPSGWLRELPDQITQDCRYEVQLGGSMVSMSGCRRKCRKQVVQKACCPGYWGSRCHECPGGAETPCNGHGTCLDGMDRNGTCVCQENFRGSACQECQDPNRFGPDCQSVCSCVHGVCNHGPRGDGSCLCFAGYTGPHCDQELPVWQELGFPQNNPRLRKAPNCKCLPGXHRNGLIATPNPCRP

SEQ ID NO: 1839 - protein, 89 aa, Homo sapiens
  misc_feature (1)...(89): Xaa = any amino acid or nothing
FFFSEMESRSVTRLECSGAISAHLRLLGSSNSPASASXVAGTIGACHHAQLIFVFLVETGFHHVGQDGLDLLNLMIHPPRPPKVLGFQA

SEQ ID NO: 1840 - protein, 3223 aa, Homo sapiens
GCQSCWPAWPRLRRRGPASAGARLGRKAPWGLPGRVQDGRPLRFCFYLRPRAPFIAPVLSGAASRPEASGDCRAGRETAMATLEKLMKAFESLKSFQQQQQQQQQQQQQQQQQQQQQQQPPPPPPPPPPPQLPQPPPQAQPLLPQPQPPPPPPPPPPGPAVAEEPLHRPKKELSATKKDRVNHCLTICENIVAQSVRNSPEFQKLLGIAMELFLLCSDDAESDVRMVADECLNKVIKALMDSNLPRLQLELYKEIKKNGAPRSLRAALWRFAELAHLVRPQKCRPYLVNLLPCLTRTSKRPEESVQETLAAAVPKIMASFGNFANDNEIKVLLKAFIANLKSSSPTIRRTAAGSAVSICQHSRRTQYFYSWLLNVLLGLLVPVEDEHSTLLILGVLLTLRYLVPLLQQQVKDTSLKGSFGVTRKEMEVSPSAEQLVQVYELTLHHTQHQDHNVVTGALELLQQLFRTPPPELLQTLTAVGGIGQLTAAKEESGGRSRSGSIVELIAGGGSSCSPVLSRKQKGKVLLGEEEALEDDSESRSDVSSSALTASVKDEISGELAASSGVSTPGSAGHDIITEQPRSQHTLQADSVDLASCDLTSSATDGDEEDILSHSSSQVSAVPSDPAMDLNDGTQASSPISDSSQTTTEGPDSAVTPSDSSEIVLDGTDNQYLGLQIGQPQDEDEEATGILPDEASEAFRNSSMALQQAHLLKNMSHCRQPSDSSVDKFVLRDEATEPGDQENKPCRIKGDIGQSTDDDSAPLVHCVRLLSASFLLTGGKNVLVPDRDVRVSVKALALSCVGAAVALHPESFFSKLYKVPLDTTEYPEEQYVSDILNYIDHGDPQVRGATAILCGTLICSILSRSRFHVGDWMGTIRTLTGNTFSLADCIPLLRKTLKDESSVTCKLACTAVRNCVMSLCSSSYSELGLQLIIDVLTLRNSSYWLVRTELLETLAEIDFRLVSFLEAKAENLHRGAHHYTGLLKLQERVLNNVVIHLLGDEDPRVRHVAAASLIRLVPKLFYKCDQGQADPVVAVARDQSSVYLKLLMHETQPPSHFSVSTITRIYRGYNLLPSITDVTMENNLSRVIAAVSHELITSTTRALTFGCCEALCLLSTAFPVCIWSLGWHCGVPPLSASDESRKSCTVGMATMILTLLSSAWFPLDLSAHQDALILAGNLLAASAPKSLRSSWASEEEANPAATKQEEVWPALGDRALVPMVEQLFSHLLKVINICAHVLDDVAPGPAIKAALPSLTNPPSLSPIRRKGKEKEPGEQASVPLSPKKGSEASAASRQSDTSGPVTTSKSSSLGSFYHLPSYLKLHDVLKATHANYKVTLDLQNSTEKFGGFLRSALDVLSQILELATLQDIGKCVEEILGYLKSCFSREPMMATVCVQQLLKTLFGTNLASQFDGLSSNPSKSQGRAQRLGSSSVRPGLYHYCFMAPYTHFTQALADASLRNMVQAEQENDTSGWFDVLQKVSTQLKTNLTSVTKNRADKNAIHNHIRLFEPLVIKALKQYTTTTCVQLQKQVLDLLAQLVQLRVNYCLLDSDQVFIGFVLKQFEYIEVGQFRESEAIIPNIFFFLVLLSYERYHSKQIIGIPKIIQLCDGIMASGRKAVTHAIPALQPIVHDLFVLRGTNKADAGKELETQKEVVVSMLLRLIQYHQVLEMFILVLQQCHKENEDKWKRLSRQIADIILPMLAKQQMHIDSHEALGVLNTLFEILAPSSLRPVDMLLRSMFVTPNTMASVSTVQLWISGILAILRVLISQSTEDIVLSRIQELSFSPYLISCTVINRLRDGDSTSTLEEHSEGKQIKNLPEETFSRFLLQLVGILLEDIVTKQLKVEMSEQQHTFYCQELGTLLMCLIHIFKSGMFRRITAAATRLFRSDGCGGSFYTLDSLNLRARSMITTHPALVLLWCQILLLVNHTDYRWWAEVQQTPKRHSLSSTKLLSPQMSGEEEDSDLAAKLGMCNREIVRRGALILFCDYVCQNLHDSEHLTWLIVNHIQDLISLSHEPPVQDFISAVHRNSAASGLFIQAIQSRCENLSTPTMLKKTLQCLEGIHLSQSGAVLTLYVDRLLCTPFRVLARMVDILACRRVEMLLAANLQSSMAQLPMEELNRIQEYLQSSGLAQRHQRLYSLLDRFRLSTMQDSLSPSPPVSSHPLDGDGHVSLETVSPDKDWYVHLVKSQCWTRSDSALLEGAELVNRIPAEDMNAFMMNSEFNLSLLAPCLSLGMSEISGGQKSALFEAAREVTLARVSGTVQQLPAVHHVFQPELPAEPAAYWSKLNDLFGDAALYQSLPTLARALAQYLVVVSKLPSHLHLPPEKEKDIVKFVVATLEALSWHLIHEQIPLSLDLQAGLDCCCLALQLPGLWSVVSSTEFVTHACSLIYCVHFILEAVAVQPGEQLLSPERRTNTPKAISEEEEEVDPNTQNPKYITAACEMVAEMVESLQSVLALGHKRNSGVPAFLTPLLRNIIISLARLPLVNSYTRVPPLVWKLGWSPKPGGDFGTAFPEIPVEFLQEKEVFKEFIYRINTLGWTSRTQFEETWATLLGVLVTQPLVMEQEESPPEEDTERTQINVLAVQAITSLVLSAMTVPVAGNPAVSCLEQQPRNKPLKALDTRFGRKLSIIRGIVEQEIQAMVSKRENIATHHLYQAWDPVPSLSPATTGALISHEKLLLQINPERELGSMSYKLGQVSIHSVWLGNSITPLREEEWDEEEEEEADAPAPSSPPTSPVNSRKHRAGVDIHSCSQFLLELYSRWILPSSSARRTPAILISEVVRSLLVVSDLFTERNQFELMYVTLTELRRVHPSEDEILAQYLVPATCKAAAVLGMDKAVAEPVSRLLESTLRSSHLPSRVGALHGVLYVLECDLLDDTAKQLIPVISDYLLSNLKGIAHCVNIHSQQHVLVMCATAFYLIENYPLDVGPEFSASIIQMCGVMLSGSEESTPSIIYHCALRGLERLLLSEQLSRLDAESLVKLSVDRVNVHSPHRAMAALGLMLTCMYTGKEKVSPGRTSDPNPAAPDSESVIVAMERVSVLFDRIRKGFPCEARVVARILPQFLDDFFPPQDIMNKVIGEFLSNQQPYPQFMATVVYKVFQTLHSTGQSSMVRDWVMLSLSNFTQRAPVAMATWSLSCFFVSASTSPWVAAILPHVISRMGKLEQVDVNLFCLVATDFYRHQIEEELDRRAFQSVLEVVAAPGSPYHRLLTCLRNVHKVTTC

SEQ ID NO: 1841 - protein, 56 aa, Homo sapiens
SNPPASASRVAGITGVHQHAWLIFVFLVEMEFHHVGQAVLKLLISGDLPVSASQSA

SEQ ID NO: 1842 - protein, 101 aa, Homo sapiens
  misc_feature (1)...(101): Xaa = any amino acid or nothing
VAPSPMIMPDLYFYRDPEEIEKEEXAAAEKEEFQSEWTAVVPEFTATQSEVADWFKDMQVPSVPIQQFPTEDWSTXPTMNDWSATSTAQTTEWVRITTEWP

SEQ ID NO: 1843 - protein, 119 aa, Homo sapiens
  misc_feature (1)...(119): Xaa = any amino acid or nothing
TPSDMNRAFETDTQSIGEKNRSPSEPDYFERKKFKRSXEKAHIRYKIDQPEDIPLKEFLCKHSKCTATLSMRNMSLMKKKCSFSEEFLAFFPSLLVCHLLAIKLGFYIEIHLTTFNNTF

SEQ ID NO: 1844 - protein, 116 aa, Homo sapiens
  misc_feature (1)...(116): Xaa = any amino acid or nothing
FFFLRRSLDSVAQAEAQWLELGLLQAPPPGFKPISLPGLPSSWDYGRPPPCPANFCIFMXRRGFTVLARMVLISXPCDPPTLASQGTAITGMSYHARPQDIDFLYAHQGRCWFRLL

SEQ ID NO: 1845 - protein, 575 aa, Homo sapiens
  misc_feature (1)...(575): Xaa = any amino acid or nothing
DIFFRRAKEGMGQDEAQFSVEMPLTGKAYLWADKYRPRKPRFFNRVHTGFEWNKYNQTHYDFDNPPPKIVQGYKFNIFYPDLIDKRSTPEYFLEACADNKDFAILRFHAGPPYEDIAFKIVNREWEYSHRHGFRCQFANGIFQLWFHFKRYRYRRXRPWGTAGRCPRGHSKGASVKLVVTPGPLSGLQGRGFTSHLRPHLSFARPQFPPIXKGGHHXACHGELRRHWDRLAXGPDATEGALGASFEHEGGQQPPADLTVQADTLHRPSARLGGAHRACPKRRPHRVLWRWARGAWAWRCQAREKQETQGQPCHITGHPLGREAEPAAAGAAPALAHRPPFARTGSTEPGPCWRPIRHCRRDPLWTPTLCRDWPPTHPVLAGGVHFPAAGIGGCVEVPVSVNVMGTKSHXAVLPPPPSTGPGGQGLPEGWGLEKGEGLPPGIPPPGLLTGPWSMRPVTPSFAHIRTVAPSHSPFSGQEGRGPHGCHSPGRSGPAGRLVLQHPTGTSPTEAKRKVPPGPPEGHPTSPVTSPRPPTAPPRHPASSGNSSVCFSKKTCRWEKKSFVLMELAYWQDRMFF

SEQ ID NO: 1846 - protein, 129 aa, Homo sapiens
  misc_feature (1)...(129): Xaa = any amino acid or nothing
AKSPLPLGXIQWRNLGSLKLRLPGFKXFTCLGLLSSWDYRSLPPRPVNFCILVELGFHHVDQAGLKLLTSSALPALASQSAEITGMSHRIWPLPLLRRPPVIRIRAPPQRLPFNLITSLKALSPNMATF

SEQ ID NO: 1847 - protein, 131 aa, Homo sapiens
ALRKTRRDGIARTGAQPAASWKGTNNYPWRLEMAGRPGSQEQSKDRGTGSLPPPSQRPLGPSPEGAGPSPPPPGIPRGGGSSSSEGPPQLLFVPRRFPAPKKGLPSDTPHSKAPPTPHLILGGEDSQVPIL

SEQ ID NO: 1848 - protein, 126 aa, Homo sapiens
  misc_feature (1)...(126): Xaa = any amino acid or nothing
KNASTVYSSQGDPKSFFFLLRWSLALVAQAGEQXRDLSSLQPPPPGFKXFSCLSLPSSWDYRCPLPCLANFXFLVETGFHHVGQADLKLLTSGDPPTSASESAGITGVSHRAWPRIHFLYWKTFFL

SEQ ID NO: 1849 - protein, 174 aa, Homo sapiens
  misc_feature (1)...(174): Xaa = any amino acid or nothing
APSQISVAFLYAADKLFEKEIXKKIPFIIASDKIKIGINLTKEVKYLYTENYITLMKEIKDTDKWKDILYXWIGKINIXKMSTPPKAIYRFNAIPTKIPMTFFTEIEKSIIKFIWNHKKPPNTQSNIEQKEXSFCSILLWVFGGFLWFHMNFMIDFSISVKNVIGILVGIALNL

SEQ ID NO: 1850 - protein, 5081 aa, Homo sapiens
LPRGCLWCLQRSPTPARPQPSRPARSPLPLFPDLRPWASDLDIMGDAEGEDEVQFLRTDDEVVLQCSATVLKEQLKLCLAAEGFGNRLCFLEPTSNAQNVPPDLAICCFVLEQSLSVRALQEMLANTVEAGVESSQGGGHRTLLYGHAILLRHAHSRMYLSCLTTSRSMTDKLAFDVGLQEDATGEACWWTMHPASKQRSEGEKVRVGDDIILVSVSSERYLHLSTASGELQVDASFMQTLWNMNPICSRCEEGFVTGGHVLRLFHGHMDECLTISPADSDDQRRLVYYEGGAVCTHARSLWRLEPLRISWSGSHLRWGQPLRVRHVTTGQYLALTEDQGLVVVDASKAHTKATSFCFRISKEKLDVAPKRDVEGMGPPEIKYGESLCFVQHVASGLWLTYAAPDPKALRLGVLKKKAMLHQEGHMDDALSLTRCQQEESQAARMIHSTNGLYNQFIKSLDSFSGKPRGSGPPAGTALPIEGVILSLQDLIIYFEPPSEDLQHEEKQSKLRSLRNRQSLFQEEGMLSMVLNCIDRLNVYTTAAHFAEFAGEEAAESWKEIVNLLYELLASLIRGNRSNCALFSTNLDWLVSKLDRLEASSGILEVLYCVLIESPEVLNIIQENHIKSIISLLDKHGRNHKVLDVLCSLCVCNGVAVRSNQDLITENLLPGRELLLQTNLINYVTSIRPNIFVGRAEGTTQYSKWYFEVMVDEVTPFLTAQATHLRVGWALTEGYTPYPGAGEGWGGNGVGDDLYSYGFDGLHLWTGHVARPVTSPGQHLLAPEDVISCCLDLSVPSISFRINGCPVQGVFESFNLDGLFFPVVSFSAGVKVRFLLGGRHGEFKFLPPPGYAPCHEAVLPRERLHLEPIKEYRREGPRGPHLVGPSRCLSHTDFVPCPVDTVQIVLPPHLERIREKLAENIHELWALTRIEQGWTYGPVRDDNKRLHPCLVDFHSLPEPERNYNLQMSGETLKTLLALGCHVGMADEKAEDNLKKTKLPKTYMMSNGYKPAPLDLSHVRLTPAQTTLVDRLAENGHNVWARDRVGQGWSYSAVQDIPARRNPRLVPYRLLDEATKRSNRDSLCQAVRTLLGYGYNIEPPDQEPSQVENQSRCDRVRIFRAEKSYTVQSGRWYFEFEAVTTGEMRVGWARPELRPDVELGADELAYVFNGHRGQRWHLGSEPFGRPWQPGDVVGCMIDLTENTIIFTLNGEVLMSDSGSETAFREIEIGDGFLPVCSLGPGQVGHLNLGQDVSSLRFFAICGLQEGFEPFAINMQRPVTTWFSKGLPQFEPVPLEHPHYEVSRVDGTVDTPPCLRLTHRTWGSQNSLVEMLFLRLSLPVQFHQHFRCTAGATPLAPPGLQPPAEDEARAAEPDPDYENLRRSAGGWSEAENGKEGTAKEGAPGGTPQAGGEAQPARAENEKDATTEKNKKRGFLFKAKKVAMMTQPPATPTLPRLPHDVVPADNRDDPEIILNTTTYYYSVRVFAGQEPSCVWAGWVTPDYHQHDMSFDLSKVRVVTVTMGDEQGNVHSSLKCSNCYMVWGGDFVSPGQQGRISHTDLVIGCLVDLATGLMTFTANGKESNTFFQVEPNTKLFPAVFVLPTHQNVIQFELGKQKNIMPLSAAMFQSERKNPAPQCPPRLEMQMLMPVSWSRMPNHFLQVETRRAGERLGWAVQCQEPLTMMALHIPEENRCMDILELSERLDLQRFHSHTLRLYRAVCALGNNRVAHALCSHVDQAQLLHALEDAHLPGPLRAGYYDLLISIHLESACRSRRSMLSEYIVPLTPETRAITLFPPGRSTENGHPRHGLPGVGVTTSLRPPHHFSPPCFVAALPAAGAAEAPARLSPAIPLEALRDKALRMLGEAVRDGGQHARDPVGASVEFQFVPVLKLVSTLLVMGIFGDEDVKQILKMIEPEVFTEEEEEEDEEEEGEEEDEEEKEEDEEETAQEKEDEEKEEEEAAEGEKEEGLEEGLLQMKLPESVKLQMCHLLEYFCDQELQHRVESLAAFAERYVDKLQANQRSRYGLLIKAFSMTAAETARRTREFRSPPQEQINMLLQFKDGTDEEDCPLPEEIRQDLLDFHQDLLAHCGIQLDGEEEEPEEETTLGSRLMSLLEKVRLVKKKEEKPEEERSAEESKPRSLQELVSHMVVRWAQEDFVQSPELVRAMFSLLHRQYDGLGELLRALPRAYTISPSSVEDTMSLLECLGQIRSLLIVQMGPQEENLMIQSIGNIMNNKVFYQHPNLMRALGMHETVMEVMVNVLGGGESKEIRFPKMVTSCCRFLCYFCRISRQNQRSMFDHLSYLLENSGIGLGMQGSTPLDVAAASVIDNNELALALQEQDLEKVVSYLAGCGLQSCPMLVAKGYPDIGWKPCGGERYLDFLRFAVFVNGESVEENANVVVRLLIRKPECFGPALRGEGGSGLLAAIEEAIRISEDPARDGPGIRRDRRREHFGEEPPEENRVHLGHAIMSFYAALIDLLGRCAPEMHLIQAGKGEALRIRAILRSLVPLEDLVGIISLPLQIPTLGKDGALVQPKMSASFVPDHKASMVLFLDRVYGIENQDFLLHVLDVGFLPDMRAAASLDTATFSTTEMALAVNRYLCLAVLPLITKCAPLFAGTEHRAIMVDSMLHTVYRLSRGRSLTKAQRDVIEDCLMSLCRYIRPSMLQHLLRRLVFDVPILNEFAKMPLKLLTNHYERCWKYYCLPTGWANFGVTSEEELHLTRKLFWGIFDSLAHKKYDPELYRMAMPCLCAIAGALPPDYVDASYSSKAEKKATVDAEGNFDPRPVETLNVIIPEKLDSFINKFAEYTHEKWAFDKIQNNWSYGENIDEELKTHPMLRPYKTFSEKDKEIYRWPIKESLKAMIAWEWTIEKAREGEEEKTEKKKTAKISQSAQTYDPREGYNPQPPDLSAVTLSRELQAMAEQLAENYHNTWGRKKKQELEAKGGGTHPLLVPYDTLTAKEKARDREKAQELLKFLQMNGYAVTRGLKDMELDSSSIEKRFAFGFLQQLLRWMDISQEFIAHLEAVVSSGRVEKSPHEQEIKFFAKILLPLINQYFTNHCLYFLSTPAKVLGSGGHASNKEKEMITSLFCKLAALVRHRVSLFGTDAPAVVNCLHILARSLDARTVMKSGPEIVKAGLRSFFESASEDIEKMVENLRLGKVSQARTQVKGVGQNLTYTTVALLPVLTTLFQHIAQHQFGDDVILDDVQVSCYRTLCSIYSLGTTKNTYVEKLRPALGECLARLAAAMPVAFLEPQLNEYNACSVYTTKSPRERAILGLPNSVEEMCPDIPVLERLMADIGGLAESGARYTEMPHVIEITLPMLCSYLPRWWERGPEAPPSALPAGAPPPCTAVTSDHLNSLLGNILRIIVNNLGIDEASWMKRLAVFAQPIVSRARPELLQSHFIPTIGRLRKRAGKVVSEEEQLALEAKAEAQEGELLVRDEFSVLCRDLYALYPLLIRYVDNNRAQWLTEPNPSAEELFRMVGEIFIYWSKSHNFKREEQNFVVQNEINNMSFLTADNKSKMAKAGDIQSGGSDQERTKKKRRGDRYSVQTSLIVATLKKMLPIGLNMCAPTDQDLITLAKTRYALKDTDEEVREFLHNNLHLQGKVEGSPSLRWQMALYRGVPGREEDADDPEKIVRRVQEVSAVLYYLDQTEHPYKSKKAVWHKLLSKQRRRAVVACFRMTPLYNLPTHRACNMFLESYKAAWILTEDHSFEDRMIDDLSKAGEQEEEEEEVEEKKPDPLHQLVLHFSRTALTEKSKLDEDYLYMAYADIMAKSCHLEEGGENGEAEEEVEVSFEEKQMEKQRLLYQQARLHTRGAAEMVLQMISACKGETGAMVSSTLKLGISILNGGNAEVQQKMLDYLKDKKEVGFFQSIQALMQTCSVLDLNAFERQNKAEGLGMVNEDGTVINRQNGEKVMADDEFTQDLFRFLQLLCEGHNNDFQNYLRTQTGNTTTINIIICTVDYLLRLQESISDFYWYYSGKDVIEEQGKRNFSKAMSVAKQVFNSLTEYIQGPCTGNQQSLAHSRLWDAVVGFLHVFAHMMMKLAQDSSQIELLKELLDLQKDMVVMLLSLLEGNVVNGMIARQMVDMLVESSSNVEMILKFFDMFLKLKDIVGSEAFQDYVTDPRGLISKKDFQKAMDSQKQFSGPEIQFLLSCSEADENEMINCEEFANRFQEPARDIGFNVAVLLTNLSEHVPHDPRLHNFLELAESILEYFRPYLGRIEIMGASRRIERIYFEISETNRAQWEMPQVKESKRQFIFDVVNEGGEAEKMELFVSFCEDTIFEMQIAAQISEPEGEPETDEDEGAGAAEAGAEGAEEGAAGLEGTAATAAAGATARVVAAAGRALRGLSYRSLRRRVRRLRRLTAREAATAVAALLWAAVTRAGAAGAGAAAGALGLLWGSLFGGGLVEGAKKVTVTELLAGMPDPTSDEVHGEQPAGPGGDADGEGASEGAGDAAEGAGDEEEAVHEAGPGGADGAVAVTDGGPFRPEGAGGLGDMGDTTPAEPPTPEGSPILKRKLGVDGVEEELPPEPEPEPEPELEPEKADAENGEKEEVPEPTPEPPKKQAPPSPPPKKEEAGGEFWGELEVQRVKFLNYLSRNFYTLRFLALFLAFAINFILLFYKVSDSPPGEDDMEGSAAGDVSGAGSGGSSGWGLGAGEEAEGDEDENMVYYFLEESTGYMEPALRCLSLLHTLVAFLCIIGYNCLKVPLVIFKREKELARKLEFDGLYITEQPEDDDVKGQWDRLVLNTPSFPSNYWDKFVKRKVLDKHGDIYGRERIAELLGMDLATLEITAHNERKPNPPPGLLTWLMSIDVKYQIWKFGVIFTDNSFLYLGWYMVMSLLGHYNNFFFAAHLLDIAMGVKTLRTILSSVTHNGKQLVMTVGLLAVVVYLYTVVAFNFFRKFYNKSEDEDEPDMKCDDMMTCYLFHMYVGVRAGGGIGDEIEDPAGDEYELYRVVFDITFFFFVIVILLAIIQGLIIDAFGELRDQQEQVKEDMETKCFICGIGSDYFDTTPHGFETHTLEEHNLANYMFFLMYLINKDETEHTGQESYVWKMYQERCWDFFPAGDCFRKQYEDQLS

SEQ ID NO: 1851 - protein, 66 aa, Homo sapiens
  misc_feature (1)...(66): Xaa = any amino acid or nothing
VIVAIYCQLIFDKGAKTIQXPFQQIALCKRMKLGPCFTPCGKINSEWIRELSVRVKTIKHLEIGVN

SEQ ID NO: 1852 - protein, 105 aa, Homo sapiens
  misc_feature (1)...(105): Xaa = any amino acid or nothing
SGMQWRDLTPLQPLPPRFKQFSCLSLPGSWDYRHAPPLLTNFXFLVEMGFCYVGQAGRKLLASSDQSALASQSAGITGISTAPGPPFFFLNFEAGSCSVAQAGVQ

SEQ ID NO: 1853 - protein, 194 aa, Homo sapiens
  misc_feature (1)...(194): Xaa = any amino acid or nothing
EVDSQSGVQXQAPGSLQLQTPGLKVSCLLSRQDYRSSLPHLASCCYYYYYYVFLXRRGLTTLVQGGLKLLPSSNPFASAPXTAGITGMSHCAGPHFNFXMFRKISCIREXFXHTRIYDIPFLILFFKETWVLLCYPGWPQIPGLKPSSCLRLLSSWDHRCAPPCPASFFIFHVDRVSPPCPGLVSITFKMLLLL

SEQ ID NO: 1854 - protein, 70 aa, Homo sapiens
MVSKSKSILMSYNHVELTFSDMKKMPEAFRRTQKHTIYLIPYQVIFWSTGKDAMRSFMMPFYQKEYYENQ

SEQ ID NO: 1855 - protein, 464 aa, Homo sapiens
  misc_feature (1)...(464): Xaa = any amino acid or nothing
EPGVPTKKTWFDKPDFNRTNSPGFQKKVQFGNENTKLELRKVPPELNNISKLNEHFSRFGTLVNLQVAYNGDPEGALIQFATYEEAKKAISSTEAVLNNRFIKVYWHREGSTQQLQTTSPKVMQPLVQQPILPVVKQSVKERLGPVPSSTIEPAEAQSASSDLPQVLSTLLAXQKQCIIQLLWKAAQKTLLVSTSAVDNNEAQKKKQEALKLQQDVRKRKQEILEKHIETQKMLISKLEKNKTMKSEDKAEIMKTLEVLTKNITKLKDEVKAASPGRCLPKSIKTKTQMQKELLDTELDLYKKMQAGEEVTELRRKYTELQLEAAKRGILSSGRGRGIHSRGRGAVHGRGRGRGRGRGVPGHAVVDHRPRALEISAFTESDREDLLPHFAQYGEIEDCQIDDSSLHAVITFKTRAEAEAAAVHGARFKGQDLKLAWNKPVTNISAVETEEVEPDEEEQREIIIA

SEQ ID NO: 1856 - protein, 343 aa, Homo sapiens
  misc_feature (1)...(343): Xaa = any amino acid or nothing
DAELSGTLSLVLTQCCKRIKDTVQKLASDHKDIHSSVSRVGKAIDKNFDSDISSVGIDGCWQADSQRLLNEVMVEHFFRQGMLDVAEELCQESGLSVDPSQKEPFVELNRILEALKVRVLRPALEWAVSNREMLIAQNSSLEFKLHRLYFISLLMGGTTNQREALQYAKNFQPFALNHQKDIQVLMGSLVYLRQGIENSPYVHLLDANQWADICDIFTRDACALLGLSVESPLSVSFSAGCVALPALINIKAVIEQRQCTGVWNQKDELPIEVDLGXKSAGYHSIFACPILRQQTTDNNPPMKLVCGHIISRDALNKMFNGSKLKCPYCPMEQSPGDAKQIFF

SEQ ID NO: 1857 - protein, 140 aa, Homo sapiens
  misc_feature (1)...(140): Xaa = any amino acid or nothing
SHPFSPAPGICPDAPPPLPRPSKGLGHPGTAGAPGSGARCHPPSTCSPSWASPGXGAKASPALPRSHGVTLLCKAQAHLCRGEDSKDASGSTSQAWEPGXGAWGMPRCQGPALGSCFCPPGTTVQRPAKQRDKRNRHLGR

SEQ ID NO: 1858 - protein, 97 aa, Homo sapiens
  misc_feature (1)...(97): Xaa = any amino acid or nothing
WCPAGTLDFPGPQEMVLLEIEVMNQLNHRNLIQLYAAIETPHEIVLFMEYECPKXWXGLGGGTTRHGASRGGVCAHSIEGGELFERIVDEDYHLTEV

SEQ ID NO: 1859 - protein, 120 aa, Homo sapiens
  misc_feature (1)...(120): Xaa = any amino acid or nothing
LTKTPSPREKGRGVLSVLLMMIXKCRVIFVKIPMVFFLQNFCRIILNVAWTGDXPNTLXKEQRGITFSDSKSXYKATKIKTMWYCHKNRYIDERNRIEIPEINPCICDKIIFRKLSMTTQ

SEQ ID NO: 1860 - protein, 43 aa, Homo sapiens
FSETRACCPRLEHSGRIEAHCSLNIPGSSDPPTSASSVAATTG

SEQ ID NO: 1861 - protein, 350 aa, Homo sapiens
  misc_feature (1)...(350): Xaa = any amino acid or nothing
PPAWAPRSPLIWAPTSGRHPCRAALPWSTSSVRWQPSEKQPPPPAHRGPADSLSTAAGAAELSAEGAGKSRGSGEQDWVNRPKTVRDTLLALHQHGHSGPFESKFKKEPALTAVARTARKRKPSPEPEGEVGPPKTTERPSRGCPHPQRGSRSPXLLHPLLCLRHHPLPHLIPTGPHRLKRPRMPSPMAALILVADNAGGSHASKDANQVHSTTRRNSNSPPSPSSMNQRRLGPREVGGQGAGNTGGLEPVHPASLPDSSLATSAPLCCTLCHERLEDTHFVQCPSVPSHKFCFPCSRQSIKQQGASGEVYCPSGEKCPLVGSNVPWAFMQGEIATILAGDVKVKKERDS

SEQ ID NO: 1862 - protein, 361 aa, Homo sapiens
  misc_feature (1)...(361): Xaa = any amino acid or nothing
QDRARLDCSSATSAHCNLRLPGSXDSPASASRVAGTTDTHHHTWLILGSSVQTGFDHVGQAGLELLTSGDPPISASESAGIMGMSHCVWPXSWGLSHHMAPPQGDGGRARGTPGPEQSFWNLSCHXPRCQVPSXLMTQLFWGRHQYNPTMKRGKLRHREACSLPLPGEGEPGLQPSSXSQNPCSSPLFHHGLXAWLWCPELLLQGQARRHXRSPPSFKCPATLSLTAWSQTKRLRSQFLLLPWLXRALXHPPCHWPSRRSLGDPLLPRSQGXRDGTXASTFCSYFXDTESHLVAQAGVQWRDLGSLQPPCPRLKRFSRLSPPSSYTHRYVPSHLAESCISSRDRIPPSRPDRSRNSNSLSR

SEQ ID NO: 1863 - protein, 851 aa, Homo sapiens
  misc_feature (1)...(851): Xaa = any amino acid or nothing
VALTTSMCCNKQVIVIDKIKSASIADRCGALHVGDHILSIDGTSMEYCTLAEATQFLANTTDQVKLEILPHHQTRLALKGPDHVKIQRSDRQLTWDSWASNHSSLHTNHHYNTYHPDHCRVPALTFPKAPPPNSPPALVSSSFSPTSMSAYSLSSLNMGTLPRSLYSTSPRGTMMRRRLKKKDFKSSLSLASSTVGLAGQVVHTETTEVVLTADPVTGFGIQLQGSVFATETLSSPPLISYIEADSPAERCGVLQIGDRVMAINGIPTEDSTFEEASQLLRDSSITSKVTLEIEFDVAESVIPSSGTFHVKLPKKHNVELGITISSPSSRKPGDPLVISDIKKGSVAHRTGTLELGDKLLAIDNIRLDNCSMEDAVQILQQCEDLVKLKIRKDEDNSDEQESSGAIIYTVELKRYGGPLGITISGTEEPFDLXIISSLTKGGLAERTGAIHIGDRILAINSSSLKGKPLSEAIHLLQMAGETVTLKIKKQTDAQSASSPKKFPISSHLSDLGDVEEDSSPAQKPGKLSDMYPSHGCPSVDSAVDSWDGSAIDTSYGTEGTSFQASGYNFNTYDWRSPKQRGSLSPVTKPRSQTYPDVGLSYEDWDRSTASGFAGAADSAETEQEENFWSQALEDLETCGQSGILRELEATIMSGSTMSLNHEAPTPRSPAGSDRPSFQERSSSRPHYSQTTRSNTLPSDVGRKSVTLRKMKQEIKEIMSPTPVELHKVTLYKDSDMEDFGFSVADGLLEKGVYVKNIRPAGPGDLGGLKPYDRLLQVNHVRTRDFDCCLVVPLIAESGNKLDLVISRNPLASQKSIDQQSLPGDXSEQNSAFFQQPSHGGNLETREPTNTL

SEQ ID NO: 1864 - protein, 178 aa, Homo sapiens
  misc_feature (1)...(178): Xaa = any amino acid or nothing
LEKQGVSGMATKRLARQLGLIRRKSIAPANGNLGRSKSKQLFDYLIVIDFESTCWNDGKHHHSQEIIEFPAVLLNTSTGQIDSEFQAYVQPQEHPILSEFCMELTGIKQAQVDEGVPLKICLSQFCKWIHKIQQQKNIIFATGISEPSDFXSKIMCICYLVRXRISYTYXSKHKSKGC

SEQ ID NO: 1865 - protein, 103 aa, Homo sapiens
  misc_feature (1)...(103): Xaa = any amino acid or nothing
CRFWGISTHCDTCDPLSPQTTEGXXEGDLWSLDLLGPEFLARKPLFKTKTYQSTFXSISKNEFTCPNFIIEEGTDLIFXQVKHNPCHRLTPEEGTVQLNRADS

SEQ ID NO: 1866 - protein, 452 aa, Homo sapiens
  misc_feature (1)...(452): Xaa = any amino acid or nothing
KMLCQKESNYIRLKRAKMDKSMFVKIKTLGIGAFGEVCLARKVDTKALYATKTLRKKDVLLRNQVAHVKAERDILAEADNEWVVRLYYSFQDKDNLYFVMDYIPGGDMMSLLIRMGIFPESLARFYIAELTCAVESVHKMGFIHRDIKPDNILIDRDGHIKLTDFGLCTGFRWTHDSKYYQSGDHPRQDSMDFSNEWGDPSSCRCGDRLKPLERRAARQHQRCLAHSLVGTPNYIAPEVLLRTGYTQLCDWWSVGVILFEMLVGQPPFLAQTPLETQMKVINWQTSLHIPPQAKLSPEASDLIIKLCRGPEDRLGKNGADEIKAHPIFXNQFDFSQXPEDSRSAFKQFPXNHTTPTDTSNFDPVDPDKLWSDDNEEENVNDTLNGWYKNGKHPEHAFYEFTFRRFFDDNGYPYNYPKPIEYEYINSQGSEQQSDEDDQNTGSEIKNRDLVYV

SEQ ID NO: 1867 - protein, 111 aa, Homo sapiens
  misc_feature (1)...(111): Xaa = any amino acid or nothing
FFFKKFTQSLGFLLFSFSFLFSCFFFFHFVLFCYVFLDRVPLCHPGWSAVVQSQVTVNLPPSWDXRCRPPHLANLCNFCRDSFTTLPRLVLNTWAQAIFQPQPPKVLGLQV

SEQ ID NO: 1868 - protein, 103 aa, Homo sapiens
  misc_feature (1)...(103): Xaa = any amino acid or nothing
SPEMESHPITQAGVQWHHLSSLQPLPPGFKXFSCFSLPEXLGYRHVPPCLANSVFSVEMGFLHVGQAGLELLTSGDLPALASQSAGITGSHRARPENGFENIF

SEQ ID NO: 1869 - protein, 205 aa, Homo sapiens
NQGLRHVGLCRTCLVNQMFASSILGKSHHHSLISINQGHNALWKAAGPLPLKAGYCQSFSPCDSLKYGSWDEKDLTVPQRDTHKRSVLRWISQRGKLAVEMEEGHCLLLPLGTECLGIKPIVHLFSSEMGENRPMVGARHVYSNAALLSFTPLRCLGGEKHKSGLHARPVIVPSLELHYDMDSIAHVFADLLLIITLPSYYIPFC

SEQ ID NO: 1870 - protein, 61 aa, Homo sapiens
  misc_feature (1)...(61): Xaa = any amino acid or nothing
QSFRLSLLSSWDYRHMXPRLANFXTFFCRDRSLALLPRLVSNSWPQAILPPRPPKVLGLQT

SEQ ID NO: 1871 - protein, 56 aa, Homo sapiens
  misc_feature (1)...(56): Xaa = any amino acid or nothing
FFFXETVSCSASXAGVRSHDNSSLQPPSPGSSNPPTSASHVAGATGTHHHAWLLSV

SEQ ID NO: 1872 - protein, 125 aa, Homo sapiens
  misc_feature (1)...(125): Xaa = any amino acid or nothing
QGIALLTRMGESVKHVTGGYKLRTRPLEFAAIGDYLDTFALKLGTIDRIAQRIIKEEIEYLVELREYGPVYSTWSALEGELAEPLEGVSACIGNCSTALXELTDDMTEDFLFVLREYILYSDSMK

SEQ ID NO: 1873 - protein, 107 aa, Homo sapiens
  misc_feature (1)...(107): Xaa = any amino acid or nothing
ERVIHNQIQQAQRSPHIFNARRSSPRPNIVELPKVKEVCKTSKSGQVIYKGVSIRLRANFLAEPLXNRREWDEAIKVLKEKQFLSKMVYPANLSFGNEGDITSFPAK

SEQ ID NO: 1874 - protein, 107 aa, Homo sapiens
  misc_feature (1)...(107): Xaa = any amino acid or nothing
FFLRWSLDSVAQAGVKWCNLGSLQAPPPGFTPFSCLSLPSSWDYRHPPPRLANXLTNFLCFXXRQGFTVLARMVLISXPHDLPASASQSAGITGLSHCSWPTSSILS

SEQ ID NO: 1875 - protein, 144 aa, Homo sapiens
  misc_feature (1)...(144): Xaa = any amino acid or nothing
QFRVIFFFLRRSHSVAQAGMQWHDHSLLQPLPPRLKQFSHLSPPSIWDYRRVPPCLVNFSIFFVETGSCQPCLQLLGSSNPPASASQSAGIAGISHQGQPEXSFDIRFACVIAALRETFQCLCSASRVNNKIINRPTHPVESSF

SEQ ID NO: 1876 - protein, 87 aa, Homo sapiens
  misc_feature (1)...(87): Xaa = any amino acid or nothing
TPSSTSRGTEEQQSSKMAWQRREEKEHLNVRRSSAEDGWKADKPVDGXTPGEDHLPTPSPFQLHIHSSESQLHHSVKSPPSLSFRLM

SEQ ID NO: 1877 - protein, 119 aa, Homo sapiens
  misc_feature (1)...(119): Xaa = any amino acid or nothing
DFYLYPERKKRGQMMTAVSLTTRPQESVAFEDVAVYFTTKEWAIMGPAERALYRDVMLENYGGCGPLXCHPTSKPALVFSLEQGKESCFSPATGSSLSRNDWRAGWIGYLELRRYTYLS

SEQ ID NO: 1878 - protein, 304 aa, Homo sapiens
GTSELLCIQRWNWGPAFPPRPGLALAPTLQLLVEMGSAKSVPVTPARPPPHNKHLARVADPRSPSAGILRTPIQVESSPQPGLPAGEQLEGLKHAQDSDPRSPTLGIARTPMKTSSGDPPSPLVKQLSEVFETEDSKSNLPPEPVLPPEAPLSSELDLPLGTQLSVEEQMPPWNQTEFPSKQVFSKEEARQPTETPVASQSSDKPSRDPETPRSSGSMRNRWKPNSSKVLGKSPLHPSCQDDNSPGTLTLRQGKAAFKPLSENVSELKEGAILGTGRLLKTEGRAWEQGQDHDKENQHFPLVES

SEQ ID NO: 1879 - protein, 122 aa, Homo sapiens
  misc_feature (1)...(122): Xaa = any amino acid or nothing
KDMVLIMEMQSMITMKCPQYLXEXRKIPDITKCWXGCGSTGILIFCWSXPLXKTIXQPRXFKQIXTILTIIYSIMXEHTFHNAGVXLSDIYPRFMKGYVHTEICTXMFIAVLFVVVKTWKQF

SEQ ID NO: 1880 - protein, 119 aa, Homo sapiens
  misc_feature (1)...(119): Xaa = any amino acid or nothing
LLEVNGNTIVTVFTKAQNKKNKGSRSILFKQLRKYGSRINLLKSKHDKNICTENYKTXMKEIEADTDKWKDILCSWIRRIHMKDILCSWIGRTHVVKISILPKVNYRFYLISIKIIMAI

SEQ ID NO: 1881 - protein, 100 aa, Homo sapiens
  misc_feature (1)...(100): Xaa = any amino acid or nothing
TQGTEEIYKISSCEWVQASFSTPLITLHDFKIYHKATVIKMVWYWHRQXKFSKNRIESSEIEPHIYDQFIFDKGEKIIQEKGNSFFNNMCWKNWIFTXKR

SEQ ID NO: 1882 - protein, 116 aa, Homo sapiens
  misc_feature (1)...(116): Xaa = any amino acid or nothing
NDLLENFKFWEXFKEXLENINGTVTEKETGGVYKELSSPKYSGTRQFYGQTISNFPGKIISMVYKLFQNTETEGRHPISLYEFRITLITIPNKDNIYLQIWMPVSLMNIVTLKCPT

SEQ ID NO: 1883 - protein, 119 aa, Homo sapiens
  misc_feature (1)...(119): Xaa = any amino acid or nothing
PIRKFTKVAGXKSNTPKXLAFLHINNEQFENKIITNIPFIIASKRIKYSGISLTKEMKDLYTETLLRKIKEDTNKWKDISCFWVGRLNIVKMPKVICIFNAIPIKMPMMCMAKIEKNSS

SEQ ID NO: 1884 - protein, 642 aa, Homo sapiens
IIDSSTRRMESERSPLYRQLIDLGYLSSSHWNCGAPGQDTKAQSMLVEQSEKLRHLSTFSHQVLQTRLVDAAKALNLVHCHCLDIFINQAFDMQRDLQITPKRLEYTRKKENELYESLMNIANRKQEEMKDMIVETLNTMKEELLDDATNMEFKDVIVPENGEPVGTREIKCCIRQIQELIISRLNQAVANKLISSVDYLRESFVGTLERCLQSLEKSQDVSVHITSNYLKQILNAAYHVEVTFHSGSSVTRMLWEQIKQIIQRITWVSPPAITLEWKRKVAQEAIESLSASKLAKSICSQFRTRLNSSHEAFAASLRQLEAGHSGRLEKTEDLWLRVRKDHAPRLARLSLESRSLQDVLLHRKPKLGQELGRGQYGVVYLCDNWGGHFPCALKSVVPPDEKHWNDLALEFHYMRSLPKHERLVDLHGSVIDYNYGGGSSIAVLLIMERLHRDLYTGLKAGLTLETRLQIALDVVEGIRFLHSQGLVHRDIKLKNVLLDKQNRAKITDLGFCKPEAMMSGSIVGTPIHMAPELFTGKYDNSVDVYAFGILFWYICSGSVKLPEAFERCASKDHLWNNVRRGARPERLPVFDEECWQLMEACWDGDPLKRPLLGIVQPMLQGIMNRLCKSNSEQPNRGLDDST

SEQ ID NO: 1885 - protein, 138 aa, Homo sapiens
ALMPHEANYEEIFLKTDKDMDGFESGLEVREIFLKTRGLPSTLLAHIWALCDSKDCGKLSKDHFALAFHLITQKLIKGIDPPLVLTPEKISPSNRASLQKVTELTRKPVCIIFKGTILWRITDSIWMKHNRKRIWLRA

SEQ ID NO: 1886 - protein, 87 aa, Homo sapiens
  misc_feature (1)...(87): Xaa = any amino acid or nothing
DHQKXKNIPCSWIGRINIVKMSILPKAIYRFSAIPIKIPMTFFTEIXSXNVYRTTKTQEXAKAILSKKEQNLEESHYLDFKXYYRAV

SEQ ID NO: 1887 - protein, 76 aa, Homo sapiens
SIDCEHLIRRMLVLDPSKRLTIAQIKEHKWMLIEVPVQRPVLYPQEQENEPSIGEFNEQVLRLMHSLGIDQQKTIE

SEQ ID NO: 1888 - protein, 57 aa, Homo sapiens
IRHIPLKIRSVVSHLKCFYKFILTFFFAGCSQPLVPRENITAWMNAIGLIITALPVS

SEQ ID NO: 1889 - protein, 87 aa, Homo sapiens
  misc_feature (1)...(87): Xaa = any amino acid or nothing
ASRPWGHSYPXFNQQEVDTLKRPIASSEIXMMIXKFATKKSPGPYRFTAEFSHTFKEDLVPILWPLFPKIYREGTLPHSFYEASITL

SEQ ID NO: 1890 - protein, 622 aa, Homo sapiens
PEPGAGRAATPWGPLFWRGRGSGRCEKAAEAALGDFLGLHRRTQQPAVDRLLSDASAQWRVRGHGGVRESGRAPQQPGRRRGRRPRKRPRGRWRREGCGAGGRGVCVAAWSQRSIAGNNDYRLFHKMSNSHPLRPFTAVGEIDHVHILSEHIGALLIGEEYGDVTFVVEKKRFPAHRVILAARCQYFRALLYGGMRESQPEAEIPLQDTTAEAFTMLLKYIYTGRATLTDEKEEVLLDFLSLAHKYGFPELEDSTSEYLCTILNIQNVCMTFDVASLYSLPKLTCMCCMFMDRNAQEVLSSEGFLSLSKTALLNIVLRDSFAAPEKDIFLALLNWCKHNSKENHAEIMQAVRLPLMSLTELLNVVRPSGLLSPDAILDAIKVRSESRDMDLNYRGMLIPEENIATMKYGAQVVKGELKSALLDGDTQNYDLDHGFSRHPIDDDCRSGIEIKLGQPSIINHVRILLWDRDSRSYSYFIEVSMDELDWVRVIDHSQYLCRSWQKLYFPARVCRYIRIVGTHNTVNKIFHIVAFECMFTNKTFTLEKGLIVPMENVATIADCASVIEGVSRSRNALLNGDTKNYDWDSGYTCHQLGSGAIVVQLAQPYMIGSIRVLLWDCDDRSY

SEQ ID NO: 1891 - protein, 165 aa, Homo sapiens
GTLGYPNGARGQPQDNFFAHQVSHHPPISACHAESENFAFWQDMKWKNKFWGKSLEIVPVGTVNVSLPRFGDHFEWNKVTSCIHNVLSGQRWIEHYGEVLIRNTQDSSCHCKITFCKAKYWSSNVHEVQGAVLSRSGRVLHRLFGKWHEGLYRGPTPGGQCIWKP

SEQ ID NO: 1892 - protein, 130 aa, Homo sapiens
  misc_feature (1)...(130): Xaa = any amino acid or nothing
SVDAYVCNDIVFSYRTTITLLEGAXLTHRYVAQDPKQGQLRSLHLTCDSAPAGSQGTWSTSCRINHLIFRGGAQITFLATFDDSPKAVLGDRLLLTANVSSENNTPRTSKTTFQLELSVKDAVYTVVSSH

SEQ ID NO: 1893 - protein, 222 aa, Homo sapiens
  misc_feature (1)...(222): Xaa = any amino acid or nothing
TISYPQCLTQMYFLISFANVDTFLLPIMALDHYVAICSALQXCSIITPELCQGLPVLAXAGSSLISPVHTVIMSRLAFCSSAQISHFYRDAYLLMKIACSHTXNQHVFLGAVVLFLAPCALILVSYIRIAAAILRIPSPTRRRKACSICSSHLSLVTLFYGTVLGICIXPPDSFSAQDAIATIMYTVVTSMLNPFIYSLMNKEVQEAVRRLFSRGSHSSWCW

SEQ ID NO: 1894 - protein, 178 aa, Homo sapiens
  misc_feature (1)...(178): Xaa = any amino acid or nothing
LLYAQAGVQXLNLSSLQPQPAGLKQSSHPSLPSSWDYRYSTPHPANFFVEMEFHHVAQAGLELLGSGDLPTSTSHSAGITGVSHHAPPRLISSEGSLLGHLLCLPMVFPLLCVFVLISSSLAGEEAAGLRVQKLWPAVVLSHLPVCWFHCSGIWSEVIELKVGREGHVLPWQAHVVEF

SEQ ID NO: 1895 - protein, 137 aa, Homo sapiens
HPLGLGLVPSEIFSPQDKKAADGSILAPARGEDLEAGLKGSFMDGRLQASVSVFRIQRVGSAMQDTASAMPCLPYYPTSHCFMAGGKSRSQGWELELSGEPAPGWQVLAGYTYTQARYLRDASEANVGQPLRPVDPR

SEQ ID NO: 1896 - protein, 115 aa, Homo sapiens
  misc_feature (1)...(115): Xaa = any amino acid or nothing
FFQVFIFLFLIFFKTEFHSCCPGAVQWHDLDSLQPPPPRFKGFSCLSLPSSWDYRHAPAHPANFVFLVETGFLHVGQASLELPTSGDTPASASQSAGITGVSHHAXPRASGRRCW

SEQ ID NO: 1897 - protein, 1008 aa, Homo sapiens
  misc_feature (1)...(1008): Xaa = any amino acid or nothing
AGPDGLAAPASCQGARGQTRVPGAFSWLAPGSHHASEGLAPGVPPAGGVSAQELTAPPQEGWGLGAPPAAPRPESDEKRAGSDAVRSFSRGARDSLGQRRLGGTRGAGPAGKGAQRTMGPASGFHSFPPRPHQEPSPRSSCWQHLLWHCPWPQPSRLPRLTPAQLLQGPGVLAAPPGPXHVPGFLAQSPWPLPSGPRSPXDPLHQGALVPLPQGGSPHTAPHCLPSVLSPAIQQPLLPTASTSSRSPPASTMAPIPSALAVWEPAGSSPQLSSAPADSSPLPALPKVLPPWTQKPLLGCLCQSPLPLLSPPDQIRCPPACSPAAASSFSFESQPCPSAPSKASPAPAALIVGPHHPPXSQQPQSQSVHPHGPGGPQPPLAASSLFWMFCQPPPPHPQFLWHRPLPVTGKALASPLCFRPAPGSLRQTPLPPQFHIPRPGLSAPPPPASGTSDSSDSRSPSASAARVWPPASPPPPAARHRPHPPEYFLSPCPFSCGFPRLLGRPRRPQALQTPRAWDLPPGSSPAPLCSGPELPXAPPPLPPFPRVAXLGSGHPPSAQVPGLWXRCVXGHPIPRPVGHSXSGPPHSPPLXAPPQAWPLELPPSRQCLQPLHLRAAQPLDPCCSLSPPGPPLPVPALPSWPGRPXSPSPASSQPPYHAGLPGPQSSPLPPGLPQLPSLRSGSQQPLLFFQCPGPGAVWGKGSPQPLSPHPPPPARTQTFPVASRSLSPGTAPYSVCLTPSRSASSLPEVVLASSLPKIPQSSGSPLGPTSPMPXCFHRPSPPLPLSSPFPALRPQAPQFPLHLPPXPPAPSPGCPLPPLAQQHQPSPPSPHARSTLTPPLWPSLALLPXPLPPPPPVPSFSASLLCSLPAHGTPASPGLGRSCLGKPQTLPWISFWPPSGRLAPGTWQPWPVSPAPLSCLSAWDPWELPSPQPQVCSTAELPTSCLLSSPGPPAFQPPRFGCLXGPPGPPGLPPLQSSLSFPPPPPPVPQPPAPPALQWGLHLPGGRTK

SEQ ID NO: 1898 - protein, 508 aa, Homo sapiens
  misc_feature (1)...(508): Xaa = any amino acid or nothing
RIHREEDFQFILKGIARLLSNPLLQTYLPNSTKKIQFHQELLVLFWKLCDFNKVGQPRGALQGDGEQLPQXPGGRDSVRLRGVGQSCPSLELSPLGPSPHPXKFLFFVLKSSDVLDILVPILFFLNDARADQSRVGLMHIGVFILLLLSGECNFGVRLNKPYSIRVPMDIPVFTGTHADLLIVVFHKIITSGHQRLQPLFDCLLTIVVNVSPYLKSLSMVTANKLLHLLEAFSTTWFLFSAAQNHHLVFFLLEVFNNIIQYQFDGNSNLVYAIIRKRSIFHQLANLPTDPPTIHKALQRRRRTPEPLSRTGSQGGAPPWRAPAPLPLQSQAPSRPVWWLLQALTSXPRSPRCQRMAPCGPWNLSPSRAWRMAARLRGSPARHGGSSGDRPHSSASGQWSPTPEWVLSWKSKLPLQTIMRLLQVLVPQVEKICIDKGLTDESEILRFLQHGTLVGLLPVPHPILIRKYQANSGTAMWFRTYMWGVIYLRNVDPPVWYDTDVKLFEIQRV

SEQ ID NO: 1899 - protein, 179 aa, Homo sapiens
LPWQRLGVLLSRGKMAVTGWLESLRTAQKTALLQDGRRKVHYLFPDGKEMAEEYDEKTSELLVRKWRVKSALGAMGQWQLEVGDPAPLGAGNLGPELIKESNANPIFMRKDTKMSFQWRIRNLPYPKDVYSVSVDQKERCIIVRTTNKKYYKKFSIPDLDRHQLPLDDALLSFATPTAP

SEQ ID NO: 1900 - protein, 657 aa, Homo sapiens
IRHTGSDIAGVCGWLLLSGPCGVGLDLDSRLLGASAMRRSEVLAEESIVCLQKALNHLREIWELIGIPEDQRLQRTEVVKKHIKELLDMMIAEEESLKERLIKSISVCQKELNTLCSELHVEPFQEEGETTILQLEKDLRTQVELMRKQKKERKQELKLLQEQDQELCEILCMPHYDIDSASVPSLEELNQFRQHVTTLRETKASRREEFVSSIKRQIILCMEELDHTPDTSFERDVVCEDEDAFCLSLENIATLQKLLRQLEMQKSQNEAVCEGLRTQIRELWDRLQIPEEEREAVATIMSGSKAKVRKALQLEVDRLEELEKCKTMKKVIEAIRVELVQYWDQCFYSQEQRQAFAPFCAEDYTESLLQLHDAEIVRLKNYYEVHKELFEGVQKWEETWRLFLEFERKASDPNRFTNRGGNLLKEEKQRAKLQKMLPKLEEELKARIELWEQEHSKAFMVNGQKFMEYVAEQWEMHRLEKERAKQERQLKNKKQTETEMLYGSAPRTPSKRRGLAPNTPGKARKLNTTTMSNATANSSIRPIFGGTVYHSPVSRLPPSGSKPVAASTCSGKKTPRTGRHGANKENLELNGSILSGGYPGSAPLQRNFSINSVASTYSEFADPSLSDSSTVGLQRELSKASKSDATSGILNSTNIQS

SEQ ID NO: 1901 - protein, 333 aa, Homo sapiens
AWHEGLVSSPAIGAYLSASYGDSLVVLVATVVALLDICFILVAVPESLPEKMRPVSWGAQISWKQADPFASLKKVGKDSTVLLICITVCLSYLPEAGQYSSFFLYLRQVIGFGTVKIAAFIAMVGILSIVAQTAFLSILMRSLGNKNTVLLGLGFQMLQLAWYGFGSQAWMMWAAGTVAAMSSITFPAISALVSRNAESDQQGVAQGIITGIRGLCNGLGPALYGFIFYMFHVELTELGPKLNSNNVPLQGAVIPGPPFLFGACIVLMSFLVALFIPEYSKASGVQKHSNSSSGSLTNTPERGSDEDIEPLLQDSSIWELSSFEEPGNQCTEL

SEQ ID NO: 1902 - protein, 4767 aa, Homo sapiens
ARPPPAPGSRQQKQKAAPGAAAAAELRGAREPAPARRRGTMADGGEGEDEIQFLRTDDEVVLQCTATIHKEQQKLCLAAEGFGNRLCFLESTSNSKNVPPDLSICTFVLEQSLSVRALQEMLANTVEKSEGQVDVEKWKFMMKTAQGGGHRTLLYGHAILLRHSYSGMYLCCLSTSRSSTDKLAFDVGLQEDTTGEACWWTIHPASKQRSEGEKVRVGDDLILVSVSSERYLHLSYGNGSLHVDAAFQQTLWSVAPISSGSEAAQGYLIGGDVLRLLHGHMDECLTVPSGEHGEEQRRTVHYEGGAVSVHARSLWRLETLRVAWSGSHIRWGQPFRLRHVTTGKYLSLMEDKNLLLMDKEKADVKSTAFTFRSSKEKLDVGVRKEVDGMGTSEIKYGDSVCYIQHVDTGLWLTYQSVDVKSVRMGSIQRKAIMHHEGHMDDGISLSRSQHEESRTARVIRSTVFLFNRFIRGLDALSKKAKASTVDLPIESVSLSLQDLIGYFHPPDEHLEHEDKQNRLRALKNRQNLFQEEGMINLVLECIDRLHVYSSAAHFADVAGREAGESWKSILNSLYELLAALIRGNRKNCAQFSGSLDWLISRLERLEASSGILEVLHCVLVESPEALNIIKEGHIKSIISLLDKHGRNHKVLDVLCSLCVCHGVAVRSNQHLICDNLLPGRDLLLQTRLVNHVSSMRPNIFLGVSEGSAQYKKWYYELMVDHTEPFVTAEATHLRVGWASTEGYSPYPGGGEEWGGNGVGDDLFSYGFDGLHLWSGCIARTVSSPNQHLLRTDDVISCCLDLSAPSISFRINGQPVQGMFENFNIDGLFFPVVSFSAGIKVRFLLGGRHGEFKFLPPPGYAPCYEAVLPKEKLKVEHSREYKQERTYTRDLLGPTVSLTQAAFTPIPVDTSQIVLPPHLERIREKLAENIHELWVMNKIELGWQYGPVRDDNKRQHPCLVEFSKLPEQERNYNLQMSLETLKTLLALGCHVGISDEHAEDKVKKMKLPKNYQLTSGYKPAPMDLSFIKLTPSQEAMVDKLAENAHNVWARDRIRQGWTYGIQQDVKNRRNPRLVPYTPLDDRTKKSNKDSLREAVRTLLGYGYNLEAPDQDHAARAEVCSGTGERFRIFRAEKTYAVKAGRWYFEFETVTAGDMRVGWSRPGCQPDQELGSDERAFAFDGFKAQRWHQGNEHYGRSWQAGDVVGCMVDMNEHTMMFTLNGEILLDDSGSELAFKDFDVGDGFIPVCSLGVAQVGRMNFGKDVSTLKYFTICGLQEGYEPFAVNTNRDITMWLSKRLPQFLQVPSNHEHIEVTRIDGTIDSSPCLKVTQKSFGSQNSNTDIMFYRLSMPIECAEVFSKTVAGGLPGAGLFGPKNDLEDYDADSDFEVLMKTAHGHLVPDRVDKDKEATKPEFNNHKDYAQEKPSRLKQRFLLRRTKPDYSTSHSARLTEDVLADDRDDYDFLMQTSTYYYSVRIFPGQEPANVWVGWITSDFHQYDTGFDLDRVRTVTVTLGDEKGKVHESIKRSNCYMVCAGESMSPGQGRNNNGLEIGCVVDAASGLLTFIANGKELSTYYQVEPSTKLFPAVFAQATSPNVFQFELGRIKNVMPLSAGLFKSEHKNPVPQCPPRLHVQFLSHVLWSRMPNQFLKVDVSRISERQGWLVQCLDPLQFMSLHIPEENRSVDILELTEQEELLKFHYHTLRLYSAVCALGNHRVAHALCSHVDEPQLLYAIENKYMPGLLRAGYYDLLIDIHLSSYATARLMMNNEYIVPMTEETKSITLFPDENKKHGLPGIGLSTSLRPRMQFSSPSFVSISNECYQYSPEFPLDILKSKTIQMLTEAVKEGSLHARDPVGGTTEFLFVPLIKLFYTLLIMGIFHNEDLKHILQLIEPSVFKEAATPEEESDTLEKELSVDDAKLQGAGEEEAKGGKRPKEGLLQMKLPEPVKLQMCLLLQYLCDCQVRHRIEAIVAFSDDFVAKLQDNQRFRYNEVMQALNMSAALTARKTKEFRSPPQEQINMLLNFKDDKSECPCPEEIRDQLLDFHEDLMTHCGIELDEDGSLDGNSDLTIRGRLLSLVEKVTYLKKKQAEKPVESDSKKSSTLQQLISETMVRWAQESVIEDPELVRAMFVLLHRQYDGIGGLVRALPKTYTINGVSVEDTINLLASLGQIRSLLSVRMGKEEEKLMIRGLGDIMNNKVFYQHPNLMRALGMHETVMEVMVNVLGGGESKEITFPKMVANCCRFLCYFCRISRQNQKAMFDHLSYLLENSSVGLASPAMRGSTPLDVAAASVMDNNELALALREPDLEKVVRYLAGCGLQSCQMLVSKGYPDIGWNPVEGERYLDFLRFAVFCNGESVEENANVVVRLLIRRPECFGPALRGEGGNGLLAAMEEAIKIAEDPSRDGPSPNSGSSKTLDTEEEEDDTIHMGNAIMTFYSALIDLLGRCAPEMHLIHAGKGEAIRIRSILRSLIPLGDLVGVISIAFQMPTIAKDGNVVEPDMSAGFCPDHKAAMVLFLDRVYGIEVQDFLLHLLEVGFLPDLRAAASLDTAALSATDMALALNRYLCTAVLPLLTRCAPLFAGTEHHASLIDSLLHTVYRLSKGCSLTKAQRDSIEVCLLSICGQLRPSMMQHLLRRLVFDVPLLNEHAKMPLKLLTNHYERCWKYYCLPGGWGNFGAASEEELHLSRKLFWGIFDALSQKKYEQELFKLALPCLSAVAGALPPDYMESNYVSMMEKQSSMDSEGNFNPQPVDTSNITIPEKLEYFINKYAEHSHDKWSMDKLANGWIYGEIYSDSSKVQPLMKPYKLLSEKEKEIYRWPIKESLKTMLARTMRTERTREGDSMALYNRTRRISQTSQVSVDAAHGYSPRAIDMSNVTLSRDLHAMAEMMAENYHNIWAKKKKMELESKGGGNHPLLVPYDTLTAKEKAKDREKAQDILKFLQINGYAVSRGFKDLELDTPSIEKRFAYSFLQQLIRYVDEAHQYILEFDGGSRGKGEHFPYEQEIKFFAKVVLPLIDQYFKNHRLYFLSAASRPLCSGGHASNKEKEMVTSLFCKLGVLVRHRISLFGNDATSIVNCLHILGQTLDARTVMKTGLESVKSALRAFLDNAAEDLEKTMENLKQGQFTHTRNQPKGVTQIINYTTVALLPMLSSLFEHIGQHQFGEDLILEDVQVSCYRILTSLYALGTSKSIYVERQRSALGECLAAFAGAFPVAFLETHLDKHNIYSIYNTKSSRERAALSLPTNVEDVCPNIPSLEKLMEEIVELAESGIRYTQMPHVMEVILPMLCSYMSRWWEHGPENNPERAEMCCTALNSEHMNTLLGNILKIIYNNLGIDEGAWMKRLAVFSQPIINKVKPQLLKTHFLPLMEKLKKKAATVVSEEDHLKAEARGDMSEAELLILDEFTTLARDLYAFYPLLIRFVDYNRAKWLKEPNPEAEELFRMVAEVFIYWSKSHNFKREEQNFVVQNEINNMSFLITDTKSKMSKAAVSDQERKKMKRKGDRYSMQTSLIVAALKRLLPIGLNICAPGDQELIALAKNRFSLKDTEDEVRDIIRSNIHLQGKLEDPAIRWQMALYKDLPNRTDDTSDPEKTVERVLDIANVLFHLEQKSKRVGRRHYCLVEHPQRSKKAVWHKLLSKQRKRAVVACFRMAPLYNLPRHRAVNLFLQGYEKSWIETEEHYFEDKLIEDLAKPGAEPPEEDEGTKRVDPLHQLILLFSRTALTEKCKLEEDFLYMAYADIMAKSCHDEEDDDGEEEVKSFEEKEMEKQKLLYQQARLHDRGAAEMVLQTISASKGETGPMVAATLKLGIAILNGGNSTVQQKMLDYLKEKKDVGFFQSLAGLMQSCSVLDLNAFERQNKAEGLGMVTEEGSGEKVLQDDEFTCDLFRFLQLLCEGHNSDFQNYLRTQTGNNTTVNIIISTVDYLLRVQESISDFYWYYSGKDVIDEQGQRNFSKAIQVAKQVFNTLTEYIQGPCTGNQQSLAHSRLWDAVVGFLHVFAHMQMKLSQDSSQIELLKELMDLQKDMVVMLLSMLEGNVVNGTIGKQMVDMLVESSNNVEMILKFFDMFLKLKDLTSSDTFKEYDPDGKGVISKRDFHKAMESHKHYTQSETEFLLSCAETDENETLDYEEFVKRFHEPAKDIGFNVAVLLTNLSEHMPNDTRLQTFLELAESVLNYFQPFLGRIEIMGSAKRIERVYFEISESSRTQWEKPQVKESKRQFIFDVVNEGGEKEKMELFVNFCEDTIFEMQLAAQISESDLNERSANKEESEKERPEEQGPRMAFFSILTVRSALFALRYNILTLMRMLSLKSLKKQMKKVKKMTVKDMVTAFFSSYWSIFMTLLHFVASVFRGFFRIICSLLLGGSLVEGAKKIKVAELLANMPDPTQDEVRGDGEEGERKPLEAALPSEDLTDLKELTEESDLLSDIFGLDLKREGGQYKLIPHNPNAGLSDLMSNPVPMPEVQEKFQEQKAKEEEKEEKEETKSEPEKAEGEDGEKEEKAKEDKGKQKLRQLHTHRYGEPEVPESAFWKKIIAYQQKLLNYFARNFYNMRMLALFVAFAINFILLFYKVSTSSVVEGKELPTRSSSENAKVTSLDSSSHRIIAVHYVLEESSGYMEPTVRILPILHTVISFFCIIGYYCLKVPLVIFKREKEVARKLEFDGLYITEQPSEDDIKGQWDRLVINTQSFPNNYWDKFVKRKVMDKYGEFYGRDRISELLGMDKAALDFSDAREKKKPKKDSSLSAVLNSIDVKYQMWKLGVVFTDNSFLYLAWYMT

SEQ ID NO: 1903 - protein, 245 aa, Homo sapiens
LPELNGRGAGLRRAEPSERGGGAERTQQVAALPLSHGHSHGGGGCRCAAERVGAARGSAACAYGLYLRIDKGRLQCLNESREGSGRGVFKPWERADDRSKFVESDADEELLFNIPFTGHVKLKGIIIMGEDDDSHPSEMRLYKNIPQMSFDDTEREPDQTFSLNRDLTGELEYATKISRFSNVYHLSIHISKNFGADTTKVFYIGLRGEWTELRRHEVTICNYEASANPADHRVHQVTPQTHFIS

SEQ ID NO: 1904 - protein, 319 aa, Homo sapiens
GIPCTEMGNFDNANVTGEIEFAIHYCFKTHSLEICIKACKNLAYGEEKKKKCNPYVKTYLLPDRSSQGKRKTGVQRNTVDPTFQETLKYQVAPAQLVTRQLQVSVWHLGTLARRVFLGEVIIPLATWDFEDSTTQSFRWHPLRAKADKYEDSVPQSNGELTVRAKLVLPSRTRKLQEAQEGTDQPSLHGQLCLVVLGAKNLPVRPDGTLNSFVKGCLTLPDQQKLRLKSPVLRKQACPQWKHSFVFSGVTPAQLRQSSLELTVWDQALFGMNDRLLGGTRLGSKGDTAVGGDACSQSKLQWQKVLSSPNLWTDMTLVLH

SEQ ID NO: 1905 - protein, 695 aa, Homo sapiens
KENKKARNLRMNQSRSRSDGGSEETLPQDHNHHENERRWQQERLHREEAYYQFINELNDEDYRLMRDHNLLGTPGEITSEELQQRLDGVKEQLASQPDLRDGTNYRDSEVPRESSHEDSLLEWLNTFRRTGNATRSGQNGNQTWRAVSRTNPNNGEFRFSLEIHVNHENRGFEIHGEDYTDIPLSDSNRDHTANRQQRSTSPVARRTRSQTSVNFNGSSSNIPRTRLASRGQNPAEGSFSTLGRLRNGIGGAAGIPRANASRTNFSSHTNQSGGSELRQREGQRFGAAHVWENGARSNVTVRNTNQRLEPIRLRSTSNSRSRSPIQRQSGTVYHNSQRESRPVQQTTRRSVRRRGRTRVFLEQDRERERRGTAYTPFSNSRLVSRITVEEGEESSRSSTAVRRHPTITLDLQVRRIRPGENRDRDSIANRTRSRVGLAENTVTIESNSGGFRRTISRLERSGIRTYVSTITVPLRRISENELVEPSSVALRSILRQIMTGFGELSSLMEADSESELQRNGQHLPDMHSELSNLGTDNNRSQHREGSSQDRQAQGDSTEMHGENETTQPHTRNSDSRGGRQLRNPNNLVETGTLPILRLAHFFLLNESDDDDRIRGLTKEQIDNLSTRHYEHNSIDSELGKICSVCISDYVTGNKLRQLPCMHEFHIHCIDRWLSENCTCPICRQPVLGSNIANNG

SEQ ID NO: 1906 - protein, 152 aa, Homo sapiens
LQRQRQHPAAAPAVPVRCFTFCFTDIVIMPKRKSPENTEGKDGSKVTKQEPTRRSARLSAKPAPPKPEPKPRKTSAKKEPGAKISRGAKGKKEEKQEAGKEGTAPSENGETKAEEIHISRSTVNVSTSRGTPPSTLSVKGQIETVRVKGTEN

SEQ ID NO: 1907 - protein, 89 aa, Homo sapiens
ARRFSCLTLQTSWGHRHGPPRPANFVFLVETGFLHIGQAGHKLPTSGDPPASASQSARITGMSHRTWFLASFLIDSCKNFIVYKIMYTL

SEQ ID NO: 1908 - protein, 416 aa, Homo sapiens
TYRHAEREHPETSSATKVSYDYRHKRPKLLDGDQDFSDGRTQKYCKEEDRKYSFQKGPLNRELDCFNTGRGRETQDGQVKEPFKPSKKDSIACTYSNKNDVDLRSSNDKWKEKKKKEGDCRKESNSSSNQLDKSQKLPDVKPSPINLRKKSLTVKVDVKKTVDTFRVASSYSTERQMSHDLVAVGRKSENFHPVFEHLDSTQNTENKPTGEFAQEIITIIHQVKANYFPSPGITLHERFSKMADIHKADVNEIPLNSDPEIHRRIDMSLAELQSKQAVIYESEQTLIKIIDPNDLRHDIERRRKERLQNEDEHIFHIASAAERDDQNSSFSKNYTTQRKDIITHKPFEVEGNHRNTRVRPFKSNFRGGRCQPNYKSGLVQKSLYIQAKYQRLRFTGPRGFITHKFRERLMRKKKVP

SEQ ID NO: 1909 - protein, 107 aa, Homo sapiens
KFSIPFFLRWSFTLVPRLEGNDMISVHCNLGLLGLSHSPASASQVGGITGTQHHTGLIFGFLIETEFHHVGQAGLELLTSGDPPALAFQSAGITGVSHHAWLQVLNS

SEQ ID NO: 1910 - protein, 521 aa, Homo sapiens
TLSLLERVLMKDIVTPVPQEEVKTVIRKCLEQAALVNYSRLSEYAKIEGKKREMYELPVFCLASQVMDLTIQNQKDAENVGRLITPAKKLEDTIRLAELVIEVLQQNEEHHAEAFAWWSDLMVEHAETFLSLFAVDMDAALEVQPPDTWDSFPLFQLLNDFLRTGLLICGNGKFHKHLQDLFAPLVVRYMWDLDGSSPIAQSIHRGLLSRESWEPVNNGSGTSEDLFWKLDALQTFIRDLHWPEEEFGKHLEQRLKLMASDMIESCVKRTRIAFEVKLQKTSSIQQIFRVPQFNMAPCFNVMGLMAKGSIQPKLCSMEMGQEFAKMWHQYHSKIDELIEETVKEMITLLVAKFVTILEGVLAKLSRYDEGTLFSSFLSFTVKAASKYVDVPKPGMDVADAYVTFVRHSQDVLRDKVNEEMYIERLFDQWYNSSMNVICTWLTDRMDLQLHIYQLKTLIRMVKKTYRDFRLQGVLDSTLNSKTYETIRNRLTVEEATASVSEGGGLQGISMKDSDEEDEEDD

SEQ ID NO: 1911 - protein, 215 aa, Homo sapiens
SELVQFLLIKDQKKIPIKRADILKHVIGDYKDIFPDLFKRAAERLQYVFGYKLVELEPKSNTYILINTLEPVEEDAEMRGDQGTPTTGLLMIVLGLIFMKGNTIKETEAWDFLLALGVYPTKKHLIFGDPKKLITEDFVRQRYLEYRRIPHTDPVDYEFQWGPRTNLETSKMKVLKFVAKVHNQDPKDWPAQYCEALADEENRARPQPSGPAPSS

SEQ ID NO: 1912 - protein, 498 aa, Homo sapiens
MVTWLYRFLPTSNMAAKLRSLLPPDLRLQFWLHARLQKCFLSRGCGSYCAGAKASPLPGKMAMGLMCGRRELLRLLQSGRRVHSVAGPSQWLGKPLTTRLLFPAAPCCCRPHYLFLAASGPRSLSTSAISFAEVQVQAPPVVAATPSPTAVPEVASGETADVVQTAAEQSFAELGLGSYTPVGLIQNLLEFMHVDLGLPWWGAIAACTVFARCLIFPLIVTGQREAARIHNHLPEIQKFSSRIREAKLAGDHIEYYKASSEMALYQKKHGIKLYKPLILPVTQAPIFISFFIALREMANLPVPSLQTGGLWWFQDLTVSDPIYILPLAVTATMWAVLELGAETGVQSSDLQWMRNVIRMMPLITLPITMHFPTAVFMYWLSSNLFSLVQVSCLRIPAVRTVLKIPQRVVHDLDKLPPREGFLESFKKGWKNAEMTRQLREREQRMRNQLELAARGPLRQTFTHNPLLQPGKDNPPNIPSSSSSSSKPKSKYPWHDTLG

SEQ ID NO: 1913 - protein, 169 aa, Homo sapiens
MGGLAPTQTLEPTREYQNTQLSVSYLLPEQNTHGTRRTLSSGPSNNLPLPLSSSATMPSMQCKHRSPNGGLFRQSPVKTPPIPMSFQPVPGGVLPRGSGNPPHGTSILTAPPALLPHPPTHPTQQSFLIQENNNTNHTHSHTHTYTETLSFFLYICVNNDRMEWGKSVF

SEQ ID NO: 1914 - protein, 121 aa, Homo sapiens
ILKRKLSSLNSEVSTIQNTRMLAFKATAQLFILGCTWCLGLLQVGPAAQVMAYLFTIINSLQGFFIFLVYCLLSQQVQKQYQKWFREIVKSKSESETYTLSSKMGPDSKPSEGDVFPRTSE

SEQ ID NO: 1915 - protein, 107 aa, Homo sapiens
RNSRPLWCSPPASQPRQAPVSQSCCCPLPSSSSPPSALLAPTKPRALGTLRLYECSPELCTTMLPPAWLLMLCQAPRPQDPDPRLTQPEKSLQEAPGQTGASRTPRT

SEQ ID NO: 1916 - protein, 269 aa, Homo sapiens
LNSSQKLACLIGVEGGHSLDSSLSVLRSFYVLGVRYLTLTFTCSTPWAESSTKFRHHMYTNVSGLTSFGEKVVEELNRLGMMIDLSYASDTLIRRVLEVSQAPVIFSHSAARAVCDNLLNVPDDILQLLKKNGGIVMVTLSMGVLQCNLLANVSTVADHFDHIRAVIGSEFIGIGGNYDGTGRFPQGLEDVSTYPVLIEELLSRSWSEEELQGVLRGNLLRVFRQVEKVREESRAQSPVEAEFPYGQLSTSCHFHLGASEWTPRLLIWR

SEQ ID NO: 1917 - protein, 368 aa, Homo sapiens
GATPLGSVGGRTGKMDAATLTYDTLRFAEFEDFPETSEPVWILGRKYSIFTEKDEILSDVASRLWFTYRKNFPAIGGTGPTSDTGWGCMLRCGQMIFAQALVCRHLGRDWRWTQRKRQPDSYFSVLNAFIDRKDSYYSIHQIAQMGVGEGKSIGQWYGPNTVAQVLKKLAVFDTWSSLAVHIAMDNTVVMEEIRRLCRTSVPCAGATAFPADSDRHCNGFPAGAEVTNRPSPWRPLVLLIPLRLGLTDINEAYVETLKHCFMMPQSLGVIGGKPNSAHYFIGYVGEELIYLDPHTTQPAVEPTDGCFIPDESFHCQHPPCRMSIAELDPSIAVVRGGHLSTQAFGAECCLGMTRKTFGFLRFFFSMLG

SEQ ID NO: 1918 - protein, 56 aa, Homo sapiens
SRKFLTITPIVLYFLTSFYTKYDQIHFVLNTVSLMSVLIPKLPQLHGVRIFGINKY

SEQ ID NO: 1919 - protein, 115 aa, Homo sapiens
WTFCLFLWWVPESARWLLTQGHVKEAHRYLLHCARLNGRPVCEDSFSQEVRVNVCVSMHICVWWGVGCVKCLPPRAHHIWQEKPLGPHRTVTESKLEAEGKTKEKAREKERKKKS

SEQ ID NO: 1920 - protein, 288 aa, Homo sapiens
RSGQGKVYGLIGRRRFQQMDVLEGLNLLITISGKRNKLRVYYLSWLRNKILHNDPEVEKKQGWTTVGDMEGCGHYRVVKYERIKFLVIALKSSVEVYAWAPKPYHKFMAFKSFADLPHRPLLVDLTVEEGQRLKVIYGSSAGFHAVDVDSGNSYDIYIPVHIQSQITPHAIIFLPNTDGMEMLLCYEDEGVYVNTYGRIIKDVVLQWGEMPTSVAYICSNQIMGWGEKAIEIRSVETGHLDGVFMHKRAQRLKFLCERNDKVFFASVRSGGSSQVYFMTLNRNCIMNW

SEQ ID NO: 1921 - protein, 172 aa, Homo sapiens
ASREMDVTKVCGEMRYQLNKTNMEKDEAEKEHREFRAKTNRDLEIKDQEIEKLRIELDESKQHLEQEQQKAALAREECLRLTELLGESEHQLHLTRQEKDSIQQSFSKEAKAQALQAQQREQELTQKIQQMEAQHDKTENEQYLLLTSQNTFLTKLKEECCTLAKKLEQISQ

SEQ ID NO: 1922 - protein, 371 aa, Homo sapiens
GATPLGSVGGRTGKMDAATLTYDTLRFAEFEDFPETSEPVWILGRKYSIFTEKDEILSDVASRLWFTYRKNFPAIGGTGPTSDTGWGCMLRCGQMIFAQALVCRHLGRDWRWTQRKRQPDSYFSVLNAFIDRKDSYYSIHQIAQMGVGEGKSIGQWYGPNTVAQVLKKLAVFDTWSSLAVHIAMDNTVVMEEIRRLCRTSVPCAGATAFPADSDRHCNGFPAGAEVTNRPSPWRPLVLLIPLRLGLTDINEAYVETLKHCFHGWPQFPGVVHREGKPNSAHYFIGYVGEELIYLDPHTTQPAVEPTDGCFIPDESFHCQHPPCRMSIAELDPSIAVVRGGHLSTQAFGAECCLGMTRKTFGFLRFFFSMLG

SEQ ID NO: 1923 - protein, 234 aa, Homo sapiens
GGVPVGLASKPFQILYGHTNEVLSVGISTELDMAVSGSRDGTVIIHTIQKGQYMRTLRPPCESSLFLTIPNLAISWEGHIVVYSSTEEKTTLKERMHYICFSINGKYLGSQILKEQVSDICIIGEHIVTGSIQGFLSIRDLHSLNLSINPLAMRLPIHCVCVTKEYSHILVGLEDGKLIVVGVGKPAEVKPSISNFISHAVGDYFGSPSFQLIEKSPLGINKLKAKFDFSKGSK

SEQ ID NO: 1924 - protein, 292 aa, Homo sapiens
MDTLEEVTWANGSTALPPPLAPNISVPHRCLLLLYEDIGTSRVRYWDLLLLIPNVLFLIFLLWKLPSARAKIRITSSPIFITFYILVFVVALVGIARAVVSMTVSTSNAATVADKILWEITRFFLLAIELSVIILGLAFGHLESKSSIKRVLAITTVLSLAYSVTQGTLEILYPDAHLSAEDFNIYGHGGRQFWLVSSCFFFLVYSLVVILPKTPLKERISLPSRRSFYVYAGILALLNLLQGLGSVLLCFDIIEGLCCVDATTFLYFSFFAPLIYVAFLRGFFGSEPKILF

SEQ ID NO: 1925 - protein, 175 aa, Homo sapiens
GCWWRHPWLASQRDCLDCRIQLAEKFVKAVSKPSRPDMNPIRVKEVYRLEEMEKIFVRLEMKIIKGSSGTPKLSYTGRDDRHFVPMGLYIVRTVNEPWTMGFSKSFKKKFFYNKKTKDSTFDLPADSIAPFHICYYGRLFWEWGDGIRVHDSQKPQDQDKLSKEDVLSFIQMHRA

SEQ ID NO: 1926 - protein, 145 aa, Homo sapiens
QVEGRQGREVKRTAWRISPVWRPARCRRRSTPQPPEPGAQQQERHRQGEAPMQALDPRAEPGPQAQSHAACQPEPEPPRVLLDPTAARGGVQGRPGLSRHPGLAPHPQTHTPWPQSGRLPCASEPLPLGGIRPTPGLEPKGRDLM

SEQ ID NO: 1927 - protein, 94 aa, Homo sapiens
SAPPKKKNGVLFLSPRLKSSGAIWVHSTPTLWASSNSRASTPKVAGITGARPHARIIFVFLIEMGFHNVGQAGLDTLTLVICPPQPPKLLGLQM

SEQ ID NO: 1928 - protein, 73 aa, Homo sapiens
FFFFLKKSRCVTQAGVQGPISLHPPPPGFKRFSRLSLLSSWDYRHPHAANFCIFSRDGVSPYWSGWSRTPDLR

SEQ ID NO: 1929 - protein, 74 aa, Homo sapiens
FETESHSVTQAGMQWHNLGSLQPMPPGLKRFSCLRLQSSWDHRHAPPHLAHFCIFSRDGVSPCWPGWSSTPDLK

SEQ ID NO: 1930 - protein, 104 aa, Homo sapiens
SRLKPYSTNVTAKKLPATNIPNLDCFTAKLYQVFKKGIIHILHELFQNKEEGAFPNSFYEASFTLRPKSDRDIAKEESYSTISLLSTDTKILMSKYKQLKSSDL

SEQ ID NO: 1931 - protein, 222 aa, Homo sapiens
VLVHRQCGGILRLRRKEAVSVLDSADIEVTDSRLPHATIVDHRPQHRWLETCNAPPQLIQGKARSAPKPSQASGHFSVELVRGYAGFGLTLGGGRDVAGDTPLAVRGLLKDGPAQRCGRLEVGDLVLHINGESTQGLTHAQAVERIRAGGPQLHLVIRRPLETHPGKPRGVGEPRKGVVPSWPDRSPDPGGPEVTGSRSSSTSLVQHPPSRTTLKKTRGSPE

SEQ ID NO: 1932 - protein, 84 aa, Homo sapiens
VLYIRKKKRLEKLRHQLMPMYNFDPTEEQDELEQELLEHGRDAASVQAATSVQAMQGKTTLPSQGPLQRPSRLVFTDVANAIHV

SEQ ID NO: 1933 - protein, 76 aa, Homo sapiens
APGPPVPPPGSPPEQMPGPCPASMPPDPPPGSPPEQMPGPCPVSAPPGPPPGSPPEQMPGPCPVSAPPALLQDTSV

SEQ ID NO: 1934 - protein, 209 aa, Homo sapiens
  misc_feature (1)...(209): Xaa = any amino acid or nothing
SATPQQPSAPQHQGTLNQPPVPGMDESMSYQAPPQQLPSAQPPQPSNPPHGAHTLNSGPQPGTAPATQHSQAGPATGQAYGPHTYTEPAKPKKGQQLWNRMKPAPGTEVSSSTSRSDPLLLPPRALAPTQRASTVVLAPSPTSEKVQNHSGSSARGNLSGKPDDWPLGHERVCGALLHRLXVGGGQGPHGKAAQGGAAGAAAGRLGLYH

SEQ ID NO: 1935 - protein, 45 aa, Homo sapiens
HKPVTNSRDTQEVPLEKAKQVLKIIATFKHTTSIFDDFAHYEKRQ

SEQ ID NO: 1936 - protein, 402 aa, Homo sapiens
LNAESYVSFTTKLDIPTAAKYEYGVPLQTSDSFLRFPSSLTSSLCTDNNPAAFLVNQAVKCTRKINLEQCEEIEALSMAFYSSPEILRVPDSRKKVPITVQSIVIQSLNKTLTRREDTDVLQPTLVNAGHFSLCVNVVLEVKYSLTYTDAGEVTKADLSFVLGTVSSVVVPLQQKFEIHFLQENTQPVPLSGNPGYVVGLPLAAGFQPHKGSGIIQTTNRYGQLTILHSTTEQDCLALEGVRTPVLFGYTMQSGCKLRLTGALPCQLVAQKVKSLLWGQGFPDYVAPFGNSQGPADMLDWVPIHFITQSFNRKDSCQLPGALVIEVKWTKYGSLLNPQAKIVNVTANLISSSFPEANSGNERTILISTAVTFVDVSAPAEAGFRAPPAINARLPFNFFFPFV

SEQ ID NO: 1937 - protein, 78 aa, Homo sapiens
LLGRASACLQLQSSWDHRPMLPYLANFVFCKDRSFTWLPRLVLNSWLQVILLPWPPTGCDNKHEPPCPATKRRHSGSI

SEQ ID NO: 1938 - protein, 88 aa, Homo sapiens
HDLGSLQPPPPGFKRFSCLSLPSSWDYRLMPPCPANFCIIIIDFLVETGFHHVGQASHELLTSGDPPTSASQSAGITGMSYHTWFGES

SEQ ID NO: 1939 - protein, 196 aa, Homo sapiens
APVTTSPRVGQPWRTALALRSLYRARPSLRCPPVELPWAPRRGHRLSPADDELYQRTRISLLQREAAQAMYIDSYNSRGFMINGNRVLGPCALLPHSVVQWNVGSHQDITEDSFSLFWLLEPRIEIVVVGTGDRTERLQSQVLQAMRQRGIAVEVQDTPNACATFNFLCHEGRVTGAALIPPPGGTSLTSLGQAAQ

SEQ ID NO: 1940 - protein, 157 aa, Homo sapiens
FFFFETESRSVAQAGVQWRDLGSLQAPPPGFTPFSCLSLPSSWDYRRPPLRPANFFVFLVETGFPRFSRDGLDLLTSGDPPTSASQSAGITGVSHRARPKRIGEPRRKCGNAVVWPSTSLGDHRVTSVPHQGGLPGPIRVAPSSAGQREASQGPPGR

SEQ ID NO: 1941 - protein, 108 aa, Homo sapiens
IAARFTLAKTWNQLKRPTMIDSIKKTRYIYTMEYYADTERNEIMSFAGTWVELEAIILSKLMLKDNWVEDTIPQGAVPCTATAEGMKRLLFALEPWDSSCFPHPSSGV

SEQ ID NO: 1942 - protein, 306 aa, Homo sapiens
RTRPLFSGRPTRPVCTMSDERRLPGSAVGWLVCGGLSLLANAWGILSVGAKQKKWKPLEFLLCTLAATHMLNVAVPIATYSVVQLRRQRPDFEWNEGLCKVFVSTFYTLTLATCFSVTSLSYHRMWMVCWPVNYRLSNAKKQAGHTVMGIWMGSFILSALPAVGWHDTSERFYTHGCRFIVAEIGLGFGVCFLLLVGGSVAMGVICTAIALFQTLAVQVGRQADHRAFTVPTIVVEDAQGKRRSSIDGSEPAKTSLQTTGLVTTIVFIYDCLMGFPVLGPFSLADTHLSDLPYTWGDRDSGGACVM

SEQ ID NO: 1943 - protein, 63 aa, Homo sapiens
FFFEAESCSVPQAGVQRPDLGWLHAPPPGSCHFPASASQVAGTTHARHHTQLIFAFLVENGLC

SEQ ID NO: 1944 - protein, 225 aa, Homo sapiens
KMAGGVRPLRGLRALCRVLLFLSQFCILSGGESTEIPPYVMKCPSNGLCSRLPADCIDCTTNFSCTYGKPVTFDCAVKPSVTCVDQDFKSQKNFIINMTCRFCWQLPETDYECTNSTSCMTVSCPRQRYPANCTVRDHVHCLGNRTFPKMLYCNWTGGYKWVYGLWLLRHHPRWGLGADRFYLGPVAGTASGKLFSFGGLGIWTLIDVLLIGVGYVGPADGSLYI

SEQ ID NO: 1945 - protein, 90 aa, Homo sapiens
FFFKMESYSVARLECSGAISAPCNLHLLGSNNSPASASRVAGNIGARHHTQQIFVLLVQMRVHYVGQDGLDLLNLMIHPPRSPKVLGLQA

SEQ ID NO: 1946 - protein, 555 aa, Homo sapiens
HASDHLYPNFLVNELILKQKQRFEEKRFKLDHSVSSTNGHRWQIFQDWLGTDQDNLDLANVNLMLELLVQKKKQLEAESHAAQLQILMEFLKVARRNKREQLEQIQKELSVLEEDIKRVEEMSGLYSPVSEDSTVPQFEAPSPSHSSIIDSTEYSQPPGFSGSSQTKKQPWYNSTLASRRKRLTAHFEDLEQCYFSTRMSRISDDSRTASQLDEFQECLSKFTRYNSVRPLATLSYASDLYNGSQYKSLVFEFDRDCDYFAIAGVTKKIKVYEYDTVIQDAVDIHYPENEMTCNSKISCISWSSYHKNLLASSDYEGTVILWDGFTGQRSKVYQEHEKRCWSVDFNLMDPKLLASGSDDAKVKLWSTNLDNSVASIEAKANVCCVKFSPSSRYHLAFGCADHCVHYYDLRNTKQPIMVFKGHRKAVSYAKFVSGEEIVSASTDSQLKLWNVGKPYCLRSFKGHINEKNFVGLASNGDYIACGSENNSLYLYYKGLSKTLLTFKFDTVKSVLDKDRKEDDTNEFVSAVCWRALPDGESNVLIAANSQGTIKVLELV

SEQ ID NO: 1947 - protein, 95 aa, Homo sapiens
RSLALSPGLECSGMISAHCNLHLLGSSDPPTSASQVAEITSVRHHTWLIFCILGQMGFHHVGEQAGLELLTSWDPAILPSQSAGIIGMSPHAWPP

SEQ ID NO: 1948 - protein, 127 aa, Homo sapiens
FDTEFVNIGGDFDAAAGVFRCRLPGAYFFSFTLGKLPRKTLSVKLMKNRDEVQAMIYDDGSSRRREMQSQSVMLALRRGDAVWLLSHDHDGYGAYSNHGKYITFSGFLVYPDLAPAAPPGLGASELL

SEQ ID NO: 1949 - protein, 137 aa, Homo sapiens
MGQPAPYAEGPIQGGDAGELCKCDFLVFTSPNPEAVCEAGTPAMFQTAWRQMESCSIAQAGVQWRDPGSLHPPPLGFKRFSCLSLPSSWDYKHAPPHPANFCIFSRDQVSPCWPGWSRSLDLVIPPPWLPKVLGLQA

SEQ ID NO: 1950 - protein, 146 aa, Homo sapiens
FFFETESCYVAQAGVQWCDLCSLQAPPPGSSDPPASASRVAGTTGARHHTQLIFVFLVETGFHMLARDGLKLLTSSDPPASASQSSWDYRREPPRLANFFVFLVETGSRYVAQAGVQWLFTGAIPLLISTGVLTCSVSDLGRFTPP

SEQ ID NO: 1951 - protein, 352 aa, Homo sapiens
HEVQESIHFLESEFSRGISDNYTLALITYALSSVGSPKAKEALNMLTWRAEQEGGMQFWVSSESKLSDSWQPRSLDIEVAAYALLSHFLQFQTSEGIPIMRWLSRQRNSLGGFASTQDTTVALKALSEFAALMNTERTNIQVTVTGPSSPSPVKFLIDTHNRLLLQTAELADGTANGSVSISANGFGFAICQLNVVYNVKASGSSRRRRSIQNQEAFDLDVAVKENKDDLNHVDLNVCTSFSGPGRSGMALMEVNLLSGFMVPSEAISLSETVKKVEYDHGKLNLYLDSVNETQFCVNIPAVRNFKVSNTQDASVSIVDYYEPRRQAVRSYNSEVKLSSCDLCSDVQRLPSL

SEQ ID NO: 1952 - protein, 553 aa, Homo sapiens
MRAPGRPALRPLPLPPLLLLLLSSPWGRAVPCVSGGLPKPANITFLSINMKNVLQWTPPEGLQGVKVTYTVQYFIYGQKKWLNKSECRNINRTYCDLSAETSDYEHQYYAKVKAIWGTKCSKWAESGRFYPFLETQIGPPEVALTTDEKSISVVLTAPEKWKRNPEDLPVSMQQIYSNLKYNVSVLNTKSNRTWSQCVTNHTLVLTWLEPNTLYCVHVESFVPGPPRRAQPSEKQCARTLKDQSSEFKAKIIFWYVLPISITVFLFSVMGYSIYRYIHVGKEKHPANLILIYGNEFDKRFFVPAEKIVINFITLNISDDSKISHQDMSLLGKSSDVSSLNDPQPSGNLRPPQEEEEVKHLGYASHLMEIFCDSEENTEGTSFTQQESLSRTIPPDKTVIEYEYDVRTTDICAGPEEQELSLQEEVSTQGTLLESQAALAVLGPQTLQYSYTPQLQDLDPLAQEHTDSEEGPEEEPSTTLVDWDPQTGRLCIPSLSSFDQDSEGCEPSEGDGLGEEGLLSRLYEEPAPDRPPGENETYLMQFMEEWGLYVQMEN

SEQ ID NO: 1953 - protein, 199 aa, Homo sapiens
YSAVEFVEQASGISDWWNPALRKRMLSDSGLGMIAPYYEDSDLKDLSHSRVLQSPVSSEDHAILQAVIAGDLMKLIESYKNGGSLLIQGPDHCSLLHYAAETGNGEIVKYILDHGPSELLDMADSETGETALHKAACQRNRAVCQLLVDAGASLRKTDSKGKTPQERAQQAGDPDLAAYTIESRQNYKVIGHEDLETAV

SEQ ID NO: 1954 - protein, 312 aa, Homo sapiens
QDNKVQNGSLHQKDTVHDNDFEPYLTGQANQSNSYPSMSDPYLSSYYPPSIGFPYSLNEAPWSTAGDPPIPYLTTYGQLSNGDHHFMHDAVFGQPGGLGNNIYQHRFNFFPENPAFSAWGTSGSQGQQTQSSAYGSSYTYPPSSLGGTVVDGQPGFHSDTLSKAPGMNSLEQGMVGLKIGDVSSSAVKTVGSVVSSVALTGVLSGNGGTNVNMPVSKPTSWAAIASKPAKPQPKMKTKSGPVMGGGLPPPPIKHNMDIGTWDNKGPVPKAPVPQQAPSPQAAPQPQQVAQPLPAQPPALAQPQYQSPQQPPQ

SEQ ID NO: 1955 - protein, 767 aa, Homo sapiens
ILLQEKRNCLLMQLEEATRLTSYLQSQLKSLCASTLTVSSGSSRGSLASSRGSLASSRGSLSSVSFTDIYGLPQYEKPDAEGSQLLRFDLIPFDSLGRDAPFSEPPGPSGFHKQRRSLDTPQSLASLSSRSSLSSLSPPSSPLDTPFLPASRDSPLAQLADSCEGPGLGALDRLRAHASAMGDEDLPGMAALQPHGVPGDGEGPHERGPPPASAPVGGTVTLREDSAKRLERRARRISACLSDYSLASDSGVFEPLTKRNEDAEEPAYGDTASNGDPQIHVGLLRDSGSECLLVHVLQLKNPAGLAVKEDCKVHIRVYLPPLDSGTPNTYCSKALEFQVPLVFNEVFRIPVHSSALTLKSLQLYVCSVTPQLQEELLGIAQINLADYDSLSEMQLRWHSVQVFTSLNHQGRGRLGVQERAPPGTLHTPSPSPASTDAVTVLLARTTAQLQAVERELAEERAKLEYTEEEVLEMERKEEQAEAISERSWQADSVDSGCSNCTQTSPPYPEPCCMGIDSILGHPFAAQAGPYSPEKFQPSPLKVDKETNTEDLFLEEAASLVKERPSRRARGSPFVRSGTIVRSQTFSPGARSQYVCRLYRSDSDSSTLPRKSPFVRNTLERRTLRYKQSCRSSLAELMARTSLDLELDLQASRTRQRQLNEELCALRELRQRLEDAQLRGQTDLPPWVLRDERLRGLLREAERQTRQTKLDYRHEQAAEKMLKKASKEIYQLRGQSHKEPIQVQTFREKIAFFTRPRINIPPLPADDV

SEQ ID NO: 1956 - protein, 884 aa, Homo sapiens
PGSGPGPAPFLAPVAAPVGGISFHLQIGLSREPVLLLQDSSGDYSLAHVREMACSIVDQKFPECGFYGMYDKILLFRHDPTSENILQLVKAASDIQEGDLIEVVLSASATFEDFQIRPHALFVHSYRAPAFCDHCGEMLWGLVRQGLKCEGCGLNYHKRCAFKIPNNCSGVRRRRLSNVSLTGVSTIRTSSAELSTSAPDEPLLQKSPSESFIGREKRSNSQSYIGRPIHLDKILMSKVKVPHTFVIHSYTRPTVCQYCKKLLKGLFRQGLQCKDCRFNCHKRCAPKVPNNCLGEVTINGDLLSPGAESDVVMEEGSDDNDSERNSGLMDDMEEAMVQDAEMAMAECQNDSGEMQDPDPDHEDANRTISPSTSNNIPLMRVVQSVKHTKRKSSTVMKEGWMVHYTSKDTLRKRHYWRLDSKCITLFQNDTGSRYYKEIPLSEILSLEPVKTSALIPNGANPHCFEITTANVVYYVGENVVNPSSPSPNNSVLTSGVGADVARMWEIAIQHALMPVIPKGSSVGTGTNLHRDISVSISVSNCQIQENVDISTVYQIFPDEVLGSGQFGIVYGGKHRKTGRDVAIKIIDKLRFPTKQESQLRNEVAILQNLHHPGVVNLECMFETPERVFVVMEKLHGDMLEMILSSEKGRLPEHITKFLITQILVALRHLHFKNIVHCDLKPENVLLASADPFPQVKLCDFGFARIIGEKSFRRSVVGTPAYLAPEVLRNKGYNRSLDMWSVGVIIYVSLSGTFPFNEDEDIHDQIQNAAFMYPPNPWKEISHEAIDLINNLLQVKMRKRYSVDKTLSHPWLQDYQTWLDLRELECKIGERYITHESDDLRWEKYAGEQGLQYPTHLINPSASHSDTPETEETEMKALGERVSIL

SEQ ID NO: 1957 - protein, 1498 aa, Homo sapiens
SRPWWLRASERPSAPSAMAKRSRGPGRRCLLALVLFCAWGTLAVVAQKPGAGCPSRCLCFRTTVRCMHLLLEAVPAVAPQTSILDLRFNRIREIQPGAFRRLRNLNTLLLNNNQIKRIPSGAFEDLENLKYLYLYKNEIQSIDRQAFKGLASLEQLYLHFNQIETLDPDSFQHLPKLERLFLHNNRITHLVPGTFNHLESMKRLRLDSNTLHCDCEILWLADLLKTYAESGNAQAAAICEYPRRIQGRSVATITPEELNCERPRITSEPQDADVTSGNTVYFTCRAEGNPKPEIIWLRNNNELSMKTDSRLNLLDDGTLMIQNTQETDQGIYQCMAKNVAGEVKTQEVTLRYFGSPARPTFVIQPQNTEVLVGESVTLECSATGHPPPRISWTRGDRTPLPVDPRVNITPSGGLYIQNVVQGDSGEYACSATNNIDSVHATAFIIVQALPQFTVTPQDRVVIEGQTVDFQCEAKGNPPPVIAWTKGGSQLSVDRRHLVLSSGTLRISGVALHDQGQYECQAVNIIGSQKVVAHLTVQPRVTPVFASIPSDTTVEVGANVQLPCSSQGEPEPAITWNKDGVQVTESGKFHISPEGFLTINDVGPADAGRYECVARNTIGSASVSMVLSVNVPDVSRNGDPFVATSIVEAIATVDRAINSTRTHLFDSRPRSPNDLLALFRYPRDPYTVEQARAGEIFERTLQLIQEHVQHGLMVDLNGTSYHYNDLVSPQYLNLIANLSGCTAHRRVNNCSDMCFHQKYRTHDGTCNNLQHPMWGASLTAFERLLKSVYENGFNTPRGINPHRLYNGHALPMPRLVSTTLIGTETVTPDEQFTHMLMQWGQFLDHDLDSTVVALSQARFSDGQHCSNVCSNDPPCFSVMIPPNDSRARSGARCMFFVRSSPVCGSGMTSLLMNSVYPREQINQLTSYIDASNVYGSTEHEARSIRDLASHRGLLRQGIVQRSGKPLLPFATGPPTECMRDENESPIPCFLAGDHRANEQLGLTSMHTLWFREHNRIATELLKLNPHWDGDTIYYETRKIVGAEIQHITYQHWLPKILGEVGMRTLGEYHGYDPGINAGIFNAFATAAFRFGHTLVNPLLLPGLDENFQPIAQDHLPLHKAFFSPFRIVNEGGIDPLLRGLFGVAGKMRVPSQLLNTELTERLFSMAHTVALDLAAINIQRGRDHGIPPYHDYRVYCNLSAAHTFEDLKNEIKNPEIREKLKRLYGSTLNIDLFPALVVEDLVPGSRLGPTLMCLLSTQFKRLRDGDRLWYENPGVFSPAQLTQIKQTSLARILCDNADNITRVQSDVFRVAEFPHGYGSCDEIPRVDLRVWQDCCEDCRTRGQFNAFSYHFRGRRSLEFSYQEDKPTKKTRPRKIPSVGRQGEHLSNSTSAFSTRSDASGTNDFQRVCSWEMQKTITDLRTQIKKLESRLSTTECVDAGGESHANNTKWKKDACTICECKDGQVTCFVEACPPATCAVPVNIPGACCPVCLQKRAEEKP

SEQ ID NO: 1958 - protein, 261 aa, Homo sapiens
FSFLCGVSGRLGLDSEEDYYTPQKVDVPKALIIVAVQCGCDGTFLLTQSGKVLACGLNEFNKLGLNQCMSGIINHEAYHEVPYTTSFTLAKQLSFYKIRTIAPGKTHTAAIDERGRLLTFGCNKCGQLGVGNYKKRLGINLLGGPLGGKQVIRVSCGDEFTIAATDDNHIFAWGNGGNGRLAMTPTERPHGSDICTSWPRPIFGSLHHVPDLSCRGWHTILIVEKVLNSKTIRSNSSGLSIGTVFQSSSPGGGGEGGPDAW

SEQ ID NO: 1959 - protein, 137 aa, Homo sapiens
FFFFETESRSVAQAGVQWRDLGSLQAPPPGFTPFSCLSLPSSWDYRRPPLRPANFFVFLVETGFHRFSRDGLDLLTSGDPPASASQSAGITGVSHRARPRINLRNVIYSFAVTYCLNYISLAMSSTLKLSFHVLSGS

SEQ ID NO: 1960 - protein, 77 aa, Homo sapiens
ECRGVISAHCCTLCLPSSSDSASAFRVARTTGTCDYAQLIFAFLVEMGFHHVGQDGLHLLNLVIRPPRPPKVLGLQA

SEQ ID NO: 1961 - protein, 456 aa, Homo sapiens
ADPHTTVIRFFPAASATKRVLPPVLRVSSPRTWNPNVPESPRIPAPRLPKRMSGAPTAGAALMLCAATAVLLSAQGGPVQSKSPRFASWDEMNVLAHGLLQLGQGCANTGAHPQSAERAGARLSACGSACQGTEGSTDLPLAPESRVDPEVLHSLQTQLKAQNSRIQQLFHKVAQQQRHLEKQHLRIQHLQSQFGLLDHKHLDHEVAKPARRKRLPEMAQPVDPAHNVSRLHRLPRDCQELFQVGERQSGLFEIQPQGSPPFLVNCKMTSDGGWTVIQRRHDGSVDFNRPWEAYKAGFGDPHGEFWLGLEKVHSITGDRNSRLAVQLRDWDGNAELLQFSVHLGGEDTAYSLQLTAPVAGQLGATTVPPSGLSVPFSTWDQDHDLRRDKNCAKSLSGGWWFGTCSHSNLNGQYFRSIPQQRQKLKKGIFWKTWRGRYYPLQATTMLIQPMAAEAAS

SEQ ID NO: 1962 - protein, 53 aa, Homo sapiens
FFFETESRSVAQAGVQWRDLSSLQPPPPGSRGSPASASPVAGITGTRHHRTRG

SEQ ID NO: 1963 - protein, 123 aa, Homo sapiens
PLAQRRPFLWVTVKTNGHIWGSSTYPHFWGSSNSPASASQVAGIPNARHQARIIFVFLVEPRFHHVGRAGLGFLNLAICLPQHPKVLGLQACNLNIKPHPAHKYISMIQFNVHFMCMSVHIYI

SEQ ID NO: 1964 - protein, 142 aa, Homo sapiens
PGSAQSAQRGRGRRRARAGSATQITMYSFMGGGLFCAWVGTILLVVAMATDHWMQYRLSGSFAHQGLWRYCLGNKCYLQTDSIAYWNATRAFMILSALCAISGIIMGIMAFGWVAVLMTFFAGIFYMCAYRVHECRRLSTPR

SEQ ID NO: 1965 - protein, 137 aa, Homo sapiens
TILPEKIQAWAQKQCPQSGEEAVALVVHLEKETGRLRQQVSSPVHREKHSPLGAAWEVADFQPEQVETQPRAVSREEPGSLHSGHQEQLNRKRERRPLPKNARPSPWVPALADEWNTLHQEVTTTRLPAGSQEPVKD

SEQ ID NO: 1966 - protein, 94 aa, Homo sapiens
DFALVAQAGVQWHNLGSPQPLPPGFKRFSCLSLPSSWEYRCVPPRLANFVFLVEMGFLHVGQAGLELPTSGDPPALASQSAGITGVTTVPSGPG

SEQ ID NO: 1967 - protein, 132 aa, Homo sapiens
  misc_feature (1)...(133): Xaa = any amino acid or nothing
XRHGLREPLLERRCAAASSFQHSSSLGRELPYDPVDTEGFGEGGDMQERFLFPEYILDPEPQPTREKQLQELQQQQEEEERQRQQRREERRQQNLRARSREHPVVGHPDPALPPSGVNCSGCGAELHCQDAR

SEQ ID NO: 1968 - protein, 585 aa, Homo sapiens
ARSRNSARGVYGMCVDTLFLCFLEDLERNDGSAERPYFMCSTLKKPLARRCFPAIHAYKGVLMVGNETTYEDGHGSRKNITDLVEGAKKANGVLEARQLAMRIFEDYTVSWYWIIIGLVIAMAMSLLSIILLHLLAGIMGWVMIIMEISELGYRIFHCYMEYSRLRGEAGSDVSLVDLGFQTDFRVYLHLRQTWLAFMIILSILEVIIILLLIFLRKRILIAIALIKEASRAVGYVMCSLLYPLVTFFLLCLCIAYWASTAVFLSTSNEAVYKIFDDSPCPFTAKTCNPETFPSSNESRQCPNARCQFAFYGGESGYHRALLGLQIFNAFMFFWLANFVLALGQVTLAGAFASYYWALRKPDDLPAFPLFSAFGRALRYHTGSLAFGALILAIVQIIRVILEYLDQRLKAAENKFAKCLMTCLKCCFWCLEKFIKFLNRNAYIMIAIYGTNFCTSARNAFFLLMRNIIRVAVLDKVTDFLFLLGKLLIVGSVGILAFFFFTHRIRIVQDTAPPLNYYWVPILTVIVGSYLIAHGFFSVYGMCVDTLFLCFLEDLERNDGSAERPYFMSSTLKKLLNKTNKKAAES

SEQ ID NO: 1969 - protein, 119 aa, Homo sapiens
RTSVEPYILGEFRKLSNNTKVVKTEYKATEYGLAYGHFSYEFSNHRDVVVDLQGWVTGNGKGLIYLTDPQIHSVDQKVFTTNFGKRGIFYFFNNQHVECNEICHRLSLTRPSMEKPCKS

SEQ ID NO: 1970 - protein, 802 aa, Homo sapiens
MERLWGLFQRAQQLSPRSSQTVYQRVEGPRKGHLEEEEEDGEEGAETLAHFCPMELRGPEPLGSRPRQPNLIPWAAAGRRAAPYLVLTALLIFTGAFLLGYVAFRGSCQACGDSVLVVSEDVNYEPDLDFHQGRLYWSDLQAMFLQFLGEGRLEDTIRQTSLRERVAGSAGMAALTQDIRAALSRQKLDHVWTDTHYVGLQFPDPAHPNTLHWVDEAGKVGEQLPLEDPDVYCPYSAIGNVTGELVYAHYGRPEDLQDLRARGVDPVGRLLLVRVGVISFAQKVTNAQDFGAQGVLIYPEPADFSQDPPKPSLSSQQAVYGHVHLGTGDPYTPGFPSFNQTQFPPVASSGLPSIPAQPISADIASRLLRKLKGPVAPQEWQGSLLGSPYHLGPGPRLRLVVNNHRTSTPINNIFGCIEGRSEPDHYVVIGAQRDAWGPGAAKSAVGTAILLELVRTFSSMVSNGFRPRRSLLFISWDGGDFGSVGSTEWLEGYLSVLHLKAVVYVSLDNAVLGDDKFHAKTSPLLTSLIESVLKQVDSPNHSGQTLYEQVVFTNPSWDAEVIRPLPMDSSAYSFTAFVGVPAVEFSFMEDDQAYPFLHTKEDTYENLHKVLQGRLPAVAQAVAQLAGQLLIRLSHDRLLPLDFGRYGDVVLRHIGNLNEFSGDLKARGLTLQWVYSARGDYIRAAEKLRQEIYSSEERDERLTRMYNVRIMRVEFYFLSQYVSPADSPFRHIFMGRGDHTLGALLDHLRLLRSNSSGTPGATSSTGFQESRFRRQLALLTWDACKGAANALSGDVWNIDNNF

SEQ ID NO: 1971 - protein, 151 aa, Homo sapiens
ISRVDDFVGSGIANVIIAVAIFSIPAFARLVRGNTLVLKQQTFIESARSIGASDMTVLLRHILPGTGSSIVVFFTMRIGTSIISAASLSFLGLGAQPPTPEWGAMLNEARADMVIAPHVAVFPALAIFLTVLAFNLLGDGLRDALDPKIKG

SEQ ID NO: 1972 - protein, 272 aa, Homo sapiens
LVYVMIAIFCIASAMSLYNCLAALIHKIPYGQCTIACRGKNMEVRLIFLSGLCIAVAVVWAVFRNEDRWAWILQDILGIAFCLNLIKTLKLPNFKSCVILLGLLLLYDVFFVFITPFITKNGESIMVELAAGPFGNNEKNDGNLVEATGQPSAPHEKLPVVIRVPKLIYFSVMSVCLMPVSILGFGDIIVPGLLIAYCRRFDVQTGSSYIYYVSVTVAYAIGMILTFVVLGLMKKGQPALLYLVPCTLITACQFVAWETVREMKKFWERVTS

SEQ ID NO: 1973 - protein, 224 aa, Homo sapiens
  misc_feature (1)...(224): Xaa = any amino acid or nothing
TLVSVVEFVRRADLTREDLAPSSVDSGQAGFGGCCESGLPNTMPSAFSVSSFPVSIPAVLTQTDWTEPWLMGLATFHALCVLLTCLSSRSYRLQIGHFLCLVILVYCAEYINEAAAMNWRLFSKYQYFDSRGMFISIVFSAPLLVNAMIIVVMWVWKTLNVMTDLKNAQERRKEKKRRRKEDXGAAAAWSLRPSRPPSAAPSAAVCVAWASFQLTHGLKNRCFI

SEQ ID NO: 1974 - protein, 168 aa, Homo sapiens
  misc_feature (1)...(168): Xaa = any amino acid or nothing
VSCYTALQSIMNQPESANDPEPLCAVCGQAHSLEENHFYSYPEEVDDDLICHICLQALLDPLDTPCGHTYCTLCLTNFLVEKDFCPMDRKPLVLQHCKKSSILVNKLLNKLLVTCPFREHCTQVLQRCDLEHHFQTSQAWGTHLXSQLLGRLRQEDCLSPGVHHCSEV

SEQ ID NO: 1975 - protein, 48 aa, Homo sapiens
  misc_feature (1)...(48): Xaa = any amino acid or nothing
CFLSPSPLLPPLLLSSSSSPSFPLPPPPTLLPSTLPPPLLIPSSXLSP

SEQ ID NO: 1976 - protein, 81 aa, Homo sapiens
  misc_feature (1)...(81): Xaa = any amino acid or nothing
KLKGNECFCYHCNVCIFLMIKKXGLFLCXIYFILFFETXSHSFTRLECSGTISAHCSLQLQGSSNSPASASQVAGIAGTHH

SEQ ID NO: 1977 - protein, 100 aa, Homo sapiens
  misc_feature (1)...(100): Xaa = any amino acid or nothing
FFFFETKPFFAPQAGGQGPSRGSLNPLPTGLKQFSGLTLSRSGNNGPRPPPRVNFGILRGNGVPPGGAGXPRPPDLRGPPGLAPPQGGNNGGDPPARAYL

SEQ ID NO: 1978 - protein, 191 aa, Homo sapiens
  misc_feature (1)...(191): Xaa = any amino acid or nothing
KLFSSQRLFGPHIQAINPSFLLLSFFPSXLLAMRTVGNNAFILVFLVYRIVLLLFXHVXPAYFQPSKNKTAKINCNXRPFLFLVCYLLXAELHIGIFIANFYDCIPNKLNEHLWPKLLQSLIFHVDFCGFLHKVFYICFTEFLLFLYFLXLFIIKVSCSIIXCSTICVFSYKSFAVIIFFVDNTRFFSFGF

SEQ ID NO: 1979 - protein, 326 aa, Homo sapiens
  misc_feature (1)...(326): Xaa = any amino acid or nothing
HHELHTLELLQNPKEVLTRSEIQDVNYSLEAVKVKTVCQIPLMKEMLKRFQVAVNLAEDTAHPKLVFSQEGRYVKNTASASSWPVFSSAWNYFAGWRNPQKTAFVERFQHLSCVLGKNVFTSGKHYWEVESRDSLEVAVGVCREDVMGITDRSKMSPDVGIWAIYWSAAGYWPLIGFPGTPTQQEPALHRVGVYLDRGTGNVSFYSAVDGVHLHTFSCSSVSRLRPFFWLSPLASLVIPPVTDRKXGFSSPDQNSFPVVQLRDTHPWALFCPSCLYPGWSIFWVSLTVPFGICPLCASQEAVPWEVGLANGDGTGNFPRRFWEIFL

SEQ ID NO: 1980 - protein, 118 aa, Homo sapiens
  misc_feature (1)...(118): Xaa = any amino acid or nothing
FFFFFETESHSVAQAGMQWRNLGSLPAPPPGFTPFFCLSLLNGWDYRRPPPHLANFFVLLVETGFHDVGQDGLDLLTSXSTPSASQSAEITGVSHCTRLKKIRFAKGHVEFFFESHVE

SEQ ID NO: 1981 - protein, 113 aa, Homo sapiens
  misc_feature (1)...(113): Xaa = any amino acid or nothing
TPIRGTDDEHEECTVQEYSAGKNTCLRPGAVAHTCNPCTLGGRGRWITXGSGVQDQPGPTWQNPVFLERRPRALHSSPGLTTQRILWAQGLWVGAGSTGCSRGPRGEGVFREG

SEQ ID NO: 1982 - protein, 93 aa, Homo sapiens
  misc_feature (1)...(93): Xaa = any amino acid or nothing
RSTHASGMISPSFGFMGHLLRLEFEILPSTPNPXLPSYQGEAAGSSLISHLQTFSPDLKGVYCTFPASGLAPVPTHWTVSELSRSPVATATFC

SEQ ID NO: 1983 - protein, 455 aa, Homo sapiens
RTLGMEGERRASQAPSSGLPAGGANGESPGGGAPFPGSSGSSALLQAEVLDLDEDEDDLEVFSKDASLMDMNSFSPMMPTSPLSMINQIKFEDEPDLKDLFITVDEPESHVTTIETFITYRIITKTSRGEFDSSEFEVRRRYQDFLWLKGKLEEAHPTLIIPPLPEKFIVKGMVERFNDDFIETRRKALHKFLNRIADHPTLTFNEDFKIFLTAQAWELSSHKKQGPGLLSRMGQTVRAVASSMRGVKNRPEEFMEMNNFIELFSQKINLIDKISQRIYKEEREYFDEMKEYGPIHILWSASEEDLVDTLKDVASCIDRCCKATEKRMSGLSEALLPVVHEYVLYSEMLMGVMKRRDQIQAELDSKVEVLTYKKADTDLLPEEIGKLEDKVECANNALKADWERWKQNMQNDIKLAFTDMAEENIHYYEQCLATWESFLTSQTNLHLEEASEDKP

SEQ ID NO: 1984 - protein, 87 aa, Homo sapiens
  misc_feature (1)...(87): Xaa = any amino acid or nothing
SYWVGEDYTYKFFEVILIDPFHKAIRRNPDTQWISKAVYKHREMCGLTSTGRKSHGLEKDRMFPHAIGGSCRAAXRRRKTLQFPCYH

SEQ ID NO: 1985 - protein, 99 aa, Homo sapiens
  misc_feature (1)...(99): Xaa = any amino acid or nothing
YIKQPDAKERRRTVHWKKETESEASEITIPPSTPGVPQAPGHWEDYGRGDNFYLPHXDPGGIVLWNIFNRMPIARKNITDGEHHEYLIEVPRLFHTSED

SEQ ID NO: 1986 - protein, 116 aa, Homo sapiens
  misc_feature (1)...(116): Xaa = any amino acid or nothing
EKPDHFFPEGTSFIHEPRRPNXGDLVHCLGGISRSTTVTVAXLMQKLNLSMNDAYYIVIMKMSSISPNFNSMDQPLDFQRTLGLRSPCYNRVPAQKMYFTTPSNHNAYQVDSVQST

SEQ ID NO: 1987 - protein, 137 aa, Homo sapiens
  misc_feature (1)...(137): Xaa = any amino acid or nothing
NTGLTCSIQRKCGETQLYRREENRLILLLQDHLKSESFQVLTLSPRLEFSGLISAHCNLRLPGSSDSSASSSRAAGITGVHHHAWLIFFFLVETGFLHAGXAGLELLTSGDPPASASRSAGITGVSHHARPRETRFL

SEQ ID NO: 1988 - protein, 189 aa, Homo sapiens
GGMDSRVSGTTSNGETKPVYPVMEKKEEDGTLERGHWNNKMEFVLSVAGEIIGLGNVWRFPYLCYKNGGGAFFIPYLVFLFTCGIPVFLLETALGQYTSQGGVTAWRKICPIFEGIGYASQMIVILLNVYYIIVLAWALFYLFSSFTIDLPWGGCYHEWNTEHCMEFQKTNGSLNGTSENATSPVIEFW

SEQ ID NO: 1989 - protein, 113 aa, Homo sapiens
  misc_feature (1)...(113): Xaa = any amino acid or nothing
QGLTLLPRMECSATITAHCSLELPGSIDLPTSASXVARTTGTHHHPWLILVLLLXTWGSYYVAQAGLELLGSSNLPAAMVSQSAQIIGHDHCAWATSNHVLYTQEGLRRGKEG

SEQ ID NO: 1990 - protein, 175 aa, Homo sapiens
  misc_feature (1)...(175): Xaa = any amino acid or nothing
GRIDCPHPATVLAQPIFIDACSVLGAYQGAQNWIRRRPCLPSGCLKMNREIGPLQHSLCCPGWSQTPGLKAILLRQPPKXLGLQMESHSCPPAWSAMARSRLTATSASQVQAILLPQPPGTTDSCSPSPDHEQQPLSWVLPPPQKDMNPREQQVALGPQAAALPWAVWRNDCFPR

SEQ ID NO: 1991 - protein, 152 aa, Homo sapiens
RPSSQCGGIPTGWKKGLAPELSSELSSPPLPARLQLAASPYFSPSWAECPQPVPAGTHATWCLARVWARMTPPGPAGIPSHPLPPPPPERSVPIPSPFPARDSGSRQGHSTDRYKHTDAPRDAHRRVPQRDTDTGVHTGSGTHTHAHTPPEK

SEQ ID NO: 1992 - protein, 162 aa, Homo sapiens
GYSFRCDIVDYSRSPTALRMARTCWLYYFSKFIELLDTIFFVLRKKNSQVTFLHVFHHTIMPWTWWFGVKFAAGGLGTFHALLNTAVHVVMYSYYGLSALGPAYQKYLWWKKYLTSLQLVQFVIVAIHISQFFFMEDCKYQFPVFACIIMSYSFMFLLLFLH

SEQ ID NO: 1993 - protein, 146 aa, Homo sapiens
  misc_feature (1)...(146): Xaa = any amino acid or nothing
LMAFIEMHISGSLVYLKIKTKIYSYFSMLNFLLQEIPLSEILRISSPRDFTNISQGSNPHCFEIITDTMVYFVGENNGDSSHNPVLAATGVGLDVAQSWEKAIRQALMPVTPQASVCTSPGQGKDHSKQXASVCTSPGQGKDHSKQ

SEQ ID NO: 1994 - protein, 117 aa, Homo sapiens
AYPLFAVHPVHTECVAGVVGRAYLLCALFFLLSFLGYCKAFRESNKEGAHSSTFWVLLSIFLGAVAMLCKEQGITVLVRAATWLGPAFSVCPFPSYKDIWGWPCLCGVLHAYIPLLV

SEQ ID NO: 1995 - protein, 110 aa, Homo sapiens
LLWTTVLCQTPARPQSTMIHLGHILFLLLLPVAAAQTTPGERSSLPAFYPGTSGSCSGCGSLSLPLLAGLVAADAVASLLIVGAVFLCARPRRSPAQEDGKVYINMPGRG

SEQ ID NO: 1996 - protein, 328 aa, Homo sapiens
  misc_feature (1)...(328): Xaa = any amino acid or nothing
LQGDTWHLSFLSHFSRLHGGVPGRGLLEGNLLQPQAPGHDMTSIPFPGDRLLQVDGVILCGLTHKQAVQCLKGPGQVARLVLERRVPRSTQQCPSANDSMGDERTAVSLVTALPGRPSSCVSVTDGPKFXSSNXKRIANGLGFSFVQMEKESCSHLKSDLVRIKRLFPGHPAEENGAIAAGDIILGREWEGPRKASSSRCRGSWAMQLSVQAGPSFASYYPAAVEVLHLLRGAPQEVTLLLCRPPPGALPELEQEWQTPELSADKEFTRATCTDSCTSPILGSRGQLGGTVPPQMQGKAWGLRPESSQKAIREGTMGAKTERDLGPVP

SEQ ID NO: 1997 - protein, 236 aa, Homo sapiens
PRVRGDWPLEKKKSNSNIHPIFSWCGSTDSKDIVMPTYDLTDSVLETMGRVSLDMMSVQANTGPPWESKNSTAVWRGRDSRKERLELVKLSRKHPELIDAAFTNFFFFKHDENLYGPIVKHISFFDFFKHKYQINIDGTVAAYRLPYLLVGDSVVLKQDSIYYEHFYNELQPWKHYIPVKSNLSDLLEKLKWAKDHDEEAKKIAKAGQEFARNNLMGDDIFCYYFQTFPRNMPIYK

SEQ ID NO: 1998 - protein, 397 aa, Homo sapiens
AGMLPAVGSADEEEDPAEEDCPELVPMETTQSEEEEKSGLGAKIPVTIITGYLGAGKTTLLNYILTEQHSKRVAVILNEFGEGSALEKSLAVSQGGELYEEWLELRNGCLCCSVKDNGLRAIENLMQKKGKFDYILLETTGLADPGAVASMFWVDAELGSDIYLDGIITIVDSKYGLKHLAEEKPDGLINEATRQVALADAILINKTDLVPEEDVKKLRTTIRSINGLGQILETQRSRVDLSNVLDLHAFDSLSGISLQKKLQHVPGTQPHLDQSIVTITFDVPGNAKEEHLNMFIQNLLWEKNVRNKDNHCMEVIRLKGLVSIKDKSQQVIVQGVHELYDLEETPVSWKDDTERTNRLVLLGRNLDKDILKQLFIATVTETEKQWTTHFKEDQVCT

SEQ ID NO: 1999 - protein, 109 aa, Homo sapiens
  misc_feature (1)...(109): Xaa = any amino acid or nothing
DGVSLLLPKLGVQWAQYWAHWQPPLPGFKRFSCLSLRSSWDXKCAPPHPAFVFLVEMGFHRVGQAGLELRTSGDPPASASQSAGITGVSHLAXPTSMPLLPFQRLCVYI

SEQ ID NO: 2000 - protein, 145 aa, Homo sapiens
  misc_feature (1)...(145): Xaa = any amino acid or nothing
FFFLRRSFAFVAQAGVQWCDLGSPQPLPPGFKXFSCLSLPSSWDYRHAPPPCPSXFLYFXXRQGFTMLARLVLNSXPHDLPTSPSQSAEIKGVSHRCPASFYLFLKYYLEAKFCAXGECAPSAGVGAGYKRGHKSCLLINCVVQI

SEQ ID NO: 2001 - protein, 309 aa, Homo sapiens
  misc_feature (1)...(309): Xaa = any amino acid or nothing
DAWGPETRLARILNPDSFIEPRPGRLPELEATRPHMEPKASCPAAAPLMERKFHVLVGVTGSVAALKLPLLVSKLLDIPGLEVAVVTTERAKHFYSPQDIPVTLYSDADEWEMWKSRSDPVLHIDLRRWADLLLVAPLDANTLGKVASGICDNLLTCVMRAWDRSKPLLFCPAMNTAMWEHPITAQQVDQLKAFGYVEIPCVAKKLVCGDEGLGAMAEVGTIVDKVKEVLFQHSGFQQSXPGISVMGVPLYSEWVQAKSVKMDVGKIGGYPHLLNGGPALSLPRGQACSRLNWTEGPGLSFFQPGEAAA

SEQ ID NO: 2002 - protein, 203 aa, Homo sapiens
  misc_feature (1)...(203): Xaa = any amino acid or nothing
FRGRQTSRPARGFSPWRPPGTMQEPSSGECPASPXLPCASNRLAFGGLIFPCAPLVPYPAPFSPLLPAFSCAPRPRAHTHSRTHPSAPLVPKPSSRARGQSPIPSRASSPSCSWAQVPGVALARCAGVCKPGDSWRVAACISGRCCSRGRRRGSGPRNPEQSFRGAWGPSFWGSWKSQRELSAGGAQAWPLLGSAGSGLRGEA

SEQ ID NO: 2003 - protein, 93 aa, Homo sapiens
  misc_feature (1)...(93): Xaa = any amino acid or nothing
FFFFIXDGVSLCHPGWNAVARSWLTATSASRVQAVSCFRLPSSWDYRHATMPGXFFXYFXXRWGFTILAILVLNSXPQVICPPWPPKVLTLQA

SEQ ID NO: 2004 - protein, 144 aa, Homo sapiens
  misc_feature (1)...(144): Xaa = any amino acid or nothing
RPGIPGRRFRRSWFCQLPXEPEPGLESLATPGDIPAVGLGALGVIPPVRVPQRPPTQRSQGRGWDPERDPGCRVQVSRGPRFGEQKTPGLQGCLPPPCLTHLAAASCVVVWCGRWKRDSAECQCDHSCSAVSQQEDRCRSSSCS

SEQ ID NO: 2005 - protein, 65 aa, Homo sapiens
MNNNTTCIQPSMISSMALPIIYILLCIVGVFGNTLSQWIFLTKIGKKTSTHIYLSHLVTANLLVC

SEQ ID NO: 2006 - protein, 57 aa, Homo sapiens
  misc_feature (1)...(57): Xaa = any amino acid or nothing
LVHKDMYREFFEEEAQASNKHVTRCLTSLVIREVHIKTMRXHFLPIRLEKNKNNIKD

SEQ ID NO: 2007 - protein, 113 aa, Homo sapiens
  misc_feature (1)...(114): Xaa = any amino acid or nothing
MAGMKTASGDYIDSSWELRVFVGEEDPEAESVTLRVTGESHIGGVLLKIVEQINRKQDWSDHAIWWEQKRQWLLQTHWTLDKYGILADARLFFGPQHRPVILRLPNRRALRLX

SEQ ID NO: 2008 - protein, 97 aa, Homo sapiens
  misc_feature (1)...(97): Xaa = any amino acid or nothing
FFFFKETESHSVTQAGVQWHDLGSLQPPPPGFKRFSCLSLLSSWDYRCAPPHPANFVFLVETGFHHVAQAGLKLLTLXSANLGLSTSLPIPLFILLS

SEQ ID NO: 2009 - protein, 107 aa, Homo sapiens
  misc_feature (1)...(107): Xaa = any amino acid or nothing
RGHGGKSLTGGTPGNWGDGLLVSEDWSHLIFTXNSLVSPVLGKWSPCLQGPGLSAVHTWPWLMAACWAVHVKTHMRPGLAVLPRLVLNSWSXAIILLWPPKALGLQA

SEQ ID NO: 2010 - protein, 102 aa, Homo sapiens
  misc_feature (1)...(102): Xaa = any amino acid or nothing
SRVDDFVGERRGGCDECLCGHRGLRAVPLGHPGHLCLQPPGGPAXFLDYCRGCCPHPVPGSTAGSCPRQKKTTPGPTVLCVCSFWIYQRGEPHHRTGARWNH

SEQ ID NO: 2011 - protein, 107 aa, Homo sapiens
  misc_feature (1)...(107): Xaa = any amino acid or nothing
RQSCSSTQAKVQWFHYGPLQSQPPGLKQSSQLSLPNSRDHRHVPPRLAIFSFAETGSPYFAQASLELLGSSHPPTSASQSARITGVSHRAWPLKXFNLNQYQTLTMN

SEQ ID NO: 2012 - protein, 214 aa, Homo sapiens
  misc_feature (1)...(214): Xaa = any amino acid or nothing
ELNNGPFQMPLCNGGNLAVTGSWADRSPLHEAASQGRLLALRTLLSQGYNVNAVTLDHVTPLHEACLGDHVACARTLLEAGANVNAITIDGVTPLFNACSQGSPSCAELLLEYGAQAQLESCLPSPTHEGASKGHHECLDILISWGIDVDQEIPHSGTPLYVACMAQQFHCIWNLIYAGAGVRKGKYWDTPLPGAGHQSTQKLEXLFAMVEIWQ

SEQ ID NO: 2013 - protein, 124 aa, Homo sapiens
  misc_feature (1)...(124): Xaa = any amino acid or nothing
VRNSXSFAHCASVYKHHYMDGQTPCLFVSSKADLPEGVAVSGPSPAEFCRKHRLPAPVPFSCAGPAEPSTTIFTQLATMAAFPHLVHAELHPSSFWLRGLLGVVGAAVAAVLSFSLYRVLVKSQ

SEQ ID NO: 2014 - protein, 183 aa, Homo sapiens
LSFIEVLSMEQVNKTVVREFVVLGFSSLARLQQLLFVIFLLLYLFTLGTNAIIISTIVLDRALHTPMYFFLAILSCSEICYTFVIVPKMLVDLLSQKKTISFLGCAIQMFSFLFFGSSHSFLLAAMGYDRYMAICNPLRYSVLMGHGVCMGLMAAAWACGFTVSLVTTSLVFHLPFHSSNQHE

SEQ ID NO: 2015 - protein, 240 aa, Homo sapiens
  misc_feature (1)...(240): Xaa = any amino acid or nothing
QQYHNTGSAGHHAHCQVGHSPHVHYPSGCGPLXIQRGLPSFNSLEGHSLKDSGHEESVQLDSEHDVQRSLYCDTAVNDVLNTSVTSMGSQMPDHDQNEGFHCREECRILGHSDRCWMPRNPMPIRSKSPEHVRNIIALSIEATAADVEAYDDCGPTKRTFATFGKDVSDHPAEERPTLKGKRTVDVTICSPKVNSVIREAGNGCEAISPVTSPLHLKSSLPTKPSVSYEIVDPGITARRC

SEQ ID NO: 2016 - protein, 53 aa, Homo sapiens
  misc_feature (1)...(53): Xaa = any amino acid or nothing
IMLLSTSSXVYFQSSTKDSHFFLFDFQKTGPPLVGPKAQLSGLQLQPCLYKRR

SEQ ID NO: 2017 - protein, 39 aa, Homo sapiens
  misc_feature (1)...(39): Xaa = any amino acid or nothing
DLTNSHFFLFDFQKTGPPLGGPKAQFSSLQLQPCVYXRR

SEQ ID NO: 2018 - protein, 206 aa, Homo sapiens
  misc_feature (1)...(206): Xaa = any amino acid or nothing
NIKSNDRWVQIKTAYKYFFXKNGDNYNWVFRALPTTFADIENLKYLLFTRDASQPFYLGHTVIFGDLEYVTVEGGIVLSRELMKRLNRLLDNSETCADQSVIWKLSEDKQLAICLKYAGVHAENAEDYEGRDVFNTKPIAQLIEEALSNNPQQVVEGCCSDMAITFNGLTPQKMEVMMYGLYRLRAFGHYFNDTLVFLPPVGSEND

SEQ ID NO: 2019 - protein, 109 aa, Homo sapiens
  misc_feature (1)...(109): Xaa = any amino acid or nothing
PGRPTRPPLLTLLAHVSPEPAGPSCDSLAQPGASGVXVQHDSHPPLLCGSQCLSEPVPGSHGPPRGCQHEAAPCPRGPGSDGLHHASAACASLPPSPILPVLLPELGPL

SEQ ID NO: 2020 - protein, 181 aa, Homo sapiens
  misc_feature (1)...(181): Xaa = any amino acid or nothing
DAWGNRCAVGAAPRLIHLHLCCTPADPSRKPDELXNMNGRVDYLVTEEEINLTRGPSGLGFNIVGGTDQQYVSNDSGIYVSRIKENGAAALDGRLQEGDKILSVNGQDLKNLLHQDAVDLFRNAGYAVSLRVQHRLQVQNGPIGHRGEGDPSGIPIFMVLVPVFALTMVAAWAFMRYRQQL

SEQ ID NO: 2021 - protein, 91 aa, Homo sapiens
  misc_feature (1)...(91): Xaa = any amino acid or nothing
RDGREELCLQQEPTLPSRICSSAPLLYFLFICPFVLLLLLLISLLCLYWKARKLSTLRSNTRKEKALWVDLKEAGGVTTNRMEDXEEDECN

SEQ ID NO: 2022 - protein, 80 aa, Homo sapiens
IIYFSYNIFLKITELLNDVERLKQALNGLSQLTYTSGNPTKRQSQLIDTLQHQVKSLEQQLAVSNQAHGALQEYVLAPCS

SEQ ID NO: 2023 - protein, 42 aa, Homo sapiens
  misc_feature (1)...(42): Xaa = any amino acid or nothing
REILCSRIGRLNIVXMSLFPNLTCRLNAIPIKIPANHFVEVT

SEQ ID NO: 2024 - protein, 983 aa, Homo sapiens
LTEDQPFDILQKSLQEANITEQTLAEEAYLDASIGSSQQFAQAQLHPSSSASFTQASNVSNYSGQTLQPIGVTHVPVGASFASNTVGVQHGFMQHVGISVPSQHLSNSSQISGSGQIQLIGSFGNHPSMMTINNLDGSQIILKGSGQQAPSNVSGGLLVHRQTPNGNSLFGNSSSSPVAQPVTVPFNSTNFQTSLPVHNIIIQRGLAPNSNKVPINIQPKPIQMGQQNTYNVNNLGIQQHHVQQGISFASASSPQGSVVGPHMSVNIVNQQNTRKPVTSQAVSSTGGSIVIHSPMGQPHAPQSQFLIPTSLSVSSNSVHHVQTINGQLLQTQPSQLISGQVASEHVMLNRNSSNMLRTNQPYTGPMLNNQNTAVHLVSGQTFAASGSPVIANHASPQLVGGQMPLQQASPTVLHLSPGQSSVSQGRPGFATMPSVTSMSGPSRFPAVSSASTAHPSLGSAVQSGSSGSNFTGDQLTQPNRTPVPVSVSHRLPVSSSKSTSTFSNTPGTGTQQQFFCQAQKKCLNQTSPISAPKTTDGLRQAQIPGLLSTTLPGQDSGSKVISASLGTAQPQQEKVVGSSPGHPAVQVESHSGGQKRPAAKQLTKGAFILQQLQRDQAHTVTPDKSHFRSLSDAVQRLLSYHVCQGSMPTEEDLRKVDNEFETVATQLLKRTQAMLNKYRCLLLEDAMRINPPAEMVMIDRMFNQEERASLSRDKRLALVDPEGFQADFCCSFKLDKAAHETQFGRSDQHGSKASSSLQPPAKAQGRDRAKTGVTEPMNHDQFHLVPNHIVVSAEGNISKKTECLGRALKFDKVGLVQYQSTSEEKASRREPLKASQCSPGPEGHRKTSSRSDHGTESKLSSILADSHLEMTCNNSFQDKSLRNSPKNEVLHTDIMKGSGEPQPDLQLTKSLETTFKNILELKKAGRQPQSDPTVSGSVELDFPNFSPMASQENCLEKFIPDHSEGVVETDSILEAAVNSILEC

SEQ ID NO: 2025 - protein, 427 aa, Homo sapiens
LKKMEPFSCDTFVALPPATVDNRIIFGKNSDRLYDEVQEVVYFPAVVHDNLGERLKCTYIEIDQVPETYAVVLSRPAWLWGAEMGANEHGVCIGNEAVWGREEVCDEEALLGMDLVRLGLERADTAEKALNVIVDLLEKYGQGGNCTEGRMVFSYHNSFLIADRNEAWILETAGKYWAAEKVQEGVRNISNQLSITTKIAREHPDMRNYAKRKGWWDGKKEFDFAAAYSYLDTAKMMTSSGRYCEGYKLLNKHKGNITFETMMEILRDKPSGINMEGEFLTTASMVFILPQDSSLPCIHFFTGTPDPERSVFKPFIFVPHISQLLDTSSPTFELEDLVKKKSHFKPDRRHPLYQKHQQALEVVNNNEEKAKIMLDNMRKLEKELFREMESILQNKHLDVEKIVNLFPQCTKDEIQIYQSNLSVKVSS

SEQ ID NO: 2026 - protein, 101 aa, Homo sapiens
  misc_feature (1)...(101): Xaa = any amino acid or nothing
FFFLRRSLALSPRPDCGLQWRNLGSLQAPPPGFTPFSCLSLPSSWDYRRPPPRPANFLYFXXRRGFTLLARMVSISXPHDPPASASQSAGITGVSHRARPT

SEQ ID NO: 2027 - protein, 214 aa, Homo sapiens
FFHSVDLLALEQSKTFYKPDWFDIVESEVKCCKEAVCVIDMSSFTEFEITSTGDQALEVLQYLFSNDLDVPVGHIVHTGMLNEGGGYENDCSIARLNKRSFFMISPTDQQVHCWAWLKKHMPKDSNLLLEDVTWKYTALNLIGPRAVDVLSELSYAPMTPDHFPSLFCKEMSVGYANGIRVMSMTHTGEPGFMLYIPIEYRWGFTMLSTLVSNS

SEQ ID NO: 2028 - protein, 114 aa, Homo sapiens
  misc_feature (1)...(114): Xaa = any amino acid or nothing
PALCRLRDDMTVCVADFGLSKKIYSGDYYRQGRIAKMPVKWIAIESLADRVYTSKSDVWAFGVTMWEIATRGMTPYPGVQNHEMYDYLLHGHRLKQPEDCLDELCKIXXSPQSP

SEQ ID NO: 2029 - protein, 153 aa, Homo sapiens
RESQVKHFKMRKIDLCLSSEGSEVILATSSDEKHPPENIIDGNPETFWTTTGMFPQEFIICFHKHVRIERLVIQSYFVQTLKIEKSTSKEPVDFEQWIEKDLVHTEGQLQNEEIVAHDGSATYLRFIIVSAFDHFASVHSVSAEGTVVSNLSS

SEQ ID NO: 2030 - protein, 149 aa, Homo sapiens
EILAVLKLACGDISLNALALMVATAVLTLAPLLLICLSYLFILSAILRVPSAAGRCKAFSTCSAHRTVVVVFYGTISFMYFKPKAKDPNVDKTVALFYGVVTPSLNPIIYSLRNAEVKAAVLTLLRGGLLSRKASHCYCCPLPLSAGIG

SEQ ID NO: 2031 - protein, 79 aa, Homo sapiens
  misc_feature (1)...(79): Xaa = any amino acid or nothing
VPDNGDVTKLPVCSTLVEETSLTVSEAMEQSIKNESPLPGTLAHTCNTSTLGGRGRWITXGREFDTSMANMVKPCLYRK

SEQ ID NO: 2032 - protein, 76 aa, Homo sapiens
  misc_feature (1)...(76): Xaa = any amino acid or nothing
FFFETESYSITQAGVQWPNLSSLKTLPPGFKXFSCLSLPSSWDYRCLPPCPANFCIFSRNGVLPCWPGWSRTPDLS

SEQ ID NO: 2033 - protein, 106 aa, Homo sapiens
  misc_feature (1)...(106): Xaa = any amino acid or nothing
CPSVSGLIKSDLRRHNINIGITNVDVKAVSNIFMIILLRSMYRINVKPYFFIXLFFSRVNCXSVIIGYARCYTFLIFXLFLXIPADSPTDQEPKTVMLSKQSESAI

SEQ ID NO: 2034 - protein, 64 aa, Homo sapiens
  misc_feature (1)...(64): Xaa = any amino acid or nothing
NLMKEMQNLNSENHKTWEEYKDTKXIMSYFYGXALNVIKMAVLPKLMYRFSATLVKIPQHLTDS

SEQ ID NO: 2035 - protein, 60 aa, Homo sapiens
  misc_feature (1)...(60): Xaa = any amino acid or nothing
LHSQDGNSDPRKPQGEMSAHAFPVQTCGEEDQKKTPQVPINFTELSKCSXSXKIMSGERE

SEQ ID NO: 2036 - protein, 143 aa, Homo sapiens
GGEAAARAAKLSSPRPHRVGRRERGVGGMSAFSEAALEKKLSELSNSQQSVQTLSLWLIHHRKHSRPIVTVWERELRKAKPNRKLTFLYLANDVIQNSKRKGPEFTKDFAPVIVEAFKHVSSETDESCKKHLGRVLSIWEERS

SEQ ID NO: 2037 - protein, 142 aa, Homo sapiens
MAAVVAATALKGRGARNARVLRGILAGATANKASHNRTRALQSHSSPEGKEEPEPLSPELEYIPRKRGKNPMKAVGLAWAIGFPCGILLFILTKREVDKDRVKQMKARQNMRLSNTGEYESQRFRASSQSAPSPDVGSGVQT

SEQ ID NO: 2038 - protein, 469 aa, Homo sapiens
LQQTEDKSLLNQGSSSEEVAGSSQKMGQPGPSGDSDLATALHRLSLRRQNYLSEKQFFAEEWQRKIQVLADQKEGVSGCVTPTESLASLCTTQSEITDLSSASCLRGFMPEKLQIVKPLEGSQTLYHWQQLAQPNLGTILDPRPGVITKGFTQLPGDAIYHISDLEEDEEEGITFQVQQPLEVEEKLSTSKPVTGIFLPPITSAGGPVTVATANPGKCLSCTNSTFTFTTCRILHPSDITQVTPSSGFPSLSCGSSGSSSSNTAVNSPALAYRLSIGESITNRRDSTTTFSSTMSLAKLLQERGISAKVYHSPISENPLQPLPKSLAIPSTPPNSPSHSPCPSPLPFEPRVHLSENFLASRPAETFLQEMYGLRPSRNPPDVGQLKMNLVDRLKRLGIARVVKNPGAQENGRCQEAEIGPQKPDSAVYLNSGSSLLGGLRRNQSLPVIMGSFAAPVCTSSPKMGVLKED

SEQ ID NO: 2039 - protein, 873 aa, Homo sapiens
LSLFGSRALGRSGARAMAKAKKVGARRKASGAPAGARGGPAKANSNPFEVKVNRQKFQILGRKTRHDVGLPGVSRARALRKRTQTLLKEYKERDKSNVFRDKRFGEYNSNMSPEEKMMKRFALEQQRHHEKKSIYNLNEDEELTHYGQSLADIEKHNDIVDSDSDAEDRGTLSGELTAAHFGGGGGLLHKKTQQEGEEREKPKSRKELIEELIAKSKQEKRERQAQREDALELTEKLDQDWKEIQTLLSHKTPKSENRDKKEKPKPDAYDMMVRELGFEMKAQPSNRMKTEAELAKEEQEHLRKLEAERLRRMLGKDEDENVKKPKHMSADDLNDGFVLDKDDRRLLSYKDGKMNVEEDVQEEQSKEASDPESNEEEGDSSGGEDTEESDSPDSHLDLESNVESEEENEKPAKEQRQTPGKGLISGKERAGKATRDELPYTFAAPESYEELRSLLLGRSMEEQLLVVERIQKCNHPSLAEGNKAKLEKLFGFLLEYVGDLATDDPPDLTVIDKLVVHLYHLCQMFPESASDAIKFVLRDAMHEMEEMIETKGRAALPGLDVLIYLKITGLLFPTSDFWHPVVTPALVCLSQLLTKCPILSLQDVVKGLFVCCLFLEYVALSQRFIPELINFLLGILYIATPNKASQGSTLVHPFRALGKNSELLVVSAREDVATWQQSSLSLRWASRLRAPTSTEANHIRLSCLAVGLALLKRCVLMYGSLPSFHAIMGPLRALLTDHLADCSHPQELQELCQSTLTEMESQKQLCRPLTCEKSKPVPLKLFTPRLVKVLEFGRKQGSSKEEQERKRLIHKHKREFKGAVREIRKDNQFLARMQLSEIMERDAERKRKVKQLFNSLATQEGEWKALKRKKFKK

SEQ ID NO: 2040 - protein, 101 aa, Homo sapiens
FFFFVFLVETGFHHVGQAGLELLTSGDPPTWASQSAGITGVSHCSWPVIYVLSTLLHAVRNVLFKRTFPLKSSSFLSYDKEIFPILIVLKFYLVTLTSFVK

SEQ ID NO: 2041 - protein, 51 aa, Homo sapiens
NCHTTHCTANWVHLPGTPPGWKIDGPAAALEVLSSFFFFFLKFSYKPQNIV

SEQ ID NO: 2042 - protein, 404 aa, Homo sapiens
GMEPVGCCGECRGSSVDPRSTFVLSNLAEVVERVLTFLPAKALLRVACVCRLWRECVRRVLRTHRSVTWISAGLAEAGHLEGHCLVRVVAEELENVRILPHTVLYMADSETFISLEECRGHKRARKRTSMETALALEKLFPKQCQVLGIVTPGIVVTPMGSGSNRPQEIEIGESGFALLFPQIEGIKIQPFHFIKDPKNLTLERHQLTEVGLLDNPELRVVLVFGYNCCKVGASNYLQQVVSTFSDMNIILAGGQVDNLSSLTSEKNPLDIDASGVVGLSFSGHRIQSATVLLNEDVSDEKTAEAAMQRLKAANIPEHNTIGFMFACVGRGFQYYRAKGNVEADAFRKFFPSVPLFGFFGNGEIGCDRIVTGNFILRKCNEVKDDDLFHSYTTIMALIHLGSSK

SEQ ID NO: 2043 - protein, 48 aa, Homo sapiens
EEIKERFGPGLVIYWYGFIQELDCNRERGILLKACFPTNIVTLCHSIA

SEQ ID NO: 2044 - protein, 68 aa, Homo sapiens
RVLTAINHTLKENLRKFYKGKKDKPLDLRPKKTRAMRRRLNMHEENLKTKKQHRKERLYPLRKYAAKA

SEQ ID NO: 2045 - protein, 490 aa, Homo sapiens
ETRSTAVKSEVQVCISLLLCLEDRTMPKKAKPTGSGKEEGPAPCKQMKLEAAGGPSALNFDSPSSLFESLISPIKTETFFKEFWEQKPLLIQRDDPALATYYGSLFKLTDLKSLCSRGMYYGRDVNVCRCVNGKKKVLNKDGKAHFLQLRKDFDQKRATIQFHQPQRFKDELWRIQEKLECYFGSLVGSNVYITPAGSQGLPPHYDDVEVFILQLEGEKHWRLYHPTVPLAREYSVEAEERIGRPVHEFMLKPGDLLYFPRGTIHQADTPAGLAHSTHVTISTYQNNSWGDFLLDTISGLVFDTAKEDVELRTGIPRQLLLQVESTTVATRRLSGFLRTLADRLEGTKELLSSDMKKDFIMHRLPPYSAGDGAELSTPGGKLPRLDSVVRLQFKDHIVLTVLPDQDQSDETQEKMVYIYHSLKNSRETHMMGNEEETEFHGLRFPLSHLDALKQIWNSPAISVKDLKLTTDEEKESLVLSLWTECLIQVV

SEQ ID NO: 2046 - protein, 245 aa, Homo sapiens
  misc_feature (1)...(245): Xaa = any amino acid or nothing
LMKXYLEAAELGEISDIHTKLLRLSSSQGTIETSLQDIDSRLSPGGSLADAWAHQEGTHPKDRNVEKLQVLLNCMTEIYYQFKKDKAERRLAYNEEQIHKFDKQKLYYHATKAMTHFTDECVKKYEAFLNKSEEWIRKMLHLRKQLLSLTNQCFDIEEEVSKYQEYTNELQETLPQKMFTASSGIKHTMTPIYPSSNTLVEMTLGMKKLKEEMEGVVKELAENNHILESGGSLTMDGGLRNVDCL

SEQ ID NO: 2047 - protein, 78 aa, Homo sapiens
LDYNFFLFEMTFGLVSQAGVQWHDLGSLQPPPPGFKQFSCLSLPSSWDYRHLPPHLANFSREGVSPSWPGWSRTPDFR

SEQ ID NO: 2048 - protein, 149 aa, Homo sapiens
LPIRKSLRSVRSGFPTSQSPITRNLDGTASGSCLAKTVTGSLFRINVGLRGLVAGGIIGALLGTPVGGLLMAFQKYSGETVQERKQKDRKALHELKLEEWKGRLQVTEHLPEKIESSLQEDEPENDAKKIEALLNLPRNPSVIDKQDKD

SEQ ID NO: 2049 - protein, 141 aa, Homo sapiens
RPHGHLVCISSSAGLSGVNGLADYCASKFAAFGFAESVFVETFVQKQKGIKTTIVCPFFIKTGMFEGCTTGCPSLLPILEPKYAVEKIVEAILQEKMYLYMPKLLYFMMFLKSFLPLKTGLLIADYLGILHAMDGFADQKK

SEQ ID NO: 2050 - protein, 204 aa, Homo sapiens
PTAEEMSSLTPESSPELAKRSWFGNFISLDKEEQIFLVLKDKPLSSIKADIVHAFLSIPSLSHSVLSQTSFRAEYKASGGPSVFQKPVRFQVDISSSEGPEPSPRRDGSGGGGIYSVTFTLISGPSRRFKRVVETIQAQLLSTHDQPSVQALADEKNGAQTRPAGAPPRSLQPPPGRPDPELSSSPRRGPPKDKKLLATNGTPL

SEQ ID NO: 2051 - protein, 459 aa, Homo sapiens
HASVLFCRVMAASKTQGAVARMQEDRDGSCSTVGGVGYGDSKDCILEPLSLPESPGGTTTLEGSPSVPCIFCEEHFPVAEQDKLLKHMIIEHKIVIADVKLVADFQRYILYWRKRFTEQPITDFCSVIRINSTAPFEEQENYFLLCDVLPEDRILREELQKQRLREILEQQQQERNDTNFHGVCMFCNEEFLGNRSVILNHMAREHAFNIGLPDNIVNCNEFLCTLQKKLDNLQCLYCEKTFRDKNTLKDHMRKKQHRKINPKNREYDRFYVINYLELGKSWEEVQLEDDRELLDHQEDDWSDWEEHPASAVCLFCEKQAETIEKLYVHMEDAHEFDLLKIKSELGLNFYQQVKLVNFIRRQVHQCRCYGCHVKFKSKADLRTHMEETKHTSLLPDRKTWDQLEYYFPTYENDTLLWTLSDSESDLTAQEQNENVPIISEDTSKLYALKQSSILNQLLL

SEQ ID NO: 2052 - protein, 321 aa, Homo sapiens
MAAATRGCRPWGSLLGLLGLVSAAAAAWDLASLRCTLGAFCECDFRPDLPGLECDLAQHLAGQHLAKALVVKALKAFVRDPAPTKPLVLSLHGWTGTGKSYVSSLLAHYLFQGGLRSPRVHHFSPVLHFPHPSHIERYKKDLKSWVQGNLTACGRSLFLFDEMDKMPPGLMEVLRPFLGSSWVVYGTNYRKAIFIFISNTGGEQINQVALEAWRSRRDREEILLQELEPVISRAVLDNPHHGFSNSGIMEERLLDAVVPFLPLQRHHVRHCVLNELAQLGLEPRDEVVQAVLDSTTFFPEDEQLFSSNGCKTVASRIAFFL

SEQ ID NO: 2053 - protein, 126 aa, Homo sapiens
LFLQKLRMKTEEEARTHTEIEMFLRKEQQKLEERLEFWMEKYDKDTEMKQNELNALKATKASDLAHLQDLAKMIREYEQVIIEDRIEKERSKKKVKQDLLELKSVIKLQAWWRGTMIRREIGGFKM

SEQ ID NO: 2054 - protein, 334 aa, Homo sapiens
FRGRAVKMAAVVEVEVGGGAAGERELDEVDMSDLSPEEQWRVEHARMHAKHRGHEAMHAEMVLILIATLVVAQLLLVQWKQRHPRSYNMVTLFQMWVVPLYFTVKLHWWRFLVIWILFSAVTAFVTFRATRKPLVQTTPRLVYKWFLLIYKISYATGIVGYMAVMFTLFGLNLLFKIKPEDAMDFGISLLFYGLYYGVLERDFAEMCADYMASTIGFYSESGMPTKHLSDSVCAVCGQQIFVDVSEEGIIENTYRLSCNHVFHEFCIRGWCIVGKKQTCPYCKEKVDLKRMFSNPWERPHVMYGQLLDWLRYLVAWQPVIIGVVQGINYILGLE

SEQ ID NO: 2055 - protein, 223 aa, Homo sapiens
IYDRDPLQLATRAGQPLDINMAGEPKPYRPKPGNKRPLSALYRLESKEPFLSVGGYVFDYDYYRDDFYNRLFDYHGRVPPPPRAVIPLKRPRVAVTTTRRGKGVFSMKGGSRSTASGSTGSKLKSDELQTIKKELTQIKTKIDSVLGRLDKIEKQQKAEAEAQKKLLEESLVLIQEECVSEIADHSTEEPAEGGPDADGEEMTDGIEEAFDEDGGHELFLQIK

SEQ ID NO: 2056 - protein, 32 aa, Homo sapiens
GRVGLNLEGRGCSEPKWRHCTPTWATEQDSIS

SEQ ID NO: 2057 - protein, 93 aa, Homo sapiens
PFKLTPSFLSHAFSSGQERKVFIELNHIKKCNTVRGVFVLEEFGNYTILLLGLDSHGSNSNLGAPEEGLGAGRKRTSVEKSGGAGVTRKKRDP

SEQ ID NO: 2058 - protein, 95 aa, Homo sapiens
SSSNPLGSPSTLWKLCSFVLHNKSCCCSFFGSTPTLRAITLTVRVCGFIPEVSKTTNPLGRTNNSGCTIFKTVTLTARSTASLLKSVRPRTHQKE

SEQ ID NO: 2059 - protein, 110 aa, Homo sapiens
RIRHEEKRGSRGRGRRTSEEDTPKKKKHKGGSEFTDTILSVHPSDVLDMPVDPNEPTYCLCHQVSYGEMIGCDNPDCPIEWFHFACVDLTTKPKGKWFCPRCVQEKRKKK

SEQ ID NO: 2060 - protein, 171 aa, Homo sapiens
QESLKKKIQPKLSLTLSSSVSRGNVSTPPRHSSGSLTPPVTPPITPSSSFRSSTPTGSEYDEEEVDYEESDSDESWTTESAISSEAILSSMCMNGGEEKPFACPVPGCKKRYKNVNGIKYHAKNGHRTQIRVRKPFKCRCGKSYKTAQGLRHHTINFHPPVSAEIIRKMQQ

SEQ ID NO: 2061 - protein, 106 aa, Homo sapiens
GDSLCVPQYNKYREERVILFLKMASGHAFQPDLVKRIRDAIRMGLSARHVPSLILETKGIPYTLNGKKVEVAVKQIIAGKAVEQGGAFSNPETLDLYRDIPELQGF

SEQ ID NO: 2062 - protein, 219 aa, Homo sapiens
RPTPGHGDFWMQPLTKDAGMSLSSVTLASALQVRGEALSEEEIWSLLFLAAEQLLEDLRNDSSDYVVCPWSALLSAAGSLSFQGRVSHIEAAPFKAPELLQGQSEDEQPDASQMHVYSLGMTLYWSAGFHVPPHQPLQLCEPLHSILLTMCEDQPHRRCTLQSVLEACRVHEKEVSVYPAPAGLHIRRLVGLVLGTISEVSREPCFSSSSCWSCVAIKI

SEQ ID NO: 2063 - protein, 152 aa, Homo sapiens
VEELILVSRLDPHLHTPMYFFLAHLSFLDLSFTTSSIPQLLYNLNGCDKTISYMGCAIQLFLFLGLGGVECLLLAVMAYDRCVAICKPLHYMVIMNPRLCRGLVSVTWGCGVANSLAMSPVTLRLPRCGHHEVDHFLCEMPALIRMACISTV

SEQ ID NO: 2064 - protein, 65 aa, Homo sapiens
AIRPYWCENNIIGIGKLSTADGKAFADPEVLRRLTSSVSCALDEAAAALTRMRAESTANAGQSDK

SEQ ID NO: 2065 - protein, 268 aa, Homo sapiens
KVTAPRRPQRYSSGHGSDNSSVLSGELPPAMGRTALFHHSGGSSGYESLRRDSEATGSASSAPDSMSESGAASPGARTRSLKSPKKRATGLQRRRLIPAPLPDTTALGRKPSLPGQWVDLPPPLAGSLKEPFEIKVYEIDDVERLQRPRPTPREAPTQGLACVSTRLRLAERRQQRLREVQAKHKHLCEELAETQGRLMLEPGRWLEQFEVDPELEPESAEYLAALERATAALEQCVNLCKAHVMMVTCFDISVAASAAIPGPQEVDV

SEQ ID NO: 2066 - protein, 111 aa, Homo sapiens
  misc_feature (1)...(111): Xaa = any amino acid or nothing
SPGYGENKFTVTSXNIAVPLCEMNKIYSYYSDSSSSERTMDLVLEMCNTNSIHWCGISGRQLGKLHPSSSLCLALTLLSSVQGLQSISGLRLTDTFLKRTYEYDDIAQVCV

SEQ ID NO: 2067 - protein, 152 aa, Homo sapiens
NSEDLLKYFNPESWQEDLDNMYLDTPRYRGRSYHDRKSKVDLDRLNDDAKRYSCTPRNYSVNIREELKLANVVFFPRCLLVQRCGGNCGCGTVNWRSCTCNSGKTVKKYHEVLQFEPGHIKRRGRAKTMALVDIQLDHHERCDCICSSRPPR

SEQ ID NO: 2068 - protein, 74 aa, Homo sapiens
AVLKNMAPMTALGLLDLHILNLILFLSAGEDFTSVVSEIMMYILLVFLTLWLLIEMIYCYRKVSKAEEAAQENA

SEQ ID NO: 2069 - protein, 110 aa, Homo sapiens
KNCANEAVVQKILDRVLSRYDVRLRPNFGSMLATNSTRGLNEDELMAHGQEKDSSSESEDSCPPSPGCSFTEGFSFDLLNPDYVPKVDKWSRFLFPLAFGLFNIVAAERC

SEQ ID NO: 2070 - protein, 217 aa, Homo sapiens
LPPAQIPEAWLLLANVVVVLILVPLKDRLIDPLLLRCKLLPSALQKMALGMFFGFTSVIVAGVLEMERLHYIHHNETVSQQIGEVLYNAAPLSIWWQIPQYLLIGISEIFASIPGLEFAYSEAPRSMQGAIMGIFFCLSGVGSLLGSSLVALLSLPGGWLHCPKDFGNINNCRMDLYFFLLAGIQAVTALLFVWIAGRYERASQGPASHSRFSRDRG

SEQ ID NO: 2071 - protein, 130 aa, Homo sapiens [sequence omitted]

SEQ ID NO: 2072 - protein, 1268 aa, Homo sapiens
CPSLDIRSEVAELRQLENCSVVEGHLQILLMFTATGEDFRGLSFPRLTQVTDYLLLFRVYGLESLRDLFPNLAVIRGTRLFLGYALVIFEMPHLRDVALPALGAVLRGAVRVEKNQELCHLSTIDWGLLQPAPGANHIVGNKLGEECADVCPGVLGAAGEPCAKTTFSGHTDYRCWTSSHCQRVCPCPHGMACTARGECCHTECLGGCSQPEDPRACVACRHLYFQGACLWACPPGTYQYESWRCVTAERCASLHSVPGRASTFGIHQGSCLAQCPSGFTRNSSSIFCHKCEGLCPKECKVGTKTIDSIQAAQDLVGCTHVEGSLILNLRQGYNLEPQLQHSLGLVETITGFLKIKHSFALVSLGFFKNLKLIRGDAMVDGNYTLYVLDNQNLQQLGSWVAAGLTIPVGKIYFAFNPRLCLEHIYRLEEVTGTRGRQNKAEINPRTNGDRAACQTRTLRFVSNVTEADRILLRWERYEPLEARDLLSFIVYYKESPFQNATEHVGPDACGTQSWNLLDVELPLSRTQEPGVTLASLKPWTQYAVFVRAITLTTEEDSPHQGAQSPIVYLRTLPAAPTVPQDVISTSNSSSHLLVRWKPPTQRNGNLTYYLVLWQRLAEDGDLYLNDYCHRGLRLPTSNNDPRFDGEDGDPEAEMESDCCPCQHPPPGQVLPPLEAQEASFQKKFENFLHNAITIPISPWKVTSINKSPQRDSGRHRRAAGPLRLGGNSSDFEIQEDKVPRERAVLSGLRHFTEYRIDIHACNHAAHTVGCSAATFVFARTMPHREADGIPGKVAWEASSKNSVLLRWLEPPDPNGLILKYEIKYRRLGEEATVLCVSRLRYAKFGGVHLALLPPGNYSARVRATSLAGNGSWTDSVAFYILGPEEEDAGGLHVLLTATPVGLTLLIVLAALGFFYGKKRNRTLYASVNPEYFSASDMYVPDEWEVPREQISIIRELGQGSFGMVYEGLARGLEAGEESTPVALKTVNELASPRECIEFLKEASVMKAFKCHHVVRLLGVVSQGQPTLVIMELMTRGDLKSHLRSLRPEAENNPGLPQPALGEMIQMAGEIADGMAYLAANKFVHRDLAARNCMVSQDFTVKIGDFGMTRDVYETDYYRKGGKGLLPVRWMAPESLKDGIFTTHSDVWSFGVVLWEIVTLAEQPYQGLSNEQVLKFVMDGGVLEELEGCPLQLQELMSRCWQPNPRLRPSFTHILDSIQEELRPSFRLLSFYYSPECRGARGSLPTTDAEPDSSPTPRDCSPQNGGPGH

SEQ ID NO: 2073 - protein, 72 aa, Homo sapiens
LAWIDNILPEKEKKETDKKRKRKKGAHEDCDEEPQFPPPSVIKIPMESVQSDPQNGIHCIARKRSSSWSYSL

SEQ ID NO: 2074 - protein, 1098 aa, Homo sapiens
ARGRRSRPVWAASWGGRGRPAARRRPRGLAATMGFELDRFDGDVDPDLKCALCHKVLEDPLTTPCGHVFCAGCVLPWVVQEGSCPARCRGRLSAKELNHVLPLKRLILKLDIKCAYATRGCGRVVKLQQLPEHLERCDFAPARCRHAGCGQVLLRRDVEAHMRDACDARPVGRCQEGCGLPLTHGEQRAGGHCCARALRAHNGALQARLGALHKALKKEALRAGKREKSLVAQLAAAQLELQMTALRYQKKFTEYSARLDSLSRCVAAPPGGKGEETKSLTLVLHRDSGSLGFNIIGGRPSVDNHDGSSSEGIFVSKIVDSGPAAKEGGLQIHDRIIEVNGRDLSRATHDQAVEAFKTAKEPIVVQVLRRTPRTKMFTPPSESQLVDTGTQTDITFEHIMALTKMSSPSPPVLDPYLLPEEHPSAHEYYDPNDYIGDIHQEMDREELELEEVDLYRMNSQDKLGLTVCYRTDDEDDIGIYISEIDPNSIAAKDGRIREGDRIIQINGIEVQNREEAVALLTSEENKNFSLLIARAELQLDEGWMDDDRNDFLDDLHMDMLEEQHHQAMQFTASVLQQKKHDEDGGTTDTATILSNQHEKDSGVGRTDESTRNDESSEQENNGDDATASSNPLAGQRKLTCSQDTLGSGDLPFSNESFISADCTDADYLGIPVDECERFRELLELKCQVKSATPYGLYYPSGPLDAGKSDPESVDKELELLNEELRSIELECLSIVRAHKMQQLKEQYRESWMLHNSGFRNYNTSIDVRRHELSDITELPEKSDKDSSSAYNTGESCRSTPLTLEISPDNSLRRAAEGISCPSSEGAVGTTEAYGPASKNLLSITEDPEVGTPTYSPSLKELDPNQPLESKERRASDGSRSPTPSQKLGSAYLPSYHHSPYKHAHIPAHAQHYQSYMQLIQQKSAVEYAQSQMSLVSMCKDLSSPTPSEPRMEWKVKIRSDGTRYITKRPVRDRLLRERALKIREERSGMTTDDDAVSEMKMGRYWSKEERKQHLVKAKEQRRRREFMMQSRLDCLKEQQAADDRKEMNILELSHKKMMKKRNKKIFDNWMTIQELLTHGTKSPDGTRVYNSFLSVTTV

(The sequence listing continues in the following parts.)

What is claimed is:

1. An insolated polynucleotide comprising a nucleotide sequence from the group consisting of SEQ ID NO: 1-1350, a mature protein coding portion of SEQ ID NO: 1-130, an active domain of SEQ ID NO: 1-1350, and complementary sequences thereof.

2. An insolated polynucleotide encoding a polypeptide with biological activity, wherein said polynucleotide hybridizes to the polynucleotide of claim 1 under stringent hydribization conditions.

3. An insolated polynucleotide encoding a polypeptide with biological activity, wherein said polynucleotide has greater than about 90% sequence identify with the polynucleotide of claim 1.

4. The polynucleotide of claim 1 wherein said polynucleotide is DNA.

5. An insolated polynucleotide of claim 1 wherein said polynucleotide comprises the complementary sequences.

6. A vector comprising the polynucleotide of claim 1.

7. An expression vector comprising the polynucleotide of claim 1.

8. A host cell genetically engineered to comprise the polynucleotide of claim 1.

9. A host cell genetically engineered to comprise the polynucleotide of claim 1 operatively associated with a regulatiry sequence that modulates expression of the polynucleotide in the host cell.

10. An insolated polypeptide, wherein polypeptide is selected from the group consisting of:
(a) a polypeptide encoded by any one of the polynucleotide of claim 1; and
(b) a polypeptide encoded by a polynucleotide hybridizing under stringent conditions with any one of SEQ ID NO: 1-1350.

11. A composition comprising the polypeptide of claim 10.

12. An antibody directed against the polypeptide of claim 10.

13. A method for detecting the polynucleotide of claim 1 in a sample, comprising:
a) contacting the sample with a compound that binds to and forms a complex with the polynucleotide of claim 1 for a period sufficient to form the complex; and
b) detecting the complex, so that if a complex is detected, the polynucleotide of claim 1 is detected.

14. A method for detecting the polynucleotide of claim 1 in a sample, comprising:
a) contacting the sample under stringent hybridization conditions with nucleic acid primers that anneal to the polynucleotide of claim 1 under such conditions;
b) amplifying a product comprising at least a portion of the polynucleotide of claim 1; and
c) detecting said product and thereby the polynucleotide of claim 1 in the sample.

15. The method of claim 14, wherein the polynucleotide is an RNA molecule and the method further comprises reverse transcribing an annealed RNA molecule into a cDNA polynucleotide.

16. A method for detecting the polypeptide of claim 10 in a sample, comprising:
a) contacting the sample with a compound that binds to and forms a complex with the polypeptide under conditions and for a period sufficient to form the complex; and
b) detecting formation of the complex, so that if a complex formation is detected, the polypeptide of claim 10 is detected.

17. A method for identifying a compound that binds to the polypeptide of claim 10, comprising:
a) contacting the compound with the polypeptide of claim 10 under conditions sufficient to form a polypeptide/compound complex; and
b) detecting the complex, so that if the polypeptide/compound complex is detected, a compound that binds to the polypeptide of claim 10 is identified.

18. A method for identifying a compound that binds to the polypeptide of claim 10, comprising:
a) contacting the compound with the polypeptide of claim 10, in a cell, under conditions sufficient to form a polypeptide/compound complex, wherein the complex drives expression of a reporter gene sequence in the cell; and
b) detecting the complex by detecting reporter gene sequence expression, so that if the polypeptide/compound complex is detected, a compound that binds to the polypeptide of claim 10 is identified.

19. A method of producing the polypeptide of claim 10, comprising,
a) culturing a host cell comprising a polynucleotide sequence selected from the group consisting of a polynucleotide sequence of SEQ ID NO: 1-1350, a mature protein coding portion of SEQ ID NO: 1-1350, an active domain of SEQ ID NO: 1-1350, complementary sequences thereof and a polynucleotide sequence hybridizing under stringent conditions to SEQ ID NO: 1-1350, under conditions sufficient to express the polypeptide in said cell; and
b) isolating the polypeptide from the cell culture or cells of step (a).

20. An isolated polypeptide comprising an amino acid sequence selected from the group consisting of SEQ ID NO: 1351-2700, the mature protein portion thereof, or the active domain thereof.

21. The polypeptide of claim 20 wherein the polypeptide is provided on a polypeptide array.

22. A collection of polynucleotides, wherein the collection comprises the sequence information of at least one of SEQ ID NO: 1-1350.

23. The collection of claim 22, wherein the collection is provided on a nucleic acid array.

24. The collection of claim 23, wherein the array detects full-matches to any one of the polynucleotides in the collection.

25. The collection of claim 23, wherein the array detects mismatches to any one of the polynucleotides in the collection.

26. The collection of claim 22, wherein the collection is provided in a computer-readablele format.

27. A method of treatment comprising administering to a mammalian subject in need thereof a therapeutic amount of a composition comprising a polypeptide of claim 10 or 20 and a pharmaceutically acceptable carrier.

28. A method of treatment comprising administering to a mammalian subject in need thereof a therapeutic amount of a composition comprising an antibody that specifically binds to a polypeptide of claim 10 or 20 and a pharmaceutically acceptable carrier.
